United States Patent Application Publication US 2019/0048337 A1 - sequence listing, part 5

SEQ ID NO: 134512 - RNA, 18 nt, Artificial Sequence
  Synthetic
gaagggucguggggaggu

SEQ ID NO: 134513 - RNA, 19 nt, Artificial Sequence
  Synthetic
ggaagggucguggggaggu

SEQ ID NO: 134514 - RNA, 20 nt, Artificial Sequence
  Synthetic
gggaagggucguggggaggu

SEQ ID NO: 134515 - RNA, 20 nt, Artificial Sequence
  Synthetic
gcauguccucacucauaggu

SEQ ID NO: 134516 - RNA, 20 nt, Artificial Sequence
  Synthetic
gcauguucucgcucauaggu

SEQ ID NO: 134517 - RNA, 21 nt, Artificial Sequence
  Synthetic
guguggagguaggggauaggu

SEQ ID NO: 134518 - RNA, 24 nt, Artificial Sequence
  Synthetic
guaguguggagguaggggauaggu

SEQ ID NO: 134519 - RNA, 20 nt, Artificial Sequence
  Synthetic
gcauguucucacucuuaggu

SEQ ID NO: 134520 - RNA, 22 nt, Artificial Sequence
  Synthetic
gcgcauguucucacucuuaggu

SEQ ID NO: 134521 - RNA, 24 nt, Artificial Sequence
  Synthetic
gcacuccagccugggugacagggu

SEQ ID NO: 134522 - RNA, 18 nt, Artificial Sequence
  Synthetic
gggguggggggcuagggu

SEQ ID NO: 134523 - RNA, 19 nt, Artificial Sequence
  Synthetic
ggggguggggggcuagggu

SEQ ID NO: 134524 - RNA, 22 nt, Artificial Sequence
  Synthetic
guuggggguggggggcuagggu

SEQ ID NO: 134525 - RNA, 22 nt, Artificial Sequence
  Synthetic
guucaggacuguaggacugggu

SEQ ID NO: 134526 - RNA, 18 nt, Artificial Sequence
  Synthetic
guuuguuugggggauggu

SEQ ID NO: 134527 - RNA, 19 nt, Artificial Sequence
  Synthetic
gguuuguuugggggauggu

SEQ ID NO: 134528 - RNA, 19 nt, Artificial Sequence
  Synthetic
gugagccaccaugccuggu

SEQ ID NO: 134529 - RNA, 21 nt, Artificial Sequence
  Synthetic
gugugagccaccaugccuggu

SEQ ID NO: 134530 - RNA, 22 nt, Artificial Sequence
  Synthetic
ggugugagccaccaugccuggu

SEQ ID NO: 134531 - RNA, 21 nt, Artificial Sequence
  Synthetic
gcuauaaugaauaaugguggu

SEQ ID NO: 134532 - RNA, 22 nt, Artificial Sequence
  Synthetic
ggcuauaaugaauaaugguggu

SEQ ID NO: 134533 - RNA, 19 nt, Artificial Sequence
  Synthetic
gagcacuuuauauuguggu

SEQ ID NO: 134534 - RNA, 20 nt, Artificial Sequence
  Synthetic
ggagcacuuuauauuguggu

SEQ ID NO: 134535 - RNA, 21 nt, Artificial Sequence
  Synthetic
gggagcacuuuauauuguggu

SEQ ID NO: 134536 - RNA, 24 nt, Artificial Sequence
  Synthetic
gcagggagcacuuuauauuguggu

SEQ ID NO: 134537 - RNA, 22 nt, Artificial Sequence
  Synthetic
gaaaaccuugcacacuguuggu

SEQ ID NO: 134538 - RNA, 23 nt, Artificial Sequence
  Synthetic
ggaaaaccuugcacacuguuggu

SEQ ID NO: 134539 - RNA, 21 nt, Artificial Sequence
  Synthetic
gaacucuuuuacacuguuggu

SEQ ID NO: 134540 - RNA, 22 nt, Artificial Sequence
  Synthetic
ggaacucuuuuacacuguuggu

SEQ ID NO: 134541 - RNA, 21 nt, Artificial Sequence
  Synthetic
gaacccuuaugcacuguuggu

SEQ ID NO: 134542 - RNA, 22 nt, Artificial Sequence
  Synthetic
ggaacccuuaugcacuguuggu

SEQ ID NO: 134543 - RNA, 23 nt, Artificial Sequence
  Synthetic
gggaacccuuaugcacuguuggu

SEQ ID NO: 134544 - RNA, 21 nt, Artificial Sequence
  Synthetic
gaaugcuuauacccuguuggu

SEQ ID NO: 134545 - RNA, 22 nt, Artificial Sequence
  Synthetic
ggaaugcuuauacccuguuggu

SEQ ID NO: 134546 - RNA, 23 nt, Artificial Sequence
  Synthetic
gggaaugcuuauacccuguuggu

SEQ ID NO: 134547 - RNA, 24 nt, Artificial Sequence
  Synthetic
ggggaaugcuuauacccuguuggu

SEQ ID NO: 134548 - RNA, 22 nt, Artificial Sequence
  Synthetic
gaaacacuucugcauuguuggu

SEQ ID NO: 134549 - RNA, 21 nt, Artificial Sequence
  Synthetic
gauuuagccauuccacaaugu

SEQ ID NO: 134550 - RNA, 19 nt, Artificial Sequence
  Synthetic
gauaugagaacuauaaugu

SEQ ID NO: 134551 - RNA, 18 nt, Artificial Sequence
  Synthetic
gcuccacccuugacaugu

SEQ ID NO: 134552 - RNA, 19 nt, Artificial Sequence
  Synthetic
ggcuccacccuugacaugu

SEQ ID NO: 134553 - RNA, 20 nt, Artificial Sequence
  Synthetic
gucucucucccuugacaugu

SEQ ID NO: 134554 - RNA, 21 nt, Artificial Sequence
  Synthetic
ggucucucucccuugacaugu

SEQ ID NO: 134555 - RNA, 20 nt, Artificial Sequence
  Synthetic
gcuagcuccuuucagcaugu

SEQ ID NO: 134556 - RNA, 24 nt, Artificial Sequence
  Synthetic
gcuagcuagcuccuuucagcaugu

SEQ ID NO: 134557 - RNA, 18 nt, Artificial Sequence
  Synthetic
gggccuggugugagaugu

SEQ ID NO: 134558 - RNA, 19 nt, Artificial Sequence
  Synthetic
ggggccuggugugagaugu

SEQ ID NO: 134559 - RNA, 24 nt, Artificial Sequence
  Synthetic
gacuuggggccuggugugagaugu

SEQ ID NO: 134560 - RNA, 20 nt, Artificial Sequence
  Synthetic
guagguacuaugcucacugu

SEQ ID NO: 134561 - RNA, 19 nt, Artificial Sequence
  Synthetic
gauaucaucuuauaccugu

SEQ ID NO: 134562 - RNA, 22 nt, Artificial Sequence
  Synthetic
gauauuuccugcuuucuccugu

SEQ ID NO: 134563 - RNA, 20 nt, Artificial Sequence
  Synthetic
gccaaugauguaguuccugu

SEQ ID NO: 134564 - RNA, 24 nt, Artificial Sequence
  Synthetic
gaaagccaaugauguaguuccugu

SEQ ID NO: 134565 - RNA, 18 nt, Artificial Sequence
  Synthetic
ggguguacaaauaucugu

SEQ ID NO: 134566 - RNA, 24 nt, Artificial Sequence
  Synthetic
gaacuuggguguacaaauaucugu

SEQ ID NO: 134567 - RNA, 21 nt, Artificial Sequence
  Synthetic
gaaacucuccaggauaucugu

SEQ ID NO: 134568 - RNA, 23 nt, Artificial Sequence
  Synthetic
gagaaacucuccaggauaucugu

SEQ ID NO: 134569 - RNA, 24 nt, Artificial Sequence
  Synthetic
ggagaaacucuccaggauaucugu

SEQ ID NO: 134570 - RNA, 20 nt, Artificial Sequence
  Synthetic
gccuuggccucccaaagugu

SEQ ID NO: 134571 - RNA, 23 nt, Artificial Sequence
  Synthetic
guuuacagucccaccaacagugu

SEQ ID NO: 134572 - RNA, 18 nt, Artificial Sequence
  Synthetic
ggugacuggaucaugugu

SEQ ID NO: 134573 - RNA, 20 nt, Artificial Sequence
  Synthetic
gaggugacuggaucaugugu

SEQ ID NO: 134574 - RNA, 21 nt, Artificial Sequence
  Synthetic
ggaggugacuggaucaugugu

SEQ ID NO: 134575 - RNA, 22 nt, Artificial Sequence
  Synthetic
gggaggugacuggaucaugugu

SEQ ID NO: 134576 - RNA, 24 nt, Artificial Sequence
  Synthetic
gugggaggugacuggaucaugugu

SEQ ID NO: 134577 - RNA, 19 nt, Artificial Sequence
  Synthetic
gccauucugauagaugugu

SEQ ID NO: 134578 - RNA, 20 nt, Artificial Sequence
  Synthetic
gucucucacuauuacugugu

SEQ ID NO: 134579 - RNA, 18 nt, Artificial Sequence
  Synthetic
gaaugcugaauggugugu

SEQ ID NO: 134580 - RNA, 20 nt, Artificial Sequence
  Synthetic
gaaaacaccacagaaguugu

SEQ ID NO: 134581 - RNA, 18 nt, Artificial Sequence
  Synthetic
gaaaagcagaacaguugu

SEQ ID NO: 134582 - RNA, 24 nt, Artificial Sequence
  Synthetic
gaacaugaaaagcagaacaguugu

SEQ ID NO: 134583 - RNA, 21 nt, Artificial Sequence
  Synthetic
guuuuuuucuuguacauuugu

SEQ ID NO: 134584 - RNA, 21 nt, Artificial Sequence
  Synthetic
gcuuugcuaagaauccuuugu

SEQ ID NO: 134585 - RNA, 20 nt, Artificial Sequence
  Synthetic
gaaauuuaauuuaaguuugu

SEQ ID NO: 134586 - RNA, 19 nt, Artificial Sequence
  Synthetic
gaaaaaaauccucaaaauu

SEQ ID NO: 134587 - RNA, 20 nt, Artificial Sequence
  Synthetic
ggaaaaaaauccucaaaauu

SEQ ID NO: 134588 - RNA, 18 nt, Artificial Sequence
  Synthetic
gaaaccauacuucaaauu

SEQ ID NO: 134589 - RNA, 21 nt, Artificial Sequence
  Synthetic
guauaauacauugauuaaauu

SEQ ID NO: 134590 - RNA, 22 nt, Artificial Sequence
  Synthetic
gguauaauacauugauuaaauu

SEQ ID NO: 134591 - RNA, 18 nt, Artificial Sequence
  Synthetic
gaaagaagagagacaauu

SEQ ID NO: 134592 - RNA, 20 nt, Artificial Sequence
  Synthetic
gagaaagaagagagacaauu

SEQ ID NO: 134593 - RNA, 22 nt, Artificial Sequence
  Synthetic
gagagaaagaagagagacaauu

SEQ ID NO: 134594 - RNA, 24 nt, Artificial Sequence
  Synthetic
guucucauugcucaacucccaauu

SEQ ID NO: 134595 - RNA, 22 nt, Artificial Sequence
  Synthetic
gcucauuggaguauuuccaauu

SEQ ID NO: 134596 - RNA, 20 nt, Artificial Sequence
  Synthetic
gauaaauauauuaaggaauu

SEQ ID NO: 134597 - RNA, 19 nt, Artificial Sequence
  Synthetic
guaggaauucuuuauaauu

SEQ ID NO: 134598 - RNA, 24 nt, Artificial Sequence
  Synthetic
gauuuguaggaauucuuuauaauu

SEQ ID NO: 134599 - RNA, 23 nt, Artificial Sequence
  Synthetic
gaccauuugcauuuaagguaauu

SEQ ID NO: 134600 - RNA, 24 nt, Artificial Sequence
  Synthetic
guaaauaaaacuuccagaaacauu

SEQ ID NO: 134601 - RNA, 23 nt, Artificial Sequence
  Synthetic
guacugagauauuguagaacauu

SEQ ID NO: 134602 - RNA, 18 nt, Artificial Sequence
  Synthetic
guuaggugcaaacacauu

SEQ ID NO: 134603 - RNA, 21 nt, Artificial Sequence
  Synthetic
guuguuaggugcaaacacauu

SEQ ID NO: 134604 - RNA, 18 nt, Artificial Sequence
  Synthetic
guuaccaauuuucacauu

SEQ ID NO: 134605 - RNA, 21 nt, Artificial Sequence
  Synthetic
gaaaaccuaggcaauaccauu

SEQ ID NO: 134606 - RNA, 24 nt, Artificial Sequence
  Synthetic
gaagaaaaccuaggcaauaccauu

SEQ ID NO: 134607 - RNA, 18 nt, Artificial Sequence
  Synthetic
gagaaaaggaagagcauu

SEQ ID NO: 134608 - RNA, 23 nt, Artificial Sequence
  Synthetic
gaaauaacaaaagagauggcauu

SEQ ID NO: 134609 - RNA, 21 nt, Artificial Sequence
  Synthetic
gcuuaucagcuuaagaagauu

SEQ ID NO: 134610 - RNA, 24 nt, Artificial Sequence
  Synthetic
guugcuuaucagcuuaagaagauu

SEQ ID NO: 134611 - RNA, 18 nt, Artificial Sequence
  Synthetic
gagagagagcgagagauu

SEQ ID NO: 134612 - RNA, 24 nt, Artificial Sequence
  Synthetic
gacacagagagagagcgagagauu

SEQ ID NO: 134613 - RNA, 20 nt, Artificial Sequence
  Synthetic
guuuagguuccucauagauu

SEQ ID NO: 134614 - RNA, 19 nt, Artificial Sequence
  Synthetic
guuaaguucccuauagauu

SEQ ID NO: 134615 - RNA, 23 nt, Artificial Sequence
  Synthetic
gcuuguuaaguucccuauagauu

SEQ ID NO: 134616 - RNA, 23 nt, Artificial Sequence
  Synthetic
guuuucuucuuuucaccuagauu

SEQ ID NO: 134617 - RNA, 20 nt, Artificial Sequence
  Synthetic
guuggaguucauuguagauu

SEQ ID NO: 134618 - RNA, 20 nt, Artificial Sequence
  Synthetic
guuuaaguuccuuguagauu

SEQ ID NO: 134619 - RNA, 24 nt, Artificial Sequence
  Synthetic
gcaaucaaacuagaacucaggauu

SEQ ID NO: 134620 - RNA, 20 nt, Artificial Sequence
  Synthetic
gauuggaaguguuuuggauu

SEQ ID NO: 134621 - RNA, 21 nt, Artificial Sequence
  Synthetic
ggauuggaaguguuuuggauu

SEQ ID NO: 134622 - RNA, 22 nt, Artificial Sequence
  Synthetic
gggauuggaaguguuuuggauu

SEQ ID NO: 134623 - RNA, 23 nt, Artificial Sequence
  Synthetic
gaauaauguauauucuguugauu

SEQ ID NO: 134624 - RNA, 23 nt, Artificial Sequence
  Synthetic
gcaucugacaaaggucuaauauu

SEQ ID NO: 134625 - RNA, 20 nt, Artificial Sequence
  Synthetic
gaaaaaggcaggcacauauu

SEQ ID NO: 134626 - RNA, 18 nt, Artificial Sequence
  Synthetic
gcauaggaaacagauauu

SEQ ID NO: 134627 - RNA, 19 nt, Artificial Sequence
  Synthetic
ggcauaggaaacagauauu

SEQ ID NO: 134628 - RNA, 20 nt, Artificial Sequence
  Synthetic
guauugggugcauauauauu

SEQ ID NO: 134629 - RNA, 23 nt, Artificial Sequence
  Synthetic
guugguuccaagucuuugcuauu

SEQ ID NO: 134630 - RNA, 24 nt, Artificial Sequence
  Synthetic
gguugguuccaagucuuugcuauu

SEQ ID NO: 134631 - RNA, 20 nt, Artificial Sequence
  Synthetic
gaauccaugucuuugcuauu

SEQ ID NO: 134632 - RNA, 23 nt, Artificial Sequence
  Synthetic
guugaauccaugucuuugcuauu

SEQ ID NO: 134633 - RNA, 20 nt, Artificial Sequence
  Synthetic
gauuccuuggcuuuucuauu

SEQ ID NO: 134634 - RNA, 23 nt, Artificial Sequence
  Synthetic
guugauuccuuggcuuuucuauu

SEQ ID NO: 134635 - RNA, 24 nt, Artificial Sequence
  Synthetic
gguugauuccuuggcuuuucuauu

SEQ ID NO: 134636 - RNA, 18 nt, Artificial Sequence
  Synthetic
guuuugauuuuuucuauu

SEQ ID NO: 134637 - RNA, 23 nt, Artificial Sequence
  Synthetic
guuuuguuuugauuuuuucuauu

SEQ ID NO: 134638 - RNA, 21 nt, Artificial Sequence
  Synthetic
gaauaccuguuuucaauuauu

SEQ ID NO: 134639 - RNA, 23 nt, Artificial Sequence
  Synthetic
gugaauaccuguuuucaauuauu

SEQ ID NO: 134640 - RNA, 18 nt, Artificial Sequence
  Synthetic
guaucuauguauauuauu

SEQ ID NO: 134641 - RNA, 20 nt, Artificial Sequence
  Synthetic
gaguaucuauguauauuauu

SEQ ID NO: 134642 - RNA, 19 nt, Artificial Sequence
  Synthetic
guuccaagucuuuguuauu

SEQ ID NO: 134643 - RNA, 20 nt, Artificial Sequence
  Synthetic
gguuccaagucuuuguuauu

SEQ ID NO: 134644 - RNA, 23 nt, Artificial Sequence
  Synthetic
guugguuccaagucuuuguuauu

SEQ ID NO: 134645 - RNA, 24 nt, Artificial Sequence
  Synthetic
gguugguuccaagucuuuguuauu

SEQ ID NO: 134646 - RNA, 23 nt, Artificial Sequence
  Synthetic
gucccaucaauaccuaauuuauu

SEQ ID NO: 134647 - RNA, 23 nt, Artificial Sequence
  Synthetic
guuccaucaguaccuaauuuauu

SEQ ID NO: 134648 - RNA, 18 nt, Artificial Sequence
  Synthetic
guaugccaguauuuuauu

SEQ ID NO: 134649 - RNA, 19 nt, Artificial Sequence
  Synthetic
gguaugccaguauuuuauu

SEQ ID NO: 134650 - RNA, 24 nt, Artificial Sequence
  Synthetic
gauucgguaugccaguauuuuauu

SEQ ID NO: 134651 - RNA, 24 nt, Artificial Sequence
  Synthetic
gauucgguuugccaguauuuuauu

SEQ ID NO: 134652 - RNA, 22 nt, Artificial Sequence
  Synthetic
guucuucaugaccuugaaacuu

SEQ ID NO: 134653 - RNA, 21 nt, Artificial Sequence
  Synthetic
guucauguccuucgcccacuu

SEQ ID NO: 134654 - RNA, 18 nt, Artificial Sequence
  Synthetic
guuccagaaaucccacuu

SEQ ID NO: 134655 - RNA, 24 nt, Artificial Sequence
  Synthetic
guucucaucguucaacucccacuu

SEQ ID NO: 134656 - RNA, 18 nt, Artificial Sequence
  Synthetic
guuguucaacucccacuu

SEQ ID NO: 134657 - RNA, 24 nt, Artificial Sequence
  Synthetic
gcucucguuguucaacucccacuu

SEQ ID NO: 134658 - RNA, 18 nt, Artificial Sequence
  Synthetic
gacuuuggacuuggacuu

SEQ ID NO: 134659 - RNA, 20 nt, Artificial Sequence
  Synthetic
gagacuuuggacuuggacuu

SEQ ID NO: 134660 - RNA, 23 nt, Artificial Sequence
  Synthetic
gaugagacuuuggacuuggacuu

SEQ ID NO: 134661 - RNA, 21 nt, Artificial Sequence
  Synthetic
gcaccuguuguuuccugacuu

SEQ ID NO: 134662 - RNA, 19 nt, Artificial Sequence
  Synthetic
gaggagaaaaaaaauacuu

SEQ ID NO: 134663 - RNA, 23 nt, Artificial Sequence
  Synthetic
guuugaggagaaaaaaaauacuu

SEQ ID NO: 134664 - RNA, 24 nt, Artificial Sequence
  Synthetic
gguuugaggagaaaaaaaauacuu

SEQ ID NO: 134665 - RNA, 20 nt, Artificial Sequence
  Synthetic
gcugaaaugaauuaauacuu

SEQ ID NO: 134666 - RNA, 20 nt, Artificial Sequence
  Synthetic
gccuguaaucccagauacuu

SEQ ID NO: 134667 - RNA, 20 nt, Artificial Sequence
  Synthetic
guagaaugauuuauuuacuu

SEQ ID NO: 134668 - RNA, 21 nt, Artificial Sequence
  Synthetic
gguagaaugauuuauuuacuu

SEQ ID NO: 134669 - RNA, 19 nt, Artificial Sequence
  Synthetic
guagaaaaaaaaaacccuu

SEQ ID NO: 134670 - RNA, 20 nt, Artificial Sequence
  Synthetic
gguagaaaaaaaaaacccuu

SEQ ID NO: 134671 - RNA, 22 nt, Artificial Sequence
  Synthetic
gcaucaugagggcucugcccuu

SEQ ID NO: 134672 - RNA, 23 nt, Artificial Sequence
  Synthetic
gcugagaggaucuuucuucccuu

SEQ ID NO: 134673 - RNA, 24 nt, Artificial Sequence
  Synthetic
ggcugagaggaucuuucuucccuu

SEQ ID NO: 134674 - RNA, 19 nt, Artificial Sequence
  Synthetic
guccuccugccccagccuu

SEQ ID NO: 134675 - RNA, 21 nt, Artificial Sequence
  Synthetic
guacuguuuuugcaacuccuu

SEQ ID NO: 134676 - RNA, 20 nt, Artificial Sequence
  Synthetic
guucucuccuuccuuuccuu

SEQ ID NO: 134677 - RNA, 18 nt, Artificial Sequence
  Synthetic
gucugaugggcuuuccuu

SEQ ID NO: 134678 - RNA, 22 nt, Artificial Sequence
  Synthetic
guuagucugaugggcuuuccuu

SEQ ID NO: 134679 - RNA, 19 nt, Artificial Sequence
  Synthetic
gacagaguccagugagcuu

SEQ ID NO: 134680 - RNA, 20 nt, Artificial Sequence
  Synthetic
ggacagaguccagugagcuu

SEQ ID NO: 134681 - RNA, 22 nt, Artificial Sequence
  Synthetic
gaggacagaguccagugagcuu

SEQ ID NO: 134682 - RNA, 22 nt, Artificial Sequence
  Synthetic
guucucaaacuugagugggcuu

SEQ ID NO: 134683 - RNA, 23 nt, Artificial Sequence
  Synthetic
gguucucaaacuugagugggcuu

SEQ ID NO: 134684 - RNA, 21 nt, Artificial Sequence
  Synthetic
gagggcagcaaacuauggcuu

SEQ ID NO: 134685 - RNA, 24 nt, Artificial Sequence
  Synthetic
gcagagggcagcaaacuauggcuu

SEQ ID NO: 134686 - RNA, 19 nt, Artificial Sequence
  Synthetic
guuucaggcuuuuuggcuu

SEQ ID NO: 134687 - RNA, 20 nt, Artificial Sequence
  Synthetic
gguuucaggcuuuuuggcuu

SEQ ID NO: 134688 - RNA, 22 nt, Artificial Sequence
  Synthetic
gcgguuucaggcuuuuuggcuu

SEQ ID NO: 134689 - RNA, 18 nt, Artificial Sequence
  Synthetic
guuugcugacucuugcuu

SEQ ID NO: 134690 - RNA, 22 nt, Artificial Sequence
  Synthetic
gaucugauacguagaaaaucuu

SEQ ID NO: 134691 - RNA, 19 nt, Artificial Sequence
  Synthetic
gugaugguggcacaaucuu

SEQ ID NO: 134692 - RNA, 20 nt, Artificial Sequence
  Synthetic
ggugaugguggcacaaucuu

SEQ ID NO: 134693 - RNA, 19 nt, Artificial Sequence
  Synthetic
guauauuuucucucaucuu

SEQ ID NO: 134694 - RNA, 21 nt, Artificial Sequence
  Synthetic
guguauauuuucucucaucuu

SEQ ID NO: 134695 - RNA, 18 nt, Artificial Sequence
  Synthetic
gauaucaccucauaucuu

SEQ ID NO: 134696 - RNA, 20 nt, Artificial Sequence
  Synthetic
gagauaucaccucauaucuu

SEQ ID NO: 134697 - RNA, 18 nt, Artificial Sequence
  Synthetic
gcacaugaggugggucuu

SEQ ID NO: 134698 - RNA, 24 nt, Artificial Sequence
  Synthetic
gucucugcacaugaggugggucuu

SEQ ID NO: 134699 - RNA, 21 nt, Artificial Sequence
  Synthetic
gacauacugguuuaaauucuu

SEQ ID NO: 134700 - RNA, 19 nt, Artificial Sequence
  Synthetic
gauucugguuuuaauucuu

SEQ ID NO: 134701 - RNA, 21 nt, Artificial Sequence
  Synthetic
gagauucugguuuuaauucuu

SEQ ID NO: 134702 - RNA, 19 nt, Artificial Sequence
  Synthetic
gcauucuuucuucuuucuu

SEQ ID NO: 134703 - RNA, 18 nt, Artificial Sequence
  Synthetic
gguuucugugauuuucuu

SEQ ID NO: 134704 - RNA, 20 nt, Artificial Sequence
  Synthetic
guagaaccauuuguuuucuu

SEQ ID NO: 134705 - RNA, 21 nt, Artificial Sequence
  Synthetic
gguagaaccauuuguuuucuu

SEQ ID NO: 134706 - RNA, 21 nt, Artificial Sequence
  Synthetic
gcuacuuuaggacacuaaguu

SEQ ID NO: 134707 - RNA, 18 nt, Artificial Sequence
  Synthetic
gugcccguuagcuaaguu

SEQ ID NO: 134708 - RNA, 18 nt, Artificial Sequence
  Synthetic
gaauaguugcuaagaguu

SEQ ID NO: 134709 - RNA, 19 nt, Artificial Sequence
  Synthetic
ggaauaguugcuaagaguu

SEQ ID NO: 134710 - RNA, 19 nt, Artificial Sequence
  Synthetic
gcaggugaaaauaugaguu

SEQ ID NO: 134711 - RNA, 22 nt, Artificial Sequence
  Synthetic
gucuuugaagauguaauuaguu

SEQ ID NO: 134712 - RNA, 23 nt, Artificial Sequence
  Synthetic
ggucuuugaagauguaauuaguu

SEQ ID NO: 134713 - RNA, 24 nt, Artificial Sequence
  Synthetic
gggucuuugaagauguaauuaguu

SEQ ID NO: 134714 - RNA, 24 nt, Artificial Sequence
  Synthetic
gaucuuagcuggcugggcuccguu

SEQ ID NO: 134715 - RNA, 19 nt, Artificial Sequence
  Synthetic
guugugugaugccaagguu

SEQ ID NO: 134716 - RNA, 23 nt, Artificial Sequence
  Synthetic
guauguugugugaugccaagguu

SEQ ID NO: 134717 - RNA, 24 nt, Artificial Sequence
  Synthetic
gauauauggcgugaugcugagguu

SEQ ID NO: 134718 - RNA, 19 nt, Artificial Sequence
  Synthetic
gacacugauucaauagguu

SEQ ID NO: 134719 - RNA, 19 nt, Artificial Sequence
  Synthetic
gacacugauucaguagguu

SEQ ID NO: 134720 - RNA, 19 nt, Artificial Sequence
  Synthetic
gaaaugacaacaaaggguu

SEQ ID NO: 134721 - RNA, 22 nt, Artificial Sequence
  Synthetic
guugaaaugacaacaaaggguu

SEQ ID NO: 134722 - RNA, 20 nt, Artificial Sequence
  Synthetic
guauccacaaagauaugguu

SEQ ID NO: 134723 - RNA, 18 nt, Artificial Sequence
  Synthetic
gcucugauuuaacugguu

SEQ ID NO: 134724 - RNA, 19 nt, Artificial Sequence
  Synthetic
ggcucugauuuaacugguu

SEQ ID NO: 134725 - RNA, 22 nt, Artificial Sequence
  Synthetic
guuuccauguaguugugugguu

SEQ ID NO: 134726 - RNA, 19 nt, Artificial Sequence
  Synthetic
gugauuuggacaggauguu

SEQ ID NO: 134727 - RNA, 22 nt, Artificial Sequence
  Synthetic
gcagugauuuggacaggauguu

SEQ ID NO: 134728 - RNA, 23 nt, Artificial Sequence
  Synthetic
ggcagugauuuggacaggauguu

SEQ ID NO: 134729 - RNA, 18 nt, Artificial Sequence
  Synthetic
ggugaaaagagcacuguu

SEQ ID NO: 134730 - RNA, 20 nt, Artificial Sequence
  Synthetic
guggugaaaagagcacuguu

SEQ ID NO: 134731 - RNA, 22 nt, Artificial Sequence
  Synthetic
gcauuggguaaauacaccuguu

SEQ ID NO: 134732 - RNA, 23 nt, Artificial Sequence
  Synthetic
ggcauuggguaaauacaccuguu

SEQ ID NO: 134733 - RNA, 24 nt, Artificial Sequence
  Synthetic
gaacaacacacacuggugccuguu

SEQ ID NO: 134734 - RNA, 20 nt, Artificial Sequence
  Synthetic
gcacagggcuuagagcuguu

SEQ ID NO: 134735 - RNA, 21 nt, Artificial Sequence
  Synthetic
gccucagccucccaaaguguu

SEQ ID NO: 134736 - RNA, 19 nt, Artificial Sequence
  Synthetic
gcuugggauuggaaguguu

SEQ ID NO: 134737 - RNA, 19 nt, Artificial Sequence
  Synthetic
gaugauuuugcacaguguu

SEQ ID NO: 134738 - RNA, 23 nt, Artificial Sequence
  Synthetic
gccucaccaacaucuauuguguu

SEQ ID NO: 134739 - RNA, 20 nt, Artificial Sequence
  Synthetic
gucccucuuuuccuauuguu

SEQ ID NO: 134740 - RNA, 22 nt, Artificial Sequence
  Synthetic
gagucccucuuuuccuauuguu

SEQ ID NO: 134741 - RNA, 23 nt, Artificial Sequence
  Synthetic
ggagucccucuuuuccuauuguu

SEQ ID NO: 134742 - RNA, 24 nt, Artificial Sequence
  Synthetic
guacaaaagcaaagcaaauuuguu

SEQ ID NO: 134743 - RNA, 18 nt, Artificial Sequence
  Synthetic
guaaaauaaauguuuguu

SEQ ID NO: 134744 - RNA, 18 nt, Artificial Sequence
  Synthetic
gagaacuuuauaaaauuu

SEQ ID NO: 134745 - RNA, 20 nt, Artificial Sequence
  Synthetic
gauaauuuucauagaaauuu

SEQ ID NO: 134746 - RNA, 18 nt, Artificial Sequence
  Synthetic
gacuagagauauaaauuu

SEQ ID NO: 134747 - RNA, 18 nt, Artificial Sequence
  Synthetic
gaguuaagaaugcaauuu

SEQ ID NO: 134748 - RNA, 23 nt, Artificial Sequence
  Synthetic
guuuuuuagauucauaugaauuu

SEQ ID NO: 134749 - RNA, 20 nt, Artificial Sequence
  Synthetic
guauuuccaauuuugaauuu

SEQ ID NO: 134750 - RNA, 22 nt, Artificial Sequence
  Synthetic
gaguauuuccaauuuugaauuu

SEQ ID NO: 134751 - RNA, 23 nt, Artificial Sequence
  Synthetic
ggaguauuuccaauuuugaauuu

SEQ ID NO: 134752 - RNA, 21 nt, Artificial Sequence
  Synthetic
guauccauggguuccacauuu

SEQ ID NO: 134753 - RNA, 19 nt, Artificial Sequence
  Synthetic
gcuaaauaauauuccauuu

SEQ ID NO: 134754 - RNA, 24 nt, Artificial Sequence
  Synthetic
gauuuauaccuacguauuucauuu

SEQ ID NO: 134755 - RNA, 19 nt, Artificial Sequence
  Synthetic
guuuuuaaaauagagauuu

SEQ ID NO: 134756 - RNA, 18 nt, Artificial Sequence
  Synthetic
guuaagcuauugagauuu

SEQ ID NO: 134757 - RNA, 20 nt, Artificial Sequence
  Synthetic
guguuaagcuauugagauuu

SEQ ID NO: 134758 - RNA, 22 nt, Artificial Sequence
  Synthetic
gaaaucugcucuugaaugauuu

SEQ ID NO: 134759 - RNA, 18 nt, Artificial Sequence
  Synthetic
gauuuaauuuccugauuu

SEQ ID NO: 134760 - RNA, 20 nt, Artificial Sequence
  Synthetic
gugauuuaauuuccugauuu

SEQ ID NO: 134761 - RNA, 18 nt, Artificial Sequence
  Synthetic
ggaguucaguaaauauuu

SEQ ID NO: 134762 - RNA, 20 nt, Artificial Sequence
  Synthetic
gaggaguucaguaaauauuu

SEQ ID NO: 134763 - RNA, 18 nt, Artificial Sequence
  Synthetic
gacuggaaugucauauuu

SEQ ID NO: 134764 - RNA, 23 nt, Artificial Sequence
  Synthetic
gcuuugacuggaaugucauauuu

SEQ ID NO: 134765 - RNA, 24 nt, Artificial Sequence
  Synthetic
ggcuuugacuggaaugucauauuu

SEQ ID NO: 134766 - RNA, 23 nt, Artificial Sequence
  Synthetic
guacauaguauguauauauauuu

SEQ ID NO: 134767 - RNA, 24 nt, Artificial Sequence
  Synthetic
gguacauaguauguauauauauuu

SEQ ID NO: 134768 - RNA, 20 nt, Artificial Sequence
  Synthetic
guagguaugcggcuuuauuu

SEQ ID NO: 134769 - RNA, 23 nt, Artificial Sequence
  Synthetic
gcuguagguaugcggcuuuauuu

SEQ ID NO: 134770 - RNA, 24 nt, Artificial Sequence
  Synthetic
ggcuguagguaugcggcuuuauuu

SEQ ID NO: 134771 - RNA, 18 nt, Artificial Sequence
  Synthetic
guacuauuaucuuuauuu

SEQ ID NO: 134772 - RNA, 20 nt, Artificial Sequence
  Synthetic
gucuguaauuucagcacuuu

SEQ ID NO: 134773 - RNA, 23 nt, Artificial Sequence
  Synthetic
gcaaaugagaaaacugagacuuu

SEQ ID NO: 134774 - RNA, 19 nt, Artificial Sequence
  Synthetic
gcuguaaucccaggacuuu

SEQ ID NO: 134775 - RNA, 19 nt, Artificial Sequence
  Synthetic
gugaggccagcuggacuuu

SEQ ID NO: 134776 - RNA, 20 nt, Artificial Sequence
  Synthetic
ggugaggccagcuggacuuu

SEQ ID NO: 134777 - RNA, 22 nt, Artificial Sequence
  Synthetic
gaggugaggccagcuggacuuu

SEQ ID NO: 134778 - RNA, 24 nt, Artificial Sequence
  Synthetic
gagaggugaggccagcuggacuuu

SEQ ID NO: 134779 - RNA, 20 nt, Artificial Sequence
  Synthetic
gaugaaugagaaauuacuuu

SEQ ID NO: 134780 - RNA, 23 nt, Artificial Sequence
  Synthetic
guugaugaaugagaaauuacuuu

SEQ ID NO: 134781 - RNA, 19 nt, Artificial Sequence
  Synthetic
gucucuaagaacuuacuuu

SEQ ID NO: 134782 - RNA, 20 nt, Artificial Sequence
  Synthetic
ggucucuaagaacuuacuuu

SEQ ID NO: 134783 - RNA, 23 nt, Artificial Sequence
  Synthetic
guaggucucuaagaacuuacuuu

SEQ ID NO: 134784 - RNA, 19 nt, Artificial Sequence
  Synthetic
gccuccuguguugcccuuu

SEQ ID NO: 134785 - RNA, 19 nt, Artificial Sequence
  Synthetic
gucugaugggcuucccuuu

SEQ ID NO: 134786 - RNA, 23 nt, Artificial Sequence
  Synthetic
guuagucugaugggcuucccuuu

SEQ ID NO: 134787 - RNA, 21 nt, Artificial Sequence
  Synthetic
ggccugacccacuaccgcuuu

SEQ ID NO: 134788 - RNA, 24 nt, Artificial Sequence
  Synthetic
gcuggccugacccacuaccgcuuu

SEQ ID NO: 134789 - RNA, 22 nt, Artificial Sequence
  Synthetic
guuuccuuucucuugcugcuuu

SEQ ID NO: 134790 - RNA, 19 nt, Artificial Sequence
  Synthetic
gucucuaggaacuugcuuu

SEQ ID NO: 134791 - RNA, 20 nt, Artificial Sequence
  Synthetic
ggucucuaggaacuugcuuu

SEQ ID NO: 134792 - RNA, 23 nt, Artificial Sequence
  Synthetic
guaggucucuaggaacuugcuuu

SEQ ID NO: 134793 - RNA, 20 nt, Artificial Sequence
  Synthetic
gcccacauccucaggucuuu

SEQ ID NO: 134794 - RNA, 22 nt, Artificial Sequence
  Synthetic
gauaacugaaguaaauaaguuu

SEQ ID NO: 134795 - RNA, 23 nt, Artificial Sequence
  Synthetic
gauaauuuuaagucaauaaguuu

SEQ ID NO: 134796 - RNA, 19 nt, Artificial Sequence
  Synthetic
gucagcauucaaacaguuu

SEQ ID NO: 134797 - RNA, 24 nt, Artificial Sequence
  Synthetic
gucaugucagcauucaaacaguuu

SEQ ID NO: 134798 - RNA, 19 nt, Artificial Sequence
  Synthetic
guuacuauuuuaauaguuu

SEQ ID NO: 134799 - RNA, 22 nt, Artificial Sequence
  Synthetic
gauguuacuauuuuaauaguuu

SEQ ID NO: 134800 - RNA, 19 nt, Artificial Sequence
  Synthetic
guauauauguauauaguuu

SEQ ID NO: 134801 - RNA, 21 nt, Artificial Sequence
  Synthetic
guguauauauguauauaguuu

SEQ ID NO: 134802 - RNA, 20 nt, Artificial Sequence
  Synthetic
guuuuugugagcuauaguuu

SEQ ID NO: 134803 - RNA, 20 nt, Artificial Sequence
  Synthetic
gauauuuaaaagaaucguuu

SEQ ID NO: 134804 - RNA, 20 nt, Artificial Sequence
  Synthetic
guauuucaaauuucagguuu

SEQ ID NO: 134805 - RNA, 21 nt, Artificial Sequence
  Synthetic
gaacauuuggauuucagguuu

SEQ ID NO: 134806 - RNA, 22 nt, Artificial Sequence
  Synthetic
ggaacauuuggauuucagguuu

SEQ ID NO: 134807 - RNA, 18 nt, Artificial Sequence
  Synthetic
gggccuggcgggagguuu

SEQ ID NO: 134808 - RNA, 19 nt, Artificial Sequence
  Synthetic
ggggccuggcgggagguuu

SEQ ID NO: 134809 - RNA, 21 nt, Artificial Sequence
  Synthetic
guggggccuggcgggagguuu

SEQ ID NO: 134810 - RNA, 22 nt, Artificial Sequence
  Synthetic
gguggggccuggcgggagguuu

SEQ ID NO: 134811 - RNA, 24 nt, Artificial Sequence
  Synthetic
gugguggggccuggcgggagguuu

SEQ ID NO: 134812 - RNA, 18 nt, Artificial Sequence
  Synthetic
guaaaaauaaaaauguuu

SEQ ID NO: 134813 - RNA, 22 nt, Artificial Sequence
  Synthetic
gccccgaacccucacacuguuu

SEQ ID NO: 134814 - RNA, 24 nt, Artificial Sequence
  Synthetic
gcgccccgaacccucacacuguuu

SEQ ID NO: 134815 - RNA, 22 nt, Artificial Sequence
  Synthetic
gcacauuugcaugggucuguuu

SEQ ID NO: 134816 - RNA, 23 nt, Artificial Sequence
  Synthetic
ggcacauuugcaugggucuguuu

SEQ ID NO: 134817 - RNA, 24 nt, Artificial Sequence
  Synthetic
gggcacauuugcaugggucuguuu

SEQ ID NO: 134818 - RNA, 22 nt, Artificial Sequence
  Synthetic
gccccuaacccucacauuguuu

SEQ ID NO: 134819 - RNA, 24 nt, Artificial Sequence
  Synthetic
gcgccccuaacccucacauuguuu

SEQ ID NO: 134820 - RNA, 18 nt, Artificial Sequence
  Synthetic
ggggaaaaagaaaauuuu

SEQ ID NO: 134821 - RNA, 18 nt, Artificial Sequence
  Synthetic
gccuaagguugcaauuuu

SEQ ID NO: 134822 - RNA, 18 nt, Artificial Sequence
  Synthetic
guccagagaccccauuuu

SEQ ID NO: 134823 - RNA, 22 nt, Artificial Sequence
  Synthetic
gcuaguccagagaccccauuuu

SEQ ID NO: 134824 - RNA, 22 nt, Artificial Sequence
  Synthetic
guccaauuuauccugccauuuu

SEQ ID NO: 134825 - RNA, 24 nt, Artificial Sequence
  Synthetic
guguccaauuuauccugccauuuu

SEQ ID NO: 134826 - RNA, 18 nt, Artificial Sequence
  Synthetic
gaagggcccuaggauuuu

SEQ ID NO: 134827 - RNA, 24 nt, Artificial Sequence
  Synthetic
guuuuuaaaaaauuuccauauuuu

SEQ ID NO: 134828 - RNA, 20 nt, Artificial Sequence
  Synthetic
gcuuucuugccucauauuuu

SEQ ID NO: 134829 - RNA, 20 nt, Artificial Sequence
  Synthetic
gacccuuuugaggcuauuuu

SEQ ID NO: 134830 - RNA, 24 nt, Artificial Sequence
  Synthetic
gauugacccuuuugaggcuauuuu

SEQ ID NO: 134831 - RNA, 18 nt, Artificial Sequence
  Synthetic
guucuuugcaguuauuuu

SEQ ID NO: 134832 - RNA, 20 nt, Artificial Sequence
  Synthetic
guccaaaccugaacacuuuu

SEQ ID NO: 134833 - RNA, 19 nt, Artificial Sequence
  Synthetic
gcuuuauaauauuacuuuu

SEQ ID NO: 134834 - RNA, 18 nt, Artificial Sequence
  Synthetic
gucuaucuucuuucuuuu

SEQ ID NO: 134835 - RNA, 20 nt, Artificial Sequence
  Synthetic
gugucuaucuucuuucuuuu

SEQ ID NO: 134836 - RNA, 20 nt, Artificial Sequence
  Synthetic
gcuccaaaaguaaaaguuuu

SEQ ID NO: 134837 - RNA, 24 nt, Artificial Sequence
  Synthetic
gcucaauucuuuuuuaaaaguuuu

SEQ ID NO: 134838 - RNA, 18 nt, Artificial Sequence
  Synthetic
gcaauguauuacaguuuu

SEQ ID NO: 134839 - RNA, 19 nt, Artificial Sequence
  Synthetic
guuucuucugcucaguuuu

SEQ ID NO: 134840 - RNA, 18 nt, Artificial Sequence
  Synthetic
gugaggugggaagguuuu

SEQ ID NO: 134841 - RNA, 19 nt, Artificial Sequence
  Synthetic
ggugaggugggaagguuuu

SEQ ID NO: 134842 - RNA, 20 nt, Artificial Sequence
  Synthetic
gggugaggugggaagguuuu

SEQ ID NO: 134843 - RNA, 19 nt, Artificial Sequence
  Synthetic
gaagaggcguuccgguuuu

SEQ ID NO: 134844 - RNA, 21 nt, Artificial Sequence
  Synthetic
gagaagaggcguuccgguuuu

SEQ ID NO: 134845 - RNA, 22 nt, Artificial Sequence
  Synthetic
ggagaagaggcguuccgguuuu

SEQ ID NO: 134846 - RNA, 24 nt, Artificial Sequence
  Synthetic
gaggagaagaggcguuccgguuuu

SEQ ID NO: 134847 - RNA, 18 nt, Artificial Sequence
  Synthetic
gauuuaaaagagauuuuu

SEQ ID NO: 134848 - RNA, 20 nt, Artificial Sequence
  Synthetic
gagauuuaaaagagauuuuu

SEQ ID NO: 134849 - RNA, 18 nt, Artificial Sequence
  Synthetic
gauaguguauuccuuuuu

SEQ ID NO: 134850 - RNA, 19 nt, Artificial Sequence
  Synthetic
ggauaguguauuccuuuuu

SEQ ID NO: 134851 - RNA, 19 nt, Artificial Sequence
  Synthetic
guuaaaaaaaaccuuuuuu

SEQ ID NO: 134852 - RNA, 21 nt, Artificial Sequence
  Synthetic
gacaugaacucguucuuuuuu

SEQ ID NO: 134853 - RNA, 22 nt, Artificial Sequence
  Synthetic
ggacaugaacucguucuuuuuu

SEQ ID NO: 134854 - RNA, 20 nt, Artificial Sequence
  Synthetic
gaaaguuaacaauuuuuuuu

SEQ ID NO: 134855 - RNA, 24 nt, Artificial Sequence
  Synthetic
guuuuauauauauauauuuuuuuu

SEQ ID NO: 134856 - RNA, 18 nt, Artificial Sequence
  Synthetic
aaaaaaaaaaaaaaaaaa

SEQ ID NO: 134857 - RNA, 19 nt, Artificial Sequence
  Synthetic
aaaaaaaaaaaaaaaaaaa

SEQ ID NO: 134858 - RNA, 21 nt, Artificial Sequence
  Synthetic
agaaaaaaaaaaaaaaaaaaa

SEQ ID NO: 134859 - RNA, 22 nt, Artificial Sequence
  Synthetic
aagaaaaaaaaaaaaaaaaaaa

SEQ ID NO: 134860 - RNA, 24 nt, Artificial Sequence
  Synthetic
agaagaaaaaaaaaaaaaaaaaaa

SEQ ID NO: 134861 - RNA, 18 nt, Artificial Sequence
  Synthetic
ucucaaaaaaaaaaaaaa

SEQ ID NO: 134862 - RNA, 19 nt, Artificial Sequence
  Synthetic
aucucaaaaaaaaaaaaaa

SEQ ID NO: 134863 - RNA, 20 nt, Artificial Sequence
  Synthetic
caucucaaaaaaaaaaaaaa

SEQ ID NO: 134864 - RNA, 21 nt, Artificial Sequence
  Synthetic
ccaucucaaaaaaaaaaaaaa

SEQ ID NO: 134865 - RNA, 22 nt, Artificial Sequence
  Synthetic
uccaucucaaaaaaaaaaaaaa

SEQ ID NO: 134866 - RNA, 23 nt, Artificial Sequence
  Synthetic
cuccaucucaaaaaaaaaaaaaa

SEQ ID NO: 134867 - RNA, 24 nt, Artificial Sequence
  Synthetic
acuccaucucaaaaaaaaaaaaaa

SEQ ID NO: 134868 - RNA, 18 nt, Artificial Sequence
  Synthetic
agucaugaaaaaaaaaaa

SEQ ID NO: 134869 - RNA, 19 nt, Artificial Sequence
  Synthetic
cagucaugaaaaaaaaaaa

SEQ ID NO: 134870 - RNA, 20 nt, Artificial Sequence
  Synthetic
ucagucaugaaaaaaaaaaa

SEQ ID NO: 134871 - RNA, 21 nt, Artificial Sequence
  Synthetic
uucagucaugaaaaaaaaaaa

SEQ ID NO: 134872 - RNA, 23 nt, Artificial Sequence
  Synthetic
uguucagucaugaaaaaaaaaaa

SEQ ID NO: 134873 - RNA, 24 nt, Artificial Sequence
  Synthetic
cuguucagucaugaaaaaaaaaaa

SEQ ID NO: 134874 - RNA, 19 nt, Artificial Sequence
  Synthetic
aggaaugagaaaaaaaaaa

SEQ ID NO: 134875 - RNA, 21 nt, Artificial Sequence
  Synthetic
ugaggaaugagaaaaaaaaaa

SEQ ID NO: 134876 - RNA, 22 nt, Artificial Sequence
  Synthetic
cugaggaaugagaaaaaaaaaa

SEQ ID NO: 134877 - RNA, 23 nt, Artificial Sequence
  Synthetic
ucugaggaaugagaaaaaaaaaa

SEQ ID NO: 134878 - RNA, 24 nt, Artificial Sequence
  Synthetic
uucugaggaaugagaaaaaaaaaa

SEQ ID NO: 134879 - RNA, 18 nt, Artificial Sequence
  Synthetic
uagacugaccaaaaaaaa

SEQ ID NO: 134880 - RNA, 19 nt, Artificial Sequence
  Synthetic
cuagacugaccaaaaaaaa

SEQ ID NO: 134881 - RNA, 21 nt, Artificial Sequence
  Synthetic
agcuagacugaccaaaaaaaa

SEQ ID NO: 134882 - RNA, 22 nt, Artificial Sequence
  Synthetic
uagcuagacugaccaaaaaaaa

SEQ ID NO: 134883 - RNA, 23 nt, Artificial Sequence
  Synthetic
uuagcuagacugaccaaaaaaaa

SEQ ID NO: 134884 - RNA, 24 nt, Artificial Sequence
  Synthetic
uuuagcuagacugaccaaaaaaaa

SEQ ID NO: 134885 - RNA, 21 nt, Artificial Sequence
  Synthetic
uucacugagguggaaaaaaaa

SEQ ID NO: 134886 - RNA, 22 nt, Artificial Sequence
  Synthetic
uuucacugagguggaaaaaaaa

SEQ ID NO: 134887 - RNA, 23 nt, Artificial Sequence
  Synthetic
uuuucacugagguggaaaaaaaa

SEQ ID NO: 134888 - RNA, 24 nt, Artificial Sequence
  Synthetic
cuuuucacugagguggaaaaaaaa

SEQ ID NO: 134889 - RNA, 18 nt, Artificial Sequence
  Synthetic
aagaguuccagaaaaaaa

SEQ ID NO: 134890 - RNA, 19 nt, Artificial Sequence
  Synthetic
caagaguuccagaaaaaaa

SEQ ID NO: 134891 - RNA, 20 nt, Artificial Sequence
  Synthetic
acaagaguuccagaaaaaaa

SEQ ID NO: 134892 - RNA, 21 nt, Artificial Sequence
  Synthetic
uacaagaguuccagaaaaaaa

SEQ ID NO: 134893 - RNA, 22 nt, Artificial Sequence
  Synthetic
uuacaagaguuccagaaaaaaa

SEQ ID NO: 134894 - RNA, 24 nt, Artificial Sequence
  Synthetic
uguuacaagaguuccagaaaaaaa

SEQ ID NO: 134895 - RNA, 19 nt, Artificial Sequence
  Synthetic
agcccagaggggaaaaaaa

SEQ ID NO: 134896 - RNA, 20 nt, Artificial Sequence
  Synthetic
aagcccagaggggaaaaaaa

SEQ ID NO: 134897 - RNA, 18 nt, Artificial Sequence
  Synthetic
augagaaaauuaaaaaaa

SEQ ID NO: 134898 - RNA, 19 nt, Artificial Sequence
  Synthetic
aaugagaaaauuaaaaaaa

SEQ ID NO: 134899 - RNA, 20 nt, Artificial Sequence
  Synthetic
aaaugagaaaauuaaaaaaa

SEQ ID NO: 134900 - RNA, 22 nt, Artificial Sequence
  Synthetic
agaaaugagaaaauuaaaaaaa

SEQ ID NO: 134901 - RNA, 23 nt, Artificial Sequence
  Synthetic
aagaaaugagaaaauuaaaaaaa

SEQ ID NO: 134902 - RNA, 24 nt, Artificial Sequence
  Synthetic
uaagaaaugagaaaauuaaaaaaa

SEQ ID NO: 134903 - RNA, 18 nt, Artificial Sequence
  Synthetic
ugacaauguuuaaaaaaa

SEQ ID NO: 134904 - RNA, 19 nt, Artificial Sequence
  Synthetic
uugacaauguuuaaaaaaa

SEQ ID NO: 134905 - RNA, 20 nt, Artificial Sequence
  Synthetic
uuugacaauguuuaaaaaaa

SEQ ID NO: 134906 - RNA, 18 nt, Artificial Sequence
  Synthetic
agagacacaaccaaaaaa

SEQ ID NO: 134907 - RNA, 19 nt, Artificial Sequence
  Synthetic
cagagacacaaccaaaaaa

SEQ ID NO: 134908 - RNA, 19 nt, Artificial Sequence
  Synthetic
agaaaaacacuccaaaaaa

SEQ ID NO: 134909 - RNA, 20 nt, Artificial Sequence
  Synthetic
cagaaaaacacuccaaaaaa

SEQ ID NO: 134910 - RNA, 18 nt, Artificial Sequence
  Synthetic
agcuaaucauucaaaaaa

SEQ ID NO: 134911 - RNA, 19 nt, Artificial Sequence
  Synthetic
uagcuaaucauucaaaaaa

SEQ ID NO: 134912 - RNA, 20 nt, Artificial Sequence
  Synthetic
auagcuaaucauucaaaaaa

SEQ ID NO: 134913 - RNA, 21 nt, Artificial Sequence
  Synthetic
cuaaguguucaugggaaaaaa

SEQ ID NO: 134914 - RNA, 22 nt, Artificial Sequence
  Synthetic
ucuaaguguucaugggaaaaaa

SEQ ID NO: 134915 - RNA, 23 nt, Artificial Sequence
  Synthetic
cucuaaguguucaugggaaaaaa

SEQ ID NO: 134916 - RNA, 24 nt, Artificial Sequence
  Synthetic
ccucuaaguguucaugggaaaaaa

SEQ ID NO: 134917 - RNA, 18 nt, Artificial Sequence
  Synthetic
uuccucauguguaaaaaa

SEQ ID NO: 134918 - RNA, 19 nt, Artificial Sequence
  Synthetic
uuuccucauguguaaaaaa

SEQ ID NO: 134919 - RNA, 20 nt, Artificial Sequence
  Synthetic
auuuccucauguguaaaaaa

SEQ ID NO: 134920 - RNA, 18 nt, Artificial Sequence
  Synthetic
ucacugauucaccaaaaa

SEQ ID NO: 134921 - RNA, 19 nt, Artificial Sequence
  Synthetic
cucacugauucaccaaaaa

SEQ ID NO: 134922 - RNA, 20 nt, Artificial Sequence
  Synthetic
acucacugauucaccaaaaa

SEQ ID NO: 134923 - RNA, 21 nt, Artificial Sequence
  Synthetic
cacucacugauucaccaaaaa

SEQ ID NO: 134924 - RNA, 22 nt, Artificial Sequence
  Synthetic
ucacucacugauucaccaaaaa

SEQ ID NO: 134925 - RNA, 24 nt, Artificial Sequence
  Synthetic
ugucacucacugauucaccaaaaa

SEQ ID NO: 134926 - RNA, 18 nt, Artificial Sequence
  Synthetic
aaaggaaaacaucaaaaa

SEQ ID NO: 134927 - RNA, 19 nt, Artificial Sequence
  Synthetic
aaaaggaaaacaucaaaaa

SEQ ID NO: 134928 - RNA, 20 nt, Artificial Sequence
  Synthetic
caaaaggaaaacaucaaaaa

SEQ ID NO: 134929 - RNA, 18 nt, Artificial Sequence
  Synthetic
ugacaaaacaaagaaaaa

SEQ ID NO: 134930 - RNA, 19 nt, Artificial Sequence
  Synthetic
augacaaaacaaagaaaaa

SEQ ID NO: 134931 - RNA, 20 nt, Artificial Sequence
  Synthetic
aaugacaaaacaaagaaaaa

SEQ ID NO: 134932 - RNA, 21 nt, Artificial Sequence
  Synthetic
aaaugacaaaacaaagaaaaa

SEQ ID NO: 134933 - RNA, 23 nt, Artificial Sequence
  Synthetic
agaaaugacaaaacaaagaaaaa

SEQ ID NO: 134934 - RNA, 18 nt, Artificial Sequence
  Synthetic
acuaauauuagagaaaaa

SEQ ID NO: 134935 - RNA, 19 nt, Artificial Sequence
  Synthetic
uacuaauauuagagaaaaa

SEQ ID NO: 134936 - RNA, 20 nt, Artificial Sequence
  Synthetic
uuacuaauauuagagaaaaa

SEQ ID NO: 134937 - RNA, 21 nt, Artificial Sequence
  Synthetic
auuacuaauauuagagaaaaa

SEQ ID NO: 134938 - RNA, 22 nt, Artificial Sequence
  Synthetic
aauuacuaauauuagagaaaaa

SEQ ID NO: 134939 - RNA, 23 nt, Artificial Sequence
  Synthetic
aaauuacuaauauuagagaaaaa

SEQ ID NO: 134940 - RNA, 24 nt, Artificial Sequence
  Synthetic
caaauuacuaauauuagagaaaaa

SEQ ID NO: 134941 - RNA, 18 nt, Artificial Sequence
  Synthetic
uugaagaauuuagaaaaa

SEQ ID NO: 134942 - RNA, 19 nt, Artificial Sequence
  Synthetic
auugaagaauuuagaaaaa

SEQ ID NO: 134943 - RNA, 20 nt, Artificial Sequence
  Synthetic
cauugaagaauuuagaaaaa

SEQ ID NO: 134944 - RNA, 18 nt, Artificial Sequence
  Synthetic
uccuuuuauuuagaaaaa

SEQ ID NO: 134945 - RNA, 19 nt, Artificial Sequence
  Synthetic
cuccuuuuauuuagaaaaa

SEQ ID NO: 134946 - RNA, 20 nt, Artificial Sequence
  Synthetic
ccuccuuuuauuuagaaaaa

SEQ ID NO: 134947 - RNA, 18 nt, Artificial Sequence
  Synthetic
uucacuaaaaaugaaaaa

SEQ ID NO: 134948 - RNA, 19 nt, Artificial Sequence
  Synthetic
cuucacuaaaaaugaaaaa

SEQ ID NO: 134949 - RNA, 20 nt, Artificial Sequence
  Synthetic
ucuucacuaaaaaugaaaaa

SEQ ID NO: 134950 - RNA, 18 nt, Artificial Sequence
  Synthetic
ccagaaguuaaugaaaaa

SEQ ID NO: 134951 - RNA, 19 nt, Artificial Sequence
  Synthetic
accagaaguuaaugaaaaa

SEQ ID NO: 134952 - RNA, 18 nt, Artificial Sequence
  Synthetic
augcuucauauugaaaaa

SEQ ID NO: 134953 - RNA, 19 nt, Artificial Sequence
  Synthetic
aaugcuucauauugaaaaa

SEQ ID NO: 134954 - RNA, 20 nt, Artificial Sequence
  Synthetic
aaaugcuucauauugaaaaa

SEQ ID NO: 134955 - RNA, 18 nt, Artificial Sequence
  Synthetic
uauacauaaaaauaaaaa

SEQ ID NO: 134956 - RNA, 19 nt, Artificial Sequence
  Synthetic
uuauacauaaaaauaaaaa

SEQ ID NO: 134957 - RNA, 20 nt, Artificial Sequence
  Synthetic
auuauacauaaaaauaaaaa

SEQ ID NO: 134958 - RNA, 18 nt, Artificial Sequence
  Synthetic
auuucuguaaaauaaaaa

SEQ ID NO: 134959 - RNA, 19 nt, Artificial Sequence
  Synthetic
aauuucuguaaaauaaaaa

SEQ ID NO: 134960 - RNA, 20 nt, Artificial Sequence
  Synthetic
aaauuucuguaaaauaaaaa

SEQ ID NO: 134961 - RNA, 21 nt, Artificial Sequence
  Synthetic
aaaauuucuguaaaauaaaaa

SEQ ID NO: 134962 - RNA, 22 nt, Artificial Sequence
  Synthetic
uaaaauuucuguaaaauaaaaa

SEQ ID NO: 134963 - RNA, 23 nt, Artificial Sequence
  Synthetic
auaaaauuucuguaaaauaaaaa

SEQ ID NO: 134964 - RNA, 24 nt, Artificial Sequence
  Synthetic
aauaaaauuucuguaaaauaaaaa

SEQ ID NO: 134965 - RNA, 18 nt, Artificial Sequence
  Synthetic
uaaaacauucaauaaaaa

SEQ ID NO: 134966 - RNA, 19 nt, Artificial Sequence
  Synthetic
uuaaaacauucaauaaaaa

SEQ ID NO: 134967 - RNA, 20 nt, Artificial Sequence
  Synthetic
uuuaaaacauucaauaaaaa

SEQ ID NO: 134968 - RNA, 18 nt, Artificial Sequence
  Synthetic
acuaugcagccauaaaaa

SEQ ID NO: 134969 - RNA, 19 nt, Artificial Sequence
  Synthetic
uacuaugcagccauaaaaa

SEQ ID NO: 134970 - RNA, 20 nt, Artificial Sequence
  Synthetic
auacuaugcagccauaaaaa

SEQ ID NO: 134971 - RNA, 21 nt, Artificial Sequence
  Synthetic
aauacuaugcagccauaaaaa

SEQ ID NO: 134972 - RNA, 24 nt, Artificial Sequence
  Synthetic
uggaauacuaugcagccauaaaaa

SEQ ID NO: 134973 - RNA, 18 nt, Artificial Sequence
  Synthetic
agugaaaguuuguaaaaa

SEQ ID NO: 134974 - RNA, 19 nt, Artificial Sequence
  Synthetic
aagugaaaguuuguaaaaa

SEQ ID NO: 134975 - RNA, 20 nt, Artificial Sequence
  Synthetic
aaagugaaaguuuguaaaaa

SEQ ID NO: 134976 - RNA, 22 nt, Artificial Sequence
  Synthetic
ugaaagugaaaguuuguaaaaa

SEQ ID NO: 134977 - RNA, 23 nt, Artificial Sequence
  Synthetic
cugaaagugaaaguuuguaaaaa

SEQ ID NO: 134978 - RNA, 24 nt, Artificial Sequence
  Synthetic
ucugaaagugaaaguuuguaaaaa

SEQ ID NO: 134979 - RNA, 18 nt, Artificial Sequence
  Synthetic
cuuuguucacuuuaaaaa

SEQ ID NO: 134980 - RNA, 19 nt, Artificial Sequence
  Synthetic
ccuuuguucacuuuaaaaa

SEQ ID NO: 134981 - RNA, 20 nt, Artificial Sequence
  Synthetic
uccuuuguucacuuuaaaaa

SEQ ID NO: 134982 - RNA, 21 nt, Artificial Sequence
  Synthetic
uuccuuuguucacuuuaaaaa

SEQ ID NO: 134983 - RNA, 22 nt, Artificial Sequence
  Synthetic
auuccuuuguucacuuuaaaaa

SEQ ID NO: 134984 - RNA, 23 nt, Artificial Sequence
  Synthetic
aauuccuuuguucacuuuaaaaa

SEQ ID NO: 134985 - RNA, 24 nt, Artificial Sequence
  Synthetic
caauuccuuuguucacuuuaaaaa

SEQ ID NO: 134986 - RNA, 18 nt, Artificial Sequence
  Synthetic
auuuuuaaagaaacaaaa

SEQ ID NO: 134987 - RNA, 19 nt, Artificial Sequence
  Synthetic
cauuuuuaaagaaacaaaa

SEQ ID NO: 134988 - RNA, 20 nt, Artificial Sequence
  Synthetic
ccauuuuuaaagaaacaaaa

SEQ ID NO: 134989 - RNA, 18 nt, Artificial Sequence
  Synthetic
uccagcaagggaacaaaa

SEQ ID NO: 134990 - RNA, 19 nt, Artificial Sequence
  Synthetic
cuccagcaagggaacaaaa

SEQ ID NO: 134991 - RNA, 20 nt, Artificial Sequence
  Synthetic
ucuccagcaagggaacaaaa

SEQ ID NO: 134992 - RNA, 21 nt, Artificial Sequence
  Synthetic
cucuccagcaagggaacaaaa

SEQ ID NO: 134993 - RNA, 22 nt, Artificial Sequence
  Synthetic
ccucuccagcaagggaacaaaa

SEQ ID NO: 134994 - RNA, 23 nt, Artificial Sequence
  Synthetic
uccucuccagcaagggaacaaaa

SEQ ID NO: 134995 - RNA, 24 nt, Artificial Sequence
  Synthetic
cuccucuccagcaagggaacaaaa

SEQ ID NO: 134996 - RNA, 18 nt, Artificial Sequence
  Synthetic
aagacaaaauacacaaaa

SEQ ID NO: 134997 - RNA, 19 nt, Artificial Sequence
  Synthetic
caagacaaaauacacaaaa

SEQ ID NO: 134998 - RNA, 20 nt, Artificial Sequence
  Synthetic
acaagacaaaauacacaaaa

SEQ ID NO: 134999 - RNA, 21 nt, Artificial Sequence
  Synthetic
aacaagacaaaauacacaaaa

SEQ ID NO: 135000 - RNA, 22 nt, Artificial Sequence
  Synthetic
aaacaagacaaaauacacaaaa

SEQ ID NO: 135001 - RNA, 23 nt, Artificial Sequence
  Synthetic
aaaacaagacaaaauacacaaaa

SEQ ID NO: 135002 - RNA, 24 nt, Artificial Sequence
  Synthetic
aaaaacaagacaaaauacacaaaa

SEQ ID NO: 135003 - RNA, 19 nt, Artificial Sequence
  Synthetic
agggucuaggaggacaaaa

SEQ ID NO: 135004 - RNA, 20 nt, Artificial Sequence
  Synthetic
uagggucuaggaggacaaaa

SEQ ID NO: 135005 - RNA, 18 nt, Artificial Sequence
  Synthetic
acuaaaagcaauacaaaa

SEQ ID NO: 135006 - RNA, 19 nt, Artificial Sequence
  Synthetic
aacuaaaagcaauacaaaa

SEQ ID NO: 135007 - RNA, 20 nt, Artificial Sequence
  Synthetic
aaacuaaaagcaauacaaaa

SEQ ID NO: 135008 - RNA, 21 nt, Artificial Sequence
  Synthetic
uaaacuaaaagcaauacaaaa

SEQ ID NO: 135009 - RNA, 22 nt, Artificial Sequence
  Synthetic
uuaaacuaaaagcaauacaaaa

SEQ ID NO: 135010 - RNA, 23 nt, Artificial Sequence
  Synthetic
uuuaaacuaaaagcaauacaaaa

SEQ ID NO: 135011 - RNA, 24 nt, Artificial Sequence
  Synthetic
auuuaaacuaaaagcaauacaaaa

SEQ ID NO: 135012 - RNA, 18 nt, Artificial Sequence
  Synthetic
ugcaaauggaaaccaaaa

SEQ ID NO: 135013 - RNA, 19 nt, Artificial Sequence
  Synthetic
augcaaauggaaaccaaaa

SEQ ID NO: 135014 - RNA, 20 nt, Artificial Sequence
  Synthetic
caugcaaauggaaaccaaaa

SEQ ID NO: 135015 - RNA, 21 nt, Artificial Sequence
  Synthetic
ccaugcaaauggaaaccaaaa

SEQ ID NO: 135016 - RNA, 22 nt, Artificial Sequence
  Synthetic
uccaugcaaauggaaaccaaaa

SEQ ID NO: 135017 - RNA, 23 nt, Artificial Sequence
  Synthetic
uuccaugcaaauggaaaccaaaa

SEQ ID NO: 135018 - RNA, 24 nt, Artificial Sequence
  Synthetic
uuuccaugcaaauggaaaccaaaa

SEQ ID NO: 135019 - RNA, 18 nt, Artificial Sequence
  Synthetic
aagagaagaaaagcaaaa

SEQ ID NO: 135020 - RNA, 19 nt, Artificial Sequence
  Synthetic
uaagagaagaaaagcaaaa

SEQ ID NO: 135021 - RNA, 20 nt, Artificial Sequence
  Synthetic
auaagagaagaaaagcaaaa

SEQ ID NO: 135022 - RNA, 18 nt, Artificial Sequence
  Synthetic
caaauacaugaagcaaaa

SEQ ID NO: 135023 - RNA, 19 nt, Artificial Sequence
  Synthetic
ccaaauacaugaagcaaaa

SEQ ID NO: 135024 - RNA, 20 nt, Artificial Sequence
  Synthetic
uccaaauacaugaagcaaaa

SEQ ID NO: 135025 - RNA, 21 nt, Artificial Sequence
  Synthetic
uuccaaauacaugaagcaaaa

SEQ ID NO: 135026 - RNA, 22 nt, Artificial Sequence
  Synthetic
cuuccaaauacaugaagcaaaa

SEQ ID NO: 135027 - RNA, 24 nt, Artificial Sequence
  Synthetic
agcuuccaaauacaugaagcaaaa

SEQ ID NO: 135028 - RNA, 18 nt, Artificial Sequence
  Synthetic
acccuccccugagcaaaa

SEQ ID NO: 135029 - RNA, 20 nt, Artificial Sequence
  Synthetic
ugacccuccccugagcaaaa

SEQ ID NO: 135030 - RNA, 18 nt, Artificial Sequence
  Synthetic
aucucugagccugcaaaa

SEQ ID NO: 135031 - RNA, 19 nt, Artificial Sequence
  Synthetic
caucucugagccugcaaaa

SEQ ID NO: 135032 - RNA, 20 nt, Artificial Sequence
  Synthetic
ccaucucugagccugcaaaa

SEQ ID NO: 135033 - RNA, 21 nt, Artificial Sequence
  Synthetic
uccaucucugagccugcaaaa

SEQ ID NO: 135034 - RNA, 22 nt, Artificial Sequence
  Synthetic
uuccaucucugagccugcaaaa

SEQ ID NO: 135035 - RNA, 23 nt, Artificial Sequence
  Synthetic
cuuccaucucugagccugcaaaa

SEQ ID NO: 135036 - RNA, 24 nt, Artificial Sequence
  Synthetic
ccuuccaucucugagccugcaaaa

SEQ ID NO: 135037 - RNA, 18 nt, Artificial Sequence
  Synthetic
ugcauuagccccucaaaa

SEQ ID NO: 135038 - RNA, 19 nt, Artificial Sequence
  Synthetic
uugcauuagccccucaaaa

SEQ ID NO: 135039 - RNA, 20 nt, Artificial Sequence
  Synthetic
auugcauuagccccucaaaa

SEQ ID NO: 135040 - RNA, 21 nt, Artificial Sequence
  Synthetic
aauugcauuagccccucaaaa

SEQ ID NO: 135041 - RNA, 22 nt, Artificial Sequence
  Synthetic
caauugcauuagccccucaaaa

SEQ ID NO: 135042 - RNA, 23 nt, Artificial Sequence
  Synthetic
ucaauugcauuagccccucaaaa

SEQ ID NO: 135043 - RNA, 24 nt, Artificial Sequence
  Synthetic
aucaauugcauuagccccucaaaa

SEQ ID NO: 135044 - RNA, 18 nt, Artificial Sequence
  Synthetic
uuggcaccuuugucaaaa

SEQ ID NO: 135045 - RNA, 19 nt, Artificial Sequence
  Synthetic
cuuggcaccuuugucaaaa

SEQ ID NO: 135046 - RNA, 20 nt, Artificial Sequence
  Synthetic
ucuuggcaccuuugucaaaa

SEQ ID NO: 135047 - RNA, 21 nt, Artificial Sequence
  Synthetic
uucuuggcaccuuugucaaaa

SEQ ID NO: 135048 - RNA, 23 nt, Artificial Sequence
  Synthetic
uguucuuggcaccuuugucaaaa

SEQ ID NO: 135049 - RNA, 24 nt, Artificial Sequence
  Synthetic
auguucuuggcaccuuugucaaaa

SEQ ID NO: 135050 - RNA, 19 nt, Artificial Sequence
  Synthetic
ugcaccauuuguuucaaaa

SEQ ID NO: 135051 - RNA, 20 nt, Artificial Sequence
  Synthetic
augcaccauuuguuucaaaa

SEQ ID NO: 135052 - RNA, 18 nt, Artificial Sequence
  Synthetic
aguucaagaaaaagaaaa

SEQ ID NO: 135053 - RNA, 19 nt, Artificial Sequence
  Synthetic
uaguucaagaaaaagaaaa

SEQ ID NO: 135054 - RNA, 20 nt, Artificial Sequence
  Synthetic
uuaguucaagaaaaagaaaa

SEQ ID NO: 135055 - RNA, 18 nt, Artificial Sequence
  Synthetic
ccauauuuccuaagaaaa

SEQ ID NO: 135056 - RNA, 19 nt, Artificial Sequence
  Synthetic
uccauauuuccuaagaaaa

SEQ ID NO: 135057 - RNA, 20 nt, Artificial Sequence
  Synthetic
uuccauauuuccuaagaaaa

SEQ ID NO: 135058 - RNA, 18 nt, Artificial Sequence
  Synthetic
caaauaaaacacagaaaa

SEQ ID NO: 135059 - RNA, 19 nt, Artificial Sequence
  Synthetic
acaaauaaaacacagaaaa

SEQ ID NO: 135060 - RNA, 20 nt, Artificial Sequence
  Synthetic
uacaaauaaaacacagaaaa

SEQ ID NO: 135061 - RNA, 20 nt, Artificial Sequence
  Synthetic
uggugaggcuucagagaaaa

SEQ ID NO: 135062 - RNA, 21 nt, Artificial Sequence
  Synthetic
auggugaggcuucagagaaaa

SEQ ID NO: 135063 - RNA, 23 nt, Artificial Sequence
  Synthetic
ugauggugaggcuucagagaaaa

SEQ ID NO: 135064 - RNA, 24 nt, Artificial Sequence
  Synthetic
augauggugaggcuucagagaaaa

SEQ ID NO: 135065 - RNA, 18 nt, Artificial Sequence
  Synthetic
uaguaguaagagagaaaa

SEQ ID NO: 135066 - RNA, 19 nt, Artificial Sequence
  Synthetic
auaguaguaagagagaaaa

SEQ ID NO: 135067 - RNA, 20 nt, Artificial Sequence
  Synthetic
aauaguaguaagagagaaaa

SEQ ID NO: 135068 - RNA, 18 nt, Artificial Sequence
  Synthetic
aauuaaaaguuuagaaaa

SEQ ID NO: 135069 - RNA, 19 nt, Artificial Sequence
  Synthetic
uaauuaaaaguuuagaaaa

SEQ ID NO: 135070 - RNA, 20 nt, Artificial Sequence
  Synthetic
auaauuaaaaguuuagaaaa

SEQ ID NO: 135071 - RNA, 21 nt, Artificial Sequence
  Synthetic
aauaauuaaaaguuuagaaaa

SEQ ID NO: 135072 - RNA, 22 nt, Artificial Sequence
  Synthetic
aaauaauuaaaaguuuagaaaa

SEQ ID NO: 135073 - RNA, 23 nt, Artificial Sequence
  Synthetic
aaaauaauuaaaaguuuagaaaa

SEQ ID NO: 135074 - RNA, 18 nt, Artificial Sequence
  Synthetic
uaaaaauauuuuagaaaa

SEQ ID NO: 135075 - RNA, 19 nt, Artificial Sequence
  Synthetic
auaaaaauauuuuagaaaa

SEQ ID NO: 135076 - RNA, 20 nt, Artificial Sequence
  Synthetic
aauaaaaauauuuuagaaaa

SEQ ID NO: 135077 - RNA, 21 nt, Artificial Sequence
  Synthetic
aaauaaaaauauuuuagaaaa

SEQ ID NO: 135078 - RNA, 22 nt, Artificial Sequence
  Synthetic
aaaauaaaaauauuuuagaaaa

SEQ ID NO: 135079 - RNA, 23 nt, Artificial Sequence
  Synthetic
aaaaauaaaaauauuuuagaaaa

SEQ ID NO: 135080 - RNA, 24 nt, Artificial Sequence
  Synthetic
aaaaaauaaaaauauuuuagaaaa

SEQ ID NO: 135081 - RNA, 21 nt, Artificial Sequence
  Synthetic
cuuugacuggcuuaucgaaaa

SEQ ID NO: 135082 - RNA, 22 nt, Artificial Sequence
  Synthetic
acuuugacuggcuuaucgaaaa

SEQ ID NO: 135083 - RNA, 23 nt, Artificial Sequence
  Synthetic
cacuuugacuggcuuaucgaaaa

SEQ ID NO: 135084 - RNA, 24 nt, Artificial Sequence
  Synthetic
ucacuuugacuggcuuaucgaaaa

SEQ ID NO: 135085 - RNA, 18 nt, Artificial Sequence
  Synthetic
caaaaucauaaaggaaaa

SEQ ID NO: 135086 - RNA, 19 nt, Artificial Sequence
  Synthetic
ccaaaaucauaaaggaaaa

SEQ ID NO: 135087 - RNA, 20 nt, Artificial Sequence
  Synthetic
accaaaaucauaaaggaaaa

SEQ ID NO: 135088 - RNA, 21 nt, Artificial Sequence
  Synthetic
uaccaaaaucauaaaggaaaa

SEQ ID NO: 135089 - RNA, 22 nt, Artificial Sequence
  Synthetic
uuaccaaaaucauaaaggaaaa

SEQ ID NO: 135090 - RNA, 23 nt, Artificial Sequence
  Synthetic
auuaccaaaaucauaaaggaaaa

SEQ ID NO: 135091 - RNA, 24 nt, Artificial Sequence
  Synthetic
aauuaccaaaaucauaaaggaaaa

SEQ ID NO: 135092 - RNA, 18 nt, Artificial Sequence
  Synthetic
caggguucagaaggaaaa

SEQ ID NO: 135093 - RNA, 19 nt, Artificial Sequence
  Synthetic
ucaggguucagaaggaaaa

SEQ ID NO: 135094 - RNA, 20 nt, Artificial Sequence
  Synthetic
aucaggguucagaaggaaaa

SEQ ID NO: 135095 - RNA, 18 nt, Artificial Sequence
  Synthetic
uccucaaaaaacugaaaa

SEQ ID NO: 135096 - RNA, 19 nt, Artificial Sequence
  Synthetic
cuccucaaaaaacugaaaa

SEQ ID NO: 135097 - RNA, 21 nt, Artificial Sequence
  Synthetic
agcuccucaaaaaacugaaaa

SEQ ID NO: 135098 - RNA, 22 nt, Artificial Sequence
  Synthetic
uagcuccucaaaaaacugaaaa

SEQ ID NO: 135099 - RNA, 18 nt, Artificial Sequence
  Synthetic
agagaagauuacugaaaa

SEQ ID NO: 135100 - RNA, 19 nt, Artificial Sequence
  Synthetic
aagagaagauuacugaaaa

SEQ ID NO: 135101 - RNA, 21 nt, Artificial Sequence
  Synthetic
ugaagagaagauuacugaaaa

SEQ ID NO: 135102 - RNA, 22 nt, Artificial Sequence
  Synthetic
augaagagaagauuacugaaaa

SEQ ID NO: 135103 - RNA, 23 nt, Artificial Sequence
  Synthetic
caugaagagaagauuacugaaaa

SEQ ID NO: 135104 - RNA, 18 nt, Artificial Sequence
  Synthetic
aaguuagaaaccugaaaa

SEQ ID NO: 135105 - RNA, 19 nt, Artificial Sequence
  Synthetic
aaaguuagaaaccugaaaa

SEQ ID NO: 135106 - RNA, 20 nt, Artificial Sequence
  Synthetic
aaaaguuagaaaccugaaaa

SEQ ID NO: 135107 - RNA, 18 nt, Artificial Sequence
  Synthetic
aagcagcagcucugaaaa

SEQ ID NO: 135108 - RNA, 19 nt, Artificial Sequence
  Synthetic
aaagcagcagcucugaaaa

SEQ ID NO: 135109 - RNA, 20 nt, Artificial Sequence
  Synthetic
aaaagcagcagcucugaaaa

SEQ ID NO: 135110 - RNA, 18 nt, Artificial Sequence
  Synthetic
aggaagucaaagugaaaa

SEQ ID NO: 135111 - RNA, 19 nt, Artificial Sequence
  Synthetic
aaggaagucaaagugaaaa

SEQ ID NO: 135112 - RNA, 20 nt, Artificial Sequence
  Synthetic
aaaggaagucaaagugaaaa

SEQ ID NO: 135113 - RNA, 22 nt, Artificial Sequence
  Synthetic
uguucuugccacagagugaaaa

SEQ ID NO: 135114 - RNA, 23 nt, Artificial Sequence
  Synthetic
cuguucuugccacagagugaaaa

SEQ ID NO: 135115 - RNA, 18 nt, Artificial Sequence
  Synthetic
uaggagcucacuugaaaa

SEQ ID NO: 135116 - RNA, 19 nt, Artificial Sequence
  Synthetic
uuaggagcucacuugaaaa

SEQ ID NO: 135117 - RNA, 20 nt, Artificial Sequence
  Synthetic
cuuaggagcucacuugaaaa

SEQ ID NO: 135118 - RNA, 19 nt, Artificial Sequence
  Synthetic
ugaguggcaguuuugaaaa

SEQ ID NO: 135119 - RNA, 20 nt, Artificial Sequence
  Synthetic
augaguggcaguuuugaaaa

SEQ ID NO: 135120 - RNA, 18 nt, Artificial Sequence
  Synthetic
cauguccuaaaaauaaaa

SEQ ID NO: 135121 - RNA, 19 nt, Artificial Sequence
  Synthetic
ucauguccuaaaaauaaaa

SEQ ID NO: 135122 - RNA, 20 nt, Artificial Sequence
  Synthetic
uucauguccuaaaaauaaaa

SEQ ID NO: 135123 - RNA, 18 nt, Artificial Sequence
  Synthetic
aaaaaauagaaaauaaaa

SEQ ID NO: 135124 - RNA, 20 nt, Artificial Sequence
  Synthetic
ugaaaaaauagaaaauaaaa

SEQ ID NO: 135125 - RNA, 21 nt, Artificial Sequence
  Synthetic
augaaaaaauagaaaauaaaa

SEQ ID NO: 135126 - RNA, 22 nt, Artificial Sequence
  Synthetic
aaugaaaaaauagaaaauaaaa

SEQ ID NO: 135127 - RNA, 23 nt, Artificial Sequence
  Synthetic
caaugaaaaaauagaaaauaaaa

SEQ ID NO: 135128 - RNA, 18 nt, Artificial Sequence
  Synthetic
cacaagcugaaaauaaaa

SEQ ID NO: 135129 - RNA, 19 nt, Artificial Sequence
  Synthetic
ucacaagcugaaaauaaaa

SEQ ID NO: 135130 - RNA, 20 nt, Artificial Sequence
  Synthetic
aucacaagcugaaaauaaaa

SEQ ID NO: 135131 - RNA, 18 nt, Artificial Sequence
  Synthetic
uuaauggguaaaauaaaa

SEQ ID NO: 135132 - RNA, 19 nt, Artificial Sequence
  Synthetic
uuuaauggguaaaauaaaa

SEQ ID NO: 135133 - RNA, 20 nt, Artificial Sequence
  Synthetic
auuuaauggguaaaauaaaa

SEQ ID NO: 135134 - RNA, 21 nt, Artificial Sequence
  Synthetic
cauuuaauggguaaaauaaaa

SEQ ID NO: 135135 - RNA, 22 nt, Artificial Sequence
  Synthetic
ccauuuaauggguaaaauaaaa

SEQ ID NO: 135136 - RNA, 23 nt, Artificial Sequence
  Synthetic
uccauuuaauggguaaaauaaaa

SEQ ID NO: 135137 - RNA, 24 nt, Artificial Sequence
  Synthetic
auccauuuaauggguaaaauaaaa

SEQ ID NO: 135138 - RNA, 18 nt, Artificial Sequence
  Synthetic
cugcucaaggaaauaaaa

SEQ ID NO: 135139 - RNA, 19 nt, Artificial Sequence
  Synthetic
acugcucaaggaaauaaaa

SEQ ID NO: 135140 - RNA, 20 nt, Artificial Sequence
  Synthetic
cacugcucaaggaaauaaaa

SEQ ID NO: 135141 - RNA, 18 nt, Artificial Sequence
  Synthetic
uacuauucagcaauaaaa

SEQ ID NO: 135142 - RNA, 19 nt, Artificial Sequence
  Synthetic
auacuauucagcaauaaaa

SEQ ID NO: 135143 - RNA, 20 nt, Artificial Sequence
  Synthetic
aauacuauucagcaauaaaa

SEQ ID NO: 135144 - RNA, 21 nt, Artificial Sequence
  Synthetic
caauacuauucagcaauaaaa

SEQ ID NO: 135145 - RNA, 24 nt, Artificial Sequence
  Synthetic
aggcaauacuauucagcaauaaaa

SEQ ID NO: 135146 - RNA, 18 nt, Artificial Sequence
  Synthetic
uuguaacaugcaauaaaa

SEQ ID NO: 135147 - RNA, 19 nt, Artificial Sequence
  Synthetic
uuuguaacaugcaauaaaa

SEQ ID NO: 135148 - RNA, 20 nt, Artificial Sequence
  Synthetic
uuuuguaacaugcaauaaaa

SEQ ID NO: 135149 - RNA, 21 nt, Artificial Sequence
  Synthetic
cuuuuguaacaugcaauaaaa

SEQ ID NO: 135150 - RNA, 22 nt, Artificial Sequence
  Synthetic
acuuuuguaacaugcaauaaaa

SEQ ID NO: 135151 - RNA, 23 nt, Artificial Sequence
  Synthetic
uacuuuuguaacaugcaauaaaa

SEQ ID NO: 135152 - RNA, 24 nt, Artificial Sequence
  Synthetic
auacuuuuguaacaugcaauaaaa

SEQ ID NO: 135153 - RNA, 18 nt, Artificial Sequence
  Synthetic
caagacuuuucaauaaaa

SEQ ID NO: 135154 - RNA, 19 nt, Artificial Sequence
  Synthetic
acaagacuuuucaauaaaa

SEQ ID NO: 135155 - RNA, 20 nt, Artificial Sequence
  Synthetic
uacaagacuuuucaauaaaa

SEQ ID NO: 135156 - RNA, 22 nt, Artificial Sequence
  Synthetic
aguacaagacuuuucaauaaaa

SEQ ID NO: 135157 - RNA, 24 nt, Artificial Sequence
  Synthetic
ugaguacaagacuuuucaauaaaa

SEQ ID NO: 135158 - RNA, 18 nt, Artificial Sequence
  Synthetic
agaaaugacauaauaaaa

SEQ ID NO: 135159 - RNA, 19 nt, Artificial Sequence
  Synthetic
aagaaaugacauaauaaaa

SEQ ID NO: 135160 - RNA, 18 nt, Artificial Sequence
  Synthetic
uaaugaaauuuaauaaaa

SEQ ID NO: 135161 - RNA, 19 nt, Artificial Sequence
  Synthetic
uuaaugaaauuuaauaaaa

SEQ ID NO: 135162 - RNA, 20 nt, Artificial Sequence
  Synthetic
auuaaugaaauuuaauaaaa

SEQ ID NO: 135163 - RNA, 18 nt, Artificial Sequence
  Synthetic
uauuuaaauuuaauaaaa

SEQ ID NO: 135164 - RNA, 19 nt, Artificial Sequence
  Synthetic
auauuuaaauuuaauaaaa

SEQ ID NO: 135165 - RNA, 20 nt, Artificial Sequence
  Synthetic
uauauuuaaauuuaauaaaa

SEQ ID NO: 135166 - RNA, 21 nt, Artificial Sequence
  Synthetic
uuauauuuaaauuuaauaaaa

SEQ ID NO: 135167 - RNA, 22 nt, Artificial Sequence
  Synthetic
uuuauauuuaaauuuaauaaaa

SEQ ID NO: 135168 - RNA, 23 nt, Artificial Sequence
  Synthetic
auuuauauuuaaauuuaauaaaa

SEQ ID NO: 135169 - RNA, 24 nt, Artificial Sequence
  Synthetic
aauuuauauuuaaauuuaauaaaa

SEQ ID NO: 135170 - RNA, 18 nt, Artificial Sequence
  Synthetic
cuuuguggauacauaaaa

SEQ ID NO: 135171 - RNA, 19 nt, Artificial Sequence
  Synthetic
ucuuuguggauacauaaaa

SEQ ID NO: 135172 - RNA, 20 nt, Artificial Sequence
  Synthetic
aucuuuguggauacauaaaa

SEQ ID NO: 135173 - RNA, 21 nt, Artificial Sequence
  Synthetic
uaucuuuguggauacauaaaa

SEQ ID NO: 135174 - RNA, 22 nt, Artificial Sequence
  Synthetic
auaucuuuguggauacauaaaa

SEQ ID NO: 135175 - RNA, 23 nt, Artificial Sequence
  Synthetic
cauaucuuuguggauacauaaaa

SEQ ID NO: 135176 - RNA, 24 nt, Artificial Sequence
  Synthetic
ccauaucuuuguggauacauaaaa

SEQ ID NO: 135177 - RNA, 18 nt, Artificial Sequence
  Synthetic
uacuaugcagccauaaaa

SEQ ID NO: 135178 - RNA, 19 nt, Artificial Sequence
  Synthetic
auacuaugcagccauaaaa

SEQ ID NO: 135179 - RNA, 20 nt, Artificial Sequence
  Synthetic
aauacuaugcagccauaaaa

SEQ ID NO: 135180 - RNA, 21 nt, Artificial Sequence
  Synthetic
caauacuaugcagccauaaaa

SEQ ID NO: 135181 - RNA, 23 nt, Artificial Sequence
  Synthetic
ugcaauacuaugcagccauaaaa

SEQ ID NO: 135182 - RNA, 24 nt, Artificial Sequence
  Synthetic
augcaauacuaugcagccauaaaa

SEQ ID NO: 135183 - RNA, 22 nt, Artificial Sequence
  Synthetic
agaauacuaugcagccauaaaa

SEQ ID NO: 135184 - RNA, 23 nt, Artificial Sequence
  Synthetic
uagaauacuaugcagccauaaaa

SEQ ID NO: 135185 - RNA, 24 nt, Artificial Sequence
  Synthetic
auagaauacuaugcagccauaaaa

SEQ ID NO: 135186 - RNA, 23 nt, Artificial Sequence
  Synthetic
uggaauacuaugcagccauaaaa

SEQ ID NO: 135187 - RNA, 24 nt, Artificial Sequence
  Synthetic
auggaauacuaugcagccauaaaa

SEQ ID NO: 135188 - RNA, 18 nt, Artificial Sequence
  Synthetic
uacugugcagccauaaaa

SEQ ID NO: 135189 - RNA, 19 nt, Artificial Sequence
  Synthetic
auacugugcagccauaaaa

SEQ ID NO: 135190 - RNA, 20 nt, Artificial Sequence
  Synthetic
aauacugugcagccauaaaa

SEQ ID NO: 135191 - RNA, 23 nt, Artificial Sequence
  Synthetic
uggaauacugugcagccauaaaa

SEQ ID NO: 135192 - RNA, 24 nt, Artificial Sequence
  Synthetic
auggaauacugugcagccauaaaa

SEQ ID NO: 135193 - RNA, 18 nt, Artificial Sequence
  Synthetic
agggcuagaaauauaaaa

SEQ ID NO: 135194 - RNA, 20 nt, Artificial Sequence
  Synthetic
ugagggcuagaaauauaaaa

SEQ ID NO: 135195 - RNA, 18 nt, Artificial Sequence
  Synthetic
ccuuugaaaucuauaaaa

SEQ ID NO: 135196 - RNA, 19 nt, Artificial Sequence
  Synthetic
cccuuugaaaucuauaaaa

SEQ ID NO: 135197 - RNA, 20 nt, Artificial Sequence
  Synthetic
ucccuuugaaaucuauaaaa

SEQ ID NO: 135198 - RNA, 18 nt, Artificial Sequence
  Synthetic
cauuucugauguauaaaa

SEQ ID NO: 135199 - RNA, 19 nt, Artificial Sequence
  Synthetic
acauuucugauguauaaaa

SEQ ID NO: 135200 - RNA, 20 nt, Artificial Sequence
  Synthetic
uacauuucugauguauaaaa

SEQ ID NO: 135201 - RNA, 21 nt, Artificial Sequence
  Synthetic
auaggaggugaaauuauaaaa

SEQ ID NO: 135202 - RNA, 22 nt, Artificial Sequence
  Synthetic
aauaggaggugaaauuauaaaa

SEQ ID NO: 135203 - RNA, 23 nt, Artificial Sequence
  Synthetic
aaauaggaggugaaauuauaaaa

SEQ ID NO: 135204 - RNA, 24 nt, Artificial Sequence
  Synthetic
aaaauaggaggugaaauuauaaaa

SEQ ID NO: 135205 - RNA, 20 nt, Artificial Sequence
  Synthetic
uggaaaagggauuuauaaaa

SEQ ID NO: 135206 - RNA, 21 nt, Artificial Sequence
  Synthetic
uuggaaaagggauuuauaaaa

SEQ ID NO: 135207 - RNA, 22 nt, Artificial Sequence
  Synthetic
auuggaaaagggauuuauaaaa

SEQ ID NO: 135208 - RNA, 23 nt, Artificial Sequence
  Synthetic
cauuggaaaagggauuuauaaaa

SEQ ID NO: 135209 - RNA, 24 nt, Artificial Sequence
  Synthetic
ccauuggaaaagggauuuauaaaa

SEQ ID NO: 135210 - RNA, 18 nt, Artificial Sequence
  Synthetic
aaaauauaugaucuaaaa

SEQ ID NO: 135211 - RNA, 19 nt, Artificial Sequence
  Synthetic
caaaauauaugaucuaaaa

SEQ ID NO: 135212 - RNA, 20 nt, Artificial Sequence
  Synthetic
ucaaaauauaugaucuaaaa

SEQ ID NO: 135213 - RNA, 18 nt, Artificial Sequence
  Synthetic
aaaacuccauuucuaaaa

SEQ ID NO: 135214 - RNA, 19 nt, Artificial Sequence
  Synthetic
caaaacuccauuucuaaaa

SEQ ID NO: 135215 - RNA, 20 nt, Artificial Sequence
  Synthetic
acaaaacuccauuucuaaaa

SEQ ID NO: 135216 - RNA, 18 nt, Artificial Sequence
  Synthetic
aaauaaaaagaaguaaaa

SEQ ID NO: 135217 - RNA, 20 nt, Artificial Sequence
  Synthetic
agaaauaaaaagaaguaaaa

SEQ ID NO: 135218 - RNA, 21 nt, Artificial Sequence
  Synthetic
cagaaauaaaaagaaguaaaa

SEQ ID NO: 135219 - RNA, 22 nt, Artificial Sequence
  Synthetic
acagaaauaaaaagaaguaaaa

SEQ ID NO: 135220 - RNA, 23 nt, Artificial Sequence
  Synthetic
uacagaaauaaaaagaaguaaaa

SEQ ID NO: 135221 - RNA, 24 nt, Artificial Sequence
  Synthetic
uuacagaaauaaaaagaaguaaaa

SEQ ID NO: 135222 - RNA, 18 nt, Artificial Sequence
  Synthetic
auauugaaagcaguaaaa

SEQ ID NO: 135223 - RNA, 19 nt, Artificial Sequence
  Synthetic
uauauugaaagcaguaaaa

SEQ ID NO: 135224 - RNA, 20 nt, Artificial Sequence
  Synthetic
auauauugaaagcaguaaaa

SEQ ID NO: 135225 - RNA, 18 nt, Artificial Sequence
  Synthetic
ugaaugaaauuaguaaaa

SEQ ID NO: 135226 - RNA, 19 nt, Artificial Sequence
  Synthetic
augaaugaaauuaguaaaa

SEQ ID NO: 135227 - RNA, 20 nt, Artificial Sequence
  Synthetic
aaugaaugaaauuaguaaaa

SEQ ID NO: 135228 - RNA, 18 nt, Artificial Sequence
  Synthetic
aguguuuaacagguaaaa

SEQ ID NO: 135229 - RNA, 19 nt, Artificial Sequence
  Synthetic
aaguguuuaacagguaaaa

SEQ ID NO: 135230 - RNA, 20 nt, Artificial Sequence
  Synthetic
caaguguuuaacagguaaaa

SEQ ID NO: 135231 - RNA, 18 nt, Artificial Sequence
  Synthetic
uaagcacaucauguaaaa

SEQ ID NO: 135232 - RNA, 20 nt, Artificial Sequence
  Synthetic
aguaagcacaucauguaaaa

SEQ ID NO: 135233 - RNA, 21 nt, Artificial Sequence
  Synthetic
uaguaagcacaucauguaaaa

SEQ ID NO: 135234 - RNA, 23 nt, Artificial Sequence
  Synthetic
uguaguaagcacaucauguaaaa

SEQ ID NO: 135235 - RNA, 18 nt, Artificial Sequence
  Synthetic
uuaccuaaaaaauuaaaa

SEQ ID NO: 135236 - RNA, 19 nt, Artificial Sequence
  Synthetic
uuuaccuaaaaaauuaaaa

SEQ ID NO: 135237 - RNA, 20 nt, Artificial Sequence
  Synthetic
uuuuaccuaaaaaauuaaaa

SEQ ID NO: 135238 - RNA, 18 nt, Artificial Sequence
  Synthetic
agggaacaaaaauuaaaa

SEQ ID NO: 135239 - RNA, 19 nt, Artificial Sequence
  Synthetic
uagggaacaaaaauuaaaa

SEQ ID NO: 135240 - RNA, 20 nt, Artificial Sequence
  Synthetic
uuagggaacaaaaauuaaaa

SEQ ID NO: 135241 - RNA, 18 nt, Artificial Sequence
  Synthetic
uuauuuuauacauuaaaa

SEQ ID NO: 135242 - RNA, 19 nt, Artificial Sequence
  Synthetic
auuauuuuauacauuaaaa

SEQ ID NO: 135243 - RNA, 20 nt, Artificial Sequence
  Synthetic
aauuauuuuauacauuaaaa

SEQ ID NO: 135244 - RNA, 18 nt, Artificial Sequence
  Synthetic
ucuaauauguuauuaaaa

SEQ ID NO: 135245 - RNA, 19 nt, Artificial Sequence
  Synthetic
uucuaauauguuauuaaaa

SEQ ID NO: 135246 - RNA, 20 nt, Artificial Sequence
  Synthetic
uuucuaauauguuauuaaaa

SEQ ID NO: 135247 - RNA, 18 nt, Artificial Sequence
  Synthetic
aauuuuaaagucuuaaaa

SEQ ID NO: 135248 - RNA, 19 nt, Artificial Sequence
  Synthetic
aaauuuuaaagucuuaaaa

SEQ ID NO: 135249 - RNA, 20 nt, Artificial Sequence
  Synthetic
caaauuuuaaagucuuaaaa

SEQ ID NO: 135250 - RNA, 19 nt, Artificial Sequence
  Synthetic
uguauaaaugaauuuaaaa

SEQ ID NO: 135251 - RNA, 20 nt, Artificial Sequence
  Synthetic
auguauaaaugaauuuaaaa

SEQ ID NO: 135252 - RNA, 21 nt, Artificial Sequence
  Synthetic
aauguauaaaugaauuuaaaa

SEQ ID NO: 135253 - RNA, 22 nt, Artificial Sequence
  Synthetic
aaauguauaaaugaauuuaaaa

SEQ ID NO: 135254 - RNA, 23 nt, Artificial Sequence
  Synthetic
uaaauguauaaaugaauuuaaaa

SEQ ID NO: 135255 - RNA, 24 nt, Artificial Sequence
  Synthetic
auaaauguauaaaugaauuuaaaa

SEQ ID NO: 135256 - RNA, 18 nt, Artificial Sequence
  Synthetic
caguauucugcuuuaaaa

SEQ ID NO: 135257 - RNA, 19 nt, Artificial Sequence
  Synthetic
acaguauucugcuuuaaaa

SEQ ID NO: 135258 - RNA, 20 nt, Artificial Sequence
  Synthetic
aacaguauucugcuuuaaaa

SEQ ID NO: 135259 - RNA, 19 nt, Artificial Sequence
  Synthetic
ugugcauguaucuuuaaaa

SEQ ID NO: 135260 - RNA, 21 nt, Artificial Sequence
  Synthetic
cgugugcauguaucuuuaaaa

SEQ ID NO: 135261 - RNA, 22 nt, Artificial Sequence
  Synthetic
acgugugcauguaucuuuaaaa

SEQ ID NO: 135262 - RNA, 23 nt, Artificial Sequence
  Synthetic
uacgugugcauguaucuuuaaaa

SEQ ID NO: 135263 - RNA, 24 nt, Artificial Sequence
  Synthetic
auacgugugcauguaucuuuaaaa

SEQ ID NO: 135264 - RNA, 18 nt, Artificial Sequence
  Synthetic
uucacaaaacuuuuaaaa

SEQ ID NO: 135265 - RNA, 19 nt, Artificial Sequence
  Synthetic
auucacaaaacuuuuaaaa

SEQ ID NO: 135266 - RNA, 20 nt, Artificial Sequence
  Synthetic
aauucacaaaacuuuuaaaa

SEQ ID NO: 135267 - RNA, 21 nt, Artificial Sequence
  Synthetic
aaauucacaaaacuuuuaaaa

SEQ ID NO: 135268 - RNA, 22 nt, Artificial Sequence
  Synthetic
uaaauucacaaaacuuuuaaaa

SEQ ID NO: 135269 - RNA, 23 nt, Artificial Sequence
  Synthetic
uuaaauucacaaaacuuuuaaaa

SEQ ID NO: 135270 - RNA, 24 nt, Artificial Sequence
  Synthetic
auuaaauucacaaaacuuuuaaaa

SEQ ID NO: 135271 - RNA, 18 nt, Artificial Sequence
  Synthetic
cacugaauaguuuuaaaa

SEQ ID NO: 135272 - RNA, 19 nt, Artificial Sequence
  Synthetic
ucacugaauaguuuuaaaa

SEQ ID NO: 135273 - RNA, 20 nt, Artificial Sequence
  Synthetic
uucacugaauaguuuuaaaa

SEQ ID NO: 135274 - RNA, 18 nt, Artificial Sequence
  Synthetic
uagaaaauaauaaacaaa

SEQ ID NO: 135275 - RNA, 19 nt, Artificial Sequence
  Synthetic
uuagaaaauaauaaacaaa

SEQ ID NO: 135276 - RNA, 20 nt, Artificial Sequence
  Synthetic
uuuagaaaauaauaaacaaa

SEQ ID NO: 135277 - RNA, 21 nt, Artificial Sequence
  Synthetic
auuuagaaaauaauaaacaaa

SEQ ID NO: 135278 - RNA, 22 nt, Artificial Sequence
  Synthetic
cauuuagaaaauaauaaacaaa

SEQ ID NO: 135279 - RNA, 23 nt, Artificial Sequence
  Synthetic
acauuuagaaaauaauaaacaaa

SEQ ID NO: 135280 - RNA, 24 nt, Artificial Sequence
  Synthetic
aacauuuagaaaauaauaaacaaa

SEQ ID NO: 135281 - RNA, 18 nt, Artificial Sequence
  Synthetic
uuauucuuuuuaaacaaa

SEQ ID NO: 135282 - RNA, 19 nt, Artificial Sequence
  Synthetic
uuuauucuuuuuaaacaaa

SEQ ID NO: 135283 - RNA, 20 nt, Artificial Sequence
  Synthetic
uuuuauucuuuuuaaacaaa

SEQ ID NO: 135284 - RNA, 22 nt, Artificial Sequence
  Synthetic
aguuuuauucuuuuuaaacaaa

SEQ ID NO: 135285 - RNA, 24 nt, Artificial Sequence
  Synthetic
ugaguuuuauucuuuuuaaacaaa

SEQ ID NO: 135286 - RNA, 21 nt, Artificial Sequence
  Synthetic
aacucauaauucaacaacaaa

SEQ ID NO: 135287 - RNA, 22 nt, Artificial Sequence
  Synthetic
aaacucauaauucaacaacaaa

SEQ ID NO: 135288 - RNA, 23 nt, Artificial Sequence
  Synthetic
aaaacucauaauucaacaacaaa

SEQ ID NO: 135289 - RNA, 24 nt, Artificial Sequence
  Synthetic
aaaaacucauaauucaacaacaaa

SEQ ID NO: 135290 - RNA, 18 nt, Artificial Sequence
  Synthetic
uaaaauuaugagaacaaa

SEQ ID NO: 135291 - RNA, 19 nt, Artificial Sequence
  Synthetic
uuaaaauuaugagaacaaa

SEQ ID NO: 135292 - RNA, 20 nt, Artificial Sequence
  Synthetic
uuuaaaauuaugagaacaaa

SEQ ID NO: 135293 - RNA, 18 nt, Artificial Sequence
  Synthetic
auuuuuauuuugaacaaa

SEQ ID NO: 135294 - RNA, 19 nt, Artificial Sequence
  Synthetic
aauuuuuauuuugaacaaa

SEQ ID NO: 135295 - RNA, 18 nt, Artificial Sequence
  Synthetic
auagugaaauaccacaaa

SEQ ID NO: 135296 - RNA, 19 nt, Artificial Sequence
  Synthetic
aauagugaaauaccacaaa

SEQ ID NO: 135297 - RNA, 20 nt, Artificial Sequence
  Synthetic
caauagugaaauaccacaaa

SEQ ID NO: 135298 - RNA, 22 nt, Artificial Sequence
  Synthetic
ugcaauagugaaauaccacaaa

SEQ ID NO: 135299 - RNA, 23 nt, Artificial Sequence
  Synthetic
cugcaauagugaaauaccacaaa

SEQ ID NO: 135300 - RNA, 24 nt, Artificial Sequence
  Synthetic
acugcaauagugaaauaccacaaa

SEQ ID NO: 135301 - RNA, 18 nt, Artificial Sequence
  Synthetic
cauauguuaggccacaaa

SEQ ID NO: 135302 - RNA, 19 nt, Artificial Sequence
  Synthetic
ucauauguuaggccacaaa

SEQ ID NO: 135303 - RNA, 20 nt, Artificial Sequence
  Synthetic
aucauauguuaggccacaaa

SEQ ID NO: 135304 - RNA, 22 nt, Artificial Sequence
  Synthetic
agaucauauguuaggccacaaa

SEQ ID NO: 135305 - RNA, 23 nt, Artificial Sequence
  Synthetic
uagaucauauguuaggccacaaa

SEQ ID NO: 135306 - RNA, 18 nt, Artificial Sequence
  Synthetic
acgccaauaauagacaaa

SEQ ID NO: 135307 - RNA, 19 nt, Artificial Sequence
  Synthetic
uacgccaauaauagacaaa

SEQ ID NO: 135308 - RNA, 20 nt, Artificial Sequence
  Synthetic
auacgccaauaauagacaaa

SEQ ID NO: 135309 - RNA, 21 nt, Artificial Sequence
  Synthetic
uauacgccaauaauagacaaa

SEQ ID NO: 135310 - RNA, 22 nt, Artificial Sequence
  Synthetic
cuauacgccaauaauagacaaa

SEQ ID NO: 135311 - RNA, 23 nt, Artificial Sequence
  Synthetic
ccuauacgccaauaauagacaaa

SEQ ID NO: 135312 - RNA, 24 nt, Artificial Sequence
  Synthetic
uccuauacgccaauaauagacaaa

SEQ ID NO: 135313 - RNA, 18 nt, Artificial Sequence
  Synthetic
acaauucaaugggacaaa

SEQ ID NO: 135314 - RNA, 19 nt, Artificial Sequence
  Synthetic
cacaauucaaugggacaaa

SEQ ID NO: 135315 - RNA, 20 nt, Artificial Sequence
  Synthetic
ucacaauucaaugggacaaa

SEQ ID NO: 135316 - RNA, 18 nt, Artificial Sequence
  Synthetic
aaagccagaauugacaaa

SEQ ID NO: 135317 - RNA, 19 nt, Artificial Sequence
  Synthetic
aaaagccagaauugacaaa

SEQ ID NO: 135318 - RNA, 20 nt, Artificial Sequence
  Synthetic
caaaagccagaauugacaaa

SEQ ID NO: 135319 - RNA, 21 nt, Artificial Sequence
  Synthetic
acaaaagccagaauugacaaa

SEQ ID NO: 135320 - RNA, 22 nt, Artificial Sequence
  Synthetic
aacaaaagccagaauugacaaa

SEQ ID NO: 135321 - RNA, 23 nt, Artificial Sequence
  Synthetic
caacaaaagccagaauugacaaa

SEQ ID NO: 135322 - RNA, 18 nt, Artificial Sequence
  Synthetic
uagagaaacacauacaaa

SEQ ID NO: 135323 - RNA, 19 nt, Artificial Sequence
  Synthetic
uuagagaaacacauacaaa

SEQ ID NO: 135324 - RNA, 20 nt, Artificial Sequence
  Synthetic
cuuagagaaacacauacaaa

SEQ ID NO: 135325 - RNA, 18 nt, Artificial Sequence
  Synthetic
caauaugaaagauacaaa

SEQ ID NO: 135326 - RNA, 18 nt, Artificial Sequence
  Synthetic
acaagaucaauauacaaa

SEQ ID NO: 135327 - RNA, 19 nt, Artificial Sequence
  Synthetic
uacaagaucaauauacaaa

SEQ ID NO: 135328 - RNA, 20 nt, Artificial Sequence
  Synthetic
auacaagaucaauauacaaa

SEQ ID NO: 135329 - RNA, 23 nt, Artificial Sequence
  Synthetic
aggauacaagaucaauauacaaa

SEQ ID NO: 135330 - RNA, 24 nt, Artificial Sequence
  Synthetic
uaggauacaagaucaauauacaaa

SEQ ID NO: 135331 - RNA, 18 nt, Artificial Sequence
  Synthetic
aauagcuuaccaaccaaa

SEQ ID NO: 135332 - RNA, 19 nt, Artificial Sequence
  Synthetic
caauagcuuaccaaccaaa

SEQ ID NO: 135333 - RNA, 20 nt, Artificial Sequence
  Synthetic
ucaauagcuuaccaaccaaa

SEQ ID NO: 135334 - RNA, 21 nt, Artificial Sequence
  Synthetic
aucaauagcuuaccaaccaaa

SEQ ID NO: 135335 - RNA, 22 nt, Artificial Sequence
  Synthetic
aaucaauagcuuaccaaccaaa

SEQ ID NO: 135336 - RNA, 23 nt, Artificial Sequence
  Synthetic
uaaucaauagcuuaccaaccaaa

SEQ ID NO: 135337 - RNA, 24 nt, Artificial Sequence
  Synthetic
auaaucaauagcuuaccaaccaaa

SEQ ID NO: 135338 - RNA, 18 nt, Artificial Sequence
  Synthetic
aggcuacaguuacccaaa

SEQ ID NO: 135339 - RNA, 19 nt, Artificial Sequence
  Synthetic
aaggcuacaguuacccaaa

SEQ ID NO: 135340 - RNA, 20 nt, Artificial Sequence
  Synthetic
uaaggcuacaguuacccaaa

SEQ ID NO: 135341 - RNA, 21 nt, Artificial Sequence
  Synthetic
auaaggcuacaguuacccaaa

SEQ ID NO: 135342 - RNA, 22 nt, Artificial Sequence
  Synthetic
uauaaggcuacaguuacccaaa

SEQ ID NO: 135343 - RNA, 23 nt, Artificial Sequence
  Synthetic
cuauaaggcuacaguuacccaaa

SEQ ID NO: 135344 - RNA, 24 nt, Artificial Sequence
  Synthetic
acuauaaggcuacaguuacccaaa

SEQ ID NO: 135345 - RNA, 18 nt, Artificial Sequence
  Synthetic
agcucaacaaaccccaaa

SEQ ID NO: 135346 - RNA, 19 nt, Artificial Sequence
  Synthetic
aagcucaacaaaccccaaa

SEQ ID NO: 135347 - RNA, 20 nt, Artificial Sequence
  Synthetic
uaagcucaacaaaccccaaa

SEQ ID NO: 135348 - RNA, 18 nt, Artificial Sequence
  Synthetic
ucaccuuggccucccaaa

SEQ ID NO: 135349 - RNA, 19 nt, Artificial Sequence
  Synthetic
cucaccuuggccucccaaa

SEQ ID NO: 135350 - RNA, 20 nt, Artificial Sequence
  Synthetic
acucaccuuggccucccaaa

SEQ ID NO: 135351 - RNA, 21 nt, Artificial Sequence
  Synthetic
cacucaccuuggccucccaaa

SEQ ID NO: 135352 - RNA, 22 nt, Artificial Sequence
  Synthetic
ccacucaccuuggccucccaaa

SEQ ID NO: 135353 - RNA, 23 nt, Artificial Sequence
  Synthetic
uccacucaccuuggccucccaaa

SEQ ID NO: 135354 - RNA, 24 nt, Artificial Sequence
  Synthetic
auccacucaccuuggccucccaaa

SEQ ID NO: 135355 - RNA, 18 nt, Artificial Sequence
  Synthetic
ugggaaaggaaagccaaa

SEQ ID NO: 135356 - RNA, 20 nt, Artificial Sequence
  Synthetic
agugggaaaggaaagccaaa

SEQ ID NO: 135357 - RNA, 18 nt, Artificial Sequence
  Synthetic
aaugacccuaucuccaaa

SEQ ID NO: 135358 - RNA, 19 nt, Artificial Sequence
  Synthetic
uaaugacccuaucuccaaa

SEQ ID NO: 135359 - RNA, 21 nt, Artificial Sequence
  Synthetic
uguaaugacccuaucuccaaa

SEQ ID NO: 135360 - RNA, 22 nt, Artificial Sequence
  Synthetic
cuguaaugacccuaucuccaaa

SEQ ID NO: 135361 - RNA, 23 nt, Artificial Sequence
  Synthetic
ucuguaaugacccuaucuccaaa

SEQ ID NO: 135362 - RNA, 24 nt, Artificial Sequence
  Synthetic
cucuguaaugacccuaucuccaaa

SEQ ID NO: 135363 - RNA, 21 nt, Artificial Sequence
  Synthetic
cuuguguucauagcaagcaaa

SEQ ID NO: 135364 - RNA, 22 nt, Artificial Sequence
  Synthetic
acuuguguucauagcaagcaaa

SEQ ID NO: 135365 - RNA, 23 nt, Artificial Sequence
  Synthetic
aacuuguguucauagcaagcaaa

SEQ ID NO: 135366 - RNA, 24 nt, Artificial Sequence
  Synthetic
aaacuuguguucauagcaagcaaa

SEQ ID NO: 135367 - RNA, 18 nt, Artificial Sequence
  Synthetic
caaaagaaaaacagcaaa

SEQ ID NO: 135368 - RNA, 19 nt, Artificial Sequence
  Synthetic
ucaaaagaaaaacagcaaa

SEQ ID NO: 135369 - RNA, 21 nt, Artificial Sequence
  Synthetic
agucaaaagaaaaacagcaaa

SEQ ID NO: 135370 - RNA, 22 nt, Artificial Sequence
  Synthetic
aagucaaaagaaaaacagcaaa

SEQ ID NO: 135371 - RNA, 23 nt, Artificial Sequence
  Synthetic
aaagucaaaagaaaaacagcaaa

SEQ ID NO: 135372 - RNA, 24 nt, Artificial Sequence
  Synthetic
caaagucaaaagaaaaacagcaaa

SEQ ID NO: 135373 - RNA, 18 nt, Artificial Sequence
  Synthetic
uggugauacucaggcaaa

SEQ ID NO: 135374 - RNA, 19 nt, Artificial Sequence
  Synthetic
cuggugauacucaggcaaa

SEQ ID NO: 135375 - RNA, 21 nt, Artificial Sequence
  Synthetic
ugcuggugauacucaggcaaa

SEQ ID NO: 135376 - RNA, 22 nt, Artificial Sequence
  Synthetic
cugcuggugauacucaggcaaa

SEQ ID NO: 135377 - RNA, 23 nt, Artificial Sequence
  Synthetic
ucugcuggugauacucaggcaaa

SEQ ID NO: 135378 - RNA, 24 nt, Artificial Sequence
  Synthetic
uucugcuggugauacucaggcaaa

SEQ ID NO: 135379 - RNA, 18 nt, Artificial Sequence
  Synthetic
aagacacagacuggcaaa

SEQ ID NO: 135380 - RNA, 19 nt, Artificial Sequence
  Synthetic
aaagacacagacuggcaaa

SEQ ID NO: 135381 - RNA, 20 nt, Artificial Sequence
  Synthetic
aaaagacacagacuggcaaa

SEQ ID NO: 135382 - RNA, 21 nt, Artificial Sequence
  Synthetic
uaaaagacacagacuggcaaa

SEQ ID NO: 135383 - RNA, 22 nt, Artificial Sequence
  Synthetic
uuaaaagacacagacuggcaaa

SEQ ID NO: 135384 - RNA, 23 nt, Artificial Sequence
  Synthetic
auuaaaagacacagacuggcaaa

SEQ ID NO: 135385 - RNA, 24 nt, Artificial Sequence
  Synthetic
aauuaaaagacacagacuggcaaa

SEQ ID NO: 135386 - RNA, 18 nt, Artificial Sequence
  Synthetic
caauaaaauacuggcaaa

SEQ ID NO: 135387 - RNA, 19 nt, Artificial Sequence
  Synthetic
ucaauaaaauacuggcaaa

SEQ ID NO: 135388 - RNA, 20 nt, Artificial Sequence
  Synthetic
cucaauaaaauacuggcaaa

SEQ ID NO: 135389 - RNA, 23 nt, Artificial Sequence
  Synthetic
auccucaauaaaauacuggcaaa

SEQ ID NO: 135390 - RNA, 24 nt, Artificial Sequence
  Synthetic
aauccucaauaaaauacuggcaaa

SEQ ID NO: 135391 - RNA, 18 nt, Artificial Sequence
  Synthetic
cucuacaaaaaaugcaaa

SEQ ID NO: 135392 - RNA, 19 nt, Artificial Sequence
  Synthetic
ucucuacaaaaaaugcaaa

SEQ ID NO: 135393 - RNA, 20 nt, Artificial Sequence
  Synthetic
aucucuacaaaaaaugcaaa

SEQ ID NO: 135394 - RNA, 21 nt, Artificial Sequence
  Synthetic
caucucuacaaaaaaugcaaa

SEQ ID NO: 135395 - RNA, 22 nt, Artificial Sequence
  Synthetic
ccaucucuacaaaaaaugcaaa

SEQ ID NO: 135396 - RNA, 23 nt, Artificial Sequence
  Synthetic
cccaucucuacaaaaaaugcaaa

SEQ ID NO: 135397 - RNA, 24 nt, Artificial Sequence
  Synthetic
ccccaucucuacaaaaaaugcaaa

SEQ ID NO: 135398 - RNA, 18 nt, Artificial Sequence
  Synthetic
aguguccucaucugcaaa

SEQ ID NO: 135399 - RNA, 19 nt, Artificial Sequence
  Synthetic
caguguccucaucugcaaa

SEQ ID NO: 135400 - RNA, 20 nt, Artificial Sequence
  Synthetic
ucaguguccucaucugcaaa

SEQ ID NO: 135401 - RNA, 21 nt, Artificial Sequence
  Synthetic
cucaguguccucaucugcaaa

SEQ ID NO: 135402 - RNA, 22 nt, Artificial Sequence
  Synthetic
ccucaguguccucaucugcaaa

SEQ ID NO: 135403 - RNA, 24 nt, Artificial Sequence
  Synthetic
agccucaguguccucaucugcaaa

SEQ ID NO: 135404 - RNA, 18 nt, Artificial Sequence
  Synthetic
aguuuucucauuugcaaa

SEQ ID NO: 135405 - RNA, 19 nt, Artificial Sequence
  Synthetic
caguuuucucauuugcaaa

SEQ ID NO: 135406 - RNA, 20 nt, Artificial Sequence
  Synthetic
ucaguuuucucauuugcaaa

SEQ ID NO: 135407 - RNA, 21 nt, Artificial Sequence
  Synthetic
cucaguuuucucauuugcaaa

SEQ ID NO: 135408 - RNA, 22 nt, Artificial Sequence
  Synthetic
ucucaguuuucucauuugcaaa

SEQ ID NO: 135409 - RNA, 24 nt, Artificial Sequence
  Synthetic
agucucaguuuucucauuugcaaa

SEQ ID NO: 135410 - RNA, 18 nt, Artificial Sequence
  Synthetic
aaaagauaugugaucaaa

SEQ ID NO: 135411 - RNA, 21 nt, Artificial Sequence
  Synthetic
aggaaaagauaugugaucaaa

SEQ ID NO: 135412 - RNA, 22 nt, Artificial Sequence
  Synthetic
aaggaaaagauaugugaucaaa

SEQ ID NO: 135413 - RNA, 19 nt, Artificial Sequence
  Synthetic
uggggagauguugaucaaa

SEQ ID NO: 135414 - RNA, 20 nt, Artificial Sequence
  Synthetic
auggggagauguugaucaaa

SEQ ID NO: 135415 - RNA, 21 nt, Artificial Sequence
  Synthetic
aauggggagauguugaucaaa

SEQ ID NO: 135416 - RNA, 22 nt, Artificial Sequence
  Synthetic
aaauggggagauguugaucaaa

SEQ ID NO: 135417 - RNA, 23 nt, Artificial Sequence
  Synthetic
aaaauggggagauguugaucaaa

SEQ ID NO: 135418 - RNA, 18 nt, Artificial Sequence
  Synthetic
auucacaauugcuucaaa

SEQ ID NO: 135419 - RNA, 19 nt, Artificial Sequence
  Synthetic
cauucacaauugcuucaaa

SEQ ID NO: 135420 - RNA, 20 nt, Artificial Sequence
  Synthetic
ccauucacaauugcuucaaa

SEQ ID NO: 135421 - RNA, 21 nt, Artificial Sequence
  Synthetic
cccauucacaauugcuucaaa

SEQ ID NO: 135422 - RNA, 22 nt, Artificial Sequence
  Synthetic
ucccauucacaauugcuucaaa

SEQ ID NO: 135423 - RNA, 23 nt, Artificial Sequence
  Synthetic
uucccauucacaauugcuucaaa

SEQ ID NO: 135424 - RNA, 24 nt, Artificial Sequence
  Synthetic
auucccauucacaauugcuucaaa

SEQ ID NO: 135425 - RNA, 18 nt, Artificial Sequence
  Synthetic
aaaagagaagguuucaaa

SEQ ID NO: 135426 - RNA, 19 nt, Artificial Sequence
  Synthetic
caaaagagaagguuucaaa

SEQ ID NO: 135427 - RNA, 20 nt, Artificial Sequence
  Synthetic
ucaaaagagaagguuucaaa

SEQ ID NO: 135428 - RNA, 18 nt, Artificial Sequence
  Synthetic
cuugugccaguuuucaaa

SEQ ID NO: 135429 - RNA, 19 nt, Artificial Sequence
  Synthetic
ucuugugccaguuuucaaa

SEQ ID NO: 135430 - RNA, 21 nt, Artificial Sequence
  Synthetic
ugucuugugccaguuuucaaa

SEQ ID NO: 135431 - RNA, 22 nt, Artificial Sequence
  Synthetic
cugucuugugccaguuuucaaa

SEQ ID NO: 135432 - RNA, 23 nt, Artificial Sequence
  Synthetic
ccugucuugugccaguuuucaaa

SEQ ID NO: 135433 - RNA, 24 nt, Artificial Sequence
  Synthetic
cccugucuugugccaguuuucaaa

SEQ ID NO: 135434 - RNA, 22 nt, Artificial Sequence
  Synthetic
uugucuugugccaguuuucaaa

SEQ ID NO: 135435 - RNA, 23 nt, Artificial Sequence
  Synthetic
cuugucuugugccaguuuucaaa

SEQ ID NO: 135436 - RNA, 24 nt, Artificial Sequence
  Synthetic
ccuugucuugugccaguuuucaaa

SEQ ID NO: 135437 - RNA, 18 nt, Artificial Sequence
  Synthetic
aaaaaaaaagaaaagaaa

SEQ ID NO: 135438 - RNA, 19 nt, Artificial Sequence
  Synthetic
aaaaaaaaaagaaaagaaa

SEQ ID NO: 135439 - RNA, 20 nt, Artificial Sequence
  Synthetic
aaaaaaaaaaagaaaagaaa

SEQ ID NO: 135440 - RNA, 21 nt, Artificial Sequence
  Synthetic
aaaaaaaaaaaagaaaagaaa

SEQ ID NO: 135441 - RNA, 22 nt, Artificial Sequence
  Synthetic
aaaaaaaaaaaaagaaaagaaa

SEQ ID NO: 135442 - RNA, 23 nt, Artificial Sequence
  Synthetic
aaaaaaaaaaaaaagaaaagaaa

SEQ ID NO: 135443 - RNA, 24 nt, Artificial Sequence
  Synthetic
aaaaaaaaaaaaaaagaaaagaaa

SEQ ID NO: 135444 - RNA, 19 nt, Artificial Sequence
  Synthetic
ugauuaccucuaaaagaaa

SEQ ID NO: 135445 - RNA, 18 nt, Artificial Sequence
  Synthetic
ucaaaaaauacaaagaaa

SEQ ID NO: 135446 - RNA, 19 nt, Artificial Sequence
  Synthetic
aucaaaaaauacaaagaaa

SEQ ID NO: 135447 - RNA, 20 nt, Artificial Sequence
  Synthetic
caucaaaaaauacaaagaaa

SEQ ID NO: 135448 - RNA, 19 nt, Artificial Sequence
  Synthetic
uggguaauuuacaaagaaa

SEQ ID NO: 135449 - RNA, 20 nt, Artificial Sequence
  Synthetic
auggguaauuuacaaagaaa

SEQ ID NO: 135450 - RNA, 21 nt, Artificial Sequence
  Synthetic
aauggguaauuuacaaagaaa

SEQ ID NO: 135451 - RNA, 22 nt, Artificial Sequence
  Synthetic
aaauggguaauuuacaaagaaa

SEQ ID NO: 135452 - RNA, 23 nt, Artificial Sequence
  Synthetic
aaaauggguaauuuacaaagaaa

SEQ ID NO: 135453 - RNA, 18 nt, Artificial Sequence
  Synthetic
uuccagaaaccaaagaaa

SEQ ID NO: 135454 - RNA, 20 nt, Artificial Sequence
  Synthetic
aguuccagaaaccaaagaaa

SEQ ID NO: 135455 - RNA, 18 nt, Artificial Sequence
  Synthetic
auucauaauauaaagaaa

SEQ ID NO: 135456 - RNA, 19 nt, Artificial Sequence
  Synthetic
uauucauaauauaaagaaa

SEQ ID NO: 135457 - RNA, 18 nt, Artificial Sequence
  Synthetic
aaugaaaauuuaaagaaa

SEQ ID NO: 135458 - RNA, 19 nt, Artificial Sequence
  Synthetic
aaaugaaaauuuaaagaaa

SEQ ID NO: 135459 - RNA, 20 nt, Artificial Sequence
  Synthetic
aaaaugaaaauuuaaagaaa

SEQ ID NO: 135460 - RNA, 21 nt, Artificial Sequence
  Synthetic
uaaaaugaaaauuuaaagaaa

SEQ ID NO: 135461 - RNA, 24 nt, Artificial Sequence
  Synthetic
agguaaaaugaaaauuuaaagaaa

SEQ ID NO: 135462 - RNA, 18 nt, Artificial Sequence
  Synthetic
uagaccuauaacaagaaa

SEQ ID NO: 135463 - RNA, 19 nt, Artificial Sequence
  Synthetic
auagaccuauaacaagaaa

SEQ ID NO: 135464 - RNA, 22 nt, Artificial Sequence
  Synthetic
uggauagaccuauaacaagaaa

SEQ ID NO: 135465 - RNA, 23 nt, Artificial Sequence
  Synthetic
cuggauagaccuauaacaagaaa

SEQ ID NO: 135466 - RNA, 24 nt, Artificial Sequence
  Synthetic
ccuggauagaccuauaacaagaaa

SEQ ID NO: 135467 - RNA, 18 nt, Artificial Sequence
  Synthetic
ccuuguggggacaagaaa

SEQ ID NO: 135468 - RNA, 19 nt, Artificial Sequence
  Synthetic
uccuuguggggacaagaaa

SEQ ID NO: 135469 - RNA, 20 nt, Artificial Sequence
  Synthetic
auccuuguggggacaagaaa

SEQ ID NO: 135470 - RNA, 19 nt, Artificial Sequence
  Synthetic
ugcuuugggcugcaagaaa

SEQ ID NO: 135471 - RNA, 20 nt, Artificial Sequence
  Synthetic
augcuuugggcugcaagaaa

SEQ ID NO: 135472 - RNA, 22 nt, Artificial Sequence
  Synthetic
agaugcuuugggcugcaagaaa

SEQ ID NO: 135473 - RNA, 23 nt, Artificial Sequence
  Synthetic
aagaugcuuugggcugcaagaaa

SEQ ID NO: 135474 - RNA, 24 nt, Artificial Sequence
  Synthetic
uaagaugcuuugggcugcaagaaa

SEQ ID NO: 135475 - RNA, 21 nt, Artificial Sequence
  Synthetic
agggaggaaguaaggaagaaa

SEQ ID NO: 135476 - RNA, 22 nt, Artificial Sequence
  Synthetic
aagggaggaaguaaggaagaaa

SEQ ID NO: 135477 - RNA, 19 nt, Artificial Sequence
  Synthetic
agacuaaaccaggaagaaa

SEQ ID NO: 135478 - RNA, 20 nt, Artificial Sequence
  Synthetic
aagacuaaaccaggaagaaa

SEQ ID NO: 135479 - RNA, 21 nt, Artificial Sequence
  Synthetic
caagacuaaaccaggaagaaa

SEQ ID NO: 135480 - RNA, 22 nt, Artificial Sequence
  Synthetic
ccaagacuaaaccaggaagaaa

SEQ ID NO: 135481 - RNA, 23 nt, Artificial Sequence
  Synthetic
cccaagacuaaaccaggaagaaa

SEQ ID NO: 135482 - RNA, 24 nt, Artificial Sequence
  Synthetic
ucccaagacuaaaccaggaagaaa

SEQ ID NO: 135483 - RNA, 18 nt, Artificial Sequence
  Synthetic
uucuuagaacugaagaaa

SEQ ID NO: 135484 - RNA, 19 nt, Artificial Sequence
  Synthetic
uuucuuagaacugaagaaa

SEQ ID NO: 135485 - RNA, 20 nt, Artificial Sequence
  Synthetic
uuuucuuagaacugaagaaa

SEQ ID NO: 135486 - RNA, 18 nt, Artificial Sequence
  Synthetic
cauggguagaauaagaaa

SEQ ID NO: 135487 - RNA, 19 nt, Artificial Sequence
  Synthetic
ucauggguagaauaagaaa

SEQ ID NO: 135488 - RNA, 20 nt, Artificial Sequence
  Synthetic
aucauggguagaauaagaaa

SEQ ID NO: 135489 - RNA, 18 nt, Artificial Sequence
  Synthetic
uaguaauauauuaagaaa

SEQ ID NO: 135490 - RNA, 20 nt, Artificial Sequence
  Synthetic
uguaguaauauauuaagaaa

SEQ ID NO: 135491 - RNA, 18 nt, Artificial Sequence
  Synthetic
uaaucacauuuacagaaa

SEQ ID NO: 135492 - RNA, 19 nt, Artificial Sequence
  Synthetic
auaaucacauuuacagaaa

SEQ ID NO: 135493 - RNA, 20 nt, Artificial Sequence
  Synthetic
aauaaucacauuuacagaaa

SEQ ID NO: 135494 - RNA, 18 nt, Artificial Sequence
  Synthetic
uuuauuuuuacccagaaa

SEQ ID NO: 135495 - RNA, 19 nt, Artificial Sequence
  Synthetic
auuuauuuuuacccagaaa

SEQ ID NO: 135496 - RNA, 20 nt, Artificial Sequence
  Synthetic
aauuuauuuuuacccagaaa

SEQ ID NO: 135497 - RNA, 21 nt, Artificial Sequence
  Synthetic
cagagaagcucuaggcagaaa

SEQ ID NO: 135498 - RNA, 24 nt, Artificial Sequence
  Synthetic
aggcagagaagcucuaggcagaaa

SEQ ID NO: 135499 - RNA, 18 nt, Artificial Sequence
  Synthetic
ugaauuucuccucagaaa

SEQ ID NO: 135500 - RNA, 19 nt, Artificial Sequence
  Synthetic
uugaauuucuccucagaaa

SEQ ID NO: 135501 - RNA, 20 nt, Artificial Sequence
  Synthetic
auugaauuucuccucagaaa

SEQ ID NO: 135502 - RNA, 22 nt, Artificial Sequence
  Synthetic
agauugaauuucuccucagaaa

SEQ ID NO: 135503 - RNA, 23 nt, Artificial Sequence
  Synthetic
cagauugaauuucuccucagaaa

SEQ ID NO: 135504 - RNA, 24 nt, Artificial Sequence
  Synthetic
ucagauugaauuucuccucagaaa

SEQ ID NO: 135505 - RNA, 18 nt, Artificial Sequence
  Synthetic
agggcgaaaaaagagaaa

SEQ ID NO: 135506 - RNA, 19 nt, Artificial Sequence
  Synthetic
cagggcgaaaaaagagaaa

SEQ ID NO: 135507 - RNA, 20 nt, Artificial Sequence
  Synthetic
acagggcgaaaaaagagaaa

SEQ ID NO: 135508 - RNA, 18 nt, Artificial Sequence
  Synthetic
auuacacauccagagaaa

SEQ ID NO: 135509 - RNA, 19 nt, Artificial Sequence
  Synthetic
cauuacacauccagagaaa

SEQ ID NO: 135510 - RNA, 20 nt, Artificial Sequence
  Synthetic
ucauuacacauccagagaaa

SEQ ID NO: 135511 - RNA, 21 nt, Artificial Sequence
  Synthetic
uucauuacacauccagagaaa

SEQ ID NO: 135512 - RNA, 22 nt, Artificial Sequence
  Synthetic
uuucauuacacauccagagaaa

SEQ ID NO: 135513 - RNA, 23 nt, Artificial Sequence
  Synthetic
cuuucauuacacauccagagaaa

SEQ ID NO: 135514 - RNA, 24 nt, Artificial Sequence
  Synthetic
ucuuucauuacacauccagagaaa

SEQ ID NO: 135515 - RNA, 21 nt, Artificial Sequence
  Synthetic
aggaaaagaguugcagagaaa

SEQ ID NO: 135516 - RNA, 23 nt, Artificial Sequence
  Synthetic
agaggaaaagaguugcagagaaa

SEQ ID NO: 135517 - RNA, 18 nt, Artificial Sequence
  Synthetic
ucuucagaggaggagaaa

SEQ ID NO: 135518 - RNA, 20 nt, Artificial Sequence
  Synthetic
agucuucagaggaggagaaa

SEQ ID NO: 135519 - RNA, 18 nt, Artificial Sequence
  Synthetic
agaugggauugggagaaa

SEQ ID NO: 135520 - RNA, 19 nt, Artificial Sequence
  Synthetic
aagaugggauugggagaaa

SEQ ID NO: 135521 - RNA, 18 nt, Artificial Sequence
  Synthetic
agcaaggauguggagaaa

SEQ ID NO: 135522 - RNA, 19 nt, Artificial Sequence
  Synthetic
uagcaaggauguggagaaa

SEQ ID NO: 135523 - RNA, 20 nt, Artificial Sequence
  Synthetic
cuagcaaggauguggagaaa

SEQ ID NO: 135524 - RNA, 22 nt, Artificial Sequence
  Synthetic
ugcuagcaaggauguggagaaa

SEQ ID NO: 135525 - RNA, 23 nt, Artificial Sequence
  Synthetic
augcuagcaaggauguggagaaa

SEQ ID NO: 135526 - RNA, 18 nt, Artificial Sequence
  Synthetic
aauuuucacaucuagaaa

SEQ ID NO: 135527 - RNA, 19 nt, Artificial Sequence
  Synthetic
aaauuuucacaucuagaaa

SEQ ID NO: 135528 - RNA, 20 nt, Artificial Sequence
  Synthetic
aaaauuuucacaucuagaaa

SEQ ID NO: 135529 - RNA, 21 nt, Artificial Sequence
  Synthetic
aaaaauuuucacaucuagaaa

SEQ ID NO: 135530 - RNA, 22 nt, Artificial Sequence
  Synthetic
aaaaaauuuucacaucuagaaa

SEQ ID NO: 135531 - RNA, 23 nt, Artificial Sequence
  Synthetic
aaaaaaauuuucacaucuagaaa

SEQ ID NO: 135532 - RNA, 24 nt, Artificial Sequence
  Synthetic
uaaaaaaauuuucacaucuagaaa

SEQ ID NO: 135533 - RNA, 18 nt, Artificial Sequence
  Synthetic
uuguauuuuugguagaaa

SEQ ID NO: 135534 - RNA, 19 nt, Artificial Sequence
  Synthetic
uuuguauuuuugguagaaa

SEQ ID NO: 135535 - RNA, 20 nt, Artificial Sequence
  Synthetic
uuuuguauuuuugguagaaa

SEQ ID NO: 135536 - RNA, 21 nt, Artificial Sequence
  Synthetic
uuuuuguauuuuugguagaaa

SEQ ID NO: 135537 - RNA, 22 nt, Artificial Sequence
  Synthetic
uuuuuuguauuuuugguagaaa

SEQ ID NO: 135538 - RNA, 23 nt, Artificial Sequence
  Synthetic
auuuuuuguauuuuugguagaaa

SEQ ID NO: 135539 - RNA, 24 nt, Artificial Sequence
  Synthetic
aauuuuuuguauuuuugguagaaa

SEQ ID NO: 135540 - RNA, 18 nt, Artificial Sequence
  Synthetic
ugugaccuuauguagaaa

SEQ ID NO: 135541 - RNA, 19 nt, Artificial Sequence
  Synthetic
augugaccuuauguagaaa

SEQ ID NO: 135542 - RNA, 20 nt, Artificial Sequence
  Synthetic
aaugugaccuuauguagaaa

SEQ ID NO: 135543 - RNA, 21 nt, Artificial Sequence
  Synthetic
aaaugugaccuuauguagaaa

SEQ ID NO: 135544 - RNA, 22 nt, Artificial Sequence
  Synthetic
caaaugugaccuuauguagaaa

SEQ ID NO: 135545 - RNA, 24 nt, Artificial Sequence
  Synthetic
ugcaaaugugaccuuauguagaaa

SEQ ID NO: 135546 - RNA, 18 nt, Artificial Sequence
  Synthetic
uuguauuuucuguagaaa

SEQ ID NO: 135547 - RNA, 19 nt, Artificial Sequence
  Synthetic
uuuguauuuucuguagaaa

SEQ ID NO: 135548 - RNA, 20 nt, Artificial Sequence
  Synthetic
uuuuguauuuucuguagaaa

SEQ ID NO: 135549 - RNA, 21 nt, Artificial Sequence
  Synthetic
uuuuuguauuuucuguagaaa

SEQ ID NO: 135550 - RNA, 22 nt, Artificial Sequence
  Synthetic
cuuuuuguauuuucuguagaaa

SEQ ID NO: 135551 - RNA, 23 nt, Artificial Sequence
  Synthetic
acuuuuuguauuuucuguagaaa

SEQ ID NO: 135552 - RNA, 24 nt, Artificial Sequence
  Synthetic
uacuuuuuguauuuucuguagaaa

SEQ ID NO: 135553 - RNA, 18 nt, Artificial Sequence
  Synthetic
aaaacuuacaaaaggaaa

SEQ ID NO: 135554 - RNA, 19 nt, Artificial Sequence
  Synthetic
caaaacuuacaaaaggaaa

SEQ ID NO: 135555 - RNA, 20 nt, Artificial Sequence
  Synthetic
acaaaacuuacaaaaggaaa

SEQ ID NO: 135556 - RNA, 18 nt, Artificial Sequence
  Synthetic
cauuuuuucaaaaggaaa

SEQ ID NO: 135557 - RNA, 19 nt, Artificial Sequence
  Synthetic
acauuuuuucaaaaggaaa

SEQ ID NO: 135558 - RNA, 20 nt, Artificial Sequence
  Synthetic
cacauuuuuucaaaaggaaa

SEQ ID NO: 135559 - RNA, 21 nt, Artificial Sequence
  Synthetic
acacauuuuuucaaaaggaaa

SEQ ID NO: 135560 - RNA, 22 nt, Artificial Sequence
  Synthetic
aacacauuuuuucaaaaggaaa

SEQ ID NO: 135561 - RNA, 23 nt, Artificial Sequence
  Synthetic
aaacacauuuuuucaaaaggaaa

SEQ ID NO: 135562 - RNA, 18 nt, Artificial Sequence
  Synthetic
ugaagaaugccaaggaaa

SEQ ID NO: 135563 - RNA, 20 nt, Artificial Sequence
  Synthetic
ugugaagaaugccaaggaaa

SEQ ID NO: 135564 - RNA, 18 nt, Artificial Sequence
  Synthetic
agauaugggauaaggaaa

SEQ ID NO: 135565 - RNA, 19 nt, Artificial Sequence
  Synthetic
cagauaugggauaaggaaa

SEQ ID NO: 135566 - RNA, 20 nt, Artificial Sequence
  Synthetic
ucagauaugggauaaggaaa

SEQ ID NO: 135567 - RNA, 20 nt, Artificial Sequence
  Synthetic
ugggucauuuauacaggaaa

SEQ ID NO: 135568 - RNA, 21 nt, Artificial Sequence
  Synthetic
cugggucauuuauacaggaaa

SEQ ID NO: 135569 - RNA, 22 nt, Artificial Sequence
  Synthetic
acugggucauuuauacaggaaa

SEQ ID NO: 135570 - RNA, 24 nt, Artificial Sequence
  Synthetic
agacugggucauuuauacaggaaa

SEQ ID NO: 135571 - RNA, 18 nt, Artificial Sequence
  Synthetic
cagggagauagcaggaaa

SEQ ID NO: 135572 - RNA, 19 nt, Artificial Sequence
  Synthetic
ucagggagauagcaggaaa

SEQ ID NO: 135573 - RNA, 18 nt, Artificial Sequence
  Synthetic
aaaguaaauuucaggaaa

SEQ ID NO: 135574 - RNA, 19 nt, Artificial Sequence
  Synthetic
uaaaguaaauuucaggaaa

SEQ ID NO: 135575 - RNA, 20 nt, Artificial Sequence
  Synthetic
uuaaaguaaauuucaggaaa

SEQ ID NO: 135576 - RNA, 20 nt, Artificial Sequence
  Synthetic
agguggaaaaagaagggaaa

SEQ ID NO: 135577 - RNA, 18 nt, Artificial Sequence
  Synthetic
caugaguuuucugggaaa

SEQ ID NO: 135578 - RNA, 19 nt, Artificial Sequence
  Synthetic
ucaugaguuuucugggaaa

SEQ ID NO: 135579 - RNA, 20 nt, Artificial Sequence
  Synthetic
uucaugaguuuucugggaaa

SEQ ID NO: 135580 - RNA, 21 nt, Artificial Sequence
  Synthetic
auucaugaguuuucugggaaa

SEQ ID NO: 135581 - RNA, 22 nt, Artificial Sequence
  Synthetic
uauucaugaguuuucugggaaa

SEQ ID NO: 135582 - RNA, 23 nt, Artificial Sequence
  Synthetic
uuauucaugaguuuucugggaaa

SEQ ID NO: 135583 - RNA, 24 nt, Artificial Sequence
  Synthetic
auuauucaugaguuuucugggaaa

SEQ ID NO: 135584 - RNA, 18 nt, Artificial Sequence
  Synthetic
aagagaauucaauggaaa

SEQ ID NO: 135585 - RNA, 19 nt, Artificial Sequence
  Synthetic
caagagaauucaauggaaa

SEQ ID NO: 135586 - RNA, 20 nt, Artificial Sequence
  Synthetic
ccaagagaauucaauggaaa

SEQ ID NO: 135587 - RNA, 21 nt, Artificial Sequence
  Synthetic
accaagagaauucaauggaaa

SEQ ID NO: 135588 - RNA, 22 nt, Artificial Sequence
  Synthetic
uaccaagagaauucaauggaaa

SEQ ID NO: 135589 - RNA, 18 nt, Artificial Sequence
  Synthetic
aguaaguauauauggaaa

SEQ ID NO: 135590 - RNA, 19 nt, Artificial Sequence
  Synthetic
aaguaaguauauauggaaa

SEQ ID NO: 135591 - RNA, 20 nt, Artificial Sequence
  Synthetic
aaaguaaguauauauggaaa

SEQ ID NO: 135592 - RNA, 21 nt, Artificial Sequence
  Synthetic
aaaaguaaguauauauggaaa

SEQ ID NO: 135593 - RNA, 22 nt, Artificial Sequence
  Synthetic
aaaaaguaaguauauauggaaa

SEQ ID NO: 135594 - RNA, 23 nt, Artificial Sequence
  Synthetic
aaaaaaguaaguauauauggaaa

SEQ ID NO: 135595 - RNA, 24 nt, Artificial Sequence
  Synthetic
aaaaaaaguaaguauauauggaaa

SEQ ID NO: 135596 - RNA, 18 nt, Artificial Sequence
  Synthetic
aaacuuaaaaucuggaaa

SEQ ID NO: 135597 - RNA, 19 nt, Artificial Sequence
  Synthetic
aaaacuuaaaaucuggaaa

SEQ ID NO: 135598 - RNA, 20 nt, Artificial Sequence
  Synthetic
uaaaacuuaaaaucuggaaa

SEQ ID NO: 135599 - RNA, 21 nt, Artificial Sequence
  Synthetic
auaaaacuuaaaaucuggaaa

SEQ ID NO: 135600 - RNA, 22 nt, Artificial Sequence
  Synthetic
uauaaaacuuaaaaucuggaaa

SEQ ID NO: 135601 - RNA, 23 nt, Artificial Sequence
  Synthetic
uuauaaaacuuaaaaucuggaaa

SEQ ID NO: 135602 - RNA, 24 nt, Artificial Sequence
  Synthetic
auuauaaaacuuaaaaucuggaaa

SEQ ID NO: 135603 - RNA, 18 nt, Artificial Sequence
  Synthetic
agaaaagaggucuggaaa

SEQ ID NO: 135604 - RNA, 19 nt, Artificial Sequence
  Synthetic
aagaaaagaggucuggaaa

SEQ ID NO: 135605 - RNA, 22 nt, Artificial Sequence
  Synthetic
uggaagaaaagaggucuggaaa

SEQ ID NO: 135606 - RNA, 23 nt, Artificial Sequence
  Synthetic
uuggaagaaaagaggucuggaaa

SEQ ID NO: 135607 - RNA, 24 nt, Artificial Sequence
  Synthetic
uuuggaagaaaagaggucuggaaa

SEQ ID NO: 135608 - RNA, 18 nt, Artificial Sequence
  Synthetic
aauuuucucuucuggaaa

SEQ ID NO: 135609 - RNA, 19 nt, Artificial Sequence
  Synthetic
uaauuuucucuucuggaaa

SEQ ID NO: 135610 - RNA, 20 nt, Artificial Sequence
  Synthetic
uuaauuuucucuucuggaaa

SEQ ID NO: 135611 - RNA, 21 nt, Artificial Sequence
  Synthetic
cuuaauuuucucuucuggaaa

SEQ ID NO: 135612 - RNA, 22 nt, Artificial Sequence
  Synthetic
ccuuaauuuucucuucuggaaa

SEQ ID NO: 135613 - RNA, 23 nt, Artificial Sequence
  Synthetic
accuuaauuuucucuucuggaaa

SEQ ID NO: 135614 - RNA, 21 nt, Artificial Sequence
  Synthetic
cuggaauacguggcuuggaaa

SEQ ID NO: 135615 - RNA, 22 nt, Artificial Sequence
  Synthetic
acuggaauacguggcuuggaaa

SEQ ID NO: 135616 - RNA, 23 nt, Artificial Sequence
  Synthetic
aacuggaauacguggcuuggaaa

SEQ ID NO: 135617 - RNA, 18 nt, Artificial Sequence
  Synthetic
cucauagaccaaaugaaa

SEQ ID NO: 135618 - RNA, 19 nt, Artificial Sequence
  Synthetic
acucauagaccaaaugaaa

SEQ ID NO: 135619 - RNA, 18 nt, Artificial Sequence
  Synthetic
acauauagaucaaugaaa

SEQ ID NO: 135620 - RNA, 20 nt, Artificial Sequence
  Synthetic
agacauauagaucaaugaaa

SEQ ID NO: 135621 - RNA, 21 nt, Artificial Sequence
  Synthetic
uagacauauagaucaaugaaa

SEQ ID NO: 135622 - RNA, 22 nt, Artificial Sequence
  Synthetic
auagacauauagaucaaugaaa

SEQ ID NO: 135623 - RNA, 23 nt, Artificial Sequence
  Synthetic
aauagacauauagaucaaugaaa

SEQ ID NO: 135624 - RNA, 18 nt, Artificial Sequence
  Synthetic
uacuauguggccaugaaa

SEQ ID NO: 135625 - RNA, 19 nt, Artificial Sequence
  Synthetic
auacuauguggccaugaaa

SEQ ID NO: 135626 - RNA, 20 nt, Artificial Sequence
  Synthetic
aauacuauguggccaugaaa

SEQ ID NO: 135627 - RNA, 23 nt, Artificial Sequence
  Synthetic
uggaauacuauguggccaugaaa

SEQ ID NO: 135628 - RNA, 24 nt, Artificial Sequence
  Synthetic
auggaauacuauguggccaugaaa

SEQ ID NO: 135629 - RNA, 18 nt, Artificial Sequence
  Synthetic
agauaucaaaagaugaaa

SEQ ID NO: 135630 - RNA, 19 nt, Artificial Sequence
  Synthetic
aagauaucaaaagaugaaa

SEQ ID NO: 135631 - RNA, 19 nt, Artificial Sequence
  Synthetic
uguaacagaauaccugaaa

SEQ ID NO: 135632 - RNA, 20 nt, Artificial Sequence
  Synthetic
uuguaacagaauaccugaaa

SEQ ID NO: 135633 - RNA, 21 nt, Artificial Sequence
  Synthetic
cuuguaacagaauaccugaaa

SEQ ID NO: 135634 - RNA, 23 nt, Artificial Sequence
  Synthetic
ugcuuguaacagaauaccugaaa

SEQ ID NO: 135635 - RNA, 24 nt, Artificial Sequence
  Synthetic
uugcuuguaacagaauaccugaaa

SEQ ID NO: 135636 - RNA, 18 nt, Artificial Sequence
  Synthetic
auauguagaaagcugaaa

SEQ ID NO: 135637 - RNA, 19 nt, Artificial Sequence
  Synthetic
cauauguagaaagcugaaa

SEQ ID NO: 135638 - RNA, 20 nt, Artificial Sequence
  Synthetic
ccauauguagaaagcugaaa

SEQ ID NO: 135639 - RNA, 22 nt, Artificial Sequence
  Synthetic
agccauauguagaaagcugaaa

SEQ ID NO: 135640 - RNA, 23 nt, Artificial Sequence
  Synthetic
uagccauauguagaaagcugaaa

SEQ ID NO: 135641 - RNA, 24 nt, Artificial Sequence
  Synthetic
cuagccauauguagaaagcugaaa

SEQ ID NO: 135642 - RNA, 19 nt, Artificial Sequence
  Synthetic
aggcuuugauagggugaaa

SEQ ID NO: 135643 - RNA, 20 nt, Artificial Sequence
  Synthetic
aaggcuuugauagggugaaa

SEQ ID NO: 135644 - RNA, 18 nt, Artificial Sequence
  Synthetic
uuugagauuacugugaaa

SEQ ID NO: 135645 - RNA, 19 nt, Artificial Sequence
  Synthetic
uuuugagauuacugugaaa

SEQ ID NO: 135646 - RNA, 20 nt, Artificial Sequence
  Synthetic
uuuuugagauuacugugaaa

SEQ ID NO: 135647 - RNA, 21 nt, Artificial Sequence
  Synthetic
cuuuuugagauuacugugaaa

SEQ ID NO: 135648 - RNA, 24 nt, Artificial Sequence
  Synthetic
aggcuuuuugagauuacugugaaa

SEQ ID NO: 135649 - RNA, 18 nt, Artificial Sequence
  Synthetic
aauggaaaauccuugaaa

SEQ ID NO: 135650 - RNA, 19 nt, Artificial Sequence
  Synthetic
caauggaaaauccuugaaa

SEQ ID NO: 135651 - RNA, 20 nt, Artificial Sequence
  Synthetic
acaauggaaaauccuugaaa

SEQ ID NO: 135652 - RNA, 18 nt, Artificial Sequence
  Synthetic
agagcagaaauuuugaaa

SEQ ID NO: 135653 - RNA, 19 nt, Artificial Sequence
  Synthetic
aagagcagaaauuuugaaa

SEQ ID NO: 135654 - RNA, 20 nt, Artificial Sequence
  Synthetic
uaagagcagaaauuuugaaa

SEQ ID NO: 135655 - RNA, 18 nt, Artificial Sequence
  Synthetic
uccaaaaauauuuugaaa

SEQ ID NO: 135656 - RNA, 19 nt, Artificial Sequence
  Synthetic
auccaaaaauauuuugaaa

SEQ ID NO: 135657 - RNA, 20 nt, Artificial Sequence
  Synthetic
uauccaaaaauauuuugaaa

SEQ ID NO: 135658 - RNA, 18 nt, Artificial Sequence
  Synthetic
uuuuuuuuuuuuuugaaa

SEQ ID NO: 135659 - RNA, 19 nt, Artificial Sequence
  Synthetic
auuuuuuuuuuuuuugaaa

SEQ ID NO: 135660 - RNA, 20 nt, Artificial Sequence
  Synthetic
aauuuuuuuuuuuuuugaaa

SEQ ID NO: 135661 - RNA, 21 nt, Artificial Sequence
  Synthetic
uaauuuuuuuuuuuuuugaaa

SEQ ID NO: 135662 - RNA, 22 nt, Artificial Sequence
  Synthetic
cuaauuuuuuuuuuuuuugaaa

SEQ ID NO: 135663 - RNA, 23 nt, Artificial Sequence
  Synthetic
ccuaauuuuuuuuuuuuuugaaa

SEQ ID NO: 135664 - RNA, 24 nt, Artificial Sequence
  Synthetic
accuaauuuuuuuuuuuuuugaaa

SEQ ID NO: 135665 - RNA, 18 nt, Artificial Sequence
  Synthetic
uaaacacaaagaaauaaa

SEQ ID NO: 135666 - RNA, 19 nt, Artificial Sequence
  Synthetic
auaaacacaaagaaauaaa

SEQ ID NO: 135667 - RNA, 20 nt, Artificial Sequence
  Synthetic
aauaaacacaaagaaauaaa

SEQ ID NO: 135668 - RNA, 21 nt, Artificial Sequence
  Synthetic
aaauaaacacaaagaaauaaa

SEQ ID NO: 135669 - RNA, 22 nt, Artificial Sequence
  Synthetic
aaaauaaacacaaagaaauaaa

SEQ ID NO: 135670 - RNA, 24 nt, Artificial Sequence
  Synthetic
ugaaaauaaacacaaagaaauaaa

SEQ ID NO: 135671 - RNA, 18 nt, Artificial Sequence
  Synthetic
auauaaauuggaaauaaa

SEQ ID NO: 135672 - RNA, 19 nt, Artificial Sequence
  Synthetic
aauauaaauuggaaauaaa

SEQ ID NO: 135673 - RNA, 20 nt, Artificial Sequence
  Synthetic
caauauaaauuggaaauaaa

SEQ ID NO: 135674 - RNA, 18 nt, Artificial Sequence
  Synthetic
acauuaguaaggaauaaa

SEQ ID NO: 135675 - RNA, 20 nt, Artificial Sequence
  Synthetic
agacauuaguaaggaauaaa

SEQ ID NO: 135676 - RNA, 18 nt, Artificial Sequence
  Synthetic
ccagaccaccauaauaaa

SEQ ID NO: 135677 - RNA, 19 nt, Artificial Sequence
  Synthetic
uccagaccaccauaauaaa

SEQ ID NO: 135678 - RNA, 20 nt, Artificial Sequence
  Synthetic
uuccagaccaccauaauaaa

SEQ ID NO: 135679 - RNA, 22 nt, Artificial Sequence
  Synthetic
aguuccagaccaccauaauaaa

SEQ ID NO: 135680 - RNA, 23 nt, Artificial Sequence
  Synthetic
caguuccagaccaccauaauaaa

SEQ ID NO: 135681 - RNA, 24 nt, Artificial Sequence
  Synthetic
ucaguuccagaccaccauaauaaa

SEQ ID NO: 135682 - RNA, 18 nt, Artificial Sequence
  Synthetic
cuugaggaaacuaauaaa

SEQ ID NO: 135683 - RNA, 19 nt, Artificial Sequence
  Synthetic
ucuugaggaaacuaauaaa

SEQ ID NO: 135684 - RNA, 20 nt, Artificial Sequence
  Synthetic
aucuugaggaaacuaauaaa

SEQ ID NO: 135685 - RNA, 18 nt, Artificial Sequence
  Synthetic
aacuaaagaaguaauaaa

SEQ ID NO: 135686 - RNA, 19 nt, Artificial Sequence
  Synthetic
aaacuaaagaaguaauaaa

SEQ ID NO: 135687 - RNA, 20 nt, Artificial Sequence
  Synthetic
uaaacuaaagaaguaauaaa

SEQ ID NO: 135688 - RNA, 18 nt, Artificial Sequence
  Synthetic
auacuaugcagccauaaa

SEQ ID NO: 135689 - RNA, 19 nt, Artificial Sequence
  Synthetic
aauacuaugcagccauaaa

SEQ ID NO: 135690 - RNA, 22 nt, Artificial Sequence
  Synthetic
uggaauacuaugcagccauaaa

SEQ ID NO: 135691 - RNA, 23 nt, Artificial Sequence
  Synthetic
auggaauacuaugcagccauaaa

SEQ ID NO: 135692 - RNA, 24 nt, Artificial Sequence
  Synthetic
cauggaauacuaugcagccauaaa

SEQ ID NO: 135693 - RNA, 18 nt, Artificial Sequence
  Synthetic
uaauagaaaugccauaaa

SEQ ID NO: 135694 - RNA, 19 nt, Artificial Sequence
  Synthetic
auaauagaaaugccauaaa

SEQ ID NO: 135695 - RNA, 20 nt, Artificial Sequence
  Synthetic
uauaauagaaaugccauaaa

SEQ ID NO: 135696 - RNA, 21 nt, Artificial Sequence
  Synthetic
cuauaauagaaaugccauaaa

SEQ ID NO: 135697 - RNA, 23 nt, Artificial Sequence
  Synthetic
ugcuauaauagaaaugccauaaa

SEQ ID NO: 135698 - RNA, 24 nt, Artificial Sequence
  Synthetic
cugcuauaauagaaaugccauaaa

SEQ ID NO: 135699 - RNA, 18 nt, Artificial Sequence
  Synthetic
ugaugcuggccucauaaa

SEQ ID NO: 135700 - RNA, 19 nt, Artificial Sequence
  Synthetic
augaugcuggccucauaaa

SEQ ID NO: 135701 - RNA, 20 nt, Artificial Sequence
  Synthetic
aaugaugcuggccucauaaa

SEQ ID NO: 135702 - RNA, 24 nt, Artificial Sequence
  Synthetic
ucaggaugaugcuggccucauaaa

SEQ ID NO: 135703 - RNA, 18 nt, Artificial Sequence
  Synthetic
ugcugcuggccucauaaa

SEQ ID NO: 135704 - RNA, 19 nt, Artificial Sequence
  Synthetic
augcugcuggccucauaaa

SEQ ID NO: 135705 - RNA, 22 nt, Artificial Sequence
  Synthetic
aggaugcugcuggccucauaaa

SEQ ID NO: 135706 - RNA, 23 nt, Artificial Sequence
  Synthetic
caggaugcugcuggccucauaaa

SEQ ID NO: 135707 - RNA, 24 nt, Artificial Sequence
  Synthetic
ucaggaugcugcuggccucauaaa

SEQ ID NO: 135708 - RNA, 18 nt, Artificial Sequence
  Synthetic
agagagagcccagauaaa

SEQ ID NO: 135709 - RNA, 19 nt, Artificial Sequence
  Synthetic
aagagagagcccagauaaa

SEQ ID NO: 135710 - RNA, 20 nt, Artificial Sequence
  Synthetic
aaagagagagcccagauaaa

SEQ ID NO: 135711 - RNA, 18 nt, Artificial Sequence
  Synthetic
agaaaaaugugggauaaa

SEQ ID NO: 135712 - RNA, 19 nt, Artificial Sequence
  Synthetic
aagaaaaaugugggauaaa

SEQ ID NO: 135713 - RNA, 21 nt, Artificial Sequence
  Synthetic
agaagaaaaaugugggauaaa

SEQ ID NO: 135714 - RNA, 22 nt, Artificial Sequence
  Synthetic
aagaagaaaaaugugggauaaa

SEQ ID NO: 135715 - RNA, 23 nt, Artificial Sequence
  Synthetic
uaagaagaaaaaugugggauaaa

SEQ ID NO: 135716 - RNA, 24 nt, Artificial Sequence
  Synthetic
cuaagaagaaaaaugugggauaaa

SEQ ID NO: 135717 - RNA, 18 nt, Artificial Sequence
  Synthetic
acaagaaaaaaugauaaa

SEQ ID NO: 135718 - RNA, 19 nt, Artificial Sequence
  Synthetic
cacaagaaaaaaugauaaa

SEQ ID NO: 135719 - RNA, 20 nt, Artificial Sequence
  Synthetic
acacaagaaaaaaugauaaa

SEQ ID NO: 135720 - RNA, 22 nt, Artificial Sequence
  Synthetic
agacacaagaaaaaaugauaaa

SEQ ID NO: 135721 - RNA, 23 nt, Artificial Sequence
  Synthetic
cagacacaagaaaaaaugauaaa

SEQ ID NO: 135722 - RNA, 24 nt, Artificial Sequence
  Synthetic
acagacacaagaaaaaaugauaaa

SEQ ID NO: 135723 - RNA, 18 nt, Artificial Sequence
  Synthetic
aucaugucuuuugauaaa

SEQ ID NO: 135724 - RNA, 19 nt, Artificial Sequence
  Synthetic
uaucaugucuuuugauaaa

SEQ ID NO: 135725 - RNA, 20 nt, Artificial Sequence
  Synthetic
uuaucaugucuuuugauaaa

SEQ ID NO: 135726 - RNA, 19 nt, Artificial Sequence
  Synthetic
agucccauaaaaauauaaa

SEQ ID NO: 135727 - RNA, 18 nt, Artificial Sequence
  Synthetic
auagaaacagaauauaaa

SEQ ID NO: 135728 - RNA, 19 nt, Artificial Sequence
  Synthetic
aauagaaacagaauauaaa

SEQ ID NO: 135729 - RNA, 20 nt, Artificial Sequence
  Synthetic
uaauagaaacagaauauaaa

SEQ ID NO: 135730 - RNA, 19 nt, Artificial Sequence
  Synthetic
aguguuaggugcauauaaa

SEQ ID NO: 135731 - RNA, 20 nt, Artificial Sequence
  Synthetic
caguguuaggugcauauaaa

SEQ ID NO: 135732 - RNA, 21 nt, Artificial Sequence
  Synthetic
ccaguguuaggugcauauaaa

SEQ ID NO: 135733 - RNA, 22 nt, Artificial Sequence
  Synthetic
accaguguuaggugcauauaaa

SEQ ID NO: 135734 - RNA, 23 nt, Artificial Sequence
  Synthetic
caccaguguuaggugcauauaaa

SEQ ID NO: 135735 - RNA, 18 nt, Artificial Sequence
  Synthetic
caaagucauauagcuaaa

SEQ ID NO: 135736 - RNA, 19 nt, Artificial Sequence
  Synthetic
ucaaagucauauagcuaaa

SEQ ID NO: 135737 - RNA, 20 nt, Artificial Sequence
  Synthetic
cucaaagucauauagcuaaa

SEQ ID NO: 135738 - RNA, 18 nt, Artificial Sequence
  Synthetic
uuuauuaaucuuucuaaa

SEQ ID NO: 135739 - RNA, 19 nt, Artificial Sequence
  Synthetic
uuuuauuaaucuuucuaaa

SEQ ID NO: 135740 - RNA, 20 nt, Artificial Sequence
  Synthetic
uuuuuauuaaucuuucuaaa

SEQ ID NO: 135741 - RNA, 23 nt, Artificial Sequence
  Synthetic
ugguuuuuauuaaucuuucuaaa

SEQ ID NO: 135742 - RNA, 24 nt, Artificial Sequence
  Synthetic
cugguuuuuauuaaucuuucuaaa

SEQ ID NO: 135743 - RNA, 18 nt, Artificial Sequence
  Synthetic
uuuaauguucaaaguaaa

SEQ ID NO: 135744 - RNA, 19 nt, Artificial Sequence
  Synthetic
uuuuaauguucaaaguaaa

SEQ ID NO: 135745 - RNA, 20 nt, Artificial Sequence
  Synthetic
uuuuuaauguucaaaguaaa

SEQ ID NO: 135746 - RNA, 18 nt, Artificial Sequence
  Synthetic
uucauuuaaaaagguaaa

SEQ ID NO: 135747 - RNA, 19 nt, Artificial Sequence
  Synthetic
cuucauuuaaaaagguaaa

SEQ ID NO: 135748 - RNA, 20 nt, Artificial Sequence
  Synthetic
acuucauuuaaaaagguaaa

SEQ ID NO: 135749 - RNA, 18 nt, Artificial Sequence
  Synthetic
aacuugaaaauagguaaa

SEQ ID NO: 135750 - RNA, 19 nt, Artificial Sequence
  Synthetic
aaacuugaaaauagguaaa

SEQ ID NO: 135751 - RNA, 20 nt, Artificial Sequence
  Synthetic
caaacuugaaaauagguaaa

SEQ ID NO: 135752 - RNA, 22 nt, Artificial Sequence
  Synthetic
agcaaacuugaaaauagguaaa

SEQ ID NO: 135753 - RNA, 23 nt, Artificial Sequence
  Synthetic
cagcaaacuugaaaauagguaaa

SEQ ID NO: 135754 - RNA, 24 nt, Artificial Sequence
  Synthetic
ucagcaaacuugaaaauagguaaa

SEQ ID NO: 135755 - RNA, 18 nt, Artificial Sequence
  Synthetic
uacuuuguauuauguaaa

SEQ ID NO: 135756 - RNA, 19 nt, Artificial Sequence
  Synthetic
uuacuuuguauuauguaaa

SEQ ID NO: 135757 - RNA, 20 nt, Artificial Sequence
  Synthetic
uuuacuuuguauuauguaaa

SEQ ID NO: 135758 - RNA, 18 nt, Artificial Sequence
  Synthetic
ccugucuagugcuguaaa

SEQ ID NO: 135759 - RNA, 19 nt, Artificial Sequence
  Synthetic
accugucuagugcuguaaa

SEQ ID NO: 135760 - RNA, 21 nt, Artificial Sequence
  Synthetic
ugaccugucuagugcuguaaa

SEQ ID NO: 135761 - RNA, 23 nt, Artificial Sequence
  Synthetic
agugaccugucuagugcuguaaa

SEQ ID NO: 135762 - RNA, 24 nt, Artificial Sequence
  Synthetic
cagugaccugucuagugcuguaaa

SEQ ID NO: 135763 - RNA, 21 nt, Artificial Sequence
  Synthetic
uuggcagggcauuguuguaaa

SEQ ID NO: 135764 - RNA, 22 nt, Artificial Sequence
  Synthetic
cuuggcagggcauuguuguaaa

SEQ ID NO: 135765 - RNA, 24 nt, Artificial Sequence
  Synthetic
ugcuuggcagggcauuguuguaaa

SEQ ID NO: 135766 - RNA, 18 nt, Artificial Sequence
  Synthetic
uuguaauuuaaaauuaaa

SEQ ID NO: 135767 - RNA, 19 nt, Artificial Sequence
  Synthetic
uuuguaauuuaaaauuaaa

SEQ ID NO: 135768 - RNA, 20 nt, Artificial Sequence
  Synthetic
cuuuguaauuuaaaauuaaa

SEQ ID NO: 135769 - RNA, 23 nt, Artificial Sequence
  Synthetic
uggcuuuguaauuuaaaauuaaa

SEQ ID NO: 135770 - RNA, 24 nt, Artificial Sequence
  Synthetic
uuggcuuuguaauuuaaaauuaaa

SEQ ID NO: 135771 - RNA, 19 nt, Artificial Sequence
  Synthetic
ugaaaaauucuacauuaaa

SEQ ID NO: 135772 - RNA, 20 nt, Artificial Sequence
  Synthetic
uugaaaaauucuacauuaaa

SEQ ID NO: 135773 - RNA, 18 nt, Artificial Sequence
  Synthetic
uacuacacaaccauuaaa

SEQ ID NO: 135774 - RNA, 19 nt, Artificial Sequence
  Synthetic
auacuacacaaccauuaaa

SEQ ID NO: 135775 - RNA, 20 nt, Artificial Sequence
  Synthetic
aauacuacacaaccauuaaa

SEQ ID NO: 135776 - RNA, 21 nt, Artificial Sequence
  Synthetic
aaauacuacacaaccauuaaa

SEQ ID NO: 135777 - RNA, 23 nt, Artificial Sequence
  Synthetic
ugaaauacuacacaaccauuaaa

SEQ ID NO: 135778 - RNA, 24 nt, Artificial Sequence
  Synthetic
augaaauacuacacaaccauuaaa

SEQ ID NO: 135779 - RNA, 18 nt, Artificial Sequence
  Synthetic
ugaaaaauauuuauuaaa

SEQ ID NO: 135780 - RNA, 19 nt, Artificial Sequence
  Synthetic
cugaaaaauauuuauuaaa

SEQ ID NO: 135781 - RNA, 18 nt, Artificial Sequence
  Synthetic
agaaaaauuauuguuaaa

SEQ ID NO: 135782 - RNA, 19 nt, Artificial Sequence
  Synthetic
aagaaaaauuauuguuaaa

SEQ ID NO: 135783 - RNA, 21 nt, Artificial Sequence
  Synthetic
agaagaaaaauuauuguuaaa

SEQ ID NO: 135784 - RNA, 22 nt, Artificial Sequence
  Synthetic
aagaagaaaaauuauuguuaaa

SEQ ID NO: 135785 - RNA, 23 nt, Artificial Sequence
  Synthetic
aaagaagaaaaauuauuguuaaa

SEQ ID NO: 135786 - RNA, 24 nt, Artificial Sequence
  Synthetic
uaaagaagaaaaauuauuguuaaa

SEQ ID NO: 135787 - RNA, 20 nt, Artificial Sequence
  Synthetic
aggcaaauaagacauuuaaa

SEQ ID NO: 135788 - RNA, 19 nt, Artificial Sequence
  Synthetic
uggauucuaguauuuuaaa

SEQ ID NO: 135789 - RNA, 20 nt, Artificial Sequence
  Synthetic
uuggauucuaguauuuuaaa

SEQ ID NO: 135790 - RNA, 18 nt, Artificial Sequence
  Synthetic
ugaaaagauuauuuuaaa

SEQ ID NO: 135791 - RNA, 20 nt, Artificial Sequence
  Synthetic
agugaaaagauuauuuuaaa

SEQ ID NO: 135792 - RNA, 19 nt, Artificial Sequence
  Synthetic
ugugcaauucauuuuuaaa

SEQ ID NO: 135793 - RNA, 20 nt, Artificial Sequence
  Synthetic
augugcaauucauuuuuaaa

SEQ ID NO: 135794 - RNA, 18 nt, Artificial Sequence
  Synthetic
cuugugccaguuuuuaaa

SEQ ID NO: 135795 - RNA, 19 nt, Artificial Sequence
  Synthetic
ucuugugccaguuuuuaaa

SEQ ID NO: 135796 - RNA, 21 nt, Artificial Sequence
  Synthetic
ugucuugugccaguuuuuaaa

SEQ ID NO: 135797 - RNA, 22 nt, Artificial Sequence
  Synthetic
cugucuugugccaguuuuuaaa

SEQ ID NO: 135798 - RNA, 23 nt, Artificial Sequence
  Synthetic
ccugucuugugccaguuuuuaaa

SEQ ID NO: 135799 - RNA, 24 nt, Artificial Sequence
  Synthetic
cccugucuugugccaguuuuuaaa

SEQ ID NO: 135800 - RNA, 18 nt, Artificial Sequence
  Synthetic
uuucaaaggugaaaacaa

SEQ ID NO: 135801 - RNA, 19 nt, Artificial Sequence
  Synthetic
auuucaaaggugaaaacaa

SEQ ID NO: 135802 - RNA, 20 nt, Artificial Sequence
  Synthetic
cauuucaaaggugaaaacaa

SEQ ID NO: 135803 - RNA, 18 nt, Artificial Sequence
  Synthetic
uuuuccauuuacaaacaa

SEQ ID NO: 135804 - RNA, 19 nt, Artificial Sequence
  Synthetic
uuuuuccauuuacaaacaa

SEQ ID NO: 135805 - RNA, 20 nt, Artificial Sequence
  Synthetic
auuuuuccauuuacaaacaa

SEQ ID NO: 135806 - RNA, 18 nt, Artificial Sequence
  Synthetic
ccagaaauaaagaaacaa

SEQ ID NO: 135807 - RNA, 20 nt, Artificial Sequence
  Synthetic
ugccagaaauaaagaaacaa

SEQ ID NO: 135808 - RNA, 19 nt, Artificial Sequence
  Synthetic
agaugacugccagcaacaa

SEQ ID NO: 135809 - RNA, 20 nt, Artificial Sequence
  Synthetic
aagaugacugccagcaacaa

SEQ ID NO: 135810 - RNA, 18 nt, Artificial Sequence
  Synthetic
ucaaacuugguucaacaa

SEQ ID NO: 135811 - RNA, 19 nt, Artificial Sequence
  Synthetic
uucaaacuugguucaacaa

SEQ ID NO: 135812 - RNA, 20 nt, Artificial Sequence
  Synthetic
uuucaaacuugguucaacaa

SEQ ID NO: 135813 - RNA, 18 nt, Artificial Sequence
  Synthetic
acaauuagacaaacacaa

SEQ ID NO: 135814 - RNA, 19 nt, Artificial Sequence
  Synthetic
uacaauuagacaaacacaa

SEQ ID NO: 135815 - RNA, 20 nt, Artificial Sequence
  Synthetic
auacaauuagacaaacacaa

SEQ ID NO: 135816 - RNA, 19 nt, Artificial Sequence
  Synthetic
ugaaaaaggcgagacacaa

SEQ ID NO: 135817 - RNA, 20 nt, Artificial Sequence
  Synthetic
augaaaaaggcgagacacaa

SEQ ID NO: 135818 - RNA, 21 nt, Artificial Sequence
  Synthetic
aaugaaaaaggcgagacacaa

SEQ ID NO: 135819 - RNA, 23 nt, Artificial Sequence
  Synthetic
ugaaugaaaaaggcgagacacaa

SEQ ID NO: 135820 - RNA, 24 nt, Artificial Sequence
  Synthetic
uugaaugaaaaaggcgagacacaa

SEQ ID NO: 135821 - RNA, 18 nt, Artificial Sequence
  Synthetic
ugugguacauauacacaa

SEQ ID NO: 135822 - RNA, 19 nt, Artificial Sequence
  Synthetic
augugguacauauacacaa

SEQ ID NO: 135823 - RNA, 20 nt, Artificial Sequence
  Synthetic
aaugugguacauauacacaa

SEQ ID NO: 135824 - RNA, 21 nt, Artificial Sequence
  Synthetic
aaaugugguacauauacacaa

SEQ ID NO: 135825 - RNA, 22 nt, Artificial Sequence
  Synthetic
aaaaugugguacauauacacaa

SEQ ID NO: 135826 - RNA, 24 nt, Artificial Sequence
  Synthetic
agaaaaugugguacauauacacaa

SEQ ID NO: 135827 - RNA, 18 nt, Artificial Sequence
  Synthetic
caauggaauacuacacaa

SEQ ID NO: 135828 - RNA, 19 nt, Artificial Sequence
  Synthetic
acaauggaauacuacacaa

SEQ ID NO: 135829 - RNA, 20 nt, Artificial Sequence
  Synthetic
cacaauggaauacuacacaa

SEQ ID NO: 135830 - RNA, 18 nt, Artificial Sequence
  Synthetic
cuguugcgaguuccacaa

SEQ ID NO: 135831 - RNA, 19 nt, Artificial Sequence
  Synthetic
ccuguugcgaguuccacaa

SEQ ID NO: 135832 - RNA, 20 nt, Artificial Sequence
  Synthetic
cccuguugcgaguuccacaa

SEQ ID NO: 135833 - RNA, 21 nt, Artificial Sequence
  Synthetic
ccccuguugcgaguuccacaa

SEQ ID NO: 135834 - RNA, 22 nt, Artificial Sequence
  Synthetic
accccuguugcgaguuccacaa

SEQ ID NO: 135835 - RNA, 23 nt, Artificial Sequence
  Synthetic
caccccuguugcgaguuccacaa

SEQ ID NO: 135836 - RNA, 18 nt, Artificial Sequence
  Synthetic
uuaaagaaauaaagacaa

SEQ ID NO: 135837 - RNA, 19 nt, Artificial Sequence
  Synthetic
cuuaaagaaauaaagacaa

SEQ ID NO: 135838 - RNA, 20 nt, Artificial Sequence
  Synthetic
acuuaaagaaauaaagacaa

SEQ ID NO: 135839 - RNA, 18 nt, Artificial Sequence
  Synthetic
cuucucaaaagaagacaa

SEQ ID NO: 135840 - RNA, 19 nt, Artificial Sequence
  Synthetic
acuucucaaaagaagacaa

SEQ ID NO: 135841 - RNA, 20 nt, Artificial Sequence
  Synthetic
uacuucucaaaagaagacaa

SEQ ID NO: 135842 - RNA, 21 nt, Artificial Sequence
  Synthetic
auacuucucaaaagaagacaa

SEQ ID NO: 135843 - RNA, 23 nt, Artificial Sequence
  Synthetic
agauacuucucaaaagaagacaa

SEQ ID NO: 135844 - RNA, 24 nt, Artificial Sequence
  Synthetic
uagauacuucucaaaagaagacaa

SEQ ID NO: 135845 - RNA, 20 nt, Artificial Sequence
  Synthetic
uggcaaggccgcagagacaa

SEQ ID NO: 135846 - RNA, 21 nt, Artificial Sequence
  Synthetic
cuggcaaggccgcagagacaa

SEQ ID NO: 135847 - RNA, 23 nt, Artificial Sequence
  Synthetic
ugcuggcaaggccgcagagacaa

SEQ ID NO: 135848 - RNA, 24 nt, Artificial Sequence
  Synthetic
augcuggcaaggccgcagagacaa

SEQ ID NO: 135849 - RNA, 19 nt, Artificial Sequence
  Synthetic
agauuuugggcugagacaa

SEQ ID NO: 135850 - RNA, 22 nt, Artificial Sequence
  Synthetic
aggagauuuugggcugagacaa

SEQ ID NO: 135851 - RNA, 23 nt, Artificial Sequence
  Synthetic
aaggagauuuugggcugagacaa

SEQ ID NO: 135852 - RNA, 24 nt, Artificial Sequence
  Synthetic
uaaggagauuuugggcugagacaa

SEQ ID NO: 135853 - RNA, 19 nt, Artificial Sequence
  Synthetic
uguguguguugaaugacaa

SEQ ID NO: 135854 - RNA, 21 nt, Artificial Sequence
  Synthetic
uguguguguguugaaugacaa

SEQ ID NO: 135855 - RNA, 23 nt, Artificial Sequence
  Synthetic
uguguguguguguugaaugacaa

SEQ ID NO: 135856 - RNA, 18 nt, Artificial Sequence
  Synthetic
uuuuucagaaauugacaa

SEQ ID NO: 135857 - RNA, 19 nt, Artificial Sequence
  Synthetic
uuuuuucagaaauugacaa

SEQ ID NO: 135858 - RNA, 20 nt, Artificial Sequence
  Synthetic
uuuuuuucagaaauugacaa

SEQ ID NO: 135859 - RNA, 21 nt, Artificial Sequence
  Synthetic
uuuuuuuucagaaauugacaa

SEQ ID NO: 135860 - RNA, 22 nt, Artificial Sequence
  Synthetic
uuuuuuuuucagaaauugacaa

SEQ ID NO: 135861 - RNA, 23 nt, Artificial Sequence
  Synthetic
uuuuuuuuuucagaaauugacaa

SEQ ID NO: 135862 - RNA, 24 nt, Artificial Sequence
  Synthetic
uuuuuuuuuuucagaaauugacaa

SEQ ID NO: 135863 - RNA, 19 nt, Artificial Sequence
  Synthetic
ugccuguaugaauauacaa

SEQ ID NO: 135864 - RNA, 20 nt, Artificial Sequence
  Synthetic
uugccuguaugaauauacaa

SEQ ID NO: 135865 - RNA, 18 nt, Artificial Sequence
  Synthetic
uaaagauguuuuauacaa

SEQ ID NO: 135866 - RNA, 19 nt, Artificial Sequence
  Synthetic
uuaaagauguuuuauacaa

SEQ ID NO: 135867 - RNA, 20 nt, Artificial Sequence
  Synthetic
auuaaagauguuuuauacaa

SEQ ID NO: 135868 - RNA, 18 nt, Artificial Sequence
  Synthetic
cuuuuuucaucaguacaa

SEQ ID NO: 135869 - RNA, 19 nt, Artificial Sequence
  Synthetic
acuuuuuucaucaguacaa

SEQ ID NO: 135870 - RNA, 20 nt, Artificial Sequence
  Synthetic
uacuuuuuucaucaguacaa

SEQ ID NO: 135871 - RNA, 18 nt, Artificial Sequence
  Synthetic
uucucaaauaacuuacaa

SEQ ID NO: 135872 - RNA, 19 nt, Artificial Sequence
  Synthetic
uuucucaaauaacuuacaa

SEQ ID NO: 135873 - RNA, 20 nt, Artificial Sequence
  Synthetic
auuucucaaauaacuuacaa

SEQ ID NO: 135874 - RNA, 22 nt, Artificial Sequence
  Synthetic
ugauuucucaaauaacuuacaa

SEQ ID NO: 135875 - RNA, 18 nt, Artificial Sequence
  Synthetic
aacaacaccaucaaccaa

SEQ ID NO: 135876 - RNA, 20 nt, Artificial Sequence
  Synthetic
ugaacaacaccaucaaccaa

SEQ ID NO: 135877 - RNA, 21 nt, Artificial Sequence
  Synthetic
cugaacaacaccaucaaccaa

SEQ ID NO: 135878 - RNA, 22 nt, Artificial Sequence
  Synthetic
acugaacaacaccaucaaccaa

SEQ ID NO: 135879 - RNA, 23 nt, Artificial Sequence
  Synthetic
aacugaacaacaccaucaaccaa

SEQ ID NO: 135880 - RNA, 18 nt, Artificial Sequence
  Synthetic
aauuuacauucccaccaa

SEQ ID NO: 135881 - RNA, 19 nt, Artificial Sequence
  Synthetic
uaauuuacauucccaccaa

SEQ ID NO: 135882 - RNA, 20 nt, Artificial Sequence
  Synthetic
cuaauuuacauucccaccaa

SEQ ID NO: 135883 - RNA, 21 nt, Artificial Sequence
  Synthetic
acuaauuuacauucccaccaa

SEQ ID NO: 135884 - RNA, 22 nt, Artificial Sequence
  Synthetic
aacuaauuuacauucccaccaa

SEQ ID NO: 135885 - RNA, 24 nt, Artificial Sequence
  Synthetic
ugaacuaauuuacauucccaccaa

SEQ ID NO: 135886 - RNA, 18 nt, Artificial Sequence
  Synthetic
ucaugaggauggcaccaa

SEQ ID NO: 135887 - RNA, 19 nt, Artificial Sequence
  Synthetic
aucaugaggauggcaccaa

SEQ ID NO: 135888 - RNA, 20 nt, Artificial Sequence
  Synthetic
caucaugaggauggcaccaa

SEQ ID NO: 135889 - RNA, 21 nt, Artificial Sequence
  Synthetic
ucaucaugaggauggcaccaa

SEQ ID NO: 135890 - RNA, 22 nt, Artificial Sequence
  Synthetic
aucaucaugaggauggcaccaa

SEQ ID NO: 135891 - RNA, 23 nt, Artificial Sequence
  Synthetic
caucaucaugaggauggcaccaa

SEQ ID NO: 135892 - RNA, 24 nt, Artificial Sequence
  Synthetic
ucaucaucaugaggauggcaccaa

SEQ ID NO: 135893 - RNA, 19 nt, Artificial Sequence
  Synthetic
ugugacuaguugugaccaa

SEQ ID NO: 135894 - RNA, 20 nt, Artificial Sequence
  Synthetic
augugacuaguugugaccaa

SEQ ID NO: 135895 - RNA, 18 nt, Artificial Sequence
  Synthetic
ucaugaggacaguaccaa

SEQ ID NO: 135896 - RNA, 19 nt, Artificial Sequence
  Synthetic
uucaugaggacaguaccaa

SEQ ID NO: 135897 - RNA, 20 nt, Artificial Sequence
  Synthetic
uuucaugaggacaguaccaa

SEQ ID NO: 135898 - RNA, 21 nt, Artificial Sequence
  Synthetic
uuuucaugaggacaguaccaa

SEQ ID NO: 135899 - RNA, 22 nt, Artificial Sequence
  Synthetic
auuuucaugaggacaguaccaa

SEQ ID NO: 135900 - RNA, 23 nt, Artificial Sequence
  Synthetic
cauuuucaugaggacaguaccaa

SEQ ID NO: 135901 - RNA, 24 nt, Artificial Sequence
  Synthetic
ucauuuucaugaggacaguaccaa

SEQ ID NO: 135902 - RNA, 18 nt, Artificial Sequence
  Synthetic
uuuugacaaggguaccaa

SEQ ID NO: 135903 - RNA, 19 nt, Artificial Sequence
  Synthetic
uuuuugacaaggguaccaa

SEQ ID NO: 135904 - RNA, 20 nt, Artificial Sequence
  Synthetic
auuuuugacaaggguaccaa

SEQ ID NO: 135905 - RNA, 22 nt, Artificial Sequence
  Synthetic
ugauuuuugacaaggguaccaa

SEQ ID NO: 135906 - RNA, 23 nt, Artificial Sequence
  Synthetic
cugauuuuugacaaggguaccaa

SEQ ID NO: 135907 - RNA, 24 nt, Artificial Sequence
  Synthetic
acugauuuuugacaaggguaccaa

SEQ ID NO: 135908 - RNA, 19 nt, Artificial Sequence
  Synthetic
ugccuccccuuccucccaa

SEQ ID NO: 135909 - RNA, 20 nt, Artificial Sequence
  Synthetic
cugccuccccuuccucccaa

SEQ ID NO: 135910 - RNA, 18 nt, Artificial Sequence
  Synthetic
ucugggaucagcucccaa

SEQ ID NO: 135911 - RNA, 19 nt, Artificial Sequence
  Synthetic
uucugggaucagcucccaa

SEQ ID NO: 135912 - RNA, 20 nt, Artificial Sequence
  Synthetic
uuucugggaucagcucccaa

SEQ ID NO: 135913 - RNA, 21 nt, Artificial Sequence
  Synthetic
cuuucugggaucagcucccaa

SEQ ID NO: 135914 - RNA, 24 nt, Artificial Sequence
  Synthetic
uggcuuucugggaucagcucccaa

SEQ ID NO: 135915 - RNA, 19 nt, Artificial Sequence
  Synthetic
agccaccaugccuggccaa

SEQ ID NO: 135916 - RNA, 21 nt, Artificial Sequence
  Synthetic
ugagccaccaugccuggccaa

SEQ ID NO: 135917 - RNA, 23 nt, Artificial Sequence
  Synthetic
cgugagccaccaugccuggccaa

SEQ ID NO: 135918 - RNA, 24 nt, Artificial Sequence
  Synthetic
acgugagccaccaugccuggccaa

SEQ ID NO: 135919 - RNA, 18 nt, Artificial Sequence
  Synthetic
aucaguuccuggugccaa

SEQ ID NO: 135920 - RNA, 19 nt, Artificial Sequence
  Synthetic
aaucaguuccuggugccaa

SEQ ID NO: 135921 - RNA, 20 nt, Artificial Sequence
  Synthetic
aaaucaguuccuggugccaa

SEQ ID NO: 135922 - RNA, 21 nt, Artificial Sequence
  Synthetic
aaaaucaguuccuggugccaa

SEQ ID NO: 135923 - RNA, 22 nt, Artificial Sequence
  Synthetic
caaaaucaguuccuggugccaa

SEQ ID NO: 135924 - RNA, 23 nt, Artificial Sequence
  Synthetic
acaaaaucaguuccuggugccaa

SEQ ID NO: 135925 - RNA, 24 nt, Artificial Sequence
  Synthetic
cacaaaaucaguuccuggugccaa

SEQ ID NO: 135926 - RNA, 18 nt, Artificial Sequence
  Synthetic
uuccggguauauauccaa

SEQ ID NO: 135927 - RNA, 19 nt, Artificial Sequence
  Synthetic
cuuccggguauauauccaa

SEQ ID NO: 135928 - RNA, 20 nt, Artificial Sequence
  Synthetic
acuuccggguauauauccaa

SEQ ID NO: 135929 - RNA, 21 nt, Artificial Sequence
  Synthetic
cacuuccggguauauauccaa

SEQ ID NO: 135930 - RNA, 22 nt, Artificial Sequence
  Synthetic
ccacuuccggguauauauccaa

SEQ ID NO: 135931 - RNA, 23 nt, Artificial Sequence
  Synthetic
cccacuuccggguauauauccaa

SEQ ID NO: 135932 - RNA, 24 nt, Artificial Sequence
  Synthetic
ucccacuuccggguauauauccaa

SEQ ID NO: 135933 - RNA, 18 nt, Artificial Sequence
  Synthetic
ucuuuguaagaacuccaa

SEQ ID NO: 135934 - RNA, 19 nt, Artificial Sequence
  Synthetic
cucuuuguaagaacuccaa

SEQ ID NO: 135935 - RNA, 20 nt, Artificial Sequence
  Synthetic
ccucuuuguaagaacuccaa

SEQ ID NO: 135936 - RNA, 18 nt, Artificial Sequence
  Synthetic
uaauucaauuaccuccaa

SEQ ID NO: 135937 - RNA, 20 nt, Artificial Sequence
  Synthetic
uguaauucaauuaccuccaa

SEQ ID NO: 135938 - RNA, 21 nt, Artificial Sequence
  Synthetic
cuguaauucaauuaccuccaa

SEQ ID NO: 135939 - RNA, 22 nt, Artificial Sequence
  Synthetic
ccuguaauucaauuaccuccaa

SEQ ID NO: 135940 - RNA, 23 nt, Artificial Sequence
  Synthetic
cccuguaauucaauuaccuccaa

SEQ ID NO: 135941 - RNA, 24 nt, Artificial Sequence
  Synthetic
ccccuguaauucaauuaccuccaa

SEQ ID NO: 135942 - RNA, 18 nt, Artificial Sequence
  Synthetic
uugaaaaaaaaaaagcaa

SEQ ID NO: 135943 - RNA, 19 nt, Artificial Sequence
  Synthetic
uuugaaaaaaaaaaagcaa

SEQ ID NO: 135944 - RNA, 20 nt, Artificial Sequence
  Synthetic
uuuugaaaaaaaaaaagcaa

SEQ ID NO: 135945 - RNA, 21 nt, Artificial Sequence
  Synthetic
uuuuugaaaaaaaaaaagcaa

SEQ ID NO: 135946 - RNA, 23 nt, Artificial Sequence
  Synthetic
uguuuuugaaaaaaaaaaagcaa

SEQ ID NO: 135947 - RNA, 24 nt, Artificial Sequence
  Synthetic
uuguuuuugaaaaaaaaaaagcaa

SEQ ID NO: 135948 - RNA, 18 nt, Artificial Sequence
  Synthetic
cacauaggcucaaagcaa

SEQ ID NO: 135949 - RNA, 19 nt, Artificial Sequence
  Synthetic
acacauaggcucaaagcaa

SEQ ID NO: 135950 - RNA, 20 nt, Artificial Sequence
  Synthetic
cacacauaggcucaaagcaa

SEQ ID NO: 135951 - RNA, 21 nt, Artificial Sequence
  Synthetic
acacacauaggcucaaagcaa

SEQ ID NO: 135952 - RNA, 22 nt, Artificial Sequence
  Synthetic
cacacacauaggcucaaagcaa

SEQ ID NO: 135953 - RNA, 23 nt, Artificial Sequence
  Synthetic
acacacacauaggcucaaagcaa

SEQ ID NO: 135954 - RNA, 24 nt, Artificial Sequence
  Synthetic
aacacacacauaggcucaaagcaa

SEQ ID NO: 135955 - RNA, 18 nt, Artificial Sequence
  Synthetic
uuugggaggccaaggcaa

SEQ ID NO: 135956 - RNA, 19 nt, Artificial Sequence
  Synthetic
cuuugggaggccaaggcaa

SEQ ID NO: 135957 - RNA, 21 nt, Artificial Sequence
  Synthetic
ugcuuugggaggccaaggcaa

SEQ ID NO: 135958 - RNA, 23 nt, Artificial Sequence
  Synthetic
agugcuuugggaggccaaggcaa

SEQ ID NO: 135959 - RNA, 24 nt, Artificial Sequence
  Synthetic
cagugcuuugggaggccaaggcaa

SEQ ID NO: 135960 - RNA, 18 nt, Artificial Sequence
  Synthetic
cucaggaggcuaaggcaa

SEQ ID NO: 135961 - RNA, 19 nt, Artificial Sequence
  Synthetic
acucaggaggcuaaggcaa

SEQ ID NO: 135962 - RNA, 20 nt, Artificial Sequence
  Synthetic
uacucaggaggcuaaggcaa

SEQ ID NO: 135963 - RNA, 21 nt, Artificial Sequence
  Synthetic
cuacucaggaggcuaaggcaa

SEQ ID NO: 135964 - RNA, 23 nt, Artificial Sequence
  Synthetic
agcuacucaggaggcuaaggcaa

SEQ ID NO: 135965 - RNA, 24 nt, Artificial Sequence
  Synthetic
cagcuacucaggaggcuaaggcaa

SEQ ID NO: 135966 - RNA, 18 nt, Artificial Sequence
  Synthetic
uuugcgaggccgaggcaa

SEQ ID NO: 135967 - RNA, 19 nt, Artificial Sequence
  Synthetic
cuuugcgaggccgaggcaa

SEQ ID NO: 135968 - RNA, 20 nt, Artificial Sequence
  Synthetic
acuuugcgaggccgaggcaa

SEQ ID NO: 135969 - RNA, 21 nt, Artificial Sequence
  Synthetic
cacuuugcgaggccgaggcaa

SEQ ID NO: 135970 - RNA, 23 nt, Artificial Sequence
  Synthetic
agcacuuugcgaggccgaggcaa

SEQ ID NO: 135971 - RNA, 24 nt, Artificial Sequence
  Synthetic
cagcacuuugcgaggccgaggcaa

SEQ ID NO: 135972 - RNA, 19 nt, Artificial Sequence
  Synthetic
agagaccagguggaggcaa

SEQ ID NO: 135973 - RNA, 23 nt, Artificial Sequence
  Synthetic
agggagagaccagguggaggcaa

SEQ ID NO: 135974 - RNA, 24 nt, Artificial Sequence
  Synthetic
aagggagagaccagguggaggcaa

SEQ ID NO: 135975 - RNA, 18 nt, Artificial Sequence
  Synthetic
cuugggaagcugaggcaa

SEQ ID NO: 135976 - RNA, 19 nt, Artificial Sequence
  Synthetic
acuugggaagcugaggcaa

SEQ ID NO: 135977 - RNA, 20 nt, Artificial Sequence
  Synthetic
uacuugggaagcugaggcaa

SEQ ID NO: 135978 - RNA, 21 nt, Artificial Sequence
  Synthetic
cuacuugggaagcugaggcaa

SEQ ID NO: 135979 - RNA, 23 nt, Artificial Sequence
  Synthetic
agcuacuugggaagcugaggcaa

SEQ ID NO: 135980 - RNA, 24 nt, Artificial Sequence
  Synthetic
cagcuacuugggaagcugaggcaa

SEQ ID NO: 135981 - RNA, 19 nt, Artificial Sequence
  Synthetic
cgggaggaggcugaggcaa

SEQ ID NO: 135982 - RNA, 20 nt, Artificial Sequence
  Synthetic
ucgggaggaggcugaggcaa

SEQ ID NO: 135983 - RNA, 21 nt, Artificial Sequence
  Synthetic
cucgggaggaggcugaggcaa

SEQ ID NO: 135984 - RNA, 22 nt, Artificial Sequence
  Synthetic
acucgggaggaggcugaggcaa

SEQ ID NO: 135985 - RNA, 23 nt, Artificial Sequence
  Synthetic
uacucgggaggaggcugaggcaa

SEQ ID NO: 135986 - RNA, 24 nt, Artificial Sequence
  Synthetic
cuacucgggaggaggcugaggcaa

SEQ ID NO: 135987 - RNA, 18 nt, Artificial Sequence
  Synthetic
caagagcaaccugggcaa

SEQ ID NO: 135988 - RNA, 19 nt, Artificial Sequence
  Synthetic
ucaagagcaaccugggcaa

SEQ ID NO: 135989 - RNA, 20 nt, Artificial Sequence
  Synthetic
uucaagagcaaccugggcaa

SEQ ID NO: 135990 - RNA, 22 nt, Artificial Sequence
  Synthetic
aguucaagagcaaccugggcaa

SEQ ID NO: 135991 - RNA, 23 nt, Artificial Sequence
  Synthetic
aaguucaagagcaaccugggcaa

SEQ ID NO: 135992 - RNA, 19 nt, Artificial Sequence
  Synthetic
ugcacuccagccugggcaa

SEQ ID NO: 135993 - RNA, 20 nt, Artificial Sequence
  Synthetic
cugcacuccagccugggcaa

SEQ ID NO: 135994 - RNA, 22 nt, Artificial Sequence
  Synthetic
cgcugcacuccagccugggcaa

SEQ ID NO: 135995 - RNA, 23 nt, Artificial Sequence
  Synthetic
ccgcugcacuccagccugggcaa

SEQ ID NO: 135996 - RNA, 24 nt, Artificial Sequence
  Synthetic
accgcugcacuccagccugggcaa

SEQ ID NO: 135997 - RNA, 19 nt, Artificial Sequence
  Synthetic
ugcauuccagccugggcaa

SEQ ID NO: 135998 - RNA, 20 nt, Artificial Sequence
  Synthetic
cugcauuccagccugggcaa

SEQ ID NO: 135999 - RNA, 21 nt, Artificial Sequence
  Synthetic
acugcauuccagccugggcaa

SEQ ID NO: 136000 - RNA, 22 nt, Artificial Sequence
  Synthetic
cacugcauuccagccugggcaa

SEQ ID NO: 136001 - RNA, 23 nt, Artificial Sequence
  Synthetic
ccacugcauuccagccugggcaa

SEQ ID NO: 136002 - RNA, 18 nt, Artificial Sequence
  Synthetic
acaacacauucuuggcaa

SEQ ID NO: 136003 - RNA, 21 nt, Artificial Sequence
  Synthetic
uggacaacacauucuuggcaa

SEQ ID NO: 136004 - RNA, 22 nt, Artificial Sequence
  Synthetic
uuggacaacacauucuuggcaa

SEQ ID NO: 136005 - RNA, 23 nt, Artificial Sequence
  Synthetic
uuuggacaacacauucuuggcaa

SEQ ID NO: 136006 - RNA, 24 nt, Artificial Sequence
  Synthetic
uuuuggacaacacauucuuggcaa

SEQ ID NO: 136007 - RNA, 18 nt, Artificial Sequence
  Synthetic
uuuugccugcaaaugcaa

SEQ ID NO: 136008 - RNA, 19 nt, Artificial Sequence
  Synthetic
auuuugccugcaaaugcaa

SEQ ID NO: 136009 - RNA, 20 nt, Artificial Sequence
  Synthetic
aauuuugccugcaaaugcaa

SEQ ID NO: 136010 - RNA, 18 nt, Artificial Sequence
  Synthetic
acauuuuuuguuaugcaa

SEQ ID NO: 136011 - RNA, 19 nt, Artificial Sequence
  Synthetic
aacauuuuuuguuaugcaa

SEQ ID NO: 136012 - RNA, 20 nt, Artificial Sequence
  Synthetic
aaacauuuuuuguuaugcaa

SEQ ID NO: 136013 - RNA, 18 nt, Artificial Sequence
  Synthetic
uuuuugaauuuuaugcaa

SEQ ID NO: 136014 - RNA, 20 nt, Artificial Sequence
  Synthetic
aguuuuugaauuuuaugcaa

SEQ ID NO: 136015 - RNA, 21 nt, Artificial Sequence
  Synthetic
caguuuuugaauuuuaugcaa

SEQ ID NO: 136016 - RNA, 22 nt, Artificial Sequence
  Synthetic
ccaguuuuugaauuuuaugcaa

SEQ ID NO: 136017 - RNA, 24 nt, Artificial Sequence
  Synthetic
ugccaguuuuugaauuuuaugcaa

SEQ ID NO: 136018 - RNA, 20 nt, Artificial Sequence
  Synthetic
aggcacagggaccacugcaa

SEQ ID NO: 136019 - RNA, 21 nt, Artificial Sequence
  Synthetic
uaggcacagggaccacugcaa

SEQ ID NO: 136020 - RNA, 22 nt, Artificial Sequence
  Synthetic
auaggcacagggaccacugcaa

SEQ ID NO: 136021 - RNA, 23 nt, Artificial Sequence
  Synthetic
aauaggcacagggaccacugcaa

SEQ ID NO: 136022 - RNA, 24 nt, Artificial Sequence
  Synthetic
caauaggcacagggaccacugcaa

SEQ ID NO: 136023 - RNA, 18 nt, Artificial Sequence
  Synthetic
cuccccaccccaaaucaa

SEQ ID NO: 136024 - RNA, 19 nt, Artificial Sequence
  Synthetic
acuccccaccccaaaucaa

SEQ ID NO: 136025 - RNA, 20 nt, Artificial Sequence
  Synthetic
aacuccccaccccaaaucaa

SEQ ID NO: 136026 - RNA, 22 nt, Artificial Sequence
  Synthetic
agaacuccccaccccaaaucaa

SEQ ID NO: 136027 - RNA, 23 nt, Artificial Sequence
  Synthetic
cagaacuccccaccccaaaucaa

SEQ ID NO: 136028 - RNA, 24 nt, Artificial Sequence
  Synthetic
acagaacuccccaccccaaaucaa

SEQ ID NO: 136029 - RNA, 18 nt, Artificial Sequence
  Synthetic
ugccaaaucugacaucaa

SEQ ID NO: 136030 - RNA, 19 nt, Artificial Sequence
  Synthetic
uugccaaaucugacaucaa

SEQ ID NO: 136031 - RNA, 19 nt, Artificial Sequence
  Synthetic
uggcaaaauaaaugaucaa

SEQ ID NO: 136032 - RNA, 20 nt, Artificial Sequence
  Synthetic
auggcaaaauaaaugaucaa

SEQ ID NO: 136033 - RNA, 21 nt, Artificial Sequence
  Synthetic
cauggcaaaauaaaugaucaa

SEQ ID NO: 136034 - RNA, 23 nt, Artificial Sequence
  Synthetic
ugcauggcaaaauaaaugaucaa

SEQ ID NO: 136035 - RNA, 24 nt, Artificial Sequence
  Synthetic
cugcauggcaaaauaaaugaucaa

SEQ ID NO: 136036 - RNA, 18 nt, Artificial Sequence
  Synthetic
uccaccuccugugaucaa

SEQ ID NO: 136037 - RNA, 19 nt, Artificial Sequence
  Synthetic
cuccaccuccugugaucaa

SEQ ID NO: 136038 - RNA, 20 nt, Artificial Sequence
  Synthetic
ccuccaccuccugugaucaa

SEQ ID NO: 136039 - RNA, 21 nt, Artificial Sequence
  Synthetic
accuccaccuccugugaucaa

SEQ ID NO: 136040 - RNA, 22 nt, Artificial Sequence
  Synthetic
aaccuccaccuccugugaucaa

SEQ ID NO: 136041 - RNA, 23 nt, Artificial Sequence
  Synthetic
caaccuccaccuccugugaucaa

SEQ ID NO: 136042 - RNA, 18 nt, Artificial Sequence
  Synthetic
uguauuauaccauaucaa

SEQ ID NO: 136043 - RNA, 19 nt, Artificial Sequence
  Synthetic
auguauuauaccauaucaa

SEQ ID NO: 136044 - RNA, 20 nt, Artificial Sequence
  Synthetic
aauguauuauaccauaucaa

SEQ ID NO: 136045 - RNA, 21 nt, Artificial Sequence
  Synthetic
caauguauuauaccauaucaa

SEQ ID NO: 136046 - RNA, 22 nt, Artificial Sequence
  Synthetic
ucaauguauuauaccauaucaa

SEQ ID NO: 136047 - RNA, 23 nt, Artificial Sequence
  Synthetic
aucaauguauuauaccauaucaa

SEQ ID NO: 136048 - RNA, 24 nt, Artificial Sequence
  Synthetic
aaucaauguauuauaccauaucaa

SEQ ID NO: 136049 - RNA, 18 nt, Artificial Sequence
  Synthetic
agcaaaagaaacuaucaa

SEQ ID NO: 136050 - RNA, 19 nt, Artificial Sequence
  Synthetic
cagcaaaagaaacuaucaa

SEQ ID NO: 136051 - RNA, 20 nt, Artificial Sequence
  Synthetic
acagcaaaagaaacuaucaa

SEQ ID NO: 136052 - RNA, 21 nt, Artificial Sequence
  Synthetic
cacagcaaaagaaacuaucaa

SEQ ID NO: 136053 - RNA, 22 nt, Artificial Sequence
  Synthetic
acacagcaaaagaaacuaucaa

SEQ ID NO: 136054 - RNA, 23 nt, Artificial Sequence
  Synthetic
uacacagcaaaagaaacuaucaa

SEQ ID NO: 136055 - RNA, 24 nt, Artificial Sequence
  Synthetic
cuacacagcaaaagaaacuaucaa

SEQ ID NO: 136056 - RNA, 21 nt, Artificial Sequence
  Synthetic
cuuagagcaugaaauuaucaa

SEQ ID NO: 136057 - RNA, 22 nt, Artificial Sequence
  Synthetic
ucuuagagcaugaaauuaucaa

SEQ ID NO: 136058 - RNA, 23 nt, Artificial Sequence
  Synthetic
uucuuagagcaugaaauuaucaa

SEQ ID NO: 136059 - RNA, 24 nt, Artificial Sequence
  Synthetic
auucuuagagcaugaaauuaucaa

SEQ ID NO: 136060 - RNA, 18 nt, Artificial Sequence
  Synthetic
cagugaugaguaacucaa

SEQ ID NO: 136061 - RNA, 19 nt, Artificial Sequence
  Synthetic
ucagugaugaguaacucaa

SEQ ID NO: 136062 - RNA, 20 nt, Artificial Sequence
  Synthetic
cucagugaugaguaacucaa

SEQ ID NO: 136063 - RNA, 21 nt, Artificial Sequence
  Synthetic
acucagugaugaguaacucaa

SEQ ID NO: 136064 - RNA, 22 nt, Artificial Sequence
  Synthetic
aacucagugaugaguaacucaa

SEQ ID NO: 136065 - RNA, 23 nt, Artificial Sequence
  Synthetic
aaacucagugaugaguaacucaa

SEQ ID NO: 136066 - RNA, 18 nt, Artificial Sequence
  Synthetic
uccagaaaauagccucaa

SEQ ID NO: 136067 - RNA, 19 nt, Artificial Sequence
  Synthetic
auccagaaaauagccucaa

SEQ ID NO: 136068 - RNA, 21 nt, Artificial Sequence
  Synthetic
agauccagaaaauagccucaa

SEQ ID NO: 136069 - RNA, 22 nt, Artificial Sequence
  Synthetic
aagauccagaaaauagccucaa

SEQ ID NO: 136070 - RNA, 23 nt, Artificial Sequence
  Synthetic
caagauccagaaaauagccucaa

SEQ ID NO: 136071 - RNA, 24 nt, Artificial Sequence
  Synthetic
acaagauccagaaaauagccucaa

SEQ ID NO: 136072 - RNA, 19 nt, Artificial Sequence
  Synthetic
ugguagguguauaugucaa

SEQ ID NO: 136073 - RNA, 20 nt, Artificial Sequence
  Synthetic
augguagguguauaugucaa

SEQ ID NO: 136074 - RNA, 21 nt, Artificial Sequence
  Synthetic
caugguagguguauaugucaa

SEQ ID NO: 136075 - RNA, 22 nt, Artificial Sequence
  Synthetic
acaugguagguguauaugucaa

SEQ ID NO: 136076 - RNA, 23 nt, Artificial Sequence
  Synthetic
uacaugguagguguauaugucaa

SEQ ID NO: 136077 - RNA, 18 nt, Artificial Sequence
  Synthetic
caucucaugggcauucaa

SEQ ID NO: 136078 - RNA, 19 nt, Artificial Sequence
  Synthetic
acaucucaugggcauucaa

SEQ ID NO: 136079 - RNA, 20 nt, Artificial Sequence
  Synthetic
cacaucucaugggcauucaa

SEQ ID NO: 136080 - RNA, 18 nt, Artificial Sequence
  Synthetic
uuaaaacuuuaaguucaa

SEQ ID NO: 136081 - RNA, 19 nt, Artificial Sequence
  Synthetic
uuuaaaacuuuaaguucaa

SEQ ID NO: 136082 - RNA, 20 nt, Artificial Sequence
  Synthetic
uuuuaaaacuuuaaguucaa

SEQ ID NO: 136083 - RNA, 18 nt, Artificial Sequence
  Synthetic
ucucuuuuguuauuucaa

SEQ ID NO: 136084 - RNA, 19 nt, Artificial Sequence
  Synthetic
aucucuuuuguuauuucaa

SEQ ID NO: 136085 - RNA, 20 nt, Artificial Sequence
  Synthetic
caucucuuuuguuauuucaa

SEQ ID NO: 136086 - RNA, 21 nt, Artificial Sequence
  Synthetic
ccaucucuuuuguuauuucaa

SEQ ID NO: 136087 - RNA, 23 nt, Artificial Sequence
  Synthetic
ugccaucucuuuuguuauuucaa

SEQ ID NO: 136088 - RNA, 24 nt, Artificial Sequence
  Synthetic
augccaucucuuuuguuauuucaa

SEQ ID NO: 136089 - RNA, 18 nt, Artificial Sequence
  Synthetic
ucuguguuugccuuucaa

SEQ ID NO: 136090 - RNA, 19 nt, Artificial Sequence
  Synthetic
uucuguguuugccuuucaa

SEQ ID NO: 136091 - RNA, 21 nt, Artificial Sequence
  Synthetic
aaaaaaaaaaaaaaaaaagaa

SEQ ID NO: 136092 - RNA, 22 nt, Artificial Sequence
  Synthetic
caaaaaaaaaaaaaaaaaagaa

SEQ ID NO: 136093 - RNA, 23 nt, Artificial Sequence
  Synthetic
ccaaaaaaaaaaaaaaaaaagaa

SEQ ID NO: 136094 - RNA, 24 nt, Artificial Sequence
  Synthetic
accaaaaaaaaaaaaaaaaaagaa

SEQ ID NO: 136095 - RNA, 18 nt, Artificial Sequence
  Synthetic
agaaaaagagaaaaagaa

SEQ ID NO: 136096 - RNA, 19 nt, Artificial Sequence
  Synthetic
uagaaaaagagaaaaagaa

SEQ ID NO: 136097 - RNA, 20 nt, Artificial Sequence
  Synthetic
uuagaaaaagagaaaaagaa

SEQ ID NO: 136098 - RNA, 18 nt, Artificial Sequence
  Synthetic
uuacacuaaauaaaagaa

SEQ ID NO: 136099 - RNA, 19 nt, Artificial Sequence
  Synthetic
auuacacuaaauaaaagaa

SEQ ID NO: 136100 - RNA, 20 nt, Artificial Sequence
  Synthetic
uauuacacuaaauaaaagaa

SEQ ID NO: 136101 - RNA, 19 nt, Artificial Sequence
  Synthetic
agagcagggaaagaaagaa

SEQ ID NO: 136102 - RNA, 20 nt, Artificial Sequence
  Synthetic
aagagcagggaaagaaagaa

SEQ ID NO: 136103 - RNA, 18 nt, Artificial Sequence
  Synthetic
aauguaagagugaaagaa

SEQ ID NO: 136104 - RNA, 19 nt, Artificial Sequence
  Synthetic
aaauguaagagugaaagaa

SEQ ID NO: 136105 - RNA, 20 nt, Artificial Sequence
  Synthetic
caaauguaagagugaaagaa

SEQ ID NO: 136106 - RNA, 18 nt, Artificial Sequence
  Synthetic
uucaacauucuuaaagaa

SEQ ID NO: 136107 - RNA, 19 nt, Artificial Sequence
  Synthetic
auucaacauucuuaaagaa

SEQ ID NO: 136108 - RNA, 20 nt, Artificial Sequence
  Synthetic
uauucaacauucuuaaagaa

SEQ ID NO: 136109 - RNA, 21 nt, Artificial Sequence
  Synthetic
auauucaacauucuuaaagaa

SEQ ID NO: 136110 - RNA, 22 nt, Artificial Sequence
  Synthetic
aauauucaacauucuuaaagaa

SEQ ID NO: 136111 - RNA, 23 nt, Artificial Sequence
  Synthetic
caauauucaacauucuuaaagaa

SEQ ID NO: 136112 - RNA, 24 nt, Artificial Sequence
  Synthetic
ccaauauucaacauucuuaaagaa

SEQ ID NO: 136113 - RNA, 18 nt, Artificial Sequence
  Synthetic
uuuuuucacuuuaaagaa

SEQ ID NO: 136114 - RNA, 19 nt, Artificial Sequence
  Synthetic
uuuuuuucacuuuaaagaa

SEQ ID NO: 136115 - RNA, 20 nt, Artificial Sequence
  Synthetic
auuuuuuucacuuuaaagaa

SEQ ID NO: 136116 - RNA, 18 nt, Artificial Sequence
  Synthetic
aagaaaaaaagacaagaa

SEQ ID NO: 136117 - RNA, 19 nt, Artificial Sequence
  Synthetic
aaagaaaaaaagacaagaa

SEQ ID NO: 136118 - RNA, 22 nt, Artificial Sequence
  Synthetic
aggaaagaaaaaaagacaagaa

SEQ ID NO: 136119 - RNA, 23 nt, Artificial Sequence
  Synthetic
aaggaaagaaaaaaagacaagaa

SEQ ID NO: 136120 - RNA, 24 nt, Artificial Sequence
  Synthetic
caaggaaagaaaaaaagacaagaa

SEQ ID NO: 136121 - RNA, 21 nt, Artificial Sequence
  Synthetic
accuuuuauucaugacaagaa

SEQ ID NO: 136122 - RNA, 22 nt, Artificial Sequence
  Synthetic
caccuuuuauucaugacaagaa

SEQ ID NO: 136123 - RNA, 23 nt, Artificial Sequence
  Synthetic
ucaccuuuuauucaugacaagaa

SEQ ID NO: 136124 - RNA, 24 nt, Artificial Sequence
  Synthetic
aucaccuuuuauucaugacaagaa

SEQ ID NO: 136125 - RNA, 18 nt, Artificial Sequence
  Synthetic
uaggggaaaaaagaagaa

SEQ ID NO: 136126 - RNA, 20 nt, Artificial Sequence
  Synthetic
uguaggggaaaaaagaagaa

SEQ ID NO: 136127 - RNA, 21 nt, Artificial Sequence
  Synthetic
uuguaggggaaaaaagaagaa

SEQ ID NO: 136128 - RNA, 22 nt, Artificial Sequence
  Synthetic
auuguaggggaaaaaagaagaa

SEQ ID NO: 136129 - RNA, 23 nt, Artificial Sequence
  Synthetic
aauuguaggggaaaaaagaagaa

SEQ ID NO: 136130 - RNA, 24 nt, Artificial Sequence
  Synthetic
caauuguaggggaaaaaagaagaa

SEQ ID NO: 136131 - RNA, 18 nt, Artificial Sequence
  Synthetic
cuagaaaaucuagaagaa

SEQ ID NO: 136132 - RNA, 19 nt, Artificial Sequence
  Synthetic
acuagaaaaucuagaagaa

SEQ ID NO: 136133 - RNA, 20 nt, Artificial Sequence
  Synthetic
aacuagaaaaucuagaagaa

SEQ ID NO: 136134 - RNA, 18 nt, Artificial Sequence
  Synthetic
caggagcuggaggaagaa

SEQ ID NO: 136135 - RNA, 19 nt, Artificial Sequence
  Synthetic
ccaggagcuggaggaagaa

SEQ ID NO: 136136 - RNA, 20 nt, Artificial Sequence
  Synthetic
accaggagcuggaggaagaa

SEQ ID NO: 136137 - RNA, 18 nt, Artificial Sequence
  Synthetic
augaaaguaccauaagaa

SEQ ID NO: 136138 - RNA, 19 nt, Artificial Sequence
  Synthetic
aaugaaaguaccauaagaa

SEQ ID NO: 136139 - RNA, 20 nt, Artificial Sequence
  Synthetic
uaaugaaaguaccauaagaa

SEQ ID NO: 136140 - RNA, 18 nt, Artificial Sequence
  Synthetic
uuuuauaucauguaagaa

SEQ ID NO: 136141 - RNA, 19 nt, Artificial Sequence
  Synthetic
uuuuuauaucauguaagaa

SEQ ID NO: 136142 - RNA, 20 nt, Artificial Sequence
  Synthetic
uuuuuuauaucauguaagaa

SEQ ID NO: 136143 - RNA, 21 nt, Artificial Sequence
  Synthetic
auuuuuuauaucauguaagaa

SEQ ID NO: 136144 - RNA, 22 nt, Artificial Sequence
  Synthetic
cauuuuuuauaucauguaagaa

SEQ ID NO: 136145 - RNA, 23 nt, Artificial Sequence
  Synthetic
ucauuuuuuauaucauguaagaa

SEQ ID NO: 136146 - RNA, 24 nt, Artificial Sequence
  Synthetic
uucauuuuuuauaucauguaagaa

SEQ ID NO: 136147 - RNA, 18 nt, Artificial Sequence
  Synthetic
uuguauaagguguaagaa

SEQ ID NO: 136148 - RNA, 19 nt, Artificial Sequence
  Synthetic
uuuguauaagguguaagaa

SEQ ID NO: 136149 - RNA, 20 nt, Artificial Sequence
  Synthetic
uuuuguauaagguguaagaa

SEQ ID NO: 136150 - RNA, 21 nt, Artificial Sequence
  Synthetic
uuuuuguauaagguguaagaa

SEQ ID NO: 136151 - RNA, 22 nt, Artificial Sequence
  Synthetic
auuuuuguauaagguguaagaa

SEQ ID NO: 136152 - RNA, 23 nt, Artificial Sequence
  Synthetic
aauuuuuguauaagguguaagaa

SEQ ID NO: 136153 - RNA, 24 nt, Artificial Sequence
  Synthetic
uaauuuuuguauaagguguaagaa

SEQ ID NO: 136154 - RNA, 18 nt, Artificial Sequence
  Synthetic
uuguuacuguuuuaagaa

SEQ ID NO: 136155 - RNA, 19 nt, Artificial Sequence
  Synthetic
uuuguuacuguuuuaagaa

SEQ ID NO: 136156 - RNA, 20 nt, Artificial Sequence
  Synthetic
uuuuguuacuguuuuaagaa

SEQ ID NO: 136157 - RNA, 18 nt, Artificial Sequence
  Synthetic
aaagauacaagaacagaa

SEQ ID NO: 136158 - RNA, 19 nt, Artificial Sequence
  Synthetic
aaaagauacaagaacagaa

SEQ ID NO: 136159 - RNA, 20 nt, Artificial Sequence
  Synthetic
uaaaagauacaagaacagaa

SEQ ID NO: 136160 - RNA, 18 nt, Artificial Sequence
  Synthetic
aaacccuacaagccagaa

SEQ ID NO: 136161 - RNA, 20 nt, Artificial Sequence
  Synthetic
agaaacccuacaagccagaa

SEQ ID NO: 136162 - RNA, 21 nt, Artificial Sequence
  Synthetic
cagaaacccuacaagccagaa

SEQ ID NO: 136163 - RNA, 24 nt, Artificial Sequence
  Synthetic
uggcagaaacccuacaagccagaa

SEQ ID NO: 136164 - RNA, 18 nt, Artificial Sequence
  Synthetic
caugugaagacagcagaa

SEQ ID NO: 136165 - RNA, 19 nt, Artificial Sequence
  Synthetic
ccaugugaagacagcagaa

SEQ ID NO: 136166 - RNA, 20 nt, Artificial Sequence
  Synthetic
accaugugaagacagcagaa

SEQ ID NO: 136167 - RNA, 18 nt, Artificial Sequence
  Synthetic
aaggaaauuaaggcagaa

SEQ ID NO: 136168 - RNA, 19 nt, Artificial Sequence
  Synthetic
uaaggaaauuaaggcagaa

SEQ ID NO: 136169 - RNA, 20 nt, Artificial Sequence
  Synthetic
auaaggaaauuaaggcagaa

SEQ ID NO: 136170 - RNA, 21 nt, Artificial Sequence
  Synthetic
aauaaggaaauuaaggcagaa

SEQ ID NO: 136171 - RNA, 22 nt, Artificial Sequence
  Synthetic
aaauaaggaaauuaaggcagaa

SEQ ID NO: 136172 - RNA, 23 nt, Artificial Sequence
  Synthetic
uaaauaaggaaauuaaggcagaa

SEQ ID NO: 136173 - RNA, 24 nt, Artificial Sequence
  Synthetic
auaaauaaggaaauuaaggcagaa

SEQ ID NO: 136174 - RNA, 18 nt, Artificial Sequence
  Synthetic
uggaauucagaaagagaa

SEQ ID NO: 136175 - RNA, 19 nt, Artificial Sequence
  Synthetic
auggaauucagaaagagaa

SEQ ID NO: 136176 - RNA, 20 nt, Artificial Sequence
  Synthetic
aauggaauucagaaagagaa

SEQ ID NO: 136177 - RNA, 18 nt, Artificial Sequence
  Synthetic
aauauuuaugacagagaa

SEQ ID NO: 136178 - RNA, 19 nt, Artificial Sequence
  Synthetic
aaauauuuaugacagagaa

SEQ ID NO: 136179 - RNA, 20 nt, Artificial Sequence
  Synthetic
aaaauauuuaugacagagaa

SEQ ID NO: 136180 - RNA, 21 nt, Artificial Sequence
  Synthetic
uagcagauugggggcagagaa

SEQ ID NO: 136181 - RNA, 21 nt, Artificial Sequence
  Synthetic
aguagucaaguggauagagaa

SEQ ID NO: 136182 - RNA, 22 nt, Artificial Sequence
  Synthetic
aaguagucaaguggauagagaa

SEQ ID NO: 136183 - RNA, 23 nt, Artificial Sequence
  Synthetic
caaguagucaaguggauagagaa

SEQ ID NO: 136184 - RNA, 24 nt, Artificial Sequence
  Synthetic
acaaguagucaaguggauagagaa

SEQ ID NO: 136185 - RNA, 18 nt, Artificial Sequence
  Synthetic
uuguuuucuaaaggagaa

SEQ ID NO: 136186 - RNA, 19 nt, Artificial Sequence
  Synthetic
uuuguuuucuaaaggagaa

SEQ ID NO: 136187 - RNA, 20 nt, Artificial Sequence
  Synthetic
uuuuguuuucuaaaggagaa

SEQ ID NO: 136188 - RNA, 18 nt, Artificial Sequence
  Synthetic
acacauagaccaauagaa

SEQ ID NO: 136189 - RNA, 19 nt, Artificial Sequence
  Synthetic
uacacauagaccaauagaa

SEQ ID NO: 136190 - RNA, 19 nt, Artificial Sequence
  Synthetic
uguucauaaaauaauagaa

SEQ ID NO: 136191 - RNA, 20 nt, Artificial Sequence
  Synthetic
auguucauaaaauaauagaa

SEQ ID NO: 136192 - RNA, 18 nt, Artificial Sequence
  Synthetic
aaacccuacaagcuagaa

SEQ ID NO: 136193 - RNA, 20 nt, Artificial Sequence
  Synthetic
agaaacccuacaagcuagaa

SEQ ID NO: 136194 - RNA, 21 nt, Artificial Sequence
  Synthetic
cagaaacccuacaagcuagaa

SEQ ID NO: 136195 - RNA, 23 nt, Artificial Sequence
  Synthetic
ugcagaaacccuacaagcuagaa

SEQ ID NO: 136196 - RNA, 24 nt, Artificial Sequence
  Synthetic
cugcagaaacccuacaagcuagaa

SEQ ID NO: 136197 - RNA, 21 nt, Artificial Sequence
  Synthetic
cagaaacuuggaccaguagaa

SEQ ID NO: 136198 - RNA, 22 nt, Artificial Sequence
  Synthetic
acagaaacuuggaccaguagaa

SEQ ID NO: 136199 - RNA, 23 nt, Artificial Sequence
  Synthetic
aacagaaacuuggaccaguagaa

SEQ ID NO: 136200 - RNA, 24 nt, Artificial Sequence
  Synthetic
aaacagaaacuuggaccaguagaa

SEQ ID NO: 136201 - RNA, 18 nt, Artificial Sequence
  Synthetic
aagacauccagauuagaa

SEQ ID NO: 136202 - RNA, 19 nt, Artificial Sequence
  Synthetic
aaagacauccagauuagaa

SEQ ID NO: 136203 - RNA, 20 nt, Artificial Sequence
  Synthetic
aaaagacauccagauuagaa

SEQ ID NO: 136204 - RNA, 21 nt, Artificial Sequence
  Synthetic
uaaaagacauccagauuagaa

SEQ ID NO: 136205 - RNA, 22 nt, Artificial Sequence
  Synthetic
auaaaagacauccagauuagaa

SEQ ID NO: 136206 - RNA, 23 nt, Artificial Sequence
  Synthetic
aauaaaagacauccagauuagaa

SEQ ID NO: 136207 - RNA, 24 nt, Artificial Sequence
  Synthetic
aaauaaaagacauccagauuagaa

SEQ ID NO: 136208 - RNA, 19 nt, Artificial Sequence
  Synthetic
ugauucaguagacuuagaa

SEQ ID NO: 136209 - RNA, 20 nt, Artificial Sequence
  Synthetic
cugauucaguagacuuagaa

SEQ ID NO: 136210 - RNA, 21 nt, Artificial Sequence
  Synthetic
ucugauucaguagacuuagaa

SEQ ID NO: 136211 - RNA, 22 nt, Artificial Sequence
  Synthetic
uucugauucaguagacuuagaa

SEQ ID NO: 136212 - RNA, 23 nt, Artificial Sequence
  Synthetic
auucugauucaguagacuuagaa

SEQ ID NO: 136213 - RNA, 24 nt, Artificial Sequence
  Synthetic
aauucugauucaguagacuuagaa

SEQ ID NO: 136214 - RNA, 18 nt, Artificial Sequence
  Synthetic
uaaauaccuauuuuagaa

SEQ ID NO: 136215 - RNA, 19 nt, Artificial Sequence
  Synthetic
uuaaauaccuauuuuagaa

SEQ ID NO: 136216 - RNA, 20 nt, Artificial Sequence
  Synthetic
uuuaaauaccuauuuuagaa

SEQ ID NO: 136217 - RNA, 21 nt, Artificial Sequence
  Synthetic
uuuuaaauaccuauuuuagaa

SEQ ID NO: 136218 - RNA, 23 nt, Artificial Sequence
  Synthetic
aguuuuaaauaccuauuuuagaa

SEQ ID NO: 136219 - RNA, 24 nt, Artificial Sequence
  Synthetic
uaguuuuaaauaccuauuuuagaa

SEQ ID NO: 136220 - RNA, 19 nt, Artificial Sequence
  Synthetic
agcacuuugagaggccgaa

SEQ ID NO: 136221 - RNA, 20 nt, Artificial Sequence
  Synthetic
cagcacuuugagaggccgaa

SEQ ID NO: 136222 - RNA, 21 nt, Artificial Sequence
  Synthetic
ccagcacuuugagaggccgaa

SEQ ID NO: 136223 - RNA, 22 nt, Artificial Sequence
  Synthetic
cccagcacuuugagaggccgaa

SEQ ID NO: 136224 - RNA, 23 nt, Artificial Sequence
  Synthetic
ucccagcacuuugagaggccgaa

SEQ ID NO: 136225 - RNA, 24 nt, Artificial Sequence
  Synthetic
aucccagcacuuugagaggccgaa

SEQ ID NO: 136226 - RNA, 18 nt, Artificial Sequence
  Synthetic
ccugcagcuacaaaggaa

SEQ ID NO: 136227 - RNA, 19 nt, Artificial Sequence
  Synthetic
uccugcagcuacaaaggaa

SEQ ID NO: 136228 - RNA, 20 nt, Artificial Sequence
  Synthetic
uuccugcagcuacaaaggaa

SEQ ID NO: 136229 - RNA, 18 nt, Artificial Sequence
  Synthetic
caggcaagggacaaggaa

SEQ ID NO: 136230 - RNA, 19 nt, Artificial Sequence
  Synthetic
acaggcaagggacaaggaa

SEQ ID NO: 136231 - RNA, 20 nt, Artificial Sequence
  Synthetic
cacaggcaagggacaaggaa

SEQ ID NO: 136232 - RNA, 18 nt, Artificial Sequence
  Synthetic
cucuuuccaaauaaggaa

SEQ ID NO: 136233 - RNA, 19 nt, Artificial Sequence
  Synthetic
ccucuuuccaaauaaggaa

SEQ ID NO: 136234 - RNA, 20 nt, Artificial Sequence
  Synthetic
uccucuuuccaaauaaggaa

SEQ ID NO: 136235 - RNA, 22 nt, Artificial Sequence
  Synthetic
aguccucuuuccaaauaaggaa

SEQ ID NO: 136236 - RNA, 23 nt, Artificial Sequence
  Synthetic
uaguccucuuuccaaauaaggaa

SEQ ID NO: 136237 - RNA, 24 nt, Artificial Sequence
  Synthetic
uuaguccucuuuccaaauaaggaa

SEQ ID NO: 136238 - RNA, 21 nt, Artificial Sequence
  Synthetic
aaaaagaaauuguaccaggaa

SEQ ID NO: 136239 - RNA, 23 nt, Artificial Sequence
  Synthetic
agaaaaagaaauuguaccaggaa

SEQ ID NO: 136240 - RNA, 24 nt, Artificial Sequence
  Synthetic
aagaaaaagaaauuguaccaggaa

SEQ ID NO: 136241 - RNA, 19 nt, Artificial Sequence
  Synthetic
agagacagagagagaggaa

SEQ ID NO: 136242 - RNA, 21 nt, Artificial Sequence
  Synthetic
agagagacagagagagaggaa

SEQ ID NO: 136243 - RNA, 23 nt, Artificial Sequence
  Synthetic
agagagagacagagagagaggaa

SEQ ID NO: 136244 - RNA, 18 nt, Artificial Sequence
  Synthetic
aacagugggugggaggaa

SEQ ID NO: 136245 - RNA, 19 nt, Artificial Sequence
  Synthetic
aaacagugggugggaggaa

SEQ ID NO: 136246 - RNA, 20 nt, Artificial Sequence
  Synthetic
aaaacagugggugggaggaa

SEQ ID NO: 136247 - RNA, 21 nt, Artificial Sequence
  Synthetic
uaaaacagugggugggaggaa

SEQ ID NO: 136248 - RNA, 22 nt, Artificial Sequence
  Synthetic
uuaaaacagugggugggaggaa

SEQ ID NO: 136249 - RNA, 23 nt, Artificial Sequence
  Synthetic
uuuaaaacagugggugggaggaa

SEQ ID NO: 136250 - RNA, 24 nt, Artificial Sequence
  Synthetic
auuuaaaacagugggugggaggaa

SEQ ID NO: 136251 - RNA, 18 nt, Artificial Sequence
  Synthetic
acuggagcuuggagggaa

SEQ ID NO: 136252 - RNA, 19 nt, Artificial Sequence
  Synthetic
cacuggagcuuggagggaa

SEQ ID NO: 136253 - RNA, 20 nt, Artificial Sequence
  Synthetic
acacuggagcuuggagggaa

SEQ ID NO: 136254 - RNA, 19 nt, Artificial Sequence
  Synthetic
agaggguggaaugagggaa

SEQ ID NO: 136255 - RNA, 19 nt, Artificial Sequence
  Synthetic
agaaaaaauauauagggaa

SEQ ID NO: 136256 - RNA, 20 nt, Artificial Sequence
  Synthetic
aagaaaaaauauauagggaa

SEQ ID NO: 136257 - RNA, 21 nt, Artificial Sequence
  Synthetic
aaagaaaaaauauauagggaa

SEQ ID NO: 136258 - RNA, 22 nt, Artificial Sequence
  Synthetic
aaaagaaaaaauauauagggaa

SEQ ID NO: 136259 - RNA, 23 nt, Artificial Sequence
  Synthetic
aaaaagaaaaaauauauagggaa

SEQ ID NO: 136260 - RNA, 24 nt, Artificial Sequence
  Synthetic
aaaaaagaaaaaauauauagggaa

SEQ ID NO: 136261 - RNA, 18 nt, Artificial Sequence
  Synthetic
agcugaggguugggggaa

SEQ ID NO: 136262 - RNA, 19 nt, Artificial Sequence
  Synthetic
aagcugaggguugggggaa

SEQ ID NO: 136263 - RNA, 18 nt, Artificial Sequence
  Synthetic
aaagaaagguauggggaa

SEQ ID NO: 136264 - RNA, 19 nt, Artificial Sequence
  Synthetic
aaaagaaagguauggggaa

SEQ ID NO: 136265 - RNA, 18 nt, Artificial Sequence
  Synthetic
aaaaauaagcauugggaa

SEQ ID NO: 136266 - RNA, 19 nt, Artificial Sequence
  Synthetic
aaaaaauaagcauugggaa

SEQ ID NO: 136267 - RNA, 20 nt, Artificial Sequence
  Synthetic
aaaaaaauaagcauugggaa

SEQ ID NO: 136268 - RNA, 19 nt, Artificial Sequence
  Synthetic
agcuggaaaaggcauggaa

SEQ ID NO: 136269 - RNA, 20 nt, Artificial Sequence
  Synthetic
aagcuggaaaaggcauggaa

SEQ ID NO: 136270 - RNA, 21 nt, Artificial Sequence
  Synthetic
aaagcuggaaaaggcauggaa

SEQ ID NO: 136271 - RNA, 22 nt, Artificial Sequence
  Synthetic
aaaagcuggaaaaggcauggaa

SEQ ID NO: 136272 - RNA, 23 nt, Artificial Sequence
  Synthetic
uaaaagcuggaaaaggcauggaa

SEQ ID NO: 136273 - RNA, 24 nt, Artificial Sequence
  Synthetic
cuaaaagcuggaaaaggcauggaa

SEQ ID NO: 136274 - RNA, 19 nt, Artificial Sequence
  Synthetic
agauaauugaaucauggaa

SEQ ID NO: 136275 - RNA, 20 nt, Artificial Sequence
  Synthetic
cagauaauugaaucauggaa

SEQ ID NO: 136276 - RNA, 18 nt, Artificial Sequence
  Synthetic
acuauuaauuaaguggaa

SEQ ID NO: 136277 - RNA, 19 nt, Artificial Sequence
  Synthetic
uacuauuaauuaaguggaa

SEQ ID NO: 136278 - RNA, 20 nt, Artificial Sequence
  Synthetic
uuacuauuaauuaaguggaa

SEQ ID NO: 136279 - RNA, 21 nt, Artificial Sequence
  Synthetic
uuuacuauuaauuaaguggaa

SEQ ID NO: 136280 - RNA, 22 nt, Artificial Sequence
  Synthetic
auuuacuauuaauuaaguggaa

SEQ ID NO: 136281 - RNA, 23 nt, Artificial Sequence
  Synthetic
uauuuacuauuaauuaaguggaa

SEQ ID NO: 136282 - RNA, 24 nt, Artificial Sequence
  Synthetic
auauuuacuauuaauuaaguggaa

SEQ ID NO: 136283 - RNA, 18 nt, Artificial Sequence
  Synthetic
aacagccuucuauuggaa

SEQ ID NO: 136284 - RNA, 19 nt, Artificial Sequence
  Synthetic
aaacagccuucuauuggaa

SEQ ID NO: 136285 - RNA, 21 nt, Artificial Sequence
  Synthetic
cgaaacagccuucuauuggaa

SEQ ID NO: 136286 - RNA, 22 nt, Artificial Sequence
  Synthetic
acgaaacagccuucuauuggaa

SEQ ID NO: 136287 - RNA, 24 nt, Artificial Sequence
  Synthetic
agacgaaacagccuucuauuggaa

SEQ ID NO: 136288 - RNA, 18 nt, Artificial Sequence
  Synthetic
uguggaagugacuuggaa

SEQ ID NO: 136289 - RNA, 19 nt, Artificial Sequence
  Synthetic
auguggaagugacuuggaa

SEQ ID NO: 136290 - RNA, 20 nt, Artificial Sequence
  Synthetic
aauguggaagugacuuggaa

SEQ ID NO: 136291 - RNA, 21 nt, Artificial Sequence
  Synthetic
aaauguggaagugacuuggaa

SEQ ID NO: 136292 - RNA, 22 nt, Artificial Sequence
  Synthetic
aaaauguggaagugacuuggaa

SEQ ID NO: 136293 - RNA, 24 nt, Artificial Sequence
  Synthetic
ugaaaauguggaagugacuuggaa

SEQ ID NO: 136294 - RNA, 18 nt, Artificial Sequence
  Synthetic
aaauacaaaucaaaugaa

SEQ ID NO: 136295 - RNA, 20 nt, Artificial Sequence
  Synthetic
ugaaauacaaaucaaaugaa

SEQ ID NO: 136296 - RNA, 18 nt, Artificial Sequence
  Synthetic
uaaugaaauucaaaugaa

SEQ ID NO: 136297 - RNA, 19 nt, Artificial Sequence
  Synthetic
uuaaugaaauucaaaugaa

SEQ ID NO: 136298 - RNA, 21 nt, Artificial Sequence
  Synthetic
aguuaaugaaauucaaaugaa

SEQ ID NO: 136299 - RNA, 23 nt, Artificial Sequence
  Synthetic
agaguuaaugaaauucaaaugaa

SEQ ID NO: 136300 - RNA, 24 nt, Artificial Sequence
  Synthetic
cagaguuaaugaaauucaaaugaa

SEQ ID NO: 136301 - RNA, 20 nt, Artificial Sequence
  Synthetic
aggguuguuauuagaaugaa

SEQ ID NO: 136302 - RNA, 21 nt, Artificial Sequence
  Synthetic
uaggguuguuauuagaaugaa

SEQ ID NO: 136303 - RNA, 22 nt, Artificial Sequence
  Synthetic
auaggguuguuauuagaaugaa

SEQ ID NO: 136304 - RNA, 23 nt, Artificial Sequence
  Synthetic
cauaggguuguuauuagaaugaa

SEQ ID NO: 136305 - RNA, 24 nt, Artificial Sequence
  Synthetic
ucauaggguuguuauuagaaugaa

SEQ ID NO: 136306 - RNA, 18 nt, Artificial Sequence
  Synthetic
caaauuuuauguaaugaa

SEQ ID NO: 136307 - RNA, 19 nt, Artificial Sequence
  Synthetic
acaaauuuuauguaaugaa

SEQ ID NO: 136308 - RNA, 20 nt, Artificial Sequence
  Synthetic
aacaaauuuuauguaaugaa

SEQ ID NO: 136309 - RNA, 18 nt, Artificial Sequence
  Synthetic
cagggaaaaagagaugaa

SEQ ID NO: 136310 - RNA, 19 nt, Artificial Sequence
  Synthetic
ucagggaaaaagagaugaa

SEQ ID NO: 136311 - RNA, 20 nt, Artificial Sequence
  Synthetic
cucagggaaaaagagaugaa

SEQ ID NO: 136312 - RNA, 18 nt, Artificial Sequence
  Synthetic
caaggauuucuggaugaa

SEQ ID NO: 136313 - RNA, 19 nt, Artificial Sequence
  Synthetic
acaaggauuucuggaugaa

SEQ ID NO: 136314 - RNA, 20 nt, Artificial Sequence
  Synthetic
aacaaggauuucuggaugaa

SEQ ID NO: 136315 - RNA, 18 nt, Artificial Sequence
  Synthetic
aaaacuucaacauaugaa

SEQ ID NO: 136316 - RNA, 19 nt, Artificial Sequence
  Synthetic
uaaaacuucaacauaugaa

SEQ ID NO: 136317 - RNA, 20 nt, Artificial Sequence
  Synthetic
uuaaaacuucaacauaugaa

SEQ ID NO: 136318 - RNA, 18 nt, Artificial Sequence
  Synthetic
agcauucauacaacugaa

SEQ ID NO: 136319 - RNA, 19 nt, Artificial Sequence
  Synthetic
cagcauucauacaacugaa

SEQ ID NO: 136320 - RNA, 20 nt, Artificial Sequence
  Synthetic
ucagcauucauacaacugaa

SEQ ID NO: 136321 - RNA, 21 nt, Artificial Sequence
  Synthetic
cucagcauucauacaacugaa

SEQ ID NO: 136322 - RNA, 22 nt, Artificial Sequence
  Synthetic
ucucagcauucauacaacugaa

SEQ ID NO: 136323 - RNA, 23 nt, Artificial Sequence
  Synthetic
cucucagcauucauacaacugaa

SEQ ID NO: 136324 - RNA, 24 nt, Artificial Sequence
  Synthetic
ucucucagcauucauacaacugaa

SEQ ID NO: 136325 - RNA, 18 nt, Artificial Sequence
  Synthetic
uuuaaaaauagcacugaa

SEQ ID NO: 136326 - RNA, 19 nt, Artificial Sequence
  Synthetic
uuuuaaaaauagcacugaa

SEQ ID NO: 136327 - RNA, 20 nt, Artificial Sequence
  Synthetic
auuuuaaaaauagcacugaa

SEQ ID NO: 136328 - RNA, 18 nt, Artificial Sequence
  Synthetic
uuuucuugucauacugaa

SEQ ID NO: 136329 - RNA, 20 nt, Artificial Sequence
  Synthetic
aguuuucuugucauacugaa

SEQ ID NO: 136330 - RNA, 18 nt, Artificial Sequence
  Synthetic
uucuuuccuaaggcugaa

SEQ ID NO: 136331 - RNA, 19 nt, Artificial Sequence
  Synthetic
uuucuuuccuaaggcugaa

SEQ ID NO: 136332 - RNA, 20 nt, Artificial Sequence
  Synthetic
cuuucuuuccuaaggcugaa

SEQ ID NO: 136333 - RNA, 21 nt, Artificial Sequence
  Synthetic
ucuuucuuuccuaaggcugaa

SEQ ID NO: 136334 - RNA, 22 nt, Artificial Sequence
  Synthetic
uucuuucuuuccuaaggcugaa

SEQ ID NO: 136335 - RNA, 23 nt, Artificial Sequence
  Synthetic
uuucuuucuuuccuaaggcugaa

SEQ ID NO: 136336 - RNA, 24 nt, Artificial Sequence
  Synthetic
auuucuuucuuuccuaaggcugaa

SEQ ID NO: 136337 - RNA, 18 nt, Artificial Sequence
  Synthetic
aagcauauacauucugaa

SEQ ID NO: 136338 - RNA, 19 nt, Artificial Sequence
  Synthetic
aaagcauauacauucugaa

SEQ ID NO: 136339 - RNA, 20 nt, Artificial Sequence
  Synthetic
uaaagcauauacauucugaa

SEQ ID NO: 136340 - RNA, 18 nt, Artificial Sequence
  Synthetic
aaaacaaugcuaagugaa

SEQ ID NO: 136341 - RNA, 19 nt, Artificial Sequence
  Synthetic
aaaaacaaugcuaagugaa

SEQ ID NO: 136342 - RNA, 20 nt, Artificial Sequence
  Synthetic
uaaaaacaaugcuaagugaa

SEQ ID NO: 136343 - RNA, 18 nt, Artificial Sequence
  Synthetic
aaugaauaaguaagugaa

SEQ ID NO: 136344 - RNA, 19 nt, Artificial Sequence
  Synthetic
uaaugaauaaguaagugaa

SEQ ID NO: 136345 - RNA, 20 nt, Artificial Sequence
  Synthetic
uuaaugaauaaguaagugaa

SEQ ID NO: 136346 - RNA, 18 nt, Artificial Sequence
  Synthetic
accaguuuuaggagugaa

SEQ ID NO: 136347 - RNA, 19 nt, Artificial Sequence
  Synthetic
aaccaguuuuaggagugaa

SEQ ID NO: 136348 - RNA, 20 nt, Artificial Sequence
  Synthetic
aaaccaguuuuaggagugaa

SEQ ID NO: 136349 - RNA, 21 nt, Artificial Sequence
  Synthetic
aaguagcauuuuggaguugaa

SEQ ID NO: 136350 - RNA, 23 nt, Artificial Sequence
  Synthetic
agaaguagcauuuuggaguugaa

SEQ ID NO: 136351 - RNA, 24 nt, Artificial Sequence
  Synthetic
uagaaguagcauuuuggaguugaa

SEQ ID NO: 136352 - RNA, 18 nt, Artificial Sequence
  Synthetic
ccagcaccauugguugaa

SEQ ID NO: 136353 - RNA, 19 nt, Artificial Sequence
  Synthetic
cccagcaccauugguugaa

SEQ ID NO: 136354 - RNA, 20 nt, Artificial Sequence
  Synthetic
ucccagcaccauugguugaa

SEQ ID NO: 136355 - RNA, 21 nt, Artificial Sequence
  Synthetic
uucccagcaccauugguugaa

SEQ ID NO: 136356 - RNA, 22 nt, Artificial Sequence
  Synthetic
uuucccagcaccauugguugaa

SEQ ID NO: 136357 - RNA, 23 nt, Artificial Sequence
  Synthetic
uuuucccagcaccauugguugaa

SEQ ID NO: 136358 - RNA, 18 nt, Artificial Sequence
  Synthetic
uguuaugaaacuguugaa

SEQ ID NO: 136359 - RNA, 19 nt, Artificial Sequence
  Synthetic
auguuaugaaacuguugaa

SEQ ID NO: 136360 - RNA, 20 nt, Artificial Sequence
  Synthetic
cauguuaugaaacuguugaa

SEQ ID NO: 136361 - RNA, 18 nt, Artificial Sequence
  Synthetic
caguaaauaguuguugaa

SEQ ID NO: 136362 - RNA, 19 nt, Artificial Sequence
  Synthetic
ucaguaaauaguuguugaa

SEQ ID NO: 136363 - RNA, 18 nt, Artificial Sequence
  Synthetic
uugaugaugucauuugaa

SEQ ID NO: 136364 - RNA, 19 nt, Artificial Sequence
  Synthetic
cuugaugaugucauuugaa

SEQ ID NO: 136365 - RNA, 20 nt, Artificial Sequence
  Synthetic
ucuugaugaugucauuugaa

SEQ ID NO: 136366 - RNA, 21 nt, Artificial Sequence
  Synthetic
cacauggugaagcauuuugaa

SEQ ID NO: 136367 - RNA, 22 nt, Artificial Sequence
  Synthetic
ccacauggugaagcauuuugaa

SEQ ID NO: 136368 - RNA, 23 nt, Artificial Sequence
  Synthetic
cccacauggugaagcauuuugaa

SEQ ID NO: 136369 - RNA, 18 nt, Artificial Sequence
  Synthetic
auuauaaaauauuuugaa

SEQ ID NO: 136370 - RNA, 19 nt, Artificial Sequence
  Synthetic
aauuauaaaauauuuugaa

SEQ ID NO: 136371 - RNA, 20 nt, Artificial Sequence
  Synthetic
aaauuauaaaauauuuugaa

SEQ ID NO: 136372 - RNA, 23 nt, Artificial Sequence
  Synthetic
aggaaauuauaaaauauuuugaa

SEQ ID NO: 136373 - RNA, 24 nt, Artificial Sequence
  Synthetic
uaggaaauuauaaaauauuuugaa

SEQ ID NO: 136374 - RNA, 18 nt, Artificial Sequence
  Synthetic
aaacauuuguaaaaauaa

SEQ ID NO: 136375 - RNA, 19 nt, Artificial Sequence
  Synthetic
uaaacauuuguaaaaauaa

SEQ ID NO: 136376 - RNA, 20 nt, Artificial Sequence
  Synthetic
auaaacauuuguaaaaauaa

SEQ ID NO: 136377 - RNA, 18 nt, Artificial Sequence
  Synthetic
cacauaggcucaaaauaa

SEQ ID NO: 136378 - RNA, 19 nt, Artificial Sequence
  Synthetic
acacauaggcucaaaauaa

SEQ ID NO: 136379 - RNA, 20 nt, Artificial Sequence
  Synthetic
cacacauaggcucaaaauaa

SEQ ID NO: 136380 - RNA, 21 nt, Artificial Sequence
  Synthetic
acacacauaggcucaaaauaa

SEQ ID NO: 136381 - RNA, 23 nt, Artificial Sequence
  Synthetic
agacacacauaggcucaaaauaa

SEQ ID NO: 136382 - RNA, 18 nt, Artificial Sequence
  Synthetic
auaaguauauuaaaauaa

SEQ ID NO: 136383 - RNA, 19 nt, Artificial Sequence
  Synthetic
aauaaguauauuaaaauaa

SEQ ID NO: 136384 - RNA, 20 nt, Artificial Sequence
  Synthetic
aaauaaguauauuaaaauaa

SEQ ID NO: 136385 - RNA, 18 nt, Artificial Sequence
  Synthetic
aaaaaaacuuuaaaauaa

SEQ ID NO: 136386 - RNA, 19 nt, Artificial Sequence
  Synthetic
uaaaaaaacuuuaaaauaa

SEQ ID NO: 136387 - RNA, 20 nt, Artificial Sequence
  Synthetic
cuaaaaaaacuuuaaaauaa

SEQ ID NO: 136388 - RNA, 18 nt, Artificial Sequence
  Synthetic
uugaaauuaaauaaauaa

SEQ ID NO: 136389 - RNA, 19 nt, Artificial Sequence
  Synthetic
auugaaauuaaauaaauaa

SEQ ID NO: 136390 - RNA, 20 nt, Artificial Sequence
  Synthetic
cauugaaauuaaauaaauaa

SEQ ID NO: 136391 - RNA, 18 nt, Artificial Sequence
  Synthetic
ucacacacauauaaauaa

SEQ ID NO: 136392 - RNA, 19 nt, Artificial Sequence
  Synthetic
uucacacacauauaaauaa

SEQ ID NO: 136393 - RNA, 20 nt, Artificial Sequence
  Synthetic
auucacacacauauaaauaa

SEQ ID NO: 136394 - RNA, 18 nt, Artificial Sequence
  Synthetic
uaaaaacaaccuaaauaa

SEQ ID NO: 136395 - RNA, 19 nt, Artificial Sequence
  Synthetic
uuaaaaacaaccuaaauaa

SEQ ID NO: 136396 - RNA, 20 nt, Artificial Sequence
  Synthetic
auuaaaaacaaccuaaauaa

SEQ ID NO: 136397 - RNA, 18 nt, Artificial Sequence
  Synthetic
uggguauauaaccaauaa

SEQ ID NO: 136398 - RNA, 19 nt, Artificial Sequence
  Synthetic
uuggguauauaaccaauaa

SEQ ID NO: 136399 - RNA, 20 nt, Artificial Sequence
  Synthetic
uuuggguauauaaccaauaa

SEQ ID NO: 136400 - RNA, 21 nt, Artificial Sequence
  Synthetic
cuuuggguauauaaccaauaa

SEQ ID NO: 136401 - RNA, 22 nt, Artificial Sequence
  Synthetic
ccuuuggguauauaaccaauaa

SEQ ID NO: 136402 - RNA, 23 nt, Artificial Sequence
  Synthetic
uccuuuggguauauaaccaauaa

SEQ ID NO: 136403 - RNA, 24 nt, Artificial Sequence
  Synthetic
uuccuuuggguauauaaccaauaa

SEQ ID NO: 136404 - RNA, 18 nt, Artificial Sequence
  Synthetic
uucaacacucuucaauaa

SEQ ID NO: 136405 - RNA, 19 nt, Artificial Sequence
  Synthetic
auucaacacucuucaauaa

SEQ ID NO: 136406 - RNA, 20 nt, Artificial Sequence
  Synthetic
uauucaacacucuucaauaa

SEQ ID NO: 136407 - RNA, 21 nt, Artificial Sequence
  Synthetic
auauucaacacucuucaauaa

SEQ ID NO: 136408 - RNA, 22 nt, Artificial Sequence
  Synthetic
aauauucaacacucuucaauaa

SEQ ID NO: 136409 - RNA, 23 nt, Artificial Sequence
  Synthetic
caauauucaacacucuucaauaa

SEQ ID NO: 136410 - RNA, 24 nt, Artificial Sequence
  Synthetic
ccaauauucaacacucuucaauaa

SEQ ID NO: 136411 - RNA, 18 nt, Artificial Sequence
  Synthetic
aacuuuaccuuggaauaa

SEQ ID NO: 136412 - RNA, 19 nt, Artificial Sequence
  Synthetic
uaacuuuaccuuggaauaa

SEQ ID NO: 136413 - RNA, 20 nt, Artificial Sequence
  Synthetic
uuaacuuuaccuuggaauaa

SEQ ID NO: 136414 - RNA, 18 nt, Artificial Sequence
  Synthetic
uaauaguuuuuggaauaa

SEQ ID NO: 136415 - RNA, 19 nt, Artificial Sequence
  Synthetic
auaauaguuuuuggaauaa

SEQ ID NO: 136416 - RNA, 20 nt, Artificial Sequence
  Synthetic
aauaauaguuuuuggaauaa

SEQ ID NO: 136417 - RNA, 19 nt, Artificial Sequence
  Synthetic
aguugaguuuuuuuaauaa

SEQ ID NO: 136418 - RNA, 20 nt, Artificial Sequence
  Synthetic
aaguugaguuuuuuuaauaa

SEQ ID NO: 136419 - RNA, 21 nt, Artificial Sequence
  Synthetic
augcagauuuuaugaccauaa

SEQ ID NO: 136420 - RNA, 22 nt, Artificial Sequence
  Synthetic
aaugcagauuuuaugaccauaa

SEQ ID NO: 136421 - RNA, 23 nt, Artificial Sequence
  Synthetic
caaugcagauuuuaugaccauaa

SEQ ID NO: 136422 - RNA, 24 nt, Artificial Sequence
  Synthetic
acaaugcagauuuuaugaccauaa

SEQ ID NO: 136423 - RNA, 18 nt, Artificial Sequence
  Synthetic
uugcaaccuuaggcauaa

SEQ ID NO: 136424 - RNA, 19 nt, Artificial Sequence
  Synthetic
auugcaaccuuaggcauaa

SEQ ID NO: 136425 - RNA, 20 nt, Artificial Sequence
  Synthetic
aauugcaaccuuaggcauaa

SEQ ID NO: 136426 - RNA, 21 nt, Artificial Sequence
  Synthetic
aaauugcaaccuuaggcauaa

SEQ ID NO: 136427 - RNA, 22 nt, Artificial Sequence
  Synthetic
aaaauugcaaccuuaggcauaa

SEQ ID NO: 136428 - RNA, 23 nt, Artificial Sequence
  Synthetic
aaaaauugcaaccuuaggcauaa

SEQ ID NO: 136429 - RNA, 24 nt, Artificial Sequence
  Synthetic
aaaaaauugcaaccuuaggcauaa

SEQ ID NO: 136430 - RNA, 18 nt, Artificial Sequence
  Synthetic
uaagaguuuuucucauaa

SEQ ID NO: 136431 - RNA, 19 nt, Artificial Sequence
  Synthetic
cuaagaguuuuucucauaa

SEQ ID NO: 136432 - RNA, 21 nt, Artificial Sequence
  Synthetic
ugcuaagaguuuuucucauaa

SEQ ID NO: 136433 - RNA, 22 nt, Artificial Sequence
  Synthetic
uugcuaagaguuuuucucauaa

SEQ ID NO: 136434 - RNA, 23 nt, Artificial Sequence
  Synthetic
uuugcuaagaguuuuucucauaa

SEQ ID NO: 136435 - RNA, 24 nt, Artificial Sequence
  Synthetic
auuugcuaagaguuuuucucauaa

SEQ ID NO: 136436 - RNA, 18 nt, Artificial Sequence
  Synthetic
uguuuuuaaauuucauaa

SEQ ID NO: 136437 - RNA, 19 nt, Artificial Sequence
  Synthetic
auguuuuuaaauuucauaa

SEQ ID NO: 136438 - RNA, 20 nt, Artificial Sequence
  Synthetic
aauguuuuuaaauuucauaa

SEQ ID NO: 136439 - RNA, 21 nt, Artificial Sequence
  Synthetic
uaauguuuuuaaauuucauaa

SEQ ID NO: 136440 - RNA, 22 nt, Artificial Sequence
  Synthetic
uuaauguuuuuaaauuucauaa

SEQ ID NO: 136441 - RNA, 23 nt, Artificial Sequence
  Synthetic
uuuaauguuuuuaaauuucauaa

SEQ ID NO: 136442 - RNA, 24 nt, Artificial Sequence
  Synthetic
uuuuaauguuuuuaaauuucauaa

SEQ ID NO: 136443 - RNA, 18 nt, Artificial Sequence
  Synthetic
auagaaaugaaaagauaa

SEQ ID NO: 136444 - RNA, 19 nt, Artificial Sequence
  Synthetic
aauagaaaugaaaagauaa

SEQ ID NO: 136445 - RNA, 20 nt, Artificial Sequence
  Synthetic
aaauagaaaugaaaagauaa

SEQ ID NO: 136446 - RNA, 19 nt, Artificial Sequence
  Synthetic
uggagccaggugcagauaa

SEQ ID NO: 136447 - RNA, 23 nt, Artificial Sequence
  Synthetic
aggguggagccaggugcagauaa

SEQ ID NO: 136448 - RNA, 24 nt, Artificial Sequence
  Synthetic
aaggguggagccaggugcagauaa

SEQ ID NO: 136449 - RNA, 18 nt, Artificial Sequence
  Synthetic
aauaaauaauaacgauaa

SEQ ID NO: 136450 - RNA, 19 nt, Artificial Sequence
  Synthetic
aaauaaauaauaacgauaa

SEQ ID NO: 136451 - RNA, 20 nt, Artificial Sequence
  Synthetic
uaaauaaauaauaacgauaa

SEQ ID NO: 136452 - RNA, 21 nt, Artificial Sequence
  Synthetic
auaaauaaauaauaacgauaa

SEQ ID NO: 136453 - RNA, 22 nt, Artificial Sequence
  Synthetic
aauaaauaaauaauaacgauaa

SEQ ID NO: 136454 - RNA, 23 nt, Artificial Sequence
  Synthetic
aaauaaauaaauaauaacgauaa

SEQ ID NO: 136455 - RNA, 24 nt, Artificial Sequence
  Synthetic
uaaauaaauaaauaauaacgauaa

SEQ ID NO: 136456 - RNA, 21 nt, Artificial Sequence
  Synthetic
uguguguguuguggaggauaa

SEQ ID NO: 136457 - RNA, 23 nt, Artificial Sequence
  Synthetic
uguguguguguuguggaggauaa

SEQ ID NO: 136458 - RNA, 20 nt, Artificial Sequence
  Synthetic
aggucauuaaauaaugauaa

SEQ ID NO: 136459 - RNA, 21 nt, Artificial Sequence
  Synthetic
aaggucauuaaauaaugauaa

SEQ ID NO: 136460 - RNA, 23 nt, Artificial Sequence
  Synthetic
agaaggucauuaaauaaugauaa

SEQ ID NO: 136461 - RNA, 24 nt, Artificial Sequence
  Synthetic
aagaaggucauuaaauaaugauaa

SEQ ID NO: 136462 - RNA, 18 nt, Artificial Sequence
  Synthetic
auucaagauuuuugauaa

SEQ ID NO: 136463 - RNA, 19 nt, Artificial Sequence
  Synthetic
uauucaagauuuuugauaa

SEQ ID NO: 136464 - RNA, 18 nt, Artificial Sequence
  Synthetic
aaagugcuauuaauauaa

SEQ ID NO: 136465 - RNA, 19 nt, Artificial Sequence
  Synthetic
uaaagugcuauuaauauaa

SEQ ID NO: 136466 - RNA, 20 nt, Artificial Sequence
  Synthetic
uuaaagugcuauuaauauaa

SEQ ID NO: 136467 - RNA, 18 nt, Artificial Sequence
  Synthetic
aggaaaggaagacuauaa

SEQ ID NO: 136468 - RNA, 19 nt, Artificial Sequence
  Synthetic
aaggaaaggaagacuauaa

SEQ ID NO: 136469 - RNA, 20 nt, Artificial Sequence
  Synthetic
aaaggaaaggaagacuauaa

SEQ ID NO: 136470 - RNA, 18 nt, Artificial Sequence
  Synthetic
ucauguauguugcuauaa

SEQ ID NO: 136471 - RNA, 19 nt, Artificial Sequence
  Synthetic
uucauguauguugcuauaa

SEQ ID NO: 136472 - RNA, 21 nt, Artificial Sequence
  Synthetic
uguucauguauguugcuauaa

SEQ ID NO: 136473 - RNA, 22 nt, Artificial Sequence
  Synthetic
uuguucauguauguugcuauaa

SEQ ID NO: 136474 - RNA, 23 nt, Artificial Sequence
  Synthetic
uuuguucauguauguugcuauaa

SEQ ID NO: 136475 - RNA, 24 nt, Artificial Sequence
  Synthetic
cuuuguucauguauguugcuauaa

SEQ ID NO: 136476 - RNA, 18 nt, Artificial Sequence
  Synthetic
cauuuuccuugucuauaa

SEQ ID NO: 136477 - RNA, 19 nt, Artificial Sequence
  Synthetic
ucauuuuccuugucuauaa

SEQ ID NO: 136478 - RNA, 20 nt, Artificial Sequence
  Synthetic
uucauuuuccuugucuauaa

SEQ ID NO: 136479 - RNA, 21 nt, Artificial Sequence
  Synthetic
cuucauuuuccuugucuauaa

SEQ ID NO: 136480 - RNA, 23 nt, Artificial Sequence
  Synthetic
ugcuucauuuuccuugucuauaa

SEQ ID NO: 136481 - RNA, 18 nt, Artificial Sequence
  Synthetic
uuauugaaacuuuuauaa

SEQ ID NO: 136482 - RNA, 19 nt, Artificial Sequence
  Synthetic
cuuauugaaacuuuuauaa

SEQ ID NO: 136483 - RNA, 20 nt, Artificial Sequence
  Synthetic
acuuauugaaacuuuuauaa

SEQ ID NO: 136484 - RNA, 18 nt, Artificial Sequence
  Synthetic
acauuuaaaaauaacuaa

SEQ ID NO: 136485 - RNA, 19 nt, Artificial Sequence
  Synthetic
uacauuuaaaaauaacuaa

SEQ ID NO: 136486 - RNA, 21 nt, Artificial Sequence
  Synthetic
uguacauuuaaaaauaacuaa

SEQ ID NO: 136487 - RNA, 22 nt, Artificial Sequence
  Synthetic
uuguacauuuaaaaauaacuaa

SEQ ID NO: 136488 - RNA, 23 nt, Artificial Sequence
  Synthetic
cuuguacauuuaaaaauaacuaa

SEQ ID NO: 136489 - RNA, 24 nt, Artificial Sequence
  Synthetic
acuuguacauuuaaaaauaacuaa

SEQ ID NO: 136490 - RNA, 18 nt, Artificial Sequence
  Synthetic
aaaaauaauuuuuacuaa

SEQ ID NO: 136491 - RNA, 19 nt, Artificial Sequence
  Synthetic
uaaaaauaauuuuuacuaa

SEQ ID NO: 136492 - RNA, 20 nt, Artificial Sequence
  Synthetic
auaaaaauaauuuuuacuaa

SEQ ID NO: 136493 - RNA, 18 nt, Artificial Sequence
  Synthetic
uuuaaggaaugggccuaa

SEQ ID NO: 136494 - RNA, 19 nt, Artificial Sequence
  Synthetic
auuuaaggaaugggccuaa

SEQ ID NO: 136495 - RNA, 20 nt, Artificial Sequence
  Synthetic
cauuuaaggaaugggccuaa

SEQ ID NO: 136496 - RNA, 18 nt, Artificial Sequence
  Synthetic
uggaggucauuauccuaa

SEQ ID NO: 136497 - RNA, 19 nt, Artificial Sequence
  Synthetic
cuggaggucauuauccuaa

SEQ ID NO: 136498 - RNA, 21 nt, Artificial Sequence
  Synthetic
agcuggaggucauuauccuaa

SEQ ID NO: 136499 - RNA, 22 nt, Artificial Sequence
  Synthetic
cagcuggaggucauuauccuaa

SEQ ID NO: 136500 - RNA, 24 nt, Artificial Sequence
  Synthetic
ugcagcuggaggucauuauccuaa

SEQ ID NO: 136501 - RNA, 19 nt, Artificial Sequence
  Synthetic
ugacuuccucuucuccuaa

SEQ ID NO: 136502 - RNA, 20 nt, Artificial Sequence
  Synthetic
uugacuuccucuucuccuaa

SEQ ID NO: 136503 - RNA, 21 nt, Artificial Sequence
  Synthetic
uuugacuuccucuucuccuaa

SEQ ID NO: 136504 - RNA, 22 nt, Artificial Sequence
  Synthetic
auuugacuuccucuucuccuaa

SEQ ID NO: 136505 - RNA, 23 nt, Artificial Sequence
  Synthetic
aauuugacuuccucuucuccuaa

SEQ ID NO: 136506 - RNA, 24 nt, Artificial Sequence
  Synthetic
caauuugacuuccucuucuccuaa

SEQ ID NO: 136507 - RNA, 18 nt, Artificial Sequence
  Synthetic
cuugaaauuauuuccuaa

SEQ ID NO: 136508 - RNA, 19 nt, Artificial Sequence
  Synthetic
ucuugaaauuauuuccuaa

SEQ ID NO: 136509 - RNA, 20 nt, Artificial Sequence
  Synthetic
cucuugaaauuauuuccuaa

SEQ ID NO: 136510 - RNA, 21 nt, Artificial Sequence
  Synthetic
acucuugaaauuauuuccuaa

SEQ ID NO: 136511 - RNA, 24 nt, Artificial Sequence
  Synthetic
aggacucuugaaauuauuuccuaa

SEQ ID NO: 136512 - RNA, 19 nt, Artificial Sequence
  Synthetic
ugacuuccucuuuuccuaa

SEQ ID NO: 136513 - RNA, 20 nt, Artificial Sequence
  Synthetic
uugacuuccucuuuuccuaa

SEQ ID NO: 136514 - RNA, 21 nt, Artificial Sequence
  Synthetic
uuugacuuccucuuuuccuaa

SEQ ID NO: 136515 - RNA, 22 nt, Artificial Sequence
  Synthetic
auuugacuuccucuuuuccuaa

SEQ ID NO: 136516 - RNA, 23 nt, Artificial Sequence
  Synthetic
aauuugacuuccucuuuuccuaa

SEQ ID NO: 136517 - RNA, 24 nt, Artificial Sequence
  Synthetic
caauuugacuuccucuuuuccuaa

SEQ ID NO: 136518 - RNA, 18 nt, Artificial Sequence
  Synthetic
auauauggagaaagcuaa

SEQ ID NO: 136519 - RNA, 19 nt, Artificial Sequence
  Synthetic
uauauauggagaaagcuaa

SEQ ID NO: 136520 - RNA, 20 nt, Artificial Sequence
  Synthetic
auauauauggagaaagcuaa

SEQ ID NO: 136521 - RNA, 18 nt, Artificial Sequence
  Synthetic
uauuuaaaacuuugcuaa

SEQ ID NO: 136522 - RNA, 19 nt, Artificial Sequence
  Synthetic
auauuuaaaacuuugcuaa

SEQ ID NO: 136523 - RNA, 20 nt, Artificial Sequence
  Synthetic
uauauuuaaaacuuugcuaa

SEQ ID NO: 136524 - RNA, 21 nt, Artificial Sequence
  Synthetic
uuauauuuaaaacuuugcuaa

SEQ ID NO: 136525 - RNA, 22 nt, Artificial Sequence
  Synthetic
uuuauauuuaaaacuuugcuaa

SEQ ID NO: 136526 - RNA, 23 nt, Artificial Sequence
  Synthetic
uuuuauauuuaaaacuuugcuaa

SEQ ID NO: 136527 - RNA, 18 nt, Artificial Sequence
  Synthetic
uugaacauauuuuucuaa

SEQ ID NO: 136528 - RNA, 19 nt, Artificial Sequence
  Synthetic
uuugaacauauuuuucuaa

SEQ ID NO: 136529 - RNA, 20 nt, Artificial Sequence
  Synthetic
cuuugaacauauuuuucuaa

SEQ ID NO: 136530 - RNA, 18 nt, Artificial Sequence
  Synthetic
ugcacaauagcaaaguaa

SEQ ID NO: 136531 - RNA, 19 nt, Artificial Sequence
  Synthetic
augcacaauagcaaaguaa

SEQ ID NO: 136532 - RNA, 20 nt, Artificial Sequence
  Synthetic
uaugcacaauagcaaaguaa

SEQ ID NO: 136533 - RNA, 21 nt, Artificial Sequence
  Synthetic
cuaugcacaauagcaaaguaa

SEQ ID NO: 136534 - RNA, 22 nt, Artificial Sequence
  Synthetic
acuaugcacaauagcaaaguaa

SEQ ID NO: 136535 - RNA, 23 nt, Artificial Sequence
  Synthetic
cacuaugcacaauagcaaaguaa

SEQ ID NO: 136536 - RNA, 18 nt, Artificial Sequence
  Synthetic
aguuuauuaagaaaguaa

SEQ ID NO: 136537 - RNA, 19 nt, Artificial Sequence
  Synthetic
aaguuuauuaagaaaguaa

SEQ ID NO: 136538 - RNA, 20 nt, Artificial Sequence
  Synthetic
caaguuuauuaagaaaguaa

SEQ ID NO: 136539 - RNA, 22 nt, Artificial Sequence
  Synthetic
agcaaguuuauuaagaaaguaa

SEQ ID NO: 136540 - RNA, 23 nt, Artificial Sequence
  Synthetic
aagcaaguuuauuaagaaaguaa

SEQ ID NO: 136541 - RNA, 24 nt, Artificial Sequence
  Synthetic
aaagcaaguuuauuaagaaaguaa

SEQ ID NO: 136542 - RNA, 20 nt, Artificial Sequence
  Synthetic
agggacccagggggaaguaa

SEQ ID NO: 136543 - RNA, 24 nt, Artificial Sequence
  Synthetic
ugggagggacccagggggaaguaa

SEQ ID NO: 136544 - RNA, 19 nt, Artificial Sequence
  Synthetic
agcauuaaugaauaaguaa

SEQ ID NO: 136545 - RNA, 20 nt, Artificial Sequence
  Synthetic
aagcauuaaugaauaaguaa

SEQ ID NO: 136546 - RNA, 21 nt, Artificial Sequence
  Synthetic
aaagcauuaaugaauaaguaa

SEQ ID NO: 136547 - RNA, 23 nt, Artificial Sequence
  Synthetic
ugaaagcauuaaugaauaaguaa

SEQ ID NO: 136548 - RNA, 24 nt, Artificial Sequence
  Synthetic
augaaagcauuaaugaauaaguaa

SEQ ID NO: 136549 - RNA, 18 nt, Artificial Sequence
  Synthetic
uggguauauacccaguaa

SEQ ID NO: 136550 - RNA, 19 nt, Artificial Sequence
  Synthetic
uuggguauauacccaguaa

SEQ ID NO: 136551 - RNA, 20 nt, Artificial Sequence
  Synthetic
uuuggguauauacccaguaa

SEQ ID NO: 136552 - RNA, 19 nt, Artificial Sequence
  Synthetic
ugggcuauaugcccaguaa

SEQ ID NO: 136553 - RNA, 20 nt, Artificial Sequence
  Synthetic
uugggcuauaugcccaguaa

SEQ ID NO: 136554 - RNA, 21 nt, Artificial Sequence
  Synthetic
uuugggcuauaugcccaguaa

SEQ ID NO: 136555 - RNA, 22 nt, Artificial Sequence
  Synthetic
auuugggcuauaugcccaguaa

SEQ ID NO: 136556 - RNA, 23 nt, Artificial Sequence
  Synthetic
uauuugggcuauaugcccaguaa

SEQ ID NO: 136557 - RNA, 24 nt, Artificial Sequence
  Synthetic
uuauuugggcuauaugcccaguaa

SEQ ID NO: 136558 - RNA, 18 nt, Artificial Sequence
  Synthetic
uggguauauauccaguaa

SEQ ID NO: 136559 - RNA, 19 nt, Artificial Sequence
  Synthetic
uuggguauauauccaguaa

SEQ ID NO: 136560 - RNA, 20 nt, Artificial Sequence
  Synthetic
uuuggguauauauccaguaa

SEQ ID NO: 136561 - RNA, 21 nt, Artificial Sequence
  Synthetic
cuuuggguauauauccaguaa

SEQ ID NO: 136562 - RNA, 22 nt, Artificial Sequence
  Synthetic
ccuuuggguauauauccaguaa

SEQ ID NO: 136563 - RNA, 23 nt, Artificial Sequence
  Synthetic
uccuuuggguauauauccaguaa

SEQ ID NO: 136564 - RNA, 24 nt, Artificial Sequence
  Synthetic
auccuuuggguauauauccaguaa

SEQ ID NO: 136565 - RNA, 18 nt, Artificial Sequence
  Synthetic
uggguauauaugcaguaa

SEQ ID NO: 136566 - RNA, 19 nt, Artificial Sequence
  Synthetic
uuggguauauaugcaguaa

SEQ ID NO: 136567 - RNA, 20 nt, Artificial Sequence
  Synthetic
uuuggguauauaugcaguaa

SEQ ID NO: 136568 - RNA, 21 nt, Artificial Sequence
  Synthetic
cuuuggguauauaugcaguaa

SEQ ID NO: 136569 - RNA, 22 nt, Artificial Sequence
  Synthetic
acuuuggguauauaugcaguaa

SEQ ID NO: 136570 - RNA, 23 nt, Artificial Sequence
  Synthetic
uacuuuggguauauaugcaguaa

SEQ ID NO: 136571 - RNA, 24 nt, Artificial Sequence
  Synthetic
auacuuuggguauauaugcaguaa

SEQ ID NO: 136572 - RNA, 22 nt, Artificial Sequence
  Synthetic
ugaacucuuguacagagaguaa

SEQ ID NO: 136573 - RNA, 23 nt, Artificial Sequence
  Synthetic
uugaacucuuguacagagaguaa

SEQ ID NO: 136574 - RNA, 24 nt, Artificial Sequence
  Synthetic
auugaacucuuguacagagaguaa

SEQ ID NO: 136575 - RNA, 18 nt, Artificial Sequence
  Synthetic
aaaugaauggaugaguaa

SEQ ID NO: 136576 - RNA, 19 nt, Artificial Sequence
  Synthetic
aaaaugaauggaugaguaa

SEQ ID NO: 136577 - RNA, 20 nt, Artificial Sequence
  Synthetic
uaaaaugaauggaugaguaa

SEQ ID NO: 136578 - RNA, 18 nt, Artificial Sequence
  Synthetic
uggaggccauuaucguaa

SEQ ID NO: 136579 - RNA, 19 nt, Artificial Sequence
  Synthetic
cuggaggccauuaucguaa

SEQ ID NO: 136580 - RNA, 20 nt, Artificial Sequence
  Synthetic
acuggaggccauuaucguaa

SEQ ID NO: 136581 - RNA, 21 nt, Artificial Sequence
  Synthetic
aacuggaggccauuaucguaa

SEQ ID NO: 136582 - RNA, 22 nt, Artificial Sequence
  Synthetic
caacuggaggccauuaucguaa

SEQ ID NO: 136583 - RNA, 24 nt, Artificial Sequence
  Synthetic
ugcaacuggaggccauuaucguaa

SEQ ID NO: 136584 - RNA, 18 nt, Artificial Sequence
  Synthetic
aagauuggaagaagguaa

SEQ ID NO: 136585 - RNA, 19 nt, Artificial Sequence
  Synthetic
aaagauuggaagaagguaa

SEQ ID NO: 136586 - RNA, 20 nt, Artificial Sequence
  Synthetic
caaagauuggaagaagguaa

SEQ ID NO: 136587 - RNA, 22 nt, Artificial Sequence
  Synthetic
agcaaagauuggaagaagguaa

SEQ ID NO: 136588 - RNA, 24 nt, Artificial Sequence
  Synthetic
ugagcaaagauuggaagaagguaa

SEQ ID NO: 136589 - RNA, 20 nt, Artificial Sequence
  Synthetic
agggacccagugagagguaa

SEQ ID NO: 136590 - RNA, 24 nt, Artificial Sequence
  Synthetic
ugggagggacccagugagagguaa

SEQ ID NO: 136591 - RNA, 19 nt, Artificial Sequence
  Synthetic
agagaccagguggagguaa

SEQ ID NO: 136592 - RNA, 21 nt, Artificial Sequence
  Synthetic
agagagaccagguggagguaa

SEQ ID NO: 136593 - RNA, 18 nt, Artificial Sequence
  Synthetic
cuguuuaugggaauguaa

SEQ ID NO: 136594 - RNA, 19 nt, Artificial Sequence
  Synthetic
acuguuuaugggaauguaa

SEQ ID NO: 136595 - RNA, 20 nt, Artificial Sequence
  Synthetic
cacuguuuaugggaauguaa

SEQ ID NO: 136596 - RNA, 21 nt, Artificial Sequence
  Synthetic
acacuguuuaugggaauguaa

SEQ ID NO: 136597 - RNA, 22 nt, Artificial Sequence
  Synthetic
uacacuguuuaugggaauguaa

SEQ ID NO: 136598 - RNA, 23 nt, Artificial Sequence
  Synthetic
auacacuguuuaugggaauguaa

SEQ ID NO: 136599 - RNA, 24 nt, Artificial Sequence
  Synthetic
uauacacuguuuaugggaauguaa

SEQ ID NO: 136600 - RNA, 18 nt, Artificial Sequence
  Synthetic
uauuuacuuugaauguaa

SEQ ID NO: 136601 - RNA, 19 nt, Artificial Sequence
  Synthetic
auauuuacuuugaauguaa

SEQ ID NO: 136602 - RNA, 20 nt, Artificial Sequence
  Synthetic
aauauuuacuuugaauguaa

SEQ ID NO: 136603 - RNA, 21 nt, Artificial Sequence
  Synthetic
caauauuuacuuugaauguaa

SEQ ID NO: 136604 - RNA, 22 nt, Artificial Sequence
  Synthetic
ucaauauuuacuuugaauguaa

SEQ ID NO: 136605 - RNA, 23 nt, Artificial Sequence
  Synthetic
aucaauauuuacuuugaauguaa

SEQ ID NO: 136606 - RNA, 24 nt, Artificial Sequence
  Synthetic
uaucaauauuuacuuugaauguaa

SEQ ID NO: 136607 - RNA, 18 nt, Artificial Sequence
  Synthetic
uuuagauaccucauguaa

SEQ ID NO: 136608 - RNA, 19 nt, Artificial Sequence
  Synthetic
cuuuagauaccucauguaa

SEQ ID NO: 136609 - RNA, 20 nt, Artificial Sequence
  Synthetic
acuuuagauaccucauguaa

SEQ ID NO: 136610 - RNA, 21 nt, Artificial Sequence
  Synthetic
uacuuuagauaccucauguaa

SEQ ID NO: 136611 - RNA, 22 nt, Artificial Sequence
  Synthetic
cuacuuuagauaccucauguaa

SEQ ID NO: 136612 - RNA, 23 nt, Artificial Sequence
  Synthetic
acuacuuuagauaccucauguaa

SEQ ID NO: 136613 - RNA, 18 nt, Artificial Sequence
  Synthetic
accauagacaauauguaa

SEQ ID NO: 136614 - RNA, 19 nt, Artificial Sequence
  Synthetic
aaccauagacaauauguaa

SEQ ID NO: 136615 - RNA, 20 nt, Artificial Sequence
  Synthetic
caaccauagacaauauguaa

SEQ ID NO: 136616 - RNA, 22 nt, Artificial Sequence
  Synthetic
agcaaccauagacaauauguaa

SEQ ID NO: 136617 - RNA, 23 nt, Artificial Sequence
  Synthetic
aagcaaccauagacaauauguaa

SEQ ID NO: 136618 - RNA, 24 nt, Artificial Sequence
  Synthetic
aaagcaaccauagacaauauguaa

SEQ ID NO: 136619 - RNA, 20 nt, Artificial Sequence
  Synthetic
uaaccauagacaauauguaa

SEQ ID NO: 136620 - RNA, 22 nt, Artificial Sequence
  Synthetic
aguaaccauagacaauauguaa

SEQ ID NO: 136621 - RNA, 23 nt, Artificial Sequence
  Synthetic
aaguaaccauagacaauauguaa

SEQ ID NO: 136622 - RNA, 24 nt, Artificial Sequence
  Synthetic
aaaguaaccauagacaauauguaa

SEQ ID NO: 136623 - RNA, 18 nt, Artificial Sequence
  Synthetic
cucccaccaacaguguaa

SEQ ID NO: 136624 - RNA, 19 nt, Artificial Sequence
  Synthetic
acucccaccaacaguguaa

SEQ ID NO: 136625 - RNA, 20 nt, Artificial Sequence
  Synthetic
cacucccaccaacaguguaa

SEQ ID NO: 136626 - RNA, 21 nt, Artificial Sequence
  Synthetic
acacucccaccaacaguguaa

SEQ ID NO: 136627 - RNA, 22 nt, Artificial Sequence
  Synthetic
uacacucccaccaacaguguaa

SEQ ID NO: 136628 - RNA, 23 nt, Artificial Sequence
  Synthetic
uuacacucccaccaacaguguaa

SEQ ID NO: 136629 - RNA, 24 nt, Artificial Sequence
  Synthetic
uuuacacucccaccaacaguguaa

SEQ ID NO: 136630 - RNA, 18 nt, Artificial Sequence
  Synthetic
auuugcuguugcuuguaa

SEQ ID NO: 136631 - RNA, 19 nt, Artificial Sequence
  Synthetic
cauuugcuguugcuuguaa

SEQ ID NO: 136632 - RNA, 20 nt, Artificial Sequence
  Synthetic
ccauuugcuguugcuuguaa

SEQ ID NO: 136633 - RNA, 21 nt, Artificial Sequence
  Synthetic
uccauuugcuguugcuuguaa

SEQ ID NO: 136634 - RNA, 23 nt, Artificial Sequence
  Synthetic
aguccauuugcuguugcuuguaa

SEQ ID NO: 136635 - RNA, 24 nt, Artificial Sequence
  Synthetic
aaguccauuugcuguugcuuguaa

SEQ ID NO: 136636 - RNA, 18 nt, Artificial Sequence
  Synthetic
cuucucguguaguuguaa

SEQ ID NO: 136637 - RNA, 19 nt, Artificial Sequence
  Synthetic
acuucucguguaguuguaa

SEQ ID NO: 136638 - RNA, 20 nt, Artificial Sequence
  Synthetic
aacuucucguguaguuguaa

SEQ ID NO: 136639 - RNA, 21 nt, Artificial Sequence
  Synthetic
caacuucucguguaguuguaa

SEQ ID NO: 136640 - RNA, 24 nt, Artificial Sequence
  Synthetic
cggcaacuucucguguaguuguaa

SEQ ID NO: 136641 - RNA, 18 nt, Artificial Sequence
  Synthetic
aaaguuaaaaaaaauuaa

SEQ ID NO: 136642 - RNA, 19 nt, Artificial Sequence
  Synthetic
aaaaguuaaaaaaaauuaa

SEQ ID NO: 136643 - RNA, 20 nt, Artificial Sequence
  Synthetic
uaaaaguuaaaaaaaauuaa

SEQ ID NO: 136644 - RNA, 21 nt, Artificial Sequence
  Synthetic
auaaaaguuaaaaaaaauuaa

SEQ ID NO: 136645 - RNA, 22 nt, Artificial Sequence
  Synthetic
aauaaaaguuaaaaaaaauuaa

SEQ ID NO: 136646 - RNA, 23 nt, Artificial Sequence
  Synthetic
aaauaaaaguuaaaaaaaauuaa

SEQ ID NO: 136647 - RNA, 24 nt, Artificial Sequence
  Synthetic
aaaauaaaaguuaaaaaaaauuaa

SEQ ID NO: 136648 - RNA, 18 nt, Artificial Sequence
  Synthetic
aaagaauucaaaaauuaa

SEQ ID NO: 136649 - RNA, 19 nt, Artificial Sequence
  Synthetic
caaagaauucaaaaauuaa

SEQ ID NO: 136650 - RNA, 20 nt, Artificial Sequence
  Synthetic
acaaagaauucaaaaauuaa

SEQ ID NO: 136651 - RNA, 21 nt, Artificial Sequence
  Synthetic
uacaaagaauucaaaaauuaa

SEQ ID NO: 136652 - RNA, 22 nt, Artificial Sequence
  Synthetic
cuacaaagaauucaaaaauuaa

SEQ ID NO: 136653 - RNA, 23 nt, Artificial Sequence
  Synthetic
ucuacaaagaauucaaaaauuaa

SEQ ID NO: 136654 - RNA, 24 nt, Artificial Sequence
  Synthetic
cucuacaaagaauucaaaaauuaa

SEQ ID NO: 136655 - RNA, 18 nt, Artificial Sequence
  Synthetic
uucaaaaauaaaaauuaa

SEQ ID NO: 136656 - RNA, 20 nt, Artificial Sequence
  Synthetic
uguucaaaaauaaaaauuaa

SEQ ID NO: 136657 - RNA, 18 nt, Artificial Sequence
  Synthetic
uuggugaaauaaaauuaa

SEQ ID NO: 136658 - RNA, 19 nt, Artificial Sequence
  Synthetic
uuuggugaaauaaaauuaa

SEQ ID NO: 136659 - RNA, 20 nt, Artificial Sequence
  Synthetic
auuuggugaaauaaaauuaa

SEQ ID NO: 136660 - RNA, 18 nt, Artificial Sequence
  Synthetic
uagguagguuaaaauuaa

SEQ ID NO: 136661 - RNA, 19 nt, Artificial Sequence
  Synthetic
cuagguagguuaaaauuaa

SEQ ID NO: 136662 - RNA, 20 nt, Artificial Sequence
  Synthetic
ccuagguagguuaaaauuaa

SEQ ID NO: 136663 - RNA, 18 nt, Artificial Sequence
  Synthetic
aaaucaugccuaaauuaa

SEQ ID NO: 136664 - RNA, 19 nt, Artificial Sequence
  Synthetic
aaaaucaugccuaaauuaa

SEQ ID NO: 136665 - RNA, 20 nt, Artificial Sequence
  Synthetic
aaaaaucaugccuaaauuaa

SEQ ID NO: 136666 - RNA, 18 nt, Artificial Sequence
  Synthetic
auuucauuuuuaaauuaa

SEQ ID NO: 136667 - RNA, 19 nt, Artificial Sequence
  Synthetic
uauuucauuuuuaaauuaa

SEQ ID NO: 136668 - RNA, 18 nt, Artificial Sequence
  Synthetic
aauuugucuuuuaauuaa

SEQ ID NO: 136669 - RNA, 19 nt, Artificial Sequence
  Synthetic
aaauuugucuuuuaauuaa

SEQ ID NO: 136670 - RNA, 20 nt, Artificial Sequence
  Synthetic
aaaauuugucuuuuaauuaa

SEQ ID NO: 136671 - RNA, 19 nt, Artificial Sequence
  Synthetic
aguaacuuacauggauuaa

SEQ ID NO: 136672 - RNA, 20 nt, Artificial Sequence
  Synthetic
aaguaacuuacauggauuaa

SEQ ID NO: 136673 - RNA, 18 nt, Artificial Sequence
  Synthetic
auuauaaaagaauauuaa

SEQ ID NO: 136674 - RNA, 19 nt, Artificial Sequence
  Synthetic
cauuauaaaagaauauuaa

SEQ ID NO: 136675 - RNA, 20 nt, Artificial Sequence
  Synthetic
ccauuauaaaagaauauuaa

SEQ ID NO: 136676 - RNA, 18 nt, Artificial Sequence
  Synthetic
caauacauacauuauuaa

SEQ ID NO: 136677 - RNA, 19 nt, Artificial Sequence
  Synthetic
ucaauacauacauuauuaa

SEQ ID NO: 136678 - RNA, 20 nt, Artificial Sequence
  Synthetic
aucaauacauacauuauuaa

SEQ ID NO: 136679 - RNA, 18 nt, Artificial Sequence
  Synthetic
ugcuuacuaccugguuaa

SEQ ID NO: 136680 - RNA, 19 nt, Artificial Sequence
  Synthetic
augcuuacuaccugguuaa

SEQ ID NO: 136681 - RNA, 20 nt, Artificial Sequence
  Synthetic
uaugcuuacuaccugguuaa

SEQ ID NO: 136682 - RNA, 21 nt, Artificial Sequence
  Synthetic
cuaugcuuacuaccugguuaa

SEQ ID NO: 136683 - RNA, 22 nt, Artificial Sequence
  Synthetic
acuaugcuuacuaccugguuaa

SEQ ID NO: 136684 - RNA, 23 nt, Artificial Sequence
  Synthetic
uacuaugcuuacuaccugguuaa

SEQ ID NO: 136685 - RNA, 18 nt, Artificial Sequence
  Synthetic
uaauauguaauauguuaa

SEQ ID NO: 136686 - RNA, 19 nt, Artificial Sequence
  Synthetic
auaauauguaauauguuaa

SEQ ID NO: 136687 - RNA, 20 nt, Artificial Sequence
  Synthetic
aauaauauguaauauguuaa

SEQ ID NO: 136688 - RNA, 21 nt, Artificial Sequence
  Synthetic
aaaaaaaccagaaucuguuaa

SEQ ID NO: 136689 - RNA, 22 nt, Artificial Sequence
  Synthetic
aaaaaaaaccagaaucuguuaa

SEQ ID NO: 136690 - RNA, 23 nt, Artificial Sequence
  Synthetic
aaaaaaaaaccagaaucuguuaa

SEQ ID NO: 136691 - RNA, 24 nt, Artificial Sequence
  Synthetic
aaaaaaaaaaccagaaucuguuaa

SEQ ID NO: 136692 - RNA, 18 nt, Artificial Sequence
  Synthetic
uuaucuucaaaguguuaa

SEQ ID NO: 136693 - RNA, 19 nt, Artificial Sequence
  Synthetic
auuaucuucaaaguguuaa

SEQ ID NO: 136694 - RNA, 20 nt, Artificial Sequence
  Synthetic
aauuaucuucaaaguguuaa

SEQ ID NO: 136695 - RNA, 18 nt, Artificial Sequence
  Synthetic
aaaaaaaaaauguguuaa

SEQ ID NO: 136696 - RNA, 19 nt, Artificial Sequence
  Synthetic
aaaaaaaaaaauguguuaa

SEQ ID NO: 136697 - RNA, 20 nt, Artificial Sequence
  Synthetic
aaaaaaaaaaaauguguuaa

SEQ ID NO: 136698 - RNA, 21 nt, Artificial Sequence
  Synthetic
aaaaaaaaaaaaauguguuaa

SEQ ID NO: 136699 - RNA, 22 nt, Artificial Sequence
  Synthetic
aaaaaaaaaaaaaauguguuaa

SEQ ID NO: 136700 - RNA, 23 nt, Artificial Sequence
  Synthetic
aaaaaaaaaaaaaaauguguuaa

SEQ ID NO: 136701 - RNA, 24 nt, Artificial Sequence
  Synthetic
caaaaaaaaaaaaaaauguguuaa

SEQ ID NO: 136702 - RNA, 18 nt, Artificial Sequence
  Synthetic
uagaaaauuuaaauuuaa

SEQ ID NO: 136703 - RNA, 20 nt, Artificial Sequence
  Synthetic
uguagaaaauuuaaauuuaa

SEQ ID NO: 136704 - RNA, 18 nt, Artificial Sequence
  Synthetic
auauagcuauuucuuuaa

SEQ ID NO: 136705 - RNA, 19 nt, Artificial Sequence
  Synthetic
aauauagcuauuucuuuaa

SEQ ID NO: 136706 - RNA, 20 nt, Artificial Sequence
  Synthetic
uaauauagcuauuucuuuaa

SEQ ID NO: 136707 - RNA, 18 nt, Artificial Sequence
  Synthetic
aauuuuauauauguuuaa

SEQ ID NO: 136708 - RNA, 19 nt, Artificial Sequence
  Synthetic
uaauuuuauauauguuuaa

SEQ ID NO: 136709 - RNA, 20 nt, Artificial Sequence
  Synthetic
auaauuuuauauauguuuaa

SEQ ID NO: 136710 - RNA, 21 nt, Artificial Sequence
  Synthetic
augcuauaugugguuguuuaa

SEQ ID NO: 136711 - RNA, 22 nt, Artificial Sequence
  Synthetic
caugcuauaugugguuguuuaa

SEQ ID NO: 136712 - RNA, 23 nt, Artificial Sequence
  Synthetic
ucaugcuauaugugguuguuuaa

SEQ ID NO: 136713 - RNA, 24 nt, Artificial Sequence
  Synthetic
uucaugcuauaugugguuguuuaa

SEQ ID NO: 136714 - RNA, 18 nt, Artificial Sequence
  Synthetic
ucacaaucugcauuuuaa

SEQ ID NO: 136715 - RNA, 19 nt, Artificial Sequence
  Synthetic
aucacaaucugcauuuuaa

SEQ ID NO: 136716 - RNA, 20 nt, Artificial Sequence
  Synthetic
aaucacaaucugcauuuuaa

SEQ ID NO: 136717 - RNA, 22 nt, Artificial Sequence
  Synthetic
ugaaucacaaucugcauuuuaa

SEQ ID NO: 136718 - RNA, 23 nt, Artificial Sequence
  Synthetic
cugaaucacaaucugcauuuuaa

SEQ ID NO: 136719 - RNA, 24 nt, Artificial Sequence
  Synthetic
acugaaucacaaucugcauuuuaa

SEQ ID NO: 136720 - RNA, 18 nt, Artificial Sequence
  Synthetic
auuuuaccaugauuuuaa

SEQ ID NO: 136721 - RNA, 19 nt, Artificial Sequence
  Synthetic
uauuuuaccaugauuuuaa

SEQ ID NO: 136722 - RNA, 20 nt, Artificial Sequence
  Synthetic
uuauuuuaccaugauuuuaa

SEQ ID NO: 136723 - RNA, 18 nt, Artificial Sequence
  Synthetic
aauucuuguauauuuuaa

SEQ ID NO: 136724 - RNA, 19 nt, Artificial Sequence
  Synthetic
uaauucuuguauauuuuaa

SEQ ID NO: 136725 - RNA, 18 nt, Artificial Sequence
  Synthetic
ucaacuaauaccuuuuaa

SEQ ID NO: 136726 - RNA, 19 nt, Artificial Sequence
  Synthetic
cucaacuaauaccuuuuaa

SEQ ID NO: 136727 - RNA, 20 nt, Artificial Sequence
  Synthetic
ucucaacuaauaccuuuuaa

SEQ ID NO: 136728 - RNA, 21 nt, Artificial Sequence
  Synthetic
augaucucaaucauguuuuaa

SEQ ID NO: 136729 - RNA, 22 nt, Artificial Sequence
  Synthetic
caugaucucaaucauguuuuaa

SEQ ID NO: 136730 - RNA, 18 nt, Artificial Sequence
  Synthetic
uaguuuuauauguuuuaa

SEQ ID NO: 136731 - RNA, 19 nt, Artificial Sequence
  Synthetic
uuaguuuuauauguuuuaa

SEQ ID NO: 136732 - RNA, 20 nt, Artificial Sequence
  Synthetic
auuaguuuuauauguuuuaa

SEQ ID NO: 136733 - RNA, 18 nt, Artificial Sequence
  Synthetic
agagaaggauuuuuuuaa

SEQ ID NO: 136734 - RNA, 19 nt, Artificial Sequence
  Synthetic
cagagaaggauuuuuuuaa

SEQ ID NO: 136735 - RNA, 20 nt, Artificial Sequence
  Synthetic
ccagagaaggauuuuuuuaa

SEQ ID NO: 136736 - RNA, 18 nt, Artificial Sequence
  Synthetic
ucugcagauuuuuuuuaa

SEQ ID NO: 136737 - RNA, 19 nt, Artificial Sequence
  Synthetic
aucugcagauuuuuuuuaa

SEQ ID NO: 136738 - RNA, 20 nt, Artificial Sequence
  Synthetic
uaucugcagauuuuuuuuaa

SEQ ID NO: 136739 - RNA, 18 nt, Artificial Sequence
  Synthetic
aaaauauucagaaaaaca

SEQ ID NO: 136740 - RNA, 19 nt, Artificial Sequence
  Synthetic
aaaaauauucagaaaaaca

SEQ ID NO: 136741 - RNA, 20 nt, Artificial Sequence
  Synthetic
caaaaauauucagaaaaaca

SEQ ID NO: 136742 - RNA, 21 nt, Artificial Sequence
  Synthetic
ucaaaaauauucagaaaaaca

SEQ ID NO: 136743 - RNA, 22 nt, Artificial Sequence
  Synthetic
aucaaaaauauucagaaaaaca

SEQ ID NO: 136744 - RNA, 23 nt, Artificial Sequence
  Synthetic
caucaaaaauauucagaaaaaca

SEQ ID NO: 136745 - RNA, 18 nt, Artificial Sequence
  Synthetic
aggaaacauguaaaaaca

SEQ ID NO: 136746 - RNA, 19 nt, Artificial Sequence
  Synthetic
uaggaaacauguaaaaaca

SEQ ID NO: 136747 - RNA, 20 nt, Artificial Sequence
  Synthetic
auaggaaacauguaaaaaca

SEQ ID NO: 136748 - RNA, 18 nt, Artificial Sequence
  Synthetic
uuucaaucuaagaaaaca

SEQ ID NO: 136749 - RNA, 19 nt, Artificial Sequence
  Synthetic
uuuucaaucuaagaaaaca

SEQ ID NO: 136750 - RNA, 21 nt, Artificial Sequence
  Synthetic
aguuuucaaucuaagaaaaca

SEQ ID NO: 136751 - RNA, 22 nt, Artificial Sequence
  Synthetic
aaguuuucaaucuaagaaaaca

SEQ ID NO: 136752 - RNA, 23 nt, Artificial Sequence
  Synthetic
uaaguuuucaaucuaagaaaaca

SEQ ID NO: 136753 - RNA, 18 nt, Artificial Sequence
  Synthetic
cucagauuaaggaaaaca

SEQ ID NO: 136754 - RNA, 19 nt, Artificial Sequence
  Synthetic
ucucagauuaaggaaaaca

SEQ ID NO: 136755 - RNA, 20 nt, Artificial Sequence
  Synthetic
uucucagauuaaggaaaaca

SEQ ID NO: 136756 - RNA, 21 nt, Artificial Sequence
  Synthetic
auucucagauuaaggaaaaca

SEQ ID NO: 136757 - RNA, 22 nt, Artificial Sequence
  Synthetic
cauucucagauuaaggaaaaca

SEQ ID NO: 136758 - RNA, 23 nt, Artificial Sequence
  Synthetic
acauucucagauuaaggaaaaca

SEQ ID NO: 136759 - RNA, 18 nt, Artificial Sequence
  Synthetic
cauuaaagaaauaaaaca

SEQ ID NO: 136760 - RNA, 19 nt, Artificial Sequence
  Synthetic
ucauuaaagaaauaaaaca

SEQ ID NO: 136761 - RNA, 20 nt, Artificial Sequence
  Synthetic
uucauuaaagaaauaaaaca

SEQ ID NO: 136762 - RNA, 18 nt, Artificial Sequence
  Synthetic
uauauaaagcauaaaaca

SEQ ID NO: 136763 - RNA, 19 nt, Artificial Sequence
  Synthetic
auauauaaagcauaaaaca

SEQ ID NO: 136764 - RNA, 20 nt, Artificial Sequence
  Synthetic
aauauauaaagcauaaaaca

SEQ ID NO: 136765 - RNA, 18 nt, Artificial Sequence
  Synthetic
cugucucaaaaacaaaca

SEQ ID NO: 136766 - RNA, 19 nt, Artificial Sequence
  Synthetic
ucugucucaaaaacaaaca

SEQ ID NO: 136767 - RNA, 20 nt, Artificial Sequence
  Synthetic
cucugucucaaaaacaaaca

SEQ ID NO: 136768 - RNA, 21 nt, Artificial Sequence
  Synthetic
acucugucucaaaaacaaaca

SEQ ID NO: 136769 - RNA, 23 nt, Artificial Sequence
  Synthetic
agacucugucucaaaaacaaaca

SEQ ID NO: 136770 - RNA, 24 nt, Artificial Sequence
  Synthetic
aagacucugucucaaaaacaaaca

SEQ ID NO: 136771 - RNA, 18 nt, Artificial Sequence
  Synthetic
aguaaaguagaauaaaca

SEQ ID NO: 136772 - RNA, 19 nt, Artificial Sequence
  Synthetic
aaguaaaguagaauaaaca

SEQ ID NO: 136773 - RNA, 20 nt, Artificial Sequence
  Synthetic
aaaguaaaguagaauaaaca

SEQ ID NO: 136774 - RNA, 18 nt, Artificial Sequence
  Synthetic
uugauuauaugcuaaaca

SEQ ID NO: 136775 - RNA, 19 nt, Artificial Sequence
  Synthetic
cuugauuauaugcuaaaca

SEQ ID NO: 136776 - RNA, 20 nt, Artificial Sequence
  Synthetic
ucuugauuauaugcuaaaca

SEQ ID NO: 136777 - RNA, 21 nt, Artificial Sequence
  Synthetic
uucuugauuauaugcuaaaca

SEQ ID NO: 136778 - RNA, 22 nt, Artificial Sequence
  Synthetic
uuucuugauuauaugcuaaaca

SEQ ID NO: 136779 - RNA, 23 nt, Artificial Sequence
  Synthetic
auuucuugauuauaugcuaaaca

SEQ ID NO: 136780 - RNA, 24 nt, Artificial Sequence
  Synthetic
uauuucuugauuauaugcuaaaca

SEQ ID NO: 136781 - RNA, 18 nt, Artificial Sequence
  Synthetic
agacagccccccacaaca

SEQ ID NO: 136782 - RNA, 19 nt, Artificial Sequence
  Synthetic
aagacagccccccacaaca

SEQ ID NO: 136783 - RNA, 20 nt, Artificial Sequence
  Synthetic
caagacagccccccacaaca

SEQ ID NO: 136784 - RNA, 21 nt, Artificial Sequence
  Synthetic
acaagacagccccccacaaca

SEQ ID NO: 136785 - RNA, 22 nt, Artificial Sequence
  Synthetic
cacaagacagccccccacaaca

SEQ ID NO: 136786 - RNA, 24 nt, Artificial Sequence
  Synthetic
ugcacaagacagccccccacaaca

SEQ ID NO: 136787 - RNA, 18 nt, Artificial Sequence
  Synthetic
auuguugaaaugacaaca

SEQ ID NO: 136788 - RNA, 19 nt, Artificial Sequence
  Synthetic
cauuguugaaaugacaaca

SEQ ID NO: 136789 - RNA, 20 nt, Artificial Sequence
  Synthetic
acauuguugaaaugacaaca

SEQ ID NO: 136790 - RNA, 21 nt, Artificial Sequence
  Synthetic
aacauuguugaaaugacaaca

SEQ ID NO: 136791 - RNA, 23 nt, Artificial Sequence
  Synthetic
ugaacauuguugaaaugacaaca

SEQ ID NO: 136792 - RNA, 18 nt, Artificial Sequence
  Synthetic
acauaaaguuguacaaca

SEQ ID NO: 136793 - RNA, 19 nt, Artificial Sequence
  Synthetic
aacauaaaguuguacaaca

SEQ ID NO: 136794 - RNA, 20 nt, Artificial Sequence
  Synthetic
aaacauaaaguuguacaaca

SEQ ID NO: 136795 - RNA, 19 nt, Artificial Sequence
  Synthetic
agaaaaauaaaucucaaca

SEQ ID NO: 136796 - RNA, 20 nt, Artificial Sequence
  Synthetic
cagaaaaauaaaucucaaca

SEQ ID NO: 136797 - RNA, 18 nt, Artificial Sequence
  Synthetic
uaagaaugaaaaagaaca

SEQ ID NO: 136798 - RNA, 19 nt, Artificial Sequence
  Synthetic
auaagaaugaaaaagaaca

SEQ ID NO: 136799 - RNA, 20 nt, Artificial Sequence
  Synthetic
cauaagaaugaaaaagaaca

SEQ ID NO: 136800 - RNA, 18 nt, Artificial Sequence
  Synthetic
cacuuauaaaugagaaca

SEQ ID NO: 136801 - RNA, 19 nt, Artificial Sequence
  Synthetic
ccacuuauaaaugagaaca

SEQ ID NO: 136802 - RNA, 20 nt, Artificial Sequence
  Synthetic
cccacuuauaaaugagaaca

SEQ ID NO: 136803 - RNA, 21 nt, Artificial Sequence
  Synthetic
ucccacuuauaaaugagaaca

SEQ ID NO: 136804 - RNA, 22 nt, Artificial Sequence
  Synthetic
cucccacuuauaaaugagaaca

SEQ ID NO: 136805 - RNA, 24 nt, Artificial Sequence
  Synthetic
agcucccacuuauaaaugagaaca

SEQ ID NO: 136806 - RNA, 18 nt, Artificial Sequence
  Synthetic
aaaaaggcauauagaaca

SEQ ID NO: 136807 - RNA, 19 nt, Artificial Sequence
  Synthetic
aaaaaaggcauauagaaca

SEQ ID NO: 136808 - RNA, 20 nt, Artificial Sequence
  Synthetic
aaaaaaaggcauauagaaca

SEQ ID NO: 136809 - RNA, 18 nt, Artificial Sequence
  Synthetic
acauugaacacucgaaca

SEQ ID NO: 136810 - RNA, 21 nt, Artificial Sequence
  Synthetic
aggacauugaacacucgaaca

SEQ ID NO: 136811 - RNA, 23 nt, Artificial Sequence
  Synthetic
ugaggacauugaacacucgaaca

SEQ ID NO: 136812 - RNA, 24 nt, Artificial Sequence
  Synthetic
cugaggacauugaacacucgaaca

SEQ ID NO: 136813 - RNA, 18 nt, Artificial Sequence
  Synthetic
auggaagagacuggaaca

SEQ ID NO: 136814 - RNA, 20 nt, Artificial Sequence
  Synthetic
agauggaagagacuggaaca

SEQ ID NO: 136815 - RNA, 18 nt, Artificial Sequence
  Synthetic
auuuuggugacuugaaca

SEQ ID NO: 136816 - RNA, 19 nt, Artificial Sequence
  Synthetic
uauuuuggugacuugaaca

SEQ ID NO: 136817 - RNA, 20 nt, Artificial Sequence
  Synthetic
cuauuuuggugacuugaaca

SEQ ID NO: 136818 - RNA, 18 nt, Artificial Sequence
  Synthetic
uuauauccagaaauaaca

SEQ ID NO: 136819 - RNA, 19 nt, Artificial Sequence
  Synthetic
cuuauauccagaaauaaca

SEQ ID NO: 136820 - RNA, 20 nt, Artificial Sequence
  Synthetic
ccuuauauccagaaauaaca

SEQ ID NO: 136821 - RNA, 18 nt, Artificial Sequence
  Synthetic
uauucaaacuuaauaaca

SEQ ID NO: 136822 - RNA, 19 nt, Artificial Sequence
  Synthetic
auauucaaacuuaauaaca

SEQ ID NO: 136823 - RNA, 20 nt, Artificial Sequence
  Synthetic
aauauucaaacuuaauaaca

SEQ ID NO: 136824 - RNA, 18 nt, Artificial Sequence
  Synthetic
aagcccaucagacuaaca

SEQ ID NO: 136825 - RNA, 19 nt, Artificial Sequence
  Synthetic
aaagcccaucagacuaaca

SEQ ID NO: 136826 - RNA, 22 nt, Artificial Sequence
  Synthetic
agggaagcccaucagacuaaca

SEQ ID NO: 136827 - RNA, 23 nt, Artificial Sequence
  Synthetic
aagggaagcccaucagacuaaca

SEQ ID NO: 136828 - RNA, 24 nt, Artificial Sequence
  Synthetic
aaagggaagcccaucagacuaaca

SEQ ID NO: 136829 - RNA, 18 nt, Artificial Sequence
  Synthetic
ugauuaaguucauuaaca

SEQ ID NO: 136830 - RNA, 19 nt, Artificial Sequence
  Synthetic
augauuaaguucauuaaca

SEQ ID NO: 136831 - RNA, 20 nt, Artificial Sequence
  Synthetic
aaugauuaaguucauuaaca

SEQ ID NO: 136832 - RNA, 18 nt, Artificial Sequence
  Synthetic
uggucagccauauuaaca

SEQ ID NO: 136833 - RNA, 19 nt, Artificial Sequence
  Synthetic
auggucagccauauuaaca

SEQ ID NO: 136834 - RNA, 20 nt, Artificial Sequence
  Synthetic
uauggucagccauauuaaca

SEQ ID NO: 136835 - RNA, 18 nt, Artificial Sequence
  Synthetic
aaauuaauuuaaaacaca

SEQ ID NO: 136836 - RNA, 19 nt, Artificial Sequence
  Synthetic
uaaauuaauuuaaaacaca

SEQ ID NO: 136837 - RNA, 21 nt, Artificial Sequence
  Synthetic
uguaaauuaauuuaaaacaca

SEQ ID NO: 136838 - RNA, 22 nt, Artificial Sequence
  Synthetic
auguaaauuaauuuaaaacaca

SEQ ID NO: 136839 - RNA, 23 nt, Artificial Sequence
  Synthetic
aauguaaauuaauuuaaaacaca

SEQ ID NO: 136840 - RNA, 24 nt, Artificial Sequence
  Synthetic
aaauguaaauuaauuuaaaacaca

SEQ ID NO: 136841 - RNA, 19 nt, Artificial Sequence
  Synthetic
ugggagccuccaucacaca

SEQ ID NO: 136842 - RNA, 20 nt, Artificial Sequence
  Synthetic
augggagccuccaucacaca

SEQ ID NO: 136843 - RNA, 21 nt, Artificial Sequence
  Synthetic
ugcauaggauagcccuccaca

SEQ ID NO: 136844 - RNA, 22 nt, Artificial Sequence
  Synthetic
augcauaggauagcccuccaca

SEQ ID NO: 136845 - RNA, 23 nt, Artificial Sequence
  Synthetic
aaugcauaggauagcccuccaca

SEQ ID NO: 136846 - RNA, 24 nt, Artificial Sequence
  Synthetic
caaugcauaggauagcccuccaca

SEQ ID NO: 136847 - RNA, 18 nt, Artificial Sequence
  Synthetic
uggggucggagcuccaca

SEQ ID NO: 136848 - RNA, 20 nt, Artificial Sequence
  Synthetic
uguggggucggagcuccaca

SEQ ID NO: 136849 - RNA, 21 nt, Artificial Sequence
  Synthetic
auguggggucggagcuccaca

SEQ ID NO: 136850 - RNA, 22 nt, Artificial Sequence
  Synthetic
aauguggggucggagcuccaca

SEQ ID NO: 136851 - RNA, 23 nt, Artificial Sequence
  Synthetic
aaauguggggucggagcuccaca

SEQ ID NO: 136852 - RNA, 24 nt, Artificial Sequence
  Synthetic
aaaauguggggucggagcuccaca

SEQ ID NO: 136853 - RNA, 18 nt, Artificial Sequence
  Synthetic
ccucaccccggaagcaca

SEQ ID NO: 136854 - RNA, 20 nt, Artificial Sequence
  Synthetic
cgccucaccccggaagcaca

SEQ ID NO: 136855 - RNA, 21 nt, Artificial Sequence
  Synthetic
ucgccucaccccggaagcaca

SEQ ID NO: 136856 - RNA, 23 nt, Artificial Sequence
  Synthetic
ugucgccucaccccggaagcaca

SEQ ID NO: 136857 - RNA, 24 nt, Artificial Sequence
  Synthetic
augucgccucaccccggaagcaca

SEQ ID NO: 136858 - RNA, 18 nt, Artificial Sequence
  Synthetic
aaaggauacugaggcaca

SEQ ID NO: 136859 - RNA, 19 nt, Artificial Sequence
  Synthetic
aaaaggauacugaggcaca

SEQ ID NO: 136860 - RNA, 21 nt, Artificial Sequence
  Synthetic
agaaaaggauacugaggcaca

SEQ ID NO: 136861 - RNA, 23 nt, Artificial Sequence
  Synthetic
agagaaaaggauacugaggcaca

SEQ ID NO: 136862 - RNA, 24 nt, Artificial Sequence
  Synthetic
cagagaaaaggauacugaggcaca

SEQ ID NO: 136863 - RNA, 19 nt, Artificial Sequence
  Synthetic
aggcaagggcaagaucaca

SEQ ID NO: 136864 - RNA, 20 nt, Artificial Sequence
  Synthetic
uaggcaagggcaagaucaca

SEQ ID NO: 136865 - RNA, 18 nt, Artificial Sequence
  Synthetic
cuuaauuuugacgucaca

SEQ ID NO: 136866 - RNA, 19 nt, Artificial Sequence
  Synthetic
ccuuaauuuugacgucaca

SEQ ID NO: 136867 - RNA, 20 nt, Artificial Sequence
  Synthetic
accuuaauuuugacgucaca

SEQ ID NO: 136868 - RNA, 19 nt, Artificial Sequence
  Synthetic
ugcauucuaaaaugucaca

SEQ ID NO: 136869 - RNA, 18 nt, Artificial Sequence
  Synthetic
caggaagaauuauucaca

SEQ ID NO: 136870 - RNA, 19 nt, Artificial Sequence
  Synthetic
ucaggaagaauuauucaca

SEQ ID NO: 136871 - RNA, 20 nt, Artificial Sequence
  Synthetic
uucaggaagaauuauucaca

SEQ ID NO: 136872 - RNA, 19 nt, Artificial Sequence
  Synthetic
uguuacuuuuauuuucaca

SEQ ID NO: 136873 - RNA, 18 nt, Artificial Sequence
  Synthetic
aagaaaccaagaaagaca

SEQ ID NO: 136874 - RNA, 19 nt, Artificial Sequence
  Synthetic
aaagaaaccaagaaagaca

SEQ ID NO: 136875 - RNA, 18 nt, Artificial Sequence
  Synthetic
ucauauuuuaagaagaca

SEQ ID NO: 136876 - RNA, 19 nt, Artificial Sequence
  Synthetic
uucauauuuuaagaagaca

SEQ ID NO: 136877 - RNA, 20 nt, Artificial Sequence
  Synthetic
uuucauauuuuaagaagaca

SEQ ID NO: 136878 - RNA, 21 nt, Artificial Sequence
  Synthetic
uuuucauauuuuaagaagaca

SEQ ID NO: 136879 - RNA, 22 nt, Artificial Sequence
  Synthetic
auuuucauauuuuaagaagaca

SEQ ID NO: 136880 - RNA, 24 nt, Artificial Sequence
  Synthetic
ugauuuucauauuuuaagaagaca

SEQ ID NO: 136881 - RNA, 18 nt, Artificial Sequence
  Synthetic
ccacaaaggaggaagaca

SEQ ID NO: 136882 - RNA, 19 nt, Artificial Sequence
  Synthetic
cccacaaaggaggaagaca

SEQ ID NO: 136883 - RNA, 20 nt, Artificial Sequence
  Synthetic
ucccacaaaggaggaagaca

SEQ ID NO: 136884 - RNA, 19 nt, Artificial Sequence
  Synthetic
agugggcccucaccagaca

SEQ ID NO: 136885 - RNA, 22 nt, Artificial Sequence
  Synthetic
aggagugggcccucaccagaca

SEQ ID NO: 136886 - RNA, 23 nt, Artificial Sequence
  Synthetic
caggagugggcccucaccagaca

SEQ ID NO: 136887 - RNA, 24 nt, Artificial Sequence
  Synthetic
acaggagugggcccucaccagaca

SEQ ID NO: 136888 - RNA, 22 nt, Artificial Sequence
  Synthetic
agacauuuucuuucuggagaca

SEQ ID NO: 136889 - RNA, 23 nt, Artificial Sequence
  Synthetic
aagacauuuucuuucuggagaca

SEQ ID NO: 136890 - RNA, 24 nt, Artificial Sequence
  Synthetic
caagacauuuucuuucuggagaca

SEQ ID NO: 136891 - RNA, 18 nt, Artificial Sequence
  Synthetic
cuccagaagucugagaca

SEQ ID NO: 136892 - RNA, 19 nt, Artificial Sequence
  Synthetic
ccuccagaagucugagaca

SEQ ID NO: 136893 - RNA, 21 nt, Artificial Sequence
  Synthetic
agccuccagaagucugagaca

SEQ ID NO: 136894 - RNA, 22 nt, Artificial Sequence
  Synthetic
uagccuccagaagucugagaca

SEQ ID NO: 136895 - RNA, 23 nt, Artificial Sequence
  Synthetic
cuagccuccagaagucugagaca

SEQ ID NO: 136896 - RNA, 24 nt, Artificial Sequence
  Synthetic
ucuagccuccagaagucugagaca

SEQ ID NO: 136897 - RNA, 18 nt, Artificial Sequence
  Synthetic
acugggacugguuagaca

SEQ ID NO: 136898 - RNA, 19 nt, Artificial Sequence
  Synthetic
cacugggacugguuagaca

SEQ ID NO: 136899 - RNA, 20 nt, Artificial Sequence
  Synthetic
ucacugggacugguuagaca

SEQ ID NO: 136900 - RNA, 21 nt, Artificial Sequence
  Synthetic
cucacugggacugguuagaca

SEQ ID NO: 136901 - RNA, 22 nt, Artificial Sequence
  Synthetic
ucucacugggacugguuagaca

SEQ ID NO: 136902 - RNA, 23 nt, Artificial Sequence
  Synthetic
aucucacugggacugguuagaca

SEQ ID NO: 136903 - RNA, 24 nt, Artificial Sequence
  Synthetic
caucucacugggacugguuagaca

SEQ ID NO: 136904 - RNA, 18 nt, Artificial Sequence
  Synthetic
aacauguacacauggaca

SEQ ID NO: 136905 - RNA, 19 nt, Artificial Sequence
  Synthetic
aaacauguacacauggaca

SEQ ID NO: 136906 - RNA, 20 nt, Artificial Sequence
  Synthetic
uaaacauguacacauggaca

SEQ ID NO: 136907 - RNA, 18 nt, Artificial Sequence
  Synthetic
ucucugaucucauggaca

SEQ ID NO: 136908 - RNA, 19 nt, Artificial Sequence
  Synthetic
aucucugaucucauggaca

SEQ ID NO: 136909 - RNA, 20 nt, Artificial Sequence
  Synthetic
caucucugaucucauggaca

SEQ ID NO: 136910 - RNA, 18 nt, Artificial Sequence
  Synthetic
aaugagaacacuuggaca

SEQ ID NO: 136911 - RNA, 19 nt, Artificial Sequence
  Synthetic
caaugagaacacuuggaca

SEQ ID NO: 136912 - RNA, 21 nt, Artificial Sequence
  Synthetic
agcaaugagaacacuuggaca

SEQ ID NO: 136913 - RNA, 23 nt, Artificial Sequence
  Synthetic
ugagcaaugagaacacuuggaca

SEQ ID NO: 136914 - RNA, 24 nt, Artificial Sequence
  Synthetic
uugagcaaugagaacacuuggaca

SEQ ID NO: 136915 - RNA, 18 nt, Artificial Sequence
  Synthetic
cagaaaaaaaaagugaca

SEQ ID NO: 136916 - RNA, 21 nt, Artificial Sequence
  Synthetic
acaacugugaaaugguugaca

SEQ ID NO: 136917 - RNA, 22 nt, Artificial Sequence
  Synthetic
aacaacugugaaaugguugaca

SEQ ID NO: 136918 - RNA, 24 nt, Artificial Sequence
  Synthetic
ugaacaacugugaaaugguugaca

SEQ ID NO: 136919 - RNA, 18 nt, Artificial Sequence
  Synthetic
acuuuucugguuuugaca

SEQ ID NO: 136920 - RNA, 18 nt, Artificial Sequence
  Synthetic
aaaaacauuauaaauaca

SEQ ID NO: 136921 - RNA, 19 nt, Artificial Sequence
  Synthetic
uaaaaacauuauaaauaca

SEQ ID NO: 136922 - RNA, 20 nt, Artificial Sequence
  Synthetic
uuaaaaacauuauaaauaca

SEQ ID NO: 136923 - RNA, 18 nt, Artificial Sequence
  Synthetic
aauuauucauuaaauaca

SEQ ID NO: 136924 - RNA, 19 nt, Artificial Sequence
  Synthetic
uaauuauucauuaaauaca

SEQ ID NO: 136925 - RNA, 20 nt, Artificial Sequence
  Synthetic
auaauuauucauuaaauaca

SEQ ID NO: 136926 - RNA, 18 nt, Artificial Sequence
  Synthetic
aguuuuauuuugaauaca

SEQ ID NO: 136927 - RNA, 19 nt, Artificial Sequence
  Synthetic
aaguuuuauuuugaauaca

SEQ ID NO: 136928 - RNA, 20 nt, Artificial Sequence
  Synthetic
caaguuuuauuuugaauaca

SEQ ID NO: 136929 - RNA, 21 nt, Artificial Sequence
  Synthetic
ucaaguuuuauuuugaauaca

SEQ ID NO: 136930 - RNA, 22 nt, Artificial Sequence
  Synthetic
uucaaguuuuauuuugaauaca

SEQ ID NO: 136931 - RNA, 23 nt, Artificial Sequence
  Synthetic
auucaaguuuuauuuugaauaca

SEQ ID NO: 136932 - RNA, 24 nt, Artificial Sequence
  Synthetic
aauucaaguuuuauuuugaauaca

SEQ ID NO: 136933 - RNA, 18 nt, Artificial Sequence
  Synthetic
ucagauuuuuuuaauaca

SEQ ID NO: 136934 - RNA, 19 nt, Artificial Sequence
  Synthetic
aucagauuuuuuuaauaca

SEQ ID NO: 136935 - RNA, 20 nt, Artificial Sequence
  Synthetic
aaucagauuuuuuuaauaca

SEQ ID NO: 136936 - RNA, 23 nt, Artificial Sequence
  Synthetic
uggaaucagauuuuuuuaauaca

SEQ ID NO: 136937 - RNA, 24 nt, Artificial Sequence
  Synthetic
auggaaucagauuuuuuuaauaca

SEQ ID NO: 136938 - RNA, 18 nt, Artificial Sequence
  Synthetic
uacuaccacagacauaca

SEQ ID NO: 136939 - RNA, 19 nt, Artificial Sequence
  Synthetic
cuacuaccacagacauaca

SEQ ID NO: 136940 - RNA, 20 nt, Artificial Sequence
  Synthetic
acuacuaccacagacauaca

SEQ ID NO: 136941 - RNA, 18 nt, Artificial Sequence
  Synthetic
aaaauuagagagcauaca

SEQ ID NO: 136942 - RNA, 19 nt, Artificial Sequence
  Synthetic
aaaaauuagagagcauaca

SEQ ID NO: 136943 - RNA, 20 nt, Artificial Sequence
  Synthetic
aaaaaauuagagagcauaca

SEQ ID NO: 136944 - RNA, 18 nt, Artificial Sequence
  Synthetic
augugguguauucauaca

SEQ ID NO: 136945 - RNA, 19 nt, Artificial Sequence
  Synthetic
aaugugguguauucauaca

SEQ ID NO: 136946 - RNA, 20 nt, Artificial Sequence
  Synthetic
aaaugugguguauucauaca

SEQ ID NO: 136947 - RNA, 21 nt, Artificial Sequence
  Synthetic
aaaaugugguguauucauaca

SEQ ID NO: 136948 - RNA, 23 nt, Artificial Sequence
  Synthetic
agaaaaugugguguauucauaca

SEQ ID NO: 136949 - RNA, 24 nt, Artificial Sequence
  Synthetic
aagaaaaugugguguauucauaca

SEQ ID NO: 136950 - RNA, 19 nt, Artificial Sequence
  Synthetic
agaaauaaagaaauauaca

SEQ ID NO: 136951 - RNA, 18 nt, Artificial Sequence
  Synthetic
aauuuuauuuuauauaca

SEQ ID NO: 136952 - RNA, 19 nt, Artificial Sequence
  Synthetic
aaauuuuauuuuauauaca

SEQ ID NO: 136953 - RNA, 20 nt, Artificial Sequence
  Synthetic
caaauuuuauuuuauauaca

SEQ ID NO: 136954 - RNA, 18 nt, Artificial Sequence
  Synthetic
uucauccaugucccuaca

SEQ ID NO: 136955 - RNA, 19 nt, Artificial Sequence
  Synthetic
cuucauccaugucccuaca

SEQ ID NO: 136956 - RNA, 21 nt, Artificial Sequence
  Synthetic
agcuucauccaugucccuaca

SEQ ID NO: 136957 - RNA, 22 nt, Artificial Sequence
  Synthetic
cagcuucauccaugucccuaca

SEQ ID NO: 136958 - RNA, 23 nt, Artificial Sequence
  Synthetic
ccagcuucauccaugucccuaca

SEQ ID NO: 136959 - RNA, 24 nt, Artificial Sequence
  Synthetic
uccagcuucauccaugucccuaca

SEQ ID NO: 136960 - RNA, 21 nt, Artificial Sequence
  Synthetic
ucacugacaguaucugcuaca

SEQ ID NO: 136961 - RNA, 24 nt, Artificial Sequence
  Synthetic
aggucacugacaguaucugcuaca

SEQ ID NO: 136962 - RNA, 18 nt, Artificial Sequence
  Synthetic
caaggccccaucucuaca

SEQ ID NO: 136963 - RNA, 21 nt, Artificial Sequence
  Synthetic
uggcaaggccccaucucuaca

SEQ ID NO: 136964 - RNA, 22 nt, Artificial Sequence
  Synthetic
auggcaaggccccaucucuaca

SEQ ID NO: 136965 - RNA, 23 nt, Artificial Sequence
  Synthetic
cauggcaaggccccaucucuaca

SEQ ID NO: 136966 - RNA, 24 nt, Artificial Sequence
  Synthetic
acauggcaaggccccaucucuaca

SEQ ID NO: 136967 - RNA, 18 nt, Artificial Sequence
  Synthetic
aaaacacccugcaguaca

SEQ ID NO: 136968 - RNA, 19 nt, Artificial Sequence
  Synthetic
caaaacacccugcaguaca

SEQ ID NO: 136969 - RNA, 21 nt, Artificial Sequence
  Synthetic
ugcaaaacacccugcaguaca

SEQ ID NO: 136970 - RNA, 22 nt, Artificial Sequence
  Synthetic
cugcaaaacacccugcaguaca

SEQ ID NO: 136971 - RNA, 24 nt, Artificial Sequence
  Synthetic
ugcugcaaaacacccugcaguaca

SEQ ID NO: 136972 - RNA, 21 nt, Artificial Sequence
  Synthetic
cucuuuuuguucucauguaca

SEQ ID NO: 136973 - RNA, 22 nt, Artificial Sequence
  Synthetic
ucucuuuuuguucucauguaca

SEQ ID NO: 136974 - RNA, 23 nt, Artificial Sequence
  Synthetic
cucucuuuuuguucucauguaca

SEQ ID NO: 136975 - RNA, 18 nt, Artificial Sequence
  Synthetic
aaaaaaaaaauguguaca

SEQ ID NO: 136976 - RNA, 20 nt, Artificial Sequence
  Synthetic
agaaaaaaaaaauguguaca

SEQ ID NO: 136977 - RNA, 18 nt, Artificial Sequence
  Synthetic
agcugaaagaauuguaca

SEQ ID NO: 136978 - RNA, 19 nt, Artificial Sequence
  Synthetic
aagcugaaagaauuguaca

SEQ ID NO: 136979 - RNA, 20 nt, Artificial Sequence
  Synthetic
aaagcugaaagaauuguaca

SEQ ID NO: 136980 - RNA, 18 nt, Artificial Sequence
  Synthetic
aaauugaacucuuguaca

SEQ ID NO: 136981 - RNA, 19 nt, Artificial Sequence
  Synthetic
aaaauugaacucuuguaca

SEQ ID NO: 136982 - RNA, 20 nt, Artificial Sequence
  Synthetic
aaaaauugaacucuuguaca

SEQ ID NO: 136983 - RNA, 18 nt, Artificial Sequence
  Synthetic
uauuuuuucuuaauuaca

SEQ ID NO: 136984 - RNA, 19 nt, Artificial Sequence
  Synthetic
uuauuuuuucuuaauuaca

SEQ ID NO: 136985 - RNA, 20 nt, Artificial Sequence
  Synthetic
uuuauuuuuucuuaauuaca

SEQ ID NO: 136986 - RNA, 18 nt, Artificial Sequence
  Synthetic
cuaggaauccaacuuaca

SEQ ID NO: 136987 - RNA, 19 nt, Artificial Sequence
  Synthetic
ccuaggaauccaacuuaca

SEQ ID NO: 136988 - RNA, 20 nt, Artificial Sequence
  Synthetic
accuaggaauccaacuuaca

SEQ ID NO: 136989 - RNA, 18 nt, Artificial Sequence
  Synthetic
cuaggaaugcaacuuaca

SEQ ID NO: 136990 - RNA, 19 nt, Artificial Sequence
  Synthetic
ccuaggaaugcaacuuaca

SEQ ID NO: 136991 - RNA, 20 nt, Artificial Sequence
  Synthetic
accuaggaaugcaacuuaca

SEQ ID NO: 136992 - RNA, 21 nt, Artificial Sequence
  Synthetic
uaccuaggaaugcaacuuaca

SEQ ID NO: 136993 - RNA, 22 nt, Artificial Sequence
  Synthetic
auaccuaggaaugcaacuuaca

SEQ ID NO: 136994 - RNA, 23 nt, Artificial Sequence
  Synthetic
aauaccuaggaaugcaacuuaca

SEQ ID NO: 136995 - RNA, 24 nt, Artificial Sequence
  Synthetic
aaauaccuaggaaugcaacuuaca

SEQ ID NO: 136996 - RNA, 18 nt, Artificial Sequence
  Synthetic
ugauauuuucaacuuaca

SEQ ID NO: 136997 - RNA, 19 nt, Artificial Sequence
  Synthetic
augauauuuucaacuuaca

SEQ ID NO: 136998 - RNA, 20 nt, Artificial Sequence
  Synthetic
aaugauauuuucaacuuaca

SEQ ID NO: 136999 - RNA, 21 nt, Artificial Sequence
  Synthetic
uaaugauauuuucaacuuaca

SEQ ID NO: 137000 - RNA, 22 nt, Artificial Sequence
  Synthetic
uuaaugauauuuucaacuuaca

SEQ ID NO: 137001 - RNA, 23 nt, Artificial Sequence
  Synthetic
auuaaugauauuuucaacuuaca

SEQ ID NO: 137002 - RNA, 24 nt, Artificial Sequence
  Synthetic
aauuaaugauauuuucaacuuaca

SEQ ID NO: 137003 - RNA, 18 nt, Artificial Sequence
  Synthetic
aagccccuuauaaaacca

SEQ ID NO: 137004 - RNA, 19 nt, Artificial Sequence
  Synthetic
aaagccccuuauaaaacca

SEQ ID NO: 137005 - RNA, 20 nt, Artificial Sequence
  Synthetic
aaaagccccuuauaaaacca

SEQ ID NO: 137006 - RNA, 19 nt, Artificial Sequence
  Synthetic
agucaaacucguagaacca

SEQ ID NO: 137007 - RNA, 20 nt, Artificial Sequence
  Synthetic
cagucaaacucguagaacca

SEQ ID NO: 137008 - RNA, 19 nt, Artificial Sequence
  Synthetic
aggagaaucacuugaacca

SEQ ID NO: 137009 - RNA, 20 nt, Artificial Sequence
  Synthetic
caggagaaucacuugaacca

SEQ ID NO: 137010 - RNA, 23 nt, Artificial Sequence
  Synthetic
aggcaggagaaucacuugaacca

SEQ ID NO: 137011 - RNA, 19 nt, Artificial Sequence
  Synthetic
agguggcacauacacacca

SEQ ID NO: 137012 - RNA, 20 nt, Artificial Sequence
  Synthetic
aagguggcacauacacacca

SEQ ID NO: 137013 - RNA, 21 nt, Artificial Sequence
  Synthetic
aaagguggcacauacacacca

SEQ ID NO: 137014 - RNA, 22 nt, Artificial Sequence
  Synthetic
aaaagguggcacauacacacca

SEQ ID NO: 137015 - RNA, 24 nt, Artificial Sequence
  Synthetic
agaaaagguggcacauacacacca

SEQ ID NO: 137016 - RNA, 18 nt, Artificial Sequence
  Synthetic
cguggcacagauacacca

SEQ ID NO: 137017 - RNA, 19 nt, Artificial Sequence
  Synthetic
acguggcacagauacacca

SEQ ID NO: 137018 - RNA, 20 nt, Artificial Sequence
  Synthetic
aacguggcacagauacacca

SEQ ID NO: 137019 - RNA, 21 nt, Artificial Sequence
  Synthetic
aaacguggcacagauacacca

SEQ ID NO: 137020 - RNA, 22 nt, Artificial Sequence
  Synthetic
aaaacguggcacagauacacca

SEQ ID NO: 137021 - RNA, 24 nt, Artificial Sequence
  Synthetic
agaaaacguggcacagauacacca

SEQ ID NO: 137022 - RNA, 18 nt, Artificial Sequence
  Synthetic
ugugguacauauacacca

SEQ ID NO: 137023 - RNA, 19 nt, Artificial Sequence
  Synthetic
augugguacauauacacca

SEQ ID NO: 137024 - RNA, 20 nt, Artificial Sequence
  Synthetic
aaugugguacauauacacca

SEQ ID NO: 137025 - RNA, 18 nt, Artificial Sequence
  Synthetic
uguggcacauauccacca

SEQ ID NO: 137026 - RNA, 19 nt, Artificial Sequence
  Synthetic
auguggcacauauccacca

SEQ ID NO: 137027 - RNA, 20 nt, Artificial Sequence
  Synthetic
aauguggcacauauccacca

SEQ ID NO: 137028 - RNA, 21 nt, Artificial Sequence
  Synthetic
aaauguggcacauauccacca

SEQ ID NO: 137029 - RNA, 22 nt, Artificial Sequence
  Synthetic
aaaauguggcacauauccacca

SEQ ID NO: 137030 - RNA, 24 nt, Artificial Sequence
  Synthetic
agaaaauguggcacauauccacca

SEQ ID NO: 137031 - RNA, 18 nt, Artificial Sequence
  Synthetic
uuaaaaaaauuuccacca

SEQ ID NO: 137032 - RNA, 19 nt, Artificial Sequence
  Synthetic
uuuaaaaaaauuuccacca

SEQ ID NO: 137033 - RNA, 20 nt, Artificial Sequence
  Synthetic
auuuaaaaaaauuuccacca

SEQ ID NO: 137034 - RNA, 18 nt, Artificial Sequence
  Synthetic
cgugguauacaugcacca

SEQ ID NO: 137035 - RNA, 19 nt, Artificial Sequence
  Synthetic
acgugguauacaugcacca

SEQ ID NO: 137036 - RNA, 20 nt, Artificial Sequence
  Synthetic
aacgugguauacaugcacca

SEQ ID NO: 137037 - RNA, 18 nt, Artificial Sequence
  Synthetic
auaagaggauaaucacca

SEQ ID NO: 137038 - RNA, 20 nt, Artificial Sequence
  Synthetic
agauaagaggauaaucacca

SEQ ID NO: 137039 - RNA, 22 nt, Artificial Sequence
  Synthetic
agagauaagaggauaaucacca

SEQ ID NO: 137040 - RNA, 23 nt, Artificial Sequence
  Synthetic
uagagauaagaggauaaucacca

SEQ ID NO: 137041 - RNA, 24 nt, Artificial Sequence
  Synthetic
auagagauaagaggauaaucacca

SEQ ID NO: 137042 - RNA, 18 nt, Artificial Sequence
  Synthetic
acacaaaagaauagacca

SEQ ID NO: 137043 - RNA, 19 nt, Artificial Sequence
  Synthetic
aacacaaaagaauagacca

SEQ ID NO: 137044 - RNA, 20 nt, Artificial Sequence
  Synthetic
aaacacaaaagaauagacca

SEQ ID NO: 137045 - RNA, 19 nt, Artificial Sequence
  Synthetic
aggccaaggcgggugacca

SEQ ID NO: 137046 - RNA, 23 nt, Artificial Sequence
  Synthetic
ugggaggccaaggcgggugacca

SEQ ID NO: 137047 - RNA, 24 nt, Artificial Sequence
  Synthetic
uugggaggccaaggcgggugacca

SEQ ID NO: 137048 - RNA, 18 nt, Artificial Sequence
  Synthetic
uuuaaaauagaaauacca

SEQ ID NO: 137049 - RNA, 19 nt, Artificial Sequence
  Synthetic
auuuaaaauagaaauacca

SEQ ID NO: 137050 - RNA, 20 nt, Artificial Sequence
  Synthetic
uauuuaaaauagaaauacca

SEQ ID NO: 137051 - RNA, 18 nt, Artificial Sequence
  Synthetic
cugaaaacagaauuacca

SEQ ID NO: 137052 - RNA, 19 nt, Artificial Sequence
  Synthetic
acugaaaacagaauuacca

SEQ ID NO: 137053 - RNA, 20 nt, Artificial Sequence
  Synthetic
aacugaaaacagaauuacca

SEQ ID NO: 137054 - RNA, 21 nt, Artificial Sequence
  Synthetic
aaacugaaaacagaauuacca

SEQ ID NO: 137055 - RNA, 22 nt, Artificial Sequence
  Synthetic
aaaacugaaaacagaauuacca

SEQ ID NO: 137056 - RNA, 23 nt, Artificial Sequence
  Synthetic
aaaaacugaaaacagaauuacca

SEQ ID NO: 137057 - RNA, 24 nt, Artificial Sequence
  Synthetic
aaaaaacugaaaacagaauuacca

SEQ ID NO: 137058 - RNA, 19 nt, Artificial Sequence
  Synthetic
agaguaaaaaugaaaccca

SEQ ID NO: 137059 - RNA, 21 nt, Artificial Sequence
  Synthetic
agagaguaaaaaugaaaccca

SEQ ID NO: 137060 - RNA, 23 nt, Artificial Sequence
  Synthetic
ugagagaguaaaaaugaaaccca

SEQ ID NO: 137061 - RNA, 24 nt, Artificial Sequence
  Synthetic
cugagagaguaaaaaugaaaccca

SEQ ID NO: 137062 - RNA, 18 nt, Artificial Sequence
  Synthetic
aggcccaccuuacaccca

SEQ ID NO: 137063 - RNA, 19 nt, Artificial Sequence
  Synthetic
caggcccaccuuacaccca

SEQ ID NO: 137064 - RNA, 20 nt, Artificial Sequence
  Synthetic
ucaggcccaccuuacaccca

SEQ ID NO: 137065 - RNA, 21 nt, Artificial Sequence
  Synthetic
cucaggcccaccuuacaccca

SEQ ID NO: 137066 - RNA, 22 nt, Artificial Sequence
  Synthetic
ucucaggcccaccuuacaccca

SEQ ID NO: 137067 - RNA, 23 nt, Artificial Sequence
  Synthetic
uucucaggcccaccuuacaccca

SEQ ID NO: 137068 - RNA, 24 nt, Artificial Sequence
  Synthetic
auucucaggcccaccuuacaccca

SEQ ID NO: 137069 - RNA, 19 nt, Artificial Sequence
  Synthetic
agccuucagaaaugaccca

SEQ ID NO: 137070 - RNA, 21 nt, Artificial Sequence
  Synthetic
ccuauccaaauccuugaccca

SEQ ID NO: 137071 - RNA, 22 nt, Artificial Sequence
  Synthetic
cccuauccaaauccuugaccca

SEQ ID NO: 137072 - RNA, 24 nt, Artificial Sequence
  Synthetic
agcccuauccaaauccuugaccca

SEQ ID NO: 137073 - RNA, 18 nt, Artificial Sequence
  Synthetic
uuacuggguauauaccca

SEQ ID NO: 137074 - RNA, 19 nt, Artificial Sequence
  Synthetic
auuacuggguauauaccca

SEQ ID NO: 137075 - RNA, 20 nt, Artificial Sequence
  Synthetic
cauuacuggguauauaccca

SEQ ID NO: 137076 - RNA, 18 nt, Artificial Sequence
  Synthetic
uuacugguuauauaccca

SEQ ID NO: 137077 - RNA, 19 nt, Artificial Sequence
  Synthetic
auuacugguuauauaccca

SEQ ID NO: 137078 - RNA, 20 nt, Artificial Sequence
  Synthetic
cauuacugguuauauaccca

SEQ ID NO: 137079 - RNA, 21 nt, Artificial Sequence
  Synthetic
ccauuacugguuauauaccca

SEQ ID NO: 137080 - RNA, 22 nt, Artificial Sequence
  Synthetic
cccauuacugguuauauaccca

SEQ ID NO: 137081 - RNA, 23 nt, Artificial Sequence
  Synthetic
ucccauuacugguuauauaccca

SEQ ID NO: 137082 - RNA, 24 nt, Artificial Sequence
  Synthetic
aucccauuacugguuauauaccca

SEQ ID NO: 137083 - RNA, 18 nt, Artificial Sequence
  Synthetic
agcucagaugagccccca

SEQ ID NO: 137084 - RNA, 19 nt, Artificial Sequence
  Synthetic
cagcucagaugagccccca

SEQ ID NO: 137085 - RNA, 18 nt, Artificial Sequence
  Synthetic
cagcucugcugacgccca

SEQ ID NO: 137086 - RNA, 18 nt, Artificial Sequence
  Synthetic
auguuauauucuugccca

SEQ ID NO: 137087 - RNA, 19 nt, Artificial Sequence
  Synthetic
aauguuauauucuugccca

SEQ ID NO: 137088 - RNA, 20 nt, Artificial Sequence
  Synthetic
aaauguuauauucuugccca

SEQ ID NO: 137089 - RNA, 18 nt, Artificial Sequence
  Synthetic
aaaagaaaugauauccca

SEQ ID NO: 137090 - RNA, 19 nt, Artificial Sequence
  Synthetic
aaaaagaaaugauauccca

SEQ ID NO: 137091 - RNA, 20 nt, Artificial Sequence
  Synthetic
aaaaaagaaaugauauccca

SEQ ID NO: 137092 - RNA, 18 nt, Artificial Sequence
  Synthetic
uccuggguauauauccca

SEQ ID NO: 137093 - RNA, 19 nt, Artificial Sequence
  Synthetic
cuccuggguauauauccca

SEQ ID NO: 137094 - RNA, 20 nt, Artificial Sequence
  Synthetic
acuccuggguauauauccca

SEQ ID NO: 137095 - RNA, 21 nt, Artificial Sequence
  Synthetic
cacuccuggguauauauccca

SEQ ID NO: 137096 - RNA, 22 nt, Artificial Sequence
  Synthetic
ucacuccuggguauauauccca

SEQ ID NO: 137097 - RNA, 23 nt, Artificial Sequence
  Synthetic
cucacuccuggguauauauccca

SEQ ID NO: 137098 - RNA, 24 nt, Artificial Sequence
  Synthetic
ccucacuccuggguauauauccca

SEQ ID NO: 137099 - RNA, 18 nt, Artificial Sequence
  Synthetic
ugauuaaauuaccuccca

SEQ ID NO: 137100 - RNA, 19 nt, Artificial Sequence
  Synthetic
augauuaaauuaccuccca

SEQ ID NO: 137101 - RNA, 20 nt, Artificial Sequence
  Synthetic
caugauuaaauuaccuccca

SEQ ID NO: 137102 - RNA, 21 nt, Artificial Sequence
  Synthetic
ccaugauuaaauuaccuccca

SEQ ID NO: 137103 - RNA, 22 nt, Artificial Sequence
  Synthetic
cccaugauuaaauuaccuccca

SEQ ID NO: 137104 - RNA, 23 nt, Artificial Sequence
  Synthetic
ccccaugauuaaauuaccuccca

SEQ ID NO: 137105 - RNA, 24 nt, Artificial Sequence
  Synthetic
cccccaugauuaaauuaccuccca

SEQ ID NO: 137106 - RNA, 18 nt, Artificial Sequence
  Synthetic
ugauucaguuaccuccca

SEQ ID NO: 137107 - RNA, 19 nt, Artificial Sequence
  Synthetic
augauucaguuaccuccca

SEQ ID NO: 137108 - RNA, 20 nt, Artificial Sequence
  Synthetic
caugauucaguuaccuccca

SEQ ID NO: 137109 - RNA, 21 nt, Artificial Sequence
  Synthetic
ccaugauucaguuaccuccca

SEQ ID NO: 137110 - RNA, 22 nt, Artificial Sequence
  Synthetic
cccaugauucaguuaccuccca

SEQ ID NO: 137111 - RNA, 23 nt, Artificial Sequence
  Synthetic
ccccaugauucaguuaccuccca

SEQ ID NO: 137112 - RNA, 24 nt, Artificial Sequence
  Synthetic
cccccaugauucaguuaccuccca

SEQ ID NO: 137113 - RNA, 18 nt, Artificial Sequence
  Synthetic
cuguuuuuuuuucuccca

SEQ ID NO: 137114 - RNA, 20 nt, Artificial Sequence
  Synthetic
agcuguuuuuuuuucuccca

SEQ ID NO: 137115 - RNA, 18 nt, Artificial Sequence
  Synthetic
auuucuaucaaauuccca

SEQ ID NO: 137116 - RNA, 19 nt, Artificial Sequence
  Synthetic
cauuucuaucaaauuccca

SEQ ID NO: 137117 - RNA, 21 nt, Artificial Sequence
  Synthetic
ugcauuucuaucaaauuccca

SEQ ID NO: 137118 - RNA, 22 nt, Artificial Sequence
  Synthetic
uugcauuucuaucaaauuccca

SEQ ID NO: 137119 - RNA, 23 nt, Artificial Sequence
  Synthetic
uuugcauuucuaucaaauuccca

SEQ ID NO: 137120 - RNA, 24 nt, Artificial Sequence
  Synthetic
auuugcauuucuaucaaauuccca

SEQ ID NO: 137121 - RNA, 18 nt, Artificial Sequence
  Synthetic
uucacaauagaaaagcca

SEQ ID NO: 137122 - RNA, 19 nt, Artificial Sequence
  Synthetic
auucacaauagaaaagcca

SEQ ID NO: 137123 - RNA, 20 nt, Artificial Sequence
  Synthetic
uauucacaauagaaaagcca

SEQ ID NO: 137124 - RNA, 21 nt, Artificial Sequence
  Synthetic
cuauucacaauagaaaagcca

SEQ ID NO: 137125 - RNA, 22 nt, Artificial Sequence
  Synthetic
acuauucacaauagaaaagcca

SEQ ID NO: 137126 - RNA, 23 nt, Artificial Sequence
  Synthetic
cacuauucacaauagaaaagcca

SEQ ID NO: 137127 - RNA, 18 nt, Artificial Sequence
  Synthetic
aguucagcagugcagcca

SEQ ID NO: 137128 - RNA, 20 nt, Artificial Sequence
  Synthetic
agaguucagcagugcagcca

SEQ ID NO: 137129 - RNA, 21 nt, Artificial Sequence
  Synthetic
uagaguucagcagugcagcca

SEQ ID NO: 137130 - RNA, 24 nt, Artificial Sequence
  Synthetic
ugguagaguucagcagugcagcca

SEQ ID NO: 137131 - RNA, 19 nt, Artificial Sequence
  Synthetic
aggagaaccgcuugagcca

SEQ ID NO: 137132 - RNA, 20 nt, Artificial Sequence
  Synthetic
caggagaaccgcuugagcca

SEQ ID NO: 137133 - RNA, 23 nt, Artificial Sequence
  Synthetic
aggcaggagaaccgcuugagcca

SEQ ID NO: 137134 - RNA, 18 nt, Artificial Sequence
  Synthetic
ugagcuaugauagcgcca

SEQ ID NO: 137135 - RNA, 20 nt, Artificial Sequence
  Synthetic
agugagcuaugauagcgcca

SEQ ID NO: 137136 - RNA, 21 nt, Artificial Sequence
  Synthetic
cagugagcuaugauagcgcca

SEQ ID NO: 137137 - RNA, 23 nt, Artificial Sequence
  Synthetic
ugcagugagcuaugauagcgcca

SEQ ID NO: 137138 - RNA, 24 nt, Artificial Sequence
  Synthetic
cugcagugagcuaugauagcgcca

SEQ ID NO: 137139 - RNA, 22 nt, Artificial Sequence
  Synthetic
uggaagaguugccccugcgcca

SEQ ID NO: 137140 - RNA, 19 nt, Artificial Sequence
  Synthetic
agaaagaagcauuuggcca

SEQ ID NO: 137141 - RNA, 18 nt, Artificial Sequence
  Synthetic
uuauagcuguucuugcca

SEQ ID NO: 137142 - RNA, 19 nt, Artificial Sequence
  Synthetic
auuauagcuguucuugcca

SEQ ID NO: 137143 - RNA, 21 nt, Artificial Sequence
  Synthetic
agauuauagcuguucuugcca

SEQ ID NO: 137144 - RNA, 22 nt, Artificial Sequence
  Synthetic
uagauuauagcuguucuugcca

SEQ ID NO: 137145 - RNA, 23 nt, Artificial Sequence
  Synthetic
auagauuauagcuguucuugcca

SEQ ID NO: 137146 - RNA, 24 nt, Artificial Sequence
  Synthetic
aauagauuauagcuguucuugcca

SEQ ID NO: 137147 - RNA, 18 nt, Artificial Sequence
  Synthetic
aggccugcaugauaucca

SEQ ID NO: 137148 - RNA, 19 nt, Artificial Sequence
  Synthetic
aaggccugcaugauaucca

SEQ ID NO: 137149 - RNA, 20 nt, Artificial Sequence
  Synthetic
aaaggccugcaugauaucca

SEQ ID NO: 137150 - RNA, 18 nt, Artificial Sequence
  Synthetic
aucuucauucccucucca

SEQ ID NO: 137151 - RNA, 19 nt, Artificial Sequence
  Synthetic
caucuucauucccucucca

SEQ ID NO: 137152 - RNA, 20 nt, Artificial Sequence
  Synthetic
ccaucuucauucccucucca

SEQ ID NO: 137153 - RNA, 18 nt, Artificial Sequence
  Synthetic
auuuaaauucaaauucca

SEQ ID NO: 137154 - RNA, 19 nt, Artificial Sequence
  Synthetic
uauuuaaauucaaauucca

SEQ ID NO: 137155 - RNA, 20 nt, Artificial Sequence
  Synthetic
uuauuuaaauucaaauucca

SEQ ID NO: 137156 - RNA, 19 nt, Artificial Sequence
  Synthetic
ugggcugcauaauauucca

SEQ ID NO: 137157 - RNA, 20 nt, Artificial Sequence
  Synthetic
augggcugcauaauauucca

SEQ ID NO: 137158 - RNA, 21 nt, Artificial Sequence
  Synthetic
uaugggcugcauaauauucca

SEQ ID NO: 137159 - RNA, 22 nt, Artificial Sequence
  Synthetic
uuaugggcugcauaauauucca

SEQ ID NO: 137160 - RNA, 23 nt, Artificial Sequence
  Synthetic
uuuaugggcugcauaauauucca

SEQ ID NO: 137161 - RNA, 24 nt, Artificial Sequence
  Synthetic
uuuuaugggcugcauaauauucca

SEQ ID NO: 137162 - RNA, 18 nt, Artificial Sequence
  Synthetic
uucauuuaacuguuucca

SEQ ID NO: 137163 - RNA, 19 nt, Artificial Sequence
  Synthetic
uuucauuuaacuguuucca

SEQ ID NO: 137164 - RNA, 20 nt, Artificial Sequence
  Synthetic
auuucauuuaacuguuucca

SEQ ID NO: 137165 - RNA, 21 nt, Artificial Sequence
  Synthetic
aauuucauuuaacuguuucca

SEQ ID NO: 137166 - RNA, 22 nt, Artificial Sequence
  Synthetic
uaauuucauuuaacuguuucca

SEQ ID NO: 137167 - RNA, 23 nt, Artificial Sequence
  Synthetic
auaauuucauuuaacuguuucca

SEQ ID NO: 137168 - RNA, 24 nt, Artificial Sequence
  Synthetic
aauaauuucauuuaacuguuucca

SEQ ID NO: 137169 - RNA, 18 nt, Artificial Sequence
  Synthetic
uucugaauuuauuuucca

SEQ ID NO: 137170 - RNA, 19 nt, Artificial Sequence
  Synthetic
auucugaauuuauuuucca

SEQ ID NO: 137171 - RNA, 18 nt, Artificial Sequence
  Synthetic
aaaaaagaaaauaaagca

SEQ ID NO: 137172 - RNA, 19 nt, Artificial Sequence
  Synthetic
uaaaaaagaaaauaaagca

SEQ ID NO: 137173 - RNA, 20 nt, Artificial Sequence
  Synthetic
auaaaaaagaaaauaaagca

SEQ ID NO: 137174 - RNA, 21 nt, Artificial Sequence
  Synthetic
aauaaaaaagaaaauaaagca

SEQ ID NO: 137175 - RNA, 22 nt, Artificial Sequence
  Synthetic
aaauaaaaaagaaaauaaagca

SEQ ID NO: 137176 - RNA, 24 nt, Artificial Sequence
  Synthetic
agaaauaaaaaagaaaauaaagca

SEQ ID NO: 137177 - RNA, 18 nt, Artificial Sequence
  Synthetic
auuaguuucuuuaaagca

SEQ ID NO: 137178 - RNA, 19 nt, Artificial Sequence
  Synthetic
uauuaguuucuuuaaagca

SEQ ID NO: 137179 - RNA, 18 nt, Artificial Sequence
  Synthetic
cauccuuaaaaccaagca

SEQ ID NO: 137180 - RNA, 19 nt, Artificial Sequence
  Synthetic
acauccuuaaaaccaagca

SEQ ID NO: 137181 - RNA, 20 nt, Artificial Sequence
  Synthetic
uacauccuuaaaaccaagca

SEQ ID NO: 137182 - RNA, 21 nt, Artificial Sequence
  Synthetic
auacauccuuaaaaccaagca

SEQ ID NO: 137183 - RNA, 22 nt, Artificial Sequence
  Synthetic
cauacauccuuaaaaccaagca

SEQ ID NO: 137184 - RNA, 23 nt, Artificial Sequence
  Synthetic
ccauacauccuuaaaaccaagca

SEQ ID NO: 137185 - RNA, 24 nt, Artificial Sequence
  Synthetic
uccauacauccuuaaaaccaagca

SEQ ID NO: 137186 - RNA, 18 nt, Artificial Sequence
  Synthetic
cuaaaguuuagucaagca

SEQ ID NO: 137187 - RNA, 19 nt, Artificial Sequence
  Synthetic
acuaaaguuuagucaagca

SEQ ID NO: 137188 - RNA, 21 nt, Artificial Sequence
  Synthetic
ugacuaaaguuuagucaagca

SEQ ID NO: 137189 - RNA, 22 nt, Artificial Sequence
  Synthetic
cugacuaaaguuuagucaagca

SEQ ID NO: 137190 - RNA, 23 nt, Artificial Sequence
  Synthetic
ccugacuaaaguuuagucaagca

SEQ ID NO: 137191 - RNA, 19 nt, Artificial Sequence
  Synthetic
agucaaacucauagaagca

SEQ ID NO: 137192 - RNA, 20 nt, Artificial Sequence
  Synthetic
uagucaaacucauagaagca

SEQ ID NO: 137193 - RNA, 21 nt, Artificial Sequence
  Synthetic
uuagucaaacucauagaagca

SEQ ID NO: 137194 - RNA, 22 nt, Artificial Sequence
  Synthetic
uuuagucaaacucauagaagca

SEQ ID NO: 137195 - RNA, 23 nt, Artificial Sequence
  Synthetic
auuuagucaaacucauagaagca

SEQ ID NO: 137196 - RNA, 24 nt, Artificial Sequence
  Synthetic
uauuuagucaaacucauagaagca

SEQ ID NO: 137197 - RNA, 19 nt, Artificial Sequence
  Synthetic
uggaguuugagaggaagca

SEQ ID NO: 137198 - RNA, 18 nt, Artificial Sequence
  Synthetic
caggaacuggaggaagca

SEQ ID NO: 137199 - RNA, 19 nt, Artificial Sequence
  Synthetic
ccaggaacuggaggaagca

SEQ ID NO: 137200 - RNA, 20 nt, Artificial Sequence
  Synthetic
cccaggaacuggaggaagca

SEQ ID NO: 137201 - RNA, 21 nt, Artificial Sequence
  Synthetic
acccaggaacuggaggaagca

SEQ ID NO: 137202 - RNA, 22 nt, Artificial Sequence
  Synthetic
aacccaggaacuggaggaagca

SEQ ID NO: 137203 - RNA, 24 nt, Artificial Sequence
  Synthetic
ugaacccaggaacuggaggaagca

SEQ ID NO: 137204 - RNA, 18 nt, Artificial Sequence
  Synthetic
acacgcugaauugaagca

SEQ ID NO: 137205 - RNA, 20 nt, Artificial Sequence
  Synthetic
agacacgcugaauugaagca

SEQ ID NO: 137206 - RNA, 18 nt, Artificial Sequence
  Synthetic
ucuuccuuuccauaagca

SEQ ID NO: 137207 - RNA, 19 nt, Artificial Sequence
  Synthetic
uucuuccuuuccauaagca

SEQ ID NO: 137208 - RNA, 20 nt, Artificial Sequence
  Synthetic
auucuuccuuuccauaagca

SEQ ID NO: 137209 - RNA, 22 nt, Artificial Sequence
  Synthetic
ugauucuuccuuuccauaagca

SEQ ID NO: 137210 - RNA, 23 nt, Artificial Sequence
  Synthetic
uugauucuuccuuuccauaagca

SEQ ID NO: 137211 - RNA, 24 nt, Artificial Sequence
  Synthetic
auugauucuuccuuuccauaagca

SEQ ID NO: 137212 - RNA, 18 nt, Artificial Sequence
  Synthetic
cuguugcugcuuuaagca

SEQ ID NO: 137213 - RNA, 20 nt, Artificial Sequence
  Synthetic
agcuguugcugcuuuaagca

SEQ ID NO: 137214 - RNA, 18 nt, Artificial Sequence
  Synthetic
acaaaggagaaaacagca

SEQ ID NO: 137215 - RNA, 20 nt, Artificial Sequence
  Synthetic
ugacaaaggagaaaacagca

SEQ ID NO: 137216 - RNA, 18 nt, Artificial Sequence
  Synthetic
uccagcagaccugcagca

SEQ ID NO: 137217 - RNA, 19 nt, Artificial Sequence
  Synthetic
uuccagcagaccugcagca

SEQ ID NO: 137218 - RNA, 20 nt, Artificial Sequence
  Synthetic
auuccagcagaccugcagca

SEQ ID NO: 137219 - RNA, 21 nt, Artificial Sequence
  Synthetic
aauuccagcagaccugcagca

SEQ ID NO: 137220 - RNA, 22 nt, Artificial Sequence
  Synthetic
aaauuccagcagaccugcagca

SEQ ID NO: 137221 - RNA, 23 nt, Artificial Sequence
  Synthetic
caaauuccagcagaccugcagca

SEQ ID NO: 137222 - RNA, 18 nt, Artificial Sequence
  Synthetic
cuucugcugugugcagca

SEQ ID NO: 137223 - RNA, 19 nt, Artificial Sequence
  Synthetic
ccuucugcugugugcagca

SEQ ID NO: 137224 - RNA, 20 nt, Artificial Sequence
  Synthetic
cccuucugcugugugcagca

SEQ ID NO: 137225 - RNA, 19 nt, Artificial Sequence
  Synthetic
aguuguaaaaauaucagca

SEQ ID NO: 137226 - RNA, 18 nt, Artificial Sequence
  Synthetic
ucuuccuauccaugagca

SEQ ID NO: 137227 - RNA, 19 nt, Artificial Sequence
  Synthetic
uucuuccuauccaugagca

SEQ ID NO: 137228 - RNA, 20 nt, Artificial Sequence
  Synthetic
auucuuccuauccaugagca

SEQ ID NO: 137229 - RNA, 22 nt, Artificial Sequence
  Synthetic
ugauucuuccuauccaugagca

SEQ ID NO: 137230 - RNA, 23 nt, Artificial Sequence
  Synthetic
uugauucuuccuauccaugagca

SEQ ID NO: 137231 - RNA, 24 nt, Artificial Sequence
  Synthetic
auugauucuuccuauccaugagca

SEQ ID NO: 137232 - RNA, 18 nt, Artificial Sequence
  Synthetic
aaauagaauaagauagca

SEQ ID NO: 137233 - RNA, 19 nt, Artificial Sequence
  Synthetic
aaaauagaauaagauagca

SEQ ID NO: 137234 - RNA, 20 nt, Artificial Sequence
  Synthetic
uaaaauagaauaagauagca

SEQ ID NO: 137235 - RNA, 21 nt, Artificial Sequence
  Synthetic
auaaaauagaauaagauagca

SEQ ID NO: 137236 - RNA, 22 nt, Artificial Sequence
  Synthetic
aauaaaauagaauaagauagca

SEQ ID NO: 137237 - RNA, 23 nt, Artificial Sequence
  Synthetic
aaauaaaauagaauaagauagca

SEQ ID NO: 137238 - RNA, 24 nt, Artificial Sequence
  Synthetic
aaaauaaaauagaauaagauagca

SEQ ID NO: 137239 - RNA, 18 nt, Artificial Sequence
  Synthetic
agccuguuggggauagca

SEQ ID NO: 137240 - RNA, 19 nt, Artificial Sequence
  Synthetic
uagccuguuggggauagca

SEQ ID NO: 137241 - RNA, 22 nt, Artificial Sequence
  Synthetic
ugguagccuguuggggauagca

SEQ ID NO: 137242 - RNA, 24 nt, Artificial Sequence
  Synthetic
agugguagccuguuggggauagca

SEQ ID NO: 137243 - RNA, 18 nt, Artificial Sequence
  Synthetic
ugcuuucacaggcuagca

SEQ ID NO: 137244 - RNA, 19 nt, Artificial Sequence
  Synthetic
cugcuuucacaggcuagca

SEQ ID NO: 137245 - RNA, 22 nt, Artificial Sequence
  Synthetic
uggcugcuuucacaggcuagca

SEQ ID NO: 137246 - RNA, 23 nt, Artificial Sequence
  Synthetic
cuggcugcuuucacaggcuagca

SEQ ID NO: 137247 - RNA, 24 nt, Artificial Sequence
  Synthetic
ccuggcugcuuucacaggcuagca

SEQ ID NO: 137248 - RNA, 18 nt, Artificial Sequence
  Synthetic
agcuugaugggaguagca

SEQ ID NO: 137249 - RNA, 19 nt, Artificial Sequence
  Synthetic
uagcuugaugggaguagca

SEQ ID NO: 137250 - RNA, 22 nt, Artificial Sequence
  Synthetic
ugguagcuugaugggaguagca

SEQ ID NO: 137251 - RNA, 23 nt, Artificial Sequence
  Synthetic
augguagcuugaugggaguagca

SEQ ID NO: 137252 - RNA, 24 nt, Artificial Sequence
  Synthetic
aaugguagcuugaugggaguagca

SEQ ID NO: 137253 - RNA, 18 nt, Artificial Sequence
  Synthetic
uucuggcgugaaaaggca

SEQ ID NO: 137254 - RNA, 19 nt, Artificial Sequence
  Synthetic
cuucuggcgugaaaaggca

SEQ ID NO: 137255 - RNA, 20 nt, Artificial Sequence
  Synthetic
ucuucuggcgugaaaaggca

SEQ ID NO: 137256 - RNA, 21 nt, Artificial Sequence
  Synthetic
uccuugcccuuuuaaaaggca

SEQ ID NO: 137257 - RNA, 22 nt, Artificial Sequence
  Synthetic
uuccuugcccuuuuaaaaggca

SEQ ID NO: 137258 - RNA, 23 nt, Artificial Sequence
  Synthetic
cuuccuugcccuuuuaaaaggca

SEQ ID NO: 137259 - RNA, 24 nt, Artificial Sequence
  Synthetic
ucuuccuugcccuuuuaaaaggca

SEQ ID NO: 137260 - RNA, 18 nt, Artificial Sequence
  Synthetic
aaaauggaagcacaggca

SEQ ID NO: 137261 - RNA, 19 nt, Artificial Sequence
  Synthetic
uaaaauggaagcacaggca

SEQ ID NO: 137262 - RNA, 20 nt, Artificial Sequence
  Synthetic
auaaaauggaagcacaggca

SEQ ID NO: 137263 - RNA, 22 nt, Artificial Sequence
  Synthetic
agauaaaauggaagcacaggca

SEQ ID NO: 137264 - RNA, 23 nt, Artificial Sequence
  Synthetic
uagauaaaauggaagcacaggca

SEQ ID NO: 137265 - RNA, 24 nt, Artificial Sequence
  Synthetic
cuagauaaaauggaagcacaggca

SEQ ID NO: 137266 - RNA, 19 nt, Artificial Sequence
  Synthetic
agcugaagaaaaccaggca

SEQ ID NO: 137267 - RNA, 20 nt, Artificial Sequence
  Synthetic
cagcugaagaaaaccaggca

SEQ ID NO: 137268 - RNA, 21 nt, Artificial Sequence
  Synthetic
ucagcugaagaaaaccaggca

SEQ ID NO: 137269 - RNA, 23 nt, Artificial Sequence
  Synthetic
ugucagcugaagaaaaccaggca

SEQ ID NO: 137270 - RNA, 24 nt, Artificial Sequence
  Synthetic
augucagcugaagaaaaccaggca

SEQ ID NO: 137271 - RNA, 19 nt, Artificial Sequence
  Synthetic
cgcuugaacguaggaggca

SEQ ID NO: 137272 - RNA, 20 nt, Artificial Sequence
  Synthetic
ucgcuugaacguaggaggca

SEQ ID NO: 137273 - RNA, 21 nt, Artificial Sequence
  Synthetic
aucgcuugaacguaggaggca

SEQ ID NO: 137274 - RNA, 22 nt, Artificial Sequence
  Synthetic
aaucgcuugaacguaggaggca

SEQ ID NO: 137275 - RNA, 24 nt, Artificial Sequence
  Synthetic
agaaucgcuugaacguaggaggca

SEQ ID NO: 137276 - RNA, 22 nt, Artificial Sequence
  Synthetic
agaggaaacaagggcaagggca

SEQ ID NO: 137277 - RNA, 23 nt, Artificial Sequence
  Synthetic
cagaggaaacaagggcaagggca

SEQ ID NO: 137278 - RNA, 18 nt, Artificial Sequence
  Synthetic
cuaaucaaaaauugggca

SEQ ID NO: 137279 - RNA, 19 nt, Artificial Sequence
  Synthetic
ccuaaucaaaaauugggca

SEQ ID NO: 137280 - RNA, 20 nt, Artificial Sequence
  Synthetic
accuaaucaaaaauugggca

SEQ ID NO: 137281 - RNA, 21 nt, Artificial Sequence
  Synthetic
aaccuaaucaaaaauugggca

SEQ ID NO: 137282 - RNA, 22 nt, Artificial Sequence
  Synthetic
aaaccuaaucaaaaauugggca

SEQ ID NO: 137283 - RNA, 23 nt, Artificial Sequence
  Synthetic
aaaaccuaaucaaaaauugggca

SEQ ID NO: 137284 - RNA, 24 nt, Artificial Sequence
  Synthetic
aaaaaccuaaucaaaaauugggca

SEQ ID NO: 137285 - RNA, 21 nt, Artificial Sequence
  Synthetic
uaacuaaguuaaguaauggca

SEQ ID NO: 137286 - RNA, 22 nt, Artificial Sequence
  Synthetic
uuaacuaaguuaaguaauggca

SEQ ID NO: 137287 - RNA, 23 nt, Artificial Sequence
  Synthetic
auuaacuaaguuaaguaauggca

SEQ ID NO: 137288 - RNA, 24 nt, Artificial Sequence
  Synthetic
aauuaacuaaguuaaguaauggca

SEQ ID NO: 137289 - RNA, 18 nt, Artificial Sequence
  Synthetic
aacagaaugcagauggca

SEQ ID NO: 137290 - RNA, 19 nt, Artificial Sequence
  Synthetic
aaacagaaugcagauggca

SEQ ID NO: 137291 - RNA, 20 nt, Artificial Sequence
  Synthetic
aaaacagaaugcagauggca

SEQ ID NO: 137292 - RNA, 18 nt, Artificial Sequence
  Synthetic
agcuugauggggauggca

SEQ ID NO: 137293 - RNA, 19 nt, Artificial Sequence
  Synthetic
uagcuugauggggauggca

SEQ ID NO: 137294 - RNA, 18 nt, Artificial Sequence
  Synthetic
ugcuuuuacaggcuggca

SEQ ID NO: 137295 - RNA, 19 nt, Artificial Sequence
  Synthetic
cugcuuuuacaggcuggca

SEQ ID NO: 137296 - RNA, 22 nt, Artificial Sequence
  Synthetic
uggcugcuuuuacaggcuggca

SEQ ID NO: 137297 - RNA, 23 nt, Artificial Sequence
  Synthetic
cuggcugcuuuuacaggcuggca

SEQ ID NO: 137298 - RNA, 24 nt, Artificial Sequence
  Synthetic
ccuggcugcuuuuacaggcuggca

SEQ ID NO: 137299 - RNA, 18 nt, Artificial Sequence
  Synthetic
uuuggguuuccauuggca

SEQ ID NO: 137300 - RNA, 20 nt, Artificial Sequence
  Synthetic
uguuuggguuuccauuggca

SEQ ID NO: 137301 - RNA, 21 nt, Artificial Sequence
  Synthetic
auguuuggguuuccauuggca

SEQ ID NO: 137302 - RNA, 22 nt, Artificial Sequence
  Synthetic
uauguuuggguuuccauuggca

SEQ ID NO: 137303 - RNA, 23 nt, Artificial Sequence
  Synthetic
cuauguuuggguuuccauuggca

SEQ ID NO: 137304 - RNA, 18 nt, Artificial Sequence
  Synthetic
uaaauacccuacaaugca

SEQ ID NO: 137305 - RNA, 19 nt, Artificial Sequence
  Synthetic
cuaaauacccuacaaugca

SEQ ID NO: 137306 - RNA, 21 nt, Artificial Sequence
  Synthetic
ugcuaaauacccuacaaugca

SEQ ID NO: 137307 - RNA, 22 nt, Artificial Sequence
  Synthetic
cugcuaaauacccuacaaugca

SEQ ID NO: 137308 - RNA, 23 nt, Artificial Sequence
  Synthetic
acugcuaaauacccuacaaugca

SEQ ID NO: 137309 - RNA, 24 nt, Artificial Sequence
  Synthetic
uacugcuaaauacccuacaaugca

SEQ ID NO: 137310 - RNA, 18 nt, Artificial Sequence
  Synthetic
aaaauauccuacaaugca

SEQ ID NO: 137311 - RNA, 19 nt, Artificial Sequence
  Synthetic
uaaaauauccuacaaugca

SEQ ID NO: 137312 - RNA, 20 nt, Artificial Sequence
  Synthetic
auaaaauauccuacaaugca

SEQ ID NO: 137313 - RNA, 21 nt, Artificial Sequence
  Synthetic
uauaaaauauccuacaaugca

SEQ ID NO: 137314 - RNA, 24 nt, Artificial Sequence
  Synthetic
ugguauaaaauauccuacaaugca

SEQ ID NO: 137315 - RNA, 19 nt, Artificial Sequence
  Synthetic
agcaaauaauuauaaugca

SEQ ID NO: 137316 - RNA, 20 nt, Artificial Sequence
  Synthetic
cagcaaauaauuauaaugca

SEQ ID NO: 137317 - RNA, 18 nt, Artificial Sequence
  Synthetic
aauauuuugcuacaugca

SEQ ID NO: 137318 - RNA, 19 nt, Artificial Sequence
  Synthetic
uaauauuuugcuacaugca

SEQ ID NO: 137319 - RNA, 21 nt, Artificial Sequence
  Synthetic
uguaauauuuugcuacaugca

SEQ ID NO: 137320 - RNA, 22 nt, Artificial Sequence
  Synthetic
auguaauauuuugcuacaugca

SEQ ID NO: 137321 - RNA, 23 nt, Artificial Sequence
  Synthetic
cauguaauauuuugcuacaugca

SEQ ID NO: 137322 - RNA, 24 nt, Artificial Sequence
  Synthetic
acauguaauauuuugcuacaugca

SEQ ID NO: 137323 - RNA, 18 nt, Artificial Sequence
  Synthetic
uugugaacuacucaugca

SEQ ID NO: 137324 - RNA, 19 nt, Artificial Sequence
  Synthetic
auugugaacuacucaugca

SEQ ID NO: 137325 - RNA, 20 nt, Artificial Sequence
  Synthetic
uauugugaacuacucaugca

SEQ ID NO: 137326 - RNA, 21 nt, Artificial Sequence
  Synthetic
cuauugugaacuacucaugca

SEQ ID NO: 137327 - RNA, 22 nt, Artificial Sequence
  Synthetic
ccuauugugaacuacucaugca

SEQ ID NO: 137328 - RNA, 23 nt, Artificial Sequence
  Synthetic
cccuauugugaacuacucaugca

SEQ ID NO: 137329 - RNA, 24 nt, Artificial Sequence
  Synthetic
acccuauugugaacuacucaugca

SEQ ID NO: 137330 - RNA, 18 nt, Artificial Sequence
  Synthetic
cacagaugaagagaugca

SEQ ID NO: 137331 - RNA, 19 nt, Artificial Sequence
  Synthetic
acacagaugaagagaugca

SEQ ID NO: 137332 - RNA, 22 nt, Artificial Sequence
  Synthetic
aggacacagaugaagagaugca

SEQ ID NO: 137333 - RNA, 23 nt, Artificial Sequence
  Synthetic
aaggacacagaugaagagaugca

SEQ ID NO: 137334 - RNA, 24 nt, Artificial Sequence
  Synthetic
aaaggacacagaugaagagaugca

SEQ ID NO: 137335 - RNA, 18 nt, Artificial Sequence
  Synthetic
caguaaauugguacugca

SEQ ID NO: 137336 - RNA, 19 nt, Artificial Sequence
  Synthetic
acaguaaauugguacugca

SEQ ID NO: 137337 - RNA, 20 nt, Artificial Sequence
  Synthetic
uacaguaaauugguacugca

SEQ ID NO: 137338 - RNA, 21 nt, Artificial Sequence
  Synthetic
auacaguaaauugguacugca

SEQ ID NO: 137339 - RNA, 22 nt, Artificial Sequence
  Synthetic
aauacaguaaauugguacugca

SEQ ID NO: 137340 - RNA, 23 nt, Artificial Sequence
  Synthetic
uaauacaguaaauugguacugca

SEQ ID NO: 137341 - RNA, 24 nt, Artificial Sequence
  Synthetic
cuaauacaguaaauugguacugca

SEQ ID NO: 137342 - RNA, 18 nt, Artificial Sequence
  Synthetic
cuuauaucuguuucugca

SEQ ID NO: 137343 - RNA, 19 nt, Artificial Sequence
  Synthetic
ucuuauaucuguuucugca

SEQ ID NO: 137344 - RNA, 20 nt, Artificial Sequence
  Synthetic
uucuuauaucuguuucugca

SEQ ID NO: 137345 - RNA, 18 nt, Artificial Sequence
  Synthetic
auuuugauugagauugca

SEQ ID NO: 137346 - RNA, 19 nt, Artificial Sequence
  Synthetic
aauuuugauugagauugca

SEQ ID NO: 137347 - RNA, 20 nt, Artificial Sequence
  Synthetic
caauuuugauugagauugca

SEQ ID NO: 137348 - RNA, 22 nt, Artificial Sequence
  Synthetic
ugcaauuuugauugagauugca

SEQ ID NO: 137349 - RNA, 23 nt, Artificial Sequence
  Synthetic
cugcaauuuugauugagauugca

SEQ ID NO: 137350 - RNA, 18 nt, Artificial Sequence
  Synthetic
aacagauuggugauugca

SEQ ID NO: 137351 - RNA, 20 nt, Artificial Sequence
  Synthetic
agaacagauuggugauugca

SEQ ID NO: 137352 - RNA, 21 nt, Artificial Sequence
  Synthetic
aagaacagauuggugauugca

SEQ ID NO: 137353 - RNA, 23 nt, Artificial Sequence
  Synthetic
ugaagaacagauuggugauugca

SEQ ID NO: 137354 - RNA, 24 nt, Artificial Sequence
  Synthetic
augaagaacagauuggugauugca

SEQ ID NO: 137355 - RNA, 18 nt, Artificial Sequence
  Synthetic
ucucagcaaacuauugca

SEQ ID NO: 137356 - RNA, 19 nt, Artificial Sequence
  Synthetic
uucucagcaaacuauugca

SEQ ID NO: 137357 - RNA, 20 nt, Artificial Sequence
  Synthetic
auucucagcaaacuauugca

SEQ ID NO: 137358 - RNA, 21 nt, Artificial Sequence
  Synthetic
cauucucagcaaacuauugca

SEQ ID NO: 137359 - RNA, 22 nt, Artificial Sequence
  Synthetic
ucauucucagcaaacuauugca

SEQ ID NO: 137360 - RNA, 23 nt, Artificial Sequence
  Synthetic
aucauucucagcaaacuauugca

SEQ ID NO: 137361 - RNA, 24 nt, Artificial Sequence
  Synthetic
caucauucucagcaaacuauugca

SEQ ID NO: 137362 - RNA, 18 nt, Artificial Sequence
  Synthetic
uuuugguucccauuugca

SEQ ID NO: 137363 - RNA, 19 nt, Artificial Sequence
  Synthetic
cuuuugguucccauuugca

SEQ ID NO: 137364 - RNA, 21 nt, Artificial Sequence
  Synthetic
ugcuuuugguucccauuugca

SEQ ID NO: 137365 - RNA, 22 nt, Artificial Sequence
  Synthetic
uugcuuuugguucccauuugca

SEQ ID NO: 137366 - RNA, 23 nt, Artificial Sequence
  Synthetic
cuugcuuuugguucccauuugca

SEQ ID NO: 137367 - RNA, 20 nt, Artificial Sequence
  Synthetic
aggaaaaaggagaaaaauca

SEQ ID NO: 137368 - RNA, 21 nt, Artificial Sequence
  Synthetic
aaggaaaaaggagaaaaauca

SEQ ID NO: 137369 - RNA, 22 nt, Artificial Sequence
  Synthetic
aaaggaaaaaggagaaaaauca

SEQ ID NO: 137370 - RNA, 23 nt, Artificial Sequence
  Synthetic
aaaaggaaaaaggagaaaaauca

SEQ ID NO: 137371 - RNA, 24 nt, Artificial Sequence
  Synthetic
aaaaaggaaaaaggagaaaaauca

SEQ ID NO: 137372 - RNA, 18 nt, Artificial Sequence
  Synthetic
uaaaagaaaaagaaauca

SEQ ID NO: 137373 - RNA, 20 nt, Artificial Sequence
  Synthetic
aguaaaagaaaaagaaauca

SEQ ID NO: 137374 - RNA, 21 nt, Artificial Sequence
  Synthetic
aaguaaaagaaaaagaaauca

SEQ ID NO: 137375 - RNA, 22 nt, Artificial Sequence
  Synthetic
aaaguaaaagaaaaagaaauca

SEQ ID NO: 137376 - RNA, 23 nt, Artificial Sequence
  Synthetic
aaaaguaaaagaaaaagaaauca

SEQ ID NO: 137377 - RNA, 24 nt, Artificial Sequence
  Synthetic
aaaaaguaaaagaaaaagaaauca

SEQ ID NO: 137378 - RNA, 18 nt, Artificial Sequence
  Synthetic
acaaaaucuuggaaauca

SEQ ID NO: 137379 - RNA, 19 nt, Artificial Sequence
  Synthetic
aacaaaaucuuggaaauca

SEQ ID NO: 137380 - RNA, 20 nt, Artificial Sequence
  Synthetic
aaacaaaaucuuggaaauca

SEQ ID NO: 137381 - RNA, 18 nt, Artificial Sequence
  Synthetic
uuuuaagcaagagaauca

SEQ ID NO: 137382 - RNA, 19 nt, Artificial Sequence
  Synthetic
auuuuaagcaagagaauca

SEQ ID NO: 137383 - RNA, 20 nt, Artificial Sequence
  Synthetic
aauuuuaagcaagagaauca

SEQ ID NO: 137384 - RNA, 22 nt, Artificial Sequence
  Synthetic
ugauuuuguuguuguauaauca

SEQ ID NO: 137385 - RNA, 18 nt, Artificial Sequence
  Synthetic
aaauacaaacuaccauca

SEQ ID NO: 137386 - RNA, 20 nt, Artificial Sequence
  Synthetic
agaaauacaaacuaccauca

SEQ ID NO: 137387 - RNA, 18 nt, Artificial Sequence
  Synthetic
caaccuaaacguccauca

SEQ ID NO: 137388 - RNA, 19 nt, Artificial Sequence
  Synthetic
ucaaccuaaacguccauca

SEQ ID NO: 137389 - RNA, 20 nt, Artificial Sequence
  Synthetic
aucaaccuaaacguccauca

SEQ ID NO: 137390 - RNA, 21 nt, Artificial Sequence
  Synthetic
aaucaaccuaaacguccauca

SEQ ID NO: 137391 - RNA, 24 nt, Artificial Sequence
  Synthetic
uggaaucaaccuaaacguccauca

SEQ ID NO: 137392 - RNA, 18 nt, Artificial Sequence
  Synthetic
caaccuaaguuuccauca

SEQ ID NO: 137393 - RNA, 19 nt, Artificial Sequence
  Synthetic
ucaaccuaaguuuccauca

SEQ ID NO: 137394 - RNA, 20 nt, Artificial Sequence
  Synthetic
aucaaccuaaguuuccauca

SEQ ID NO: 137395 - RNA, 21 nt, Artificial Sequence
  Synthetic
aaucaaccuaaguuuccauca

SEQ ID NO: 137396 - RNA, 24 nt, Artificial Sequence
  Synthetic
uggaaucaaccuaaguuuccauca

SEQ ID NO: 137397 - RNA, 18 nt, Artificial Sequence
  Synthetic
acuaggagacagagauca

SEQ ID NO: 137398 - RNA, 19 nt, Artificial Sequence
  Synthetic
uacuaggagacagagauca

SEQ ID NO: 137399 - RNA, 20 nt, Artificial Sequence
  Synthetic
auacuaggagacagagauca

SEQ ID NO: 137400 - RNA, 18 nt, Artificial Sequence
  Synthetic
agaaaaauggcaauauca

SEQ ID NO: 137401 - RNA, 19 nt, Artificial Sequence
  Synthetic
aagaaaaauggcaauauca

SEQ ID NO: 137402 - RNA, 20 nt, Artificial Sequence
  Synthetic
uaagaaaaauggcaauauca

SEQ ID NO: 137403 - RNA, 18 nt, Artificial Sequence
  Synthetic
cacagccaaaccauauca

SEQ ID NO: 137404 - RNA, 19 nt, Artificial Sequence
  Synthetic
acacagccaaaccauauca

SEQ ID NO: 137405 - RNA, 21 nt, Artificial Sequence
  Synthetic
agacacagccaaaccauauca

SEQ ID NO: 137406 - RNA, 22 nt, Artificial Sequence
  Synthetic
cagacacagccaaaccauauca

SEQ ID NO: 137407 - RNA, 23 nt, Artificial Sequence
  Synthetic
acagacacagccaaaccauauca

SEQ ID NO: 137408 - RNA, 24 nt, Artificial Sequence
  Synthetic
uacagacacagccaaaccauauca

SEQ ID NO: 137409 - RNA, 18 nt, Artificial Sequence
  Synthetic
uguggcacauauauauca

SEQ ID NO: 137410 - RNA, 19 nt, Artificial Sequence
  Synthetic
auguggcacauauauauca

SEQ ID NO: 137411 - RNA, 20 nt, Artificial Sequence
  Synthetic
aauguggcacauauauauca

SEQ ID NO: 137412 - RNA, 21 nt, Artificial Sequence
  Synthetic
aaauguggcacauauauauca

SEQ ID NO: 137413 - RNA, 22 nt, Artificial Sequence
  Synthetic
aaaauguggcacauauauauca

SEQ ID NO: 137414 - RNA, 24 nt, Artificial Sequence
  Synthetic
agaaaauguggcacauauauauca

SEQ ID NO: 137415 - RNA, 18 nt, Artificial Sequence
  Synthetic
acacaauggggccuauca

SEQ ID NO: 137416 - RNA, 19 nt, Artificial Sequence
  Synthetic
cacacaauggggccuauca

SEQ ID NO: 137417 - RNA, 20 nt, Artificial Sequence
  Synthetic
acacacaauggggccuauca

SEQ ID NO: 137418 - RNA, 21 nt, Artificial Sequence
  Synthetic
aacacacaauggggccuauca

SEQ ID NO: 137419 - RNA, 22 nt, Artificial Sequence
  Synthetic
caacacacaauggggccuauca

SEQ ID NO: 137420 - RNA, 23 nt, Artificial Sequence
  Synthetic
acaacacacaauggggccuauca

SEQ ID NO: 137421 - RNA, 24 nt, Artificial Sequence
  Synthetic
aacaacacacaauggggccuauca

SEQ ID NO: 137422 - RNA, 18 nt, Artificial Sequence
  Synthetic
uggaaucaauugguauca

SEQ ID NO: 137423 - RNA, 19 nt, Artificial Sequence
  Synthetic
auggaaucaauugguauca

SEQ ID NO: 137424 - RNA, 20 nt, Artificial Sequence
  Synthetic
cauggaaucaauugguauca

SEQ ID NO: 137425 - RNA, 18 nt, Artificial Sequence
  Synthetic
uaaauauacauuguauca

SEQ ID NO: 137426 - RNA, 19 nt, Artificial Sequence
  Synthetic
auaaauauacauuguauca

SEQ ID NO: 137427 - RNA, 21 nt, Artificial Sequence
  Synthetic
ugauaaauauacauuguauca

SEQ ID NO: 137428 - RNA, 22 nt, Artificial Sequence
  Synthetic
augauaaauauacauuguauca

SEQ ID NO: 137429 - RNA, 24 nt, Artificial Sequence
  Synthetic
ugaugauaaauauacauuguauca

SEQ ID NO: 137430 - RNA, 21 nt, Artificial Sequence
  Synthetic
aaaaaaaagcuugaacacuca

SEQ ID NO: 137431 - RNA, 22 nt, Artificial Sequence
  Synthetic
aaaaaaaaagcuugaacacuca

SEQ ID NO: 137432 - RNA, 23 nt, Artificial Sequence
  Synthetic
aaaaaaaaaagcuugaacacuca

SEQ ID NO: 137433 - RNA, 24 nt, Artificial Sequence
  Synthetic
aaaaaaaaaaagcuugaacacuca

SEQ ID NO: 137434 - RNA, 18 nt, Artificial Sequence
  Synthetic
auguguauucuacacuca

SEQ ID NO: 137435 - RNA, 19 nt, Artificial Sequence
  Synthetic
aauguguauucuacacuca

SEQ ID NO: 137436 - RNA, 21 nt, Artificial Sequence
  Synthetic
agaauguguauucuacacuca

SEQ ID NO: 137437 - RNA, 22 nt, Artificial Sequence
  Synthetic
aagaauguguauucuacacuca

SEQ ID NO: 137438 - RNA, 24 nt, Artificial Sequence
  Synthetic
agaagaauguguauucuacacuca

SEQ ID NO: 137439 - RNA, 18 nt, Artificial Sequence
  Synthetic
ucaaacauugacuacuca

SEQ ID NO: 137440 - RNA, 19 nt, Artificial Sequence
  Synthetic
uucaaacauugacuacuca

SEQ ID NO: 137441 - RNA, 20 nt, Artificial Sequence
  Synthetic
uuucaaacauugacuacuca

SEQ ID NO: 137442 - RNA, 18 nt, Artificial Sequence
  Synthetic
cuggcuaaaccaaccuca

SEQ ID NO: 137443 - RNA, 19 nt, Artificial Sequence
  Synthetic
ucuggcuaaaccaaccuca

SEQ ID NO: 137444 - RNA, 20 nt, Artificial Sequence
  Synthetic
uucuggcuaaaccaaccuca

SEQ ID NO: 137445 - RNA, 21 nt, Artificial Sequence
  Synthetic
auucuggcuaaaccaaccuca

SEQ ID NO: 137446 - RNA, 18 nt, Artificial Sequence
  Synthetic
auauuaguacccaccuca

SEQ ID NO: 137447 - RNA, 19 nt, Artificial Sequence
  Synthetic
aauauuaguacccaccuca

SEQ ID NO: 137448 - RNA, 20 nt, Artificial Sequence
  Synthetic
caauauuaguacccaccuca

SEQ ID NO: 137449 - RNA, 18 nt, Artificial Sequence
  Synthetic
acacaauaucugaccuca

SEQ ID NO: 137450 - RNA, 20 nt, Artificial Sequence
  Synthetic
agacacaauaucugaccuca

SEQ ID NO: 137451 - RNA, 21 nt, Artificial Sequence
  Synthetic
aagacacaauaucugaccuca

SEQ ID NO: 137452 - RNA, 22 nt, Artificial Sequence
  Synthetic
uaagacacaauaucugaccuca

SEQ ID NO: 137453 - RNA, 23 nt, Artificial Sequence
  Synthetic
auaagacacaauaucugaccuca

SEQ ID NO: 137454 - RNA, 24 nt, Artificial Sequence
  Synthetic
aauaagacacaauaucugaccuca

SEQ ID NO: 137455 - RNA, 20 nt, Artificial Sequence
  Synthetic
uggcuccuggggaggccuca

SEQ ID NO: 137456 - RNA, 21 nt, Artificial Sequence
  Synthetic
uuggcuccuggggaggccuca

SEQ ID NO: 137457 - RNA, 22 nt, Artificial Sequence
  Synthetic
cuuggcuccuggggaggccuca

SEQ ID NO: 137458 - RNA, 24 nt, Artificial Sequence
  Synthetic
ugcuuggcuccuggggaggccuca

SEQ ID NO: 137459 - RNA, 18 nt, Artificial Sequence
  Synthetic
cuccaacuacuggccuca

SEQ ID NO: 137460 - RNA, 19 nt, Artificial Sequence
  Synthetic
ucuccaacuacuggccuca

SEQ ID NO: 137461 - RNA, 20 nt, Artificial Sequence
  Synthetic
uucuccaacuacuggccuca

SEQ ID NO: 137462 - RNA, 18 nt, Artificial Sequence
  Synthetic
cccaacuucccauccuca

SEQ ID NO: 137463 - RNA, 19 nt, Artificial Sequence
  Synthetic
acccaacuucccauccuca

SEQ ID NO: 137464 - RNA, 20 nt, Artificial Sequence
  Synthetic
uacccaacuucccauccuca

SEQ ID NO: 137465 - RNA, 19 nt, Artificial Sequence
  Synthetic
agccaaguggucuagcuca

SEQ ID NO: 137466 - RNA, 23 nt, Artificial Sequence
  Synthetic
agggagccaaguggucuagcuca

SEQ ID NO: 137467 - RNA, 24 nt, Artificial Sequence
  Synthetic
cagggagccaaguggucuagcuca

SEQ ID NO: 137468 - RNA, 18 nt, Artificial Sequence
  Synthetic
agcuccauuguaaucuca

SEQ ID NO: 137469 - RNA, 19 nt, Artificial Sequence
  Synthetic
cagcuccauuguaaucuca

SEQ ID NO: 137470 - RNA, 20 nt, Artificial Sequence
  Synthetic
ucagcuccauuguaaucuca

SEQ ID NO: 137471 - RNA, 21 nt, Artificial Sequence
  Synthetic
uucagcuccauuguaaucuca

SEQ ID NO: 137472 - RNA, 22 nt, Artificial Sequence
  Synthetic
uuucagcuccauuguaaucuca

SEQ ID NO: 137473 - RNA, 23 nt, Artificial Sequence
  Synthetic
uuuucagcuccauuguaaucuca

SEQ ID NO: 137474 - RNA, 24 nt, Artificial Sequence
  Synthetic
uuuuucagcuccauuguaaucuca

SEQ ID NO: 137475 - RNA, 18 nt, Artificial Sequence
  Synthetic
auuugagcaaagaucuca

SEQ ID NO: 137476 - RNA, 19 nt, Artificial Sequence
  Synthetic
cauuugagcaaagaucuca

SEQ ID NO: 137477 - RNA, 20 nt, Artificial Sequence
  Synthetic
acauuugagcaaagaucuca

SEQ ID NO: 137478 - RNA, 22 nt, Artificial Sequence
  Synthetic
ugacauuugagcaaagaucuca

SEQ ID NO: 137479 - RNA, 18 nt, Artificial Sequence
  Synthetic
auaaugcuacuuaucuca

SEQ ID NO: 137480 - RNA, 19 nt, Artificial Sequence
  Synthetic
aauaaugcuacuuaucuca

SEQ ID NO: 137481 - RNA, 20 nt, Artificial Sequence
  Synthetic
caauaaugcuacuuaucuca

SEQ ID NO: 137482 - RNA, 18 nt, Artificial Sequence
  Synthetic
agcgguauuagauucuca

SEQ ID NO: 137483 - RNA, 19 nt, Artificial Sequence
  Synthetic
cagcgguauuagauucuca

SEQ ID NO: 137484 - RNA, 21 nt, Artificial Sequence
  Synthetic
agcagcgguauuagauucuca

SEQ ID NO: 137485 - RNA, 22 nt, Artificial Sequence
  Synthetic
cagcagcgguauuagauucuca

SEQ ID NO: 137486 - RNA, 23 nt, Artificial Sequence
  Synthetic
ucagcagcgguauuagauucuca

SEQ ID NO: 137487 - RNA, 24 nt, Artificial Sequence
  Synthetic
cucagcagcgguauuagauucuca

SEQ ID NO: 137488 - RNA, 18 nt, Artificial Sequence
  Synthetic
aucucuaacaaguucuca

SEQ ID NO: 137489 - RNA, 19 nt, Artificial Sequence
  Synthetic
caucucuaacaaguucuca

SEQ ID NO: 137490 - RNA, 21 nt, Artificial Sequence
  Synthetic
ugcaucucuaacaaguucuca

SEQ ID NO: 137491 - RNA, 22 nt, Artificial Sequence
  Synthetic
uugcaucucuaacaaguucuca

SEQ ID NO: 137492 - RNA, 23 nt, Artificial Sequence
  Synthetic
uuugcaucucuaacaaguucuca

SEQ ID NO: 137493 - RNA, 24 nt, Artificial Sequence
  Synthetic
auuugcaucucuaacaaguucuca

SEQ ID NO: 137494 - RNA, 18 nt, Artificial Sequence
  Synthetic
uggccaagcccaaaguca

SEQ ID NO: 137495 - RNA, 20 nt, Artificial Sequence
  Synthetic
uguggccaagcccaaaguca

SEQ ID NO: 137496 - RNA, 21 nt, Artificial Sequence
  Synthetic
uuguggccaagcccaaaguca

SEQ ID NO: 137497 - RNA, 22 nt, Artificial Sequence
  Synthetic
cuuguggccaagcccaaaguca

SEQ ID NO: 137498 - RNA, 23 nt, Artificial Sequence
  Synthetic
ucuuguggccaagcccaaaguca

SEQ ID NO: 137499 - RNA, 18 nt, Artificial Sequence
  Synthetic
uccugcauuaaucaguca

SEQ ID NO: 137500 - RNA, 19 nt, Artificial Sequence
  Synthetic
cuccugcauuaaucaguca

SEQ ID NO: 137501 - RNA, 20 nt, Artificial Sequence
  Synthetic
acuccugcauuaaucaguca

SEQ ID NO: 137502 - RNA, 19 nt, Artificial Sequence
  Synthetic
agcuaccagugugacguca

SEQ ID NO: 137503 - RNA, 20 nt, Artificial Sequence
  Synthetic
aagcuaccagugugacguca

SEQ ID NO: 137504 - RNA, 21 nt, Artificial Sequence
  Synthetic
caagcuaccagugugacguca

SEQ ID NO: 137505 - RNA, 22 nt, Artificial Sequence
  Synthetic
ucaagcuaccagugugacguca

SEQ ID NO: 137506 - RNA, 23 nt, Artificial Sequence
  Synthetic
uucaagcuaccagugugacguca

SEQ ID NO: 137507 - RNA, 24 nt, Artificial Sequence
  Synthetic
uuucaagcuaccagugugacguca

SEQ ID NO: 137508 - RNA, 18 nt, Artificial Sequence
  Synthetic
aaauacaaacuaccguca

SEQ ID NO: 137509 - RNA, 20 nt, Artificial Sequence
  Synthetic
agaaauacaaacuaccguca

SEQ ID NO: 137510 - RNA, 21 nt, Artificial Sequence
  Synthetic
cagaaauacaaacuaccguca

SEQ ID NO: 137511 - RNA, 22 nt, Artificial Sequence
  Synthetic
acagaaauacaaacuaccguca

SEQ ID NO: 137512 - RNA, 23 nt, Artificial Sequence
  Synthetic
cacagaaauacaaacuaccguca

SEQ ID NO: 137513 - RNA, 24 nt, Artificial Sequence
  Synthetic
ccacagaaauacaaacuaccguca

SEQ ID NO: 137514 - RNA, 18 nt, Artificial Sequence
  Synthetic
auggggcaauguagguca

SEQ ID NO: 137515 - RNA, 19 nt, Artificial Sequence
  Synthetic
aauggggcaauguagguca

SEQ ID NO: 137516 - RNA, 20 nt, Artificial Sequence
  Synthetic
aaauggggcaauguagguca

SEQ ID NO: 137517 - RNA, 23 nt, Artificial Sequence
  Synthetic
aggaaauggggcaauguagguca

SEQ ID NO: 137518 - RNA, 18 nt, Artificial Sequence
  Synthetic
cggaagcacaagggguca

SEQ ID NO: 137519 - RNA, 19 nt, Artificial Sequence
  Synthetic
ccggaagcacaagggguca

SEQ ID NO: 137520 - RNA, 20 nt, Artificial Sequence
  Synthetic
cccggaagcacaagggguca

SEQ ID NO: 137521 - RNA, 21 nt, Artificial Sequence
  Synthetic
ccccggaagcacaagggguca

SEQ ID NO: 137522 - RNA, 22 nt, Artificial Sequence
  Synthetic
accccggaagcacaagggguca

SEQ ID NO: 137523 - RNA, 23 nt, Artificial Sequence
  Synthetic
caccccggaagcacaagggguca

SEQ ID NO: 137524 - RNA, 24 nt, Artificial Sequence
  Synthetic
ucaccccggaagcacaagggguca

SEQ ID NO: 137525 - RNA, 21 nt, Artificial Sequence
  Synthetic
uuugaccacagaaaaauguca

SEQ ID NO: 137526 - RNA, 23 nt, Artificial Sequence
  Synthetic
aguuugaccacagaaaaauguca

SEQ ID NO: 137527 - RNA, 24 nt, Artificial Sequence
  Synthetic
aaguuugaccacagaaaaauguca

SEQ ID NO: 137528 - RNA, 18 nt, Artificial Sequence
  Synthetic
agaauagugucuauguca

SEQ ID NO: 137529 - RNA, 19 nt, Artificial Sequence
  Synthetic
aagaauagugucuauguca

SEQ ID NO: 137530 - RNA, 20 nt, Artificial Sequence
  Synthetic
uaagaauagugucuauguca

SEQ ID NO: 137531 - RNA, 18 nt, Artificial Sequence
  Synthetic
uuauuuuauccaguguca

SEQ ID NO: 137532 - RNA, 19 nt, Artificial Sequence
  Synthetic
uuuauuuuauccaguguca

SEQ ID NO: 137533 - RNA, 20 nt, Artificial Sequence
  Synthetic
uuuuauuuuauccaguguca

SEQ ID NO: 137534 - RNA, 18 nt, Artificial Sequence
  Synthetic
auggggagaggauuguca

SEQ ID NO: 137535 - RNA, 19 nt, Artificial Sequence
  Synthetic
aauggggagaggauuguca

SEQ ID NO: 137536 - RNA, 21 nt, Artificial Sequence
  Synthetic
agaauggggagaggauuguca

SEQ ID NO: 137537 - RNA, 23 nt, Artificial Sequence
  Synthetic
cgagaauggggagaggauuguca

SEQ ID NO: 137538 - RNA, 18 nt, Artificial Sequence
  Synthetic
augucaggucacuuguca

SEQ ID NO: 137539 - RNA, 19 nt, Artificial Sequence
  Synthetic
caugucaggucacuuguca

SEQ ID NO: 137540 - RNA, 20 nt, Artificial Sequence
  Synthetic
ucaugucaggucacuuguca

SEQ ID NO: 137541 - RNA, 18 nt, Artificial Sequence
  Synthetic
aauauauuuuccaauuca

SEQ ID NO: 137542 - RNA, 19 nt, Artificial Sequence
  Synthetic
aaauauauuuuccaauuca

SEQ ID NO: 137543 - RNA, 20 nt, Artificial Sequence
  Synthetic
aaaauauauuuuccaauuca

SEQ ID NO: 137544 - RNA, 18 nt, Artificial Sequence
  Synthetic
accucugccuagaauuca

SEQ ID NO: 137545 - RNA, 19 nt, Artificial Sequence
  Synthetic
aaccucugccuagaauuca

SEQ ID NO: 137546 - RNA, 20 nt, Artificial Sequence
  Synthetic
caaccucugccuagaauuca

SEQ ID NO: 137547 - RNA, 22 nt, Artificial Sequence
  Synthetic
ugcaaccucugccuagaauuca

SEQ ID NO: 137548 - RNA, 23 nt, Artificial Sequence
  Synthetic
uugcaaccucugccuagaauuca

SEQ ID NO: 137549 - RNA, 24 nt, Artificial Sequence
  Synthetic
uuugcaaccucugccuagaauuca

SEQ ID NO: 137550 - RNA, 18 nt, Artificial Sequence
  Synthetic
auguguuauuuuaauuca

SEQ ID NO: 137551 - RNA, 19 nt, Artificial Sequence
  Synthetic
aauguguuauuuuaauuca

SEQ ID NO: 137552 - RNA, 20 nt, Artificial Sequence
  Synthetic
aaauguguuauuuuaauuca

SEQ ID NO: 137553 - RNA, 18 nt, Artificial Sequence
  Synthetic
acuuugauuuuagauuca

SEQ ID NO: 137554 - RNA, 19 nt, Artificial Sequence
  Synthetic
aacuuugauuuuagauuca

SEQ ID NO: 137555 - RNA, 20 nt, Artificial Sequence
  Synthetic
caacuuugauuuuagauuca

SEQ ID NO: 137556 - RNA, 21 nt, Artificial Sequence
  Synthetic
ucaacuuugauuuuagauuca

SEQ ID NO: 137557 - RNA, 22 nt, Artificial Sequence
  Synthetic
uucaacuuugauuuuagauuca

SEQ ID NO: 137558 - RNA, 23 nt, Artificial Sequence
  Synthetic
uuucaacuuugauuuuagauuca

SEQ ID NO: 137559 - RNA, 24 nt, Artificial Sequence
  Synthetic
uuuucaacuuugauuuuagauuca

SEQ ID NO: 137560 - RNA, 18 nt, Artificial Sequence
  Synthetic
acuuuuauuuuagauuca

SEQ ID NO: 137561 - RNA, 19 nt, Artificial Sequence
  Synthetic
aacuuuuauuuuagauuca

SEQ ID NO: 137562 - RNA, 20 nt, Artificial Sequence
  Synthetic
caacuuuuauuuuagauuca

SEQ ID NO: 137563 - RNA, 21 nt, Artificial Sequence
  Synthetic
ucaacuuuuauuuuagauuca

SEQ ID NO: 137564 - RNA, 22 nt, Artificial Sequence
  Synthetic
uucaacuuuuauuuuagauuca

SEQ ID NO: 137565 - RNA, 23 nt, Artificial Sequence
  Synthetic
uuucaacuuuuauuuuagauuca

SEQ ID NO: 137566 - RNA, 24 nt, Artificial Sequence
  Synthetic
auuucaacuuuuauuuuagauuca

SEQ ID NO: 137567 - RNA, 18 nt, Artificial Sequence
  Synthetic
uuuaaaaauaauuauuca

SEQ ID NO: 137568 - RNA, 19 nt, Artificial Sequence
  Synthetic
auuuaaaaauaauuauuca

SEQ ID NO: 137569 - RNA, 20 nt, Artificial Sequence
  Synthetic
uauuuaaaaauaauuauuca

SEQ ID NO: 137570 - RNA, 18 nt, Artificial Sequence
  Synthetic
auauuuccuaaaacuuca

SEQ ID NO: 137571 - RNA, 19 nt, Artificial Sequence
  Synthetic
aauauuuccuaaaacuuca

SEQ ID NO: 137572 - RNA, 20 nt, Artificial Sequence
  Synthetic
uaauauuuccuaaaacuuca

SEQ ID NO: 137573 - RNA, 18 nt, Artificial Sequence
  Synthetic
ucucaagguaaaacuuca

SEQ ID NO: 137574 - RNA, 19 nt, Artificial Sequence
  Synthetic
aucucaagguaaaacuuca

SEQ ID NO: 137575 - RNA, 20 nt, Artificial Sequence
  Synthetic
aaucucaagguaaaacuuca

SEQ ID NO: 137576 - RNA, 21 nt, Artificial Sequence
  Synthetic
uaaucucaagguaaaacuuca

SEQ ID NO: 137577 - RNA, 23 nt, Artificial Sequence
  Synthetic
uguaaucucaagguaaaacuuca

SEQ ID NO: 137578 - RNA, 24 nt, Artificial Sequence
  Synthetic
cuguaaucucaagguaaaacuuca

SEQ ID NO: 137579 - RNA, 18 nt, Artificial Sequence
  Synthetic
ucauauuuguaaacuuca

SEQ ID NO: 137580 - RNA, 19 nt, Artificial Sequence
  Synthetic
uucauauuuguaaacuuca

SEQ ID NO: 137581 - RNA, 20 nt, Artificial Sequence
  Synthetic
uuucauauuuguaaacuuca

SEQ ID NO: 137582 - RNA, 18 nt, Artificial Sequence
  Synthetic
agggugauacugacuuca

SEQ ID NO: 137583 - RNA, 19 nt, Artificial Sequence
  Synthetic
uagggugauacugacuuca

SEQ ID NO: 137584 - RNA, 20 nt, Artificial Sequence
  Synthetic
uuagggugauacugacuuca

SEQ ID NO: 137585 - RNA, 21 nt, Artificial Sequence
  Synthetic
auuagggugauacugacuuca

SEQ ID NO: 137586 - RNA, 22 nt, Artificial Sequence
  Synthetic
uauuagggugauacugacuuca

SEQ ID NO: 137587 - RNA, 18 nt, Artificial Sequence
  Synthetic
aaaauguuauguacuuca

SEQ ID NO: 137588 - RNA, 20 nt, Artificial Sequence
  Synthetic
agaaaauguuauguacuuca

SEQ ID NO: 137589 - RNA, 18 nt, Artificial Sequence
  Synthetic
cagucaucugagccuuca

SEQ ID NO: 137590 - RNA, 20 nt, Artificial Sequence
  Synthetic
agcagucaucugagccuuca

SEQ ID NO: 137591 - RNA, 21 nt, Artificial Sequence
  Synthetic
uagcagucaucugagccuuca

SEQ ID NO: 137592 - RNA, 22 nt, Artificial Sequence
  Synthetic
cuagcagucaucugagccuuca

SEQ ID NO: 137593 - RNA, 24 nt, Artificial Sequence
  Synthetic
ugcuagcagucaucugagccuuca

SEQ ID NO: 137594 - RNA, 19 nt, Artificial Sequence
  Synthetic
agcucaggcuguugcuuca

SEQ ID NO: 137595 - RNA, 20 nt, Artificial Sequence
  Synthetic
cagcucaggcuguugcuuca

SEQ ID NO: 137596 - RNA, 21 nt, Artificial Sequence
  Synthetic
acagcucaggcuguugcuuca

SEQ ID NO: 137597 - RNA, 22 nt, Artificial Sequence
  Synthetic
uacagcucaggcuguugcuuca

SEQ ID NO: 137598 - RNA, 24 nt, Artificial Sequence
  Synthetic
aguacagcucaggcuguugcuuca

SEQ ID NO: 137599 - RNA, 18 nt, Artificial Sequence
  Synthetic
uaccaaugccuuucuuca

SEQ ID NO: 137600 - RNA, 19 nt, Artificial Sequence
  Synthetic
cuaccaaugccuuucuuca

SEQ ID NO: 137601 - RNA, 21 nt, Artificial Sequence
  Synthetic
agcuaccaaugccuuucuuca

SEQ ID NO: 137602 - RNA, 22 nt, Artificial Sequence
  Synthetic
aagcuaccaaugccuuucuuca

SEQ ID NO: 137603 - RNA, 23 nt, Artificial Sequence
  Synthetic
caagcuaccaaugccuuucuuca

SEQ ID NO: 137604 - RNA, 24 nt, Artificial Sequence
  Synthetic
ucaagcuaccaaugccuuucuuca

SEQ ID NO: 137605 - RNA, 18 nt, Artificial Sequence
  Synthetic
cuccgccuccuggguuca

SEQ ID NO: 137606 - RNA, 19 nt, Artificial Sequence
  Synthetic
ccuccgccuccuggguuca

SEQ ID NO: 137607 - RNA, 21 nt, Artificial Sequence
  Synthetic
agccuccgccuccuggguuca

SEQ ID NO: 137608 - RNA, 22 nt, Artificial Sequence
  Synthetic
cagccuccgccuccuggguuca

SEQ ID NO: 137609 - RNA, 24 nt, Artificial Sequence
  Synthetic
ugcagccuccgccuccuggguuca

SEQ ID NO: 137610 - RNA, 18 nt, Artificial Sequence
  Synthetic
cucugacucccugguuca

SEQ ID NO: 137611 - RNA, 19 nt, Artificial Sequence
  Synthetic
ccucugacucccugguuca

SEQ ID NO: 137612 - RNA, 20 nt, Artificial Sequence
  Synthetic
accucugacucccugguuca

SEQ ID NO: 137613 - RNA, 21 nt, Artificial Sequence
  Synthetic
aaccucugacucccugguuca

SEQ ID NO: 137614 - RNA, 22 nt, Artificial Sequence
  Synthetic
caaccucugacucccugguuca

SEQ ID NO: 137615 - RNA, 24 nt, Artificial Sequence
  Synthetic
ugcaaccucugacucccugguuca

SEQ ID NO: 137616 - RNA, 20 nt, Artificial Sequence
  Synthetic
uggaaugcaauaaauguuca

SEQ ID NO: 137617 - RNA, 18 nt, Artificial Sequence
  Synthetic
acugggaguugcuguuca

SEQ ID NO: 137618 - RNA, 19 nt, Artificial Sequence
  Synthetic
aacugggaguugcuguuca

SEQ ID NO: 137619 - RNA, 18 nt, Artificial Sequence
  Synthetic
uuauuuaaaucuauuuca

SEQ ID NO: 137620 - RNA, 19 nt, Artificial Sequence
  Synthetic
uuuauuuaaaucuauuuca

SEQ ID NO: 137621 - RNA, 20 nt, Artificial Sequence
  Synthetic
auuuauuuaaaucuauuuca

SEQ ID NO: 137622 - RNA, 19 nt, Artificial Sequence
  Synthetic
ugaauugguauuucuuuca

SEQ ID NO: 137623 - RNA, 20 nt, Artificial Sequence
  Synthetic
cugaauugguauuucuuuca

SEQ ID NO: 137624 - RNA, 21 nt, Artificial Sequence
  Synthetic
acugaauugguauuucuuuca

SEQ ID NO: 137625 - RNA, 22 nt, Artificial Sequence
  Synthetic
cacugaauugguauuucuuuca

SEQ ID NO: 137626 - RNA, 23 nt, Artificial Sequence
  Synthetic
acacugaauugguauuucuuuca

SEQ ID NO: 137627 - RNA, 24 nt, Artificial Sequence
  Synthetic
uacacugaauugguauuucuuuca

SEQ ID NO: 137628 - RNA, 18 nt, Artificial Sequence
  Synthetic
uuuaaguuuuuucuuuca

SEQ ID NO: 137629 - RNA, 19 nt, Artificial Sequence
  Synthetic
uuuuaaguuuuuucuuuca

SEQ ID NO: 137630 - RNA, 20 nt, Artificial Sequence
  Synthetic
cuuuuaaguuuuuucuuuca

SEQ ID NO: 137631 - RNA, 19 nt, Artificial Sequence
  Synthetic
ugguagauugcauguuuca

SEQ ID NO: 137632 - RNA, 20 nt, Artificial Sequence
  Synthetic
uugguagauugcauguuuca

SEQ ID NO: 137633 - RNA, 18 nt, Artificial Sequence
  Synthetic
cauaauuuaaaauuuuca

SEQ ID NO: 137634 - RNA, 19 nt, Artificial Sequence
  Synthetic
ucauaauuuaaaauuuuca

SEQ ID NO: 137635 - RNA, 20 nt, Artificial Sequence
  Synthetic
aucauaauuuaaaauuuuca

SEQ ID NO: 137636 - RNA, 21 nt, Artificial Sequence
  Synthetic
uaucauaauuuaaaauuuuca

SEQ ID NO: 137637 - RNA, 22 nt, Artificial Sequence
  Synthetic
auaucauaauuuaaaauuuuca

SEQ ID NO: 137638 - RNA, 23 nt, Artificial Sequence
  Synthetic
uauaucauaauuuaaaauuuuca

SEQ ID NO: 137639 - RNA, 24 nt, Artificial Sequence
  Synthetic
auauaucauaauuuaaaauuuuca

SEQ ID NO: 137640 - RNA, 18 nt, Artificial Sequence
  Synthetic
auuuuacuuaucuuuuca

SEQ ID NO: 137641 - RNA, 19 nt, Artificial Sequence
  Synthetic
aauuuuacuuaucuuuuca

SEQ ID NO: 137642 - RNA, 20 nt, Artificial Sequence
  Synthetic
caauuuuacuuaucuuuuca

SEQ ID NO: 137643 - RNA, 21 nt, Artificial Sequence
  Synthetic
ucaauuuuacuuaucuuuuca

SEQ ID NO: 137644 - RNA, 22 nt, Artificial Sequence
  Synthetic
aucaauuuuacuuaucuuuuca

SEQ ID NO: 137645 - RNA, 23 nt, Artificial Sequence
  Synthetic
uaucaauuuuacuuaucuuuuca

SEQ ID NO: 137646 - RNA, 24 nt, Artificial Sequence
  Synthetic
cuaucaauuuuacuuaucuuuuca

SEQ ID NO: 137647 - RNA, 18 nt, Artificial Sequence
  Synthetic
uagcaaugucauuuuuca

SEQ ID NO: 137648 - RNA, 19 nt, Artificial Sequence
  Synthetic
cuagcaaugucauuuuuca

SEQ ID NO: 137649 - RNA, 20 nt, Artificial Sequence
  Synthetic
acuagcaaugucauuuuuca

SEQ ID NO: 137650 - RNA, 21 nt, Artificial Sequence
  Synthetic
aacuagcaaugucauuuuuca

SEQ ID NO: 137651 - RNA, 22 nt, Artificial Sequence
  Synthetic
aaacuagcaaugucauuuuuca

SEQ ID NO: 137652 - RNA, 23 nt, Artificial Sequence
  Synthetic
caaacuagcaaugucauuuuuca

SEQ ID NO: 137653 - RNA, 24 nt, Artificial Sequence
  Synthetic
ucaaacuagcaaugucauuuuuca

SEQ ID NO: 137654 - RNA, 18 nt, Artificial Sequence
  Synthetic
augaauccauaaaaaaga

SEQ ID NO: 137655 - RNA, 19 nt, Artificial Sequence
  Synthetic
uaugaauccauaaaaaaga

SEQ ID NO: 137656 - RNA, 20 nt, Artificial Sequence
  Synthetic
cuaugaauccauaaaaaaga

SEQ ID NO: 137657 - RNA, 21 nt, Artificial Sequence
  Synthetic
acuaugaauccauaaaaaaga

SEQ ID NO: 137658 - RNA, 22 nt, Artificial Sequence
  Synthetic
uacuaugaauccauaaaaaaga

SEQ ID NO: 137659 - RNA, 23 nt, Artificial Sequence
  Synthetic
auacuaugaauccauaaaaaaga

SEQ ID NO: 137660 - RNA, 24 nt, Artificial Sequence
  Synthetic
aauacuaugaauccauaaaaaaga

SEQ ID NO: 137661 - RNA, 18 nt, Artificial Sequence
  Synthetic
ccaaucaauagaaaaaga

SEQ ID NO: 137662 - RNA, 19 nt, Artificial Sequence
  Synthetic
uccaaucaauagaaaaaga

SEQ ID NO: 137663 - RNA, 20 nt, Artificial Sequence
  Synthetic
uuccaaucaauagaaaaaga

SEQ ID NO: 137664 - RNA, 19 nt, Artificial Sequence
  Synthetic
aggaaaacauuuaaaaaga

SEQ ID NO: 137665 - RNA, 20 nt, Artificial Sequence
  Synthetic
uaggaaaacauuuaaaaaga

SEQ ID NO: 137666 - RNA, 18 nt, Artificial Sequence
  Synthetic
cccagggaagccaaaaga

SEQ ID NO: 137667 - RNA, 21 nt, Artificial Sequence
  Synthetic
uggcccagggaagccaaaaga

SEQ ID NO: 137668 - RNA, 23 nt, Artificial Sequence
  Synthetic
uguggcccagggaagccaaaaga

SEQ ID NO: 137669 - RNA, 18 nt, Artificial Sequence
  Synthetic
aaucgaccaagcaaaaga

SEQ ID NO: 137670 - RNA, 19 nt, Artificial Sequence
  Synthetic
aaaucgaccaagcaaaaga

SEQ ID NO: 137671 - RNA, 20 nt, Artificial Sequence
  Synthetic
caaaucgaccaagcaaaaga

SEQ ID NO: 137672 - RNA, 21 nt, Artificial Sequence
  Synthetic
ccaaaucgaccaagcaaaaga

SEQ ID NO: 137673 - RNA, 23 nt, Artificial Sequence
  Synthetic
agccaaaucgaccaagcaaaaga

SEQ ID NO: 137674 - RNA, 24 nt, Artificial Sequence
  Synthetic
uagccaaaucgaccaagcaaaaga

SEQ ID NO: 137675 - RNA, 18 nt, Artificial Sequence
  Synthetic
uaaauguuuaucaaaaga

SEQ ID NO: 137676 - RNA, 19 nt, Artificial Sequence
  Synthetic
auaaauguuuaucaaaaga

SEQ ID NO: 137677 - RNA, 20 nt, Artificial Sequence
  Synthetic
aauaaauguuuaucaaaaga

SEQ ID NO: 137678 - RNA, 21 nt, Artificial Sequence
  Synthetic
caauaaauguuuaucaaaaga

SEQ ID NO: 137679 - RNA, 22 nt, Artificial Sequence
  Synthetic
ucaauaaauguuuaucaaaaga

SEQ ID NO: 137680 - RNA, 23 nt, Artificial Sequence
  Synthetic
cucaauaaauguuuaucaaaaga

SEQ ID NO: 137681 - RNA, 18 nt, Artificial Sequence
  Synthetic
aagguugcuuggaaaaga

SEQ ID NO: 137682 - RNA, 20 nt, Artificial Sequence
  Synthetic
agaagguugcuuggaaaaga

SEQ ID NO: 137683 - RNA, 18 nt, Artificial Sequence
  Synthetic
uuucaaaagguuaaaaga

SEQ ID NO: 137684 - RNA, 19 nt, Artificial Sequence
  Synthetic
auuucaaaagguuaaaaga

SEQ ID NO: 137685 - RNA, 20 nt, Artificial Sequence
  Synthetic
uauuucaaaagguuaaaaga

SEQ ID NO: 137686 - RNA, 18 nt, Artificial Sequence
  Synthetic
agauacaaauuccaaaga

SEQ ID NO: 137687 - RNA, 19 nt, Artificial Sequence
  Synthetic
aagauacaaauuccaaaga

SEQ ID NO: 137688 - RNA, 20 nt, Artificial Sequence
  Synthetic
aaagauacaaauuccaaaga

SEQ ID NO: 137689 - RNA, 18 nt, Artificial Sequence
  Synthetic
aggagagagagagaaaga

SEQ ID NO: 137690 - RNA, 19 nt, Artificial Sequence
  Synthetic
caggagagagagagaaaga

SEQ ID NO: 137691 - RNA, 21 nt, Artificial Sequence
  Synthetic
agcaggagagagagagaaaga

SEQ ID NO: 137692 - RNA, 22 nt, Artificial Sequence
  Synthetic
cagcaggagagagagagaaaga

SEQ ID NO: 137693 - RNA, 19 nt, Artificial Sequence
  Synthetic
agggaagcauggagaaaga

SEQ ID NO: 137694 - RNA, 23 nt, Artificial Sequence
  Synthetic
agggagggaagcauggagaaaga

SEQ ID NO: 137695 - RNA, 18 nt, Artificial Sequence
  Synthetic
uuagcuaagaaggaaaga

SEQ ID NO: 137696 - RNA, 19 nt, Artificial Sequence
  Synthetic
uuuagcuaagaaggaaaga

SEQ ID NO: 137697 - RNA, 20 nt, Artificial Sequence
  Synthetic
uuuuagcuaagaaggaaaga

SEQ ID NO: 137698 - RNA, 21 nt, Artificial Sequence
  Synthetic
uuagccugagcaacggaaaga

SEQ ID NO: 137699 - RNA, 22 nt, Artificial Sequence
  Synthetic
uuuagccugagcaacggaaaga

SEQ ID NO: 137700 - RNA, 23 nt, Artificial Sequence
  Synthetic
uuuuagccugagcaacggaaaga

SEQ ID NO: 137701 - RNA, 24 nt, Artificial Sequence
  Synthetic
uuuuuagccugagcaacggaaaga

SEQ ID NO: 137702 - RNA, 18 nt, Artificial Sequence
  Synthetic
acaggucaaggauaaaga

SEQ ID NO: 137703 - RNA, 19 nt, Artificial Sequence
  Synthetic
cacaggucaaggauaaaga

SEQ ID NO: 137704 - RNA, 20 nt, Artificial Sequence
  Synthetic
ccacaggucaaggauaaaga

SEQ ID NO: 137705 - RNA, 21 nt, Artificial Sequence
  Synthetic
cccacaggucaaggauaaaga

SEQ ID NO: 137706 - RNA, 22 nt, Artificial Sequence
  Synthetic
ucccacaggucaaggauaaaga

SEQ ID NO: 137707 - RNA, 23 nt, Artificial Sequence
  Synthetic
cucccacaggucaaggauaaaga

SEQ ID NO: 137708 - RNA, 24 nt, Artificial Sequence
  Synthetic
acucccacaggucaaggauaaaga

SEQ ID NO: 137709 - RNA, 18 nt, Artificial Sequence
  Synthetic
aauucaccagucuaaaga

SEQ ID NO: 137710 - RNA, 19 nt, Artificial Sequence
  Synthetic
aaauucaccagucuaaaga

SEQ ID NO: 137711 - RNA, 20 nt, Artificial Sequence
  Synthetic
uaaauucaccagucuaaaga

SEQ ID NO: 137712 - RNA, 21 nt, Artificial Sequence
  Synthetic
uuaaauucaccagucuaaaga

SEQ ID NO: 137713 - RNA, 22 nt, Artificial Sequence
  Synthetic
auuaaauucaccagucuaaaga

SEQ ID NO: 137714 - RNA, 18 nt, Artificial Sequence
  Synthetic
uuguaguuuuaguaaaga

SEQ ID NO: 137715 - RNA, 19 nt, Artificial Sequence
  Synthetic
uuuguaguuuuaguaaaga

SEQ ID NO: 137716 - RNA, 20 nt, Artificial Sequence
  Synthetic
uuuuguaguuuuaguaaaga

SEQ ID NO: 137717 - RNA, 21 nt, Artificial Sequence
  Synthetic
uuuuuguaguuuuaguaaaga

SEQ ID NO: 137718 - RNA, 22 nt, Artificial Sequence
  Synthetic
auuuuuguaguuuuaguaaaga

SEQ ID NO: 137719 - RNA, 23 nt, Artificial Sequence
  Synthetic
aauuuuuguaguuuuaguaaaga

SEQ ID NO: 137720 - RNA, 24 nt, Artificial Sequence
  Synthetic
uaauuuuuguaguuuuaguaaaga

SEQ ID NO: 137721 - RNA, 18 nt, Artificial Sequence
  Synthetic
cacaaaaguuuuuaaaga

SEQ ID NO: 137722 - RNA, 19 nt, Artificial Sequence
  Synthetic
acacaaaaguuuuuaaaga

SEQ ID NO: 137723 - RNA, 22 nt, Artificial Sequence
  Synthetic
uggacacaaaaguuuuuaaaga

SEQ ID NO: 137724 - RNA, 23 nt, Artificial Sequence
  Synthetic
auggacacaaaaguuuuuaaaga

SEQ ID NO: 137725 - RNA, 24 nt, Artificial Sequence
  Synthetic
cauggacacaaaaguuuuuaaaga

SEQ ID NO: 137726 - RNA, 18 nt, Artificial Sequence
  Synthetic
augaagaaauacccaaga

SEQ ID NO: 137727 - RNA, 19 nt, Artificial Sequence
  Synthetic
uaugaagaaauacccaaga

SEQ ID NO: 137728 - RNA, 20 nt, Artificial Sequence
  Synthetic
cuaugaagaaauacccaaga

SEQ ID NO: 137729 - RNA, 24 nt, Artificial Sequence
  Synthetic
acugcuaugaagaaauacccaaga

SEQ ID NO: 137730 - RNA, 18 nt, Artificial Sequence
  Synthetic
cuaaagaacugcccaaga

SEQ ID NO: 137731 - RNA, 19 nt, Artificial Sequence
  Synthetic
ucuaaagaacugcccaaga

SEQ ID NO: 137732 - RNA, 20 nt, Artificial Sequence
  Synthetic
cucuaaagaacugcccaaga

SEQ ID NO: 137733 - RNA, 22 nt, Artificial Sequence
  Synthetic
ugcucuaaagaacugcccaaga

SEQ ID NO: 137734 - RNA, 23 nt, Artificial Sequence
  Synthetic
cugcucuaaagaacugcccaaga

SEQ ID NO: 137735 - RNA, 20 nt, Artificial Sequence
  Synthetic
aggcagaauaaaauccaaga

SEQ ID NO: 137736 - RNA, 19 nt, Artificial Sequence
  Synthetic
ugguauccaagaugcaaga

SEQ ID NO: 137737 - RNA, 20 nt, Artificial Sequence
  Synthetic
cugguauccaagaugcaaga

SEQ ID NO: 137738 - RNA, 22 nt, Artificial Sequence
  Synthetic
agcugguauccaagaugcaaga

SEQ ID NO: 137739 - RNA, 23 nt, Artificial Sequence
  Synthetic
aagcugguauccaagaugcaaga

SEQ ID NO: 137740 - RNA, 24 nt, Artificial Sequence
  Synthetic
uaagcugguauccaagaugcaaga

SEQ ID NO: 137741 - RNA, 18 nt, Artificial Sequence
  Synthetic
aaaaaugauucugcaaga

SEQ ID NO: 137742 - RNA, 19 nt, Artificial Sequence
  Synthetic
aaaaaaugauucugcaaga

SEQ ID NO: 137743 - RNA, 20 nt, Artificial Sequence
  Synthetic
aaaaaaaugauucugcaaga

SEQ ID NO: 137744 - RNA, 19 nt, Artificial Sequence
  Synthetic
agaagguaauuucucaaga

SEQ ID NO: 137745 - RNA, 20 nt, Artificial Sequence
  Synthetic
aagaagguaauuucucaaga

SEQ ID NO: 137746 - RNA, 19 nt, Artificial Sequence
  Synthetic
ugggaacugcaauucaaga

SEQ ID NO: 137747 - RNA, 20 nt, Artificial Sequence
  Synthetic
augggaacugcaauucaaga

SEQ ID NO: 137748 - RNA, 21 nt, Artificial Sequence
  Synthetic
uaugggaacugcaauucaaga

SEQ ID NO: 137749 - RNA, 22 nt, Artificial Sequence
  Synthetic
uuaugggaacugcaauucaaga

SEQ ID NO: 137750 - RNA, 23 nt, Artificial Sequence
  Synthetic
auuaugggaacugcaauucaaga

SEQ ID NO: 137751 - RNA, 18 nt, Artificial Sequence
  Synthetic
cccagccccuauucaaga

SEQ ID NO: 137752 - RNA, 19 nt, Artificial Sequence
  Synthetic
acccagccccuauucaaga

SEQ ID NO: 137753 - RNA, 20 nt, Artificial Sequence
  Synthetic
uacccagccccuauucaaga

SEQ ID NO: 137754 - RNA, 21 nt, Artificial Sequence
  Synthetic
uuacccagccccuauucaaga

SEQ ID NO: 137755 - RNA, 22 nt, Artificial Sequence
  Synthetic
uuuacccagccccuauucaaga

SEQ ID NO: 137756 - RNA, 23 nt, Artificial Sequence
  Synthetic
uuuuacccagccccuauucaaga

SEQ ID NO: 137757 - RNA, 24 nt, Artificial Sequence
  Synthetic
auuuuacccagccccuauucaaga

SEQ ID NO: 137758 - RNA, 18 nt, Artificial Sequence
  Synthetic
aauucugaagaaagaaga

SEQ ID NO: 137759 - RNA, 19 nt, Artificial Sequence
  Synthetic
uaauucugaagaaagaaga

SEQ ID NO: 137760 - RNA, 20 nt, Artificial Sequence
  Synthetic
uuaauucugaagaaagaaga

SEQ ID NO: 137761 - RNA, 18 nt, Artificial Sequence
  Synthetic
cuagccauaugcagaaga

SEQ ID NO: 137762 - RNA, 21 nt, Artificial Sequence
  Synthetic
uggcuagccauaugcagaaga

SEQ ID NO: 137763 - RNA, 22 nt, Artificial Sequence
  Synthetic
cuggcuagccauaugcagaaga

SEQ ID NO: 137764 - RNA, 23 nt, Artificial Sequence
  Synthetic
acuggcuagccauaugcagaaga

SEQ ID NO: 137765 - RNA, 24 nt, Artificial Sequence
  Synthetic
aacuggcuagccauaugcagaaga

SEQ ID NO: 137766 - RNA, 18 nt, Artificial Sequence
  Synthetic
ucaugccuccucagaaga

SEQ ID NO: 137767 - RNA, 19 nt, Artificial Sequence
  Synthetic
uucaugccuccucagaaga

SEQ ID NO: 137768 - RNA, 20 nt, Artificial Sequence
  Synthetic
auucaugccuccucagaaga

SEQ ID NO: 137769 - RNA, 21 nt, Artificial Sequence
  Synthetic
aauucaugccuccucagaaga

SEQ ID NO: 137770 - RNA, 22 nt, Artificial Sequence
  Synthetic
uaauucaugccuccucagaaga

SEQ ID NO: 137771 - RNA, 23 nt, Artificial Sequence
  Synthetic
uuaauucaugccuccucagaaga

SEQ ID NO: 137772 - RNA, 24 nt, Artificial Sequence
  Synthetic
cuuaauucaugccuccucagaaga

SEQ ID NO: 137773 - RNA, 18 nt, Artificial Sequence
  Synthetic
cucagccuucugagaaga

SEQ ID NO: 137774 - RNA, 19 nt, Artificial Sequence
  Synthetic
ccucagccuucugagaaga

SEQ ID NO: 137775 - RNA, 20 nt, Artificial Sequence
  Synthetic
accucagccuucugagaaga

SEQ ID NO: 137776 - RNA, 21 nt, Artificial Sequence
  Synthetic
caccucagccuucugagaaga

SEQ ID NO: 137777 - RNA, 22 nt, Artificial Sequence
  Synthetic
ccaccucagccuucugagaaga

SEQ ID NO: 137778 - RNA, 23 nt, Artificial Sequence
  Synthetic
cccaccucagccuucugagaaga

SEQ ID NO: 137779 - RNA, 24 nt, Artificial Sequence
  Synthetic
ucccaccucagccuucugagaaga

SEQ ID NO: 137780 - RNA, 18 nt, Artificial Sequence
  Synthetic
cucaaaacggcuagaaga

SEQ ID NO: 137781 - RNA, 19 nt, Artificial Sequence
  Synthetic
ucucaaaacggcuagaaga

SEQ ID NO: 137782 - RNA, 20 nt, Artificial Sequence
  Synthetic
aucucaaaacggcuagaaga

SEQ ID NO: 137783 - RNA, 21 nt, Artificial Sequence
  Synthetic
uaucucaaaacggcuagaaga

SEQ ID NO: 137784 - RNA, 23 nt, Artificial Sequence
  Synthetic
cguaucucaaaacggcuagaaga

SEQ ID NO: 137785 - RNA, 18 nt, Artificial Sequence
  Synthetic
ugaaauuauuuuagaaga

SEQ ID NO: 137786 - RNA, 19 nt, Artificial Sequence
  Synthetic
augaaauuauuuuagaaga

SEQ ID NO: 137787 - RNA, 20 nt, Artificial Sequence
  Synthetic
uaugaaauuauuuuagaaga

SEQ ID NO: 137788 - RNA, 18 nt, Artificial Sequence
  Synthetic
aaauucauaaaacgaaga

SEQ ID NO: 137789 - RNA, 19 nt, Artificial Sequence
  Synthetic
aaaauucauaaaacgaaga

SEQ ID NO: 137790 - RNA, 20 nt, Artificial Sequence
  Synthetic
uaaaauucauaaaacgaaga

SEQ ID NO: 137791 - RNA, 20 nt, Artificial Sequence
  Synthetic
aggaaaacauccaaauaaga

SEQ ID NO: 137792 - RNA, 18 nt, Artificial Sequence
  Synthetic
uuuucaauuuaaauaaga

SEQ ID NO: 137793 - RNA, 19 nt, Artificial Sequence
  Synthetic
uuuuucaauuuaaauaaga

SEQ ID NO: 137794 - RNA, 20 nt, Artificial Sequence
  Synthetic
auuuuucaauuuaaauaaga

SEQ ID NO: 137795 - RNA, 21 nt, Artificial Sequence
  Synthetic
uauuuuucaauuuaaauaaga

SEQ ID NO: 137796 - RNA, 22 nt, Artificial Sequence
  Synthetic
cuauuuuucaauuuaaauaaga

SEQ ID NO: 137797 - RNA, 23 nt, Artificial Sequence
  Synthetic
ccuauuuuucaauuuaaauaaga

SEQ ID NO: 137798 - RNA, 24 nt, Artificial Sequence
  Synthetic
uccuauuuuucaauuuaaauaaga

SEQ ID NO: 137799 - RNA, 18 nt, Artificial Sequence
  Synthetic
uacuaugcagccauaaga

SEQ ID NO: 137800 - RNA, 19 nt, Artificial Sequence
  Synthetic
auacuaugcagccauaaga

SEQ ID NO: 137801 - RNA, 20 nt, Artificial Sequence
  Synthetic
aauacuaugcagccauaaga

SEQ ID NO: 137802 - RNA, 23 nt, Artificial Sequence
  Synthetic
uggaauacuaugcagccauaaga

SEQ ID NO: 137803 - RNA, 24 nt, Artificial Sequence
  Synthetic
auggaauacuaugcagccauaaga

SEQ ID NO: 137804 - RNA, 18 nt, Artificial Sequence
  Synthetic
uucuuccauucuuuaaga

SEQ ID NO: 137805 - RNA, 19 nt, Artificial Sequence
  Synthetic
uuucuuccauucuuuaaga

SEQ ID NO: 137806 - RNA, 20 nt, Artificial Sequence
  Synthetic
uuuucuuccauucuuuaaga

SEQ ID NO: 137807 - RNA, 18 nt, Artificial Sequence
  Synthetic
cuacuuuucucaaacaga

SEQ ID NO: 137808 - RNA, 19 nt, Artificial Sequence
  Synthetic
ucuacuuuucucaaacaga

SEQ ID NO: 137809 - RNA, 21 nt, Artificial Sequence
  Synthetic
ugucuacuuuucucaaacaga

SEQ ID NO: 137810 - RNA, 22 nt, Artificial Sequence
  Synthetic
cugucuacuuuucucaaacaga

SEQ ID NO: 137811 - RNA, 23 nt, Artificial Sequence
  Synthetic
ucugucuacuuuucucaaacaga

SEQ ID NO: 137812 - RNA, 24 nt, Artificial Sequence
  Synthetic
uucugucuacuuuucucaaacaga

SEQ ID NO: 137813 - RNA, 18 nt, Artificial Sequence
  Synthetic
cacacagauacacacaga

SEQ ID NO: 137814 - RNA, 20 nt, Artificial Sequence
  Synthetic
agcacacagauacacacaga

SEQ ID NO: 137815 - RNA, 18 nt, Artificial Sequence
  Synthetic
uauaucuauacacacaga

SEQ ID NO: 137816 - RNA, 19 nt, Artificial Sequence
  Synthetic
auauaucuauacacacaga

SEQ ID NO: 137817 - RNA, 20 nt, Artificial Sequence
  Synthetic
uauauaucuauacacacaga

SEQ ID NO: 137818 - RNA, 19 nt, Artificial Sequence
  Synthetic
cguaacaaaauaccacaga

SEQ ID NO: 137819 - RNA, 20 nt, Artificial Sequence
  Synthetic
ccguaacaaaauaccacaga

SEQ ID NO: 137820 - RNA, 21 nt, Artificial Sequence
  Synthetic
uccguaacaaaauaccacaga

SEQ ID NO: 137821 - RNA, 22 nt, Artificial Sequence
  Synthetic
uuccguaacaaaauaccacaga

SEQ ID NO: 137822 - RNA, 23 nt, Artificial Sequence
  Synthetic
cuuccguaacaaaauaccacaga

SEQ ID NO: 137823 - RNA, 18 nt, Artificial Sequence
  Synthetic
aaguuucaacuagacaga

SEQ ID NO: 137824 - RNA, 19 nt, Artificial Sequence
  Synthetic
aaaguuucaacuagacaga

SEQ ID NO: 137825 - RNA, 20 nt, Artificial Sequence
  Synthetic
caaaguuucaacuagacaga

SEQ ID NO: 137826 - RNA, 21 nt, Artificial Sequence
  Synthetic
acaaaguuucaacuagacaga

SEQ ID NO: 137827 - RNA, 22 nt, Artificial Sequence
  Synthetic
uacaaaguuucaacuagacaga

SEQ ID NO: 137828 - RNA, 23 nt, Artificial Sequence
  Synthetic
uuacaaaguuucaacuagacaga

SEQ ID NO: 137829 - RNA, 24 nt, Artificial Sequence
  Synthetic
auuacaaaguuucaacuagacaga

SEQ ID NO: 137830 - RNA, 18 nt, Artificial Sequence
  Synthetic
ucaaacuugcaugacaga

SEQ ID NO: 137831 - RNA, 19 nt, Artificial Sequence
  Synthetic
cucaaacuugcaugacaga

SEQ ID NO: 137832 - RNA, 20 nt, Artificial Sequence
  Synthetic
acucaaacuugcaugacaga

SEQ ID NO: 137833 - RNA, 21 nt, Artificial Sequence
  Synthetic
cacucaaacuugcaugacaga

SEQ ID NO: 137834 - RNA, 23 nt, Artificial Sequence
  Synthetic
ugcacucaaacuugcaugacaga

SEQ ID NO: 137835 - RNA, 24 nt, Artificial Sequence
  Synthetic
cugcacucaaacuugcaugacaga

SEQ ID NO: 137836 - RNA, 19 nt, Artificial Sequence
  Synthetic
agagcuagucagugacaga

SEQ ID NO: 137837 - RNA, 20 nt, Artificial Sequence
  Synthetic
cagagcuagucagugacaga

SEQ ID NO: 137838 - RNA, 18 nt, Artificial Sequence
  Synthetic
uuguauuuuuaguacaga

SEQ ID NO: 137839 - RNA, 19 nt, Artificial Sequence
  Synthetic
uuuguauuuuuaguacaga

SEQ ID NO: 137840 - RNA, 20 nt, Artificial Sequence
  Synthetic
uuuuguauuuuuaguacaga

SEQ ID NO: 137841 - RNA, 21 nt, Artificial Sequence
  Synthetic
uuuuuguauuuuuaguacaga

SEQ ID NO: 137842 - RNA, 22 nt, Artificial Sequence
  Synthetic
auuuuuguauuuuuaguacaga

SEQ ID NO: 137843 - RNA, 23 nt, Artificial Sequence
  Synthetic
aauuuuuguauuuuuaguacaga

SEQ ID NO: 137844 - RNA, 24 nt, Artificial Sequence
  Synthetic
uaauuuuuguauuuuuaguacaga

SEQ ID NO: 137845 - RNA, 18 nt, Artificial Sequence
  Synthetic
uuuuauuuuuaguacaga

SEQ ID NO: 137846 - RNA, 19 nt, Artificial Sequence
  Synthetic
uuuuuauuuuuaguacaga

SEQ ID NO: 137847 - RNA, 20 nt, Artificial Sequence
  Synthetic
uuuuuuauuuuuaguacaga

SEQ ID NO: 137848 - RNA, 21 nt, Artificial Sequence
  Synthetic
auuuuuuauuuuuaguacaga

SEQ ID NO: 137849 - RNA, 22 nt, Artificial Sequence
  Synthetic
aauuuuuuauuuuuaguacaga

SEQ ID NO: 137850 - RNA, 23 nt, Artificial Sequence
  Synthetic
uaauuuuuuauuuuuaguacaga

SEQ ID NO: 137851 - RNA, 24 nt, Artificial Sequence
  Synthetic
cuaauuuuuuauuuuuaguacaga

SEQ ID NO: 137852 - RNA, 18 nt, Artificial Sequence
  Synthetic
uuauuuuuuuaguacaga

SEQ ID NO: 137853 - RNA, 19 nt, Artificial Sequence
  Synthetic
uuuauuuuuuuaguacaga

SEQ ID NO: 137854 - RNA, 20 nt, Artificial Sequence
  Synthetic
uuuuauuuuuuuaguacaga

SEQ ID NO: 137855 - RNA, 21 nt, Artificial Sequence
  Synthetic
uuuuuauuuuuuuaguacaga

SEQ ID NO: 137856 - RNA, 22 nt, Artificial Sequence
  Synthetic
uuuuuuauuuuuuuaguacaga

SEQ ID NO: 137857 - RNA, 23 nt, Artificial Sequence
  Synthetic
uuuuuuuauuuuuuuaguacaga

SEQ ID NO: 137858 - RNA, 24 nt, Artificial Sequence
  Synthetic
auuuuuuuauuuuuuuaguacaga

SEQ ID NO: 137859 - RNA, 18 nt, Artificial Sequence
  Synthetic
uaauuaaaacaagccaga

SEQ ID NO: 137860 - RNA, 19 nt, Artificial Sequence
  Synthetic
auaauuaaaacaagccaga

SEQ ID NO: 137861 - RNA, 20 nt, Artificial Sequence
  Synthetic
aauaauuaaaacaagccaga

SEQ ID NO: 137862 - RNA, 19 nt, Artificial Sequence
  Synthetic
cgugccacugcacuccaga

SEQ ID NO: 137863 - RNA, 20 nt, Artificial Sequence
  Synthetic
ucgugccacugcacuccaga

SEQ ID NO: 137864 - RNA, 21 nt, Artificial Sequence
  Synthetic
aucgugccacugcacuccaga

SEQ ID NO: 137865 - RNA, 23 nt, Artificial Sequence
  Synthetic
agaucgugccacugcacuccaga

SEQ ID NO: 137866 - RNA, 18 nt, Artificial Sequence
  Synthetic
acaccauugcacuccaga

SEQ ID NO: 137867 - RNA, 19 nt, Artificial Sequence
  Synthetic
cacaccauugcacuccaga

SEQ ID NO: 137868 - RNA, 20 nt, Artificial Sequence
  Synthetic
ucacaccauugcacuccaga

SEQ ID NO: 137869 - RNA, 21 nt, Artificial Sequence
  Synthetic
aucacaccauugcacuccaga

SEQ ID NO: 137870 - RNA, 23 nt, Artificial Sequence
  Synthetic
agaucacaccauugcacuccaga

SEQ ID NO: 137871 - RNA, 18 nt, Artificial Sequence
  Synthetic
aaaugugaaauguccaga

SEQ ID NO: 137872 - RNA, 19 nt, Artificial Sequence
  Synthetic
caaaugugaaauguccaga

SEQ ID NO: 137873 - RNA, 20 nt, Artificial Sequence
  Synthetic
ucaaaugugaaauguccaga

SEQ ID NO: 137874 - RNA, 18 nt, Artificial Sequence
  Synthetic
uaaaaagugaagagcaga

SEQ ID NO: 137875 - RNA, 19 nt, Artificial Sequence
  Synthetic
uuaaaaagugaagagcaga

SEQ ID NO: 137876 - RNA, 20 nt, Artificial Sequence
  Synthetic
cuuaaaaagugaagagcaga

SEQ ID NO: 137877 - RNA, 18 nt, Artificial Sequence
  Synthetic
uagguacacaaaggcaga

SEQ ID NO: 137878 - RNA, 20 nt, Artificial Sequence
  Synthetic
uguagguacacaaaggcaga

SEQ ID NO: 137879 - RNA, 21 nt, Artificial Sequence
  Synthetic
cuguagguacacaaaggcaga

SEQ ID NO: 137880 - RNA, 23 nt, Artificial Sequence
  Synthetic
cgcuguagguacacaaaggcaga

SEQ ID NO: 137881 - RNA, 24 nt, Artificial Sequence
  Synthetic
acgcuguagguacacaaaggcaga

SEQ ID NO: 137882 - RNA, 18 nt, Artificial Sequence
  Synthetic
aaacauaaaauuggcaga

SEQ ID NO: 137883 - RNA, 19 nt, Artificial Sequence
  Synthetic
aaaacauaaaauuggcaga

SEQ ID NO: 137884 - RNA, 20 nt, Artificial Sequence
  Synthetic
uaaaacauaaaauuggcaga

SEQ ID NO: 137885 - RNA, 18 nt, Artificial Sequence
  Synthetic
uuguccaaggacugcaga

SEQ ID NO: 137886 - RNA, 19 nt, Artificial Sequence
  Synthetic
uuuguccaaggacugcaga

SEQ ID NO: 137887 - RNA, 20 nt, Artificial Sequence
  Synthetic
cuuuguccaaggacugcaga

SEQ ID NO: 137888 - RNA, 21 nt, Artificial Sequence
  Synthetic
ccuuuguccaaggacugcaga

SEQ ID NO: 137889 - RNA, 22 nt, Artificial Sequence
  Synthetic
uccuuuguccaaggacugcaga

SEQ ID NO: 137890 - RNA, 23 nt, Artificial Sequence
  Synthetic
cuccuuuguccaaggacugcaga

SEQ ID NO: 137891 - RNA, 24 nt, Artificial Sequence
  Synthetic
acuccuuuguccaaggacugcaga

SEQ ID NO: 137892 - RNA, 18 nt, Artificial Sequence
  Synthetic
agaauuuccuuuugcaga

SEQ ID NO: 137893 - RNA, 19 nt, Artificial Sequence
  Synthetic
uagaauuuccuuuugcaga

SEQ ID NO: 137894 - RNA, 20 nt, Artificial Sequence
  Synthetic
uuagaauuuccuuuugcaga

SEQ ID NO: 137895 - RNA, 21 nt, Artificial Sequence
  Synthetic
agggaaaagacaauccucaga

SEQ ID NO: 137896 - RNA, 22 nt, Artificial Sequence
  Synthetic
aagggaaaagacaauccucaga

SEQ ID NO: 137897 - RNA, 23 nt, Artificial Sequence
  Synthetic
aaagggaaaagacaauccucaga

SEQ ID NO: 137898 - RNA, 18 nt, Artificial Sequence
  Synthetic
caaauuucuguagucaga

SEQ ID NO: 137899 - RNA, 20 nt, Artificial Sequence
  Synthetic
ugcaaauuucuguagucaga

SEQ ID NO: 137900 - RNA, 21 nt, Artificial Sequence
  Synthetic
augcaaauuucuguagucaga

SEQ ID NO: 137901 - RNA, 22 nt, Artificial Sequence
  Synthetic
uaugcaaauuucuguagucaga

SEQ ID NO: 137902 - RNA, 23 nt, Artificial Sequence
  Synthetic
auaugcaaauuucuguagucaga

SEQ ID NO: 137903 - RNA, 24 nt, Artificial Sequence
  Synthetic
cauaugcaaauuucuguagucaga

SEQ ID NO: 137904 - RNA, 19 nt, Artificial Sequence
  Synthetic
ugcacauacuuuugucaga

SEQ ID NO: 137905 - RNA, 20 nt, Artificial Sequence
  Synthetic
augcacauacuuuugucaga

SEQ ID NO: 137906 - RNA, 18 nt, Artificial Sequence
  Synthetic
uggacaucagccuucaga

SEQ ID NO: 137907 - RNA, 19 nt, Artificial Sequence
  Synthetic
cuggacaucagccuucaga

SEQ ID NO: 137908 - RNA, 20 nt, Artificial Sequence
  Synthetic
ucuggacaucagccuucaga

SEQ ID NO: 137909 - RNA, 21 nt, Artificial Sequence
  Synthetic
uucuggacaucagccuucaga

SEQ ID NO: 137910 - RNA, 22 nt, Artificial Sequence
  Synthetic
auucuggacaucagccuucaga

SEQ ID NO: 137911 - RNA, 23 nt, Artificial Sequence
  Synthetic
uauucuggacaucagccuucaga

SEQ ID NO: 137912 - RNA, 24 nt, Artificial Sequence
  Synthetic
cuauucuggacaucagccuucaga

SEQ ID NO: 137913 - RNA, 18 nt, Artificial Sequence
  Synthetic
agaaagcagaauuucaga

SEQ ID NO: 137914 - RNA, 19 nt, Artificial Sequence
  Synthetic
uagaaagcagaauuucaga

SEQ ID NO: 137915 - RNA, 20 nt, Artificial Sequence
  Synthetic
cuagaaagcagaauuucaga

SEQ ID NO: 137916 - RNA, 19 nt, Artificial Sequence
  Synthetic
ugauuggaauaguuucaga

SEQ ID NO: 137917 - RNA, 20 nt, Artificial Sequence
  Synthetic
uugauuggaauaguuucaga

SEQ ID NO: 137918 - RNA, 21 nt, Artificial Sequence
  Synthetic
auugauuggaauaguuucaga

SEQ ID NO: 137919 - RNA, 22 nt, Artificial Sequence
  Synthetic
uauugauuggaauaguuucaga

SEQ ID NO: 137920 - RNA, 23 nt, Artificial Sequence
  Synthetic
cuauugauuggaauaguuucaga

SEQ ID NO: 137921 - RNA, 24 nt, Artificial Sequence
  Synthetic
ucuauugauuggaauaguuucaga

SEQ ID NO: 137922 - RNA, 18 nt, Artificial Sequence
  Synthetic
ccuacaagcuagaagaga

SEQ ID NO: 137923 - RNA, 19 nt, Artificial Sequence
  Synthetic
cccuacaagcuagaagaga

SEQ ID NO: 137924 - RNA, 20 nt, Artificial Sequence
  Synthetic
acccuacaagcuagaagaga

SEQ ID NO: 137925 - RNA, 21 nt, Artificial Sequence
  Synthetic
aacccuacaagcuagaagaga

SEQ ID NO: 137926 - RNA, 22 nt, Artificial Sequence
  Synthetic
aaacccuacaagcuagaagaga

SEQ ID NO: 137927 - RNA, 24 nt, Artificial Sequence
  Synthetic
agaaacccuacaagcuagaagaga

SEQ ID NO: 137928 - RNA, 18 nt, Artificial Sequence
  Synthetic
acaauuauuuugaagaga

SEQ ID NO: 137929 - RNA, 19 nt, Artificial Sequence
  Synthetic
aacaauuauuuugaagaga

SEQ ID NO: 137930 - RNA, 20 nt, Artificial Sequence
  Synthetic
aaacaauuauuuugaagaga

SEQ ID NO: 137931 - RNA, 18 nt, Artificial Sequence
  Synthetic
cuaauaaugaauaagaga

SEQ ID NO: 137932 - RNA, 19 nt, Artificial Sequence
  Synthetic
acuaauaaugaauaagaga

SEQ ID NO: 137933 - RNA, 20 nt, Artificial Sequence
  Synthetic
aggggggaaagagacagaga

SEQ ID NO: 137934 - RNA, 19 nt, Artificial Sequence
  Synthetic
agcuagcuagagacagaga

SEQ ID NO: 137935 - RNA, 20 nt, Artificial Sequence
  Synthetic
uagcuagcuagagacagaga

SEQ ID NO: 137936 - RNA, 21 nt, Artificial Sequence
  Synthetic
cuagcuagcuagagacagaga

SEQ ID NO: 137937 - RNA, 23 nt, Artificial Sequence
  Synthetic
agcuagcuagcuagagacagaga

SEQ ID NO: 137938 - RNA, 24 nt, Artificial Sequence
  Synthetic
uagcuagcuagcuagagacagaga

SEQ ID NO: 137939 - RNA, 18 nt, Artificial Sequence
  Synthetic
ucuguuguuugacagaga

SEQ ID NO: 137940 - RNA, 19 nt, Artificial Sequence
  Synthetic
uucuguuguuugacagaga

SEQ ID NO: 137941 - RNA, 20 nt, Artificial Sequence
  Synthetic
uuucuguuguuugacagaga

SEQ ID NO: 137942 - RNA, 18 nt, Artificial Sequence
  Synthetic
uguauuuuuuugcagaga

SEQ ID NO: 137943 - RNA, 19 nt, Artificial Sequence
  Synthetic
uuguauuuuuuugcagaga

SEQ ID NO: 137944 - RNA, 20 nt, Artificial Sequence
  Synthetic
uuuguauuuuuuugcagaga

SEQ ID NO: 137945 - RNA, 21 nt, Artificial Sequence
  Synthetic
uuuuguauuuuuuugcagaga

SEQ ID NO: 137946 - RNA, 22 nt, Artificial Sequence
  Synthetic
uuuuuguauuuuuuugcagaga

SEQ ID NO: 137947 - RNA, 23 nt, Artificial Sequence
  Synthetic
uuuuuuguauuuuuuugcagaga

SEQ ID NO: 137948 - RNA, 24 nt, Artificial Sequence
  Synthetic
auuuuuuguauuuuuuugcagaga

SEQ ID NO: 137949 - RNA, 19 nt, Artificial Sequence
  Synthetic
agagcaggagcaagagaga

SEQ ID NO: 137950 - RNA, 20 nt, Artificial Sequence
  Synthetic
uagagcaggagcaagagaga

SEQ ID NO: 137951 - RNA, 21 nt, Artificial Sequence
  Synthetic
cuagagcaggagcaagagaga

SEQ ID NO: 137952 - RNA, 24 nt, Artificial Sequence
  Synthetic
uggcuagagcaggagcaagagaga

SEQ ID NO: 137953 - RNA, 18 nt, Artificial Sequence
  Synthetic
auggcgaaagcagagaga

SEQ ID NO: 137954 - RNA, 19 nt, Artificial Sequence
  Synthetic
cauggcgaaagcagagaga

SEQ ID NO: 137955 - RNA, 20 nt, Artificial Sequence
  Synthetic
acauggcgaaagcagagaga

SEQ ID NO: 137956 - RNA, 21 nt, Artificial Sequence
  Synthetic
cacauggcgaaagcagagaga

SEQ ID NO: 137957 - RNA, 22 nt, Artificial Sequence
  Synthetic
ucacauggcgaaagcagagaga

SEQ ID NO: 137958 - RNA, 23 nt, Artificial Sequence
  Synthetic
uucacauggcgaaagcagagaga

SEQ ID NO: 137959 - RNA, 24 nt, Artificial Sequence
  Synthetic
uuucacauggcgaaagcagagaga

SEQ ID NO: 137960 - RNA, 18 nt, Artificial Sequence
  Synthetic
cagcaggagagagagaga

SEQ ID NO: 137961 - RNA, 21 nt, Artificial Sequence
  Synthetic
aggcagcaggagagagagaga

SEQ ID NO: 137962 - RNA, 22 nt, Artificial Sequence
  Synthetic
aaggcagcaggagagagagaga

SEQ ID NO: 137963 - RNA, 23 nt, Artificial Sequence
  Synthetic
caaggcagcaggagagagagaga

SEQ ID NO: 137964 - RNA, 24 nt, Artificial Sequence
  Synthetic
acaaggcagcaggagagagagaga

SEQ ID NO: 137965 - RNA, 20 nt, Artificial Sequence
  Synthetic
aggauggauaaggggagaga

SEQ ID NO: 137966 - RNA, 21 nt, Artificial Sequence
  Synthetic
aauaaauuuaggugugagaga

SEQ ID NO: 137967 - RNA, 24 nt, Artificial Sequence
  Synthetic
uggaauaaauuuaggugugagaga

SEQ ID NO: 137968 - RNA, 18 nt, Artificial Sequence
  Synthetic
uuucuuuucuuauagaga

SEQ ID NO: 137969 - RNA, 19 nt, Artificial Sequence
  Synthetic
uuuucuuuucuuauagaga

SEQ ID NO: 137970 - RNA, 21 nt, Artificial Sequence
  Synthetic
cguuuucuuuucuuauagaga

SEQ ID NO: 137971 - RNA, 22 nt, Artificial Sequence
  Synthetic
acguuuucuuuucuuauagaga

SEQ ID NO: 137972 - RNA, 23 nt, Artificial Sequence
  Synthetic
cacguuuucuuuucuuauagaga

SEQ ID NO: 137973 - RNA, 24 nt, Artificial Sequence
  Synthetic
acacguuuucuuuucuuauagaga

SEQ ID NO: 137974 - RNA, 18 nt, Artificial Sequence
  Synthetic
uuguauuuuaaguagaga

SEQ ID NO: 137975 - RNA, 19 nt, Artificial Sequence
  Synthetic
uuuguauuuuaaguagaga

SEQ ID NO: 137976 - RNA, 20 nt, Artificial Sequence
  Synthetic
uuuuguauuuuaaguagaga

SEQ ID NO: 137977 - RNA, 21 nt, Artificial Sequence
  Synthetic
uuuuuguauuuuaaguagaga

SEQ ID NO: 137978 - RNA, 22 nt, Artificial Sequence
  Synthetic
auuuuuguauuuuaaguagaga

SEQ ID NO: 137979 - RNA, 23 nt, Artificial Sequence
  Synthetic
aauuuuuguauuuuaaguagaga

SEQ ID NO: 137980 - RNA, 24 nt, Artificial Sequence
  Synthetic
uaauuuuuguauuuuaaguagaga

SEQ ID NO: 137981 - RNA, 21 nt, Artificial Sequence
  Synthetic
uuuuuguaucuuuaguagaga

SEQ ID NO: 137982 - RNA, 22 nt, Artificial Sequence
  Synthetic
auuuuuguaucuuuaguagaga

SEQ ID NO: 137983 - RNA, 23 nt, Artificial Sequence
  Synthetic
aauuuuuguaucuuuaguagaga

SEQ ID NO: 137984 - RNA, 24 nt, Artificial Sequence
  Synthetic
uaauuuuuguaucuuuaguagaga

SEQ ID NO: 137985 - RNA, 24 nt, Artificial Sequence
  Synthetic
aauuuuuuguaucuuuaguagaga

SEQ ID NO: 137986 - RNA, 18 nt, Artificial Sequence
  Synthetic
uuguaauuuuaguagaga

SEQ ID NO: 137987 - RNA, 19 nt, Artificial Sequence
  Synthetic
uuuguaauuuuaguagaga

SEQ ID NO: 137988 - RNA, 20 nt, Artificial Sequence
  Synthetic
uuuuguaauuuuaguagaga

SEQ ID NO: 137989 - RNA, 21 nt, Artificial Sequence
  Synthetic
uuuuuguaauuuuaguagaga

SEQ ID NO: 137990 - RNA, 22 nt, Artificial Sequence
  Synthetic
auuuuuguaauuuuaguagaga

SEQ ID NO: 137991 - RNA, 24 nt, Artificial Sequence
  Synthetic
ugauuuuuguaauuuuaguagaga

SEQ ID NO: 137992 - RNA, 18 nt, Artificial Sequence
  Synthetic
uuguacuuuuaguagaga

SEQ ID NO: 137993 - RNA, 19 nt, Artificial Sequence
  Synthetic
uuuguacuuuuaguagaga

SEQ ID NO: 137994 - RNA, 20 nt, Artificial Sequence
  Synthetic
uuuuguacuuuuaguagaga

SEQ ID NO: 137995 - RNA, 21 nt, Artificial Sequence
  Synthetic
auuuuguacuuuuaguagaga

SEQ ID NO: 137996 - RNA, 22 nt, Artificial Sequence
  Synthetic
aauuuuguacuuuuaguagaga

SEQ ID NO: 137997 - RNA, 23 nt, Artificial Sequence
  Synthetic
uaauuuuguacuuuuaguagaga

SEQ ID NO: 137998 - RNA, 24 nt, Artificial Sequence
  Synthetic
cuaauuuuguacuuuuaguagaga

SEQ ID NO: 137999 - RNA, 19 nt, Artificial Sequence
  Synthetic
ugugcauuuuuaguagaga

SEQ ID NO: 138000 - RNA, 20 nt, Artificial Sequence
  Synthetic
uugugcauuuuuaguagaga

SEQ ID NO: 138001 - RNA, 21 nt, Artificial Sequence
  Synthetic
uuugugcauuuuuaguagaga

SEQ ID NO: 138002 - RNA, 22 nt, Artificial Sequence
  Synthetic
uuuugugcauuuuuaguagaga

SEQ ID NO: 138003 - RNA, 23 nt, Artificial Sequence
  Synthetic
auuuugugcauuuuuaguagaga

SEQ ID NO: 138004 - RNA, 24 nt, Artificial Sequence
  Synthetic
aauuuugugcauuuuuaguagaga

SEQ ID NO: 138005 - RNA, 18 nt, Artificial Sequence
  Synthetic
uugcauuuuuaguagaga

SEQ ID NO: 138006 - RNA, 19 nt, Artificial Sequence
  Synthetic
uuugcauuuuuaguagaga

SEQ ID NO: 138007 - RNA, 20 nt, Artificial Sequence
  Synthetic
uuuugcauuuuuaguagaga

SEQ ID NO: 138008 - RNA, 22 nt, Artificial Sequence
  Synthetic
aguuuugcauuuuuaguagaga

SEQ ID NO: 138009 - RNA, 23 nt, Artificial Sequence
  Synthetic
aaguuuugcauuuuuaguagaga

SEQ ID NO: 138010 - RNA, 24 nt, Artificial Sequence
  Synthetic
uaaguuuugcauuuuuaguagaga

SEQ ID NO: 138011 - RNA, 18 nt, Artificial Sequence
  Synthetic
uuguauuuuuaguagaga

SEQ ID NO: 138012 - RNA, 19 nt, Artificial Sequence
  Synthetic
uuuguauuuuuaguagaga

SEQ ID NO: 138013 - RNA, 21 nt, Artificial Sequence
  Synthetic
uguuuguauuuuuaguagaga

SEQ ID NO: 138014 - RNA, 22 nt, Artificial Sequence
  Synthetic
auguuuguauuuuuaguagaga

SEQ ID NO: 138015 - RNA, 23 nt, Artificial Sequence
  Synthetic
aauguuuguauuuuuaguagaga

SEQ ID NO: 138016 - RNA, 24 nt, Artificial Sequence
  Synthetic
uaauguuuguauuuuuaguagaga

SEQ ID NO: 138017 - RNA, 22 nt, Artificial Sequence
  Synthetic
uguuuuguauuuuuaguagaga

SEQ ID NO: 138018 - RNA, 23 nt, Artificial Sequence
  Synthetic
auguuuuguauuuuuaguagaga

SEQ ID NO: 138019 - RNA, 24 nt, Artificial Sequence
  Synthetic
aauguuuuguauuuuuaguagaga

SEQ ID NO: 138020 - RNA, 22 nt, Artificial Sequence
  Synthetic
auuuuuguauuuuuaguagaga

SEQ ID NO: 138021 - RNA, 24 nt, Artificial Sequence
  Synthetic
ugauuuuuguauuuuuaguagaga

SEQ ID NO: 138022 - RNA, 24 nt, Artificial Sequence
  Synthetic
aaguuuuuguauuuuuaguagaga

SEQ ID NO: 138023 - RNA, 18 nt, Artificial Sequence
  Synthetic
uuuuauuuuuaguagaga

SEQ ID NO: 138024 - RNA, 19 nt, Artificial Sequence
  Synthetic
uuuuuauuuuuaguagaga

SEQ ID NO: 138025 - RNA, 20 nt, Artificial Sequence
  Synthetic
uuuuuuauuuuuaguagaga

SEQ ID NO: 138026 - RNA, 22 nt, Artificial Sequence
  Synthetic
uuuuuuuuauuuuuaguagaga

SEQ ID NO: 138027 - RNA, 23 nt, Artificial Sequence
  Synthetic
auuuuuuuuauuuuuaguagaga

SEQ ID NO: 138028 - RNA, 24 nt, Artificial Sequence
  Synthetic
aauuuuuuuuauuuuuaguagaga

SEQ ID NO: 138029 - RNA, 18 nt, Artificial Sequence
  Synthetic
uucuguuuuuaguagaga

SEQ ID NO: 138030 - RNA, 19 nt, Artificial Sequence
  Synthetic
uuucuguuuuuaguagaga

SEQ ID NO: 138031 - RNA, 20 nt, Artificial Sequence
  Synthetic
uuuucuguuuuuaguagaga

SEQ ID NO: 138032 - RNA, 21 nt, Artificial Sequence
  Synthetic
uuuuucuguuuuuaguagaga

SEQ ID NO: 138033 - RNA, 22 nt, Artificial Sequence
  Synthetic
auuuuucuguuuuuaguagaga

SEQ ID NO: 138034 - RNA, 23 nt, Artificial Sequence
  Synthetic
aauuuuucuguuuuuaguagaga

SEQ ID NO: 138035 - RNA, 24 nt, Artificial Sequence
  Synthetic
uaauuuuucuguuuuuaguagaga

SEQ ID NO: 138036 - RNA, 18 nt, Artificial Sequence
  Synthetic
ucguguuuuuaguagaga

SEQ ID NO: 138037 - RNA, 19 nt, Artificial Sequence
  Synthetic
cucguguuuuuaguagaga

SEQ ID NO: 138038 - RNA, 20 nt, Artificial Sequence
  Synthetic
ucucguguuuuuaguagaga

SEQ ID NO: 138039 - RNA, 21 nt, Artificial Sequence
  Synthetic
uucucguguuuuuaguagaga

SEQ ID NO: 138040 - RNA, 22 nt, Artificial Sequence
  Synthetic
uuucucguguuuuuaguagaga

SEQ ID NO: 138041 - RNA, 23 nt, Artificial Sequence
  Synthetic
auuucucguguuuuuaguagaga

SEQ ID NO: 138042 - RNA, 24 nt, Artificial Sequence
  Synthetic
uauuucucguguuuuuaguagaga

SEQ ID NO: 138043 - RNA, 18 nt, Artificial Sequence
  Synthetic
uuguguuuuuaguagaga

SEQ ID NO: 138044 - RNA, 19 nt, Artificial Sequence
  Synthetic
uuuguguuuuuaguagaga

SEQ ID NO: 138045 - RNA, 20 nt, Artificial Sequence
  Synthetic
uuuuguguuuuuaguagaga

SEQ ID NO: 138046 - RNA, 21 nt, Artificial Sequence
  Synthetic
uuuuuguguuuuuaguagaga

SEQ ID NO: 138047 - RNA, 22 nt, Artificial Sequence
  Synthetic
auuuuuguguuuuuaguagaga

SEQ ID NO: 138048 - RNA, 23 nt, Artificial Sequence
  Synthetic
aauuuuuguguuuuuaguagaga

SEQ ID NO: 138049 - RNA, 24 nt, Artificial Sequence
  Synthetic
uaauuuuuguguuuuuaguagaga

SEQ ID NO: 138050 - RNA, 18 nt, Artificial Sequence
  Synthetic
uggauuuuuuaguagaga

SEQ ID NO: 138051 - RNA, 19 nt, Artificial Sequence
  Synthetic
uuggauuuuuuaguagaga

SEQ ID NO: 138052 - RNA, 20 nt, Artificial Sequence
  Synthetic
uuuggauuuuuuaguagaga

SEQ ID NO: 138053 - RNA, 21 nt, Artificial Sequence
  Synthetic
uuuuggauuuuuuaguagaga

SEQ ID NO: 138054 - RNA, 22 nt, Artificial Sequence
  Synthetic
uuuuuggauuuuuuaguagaga

SEQ ID NO: 138055 - RNA, 23 nt, Artificial Sequence
  Synthetic
uuuuuuggauuuuuuaguagaga

SEQ ID NO: 138056 - RNA, 24 nt, Artificial Sequence
  Synthetic
uuuuuuuggauuuuuuaguagaga

SEQ ID NO: 138057 - RNA, 18 nt, Artificial Sequence
  Synthetic
uguauuuuuuaguagaga

SEQ ID NO: 138058 - RNA, 19 nt, Artificial Sequence
  Synthetic
uuguauuuuuuaguagaga

SEQ ID NO: 138059 - RNA, 20 nt, Artificial Sequence
  Synthetic
uuuguauuuuuuaguagaga

SEQ ID NO: 138060 - RNA, 24 nt, Artificial Sequence
  Synthetic
uuuuuuuguauuuuuuaguagaga

SEQ ID NO: 138061 - RNA, 18 nt, Artificial Sequence
  Synthetic
uguguuuuuuaguagaga

SEQ ID NO: 138062 - RNA, 19 nt, Artificial Sequence
  Synthetic
uuguguuuuuuaguagaga

SEQ ID NO: 138063 - RNA, 20 nt, Artificial Sequence
  Synthetic
uuuguguuuuuuaguagaga

SEQ ID NO: 138064 - RNA, 21 nt, Artificial Sequence
  Synthetic
uuuuguguuuuuuaguagaga

SEQ ID NO: 138065 - RNA, 22 nt, Artificial Sequence
  Synthetic
uuuuuguguuuuuuaguagaga

SEQ ID NO: 138066 - RNA, 23 nt, Artificial Sequence
  Synthetic
uuuuuuguguuuuuuaguagaga

SEQ ID NO: 138067 - RNA, 24 nt, Artificial Sequence
  Synthetic
uuuuuuuguguuuuuuaguagaga

SEQ ID NO: 138068 - RNA, 19 nt, Artificial Sequence
  Synthetic
uguauuuuuuuaguagaga

SEQ ID NO: 138069 - RNA, 20 nt, Artificial Sequence
  Synthetic
uuguauuuuuuuaguagaga

SEQ ID NO: 138070 - RNA, 21 nt, Artificial Sequence
  Synthetic
uuuguauuuuuuuaguagaga

SEQ ID NO: 138071 - RNA, 22 nt, Artificial Sequence
  Synthetic
uuuuguauuuuuuuaguagaga

SEQ ID NO: 138072 - RNA, 23 nt, Artificial Sequence
  Synthetic
uuuuuguauuuuuuuaguagaga

SEQ ID NO: 138073 - RNA, 24 nt, Artificial Sequence
  Synthetic
uuuuuuguauuuuuuuaguagaga

SEQ ID NO: 138074 - RNA, 18 nt, Artificial Sequence
  Synthetic
uauuuauuuucuuagaga

SEQ ID NO: 138075 - RNA, 19 nt, Artificial Sequence
  Synthetic
auauuuauuuucuuagaga

SEQ ID NO: 138076 - RNA, 20 nt, Artificial Sequence
  Synthetic
uauauuuauuuucuuagaga

SEQ ID NO: 138077 - RNA, 22 nt, Artificial Sequence
  Synthetic
uguauauuuauuuucuuagaga

SEQ ID NO: 138078 - RNA, 23 nt, Artificial Sequence
  Synthetic
uuguauauuuauuuucuuagaga

SEQ ID NO: 138079 - RNA, 24 nt, Artificial Sequence
  Synthetic
uuuguauauuuauuuucuuagaga

SEQ ID NO: 138080 - RNA, 19 nt, Artificial Sequence
  Synthetic
ugauuuucuuauuuagaga

SEQ ID NO: 138081 - RNA, 20 nt, Artificial Sequence
  Synthetic
augauuuucuuauuuagaga

SEQ ID NO: 138082 - RNA, 18 nt, Artificial Sequence
  Synthetic
uuuuauuuauuuuagaga

SEQ ID NO: 138083 - RNA, 19 nt, Artificial Sequence
  Synthetic
auuuuauuuauuuuagaga

SEQ ID NO: 138084 - RNA, 20 nt, Artificial Sequence
  Synthetic
uauuuuauuuauuuuagaga

SEQ ID NO: 138085 - RNA, 21 nt, Artificial Sequence
  Synthetic
uuauuuuauuuauuuuagaga

SEQ ID NO: 138086 - RNA, 22 nt, Artificial Sequence
  Synthetic
uuuauuuuauuuauuuuagaga

SEQ ID NO: 138087 - RNA, 23 nt, Artificial Sequence
  Synthetic
uuuuauuuuauuuauuuuagaga

SEQ ID NO: 138088 - RNA, 24 nt, Artificial Sequence
  Synthetic
auuuuauuuuauuuauuuuagaga

SEQ ID NO: 138089 - RNA, 18 nt, Artificial Sequence
  Synthetic
uguuuuguuuuuuagaga

SEQ ID NO: 138090 - RNA, 19 nt, Artificial Sequence
  Synthetic
uuguuuuguuuuuuagaga

SEQ ID NO: 138091 - RNA, 20 nt, Artificial Sequence
  Synthetic
uuuguuuuguuuuuuagaga

SEQ ID NO: 138092 - RNA, 21 nt, Artificial Sequence
  Synthetic
uuuuguuuuguuuuuuagaga

SEQ ID NO: 138093 - RNA, 23 nt, Artificial Sequence
  Synthetic
uguuuuguuuuguuuuuuagaga

SEQ ID NO: 138094 - RNA, 24 nt, Artificial Sequence
  Synthetic
uuguuuuguuuuguuuuuuagaga

SEQ ID NO: 138095 - RNA, 18 nt, Artificial Sequence
  Synthetic
augaagaaauacccgaga

SEQ ID NO: 138096 - RNA, 19 nt, Artificial Sequence
  Synthetic
uaugaagaaauacccgaga

SEQ ID NO: 138097 - RNA, 20 nt, Artificial Sequence
  Synthetic
cuaugaagaaauacccgaga

SEQ ID NO: 138098 - RNA, 22 nt, Artificial Sequence
  Synthetic
ugcuaugaagaaauacccgaga

SEQ ID NO: 138099 - RNA, 23 nt, Artificial Sequence
  Synthetic
cugcuaugaagaaauacccgaga

SEQ ID NO: 138100 - RNA, 24 nt, Artificial Sequence
  Synthetic
acugcuaugaagaaauacccgaga

SEQ ID NO: 138101 - RNA, 18 nt, Artificial Sequence
  Synthetic
agaaagaacugcccgaga

SEQ ID NO: 138102 - RNA, 19 nt, Artificial Sequence
  Synthetic
uagaaagaacugcccgaga

SEQ ID NO: 138103 - RNA, 20 nt, Artificial Sequence
  Synthetic
cuagaaagaacugcccgaga

SEQ ID NO: 138104 - RNA, 22 nt, Artificial Sequence
  Synthetic
cgcuagaaagaacugcccgaga

SEQ ID NO: 138105 - RNA, 23 nt, Artificial Sequence
  Synthetic
ccgcuagaaagaacugcccgaga

SEQ ID NO: 138106 - RNA, 24 nt, Artificial Sequence
  Synthetic
accgcuagaaagaacugcccgaga

SEQ ID NO: 138107 - RNA, 18 nt, Artificial Sequence
  Synthetic
auaaagaacugcccgaga

SEQ ID NO: 138108 - RNA, 19 nt, Artificial Sequence
  Synthetic
uauaaagaacugcccgaga

SEQ ID NO: 138109 - RNA, 20 nt, Artificial Sequence
  Synthetic
cuauaaagaacugcccgaga

SEQ ID NO: 138110 - RNA, 22 nt, Artificial Sequence
  Synthetic
ugcuauaaagaacugcccgaga

SEQ ID NO: 138111 - RNA, 23 nt, Artificial Sequence
  Synthetic
cugcuauaaagaacugcccgaga

SEQ ID NO: 138112 - RNA, 24 nt, Artificial Sequence
  Synthetic
acugcuauaaagaacugcccgaga

SEQ ID NO: 138113 - RNA, 18 nt, Artificial Sequence
  Synthetic
uuuuuuuuuuucccgaga

SEQ ID NO: 138114 - RNA, 19 nt, Artificial Sequence
  Synthetic
uuuuuuuuuuuucccgaga

SEQ ID NO: 138115 - RNA, 20 nt, Artificial Sequence
  Synthetic
uuuuuuuuuuuuucccgaga

SEQ ID NO: 138116 - RNA, 21 nt, Artificial Sequence
  Synthetic
uuuuuuuuuuuuuucccgaga

SEQ ID NO: 138117 - RNA, 22 nt, Artificial Sequence
  Synthetic
uuuuuuuuuuuuuuucccgaga

SEQ ID NO: 138118 - RNA, 23 nt, Artificial Sequence
  Synthetic
uuuuuuuuuuuuuuuucccgaga

SEQ ID NO: 138119 - RNA, 24 nt, Artificial Sequence
  Synthetic
cuuuuuuuuuuuuuuuucccgaga

SEQ ID NO: 138120 - RNA, 19 nt, Artificial Sequence
  Synthetic
agcuugcggugagccgaga

SEQ ID NO: 138121 - RNA, 22 nt, Artificial Sequence
  Synthetic
uggagcuugcggugagccgaga

SEQ ID NO: 138122 - RNA, 18 nt, Artificial Sequence
  Synthetic
augaagaaauagccgaga

SEQ ID NO: 138123 - RNA, 19 nt, Artificial Sequence
  Synthetic
uaugaagaaauagccgaga

SEQ ID NO: 138124 - RNA, 20 nt, Artificial Sequence
  Synthetic
cuaugaagaaauagccgaga

SEQ ID NO: 138125 - RNA, 22 nt, Artificial Sequence
  Synthetic
ugcuaugaagaaauagccgaga

SEQ ID NO: 138126 - RNA, 23 nt, Artificial Sequence
  Synthetic
uugcuaugaagaaauagccgaga

SEQ ID NO: 138127 - RNA, 24 nt, Artificial Sequence
  Synthetic
auugcuaugaagaaauagccgaga

SEQ ID NO: 138128 - RNA, 18 nt, Artificial Sequence
  Synthetic
uuuuuuuuuuuuccgaga

SEQ ID NO: 138129 - RNA, 19 nt, Artificial Sequence
  Synthetic
uuuuuuuuuuuuuccgaga

SEQ ID NO: 138130 - RNA, 20 nt, Artificial Sequence
  Synthetic
uuuuuuuuuuuuuuccgaga

SEQ ID NO: 138131 - RNA, 21 nt, Artificial Sequence
  Synthetic
uuuuuuuuuuuuuuuccgaga

SEQ ID NO: 138132 - RNA, 22 nt, Artificial Sequence
  Synthetic
uuuuuuuuuuuuuuuuccgaga

SEQ ID NO: 138133 - RNA, 23 nt, Artificial Sequence
  Synthetic
uuuuuuuuuuuuuuuuuccgaga

SEQ ID NO: 138134 - RNA, 24 nt, Artificial Sequence
  Synthetic
uuuuuuuuuuuuuuuuuuccgaga

SEQ ID NO: 138135 - RNA, 22 nt, Artificial Sequence
  Synthetic
agauaaauauagauaaucgaga

SEQ ID NO: 138136 - RNA, 23 nt, Artificial Sequence
  Synthetic
uagauaaauauagauaaucgaga

SEQ ID NO: 138137 - RNA, 24 nt, Artificial Sequence
  Synthetic
auagauaaauauagauaaucgaga

SEQ ID NO: 138138 - RNA, 18 nt, Artificial Sequence
  Synthetic
aucuuaugaaugaggaga

SEQ ID NO: 138139 - RNA, 19 nt, Artificial Sequence
  Synthetic
caucuuaugaaugaggaga

SEQ ID NO: 138140 - RNA, 20 nt, Artificial Sequence
  Synthetic
ucaucuuaugaaugaggaga

SEQ ID NO: 138141 - RNA, 21 nt, Artificial Sequence
  Synthetic
cucaucuuaugaaugaggaga

SEQ ID NO: 138142 - RNA, 22 nt, Artificial Sequence
  Synthetic
ucucaucuuaugaaugaggaga

SEQ ID NO: 138143 - RNA, 23 nt, Artificial Sequence
  Synthetic
uucucaucuuaugaaugaggaga

SEQ ID NO: 138144 - RNA, 24 nt, Artificial Sequence
  Synthetic
uuucucaucuuaugaaugaggaga

SEQ ID NO: 138145 - RNA, 18 nt, Artificial Sequence
  Synthetic
aggcaagaaggagggaga

SEQ ID NO: 138146 - RNA, 19 nt, Artificial Sequence
  Synthetic
aaggcaagaaggagggaga

SEQ ID NO: 138147 - RNA, 20 nt, Artificial Sequence
  Synthetic
uaaggcaagaaggagggaga

SEQ ID NO: 138148 - RNA, 18 nt, Artificial Sequence
  Synthetic
aucccagcaacugggaga

SEQ ID NO: 138149 - RNA, 19 nt, Artificial Sequence
  Synthetic
aaucccagcaacugggaga

SEQ ID NO: 138150 - RNA, 20 nt, Artificial Sequence
  Synthetic
caaucccagcaacugggaga

SEQ ID NO: 138151 - RNA, 21 nt, Artificial Sequence
  Synthetic
acaaucccagcaacugggaga

SEQ ID NO: 138152 - RNA, 22 nt, Artificial Sequence
  Synthetic
aacaaucccagcaacugggaga

SEQ ID NO: 138153 - RNA, 23 nt, Artificial Sequence
  Synthetic
uaacaaucccagcaacugggaga

SEQ ID NO: 138154 - RNA, 24 nt, Artificial Sequence
  Synthetic
auaacaaucccagcaacugggaga

SEQ ID NO: 138155 - RNA, 21 nt, Artificial Sequence
  Synthetic
uagaauaacuaaagugggaga

SEQ ID NO: 138156 - RNA, 22 nt, Artificial Sequence
  Synthetic
uuagaauaacuaaagugggaga

SEQ ID NO: 138157 - RNA, 24 nt, Artificial Sequence
  Synthetic
aguuagaauaacuaaagugggaga

SEQ ID NO: 138158 - RNA, 18 nt, Artificial Sequence
  Synthetic
aaaaacaagcaauggaga

SEQ ID NO: 138159 - RNA, 19 nt, Artificial Sequence
  Synthetic
caaaaacaagcaauggaga

SEQ ID NO: 138160 - RNA, 20 nt, Artificial Sequence
  Synthetic
acaaaaacaagcaauggaga

SEQ ID NO: 138161 - RNA, 22 nt, Artificial Sequence
  Synthetic
ugacaaaaacaagcaauggaga

SEQ ID NO: 138162 - RNA, 23 nt, Artificial Sequence
  Synthetic
cugacaaaaacaagcaauggaga

SEQ ID NO: 138163 - RNA, 24 nt, Artificial Sequence
  Synthetic
ccugacaaaaacaagcaauggaga

SEQ ID NO: 138164 - RNA, 18 nt, Artificial Sequence
  Synthetic
auagucacaucauggaga

SEQ ID NO: 138165 - RNA, 19 nt, Artificial Sequence
  Synthetic
aauagucacaucauggaga

SEQ ID NO: 138166 - RNA, 20 nt, Artificial Sequence
  Synthetic
aaauagucacaucauggaga

SEQ ID NO: 138167 - RNA, 22 nt, Artificial Sequence
  Synthetic
ugaaauagucacaucauggaga

SEQ ID NO: 138168 - RNA, 23 nt, Artificial Sequence
  Synthetic
augaaauagucacaucauggaga

SEQ ID NO: 138169 - RNA, 24 nt, Artificial Sequence
  Synthetic
uaugaaauagucacaucauggaga

SEQ ID NO: 138170 - RNA, 18 nt, Artificial Sequence
  Synthetic
aacaaaacuggauggaga

SEQ ID NO: 138171 - RNA, 22 nt, Artificial Sequence
  Synthetic
agggaacaaaacuggauggaga

SEQ ID NO: 138172 - RNA, 23 nt, Artificial Sequence
  Synthetic
aagggaacaaaacuggauggaga

SEQ ID NO: 138173 - RNA, 24 nt, Artificial Sequence
  Synthetic
caagggaacaaaacuggauggaga

SEQ ID NO: 138174 - RNA, 18 nt, Artificial Sequence
  Synthetic
aauuuggcuuccuggaga

SEQ ID NO: 138175 - RNA, 19 nt, Artificial Sequence
  Synthetic
aaauuuggcuuccuggaga

SEQ ID NO: 138176 - RNA, 20 nt, Artificial Sequence
  Synthetic
caaauuuggcuuccuggaga

SEQ ID NO: 138177 - RNA, 22 nt, Artificial Sequence
  Synthetic
ugcaaauuuggcuuccuggaga

SEQ ID NO: 138178 - RNA, 23 nt, Artificial Sequence
  Synthetic
cugcaaauuuggcuuccuggaga

SEQ ID NO: 138179 - RNA, 19 nt, Artificial Sequence
  Synthetic
ugaaaaagagaaguggaga

SEQ ID NO: 138180 - RNA, 21 nt, Artificial Sequence
  Synthetic
agugaaaaagagaaguggaga

SEQ ID NO: 138181 - RNA, 18 nt, Artificial Sequence
  Synthetic
uuguaucuuuaguggaga

SEQ ID NO: 138182 - RNA, 19 nt, Artificial Sequence
  Synthetic
uuuguaucuuuaguggaga

SEQ ID NO: 138183 - RNA, 20 nt, Artificial Sequence
  Synthetic
uuuuguaucuuuaguggaga

SEQ ID NO: 138184 - RNA, 21 nt, Artificial Sequence
  Synthetic
uuuuuguaucuuuaguggaga

SEQ ID NO: 138185 - RNA, 22 nt, Artificial Sequence
  Synthetic
auuuuuguaucuuuaguggaga

SEQ ID NO: 138186 - RNA, 23 nt, Artificial Sequence
  Synthetic
aauuuuuguaucuuuaguggaga

SEQ ID NO: 138187 - RNA, 24 nt, Artificial Sequence
  Synthetic
uaauuuuuguaucuuuaguggaga

SEQ ID NO: 138188 - RNA, 18 nt, Artificial Sequence
  Synthetic
uuuuuucuuuuuuggaga

SEQ ID NO: 138189 - RNA, 19 nt, Artificial Sequence
  Synthetic
uuuuuuucuuuuuuggaga

SEQ ID NO: 138190 - RNA, 20 nt, Artificial Sequence
  Synthetic
uuuuuuuucuuuuuuggaga

SEQ ID NO: 138191 - RNA, 21 nt, Artificial Sequence
  Synthetic
uuuuuuuuucuuuuuuggaga

SEQ ID NO: 138192 - RNA, 22 nt, Artificial Sequence
  Synthetic
uuuuuuuuuucuuuuuuggaga

SEQ ID NO: 138193 - RNA, 23 nt, Artificial Sequence
  Synthetic
uuuuuuuuuuucuuuuuuggaga

SEQ ID NO: 138194 - RNA, 24 nt, Artificial Sequence
  Synthetic
auuuuuuuuuuucuuuuuuggaga

SEQ ID NO: 138195 - RNA, 18 nt, Artificial Sequence
  Synthetic
uccccuuuuuuuuggaga

SEQ ID NO: 138196 - RNA, 19 nt, Artificial Sequence
  Synthetic
uuccccuuuuuuuuggaga

SEQ ID NO: 138197 - RNA, 20 nt, Artificial Sequence
  Synthetic
cuuccccuuuuuuuuggaga

SEQ ID NO: 138198 - RNA, 18 nt, Artificial Sequence
  Synthetic
uuuuuuuuuuuuuggaga

SEQ ID NO: 138199 - RNA, 19 nt, Artificial Sequence
  Synthetic
uuuuuuuuuuuuuuggaga

SEQ ID NO: 138200 - RNA, 20 nt, Artificial Sequence
  Synthetic
uuuuuuuuuuuuuuuggaga

SEQ ID NO: 138201 - RNA, 21 nt, Artificial Sequence
  Synthetic
uuuuuuuuuuuuuuuuggaga

SEQ ID NO: 138202 - RNA, 22 nt, Artificial Sequence
  Synthetic
uuuuuuuuuuuuuuuuuggaga

SEQ ID NO: 138203 - RNA, 23 nt, Artificial Sequence
  Synthetic
uuuuuuuuuuuuuuuuuuggaga

SEQ ID NO: 138204 - RNA, 24 nt, Artificial Sequence
  Synthetic
uuuuuuuuuuuuuuuuuuuggaga

SEQ ID NO: 138205 - RNA, 19 nt, Artificial Sequence
  Synthetic
ugaggaaaaaauaaugaga

SEQ ID NO: 138206 - RNA, 20 nt, Artificial Sequence
  Synthetic
cugaggaaaaaauaaugaga

SEQ ID NO: 138207 - RNA, 18 nt, Artificial Sequence
  Synthetic
auaaagacauacaugaga

SEQ ID NO: 138208 - RNA, 20 nt, Artificial Sequence
  Synthetic
ugauaaagacauacaugaga

SEQ ID NO: 138209 - RNA, 21 nt, Artificial Sequence
  Synthetic
cugauaaagacauacaugaga

SEQ ID NO: 138210 - RNA, 23 nt, Artificial Sequence
  Synthetic
ugcugauaaagacauacaugaga

SEQ ID NO: 138211 - RNA, 24 nt, Artificial Sequence
  Synthetic
cugcugauaaagacauacaugaga

SEQ ID NO: 138212 - RNA, 18 nt, Artificial Sequence
  Synthetic
auaaagaaauaccugaga

SEQ ID NO: 138213 - RNA, 19 nt, Artificial Sequence
  Synthetic
uauaaagaaauaccugaga

SEQ ID NO: 138214 - RNA, 20 nt, Artificial Sequence
  Synthetic
cuauaaagaaauaccugaga

SEQ ID NO: 138215 - RNA, 22 nt, Artificial Sequence
  Synthetic
ugcuauaaagaaauaccugaga

SEQ ID NO: 138216 - RNA, 23 nt, Artificial Sequence
  Synthetic
uugcuauaaagaaauaccugaga

SEQ ID NO: 138217 - RNA, 24 nt, Artificial Sequence
  Synthetic
auugcuauaaagaaauaccugaga

SEQ ID NO: 138218 - RNA, 18 nt, Artificial Sequence
  Synthetic
auaaagacauaccugaga

SEQ ID NO: 138219 - RNA, 19 nt, Artificial Sequence
  Synthetic
aauaaagacauaccugaga

SEQ ID NO: 138220 - RNA, 20 nt, Artificial Sequence
  Synthetic
uaauaaagacauaccugaga

SEQ ID NO: 138221 - RNA, 21 nt, Artificial Sequence
  Synthetic
cuaauaaagacauaccugaga

SEQ ID NO: 138222 - RNA, 23 nt, Artificial Sequence
  Synthetic
ugcuaauaaagacauaccugaga

SEQ ID NO: 138223 - RNA, 24 nt, Artificial Sequence
  Synthetic
cugcuaauaaagacauaccugaga

SEQ ID NO: 138224 - RNA, 18 nt, Artificial Sequence
  Synthetic
auaaagaacuaccugaga

SEQ ID NO: 138225 - RNA, 19 nt, Artificial Sequence
  Synthetic
uauaaagaacuaccugaga

SEQ ID NO: 138226 - RNA, 20 nt, Artificial Sequence
  Synthetic
cuauaaagaacuaccugaga

SEQ ID NO: 138227 - RNA, 22 nt, Artificial Sequence
  Synthetic
ugcuauaaagaacuaccugaga

SEQ ID NO: 138228 - RNA, 23 nt, Artificial Sequence
  Synthetic
cugcuauaaagaacuaccugaga

SEQ ID NO: 138229 - RNA, 18 nt, Artificial Sequence
  Synthetic
aaaucugguuaugugaga

SEQ ID NO: 138230 - RNA, 19 nt, Artificial Sequence
  Synthetic
aaaaucugguuaugugaga

SEQ ID NO: 138231 - RNA, 20 nt, Artificial Sequence
  Synthetic
aaaaaucugguuaugugaga

SEQ ID NO: 138232 - RNA, 18 nt, Artificial Sequence
  Synthetic
uuuuuuuuuuuugugaga

SEQ ID NO: 138233 - RNA, 19 nt, Artificial Sequence
  Synthetic
uuuuuuuuuuuuugugaga

SEQ ID NO: 138234 - RNA, 20 nt, Artificial Sequence
  Synthetic
uuuuuuuuuuuuuugugaga

SEQ ID NO: 138235 - RNA, 21 nt, Artificial Sequence
  Synthetic
uuuuuuuuuuuuuuugugaga

SEQ ID NO: 138236 - RNA, 22 nt, Artificial Sequence
  Synthetic
uuuuuuuuuuuuuuuugugaga

SEQ ID NO: 138237 - RNA, 23 nt, Artificial Sequence
  Synthetic
uuuuuuuuuuuuuuuuugugaga

SEQ ID NO: 138238 - RNA, 24 nt, Artificial Sequence
  Synthetic
uuuuuuuuuuuuuuuuuugugaga

SEQ ID NO: 138239 - RNA, 18 nt, Artificial Sequence
  Synthetic
uuuaauuguuuauugaga

SEQ ID NO: 138240 - RNA, 20 nt, Artificial Sequence
  Synthetic
uguuuaauuguuuauugaga

SEQ ID NO: 138241 - RNA, 21 nt, Artificial Sequence
  Synthetic
uuguuuaauuguuuauugaga

SEQ ID NO: 138242 - RNA, 22 nt, Artificial Sequence
  Synthetic
uuuguuuaauuguuuauugaga

SEQ ID NO: 138243 - RNA, 24 nt, Artificial Sequence
  Synthetic
uguuuguuuaauuguuuauugaga

SEQ ID NO: 138244 - RNA, 18 nt, Artificial Sequence
  Synthetic
uuauuuugucucuugaga

SEQ ID NO: 138245 - RNA, 19 nt, Artificial Sequence
  Synthetic
uuuauuuugucucuugaga

SEQ ID NO: 138246 - RNA, 20 nt, Artificial Sequence
  Synthetic
uuuuauuuugucucuugaga

SEQ ID NO: 138247 - RNA, 18 nt, Artificial Sequence
  Synthetic
uauuuuauuuuguugaga

SEQ ID NO: 138248 - RNA, 19 nt, Artificial Sequence
  Synthetic
uuauuuuauuuuguugaga

SEQ ID NO: 138249 - RNA, 20 nt, Artificial Sequence
  Synthetic
uuuauuuuauuuuguugaga

SEQ ID NO: 138250 - RNA, 21 nt, Artificial Sequence
  Synthetic
uuuuauuuuauuuuguugaga

SEQ ID NO: 138251 - RNA, 22 nt, Artificial Sequence
  Synthetic
auuuuauuuuauuuuguugaga

SEQ ID NO: 138252 - RNA, 23 nt, Artificial Sequence
  Synthetic
uauuuuauuuuauuuuguugaga

SEQ ID NO: 138253 - RNA, 24 nt, Artificial Sequence
  Synthetic
uuauuuuauuuuauuuuguugaga

SEQ ID NO: 138254 - RNA, 18 nt, Artificial Sequence
  Synthetic
uguuuuguuuuguugaga

SEQ ID NO: 138255 - RNA, 19 nt, Artificial Sequence
  Synthetic
uuguuuuguuuuguugaga

SEQ ID NO: 138256 - RNA, 20 nt, Artificial Sequence
  Synthetic
uuuguuuuguuuuguugaga

SEQ ID NO: 138257 - RNA, 21 nt, Artificial Sequence
  Synthetic
uuuuguuuuguuuuguugaga

SEQ ID NO: 138258 - RNA, 23 nt, Artificial Sequence
  Synthetic
uguuuuguuuuguuuuguugaga

SEQ ID NO: 138259 - RNA, 24 nt, Artificial Sequence
  Synthetic
uuguuuuguuuuguuuuguugaga

SEQ ID NO: 138260 - RNA, 18 nt, Artificial Sequence
  Synthetic
aagcuuucaaauuugaga

SEQ ID NO: 138261 - RNA, 19 nt, Artificial Sequence
  Synthetic
aaagcuuucaaauuugaga

SEQ ID NO: 138262 - RNA, 20 nt, Artificial Sequence
  Synthetic
uaaagcuuucaaauuugaga

SEQ ID NO: 138263 - RNA, 21 nt, Artificial Sequence
  Synthetic
auaaagcuuucaaauuugaga

SEQ ID NO: 138264 - RNA, 22 nt, Artificial Sequence
  Synthetic
aauaaagcuuucaaauuugaga

SEQ ID NO: 138265 - RNA, 23 nt, Artificial Sequence
  Synthetic
aaauaaagcuuucaaauuugaga

SEQ ID NO: 138266 - RNA, 24 nt, Artificial Sequence
  Synthetic
uaaauaaagcuuucaaauuugaga

SEQ ID NO: 138267 - RNA, 19 nt, Artificial Sequence
  Synthetic
uguauguauguauuugaga

SEQ ID NO: 138268 - RNA, 20 nt, Artificial Sequence
  Synthetic
auguauguauguauuugaga

SEQ ID NO: 138269 - RNA, 21 nt, Artificial Sequence
  Synthetic
uauguauguauguauuugaga

SEQ ID NO: 138270 - RNA, 23 nt, Artificial Sequence
  Synthetic
cguauguauguauguauuugaga

SEQ ID NO: 138271 - RNA, 24 nt, Artificial Sequence
  Synthetic
acguauguauguauguauuugaga

SEQ ID NO: 138272 - RNA, 18 nt, Artificial Sequence
  Synthetic
uauuauuauuauuugaga

SEQ ID NO: 138273 - RNA, 19 nt, Artificial Sequence
  Synthetic
uuauuauuauuauuugaga

SEQ ID NO: 138274 - RNA, 20 nt, Artificial Sequence
  Synthetic
auuauuauuauuauuugaga

SEQ ID NO: 138275 - RNA, 21 nt, Artificial Sequence
  Synthetic
uauuauuauuauuauuugaga

SEQ ID NO: 138276 - RNA, 22 nt, Artificial Sequence
  Synthetic
uuauuauuauuauuauuugaga

SEQ ID NO: 138277 - RNA, 23 nt, Artificial Sequence
  Synthetic
auuauuauuauuauuauuugaga

SEQ ID NO: 138278 - RNA, 24 nt, Artificial Sequence
  Synthetic
aauuauuauuauuauuauuugaga

SEQ ID NO: 138279 - RNA, 18 nt, Artificial Sequence
  Synthetic
uuguuuguuuguuugaga

SEQ ID NO: 138280 - RNA, 19 nt, Artificial Sequence
  Synthetic
uuuguuuguuuguuugaga

SEQ ID NO: 138281 - RNA, 20 nt, Artificial Sequence
  Synthetic
uuuuguuuguuuguuugaga

SEQ ID NO: 138282 - RNA, 21 nt, Artificial Sequence
  Synthetic
uuuuuguuuguuuguuugaga

SEQ ID NO: 138283 - RNA, 22 nt, Artificial Sequence
  Synthetic
uuuuuuguuuguuuguuugaga

SEQ ID NO: 138284 - RNA, 23 nt, Artificial Sequence
  Synthetic
uuuuuuuguuuguuuguuugaga

SEQ ID NO: 138285 - RNA, 24 nt, Artificial Sequence
  Synthetic
uuuuuuuuguuuguuuguuugaga

SEQ ID NO: 138286 - RNA, 18 nt, Artificial Sequence
  Synthetic
auguauuuauuuuugaga

SEQ ID NO: 138287 - RNA, 19 nt, Artificial Sequence
  Synthetic
uauguauuuauuuuugaga

SEQ ID NO: 138288 - RNA, 20 nt, Artificial Sequence
  Synthetic
cuauguauuuauuuuugaga

SEQ ID NO: 138289 - RNA, 21 nt, Artificial Sequence
  Synthetic
ucuauguauuuauuuuugaga

SEQ ID NO: 138290 - RNA, 22 nt, Artificial Sequence
  Synthetic
uucuauguauuuauuuuugaga

SEQ ID NO: 138291 - RNA, 23 nt, Artificial Sequence
  Synthetic
uuucuauguauuuauuuuugaga

SEQ ID NO: 138292 - RNA, 24 nt, Artificial Sequence
  Synthetic
cuuucuauguauuuauuuuugaga

SEQ ID NO: 138293 - RNA, 18 nt, Artificial Sequence
  Synthetic
uuguuuuuauuuuugaga

SEQ ID NO: 138294 - RNA, 19 nt, Artificial Sequence
  Synthetic
uuuguuuuuauuuuugaga

SEQ ID NO: 138295 - RNA, 20 nt, Artificial Sequence
  Synthetic
uuuuguuuuuauuuuugaga

SEQ ID NO: 138296 - RNA, 21 nt, Artificial Sequence
  Synthetic
auuuuguuuuuauuuuugaga

SEQ ID NO: 138297 - RNA, 22 nt, Artificial Sequence
  Synthetic
uauuuuguuuuuauuuuugaga

SEQ ID NO: 138298 - RNA, 23 nt, Artificial Sequence
  Synthetic
uuauuuuguuuuuauuuuugaga

SEQ ID NO: 138299 - RNA, 24 nt, Artificial Sequence
  Synthetic
uuuauuuuguuuuuauuuuugaga

SEQ ID NO: 138300 - RNA, 18 nt, Artificial Sequence
  Synthetic
uuguucuuguuuuugaga

SEQ ID NO: 138301 - RNA, 19 nt, Artificial Sequence
  Synthetic
uuuguucuuguuuuugaga

SEQ ID NO: 138302 - RNA, 20 nt, Artificial Sequence
  Synthetic
uuuuguucuuguuuuugaga

SEQ ID NO: 138303 - RNA, 21 nt, Artificial Sequence
  Synthetic
uuuuuguucuuguuuuugaga

SEQ ID NO: 138304 - RNA, 22 nt, Artificial Sequence
  Synthetic
uuuuuuguucuuguuuuugaga

SEQ ID NO: 138305 - RNA, 24 nt, Artificial Sequence
  Synthetic
aguuuuuuguucuuguuuuugaga

SEQ ID NO: 138306 - RNA, 18 nt, Artificial Sequence
  Synthetic
cuuuauuuguuuuugaga

SEQ ID NO: 138307 - RNA, 19 nt, Artificial Sequence
  Synthetic
ucuuuauuuguuuuugaga

SEQ ID NO: 138308 - RNA, 20 nt, Artificial Sequence
  Synthetic
uucuuuauuuguuuuugaga

SEQ ID NO: 138309 - RNA, 21 nt, Artificial Sequence
  Synthetic
uuucuuuauuuguuuuugaga

SEQ ID NO: 138310 - RNA, 22 nt, Artificial Sequence
  Synthetic
uuuucuuuauuuguuuuugaga

SEQ ID NO: 138311 - RNA, 23 nt, Artificial Sequence
  Synthetic
uuuuucuuuauuuguuuuugaga

SEQ ID NO: 138312 - RNA, 24 nt, Artificial Sequence
  Synthetic
auuuuucuuuauuuguuuuugaga

SEQ ID NO: 138313 - RNA, 19 nt, Artificial Sequence
  Synthetic
uguuuguuuguuuuugaga

SEQ ID NO: 138314 - RNA, 20 nt, Artificial Sequence
  Synthetic
uuguuuguuuguuuuugaga

SEQ ID NO: 138315 - RNA, 23 nt, Artificial Sequence
  Synthetic
ugguuguuuguuuguuuuugaga

SEQ ID NO: 138316 - RNA, 24 nt, Artificial Sequence
  Synthetic
uugguuguuuguuuguuuuugaga

SEQ ID NO: 138317 - RNA, 18 nt, Artificial Sequence
  Synthetic
uauauauauuuuuugaga

SEQ ID NO: 138318 - RNA, 19 nt, Artificial Sequence
  Synthetic
uuauauauauuuuuugaga

SEQ ID NO: 138319 - RNA, 20 nt, Artificial Sequence
  Synthetic
uuuauauauauuuuuugaga

SEQ ID NO: 138320 - RNA, 21 nt, Artificial Sequence
  Synthetic
auuuauauauauuuuuugaga

SEQ ID NO: 138321 - RNA, 22 nt, Artificial Sequence
  Synthetic
uauuuauauauauuuuuugaga

SEQ ID NO: 138322 - RNA, 23 nt, Artificial Sequence
  Synthetic
uuauuuauauauauuuuuugaga

SEQ ID NO: 138323 - RNA, 24 nt, Artificial Sequence
  Synthetic
uuuauuuauauauauuuuuugaga

SEQ ID NO: 138324 - RNA, 18 nt, Artificial Sequence
  Synthetic
uuuauuuauuuuuugaga

SEQ ID NO: 138325 - RNA, 19 nt, Artificial Sequence
  Synthetic
uuuuauuuauuuuuugaga

SEQ ID NO: 138326 - RNA, 20 nt, Artificial Sequence
  Synthetic
uuuuuauuuauuuuuugaga

SEQ ID NO: 138327 - RNA, 21 nt, Artificial Sequence
  Synthetic
uuuuuuauuuauuuuuugaga

SEQ ID NO: 138328 - RNA, 22 nt, Artificial Sequence
  Synthetic
uuuuuuuauuuauuuuuugaga

SEQ ID NO: 138329 - RNA, 23 nt, Artificial Sequence
  Synthetic
uuuuuuuuauuuauuuuuugaga

SEQ ID NO: 138330 - RNA, 24 nt, Artificial Sequence
  Synthetic
uuuuuuuuuauuuauuuuuugaga

SEQ ID NO: 138331 - RNA, 19 nt, Artificial Sequence
  Synthetic
ugaacuuucuuuuuugaga

SEQ ID NO: 138332 - RNA, 20 nt, Artificial Sequence
  Synthetic
augaacuuucuuuuuugaga

SEQ ID NO: 138333 - RNA, 21 nt, Artificial Sequence
  Synthetic
uaugaacuuucuuuuuugaga

SEQ ID NO: 138334 - RNA, 22 nt, Artificial Sequence
  Synthetic
uuaugaacuuucuuuuuugaga

SEQ ID NO: 138335 - RNA, 23 nt, Artificial Sequence
  Synthetic
uuuaugaacuuucuuuuuugaga

SEQ ID NO: 138336 - RNA, 24 nt, Artificial Sequence
  Synthetic
uuuuaugaacuuucuuuuuugaga

SEQ ID NO: 138337 - RNA, 18 nt, Artificial Sequence
  Synthetic
uauuuuauuuuuuugaga

SEQ ID NO: 138338 - RNA, 19 nt, Artificial Sequence
  Synthetic
uuauuuuauuuuuuugaga

SEQ ID NO: 138339 - RNA, 20 nt, Artificial Sequence
  Synthetic
uuuauuuuauuuuuuugaga

SEQ ID NO: 138340 - RNA, 21 nt, Artificial Sequence
  Synthetic
uuuuauuuuauuuuuuugaga

SEQ ID NO: 138341 - RNA, 22 nt, Artificial Sequence
  Synthetic
auuuuauuuuauuuuuuugaga

SEQ ID NO: 138342 - RNA, 23 nt, Artificial Sequence
  Synthetic
uauuuuauuuuauuuuuuugaga

SEQ ID NO: 138343 - RNA, 24 nt, Artificial Sequence
  Synthetic
uuauuuuauuuuauuuuuuugaga

SEQ ID NO: 138344 - RNA, 18 nt, Artificial Sequence
  Synthetic
uuuuuccuuuuuuugaga

SEQ ID NO: 138345 - RNA, 19 nt, Artificial Sequence
  Synthetic
uuuuuuccuuuuuuugaga

SEQ ID NO: 138346 - RNA, 20 nt, Artificial Sequence
  Synthetic
uuuuuuuccuuuuuuugaga

SEQ ID NO: 138347 - RNA, 21 nt, Artificial Sequence
  Synthetic
cuuuuuuuccuuuuuuugaga

SEQ ID NO: 138348 - RNA, 22 nt, Artificial Sequence
  Synthetic
ucuuuuuuuccuuuuuuugaga

SEQ ID NO: 138349 - RNA, 23 nt, Artificial Sequence
  Synthetic
uucuuuuuuuccuuuuuuugaga

SEQ ID NO: 138350 - RNA, 24 nt, Artificial Sequence
  Synthetic
uuucuuuuuuuccuuuuuuugaga

SEQ ID NO: 138351 - RNA, 18 nt, Artificial Sequence
  Synthetic
uguuuuguuuuuuugaga

SEQ ID NO: 138352 - RNA, 19 nt, Artificial Sequence
  Synthetic
uuguuuuguuuuuuugaga

SEQ ID NO: 138353 - RNA, 20 nt, Artificial Sequence
  Synthetic
uuuguuuuguuuuuuugaga

SEQ ID NO: 138354 - RNA, 21 nt, Artificial Sequence
  Synthetic
uuuuguuuuguuuuuuugaga

SEQ ID NO: 138355 - RNA, 22 nt, Artificial Sequence
  Synthetic
uuuuuguuuuguuuuuuugaga

SEQ ID NO: 138356 - RNA, 24 nt, Artificial Sequence
  Synthetic
uguuuuuguuuuguuuuuuugaga

SEQ ID NO: 138357 - RNA, 18 nt, Artificial Sequence
  Synthetic
uuuaauuuuuuuuugaga

SEQ ID NO: 138358 - RNA, 19 nt, Artificial Sequence
  Synthetic
cuuuaauuuuuuuuugaga

SEQ ID NO: 138359 - RNA, 20 nt, Artificial Sequence
  Synthetic
ucuuuaauuuuuuuuugaga

SEQ ID NO: 138360 - RNA, 21 nt, Artificial Sequence
  Synthetic
uucuuuaauuuuuuuuugaga

SEQ ID NO: 138361 - RNA, 22 nt, Artificial Sequence
  Synthetic
uuucuuuaauuuuuuuuugaga

SEQ ID NO: 138362 - RNA, 23 nt, Artificial Sequence
  Synthetic
uuuucuuuaauuuuuuuuugaga

SEQ ID NO: 138363 - RNA, 24 nt, Artificial Sequence
  Synthetic
uuuuucuuuaauuuuuuuuugaga

SEQ ID NO: 138364 - RNA, 18 nt, Artificial Sequence
  Synthetic
cucucuuuuuuuuugaga

SEQ ID NO: 138365 - RNA, 19 nt, Artificial Sequence
  Synthetic
ucucucuuuuuuuuugaga

SEQ ID NO: 138366 - RNA, 20 nt, Artificial Sequence
  Synthetic
cucucucuuuuuuuuugaga

SEQ ID NO: 138367 - RNA, 21 nt, Artificial Sequence
  Synthetic
ucucucucuuuuuuuuugaga

SEQ ID NO: 138368 - RNA, 22 nt, Artificial Sequence
  Synthetic
cucucucucuuuuuuuuugaga

SEQ ID NO: 138369 - RNA, 23 nt, Artificial Sequence
  Synthetic
ucucucucucuuuuuuuuugaga

SEQ ID NO: 138370 - RNA, 24 nt, Artificial Sequence
  Synthetic
cucucucucucuuuuuuuuugaga

SEQ ID NO: 138371 - RNA, 18 nt, Artificial Sequence
  Synthetic
auaauuuuuuuuuugaga

SEQ ID NO: 138372 - RNA, 19 nt, Artificial Sequence
  Synthetic
aauaauuuuuuuuuugaga

SEQ ID NO: 138373 - RNA, 20 nt, Artificial Sequence
  Synthetic
uaauaauuuuuuuuuugaga

SEQ ID NO: 138374 - RNA, 21 nt, Artificial Sequence
  Synthetic
auaauaauuuuuuuuuugaga

SEQ ID NO: 138375 - RNA, 22 nt, Artificial Sequence
  Synthetic
aauaauaauuuuuuuuuugaga

SEQ ID NO: 138376 - RNA, 24 nt, Artificial Sequence
  Synthetic
ugaauaauaauuuuuuuuuugaga

SEQ ID NO: 138377 - RNA, 18 nt, Artificial Sequence
  Synthetic
acuuuuuuuuuuuugaga

SEQ ID NO: 138378 - RNA, 19 nt, Artificial Sequence
  Synthetic
uacuuuuuuuuuuuugaga

SEQ ID NO: 138379 - RNA, 20 nt, Artificial Sequence
  Synthetic
auacuuuuuuuuuuuugaga

SEQ ID NO: 138380 - RNA, 23 nt, Artificial Sequence
  Synthetic
uggauacuuuuuuuuuuuugaga

SEQ ID NO: 138381 - RNA, 24 nt, Artificial Sequence
  Synthetic
uuggauacuuuuuuuuuuuugaga

SEQ ID NO: 138382 - RNA, 19 nt, Artificial Sequence
  Synthetic
uuuuuuuuuuuuuuugaga

SEQ ID NO: 138383 - RNA, 20 nt, Artificial Sequence
  Synthetic
auuuuuuuuuuuuuuugaga

SEQ ID NO: 138384 - RNA, 21 nt, Artificial Sequence
  Synthetic
aauuuuuuuuuuuuuuugaga

SEQ ID NO: 138385 - RNA, 23 nt, Artificial Sequence
  Synthetic
agaauuuuuuuuuuuuuuugaga

SEQ ID NO: 138386 - RNA, 22 nt, Artificial Sequence
  Synthetic
uguuuuuuuuuuuuuuuugaga

SEQ ID NO: 138387 - RNA, 23 nt, Artificial Sequence
  Synthetic
uuguuuuuuuuuuuuuuuugaga

SEQ ID NO: 138388 - RNA, 24 nt, Artificial Sequence
  Synthetic
uuuguuuuuuuuuuuuuuuugaga

SEQ ID NO: 138389 - RNA, 21 nt, Artificial Sequence
  Synthetic
uuuuuuuuuuuuuuuuugaga

SEQ ID NO: 138390 - RNA, 22 nt, Artificial Sequence
  Synthetic
cuuuuuuuuuuuuuuuuugaga

SEQ ID NO: 138391 - RNA, 23 nt, Artificial Sequence
  Synthetic
ucuuuuuuuuuuuuuuuuugaga

SEQ ID NO: 138392 - RNA, 24 nt, Artificial Sequence
  Synthetic
uucuuuuuuuuuuuuuuuuugaga

SEQ ID NO: 138393 - RNA, 22 nt, Artificial Sequence
  Synthetic
uuuuuuuuuuuuuuuuuugaga

SEQ ID NO: 138394 - RNA, 23 nt, Artificial Sequence
  Synthetic
cuuuuuuuuuuuuuuuuuugaga

SEQ ID NO: 138395 - RNA, 24 nt, Artificial Sequence
  Synthetic
ccuuuuuuuuuuuuuuuuuugaga

SEQ ID NO: 138396 - RNA, 24 nt, Artificial Sequence
  Synthetic
ucuuuuuuuuuuuuuuuuuugaga

SEQ ID NO: 138397 - RNA, 18 nt, Artificial Sequence
  Synthetic
cacauccagagaaauaga

SEQ ID NO: 138398 - RNA, 19 nt, Artificial Sequence
  Synthetic
acacauccagagaaauaga

SEQ ID NO: 138399 - RNA, 20 nt, Artificial Sequence
  Synthetic
uacacauccagagaaauaga

SEQ ID NO: 138400 - RNA, 21 nt, Artificial Sequence
  Synthetic
uuacacauccagagaaauaga

SEQ ID NO: 138401 - RNA, 22 nt, Artificial Sequence
  Synthetic
auuacacauccagagaaauaga

SEQ ID NO: 138402 - RNA, 23 nt, Artificial Sequence
  Synthetic
cauuacacauccagagaaauaga

SEQ ID NO: 138403 - RNA, 24 nt, Artificial Sequence
  Synthetic
ucauuacacauccagagaaauaga

SEQ ID NO: 138404 - RNA, 18 nt, Artificial Sequence
  Synthetic
aaauaauaaaggaauaga

SEQ ID NO: 138405 - RNA, 19 nt, Artificial Sequence
  Synthetic
aaaauaauaaaggaauaga

SEQ ID NO: 138406 - RNA, 20 nt, Artificial Sequence
  Synthetic
caaaauaauaaaggaauaga

SEQ ID NO: 138407 - RNA, 18 nt, Artificial Sequence
  Synthetic
auguccaucaauaauaga

SEQ ID NO: 138408 - RNA, 19 nt, Artificial Sequence
  Synthetic
aauguccaucaauaauaga

SEQ ID NO: 138409 - RNA, 20 nt, Artificial Sequence
  Synthetic
aaauguccaucaauaauaga

SEQ ID NO: 138410 - RNA, 21 nt, Artificial Sequence
  Synthetic
caaauguccaucaauaauaga

SEQ ID NO: 138411 - RNA, 22 nt, Artificial Sequence
  Synthetic
ccaaauguccaucaauaauaga

SEQ ID NO: 138412 - RNA, 23 nt, Artificial Sequence
  Synthetic
cccaaauguccaucaauaauaga

SEQ ID NO: 138413 - RNA, 24 nt, Artificial Sequence
  Synthetic
acccaaauguccaucaauaauaga

SEQ ID NO: 138414 - RNA, 18 nt, Artificial Sequence
  Synthetic
auaacaaaauaccauaga

SEQ ID NO: 138415 - RNA, 19 nt, Artificial Sequence
  Synthetic
uauaacaaaauaccauaga

SEQ ID NO: 138416 - RNA, 20 nt, Artificial Sequence
  Synthetic
cuauaacaaaauaccauaga

SEQ ID NO: 138417 - RNA, 22 nt, Artificial Sequence
  Synthetic
ugcuauaacaaaauaccauaga

SEQ ID NO: 138418 - RNA, 23 nt, Artificial Sequence
  Synthetic
uugcuauaacaaaauaccauaga

SEQ ID NO: 138419 - RNA, 24 nt, Artificial Sequence
  Synthetic
auugcuauaacaaaauaccauaga

SEQ ID NO: 138420 - RNA, 18 nt, Artificial Sequence
  Synthetic
auaaaauaaugccauaga

SEQ ID NO: 138421 - RNA, 19 nt, Artificial Sequence
  Synthetic
uauaaaauaaugccauaga

SEQ ID NO: 138422 - RNA, 20 nt, Artificial Sequence
  Synthetic
cuauaaaauaaugccauaga

SEQ ID NO: 138423 - RNA, 22 nt, Artificial Sequence
  Synthetic
ugcuauaaaauaaugccauaga

SEQ ID NO: 138424 - RNA, 23 nt, Artificial Sequence
  Synthetic
cugcuauaaaauaaugccauaga

SEQ ID NO: 138425 - RNA, 18 nt, Artificial Sequence
  Synthetic
auguccaacaaugauaga

SEQ ID NO: 138426 - RNA, 19 nt, Artificial Sequence
  Synthetic
aauguccaacaaugauaga

SEQ ID NO: 138427 - RNA, 20 nt, Artificial Sequence
  Synthetic
aaauguccaacaaugauaga

SEQ ID NO: 138428 - RNA, 21 nt, Artificial Sequence
  Synthetic
caaauguccaacaaugauaga

SEQ ID NO: 138429 - RNA, 22 nt, Artificial Sequence
  Synthetic
ccaaauguccaacaaugauaga

SEQ ID NO: 138430 - RNA, 23 nt, Artificial Sequence
  Synthetic
cccaaauguccaacaaugauaga

SEQ ID NO: 138431 - RNA, 24 nt, Artificial Sequence
  Synthetic
acccaaauguccaacaaugauaga

SEQ ID NO: 138432 - RNA, 18 nt, Artificial Sequence
  Synthetic
auguccgacaaugauaga

SEQ ID NO: 138433 - RNA, 19 nt, Artificial Sequence
  Synthetic
aauguccgacaaugauaga

SEQ ID NO: 138434 - RNA, 20 nt, Artificial Sequence
  Synthetic
aaauguccgacaaugauaga

SEQ ID NO: 138435 - RNA, 21 nt, Artificial Sequence
  Synthetic
caaauguccgacaaugauaga

SEQ ID NO: 138436 - RNA, 22 nt, Artificial Sequence
  Synthetic
ccaaauguccgacaaugauaga

SEQ ID NO: 138437 - RNA, 23 nt, Artificial Sequence
  Synthetic
cccaaauguccgacaaugauaga

SEQ ID NO: 138438 - RNA, 24 nt, Artificial Sequence
  Synthetic
acccaaauguccgacaaugauaga

SEQ ID NO: 138439 - RNA, 18 nt, Artificial Sequence
  Synthetic
auguccaucaaugauaga

SEQ ID NO: 138440 - RNA, 19 nt, Artificial Sequence
  Synthetic
aauguccaucaaugauaga

SEQ ID NO: 138441 - RNA, 20 nt, Artificial Sequence
  Synthetic
aaauguccaucaaugauaga

SEQ ID NO: 138442 - RNA, 21 nt, Artificial Sequence
  Synthetic
caaauguccaucaaugauaga

SEQ ID NO: 138443 - RNA, 22 nt, Artificial Sequence
  Synthetic
ccaaauguccaucaaugauaga

SEQ ID NO: 138444 - RNA, 23 nt, Artificial Sequence
  Synthetic
cccaaauguccaucaaugauaga

SEQ ID NO: 138445 - RNA, 24 nt, Artificial Sequence
  Synthetic
acccaaauguccaucaaugauaga

SEQ ID NO: 138446 - RNA, 18 nt, Artificial Sequence
  Synthetic
augcucaucaaugauaga

SEQ ID NO: 138447 - RNA, 19 nt, Artificial Sequence
  Synthetic
aaugcucaucaaugauaga

SEQ ID NO: 138448 - RNA, 20 nt, Artificial Sequence
  Synthetic
aaaugcucaucaaugauaga

SEQ ID NO: 138449 - RNA, 21 nt, Artificial Sequence
  Synthetic
caaaugcucaucaaugauaga

SEQ ID NO: 138450 - RNA, 22 nt, Artificial Sequence
  Synthetic
ccaaaugcucaucaaugauaga

SEQ ID NO: 138451 - RNA, 23 nt, Artificial Sequence
  Synthetic
cccaaaugcucaucaaugauaga

SEQ ID NO: 138452 - RNA, 24 nt, Artificial Sequence
  Synthetic
acccaaaugcucaucaaugauaga

SEQ ID NO: 138453 - RNA, 18 nt, Artificial Sequence
  Synthetic
auguccaacagugauaga

SEQ ID NO: 138454 - RNA, 19 nt, Artificial Sequence
  Synthetic
aauguccaacagugauaga

SEQ ID NO: 138455 - RNA, 20 nt, Artificial Sequence
  Synthetic
aaauguccaacagugauaga

SEQ ID NO: 138456 - RNA, 21 nt, Artificial Sequence
  Synthetic
caaauguccaacagugauaga

SEQ ID NO: 138457 - RNA, 22 nt, Artificial Sequence
  Synthetic
ccaaauguccaacagugauaga

SEQ ID NO: 138458 - RNA, 23 nt, Artificial Sequence
  Synthetic
cccaaauguccaacagugauaga

SEQ ID NO: 138459 - RNA, 24 nt, Artificial Sequence
  Synthetic
acccaaauguccaacagugauaga

SEQ ID NO: 138460 - RNA, 19 nt, Artificial Sequence
  Synthetic
agaagauaaaauauauaga

SEQ ID NO: 138461 - RNA, 20 nt, Artificial Sequence
  Synthetic
uagaagauaaaauauauaga

SEQ ID NO: 138462 - RNA, 18 nt, Artificial Sequence
  Synthetic
aauaauaaagacuauaga

SEQ ID NO: 138463 - RNA, 19 nt, Artificial Sequence
  Synthetic
aaauaauaaagacuauaga

SEQ ID NO: 138464 - RNA, 21 nt, Artificial Sequence
  Synthetic
uucuuguaaacagccuauaga

SEQ ID NO: 138465 - RNA, 22 nt, Artificial Sequence
  Synthetic
uuucuuguaaacagccuauaga

SEQ ID NO: 138466 - RNA, 24 nt, Artificial Sequence
  Synthetic
uguuucuuguaaacagccuauaga

SEQ ID NO: 138467 - RNA, 18 nt, Artificial Sequence
  Synthetic
aggaaaugaaagccuaga

SEQ ID NO: 138468 - RNA, 20 nt, Artificial Sequence
  Synthetic
agaggaaaugaaagccuaga

SEQ ID NO: 138469 - RNA, 18 nt, Artificial Sequence
  Synthetic
uuuuuaaaauucucuaga

SEQ ID NO: 138470 - RNA, 19 nt, Artificial Sequence
  Synthetic
auuuuuaaaauucucuaga

SEQ ID NO: 138471 - RNA, 20 nt, Artificial Sequence
  Synthetic
uauuuuuaaaauucucuaga

SEQ ID NO: 138472 - RNA, 18 nt, Artificial Sequence
  Synthetic
aacauauacaaaaguaga

SEQ ID NO: 138473 - RNA, 20 nt, Artificial Sequence
  Synthetic
ugaacauauacaaaaguaga

SEQ ID NO: 138474 - RNA, 21 nt, Artificial Sequence
  Synthetic
uugaacauauacaaaaguaga

SEQ ID NO: 138475 - RNA, 22 nt, Artificial Sequence
  Synthetic
auugaacauauacaaaaguaga

SEQ ID NO: 138476 - RNA, 23 nt, Artificial Sequence
  Synthetic
uauugaacauauacaaaaguaga

SEQ ID NO: 138477 - RNA, 24 nt, Artificial Sequence
  Synthetic
auauugaacauauacaaaaguaga

SEQ ID NO: 138478 - RNA, 18 nt, Artificial Sequence
  Synthetic
uucaccaagaaaaguaga

SEQ ID NO: 138479 - RNA, 19 nt, Artificial Sequence
  Synthetic
auucaccaagaaaaguaga

SEQ ID NO: 138480 - RNA, 20 nt, Artificial Sequence
  Synthetic
uauucaccaagaaaaguaga

SEQ ID NO: 138481 - RNA, 21 nt, Artificial Sequence
  Synthetic
auauucaccaagaaaaguaga

SEQ ID NO: 138482 - RNA, 22 nt, Artificial Sequence
  Synthetic
aauauucaccaagaaaaguaga

SEQ ID NO: 138483 - RNA, 23 nt, Artificial Sequence
  Synthetic
caauauucaccaagaaaaguaga

SEQ ID NO: 138484 - RNA, 24 nt, Artificial Sequence
  Synthetic
ucaauauucaccaagaaaaguaga

SEQ ID NO: 138485 - RNA, 18 nt, Artificial Sequence
  Synthetic
cagaaagaaaauaguaga

SEQ ID NO: 138486 - RNA, 19 nt, Artificial Sequence
  Synthetic
ucagaaagaaaauaguaga

SEQ ID NO: 138487 - RNA, 20 nt, Artificial Sequence
  Synthetic
uucagaaagaaaauaguaga

SEQ ID NO: 138488 - RNA, 18 nt, Artificial Sequence
  Synthetic
aacauuuaaauugguaga

SEQ ID NO: 138489 - RNA, 19 nt, Artificial Sequence
  Synthetic
uaacauuuaaauugguaga

SEQ ID NO: 138490 - RNA, 20 nt, Artificial Sequence
  Synthetic
uuaacauuuaaauugguaga

SEQ ID NO: 138491 - RNA, 21 nt, Artificial Sequence
  Synthetic
auuaacauuuaaauugguaga

SEQ ID NO: 138492 - RNA, 23 nt, Artificial Sequence
  Synthetic
agauuaacauuuaaauugguaga

SEQ ID NO: 138493 - RNA, 18 nt, Artificial Sequence
  Synthetic
uuguauuuuuaguguaga

SEQ ID NO: 138494 - RNA, 19 nt, Artificial Sequence
  Synthetic
uuuguauuuuuaguguaga

SEQ ID NO: 138495 - RNA, 20 nt, Artificial Sequence
  Synthetic
uuuuguauuuuuaguguaga

SEQ ID NO: 138496 - RNA, 21 nt, Artificial Sequence
  Synthetic
uuuuuguauuuuuaguguaga

SEQ ID NO: 138497 - RNA, 22 nt, Artificial Sequence
  Synthetic
auuuuuguauuuuuaguguaga

SEQ ID NO: 138498 - RNA, 23 nt, Artificial Sequence
  Synthetic
aauuuuuguauuuuuaguguaga

SEQ ID NO: 138499 - RNA, 24 nt, Artificial Sequence
  Synthetic
aaauuuuuguauuuuuaguguaga

SEQ ID NO: 138500 - RNA, 18 nt, Artificial Sequence
  Synthetic
uaaagugucugguguaga

SEQ ID NO: 138501 - RNA, 20 nt, Artificial Sequence
  Synthetic
aguaaagugucugguguaga

SEQ ID NO: 138502 - RNA, 18 nt, Artificial Sequence
  Synthetic
aggaaauuaaauuguaga

SEQ ID NO: 138503 - RNA, 19 nt, Artificial Sequence
  Synthetic
aaggaaauuaaauuguaga

SEQ ID NO: 138504 - RNA, 20 nt, Artificial Sequence
  Synthetic
aaaggaaauuaaauuguaga

SEQ ID NO: 138505 - RNA, 18 nt, Artificial Sequence
  Synthetic
cuaggaauacaacuuaga

SEQ ID NO: 138506 - RNA, 19 nt, Artificial Sequence
  Synthetic
ccuaggaauacaacuuaga

SEQ ID NO: 138507 - RNA, 20 nt, Artificial Sequence
  Synthetic
accuaggaauacaacuuaga

SEQ ID NO: 138508 - RNA, 21 nt, Artificial Sequence
  Synthetic
uaccuaggaauacaacuuaga

SEQ ID NO: 138509 - RNA, 22 nt, Artificial Sequence
  Synthetic
auaccuaggaauacaacuuaga

SEQ ID NO: 138510 - RNA, 23 nt, Artificial Sequence
  Synthetic
aauaccuaggaauacaacuuaga

SEQ ID NO: 138511 - RNA, 24 nt, Artificial Sequence
  Synthetic
aaauaccuaggaauacaacuuaga

SEQ ID NO: 138512 - RNA, 18 nt, Artificial Sequence
  Synthetic
uauuauuauuauuuuaga

SEQ ID NO: 138513 - RNA, 19 nt, Artificial Sequence
  Synthetic
uuauuauuauuauuuuaga

SEQ ID NO: 138514 - RNA, 20 nt, Artificial Sequence
  Synthetic
auuauuauuauuauuuuaga

SEQ ID NO: 138515 - RNA, 21 nt, Artificial Sequence
  Synthetic
uauuauuauuauuauuuuaga

SEQ ID NO: 138516 - RNA, 22 nt, Artificial Sequence
  Synthetic
uuauuauuauuauuauuuuaga

SEQ ID NO: 138517 - RNA, 23 nt, Artificial Sequence
  Synthetic
auuauuauuauuauuauuuuaga

SEQ ID NO: 138518 - RNA, 24 nt, Artificial Sequence
  Synthetic
uauuauuauuauuauuauuuuaga

SEQ ID NO: 138519 - RNA, 19 nt, Artificial Sequence
  Synthetic
ugauuggaauaguuuuaga

SEQ ID NO: 138520 - RNA, 20 nt, Artificial Sequence
  Synthetic
uugauuggaauaguuuuaga

SEQ ID NO: 138521 - RNA, 21 nt, Artificial Sequence
  Synthetic
auugauuggaauaguuuuaga

SEQ ID NO: 138522 - RNA, 22 nt, Artificial Sequence
  Synthetic
uauugauuggaauaguuuuaga

SEQ ID NO: 138523 - RNA, 23 nt, Artificial Sequence
  Synthetic
cuauugauuggaauaguuuuaga

SEQ ID NO: 138524 - RNA, 24 nt, Artificial Sequence
  Synthetic
ucuauugauuggaauaguuuuaga

SEQ ID NO: 138525 - RNA, 19 nt, Artificial Sequence
  Synthetic
ugcuuggaauaguuuuaga

SEQ ID NO: 138526 - RNA, 20 nt, Artificial Sequence
  Synthetic
uugcuuggaauaguuuuaga

SEQ ID NO: 138527 - RNA, 21 nt, Artificial Sequence
  Synthetic
auugcuuggaauaguuuuaga

SEQ ID NO: 138528 - RNA, 22 nt, Artificial Sequence
  Synthetic
uauugcuuggaauaguuuuaga

SEQ ID NO: 138529 - RNA, 24 nt, Artificial Sequence
  Synthetic
uguauugcuuggaauaguuuuaga

SEQ ID NO: 138530 - RNA, 18 nt, Artificial Sequence
  Synthetic
acauuugauuuuuuuaga

SEQ ID NO: 138531 - RNA, 19 nt, Artificial Sequence
  Synthetic
aacauuugauuuuuuuaga

SEQ ID NO: 138532 - RNA, 20 nt, Artificial Sequence
  Synthetic
aaacauuugauuuuuuuaga

SEQ ID NO: 138533 - RNA, 21 nt, Artificial Sequence
  Synthetic
uaaacauuugauuuuuuuaga

SEQ ID NO: 138534 - RNA, 22 nt, Artificial Sequence
  Synthetic
cuaaacauuugauuuuuuuaga

SEQ ID NO: 138535 - RNA, 19 nt, Artificial Sequence
  Synthetic
agauuuugggcugagacga

SEQ ID NO: 138536 - RNA, 22 nt, Artificial Sequence
  Synthetic
aggagauuuugggcugagacga

SEQ ID NO: 138537 - RNA, 23 nt, Artificial Sequence
  Synthetic
aaggagauuuugggcugagacga

SEQ ID NO: 138538 - RNA, 24 nt, Artificial Sequence
  Synthetic
uaaggagauuuugggcugagacga

SEQ ID NO: 138539 - RNA, 19 nt, Artificial Sequence
  Synthetic
aguuuuugggcugagacga

SEQ ID NO: 138540 - RNA, 21 nt, Artificial Sequence
  Synthetic
agaguuuuugggcugagacga

SEQ ID NO: 138541 - RNA, 22 nt, Artificial Sequence
  Synthetic
aagaguuuuugggcugagacga

SEQ ID NO: 138542 - RNA, 23 nt, Artificial Sequence
  Synthetic
aaagaguuuuugggcugagacga

SEQ ID NO: 138543 - RNA, 24 nt, Artificial Sequence
  Synthetic
uaaagaguuuuugggcugagacga

SEQ ID NO: 138544 - RNA, 18 nt, Artificial Sequence
  Synthetic
uuccacucccacuuacga

SEQ ID NO: 138545 - RNA, 20 nt, Artificial Sequence
  Synthetic
uguuccacucccacuuacga

SEQ ID NO: 138546 - RNA, 21 nt, Artificial Sequence
  Synthetic
cuguuccacucccacuuacga

SEQ ID NO: 138547 - RNA, 22 nt, Artificial Sequence
  Synthetic
acuguuccacucccacuuacga

SEQ ID NO: 138548 - RNA, 23 nt, Artificial Sequence
  Synthetic
cacuguuccacucccacuuacga

SEQ ID NO: 138549 - RNA, 24 nt, Artificial Sequence
  Synthetic
ucacuguuccacucccacuuacga

SEQ ID NO: 138550 - RNA, 18 nt, Artificial Sequence
  Synthetic
ugcacuccagccgggcga

SEQ ID NO: 138551 - RNA, 19 nt, Artificial Sequence
  Synthetic
cugcacuccagccgggcga

SEQ ID NO: 138552 - RNA, 20 nt, Artificial Sequence
  Synthetic
acugcacuccagccgggcga

SEQ ID NO: 138553 - RNA, 21 nt, Artificial Sequence
  Synthetic
cacugcacuccagccgggcga

SEQ ID NO: 138554 - RNA, 22 nt, Artificial Sequence
  Synthetic
ccacugcacuccagccgggcga

SEQ ID NO: 138555 - RNA, 23 nt, Artificial Sequence
  Synthetic
accacugcacuccagccgggcga

SEQ ID NO: 138556 - RNA, 24 nt, Artificial Sequence
  Synthetic
caccacugcacuccagccgggcga

SEQ ID NO: 138557 - RNA, 18 nt, Artificial Sequence
  Synthetic
ugcacuccagccuggcga

SEQ ID NO: 138558 - RNA, 19 nt, Artificial Sequence
  Synthetic
cugcacuccagccuggcga

SEQ ID NO: 138559 - RNA, 20 nt, Artificial Sequence
  Synthetic
acugcacuccagccuggcga

SEQ ID NO: 138560 - RNA, 21 nt, Artificial Sequence
  Synthetic
cacugcacuccagccuggcga

SEQ ID NO: 138561 - RNA, 22 nt, Artificial Sequence
  Synthetic
ccacugcacuccagccuggcga

SEQ ID NO: 138562 - RNA, 24 nt, Artificial Sequence
  Synthetic
ugccacugcacuccagccuggcga

SEQ ID NO: 138563 - RNA, 19 nt, Artificial Sequence
  Synthetic
uggucacaccuaacugcga

SEQ ID NO: 138564 - RNA, 20 nt, Artificial Sequence
  Synthetic
auggucacaccuaacugcga

SEQ ID NO: 138565 - RNA, 21 nt, Artificial Sequence
  Synthetic
cauggucacaccuaacugcga

SEQ ID NO: 138566 - RNA, 22 nt, Artificial Sequence
  Synthetic
acauggucacaccuaacugcga

SEQ ID NO: 138567 - RNA, 23 nt, Artificial Sequence
  Synthetic
cacauggucacaccuaacugcga

SEQ ID NO: 138568 - RNA, 24 nt, Artificial Sequence
  Synthetic
ucacauggucacaccuaacugcga

SEQ ID NO: 138569 - RNA, 21 nt, Artificial Sequence
  Synthetic
uauacugaaguaugguuucga

SEQ ID NO: 138570 - RNA, 22 nt, Artificial Sequence
  Synthetic
cuauacugaaguaugguuucga

SEQ ID NO: 138571 - RNA, 23 nt, Artificial Sequence
  Synthetic
acuauacugaaguaugguuucga

SEQ ID NO: 138572 - RNA, 24 nt, Artificial Sequence
  Synthetic
uacuauacugaaguaugguuucga

SEQ ID NO: 138573 - RNA, 18 nt, Artificial Sequence
  Synthetic
uuauauguuuuaaaagga

SEQ ID NO: 138574 - RNA, 19 nt, Artificial Sequence
  Synthetic
uuuauauguuuuaaaagga

SEQ ID NO: 138575 - RNA, 20 nt, Artificial Sequence
  Synthetic
uuuuauauguuuuaaaagga

SEQ ID NO: 138576 - RNA, 18 nt, Artificial Sequence
  Synthetic
ucuuuuuaaggcaaagga

SEQ ID NO: 138577 - RNA, 19 nt, Artificial Sequence
  Synthetic
uucuuuuuaaggcaaagga

SEQ ID NO: 138578 - RNA, 20 nt, Artificial Sequence
  Synthetic
uuucuuuuuaaggcaaagga

SEQ ID NO: 138579 - RNA, 18 nt, Artificial Sequence
  Synthetic
uucugcauuucuaaagga

SEQ ID NO: 138580 - RNA, 19 nt, Artificial Sequence
  Synthetic
uuucugcauuucuaaagga

SEQ ID NO: 138581 - RNA, 20 nt, Artificial Sequence
  Synthetic
auuucugcauuucuaaagga

SEQ ID NO: 138582 - RNA, 19 nt, Artificial Sequence
  Synthetic
agguaggacaagagaagga

SEQ ID NO: 138583 - RNA, 20 nt, Artificial Sequence
  Synthetic
aagguaggacaagagaagga

SEQ ID NO: 138584 - RNA, 20 nt, Artificial Sequence
  Synthetic
ugggagggaagagggaagga

SEQ ID NO: 138585 - RNA, 18 nt, Artificial Sequence
  Synthetic
uuguauaugguauaagga

SEQ ID NO: 138586 - RNA, 19 nt, Artificial Sequence
  Synthetic
uuuguauaugguauaagga

SEQ ID NO: 138587 - RNA, 20 nt, Artificial Sequence
  Synthetic
uuuuguauaugguauaagga

SEQ ID NO: 138588 - RNA, 21 nt, Artificial Sequence
  Synthetic
uuuuuguauaugguauaagga

SEQ ID NO: 138589 - RNA, 22 nt, Artificial Sequence
  Synthetic
auuuuuguauaugguauaagga

SEQ ID NO: 138590 - RNA, 23 nt, Artificial Sequence
  Synthetic
aauuuuuguauaugguauaagga

SEQ ID NO: 138591 - RNA, 24 nt, Artificial Sequence
  Synthetic
uaauuuuuguauaugguauaagga

SEQ ID NO: 138592 - RNA, 18 nt, Artificial Sequence
  Synthetic
uuguauaagggguaagga

SEQ ID NO: 138593 - RNA, 19 nt, Artificial Sequence
  Synthetic
uuuguauaagggguaagga

SEQ ID NO: 138594 - RNA, 20 nt, Artificial Sequence
  Synthetic
uuuuguauaagggguaagga

SEQ ID NO: 138595 - RNA, 21 nt, Artificial Sequence
  Synthetic
uuuuuguauaagggguaagga

SEQ ID NO: 138596 - RNA, 22 nt, Artificial Sequence
  Synthetic
auuuuuguauaagggguaagga

SEQ ID NO: 138597 - RNA, 24 nt, Artificial Sequence
  Synthetic
ugauuuuuguauaagggguaagga

SEQ ID NO: 138598 - RNA, 18 nt, Artificial Sequence
  Synthetic
uuguauaagguguaagga

SEQ ID NO: 138599 - RNA, 19 nt, Artificial Sequence
  Synthetic
uuuguauaagguguaagga

SEQ ID NO: 138600 - RNA, 20 nt, Artificial Sequence
  Synthetic
uuuuguauaagguguaagga

SEQ ID NO: 138601 - RNA, 24 nt, Artificial Sequence
  Synthetic
uaauuuuuguauaagguguaagga

SEQ ID NO: 138602 - RNA, 18 nt, Artificial Sequence
  Synthetic
uuguauaugguguaagga

SEQ ID NO: 138603 - RNA, 19 nt, Artificial Sequence
  Synthetic
uuuguauaugguguaagga

SEQ ID NO: 138604 - RNA, 20 nt, Artificial Sequence
  Synthetic
uuuuguauaugguguaagga

SEQ ID NO: 138605 - RNA, 21 nt, Artificial Sequence
  Synthetic
uuuuuguauaugguguaagga

SEQ ID NO: 138606 - RNA, 22 nt, Artificial Sequence
  Synthetic
auuuuuguauaugguguaagga

SEQ ID NO: 138607 - RNA, 23 nt, Artificial Sequence
  Synthetic
aauuuuuguauaugguguaagga

SEQ ID NO: 138608 - RNA, 24 nt, Artificial Sequence
  Synthetic
uaauuuuuguauaugguguaagga

SEQ ID NO: 138609 - RNA, 18 nt, Artificial Sequence
  Synthetic
agaacaaaugaaacagga

SEQ ID NO: 138610 - RNA, 19 nt, Artificial Sequence
  Synthetic
uagaacaaaugaaacagga

SEQ ID NO: 138611 - RNA, 20 nt, Artificial Sequence
  Synthetic
cuagaacaaaugaaacagga

SEQ ID NO: 138612 - RNA, 19 nt, Artificial Sequence
  Synthetic
agagaacagcugugcagga

SEQ ID NO: 138613 - RNA, 20 nt, Artificial Sequence
  Synthetic
aagagaacagcugugcagga

SEQ ID NO: 138614 - RNA, 21 nt, Artificial Sequence
  Synthetic
caagagaacagcugugcagga

SEQ ID NO: 138615 - RNA, 22 nt, Artificial Sequence
  Synthetic
ucaagagaacagcugugcagga

SEQ ID NO: 138616 - RNA, 23 nt, Artificial Sequence
  Synthetic
cucaagagaacagcugugcagga

SEQ ID NO: 138617 - RNA, 18 nt, Artificial Sequence
  Synthetic
ugagucugaaauucagga

SEQ ID NO: 138618 - RNA, 20 nt, Artificial Sequence
  Synthetic
ugugagucugaaauucagga

SEQ ID NO: 138619 - RNA, 22 nt, Artificial Sequence
  Synthetic
ugugugagucugaaauucagga

SEQ ID NO: 138620 - RNA, 23 nt, Artificial Sequence
  Synthetic
cugugugagucugaaauucagga

SEQ ID NO: 138621 - RNA, 19 nt, Artificial Sequence
  Synthetic
uggcaccaggcaaggagga

SEQ ID NO: 138622 - RNA, 20 nt, Artificial Sequence
  Synthetic
auggcaccaggcaaggagga

SEQ ID NO: 138623 - RNA, 18 nt, Artificial Sequence
  Synthetic
auaaugaauggaggagga

SEQ ID NO: 138624 - RNA, 19 nt, Artificial Sequence
  Synthetic
uauaaugaauggaggagga

SEQ ID NO: 138625 - RNA, 20 nt, Artificial Sequence
  Synthetic
auauaaugaauggaggagga

SEQ ID NO: 138626 - RNA, 18 nt, Artificial Sequence
  Synthetic
auuuuuauuuuuugagga

SEQ ID NO: 138627 - RNA, 19 nt, Artificial Sequence
  Synthetic
uauuuuuauuuuuugagga

SEQ ID NO: 138628 - RNA, 20 nt, Artificial Sequence
  Synthetic
cuauuuuuauuuuuugagga

SEQ ID NO: 138629 - RNA, 21 nt, Artificial Sequence
  Synthetic
ucuauuuuuauuuuuugagga

SEQ ID NO: 138630 - RNA, 22 nt, Artificial Sequence
  Synthetic
uucuauuuuuauuuuuugagga

SEQ ID NO: 138631 - RNA, 23 nt, Artificial Sequence
  Synthetic
auucuauuuuuauuuuuugagga

SEQ ID NO: 138632 - RNA, 24 nt, Artificial Sequence
  Synthetic
aauucuauuuuuauuuuuugagga

SEQ ID NO: 138633 - RNA, 19 nt, Artificial Sequence
  Synthetic
aggaaaugagaaaauagga

SEQ ID NO: 138634 - RNA, 20 nt, Artificial Sequence
  Synthetic
aaggaaaugagaaaauagga

SEQ ID NO: 138635 - RNA, 18 nt, Artificial Sequence
  Synthetic
ccauguuguagcauagga

SEQ ID NO: 138636 - RNA, 19 nt, Artificial Sequence
  Synthetic
cccauguuguagcauagga

SEQ ID NO: 138637 - RNA, 20 nt, Artificial Sequence
  Synthetic
acccauguuguagcauagga

SEQ ID NO: 138638 - RNA, 21 nt, Artificial Sequence
  Synthetic
cacccauguuguagcauagga

SEQ ID NO: 138639 - RNA, 22 nt, Artificial Sequence
  Synthetic
acacccauguuguagcauagga

SEQ ID NO: 138640 - RNA, 23 nt, Artificial Sequence
  Synthetic
uacacccauguuguagcauagga

SEQ ID NO: 138641 - RNA, 18 nt, Artificial Sequence
  Synthetic
ugaugaauccugauagga

SEQ ID NO: 138642 - RNA, 19 nt, Artificial Sequence
  Synthetic
cugaugaauccugauagga

SEQ ID NO: 138643 - RNA, 21 nt, Artificial Sequence
  Synthetic
agcugaugaauccugauagga

SEQ ID NO: 138644 - RNA, 22 nt, Artificial Sequence
  Synthetic
uagcugaugaauccugauagga

SEQ ID NO: 138645 - RNA, 24 nt, Artificial Sequence
  Synthetic
aguagcugaugaauccugauagga

SEQ ID NO: 138646 - RNA, 18 nt, Artificial Sequence
  Synthetic
augcuccucaccuuagga

SEQ ID NO: 138647 - RNA, 20 nt, Artificial Sequence
  Synthetic
agaugcuccucaccuuagga

SEQ ID NO: 138648 - RNA, 21 nt, Artificial Sequence
  Synthetic
cagaugcuccucaccuuagga

SEQ ID NO: 138649 - RNA, 22 nt, Artificial Sequence
  Synthetic
acagaugcuccucaccuuagga

SEQ ID NO: 138650 - RNA, 23 nt, Artificial Sequence
  Synthetic
uacagaugcuccucaccuuagga

SEQ ID NO: 138651 - RNA, 24 nt, Artificial Sequence
  Synthetic
auacagaugcuccucaccuuagga

SEQ ID NO: 138652 - RNA, 18 nt, Artificial Sequence
  Synthetic
uauugguacuuguuagga

SEQ ID NO: 138653 - RNA, 19 nt, Artificial Sequence
  Synthetic
uuauugguacuuguuagga

SEQ ID NO: 138654 - RNA, 20 nt, Artificial Sequence
  Synthetic
uuuauugguacuuguuagga

SEQ ID NO: 138655 - RNA, 19 nt, Artificial Sequence
  Synthetic
agucugagcaaguuuagga

SEQ ID NO: 138656 - RNA, 20 nt, Artificial Sequence
  Synthetic
aagucugagcaaguuuagga

SEQ ID NO: 138657 - RNA, 21 nt, Artificial Sequence
  Synthetic
caagucugagcaaguuuagga

SEQ ID NO: 138658 - RNA, 24 nt, Artificial Sequence
  Synthetic
aggcaagucugagcaaguuuagga

SEQ ID NO: 138659 - RNA, 18 nt, Artificial Sequence
  Synthetic
uaaauauauauauacgga

SEQ ID NO: 138660 - RNA, 19 nt, Artificial Sequence
  Synthetic
auaaauauauauauacgga

SEQ ID NO: 138661 - RNA, 20 nt, Artificial Sequence
  Synthetic
uauaaauauauauauacgga

SEQ ID NO: 138662 - RNA, 21 nt, Artificial Sequence
  Synthetic
cuauaaauauauauauacgga

SEQ ID NO: 138663 - RNA, 22 nt, Artificial Sequence
  Synthetic
acuauaaauauauauauacgga

SEQ ID NO: 138664 - RNA, 23 nt, Artificial Sequence
  Synthetic
uacuauaaauauauauauacgga

SEQ ID NO: 138665 - RNA, 24 nt, Artificial Sequence
  Synthetic
auacuauaaauauauauauacgga

SEQ ID NO: 138666 - RNA, 20 nt, Artificial Sequence
  Synthetic
agggauaauaaaagaaggga

SEQ ID NO: 138667 - RNA, 18 nt, Artificial Sequence
  Synthetic
uuguauuuuuaguaggga

SEQ ID NO: 138668 - RNA, 19 nt, Artificial Sequence
  Synthetic
uuuguauuuuuaguaggga

SEQ ID NO: 138669 - RNA, 20 nt, Artificial Sequence
  Synthetic
uuuuguauuuuuaguaggga

SEQ ID NO: 138670 - RNA, 21 nt, Artificial Sequence
  Synthetic
uuuuuguauuuuuaguaggga

SEQ ID NO: 138671 - RNA, 22 nt, Artificial Sequence
  Synthetic
uuuuuuguauuuuuaguaggga

SEQ ID NO: 138672 - RNA, 23 nt, Artificial Sequence
  Synthetic
uuuuuuuguauuuuuaguaggga

SEQ ID NO: 138673 - RNA, 24 nt, Artificial Sequence
  Synthetic
auuuuuuuguauuuuuaguaggga

SEQ ID NO: 138674 - RNA, 21 nt, Artificial Sequence
  Synthetic
aaaguagcauuuucuuaggga

SEQ ID NO: 138675 - RNA, 22 nt, Artificial Sequence
  Synthetic
aaaaguagcauuuucuuaggga

SEQ ID NO: 138676 - RNA, 23 nt, Artificial Sequence
  Synthetic
aaaaaguagcauuuucuuaggga

SEQ ID NO: 138677 - RNA, 18 nt, Artificial Sequence
  Synthetic
aagcuuucaggcccggga

SEQ ID NO: 138678 - RNA, 19 nt, Artificial Sequence
  Synthetic
uaagcuuucaggcccggga

SEQ ID NO: 138679 - RNA, 20 nt, Artificial Sequence
  Synthetic
uuaagcuuucaggcccggga

SEQ ID NO: 138680 - RNA, 21 nt, Artificial Sequence
  Synthetic
cuuaagcuuucaggcccggga

SEQ ID NO: 138681 - RNA, 22 nt, Artificial Sequence
  Synthetic
ccuuaagcuuucaggcccggga

SEQ ID NO: 138682 - RNA, 23 nt, Artificial Sequence
  Synthetic
uccuuaagcuuucaggcccggga

SEQ ID NO: 138683 - RNA, 24 nt, Artificial Sequence
  Synthetic
cuccuuaagcuuucaggcccggga

SEQ ID NO: 138684 - RNA, 19 nt, Artificial Sequence
  Synthetic
aggaaacgaagaaagggga

SEQ ID NO: 138685 - RNA, 20 nt, Artificial Sequence
  Synthetic
uaggaaacgaagaaagggga

SEQ ID NO: 138686 - RNA, 18 nt, Artificial Sequence
  Synthetic
ucacuccagccuagggga

SEQ ID NO: 138687 - RNA, 19 nt, Artificial Sequence
  Synthetic
uucacuccagccuagggga

SEQ ID NO: 138688 - RNA, 20 nt, Artificial Sequence
  Synthetic
cuucacuccagccuagggga

SEQ ID NO: 138689 - RNA, 21 nt, Artificial Sequence
  Synthetic
acuucacuccagccuagggga

SEQ ID NO: 138690 - RNA, 22 nt, Artificial Sequence
  Synthetic
cacuucacuccagccuagggga

SEQ ID NO: 138691 - RNA, 23 nt, Artificial Sequence
  Synthetic
ccacuucacuccagccuagggga

SEQ ID NO: 138692 - RNA, 24 nt, Artificial Sequence
  Synthetic
accacuucacuccagccuagggga

SEQ ID NO: 138693 - RNA, 18 nt, Artificial Sequence
  Synthetic
aaaaacaagcaaugggga

SEQ ID NO: 138694 - RNA, 20 nt, Artificial Sequence
  Synthetic
agaaaaacaagcaaugggga

SEQ ID NO: 138695 - RNA, 22 nt, Artificial Sequence
  Synthetic
ugagaaaaacaagcaaugggga

SEQ ID NO: 138696 - RNA, 23 nt, Artificial Sequence
  Synthetic
cugagaaaaacaagcaaugggga

SEQ ID NO: 138697 - RNA, 24 nt, Artificial Sequence
  Synthetic
ccugagaaaaacaagcaaugggga

SEQ ID NO: 138698 - RNA, 20 nt, Artificial Sequence
  Synthetic
aggaaaacaagcaaugggga

SEQ ID NO: 138699 - RNA, 22 nt, Artificial Sequence
  Synthetic
ugaggaaaacaagcaaugggga

SEQ ID NO: 138700 - RNA, 23 nt, Artificial Sequence
  Synthetic
cugaggaaaacaagcaaugggga

SEQ ID NO: 138701 - RNA, 24 nt, Artificial Sequence
  Synthetic
ccugaggaaaacaagcaaugggga

SEQ ID NO: 138702 - RNA, 18 nt, Artificial Sequence
  Synthetic
agcaguuucuucugggga

SEQ ID NO: 138703 - RNA, 19 nt, Artificial Sequence
  Synthetic
uagcaguuucuucugggga

SEQ ID NO: 138704 - RNA, 20 nt, Artificial Sequence
  Synthetic
auagcaguuucuucugggga

SEQ ID NO: 138705 - RNA, 21 nt, Artificial Sequence
  Synthetic
aauagcaguuucuucugggga

SEQ ID NO: 138706 - RNA, 22 nt, Artificial Sequence
  Synthetic
uaauagcaguuucuucugggga

SEQ ID NO: 138707 - RNA, 23 nt, Artificial Sequence
  Synthetic
uuaauagcaguuucuucugggga

SEQ ID NO: 138708 - RNA, 24 nt, Artificial Sequence
  Synthetic
uuuaauagcaguuucuucugggga

SEQ ID NO: 138709 - RNA, 18 nt, Artificial Sequence
  Synthetic
agauagcaggaaauggga

SEQ ID NO: 138710 - RNA, 20 nt, Artificial Sequence
  Synthetic
ugguuuuuaaagacauggga

SEQ ID NO: 138711 - RNA, 21 nt, Artificial Sequence
  Synthetic
augguuuuuaaagacauggga

SEQ ID NO: 138712 - RNA, 23 nt, Artificial Sequence
  Synthetic
agaugguuuuuaaagacauggga

SEQ ID NO: 138713 - RNA, 24 nt, Artificial Sequence
  Synthetic
uagaugguuuuuaaagacauggga

SEQ ID NO: 138714 - RNA, 18 nt, Artificial Sequence
  Synthetic
cuggacauuggcuuggga

SEQ ID NO: 138715 - RNA, 19 nt, Artificial Sequence
  Synthetic
ucuggacauuggcuuggga

SEQ ID NO: 138716 - RNA, 20 nt, Artificial Sequence
  Synthetic
uucuggacauuggcuuggga

SEQ ID NO: 138717 - RNA, 21 nt, Artificial Sequence
  Synthetic
auucuggacauuggcuuggga

SEQ ID NO: 138718 - RNA, 22 nt, Artificial Sequence
  Synthetic
cauucuggacauuggcuuggga

SEQ ID NO: 138719 - RNA, 23 nt, Artificial Sequence
  Synthetic
ccauucuggacauuggcuuggga

SEQ ID NO: 138720 - RNA, 24 nt, Artificial Sequence
  Synthetic
accauucuggacauuggcuuggga

SEQ ID NO: 138721 - RNA, 18 nt, Artificial Sequence
  Synthetic
cagagagagaggaaugga

SEQ ID NO: 138722 - RNA, 19 nt, Artificial Sequence
  Synthetic
acagagagagaggaaugga

SEQ ID NO: 138723 - RNA, 21 nt, Artificial Sequence
  Synthetic
agacagagagagaggaaugga

SEQ ID NO: 138724 - RNA, 23 nt, Artificial Sequence
  Synthetic
agagacagagagagaggaaugga

SEQ ID NO: 138725 - RNA, 18 nt, Artificial Sequence
  Synthetic
aauaaguaagugaaugga

SEQ ID NO: 138726 - RNA, 20 nt, Artificial Sequence
  Synthetic
ugaauaaguaagugaaugga

SEQ ID NO: 138727 - RNA, 18 nt, Artificial Sequence
  Synthetic
augcccaucagugaugga

SEQ ID NO: 138728 - RNA, 19 nt, Artificial Sequence
  Synthetic
aaugcccaucagugaugga

SEQ ID NO: 138729 - RNA, 20 nt, Artificial Sequence
  Synthetic
aaaugcccaucagugaugga

SEQ ID NO: 138730 - RNA, 21 nt, Artificial Sequence
  Synthetic
caaaugcccaucagugaugga

SEQ ID NO: 138731 - RNA, 22 nt, Artificial Sequence
  Synthetic
ccaaaugcccaucagugaugga

SEQ ID NO: 138732 - RNA, 23 nt, Artificial Sequence
  Synthetic
cccaaaugcccaucagugaugga

SEQ ID NO: 138733 - RNA, 24 nt, Artificial Sequence
  Synthetic
acccaaaugcccaucagugaugga

SEQ ID NO: 138734 - RNA, 21 nt, Artificial Sequence
  Synthetic
aagaaugucauugcuacugga

SEQ ID NO: 138735 - RNA, 23 nt, Artificial Sequence
  Synthetic
ugaagaaugucauugcuacugga

SEQ ID NO: 138736 - RNA, 18 nt, Artificial Sequence
  Synthetic
ugggucacccaggcugga

SEQ ID NO: 138737 - RNA, 19 nt, Artificial Sequence
  Synthetic
cugggucacccaggcugga

SEQ ID NO: 138738 - RNA, 21 nt, Artificial Sequence
  Synthetic
ugcugggucacccaggcugga

SEQ ID NO: 138739 - RNA, 22 nt, Artificial Sequence
  Synthetic
uugcugggucacccaggcugga

SEQ ID NO: 138740 - RNA, 23 nt, Artificial Sequence
  Synthetic
cuugcugggucacccaggcugga

SEQ ID NO: 138741 - RNA, 24 nt, Artificial Sequence
  Synthetic
ucuugcugggucacccaggcugga

SEQ ID NO: 138742 - RNA, 18 nt, Artificial Sequence
  Synthetic
uagaagaaaaaugcugga

SEQ ID NO: 138743 - RNA, 19 nt, Artificial Sequence
  Synthetic
uuagaagaaaaaugcugga

SEQ ID NO: 138744 - RNA, 20 nt, Artificial Sequence
  Synthetic
auuagaagaaaaaugcugga

SEQ ID NO: 138745 - RNA, 20 nt, Artificial Sequence
  Synthetic
aggaaacaacagaugcugga

SEQ ID NO: 138746 - RNA, 20 nt, Artificial Sequence
  Synthetic
aggaaacaacaggugcugga

SEQ ID NO: 138747 - RNA, 18 nt, Artificial Sequence
  Synthetic
augaccaucaauggugga

SEQ ID NO: 138748 - RNA, 20 nt, Artificial Sequence
  Synthetic
agaugaccaucaauggugga

SEQ ID NO: 138749 - RNA, 21 nt, Artificial Sequence
  Synthetic
uagaugaccaucaauggugga

SEQ ID NO: 138750 - RNA, 22 nt, Artificial Sequence
  Synthetic
cuagaugaccaucaauggugga

SEQ ID NO: 138751 - RNA, 23 nt, Artificial Sequence
  Synthetic
ccuagaugaccaucaauggugga

SEQ ID NO: 138752 - RNA, 24 nt, Artificial Sequence
  Synthetic
accuagaugaccaucaauggugga

SEQ ID NO: 138753 - RNA, 20 nt, Artificial Sequence
  Synthetic
aggugcccaccaguggugga

SEQ ID NO: 138754 - RNA, 21 nt, Artificial Sequence
  Synthetic
uaggugcccaccaguggugga

SEQ ID NO: 138755 - RNA, 22 nt, Artificial Sequence
  Synthetic
cuaggugcccaccaguggugga

SEQ ID NO: 138756 - RNA, 23 nt, Artificial Sequence
  Synthetic
ccuaggugcccaccaguggugga

SEQ ID NO: 138757 - RNA, 24 nt, Artificial Sequence
  Synthetic
accuaggugcccaccaguggugga

SEQ ID NO: 138758 - RNA, 18 nt, Artificial Sequence
  Synthetic
uuaaugaaaauaugugga

SEQ ID NO: 138759 - RNA, 19 nt, Artificial Sequence
  Synthetic
uuuaaugaaaauaugugga

SEQ ID NO: 138760 - RNA, 20 nt, Artificial Sequence
  Synthetic
auuuaaugaaaauaugugga

SEQ ID NO: 138761 - RNA, 21 nt, Artificial Sequence
  Synthetic
uauuuaaugaaaauaugugga

SEQ ID NO: 138762 - RNA, 24 nt, Artificial Sequence
  Synthetic
agguauuuaaugaaaauaugugga

SEQ ID NO: 138763 - RNA, 18 nt, Artificial Sequence
  Synthetic
uuauuauuuccuugugga

SEQ ID NO: 138764 - RNA, 19 nt, Artificial Sequence
  Synthetic
uuuauuauuuccuugugga

SEQ ID NO: 138765 - RNA, 20 nt, Artificial Sequence
  Synthetic
auuuauuauuuccuugugga

SEQ ID NO: 138766 - RNA, 18 nt, Artificial Sequence
  Synthetic
aaaagaagguuuugugga

SEQ ID NO: 138767 - RNA, 19 nt, Artificial Sequence
  Synthetic
aaaaagaagguuuugugga

SEQ ID NO: 138768 - RNA, 20 nt, Artificial Sequence
  Synthetic
aaaaaagaagguuuugugga

SEQ ID NO: 138769 - RNA, 21 nt, Artificial Sequence
  Synthetic
aaaaaaagaagguuuugugga

SEQ ID NO: 138770 - RNA, 22 nt, Artificial Sequence
  Synthetic
aaaaaaaagaagguuuugugga

SEQ ID NO: 138771 - RNA, 23 nt, Artificial Sequence
  Synthetic
aaaaaaaaagaagguuuugugga

SEQ ID NO: 138772 - RNA, 24 nt, Artificial Sequence
  Synthetic
aaaaaaaaaagaagguuuugugga

SEQ ID NO: 138773 - RNA, 18 nt, Artificial Sequence
  Synthetic
auuauuuaaaaucuugga

SEQ ID NO: 138774 - RNA, 19 nt, Artificial Sequence
  Synthetic
uauuauuuaaaaucuugga

SEQ ID NO: 138775 - RNA, 20 nt, Artificial Sequence
  Synthetic
auauuauuuaaaaucuugga

SEQ ID NO: 138776 - RNA, 18 nt, Artificial Sequence
  Synthetic
auuauguuuguucuugga

SEQ ID NO: 138777 - RNA, 19 nt, Artificial Sequence
  Synthetic
aauuauguuuguucuugga

SEQ ID NO: 138778 - RNA, 20 nt, Artificial Sequence
  Synthetic
aaauuauguuuguucuugga

SEQ ID NO: 138779 - RNA, 20 nt, Artificial Sequence
  Synthetic
agguguccgucaacguugga

SEQ ID NO: 138780 - RNA, 18 nt, Artificial Sequence
  Synthetic
uuuuggguuaauguugga

SEQ ID NO: 138781 - RNA, 19 nt, Artificial Sequence
  Synthetic
cuuuuggguuaauguugga

SEQ ID NO: 138782 - RNA, 20 nt, Artificial Sequence
  Synthetic
acuuuuggguuaauguugga

SEQ ID NO: 138783 - RNA, 23 nt, Artificial Sequence
  Synthetic
uggacuuuuggguuaauguugga

SEQ ID NO: 138784 - RNA, 24 nt, Artificial Sequence
  Synthetic
uuggacuuuuggguuaauguugga

SEQ ID NO: 138785 - RNA, 18 nt, Artificial Sequence
  Synthetic
aggagagaguaauuugga

SEQ ID NO: 138786 - RNA, 20 nt, Artificial Sequence
  Synthetic
agaggagagaguaauuugga

SEQ ID NO: 138787 - RNA, 18 nt, Artificial Sequence
  Synthetic
uuagugcaaggguuugga

SEQ ID NO: 138788 - RNA, 19 nt, Artificial Sequence
  Synthetic
cuuagugcaaggguuugga

SEQ ID NO: 138789 - RNA, 20 nt, Artificial Sequence
  Synthetic
ucuuagugcaaggguuugga

SEQ ID NO: 138790 - RNA, 22 nt, Artificial Sequence
  Synthetic
agucuuagugcaaggguuugga

SEQ ID NO: 138791 - RNA, 23 nt, Artificial Sequence
  Synthetic
aagucuuagugcaaggguuugga

SEQ ID NO: 138792 - RNA, 24 nt, Artificial Sequence
  Synthetic
caagucuuagugcaaggguuugga

SEQ ID NO: 138793 - RNA, 18 nt, Artificial Sequence
  Synthetic
ugaaaggaaagaaaauga

SEQ ID NO: 138794 - RNA, 20 nt, Artificial Sequence
  Synthetic
ugugaaaggaaagaaaauga

SEQ ID NO: 138795 - RNA, 18 nt, Artificial Sequence
  Synthetic
aaauauuuauuaaaauga

SEQ ID NO: 138796 - RNA, 19 nt, Artificial Sequence
  Synthetic
aaaauauuuauuaaaauga

SEQ ID NO: 138797 - RNA, 20 nt, Artificial Sequence
  Synthetic
aaaaauauuuauuaaaauga

SEQ ID NO: 138798 - RNA, 18 nt, Artificial Sequence
  Synthetic
uucuuuuuuaacaaauga

SEQ ID NO: 138799 - RNA, 20 nt, Artificial Sequence
  Synthetic
uguucuuuuuuaacaaauga

SEQ ID NO: 138800 - RNA, 18 nt, Artificial Sequence
  Synthetic
agaaauaaagacaaauga

SEQ ID NO: 138801 - RNA, 19 nt, Artificial Sequence
  Synthetic
aagaaauaaagacaaauga

SEQ ID NO: 138802 - RNA, 20 nt, Artificial Sequence
  Synthetic
aaagaaauaaagacaaauga

SEQ ID NO: 138803 - RNA, 18 nt, Artificial Sequence
  Synthetic
ccuuauuauuccaaauga

SEQ ID NO: 138804 - RNA, 19 nt, Artificial Sequence
  Synthetic
uccuuauuauuccaaauga

SEQ ID NO: 138805 - RNA, 20 nt, Artificial Sequence
  Synthetic
auccuuauuauuccaaauga

SEQ ID NO: 138806 - RNA, 18 nt, Artificial Sequence
  Synthetic
ccacguugcugcaaauga

SEQ ID NO: 138807 - RNA, 19 nt, Artificial Sequence
  Synthetic
uccacguugcugcaaauga

SEQ ID NO: 138808 - RNA, 20 nt, Artificial Sequence
  Synthetic
auccacguugcugcaaauga

SEQ ID NO: 138809 - RNA, 21 nt, Artificial Sequence
  Synthetic
uauccacguugcugcaaauga

SEQ ID NO: 138810 - RNA, 22 nt, Artificial Sequence
  Synthetic
cuauccacguugcugcaaauga

SEQ ID NO: 138811 - RNA, 23 nt, Artificial Sequence
  Synthetic
ucuauccacguugcugcaaauga

SEQ ID NO: 138812 - RNA, 24 nt, Artificial Sequence
  Synthetic
uucuauccacguugcugcaaauga

SEQ ID NO: 138813 - RNA, 18 nt, Artificial Sequence
  Synthetic
ccaagauguugcaaauga

SEQ ID NO: 138814 - RNA, 19 nt, Artificial Sequence
  Synthetic
uccaagauguugcaaauga

SEQ ID NO: 138815 - RNA, 20 nt, Artificial Sequence
  Synthetic
auccaagauguugcaaauga

SEQ ID NO: 138816 - RNA, 21 nt, Artificial Sequence
  Synthetic
cauccaagauguugcaaauga

SEQ ID NO: 138817 - RNA, 22 nt, Artificial Sequence
  Synthetic
ccauccaagauguugcaaauga

SEQ ID NO: 138818 - RNA, 23 nt, Artificial Sequence
  Synthetic
uccauccaagauguugcaaauga

SEQ ID NO: 138819 - RNA, 24 nt, Artificial Sequence
  Synthetic
uuccauccaagauguugcaaauga

SEQ ID NO: 138820 - RNA, 18 nt, Artificial Sequence
  Synthetic
ccaugauguugcaaauga

SEQ ID NO: 138821 - RNA, 19 nt, Artificial Sequence
  Synthetic
uccaugauguugcaaauga

SEQ ID NO: 138822 - RNA, 20 nt, Artificial Sequence
  Synthetic
auccaugauguugcaaauga

SEQ ID NO: 138823 - RNA, 21 nt, Artificial Sequence
  Synthetic
cauccaugauguugcaaauga

SEQ ID NO: 138824 - RNA, 22 nt, Artificial Sequence
  Synthetic
ccauccaugauguugcaaauga

SEQ ID NO: 138825 - RNA, 23 nt, Artificial Sequence
  Synthetic
uccauccaugauguugcaaauga

SEQ ID NO: 138826 - RNA, 24 nt, Artificial Sequence
  Synthetic
uuccauccaugauguugcaaauga

SEQ ID NO: 138827 - RNA, 18 nt, Artificial Sequence
  Synthetic
ccauguuguugcaaauga

SEQ ID NO: 138828 - RNA, 19 nt, Artificial Sequence
  Synthetic
uccauguuguugcaaauga

SEQ ID NO: 138829 - RNA, 20 nt, Artificial Sequence
  Synthetic
auccauguuguugcaaauga

SEQ ID NO: 138830 - RNA, 21 nt, Artificial Sequence
  Synthetic
cauccauguuguugcaaauga

SEQ ID NO: 138831 - RNA, 22 nt, Artificial Sequence
  Synthetic
ccauccauguuguugcaaauga

SEQ ID NO: 138832 - RNA, 23 nt, Artificial Sequence
  Synthetic
uccauccauguuguugcaaauga

SEQ ID NO: 138833 - RNA, 24 nt, Artificial Sequence
  Synthetic
uuccauccauguuguugcaaauga

SEQ ID NO: 138834 - RNA, 18 nt, Artificial Sequence
  Synthetic
ccguguuguugcaaauga

SEQ ID NO: 138835 - RNA, 19 nt, Artificial Sequence
  Synthetic
uccguguuguugcaaauga

SEQ ID NO: 138836 - RNA, 20 nt, Artificial Sequence
  Synthetic
auccguguuguugcaaauga

SEQ ID NO: 138837 - RNA, 21 nt, Artificial Sequence
  Synthetic
aauccguguuguugcaaauga

SEQ ID NO: 138838 - RNA, 22 nt, Artificial Sequence
  Synthetic
caauccguguuguugcaaauga

SEQ ID NO: 138839 - RNA, 23 nt, Artificial Sequence
  Synthetic
ucaauccguguuguugcaaauga

SEQ ID NO: 138840 - RNA, 24 nt, Artificial Sequence
  Synthetic
uucaauccguguuguugcaaauga

SEQ ID NO: 138841 - RNA, 18 nt, Artificial Sequence
  Synthetic
ugccauuuacugaaauga

SEQ ID NO: 138842 - RNA, 19 nt, Artificial Sequence
  Synthetic
uugccauuuacugaaauga

SEQ ID NO: 138843 - RNA, 20 nt, Artificial Sequence
  Synthetic
auugccauuuacugaaauga

SEQ ID NO: 138844 - RNA, 18 nt, Artificial Sequence
  Synthetic
ccauguugucauaaauga

SEQ ID NO: 138845 - RNA, 19 nt, Artificial Sequence
  Synthetic
uccauguugucauaaauga

SEQ ID NO: 138846 - RNA, 20 nt, Artificial Sequence
  Synthetic
auccauguugucauaaauga

SEQ ID NO: 138847 - RNA, 21 nt, Artificial Sequence
  Synthetic
cauccauguugucauaaauga

SEQ ID NO: 138848 - RNA, 22 nt, Artificial Sequence
  Synthetic
ucauccauguugucauaaauga

SEQ ID NO: 138849 - RNA, 23 nt, Artificial Sequence
  Synthetic
uucauccauguugucauaaauga

SEQ ID NO: 138850 - RNA, 18 nt, Artificial Sequence
  Synthetic
uagacaauauguaaauga

SEQ ID NO: 138851 - RNA, 19 nt, Artificial Sequence
  Synthetic
auagacaauauguaaauga

SEQ ID NO: 138852 - RNA, 20 nt, Artificial Sequence
  Synthetic
cauagacaauauguaaauga

SEQ ID NO: 138853 - RNA, 21 nt, Artificial Sequence
  Synthetic
ccauagacaauauguaaauga

SEQ ID NO: 138854 - RNA, 22 nt, Artificial Sequence
  Synthetic
accauagacaauauguaaauga

SEQ ID NO: 138855 - RNA, 23 nt, Artificial Sequence
  Synthetic
aaccauagacaauauguaaauga

SEQ ID NO: 138856 - RNA, 24 nt, Artificial Sequence
  Synthetic
caaccauagacaauauguaaauga

SEQ ID NO: 138857 - RNA, 24 nt, Artificial Sequence
  Synthetic
uaaccauagacaauauguaaauga

SEQ ID NO: 138858 - RNA, 18 nt, Artificial Sequence
  Synthetic
cauuuuucaaaagaauga

SEQ ID NO: 138859 - RNA, 19 nt, Artificial Sequence
  Synthetic
ucauuuuucaaaagaauga

SEQ ID NO: 138860 - RNA, 20 nt, Artificial Sequence
  Synthetic
uucauuuuucaaaagaauga

SEQ ID NO: 138861 - RNA, 19 nt, Artificial Sequence
  Synthetic
uggcuuggaaaaugaauga

SEQ ID NO: 138862 - RNA, 18 nt, Artificial Sequence
  Synthetic
aauauguggaaugaauga

SEQ ID NO: 138863 - RNA, 19 nt, Artificial Sequence
  Synthetic
aaauauguggaaugaauga

SEQ ID NO: 138864 - RNA, 20 nt, Artificial Sequence
  Synthetic
aaaauauguggaaugaauga

SEQ ID NO: 138865 - RNA, 22 nt, Artificial Sequence
  Synthetic
ugaaaauauguggaaugaauga

SEQ ID NO: 138866 - RNA, 23 nt, Artificial Sequence
  Synthetic
augaaaauauguggaaugaauga

SEQ ID NO: 138867 - RNA, 24 nt, Artificial Sequence
  Synthetic
aaugaaaauauguggaaugaauga

SEQ ID NO: 138868 - RNA, 20 nt, Artificial Sequence
  Synthetic
uggaaugaaugauugaauga

SEQ ID NO: 138869 - RNA, 22 nt, Artificial Sequence
  Synthetic
uguggaaugaaugauugaauga

SEQ ID NO: 138870 - RNA, 23 nt, Artificial Sequence
  Synthetic
auguggaaugaaugauugaauga

SEQ ID NO: 138871 - RNA, 24 nt, Artificial Sequence
  Synthetic
uauguggaaugaaugauugaauga

SEQ ID NO: 138872 - RNA, 18 nt, Artificial Sequence
  Synthetic
cagcuagcaucauaauga

SEQ ID NO: 138873 - RNA, 19 nt, Artificial Sequence
  Synthetic
ccagcuagcaucauaauga

SEQ ID NO: 138874 - RNA, 20 nt, Artificial Sequence
  Synthetic
accagcuagcaucauaauga

SEQ ID NO: 138875 - RNA, 21 nt, Artificial Sequence
  Synthetic
aaccagcuagcaucauaauga

SEQ ID NO: 138876 - RNA, 22 nt, Artificial Sequence
  Synthetic
uaaccagcuagcaucauaauga

SEQ ID NO: 138877 - RNA, 24 nt, Artificial Sequence
  Synthetic
aguaaccagcuagcaucauaauga

SEQ ID NO: 138878 - RNA, 19 nt, Artificial Sequence
  Synthetic
agugaaaccaaaguaauga

SEQ ID NO: 138879 - RNA, 20 nt, Artificial Sequence
  Synthetic
uagugaaaccaaaguaauga

SEQ ID NO: 138880 - RNA, 18 nt, Artificial Sequence
  Synthetic
uauuucuugaguuaauga

SEQ ID NO: 138881 - RNA, 19 nt, Artificial Sequence
  Synthetic
auauuucuugaguuaauga

SEQ ID NO: 138882 - RNA, 20 nt, Artificial Sequence
  Synthetic
aauauuucuugaguuaauga

SEQ ID NO: 138883 - RNA, 21 nt, Artificial Sequence
  Synthetic
aaauauuucuugaguuaauga

SEQ ID NO: 138884 - RNA, 22 nt, Artificial Sequence
  Synthetic
caaauauuucuugaguuaauga

SEQ ID NO: 138885 - RNA, 23 nt, Artificial Sequence
  Synthetic
acaaauauuucuugaguuaauga

SEQ ID NO: 138886 - RNA, 24 nt, Artificial Sequence
  Synthetic
aacaaauauuucuugaguuaauga

SEQ ID NO: 138887 - RNA, 18 nt, Artificial Sequence
  Synthetic
ugaguguuuuuaacauga

SEQ ID NO: 138888 - RNA, 19 nt, Artificial Sequence
  Synthetic
uugaguguuuuuaacauga

SEQ ID NO: 138889 - RNA, 20 nt, Artificial Sequence
  Synthetic
auugaguguuuuuaacauga

SEQ ID NO: 138890 - RNA, 21 nt, Artificial Sequence
  Synthetic
uauugaguguuuuuaacauga

SEQ ID NO: 138891 - RNA, 22 nt, Artificial Sequence
  Synthetic
uuauugaguguuuuuaacauga

SEQ ID NO: 138892 - RNA, 23 nt, Artificial Sequence
  Synthetic
uuuauugaguguuuuuaacauga

SEQ ID NO: 138893 - RNA, 19 nt, Artificial Sequence
  Synthetic
ugcacuccagcccacauga

SEQ ID NO: 138894 - RNA, 20 nt, Artificial Sequence
  Synthetic
cugcacuccagcccacauga

SEQ ID NO: 138895 - RNA, 21 nt, Artificial Sequence
  Synthetic
acugcacuccagcccacauga

SEQ ID NO: 138896 - RNA, 22 nt, Artificial Sequence
  Synthetic
cacugcacuccagcccacauga

SEQ ID NO: 138897 - RNA, 23 nt, Artificial Sequence
  Synthetic
ccacugcacuccagcccacauga

SEQ ID NO: 138898 - RNA, 18 nt, Artificial Sequence
  Synthetic
auaaauuuauuuacauga

SEQ ID NO: 138899 - RNA, 20 nt, Artificial Sequence
  Synthetic
agauaaauuuauuuacauga

SEQ ID NO: 138900 - RNA, 19 nt, Artificial Sequence
  Synthetic
ugcacucaaacuugcauga

SEQ ID NO: 138901 - RNA, 20 nt, Artificial Sequence
  Synthetic
cugcacucaaacuugcauga

SEQ ID NO: 138902 - RNA, 21 nt, Artificial Sequence
  Synthetic
acugcacucaaacuugcauga

SEQ ID NO: 138903 - RNA, 22 nt, Artificial Sequence
  Synthetic
cacugcacucaaacuugcauga

SEQ ID NO: 138904 - RNA, 23 nt, Artificial Sequence
  Synthetic
ccacugcacucaaacuugcauga

SEQ ID NO: 138905 - RNA, 24 nt, Artificial Sequence
  Synthetic
accacugcacucaaacuugcauga

SEQ ID NO: 138906 - RNA, 19 nt, Artificial Sequence
  Synthetic
agagagugccaaaucauga

SEQ ID NO: 138907 - RNA, 20 nt, Artificial Sequence
  Synthetic
aagagagugccaaaucauga

SEQ ID NO: 138908 - RNA, 21 nt, Artificial Sequence
  Synthetic
aaagagagugccaaaucauga

SEQ ID NO: 138909 - RNA, 22 nt, Artificial Sequence
  Synthetic
caaagagagugccaaaucauga

SEQ ID NO: 138910 - RNA, 23 nt, Artificial Sequence
  Synthetic
acaaagagagugccaaaucauga

SEQ ID NO: 138911 - RNA, 18 nt, Artificial Sequence
  Synthetic
aauauuuuuccaucauga

SEQ ID NO: 138912 - RNA, 20 nt, Artificial Sequence
  Synthetic
ugaauauuuuuccaucauga

SEQ ID NO: 138913 - RNA, 23 nt, Artificial Sequence
  Synthetic
agguugccuguugacucucauga

SEQ ID NO: 138914 - RNA, 24 nt, Artificial Sequence
  Synthetic
uagguugccuguugacucucauga

SEQ ID NO: 138915 - RNA, 18 nt, Artificial Sequence
  Synthetic
uuagaguuuuugucauga

SEQ ID NO: 138916 - RNA, 19 nt, Artificial Sequence
  Synthetic
uuuagaguuuuugucauga

SEQ ID NO: 138917 - RNA, 20 nt, Artificial Sequence
  Synthetic
uuuuagaguuuuugucauga

SEQ ID NO: 138918 - RNA, 18 nt, Artificial Sequence
  Synthetic
cuaugggaccaaagauga

SEQ ID NO: 138919 - RNA, 20 nt, Artificial Sequence
  Synthetic
ugcuaugggaccaaagauga

SEQ ID NO: 138920 - RNA, 22 nt, Artificial Sequence
  Synthetic
agugcuaugggaccaaagauga

SEQ ID NO: 138921 - RNA, 23 nt, Artificial Sequence
  Synthetic
aagugcuaugggaccaaagauga

SEQ ID NO: 138922 - RNA, 24 nt, Artificial Sequence
  Synthetic
uaagugcuaugggaccaaagauga

SEQ ID NO: 138923 - RNA, 18 nt, Artificial Sequence
  Synthetic
caauguuguugcagauga

SEQ ID NO: 138924 - RNA, 19 nt, Artificial Sequence
  Synthetic
acaauguuguugcagauga

SEQ ID NO: 138925 - RNA, 20 nt, Artificial Sequence
  Synthetic
aacaauguuguugcagauga

SEQ ID NO: 138926 - RNA, 21 nt, Artificial Sequence
  Synthetic
caacaauguuguugcagauga

SEQ ID NO: 138927 - RNA, 22 nt, Artificial Sequence
  Synthetic
ccaacaauguuguugcagauga

SEQ ID NO: 138928 - RNA, 23 nt, Artificial Sequence
  Synthetic
uccaacaauguuguugcagauga

SEQ ID NO: 138929 - RNA, 24 nt, Artificial Sequence
  Synthetic
uuccaacaauguuguugcagauga

SEQ ID NO: 138930 - RNA, 19 nt, Artificial Sequence
  Synthetic
ugcacuccagccuggauga

SEQ ID NO: 138931 - RNA, 20 nt, Artificial Sequence
  Synthetic
cugcacuccagccuggauga

SEQ ID NO: 138932 - RNA, 21 nt, Artificial Sequence
  Synthetic
acugcacuccagccuggauga

SEQ ID NO: 138933 - RNA, 22 nt, Artificial Sequence
  Synthetic
aacugcacuccagccuggauga

SEQ ID NO: 138934 - RNA, 23 nt, Artificial Sequence
  Synthetic
caacugcacuccagccuggauga

SEQ ID NO: 138935 - RNA, 24 nt, Artificial Sequence
  Synthetic
acaacugcacuccagccuggauga

SEQ ID NO: 138936 - RNA, 21 nt, Artificial Sequence
  Synthetic
aaacauaagaucucuggauga

SEQ ID NO: 138937 - RNA, 24 nt, Artificial Sequence
  Synthetic
aggaaacauaagaucucuggauga

SEQ ID NO: 138938 - RNA, 19 nt, Artificial Sequence
  Synthetic
aguuuccaucaguggauga

SEQ ID NO: 138939 - RNA, 20 nt, Artificial Sequence
  Synthetic
aaguuuccaucaguggauga

SEQ ID NO: 138940 - RNA, 21 nt, Artificial Sequence
  Synthetic
uaaguuuccaucaguggauga

SEQ ID NO: 138941 - RNA, 22 nt, Artificial Sequence
  Synthetic
cuaaguuuccaucaguggauga

SEQ ID NO: 138942 - RNA, 23 nt, Artificial Sequence
  Synthetic
ccuaaguuuccaucaguggauga

SEQ ID NO: 138943 - RNA, 24 nt, Artificial Sequence
  Synthetic
accuaaguuuccaucaguggauga

SEQ ID NO: 138944 - RNA, 18 nt, Artificial Sequence
  Synthetic
cuaagauuaaggugauga

SEQ ID NO: 138945 - RNA, 19 nt, Artificial Sequence
  Synthetic
ucuaagauuaaggugauga

SEQ ID NO: 138946 - RNA, 18 nt, Artificial Sequence
  Synthetic
uuuuuguguauuauauga

SEQ ID NO: 138947 - RNA, 20 nt, Artificial Sequence
  Synthetic
uguuuuuguguauuauauga

SEQ ID NO: 138948 - RNA, 21 nt, Artificial Sequence
  Synthetic
aucuuugccaauaggcuauga

SEQ ID NO: 138949 - RNA, 22 nt, Artificial Sequence
  Synthetic
aaucuuugccaauaggcuauga

SEQ ID NO: 138950 - RNA, 23 nt, Artificial Sequence
  Synthetic
aaaucuuugccaauaggcuauga

SEQ ID NO: 138951 - RNA, 24 nt, Artificial Sequence
  Synthetic
aaaaucuuugccaauaggcuauga

SEQ ID NO: 138952 - RNA, 20 nt, Artificial Sequence
  Synthetic
aggguaauaaagcauuauga

SEQ ID NO: 138953 - RNA, 18 nt, Artificial Sequence
  Synthetic
uaaccuauuaauuuauga

SEQ ID NO: 138954 - RNA, 19 nt, Artificial Sequence
  Synthetic
uuaaccuauuaauuuauga

SEQ ID NO: 138955 - RNA, 20 nt, Artificial Sequence
  Synthetic
auuaaccuauuaauuuauga

SEQ ID NO: 138956 - RNA, 21 nt, Artificial Sequence
  Synthetic
cauuaaccuauuaauuuauga

SEQ ID NO: 138957 - RNA, 22 nt, Artificial Sequence
  Synthetic
ccauuaaccuauuaauuuauga

SEQ ID NO: 138958 - RNA, 23 nt, Artificial Sequence
  Synthetic
cccauuaaccuauuaauuuauga

SEQ ID NO: 138959 - RNA, 24 nt, Artificial Sequence
  Synthetic
acccauuaaccuauuaauuuauga

SEQ ID NO: 138960 - RNA, 18 nt, Artificial Sequence
  Synthetic
cuucauuccuuuuuauga

SEQ ID NO: 138961 - RNA, 19 nt, Artificial Sequence
  Synthetic
acuucauuccuuuuuauga

SEQ ID NO: 138962 - RNA, 20 nt, Artificial Sequence
  Synthetic
aacuucauuccuuuuuauga

SEQ ID NO: 138963 - RNA, 22 nt, Artificial Sequence
  Synthetic
agaacuucauuccuuuuuauga

SEQ ID NO: 138964 - RNA, 23 nt, Artificial Sequence
  Synthetic
cagaacuucauuccuuuuuauga

SEQ ID NO: 138965 - RNA, 24 nt, Artificial Sequence
  Synthetic
ucagaacuucauuccuuuuuauga

SEQ ID NO: 138966 - RNA, 18 nt, Artificial Sequence
  Synthetic
uuauuuuuuuuccccuga

SEQ ID NO: 138967 - RNA, 19 nt, Artificial Sequence
  Synthetic
uuuauuuuuuuuccccuga

SEQ ID NO: 138968 - RNA, 20 nt, Artificial Sequence
  Synthetic
uuuuauuuuuuuuccccuga

SEQ ID NO: 138969 - RNA, 22 nt, Artificial Sequence
  Synthetic
uguuuuauuuuuuuuccccuga

SEQ ID NO: 138970 - RNA, 23 nt, Artificial Sequence
  Synthetic
uuguuuuauuuuuuuuccccuga

SEQ ID NO: 138971 - RNA, 24 nt, Artificial Sequence
  Synthetic
uuuguuuuauuuuuuuuccccuga

SEQ ID NO: 138972 - RNA, 20 nt, Artificial Sequence
  Synthetic
uggcuuacaagagcuccuga

SEQ ID NO: 138973 - RNA, 21 nt, Artificial Sequence
  Synthetic
cuggcuuacaagagcuccuga

SEQ ID NO: 138974 - RNA, 22 nt, Artificial Sequence
  Synthetic
ccuggcuuacaagagcuccuga

SEQ ID NO: 138975 - RNA, 18 nt, Artificial Sequence
  Synthetic
uuuuaaagacaaagcuga

SEQ ID NO: 138976 - RNA, 19 nt, Artificial Sequence
  Synthetic
auuuuaaagacaaagcuga

SEQ ID NO: 138977 - RNA, 20 nt, Artificial Sequence
  Synthetic
cauuuuaaagacaaagcuga

SEQ ID NO: 138978 - RNA, 21 nt, Artificial Sequence
  Synthetic
acauuuuaaagacaaagcuga

SEQ ID NO: 138979 - RNA, 22 nt, Artificial Sequence
  Synthetic
uacauuuuaaagacaaagcuga

SEQ ID NO: 138980 - RNA, 23 nt, Artificial Sequence
  Synthetic
auacauuuuaaagacaaagcuga

SEQ ID NO: 138981 - RNA, 18 nt, Artificial Sequence
  Synthetic
agaaaauggagacucuga

SEQ ID NO: 138982 - RNA, 19 nt, Artificial Sequence
  Synthetic
uagaaaauggagacucuga

SEQ ID NO: 138983 - RNA, 20 nt, Artificial Sequence
  Synthetic
auagaaaauggagacucuga

SEQ ID NO: 138984 - RNA, 18 nt, Artificial Sequence
  Synthetic
ugacuaagguucuucuga

SEQ ID NO: 138985 - RNA, 19 nt, Artificial Sequence
  Synthetic
uugacuaagguucuucuga

SEQ ID NO: 138986 - RNA, 20 nt, Artificial Sequence
  Synthetic
cuugacuaagguucuucuga

SEQ ID NO: 138987 - RNA, 18 nt, Artificial Sequence
  Synthetic
ccuuugcccacuuucuga

SEQ ID NO: 138988 - RNA, 19 nt, Artificial Sequence
  Synthetic
uccuuugcccacuuucuga

SEQ ID NO: 138989 - RNA, 20 nt, Artificial Sequence
  Synthetic
auccuuugcccacuuucuga

SEQ ID NO: 138990 - RNA, 21 nt, Artificial Sequence
  Synthetic
uauccuuugcccacuuucuga

SEQ ID NO: 138991 - RNA, 22 nt, Artificial Sequence
  Synthetic
auauccuuugcccacuuucuga

SEQ ID NO: 138992 - RNA, 23 nt, Artificial Sequence
  Synthetic
cauauccuuugcccacuuucuga

SEQ ID NO: 138993 - RNA, 24 nt, Artificial Sequence
  Synthetic
ucauauccuuugcccacuuucuga

SEQ ID NO: 138994 - RNA, 19 nt, Artificial Sequence
  Synthetic
agaauaauauugaaaguga

SEQ ID NO: 138995 - RNA, 20 nt, Artificial Sequence
  Synthetic
aagaauaauauugaaaguga

SEQ ID NO: 138996 - RNA, 18 nt, Artificial Sequence
  Synthetic
aaaguaaaagacaaguga

SEQ ID NO: 138997 - RNA, 19 nt, Artificial Sequence
  Synthetic
uaaaguaaaagacaaguga

SEQ ID NO: 138998 - RNA, 18 nt, Artificial Sequence
  Synthetic
aacuguucuccuaaguga

SEQ ID NO: 138999 - RNA, 19 nt, Artificial Sequence
  Synthetic
aaacuguucuccuaaguga

SEQ ID NO: 139000 - RNA, 20 nt, Artificial Sequence
  Synthetic
caaacuguucuccuaaguga

SEQ ID NO: 139001 - RNA, 18 nt, Artificial Sequence
  Synthetic
caaaaauaugcuaaguga

SEQ ID NO: 139002 - RNA, 19 nt, Artificial Sequence
  Synthetic
ucaaaaauaugcuaaguga

SEQ ID NO: 139003 - RNA, 20 nt, Artificial Sequence
  Synthetic
cucaaaaauaugcuaaguga

SEQ ID NO: 139004 - RNA, 21 nt, Artificial Sequence
  Synthetic
ccucaaaaauaugcuaaguga

SEQ ID NO: 139005 - RNA, 22 nt, Artificial Sequence
  Synthetic
accucaaaaauaugcuaaguga

SEQ ID NO: 139006 - RNA, 23 nt, Artificial Sequence
  Synthetic
aaccucaaaaauaugcuaaguga

SEQ ID NO: 139007 - RNA, 18 nt, Artificial Sequence
  Synthetic
uacagagcuagucaguga

SEQ ID NO: 139008 - RNA, 19 nt, Artificial Sequence
  Synthetic
uuacagagcuagucaguga

SEQ ID NO: 139009 - RNA, 22 nt, Artificial Sequence
  Synthetic
agguuacagagcuagucaguga

SEQ ID NO: 139010 - RNA, 23 nt, Artificial Sequence
  Synthetic
aagguuacagagcuagucaguga

SEQ ID NO: 139011 - RNA, 24 nt, Artificial Sequence
  Synthetic
caagguuacagagcuagucaguga

SEQ ID NO: 139012 - RNA, 19 nt, Artificial Sequence
  Synthetic
ugcacuccagacugaguga

SEQ ID NO: 139013 - RNA, 20 nt, Artificial Sequence
  Synthetic
uugcacuccagacugaguga

SEQ ID NO: 139014 - RNA, 21 nt, Artificial Sequence
  Synthetic
auugcacuccagacugaguga

SEQ ID NO: 139015 - RNA, 22 nt, Artificial Sequence
  Synthetic
cauugcacuccagacugaguga

SEQ ID NO: 139016 - RNA, 23 nt, Artificial Sequence
  Synthetic
ccauugcacuccagacugaguga

SEQ ID NO: 139017 - RNA, 24 nt, Artificial Sequence
  Synthetic
accauugcacuccagacugaguga

SEQ ID NO: 139018 - RNA, 18 nt, Artificial Sequence
  Synthetic
agugaauggagugaguga

SEQ ID NO: 139019 - RNA, 19 nt, Artificial Sequence
  Synthetic
aagugaauggagugaguga

SEQ ID NO: 139020 - RNA, 20 nt, Artificial Sequence
  Synthetic
uaagugaauggagugaguga

SEQ ID NO: 139021 - RNA, 18 nt, Artificial Sequence
  Synthetic
cuguucuccugauaguga

SEQ ID NO: 139022 - RNA, 20 nt, Artificial Sequence
  Synthetic
ugcuguucuccugauaguga

SEQ ID NO: 139023 - RNA, 21 nt, Artificial Sequence
  Synthetic
augcuguucuccugauaguga

SEQ ID NO: 139024 - RNA, 22 nt, Artificial Sequence
  Synthetic
caugcuguucuccugauaguga

SEQ ID NO: 139025 - RNA, 23 nt, Artificial Sequence
  Synthetic
ccaugcuguucuccugauaguga

SEQ ID NO: 139026 - RNA, 24 nt, Artificial Sequence
  Synthetic
cccaugcuguucuccugauaguga

SEQ ID NO: 139027 - RNA, 18 nt, Artificial Sequence
  Synthetic
cuguugucgugauaguga

SEQ ID NO: 139028 - RNA, 20 nt, Artificial Sequence
  Synthetic
ugcuguugucgugauaguga

SEQ ID NO: 139029 - RNA, 21 nt, Artificial Sequence
  Synthetic
augcuguugucgugauaguga

SEQ ID NO: 139030 - RNA, 22 nt, Artificial Sequence
  Synthetic
caugcuguugucgugauaguga

SEQ ID NO: 139031 - RNA, 23 nt, Artificial Sequence
  Synthetic
ccaugcuguugucgugauaguga

SEQ ID NO: 139032 - RNA, 24 nt, Artificial Sequence
  Synthetic
cccaugcuguugucgugauaguga

SEQ ID NO: 139033 - RNA, 18 nt, Artificial Sequence
  Synthetic
aaucaugguggaagguga

SEQ ID NO: 139034 - RNA, 19 nt, Artificial Sequence
  Synthetic
caaucaugguggaagguga

SEQ ID NO: 139035 - RNA, 20 nt, Artificial Sequence
  Synthetic
acaaucaugguggaagguga

SEQ ID NO: 139036 - RNA, 21 nt, Artificial Sequence
  Synthetic
cacaaucaugguggaagguga

SEQ ID NO: 139037 - RNA, 22 nt, Artificial Sequence
  Synthetic
ucacaaucaugguggaagguga

SEQ ID NO: 139038 - RNA, 23 nt, Artificial Sequence
  Synthetic
cucacaaucaugguggaagguga

SEQ ID NO: 139039 - RNA, 24 nt, Artificial Sequence
  Synthetic
ccucacaaucaugguggaagguga

SEQ ID NO: 139040 - RNA, 19 nt, Artificial Sequence
  Synthetic
uguacuccagucuagguga

SEQ ID NO: 139041 - RNA, 20 nt, Artificial Sequence
  Synthetic
cuguacuccagucuagguga

SEQ ID NO: 139042 - RNA, 21 nt, Artificial Sequence
  Synthetic
acuguacuccagucuagguga

SEQ ID NO: 139043 - RNA, 22 nt, Artificial Sequence
  Synthetic
uacuguacuccagucuagguga

SEQ ID NO: 139044 - RNA, 23 nt, Artificial Sequence
  Synthetic
cuacuguacuccagucuagguga

SEQ ID NO: 139045 - RNA, 18 nt, Artificial Sequence
  Synthetic
cucugggugagucgguga

SEQ ID NO: 139046 - RNA, 20 nt, Artificial Sequence
  Synthetic
ugcucugggugagucgguga

SEQ ID NO: 139047 - RNA, 21 nt, Artificial Sequence
  Synthetic
uugcucugggugagucgguga

SEQ ID NO: 139048 - RNA, 23 nt, Artificial Sequence
  Synthetic
aguugcucugggugagucgguga

SEQ ID NO: 139049 - RNA, 24 nt, Artificial Sequence
  Synthetic
aaguugcucugggugagucgguga

SEQ ID NO: 139050 - RNA, 18 nt, Artificial Sequence
  Synthetic
aucaagaaauggggguga

SEQ ID NO: 139051 - RNA, 18 nt, Artificial Sequence
  Synthetic
uaaugauguuugggguga

SEQ ID NO: 139052 - RNA, 19 nt, Artificial Sequence
  Synthetic
auaaugauguuugggguga

SEQ ID NO: 139053 - RNA, 20 nt, Artificial Sequence
  Synthetic
aauaaugauguuugggguga

SEQ ID NO: 139054 - RNA, 19 nt, Artificial Sequence
  Synthetic
ugcacuccgaccuggguga

SEQ ID NO: 139055 - RNA, 20 nt, Artificial Sequence
  Synthetic
cugcacuccgaccuggguga

SEQ ID NO: 139056 - RNA, 21 nt, Artificial Sequence
  Synthetic
acugcacuccgaccuggguga

SEQ ID NO: 139057 - RNA, 22 nt, Artificial Sequence
  Synthetic
cacugcacuccgaccuggguga

SEQ ID NO: 139058 - RNA, 23 nt, Artificial Sequence
  Synthetic
ccacugcacuccgaccuggguga

SEQ ID NO: 139059 - RNA, 24 nt, Artificial Sequence
  Synthetic
accacugcacuccgaccuggguga

SEQ ID NO: 139060 - RNA, 19 nt, Artificial Sequence
  Synthetic
ugcacuccagccuggguga

SEQ ID NO: 139061 - RNA, 20 nt, Artificial Sequence
  Synthetic
cugcacuccagccuggguga

SEQ ID NO: 139062 - RNA, 21 nt, Artificial Sequence
  Synthetic
acugcacuccagccuggguga

SEQ ID NO: 139063 - RNA, 22 nt, Artificial Sequence
  Synthetic
cacugcacuccagccuggguga

SEQ ID NO: 139064 - RNA, 23 nt, Artificial Sequence
  Synthetic
ccacugcacuccagccuggguga

SEQ ID NO: 139065 - RNA, 20 nt, Artificial Sequence
  Synthetic
uugcacuccagccuggguga

SEQ ID NO: 139066 - RNA, 21 nt, Artificial Sequence
  Synthetic
auugcacuccagccuggguga

SEQ ID NO: 139067 - RNA, 22 nt, Artificial Sequence
  Synthetic
cauugcacuccagccuggguga

SEQ ID NO: 139068 - RNA, 23 nt, Artificial Sequence
  Synthetic
ccauugcacuccagccuggguga

SEQ ID NO: 139069 - RNA, 19 nt, Artificial Sequence
  Synthetic
ugcauuccagccuggguga

SEQ ID NO: 139070 - RNA, 20 nt, Artificial Sequence
  Synthetic
cugcauuccagccuggguga

SEQ ID NO: 139071 - RNA, 21 nt, Artificial Sequence
  Synthetic
acugcauuccagccuggguga

SEQ ID NO: 139072 - RNA, 22 nt, Artificial Sequence
  Synthetic
cacugcauuccagccuggguga

SEQ ID NO: 139073 - RNA, 23 nt, Artificial Sequence
  Synthetic
ccacugcauuccagccuggguga

SEQ ID NO: 139074 - RNA, 19 nt, Artificial Sequence
  Synthetic
ugcucucccgccuggguga

SEQ ID NO: 139075 - RNA, 20 nt, Artificial Sequence
  Synthetic
cugcucucccgccuggguga

SEQ ID NO: 139076 - RNA, 21 nt, Artificial Sequence
  Synthetic
acugcucucccgccuggguga

SEQ ID NO: 139077 - RNA, 22 nt, Artificial Sequence
  Synthetic
cacugcucucccgccuggguga

SEQ ID NO: 139078 - RNA, 23 nt, Artificial Sequence
  Synthetic
ccacugcucucccgccuggguga

SEQ ID NO: 139079 - RNA, 18 nt, Artificial Sequence
  Synthetic
uguucacuaucuggguga

SEQ ID NO: 139080 - RNA, 19 nt, Artificial Sequence
  Synthetic
auguucacuaucuggguga

SEQ ID NO: 139081 - RNA, 20 nt, Artificial Sequence
  Synthetic
uauguucacuaucuggguga

SEQ ID NO: 139082 - RNA, 21 nt, Artificial Sequence
  Synthetic
cuauguucacuaucuggguga

SEQ ID NO: 139083 - RNA, 22 nt, Artificial Sequence
  Synthetic
acuauguucacuaucuggguga

SEQ ID NO: 139084 - RNA, 23 nt, Artificial Sequence
  Synthetic
uacuauguucacuaucuggguga

SEQ ID NO: 139085 - RNA, 18 nt, Artificial Sequence
  Synthetic
auauuuaaaguuauguga

SEQ ID NO: 139086 - RNA, 19 nt, Artificial Sequence
  Synthetic
aauauuuaaaguuauguga

SEQ ID NO: 139087 - RNA, 20 nt, Artificial Sequence
  Synthetic
uaauauuuaaaguuauguga

SEQ ID NO: 139088 - RNA, 21 nt, Artificial Sequence
  Synthetic
auaauauuuaaaguuauguga

SEQ ID NO: 139089 - RNA, 22 nt, Artificial Sequence
  Synthetic
aauaauauuuaaaguuauguga

SEQ ID NO: 139090 - RNA, 23 nt, Artificial Sequence
  Synthetic
aaauaauauuuaaaguuauguga

SEQ ID NO: 139091 - RNA, 24 nt, Artificial Sequence
  Synthetic
uaaauaauauuuaaaguuauguga

SEQ ID NO: 139092 - RNA, 18 nt, Artificial Sequence
  Synthetic
cagccuccagaacuguga

SEQ ID NO: 139093 - RNA, 19 nt, Artificial Sequence
  Synthetic
ccagccuccagaacuguga

SEQ ID NO: 139094 - RNA, 20 nt, Artificial Sequence
  Synthetic
cccagccuccagaacuguga

SEQ ID NO: 139095 - RNA, 21 nt, Artificial Sequence
  Synthetic
ucccagccuccagaacuguga

SEQ ID NO: 139096 - RNA, 22 nt, Artificial Sequence
  Synthetic
uucccagccuccagaacuguga

SEQ ID NO: 139097 - RNA, 23 nt, Artificial Sequence
  Synthetic
cuucccagccuccagaacuguga

SEQ ID NO: 139098 - RNA, 24 nt, Artificial Sequence
  Synthetic
acuucccagccuccagaacuguga

SEQ ID NO: 139099 - RNA, 18 nt, Artificial Sequence
  Synthetic
caggcuggagugcuguga

SEQ ID NO: 139100 - RNA, 19 nt, Artificial Sequence
  Synthetic
ccaggcuggagugcuguga

SEQ ID NO: 139101 - RNA, 20 nt, Artificial Sequence
  Synthetic
cccaggcuggagugcuguga

SEQ ID NO: 139102 - RNA, 22 nt, Artificial Sequence
  Synthetic
ugcccaggcuggagugcuguga

SEQ ID NO: 139103 - RNA, 23 nt, Artificial Sequence
  Synthetic
uugcccaggcuggagugcuguga

SEQ ID NO: 139104 - RNA, 18 nt, Artificial Sequence
  Synthetic
auaacuaaaggaguguga

SEQ ID NO: 139105 - RNA, 19 nt, Artificial Sequence
  Synthetic
aauaacuaaaggaguguga

SEQ ID NO: 139106 - RNA, 20 nt, Artificial Sequence
  Synthetic
aaauaacuaaaggaguguga

SEQ ID NO: 139107 - RNA, 21 nt, Artificial Sequence
  Synthetic
aaaauaacuaaaggaguguga

SEQ ID NO: 139108 - RNA, 22 nt, Artificial Sequence
  Synthetic
aaaaauaacuaaaggaguguga

SEQ ID NO: 139109 - RNA, 23 nt, Artificial Sequence
  Synthetic
uaaaaauaacuaaaggaguguga

SEQ ID NO: 139110 - RNA, 24 nt, Artificial Sequence
  Synthetic
uuaaaaauaacuaaaggaguguga

SEQ ID NO: 139111 - RNA, 18 nt, Artificial Sequence
  Synthetic
uggagucagaagguguga

SEQ ID NO: 139112 - RNA, 20 nt, Artificial Sequence
  Synthetic
aguggagucagaagguguga

SEQ ID NO: 139113 - RNA, 21 nt, Artificial Sequence
  Synthetic
aaguggagucagaagguguga

SEQ ID NO: 139114 - RNA, 23 nt, Artificial Sequence
  Synthetic
agaaguggagucagaagguguga

SEQ ID NO: 139115 - RNA, 18 nt, Artificial Sequence
  Synthetic
caaacaaaaccuguguga

SEQ ID NO: 139116 - RNA, 19 nt, Artificial Sequence
  Synthetic
acaaacaaaaccuguguga

SEQ ID NO: 139117 - RNA, 20 nt, Artificial Sequence
  Synthetic
aacaaacaaaaccuguguga

SEQ ID NO: 139118 - RNA, 21 nt, Artificial Sequence
  Synthetic
aaacaaacaaaaccuguguga

SEQ ID NO: 139119 - RNA, 22 nt, Artificial Sequence
  Synthetic
caaacaaacaaaaccuguguga

SEQ ID NO: 139120 - RNA, 23 nt, Artificial Sequence
  Synthetic
acaaacaaacaaaaccuguguga

SEQ ID NO: 139121 - RNA, 24 nt, Artificial Sequence
  Synthetic
aacaaacaaacaaaaccuguguga

SEQ ID NO: 139122 - RNA, 18 nt, Artificial Sequence
  Synthetic
ucuuuauucauuuuguga

SEQ ID NO: 139123 - RNA, 19 nt, Artificial Sequence
  Synthetic
uucuuuauucauuuuguga

SEQ ID NO: 139124 - RNA, 20 nt, Artificial Sequence
  Synthetic
auucuuuauucauuuuguga

SEQ ID NO: 139125 - RNA, 18 nt, Artificial Sequence
  Synthetic
cuaaaaaugaaaaauuga

SEQ ID NO: 139126 - RNA, 19 nt, Artificial Sequence
  Synthetic
acuaaaaaugaaaaauuga

SEQ ID NO: 139127 - RNA, 20 nt, Artificial Sequence
  Synthetic
cacuaaaaaugaaaaauuga

SEQ ID NO: 139128 - RNA, 19 nt, Artificial Sequence
  Synthetic
ugcaauaaauguucauuga

SEQ ID NO: 139129 - RNA, 20 nt, Artificial Sequence
  Synthetic
augcaauaaauguucauuga

SEQ ID NO: 139130 - RNA, 21 nt, Artificial Sequence
  Synthetic
aaugcaauaaauguucauuga

SEQ ID NO: 139131 - RNA, 24 nt, Artificial Sequence
  Synthetic
uggaaugcaauaaauguucauuga

SEQ ID NO: 139132 - RNA, 18 nt, Artificial Sequence
  Synthetic
uggucuuuguuucauuga

SEQ ID NO: 139133 - RNA, 19 nt, Artificial Sequence
  Synthetic
auggucuuuguuucauuga

SEQ ID NO: 139134 - RNA, 18 nt, Artificial Sequence
  Synthetic
uguggaaugaaugauuga

SEQ ID NO: 139135 - RNA, 19 nt, Artificial Sequence
  Synthetic
auguggaaugaaugauuga

SEQ ID NO: 139136 - RNA, 20 nt, Artificial Sequence
  Synthetic
uauguggaaugaaugauuga

SEQ ID NO: 139137 - RNA, 21 nt, Artificial Sequence
  Synthetic
auauguggaaugaaugauuga

SEQ ID NO: 139138 - RNA, 22 nt, Artificial Sequence
  Synthetic
aauauguggaaugaaugauuga

SEQ ID NO: 139139 - RNA, 23 nt, Artificial Sequence
  Synthetic
aaauauguggaaugaaugauuga

SEQ ID NO: 139140 - RNA, 24 nt, Artificial Sequence
  Synthetic
aaaauauguggaaugaaugauuga

SEQ ID NO: 139141 - RNA, 19 nt, Artificial Sequence
  Synthetic
ugauugauugauugauuga

SEQ ID NO: 139142 - RNA, 20 nt, Artificial Sequence
  Synthetic
uugauugauugauugauuga

SEQ ID NO: 139143 - RNA, 21 nt, Artificial Sequence
  Synthetic
auugauugauugauugauuga

SEQ ID NO: 139144 - RNA, 23 nt, Artificial Sequence
  Synthetic
cgauugauugauugauugauuga

SEQ ID NO: 139145 - RNA, 24 nt, Artificial Sequence
  Synthetic
ucgauugauugauugauugauuga

SEQ ID NO: 139146 - RNA, 18 nt, Artificial Sequence
  Synthetic
caaaggagaaaugcuuga

SEQ ID NO: 139147 - RNA, 19 nt, Artificial Sequence
  Synthetic
acaaaggagaaaugcuuga

SEQ ID NO: 139148 - RNA, 20 nt, Artificial Sequence
  Synthetic
cacaaaggagaaaugcuuga

SEQ ID NO: 139149 - RNA, 21 nt, Artificial Sequence
  Synthetic
acacaaaggagaaaugcuuga

SEQ ID NO: 139150 - RNA, 22 nt, Artificial Sequence
  Synthetic
aacacaaaggagaaaugcuuga

SEQ ID NO: 139151 - RNA, 23 nt, Artificial Sequence
  Synthetic
uaacacaaaggagaaaugcuuga

SEQ ID NO: 139152 - RNA, 20 nt, Artificial Sequence
  Synthetic
agguucucaauauuuguuga

SEQ ID NO: 139153 - RNA, 21 nt, Artificial Sequence
  Synthetic
uagguucucaauauuuguuga

SEQ ID NO: 139154 - RNA, 23 nt, Artificial Sequence
  Synthetic
aguagguucucaauauuuguuga

SEQ ID NO: 139155 - RNA, 24 nt, Artificial Sequence
  Synthetic
uaguagguucucaauauuuguuga

SEQ ID NO: 139156 - RNA, 18 nt, Artificial Sequence
  Synthetic
aauuguuuuauaauuuga

SEQ ID NO: 139157 - RNA, 20 nt, Artificial Sequence
  Synthetic
agaauuguuuuauaauuuga

SEQ ID NO: 139158 - RNA, 18 nt, Artificial Sequence
  Synthetic
acaacaaauaaauuuuga

SEQ ID NO: 139159 - RNA, 19 nt, Artificial Sequence
  Synthetic
uacaacaaauaaauuuuga

SEQ ID NO: 139160 - RNA, 20 nt, Artificial Sequence
  Synthetic
auacaacaaauaaauuuuga

SEQ ID NO: 139161 - RNA, 18 nt, Artificial Sequence
  Synthetic
ccuucacccacuuuuuga

SEQ ID NO: 139162 - RNA, 19 nt, Artificial Sequence
  Synthetic
uccuucacccacuuuuuga

SEQ ID NO: 139163 - RNA, 18 nt, Artificial Sequence
  Synthetic
ccuucgcccacuuuuuga

SEQ ID NO: 139164 - RNA, 19 nt, Artificial Sequence
  Synthetic
uccuucgcccacuuuuuga

SEQ ID NO: 139165 - RNA, 20 nt, Artificial Sequence
  Synthetic
auccuucgcccacuuuuuga

SEQ ID NO: 139166 - RNA, 21 nt, Artificial Sequence
  Synthetic
uauccuucgcccacuuuuuga

SEQ ID NO: 139167 - RNA, 22 nt, Artificial Sequence
  Synthetic
auauccuucgcccacuuuuuga

SEQ ID NO: 139168 - RNA, 23 nt, Artificial Sequence
  Synthetic
cauauccuucgcccacuuuuuga

SEQ ID NO: 139169 - RNA, 24 nt, Artificial Sequence
  Synthetic
ucauauccuucgcccacuuuuuga

SEQ ID NO: 139170 - RNA, 18 nt, Artificial Sequence
  Synthetic
uuugcccauuuuuuuuga

SEQ ID NO: 139171 - RNA, 19 nt, Artificial Sequence
  Synthetic
uuuugcccauuuuuuuuga

SEQ ID NO: 139172 - RNA, 20 nt, Artificial Sequence
  Synthetic
cuuuugcccauuuuuuuuga

SEQ ID NO: 139173 - RNA, 21 nt, Artificial Sequence
  Synthetic
ucuuuugcccauuuuuuuuga

SEQ ID NO: 139174 - RNA, 23 nt, Artificial Sequence
  Synthetic
ugucuuuugcccauuuuuuuuga

SEQ ID NO: 139175 - RNA, 24 nt, Artificial Sequence
  Synthetic
augucuuuugcccauuuuuuuuga

SEQ ID NO: 139176 - RNA, 21 nt, Artificial Sequence
  Synthetic
auucuaaaugugcaaaaaaua

SEQ ID NO: 139177 - RNA, 22 nt, Artificial Sequence
  Synthetic
cauucuaaaugugcaaaaaaua

SEQ ID NO: 139178 - RNA, 23 nt, Artificial Sequence
  Synthetic
acauucuaaaugugcaaaaaaua

SEQ ID NO: 139179 - RNA, 24 nt, Artificial Sequence
  Synthetic
aacauucuaaaugugcaaaaaaua

SEQ ID NO: 139180 - RNA, 18 nt, Artificial Sequence
  Synthetic
uucugagacacaaaaaua

SEQ ID NO: 139181 - RNA, 19 nt, Artificial Sequence
  Synthetic
uuucugagacacaaaaaua

SEQ ID NO: 139182 - RNA, 20 nt, Artificial Sequence
  Synthetic
auuucugagacacaaaaaua

SEQ ID NO: 139183 - RNA, 21 nt, Artificial Sequence
  Synthetic
agggagagagggagaaaaaua

SEQ ID NO: 139184 - RNA, 18 nt, Artificial Sequence
  Synthetic
agauuacuuugaaaaaua

SEQ ID NO: 139185 - RNA, 19 nt, Artificial Sequence
  Synthetic
cagauuacuuugaaaaaua

SEQ ID NO: 139186 - RNA, 18 nt, Artificial Sequence
  Synthetic
auuaauaaauacaaaaua

SEQ ID NO: 139187 - RNA, 18 nt, Artificial Sequence
  Synthetic
uucauuuuuaagaaaaua

SEQ ID NO: 139188 - RNA, 19 nt, Artificial Sequence
  Synthetic
auucauuuuuaagaaaaua

SEQ ID NO: 139189 - RNA, 20 nt, Artificial Sequence
  Synthetic
aauucauuuuuaagaaaaua

SEQ ID NO: 139190 - RNA, 19 nt, Artificial Sequence
  Synthetic
agacuugcaugggaaaaua

SEQ ID NO: 139191 - RNA, 20 nt, Artificial Sequence
  Synthetic
aagacuugcaugggaaaaua

SEQ ID NO: 139192 - RNA, 18 nt, Artificial Sequence
  Synthetic
uuagcuaauaugaaaaua

SEQ ID NO: 139193 - RNA, 19 nt, Artificial Sequence
  Synthetic
uuuagcuaauaugaaaaua

SEQ ID NO: 139194 - RNA, 20 nt, Artificial Sequence
  Synthetic
cuuuagcuaauaugaaaaua

SEQ ID NO: 139195 - RNA, 18 nt, Artificial Sequence
  Synthetic
auuuguuauguuaaaaua

SEQ ID NO: 139196 - RNA, 19 nt, Artificial Sequence
  Synthetic
aauuuguuauguuaaaaua

SEQ ID NO: 139197 - RNA, 20 nt, Artificial Sequence
  Synthetic
aaauuuguuauguuaaaaua

SEQ ID NO: 139198 - RNA, 18 nt, Artificial Sequence
  Synthetic
ucuuuuuguuuuaaaaua

SEQ ID NO: 139199 - RNA, 19 nt, Artificial Sequence
  Synthetic
aucuuuuuguuuuaaaaua

SEQ ID NO: 139200 - RNA, 20 nt, Artificial Sequence
  Synthetic
uaucuuuuuguuuuaaaaua

SEQ ID NO: 139201 - RNA, 22 nt, Artificial Sequence
  Synthetic
cguaucuuuuuguuuuaaaaua

SEQ ID NO: 139202 - RNA, 23 nt, Artificial Sequence
  Synthetic
ucguaucuuuuuguuuuaaaaua

SEQ ID NO: 139203 - RNA, 24 nt, Artificial Sequence
  Synthetic
uucguaucuuuuuguuuuaaaaua

SEQ ID NO: 139204 - RNA, 18 nt, Artificial Sequence
  Synthetic
aucaaaaauuuacaaaua

SEQ ID NO: 139205 - RNA, 19 nt, Artificial Sequence
  Synthetic
uaucaaaaauuuacaaaua

SEQ ID NO: 139206 - RNA, 20 nt, Artificial Sequence
  Synthetic
cuaucaaaaauuuacaaaua

SEQ ID NO: 139207 - RNA, 19 nt, Artificial Sequence
  Synthetic
agcaauugaaaagcaaaua

SEQ ID NO: 139208 - RNA, 20 nt, Artificial Sequence
  Synthetic
aagcaauugaaaagcaaaua

SEQ ID NO: 139209 - RNA, 19 nt, Artificial Sequence
  Synthetic
agucaccaaagggcaaaua

SEQ ID NO: 139210 - RNA, 20 nt, Artificial Sequence
  Synthetic
cagucaccaaagggcaaaua

SEQ ID NO: 139211 - RNA, 21 nt, Artificial Sequence
  Synthetic
ccagucaccaaagggcaaaua

SEQ ID NO: 139212 - RNA, 23 nt, Artificial Sequence
  Synthetic
agccagucaccaaagggcaaaua

SEQ ID NO: 139213 - RNA, 24 nt, Artificial Sequence
  Synthetic
aagccagucaccaaagggcaaaua

SEQ ID NO: 139214 - RNA, 18 nt, Artificial Sequence
  Synthetic
agaaaagaagugcaaaua

SEQ ID NO: 139215 - RNA, 19 nt, Artificial Sequence
  Synthetic
aagaaaagaagugcaaaua

SEQ ID NO: 139216 - RNA, 18 nt, Artificial Sequence
  Synthetic
aagaagagacaucaaaua

SEQ ID NO: 139217 - RNA, 19 nt, Artificial Sequence
  Synthetic
aaagaagagacaucaaaua

SEQ ID NO: 139218 - RNA, 20 nt, Artificial Sequence
  Synthetic
aaaagaagagacaucaaaua

SEQ ID NO: 139219 - RNA, 18 nt, Artificial Sequence
  Synthetic
aaaugucacuuucaaaua

SEQ ID NO: 139220 - RNA, 19 nt, Artificial Sequence
  Synthetic
uaaaugucacuuucaaaua

SEQ ID NO: 139221 - RNA, 20 nt, Artificial Sequence
  Synthetic
uuaaaugucacuuucaaaua

SEQ ID NO: 139222 - RNA, 22 nt, Artificial Sequence
  Synthetic
aguuaaaugucacuuucaaaua

SEQ ID NO: 139223 - RNA, 23 nt, Artificial Sequence
  Synthetic
aaguuaaaugucacuuucaaaua

SEQ ID NO: 139224 - RNA, 24 nt, Artificial Sequence
  Synthetic
uaaguuaaaugucacuuucaaaua

SEQ ID NO: 139225 - RNA, 18 nt, Artificial Sequence
  Synthetic
aggcaagggaaagaaaua

SEQ ID NO: 139226 - RNA, 19 nt, Artificial Sequence
  Synthetic
caggcaagggaaagaaaua

SEQ ID NO: 139227 - RNA, 20 nt, Artificial Sequence
  Synthetic
ucaggcaagggaaagaaaua

SEQ ID NO: 139228 - RNA, 21 nt, Artificial Sequence
  Synthetic
aucaggcaagggaaagaaaua

SEQ ID NO: 139229 - RNA, 22 nt, Artificial Sequence
  Synthetic
aaucaggcaagggaaagaaaua

SEQ ID NO: 139230 - RNA, 23 nt, Artificial Sequence
  Synthetic
caaucaggcaagggaaagaaaua

SEQ ID NO: 139231 - RNA, 24 nt, Artificial Sequence
  Synthetic
acaaucaggcaagggaaagaaaua

SEQ ID NO: 139232 - RNA, 18 nt, Artificial Sequence
  Synthetic
auuuaagauaaagaaaua

SEQ ID NO: 139233 - RNA, 19 nt, Artificial Sequence
  Synthetic
cauuuaagauaaagaaaua

SEQ ID NO: 139234 - RNA, 18 nt, Artificial Sequence
  Synthetic
auauauuuuucagaaaua

SEQ ID NO: 139235 - RNA, 19 nt, Artificial Sequence
  Synthetic
aauauauuuuucagaaaua

SEQ ID NO: 139236 - RNA, 20 nt, Artificial Sequence
  Synthetic
uaauauauuuuucagaaaua

SEQ ID NO: 139237 - RNA, 18 nt, Artificial Sequence
  Synthetic
ucuaaacagagagaaaua

SEQ ID NO: 139238 - RNA, 19 nt, Artificial Sequence
  Synthetic
uucuaaacagagagaaaua

SEQ ID NO: 139239 - RNA, 20 nt, Artificial Sequence
  Synthetic
auucuaaacagagagaaaua

SEQ ID NO: 139240 - RNA, 18 nt, Artificial Sequence
  Synthetic
uaaaauagaauagaaaua

SEQ ID NO: 139241 - RNA, 20 nt, Artificial Sequence
  Synthetic
aguaaaauagaauagaaaua

SEQ ID NO: 139242 - RNA, 18 nt, Artificial Sequence
  Synthetic
aggcaggagaaggaaaua

SEQ ID NO: 139243 - RNA, 19 nt, Artificial Sequence
  Synthetic
caggcaggagaaggaaaua

SEQ ID NO: 139244 - RNA, 20 nt, Artificial Sequence
  Synthetic
ucaggcaggagaaggaaaua

SEQ ID NO: 139245 - RNA, 18 nt, Artificial Sequence
  Synthetic
aguagggagguggaaaua

SEQ ID NO: 139246 - RNA, 19 nt, Artificial Sequence
  Synthetic
aaguagggagguggaaaua

SEQ ID NO: 139247 - RNA, 21 nt, Artificial Sequence
  Synthetic
agaaguagggagguggaaaua

SEQ ID NO: 139248 - RNA, 23 nt, Artificial Sequence
  Synthetic
ugagaaguagggagguggaaaua

SEQ ID NO: 139249 - RNA, 24 nt, Artificial Sequence
  Synthetic
uugagaaguagggagguggaaaua

SEQ ID NO: 139250 - RNA, 19 nt, Artificial Sequence
  Synthetic
agguguggauguggaaaua

SEQ ID NO: 139251 - RNA, 18 nt, Artificial Sequence
  Synthetic
auuuuaaauguugaaaua

SEQ ID NO: 139252 - RNA, 19 nt, Artificial Sequence
  Synthetic
aauuuuaaauguugaaaua

SEQ ID NO: 139253 - RNA, 20 nt, Artificial Sequence
  Synthetic
aaauuuuaaauguugaaaua

SEQ ID NO: 139254 - RNA, 18 nt, Artificial Sequence
  Synthetic
auaggcacucaauaaaua

SEQ ID NO: 139255 - RNA, 19 nt, Artificial Sequence
  Synthetic
aauaggcacucaauaaaua

SEQ ID NO: 139256 - RNA, 18 nt, Artificial Sequence
  Synthetic
ccgcgcccagccuaaaua

SEQ ID NO: 139257 - RNA, 19 nt, Artificial Sequence
  Synthetic
accgcgcccagccuaaaua

SEQ ID NO: 139258 - RNA, 20 nt, Artificial Sequence
  Synthetic
caccgcgcccagccuaaaua

SEQ ID NO: 139259 - RNA, 21 nt, Artificial Sequence
  Synthetic
ccaccgcgcccagccuaaaua

SEQ ID NO: 139260 - RNA, 23 nt, Artificial Sequence
  Synthetic
agccaccgcgcccagccuaaaua

SEQ ID NO: 139261 - RNA, 18 nt, Artificial Sequence
  Synthetic
aacaccauuuauuaaaua

SEQ ID NO: 139262 - RNA, 19 nt, Artificial Sequence
  Synthetic
caacaccauuuauuaaaua

SEQ ID NO: 139263 - RNA, 20 nt, Artificial Sequence
  Synthetic
ccaacaccauuuauuaaaua

SEQ ID NO: 139264 - RNA, 21 nt, Artificial Sequence
  Synthetic
cccaacaccauuuauuaaaua

SEQ ID NO: 139265 - RNA, 22 nt, Artificial Sequence
  Synthetic
ucccaacaccauuuauuaaaua

SEQ ID NO: 139266 - RNA, 23 nt, Artificial Sequence
  Synthetic
uucccaacaccauuuauuaaaua

SEQ ID NO: 139267 - RNA, 24 nt, Artificial Sequence
  Synthetic
uuucccaacaccauuuauuaaaua

SEQ ID NO: 139268 - RNA, 19 nt, Artificial Sequence
  Synthetic
cgacaccauuuauuaaaua

SEQ ID NO: 139269 - RNA, 20 nt, Artificial Sequence
  Synthetic
ccgacaccauuuauuaaaua

SEQ ID NO: 139270 - RNA, 21 nt, Artificial Sequence
  Synthetic
cccgacaccauuuauuaaaua

SEQ ID NO: 139271 - RNA, 22 nt, Artificial Sequence
  Synthetic
ucccgacaccauuuauuaaaua

SEQ ID NO: 139272 - RNA, 23 nt, Artificial Sequence
  Synthetic
uucccgacaccauuuauuaaaua

SEQ ID NO: 139273 - RNA, 24 nt, Artificial Sequence
  Synthetic
uuucccgacaccauuuauuaaaua

SEQ ID NO: 139274 - RNA, 18 nt, Artificial Sequence
  Synthetic
agcaccauuuauuaaaua

SEQ ID NO: 139275 - RNA, 19 nt, Artificial Sequence
  Synthetic
cagcaccauuuauuaaaua

SEQ ID NO: 139276 - RNA, 20 nt, Artificial Sequence
  Synthetic
ccagcaccauuuauuaaaua

SEQ ID NO: 139277 - RNA, 21 nt, Artificial Sequence
  Synthetic
cccagcaccauuuauuaaaua

SEQ ID NO: 139278 - RNA, 22 nt, Artificial Sequence
  Synthetic
ucccagcaccauuuauuaaaua

SEQ ID NO: 139279 - RNA, 23 nt, Artificial Sequence
  Synthetic
uucccagcaccauuuauuaaaua

SEQ ID NO: 139280 - RNA, 24 nt, Artificial Sequence
  Synthetic
uuucccagcaccauuuauuaaaua

SEQ ID NO: 139281 - RNA, 18 nt, Artificial Sequence
  Synthetic
agcaccguuuauuaaaua

SEQ ID NO: 139282 - RNA, 19 nt, Artificial Sequence
  Synthetic
cagcaccguuuauuaaaua

SEQ ID NO: 139283 - RNA, 20 nt, Artificial Sequence
  Synthetic
ccagcaccguuuauuaaaua

SEQ ID NO: 139284 - RNA, 21 nt, Artificial Sequence
  Synthetic
cccagcaccguuuauuaaaua

SEQ ID NO: 139285 - RNA, 22 nt, Artificial Sequence
  Synthetic
ucccagcaccguuuauuaaaua

SEQ ID NO: 139286 - RNA, 23 nt, Artificial Sequence
  Synthetic
uucccagcaccguuuauuaaaua

SEQ ID NO: 139287 - RNA, 24 nt, Artificial Sequence
  Synthetic
uuucccagcaccguuuauuaaaua

SEQ ID NO: 139288 - RNA, 18 nt, Artificial Sequence
  Synthetic
auuauucagccuuaaaua

SEQ ID NO: 139289 - RNA, 19 nt, Artificial Sequence
  Synthetic
uauuauucagccuuaaaua

SEQ ID NO: 139290 - RNA, 21 nt, Artificial Sequence
  Synthetic
aguauuauucagccuuaaaua

SEQ ID NO: 139291 - RNA, 24 nt, Artificial Sequence
  Synthetic
uggaguauuauucagccuuaaaua

SEQ ID NO: 139292 - RNA, 18 nt, Artificial Sequence
  Synthetic
agcaucaugucuuaaaua

SEQ ID NO: 139293 - RNA, 19 nt, Artificial Sequence
  Synthetic
cagcaucaugucuuaaaua

SEQ ID NO: 139294 - RNA, 20 nt, Artificial Sequence
  Synthetic
ccagcaucaugucuuaaaua

SEQ ID NO: 139295 - RNA, 18 nt, Artificial Sequence
  Synthetic
cugacuaucauuuaaaua

SEQ ID NO: 139296 - RNA, 19 nt, Artificial Sequence
  Synthetic
acugacuaucauuuaaaua

SEQ ID NO: 139297 - RNA, 20 nt, Artificial Sequence
  Synthetic
aacugacuaucauuuaaaua

SEQ ID NO: 139298 - RNA, 18 nt, Artificial Sequence
  Synthetic
ugccauuguguuuaaaua

SEQ ID NO: 139299 - RNA, 19 nt, Artificial Sequence
  Synthetic
uugccauuguguuuaaaua

SEQ ID NO: 139300 - RNA, 20 nt, Artificial Sequence
  Synthetic
uuugccauuguguuuaaaua

SEQ ID NO: 139301 - RNA, 18 nt, Artificial Sequence
  Synthetic
ucccugaauagaccaaua

SEQ ID NO: 139302 - RNA, 19 nt, Artificial Sequence
  Synthetic
aucccugaauagaccaaua

SEQ ID NO: 139303 - RNA, 20 nt, Artificial Sequence
  Synthetic
aaucccugaauagaccaaua

SEQ ID NO: 139304 - RNA, 22 nt, Artificial Sequence
  Synthetic
cgaaucccugaauagaccaaua

SEQ ID NO: 139305 - RNA, 23 nt, Artificial Sequence
  Synthetic
ucgaaucccugaauagaccaaua

SEQ ID NO: 139306 - RNA, 24 nt, Artificial Sequence
  Synthetic
aucgaaucccugaauagaccaaua

SEQ ID NO: 139307 - RNA, 18 nt, Artificial Sequence
  Synthetic
uucacaauacuaccaaua

SEQ ID NO: 139308 - RNA, 19 nt, Artificial Sequence
  Synthetic
auucacaauacuaccaaua

SEQ ID NO: 139309 - RNA, 20 nt, Artificial Sequence
  Synthetic
aauucacaauacuaccaaua

SEQ ID NO: 139310 - RNA, 21 nt, Artificial Sequence
  Synthetic
uaauucacaauacuaccaaua

SEQ ID NO: 139311 - RNA, 22 nt, Artificial Sequence
  Synthetic
cuaauucacaauacuaccaaua

SEQ ID NO: 139312 - RNA, 23 nt, Artificial Sequence
  Synthetic
acuaauucacaauacuaccaaua

SEQ ID NO: 139313 - RNA, 24 nt, Artificial Sequence
  Synthetic
uacuaauucacaauacuaccaaua

SEQ ID NO: 139314 - RNA, 18 nt, Artificial Sequence
  Synthetic
acugaaauggaagcaaua

SEQ ID NO: 139315 - RNA, 20 nt, Artificial Sequence
  Synthetic
agacugaaauggaagcaaua

SEQ ID NO: 139316 - RNA, 18 nt, Artificial Sequence
  Synthetic
auaaguaauuaaucaaua

SEQ ID NO: 139317 - RNA, 19 nt, Artificial Sequence
  Synthetic
aauaaguaauuaaucaaua

SEQ ID NO: 139318 - RNA, 20 nt, Artificial Sequence
  Synthetic
aaauaaguaauuaaucaaua

SEQ ID NO: 139319 - RNA, 18 nt, Artificial Sequence
  Synthetic
cuguugugcuaucgaaua

SEQ ID NO: 139320 - RNA, 19 nt, Artificial Sequence
  Synthetic
ccuguugugcuaucgaaua

SEQ ID NO: 139321 - RNA, 20 nt, Artificial Sequence
  Synthetic
cccuguugugcuaucgaaua

SEQ ID NO: 139322 - RNA, 21 nt, Artificial Sequence
  Synthetic
acccuguugugcuaucgaaua

SEQ ID NO: 139323 - RNA, 22 nt, Artificial Sequence
  Synthetic
cacccuguugugcuaucgaaua

SEQ ID NO: 139324 - RNA, 23 nt, Artificial Sequence
  Synthetic
ucacccuguugugcuaucgaaua

SEQ ID NO: 139325 - RNA, 18 nt, Artificial Sequence
  Synthetic
uaagaaaguaaaggaaua

SEQ ID NO: 139326 - RNA, 19 nt, Artificial Sequence
  Synthetic
uuaagaaaguaaaggaaua

SEQ ID NO: 139327 - RNA, 20 nt, Artificial Sequence
  Synthetic
auuaagaaaguaaaggaaua

SEQ ID NO: 139328 - RNA, 21 nt, Artificial Sequence
  Synthetic
uauuaagaaaguaaaggaaua

SEQ ID NO: 139329 - RNA, 22 nt, Artificial Sequence
  Synthetic
uuauuaagaaaguaaaggaaua

SEQ ID NO: 139330 - RNA, 23 nt, Artificial Sequence
  Synthetic
uuuauuaagaaaguaaaggaaua

SEQ ID NO: 139331 - RNA, 18 nt, Artificial Sequence
  Synthetic
agguggagugagggaaua

SEQ ID NO: 139332 - RNA, 18 nt, Artificial Sequence
  Synthetic
augagaaaacugggaaua

SEQ ID NO: 139333 - RNA, 19 nt, Artificial Sequence
  Synthetic
uaugagaaaacugggaaua

SEQ ID NO: 139334 - RNA, 20 nt, Artificial Sequence
  Synthetic
cuaugagaaaacugggaaua

SEQ ID NO: 139335 - RNA, 21 nt, Artificial Sequence
  Synthetic
acuaugagaaaacugggaaua

SEQ ID NO: 139336 - RNA, 22 nt, Artificial Sequence
  Synthetic
aacuaugagaaaacugggaaua

SEQ ID NO: 139337 - RNA, 23 nt, Artificial Sequence
  Synthetic
aaacuaugagaaaacugggaaua

SEQ ID NO: 139338 - RNA, 24 nt, Artificial Sequence
  Synthetic
aaaacuaugagaaaacugggaaua

SEQ ID NO: 139339 - RNA, 18 nt, Artificial Sequence
  Synthetic
auguucauugaaugaaua

SEQ ID NO: 139340 - RNA, 19 nt, Artificial Sequence
  Synthetic
aauguucauugaaugaaua

SEQ ID NO: 139341 - RNA, 20 nt, Artificial Sequence
  Synthetic
aaauguucauugaaugaaua

SEQ ID NO: 139342 - RNA, 21 nt, Artificial Sequence
  Synthetic
uaaauguucauugaaugaaua

SEQ ID NO: 139343 - RNA, 22 nt, Artificial Sequence
  Synthetic
auaaauguucauugaaugaaua

SEQ ID NO: 139344 - RNA, 23 nt, Artificial Sequence
  Synthetic
aauaaauguucauugaaugaaua

SEQ ID NO: 139345 - RNA, 24 nt, Artificial Sequence
  Synthetic
caauaaauguucauugaaugaaua

SEQ ID NO: 139346 - RNA, 18 nt, Artificial Sequence
  Synthetic
uucaugaaggcuugaaua

SEQ ID NO: 139347 - RNA, 19 nt, Artificial Sequence
  Synthetic
auucaugaaggcuugaaua

SEQ ID NO: 139348 - RNA, 20 nt, Artificial Sequence
  Synthetic
aauucaugaaggcuugaaua

SEQ ID NO: 139349 - RNA, 18 nt, Artificial Sequence
  Synthetic
cccagggaagaaauaaua

SEQ ID NO: 139350 - RNA, 19 nt, Artificial Sequence
  Synthetic
acccagggaagaaauaaua

SEQ ID NO: 139351 - RNA, 20 nt, Artificial Sequence
  Synthetic
uacccagggaagaaauaaua

SEQ ID NO: 139352 - RNA, 18 nt, Artificial Sequence
  Synthetic
uaggccuauguaauaaua

SEQ ID NO: 139353 - RNA, 19 nt, Artificial Sequence
  Synthetic
auaggccuauguaauaaua

SEQ ID NO: 139354 - RNA, 20 nt, Artificial Sequence
  Synthetic
uauaggccuauguaauaaua

SEQ ID NO: 139355 - RNA, 21 nt, Artificial Sequence
  Synthetic
auauaggccuauguaauaaua

SEQ ID NO: 139356 - RNA, 22 nt, Artificial Sequence
  Synthetic
uauauaggccuauguaauaaua

SEQ ID NO: 139357 - RNA, 23 nt, Artificial Sequence
  Synthetic
uuauauaggccuauguaauaaua

SEQ ID NO: 139358 - RNA, 24 nt, Artificial Sequence
  Synthetic
uuuauauaggccuauguaauaaua

SEQ ID NO: 139359 - RNA, 19 nt, Artificial Sequence
  Synthetic
aggcuuaagcaugauaaua

SEQ ID NO: 139360 - RNA, 20 nt, Artificial Sequence
  Synthetic
uaggcuuaagcaugauaaua

SEQ ID NO: 139361 - RNA, 18 nt, Artificial Sequence
  Synthetic
cauaaaaugcaauuaaua

SEQ ID NO: 139362 - RNA, 19 nt, Artificial Sequence
  Synthetic
acauaaaaugcaauuaaua

SEQ ID NO: 139363 - RNA, 20 nt, Artificial Sequence
  Synthetic
uacauaaaaugcaauuaaua

SEQ ID NO: 139364 - RNA, 23 nt, Artificial Sequence
  Synthetic
agguacauaaaaugcaauuaaua

SEQ ID NO: 139365 - RNA, 24 nt, Artificial Sequence
  Synthetic
aagguacauaaaaugcaauuaaua

SEQ ID NO: 139366 - RNA, 18 nt, Artificial Sequence
  Synthetic
aacuuccacaucuuaaua

SEQ ID NO: 139367 - RNA, 19 nt, Artificial Sequence
  Synthetic
uaacuuccacaucuuaaua

SEQ ID NO: 139368 - RNA, 20 nt, Artificial Sequence
  Synthetic
auaacuuccacaucuuaaua

SEQ ID NO: 139369 - RNA, 23 nt, Artificial Sequence
  Synthetic
aggauaacuuccacaucuuaaua

SEQ ID NO: 139370 - RNA, 18 nt, Artificial Sequence
  Synthetic
accuuuauguuaaacaua

SEQ ID NO: 139371 - RNA, 19 nt, Artificial Sequence
  Synthetic
uaccuuuauguuaaacaua

SEQ ID NO: 139372 - RNA, 20 nt, Artificial Sequence
  Synthetic
uuaccuuuauguuaaacaua

SEQ ID NO: 139373 - RNA, 18 nt, Artificial Sequence
  Synthetic
agccauacugauaacaua

SEQ ID NO: 139374 - RNA, 19 nt, Artificial Sequence
  Synthetic
aagccauacugauaacaua

SEQ ID NO: 139375 - RNA, 18 nt, Artificial Sequence
  Synthetic
auuuggaauacacacaua

SEQ ID NO: 139376 - RNA, 19 nt, Artificial Sequence
  Synthetic
uauuuggaauacacacaua

SEQ ID NO: 139377 - RNA, 20 nt, Artificial Sequence
  Synthetic
uuauuuggaauacacacaua

SEQ ID NO: 139378 - RNA, 21 nt, Artificial Sequence
  Synthetic
auuauuuggaauacacacaua

SEQ ID NO: 139379 - RNA, 22 nt, Artificial Sequence
  Synthetic
aauuauuuggaauacacacaua

SEQ ID NO: 139380 - RNA, 23 nt, Artificial Sequence
  Synthetic
aaauuauuuggaauacacacaua

SEQ ID NO: 139381 - RNA, 24 nt, Artificial Sequence
  Synthetic
uaaauuauuuggaauacacacaua

SEQ ID NO: 139382 - RNA, 18 nt, Artificial Sequence
  Synthetic
aguucuaccccagacaua

SEQ ID NO: 139383 - RNA, 20 nt, Artificial Sequence
  Synthetic
ugaguucuaccccagacaua

SEQ ID NO: 139384 - RNA, 21 nt, Artificial Sequence
  Synthetic
uugaguucuaccccagacaua

SEQ ID NO: 139385 - RNA, 22 nt, Artificial Sequence
  Synthetic
cuugaguucuaccccagacaua

SEQ ID NO: 139386 - RNA, 23 nt, Artificial Sequence
  Synthetic
ucuugaguucuaccccagacaua

SEQ ID NO: 139387 - RNA, 24 nt, Artificial Sequence
  Synthetic
uucuugaguucuaccccagacaua

SEQ ID NO: 139388 - RNA, 18 nt, Artificial Sequence
  Synthetic
cucccauuuuagaccaua

SEQ ID NO: 139389 - RNA, 19 nt, Artificial Sequence
  Synthetic
ucucccauuuuagaccaua

SEQ ID NO: 139390 - RNA, 20 nt, Artificial Sequence
  Synthetic
uucucccauuuuagaccaua

SEQ ID NO: 139391 - RNA, 21 nt, Artificial Sequence
  Synthetic
uuucucccauuuuagaccaua

SEQ ID NO: 139392 - RNA, 18 nt, Artificial Sequence
  Synthetic
uagcuaaugacuaccaua

SEQ ID NO: 139393 - RNA, 20 nt, Artificial Sequence
  Synthetic
uguagcuaaugacuaccaua

SEQ ID NO: 139394 - RNA, 22 nt, Artificial Sequence
  Synthetic
aguguagcuaaugacuaccaua

SEQ ID NO: 139395 - RNA, 23 nt, Artificial Sequence
  Synthetic
aaguguagcuaaugacuaccaua

SEQ ID NO: 139396 - RNA, 24 nt, Artificial Sequence
  Synthetic
caaguguagcuaaugacuaccaua

SEQ ID NO: 139397 - RNA, 19 nt, Artificial Sequence
  Synthetic
aguauuaguuugagccaua

SEQ ID NO: 139398 - RNA, 20 nt, Artificial Sequence
  Synthetic
aaguauuaguuugagccaua

SEQ ID NO: 139399 - RNA, 18 nt, Artificial Sequence
  Synthetic
uccauaccguccuccaua

SEQ ID NO: 139400 - RNA, 19 nt, Artificial Sequence
  Synthetic
cuccauaccguccuccaua

SEQ ID NO: 139401 - RNA, 20 nt, Artificial Sequence
  Synthetic
ccuccauaccguccuccaua

SEQ ID NO: 139402 - RNA, 21 nt, Artificial Sequence
  Synthetic
accuccauaccguccuccaua

SEQ ID NO: 139403 - RNA, 22 nt, Artificial Sequence
  Synthetic
aaccuccauaccguccuccaua

SEQ ID NO: 139404 - RNA, 20 nt, Artificial Sequence
  Synthetic
uggagaaugagguguccaua

SEQ ID NO: 139405 - RNA, 19 nt, Artificial Sequence
  Synthetic
agccagcuaugugagcaua

SEQ ID NO: 139406 - RNA, 20 nt, Artificial Sequence
  Synthetic
cagccagcuaugugagcaua

SEQ ID NO: 139407 - RNA, 18 nt, Artificial Sequence
  Synthetic
caauaaaauacuggcaua

SEQ ID NO: 139408 - RNA, 19 nt, Artificial Sequence
  Synthetic
ucaauaaaauacuggcaua

SEQ ID NO: 139409 - RNA, 20 nt, Artificial Sequence
  Synthetic
cucaauaaaauacuggcaua

SEQ ID NO: 139410 - RNA, 21 nt, Artificial Sequence
  Synthetic
ccucaauaaaauacuggcaua

SEQ ID NO: 139411 - RNA, 22 nt, Artificial Sequence
  Synthetic
uccucaauaaaauacuggcaua

SEQ ID NO: 139412 - RNA, 23 nt, Artificial Sequence
  Synthetic
auccucaauaaaauacuggcaua

SEQ ID NO: 139413 - RNA, 24 nt, Artificial Sequence
  Synthetic
aauccucaauaaaauacuggcaua

SEQ ID NO: 139414 - RNA, 18 nt, Artificial Sequence
  Synthetic
cccacagccaauaucaua

SEQ ID NO: 139415 - RNA, 19 nt, Artificial Sequence
  Synthetic
acccacagccaauaucaua

SEQ ID NO: 139416 - RNA, 20 nt, Artificial Sequence
  Synthetic
aacccacagccaauaucaua

SEQ ID NO: 139417 - RNA, 18 nt, Artificial Sequence
  Synthetic
cccacagccauuaucaua

SEQ ID NO: 139418 - RNA, 19 nt, Artificial Sequence
  Synthetic
acccacagccauuaucaua

SEQ ID NO: 139419 - RNA, 20 nt, Artificial Sequence
  Synthetic
aacccacagccauuaucaua

SEQ ID NO: 139420 - RNA, 21 nt, Artificial Sequence
  Synthetic
aaacccacagccauuaucaua

SEQ ID NO: 139421 - RNA, 22 nt, Artificial Sequence
  Synthetic
caaacccacagccauuaucaua

SEQ ID NO: 139422 - RNA, 23 nt, Artificial Sequence
  Synthetic
acaaacccacagccauuaucaua

SEQ ID NO: 139423 - RNA, 18 nt, Artificial Sequence
  Synthetic
uuaagaauuuuuaucaua

SEQ ID NO: 139424 - RNA, 20 nt, Artificial Sequence
  Synthetic
uguuaagaauuuuuaucaua

SEQ ID NO: 139425 - RNA, 18 nt, Artificial Sequence
  Synthetic
auuuuuuuuuucaagaua

SEQ ID NO: 139426 - RNA, 20 nt, Artificial Sequence
  Synthetic
agauuuuuuuuuucaagaua

SEQ ID NO: 139427 - RNA, 21 nt, Artificial Sequence
  Synthetic
uagauuuuuuuuuucaagaua

SEQ ID NO: 139428 - RNA, 22 nt, Artificial Sequence
  Synthetic
uuagauuuuuuuuuucaagaua

SEQ ID NO: 139429 - RNA, 24 nt, Artificial Sequence
  Synthetic
uguuagauuuuuuuuuucaagaua

SEQ ID NO: 139430 - RNA, 20 nt, Artificial Sequence
  Synthetic
aggucaaauauauacagaua

SEQ ID NO: 139431 - RNA, 21 nt, Artificial Sequence
  Synthetic
aaggucaaauauauacagaua

SEQ ID NO: 139432 - RNA, 22 nt, Artificial Sequence
  Synthetic
aaaggucaaauauauacagaua

SEQ ID NO: 139433 - RNA, 23 nt, Artificial Sequence
  Synthetic
aaaaggucaaauauauacagaua

SEQ ID NO: 139434 - RNA, 24 nt, Artificial Sequence
  Synthetic
aaaaaggucaaauauauacagaua

SEQ ID NO: 139435 - RNA, 18 nt, Artificial Sequence
  Synthetic
auguauccccuacagaua

SEQ ID NO: 139436 - RNA, 19 nt, Artificial Sequence
  Synthetic
aauguauccccuacagaua

SEQ ID NO: 139437 - RNA, 22 nt, Artificial Sequence
  Synthetic
uggaauguauccccuacagaua

SEQ ID NO: 139438 - RNA, 23 nt, Artificial Sequence
  Synthetic
uuggaauguauccccuacagaua

SEQ ID NO: 139439 - RNA, 24 nt, Artificial Sequence
  Synthetic
cuuggaauguauccccuacagaua

SEQ ID NO: 139440 - RNA, 18 nt, Artificial Sequence
  Synthetic
auauaaauaauucagaua

SEQ ID NO: 139441 - RNA, 20 nt, Artificial Sequence
  Synthetic
agauauaaauaauucagaua

SEQ ID NO: 139442 - RNA, 23 nt, Artificial Sequence
  Synthetic
agggugaucagguaccaaggaua

SEQ ID NO: 139443 - RNA, 19 nt, Artificial Sequence
  Synthetic
ugucuuaguggucuggaua

SEQ ID NO: 139444 - RNA, 20 nt, Artificial Sequence
  Synthetic
augucuuaguggucuggaua

SEQ ID NO: 139445 - RNA, 21 nt, Artificial Sequence
  Synthetic
aaugucuuaguggucuggaua

SEQ ID NO: 139446 - RNA, 23 nt, Artificial Sequence
  Synthetic
agaaugucuuaguggucuggaua

SEQ ID NO: 139447 - RNA, 18 nt, Artificial Sequence
  Synthetic
agacuggcaaauuggaua

SEQ ID NO: 139448 - RNA, 19 nt, Artificial Sequence
  Synthetic
cagacuggcaaauuggaua

SEQ ID NO: 139449 - RNA, 20 nt, Artificial Sequence
  Synthetic
acagacuggcaaauuggaua

SEQ ID NO: 139450 - RNA, 21 nt, Artificial Sequence
  Synthetic
cacagacuggcaaauuggaua

SEQ ID NO: 139451 - RNA, 22 nt, Artificial Sequence
  Synthetic
acacagacuggcaaauuggaua

SEQ ID NO: 139452 - RNA, 24 nt, Artificial Sequence
  Synthetic
agacacagacuggcaaauuggaua

SEQ ID NO: 139453 - RNA, 18 nt, Artificial Sequence
  Synthetic
ucccaagcauuuuggaua

SEQ ID NO: 139454 - RNA, 19 nt, Artificial Sequence
  Synthetic
aucccaagcauuuuggaua

SEQ ID NO: 139455 - RNA, 20 nt, Artificial Sequence
  Synthetic
aaucccaagcauuuuggaua

SEQ ID NO: 139456 - RNA, 21 nt, Artificial Sequence
  Synthetic
caaucccaagcauuuuggaua

SEQ ID NO: 139457 - RNA, 22 nt, Artificial Sequence
  Synthetic
ccaaucccaagcauuuuggaua

SEQ ID NO: 139458 - RNA, 23 nt, Artificial Sequence
  Synthetic
uccaaucccaagcauuuuggaua

SEQ ID NO: 139459 - RNA, 24 nt, Artificial Sequence
  Synthetic
uuccaaucccaagcauuuuggaua

SEQ ID NO: 139460 - RNA, 19 nt, Artificial Sequence
  Synthetic
agucacaaaagccaugaua

SEQ ID NO: 139461 - RNA, 20 nt, Artificial Sequence
  Synthetic
uagucacaaaagccaugaua

SEQ ID NO: 139462 - RNA, 21 nt, Artificial Sequence
  Synthetic
uuagucacaaaagccaugaua

SEQ ID NO: 139463 - RNA, 22 nt, Artificial Sequence
  Synthetic
auuagucacaaaagccaugaua

SEQ ID NO: 139464 - RNA, 23 nt, Artificial Sequence
  Synthetic
cauuagucacaaaagccaugaua

SEQ ID NO: 139465 - RNA, 18 nt, Artificial Sequence
  Synthetic
uucauacuagccaugaua

SEQ ID NO: 139466 - RNA, 19 nt, Artificial Sequence
  Synthetic
uuucauacuagccaugaua

SEQ ID NO: 139467 - RNA, 20 nt, Artificial Sequence
  Synthetic
uuuucauacuagccaugaua

SEQ ID NO: 139468 - RNA, 21 nt, Artificial Sequence
  Synthetic
cuuuucauacuagccaugaua

SEQ ID NO: 139469 - RNA, 22 nt, Artificial Sequence
  Synthetic
acuuuucauacuagccaugaua

SEQ ID NO: 139470 - RNA, 23 nt, Artificial Sequence
  Synthetic
cacuuuucauacuagccaugaua

SEQ ID NO: 139471 - RNA, 18 nt, Artificial Sequence
  Synthetic
caugcuauucucaugaua

SEQ ID NO: 139472 - RNA, 19 nt, Artificial Sequence
  Synthetic
ccaugcuauucucaugaua

SEQ ID NO: 139473 - RNA, 20 nt, Artificial Sequence
  Synthetic
cccaugcuauucucaugaua

SEQ ID NO: 139474 - RNA, 21 nt, Artificial Sequence
  Synthetic
ccccaugcuauucucaugaua

SEQ ID NO: 139475 - RNA, 22 nt, Artificial Sequence
  Synthetic
cccccaugcuauucucaugaua

SEQ ID NO: 139476 - RNA, 23 nt, Artificial Sequence
  Synthetic
ucccccaugcuauucucaugaua

SEQ ID NO: 139477 - RNA, 24 nt, Artificial Sequence
  Synthetic
uucccccaugcuauucucaugaua

SEQ ID NO: 139478 - RNA, 22 nt, Artificial Sequence
  Synthetic
ugcccaugcuguucuccugaua

SEQ ID NO: 139479 - RNA, 23 nt, Artificial Sequence
  Synthetic
uugcccaugcuguucuccugaua

SEQ ID NO: 139480 - RNA, 24 nt, Artificial Sequence
  Synthetic
uuugcccaugcuguucuccugaua

SEQ ID NO: 139481 - RNA, 21 nt, Artificial Sequence
  Synthetic
ucccaugcuguucuccugaua

SEQ ID NO: 139482 - RNA, 22 nt, Artificial Sequence
  Synthetic
cucccaugcuguucuccugaua

SEQ ID NO: 139483 - RNA, 23 nt, Artificial Sequence
  Synthetic
ucucccaugcuguucuccugaua

SEQ ID NO: 139484 - RNA, 24 nt, Artificial Sequence
  Synthetic
uucucccaugcuguucuccugaua

SEQ ID NO: 139485 - RNA, 18 nt, Artificial Sequence
  Synthetic
caugcuguugucgugaua

SEQ ID NO: 139486 - RNA, 19 nt, Artificial Sequence
  Synthetic
ccaugcuguugucgugaua

SEQ ID NO: 139487 - RNA, 20 nt, Artificial Sequence
  Synthetic
cccaugcuguugucgugaua

SEQ ID NO: 139488 - RNA, 21 nt, Artificial Sequence
  Synthetic
ccccaugcuguugucgugaua

SEQ ID NO: 139489 - RNA, 22 nt, Artificial Sequence
  Synthetic
cccccaugcuguugucgugaua

SEQ ID NO: 139490 - RNA, 23 nt, Artificial Sequence
  Synthetic
ccccccaugcuguugucgugaua

SEQ ID NO: 139491 - RNA, 24 nt, Artificial Sequence
  Synthetic
uccccccaugcuguugucgugaua

SEQ ID NO: 139492 - RNA, 18 nt, Artificial Sequence
  Synthetic
uuuuuuuuuuuuuugaua

SEQ ID NO: 139493 - RNA, 19 nt, Artificial Sequence
  Synthetic
uuuuuuuuuuuuuuugaua

SEQ ID NO: 139494 - RNA, 20 nt, Artificial Sequence
  Synthetic
cuuuuuuuuuuuuuuugaua

SEQ ID NO: 139495 - RNA, 21 nt, Artificial Sequence
  Synthetic
ucuuuuuuuuuuuuuuugaua

SEQ ID NO: 139496 - RNA, 22 nt, Artificial Sequence
  Synthetic
uucuuuuuuuuuuuuuuugaua

SEQ ID NO: 139497 - RNA, 23 nt, Artificial Sequence
  Synthetic
uuucuuuuuuuuuuuuuuugaua

SEQ ID NO: 139498 - RNA, 24 nt, Artificial Sequence
  Synthetic
uuuucuuuuuuuuuuuuuuugaua

SEQ ID NO: 139499 - RNA, 18 nt, Artificial Sequence
  Synthetic
aagaucaauuaaaauaua

SEQ ID NO: 139500 - RNA, 19 nt, Artificial Sequence
  Synthetic
uaagaucaauuaaaauaua

SEQ ID NO: 139501 - RNA, 20 nt, Artificial Sequence
  Synthetic
uuaagaucaauuaaaauaua

SEQ ID NO: 139502 - RNA, 18 nt, Artificial Sequence
  Synthetic
uauuuucugugaaauaua

SEQ ID NO: 139503 - RNA, 19 nt, Artificial Sequence
  Synthetic
uuauuuucugugaaauaua

SEQ ID NO: 139504 - RNA, 18 nt, Artificial Sequence
  Synthetic
uauguuugaaaacauaua

SEQ ID NO: 139505 - RNA, 19 nt, Artificial Sequence
  Synthetic
auauguuugaaaacauaua

SEQ ID NO: 139506 - RNA, 20 nt, Artificial Sequence
  Synthetic
aauauguuugaaaacauaua

SEQ ID NO: 139507 - RNA, 18 nt, Artificial Sequence
  Synthetic
uaauauauauaacauaua

SEQ ID NO: 139508 - RNA, 19 nt, Artificial Sequence
  Synthetic
uuaauauauauaacauaua

SEQ ID NO: 139509 - RNA, 20 nt, Artificial Sequence
  Synthetic
uuuaauauauauaacauaua

SEQ ID NO: 139510 - RNA, 18 nt, Artificial Sequence
  Synthetic
uauguaucugugcauaua

SEQ ID NO: 139511 - RNA, 19 nt, Artificial Sequence
  Synthetic
auauguaucugugcauaua

SEQ ID NO: 139512 - RNA, 20 nt, Artificial Sequence
  Synthetic
uauauguaucugugcauaua

SEQ ID NO: 139513 - RNA, 18 nt, Artificial Sequence
  Synthetic
auaguauuuaaugauaua

SEQ ID NO: 139514 - RNA, 19 nt, Artificial Sequence
  Synthetic
aauaguauuuaaugauaua

SEQ ID NO: 139515 - RNA, 20 nt, Artificial Sequence
  Synthetic
aaauaguauuuaaugauaua

SEQ ID NO: 139516 - RNA, 21 nt, Artificial Sequence
  Synthetic
caaauaguauuuaaugauaua

SEQ ID NO: 139517 - RNA, 22 nt, Artificial Sequence
  Synthetic
ucaaauaguauuuaaugauaua

SEQ ID NO: 139518 - RNA, 23 nt, Artificial Sequence
  Synthetic
uucaaauaguauuuaaugauaua

SEQ ID NO: 139519 - RNA, 24 nt, Artificial Sequence
  Synthetic
uuucaaauaguauuuaaugauaua

SEQ ID NO: 139520 - RNA, 18 nt, Artificial Sequence
  Synthetic
ucaguuuauuuugauaua

SEQ ID NO: 139521 - RNA, 19 nt, Artificial Sequence
  Synthetic
uucaguuuauuuugauaua

SEQ ID NO: 139522 - RNA, 20 nt, Artificial Sequence
  Synthetic
uuucaguuuauuuugauaua

SEQ ID NO: 139523 - RNA, 18 nt, Artificial Sequence
  Synthetic
caaguuuuaaaauauaua

SEQ ID NO: 139524 - RNA, 19 nt, Artificial Sequence
  Synthetic
ccaaguuuuaaaauauaua

SEQ ID NO: 139525 - RNA, 20 nt, Artificial Sequence
  Synthetic
accaaguuuuaaaauauaua

SEQ ID NO: 139526 - RNA, 21 nt, Artificial Sequence
  Synthetic
aaccaaguuuuaaaauauaua

SEQ ID NO: 139527 - RNA, 22 nt, Artificial Sequence
  Synthetic
aaaccaaguuuuaaaauauaua

SEQ ID NO: 139528 - RNA, 23 nt, Artificial Sequence
  Synthetic
uaaaccaaguuuuaaaauauaua

SEQ ID NO: 139529 - RNA, 24 nt, Artificial Sequence
  Synthetic
auaaaccaaguuuuaaaauauaua

SEQ ID NO: 139530 - RNA, 18 nt, Artificial Sequence
  Synthetic
acggccaauaaauauaua

SEQ ID NO: 139531 - RNA, 19 nt, Artificial Sequence
  Synthetic
aacggccaauaaauauaua

SEQ ID NO: 139532 - RNA, 20 nt, Artificial Sequence
  Synthetic
aaacggccaauaaauauaua

SEQ ID NO: 139533 - RNA, 19 nt, Artificial Sequence
  Synthetic
ugggguacauauauauaua

SEQ ID NO: 139534 - RNA, 21 nt, Artificial Sequence
  Synthetic
ugugggguacauauauauaua

SEQ ID NO: 139535 - RNA, 22 nt, Artificial Sequence
  Synthetic
augugggguacauauauauaua

SEQ ID NO: 139536 - RNA, 23 nt, Artificial Sequence
  Synthetic
uaugugggguacauauauauaua

SEQ ID NO: 139537 - RNA, 24 nt, Artificial Sequence
  Synthetic
auaugugggguacauauauauaua

SEQ ID NO: 139538 - RNA, 21 nt, Artificial Sequence
  Synthetic
auauauauauauauauauaua

SEQ ID NO: 139539 - RNA, 22 nt, Artificial Sequence
  Synthetic
cauauauauauauauauauaua

SEQ ID NO: 139540 - RNA, 23 nt, Artificial Sequence
  Synthetic
ccauauauauauauauauauaua

SEQ ID NO: 139541 - RNA, 18 nt, Artificial Sequence
  Synthetic
uuucuaugagucuauaua

SEQ ID NO: 139542 - RNA, 19 nt, Artificial Sequence
  Synthetic
cuuucuaugagucuauaua

SEQ ID NO: 139543 - RNA, 20 nt, Artificial Sequence
  Synthetic
ucuuucuaugagucuauaua

SEQ ID NO: 139544 - RNA, 19 nt, Artificial Sequence
  Synthetic
agacauuuuuaauuauaua

SEQ ID NO: 139545 - RNA, 20 nt, Artificial Sequence
  Synthetic
aagacauuuuuaauuauaua

SEQ ID NO: 139546 - RNA, 18 nt, Artificial Sequence
  Synthetic
uaugaucucacuuauaua

SEQ ID NO: 139547 - RNA, 20 nt, Artificial Sequence
  Synthetic
uguaugaucucacuuauaua

SEQ ID NO: 139548 - RNA, 21 nt, Artificial Sequence
  Synthetic
uuguaugaucucacuuauaua

SEQ ID NO: 139549 - RNA, 22 nt, Artificial Sequence
  Synthetic
auuguaugaucucacuuauaua

SEQ ID NO: 139550 - RNA, 23 nt, Artificial Sequence
  Synthetic
uauuguaugaucucacuuauaua

SEQ ID NO: 139551 - RNA, 24 nt, Artificial Sequence
  Synthetic
auauuguaugaucucacuuauaua

SEQ ID NO: 139552 - RNA, 18 nt, Artificial Sequence
  Synthetic
uguuuuauuuuuuauaua

SEQ ID NO: 139553 - RNA, 21 nt, Artificial Sequence
  Synthetic
ugguguuuuauuuuuuauaua

SEQ ID NO: 139554 - RNA, 22 nt, Artificial Sequence
  Synthetic
augguguuuuauuuuuuauaua

SEQ ID NO: 139555 - RNA, 23 nt, Artificial Sequence
  Synthetic
uaugguguuuuauuuuuuauaua

SEQ ID NO: 139556 - RNA, 24 nt, Artificial Sequence
  Synthetic
auaugguguuuuauuuuuuauaua

SEQ ID NO: 139557 - RNA, 18 nt, Artificial Sequence
  Synthetic
uuuacuuucuugacuaua

SEQ ID NO: 139558 - RNA, 19 nt, Artificial Sequence
  Synthetic
cuuuacuuucuugacuaua

SEQ ID NO: 139559 - RNA, 20 nt, Artificial Sequence
  Synthetic
ucuuuacuuucuugacuaua

SEQ ID NO: 139560 - RNA, 18 nt, Artificial Sequence
  Synthetic
ugaguugauucuuguaua

SEQ ID NO: 139561 - RNA, 19 nt, Artificial Sequence
  Synthetic
uugaguugauucuuguaua

SEQ ID NO: 139562 - RNA, 20 nt, Artificial Sequence
  Synthetic
uuugaguugauucuuguaua

SEQ ID NO: 139563 - RNA, 21 nt, Artificial Sequence
  Synthetic
uuuugaguugauucuuguaua

SEQ ID NO: 139564 - RNA, 22 nt, Artificial Sequence
  Synthetic
auuuugaguugauucuuguaua

SEQ ID NO: 139565 - RNA, 23 nt, Artificial Sequence
  Synthetic
cauuuugaguugauucuuguaua

SEQ ID NO: 139566 - RNA, 24 nt, Artificial Sequence
  Synthetic
ccauuuugaguugauucuuguaua

SEQ ID NO: 139567 - RNA, 18 nt, Artificial Sequence
  Synthetic
ugaguugauuuuuguaua

SEQ ID NO: 139568 - RNA, 19 nt, Artificial Sequence
  Synthetic
uugaguugauuuuuguaua

SEQ ID NO: 139569 - RNA, 20 nt, Artificial Sequence
  Synthetic
cuugaguugauuuuuguaua

SEQ ID NO: 139570 - RNA, 21 nt, Artificial Sequence
  Synthetic
ucuugaguugauuuuuguaua

SEQ ID NO: 139571 - RNA, 22 nt, Artificial Sequence
  Synthetic
aucuugaguugauuuuuguaua

SEQ ID NO: 139572 - RNA, 23 nt, Artificial Sequence
  Synthetic
caucuugaguugauuuuuguaua

SEQ ID NO: 139573 - RNA, 18 nt, Artificial Sequence
  Synthetic
aaaaaaaagaggauuaua

SEQ ID NO: 139574 - RNA, 19 nt, Artificial Sequence
  Synthetic
aaaaaaaaagaggauuaua

SEQ ID NO: 139575 - RNA, 20 nt, Artificial Sequence
  Synthetic
aaaaaaaaaagaggauuaua

SEQ ID NO: 139576 - RNA, 21 nt, Artificial Sequence
  Synthetic
aaaaaaaaaaagaggauuaua

SEQ ID NO: 139577 - RNA, 22 nt, Artificial Sequence
  Synthetic
aaaaaaaaaaaagaggauuaua

SEQ ID NO: 139578 - RNA, 23 nt, Artificial Sequence
  Synthetic
aaaaaaaaaaaaagaggauuaua

SEQ ID NO: 139579 - RNA, 24 nt, Artificial Sequence
  Synthetic
aaaaaaaaaaaaaagaggauuaua

SEQ ID NO: 139580 - RNA, 18 nt, Artificial Sequence
  Synthetic
uuauuuuuugcucuuaua

SEQ ID NO: 139581 - RNA, 19 nt, Artificial Sequence
  Synthetic
uuuauuuuuugcucuuaua

SEQ ID NO: 139582 - RNA, 20 nt, Artificial Sequence
  Synthetic
auuuauuuuuugcucuuaua

SEQ ID NO: 139583 - RNA, 18 nt, Artificial Sequence
  Synthetic
uuuuucuuguuaguuaua

SEQ ID NO: 139584 - RNA, 19 nt, Artificial Sequence
  Synthetic
auuuuucuuguuaguuaua

SEQ ID NO: 139585 - RNA, 20 nt, Artificial Sequence
  Synthetic
aauuuuucuuguuaguuaua

SEQ ID NO: 139586 - RNA, 19 nt, Artificial Sequence
  Synthetic
agagacugggcaauuuaua

SEQ ID NO: 139587 - RNA, 20 nt, Artificial Sequence
  Synthetic
cagagacugggcaauuuaua

SEQ ID NO: 139588 - RNA, 21 nt, Artificial Sequence
  Synthetic
ccagagacugggcaauuuaua

SEQ ID NO: 139589 - RNA, 23 nt, Artificial Sequence
  Synthetic
ugccagagacugggcaauuuaua

SEQ ID NO: 139590 - RNA, 24 nt, Artificial Sequence
  Synthetic
augccagagacugggcaauuuaua

SEQ ID NO: 139591 - RNA, 18 nt, Artificial Sequence
  Synthetic
ugugaauauauauuuaua

SEQ ID NO: 139592 - RNA, 19 nt, Artificial Sequence
  Synthetic
cugugaauauauauuuaua

SEQ ID NO: 139593 - RNA, 20 nt, Artificial Sequence
  Synthetic
ucugugaauauauauuuaua

SEQ ID NO: 139594 - RNA, 18 nt, Artificial Sequence
  Synthetic
aaguuucaguguuuuaua

SEQ ID NO: 139595 - RNA, 19 nt, Artificial Sequence
  Synthetic
aaaguuucaguguuuuaua

SEQ ID NO: 139596 - RNA, 20 nt, Artificial Sequence
  Synthetic
aaaaguuucaguguuuuaua

SEQ ID NO: 139597 - RNA, 18 nt, Artificial Sequence
  Synthetic
aaccagaaaaaauaacua

SEQ ID NO: 139598 - RNA, 20 nt, Artificial Sequence
  Synthetic
agaaccagaaaaaauaacua

SEQ ID NO: 139599 - RNA, 22 nt, Artificial Sequence
  Synthetic
agagaaccagaaaaaauaacua

SEQ ID NO: 139600 - RNA, 18 nt, Artificial Sequence
  Synthetic
aacuuuguaaauuaacua

SEQ ID NO: 139601 - RNA, 19 nt, Artificial Sequence
  Synthetic
uaacuuuguaaauuaacua

SEQ ID NO: 139602 - RNA, 20 nt, Artificial Sequence
  Synthetic
auaacuuuguaaauuaacua

SEQ ID NO: 139603 - RNA, 20 nt, Artificial Sequence
  Synthetic
ugggcaaaaucagaacacua

SEQ ID NO: 139604 - RNA, 18 nt, Artificial Sequence
  Synthetic
aaacagugaaaaagacua

SEQ ID NO: 139605 - RNA, 19 nt, Artificial Sequence
  Synthetic
aaaacagugaaaaagacua

SEQ ID NO: 139606 - RNA, 20 nt, Artificial Sequence
  Synthetic
uaaaacagugaaaaagacua

SEQ ID NO: 139607 - RNA, 18 nt, Artificial Sequence
  Synthetic
cuuguauuccaaagacua

SEQ ID NO: 139608 - RNA, 19 nt, Artificial Sequence
  Synthetic
acuuguauuccaaagacua

SEQ ID NO: 139609 - RNA, 20 nt, Artificial Sequence
  Synthetic
cacuuguauuccaaagacua

SEQ ID NO: 139610 - RNA, 21 nt, Artificial Sequence
  Synthetic
ucacuuguauuccaaagacua

SEQ ID NO: 139611 - RNA, 22 nt, Artificial Sequence
  Synthetic
aucacuuguauuccaaagacua

SEQ ID NO: 139612 - RNA, 23 nt, Artificial Sequence
  Synthetic
aaucacuuguauuccaaagacua

SEQ ID NO: 139613 - RNA, 24 nt, Artificial Sequence
  Synthetic
aaaucacuuguauuccaaagacua

SEQ ID NO: 139614 - RNA, 21 nt, Artificial Sequence
  Synthetic
uccacugaucgugaucuacua

SEQ ID NO: 139615 - RNA, 22 nt, Artificial Sequence
  Synthetic
auccacugaucgugaucuacua

SEQ ID NO: 139616 - RNA, 23 nt, Artificial Sequence
  Synthetic
aauccacugaucgugaucuacua

SEQ ID NO: 139617 - RNA, 24 nt, Artificial Sequence
  Synthetic
caauccacugaucgugaucuacua

SEQ ID NO: 139618 - RNA, 18 nt, Artificial Sequence
  Synthetic
cccuucaucccaaaccua

SEQ ID NO: 139619 - RNA, 19 nt, Artificial Sequence
  Synthetic
acccuucaucccaaaccua

SEQ ID NO: 139620 - RNA, 20 nt, Artificial Sequence
  Synthetic
uacccuucaucccaaaccua

SEQ ID NO: 139621 - RNA, 20 nt, Artificial Sequence
  Synthetic
ugcccuucaucccaaaccua

SEQ ID NO: 139622 - RNA, 19 nt, Artificial Sequence
  Synthetic
agagugaacaagcaaccua

SEQ ID NO: 139623 - RNA, 20 nt, Artificial Sequence
  Synthetic
cagagugaacaagcaaccua

SEQ ID NO: 139624 - RNA, 21 nt, Artificial Sequence
  Synthetic
ucagagugaacaagcaaccua

SEQ ID NO: 139625 - RNA, 22 nt, Artificial Sequence
  Synthetic
aucagagugaacaagcaaccua

SEQ ID NO: 139626 - RNA, 23 nt, Artificial Sequence
  Synthetic
caucagagugaacaagcaaccua

SEQ ID NO: 139627 - RNA, 24 nt, Artificial Sequence
  Synthetic
ucaucagagugaacaagcaaccua

SEQ ID NO: 139628 - RNA, 19 nt, Artificial Sequence
  Synthetic
aggguugaaaaacuaccua

SEQ ID NO: 139629 - RNA, 20 nt, Artificial Sequence
  Synthetic
aaggguugaaaaacuaccua

SEQ ID NO: 139630 - RNA, 21 nt, Artificial Sequence
  Synthetic
caaggguugaaaaacuaccua

SEQ ID NO: 139631 - RNA, 18 nt, Artificial Sequence
  Synthetic
uuaacuauagucacccua

SEQ ID NO: 139632 - RNA, 19 nt, Artificial Sequence
  Synthetic
auuaacuauagucacccua

SEQ ID NO: 139633 - RNA, 20 nt, Artificial Sequence
  Synthetic
cauuaacuauagucacccua

SEQ ID NO: 139634 - RNA, 21 nt, Artificial Sequence
  Synthetic
ucauuaacuauagucacccua

SEQ ID NO: 139635 - RNA, 23 nt, Artificial Sequence
  Synthetic
ugucauuaacuauagucacccua

SEQ ID NO: 139636 - RNA, 24 nt, Artificial Sequence
  Synthetic
uugucauuaacuauagucacccua

SEQ ID NO: 139637 - RNA, 18 nt, Artificial Sequence
  Synthetic
aguguaaugacugcccua

SEQ ID NO: 139638 - RNA, 19 nt, Artificial Sequence
  Synthetic
aaguguaaugacugcccua

SEQ ID NO: 139639 - RNA, 20 nt, Artificial Sequence
  Synthetic
aaaguguaaugacugcccua

SEQ ID NO: 139640 - RNA, 21 nt, Artificial Sequence
  Synthetic
caaaguguaaugacugcccua

SEQ ID NO: 139641 - RNA, 22 nt, Artificial Sequence
  Synthetic
ucaaaguguaaugacugcccua

SEQ ID NO: 139642 - RNA, 23 nt, Artificial Sequence
  Synthetic
uucaaaguguaaugacugcccua

SEQ ID NO: 139643 - RNA, 18 nt, Artificial Sequence
  Synthetic
uucuccugccucagccua

SEQ ID NO: 139644 - RNA, 19 nt, Artificial Sequence
  Synthetic
auucuccugccucagccua

SEQ ID NO: 139645 - RNA, 21 nt, Artificial Sequence
  Synthetic
ugauucuccugccucagccua

SEQ ID NO: 139646 - RNA, 22 nt, Artificial Sequence
  Synthetic
augauucuccugccucagccua

SEQ ID NO: 139647 - RNA, 23 nt, Artificial Sequence
  Synthetic
aaugauucuccugccucagccua

SEQ ID NO: 139648 - RNA, 24 nt, Artificial Sequence
  Synthetic
aaaugauucuccugccucagccua

SEQ ID NO: 139649 - RNA, 18 nt, Artificial Sequence
  Synthetic
uucucuugccucagccua

SEQ ID NO: 139650 - RNA, 19 nt, Artificial Sequence
  Synthetic
auucucuugccucagccua

SEQ ID NO: 139651 - RNA, 20 nt, Artificial Sequence
  Synthetic
uauucucuugccucagccua

SEQ ID NO: 139652 - RNA, 21 nt, Artificial Sequence
  Synthetic
cuauucucuugccucagccua

SEQ ID NO: 139653 - RNA, 23 nt, Artificial Sequence
  Synthetic
agcuauucucuugccucagccua

SEQ ID NO: 139654 - RNA, 24 nt, Artificial Sequence
  Synthetic
aagcuauucucuugccucagccua

SEQ ID NO: 139655 - RNA, 18 nt, Artificial Sequence
  Synthetic
uccuccuccuucagccua

SEQ ID NO: 139656 - RNA, 19 nt, Artificial Sequence
  Synthetic
auccuccuccuucagccua

SEQ ID NO: 139657 - RNA, 20 nt, Artificial Sequence
  Synthetic
aauccuccuccuucagccua

SEQ ID NO: 139658 - RNA, 21 nt, Artificial Sequence
  Synthetic
caauccuccuccuucagccua

SEQ ID NO: 139659 - RNA, 23 nt, Artificial Sequence
  Synthetic
agcaauccuccuccuucagccua

SEQ ID NO: 139660 - RNA, 24 nt, Artificial Sequence
  Synthetic
aagcaauccuccuccuucagccua

SEQ ID NO: 139661 - RNA, 18 nt, Artificial Sequence
  Synthetic
ugagucuagccuggccua

SEQ ID NO: 139662 - RNA, 19 nt, Artificial Sequence
  Synthetic
uugagucuagccuggccua

SEQ ID NO: 139663 - RNA, 20 nt, Artificial Sequence
  Synthetic
uuugagucuagccuggccua

SEQ ID NO: 139664 - RNA, 22 nt, Artificial Sequence
  Synthetic
aguuugagucuagccuggccua

SEQ ID NO: 139665 - RNA, 23 nt, Artificial Sequence
  Synthetic
aaguuugagucuagccuggccua

SEQ ID NO: 139666 - RNA, 18 nt, Artificial Sequence
  Synthetic
uuauuagacuuuuuccua

SEQ ID NO: 139667 - RNA, 19 nt, Artificial Sequence
  Synthetic
auuauuagacuuuuuccua

SEQ ID NO: 139668 - RNA, 20 nt, Artificial Sequence
  Synthetic
aauuauuagacuuuuuccua

SEQ ID NO: 139669 - RNA, 21 nt, Artificial Sequence
  Synthetic
uaauuauuagacuuuuuccua

SEQ ID NO: 139670 - RNA, 22 nt, Artificial Sequence
  Synthetic
cuaauuauuagacuuuuuccua

SEQ ID NO: 139671 - RNA, 23 nt, Artificial Sequence
  Synthetic
ucuaauuauuagacuuuuuccua

SEQ ID NO: 139672 - RNA, 24 nt, Artificial Sequence
  Synthetic
aucuaauuauuagacuuuuuccua

SEQ ID NO: 139673 - RNA, 18 nt, Artificial Sequence
  Synthetic
ccaaauguccaucagcua

SEQ ID NO: 139674 - RNA, 19 nt, Artificial Sequence
  Synthetic
cccaaauguccaucagcua

SEQ ID NO: 139675 - RNA, 20 nt, Artificial Sequence
  Synthetic
acccaaauguccaucagcua

SEQ ID NO: 139676 - RNA, 21 nt, Artificial Sequence
  Synthetic
aacccaaauguccaucagcua

SEQ ID NO: 139677 - RNA, 22 nt, Artificial Sequence
  Synthetic
caacccaaauguccaucagcua

SEQ ID NO: 139678 - RNA, 23 nt, Artificial Sequence
  Synthetic
ccaacccaaauguccaucagcua

SEQ ID NO: 139679 - RNA, 24 nt, Artificial Sequence
  Synthetic
accaacccaaauguccaucagcua

SEQ ID NO: 139680 - RNA, 18 nt, Artificial Sequence
  Synthetic
aagauguacaaauagcua

SEQ ID NO: 139681 - RNA, 20 nt, Artificial Sequence
  Synthetic
agaagauguacaaauagcua

SEQ ID NO: 139682 - RNA, 21 nt, Artificial Sequence
  Synthetic
aagaagauguacaaauagcua

SEQ ID NO: 139683 - RNA, 22 nt, Artificial Sequence
  Synthetic
aaagaagauguacaaauagcua

SEQ ID NO: 139684 - RNA, 23 nt, Artificial Sequence
  Synthetic
aaaagaagauguacaaauagcua

SEQ ID NO: 139685 - RNA, 24 nt, Artificial Sequence
  Synthetic
caaaagaagauguacaaauagcua

SEQ ID NO: 139686 - RNA, 18 nt, Artificial Sequence
  Synthetic
cuuuauuuaacaaugcua

SEQ ID NO: 139687 - RNA, 19 nt, Artificial Sequence
  Synthetic
acuuuauuuaacaaugcua

SEQ ID NO: 139688 - RNA, 20 nt, Artificial Sequence
  Synthetic
uacuuuauuuaacaaugcua

SEQ ID NO: 139689 - RNA, 21 nt, Artificial Sequence
  Synthetic
cuacuuuauuuaacaaugcua

SEQ ID NO: 139690 - RNA, 22 nt, Artificial Sequence
  Synthetic
ucuacuuuauuuaacaaugcua

SEQ ID NO: 139691 - RNA, 23 nt, Artificial Sequence
  Synthetic
uucuacuuuauuuaacaaugcua

SEQ ID NO: 139692 - RNA, 24 nt, Artificial Sequence
  Synthetic
auucuacuuuauuuaacaaugcua

SEQ ID NO: 139693 - RNA, 18 nt, Artificial Sequence
  Synthetic
augcuuuuuaaugugcua

SEQ ID NO: 139694 - RNA, 19 nt, Artificial Sequence
  Synthetic
uaugcuuuuuaaugugcua

SEQ ID NO: 139695 - RNA, 20 nt, Artificial Sequence
  Synthetic
auaugcuuuuuaaugugcua

SEQ ID NO: 139696 - RNA, 23 nt, Artificial Sequence
  Synthetic
uggauaugcuuuuuaaugugcua

SEQ ID NO: 139697 - RNA, 24 nt, Artificial Sequence
  Synthetic
auggauaugcuuuuuaaugugcua

SEQ ID NO: 139698 - RNA, 18 nt, Artificial Sequence
  Synthetic
agucacccuguugugcua

SEQ ID NO: 139699 - RNA, 19 nt, Artificial Sequence
  Synthetic
uagucacccuguugugcua

SEQ ID NO: 139700 - RNA, 20 nt, Artificial Sequence
  Synthetic
auagucacccuguugugcua

SEQ ID NO: 139701 - RNA, 22 nt, Artificial Sequence
  Synthetic
cgauagucacccuguugugcua

SEQ ID NO: 139702 - RNA, 23 nt, Artificial Sequence
  Synthetic
acgauagucacccuguugugcua

SEQ ID NO: 139703 - RNA, 18 nt, Artificial Sequence
  Synthetic
ugauuuguuuucuugcua

SEQ ID NO: 139704 - RNA, 21 nt, Artificial Sequence
  Synthetic
aggugauuuguuuucuugcua

SEQ ID NO: 139705 - RNA, 22 nt, Artificial Sequence
  Synthetic
caggugauuuguuuucuugcua

SEQ ID NO: 139706 - RNA, 23 nt, Artificial Sequence
  Synthetic
ucaggugauuuguuuucuugcua

SEQ ID NO: 139707 - RNA, 18 nt, Artificial Sequence
  Synthetic
aacugaaagaaaaaucua

SEQ ID NO: 139708 - RNA, 19 nt, Artificial Sequence
  Synthetic
caacugaaagaaaaaucua

SEQ ID NO: 139709 - RNA, 20 nt, Artificial Sequence
  Synthetic
acaacugaaagaaaaaucua

SEQ ID NO: 139710 - RNA, 18 nt, Artificial Sequence
  Synthetic
auuuaaugggagaaucua

SEQ ID NO: 139711 - RNA, 19 nt, Artificial Sequence
  Synthetic
aauuuaaugggagaaucua

SEQ ID NO: 139712 - RNA, 20 nt, Artificial Sequence
  Synthetic
uaauuuaaugggagaaucua

SEQ ID NO: 139713 - RNA, 18 nt, Artificial Sequence
  Synthetic
cucuacuuucugucucua

SEQ ID NO: 139714 - RNA, 19 nt, Artificial Sequence
  Synthetic
acucuacuuucugucucua

SEQ ID NO: 139715 - RNA, 20 nt, Artificial Sequence
  Synthetic
cacucuacuuucugucucua

SEQ ID NO: 139716 - RNA, 18 nt, Artificial Sequence
  Synthetic
cagaguuuuuguauucua

SEQ ID NO: 139717 - RNA, 20 nt, Artificial Sequence
  Synthetic
ugcagaguuuuuguauucua

SEQ ID NO: 139718 - RNA, 18 nt, Artificial Sequence
  Synthetic
auuuugaaagaaguucua

SEQ ID NO: 139719 - RNA, 19 nt, Artificial Sequence
  Synthetic
aauuuugaaagaaguucua

SEQ ID NO: 139720 - RNA, 20 nt, Artificial Sequence
  Synthetic
aaauuuugaaagaaguucua

SEQ ID NO: 139721 - RNA, 21 nt, Artificial Sequence
  Synthetic
caaauuuugaaagaaguucua

SEQ ID NO: 139722 - RNA, 22 nt, Artificial Sequence
  Synthetic
ucaaauuuugaaagaaguucua

SEQ ID NO: 139723 - RNA, 23 nt, Artificial Sequence
  Synthetic
cucaaauuuugaaagaaguucua

SEQ ID NO: 139724 - RNA, 24 nt, Artificial Sequence
  Synthetic
acucaaauuuugaaagaaguucua

SEQ ID NO: 139725 - RNA, 18 nt, Artificial Sequence
  Synthetic
uccuauucuuuuguucua

SEQ ID NO: 139726 - RNA, 19 nt, Artificial Sequence
  Synthetic
auccuauucuuuuguucua

SEQ ID NO: 139727 - RNA, 20 nt, Artificial Sequence
  Synthetic
aauccuauucuuuuguucua

SEQ ID NO: 139728 - RNA, 19 nt, Artificial Sequence
  Synthetic
cgcucauuucuguuuucua

SEQ ID NO: 139729 - RNA, 20 nt, Artificial Sequence
  Synthetic
ccgcucauuucuguuuucua

SEQ ID NO: 139730 - RNA, 18 nt, Artificial Sequence
  Synthetic
uaucaaucacuuuuucua

SEQ ID NO: 139731 - RNA, 19 nt, Artificial Sequence
  Synthetic
auaucaaucacuuuuucua

SEQ ID NO: 139732 - RNA, 20 nt, Artificial Sequence
  Synthetic
aauaucaaucacuuuuucua

SEQ ID NO: 139733 - RNA, 18 nt, Artificial Sequence
  Synthetic
uacaaaagguaaaaagua

SEQ ID NO: 139734 - RNA, 19 nt, Artificial Sequence
  Synthetic
auacaaaagguaaaaagua

SEQ ID NO: 139735 - RNA, 20 nt, Artificial Sequence
  Synthetic
uauacaaaagguaaaaagua

SEQ ID NO: 139736 - RNA, 21 nt, Artificial Sequence
  Synthetic
auauacaaaagguaaaaagua

SEQ ID NO: 139737 - RNA, 23 nt, Artificial Sequence
  Synthetic
agauauacaaaagguaaaaagua

SEQ ID NO: 139738 - RNA, 24 nt, Artificial Sequence
  Synthetic
uagauauacaaaagguaaaaagua

SEQ ID NO: 139739 - RNA, 18 nt, Artificial Sequence
  Synthetic
ucuccuuaagcaaaagua

SEQ ID NO: 139740 - RNA, 19 nt, Artificial Sequence
  Synthetic
cucuccuuaagcaaaagua

SEQ ID NO: 139741 - RNA, 20 nt, Artificial Sequence
  Synthetic
ccucuccuuaagcaaaagua

SEQ ID NO: 139742 - RNA, 21 nt, Artificial Sequence
  Synthetic
uccucuccuuaagcaaaagua

SEQ ID NO: 139743 - RNA, 22 nt, Artificial Sequence
  Synthetic
cuccucuccuuaagcaaaagua

SEQ ID NO: 139744 - RNA, 23 nt, Artificial Sequence
  Synthetic
ucuccucuccuuaagcaaaagua

SEQ ID NO: 139745 - RNA, 24 nt, Artificial Sequence
  Synthetic
cucuccucuccuuaagcaaaagua

SEQ ID NO: 139746 - RNA, 18 nt, Artificial Sequence
  Synthetic
cccuaggaaauaaaagua

SEQ ID NO: 139747 - RNA, 19 nt, Artificial Sequence
  Synthetic
acccuaggaaauaaaagua

SEQ ID NO: 139748 - RNA, 20 nt, Artificial Sequence
  Synthetic
cacccuaggaaauaaaagua

SEQ ID NO: 139749 - RNA, 19 nt, Artificial Sequence
  Synthetic
agucaaacucauugaagua

SEQ ID NO: 139750 - RNA, 20 nt, Artificial Sequence
  Synthetic
aagucaaacucauugaagua

SEQ ID NO: 139751 - RNA, 21 nt, Artificial Sequence
  Synthetic
aaagucaaacucauugaagua

SEQ ID NO: 139752 - RNA, 22 nt, Artificial Sequence
  Synthetic
aaaagucaaacucauugaagua

SEQ ID NO: 139753 - RNA, 23 nt, Artificial Sequence
  Synthetic
aaaaagucaaacucauugaagua

SEQ ID NO: 139754 - RNA, 24 nt, Artificial Sequence
  Synthetic
aaaaaagucaaacucauugaagua

SEQ ID NO: 139755 - RNA, 19 nt, Artificial Sequence
  Synthetic
agucagaaaagagccagua

SEQ ID NO: 139756 - RNA, 18 nt, Artificial Sequence
  Synthetic
cuuuccaugaaggcagua

SEQ ID NO: 139757 - RNA, 19 nt, Artificial Sequence
  Synthetic
ucuuuccaugaaggcagua

SEQ ID NO: 139758 - RNA, 18 nt, Artificial Sequence
  Synthetic
uuaacaaaugaaagagua

SEQ ID NO: 139759 - RNA, 19 nt, Artificial Sequence
  Synthetic
uuuaacaaaugaaagagua

SEQ ID NO: 139760 - RNA, 20 nt, Artificial Sequence
  Synthetic
uuuuaacaaaugaaagagua

SEQ ID NO: 139761 - RNA, 18 nt, Artificial Sequence
  Synthetic
cuugcagagucaggagua

SEQ ID NO: 139762 - RNA, 19 nt, Artificial Sequence
  Synthetic
ccuugcagagucaggagua

SEQ ID NO: 139763 - RNA, 20 nt, Artificial Sequence
  Synthetic
accuugcagagucaggagua

SEQ ID NO: 139764 - RNA, 18 nt, Artificial Sequence
  Synthetic
uacuuuuaaauacuagua

SEQ ID NO: 139765 - RNA, 20 nt, Artificial Sequence
  Synthetic
uguacuuuuaaauacuagua

SEQ ID NO: 139766 - RNA, 18 nt, Artificial Sequence
  Synthetic
aagguguucauaguagua

SEQ ID NO: 139767 - RNA, 19 nt, Artificial Sequence
  Synthetic
aaagguguucauaguagua

SEQ ID NO: 139768 - RNA, 20 nt, Artificial Sequence
  Synthetic
uaaagguguucauaguagua

SEQ ID NO: 139769 - RNA, 21 nt, Artificial Sequence
  Synthetic
auaaagguguucauaguagua

SEQ ID NO: 139770 - RNA, 22 nt, Artificial Sequence
  Synthetic
cauaaagguguucauaguagua

SEQ ID NO: 139771 - RNA, 24 nt, Artificial Sequence
  Synthetic
ugcauaaagguguucauaguagua

SEQ ID NO: 139772 - RNA, 18 nt, Artificial Sequence
  Synthetic
uggauacagggagaggua

SEQ ID NO: 139773 - RNA, 19 nt, Artificial Sequence
  Synthetic
auggauacagggagaggua

SEQ ID NO: 139774 - RNA, 20 nt, Artificial Sequence
  Synthetic
cauggauacagggagaggua

SEQ ID NO: 139775 - RNA, 24 nt, Artificial Sequence
  Synthetic
agggcauggauacagggagaggua

SEQ ID NO: 139776 - RNA, 19 nt, Artificial Sequence
  Synthetic
cgggauucagaaagcggua

SEQ ID NO: 139777 - RNA, 20 nt, Artificial Sequence
  Synthetic
ccgggauucagaaagcggua

SEQ ID NO: 139778 - RNA, 22 nt, Artificial Sequence
  Synthetic
cgccgggauucagaaagcggua

SEQ ID NO: 139779 - RNA, 23 nt, Artificial Sequence
  Synthetic
ucgccgggauucagaaagcggua

SEQ ID NO: 139780 - RNA, 24 nt, Artificial Sequence
  Synthetic
uucgccgggauucagaaagcggua

SEQ ID NO: 139781 - RNA, 18 nt, Artificial Sequence
  Synthetic
agaaggaaagaaagggua

SEQ ID NO: 139782 - RNA, 19 nt, Artificial Sequence
  Synthetic
aagaaggaaagaaagggua

SEQ ID NO: 139783 - RNA, 20 nt, Artificial Sequence
  Synthetic
uaagaaggaaagaaagggua

SEQ ID NO: 139784 - RNA, 18 nt, Artificial Sequence
  Synthetic
uuauuucccaaaugggua

SEQ ID NO: 139785 - RNA, 19 nt, Artificial Sequence
  Synthetic
uuuauuucccaaaugggua

SEQ ID NO: 139786 - RNA, 20 nt, Artificial Sequence
  Synthetic
auuuauuucccaaaugggua

SEQ ID NO: 139787 - RNA, 18 nt, Artificial Sequence
  Synthetic
aauaccugagacugggua

SEQ ID NO: 139788 - RNA, 19 nt, Artificial Sequence
  Synthetic
aaauaccugagacugggua

SEQ ID NO: 139789 - RNA, 21 nt, Artificial Sequence
  Synthetic
agaaauaccugagacugggua

SEQ ID NO: 139790 - RNA, 22 nt, Artificial Sequence
  Synthetic
aagaaauaccugagacugggua

SEQ ID NO: 139791 - RNA, 23 nt, Artificial Sequence
  Synthetic
aaagaaauaccugagacugggua

SEQ ID NO: 139792 - RNA, 24 nt, Artificial Sequence
  Synthetic
uaaagaaauaccugagacugggua

SEQ ID NO: 139793 - RNA, 18 nt, Artificial Sequence
  Synthetic
cauacuguucucauggua

SEQ ID NO: 139794 - RNA, 19 nt, Artificial Sequence
  Synthetic
ccauacuguucucauggua

SEQ ID NO: 139795 - RNA, 20 nt, Artificial Sequence
  Synthetic
cccauacuguucucauggua

SEQ ID NO: 139796 - RNA, 21 nt, Artificial Sequence
  Synthetic
ccccauacuguucucauggua

SEQ ID NO: 139797 - RNA, 22 nt, Artificial Sequence
  Synthetic
cccccauacuguucucauggua

SEQ ID NO: 139798 - RNA, 23 nt, Artificial Sequence
  Synthetic
ucccccauacuguucucauggua

SEQ ID NO: 139799 - RNA, 24 nt, Artificial Sequence
  Synthetic
uucccccauacuguucucauggua

SEQ ID NO: 139800 - RNA, 18 nt, Artificial Sequence
  Synthetic
aauuagccuggcguggua

SEQ ID NO: 139801 - RNA, 19 nt, Artificial Sequence
  Synthetic
aaauuagccuggcguggua

SEQ ID NO: 139802 - RNA, 20 nt, Artificial Sequence
  Synthetic
aaaauuagccuggcguggua

SEQ ID NO: 139803 - RNA, 21 nt, Artificial Sequence
  Synthetic
aaaaauuagccuggcguggua

SEQ ID NO: 139804 - RNA, 22 nt, Artificial Sequence
  Synthetic
aaaaaauuagccuggcguggua

SEQ ID NO: 139805 - RNA, 23 nt, Artificial Sequence
  Synthetic
uaaaaaauuagccuggcguggua

SEQ ID NO: 139806 - RNA, 24 nt, Artificial Sequence
  Synthetic
auaaaaaauuagccuggcguggua

SEQ ID NO: 139807 - RNA, 18 nt, Artificial Sequence
  Synthetic
uuuauuuuuaccuuggua

SEQ ID NO: 139808 - RNA, 19 nt, Artificial Sequence
  Synthetic
auuuauuuuuaccuuggua

SEQ ID NO: 139809 - RNA, 21 nt, Artificial Sequence
  Synthetic
agauuuauuuuuaccuuggua

SEQ ID NO: 139810 - RNA, 22 nt, Artificial Sequence
  Synthetic
aagauuuauuuuuaccuuggua

SEQ ID NO: 139811 - RNA, 23 nt, Artificial Sequence
  Synthetic
uaagauuuauuuuuaccuuggua

SEQ ID NO: 139812 - RNA, 24 nt, Artificial Sequence
  Synthetic
auaagauuuauuuuuaccuuggua

SEQ ID NO: 139813 - RNA, 18 nt, Artificial Sequence
  Synthetic
auguucaauaaaaaugua

SEQ ID NO: 139814 - RNA, 21 nt, Artificial Sequence
  Synthetic
uggguugcaguuugcuaugua

SEQ ID NO: 139815 - RNA, 22 nt, Artificial Sequence
  Synthetic
cuggguugcaguuugcuaugua

SEQ ID NO: 139816 - RNA, 24 nt, Artificial Sequence
  Synthetic
agcuggguugcaguuugcuaugua

SEQ ID NO: 139817 - RNA, 19 nt, Artificial Sequence
  Synthetic
aguacagcaugugacugua

SEQ ID NO: 139818 - RNA, 20 nt, Artificial Sequence
  Synthetic
caguacagcaugugacugua

SEQ ID NO: 139819 - RNA, 21 nt, Artificial Sequence
  Synthetic
ccaguacagcaugugacugua

SEQ ID NO: 139820 - RNA, 22 nt, Artificial Sequence
  Synthetic
accaguacagcaugugacugua

SEQ ID NO: 139821 - RNA, 23 nt, Artificial Sequence
  Synthetic
aaccaguacagcaugugacugua

SEQ ID NO: 139822 - RNA, 24 nt, Artificial Sequence
  Synthetic
aaaccaguacagcaugugacugua

SEQ ID NO: 139823 - RNA, 18 nt, Artificial Sequence
  Synthetic
aaucugggugcuccugua

SEQ ID NO: 139824 - RNA, 20 nt, Artificial Sequence
  Synthetic
ugaaucugggugcuccugua

SEQ ID NO: 139825 - RNA, 21 nt, Artificial Sequence
  Synthetic
augaaucugggugcuccugua

SEQ ID NO: 139826 - RNA, 22 nt, Artificial Sequence
  Synthetic
uaugaaucugggugcuccugua

SEQ ID NO: 139827 - RNA, 23 nt, Artificial Sequence
  Synthetic
uuaugaaucugggugcuccugua

SEQ ID NO: 139828 - RNA, 24 nt, Artificial Sequence
  Synthetic
uuuaugaaucugggugcuccugua

SEQ ID NO: 139829 - RNA, 18 nt, Artificial Sequence
  Synthetic
uagcaaacaguuucugua

SEQ ID NO: 139830 - RNA, 19 nt, Artificial Sequence
  Synthetic
uuagcaaacaguuucugua

SEQ ID NO: 139831 - RNA, 20 nt, Artificial Sequence
  Synthetic
uuuagcaaacaguuucugua

SEQ ID NO: 139832 - RNA, 18 nt, Artificial Sequence
  Synthetic
caguucucaugcagugua

SEQ ID NO: 139833 - RNA, 19 nt, Artificial Sequence
  Synthetic
ccaguucucaugcagugua

SEQ ID NO: 139834 - RNA, 20 nt, Artificial Sequence
  Synthetic
cccaguucucaugcagugua

SEQ ID NO: 139835 - RNA, 18 nt, Artificial Sequence
  Synthetic
aaagaaagcccuugugua

SEQ ID NO: 139836 - RNA, 19 nt, Artificial Sequence
  Synthetic
aaaagaaagcccuugugua

SEQ ID NO: 139837 - RNA, 20 nt, Artificial Sequence
  Synthetic
uaaaagaaagcccuugugua

SEQ ID NO: 139838 - RNA, 18 nt, Artificial Sequence
  Synthetic
uuuccuaauaaaaaauua

SEQ ID NO: 139839 - RNA, 20 nt, Artificial Sequence
  Synthetic
uguuuccuaauaaaaaauua

SEQ ID NO: 139840 - RNA, 18 nt, Artificial Sequence
  Synthetic
aaaagugauaaaaaauua

SEQ ID NO: 139841 - RNA, 19 nt, Artificial Sequence
  Synthetic
aaaaagugauaaaaaauua

SEQ ID NO: 139842 - RNA, 20 nt, Artificial Sequence
  Synthetic
caaaaagugauaaaaaauua

SEQ ID NO: 139843 - RNA, 21 nt, Artificial Sequence
  Synthetic
acaaaaagugauaaaaaauua

SEQ ID NO: 139844 - RNA, 22 nt, Artificial Sequence
  Synthetic
uacaaaaagugauaaaaaauua

SEQ ID NO: 139845 - RNA, 23 nt, Artificial Sequence
  Synthetic
auacaaaaagugauaaaaaauua

SEQ ID NO: 139846 - RNA, 24 nt, Artificial Sequence
  Synthetic
uauacaaaaagugauaaaaaauua

SEQ ID NO: 139847 - RNA, 18 nt, Artificial Sequence
  Synthetic
uuuugaaugaacaaauua

SEQ ID NO: 139848 - RNA, 19 nt, Artificial Sequence
  Synthetic
uuuuugaaugaacaaauua

SEQ ID NO: 139849 - RNA, 20 nt, Artificial Sequence
  Synthetic
uuuuuugaaugaacaaauua

SEQ ID NO: 139850 - RNA, 21 nt, Artificial Sequence
  Synthetic
auuuuuugaaugaacaaauua

SEQ ID NO: 139851 - RNA, 22 nt, Artificial Sequence
  Synthetic
uauuuuuugaaugaacaaauua

SEQ ID NO: 139852 - RNA, 23 nt, Artificial Sequence
  Synthetic
auauuuuuugaaugaacaaauua

SEQ ID NO: 139853 - RNA, 24 nt, Artificial Sequence
  Synthetic
aauauuuuuugaaugaacaaauua

SEQ ID NO: 139854 - RNA, 18 nt, Artificial Sequence
  Synthetic
cugcaaacaaauaaauua

SEQ ID NO: 139855 - RNA, 19 nt, Artificial Sequence
  Synthetic
acugcaaacaaauaaauua

SEQ ID NO: 139856 - RNA, 20 nt, Artificial Sequence
  Synthetic
uacugcaaacaaauaaauua

SEQ ID NO: 139857 - RNA, 18 nt, Artificial Sequence
  Synthetic
cuugaagugacagaauua

SEQ ID NO: 139858 - RNA, 19 nt, Artificial Sequence
  Synthetic
ucuugaagugacagaauua

SEQ ID NO: 139859 - RNA, 19 nt, Artificial Sequence
  Synthetic
uggaugcauggaugaauua

SEQ ID NO: 139860 - RNA, 20 nt, Artificial Sequence
  Synthetic
auggaugcauggaugaauua

SEQ ID NO: 139861 - RNA, 21 nt, Artificial Sequence
  Synthetic
aucaggggguacuaugaauua

SEQ ID NO: 139862 - RNA, 22 nt, Artificial Sequence
  Synthetic
aaucaggggguacuaugaauua

SEQ ID NO: 139863 - RNA, 23 nt, Artificial Sequence
  Synthetic
aaaucaggggguacuaugaauua

SEQ ID NO: 139864 - RNA, 24 nt, Artificial Sequence
  Synthetic
aaaaucaggggguacuaugaauua

SEQ ID NO: 139865 - RNA, 18 nt, Artificial Sequence
  Synthetic
uaaacauuuggugaauua

SEQ ID NO: 139866 - RNA, 19 nt, Artificial Sequence
  Synthetic
uuaaacauuuggugaauua

SEQ ID NO: 139867 - RNA, 20 nt, Artificial Sequence
  Synthetic
uuuaaacauuuggugaauua

SEQ ID NO: 139868 - RNA, 21 nt, Artificial Sequence
  Synthetic
auauuaauacagauugaauua

SEQ ID NO: 139869 - RNA, 22 nt, Artificial Sequence
  Synthetic
uauauuaauacagauugaauua

SEQ ID NO: 139870 - RNA, 23 nt, Artificial Sequence
  Synthetic
uuauauuaauacagauugaauua

SEQ ID NO: 139871 - RNA, 24 nt, Artificial Sequence
  Synthetic
uuuauauuaauacagauugaauua

SEQ ID NO: 139872 - RNA, 18 nt, Artificial Sequence
  Synthetic
uguacaucuguugaauua

SEQ ID NO: 139873 - RNA, 19 nt, Artificial Sequence
  Synthetic
auguacaucuguugaauua

SEQ ID NO: 139874 - RNA, 20 nt, Artificial Sequence
  Synthetic
aauguacaucuguugaauua

SEQ ID NO: 139875 - RNA, 19 nt, Artificial Sequence
  Synthetic
agaucaggaaaaauaauua

SEQ ID NO: 139876 - RNA, 20 nt, Artificial Sequence
  Synthetic
aagaucaggaaaaauaauua

SEQ ID NO: 139877 - RNA, 22 nt, Artificial Sequence
  Synthetic
agaagaucaggaaaaauaauua

SEQ ID NO: 139878 - RNA, 18 nt, Artificial Sequence
  Synthetic
caaauaaauaaauaauua

SEQ ID NO: 139879 - RNA, 19 nt, Artificial Sequence
  Synthetic
ucaaauaaauaaauaauua

SEQ ID NO: 139880 - RNA, 20 nt, Artificial Sequence
  Synthetic
cucaaauaaauaaauaauua

SEQ ID NO: 139881 - RNA, 21 nt, Artificial Sequence
  Synthetic
ucucaaauaaauaaauaauua

SEQ ID NO: 139882 - RNA, 23 nt, Artificial Sequence
  Synthetic
cgucucaaauaaauaaauaauua

SEQ ID NO: 139883 - RNA, 24 nt, Artificial Sequence
  Synthetic
ccgucucaaauaaauaaauaauua

SEQ ID NO: 139884 - RNA, 21 nt, Artificial Sequence
  Synthetic
aacuaaccaacaucauaauua

SEQ ID NO: 139885 - RNA, 22 nt, Artificial Sequence
  Synthetic
uaacuaaccaacaucauaauua

SEQ ID NO: 139886 - RNA, 23 nt, Artificial Sequence
  Synthetic
auaacuaaccaacaucauaauua

SEQ ID NO: 139887 - RNA, 24 nt, Artificial Sequence
  Synthetic
aauaacuaaccaacaucauaauua

SEQ ID NO: 139888 - RNA, 18 nt, Artificial Sequence
  Synthetic
augaaaaugaaguaauua

SEQ ID NO: 139889 - RNA, 20 nt, Artificial Sequence
  Synthetic
agaugaaaaugaaguaauua

SEQ ID NO: 139890 - RNA, 18 nt, Artificial Sequence
  Synthetic
ucacacuauuucacauua

SEQ ID NO: 139891 - RNA, 19 nt, Artificial Sequence
  Synthetic
uucacacuauuucacauua

SEQ ID NO: 139892 - RNA, 20 nt, Artificial Sequence
  Synthetic
auucacacuauuucacauua

SEQ ID NO: 139893 - RNA, 21 nt, Artificial Sequence
  Synthetic
uauucacacuauuucacauua

SEQ ID NO: 139894 - RNA, 22 nt, Artificial Sequence
  Synthetic
uuauucacacuauuucacauua

SEQ ID NO: 139895 - RNA, 23 nt, Artificial Sequence
  Synthetic
auuauucacacuauuucacauua

SEQ ID NO: 139896 - RNA, 24 nt, Artificial Sequence
  Synthetic
uauuauucacacuauuucacauua

SEQ ID NO: 139897 - RNA, 18 nt, Artificial Sequence
  Synthetic
aacccagcaaucccauua

SEQ ID NO: 139898 - RNA, 19 nt, Artificial Sequence
  Synthetic
caacccagcaaucccauua

SEQ ID NO: 139899 - RNA, 20 nt, Artificial Sequence
  Synthetic
ucaacccagcaaucccauua

SEQ ID NO: 139900 - RNA, 21 nt, Artificial Sequence
  Synthetic
uucaacccagcaaucccauua

SEQ ID NO: 139901 - RNA, 22 nt, Artificial Sequence
  Synthetic
auucaacccagcaaucccauua

SEQ ID NO: 139902 - RNA, 23 nt, Artificial Sequence
  Synthetic
cauucaacccagcaaucccauua

SEQ ID NO: 139903 - RNA, 24 nt, Artificial Sequence
  Synthetic
ucauucaacccagcaaucccauua

SEQ ID NO: 139904 - RNA, 19 nt, Artificial Sequence
  Synthetic
ugacccaucaaucccauua

SEQ ID NO: 139905 - RNA, 20 nt, Artificial Sequence
  Synthetic
uugacccaucaaucccauua

SEQ ID NO: 139906 - RNA, 21 nt, Artificial Sequence
  Synthetic
uuugacccaucaaucccauua

SEQ ID NO: 139907 - RNA, 22 nt, Artificial Sequence
  Synthetic
auuugacccaucaaucccauua

SEQ ID NO: 139908 - RNA, 23 nt, Artificial Sequence
  Synthetic
cauuugacccaucaaucccauua

SEQ ID NO: 139909 - RNA, 24 nt, Artificial Sequence
  Synthetic
ucauuugacccaucaaucccauua

SEQ ID NO: 139910 - RNA, 19 nt, Artificial Sequence
  Synthetic
ugacccagccaucccauua

SEQ ID NO: 139911 - RNA, 20 nt, Artificial Sequence
  Synthetic
uugacccagccaucccauua

SEQ ID NO: 139912 - RNA, 21 nt, Artificial Sequence
  Synthetic
uuugacccagccaucccauua

SEQ ID NO: 139913 - RNA, 22 nt, Artificial Sequence
  Synthetic
auuugacccagccaucccauua

SEQ ID NO: 139914 - RNA, 23 nt, Artificial Sequence
  Synthetic
cauuugacccagccaucccauua

SEQ ID NO: 139915 - RNA, 24 nt, Artificial Sequence
  Synthetic
ccauuugacccagccaucccauua

SEQ ID NO: 139916 - RNA, 18 nt, Artificial Sequence
  Synthetic
aacucagccaucccauua

SEQ ID NO: 139917 - RNA, 19 nt, Artificial Sequence
  Synthetic
uaacucagccaucccauua

SEQ ID NO: 139918 - RNA, 20 nt, Artificial Sequence
  Synthetic
uuaacucagccaucccauua

SEQ ID NO: 139919 - RNA, 21 nt, Artificial Sequence
  Synthetic
uuuaacucagccaucccauua

SEQ ID NO: 139920 - RNA, 22 nt, Artificial Sequence
  Synthetic
auuuaacucagccaucccauua

SEQ ID NO: 139921 - RNA, 23 nt, Artificial Sequence
  Synthetic
cauuuaacucagccaucccauua

SEQ ID NO: 139922 - RNA, 24 nt, Artificial Sequence
  Synthetic
ccauuuaacucagccaucccauua

SEQ ID NO: 139923 - RNA, 18 nt, Artificial Sequence
  Synthetic
uauuuaaugaaagcauua

SEQ ID NO: 139924 - RNA, 19 nt, Artificial Sequence
  Synthetic
auauuuaaugaaagcauua

SEQ ID NO: 139925 - RNA, 20 nt, Artificial Sequence
  Synthetic
aauauuuaaugaaagcauua

SEQ ID NO: 139926 - RNA, 21 nt, Artificial Sequence
  Synthetic
aaagguaauaagugcucauua

SEQ ID NO: 139927 - RNA, 22 nt, Artificial Sequence
  Synthetic
uaaagguaauaagugcucauua

SEQ ID NO: 139928 - RNA, 23 nt, Artificial Sequence
  Synthetic
auaaagguaauaagugcucauua

SEQ ID NO: 139929 - RNA, 24 nt, Artificial Sequence
  Synthetic
uauaaagguaauaagugcucauua

SEQ ID NO: 139930 - RNA, 18 nt, Artificial Sequence
  Synthetic
uuaugcuuuuauucauua

SEQ ID NO: 139931 - RNA, 19 nt, Artificial Sequence
  Synthetic
uuuaugcuuuuauucauua

SEQ ID NO: 139932 - RNA, 20 nt, Artificial Sequence
  Synthetic
cuuuaugcuuuuauucauua

SEQ ID NO: 139933 - RNA, 20 nt, Artificial Sequence
  Synthetic
aggagaauacaaaaauauua

SEQ ID NO: 139934 - RNA, 19 nt, Artificial Sequence
  Synthetic
agauaagaaagaaauauua

SEQ ID NO: 139935 - RNA, 20 nt, Artificial Sequence
  Synthetic
aagauaagaaagaaauauua

SEQ ID NO: 139936 - RNA, 18 nt, Artificial Sequence
  Synthetic
aauuauauuacaauauua

SEQ ID NO: 139937 - RNA, 19 nt, Artificial Sequence
  Synthetic
aaauuauauuacaauauua

SEQ ID NO: 139938 - RNA, 20 nt, Artificial Sequence
  Synthetic
aaaauuauauuacaauauua

SEQ ID NO: 139939 - RNA, 18 nt, Artificial Sequence
  Synthetic
cuuuucucaauaauauua

SEQ ID NO: 139940 - RNA, 19 nt, Artificial Sequence
  Synthetic
ucuuuucucaauaauauua

SEQ ID NO: 139941 - RNA, 20 nt, Artificial Sequence
  Synthetic
cucuuuucucaauaauauua

SEQ ID NO: 139942 - RNA, 18 nt, Artificial Sequence
  Synthetic
auaugcccuuuaauauua

SEQ ID NO: 139943 - RNA, 19 nt, Artificial Sequence
  Synthetic
aauaugcccuuuaauauua

SEQ ID NO: 139944 - RNA, 20 nt, Artificial Sequence
  Synthetic
aaauaugcccuuuaauauua

SEQ ID NO: 139945 - RNA, 18 nt, Artificial Sequence
  Synthetic
uuuaaaauuuuuauauua

SEQ ID NO: 139946 - RNA, 19 nt, Artificial Sequence
  Synthetic
uuuuaaaauuuuuauauua

SEQ ID NO: 139947 - RNA, 18 nt, Artificial Sequence
  Synthetic
auguucaacaaauuauua

SEQ ID NO: 139948 - RNA, 20 nt, Artificial Sequence
  Synthetic
agauguucaacaaauuauua

SEQ ID NO: 139949 - RNA, 23 nt, Artificial Sequence
  Synthetic
aggagauguucaacaaauuauua

SEQ ID NO: 139950 - RNA, 24 nt, Artificial Sequence
  Synthetic
uaggagauguucaacaaauuauua

SEQ ID NO: 139951 - RNA, 18 nt, Artificial Sequence
  Synthetic
cucuuuucuguuuuauua

SEQ ID NO: 139952 - RNA, 19 nt, Artificial Sequence
  Synthetic
ucucuuuucuguuuuauua

SEQ ID NO: 139953 - RNA, 20 nt, Artificial Sequence
  Synthetic
uucucuuuucuguuuuauua

SEQ ID NO: 139954 - RNA, 18 nt, Artificial Sequence
  Synthetic
uuaugaggcacccacuua

SEQ ID NO: 139955 - RNA, 19 nt, Artificial Sequence
  Synthetic
cuuaugaggcacccacuua

SEQ ID NO: 139956 - RNA, 21 nt, Artificial Sequence
  Synthetic
ugcuuaugaggcacccacuua

SEQ ID NO: 139957 - RNA, 22 nt, Artificial Sequence
  Synthetic
cugcuuaugaggcacccacuua

SEQ ID NO: 139958 - RNA, 23 nt, Artificial Sequence
  Synthetic
ucugcuuaugaggcacccacuua

SEQ ID NO: 139959 - RNA, 24 nt, Artificial Sequence
  Synthetic
cucugcuuaugaggcacccacuua

SEQ ID NO: 139960 - RNA, 18 nt, Artificial Sequence
  Synthetic
augaggacauuagacuua

SEQ ID NO: 139961 - RNA, 19 nt, Artificial Sequence
  Synthetic
uaugaggacauuagacuua

SEQ ID NO: 139962 - RNA, 20 nt, Artificial Sequence
  Synthetic
uuaugaggacauuagacuua

SEQ ID NO: 139963 - RNA, 18 nt, Artificial Sequence
  Synthetic
uugaauacugaccccuua

SEQ ID NO: 139964 - RNA, 19 nt, Artificial Sequence
  Synthetic
uuugaauacugaccccuua

SEQ ID NO: 139965 - RNA, 20 nt, Artificial Sequence
  Synthetic
uuuugaauacugaccccuua

SEQ ID NO: 139966 - RNA, 21 nt, Artificial Sequence
  Synthetic
auuuugaauacugaccccuua

SEQ ID NO: 139967 - RNA, 22 nt, Artificial Sequence
  Synthetic
uauuuugaauacugaccccuua

SEQ ID NO: 139968 - RNA, 24 nt, Artificial Sequence
  Synthetic
uguauuuugaauacugaccccuua

SEQ ID NO: 139969 - RNA, 22 nt, Artificial Sequence
  Synthetic
agaaguauguucaugagccuua

SEQ ID NO: 139970 - RNA, 23 nt, Artificial Sequence
  Synthetic
cagaaguauguucaugagccuua

SEQ ID NO: 139971 - RNA, 22 nt, Artificial Sequence
  Synthetic
aggucuuagaugagccagcuua

SEQ ID NO: 139972 - RNA, 24 nt, Artificial Sequence
  Synthetic
agaggucuuagaugagccagcuua

SEQ ID NO: 139973 - RNA, 18 nt, Artificial Sequence
  Synthetic
acacauagagggugcuua

SEQ ID NO: 139974 - RNA, 20 nt, Artificial Sequence
  Synthetic
agacacauagagggugcuua

SEQ ID NO: 139975 - RNA, 18 nt, Artificial Sequence
  Synthetic
uuuuguugccugugcuua

SEQ ID NO: 139976 - RNA, 19 nt, Artificial Sequence
  Synthetic
cuuuuguugccugugcuua

SEQ ID NO: 139977 - RNA, 21 nt, Artificial Sequence
  Synthetic
ugcuuuuguugccugugcuua

SEQ ID NO: 139978 - RNA, 22 nt, Artificial Sequence
  Synthetic
uugcuuuuguugccugugcuua

SEQ ID NO: 139979 - RNA, 23 nt, Artificial Sequence
  Synthetic
uuugcuuuuguugccugugcuua

SEQ ID NO: 139980 - RNA, 24 nt, Artificial Sequence
  Synthetic
uuuugcuuuuguugccugugcuua

SEQ ID NO: 139981 - RNA, 18 nt, Artificial Sequence
  Synthetic
aagauaaaauuaaucuua

SEQ ID NO: 139982 - RNA, 19 nt, Artificial Sequence
  Synthetic
aaagauaaaauuaaucuua

SEQ ID NO: 139983 - RNA, 20 nt, Artificial Sequence
  Synthetic
aaaagauaaaauuaaucuua

SEQ ID NO: 139984 - RNA, 18 nt, Artificial Sequence
  Synthetic
uuaauuuuugcuaucuua

SEQ ID NO: 139985 - RNA, 19 nt, Artificial Sequence
  Synthetic
uuuaauuuuugcuaucuua

SEQ ID NO: 139986 - RNA, 20 nt, Artificial Sequence
  Synthetic
uuuuaauuuuugcuaucuua

SEQ ID NO: 139987 - RNA, 19 nt, Artificial Sequence
  Synthetic
uguuuccuaggcuuucuua

SEQ ID NO: 139988 - RNA, 22 nt, Artificial Sequence
  Synthetic
ugguguuuccuaggcuuucuua

SEQ ID NO: 139989 - RNA, 24 nt, Artificial Sequence
  Synthetic
agugguguuuccuaggcuuucuua

SEQ ID NO: 139990 - RNA, 18 nt, Artificial Sequence
  Synthetic
augcuagaugacaaguua

SEQ ID NO: 139991 - RNA, 19 nt, Artificial Sequence
  Synthetic
aaugcuagaugacaaguua

SEQ ID NO: 139992 - RNA, 20 nt, Artificial Sequence
  Synthetic
caaugcuagaugacaaguua

SEQ ID NO: 139993 - RNA, 21 nt, Artificial Sequence
  Synthetic
ccaaugcuagaugacaaguua

SEQ ID NO: 139994 - RNA, 22 nt, Artificial Sequence
  Synthetic
cccaaugcuagaugacaaguua

SEQ ID NO: 139995 - RNA, 23 nt, Artificial Sequence
  Synthetic
acccaaugcuagaugacaaguua

SEQ ID NO: 139996 - RNA, 24 nt, Artificial Sequence
  Synthetic
uacccaaugcuagaugacaaguua

SEQ ID NO: 139997 - RNA, 19 nt, Artificial Sequence
  Synthetic
ugaugagaaguaacaguua

SEQ ID NO: 139998 - RNA, 20 nt, Artificial Sequence
  Synthetic
augaugagaaguaacaguua

SEQ ID NO: 139999 - RNA, 18 nt, Artificial Sequence
  Synthetic
augcuaaaugaccaguua

SEQ ID NO: 140000 - RNA, 19 nt, Artificial Sequence
  Synthetic
aaugcuaaaugaccaguua

SEQ ID NO: 140001 - RNA, 20 nt, Artificial Sequence
  Synthetic
uaaugcuaaaugaccaguua

SEQ ID NO: 140002 - RNA, 21 nt, Artificial Sequence
  Synthetic
uuaaugcuaaaugaccaguua

SEQ ID NO: 140003 - RNA, 22 nt, Artificial Sequence
  Synthetic
cuuaaugcuaaaugaccaguua

SEQ ID NO: 140004 - RNA, 23 nt, Artificial Sequence
  Synthetic
acuuaaugcuaaaugaccaguua

SEQ ID NO: 140005 - RNA, 24 nt, Artificial Sequence
  Synthetic
uacuuaaugcuaaaugaccaguua

SEQ ID NO: 140006 - RNA, 18 nt, Artificial Sequence
  Synthetic
augguaaaugacgaguua

SEQ ID NO: 140007 - RNA, 19 nt, Artificial Sequence
  Synthetic
aaugguaaaugacgaguua

SEQ ID NO: 140008 - RNA, 20 nt, Artificial Sequence
  Synthetic
uaaugguaaaugacgaguua

SEQ ID NO: 140009 - RNA, 21 nt, Artificial Sequence
  Synthetic
cuaaugguaaaugacgaguua

SEQ ID NO: 140010 - RNA, 22 nt, Artificial Sequence
  Synthetic
ccuaaugguaaaugacgaguua

SEQ ID NO: 140011 - RNA, 23 nt, Artificial Sequence
  Synthetic
accuaaugguaaaugacgaguua

SEQ ID NO: 140012 - RNA, 24 nt, Artificial Sequence
  Synthetic
uaccuaaugguaaaugacgaguua

SEQ ID NO: 140013 - RNA, 18 nt, Artificial Sequence
  Synthetic
aauguaaaugacgaguua

SEQ ID NO: 140014 - RNA, 19 nt, Artificial Sequence
  Synthetic
uaauguaaaugacgaguua

SEQ ID NO: 140015 - RNA, 20 nt, Artificial Sequence
  Synthetic
cuaauguaaaugacgaguua

SEQ ID NO: 140016 - RNA, 21 nt, Artificial Sequence
  Synthetic
ccuaauguaaaugacgaguua

SEQ ID NO: 140017 - RNA, 22 nt, Artificial Sequence
  Synthetic
accuaauguaaaugacgaguua

SEQ ID NO: 140018 - RNA, 23 nt, Artificial Sequence
  Synthetic
uaccuaauguaaaugacgaguua

SEQ ID NO: 140019 - RNA, 24 nt, Artificial Sequence
  Synthetic
auaccuaauguaaaugacgaguua

SEQ ID NO: 140020 - RNA, 18 nt, Artificial Sequence
  Synthetic
augcuagaugacgaguua

SEQ ID NO: 140021 - RNA, 19 nt, Artificial Sequence
  Synthetic
aaugcuagaugacgaguua

SEQ ID NO: 140022 - RNA, 20 nt, Artificial Sequence
  Synthetic
uaaugcuagaugacgaguua

SEQ ID NO: 140023 - RNA, 21 nt, Artificial Sequence
  Synthetic
cuaaugcuagaugacgaguua

SEQ ID NO: 140024 - RNA, 22 nt, Artificial Sequence
  Synthetic
ccuaaugcuagaugacgaguua

SEQ ID NO: 140025 - RNA, 23 nt, Artificial Sequence
  Synthetic
accuaaugcuagaugacgaguua

SEQ ID NO: 140026 - RNA, 24 nt, Artificial Sequence
  Synthetic
uaccuaaugcuagaugacgaguua

SEQ ID NO: 140027 - RNA, 18 nt, Artificial Sequence
  Synthetic
auguuaacugacgaguua

SEQ ID NO: 140028 - RNA, 19 nt, Artificial Sequence
  Synthetic
aauguuaacugacgaguua

SEQ ID NO: 140029 - RNA, 20 nt, Artificial Sequence
  Synthetic
uaauguuaacugacgaguua

SEQ ID NO: 140030 - RNA, 21 nt, Artificial Sequence
  Synthetic
cuaauguuaacugacgaguua

SEQ ID NO: 140031 - RNA, 22 nt, Artificial Sequence
  Synthetic
ccuaauguuaacugacgaguua

SEQ ID NO: 140032 - RNA, 23 nt, Artificial Sequence
  Synthetic
accuaauguuaacugacgaguua

SEQ ID NO: 140033 - RNA, 24 nt, Artificial Sequence
  Synthetic
caccuaauguuaacugacgaguua

SEQ ID NO: 140034 - RNA, 18 nt, Artificial Sequence
  Synthetic
augcuagaugaugaguua

SEQ ID NO: 140035 - RNA, 19 nt, Artificial Sequence
  Synthetic
aaugcuagaugaugaguua

SEQ ID NO: 140036 - RNA, 20 nt, Artificial Sequence
  Synthetic
uaaugcuagaugaugaguua

SEQ ID NO: 140037 - RNA, 21 nt, Artificial Sequence
  Synthetic
cuaaugcuagaugaugaguua

SEQ ID NO: 140038 - RNA, 22 nt, Artificial Sequence
  Synthetic
ccuaaugcuagaugaugaguua

SEQ ID NO: 140039 - RNA, 23 nt, Artificial Sequence
  Synthetic
accuaaugcuagaugaugaguua

SEQ ID NO: 140040 - RNA, 24 nt, Artificial Sequence
  Synthetic
uaccuaaugcuagaugaugaguua

SEQ ID NO: 140041 - RNA, 18 nt, Artificial Sequence
  Synthetic
caaauauuucuugaguua

SEQ ID NO: 140042 - RNA, 19 nt, Artificial Sequence
  Synthetic
acaaauauuucuugaguua

SEQ ID NO: 140043 - RNA, 20 nt, Artificial Sequence
  Synthetic
aacaaauauuucuugaguua

SEQ ID NO: 140044 - RNA, 18 nt, Artificial Sequence
  Synthetic
augcuagaugacacguua

SEQ ID NO: 140045 - RNA, 19 nt, Artificial Sequence
  Synthetic
aaugcuagaugacacguua

SEQ ID NO: 140046 - RNA, 20 nt, Artificial Sequence
  Synthetic
uaaugcuagaugacacguua

SEQ ID NO: 140047 - RNA, 21 nt, Artificial Sequence
  Synthetic
cuaaugcuagaugacacguua

SEQ ID NO: 140048 - RNA, 22 nt, Artificial Sequence
  Synthetic
ccuaaugcuagaugacacguua

SEQ ID NO: 140049 - RNA, 23 nt, Artificial Sequence
  Synthetic
accuaaugcuagaugacacguua

SEQ ID NO: 140050 - RNA, 24 nt, Artificial Sequence
  Synthetic
uaccuaaugcuagaugacacguua

SEQ ID NO: 140051 - RNA, 18 nt, Artificial Sequence
  Synthetic
augcuagaugacggguua

SEQ ID NO: 140052 - RNA, 19 nt, Artificial Sequence
  Synthetic
aaugcuagaugacggguua

SEQ ID NO: 140053 - RNA, 20 nt, Artificial Sequence
  Synthetic
uaaugcuagaugacggguua

SEQ ID NO: 140054 - RNA, 21 nt, Artificial Sequence
  Synthetic
cuaaugcuagaugacggguua

SEQ ID NO: 140055 - RNA, 22 nt, Artificial Sequence
  Synthetic
ccuaaugcuagaugacggguua

SEQ ID NO: 140056 - RNA, 23 nt, Artificial Sequence
  Synthetic
accuaaugcuagaugacggguua

SEQ ID NO: 140057 - RNA, 24 nt, Artificial Sequence
  Synthetic
uaccuaaugcuagaugacggguua

SEQ ID NO: 140058 - RNA, 18 nt, Artificial Sequence
  Synthetic
aaauuauugaauauguua

SEQ ID NO: 140059 - RNA, 18 nt, Artificial Sequence
  Synthetic
acuauuuuguguauguua

SEQ ID NO: 140060 - RNA, 20 nt, Artificial Sequence
  Synthetic
ugacuauuuuguguauguua

SEQ ID NO: 140061 - RNA, 18 nt, Artificial Sequence
  Synthetic
uuuauuucauugguguua

SEQ ID NO: 140062 - RNA, 20 nt, Artificial Sequence
  Synthetic
uguuuauuucauugguguua

SEQ ID NO: 140063 - RNA, 19 nt, Artificial Sequence
  Synthetic
ugauauuauuucauuguua

SEQ ID NO: 140064 - RNA, 20 nt, Artificial Sequence
  Synthetic
uugauauuauuucauuguua

SEQ ID NO: 140065 - RNA, 21 nt, Artificial Sequence
  Synthetic
cuugauauuauuucauuguua

SEQ ID NO: 140066 - RNA, 23 nt, Artificial Sequence
  Synthetic
ugcuugauauuauuucauuguua

SEQ ID NO: 140067 - RNA, 24 nt, Artificial Sequence
  Synthetic
augcuugauauuauuucauuguua

SEQ ID NO: 140068 - RNA, 18 nt, Artificial Sequence
  Synthetic
uuauuuguuuucuuguua

SEQ ID NO: 140069 - RNA, 22 nt, Artificial Sequence
  Synthetic
aggguuauuuguuuucuuguua

SEQ ID NO: 140070 - RNA, 23 nt, Artificial Sequence
  Synthetic
uaggguuauuuguuuucuuguua

SEQ ID NO: 140071 - RNA, 24 nt, Artificial Sequence
  Synthetic
uuaggguuauuuguuuucuuguua

SEQ ID NO: 140072 - RNA, 21 nt, Artificial Sequence
  Synthetic
uggauuauuuccaaaaauuua

SEQ ID NO: 140073 - RNA, 22 nt, Artificial Sequence
  Synthetic
uuggauuauuuccaaaaauuua

SEQ ID NO: 140074 - RNA, 23 nt, Artificial Sequence
  Synthetic
uuuggauuauuuccaaaaauuua

SEQ ID NO: 140075 - RNA, 24 nt, Artificial Sequence
  Synthetic
cuuuggauuauuuccaaaaauuua

SEQ ID NO: 140076 - RNA, 18 nt, Artificial Sequence
  Synthetic
caauuaaaauaaaauuua

SEQ ID NO: 140077 - RNA, 19 nt, Artificial Sequence
  Synthetic
ccaauuaaaauaaaauuua

SEQ ID NO: 140078 - RNA, 20 nt, Artificial Sequence
  Synthetic
cccaauuaaaauaaaauuua

SEQ ID NO: 140079 - RNA, 19 nt, Artificial Sequence
  Synthetic
agcaacuucagcaaauuua

SEQ ID NO: 140080 - RNA, 20 nt, Artificial Sequence
  Synthetic
aagcaacuucagcaaauuua

SEQ ID NO: 140081 - RNA, 19 nt, Artificial Sequence
  Synthetic
ugaggccucaagaaauuua

SEQ ID NO: 140082 - RNA, 20 nt, Artificial Sequence
  Synthetic
cugaggccucaagaaauuua

SEQ ID NO: 140083 - RNA, 18 nt, Artificial Sequence
  Synthetic
auauucaagagaaauuua

SEQ ID NO: 140084 - RNA, 19 nt, Artificial Sequence
  Synthetic
aauauucaagagaaauuua

SEQ ID NO: 140085 - RNA, 20 nt, Artificial Sequence
  Synthetic
aaauauucaagagaaauuua

SEQ ID NO: 140086 - RNA, 18 nt, Artificial Sequence
  Synthetic
auuuuacuuugaaauuua

SEQ ID NO: 140087 - RNA, 20 nt, Artificial Sequence
  Synthetic
agauuuuacuuugaaauuua

SEQ ID NO: 140088 - RNA, 18 nt, Artificial Sequence
  Synthetic
aauaucucauucaauuua

SEQ ID NO: 140089 - RNA, 20 nt, Artificial Sequence
  Synthetic
ugaauaucucauucaauuua

SEQ ID NO: 140090 - RNA, 21 nt, Artificial Sequence
  Synthetic
uugaauaucucauucaauuua

SEQ ID NO: 140091 - RNA, 23 nt, Artificial Sequence
  Synthetic
uguugaauaucucauucaauuua

SEQ ID NO: 140092 - RNA, 18 nt, Artificial Sequence
  Synthetic
aagacaaaagaacauuua

SEQ ID NO: 140093 - RNA, 19 nt, Artificial Sequence
  Synthetic
uaagacaaaagaacauuua

SEQ ID NO: 140094 - RNA, 20 nt, Artificial Sequence
  Synthetic
uuaagacaaaagaacauuua

SEQ ID NO: 140095 - RNA, 18 nt, Artificial Sequence
  Synthetic
aguuaugaaauccauuua

SEQ ID NO: 140096 - RNA, 20 nt, Artificial Sequence
  Synthetic
ugaguuaugaaauccauuua

SEQ ID NO: 140097 - RNA, 18 nt, Artificial Sequence
  Synthetic
ucauucaacaaauauuua

SEQ ID NO: 140098 - RNA, 19 nt, Artificial Sequence
  Synthetic
uucauucaacaaauauuua

SEQ ID NO: 140099 - RNA, 21 nt, Artificial Sequence
  Synthetic
uguucauucaacaaauauuua

SEQ ID NO: 140100 - RNA, 22 nt, Artificial Sequence
  Synthetic
uuguucauucaacaaauauuua

SEQ ID NO: 140101 - RNA, 23 nt, Artificial Sequence
  Synthetic
uuuguucauucaacaaauauuua

SEQ ID NO: 140102 - RNA, 24 nt, Artificial Sequence
  Synthetic
auuuguucauucaacaaauauuua

SEQ ID NO: 140103 - RNA, 18 nt, Artificial Sequence
  Synthetic
aguagguauauauauuua

SEQ ID NO: 140104 - RNA, 19 nt, Artificial Sequence
  Synthetic
caguagguauauauauuua

SEQ ID NO: 140105 - RNA, 20 nt, Artificial Sequence
  Synthetic
acaguagguauauauauuua

SEQ ID NO: 140106 - RNA, 21 nt, Artificial Sequence
  Synthetic
cacaguagguauauauauuua

SEQ ID NO: 140107 - RNA, 22 nt, Artificial Sequence
  Synthetic
acacaguagguauauauauuua

SEQ ID NO: 140108 - RNA, 23 nt, Artificial Sequence
  Synthetic
uacacaguagguauauauauuua

SEQ ID NO: 140109 - RNA, 19 nt, Artificial Sequence
  Synthetic
uaguagguauauauauuua

SEQ ID NO: 140110 - RNA, 20 nt, Artificial Sequence
  Synthetic
auaguagguauauauauuua

SEQ ID NO: 140111 - RNA, 21 nt, Artificial Sequence
  Synthetic
cauaguagguauauauauuua

SEQ ID NO: 140112 - RNA, 22 nt, Artificial Sequence
  Synthetic
acauaguagguauauauauuua

SEQ ID NO: 140113 - RNA, 23 nt, Artificial Sequence
  Synthetic
uacauaguagguauauauauuua

SEQ ID NO: 140114 - RNA, 18 nt, Artificial Sequence
  Synthetic
ucauuugacaaguauuua

SEQ ID NO: 140115 - RNA, 19 nt, Artificial Sequence
  Synthetic
aucauuugacaaguauuua

SEQ ID NO: 140116 - RNA, 18 nt, Artificial Sequence
  Synthetic
aauaacuauauguauuua

SEQ ID NO: 140117 - RNA, 19 nt, Artificial Sequence
  Synthetic
uaauaacuauauguauuua

SEQ ID NO: 140118 - RNA, 18 nt, Artificial Sequence
  Synthetic
aguagguguauguauuua

SEQ ID NO: 140119 - RNA, 19 nt, Artificial Sequence
  Synthetic
uaguagguguauguauuua

SEQ ID NO: 140120 - RNA, 20 nt, Artificial Sequence
  Synthetic
auaguagguguauguauuua

SEQ ID NO: 140121 - RNA, 21 nt, Artificial Sequence
  Synthetic
cauaguagguguauguauuua

SEQ ID NO: 140122 - RNA, 22 nt, Artificial Sequence
  Synthetic
acauaguagguguauguauuua

SEQ ID NO: 140123 - RNA, 23 nt, Artificial Sequence
  Synthetic
uacauaguagguguauguauuua

SEQ ID NO: 140124 - RNA, 18 nt, Artificial Sequence
  Synthetic
uuuuuauuuauuuauuua

SEQ ID NO: 140125 - RNA, 19 nt, Artificial Sequence
  Synthetic
cuuuuuauuuauuuauuua

SEQ ID NO: 140126 - RNA, 20 nt, Artificial Sequence
  Synthetic
acuuuuuauuuauuuauuua

SEQ ID NO: 140127 - RNA, 21 nt, Artificial Sequence
  Synthetic
aacuuuuuauuuauuuauuua

SEQ ID NO: 140128 - RNA, 22 nt, Artificial Sequence
  Synthetic
uaacuuuuuauuuauuuauuua

SEQ ID NO: 140129 - RNA, 23 nt, Artificial Sequence
  Synthetic
uuaacuuuuuauuuauuuauuua

SEQ ID NO: 140130 - RNA, 24 nt, Artificial Sequence
  Synthetic
auuaacuuuuuauuuauuuauuua

SEQ ID NO: 140131 - RNA, 18 nt, Artificial Sequence
  Synthetic
aauaauuuuguuuauuua

SEQ ID NO: 140132 - RNA, 19 nt, Artificial Sequence
  Synthetic
uaauaauuuuguuuauuua

SEQ ID NO: 140133 - RNA, 20 nt, Artificial Sequence
  Synthetic
auaauaauuuuguuuauuua

SEQ ID NO: 140134 - RNA, 19 nt, Artificial Sequence
  Synthetic
uguacugcaugugacuuua

SEQ ID NO: 140135 - RNA, 20 nt, Artificial Sequence
  Synthetic
cuguacugcaugugacuuua

SEQ ID NO: 140136 - RNA, 21 nt, Artificial Sequence
  Synthetic
ccuguacugcaugugacuuua

SEQ ID NO: 140137 - RNA, 22 nt, Artificial Sequence
  Synthetic
accuguacugcaugugacuuua

SEQ ID NO: 140138 - RNA, 23 nt, Artificial Sequence
  Synthetic
aaccuguacugcaugugacuuua

SEQ ID NO: 140139 - RNA, 24 nt, Artificial Sequence
  Synthetic
aaaccuguacugcaugugacuuua

SEQ ID NO: 140140 - RNA, 18 nt, Artificial Sequence
  Synthetic
uuauguuuuuaaccuuua

SEQ ID NO: 140141 - RNA, 19 nt, Artificial Sequence
  Synthetic
cuuauguuuuuaaccuuua

SEQ ID NO: 140142 - RNA, 20 nt, Artificial Sequence
  Synthetic
ucuuauguuuuuaaccuuua

SEQ ID NO: 140143 - RNA, 18 nt, Artificial Sequence
  Synthetic
aauauuuuuacaucuuua

SEQ ID NO: 140144 - RNA, 19 nt, Artificial Sequence
  Synthetic
aaauauuuuuacaucuuua

SEQ ID NO: 140145 - RNA, 20 nt, Artificial Sequence
  Synthetic
caaauauuuuuacaucuuua

SEQ ID NO: 140146 - RNA, 22 nt, Artificial Sequence
  Synthetic
ugcaaauauuuuuacaucuuua

SEQ ID NO: 140147 - RNA, 23 nt, Artificial Sequence
  Synthetic
augcaaauauuuuuacaucuuua

SEQ ID NO: 140148 - RNA, 24 nt, Artificial Sequence
  Synthetic
uaugcaaauauuuuuacaucuuua

SEQ ID NO: 140149 - RNA, 18 nt, Artificial Sequence
  Synthetic
uuaggaaauauaucuuua

SEQ ID NO: 140150 - RNA, 19 nt, Artificial Sequence
  Synthetic
auuaggaaauauaucuuua

SEQ ID NO: 140151 - RNA, 20 nt, Artificial Sequence
  Synthetic
cauuaggaaauauaucuuua

SEQ ID NO: 140152 - RNA, 18 nt, Artificial Sequence
  Synthetic
uacuuauauuuuucuuua

SEQ ID NO: 140153 - RNA, 19 nt, Artificial Sequence
  Synthetic
auacuuauauuuuucuuua

SEQ ID NO: 140154 - RNA, 20 nt, Artificial Sequence
  Synthetic
aauacuuauauuuuucuuua

SEQ ID NO: 140155 - RNA, 18 nt, Artificial Sequence
  Synthetic
cuuuaccaacuaaguuua

SEQ ID NO: 140156 - RNA, 20 nt, Artificial Sequence
  Synthetic
ugcuuuaccaacuaaguuua

SEQ ID NO: 140157 - RNA, 21 nt, Artificial Sequence
  Synthetic
cugcuuuaccaacuaaguuua

SEQ ID NO: 140158 - RNA, 23 nt, Artificial Sequence
  Synthetic
ugcugcuuuaccaacuaaguuua

SEQ ID NO: 140159 - RNA, 24 nt, Artificial Sequence
  Synthetic
cugcugcuuuaccaacuaaguuua

SEQ ID NO: 140160 - RNA, 18 nt, Artificial Sequence
  Synthetic
ccaucaauaacuaguuua

SEQ ID NO: 140161 - RNA, 19 nt, Artificial Sequence
  Synthetic
cccaucaauaacuaguuua

SEQ ID NO: 140162 - RNA, 20 nt, Artificial Sequence
  Synthetic
ucccaucaauaacuaguuua

SEQ ID NO: 140163 - RNA, 22 nt, Artificial Sequence
  Synthetic
ugucccaucaauaacuaguuua

SEQ ID NO: 140164 - RNA, 23 nt, Artificial Sequence
  Synthetic
uugucccaucaauaacuaguuua

SEQ ID NO: 140165 - RNA, 24 nt, Artificial Sequence
  Synthetic
uuugucccaucaauaacuaguuua

SEQ ID NO: 140166 - RNA, 18 nt, Artificial Sequence
  Synthetic
uuggacagcacagguuua

SEQ ID NO: 140167 - RNA, 20 nt, Artificial Sequence
  Synthetic
uguuggacagcacagguuua

SEQ ID NO: 140168 - RNA, 22 nt, Artificial Sequence
  Synthetic
cguguuggacagcacagguuua

SEQ ID NO: 140169 - RNA, 23 nt, Artificial Sequence
  Synthetic
ccguguuggacagcacagguuua

SEQ ID NO: 140170 - RNA, 24 nt, Artificial Sequence
  Synthetic
accguguuggacagcacagguuua

SEQ ID NO: 140171 - RNA, 19 nt, Artificial Sequence
  Synthetic
uguuaugcaguauuguuua

SEQ ID NO: 140172 - RNA, 20 nt, Artificial Sequence
  Synthetic
uuguuaugcaguauuguuua

SEQ ID NO: 140173 - RNA, 22 nt, Artificial Sequence
  Synthetic
aguuguuaugcaguauuguuua

SEQ ID NO: 140174 - RNA, 23 nt, Artificial Sequence
  Synthetic
uaguuguuaugcaguauuguuua

SEQ ID NO: 140175 - RNA, 24 nt, Artificial Sequence
  Synthetic
auaguuguuaugcaguauuguuua

SEQ ID NO: 140176 - RNA, 18 nt, Artificial Sequence
  Synthetic
augagggcuuauuguuua

SEQ ID NO: 140177 - RNA, 19 nt, Artificial Sequence
  Synthetic
aaugagggcuuauuguuua

SEQ ID NO: 140178 - RNA, 21 nt, Artificial Sequence
  Synthetic
agaaugagggcuuauuguuua

SEQ ID NO: 140179 - RNA, 23 nt, Artificial Sequence
  Synthetic
agagaaugagggcuuauuguuua

SEQ ID NO: 140180 - RNA, 24 nt, Artificial Sequence
  Synthetic
aagagaaugagggcuuauuguuua

SEQ ID NO: 140181 - RNA, 20 nt, Artificial Sequence
  Synthetic
uggaauaaauguaaauuuua

SEQ ID NO: 140182 - RNA, 18 nt, Artificial Sequence
  Synthetic
uguuuuacuuaaauuuua

SEQ ID NO: 140183 - RNA, 19 nt, Artificial Sequence
  Synthetic
auguuuuacuuaaauuuua

SEQ ID NO: 140184 - RNA, 20 nt, Artificial Sequence
  Synthetic
aauguuuuacuuaaauuuua

SEQ ID NO: 140185 - RNA, 18 nt, Artificial Sequence
  Synthetic
caguuugcuaguauuuua

SEQ ID NO: 140186 - RNA, 19 nt, Artificial Sequence
  Synthetic
ucaguuugcuaguauuuua

SEQ ID NO: 140187 - RNA, 20 nt, Artificial Sequence
  Synthetic
uucaguuugcuaguauuuua

SEQ ID NO: 140188 - RNA, 22 nt, Artificial Sequence
  Synthetic
aguucaguuugcuaguauuuua

SEQ ID NO: 140189 - RNA, 24 nt, Artificial Sequence
  Synthetic
ugaguucaguuugcuaguauuuua

SEQ ID NO: 140190 - RNA, 18 nt, Artificial Sequence
  Synthetic
uguuaauaauaacuuuua

SEQ ID NO: 140191 - RNA, 19 nt, Artificial Sequence
  Synthetic
auguuaauaauaacuuuua

SEQ ID NO: 140192 - RNA, 20 nt, Artificial Sequence
  Synthetic
aauguuaauaauaacuuuua

SEQ ID NO: 140193 - RNA, 18 nt, Artificial Sequence
  Synthetic
cucucucucucucuuuua

SEQ ID NO: 140194 - RNA, 19 nt, Artificial Sequence
  Synthetic
ucucucucucucucuuuua

SEQ ID NO: 140195 - RNA, 21 nt, Artificial Sequence
  Synthetic
ugucucucucucucucuuuua

SEQ ID NO: 140196 - RNA, 23 nt, Artificial Sequence
  Synthetic
agugucucucucucucucuuuua

SEQ ID NO: 140197 - RNA, 24 nt, Artificial Sequence
  Synthetic
cagugucucucucucucucuuuua

SEQ ID NO: 140198 - RNA, 19 nt, Artificial Sequence
  Synthetic
agauuucuauuuucuuuua

SEQ ID NO: 140199 - RNA, 20 nt, Artificial Sequence
  Synthetic
cagauuucuauuuucuuuua

SEQ ID NO: 140200 - RNA, 18 nt, Artificial Sequence
  Synthetic
agauaaguuugcguuuua

SEQ ID NO: 140201 - RNA, 19 nt, Artificial Sequence
  Synthetic
uagauaaguuugcguuuua

SEQ ID NO: 140202 - RNA, 20 nt, Artificial Sequence
  Synthetic
auagauaaguuugcguuuua

SEQ ID NO: 140203 - RNA, 21 nt, Artificial Sequence
  Synthetic
uauagauaaguuugcguuuua

SEQ ID NO: 140204 - RNA, 22 nt, Artificial Sequence
  Synthetic
uuauagauaaguuugcguuuua

SEQ ID NO: 140205 - RNA, 23 nt, Artificial Sequence
  Synthetic
auuauagauaaguuugcguuuua

SEQ ID NO: 140206 - RNA, 24 nt, Artificial Sequence
  Synthetic
cauuauagauaaguuugcguuuua

SEQ ID NO: 140207 - RNA, 18 nt, Artificial Sequence
  Synthetic
ccaaaaauaaaauuuuua

SEQ ID NO: 140208 - RNA, 19 nt, Artificial Sequence
  Synthetic
accaaaaauaaaauuuuua

SEQ ID NO: 140209 - RNA, 20 nt, Artificial Sequence
  Synthetic
caccaaaaauaaaauuuuua

SEQ ID NO: 140210 - RNA, 18 nt, Artificial Sequence
  Synthetic
aauaauaauauauuuuua

SEQ ID NO: 140211 - RNA, 19 nt, Artificial Sequence
  Synthetic
uaauaauaauauauuuuua

SEQ ID NO: 140212 - RNA, 20 nt, Artificial Sequence
  Synthetic
auaauaauaauauauuuuua

SEQ ID NO: 140213 - RNA, 21 nt, Artificial Sequence
  Synthetic
uauaauaauaauauauuuuua

SEQ ID NO: 140214 - RNA, 22 nt, Artificial Sequence
  Synthetic
uuauaauaauaauauauuuuua

SEQ ID NO: 140215 - RNA, 23 nt, Artificial Sequence
  Synthetic
uuuauaauaauaauauauuuuua

SEQ ID NO: 140216 - RNA, 24 nt, Artificial Sequence
  Synthetic
cuuuauaauaauaauauauuuuua

SEQ ID NO: 140217 - RNA, 18 nt, Artificial Sequence
  Synthetic
cuacuuuggguauuuuua

SEQ ID NO: 140218 - RNA, 20 nt, Artificial Sequence
  Synthetic
ugcuacuuuggguauuuuua

SEQ ID NO: 140219 - RNA, 21 nt, Artificial Sequence
  Synthetic
ccuuacaaaauguacuuuuua

SEQ ID NO: 140220 - RNA, 23 nt, Artificial Sequence
  Synthetic
agccuuacaaaauguacuuuuua

SEQ ID NO: 140221 - RNA, 24 nt, Artificial Sequence
  Synthetic
uagccuuacaaaauguacuuuuua

SEQ ID NO: 140222 - RNA, 19 nt, Artificial Sequence
  Synthetic
uguuuuguuuuguuuuuua

SEQ ID NO: 140223 - RNA, 20 nt, Artificial Sequence
  Synthetic
uuguuuuguuuuguuuuuua

SEQ ID NO: 140224 - RNA, 21 nt, Artificial Sequence
  Synthetic
uuuguuuuguuuuguuuuuua

SEQ ID NO: 140225 - RNA, 22 nt, Artificial Sequence
  Synthetic
uuuuguuuuguuuuguuuuuua

SEQ ID NO: 140226 - RNA, 24 nt, Artificial Sequence
  Synthetic
uguuuuguuuuguuuuguuuuuua

SEQ ID NO: 140227 - RNA, 18 nt, Artificial Sequence
  Synthetic
uuuuuuuguauuuuuuua

SEQ ID NO: 140228 - RNA, 19 nt, Artificial Sequence
  Synthetic
uuuuuuuuguauuuuuuua

SEQ ID NO: 140229 - RNA, 20 nt, Artificial Sequence
  Synthetic
uuuuuuuuuguauuuuuuua

SEQ ID NO: 140230 - RNA, 21 nt, Artificial Sequence
  Synthetic
uuuuuuuuuuguauuuuuuua

SEQ ID NO: 140231 - RNA, 22 nt, Artificial Sequence
  Synthetic
uuuuuuuuuuuguauuuuuuua

SEQ ID NO: 140232 - RNA, 23 nt, Artificial Sequence
  Synthetic
cuuuuuuuuuuuguauuuuuuua

SEQ ID NO: 140233 - RNA, 24 nt, Artificial Sequence
  Synthetic
acuuuuuuuuuuuguauuuuuuua

SEQ ID NO: 140234 - RNA, 18 nt, Artificial Sequence
  Synthetic
ugggaaaaaaaaaaaaac

SEQ ID NO: 140235 - RNA, 19 nt, Artificial Sequence
  Synthetic
uugggaaaaaaaaaaaaac

SEQ ID NO: 140236 - RNA, 20 nt, Artificial Sequence
  Synthetic
uuugggaaaaaaaaaaaaac

SEQ ID NO: 140237 - RNA, 21 nt, Artificial Sequence
  Synthetic
uuuugggaaaaaaaaaaaaac

SEQ ID NO: 140238 - RNA, 22 nt, Artificial Sequence
  Synthetic
auuuugggaaaaaaaaaaaaac

SEQ ID NO: 140239 - RNA, 23 nt, Artificial Sequence
  Synthetic
uauuuugggaaaaaaaaaaaaac

SEQ ID NO: 140240 - RNA, 18 nt, Artificial Sequence
  Synthetic
aaaaauaaaaaaaaaaac

SEQ ID NO: 140241 - RNA, 19 nt, Artificial Sequence
  Synthetic
aaaaaauaaaaaaaaaaac

SEQ ID NO: 140242 - RNA, 20 nt, Artificial Sequence
  Synthetic
aaaaaaauaaaaaaaaaaac

SEQ ID NO: 140243 - RNA, 21 nt, Artificial Sequence
  Synthetic
aaaaaaaauaaaaaaaaaaac

SEQ ID NO: 140244 - RNA, 22 nt, Artificial Sequence
  Synthetic
uaaaaaaaauaaaaaaaaaaac

SEQ ID NO: 140245 - RNA, 23 nt, Artificial Sequence
  Synthetic
uuaaaaaaaauaaaaaaaaaaac

SEQ ID NO: 140246 - RNA, 24 nt, Artificial Sequence
  Synthetic
auuaaaaaaaauaaaaaaaaaaac

SEQ ID NO: 140247 - RNA, 18 nt, Artificial Sequence
  Synthetic
uguaaacaagacaaaaac

SEQ ID NO: 140248 - RNA, 19 nt, Artificial Sequence
  Synthetic
auguaaacaagacaaaaac

SEQ ID NO: 140249 - RNA, 22 nt, Artificial Sequence
  Synthetic
aggauguaaacaagacaaaaac

SEQ ID NO: 140250 - RNA, 23 nt, Artificial Sequence
  Synthetic
uaggauguaaacaagacaaaaac

SEQ ID NO: 140251 - RNA, 21 nt, Artificial Sequence
  Synthetic
auggaacaccaccagaaaaac

SEQ ID NO: 140252 - RNA, 22 nt, Artificial Sequence
  Synthetic
aauggaacaccaccagaaaaac

SEQ ID NO: 140253 - RNA, 23 nt, Artificial Sequence
  Synthetic
aaauggaacaccaccagaaaaac

SEQ ID NO: 140254 - RNA, 24 nt, Artificial Sequence
  Synthetic
aaaauggaacaccaccagaaaaac

SEQ ID NO: 140255 - RNA, 18 nt, Artificial Sequence
  Synthetic
aacgaaaggagagaaaac

SEQ ID NO: 140256 - RNA, 19 nt, Artificial Sequence
  Synthetic
aaacgaaaggagagaaaac

SEQ ID NO: 140257 - RNA, 21 nt, Artificial Sequence
  Synthetic
agaaacgaaaggagagaaaac

SEQ ID NO: 140258 - RNA, 22 nt, Artificial Sequence
  Synthetic
aagaaacgaaaggagagaaaac

SEQ ID NO: 140259 - RNA, 23 nt, Artificial Sequence
  Synthetic
aaagaaacgaaaggagagaaaac

SEQ ID NO: 140260 - RNA, 21 nt, Artificial Sequence
  Synthetic
uguucaaaucaaauggaaaac

SEQ ID NO: 140261 - RNA, 22 nt, Artificial Sequence
  Synthetic
auguucaaaucaaauggaaaac

SEQ ID NO: 140262 - RNA, 23 nt, Artificial Sequence
  Synthetic
cauguucaaaucaaauggaaaac

SEQ ID NO: 140263 - RNA, 24 nt, Artificial Sequence
  Synthetic
acauguucaaaucaaauggaaaac

SEQ ID NO: 140264 - RNA, 21 nt, Artificial Sequence
  Synthetic
aaaagugacaaagaauaaaac

SEQ ID NO: 140265 - RNA, 22 nt, Artificial Sequence
  Synthetic
aaaaagugacaaagaauaaaac

SEQ ID NO: 140266 - RNA, 23 nt, Artificial Sequence
  Synthetic
aaaaaagugacaaagaauaaaac

SEQ ID NO: 140267 - RNA, 24 nt, Artificial Sequence
  Synthetic
aaaaaaagugacaaagaauaaaac

SEQ ID NO: 140268 - RNA, 18 nt, Artificial Sequence
  Synthetic
acacuuucuuaauaaaac

SEQ ID NO: 140269 - RNA, 19 nt, Artificial Sequence
  Synthetic
aacacuuucuuaauaaaac

SEQ ID NO: 140270 - RNA, 20 nt, Artificial Sequence
  Synthetic
aaacacuuucuuaauaaaac

SEQ ID NO: 140271 - RNA, 18 nt, Artificial Sequence
  Synthetic
uuuguucaacuguaaaac

SEQ ID NO: 140272 - RNA, 20 nt, Artificial Sequence
  Synthetic
aguuuguucaacuguaaaac

SEQ ID NO: 140273 - RNA, 21 nt, Artificial Sequence
  Synthetic
caguuuguucaacuguaaaac

SEQ ID NO: 140274 - RNA, 22 nt, Artificial Sequence
  Synthetic
acaguuuguucaacuguaaaac

SEQ ID NO: 140275 - RNA, 23 nt, Artificial Sequence
  Synthetic
uacaguuuguucaacuguaaaac

SEQ ID NO: 140276 - RNA, 24 nt, Artificial Sequence
  Synthetic
uuacaguuuguucaacuguaaaac

SEQ ID NO: 140277 - RNA, 18 nt, Artificial Sequence
  Synthetic
uuuucucaucuguaaaac

SEQ ID NO: 140278 - RNA, 19 nt, Artificial Sequence
  Synthetic
auuuucucaucuguaaaac

SEQ ID NO: 140279 - RNA, 20 nt, Artificial Sequence
  Synthetic
aauuuucucaucuguaaaac

SEQ ID NO: 140280 - RNA, 21 nt, Artificial Sequence
  Synthetic
uaauuuucucaucuguaaaac

SEQ ID NO: 140281 - RNA, 22 nt, Artificial Sequence
  Synthetic
uuaauuuucucaucuguaaaac

SEQ ID NO: 140282 - RNA, 24 nt, Artificial Sequence
  Synthetic
aguuaauuuucucaucuguaaaac

SEQ ID NO: 140283 - RNA, 18 nt, Artificial Sequence
  Synthetic
aucccaaagaauuaaaac

SEQ ID NO: 140284 - RNA, 19 nt, Artificial Sequence
  Synthetic
uaucccaaagaauuaaaac

SEQ ID NO: 140285 - RNA, 20 nt, Artificial Sequence
  Synthetic
auaucccaaagaauuaaaac

SEQ ID NO: 140286 - RNA, 21 nt, Artificial Sequence
  Synthetic
uauaucccaaagaauuaaaac

SEQ ID NO: 140287 - RNA, 22 nt, Artificial Sequence
  Synthetic
auauaucccaaagaauuaaaac

SEQ ID NO: 140288 - RNA, 23 nt, Artificial Sequence
  Synthetic
uauauaucccaaagaauuaaaac

SEQ ID NO: 140289 - RNA, 18 nt, Artificial Sequence
  Synthetic
aaaacaaaacaaacaaac

SEQ ID NO: 140290 - RNA, 19 nt, Artificial Sequence
  Synthetic
caaaacaaaacaaacaaac

SEQ ID NO: 140291 - RNA, 20 nt, Artificial Sequence
  Synthetic
acaaaacaaaacaaacaaac

SEQ ID NO: 140292 - RNA, 21 nt, Artificial Sequence
  Synthetic
aacaaaacaaaacaaacaaac

SEQ ID NO: 140293 - RNA, 23 nt, Artificial Sequence
  Synthetic
agaacaaaacaaaacaaacaaac

SEQ ID NO: 140294 - RNA, 24 nt, Artificial Sequence
  Synthetic
cagaacaaaacaaaacaaacaaac

SEQ ID NO: 140295 - RNA, 18 nt, Artificial Sequence
  Synthetic
aagaacugauggacaaac

SEQ ID NO: 140296 - RNA, 20 nt, Artificial Sequence
  Synthetic
agaagaacugauggacaaac

SEQ ID NO: 140297 - RNA, 18 nt, Artificial Sequence
  Synthetic
ugaggcuugccaagaaac

SEQ ID NO: 140298 - RNA, 21 nt, Artificial Sequence
  Synthetic
uggugaggcuugccaagaaac

SEQ ID NO: 140299 - RNA, 22 nt, Artificial Sequence
  Synthetic
auggugaggcuugccaagaaac

SEQ ID NO: 140300 - RNA, 23 nt, Artificial Sequence
  Synthetic
aauggugaggcuugccaagaaac

SEQ ID NO: 140301 - RNA, 24 nt, Artificial Sequence
  Synthetic
caauggugaggcuugccaagaaac

SEQ ID NO: 140302 - RNA, 18 nt, Artificial Sequence
  Synthetic
acaacaaaaaaaggaaac

SEQ ID NO: 140303 - RNA, 19 nt, Artificial Sequence
  Synthetic
aacaacaaaaaaaggaaac

SEQ ID NO: 140304 - RNA, 20 nt, Artificial Sequence
  Synthetic
caacaacaaaaaaaggaaac

SEQ ID NO: 140305 - RNA, 22 nt, Artificial Sequence
  Synthetic
agcaacaacaaaaaaaggaaac

SEQ ID NO: 140306 - RNA, 23 nt, Artificial Sequence
  Synthetic
cagcaacaacaaaaaaaggaaac

SEQ ID NO: 140307 - RNA, 24 nt, Artificial Sequence
  Synthetic
acagcaacaacaaaaaaaggaaac

SEQ ID NO: 140308 - RNA, 18 nt, Artificial Sequence
  Synthetic
cauaguggaagaugaaac

SEQ ID NO: 140309 - RNA, 19 nt, Artificial Sequence
  Synthetic
ucauaguggaagaugaaac

SEQ ID NO: 140310 - RNA, 20 nt, Artificial Sequence
  Synthetic
cucauaguggaagaugaaac

SEQ ID NO: 140311 - RNA, 21 nt, Artificial Sequence
  Synthetic
acucauaguggaagaugaaac

SEQ ID NO: 140312 - RNA, 22 nt, Artificial Sequence
  Synthetic
uacucauaguggaagaugaaac

SEQ ID NO: 140313 - RNA, 23 nt, Artificial Sequence
  Synthetic
uuacucauaguggaagaugaaac

SEQ ID NO: 140314 - RNA, 24 nt, Artificial Sequence
  Synthetic
uuuacucauaguggaagaugaaac

SEQ ID NO: 140315 - RNA, 21 nt, Artificial Sequence
  Synthetic
caaaggggaaugguaauaaac

SEQ ID NO: 140316 - RNA, 22 nt, Artificial Sequence
  Synthetic
acaaaggggaaugguaauaaac

SEQ ID NO: 140317 - RNA, 18 nt, Artificial Sequence
  Synthetic
aacaaggaaaaaguaaac

SEQ ID NO: 140318 - RNA, 19 nt, Artificial Sequence
  Synthetic
aaacaaggaaaaaguaaac

SEQ ID NO: 140319 - RNA, 20 nt, Artificial Sequence
  Synthetic
caaacaaggaaaaaguaaac

SEQ ID NO: 140320 - RNA, 18 nt, Artificial Sequence
  Synthetic
cccaguacuaaguuaaac

SEQ ID NO: 140321 - RNA, 19 nt, Artificial Sequence
  Synthetic
ucccaguacuaaguuaaac

SEQ ID NO: 140322 - RNA, 20 nt, Artificial Sequence
  Synthetic
cucccaguacuaaguuaaac

SEQ ID NO: 140323 - RNA, 21 nt, Artificial Sequence
  Synthetic
acucccaguacuaaguuaaac

SEQ ID NO: 140324 - RNA, 24 nt, Artificial Sequence
  Synthetic
aggacucccaguacuaaguuaaac

SEQ ID NO: 140325 - RNA, 18 nt, Artificial Sequence
  Synthetic
aaaagucuaagaaacaac

SEQ ID NO: 140326 - RNA, 19 nt, Artificial Sequence
  Synthetic
aaaaagucuaagaaacaac

SEQ ID NO: 140327 - RNA, 20 nt, Artificial Sequence
  Synthetic
aaaaaagucuaagaaacaac

SEQ ID NO: 140328 - RNA, 18 nt, Artificial Sequence
  Synthetic
acauuuuaaaauaacaac

SEQ ID NO: 140329 - RNA, 19 nt, Artificial Sequence
  Synthetic
cacauuuuaaaauaacaac

SEQ ID NO: 140330 - RNA, 20 nt, Artificial Sequence
  Synthetic
ccacauuuuaaaauaacaac

SEQ ID NO: 140331 - RNA, 18 nt, Artificial Sequence
  Synthetic
cacucuaaccugggcaac

SEQ ID NO: 140332 - RNA, 20 nt, Artificial Sequence
  Synthetic
ugcacucuaaccugggcaac

SEQ ID NO: 140333 - RNA, 21 nt, Artificial Sequence
  Synthetic
uugcacucuaaccugggcaac

SEQ ID NO: 140334 - RNA, 22 nt, Artificial Sequence
  Synthetic
auugcacucuaaccugggcaac

SEQ ID NO: 140335 - RNA, 23 nt, Artificial Sequence
  Synthetic
cauugcacucuaaccugggcaac

SEQ ID NO: 140336 - RNA, 24 nt, Artificial Sequence
  Synthetic
ccauugcacucuaaccugggcaac

SEQ ID NO: 140337 - RNA, 18 nt, Artificial Sequence
  Synthetic
cgcuccagccugggcaac

SEQ ID NO: 140338 - RNA, 20 nt, Artificial Sequence
  Synthetic
ugcgcuccagccugggcaac

SEQ ID NO: 140339 - RNA, 21 nt, Artificial Sequence
  Synthetic
uugcgcuccagccugggcaac

SEQ ID NO: 140340 - RNA, 22 nt, Artificial Sequence
  Synthetic
auugcgcuccagccugggcaac

SEQ ID NO: 140341 - RNA, 23 nt, Artificial Sequence
  Synthetic
cauugcgcuccagccugggcaac

SEQ ID NO: 140342 - RNA, 24 nt, Artificial Sequence
  Synthetic
ccauugcgcuccagccugggcaac

SEQ ID NO: 140343 - RNA, 18 nt, Artificial Sequence
  Synthetic
ugaaaauaaaacaucaac

SEQ ID NO: 140344 - RNA, 19 nt, Artificial Sequence
  Synthetic
augaaaauaaaacaucaac

SEQ ID NO: 140345 - RNA, 20 nt, Artificial Sequence
  Synthetic
aaugaaaauaaaacaucaac

SEQ ID NO: 140346 - RNA, 21 nt, Artificial Sequence
  Synthetic
aaaugaaaauaaaacaucaac

SEQ ID NO: 140347 - RNA, 22 nt, Artificial Sequence
  Synthetic
aaaaugaaaauaaaacaucaac

SEQ ID NO: 140348 - RNA, 23 nt, Artificial Sequence
  Synthetic
uaaaaugaaaauaaaacaucaac

SEQ ID NO: 140349 - RNA, 24 nt, Artificial Sequence
  Synthetic
auaaaaugaaaauaaaacaucaac

SEQ ID NO: 140350 - RNA, 18 nt, Artificial Sequence
  Synthetic
agauuugggaugcucaac

SEQ ID NO: 140351 - RNA, 19 nt, Artificial Sequence
  Synthetic
cagauuugggaugcucaac

SEQ ID NO: 140352 - RNA, 20 nt, Artificial Sequence
  Synthetic
ucagauuugggaugcucaac

SEQ ID NO: 140353 - RNA, 21 nt, Artificial Sequence
  Synthetic
uucagauuugggaugcucaac

SEQ ID NO: 140354 - RNA, 22 nt, Artificial Sequence
  Synthetic
uuucagauuugggaugcucaac

SEQ ID NO: 140355 - RNA, 23 nt, Artificial Sequence
  Synthetic
uuuucagauuugggaugcucaac

SEQ ID NO: 140356 - RNA, 24 nt, Artificial Sequence
  Synthetic
auuuucagauuugggaugcucaac

SEQ ID NO: 140357 - RNA, 18 nt, Artificial Sequence
  Synthetic
augaagaaaaaaaagaac

SEQ ID NO: 140358 - RNA, 19 nt, Artificial Sequence
  Synthetic
aaugaagaaaaaaaagaac

SEQ ID NO: 140359 - RNA, 20 nt, Artificial Sequence
  Synthetic
caaugaagaaaaaaaagaac

SEQ ID NO: 140360 - RNA, 18 nt, Artificial Sequence
  Synthetic
cccaguaaguagcagaac

SEQ ID NO: 140361 - RNA, 19 nt, Artificial Sequence
  Synthetic
ucccaguaaguagcagaac

SEQ ID NO: 140362 - RNA, 20 nt, Artificial Sequence
  Synthetic
uucccaguaaguagcagaac

SEQ ID NO: 140363 - RNA, 18 nt, Artificial Sequence
  Synthetic
uggagagauacagagaac

SEQ ID NO: 140364 - RNA, 19 nt, Artificial Sequence
  Synthetic
auggagagauacagagaac

SEQ ID NO: 140365 - RNA, 20 nt, Artificial Sequence
  Synthetic
aauggagagauacagagaac

SEQ ID NO: 140366 - RNA, 18 nt, Artificial Sequence
  Synthetic
uagaaauagcaugagaac

SEQ ID NO: 140367 - RNA, 21 nt, Artificial Sequence
  Synthetic
ugguagaaauagcaugagaac

SEQ ID NO: 140368 - RNA, 23 nt, Artificial Sequence
  Synthetic
ugugguagaaauagcaugagaac

SEQ ID NO: 140369 - RNA, 24 nt, Artificial Sequence
  Synthetic
augugguagaaauagcaugagaac

SEQ ID NO: 140370 - RNA, 18 nt, Artificial Sequence
  Synthetic
uccucaggcaucuagaac

SEQ ID NO: 140371 - RNA, 19 nt, Artificial Sequence
  Synthetic
uuccucaggcaucuagaac

SEQ ID NO: 140372 - RNA, 20 nt, Artificial Sequence
  Synthetic
auuccucaggcaucuagaac

SEQ ID NO: 140373 - RNA, 22 nt, Artificial Sequence
  Synthetic
cgauuccucaggcaucuagaac

SEQ ID NO: 140374 - RNA, 21 nt, Artificial Sequence
  Synthetic
aaaugacauuugaaaaggaac

SEQ ID NO: 140375 - RNA, 24 nt, Artificial Sequence
  Synthetic
aggaaaugacauuugaaaaggaac

SEQ ID NO: 140376 - RNA, 18 nt, Artificial Sequence
  Synthetic
uagaaauaacacaggaac

SEQ ID NO: 140377 - RNA, 21 nt, Artificial Sequence
  Synthetic
uggguguuaugagccaggaac

SEQ ID NO: 140378 - RNA, 22 nt, Artificial Sequence
  Synthetic
auggguguuaugagccaggaac

SEQ ID NO: 140379 - RNA, 23 nt, Artificial Sequence
  Synthetic
uauggguguuaugagccaggaac

SEQ ID NO: 140380 - RNA, 24 nt, Artificial Sequence
  Synthetic
cuauggguguuaugagccaggaac

SEQ ID NO: 140381 - RNA, 18 nt, Artificial Sequence
  Synthetic
uauguauguuaaaugaac

SEQ ID NO: 140382 - RNA, 20 nt, Artificial Sequence
  Synthetic
aguauguauguuaaaugaac

SEQ ID NO: 140383 - RNA, 21 nt, Artificial Sequence
  Synthetic
uaguauguauguuaaaugaac

SEQ ID NO: 140384 - RNA, 22 nt, Artificial Sequence
  Synthetic
auaguauguauguuaaaugaac

SEQ ID NO: 140385 - RNA, 23 nt, Artificial Sequence
  Synthetic
uauaguauguauguuaaaugaac

SEQ ID NO: 140386 - RNA, 24 nt, Artificial Sequence
  Synthetic
auauaguauguauguuaaaugaac

SEQ ID NO: 140387 - RNA, 19 nt, Artificial Sequence
  Synthetic
uggguaauuuauaaugaac

SEQ ID NO: 140388 - RNA, 20 nt, Artificial Sequence
  Synthetic
cuggguaauuuauaaugaac

SEQ ID NO: 140389 - RNA, 21 nt, Artificial Sequence
  Synthetic
acuggguaauuuauaaugaac

SEQ ID NO: 140390 - RNA, 23 nt, Artificial Sequence
  Synthetic
agacuggguaauuuauaaugaac

SEQ ID NO: 140391 - RNA, 24 nt, Artificial Sequence
  Synthetic
cagacuggguaauuuauaaugaac

SEQ ID NO: 140392 - RNA, 21 nt, Artificial Sequence
  Synthetic
uggccucccaagucccugaac

SEQ ID NO: 140393 - RNA, 22 nt, Artificial Sequence
  Synthetic
cuggccucccaagucccugaac

SEQ ID NO: 140394 - RNA, 23 nt, Artificial Sequence
  Synthetic
ucuggccucccaagucccugaac

SEQ ID NO: 140395 - RNA, 24 nt, Artificial Sequence
  Synthetic
cucuggccucccaagucccugaac

SEQ ID NO: 140396 - RNA, 18 nt, Artificial Sequence
  Synthetic
uuacaauccauuuugaac

SEQ ID NO: 140397 - RNA, 19 nt, Artificial Sequence
  Synthetic
uuuacaauccauuuugaac

SEQ ID NO: 140398 - RNA, 20 nt, Artificial Sequence
  Synthetic
cuuuacaauccauuuugaac

SEQ ID NO: 140399 - RNA, 21 nt, Artificial Sequence
  Synthetic
ucuuuacaauccauuuugaac

SEQ ID NO: 140400 - RNA, 22 nt, Artificial Sequence
  Synthetic
uucuuuacaauccauuuugaac

SEQ ID NO: 140401 - RNA, 23 nt, Artificial Sequence
  Synthetic
cuucuuuacaauccauuuugaac

SEQ ID NO: 140402 - RNA, 18 nt, Artificial Sequence
  Synthetic
cauaaggaaggaaauaac

SEQ ID NO: 140403 - RNA, 20 nt, Artificial Sequence
  Synthetic
agcauaaggaaggaaauaac

SEQ ID NO: 140404 - RNA, 18 nt, Artificial Sequence
  Synthetic
agaauuaaaaaguauaac

SEQ ID NO: 140405 - RNA, 19 nt, Artificial Sequence
  Synthetic
uagaauuaaaaaguauaac

SEQ ID NO: 140406 - RNA, 20 nt, Artificial Sequence
  Synthetic
auagaauuaaaaaguauaac

SEQ ID NO: 140407 - RNA, 20 nt, Artificial Sequence
  Synthetic
agguuagaggaauugcuaac

SEQ ID NO: 140408 - RNA, 21 nt, Artificial Sequence
  Synthetic
aagguuagaggaauugcuaac

SEQ ID NO: 140409 - RNA, 22 nt, Artificial Sequence
  Synthetic
aaagguuagaggaauugcuaac

SEQ ID NO: 140410 - RNA, 23 nt, Artificial Sequence
  Synthetic
aaaagguuagaggaauugcuaac

SEQ ID NO: 140411 - RNA, 24 nt, Artificial Sequence
  Synthetic
aaaaagguuagaggaauugcuaac

SEQ ID NO: 140412 - RNA, 18 nt, Artificial Sequence
  Synthetic
aaugaucaccauucuaac

SEQ ID NO: 140413 - RNA, 19 nt, Artificial Sequence
  Synthetic
uaaugaucaccauucuaac

SEQ ID NO: 140414 - RNA, 20 nt, Artificial Sequence
  Synthetic
uuaaugaucaccauucuaac

SEQ ID NO: 140415 - RNA, 21 nt, Artificial Sequence
  Synthetic
uuuaaugaucaccauucuaac

SEQ ID NO: 140416 - RNA, 22 nt, Artificial Sequence
  Synthetic
uuuuaaugaucaccauucuaac

SEQ ID NO: 140417 - RNA, 23 nt, Artificial Sequence
  Synthetic
uuuuuaaugaucaccauucuaac

SEQ ID NO: 140418 - RNA, 24 nt, Artificial Sequence
  Synthetic
cuuuuuaaugaucaccauucuaac

SEQ ID NO: 140419 - RNA, 19 nt, Artificial Sequence
  Synthetic
ugauaauagccauucuaac

SEQ ID NO: 140420 - RNA, 20 nt, Artificial Sequence
  Synthetic
uugauaauagccauucuaac

SEQ ID NO: 140421 - RNA, 21 nt, Artificial Sequence
  Synthetic
uuugauaauagccauucuaac

SEQ ID NO: 140422 - RNA, 22 nt, Artificial Sequence
  Synthetic
uuuugauaauagccauucuaac

SEQ ID NO: 140423 - RNA, 23 nt, Artificial Sequence
  Synthetic
auuuugauaauagccauucuaac

SEQ ID NO: 140424 - RNA, 24 nt, Artificial Sequence
  Synthetic
uauuuugauaauagccauucuaac

SEQ ID NO: 140425 - RNA, 18 nt, Artificial Sequence
  Synthetic
auuucaaaaugcaguaac

SEQ ID NO: 140426 - RNA, 21 nt, Artificial Sequence
  Synthetic
uggauuucaaaaugcaguaac

SEQ ID NO: 140427 - RNA, 22 nt, Artificial Sequence
  Synthetic
auggauuucaaaaugcaguaac

SEQ ID NO: 140428 - RNA, 23 nt, Artificial Sequence
  Synthetic
cauggauuucaaaaugcaguaac

SEQ ID NO: 140429 - RNA, 24 nt, Artificial Sequence
  Synthetic
ucauggauuucaaaaugcaguaac

SEQ ID NO: 140430 - RNA, 18 nt, Artificial Sequence
  Synthetic
cucagccucccgaguaac

SEQ ID NO: 140431 - RNA, 19 nt, Artificial Sequence
  Synthetic
ccucagccucccgaguaac

SEQ ID NO: 140432 - RNA, 21 nt, Artificial Sequence
  Synthetic
ugccucagccucccgaguaac

SEQ ID NO: 140433 - RNA, 22 nt, Artificial Sequence
  Synthetic
cugccucagccucccgaguaac

SEQ ID NO: 140434 - RNA, 23 nt, Artificial Sequence
  Synthetic
ccugccucagccucccgaguaac

SEQ ID NO: 140435 - RNA, 24 nt, Artificial Sequence
  Synthetic
uccugccucagccucccgaguaac

SEQ ID NO: 140436 - RNA, 18 nt, Artificial Sequence
  Synthetic
ccuguuauuuggaguaac

SEQ ID NO: 140437 - RNA, 19 nt, Artificial Sequence
  Synthetic
uccuguuauuuggaguaac

SEQ ID NO: 140438 - RNA, 20 nt, Artificial Sequence
  Synthetic
uuccuguuauuuggaguaac

SEQ ID NO: 140439 - RNA, 19 nt, Artificial Sequence
  Synthetic
uguuuucucauuuaguaac

SEQ ID NO: 140440 - RNA, 20 nt, Artificial Sequence
  Synthetic
cuguuuucucauuuaguaac

SEQ ID NO: 140441 - RNA, 21 nt, Artificial Sequence
  Synthetic
aauacugauaugcacuguaac

SEQ ID NO: 140442 - RNA, 22 nt, Artificial Sequence
  Synthetic
aaauacugauaugcacuguaac

SEQ ID NO: 140443 - RNA, 24 nt, Artificial Sequence
  Synthetic
ugaaauacugauaugcacuguaac

SEQ ID NO: 140444 - RNA, 18 nt, Artificial Sequence
  Synthetic
acgaaacagaaaauuaac

SEQ ID NO: 140445 - RNA, 19 nt, Artificial Sequence
  Synthetic
aacgaaacagaaaauuaac

SEQ ID NO: 140446 - RNA, 20 nt, Artificial Sequence
  Synthetic
caacgaaacagaaaauuaac

SEQ ID NO: 140447 - RNA, 21 nt, Artificial Sequence
  Synthetic
ucaacgaaacagaaaauuaac

SEQ ID NO: 140448 - RNA, 22 nt, Artificial Sequence
  Synthetic
aucaacgaaacagaaaauuaac

SEQ ID NO: 140449 - RNA, 18 nt, Artificial Sequence
  Synthetic
uuauuuuuauuucuuaac

SEQ ID NO: 140450 - RNA, 19 nt, Artificial Sequence
  Synthetic
uuuauuuuuauuucuuaac

SEQ ID NO: 140451 - RNA, 20 nt, Artificial Sequence
  Synthetic
auuuauuuuuauuucuuaac

SEQ ID NO: 140452 - RNA, 21 nt, Artificial Sequence
  Synthetic
cauuuauuuuuauuucuuaac

SEQ ID NO: 140453 - RNA, 22 nt, Artificial Sequence
  Synthetic
ccauuuauuuuuauuucuuaac

SEQ ID NO: 140454 - RNA, 23 nt, Artificial Sequence
  Synthetic
uccauuuauuuuuauuucuuaac

SEQ ID NO: 140455 - RNA, 24 nt, Artificial Sequence
  Synthetic
uuccauuuauuuuuauuucuuaac

SEQ ID NO: 140456 - RNA, 20 nt, Artificial Sequence
  Synthetic
uggauauaagccauuuuaac

SEQ ID NO: 140457 - RNA, 21 nt, Artificial Sequence
  Synthetic
uuggauauaagccauuuuaac

SEQ ID NO: 140458 - RNA, 22 nt, Artificial Sequence
  Synthetic
uuuggauauaagccauuuuaac

SEQ ID NO: 140459 - RNA, 23 nt, Artificial Sequence
  Synthetic
uuuuggauauaagccauuuuaac

SEQ ID NO: 140460 - RNA, 24 nt, Artificial Sequence
  Synthetic
cuuuuggauauaagccauuuuaac

SEQ ID NO: 140461 - RNA, 18 nt, Artificial Sequence
  Synthetic
cuuauguacuauuuuaac

SEQ ID NO: 140462 - RNA, 23 nt, Artificial Sequence
  Synthetic
uggggcuuauguacuauuuuaac

SEQ ID NO: 140463 - RNA, 24 nt, Artificial Sequence
  Synthetic
uuggggcuuauguacuauuuuaac

SEQ ID NO: 140464 - RNA, 18 nt, Artificial Sequence
  Synthetic
aaugauauuuuaaaacac

SEQ ID NO: 140465 - RNA, 19 nt, Artificial Sequence
  Synthetic
uaaugauauuuuaaaacac

SEQ ID NO: 140466 - RNA, 20 nt, Artificial Sequence
  Synthetic
uuaaugauauuuuaaaacac

SEQ ID NO: 140467 - RNA, 18 nt, Artificial Sequence
  Synthetic
cguuuucucuuucaacac

SEQ ID NO: 140468 - RNA, 19 nt, Artificial Sequence
  Synthetic
ucguuuucucuuucaacac

SEQ ID NO: 140469 - RNA, 20 nt, Artificial Sequence
  Synthetic
cucguuuucucuuucaacac

SEQ ID NO: 140470 - RNA, 18 nt, Artificial Sequence
  Synthetic
ugcuacucuguugaacac

SEQ ID NO: 140471 - RNA, 20 nt, Artificial Sequence
  Synthetic
agugcuacucuguugaacac

SEQ ID NO: 140472 - RNA, 21 nt, Artificial Sequence
  Synthetic
aagugcuacucuguugaacac

SEQ ID NO: 140473 - RNA, 22 nt, Artificial Sequence
  Synthetic
aaagugcuacucuguugaacac

SEQ ID NO: 140474 - RNA, 23 nt, Artificial Sequence
  Synthetic
aaaagugcuacucuguugaacac

SEQ ID NO: 140475 - RNA, 24 nt, Artificial Sequence
  Synthetic
uaaaagugcuacucuguugaacac

SEQ ID NO: 140476 - RNA, 18 nt, Artificial Sequence
  Synthetic
uccucagcaaacuaacac

SEQ ID NO: 140477 - RNA, 19 nt, Artificial Sequence
  Synthetic
auccucagcaaacuaacac

SEQ ID NO: 140478 - RNA, 20 nt, Artificial Sequence
  Synthetic
cauccucagcaaacuaacac

SEQ ID NO: 140479 - RNA, 21 nt, Artificial Sequence
  Synthetic
ucauccucagcaaacuaacac

SEQ ID NO: 140480 - RNA, 22 nt, Artificial Sequence
  Synthetic
aucauccucagcaaacuaacac

SEQ ID NO: 140481 - RNA, 23 nt, Artificial Sequence
  Synthetic
caucauccucagcaaacuaacac

SEQ ID NO: 140482 - RNA, 24 nt, Artificial Sequence
  Synthetic
ccaucauccucagcaaacuaacac

SEQ ID NO: 140483 - RNA, 18 nt, Artificial Sequence
  Synthetic
acacacacacacacacac

SEQ ID NO: 140484 - RNA, 19 nt, Artificial Sequence
  Synthetic
cacacacacacacacacac

SEQ ID NO: 140485 - RNA, 20 nt, Artificial Sequence
  Synthetic
acacacacacacacacacac

SEQ ID NO: 140486 - RNA, 21 nt, Artificial Sequence
  Synthetic
cacaugagcgugcacacacac

SEQ ID NO: 140487 - RNA, 22 nt, Artificial Sequence
  Synthetic
acacaugagcgugcacacacac

SEQ ID NO: 140488 - RNA, 23 nt, Artificial Sequence
  Synthetic
cacacaugagcgugcacacacac

SEQ ID NO: 140489 - RNA, 24 nt, Artificial Sequence
  Synthetic
acacacaugagcgugcacacacac

SEQ ID NO: 140490 - RNA, 18 nt, Artificial Sequence
  Synthetic
ucauuggucgauggacac

SEQ ID NO: 140491 - RNA, 19 nt, Artificial Sequence
  Synthetic
uucauuggucgauggacac

SEQ ID NO: 140492 - RNA, 20 nt, Artificial Sequence
  Synthetic
auucauuggucgauggacac

SEQ ID NO: 140493 - RNA, 21 nt, Artificial Sequence
  Synthetic
cauucauuggucgauggacac

SEQ ID NO: 140494 - RNA, 22 nt, Artificial Sequence
  Synthetic
ccauucauuggucgauggacac

SEQ ID NO: 140495 - RNA, 23 nt, Artificial Sequence
  Synthetic
uccauucauuggucgauggacac

SEQ ID NO: 140496 - RNA, 24 nt, Artificial Sequence
  Synthetic
auccauucauuggucgauggacac

SEQ ID NO: 140497 - RNA, 19 nt, Artificial Sequence
  Synthetic
ugcaaaacaaaauguacac

SEQ ID NO: 140498 - RNA, 20 nt, Artificial Sequence
  Synthetic
uugcaaaacaaaauguacac

SEQ ID NO: 140499 - RNA, 18 nt, Artificial Sequence
  Synthetic
augcucauugauuuacac

SEQ ID NO: 140500 - RNA, 20 nt, Artificial Sequence
  Synthetic
agaugcucauugauuuacac

SEQ ID NO: 140501 - RNA, 21 nt, Artificial Sequence
  Synthetic
cagaugcucauugauuuacac

SEQ ID NO: 140502 - RNA, 22 nt, Artificial Sequence
  Synthetic
acagaugcucauugauuuacac

SEQ ID NO: 140503 - RNA, 23 nt, Artificial Sequence
  Synthetic
uacagaugcucauugauuuacac

SEQ ID NO: 140504 - RNA, 24 nt, Artificial Sequence
  Synthetic
auacagaugcucauugauuuacac

SEQ ID NO: 140505 - RNA, 18 nt, Artificial Sequence
  Synthetic
uugaaugucagaaaccac

SEQ ID NO: 140506 - RNA, 20 nt, Artificial Sequence
  Synthetic
uguugaaugucagaaaccac

SEQ ID NO: 140507 - RNA, 18 nt, Artificial Sequence
  Synthetic
uuuuaguauauccaccac

SEQ ID NO: 140508 - RNA, 19 nt, Artificial Sequence
  Synthetic
cuuuuaguauauccaccac

SEQ ID NO: 140509 - RNA, 21 nt, Artificial Sequence
  Synthetic
agcuuuuaguauauccaccac

SEQ ID NO: 140510 - RNA, 23 nt, Artificial Sequence
  Synthetic
agagcuuuuaguauauccaccac

SEQ ID NO: 140511 - RNA, 24 nt, Artificial Sequence
  Synthetic
cagagcuuuuaguauauccaccac

SEQ ID NO: 140512 - RNA, 19 nt, Artificial Sequence
  Synthetic
agguaaaguuucugaccac

SEQ ID NO: 140513 - RNA, 20 nt, Artificial Sequence
  Synthetic
aagguaaaguuucugaccac

SEQ ID NO: 140514 - RNA, 23 nt, Artificial Sequence
  Synthetic
aggagauaguacuuuuuacccac

SEQ ID NO: 140515 - RNA, 24 nt, Artificial Sequence
  Synthetic
aaggagauaguacuuuuuacccac

SEQ ID NO: 140516 - RNA, 18 nt, Artificial Sequence
  Synthetic
ccuccugcaaagagccac

SEQ ID NO: 140517 - RNA, 21 nt, Artificial Sequence
  Synthetic
aggccuccugcaaagagccac

SEQ ID NO: 140518 - RNA, 22 nt, Artificial Sequence
  Synthetic
aaggccuccugcaaagagccac

SEQ ID NO: 140519 - RNA, 23 nt, Artificial Sequence
  Synthetic
uaaggccuccugcaaagagccac

SEQ ID NO: 140520 - RNA, 24 nt, Artificial Sequence
  Synthetic
cuaaggccuccugcaaagagccac

SEQ ID NO: 140521 - RNA, 18 nt, Artificial Sequence
  Synthetic
cucaaaauucacauccac

SEQ ID NO: 140522 - RNA, 19 nt, Artificial Sequence
  Synthetic
ucucaaaauucacauccac

SEQ ID NO: 140523 - RNA, 20 nt, Artificial Sequence
  Synthetic
cucucaaaauucacauccac

SEQ ID NO: 140524 - RNA, 18 nt, Artificial Sequence
  Synthetic
cucaaacuuuagcuccac

SEQ ID NO: 140525 - RNA, 19 nt, Artificial Sequence
  Synthetic
ucucaaacuuuagcuccac

SEQ ID NO: 140526 - RNA, 20 nt, Artificial Sequence
  Synthetic
uucucaaacuuuagcuccac

SEQ ID NO: 140527 - RNA, 23 nt, Artificial Sequence
  Synthetic
ugguucucaaacuuuagcuccac

SEQ ID NO: 140528 - RNA, 18 nt, Artificial Sequence
  Synthetic
cucggccucccaaagcac

SEQ ID NO: 140529 - RNA, 19 nt, Artificial Sequence
  Synthetic
ccucggccucccaaagcac

SEQ ID NO: 140530 - RNA, 20 nt, Artificial Sequence
  Synthetic
accucggccucccaaagcac

SEQ ID NO: 140531 - RNA, 21 nt, Artificial Sequence
  Synthetic
uaccucggccucccaaagcac

SEQ ID NO: 140532 - RNA, 22 nt, Artificial Sequence
  Synthetic
cuaccucggccucccaaagcac

SEQ ID NO: 140533 - RNA, 23 nt, Artificial Sequence
  Synthetic
ccuaccucggccucccaaagcac

SEQ ID NO: 140534 - RNA, 24 nt, Artificial Sequence
  Synthetic
uccuaccucggccucccaaagcac

SEQ ID NO: 140535 - RNA, 18 nt, Artificial Sequence
  Synthetic
cuuggccucccaaagcac

SEQ ID NO: 140536 - RNA, 19 nt, Artificial Sequence
  Synthetic
ccuuggccucccaaagcac

SEQ ID NO: 140537 - RNA, 20 nt, Artificial Sequence
  Synthetic
uccuuggccucccaaagcac

SEQ ID NO: 140538 - RNA, 21 nt, Artificial Sequence
  Synthetic
uuccuuggccucccaaagcac

SEQ ID NO: 140539 - RNA, 22 nt, Artificial Sequence
  Synthetic
cuuccuuggccucccaaagcac

SEQ ID NO: 140540 - RNA, 23 nt, Artificial Sequence
  Synthetic
ccuuccuuggccucccaaagcac

SEQ ID NO: 140541 - RNA, 24 nt, Artificial Sequence
  Synthetic
uccuuccuuggccucccaaagcac

SEQ ID NO: 140542 - RNA, 18 nt, Artificial Sequence
  Synthetic
cucagcuucccaaagcac

SEQ ID NO: 140543 - RNA, 19 nt, Artificial Sequence
  Synthetic
ccucagcuucccaaagcac

SEQ ID NO: 140544 - RNA, 20 nt, Artificial Sequence
  Synthetic
uccucagcuucccaaagcac

SEQ ID NO: 140545 - RNA, 21 nt, Artificial Sequence
  Synthetic
cuccucagcuucccaaagcac

SEQ ID NO: 140546 - RNA, 22 nt, Artificial Sequence
  Synthetic
ccuccucagcuucccaaagcac

SEQ ID NO: 140547 - RNA, 23 nt, Artificial Sequence
  Synthetic
cccuccucagcuucccaaagcac

SEQ ID NO: 140548 - RNA, 24 nt, Artificial Sequence
  Synthetic
acccuccucagcuucccaaagcac

SEQ ID NO: 140549 - RNA, 18 nt, Artificial Sequence
  Synthetic
ucauaagaacagcagcac

SEQ ID NO: 140550 - RNA, 19 nt, Artificial Sequence
  Synthetic
aucauaagaacagcagcac

SEQ ID NO: 140551 - RNA, 20 nt, Artificial Sequence
  Synthetic
uaucauaagaacagcagcac

SEQ ID NO: 140552 - RNA, 21 nt, Artificial Sequence
  Synthetic
cuaucauaagaacagcagcac

SEQ ID NO: 140553 - RNA, 22 nt, Artificial Sequence
  Synthetic
acuaucauaagaacagcagcac

SEQ ID NO: 140554 - RNA, 23 nt, Artificial Sequence
  Synthetic
cacuaucauaagaacagcagcac

SEQ ID NO: 140555 - RNA, 24 nt, Artificial Sequence
  Synthetic
ucacuaucauaagaacagcagcac

SEQ ID NO: 140556 - RNA, 18 nt, Artificial Sequence
  Synthetic
cacccaauauaggagcac

SEQ ID NO: 140557 - RNA, 20 nt, Artificial Sequence
  Synthetic
ugcacccaauauaggagcac

SEQ ID NO: 140558 - RNA, 21 nt, Artificial Sequence
  Synthetic
augcacccaauauaggagcac

SEQ ID NO: 140559 - RNA, 22 nt, Artificial Sequence
  Synthetic
uaugcacccaauauaggagcac

SEQ ID NO: 140560 - RNA, 23 nt, Artificial Sequence
  Synthetic
auaugcacccaauauaggagcac

SEQ ID NO: 140561 - RNA, 24 nt, Artificial Sequence
  Synthetic
uauaugcacccaauauaggagcac

SEQ ID NO: 140562 - RNA, 18 nt, Artificial Sequence
  Synthetic
cucaggagccugaggcac

SEQ ID NO: 140563 - RNA, 19 nt, Artificial Sequence
  Synthetic
acucaggagccugaggcac

SEQ ID NO: 140564 - RNA, 20 nt, Artificial Sequence
  Synthetic
uacucaggagccugaggcac

SEQ ID NO: 140565 - RNA, 21 nt, Artificial Sequence
  Synthetic
cuacucaggagccugaggcac

SEQ ID NO: 140566 - RNA, 23 nt, Artificial Sequence
  Synthetic
agcuacucaggagccugaggcac

SEQ ID NO: 140567 - RNA, 24 nt, Artificial Sequence
  Synthetic
cagcuacucaggagccugaggcac

SEQ ID NO: 140568 - RNA, 18 nt, Artificial Sequence
  Synthetic
cauguccuuuguaggcac

SEQ ID NO: 140569 - RNA, 19 nt, Artificial Sequence
  Synthetic
ucauguccuuuguaggcac

SEQ ID NO: 140570 - RNA, 20 nt, Artificial Sequence
  Synthetic
uucauguccuuuguaggcac

SEQ ID NO: 140571 - RNA, 22 nt, Artificial Sequence
  Synthetic
aguucauguccuuuguaggcac

SEQ ID NO: 140572 - RNA, 24 nt, Artificial Sequence
  Synthetic
ugaguucauguccuuuguaggcac

SEQ ID NO: 140573 - RNA, 18 nt, Artificial Sequence
  Synthetic
uaaugaaauuauuggcac

SEQ ID NO: 140574 - RNA, 20 nt, Artificial Sequence
  Synthetic
aguaaugaaauuauuggcac

SEQ ID NO: 140575 - RNA, 19 nt, Artificial Sequence
  Synthetic
ugcaauaacuguaaugcac

SEQ ID NO: 140576 - RNA, 21 nt, Artificial Sequence
  Synthetic
ugugcaauaacuguaaugcac

SEQ ID NO: 140577 - RNA, 23 nt, Artificial Sequence
  Synthetic
ugugugcaauaacuguaaugcac

SEQ ID NO: 140578 - RNA, 24 nt, Artificial Sequence
  Synthetic
augugugcaauaacuguaaugcac

SEQ ID NO: 140579 - RNA, 18 nt, Artificial Sequence
  Synthetic
uuuaauucuuuuuugcac

SEQ ID NO: 140580 - RNA, 19 nt, Artificial Sequence
  Synthetic
auuuaauucuuuuuugcac

SEQ ID NO: 140581 - RNA, 20 nt, Artificial Sequence
  Synthetic
uauuuaauucuuuuuugcac

SEQ ID NO: 140582 - RNA, 18 nt, Artificial Sequence
  Synthetic
acuguacauugaaaucac

SEQ ID NO: 140583 - RNA, 20 nt, Artificial Sequence
  Synthetic
ugacuguacauugaaaucac

SEQ ID NO: 140584 - RNA, 21 nt, Artificial Sequence
  Synthetic
uugacuguacauugaaaucac

SEQ ID NO: 140585 - RNA, 22 nt, Artificial Sequence
  Synthetic
cuugacuguacauugaaaucac

SEQ ID NO: 140586 - RNA, 23 nt, Artificial Sequence
  Synthetic
ccuugacuguacauugaaaucac

SEQ ID NO: 140587 - RNA, 24 nt, Artificial Sequence
  Synthetic
accuugacuguacauugaaaucac

SEQ ID NO: 140588 - RNA, 18 nt, Artificial Sequence
  Synthetic
ugcgcccaauguaaucac

SEQ ID NO: 140589 - RNA, 20 nt, Artificial Sequence
  Synthetic
agugcgcccaauguaaucac

SEQ ID NO: 140590 - RNA, 21 nt, Artificial Sequence
  Synthetic
cagugcgcccaauguaaucac

SEQ ID NO: 140591 - RNA, 22 nt, Artificial Sequence
  Synthetic
ccagugcgcccaauguaaucac

SEQ ID NO: 140592 - RNA, 23 nt, Artificial Sequence
  Synthetic
cccagugcgcccaauguaaucac

SEQ ID NO: 140593 - RNA, 24 nt, Artificial Sequence
  Synthetic
ccccagugcgcccaauguaaucac

SEQ ID NO: 140594 - RNA, 18 nt, Artificial Sequence
  Synthetic
uccuggugcacccaucac

SEQ ID NO: 140595 - RNA, 19 nt, Artificial Sequence
  Synthetic
auccuggugcacccaucac

SEQ ID NO: 140596 - RNA, 21 nt, Artificial Sequence
  Synthetic
agauccuggugcacccaucac

SEQ ID NO: 140597 - RNA, 23 nt, Artificial Sequence
  Synthetic
ugagauccuggugcacccaucac

SEQ ID NO: 140598 - RNA, 21 nt, Artificial Sequence
  Synthetic
ugggucccagaucagcaucac

SEQ ID NO: 140599 - RNA, 23 nt, Artificial Sequence
  Synthetic
ugugggucccagaucagcaucac

SEQ ID NO: 140600 - RNA, 18 nt, Artificial Sequence
  Synthetic
cugaggcaggcagaucac

SEQ ID NO: 140601 - RNA, 20 nt, Artificial Sequence
  Synthetic
agcugaggcaggcagaucac

SEQ ID NO: 140602 - RNA, 21 nt, Artificial Sequence
  Synthetic
aagcugaggcaggcagaucac

SEQ ID NO: 140603 - RNA, 18 nt, Artificial Sequence
  Synthetic
cugggaugggcagaucac

SEQ ID NO: 140604 - RNA, 21 nt, Artificial Sequence
  Synthetic
aggcugggaugggcagaucac

SEQ ID NO: 140605 - RNA, 18 nt, Artificial Sequence
  Synthetic
ccagguaagauuuaucac

SEQ ID NO: 140606 - RNA, 19 nt, Artificial Sequence
  Synthetic
accagguaagauuuaucac

SEQ ID NO: 140607 - RNA, 20 nt, Artificial Sequence
  Synthetic
aaccagguaagauuuaucac

SEQ ID NO: 140608 - RNA, 21 nt, Artificial Sequence
  Synthetic
uaaccagguaagauuuaucac

SEQ ID NO: 140609 - RNA, 22 nt, Artificial Sequence
  Synthetic
auaaccagguaagauuuaucac

SEQ ID NO: 140610 - RNA, 23 nt, Artificial Sequence
  Synthetic
cauaaccagguaagauuuaucac

SEQ ID NO: 140611 - RNA, 24 nt, Artificial Sequence
  Synthetic
ccauaaccagguaagauuuaucac

SEQ ID NO: 140612 - RNA, 18 nt, Artificial Sequence
  Synthetic
auuugaucagacugucac

SEQ ID NO: 140613 - RNA, 19 nt, Artificial Sequence
  Synthetic
cauuugaucagacugucac

SEQ ID NO: 140614 - RNA, 20 nt, Artificial Sequence
  Synthetic
acauuugaucagacugucac

SEQ ID NO: 140615 - RNA, 18 nt, Artificial Sequence
  Synthetic
uaggcaaaccggugucac

SEQ ID NO: 140616 - RNA, 19 nt, Artificial Sequence
  Synthetic
auaggcaaaccggugucac

SEQ ID NO: 140617 - RNA, 20 nt, Artificial Sequence
  Synthetic
cauaggcaaaccggugucac

SEQ ID NO: 140618 - RNA, 21 nt, Artificial Sequence
  Synthetic
acauaggcaaaccggugucac

SEQ ID NO: 140619 - RNA, 22 nt, Artificial Sequence
  Synthetic
uacauaggcaaaccggugucac

SEQ ID NO: 140620 - RNA, 23 nt, Artificial Sequence
  Synthetic
uuacauaggcaaaccggugucac

SEQ ID NO: 140621 - RNA, 24 nt, Artificial Sequence
  Synthetic
auuacauaggcaaaccggugucac

SEQ ID NO: 140622 - RNA, 18 nt, Artificial Sequence
  Synthetic
uaaaaagccagaauucac

SEQ ID NO: 140623 - RNA, 19 nt, Artificial Sequence
  Synthetic
uuaaaaagccagaauucac

SEQ ID NO: 140624 - RNA, 20 nt, Artificial Sequence
  Synthetic
uuuaaaaagccagaauucac

SEQ ID NO: 140625 - RNA, 18 nt, Artificial Sequence
  Synthetic
ccuucuucauuuauucac

SEQ ID NO: 140626 - RNA, 19 nt, Artificial Sequence
  Synthetic
uccuucuucauuuauucac

SEQ ID NO: 140627 - RNA, 20 nt, Artificial Sequence
  Synthetic
uuccuucuucauuuauucac

SEQ ID NO: 140628 - RNA, 21 nt, Artificial Sequence
  Synthetic
auuccuucuucauuuauucac

SEQ ID NO: 140629 - RNA, 22 nt, Artificial Sequence
  Synthetic
cauuccuucuucauuuauucac

SEQ ID NO: 140630 - RNA, 23 nt, Artificial Sequence
  Synthetic
ccauuccuucuucauuuauucac

SEQ ID NO: 140631 - RNA, 24 nt, Artificial Sequence
  Synthetic
accauuccuucuucauuuauucac

SEQ ID NO: 140632 - RNA, 19 nt, Artificial Sequence
  Synthetic
agaucacuggcagguucac

SEQ ID NO: 140633 - RNA, 21 nt, Artificial Sequence
  Synthetic
agagaucacuggcagguucac

SEQ ID NO: 140634 - RNA, 22 nt, Artificial Sequence
  Synthetic
cagagaucacuggcagguucac

SEQ ID NO: 140635 - RNA, 23 nt, Artificial Sequence
  Synthetic
ucagagaucacuggcagguucac

SEQ ID NO: 140636 - RNA, 18 nt, Artificial Sequence
  Synthetic
aacaggaacaaaaaagac

SEQ ID NO: 140637 - RNA, 19 nt, Artificial Sequence
  Synthetic
aaacaggaacaaaaaagac

SEQ ID NO: 140638 - RNA, 21 nt, Artificial Sequence
  Synthetic
agaaacaggaacaaaaaagac

SEQ ID NO: 140639 - RNA, 24 nt, Artificial Sequence
  Synthetic
aggagaaacaggaacaaaaaagac

SEQ ID NO: 140640 - RNA, 18 nt, Artificial Sequence
  Synthetic
aaaaagugggcaaaagac

SEQ ID NO: 140641 - RNA, 19 nt, Artificial Sequence
  Synthetic
uaaaaagugggcaaaagac

SEQ ID NO: 140642 - RNA, 21 nt, Artificial Sequence
  Synthetic
uguaaaaagugggcaaaagac

SEQ ID NO: 140643 - RNA, 22 nt, Artificial Sequence
  Synthetic
auguaaaaagugggcaaaagac

SEQ ID NO: 140644 - RNA, 23 nt, Artificial Sequence
  Synthetic
cauguaaaaagugggcaaaagac

SEQ ID NO: 140645 - RNA, 24 nt, Artificial Sequence
  Synthetic
ccauguaaaaagugggcaaaagac

SEQ ID NO: 140646 - RNA, 18 nt, Artificial Sequence
  Synthetic
acucacaauagcaaagac

SEQ ID NO: 140647 - RNA, 19 nt, Artificial Sequence
  Synthetic
uacucacaauagcaaagac

SEQ ID NO: 140648 - RNA, 20 nt, Artificial Sequence
  Synthetic
cuacucacaauagcaaagac

SEQ ID NO: 140649 - RNA, 21 nt, Artificial Sequence
  Synthetic
acuacucacaauagcaaagac

SEQ ID NO: 140650 - RNA, 22 nt, Artificial Sequence
  Synthetic
cacuacucacaauagcaaagac

SEQ ID NO: 140651 - RNA, 23 nt, Artificial Sequence
  Synthetic
acacuacucacaauagcaaagac

SEQ ID NO: 140652 - RNA, 24 nt, Artificial Sequence
  Synthetic
aacacuacucacaauagcaaagac

SEQ ID NO: 140653 - RNA, 18 nt, Artificial Sequence
  Synthetic
cuuaggagucagaaagac

SEQ ID NO: 140654 - RNA, 19 nt, Artificial Sequence
  Synthetic
acuuaggagucagaaagac

SEQ ID NO: 140655 - RNA, 18 nt, Artificial Sequence
  Synthetic
uacagaaauuagaaagac

SEQ ID NO: 140656 - RNA, 19 nt, Artificial Sequence
  Synthetic
cuacagaaauuagaaagac

SEQ ID NO: 140657 - RNA, 20 nt, Artificial Sequence
  Synthetic
ccuacagaaauuagaaagac

SEQ ID NO: 140658 - RNA, 18 nt, Artificial Sequence
  Synthetic
auuuuauuuuugaaagac

SEQ ID NO: 140659 - RNA, 19 nt, Artificial Sequence
  Synthetic
aauuuuauuuuugaaagac

SEQ ID NO: 140660 - RNA, 19 nt, Artificial Sequence
  Synthetic
ugaagaacaugaacaagac

SEQ ID NO: 140661 - RNA, 20 nt, Artificial Sequence
  Synthetic
cugaagaacaugaacaagac

SEQ ID NO: 140662 - RNA, 21 nt, Artificial Sequence
  Synthetic
ccugaagaacaugaacaagac

SEQ ID NO: 140663 - RNA, 22 nt, Artificial Sequence
  Synthetic
accugaagaacaugaacaagac

SEQ ID NO: 140664 - RNA, 23 nt, Artificial Sequence
  Synthetic
caccugaagaacaugaacaagac

SEQ ID NO: 140665 - RNA, 24 nt, Artificial Sequence
  Synthetic
ucaccugaagaacaugaacaagac

SEQ ID NO: 140666 - RNA, 18 nt, Artificial Sequence
  Synthetic
uaaaaaccggcacaagac

SEQ ID NO: 140667 - RNA, 19 nt, Artificial Sequence
  Synthetic
uuaaaaaccggcacaagac

SEQ ID NO: 140668 - RNA, 20 nt, Artificial Sequence
  Synthetic
uuuaaaaaccggcacaagac

SEQ ID NO: 140669 - RNA, 21 nt, Artificial Sequence
  Synthetic
cuuuaaaaaccggcacaagac

SEQ ID NO: 140670 - RNA, 22 nt, Artificial Sequence
  Synthetic
ccuuuaaaaaccggcacaagac

SEQ ID NO: 140671 - RNA, 23 nt, Artificial Sequence
  Synthetic
cccuuuaaaaaccggcacaagac

SEQ ID NO: 140672 - RNA, 24 nt, Artificial Sequence
  Synthetic
ucccuuuaaaaaccggcacaagac

SEQ ID NO: 140673 - RNA, 18 nt, Artificial Sequence
  Synthetic
ugaaaacuggcacaagac

SEQ ID NO: 140674 - RNA, 19 nt, Artificial Sequence
  Synthetic
uugaaaacuggcacaagac

SEQ ID NO: 140675 - RNA, 20 nt, Artificial Sequence
  Synthetic
uuugaaaacuggcacaagac

SEQ ID NO: 140676 - RNA, 21 nt, Artificial Sequence
  Synthetic
cuuugaaaacuggcacaagac

SEQ ID NO: 140677 - RNA, 22 nt, Artificial Sequence
  Synthetic
ccuuugaaaacuggcacaagac

SEQ ID NO: 140678 - RNA, 23 nt, Artificial Sequence
  Synthetic
cccuuugaaaacuggcacaagac

SEQ ID NO: 140679 - RNA, 24 nt, Artificial Sequence
  Synthetic
ucccuuugaaaacuggcacaagac

SEQ ID NO: 140680 - RNA, 18 nt, Artificial Sequence
  Synthetic
cagagcauuugucaagac

SEQ ID NO: 140681 - RNA, 19 nt, Artificial Sequence
  Synthetic
acagagcauuugucaagac

SEQ ID NO: 140682 - RNA, 20 nt, Artificial Sequence
  Synthetic
cacagagcauuugucaagac

SEQ ID NO: 140683 - RNA, 18 nt, Artificial Sequence
  Synthetic
agcaaaaauauauaagac

SEQ ID NO: 140684 - RNA, 19 nt, Artificial Sequence
  Synthetic
aagcaaaaauauauaagac

SEQ ID NO: 140685 - RNA, 20 nt, Artificial Sequence
  Synthetic
caagcaaaaauauauaagac

SEQ ID NO: 140686 - RNA, 18 nt, Artificial Sequence
  Synthetic
auaauacucauaacagac

SEQ ID NO: 140687 - RNA, 19 nt, Artificial Sequence
  Synthetic
aauaauacucauaacagac

SEQ ID NO: 140688 - RNA, 20 nt, Artificial Sequence
  Synthetic
uaauaauacucauaacagac

SEQ ID NO: 140689 - RNA, 18 nt, Artificial Sequence
  Synthetic
auagcaaauauagcagac

SEQ ID NO: 140690 - RNA, 19 nt, Artificial Sequence
  Synthetic
aauagcaaauauagcagac

SEQ ID NO: 140691 - RNA, 20 nt, Artificial Sequence
  Synthetic
aaauagcaaauauagcagac

SEQ ID NO: 140692 - RNA, 18 nt, Artificial Sequence
  Synthetic
acaagaaaaguaucagac

SEQ ID NO: 140693 - RNA, 19 nt, Artificial Sequence
  Synthetic
cacaagaaaaguaucagac

SEQ ID NO: 140694 - RNA, 20 nt, Artificial Sequence
  Synthetic
ucacaagaaaaguaucagac

SEQ ID NO: 140695 - RNA, 18 nt, Artificial Sequence
  Synthetic
ugaguccagcucucagac

SEQ ID NO: 140696 - RNA, 19 nt, Artificial Sequence
  Synthetic
cugaguccagcucucagac

SEQ ID NO: 140697 - RNA, 18 nt, Artificial Sequence
  Synthetic
uaucagagacacagagac

SEQ ID NO: 140698 - RNA, 19 nt, Artificial Sequence
  Synthetic
uuaucagagacacagagac

SEQ ID NO: 140699 - RNA, 20 nt, Artificial Sequence
  Synthetic
uuuaucagagacacagagac

SEQ ID NO: 140700 - RNA, 19 nt, Artificial Sequence
  Synthetic
agucuguuuuaucagagac

SEQ ID NO: 140701 - RNA, 20 nt, Artificial Sequence
  Synthetic
aagucuguuuuaucagagac

SEQ ID NO: 140702 - RNA, 18 nt, Artificial Sequence
  Synthetic
uguauuuuuaguagagac

SEQ ID NO: 140703 - RNA, 19 nt, Artificial Sequence
  Synthetic
uuguauuuuuaguagagac

SEQ ID NO: 140704 - RNA, 20 nt, Artificial Sequence
  Synthetic
uuuguauuuuuaguagagac

SEQ ID NO: 140705 - RNA, 23 nt, Artificial Sequence
  Synthetic
uuuuuuguauuuuuaguagagac

SEQ ID NO: 140706 - RNA, 24 nt, Artificial Sequence
  Synthetic
auuuuuuguauuuuuaguagagac

SEQ ID NO: 140707 - RNA, 22 nt, Artificial Sequence
  Synthetic
aggggaaaggaaagggggagac

SEQ ID NO: 140708 - RNA, 23 nt, Artificial Sequence
  Synthetic
aaggggaaaggaaagggggagac

SEQ ID NO: 140709 - RNA, 19 nt, Artificial Sequence
  Synthetic
agaugaugcugacugagac

SEQ ID NO: 140710 - RNA, 20 nt, Artificial Sequence
  Synthetic
aagaugaugcugacugagac

SEQ ID NO: 140711 - RNA, 18 nt, Artificial Sequence
  Synthetic
aaagaacuucccugagac

SEQ ID NO: 140712 - RNA, 19 nt, Artificial Sequence
  Synthetic
uaaagaacuucccugagac

SEQ ID NO: 140713 - RNA, 20 nt, Artificial Sequence
  Synthetic
auaaagaacuucccugagac

SEQ ID NO: 140714 - RNA, 21 nt, Artificial Sequence
  Synthetic
uauaaagaacuucccugagac

SEQ ID NO: 140715 - RNA, 22 nt, Artificial Sequence
  Synthetic
cuauaaagaacuucccugagac

SEQ ID NO: 140716 - RNA, 24 nt, Artificial Sequence
  Synthetic
ugcuauaaagaacuucccugagac

SEQ ID NO: 140717 - RNA, 19 nt, Artificial Sequence
  Synthetic
agcaccacugcacuccgac

SEQ ID NO: 140718 - RNA, 20 nt, Artificial Sequence
  Synthetic
uagcaccacugcacuccgac

SEQ ID NO: 140719 - RNA, 21 nt, Artificial Sequence
  Synthetic
auagcaccacugcacuccgac

SEQ ID NO: 140720 - RNA, 23 nt, Artificial Sequence
  Synthetic
agauagcaccacugcacuccgac

SEQ ID NO: 140721 - RNA, 18 nt, Artificial Sequence
  Synthetic
cauguccuuugcagcgac

SEQ ID NO: 140722 - RNA, 19 nt, Artificial Sequence
  Synthetic
ucauguccuuugcagcgac

SEQ ID NO: 140723 - RNA, 20 nt, Artificial Sequence
  Synthetic
aucauguccuuugcagcgac

SEQ ID NO: 140724 - RNA, 22 nt, Artificial Sequence
  Synthetic
agaucauguccuuugcagcgac

SEQ ID NO: 140725 - RNA, 24 nt, Artificial Sequence
  Synthetic
ugagaucauguccuuugcagcgac

SEQ ID NO: 140726 - RNA, 18 nt, Artificial Sequence
  Synthetic
cguguccuuuguaaggac

SEQ ID NO: 140727 - RNA, 19 nt, Artificial Sequence
  Synthetic
ucguguccuuuguaaggac

SEQ ID NO: 140728 - RNA, 20 nt, Artificial Sequence
  Synthetic
uucguguccuuuguaaggac

SEQ ID NO: 140729 - RNA, 22 nt, Artificial Sequence
  Synthetic
cguucguguccuuuguaaggac

SEQ ID NO: 140730 - RNA, 24 nt, Artificial Sequence
  Synthetic
ugcguucguguccuuuguaaggac

SEQ ID NO: 140731 - RNA, 18 nt, Artificial Sequence
  Synthetic
uuuuaaaauauuaaggac

SEQ ID NO: 140732 - RNA, 19 nt, Artificial Sequence
  Synthetic
auuuuaaaauauuaaggac

SEQ ID NO: 140733 - RNA, 20 nt, Artificial Sequence
  Synthetic
uauuuuaaaauauuaaggac

SEQ ID NO: 140734 - RNA, 18 nt, Artificial Sequence
  Synthetic
aaagacaaugaacaggac

SEQ ID NO: 140735 - RNA, 19 nt, Artificial Sequence
  Synthetic
caaagacaaugaacaggac

SEQ ID NO: 140736 - RNA, 20 nt, Artificial Sequence
  Synthetic
ucaaagacaaugaacaggac

SEQ ID NO: 140737 - RNA, 21 nt, Artificial Sequence
  Synthetic
aucaaagacaaugaacaggac

SEQ ID NO: 140738 - RNA, 23 nt, Artificial Sequence
  Synthetic
agaucaaagacaaugaacaggac

SEQ ID NO: 140739 - RNA, 24 nt, Artificial Sequence
  Synthetic
uagaucaaagacaaugaacaggac

SEQ ID NO: 140740 - RNA, 18 nt, Artificial Sequence
  Synthetic
aauaaauacacaacggac

SEQ ID NO: 140741 - RNA, 20 nt, Artificial Sequence
  Synthetic
agaauaaauacacaacggac

SEQ ID NO: 140742 - RNA, 22 nt, Artificial Sequence
  Synthetic
ugagaauaaauacacaacggac

SEQ ID NO: 140743 - RNA, 23 nt, Artificial Sequence
  Synthetic
augagaauaaauacacaacggac

SEQ ID NO: 140744 - RNA, 24 nt, Artificial Sequence
  Synthetic
aaugagaauaaauacacaacggac

SEQ ID NO: 140745 - RNA, 18 nt, Artificial Sequence
  Synthetic
cauguccuuugaagggac

SEQ ID NO: 140746 - RNA, 19 nt, Artificial Sequence
  Synthetic
ucauguccuuugaagggac

SEQ ID NO: 140747 - RNA, 20 nt, Artificial Sequence
  Synthetic
uucauguccuuugaagggac

SEQ ID NO: 140748 - RNA, 22 nt, Artificial Sequence
  Synthetic
aguucauguccuuugaagggac

SEQ ID NO: 140749 - RNA, 24 nt, Artificial Sequence
  Synthetic
cgaguucauguccuuugaagggac

SEQ ID NO: 140750 - RNA, 18 nt, Artificial Sequence
  Synthetic
cauguccuuggcagggac

SEQ ID NO: 140751 - RNA, 19 nt, Artificial Sequence
  Synthetic
ucauguccuuggcagggac

SEQ ID NO: 140752 - RNA, 20 nt, Artificial Sequence
  Synthetic
uucauguccuuggcagggac

SEQ ID NO: 140753 - RNA, 22 nt, Artificial Sequence
  Synthetic
aguucauguccuuggcagggac

SEQ ID NO: 140754 - RNA, 24 nt, Artificial Sequence
  Synthetic
ugaguucauguccuuggcagggac

SEQ ID NO: 140755 - RNA, 18 nt, Artificial Sequence
  Synthetic
cauguccguuguagggac

SEQ ID NO: 140756 - RNA, 19 nt, Artificial Sequence
  Synthetic
ucauguccguuguagggac

SEQ ID NO: 140757 - RNA, 20 nt, Artificial Sequence
  Synthetic
uucauguccguuguagggac

SEQ ID NO: 140758 - RNA, 22 nt, Artificial Sequence
  Synthetic
aguucauguccguuguagggac

SEQ ID NO: 140759 - RNA, 24 nt, Artificial Sequence
  Synthetic
ugaguucauguccguuguagggac

SEQ ID NO: 140760 - RNA, 18 nt, Artificial Sequence
  Synthetic
cacauccuuuguagggac

SEQ ID NO: 140761 - RNA, 19 nt, Artificial Sequence
  Synthetic
ucacauccuuuguagggac

SEQ ID NO: 140762 - RNA, 20 nt, Artificial Sequence
  Synthetic
uucacauccuuuguagggac

SEQ ID NO: 140763 - RNA, 18 nt, Artificial Sequence
  Synthetic
caaguccuuuguagggac

SEQ ID NO: 140764 - RNA, 19 nt, Artificial Sequence
  Synthetic
ucaaguccuuuguagggac

SEQ ID NO: 140765 - RNA, 20 nt, Artificial Sequence
  Synthetic
uucaaguccuuuguagggac

SEQ ID NO: 140766 - RNA, 22 nt, Artificial Sequence
  Synthetic
aguucaaguccuuuguagggac

SEQ ID NO: 140767 - RNA, 24 nt, Artificial Sequence
  Synthetic
ugaguucaaguccuuuguagggac

SEQ ID NO: 140768 - RNA, 18 nt, Artificial Sequence
  Synthetic
cacguccuuuguagggac

SEQ ID NO: 140769 - RNA, 19 nt, Artificial Sequence
  Synthetic
ucacguccuuuguagggac

SEQ ID NO: 140770 - RNA, 20 nt, Artificial Sequence
  Synthetic
uucacguccuuuguagggac

SEQ ID NO: 140771 - RNA, 22 nt, Artificial Sequence
  Synthetic
aguucacguccuuuguagggac

SEQ ID NO: 140772 - RNA, 24 nt, Artificial Sequence
  Synthetic
ugaguucacguccuuuguagggac

SEQ ID NO: 140773 - RNA, 18 nt, Artificial Sequence
  Synthetic
cauguccuuuguagggac

SEQ ID NO: 140774 - RNA, 19 nt, Artificial Sequence
  Synthetic
ucauguccuuuguagggac

SEQ ID NO: 140775 - RNA, 20 nt, Artificial Sequence
  Synthetic
uucauguccuuuguagggac

SEQ ID NO: 140776 - RNA, 22 nt, Artificial Sequence
  Synthetic
aguucauguccuuuguagggac

SEQ ID NO: 140777 - RNA, 24 nt, Artificial Sequence
  Synthetic
ugaguucauguccuuuguagggac

SEQ ID NO: 140778 - RNA, 19 nt, Artificial Sequence
  Synthetic
aggaaaugauuacuuggac

SEQ ID NO: 140779 - RNA, 20 nt, Artificial Sequence
  Synthetic
aaggaaaugauuacuuggac

SEQ ID NO: 140780 - RNA, 18 nt, Artificial Sequence
  Synthetic
cugaaacagaaaaaugac

SEQ ID NO: 140781 - RNA, 19 nt, Artificial Sequence
  Synthetic
ccugaaacagaaaaaugac

SEQ ID NO: 140782 - RNA, 20 nt, Artificial Sequence
  Synthetic
uccugaaacagaaaaaugac

SEQ ID NO: 140783 - RNA, 21 nt, Artificial Sequence
  Synthetic
auccugaaacagaaaaaugac

SEQ ID NO: 140784 - RNA, 24 nt, Artificial Sequence
  Synthetic
uggauccugaaacagaaaaaugac

SEQ ID NO: 140785 - RNA, 20 nt, Artificial Sequence
  Synthetic
ugggcgugguggcacaugac

SEQ ID NO: 140786 - RNA, 21 nt, Artificial Sequence
  Synthetic
cugggcgugguggcacaugac

SEQ ID NO: 140787 - RNA, 23 nt, Artificial Sequence
  Synthetic
agcugggcgugguggcacaugac

SEQ ID NO: 140788 - RNA, 24 nt, Artificial Sequence
  Synthetic
uagcugggcgugguggcacaugac

SEQ ID NO: 140789 - RNA, 18 nt, Artificial Sequence
  Synthetic
cucuugcaucagcaugac

SEQ ID NO: 140790 - RNA, 19 nt, Artificial Sequence
  Synthetic
ccucuugcaucagcaugac

SEQ ID NO: 140791 - RNA, 20 nt, Artificial Sequence
  Synthetic
accucuugcaucagcaugac

SEQ ID NO: 140792 - RNA, 21 nt, Artificial Sequence
  Synthetic
caccucuugcaucagcaugac

SEQ ID NO: 140793 - RNA, 22 nt, Artificial Sequence
  Synthetic
ccaccucuugcaucagcaugac

SEQ ID NO: 140794 - RNA, 23 nt, Artificial Sequence
  Synthetic
cccaccucuugcaucagcaugac

SEQ ID NO: 140795 - RNA, 18 nt, Artificial Sequence
  Synthetic
ucaccuuuuauucaugac

SEQ ID NO: 140796 - RNA, 19 nt, Artificial Sequence
  Synthetic
aucaccuuuuauucaugac

SEQ ID NO: 140797 - RNA, 20 nt, Artificial Sequence
  Synthetic
caucaccuuuuauucaugac

SEQ ID NO: 140798 - RNA, 21 nt, Artificial Sequence
  Synthetic
acaucaccuuuuauucaugac

SEQ ID NO: 140799 - RNA, 22 nt, Artificial Sequence
  Synthetic
aacaucaccuuuuauucaugac

SEQ ID NO: 140800 - RNA, 24 nt, Artificial Sequence
  Synthetic
ugaacaucaccuuuuauucaugac

SEQ ID NO: 140801 - RNA, 18 nt, Artificial Sequence
  Synthetic
cuucucaucucuggugac

SEQ ID NO: 140802 - RNA, 19 nt, Artificial Sequence
  Synthetic
acuucucaucucuggugac

SEQ ID NO: 140803 - RNA, 20 nt, Artificial Sequence
  Synthetic
aacuucucaucucuggugac

SEQ ID NO: 140804 - RNA, 21 nt, Artificial Sequence
  Synthetic
caacuucucaucucuggugac

SEQ ID NO: 140805 - RNA, 22 nt, Artificial Sequence
  Synthetic
acaacuucucaucucuggugac

SEQ ID NO: 140806 - RNA, 24 nt, Artificial Sequence
  Synthetic
cgacaacuucucaucucuggugac

SEQ ID NO: 140807 - RNA, 18 nt, Artificial Sequence
  Synthetic
uccauuucugguugugac

SEQ ID NO: 140808 - RNA, 19 nt, Artificial Sequence
  Synthetic
auccauuucugguugugac

SEQ ID NO: 140809 - RNA, 18 nt, Artificial Sequence
  Synthetic
cuuuggaauuagauugac

SEQ ID NO: 140810 - RNA, 18 nt, Artificial Sequence
  Synthetic
aauauucuguaucuugac

SEQ ID NO: 140811 - RNA, 19 nt, Artificial Sequence
  Synthetic
caauauucuguaucuugac

SEQ ID NO: 140812 - RNA, 22 nt, Artificial Sequence
  Synthetic
uggcaauauucuguaucuugac

SEQ ID NO: 140813 - RNA, 23 nt, Artificial Sequence
  Synthetic
cuggcaauauucuguaucuugac

SEQ ID NO: 140814 - RNA, 19 nt, Artificial Sequence
  Synthetic
uggucaacugauuuuugac

SEQ ID NO: 140815 - RNA, 20 nt, Artificial Sequence
  Synthetic
auggucaacugauuuuugac

SEQ ID NO: 140816 - RNA, 21 nt, Artificial Sequence
  Synthetic
uauggucaacugauuuuugac

SEQ ID NO: 140817 - RNA, 22 nt, Artificial Sequence
  Synthetic
uuauggucaacugauuuuugac

SEQ ID NO: 140818 - RNA, 23 nt, Artificial Sequence
  Synthetic
uuuauggucaacugauuuuugac

SEQ ID NO: 140819 - RNA, 24 nt, Artificial Sequence
  Synthetic
auuuauggucaacugauuuuugac

SEQ ID NO: 140820 - RNA, 18 nt, Artificial Sequence
  Synthetic
auaaauaaauaaaaauac

SEQ ID NO: 140821 - RNA, 19 nt, Artificial Sequence
  Synthetic
aauaaauaaauaaaaauac

SEQ ID NO: 140822 - RNA, 20 nt, Artificial Sequence
  Synthetic
aaauaaauaaauaaaaauac

SEQ ID NO: 140823 - RNA, 21 nt, Artificial Sequence
  Synthetic
uaaauaaauaaauaaaaauac

SEQ ID NO: 140824 - RNA, 22 nt, Artificial Sequence
  Synthetic
auaaauaaauaaauaaaaauac

SEQ ID NO: 140825 - RNA, 23 nt, Artificial Sequence
  Synthetic
aauaaauaaauaaauaaaaauac

SEQ ID NO: 140826 - RNA, 24 nt, Artificial Sequence
  Synthetic
aaauaaauaaauaaauaaaaauac

SEQ ID NO: 140827 - RNA, 18 nt, Artificial Sequence
  Synthetic
agaauacauauaaaauac

SEQ ID NO: 140828 - RNA, 20 nt, Artificial Sequence
  Synthetic
agagaauacauauaaaauac

SEQ ID NO: 140829 - RNA, 18 nt, Artificial Sequence
  Synthetic
uagaccaaauuaaaauac

SEQ ID NO: 140830 - RNA, 19 nt, Artificial Sequence
  Synthetic
auagaccaaauuaaaauac

SEQ ID NO: 140831 - RNA, 20 nt, Artificial Sequence
  Synthetic
cauagaccaaauuaaaauac

SEQ ID NO: 140832 - RNA, 21 nt, Artificial Sequence
  Synthetic
ucauagaccaaauuaaaauac

SEQ ID NO: 140833 - RNA, 22 nt, Artificial Sequence
  Synthetic
cucauagaccaaauuaaaauac

SEQ ID NO: 140834 - RNA, 18 nt, Artificial Sequence
  Synthetic
auaugcauauuguaauac

SEQ ID NO: 140835 - RNA, 19 nt, Artificial Sequence
  Synthetic
uauaugcauauuguaauac

SEQ ID NO: 140836 - RNA, 20 nt, Artificial Sequence
  Synthetic
uuauaugcauauuguaauac

SEQ ID NO: 140837 - RNA, 21 nt, Artificial Sequence
  Synthetic
uuuauaugcauauuguaauac

SEQ ID NO: 140838 - RNA, 23 nt, Artificial Sequence
  Synthetic
uguuuauaugcauauuguaauac

SEQ ID NO: 140839 - RNA, 24 nt, Artificial Sequence
  Synthetic
uuguuuauaugcauauuguaauac

SEQ ID NO: 140840 - RNA, 18 nt, Artificial Sequence
  Synthetic
aaauauuugauuuaauac

SEQ ID NO: 140841 - RNA, 19 nt, Artificial Sequence
  Synthetic
aaaauauuugauuuaauac

SEQ ID NO: 140842 - RNA, 20 nt, Artificial Sequence
  Synthetic
aaaaauauuugauuuaauac

SEQ ID NO: 140843 - RNA, 19 nt, Artificial Sequence
  Synthetic
uguguguguguacacauac

SEQ ID NO: 140844 - RNA, 21 nt, Artificial Sequence
  Synthetic
uguguguguguguacacauac

SEQ ID NO: 140845 - RNA, 23 nt, Artificial Sequence
  Synthetic
uguguguguguguguacacauac

SEQ ID NO: 140846 - RNA, 19 nt, Artificial Sequence
  Synthetic
ugccagguacuugggauac

SEQ ID NO: 140847 - RNA, 20 nt, Artificial Sequence
  Synthetic
augccagguacuugggauac

SEQ ID NO: 140848 - RNA, 18 nt, Artificial Sequence
  Synthetic
uuuccaccaacaguauac

SEQ ID NO: 140849 - RNA, 19 nt, Artificial Sequence
  Synthetic
auuuccaccaacaguauac

SEQ ID NO: 140850 - RNA, 20 nt, Artificial Sequence
  Synthetic
cauuuccaccaacaguauac

SEQ ID NO: 140851 - RNA, 21 nt, Artificial Sequence
  Synthetic
acauuuccaccaacaguauac

SEQ ID NO: 140852 - RNA, 22 nt, Artificial Sequence
  Synthetic
uacauuuccaccaacaguauac

SEQ ID NO: 140853 - RNA, 23 nt, Artificial Sequence
  Synthetic
uuacauuuccaccaacaguauac

SEQ ID NO: 140854 - RNA, 24 nt, Artificial Sequence
  Synthetic
uuuacauuuccaccaacaguauac

SEQ ID NO: 140855 - RNA, 20 nt, Artificial Sequence
  Synthetic
ugggguguaauguacacuac

SEQ ID NO: 140856 - RNA, 21 nt, Artificial Sequence
  Synthetic
uugggguguaauguacacuac

SEQ ID NO: 140857 - RNA, 22 nt, Artificial Sequence
  Synthetic
uuugggguguaauguacacuac

SEQ ID NO: 140858 - RNA, 23 nt, Artificial Sequence
  Synthetic
cuuugggguguaauguacacuac

SEQ ID NO: 140859 - RNA, 24 nt, Artificial Sequence
  Synthetic
ccuuugggguguaauguacacuac

SEQ ID NO: 140860 - RNA, 19 nt, Artificial Sequence
  Synthetic
agcacuuugggaggccuac

SEQ ID NO: 140861 - RNA, 20 nt, Artificial Sequence
  Synthetic
cagcacuuugggaggccuac

SEQ ID NO: 140862 - RNA, 21 nt, Artificial Sequence
  Synthetic
ccagcacuuugggaggccuac

SEQ ID NO: 140863 - RNA, 22 nt, Artificial Sequence
  Synthetic
cccagcacuuugggaggccuac

SEQ ID NO: 140864 - RNA, 23 nt, Artificial Sequence
  Synthetic
ucccagcacuuugggaggccuac

SEQ ID NO: 140865 - RNA, 24 nt, Artificial Sequence
  Synthetic
aucccagcacuuugggaggccuac

SEQ ID NO: 140866 - RNA, 18 nt, Artificial Sequence
  Synthetic
acaugagccuaggccuac

SEQ ID NO: 140867 - RNA, 19 nt, Artificial Sequence
  Synthetic
cacaugagccuaggccuac

SEQ ID NO: 140868 - RNA, 21 nt, Artificial Sequence
  Synthetic
cgcacaugagccuaggccuac

SEQ ID NO: 140869 - RNA, 22 nt, Artificial Sequence
  Synthetic
acgcacaugagccuaggccuac

SEQ ID NO: 140870 - RNA, 23 nt, Artificial Sequence
  Synthetic
cacgcacaugagccuaggccuac

SEQ ID NO: 140871 - RNA, 24 nt, Artificial Sequence
  Synthetic
acacgcacaugagccuaggccuac

SEQ ID NO: 140872 - RNA, 19 nt, Artificial Sequence
  Synthetic
ugaugaaacauuuuccuac

SEQ ID NO: 140873 - RNA, 20 nt, Artificial Sequence
  Synthetic
cugaugaaacauuuuccuac

SEQ ID NO: 140874 - RNA, 18 nt, Artificial Sequence
  Synthetic
aaagacaaaauuaaguac

SEQ ID NO: 140875 - RNA, 19 nt, Artificial Sequence
  Synthetic
aaaagacaaaauuaaguac

SEQ ID NO: 140876 - RNA, 20 nt, Artificial Sequence
  Synthetic
uaaaagacaaaauuaaguac

SEQ ID NO: 140877 - RNA, 18 nt, Artificial Sequence
  Synthetic
cccaggaggcugagguac

SEQ ID NO: 140878 - RNA, 19 nt, Artificial Sequence
  Synthetic
acccaggaggcugagguac

SEQ ID NO: 140879 - RNA, 20 nt, Artificial Sequence
  Synthetic
uacccaggaggcugagguac

SEQ ID NO: 140880 - RNA, 21 nt, Artificial Sequence
  Synthetic
cuacccaggaggcugagguac

SEQ ID NO: 140881 - RNA, 23 nt, Artificial Sequence
  Synthetic
agcuacccaggaggcugagguac

SEQ ID NO: 140882 - RNA, 24 nt, Artificial Sequence
  Synthetic
cagcuacccaggaggcugagguac

SEQ ID NO: 140883 - RNA, 18 nt, Artificial Sequence
  Synthetic
aaaugacuccucauguac

SEQ ID NO: 140884 - RNA, 19 nt, Artificial Sequence
  Synthetic
aaaaugacuccucauguac

SEQ ID NO: 140885 - RNA, 20 nt, Artificial Sequence
  Synthetic
aaaaaugacuccucauguac

SEQ ID NO: 140886 - RNA, 21 nt, Artificial Sequence
  Synthetic
aaaaaaugacuccucauguac

SEQ ID NO: 140887 - RNA, 22 nt, Artificial Sequence
  Synthetic
aaaaaaaugacuccucauguac

SEQ ID NO: 140888 - RNA, 24 nt, Artificial Sequence
  Synthetic
agaaaaaaaugacuccucauguac

SEQ ID NO: 140889 - RNA, 18 nt, Artificial Sequence
  Synthetic
uuccugccaacaguguac

SEQ ID NO: 140890 - RNA, 19 nt, Artificial Sequence
  Synthetic
auuccugccaacaguguac

SEQ ID NO: 140891 - RNA, 20 nt, Artificial Sequence
  Synthetic
cauuccugccaacaguguac

SEQ ID NO: 140892 - RNA, 21 nt, Artificial Sequence
  Synthetic
acauuccugccaacaguguac

SEQ ID NO: 140893 - RNA, 22 nt, Artificial Sequence
  Synthetic
uacauuccugccaacaguguac

SEQ ID NO: 140894 - RNA, 23 nt, Artificial Sequence
  Synthetic
uuacauuccugccaacaguguac

SEQ ID NO: 140895 - RNA, 24 nt, Artificial Sequence
  Synthetic
uuuacauuccugccaacaguguac

SEQ ID NO: 140896 - RNA, 18 nt, Artificial Sequence
  Synthetic
uucccaucaacauuguac

SEQ ID NO: 140897 - RNA, 19 nt, Artificial Sequence
  Synthetic
auucccaucaacauuguac

SEQ ID NO: 140898 - RNA, 20 nt, Artificial Sequence
  Synthetic
cauucccaucaacauuguac

SEQ ID NO: 140899 - RNA, 21 nt, Artificial Sequence
  Synthetic
acauucccaucaacauuguac

SEQ ID NO: 140900 - RNA, 22 nt, Artificial Sequence
  Synthetic
uacauucccaucaacauuguac

SEQ ID NO: 140901 - RNA, 23 nt, Artificial Sequence
  Synthetic
uuacauucccaucaacauuguac

SEQ ID NO: 140902 - RNA, 24 nt, Artificial Sequence
  Synthetic
uuuacauucccaucaacauuguac

SEQ ID NO: 140903 - RNA, 19 nt, Artificial Sequence
  Synthetic
cguaacugcugcauuguac

SEQ ID NO: 140904 - RNA, 20 nt, Artificial Sequence
  Synthetic
acguaacugcugcauuguac

SEQ ID NO: 140905 - RNA, 22 nt, Artificial Sequence
  Synthetic
ugacguaacugcugcauuguac

SEQ ID NO: 140906 - RNA, 23 nt, Artificial Sequence
  Synthetic
cugacguaacugcugcauuguac

SEQ ID NO: 140907 - RNA, 24 nt, Artificial Sequence
  Synthetic
ccugacguaacugcugcauuguac

SEQ ID NO: 140908 - RNA, 18 nt, Artificial Sequence
  Synthetic
cagugaacauccuuguac

SEQ ID NO: 140909 - RNA, 20 nt, Artificial Sequence
  Synthetic
ugcagugaacauccuuguac

SEQ ID NO: 140910 - RNA, 18 nt, Artificial Sequence
  Synthetic
acaaaauacaaaaauuac

SEQ ID NO: 140911 - RNA, 19 nt, Artificial Sequence
  Synthetic
uacaaaauacaaaaauuac

SEQ ID NO: 140912 - RNA, 20 nt, Artificial Sequence
  Synthetic
auacaaaauacaaaaauuac

SEQ ID NO: 140913 - RNA, 21 nt, Artificial Sequence
  Synthetic
aauacaaaauacaaaaauuac

SEQ ID NO: 140914 - RNA, 22 nt, Artificial Sequence
  Synthetic
aaauacaaaauacaaaaauuac

SEQ ID NO: 140915 - RNA, 24 nt, Artificial Sequence
  Synthetic
ugaaauacaaaauacaaaaauuac

SEQ ID NO: 140916 - RNA, 18 nt, Artificial Sequence
  Synthetic
aucuuuuuaaaauauuac

SEQ ID NO: 140917 - RNA, 19 nt, Artificial Sequence
  Synthetic
caucuuuuuaaaauauuac

SEQ ID NO: 140918 - RNA, 20 nt, Artificial Sequence
  Synthetic
ucaucuuuuuaaaauauuac

SEQ ID NO: 140919 - RNA, 18 nt, Artificial Sequence
  Synthetic
uuguaauuaacauauuac

SEQ ID NO: 140920 - RNA, 19 nt, Artificial Sequence
  Synthetic
uuuguaauuaacauauuac

SEQ ID NO: 140921 - RNA, 20 nt, Artificial Sequence
  Synthetic
uuuuguaauuaacauauuac

SEQ ID NO: 140922 - RNA, 18 nt, Artificial Sequence
  Synthetic
accuugcagaguuauuac

SEQ ID NO: 140923 - RNA, 19 nt, Artificial Sequence
  Synthetic
uaccuugcagaguuauuac

SEQ ID NO: 140924 - RNA, 20 nt, Artificial Sequence
  Synthetic
cuaccuugcagaguuauuac

SEQ ID NO: 140925 - RNA, 21 nt, Artificial Sequence
  Synthetic
acuaccuugcagaguuauuac

SEQ ID NO: 140926 - RNA, 22 nt, Artificial Sequence
  Synthetic
aacuaccuugcagaguuauuac

SEQ ID NO: 140927 - RNA, 23 nt, Artificial Sequence
  Synthetic
uaacuaccuugcagaguuauuac

SEQ ID NO: 140928 - RNA, 24 nt, Artificial Sequence
  Synthetic
auaacuaccuugcagaguuauuac

SEQ ID NO: 140929 - RNA, 18 nt, Artificial Sequence
  Synthetic
uaaaaauaaacaacuuac

SEQ ID NO: 140930 - RNA, 19 nt, Artificial Sequence
  Synthetic
auaaaaauaaacaacuuac

SEQ ID NO: 140931 - RNA, 20 nt, Artificial Sequence
  Synthetic
aauaaaaauaaacaacuuac

SEQ ID NO: 140932 - RNA, 21 nt, Artificial Sequence
  Synthetic
caauaaaaauaaacaacuuac

SEQ ID NO: 140933 - RNA, 22 nt, Artificial Sequence
  Synthetic
ucaauaaaaauaaacaacuuac

SEQ ID NO: 140934 - RNA, 24 nt, Artificial Sequence
  Synthetic
ugucaauaaaaauaaacaacuuac

SEQ ID NO: 140935 - RNA, 21 nt, Artificial Sequence
  Synthetic
aaaaaaaagcagaaaccuuac

SEQ ID NO: 140936 - RNA, 22 nt, Artificial Sequence
  Synthetic
aaaaaaaaagcagaaaccuuac

SEQ ID NO: 140937 - RNA, 23 nt, Artificial Sequence
  Synthetic
aaaaaaaaaagcagaaaccuuac

SEQ ID NO: 140938 - RNA, 24 nt, Artificial Sequence
  Synthetic
aaaaaaaaaaagcagaaaccuuac

SEQ ID NO: 140939 - RNA, 18 nt, Artificial Sequence
  Synthetic
auuuguaacugagcuuac

SEQ ID NO: 140940 - RNA, 19 nt, Artificial Sequence
  Synthetic
cauuuguaacugagcuuac

SEQ ID NO: 140941 - RNA, 20 nt, Artificial Sequence
  Synthetic
ucauuuguaacugagcuuac

SEQ ID NO: 140942 - RNA, 21 nt, Artificial Sequence
  Synthetic
uucauuuguaacugagcuuac

SEQ ID NO: 140943 - RNA, 22 nt, Artificial Sequence
  Synthetic
uuucauuuguaacugagcuuac

SEQ ID NO: 140944 - RNA, 23 nt, Artificial Sequence
  Synthetic
uuuucauuuguaacugagcuuac

SEQ ID NO: 140945 - RNA, 24 nt, Artificial Sequence
  Synthetic
auuuucauuuguaacugagcuuac

SEQ ID NO: 140946 - RNA, 20 nt, Artificial Sequence
  Synthetic
aggagcaagucacaucuuac

SEQ ID NO: 140947 - RNA, 23 nt, Artificial Sequence
  Synthetic
aggaggagcaagucacaucuuac

SEQ ID NO: 140948 - RNA, 24 nt, Artificial Sequence
  Synthetic
aaggaggagcaagucacaucuuac

SEQ ID NO: 140949 - RNA, 20 nt, Artificial Sequence
  Synthetic
aggaacgagucacaucuuac

SEQ ID NO: 140950 - RNA, 23 nt, Artificial Sequence
  Synthetic
aggaggaacgagucacaucuuac

SEQ ID NO: 140951 - RNA, 24 nt, Artificial Sequence
  Synthetic
aaggaggaacgagucacaucuuac

SEQ ID NO: 140952 - RNA, 18 nt, Artificial Sequence
  Synthetic
cauuucuaucauaguuac

SEQ ID NO: 140953 - RNA, 19 nt, Artificial Sequence
  Synthetic
ccauuucuaucauaguuac

SEQ ID NO: 140954 - RNA, 20 nt, Artificial Sequence
  Synthetic
uccauuucuaucauaguuac

SEQ ID NO: 140955 - RNA, 19 nt, Artificial Sequence
  Synthetic
ugaauuaaacagugguuac

SEQ ID NO: 140956 - RNA, 21 nt, Artificial Sequence
  Synthetic
agugaauuaaacagugguuac

SEQ ID NO: 140957 - RNA, 22 nt, Artificial Sequence
  Synthetic
uagugaauuaaacagugguuac

SEQ ID NO: 140958 - RNA, 23 nt, Artificial Sequence
  Synthetic
auagugaauuaaacagugguuac

SEQ ID NO: 140959 - RNA, 18 nt, Artificial Sequence
  Synthetic
caggugguauuugguuac

SEQ ID NO: 140960 - RNA, 19 nt, Artificial Sequence
  Synthetic
acaggugguauuugguuac

SEQ ID NO: 140961 - RNA, 20 nt, Artificial Sequence
  Synthetic
uacaggugguauuugguuac

SEQ ID NO: 140962 - RNA, 18 nt, Artificial Sequence
  Synthetic
uaggugguuuuugguuac

SEQ ID NO: 140963 - RNA, 19 nt, Artificial Sequence
  Synthetic
auaggugguuuuugguuac

SEQ ID NO: 140964 - RNA, 20 nt, Artificial Sequence
  Synthetic
uauaggugguuuuugguuac

SEQ ID NO: 140965 - RNA, 19 nt, Artificial Sequence
  Synthetic
aggcucagcuauuuguuac

SEQ ID NO: 140966 - RNA, 21 nt, Artificial Sequence
  Synthetic
ugaggcucagcuauuuguuac

SEQ ID NO: 140967 - RNA, 22 nt, Artificial Sequence
  Synthetic
cugaggcucagcuauuuguuac

SEQ ID NO: 140968 - RNA, 18 nt, Artificial Sequence
  Synthetic
caugugcagguuuguuac

SEQ ID NO: 140969 - RNA, 19 nt, Artificial Sequence
  Synthetic
acaugugcagguuuguuac

SEQ ID NO: 140970 - RNA, 20 nt, Artificial Sequence
  Synthetic
cacaugugcagguuuguuac

SEQ ID NO: 140971 - RNA, 20 nt, Artificial Sequence
  Synthetic
uacaugugcagguuuguuac

SEQ ID NO: 140972 - RNA, 21 nt, Artificial Sequence
  Synthetic
auacaugugcagguuuguuac

SEQ ID NO: 140973 - RNA, 22 nt, Artificial Sequence
  Synthetic
aauacaugugcagguuuguuac

SEQ ID NO: 140974 - RNA, 18 nt, Artificial Sequence
  Synthetic
caaguacauuuuuguuac

SEQ ID NO: 140975 - RNA, 19 nt, Artificial Sequence
  Synthetic
acaaguacauuuuuguuac

SEQ ID NO: 140976 - RNA, 20 nt, Artificial Sequence
  Synthetic
uacaaguacauuuuuguuac

SEQ ID NO: 140977 - RNA, 21 nt, Artificial Sequence
  Synthetic
auacaaguacauuuuuguuac

SEQ ID NO: 140978 - RNA, 22 nt, Artificial Sequence
  Synthetic
uauacaaguacauuuuuguuac

SEQ ID NO: 140979 - RNA, 19 nt, Artificial Sequence
  Synthetic
aggcaaaaugauaauuuac

SEQ ID NO: 140980 - RNA, 20 nt, Artificial Sequence
  Synthetic
uaggcaaaaugauaauuuac

SEQ ID NO: 140981 - RNA, 19 nt, Artificial Sequence
  Synthetic
uguaaaaauacauauuuac

SEQ ID NO: 140982 - RNA, 20 nt, Artificial Sequence
  Synthetic
auguaaaaauacauauuuac

SEQ ID NO: 140983 - RNA, 18 nt, Artificial Sequence
  Synthetic
caugcacgguguauuuac

SEQ ID NO: 140984 - RNA, 20 nt, Artificial Sequence
  Synthetic
agcaugcacgguguauuuac

SEQ ID NO: 140985 - RNA, 18 nt, Artificial Sequence
  Synthetic
auugcagacaaaguuuac

SEQ ID NO: 140986 - RNA, 19 nt, Artificial Sequence
  Synthetic
cauugcagacaaaguuuac

SEQ ID NO: 140987 - RNA, 20 nt, Artificial Sequence
  Synthetic
ucauugcagacaaaguuuac

SEQ ID NO: 140988 - RNA, 18 nt, Artificial Sequence
  Synthetic
cugaugucagcaguuuac

SEQ ID NO: 140989 - RNA, 19 nt, Artificial Sequence
  Synthetic
acugaugucagcaguuuac

SEQ ID NO: 140990 - RNA, 20 nt, Artificial Sequence
  Synthetic
uacugaugucagcaguuuac

SEQ ID NO: 140991 - RNA, 18 nt, Artificial Sequence
  Synthetic
uaacauccuucauuuuac

SEQ ID NO: 140992 - RNA, 19 nt, Artificial Sequence
  Synthetic
uuaacauccuucauuuuac

SEQ ID NO: 140993 - RNA, 20 nt, Artificial Sequence
  Synthetic
uuuaacauccuucauuuuac

SEQ ID NO: 140994 - RNA, 18 nt, Artificial Sequence
  Synthetic
uaauuauuauuauuuuac

SEQ ID NO: 140995 - RNA, 19 nt, Artificial Sequence
  Synthetic
auaauuauuauuauuuuac

SEQ ID NO: 140996 - RNA, 20 nt, Artificial Sequence
  Synthetic
aauaauuauuauuauuuuac

SEQ ID NO: 140997 - RNA, 21 nt, Artificial Sequence
  Synthetic
uaauaauuauuauuauuuuac

SEQ ID NO: 140998 - RNA, 22 nt, Artificial Sequence
  Synthetic
auaauaauuauuauuauuuuac

SEQ ID NO: 140999 - RNA, 24 nt, Artificial Sequence
  Synthetic
ugauaauaauuauuauuauuuuac

SEQ ID NO: 141000 - RNA, 18 nt, Artificial Sequence
  Synthetic
aauaaugguugcacaacc

SEQ ID NO: 141001 - RNA, 19 nt, Artificial Sequence
  Synthetic
uaauaaugguugcacaacc

SEQ ID NO: 141002 - RNA, 20 nt, Artificial Sequence
  Synthetic
auaauaaugguugcacaacc

SEQ ID NO: 141003 - RNA, 19 nt, Artificial Sequence
  Synthetic
agaggacagugaggcaacc

SEQ ID NO: 141004 - RNA, 20 nt, Artificial Sequence
  Synthetic
cagaggacagugaggcaacc

SEQ ID NO: 141005 - RNA, 21 nt, Artificial Sequence
  Synthetic
acagaggacagugaggcaacc

SEQ ID NO: 141006 - RNA, 22 nt, Artificial Sequence
  Synthetic
aacagaggacagugaggcaacc

SEQ ID NO: 141007 - RNA, 23 nt, Artificial Sequence
  Synthetic
caacagaggacagugaggcaacc

SEQ ID NO: 141008 - RNA, 24 nt, Artificial Sequence
  Synthetic
ccaacagaggacagugaggcaacc

SEQ ID NO: 141009 - RNA, 18 nt, Artificial Sequence
  Synthetic
agaaaagaauuuucaacc

SEQ ID NO: 141010 - RNA, 19 nt, Artificial Sequence
  Synthetic
aagaaaagaauuuucaacc

SEQ ID NO: 141011 - RNA, 20 nt, Artificial Sequence
  Synthetic
aaagaaaagaauuuucaacc

SEQ ID NO: 141012 - RNA, 21 nt, Artificial Sequence
  Synthetic
uaaagaaaagaauuuucaacc

SEQ ID NO: 141013 - RNA, 22 nt, Artificial Sequence
  Synthetic
uuaaagaaaagaauuuucaacc

SEQ ID NO: 141014 - RNA, 23 nt, Artificial Sequence
  Synthetic
cuuaaagaaaagaauuuucaacc

SEQ ID NO: 141015 - RNA, 24 nt, Artificial Sequence
  Synthetic
ucuuaaagaaaagaauuuucaacc

SEQ ID NO: 141016 - RNA, 21 nt, Artificial Sequence
  Synthetic
ucaauaagggaauuuucaacc

SEQ ID NO: 141017 - RNA, 22 nt, Artificial Sequence
  Synthetic
uucaauaagggaauuuucaacc

SEQ ID NO: 141018 - RNA, 23 nt, Artificial Sequence
  Synthetic
cuucaauaagggaauuuucaacc

SEQ ID NO: 141019 - RNA, 24 nt, Artificial Sequence
  Synthetic
ucuucaauaagggaauuuucaacc

SEQ ID NO: 141020 - RNA, 18 nt, Artificial Sequence
  Synthetic
uuuauagaugagauaacc

SEQ ID NO: 141021 - RNA, 19 nt, Artificial Sequence
  Synthetic
uuuuauagaugagauaacc

SEQ ID NO: 141022 - RNA, 20 nt, Artificial Sequence
  Synthetic
auuuuauagaugagauaacc

SEQ ID NO: 141023 - RNA, 21 nt, Artificial Sequence
  Synthetic
cauuuuauagaugagauaacc

SEQ ID NO: 141024 - RNA, 22 nt, Artificial Sequence
  Synthetic
ccauuuuauagaugagauaacc

SEQ ID NO: 141025 - RNA, 23 nt, Artificial Sequence
  Synthetic
cccauuuuauagaugagauaacc

SEQ ID NO: 141026 - RNA, 24 nt, Artificial Sequence
  Synthetic
ucccauuuuauagaugagauaacc

SEQ ID NO: 141027 - RNA, 18 nt, Artificial Sequence
  Synthetic
uccucccuuccucuaacc

SEQ ID NO: 141028 - RNA, 19 nt, Artificial Sequence
  Synthetic
cuccucccuuccucuaacc

SEQ ID NO: 141029 - RNA, 20 nt, Artificial Sequence
  Synthetic
ccuccucccuuccucuaacc

SEQ ID NO: 141030 - RNA, 18 nt, Artificial Sequence
  Synthetic
uuauuuuguuaaugcacc

SEQ ID NO: 141031 - RNA, 19 nt, Artificial Sequence
  Synthetic
uuuauuuuguuaaugcacc

SEQ ID NO: 141032 - RNA, 20 nt, Artificial Sequence
  Synthetic
cuuuauuuuguuaaugcacc

SEQ ID NO: 141033 - RNA, 18 nt, Artificial Sequence
  Synthetic
ccccacccaaaucucacc

SEQ ID NO: 141034 - RNA, 19 nt, Artificial Sequence
  Synthetic
uccccacccaaaucucacc

SEQ ID NO: 141035 - RNA, 21 nt, Artificial Sequence
  Synthetic
uguccccacccaaaucucacc

SEQ ID NO: 141036 - RNA, 23 nt, Artificial Sequence
  Synthetic
uguguccccacccaaaucucacc

SEQ ID NO: 141037 - RNA, 24 nt, Artificial Sequence
  Synthetic
cuguguccccacccaaaucucacc

SEQ ID NO: 141038 - RNA, 19 nt, Artificial Sequence
  Synthetic
uguuuacagcgucuucacc

SEQ ID NO: 141039 - RNA, 20 nt, Artificial Sequence
  Synthetic
uuguuuacagcgucuucacc

SEQ ID NO: 141040 - RNA, 21 nt, Artificial Sequence
  Synthetic
auuguuuacagcgucuucacc

SEQ ID NO: 141041 - RNA, 22 nt, Artificial Sequence
  Synthetic
cauuguuuacagcgucuucacc

SEQ ID NO: 141042 - RNA, 23 nt, Artificial Sequence
  Synthetic
acauuguuuacagcgucuucacc

SEQ ID NO: 141043 - RNA, 24 nt, Artificial Sequence
  Synthetic
aacauuguuuacagcgucuucacc

SEQ ID NO: 141044 - RNA, 18 nt, Artificial Sequence
  Synthetic
uuccuauguuauuucacc

SEQ ID NO: 141045 - RNA, 20 nt, Artificial Sequence
  Synthetic
uguuccuauguuauuucacc

SEQ ID NO: 141046 - RNA, 21 nt, Artificial Sequence
  Synthetic
cuguuccuauguuauuucacc

SEQ ID NO: 141047 - RNA, 22 nt, Artificial Sequence
  Synthetic
ucuguuccuauguuauuucacc

SEQ ID NO: 141048 - RNA, 23 nt, Artificial Sequence
  Synthetic
uucuguuccuauguuauuucacc

SEQ ID NO: 141049 - RNA, 24 nt, Artificial Sequence
  Synthetic
uuucuguuccuauguuauuucacc

SEQ ID NO: 141050 - RNA, 18 nt, Artificial Sequence
  Synthetic
uuuggccucccagagacc

SEQ ID NO: 141051 - RNA, 19 nt, Artificial Sequence
  Synthetic
cuuuggccucccagagacc

SEQ ID NO: 141052 - RNA, 21 nt, Artificial Sequence
  Synthetic
cgcuuuggccucccagagacc

SEQ ID NO: 141053 - RNA, 22 nt, Artificial Sequence
  Synthetic
ccgcuuuggccucccagagacc

SEQ ID NO: 141054 - RNA, 23 nt, Artificial Sequence
  Synthetic
cccgcuuuggccucccagagacc

SEQ ID NO: 141055 - RNA, 24 nt, Artificial Sequence
  Synthetic
acccgcuuuggccucccagagacc

SEQ ID NO: 141056 - RNA, 18 nt, Artificial Sequence
  Synthetic
aaauugcaguuugggacc

SEQ ID NO: 141057 - RNA, 20 nt, Artificial Sequence
  Synthetic
agaaauugcaguuugggacc

SEQ ID NO: 141058 - RNA, 21 nt, Artificial Sequence
  Synthetic
aagaaauugcaguuugggacc

SEQ ID NO: 141059 - RNA, 22 nt, Artificial Sequence
  Synthetic
aaagaaauugcaguuugggacc

SEQ ID NO: 141060 - RNA, 23 nt, Artificial Sequence
  Synthetic
aaaagaaauugcaguuugggacc

SEQ ID NO: 141061 - RNA, 24 nt, Artificial Sequence
  Synthetic
caaaagaaauugcaguuugggacc

SEQ ID NO: 141062 - RNA, 18 nt, Artificial Sequence
  Synthetic
agcagucugaaguggacc

SEQ ID NO: 141063 - RNA, 19 nt, Artificial Sequence
  Synthetic
cagcagucugaaguggacc

SEQ ID NO: 141064 - RNA, 20 nt, Artificial Sequence
  Synthetic
acagcagucugaaguggacc

SEQ ID NO: 141065 - RNA, 21 nt, Artificial Sequence
  Synthetic
cacagcagucugaaguggacc

SEQ ID NO: 141066 - RNA, 23 nt, Artificial Sequence
  Synthetic
agcacagcagucugaaguggacc

SEQ ID NO: 141067 - RNA, 24 nt, Artificial Sequence
  Synthetic
cagcacagcagucugaaguggacc

SEQ ID NO: 141068 - RNA, 19 nt, Artificial Sequence
  Synthetic
uggucucaaacuccugacc

SEQ ID NO: 141069 - RNA, 20 nt, Artificial Sequence
  Synthetic
cuggucucaaacuccugacc

SEQ ID NO: 141070 - RNA, 23 nt, Artificial Sequence
  Synthetic
aggcuggucucaaacuccugacc

SEQ ID NO: 141071 - RNA, 24 nt, Artificial Sequence
  Synthetic
caggcuggucucaaacuccugacc

SEQ ID NO: 141072 - RNA, 18 nt, Artificial Sequence
  Synthetic
cucccaagcugugugacc

SEQ ID NO: 141073 - RNA, 18 nt, Artificial Sequence
  Synthetic
cucagccuccgaaguacc

SEQ ID NO: 141074 - RNA, 19 nt, Artificial Sequence
  Synthetic
ccucagccuccgaaguacc

SEQ ID NO: 141075 - RNA, 21 nt, Artificial Sequence
  Synthetic
ugccucagccuccgaaguacc

SEQ ID NO: 141076 - RNA, 22 nt, Artificial Sequence
  Synthetic
cugccucagccuccgaaguacc

SEQ ID NO: 141077 - RNA, 23 nt, Artificial Sequence
  Synthetic
ccugccucagccuccgaaguacc

SEQ ID NO: 141078 - RNA, 24 nt, Artificial Sequence
  Synthetic
cccugccucagccuccgaaguacc

SEQ ID NO: 141079 - RNA, 18 nt, Artificial Sequence
  Synthetic
ugagggugaucagguacc

SEQ ID NO: 141080 - RNA, 19 nt, Artificial Sequence
  Synthetic
cugagggugaucagguacc

SEQ ID NO: 141081 - RNA, 20 nt, Artificial Sequence
  Synthetic
acugagggugaucagguacc

SEQ ID NO: 141082 - RNA, 21 nt, Artificial Sequence
  Synthetic
agggucacauucugagguacc

SEQ ID NO: 141083 - RNA, 22 nt, Artificial Sequence
  Synthetic
uagggucacauucugagguacc

SEQ ID NO: 141084 - RNA, 23 nt, Artificial Sequence
  Synthetic
auagggucacauucugagguacc

SEQ ID NO: 141085 - RNA, 24 nt, Artificial Sequence
  Synthetic
aauagggucacauucugagguacc

SEQ ID NO: 141086 - RNA, 18 nt, Artificial Sequence
  Synthetic
caaaaaauucaaauuacc

SEQ ID NO: 141087 - RNA, 19 nt, Artificial Sequence
  Synthetic
acaaaaaauucaaauuacc

SEQ ID NO: 141088 - RNA, 20 nt, Artificial Sequence
  Synthetic
uacaaaaaauucaaauuacc

SEQ ID NO: 141089 - RNA, 18 nt, Artificial Sequence
  Synthetic
ccaccaucauccaaaccc

SEQ ID NO: 141090 - RNA, 19 nt, Artificial Sequence
  Synthetic
accaccaucauccaaaccc

SEQ ID NO: 141091 - RNA, 22 nt, Artificial Sequence
  Synthetic
aggaccaccaucauccaaaccc

SEQ ID NO: 141092 - RNA, 24 nt, Artificial Sequence
  Synthetic
agaggaccaccaucauccaaaccc

SEQ ID NO: 141093 - RNA, 18 nt, Artificial Sequence
  Synthetic
auuacugggcuucaaccc

SEQ ID NO: 141094 - RNA, 20 nt, Artificial Sequence
  Synthetic
agauuacugggcuucaaccc

SEQ ID NO: 141095 - RNA, 18 nt, Artificial Sequence
  Synthetic
uccacaaauguggaaccc

SEQ ID NO: 141096 - RNA, 19 nt, Artificial Sequence
  Synthetic
auccacaaauguggaaccc

SEQ ID NO: 141097 - RNA, 20 nt, Artificial Sequence
  Synthetic
aauccacaaauguggaaccc

SEQ ID NO: 141098 - RNA, 21 nt, Artificial Sequence
  Synthetic
aaauccacaaauguggaaccc

SEQ ID NO: 141099 - RNA, 22 nt, Artificial Sequence
  Synthetic
uaaauccacaaauguggaaccc

SEQ ID NO: 141100 - RNA, 23 nt, Artificial Sequence
  Synthetic
uuaaauccacaaauguggaaccc

SEQ ID NO: 141101 - RNA, 21 nt, Artificial Sequence
  Synthetic
aacucacucuagcauuaaccc

SEQ ID NO: 141102 - RNA, 22 nt, Artificial Sequence
  Synthetic
uaacucacucuagcauuaaccc

SEQ ID NO: 141103 - RNA, 23 nt, Artificial Sequence
  Synthetic
uuaacucacucuagcauuaaccc

SEQ ID NO: 141104 - RNA, 24 nt, Artificial Sequence
  Synthetic
cuuaacucacucuagcauuaaccc

SEQ ID NO: 141105 - RNA, 18 nt, Artificial Sequence
  Synthetic
uccucccacccuccaccc

SEQ ID NO: 141106 - RNA, 19 nt, Artificial Sequence
  Synthetic
auccucccacccuccaccc

SEQ ID NO: 141107 - RNA, 20 nt, Artificial Sequence
  Synthetic
cauccucccacccuccaccc

SEQ ID NO: 141108 - RNA, 21 nt, Artificial Sequence
  Synthetic
ccauccucccacccuccaccc

SEQ ID NO: 141109 - RNA, 22 nt, Artificial Sequence
  Synthetic
accauccucccacccuccaccc

SEQ ID NO: 141110 - RNA, 23 nt, Artificial Sequence
  Synthetic
caccauccucccacccuccaccc

SEQ ID NO: 141111 - RNA, 24 nt, Artificial Sequence
  Synthetic
ucaccauccucccacccuccaccc

SEQ ID NO: 141112 - RNA, 18 nt, Artificial Sequence
  Synthetic
auuuuauaaaggagaccc

SEQ ID NO: 141113 - RNA, 19 nt, Artificial Sequence
  Synthetic
cauuuuauaaaggagaccc

SEQ ID NO: 141114 - RNA, 20 nt, Artificial Sequence
  Synthetic
acauuuuauaaaggagaccc

SEQ ID NO: 141115 - RNA, 18 nt, Artificial Sequence
  Synthetic
aaaccaacacauguaccc

SEQ ID NO: 141116 - RNA, 19 nt, Artificial Sequence
  Synthetic
caaaccaacacauguaccc

SEQ ID NO: 141117 - RNA, 20 nt, Artificial Sequence
  Synthetic
acaaaccaacacauguaccc

SEQ ID NO: 141118 - RNA, 21 nt, Artificial Sequence
  Synthetic
aacaaaccaacacauguaccc

SEQ ID NO: 141119 - RNA, 22 nt, Artificial Sequence
  Synthetic
uaacaaaccaacacauguaccc

SEQ ID NO: 141120 - RNA, 24 nt, Artificial Sequence
  Synthetic
uguaacaaaccaacacauguaccc

SEQ ID NO: 141121 - RNA, 18 nt, Artificial Sequence
  Synthetic
uccccaucuccccacccc

SEQ ID NO: 141122 - RNA, 19 nt, Artificial Sequence
  Synthetic
cuccccaucuccccacccc

SEQ ID NO: 141123 - RNA, 20 nt, Artificial Sequence
  Synthetic
acuccccaucuccccacccc

SEQ ID NO: 141124 - RNA, 21 nt, Artificial Sequence
  Synthetic
uacuccccaucuccccacccc

SEQ ID NO: 141125 - RNA, 22 nt, Artificial Sequence
  Synthetic
cuacuccccaucuccccacccc

SEQ ID NO: 141126 - RNA, 23 nt, Artificial Sequence
  Synthetic
ucuacuccccaucuccccacccc

SEQ ID NO: 141127 - RNA, 24 nt, Artificial Sequence
  Synthetic
cucuacuccccaucuccccacccc

SEQ ID NO: 141128 - RNA, 18 nt, Artificial Sequence
  Synthetic
acacacacacacaccccc

SEQ ID NO: 141129 - RNA, 19 nt, Artificial Sequence
  Synthetic
cacacacacacacaccccc

SEQ ID NO: 141130 - RNA, 20 nt, Artificial Sequence
  Synthetic
acacacacacacacaccccc

SEQ ID NO: 141131 - RNA, 21 nt, Artificial Sequence
  Synthetic
cacacacacacacacaccccc

SEQ ID NO: 141132 - RNA, 22 nt, Artificial Sequence
  Synthetic
acacacacacacacacaccccc

SEQ ID NO: 141133 - RNA, 23 nt, Artificial Sequence
  Synthetic
cacacacacacacacacaccccc

SEQ ID NO: 141134 - RNA, 24 nt, Artificial Sequence
  Synthetic
acacacacacacacacacaccccc

SEQ ID NO: 141135 - RNA, 18 nt, Artificial Sequence
  Synthetic
uccuggaaccaauccccc

SEQ ID NO: 141136 - RNA, 19 nt, Artificial Sequence
  Synthetic
auccuggaaccaauccccc

SEQ ID NO: 141137 - RNA, 24 nt, Artificial Sequence
  Synthetic
uggggauccuggaaccaauccccc

SEQ ID NO: 141138 - RNA, 18 nt, Artificial Sequence
  Synthetic
uucucaugccucagcccc

SEQ ID NO: 141139 - RNA, 19 nt, Artificial Sequence
  Synthetic
cuucucaugccucagcccc

SEQ ID NO: 141140 - RNA, 21 nt, Artificial Sequence
  Synthetic
cgcuucucaugccucagcccc

SEQ ID NO: 141141 - RNA, 23 nt, Artificial Sequence
  Synthetic
agcgcuucucaugccucagcccc

SEQ ID NO: 141142 - RNA, 24 nt, Artificial Sequence
  Synthetic
aagcgcuucucaugccucagcccc

SEQ ID NO: 141143 - RNA, 22 nt, Artificial Sequence
  Synthetic
agaauuaauucaacuuagcccc

SEQ ID NO: 141144 - RNA, 23 nt, Artificial Sequence
  Synthetic
aagaauuaauucaacuuagcccc

SEQ ID NO: 141145 - RNA, 24 nt, Artificial Sequence
  Synthetic
uaagaauuaauucaacuuagcccc

SEQ ID NO: 141146 - RNA, 18 nt, Artificial Sequence
  Synthetic
caucagcauuccuucccc

SEQ ID NO: 141147 - RNA, 19 nt, Artificial Sequence
  Synthetic
acaucagcauuccuucccc

SEQ ID NO: 141148 - RNA, 21 nt, Artificial Sequence
  Synthetic
ugacaucagcauuccuucccc

SEQ ID NO: 141149 - RNA, 22 nt, Artificial Sequence
  Synthetic
augacaucagcauuccuucccc

SEQ ID NO: 141150 - RNA, 23 nt, Artificial Sequence
  Synthetic
caugacaucagcauuccuucccc

SEQ ID NO: 141151 - RNA, 24 nt, Artificial Sequence
  Synthetic
ucaugacaucagcauuccuucccc

SEQ ID NO: 141152 - RNA, 18 nt, Artificial Sequence
  Synthetic
uugucugguaccaagccc

SEQ ID NO: 141153 - RNA, 21 nt, Artificial Sequence
  Synthetic
ugguugucugguaccaagccc

SEQ ID NO: 141154 - RNA, 22 nt, Artificial Sequence
  Synthetic
cugguugucugguaccaagccc

SEQ ID NO: 141155 - RNA, 23 nt, Artificial Sequence
  Synthetic
ucugguugucugguaccaagccc

SEQ ID NO: 141156 - RNA, 24 nt, Artificial Sequence
  Synthetic
cucugguugucugguaccaagccc

SEQ ID NO: 141157 - RNA, 18 nt, Artificial Sequence
  Synthetic
agccaccgcgcccagccc

SEQ ID NO: 141158 - RNA, 20 nt, Artificial Sequence
  Synthetic
ugagccaccgcgcccagccc

SEQ ID NO: 141159 - RNA, 22 nt, Artificial Sequence
  Synthetic
cgugagccaccgcgcccagccc

SEQ ID NO: 141160 - RNA, 23 nt, Artificial Sequence
  Synthetic
acgugagccaccgcgcccagccc

SEQ ID NO: 141161 - RNA, 18 nt, Artificial Sequence
  Synthetic
agccauggcgcccagccc

SEQ ID NO: 141162 - RNA, 20 nt, Artificial Sequence
  Synthetic
ugagccauggcgcccagccc

SEQ ID NO: 141163 - RNA, 22 nt, Artificial Sequence
  Synthetic
ugugagccauggcgcccagccc

SEQ ID NO: 141164 - RNA, 18 nt, Artificial Sequence
  Synthetic
uggucuggaauggagccc

SEQ ID NO: 141165 - RNA, 19 nt, Artificial Sequence
  Synthetic
uuggucuggaauggagccc

SEQ ID NO: 141166 - RNA, 21 nt, Artificial Sequence
  Synthetic
aguuggucuggaauggagccc

SEQ ID NO: 141167 - RNA, 22 nt, Artificial Sequence
  Synthetic
aaguuggucuggaauggagccc

SEQ ID NO: 141168 - RNA, 23 nt, Artificial Sequence
  Synthetic
uaaguuggucuggaauggagccc

SEQ ID NO: 141169 - RNA, 24 nt, Artificial Sequence
  Synthetic
uuaaguuggucuggaauggagccc

SEQ ID NO: 141170 - RNA, 20 nt, Artificial Sequence
  Synthetic
ugggauuaucgauugagccc

SEQ ID NO: 141171 - RNA, 23 nt, Artificial Sequence
  Synthetic
aggugggauuaucgauugagccc

SEQ ID NO: 141172 - RNA, 24 nt, Artificial Sequence
  Synthetic
aaggugggauuaucgauugagccc

SEQ ID NO: 141173 - RNA, 20 nt, Artificial Sequence
  Synthetic
ugggaggaucacuugagccc

SEQ ID NO: 141174 - RNA, 22 nt, Artificial Sequence
  Synthetic
agugggaggaucacuugagccc

SEQ ID NO: 141175 - RNA, 23 nt, Artificial Sequence
  Synthetic
aagugggaggaucacuugagccc

SEQ ID NO: 141176 - RNA, 19 nt, Artificial Sequence
  Synthetic
aggagggucacuugagccc

SEQ ID NO: 141177 - RNA, 20 nt, Artificial Sequence
  Synthetic
caggagggucacuugagccc

SEQ ID NO: 141178 - RNA, 23 nt, Artificial Sequence
  Synthetic
aggcaggagggucacuugagccc

SEQ ID NO: 141179 - RNA, 19 nt, Artificial Sequence
  Synthetic
aggagaauuacuugagccc

SEQ ID NO: 141180 - RNA, 20 nt, Artificial Sequence
  Synthetic
uaggagaauuacuugagccc

SEQ ID NO: 141181 - RNA, 21 nt, Artificial Sequence
  Synthetic
auaggagaauuacuugagccc

SEQ ID NO: 141182 - RNA, 24 nt, Artificial Sequence
  Synthetic
aggauaggagaauuacuugagccc

SEQ ID NO: 141183 - RNA, 19 nt, Artificial Sequence
  Synthetic
aggagaaucgcuugagccc

SEQ ID NO: 141184 - RNA, 20 nt, Artificial Sequence
  Synthetic
caggagaaucgcuugagccc

SEQ ID NO: 141185 - RNA, 23 nt, Artificial Sequence
  Synthetic
aggcaggagaaucgcuugagccc

SEQ ID NO: 141186 - RNA, 24 nt, Artificial Sequence
  Synthetic
aaggcaggagaaucgcuugagccc

SEQ ID NO: 141187 - RNA, 19 nt, Artificial Sequence
  Synthetic
aggaggaucgcuugagccc

SEQ ID NO: 141188 - RNA, 20 nt, Artificial Sequence
  Synthetic
caggaggaucgcuugagccc

SEQ ID NO: 141189 - RNA, 22 nt, Artificial Sequence
  Synthetic
agcaggaggaucgcuugagccc

SEQ ID NO: 141190 - RNA, 23 nt, Artificial Sequence
  Synthetic
aagcaggaggaucgcuugagccc

SEQ ID NO: 141191 - RNA, 20 nt, Artificial Sequence
  Synthetic
ugggagaauuucuugagccc

SEQ ID NO: 141192 - RNA, 21 nt, Artificial Sequence
  Synthetic
uugggagaauuucuugagccc

SEQ ID NO: 141193 - RNA, 23 nt, Artificial Sequence
  Synthetic
aguugggagaauuucuugagccc

SEQ ID NO: 141194 - RNA, 20 nt, Artificial Sequence
  Synthetic
aggauacucagggaaggccc

SEQ ID NO: 141195 - RNA, 21 nt, Artificial Sequence
  Synthetic
cucaggggauguugccggccc

SEQ ID NO: 141196 - RNA, 22 nt, Artificial Sequence
  Synthetic
ucucaggggauguugccggccc

SEQ ID NO: 141197 - RNA, 23 nt, Artificial Sequence
  Synthetic
uucucaggggauguugccggccc

SEQ ID NO: 141198 - RNA, 19 nt, Artificial Sequence
  Synthetic
agcauaaucuuaagggccc

SEQ ID NO: 141199 - RNA, 20 nt, Artificial Sequence
  Synthetic
uagcauaaucuuaagggccc

SEQ ID NO: 141200 - RNA, 18 nt, Artificial Sequence
  Synthetic
acaugaucucuugggccc

SEQ ID NO: 141201 - RNA, 20 nt, Artificial Sequence
  Synthetic
ugacaugaucucuugggccc

SEQ ID NO: 141202 - RNA, 23 nt, Artificial Sequence
  Synthetic
aggugacaugaucucuugggccc

SEQ ID NO: 141203 - RNA, 20 nt, Artificial Sequence
  Synthetic
uggcucaugccuguaauccc

SEQ ID NO: 141204 - RNA, 21 nt, Artificial Sequence
  Synthetic
auggcucaugccuguaauccc

SEQ ID NO: 141205 - RNA, 23 nt, Artificial Sequence
  Synthetic
cgauggcucaugccuguaauccc

SEQ ID NO: 141206 - RNA, 18 nt, Artificial Sequence
  Synthetic
cuggcugggccccauccc

SEQ ID NO: 141207 - RNA, 20 nt, Artificial Sequence
  Synthetic
agcuggcugggccccauccc

SEQ ID NO: 141208 - RNA, 19 nt, Artificial Sequence
  Synthetic
ugaaccagccuugcauccc

SEQ ID NO: 141209 - RNA, 20 nt, Artificial Sequence
  Synthetic
uugaaccagccuugcauccc

SEQ ID NO: 141210 - RNA, 24 nt, Artificial Sequence
  Synthetic
uauauugaaccagccuugcauccc

SEQ ID NO: 141211 - RNA, 22 nt, Artificial Sequence
  Synthetic
uguugaaccagccuugcauccc

SEQ ID NO: 141212 - RNA, 23 nt, Artificial Sequence
  Synthetic
auguugaaccagccuugcauccc

SEQ ID NO: 141213 - RNA, 24 nt, Artificial Sequence
  Synthetic
uauguugaaccagccuugcauccc

SEQ ID NO: 141214 - RNA, 19 nt, Artificial Sequence
  Synthetic
ugaaccagcuuugcauccc

SEQ ID NO: 141215 - RNA, 20 nt, Artificial Sequence
  Synthetic
uugaaccagcuuugcauccc

SEQ ID NO: 141216 - RNA, 22 nt, Artificial Sequence
  Synthetic
uguugaaccagcuuugcauccc

SEQ ID NO: 141217 - RNA, 23 nt, Artificial Sequence
  Synthetic
auguugaaccagcuuugcauccc

SEQ ID NO: 141218 - RNA, 24 nt, Artificial Sequence
  Synthetic
uauguugaaccagcuuugcauccc

SEQ ID NO: 141219 - RNA, 18 nt, Artificial Sequence
  Synthetic
ucaaguuggcuucauccc

SEQ ID NO: 141220 - RNA, 19 nt, Artificial Sequence
  Synthetic
aucaaguuggcuucauccc

SEQ ID NO: 141221 - RNA, 21 nt, Artificial Sequence
  Synthetic
ugaucaaguuggcuucauccc

SEQ ID NO: 141222 - RNA, 22 nt, Artificial Sequence
  Synthetic
augaucaaguuggcuucauccc

SEQ ID NO: 141223 - RNA, 23 nt, Artificial Sequence
  Synthetic
caugaucaaguuggcuucauccc

SEQ ID NO: 141224 - RNA, 19 nt, Artificial Sequence
  Synthetic
ugaaacaaccuucuauccc

SEQ ID NO: 141225 - RNA, 20 nt, Artificial Sequence
  Synthetic
uugaaacaaccuucuauccc

SEQ ID NO: 141226 - RNA, 21 nt, Artificial Sequence
  Synthetic
auugaaacaaccuucuauccc

SEQ ID NO: 141227 - RNA, 22 nt, Artificial Sequence
  Synthetic
uauugaaacaaccuucuauccc

SEQ ID NO: 141228 - RNA, 23 nt, Artificial Sequence
  Synthetic
auauugaaacaaccuucuauccc

SEQ ID NO: 141229 - RNA, 24 nt, Artificial Sequence
  Synthetic
uauauugaaacaaccuucuauccc

SEQ ID NO: 141230 - RNA, 18 nt, Artificial Sequence
  Synthetic
accuaucuugcagcuccc

SEQ ID NO: 141231 - RNA, 20 nt, Artificial Sequence
  Synthetic
ugaccuaucuugcagcuccc

SEQ ID NO: 141232 - RNA, 18 nt, Artificial Sequence
  Synthetic
ccaccccacaacaguccc

SEQ ID NO: 141233 - RNA, 19 nt, Artificial Sequence
  Synthetic
cccaccccacaacaguccc

SEQ ID NO: 141234 - RNA, 20 nt, Artificial Sequence
  Synthetic
ccccaccccacaacaguccc

SEQ ID NO: 141235 - RNA, 18 nt, Artificial Sequence
  Synthetic
ccaccccacagcaguccc

SEQ ID NO: 141236 - RNA, 19 nt, Artificial Sequence
  Synthetic
cccaccccacagcaguccc

SEQ ID NO: 141237 - RNA, 20 nt, Artificial Sequence
  Synthetic
ccccaccccacagcaguccc

SEQ ID NO: 141238 - RNA, 21 nt, Artificial Sequence
  Synthetic
cccccaccccacagcaguccc

SEQ ID NO: 141239 - RNA, 22 nt, Artificial Sequence
  Synthetic
ccccccaccccacagcaguccc

SEQ ID NO: 141240 - RNA, 23 nt, Artificial Sequence
  Synthetic
uccccccaccccacagcaguccc

SEQ ID NO: 141241 - RNA, 24 nt, Artificial Sequence
  Synthetic
uuccccccaccccacagcaguccc

SEQ ID NO: 141242 - RNA, 18 nt, Artificial Sequence
  Synthetic
ccucccucuaguaguccc

SEQ ID NO: 141243 - RNA, 19 nt, Artificial Sequence
  Synthetic
uccucccucuaguaguccc

SEQ ID NO: 141244 - RNA, 20 nt, Artificial Sequence
  Synthetic
cuccucccucuaguaguccc

SEQ ID NO: 141245 - RNA, 21 nt, Artificial Sequence
  Synthetic
ccuccucccucuaguaguccc

SEQ ID NO: 141246 - RNA, 22 nt, Artificial Sequence
  Synthetic
cccuccucccucuaguaguccc

SEQ ID NO: 141247 - RNA, 23 nt, Artificial Sequence
  Synthetic
ucccuccucccucuaguaguccc

SEQ ID NO: 141248 - RNA, 24 nt, Artificial Sequence
  Synthetic
cucccuccucccucuaguaguccc

SEQ ID NO: 141249 - RNA, 19 nt, Artificial Sequence
  Synthetic
ugcagaccaggagauuccc

SEQ ID NO: 141250 - RNA, 20 nt, Artificial Sequence
  Synthetic
augcagaccaggagauuccc

SEQ ID NO: 141251 - RNA, 21 nt, Artificial Sequence
  Synthetic
caugcagaccaggagauuccc

SEQ ID NO: 141252 - RNA, 22 nt, Artificial Sequence
  Synthetic
acaugcagaccaggagauuccc

SEQ ID NO: 141253 - RNA, 23 nt, Artificial Sequence
  Synthetic
aacaugcagaccaggagauuccc

SEQ ID NO: 141254 - RNA, 24 nt, Artificial Sequence
  Synthetic
caacaugcagaccaggagauuccc

SEQ ID NO: 141255 - RNA, 18 nt, Artificial Sequence
  Synthetic
uuaucacccacccuuccc

SEQ ID NO: 141256 - RNA, 19 nt, Artificial Sequence
  Synthetic
auuaucacccacccuuccc

SEQ ID NO: 141257 - RNA, 20 nt, Artificial Sequence
  Synthetic
uauuaucacccacccuuccc

SEQ ID NO: 141258 - RNA, 18 nt, Artificial Sequence
  Synthetic
accucccaccagguuccc

SEQ ID NO: 141259 - RNA, 19 nt, Artificial Sequence
  Synthetic
caccucccaccagguuccc

SEQ ID NO: 141260 - RNA, 20 nt, Artificial Sequence
  Synthetic
ucaccucccaccagguuccc

SEQ ID NO: 141261 - RNA, 21 nt, Artificial Sequence
  Synthetic
aucaccucccaccagguuccc

SEQ ID NO: 141262 - RNA, 22 nt, Artificial Sequence
  Synthetic
aaucaccucccaccagguuccc

SEQ ID NO: 141263 - RNA, 23 nt, Artificial Sequence
  Synthetic
caaucaccucccaccagguuccc

SEQ ID NO: 141264 - RNA, 24 nt, Artificial Sequence
  Synthetic
ccaaucaccucccaccagguuccc

SEQ ID NO: 141265 - RNA, 19 nt, Artificial Sequence
  Synthetic
uguaaaauaaauaaaagcc

SEQ ID NO: 141266 - RNA, 20 nt, Artificial Sequence
  Synthetic
uuguaaaauaaauaaaagcc

SEQ ID NO: 141267 - RNA, 21 nt, Artificial Sequence
  Synthetic
uuuguaaaauaaauaaaagcc

SEQ ID NO: 141268 - RNA, 22 nt, Artificial Sequence
  Synthetic
uuuuguaaaauaaauaaaagcc

SEQ ID NO: 141269 - RNA, 23 nt, Artificial Sequence
  Synthetic
uuuuuguaaaauaaauaaaagcc

SEQ ID NO: 141270 - RNA, 24 nt, Artificial Sequence
  Synthetic
auuuuuguaaaauaaauaaaagcc

SEQ ID NO: 141271 - RNA, 19 nt, Artificial Sequence
  Synthetic
agaaaauaaguuaaaagcc

SEQ ID NO: 141272 - RNA, 20 nt, Artificial Sequence
  Synthetic
aagaaaauaaguuaaaagcc

SEQ ID NO: 141273 - RNA, 18 nt, Artificial Sequence
  Synthetic
aguucuugaggcaaagcc

SEQ ID NO: 141274 - RNA, 19 nt, Artificial Sequence
  Synthetic
aaguucuugaggcaaagcc

SEQ ID NO: 141275 - RNA, 20 nt, Artificial Sequence
  Synthetic
aaaguucuugaggcaaagcc

SEQ ID NO: 141276 - RNA, 18 nt, Artificial Sequence
  Synthetic
aggugggcucccacagcc

SEQ ID NO: 141277 - RNA, 19 nt, Artificial Sequence
  Synthetic
aaggugggcucccacagcc

SEQ ID NO: 141278 - RNA, 20 nt, Artificial Sequence
  Synthetic
caaggugggcucccacagcc

SEQ ID NO: 141279 - RNA, 22 nt, Artificial Sequence
  Synthetic
ugcaaggugggcucccacagcc

SEQ ID NO: 141280 - RNA, 23 nt, Artificial Sequence
  Synthetic
augcaaggugggcucccacagcc

SEQ ID NO: 141281 - RNA, 18 nt, Artificial Sequence
  Synthetic
auacagugguucucagcc

SEQ ID NO: 141282 - RNA, 19 nt, Artificial Sequence
  Synthetic
aauacagugguucucagcc

SEQ ID NO: 141283 - RNA, 20 nt, Artificial Sequence
  Synthetic
uaauacagugguucucagcc

SEQ ID NO: 141284 - RNA, 21 nt, Artificial Sequence
  Synthetic
cuaauacagugguucucagcc

SEQ ID NO: 141285 - RNA, 22 nt, Artificial Sequence
  Synthetic
ucuaauacagugguucucagcc

SEQ ID NO: 141286 - RNA, 24 nt, Artificial Sequence
  Synthetic
agucuaauacagugguucucagcc

SEQ ID NO: 141287 - RNA, 21 nt, Artificial Sequence
  Synthetic
ugggaaagaaagagaagagcc

SEQ ID NO: 141288 - RNA, 18 nt, Artificial Sequence
  Synthetic
aucaagugggcagaggcc

SEQ ID NO: 141289 - RNA, 19 nt, Artificial Sequence
  Synthetic
caucaagugggcagaggcc

SEQ ID NO: 141290 - RNA, 20 nt, Artificial Sequence
  Synthetic
ucaucaagugggcagaggcc

SEQ ID NO: 141291 - RNA, 22 nt, Artificial Sequence
  Synthetic
ugucaucaagugggcagaggcc

SEQ ID NO: 141292 - RNA, 23 nt, Artificial Sequence
  Synthetic
cugucaucaagugggcagaggcc

SEQ ID NO: 141293 - RNA, 20 nt, Artificial Sequence
  Synthetic
ugggaggaucacuagaggcc

SEQ ID NO: 141294 - RNA, 19 nt, Artificial Sequence
  Synthetic
aggcggaucaccugaggcc

SEQ ID NO: 141295 - RNA, 20 nt, Artificial Sequence
  Synthetic
caggcggaucaccugaggcc

SEQ ID NO: 141296 - RNA, 23 nt, Artificial Sequence
  Synthetic
aggcaggcggaucaccugaggcc

SEQ ID NO: 141297 - RNA, 24 nt, Artificial Sequence
  Synthetic
aaggcaggcggaucaccugaggcc

SEQ ID NO: 141298 - RNA, 20 nt, Artificial Sequence
  Synthetic
ugggcagaucacuugaggcc

SEQ ID NO: 141299 - RNA, 23 nt, Artificial Sequence
  Synthetic
aggugggcagaucacuugaggcc

SEQ ID NO: 141300 - RNA, 20 nt, Artificial Sequence
  Synthetic
uggguggaucacuugaggcc

SEQ ID NO: 141301 - RNA, 21 nt, Artificial Sequence
  Synthetic
auggguggaucacuugaggcc

SEQ ID NO: 141302 - RNA, 22 nt, Artificial Sequence
  Synthetic
aauggguggaucacuugaggcc

SEQ ID NO: 141303 - RNA, 23 nt, Artificial Sequence
  Synthetic
aaauggguggaucacuugaggcc

SEQ ID NO: 141304 - RNA, 18 nt, Artificial Sequence
  Synthetic
agaggauugcuugaggcc

SEQ ID NO: 141305 - RNA, 19 nt, Artificial Sequence
  Synthetic
aagaggauugcuugaggcc

SEQ ID NO: 141306 - RNA, 20 nt, Artificial Sequence
  Synthetic
caagaggauugcuugaggcc

SEQ ID NO: 141307 - RNA, 23 nt, Artificial Sequence
  Synthetic
aggcaagaggauugcuugaggcc

SEQ ID NO: 141308 - RNA, 24 nt, Artificial Sequence
  Synthetic
aaggcaagaggauugcuugaggcc

SEQ ID NO: 141309 - RNA, 20 nt, Artificial Sequence
  Synthetic
ugggaggauuguuugaggcc

SEQ ID NO: 141310 - RNA, 23 nt, Artificial Sequence
  Synthetic
aggugggaggauuguuugaggcc

SEQ ID NO: 141311 - RNA, 24 nt, Artificial Sequence
  Synthetic
aaggugggaggauuguuugaggcc

SEQ ID NO: 141312 - RNA, 19 nt, Artificial Sequence
  Synthetic
ugagccaccgcgcccggcc

SEQ ID NO: 141313 - RNA, 21 nt, Artificial Sequence
  Synthetic
cgugagccaccgcgcccggcc

SEQ ID NO: 141314 - RNA, 24 nt, Artificial Sequence
  Synthetic
aggcgugagccaccgcgcccggcc

SEQ ID NO: 141315 - RNA, 19 nt, Artificial Sequence
  Synthetic
ugccuacgccaccagggcc

SEQ ID NO: 141316 - RNA, 23 nt, Artificial Sequence
  Synthetic
cgggugccuacgccaccagggcc

SEQ ID NO: 141317 - RNA, 24 nt, Artificial Sequence
  Synthetic
ucgggugccuacgccaccagggcc

SEQ ID NO: 141318 - RNA, 18 nt, Artificial Sequence
  Synthetic
uauccaggaacuagggcc

SEQ ID NO: 141319 - RNA, 19 nt, Artificial Sequence
  Synthetic
cuauccaggaacuagggcc

SEQ ID NO: 141320 - RNA, 21 nt, Artificial Sequence
  Synthetic
ugcuauccaggaacuagggcc

SEQ ID NO: 141321 - RNA, 22 nt, Artificial Sequence
  Synthetic
augcuauccaggaacuagggcc

SEQ ID NO: 141322 - RNA, 23 nt, Artificial Sequence
  Synthetic
aaugcuauccaggaacuagggcc

SEQ ID NO: 141323 - RNA, 24 nt, Artificial Sequence
  Synthetic
aaaugcuauccaggaacuagggcc

SEQ ID NO: 141324 - RNA, 18 nt, Artificial Sequence
  Synthetic
uacaugugguguugggcc

SEQ ID NO: 141325 - RNA, 19 nt, Artificial Sequence
  Synthetic
uuacaugugguguugggcc

SEQ ID NO: 141326 - RNA, 20 nt, Artificial Sequence
  Synthetic
cuuacaugugguguugggcc

SEQ ID NO: 141327 - RNA, 23 nt, Artificial Sequence
  Synthetic
uggcuuacaugugguguugggcc

SEQ ID NO: 141328 - RNA, 19 nt, Artificial Sequence
  Synthetic
ugagccaccgcaccuggcc

SEQ ID NO: 141329 - RNA, 21 nt, Artificial Sequence
  Synthetic
cgugagccaccgcaccuggcc

SEQ ID NO: 141330 - RNA, 24 nt, Artificial Sequence
  Synthetic
aggcgugagccaccgcaccuggcc

SEQ ID NO: 141331 - RNA, 19 nt, Artificial Sequence
  Synthetic
ugagccacugcgccuggcc

SEQ ID NO: 141332 - RNA, 20 nt, Artificial Sequence
  Synthetic
augagccacugcgccuggcc

SEQ ID NO: 141333 - RNA, 21 nt, Artificial Sequence
  Synthetic
caugagccacugcgccuggcc

SEQ ID NO: 141334 - RNA, 24 nt, Artificial Sequence
  Synthetic
aggcaugagccacugcgccuggcc

SEQ ID NO: 141335 - RNA, 19 nt, Artificial Sequence
  Synthetic
agcagauucccuuuuggcc

SEQ ID NO: 141336 - RNA, 20 nt, Artificial Sequence
  Synthetic
uagcagauucccuuuuggcc

SEQ ID NO: 141337 - RNA, 23 nt, Artificial Sequence
  Synthetic
agguagcagauucccuuuuggcc

SEQ ID NO: 141338 - RNA, 24 nt, Artificial Sequence
  Synthetic
aagguagcagauucccuuuuggcc

SEQ ID NO: 141339 - RNA, 18 nt, Artificial Sequence
  Synthetic
cugauuccaauacaugcc

SEQ ID NO: 141340 - RNA, 20 nt, Artificial Sequence
  Synthetic
agcugauuccaauacaugcc

SEQ ID NO: 141341 - RNA, 21 nt, Artificial Sequence
  Synthetic
uagcugauuccaauacaugcc

SEQ ID NO: 141342 - RNA, 22 nt, Artificial Sequence
  Synthetic
cuagcugauuccaauacaugcc

SEQ ID NO: 141343 - RNA, 24 nt, Artificial Sequence
  Synthetic
ugcuagcugauuccaauacaugcc

SEQ ID NO: 141344 - RNA, 19 nt, Artificial Sequence
  Synthetic
aggcgugguggugcaugcc

SEQ ID NO: 141345 - RNA, 20 nt, Artificial Sequence
  Synthetic
caggcgugguggugcaugcc

SEQ ID NO: 141346 - RNA, 21 nt, Artificial Sequence
  Synthetic
ccaggcgugguggugcaugcc

SEQ ID NO: 141347 - RNA, 23 nt, Artificial Sequence
  Synthetic
agccaggcgugguggugcaugcc

SEQ ID NO: 141348 - RNA, 24 nt, Artificial Sequence
  Synthetic
uagccaggcgugguggugcaugcc

SEQ ID NO: 141349 - RNA, 18 nt, Artificial Sequence
  Synthetic
agguuugcaaccucugcc

SEQ ID NO: 141350 - RNA, 20 nt, Artificial Sequence
  Synthetic
ugagguuugcaaccucugcc

SEQ ID NO: 141351 - RNA, 18 nt, Artificial Sequence
  Synthetic
cacuguacucccagugcc

SEQ ID NO: 141352 - RNA, 19 nt, Artificial Sequence
  Synthetic
ccacuguacucccagugcc

SEQ ID NO: 141353 - RNA, 20 nt, Artificial Sequence
  Synthetic
accacuguacucccagugcc

SEQ ID NO: 141354 - RNA, 18 nt, Artificial Sequence
  Synthetic
uuuccugguaccauugcc

SEQ ID NO: 141355 - RNA, 19 nt, Artificial Sequence
  Synthetic
uuuuccugguaccauugcc

SEQ ID NO: 141356 - RNA, 20 nt, Artificial Sequence
  Synthetic
uuuuuccugguaccauugcc

SEQ ID NO: 141357 - RNA, 18 nt, Artificial Sequence
  Synthetic
aguuugagaagcauugcc

SEQ ID NO: 141358 - RNA, 19 nt, Artificial Sequence
  Synthetic
aaguuugagaagcauugcc

SEQ ID NO: 141359 - RNA, 20 nt, Artificial Sequence
  Synthetic
aaaguuugagaagcauugcc

SEQ ID NO: 141360 - RNA, 21 nt, Artificial Sequence
  Synthetic
uaaaguuugagaagcauugcc

SEQ ID NO: 141361 - RNA, 22 nt, Artificial Sequence
  Synthetic
uuaaaguuugagaagcauugcc

SEQ ID NO: 141362 - RNA, 23 nt, Artificial Sequence
  Synthetic
auuaaaguuugagaagcauugcc

SEQ ID NO: 141363 - RNA, 24 nt, Artificial Sequence
  Synthetic
cauuaaaguuugagaagcauugcc

SEQ ID NO: 141364 - RNA, 20 nt, Artificial Sequence
  Synthetic
uggagucuuucucuguugcc

SEQ ID NO: 141365 - RNA, 21 nt, Artificial Sequence
  Synthetic
auggagucuuucucuguugcc

SEQ ID NO: 141366 - RNA, 23 nt, Artificial Sequence
  Synthetic
agauggagucuuucucuguugcc

SEQ ID NO: 141367 - RNA, 18 nt, Artificial Sequence
  Synthetic
caacaacaacaaaaaucc

SEQ ID NO: 141368 - RNA, 19 nt, Artificial Sequence
  Synthetic
acaacaacaacaaaaaucc

SEQ ID NO: 141369 - RNA, 20 nt, Artificial Sequence
  Synthetic
aacaacaacaacaaaaaucc

SEQ ID NO: 141370 - RNA, 21 nt, Artificial Sequence
  Synthetic
caacaacaacaacaaaaaucc

SEQ ID NO: 141371 - RNA, 22 nt, Artificial Sequence
  Synthetic
acaacaacaacaacaaaaaucc

SEQ ID NO: 141372 - RNA, 23 nt, Artificial Sequence
  Synthetic
aacaacaacaacaacaaaaaucc

SEQ ID NO: 141373 - RNA, 24 nt, Artificial Sequence
  Synthetic
caacaacaacaacaacaaaaaucc

SEQ ID NO: 141374 - RNA, 18 nt, Artificial Sequence
  Synthetic
uucaagcuauaagaaucc

SEQ ID NO: 141375 - RNA, 19 nt, Artificial Sequence
  Synthetic
cuucaagcuauaagaaucc

SEQ ID NO: 141376 - RNA, 20 nt, Artificial Sequence
  Synthetic
acuucaagcuauaagaaucc

SEQ ID NO: 141377 - RNA, 22 nt, Artificial Sequence
  Synthetic
agacuucaagcuauaagaaucc

SEQ ID NO: 141378 - RNA, 23 nt, Artificial Sequence
  Synthetic
aagacuucaagcuauaagaaucc

SEQ ID NO: 141379 - RNA, 24 nt, Artificial Sequence
  Synthetic
uaagacuucaagcuauaagaaucc

SEQ ID NO: 141380 - RNA, 18 nt, Artificial Sequence
  Synthetic
caggaagaaaucgaaucc

SEQ ID NO: 141381 - RNA, 19 nt, Artificial Sequence
  Synthetic
ccaggaagaaaucgaaucc

SEQ ID NO: 141382 - RNA, 20 nt, Artificial Sequence
  Synthetic
accaggaagaaaucgaaucc

SEQ ID NO: 141383 - RNA, 21 nt, Artificial Sequence
  Synthetic
aaccaggaagaaaucgaaucc

SEQ ID NO: 141384 - RNA, 22 nt, Artificial Sequence
  Synthetic
aaaccaggaagaaaucgaaucc

SEQ ID NO: 141385 - RNA, 23 nt, Artificial Sequence
  Synthetic
uaaaccaggaagaaaucgaaucc

SEQ ID NO: 141386 - RNA, 24 nt, Artificial Sequence
  Synthetic
cuaaaccaggaagaaaucgaaucc

SEQ ID NO: 141387 - RNA, 18 nt, Artificial Sequence
  Synthetic
agagcagaccaauaaucc

SEQ ID NO: 141388 - RNA, 19 nt, Artificial Sequence
  Synthetic
aagagcagaccaauaaucc

SEQ ID NO: 141389 - RNA, 20 nt, Artificial Sequence
  Synthetic
aaagagcagaccaauaaucc

SEQ ID NO: 141390 - RNA, 18 nt, Artificial Sequence
  Synthetic
acuucugccuggacaucc

SEQ ID NO: 141391 - RNA, 20 nt, Artificial Sequence
  Synthetic
agacuucugccuggacaucc

SEQ ID NO: 141392 - RNA, 21 nt, Artificial Sequence
  Synthetic
cagacuucugccuggacaucc

SEQ ID NO: 141393 - RNA, 23 nt, Artificial Sequence
  Synthetic
agcagacuucugccuggacaucc

SEQ ID NO: 141394 - RNA, 24 nt, Artificial Sequence
  Synthetic
cagcagacuucugccuggacaucc

SEQ ID NO: 141395 - RNA, 22 nt, Artificial Sequence
  Synthetic
agcccacaguggugagccaucc

SEQ ID NO: 141396 - RNA, 24 nt, Artificial Sequence
  Synthetic
agagcccacaguggugagccaucc

SEQ ID NO: 141397 - RNA, 18 nt, Artificial Sequence
  Synthetic
auuuuuuuuuuaagaucc

SEQ ID NO: 141398 - RNA, 19 nt, Artificial Sequence
  Synthetic
uauuuuuuuuuuaagaucc

SEQ ID NO: 141399 - RNA, 18 nt, Artificial Sequence
  Synthetic
uuuucaaacauuuuaucc

SEQ ID NO: 141400 - RNA, 19 nt, Artificial Sequence
  Synthetic
uuuuucaaacauuuuaucc

SEQ ID NO: 141401 - RNA, 20 nt, Artificial Sequence
  Synthetic
auuuuucaaacauuuuaucc

SEQ ID NO: 141402 - RNA, 20 nt, Artificial Sequence
  Synthetic
uggggcuggucucaaacucc

SEQ ID NO: 141403 - RNA, 21 nt, Artificial Sequence
  Synthetic
cuggggcuggucucaaacucc

SEQ ID NO: 141404 - RNA, 23 nt, Artificial Sequence
  Synthetic
ugcuggggcuggucucaaacucc

SEQ ID NO: 141405 - RNA, 24 nt, Artificial Sequence
  Synthetic
uugcuggggcuggucucaaacucc

SEQ ID NO: 141406 - RNA, 18 nt, Artificial Sequence
  Synthetic
aggcuggucuugaacucc

SEQ ID NO: 141407 - RNA, 19 nt, Artificial Sequence
  Synthetic
caggcuggucuugaacucc

SEQ ID NO: 141408 - RNA, 20 nt, Artificial Sequence
  Synthetic
ccaggcuggucuugaacucc

SEQ ID NO: 141409 - RNA, 21 nt, Artificial Sequence
  Synthetic
cccaggcuggucuugaacucc

SEQ ID NO: 141410 - RNA, 23 nt, Artificial Sequence
  Synthetic
ugcccaggcuggucuugaacucc

SEQ ID NO: 141411 - RNA, 24 nt, Artificial Sequence
  Synthetic
uugcccaggcuggucuugaacucc

SEQ ID NO: 141412 - RNA, 21 nt, Artificial Sequence
  Synthetic
aaaaauguaauaauauacucc

SEQ ID NO: 141413 - RNA, 23 nt, Artificial Sequence
  Synthetic
agaaaaauguaauaauauacucc

SEQ ID NO: 141414 - RNA, 24 nt, Artificial Sequence
  Synthetic
aagaaaaauguaauaauauacucc

SEQ ID NO: 141415 - RNA, 18 nt, Artificial Sequence
  Synthetic
agucccacaguguacucc

SEQ ID NO: 141416 - RNA, 19 nt, Artificial Sequence
  Synthetic
aagucccacaguguacucc

SEQ ID NO: 141417 - RNA, 20 nt, Artificial Sequence
  Synthetic
caagucccacaguguacucc

SEQ ID NO: 141418 - RNA, 21 nt, Artificial Sequence
  Synthetic
ccaagucccacaguguacucc

SEQ ID NO: 141419 - RNA, 24 nt, Artificial Sequence
  Synthetic
aggccaagucccacaguguacucc

SEQ ID NO: 141420 - RNA, 19 nt, Artificial Sequence
  Synthetic
uggagcuuccaugcccucc

SEQ ID NO: 141421 - RNA, 20 nt, Artificial Sequence
  Synthetic
auggagcuuccaugcccucc

SEQ ID NO: 141422 - RNA, 21 nt, Artificial Sequence
  Synthetic
cauggagcuuccaugcccucc

SEQ ID NO: 141423 - RNA, 18 nt, Artificial Sequence
  Synthetic
cugcccgccucggccucc

SEQ ID NO: 141424 - RNA, 19 nt, Artificial Sequence
  Synthetic
ucugcccgccucggccucc

SEQ ID NO: 141425 - RNA, 20 nt, Artificial Sequence
  Synthetic
aucugcccgccucggccucc

SEQ ID NO: 141426 - RNA, 22 nt, Artificial Sequence
  Synthetic
ugaucugcccgccucggccucc

SEQ ID NO: 141427 - RNA, 23 nt, Artificial Sequence
  Synthetic
augaucugcccgccucggccucc

SEQ ID NO: 141428 - RNA, 24 nt, Artificial Sequence
  Synthetic
caugaucugcccgccucggccucc

SEQ ID NO: 141429 - RNA, 18 nt, Artificial Sequence
  Synthetic
ugagauggggaaggcucc

SEQ ID NO: 141430 - RNA, 19 nt, Artificial Sequence
  Synthetic
cugagauggggaaggcucc

SEQ ID NO: 141431 - RNA, 20 nt, Artificial Sequence
  Synthetic
acugagauggggaaggcucc

SEQ ID NO: 141432 - RNA, 21 nt, Artificial Sequence
  Synthetic
uacugagauggggaaggcucc

SEQ ID NO: 141433 - RNA, 22 nt, Artificial Sequence
  Synthetic
uuacugagauggggaaggcucc

SEQ ID NO: 141434 - RNA, 23 nt, Artificial Sequence
  Synthetic
uuuacugagauggggaaggcucc

SEQ ID NO: 141435 - RNA, 24 nt, Artificial Sequence
  Synthetic
auuuacugagauggggaaggcucc

SEQ ID NO: 141436 - RNA, 18 nt, Artificial Sequence
  Synthetic
uaaaauauaaaaaucucc

SEQ ID NO: 141437 - RNA, 19 nt, Artificial Sequence
  Synthetic
uuaaaauauaaaaaucucc

SEQ ID NO: 141438 - RNA, 20 nt, Artificial Sequence
  Synthetic
uuuaaaauauaaaaaucucc

SEQ ID NO: 141439 - RNA, 18 nt, Artificial Sequence
  Synthetic
uccuuuuauucugucucc

SEQ ID NO: 141440 - RNA, 19 nt, Artificial Sequence
  Synthetic
auccuuuuauucugucucc

SEQ ID NO: 141441 - RNA, 20 nt, Artificial Sequence
  Synthetic
cauccuuuuauucugucucc

SEQ ID NO: 141442 - RNA, 21 nt, Artificial Sequence
  Synthetic
ccauccuuuuauucugucucc

SEQ ID NO: 141443 - RNA, 22 nt, Artificial Sequence
  Synthetic
accauccuuuuauucugucucc

SEQ ID NO: 141444 - RNA, 23 nt, Artificial Sequence
  Synthetic
aaccauccuuuuauucugucucc

SEQ ID NO: 141445 - RNA, 24 nt, Artificial Sequence
  Synthetic
uaaccauccuuuuauucugucucc

SEQ ID NO: 141446 - RNA, 18 nt, Artificial Sequence
  Synthetic
auagcuaacagcuucucc

SEQ ID NO: 141447 - RNA, 19 nt, Artificial Sequence
  Synthetic
aauagcuaacagcuucucc

SEQ ID NO: 141448 - RNA, 18 nt, Artificial Sequence
  Synthetic
cuuggacucccaaagucc

SEQ ID NO: 141449 - RNA, 19 nt, Artificial Sequence
  Synthetic
ccuuggacucccaaagucc

SEQ ID NO: 141450 - RNA, 20 nt, Artificial Sequence
  Synthetic
accuuggacucccaaagucc

SEQ ID NO: 141451 - RNA, 21 nt, Artificial Sequence
  Synthetic
caccuuggacucccaaagucc

SEQ ID NO: 141452 - RNA, 22 nt, Artificial Sequence
  Synthetic
ccaccuuggacucccaaagucc

SEQ ID NO: 141453 - RNA, 23 nt, Artificial Sequence
  Synthetic
cccaccuuggacucccaaagucc

SEQ ID NO: 141454 - RNA, 18 nt, Artificial Sequence
  Synthetic
cucggccucccaaagucc

SEQ ID NO: 141455 - RNA, 19 nt, Artificial Sequence
  Synthetic
ccucggccucccaaagucc

SEQ ID NO: 141456 - RNA, 21 nt, Artificial Sequence
  Synthetic
ugccucggccucccaaagucc

SEQ ID NO: 141457 - RNA, 22 nt, Artificial Sequence
  Synthetic
cugccucggccucccaaagucc

SEQ ID NO: 141458 - RNA, 18 nt, Artificial Sequence
  Synthetic
cuuggccucccaaagucc

SEQ ID NO: 141459 - RNA, 19 nt, Artificial Sequence
  Synthetic
ccuuggccucccaaagucc

SEQ ID NO: 141460 - RNA, 21 nt, Artificial Sequence
  Synthetic
cgccuuggccucccaaagucc

SEQ ID NO: 141461 - RNA, 22 nt, Artificial Sequence
  Synthetic
ccgccuuggccucccaaagucc

SEQ ID NO: 141462 - RNA, 23 nt, Artificial Sequence
  Synthetic
cccgccuuggccucccaaagucc

SEQ ID NO: 141463 - RNA, 18 nt, Artificial Sequence
  Synthetic
acauccauucugcagucc

SEQ ID NO: 141464 - RNA, 19 nt, Artificial Sequence
  Synthetic
aacauccauucugcagucc

SEQ ID NO: 141465 - RNA, 20 nt, Artificial Sequence
  Synthetic
caacauccauucugcagucc

SEQ ID NO: 141466 - RNA, 21 nt, Artificial Sequence
  Synthetic
acaacauccauucugcagucc

SEQ ID NO: 141467 - RNA, 22 nt, Artificial Sequence
  Synthetic
cacaacauccauucugcagucc

SEQ ID NO: 141468 - RNA, 23 nt, Artificial Sequence
  Synthetic
acacaacauccauucugcagucc

SEQ ID NO: 141469 - RNA, 24 nt, Artificial Sequence
  Synthetic
aacacaacauccauucugcagucc

SEQ ID NO: 141470 - RNA, 20 nt, Artificial Sequence
  Synthetic
ugggcagaucacuggagucc

SEQ ID NO: 141471 - RNA, 21 nt, Artificial Sequence
  Synthetic
augggcagaucacuggagucc

SEQ ID NO: 141472 - RNA, 19 nt, Artificial Sequence
  Synthetic
aggcagaucacuugagucc

SEQ ID NO: 141473 - RNA, 20 nt, Artificial Sequence
  Synthetic
caggcagaucacuugagucc

SEQ ID NO: 141474 - RNA, 23 nt, Artificial Sequence
  Synthetic
aggcaggcagaucacuugagucc

SEQ ID NO: 141475 - RNA, 18 nt, Artificial Sequence
  Synthetic
ugugagccacaugcgucc

SEQ ID NO: 141476 - RNA, 19 nt, Artificial Sequence
  Synthetic
cugugagccacaugcgucc

SEQ ID NO: 141477 - RNA, 20 nt, Artificial Sequence
  Synthetic
ccugugagccacaugcgucc

SEQ ID NO: 141478 - RNA, 23 nt, Artificial Sequence
  Synthetic
uggccugugagccacaugcgucc

SEQ ID NO: 141479 - RNA, 24 nt, Artificial Sequence
  Synthetic
auggccugugagccacaugcgucc

SEQ ID NO: 141480 - RNA, 19 nt, Artificial Sequence
  Synthetic
uguggcuuuaccaaggucc

SEQ ID NO: 141481 - RNA, 20 nt, Artificial Sequence
  Synthetic
auguggcuuuaccaaggucc

SEQ ID NO: 141482 - RNA, 18 nt, Artificial Sequence
  Synthetic
agaauggcuuucaggucc

SEQ ID NO: 141483 - RNA, 19 nt, Artificial Sequence
  Synthetic
aagaauggcuuucaggucc

SEQ ID NO: 141484 - RNA, 20 nt, Artificial Sequence
  Synthetic
aaagaauggcuuucaggucc

SEQ ID NO: 141485 - RNA, 21 nt, Artificial Sequence
  Synthetic
aaaagaauggcuuucaggucc

SEQ ID NO: 141486 - RNA, 23 nt, Artificial Sequence
  Synthetic
ugaaaagaauggcuuucaggucc

SEQ ID NO: 141487 - RNA, 24 nt, Artificial Sequence
  Synthetic
uugaaaagaauggcuuucaggucc

SEQ ID NO: 141488 - RNA, 19 nt, Artificial Sequence
  Synthetic
aguucucaaagggaggucc

SEQ ID NO: 141489 - RNA, 20 nt, Artificial Sequence
  Synthetic
uaguucucaaagggaggucc

SEQ ID NO: 141490 - RNA, 22 nt, Artificial Sequence
  Synthetic
aguaguucucaaagggaggucc

SEQ ID NO: 141491 - RNA, 23 nt, Artificial Sequence
  Synthetic
uaguaguucucaaagggaggucc

SEQ ID NO: 141492 - RNA, 18 nt, Artificial Sequence
  Synthetic
cuucuacucucuaugucc

SEQ ID NO: 141493 - RNA, 19 nt, Artificial Sequence
  Synthetic
ccuucuacucucuaugucc

SEQ ID NO: 141494 - RNA, 20 nt, Artificial Sequence
  Synthetic
uccuucuacucucuaugucc

SEQ ID NO: 141495 - RNA, 21 nt, Artificial Sequence
  Synthetic
auccuucuacucucuaugucc

SEQ ID NO: 141496 - RNA, 22 nt, Artificial Sequence
  Synthetic
cauccuucuacucucuaugucc

SEQ ID NO: 141497 - RNA, 23 nt, Artificial Sequence
  Synthetic
ccauccuucuacucucuaugucc

SEQ ID NO: 141498 - RNA, 24 nt, Artificial Sequence
  Synthetic
accauccuucuacucucuaugucc

SEQ ID NO: 141499 - RNA, 18 nt, Artificial Sequence
  Synthetic
uuucuacucucuaugucc

SEQ ID NO: 141500 - RNA, 19 nt, Artificial Sequence
  Synthetic
cuuucuacucucuaugucc

SEQ ID NO: 141501 - RNA, 20 nt, Artificial Sequence
  Synthetic
ccuuucuacucucuaugucc

SEQ ID NO: 141502 - RNA, 21 nt, Artificial Sequence
  Synthetic
accuuucuacucucuaugucc

SEQ ID NO: 141503 - RNA, 22 nt, Artificial Sequence
  Synthetic
uaccuuucuacucucuaugucc

SEQ ID NO: 141504 - RNA, 23 nt, Artificial Sequence
  Synthetic
cuaccuuucuacucucuaugucc

SEQ ID NO: 141505 - RNA, 24 nt, Artificial Sequence
  Synthetic
acuaccuuucuacucucuaugucc

SEQ ID NO: 141506 - RNA, 18 nt, Artificial Sequence
  Synthetic
uuaacgccuaagcugucc

SEQ ID NO: 141507 - RNA, 20 nt, Artificial Sequence
  Synthetic
uguuaacgccuaagcugucc

SEQ ID NO: 141508 - RNA, 21 nt, Artificial Sequence
  Synthetic
cuguuaacgccuaagcugucc

SEQ ID NO: 141509 - RNA, 23 nt, Artificial Sequence
  Synthetic
agcuguuaacgccuaagcugucc

SEQ ID NO: 141510 - RNA, 19 nt, Artificial Sequence
  Synthetic
ugggaggguguaugugucc

SEQ ID NO: 141511 - RNA, 20 nt, Artificial Sequence
  Synthetic
uugggaggguguaugugucc

SEQ ID NO: 141512 - RNA, 21 nt, Artificial Sequence
  Synthetic
cuugggaggguguaugugucc

SEQ ID NO: 141513 - RNA, 22 nt, Artificial Sequence
  Synthetic
ucuugggaggguguaugugucc

SEQ ID NO: 141514 - RNA, 24 nt, Artificial Sequence
  Synthetic
agucuugggaggguguaugugucc

SEQ ID NO: 141515 - RNA, 19 nt, Artificial Sequence
  Synthetic
ugaaccauuuuugcauucc

SEQ ID NO: 141516 - RNA, 20 nt, Artificial Sequence
  Synthetic
uugaaccauuuuugcauucc

SEQ ID NO: 141517 - RNA, 21 nt, Artificial Sequence
  Synthetic
auugaaccauuuuugcauucc

SEQ ID NO: 141518 - RNA, 22 nt, Artificial Sequence
  Synthetic
aauugaaccauuuuugcauucc

SEQ ID NO: 141519 - RNA, 23 nt, Artificial Sequence
  Synthetic
aaauugaaccauuuuugcauucc

SEQ ID NO: 141520 - RNA, 24 nt, Artificial Sequence
  Synthetic
uaaauugaaccauuuuugcauucc

SEQ ID NO: 141521 - RNA, 18 nt, Artificial Sequence
  Synthetic
uuugcaaacauuuauucc

SEQ ID NO: 141522 - RNA, 19 nt, Artificial Sequence
  Synthetic
cuuugcaaacauuuauucc

SEQ ID NO: 141523 - RNA, 21 nt, Artificial Sequence
  Synthetic
ugcuuugcaaacauuuauucc

SEQ ID NO: 141524 - RNA, 22 nt, Artificial Sequence
  Synthetic
augcuuugcaaacauuuauucc

SEQ ID NO: 141525 - RNA, 23 nt, Artificial Sequence
  Synthetic
uaugcuuugcaaacauuuauucc

SEQ ID NO: 141526 - RNA, 24 nt, Artificial Sequence
  Synthetic
uuaugcuuugcaaacauuuauucc

SEQ ID NO: 141527 - RNA, 18 nt, Artificial Sequence
  Synthetic
uucauaauuaaaacuucc

SEQ ID NO: 141528 - RNA, 19 nt, Artificial Sequence
  Synthetic
uuucauaauuaaaacuucc

SEQ ID NO: 141529 - RNA, 20 nt, Artificial Sequence
  Synthetic
uuuucauaauuaaaacuucc

SEQ ID NO: 141530 - RNA, 18 nt, Artificial Sequence
  Synthetic
uauguguuaggcacuucc

SEQ ID NO: 141531 - RNA, 19 nt, Artificial Sequence
  Synthetic
cuauguguuaggcacuucc

SEQ ID NO: 141532 - RNA, 20 nt, Artificial Sequence
  Synthetic
acuauguguuaggcacuucc

SEQ ID NO: 141533 - RNA, 21 nt, Artificial Sequence
  Synthetic
uacuauguguuaggcacuucc

SEQ ID NO: 141534 - RNA, 22 nt, Artificial Sequence
  Synthetic
uuacuauguguuaggcacuucc

SEQ ID NO: 141535 - RNA, 23 nt, Artificial Sequence
  Synthetic
cuuacuauguguuaggcacuucc

SEQ ID NO: 141536 - RNA, 24 nt, Artificial Sequence
  Synthetic
acuuacuauguguuaggcacuucc

SEQ ID NO: 141537 - RNA, 18 nt, Artificial Sequence
  Synthetic
acugcaaccuccgcuucc

SEQ ID NO: 141538 - RNA, 19 nt, Artificial Sequence
  Synthetic
cacugcaaccuccgcuucc

SEQ ID NO: 141539 - RNA, 20 nt, Artificial Sequence
  Synthetic
ucacugcaaccuccgcuucc

SEQ ID NO: 141540 - RNA, 21 nt, Artificial Sequence
  Synthetic
cucacugcaaccuccgcuucc

SEQ ID NO: 141541 - RNA, 24 nt, Artificial Sequence
  Synthetic
cggcucacugcaaccuccgcuucc

SEQ ID NO: 141542 - RNA, 18 nt, Artificial Sequence
  Synthetic
caugccauuccgucuucc

SEQ ID NO: 141543 - RNA, 19 nt, Artificial Sequence
  Synthetic
acaugccauuccgucuucc

SEQ ID NO: 141544 - RNA, 20 nt, Artificial Sequence
  Synthetic
uacaugccauuccgucuucc

SEQ ID NO: 141545 - RNA, 21 nt, Artificial Sequence
  Synthetic
uauaauguaauaaugucuucc

SEQ ID NO: 141546 - RNA, 22 nt, Artificial Sequence
  Synthetic
cuauaauguaauaaugucuucc

SEQ ID NO: 141547 - RNA, 23 nt, Artificial Sequence
  Synthetic
ucuauaauguaauaaugucuucc

SEQ ID NO: 141548 - RNA, 24 nt, Artificial Sequence
  Synthetic
cucuauaauguaauaaugucuucc

SEQ ID NO: 141549 - RNA, 18 nt, Artificial Sequence
  Synthetic
ccaccccacaacaguucc

SEQ ID NO: 141550 - RNA, 19 nt, Artificial Sequence
  Synthetic
cccaccccacaacaguucc

SEQ ID NO: 141551 - RNA, 20 nt, Artificial Sequence
  Synthetic
ccccaccccacaacaguucc

SEQ ID NO: 141552 - RNA, 21 nt, Artificial Sequence
  Synthetic
cccccaccccacaacaguucc

SEQ ID NO: 141553 - RNA, 22 nt, Artificial Sequence
  Synthetic
ccccccaccccacaacaguucc

SEQ ID NO: 141554 - RNA, 23 nt, Artificial Sequence
  Synthetic
uccccccaccccacaacaguucc

SEQ ID NO: 141555 - RNA, 24 nt, Artificial Sequence
  Synthetic
cuccccccaccccacaacaguucc

SEQ ID NO: 141556 - RNA, 18 nt, Artificial Sequence
  Synthetic
ucauguuaucacauuucc

SEQ ID NO: 141557 - RNA, 19 nt, Artificial Sequence
  Synthetic
aucauguuaucacauuucc

SEQ ID NO: 141558 - RNA, 20 nt, Artificial Sequence
  Synthetic
uaucauguuaucacauuucc

SEQ ID NO: 141559 - RNA, 19 nt, Artificial Sequence
  Synthetic
aggaggguuguguguuucc

SEQ ID NO: 141560 - RNA, 20 nt, Artificial Sequence
  Synthetic
uaggaggguuguguguuucc

SEQ ID NO: 141561 - RNA, 21 nt, Artificial Sequence
  Synthetic
cuaggaggguuguguguuucc

SEQ ID NO: 141562 - RNA, 22 nt, Artificial Sequence
  Synthetic
acuaggaggguuguguguuucc

SEQ ID NO: 141563 - RNA, 23 nt, Artificial Sequence
  Synthetic
aacuaggaggguuguguguuucc

SEQ ID NO: 141564 - RNA, 24 nt, Artificial Sequence
  Synthetic
aaacuaggaggguuguguguuucc

SEQ ID NO: 141565 - RNA, 18 nt, Artificial Sequence
  Synthetic
aaaauuauauuuguuucc

SEQ ID NO: 141566 - RNA, 19 nt, Artificial Sequence
  Synthetic
aaaaauuauauuuguuucc

SEQ ID NO: 141567 - RNA, 20 nt, Artificial Sequence
  Synthetic
caaaaauuauauuuguuucc

SEQ ID NO: 141568 - RNA, 20 nt, Artificial Sequence
  Synthetic
uggguucucuagucuuuucc

SEQ ID NO: 141569 - RNA, 21 nt, Artificial Sequence
  Synthetic
uuggguucucuagucuuuucc

SEQ ID NO: 141570 - RNA, 22 nt, Artificial Sequence
  Synthetic
uuuggguucucuagucuuuucc

SEQ ID NO: 141571 - RNA, 23 nt, Artificial Sequence
  Synthetic
uuuuggguucucuagucuuuucc

SEQ ID NO: 141572 - RNA, 24 nt, Artificial Sequence
  Synthetic
uuuuuggguucucuagucuuuucc

SEQ ID NO: 141573 - RNA, 18 nt, Artificial Sequence
  Synthetic
acagaguuaaauuuuucc

SEQ ID NO: 141574 - RNA, 19 nt, Artificial Sequence
  Synthetic
aacagaguuaaauuuuucc

SEQ ID NO: 141575 - RNA, 20 nt, Artificial Sequence
  Synthetic
uaacagaguuaaauuuuucc

SEQ ID NO: 141576 - RNA, 18 nt, Artificial Sequence
  Synthetic
uggaaagaaaaaaaaagc

SEQ ID NO: 141577 - RNA, 19 nt, Artificial Sequence
  Synthetic
auggaaagaaaaaaaaagc

SEQ ID NO: 141578 - RNA, 20 nt, Artificial Sequence
  Synthetic
aauggaaagaaaaaaaaagc

SEQ ID NO: 141579 - RNA, 21 nt, Artificial Sequence
  Synthetic
aaauggaaagaaaaaaaaagc

SEQ ID NO: 141580 - RNA, 22 nt, Artificial Sequence
  Synthetic
caaauggaaagaaaaaaaaagc

SEQ ID NO: 141581 - RNA, 24 nt, Artificial Sequence
  Synthetic
agcaaauggaaagaaaaaaaaagc

SEQ ID NO: 141582 - RNA, 18 nt, Artificial Sequence
  Synthetic
aaaauaauuuuaaaaagc

SEQ ID NO: 141583 - RNA, 19 nt, Artificial Sequence
  Synthetic
aaaaauaauuuuaaaaagc

SEQ ID NO: 141584 - RNA, 20 nt, Artificial Sequence
  Synthetic
caaaaauaauuuuaaaaagc

SEQ ID NO: 141585 - RNA, 21 nt, Artificial Sequence
  Synthetic
ucaaaaauaauuuuaaaaagc

SEQ ID NO: 141586 - RNA, 22 nt, Artificial Sequence
  Synthetic
uucaaaaauaauuuuaaaaagc

SEQ ID NO: 141587 - RNA, 23 nt, Artificial Sequence
  Synthetic
uuucaaaaauaauuuuaaaaagc

SEQ ID NO: 141588 - RNA, 24 nt, Artificial Sequence
  Synthetic
auuucaaaaauaauuuuaaaaagc

SEQ ID NO: 141589 - RNA, 18 nt, Artificial Sequence
  Synthetic
agcaauggcaacaaaagc

SEQ ID NO: 141590 - RNA, 19 nt, Artificial Sequence
  Synthetic
aagcaauggcaacaaaagc

SEQ ID NO: 141591 - RNA, 20 nt, Artificial Sequence
  Synthetic
aaagcaauggcaacaaaagc

SEQ ID NO: 141592 - RNA, 18 nt, Artificial Sequence
  Synthetic
uuauaaauauguaaaagc

SEQ ID NO: 141593 - RNA, 19 nt, Artificial Sequence
  Synthetic
uuuauaaauauguaaaagc

SEQ ID NO: 141594 - RNA, 20 nt, Artificial Sequence
  Synthetic
uuuuauaaauauguaaaagc

SEQ ID NO: 141595 - RNA, 21 nt, Artificial Sequence
  Synthetic
auuuuauaaauauguaaaagc

SEQ ID NO: 141596 - RNA, 24 nt, Artificial Sequence
  Synthetic
uggauuuuauaaauauguaaaagc

SEQ ID NO: 141597 - RNA, 21 nt, Artificial Sequence
  Synthetic
ucucauuguguuuuuaaaagc

SEQ ID NO: 141598 - RNA, 22 nt, Artificial Sequence
  Synthetic
aucucauuguguuuuuaaaagc

SEQ ID NO: 141599 - RNA, 23 nt, Artificial Sequence
  Synthetic
aaucucauuguguuuuuaaaagc

SEQ ID NO: 141600 - RNA, 24 nt, Artificial Sequence
  Synthetic
caaucucauuguguuuuuaaaagc

SEQ ID NO: 141601 - RNA, 18 nt, Artificial Sequence
  Synthetic
agagaaaauaaacaaagc

SEQ ID NO: 141602 - RNA, 19 nt, Artificial Sequence
  Synthetic
aagagaaaauaaacaaagc

SEQ ID NO: 141603 - RNA, 18 nt, Artificial Sequence
  Synthetic
ucuugcuauugcccaagc

SEQ ID NO: 141604 - RNA, 22 nt, Artificial Sequence
  Synthetic
agggucuugcuauugcccaagc

SEQ ID NO: 141605 - RNA, 23 nt, Artificial Sequence
  Synthetic
cagggucuugcuauugcccaagc

SEQ ID NO: 141606 - RNA, 24 nt, Artificial Sequence
  Synthetic
acagggucuugcuauugcccaagc

SEQ ID NO: 141607 - RNA, 18 nt, Artificial Sequence
  Synthetic
uucuguaauaagccaagc

SEQ ID NO: 141608 - RNA, 19 nt, Artificial Sequence
  Synthetic
uuucuguaauaagccaagc

SEQ ID NO: 141609 - RNA, 20 nt, Artificial Sequence
  Synthetic
auuucuguaauaagccaagc

SEQ ID NO: 141610 - RNA, 21 nt, Artificial Sequence
  Synthetic
uauuucuguaauaagccaagc

SEQ ID NO: 141611 - RNA, 22 nt, Artificial Sequence
  Synthetic
uuauuucuguaauaagccaagc

SEQ ID NO: 141612 - RNA, 23 nt, Artificial Sequence
  Synthetic
auuauuucuguaauaagccaagc

SEQ ID NO: 141613 - RNA, 24 nt, Artificial Sequence
  Synthetic
cauuauuucuguaauaagccaagc

SEQ ID NO: 141614 - RNA, 19 nt, Artificial Sequence
  Synthetic
agcuagaaagcaagcaagc

SEQ ID NO: 141615 - RNA, 20 nt, Artificial Sequence
  Synthetic
cagcuagaaagcaagcaagc

SEQ ID NO: 141616 - RNA, 18 nt, Artificial Sequence
  Synthetic
ucauucuggggcucaagc

SEQ ID NO: 141617 - RNA, 19 nt, Artificial Sequence
  Synthetic
cucauucuggggcucaagc

SEQ ID NO: 141618 - RNA, 20 nt, Artificial Sequence
  Synthetic
ucucauucuggggcucaagc

SEQ ID NO: 141619 - RNA, 18 nt, Artificial Sequence
  Synthetic
accugccauuacugaagc

SEQ ID NO: 141620 - RNA, 19 nt, Artificial Sequence
  Synthetic
caccugccauuacugaagc

SEQ ID NO: 141621 - RNA, 24 nt, Artificial Sequence
  Synthetic
aggggcaccugccauuacugaagc

SEQ ID NO: 141622 - RNA, 18 nt, Artificial Sequence
  Synthetic
acuaaauggaaaauaagc

SEQ ID NO: 141623 - RNA, 19 nt, Artificial Sequence
  Synthetic
uacuaaauggaaaauaagc

SEQ ID NO: 141624 - RNA, 20 nt, Artificial Sequence
  Synthetic
cuacuaaauggaaaauaagc

SEQ ID NO: 141625 - RNA, 18 nt, Artificial Sequence
  Synthetic
ccuuuuguuuaugacagc

SEQ ID NO: 141626 - RNA, 19 nt, Artificial Sequence
  Synthetic
uccuuuuguuuaugacagc

SEQ ID NO: 141627 - RNA, 20 nt, Artificial Sequence
  Synthetic
auccuuuuguuuaugacagc

SEQ ID NO: 141628 - RNA, 21 nt, Artificial Sequence
  Synthetic
ucaaacauaugaguauacagc

SEQ ID NO: 141629 - RNA, 22 nt, Artificial Sequence
  Synthetic
cucaaacauaugaguauacagc

SEQ ID NO: 141630 - RNA, 23 nt, Artificial Sequence
  Synthetic
acucaaacauaugaguauacagc

SEQ ID NO: 141631 - RNA, 24 nt, Artificial Sequence
  Synthetic
cacucaaacauaugaguauacagc

SEQ ID NO: 141632 - RNA, 19 nt, Artificial Sequence
  Synthetic
ugugccacuguacuacagc

SEQ ID NO: 141633 - RNA, 20 nt, Artificial Sequence
  Synthetic
uugugccacuguacuacagc

SEQ ID NO: 141634 - RNA, 21 nt, Artificial Sequence
  Synthetic
auugugccacuguacuacagc

SEQ ID NO: 141635 - RNA, 23 nt, Artificial Sequence
  Synthetic
ugauugugccacuguacuacagc

SEQ ID NO: 141636 - RNA, 24 nt, Artificial Sequence
  Synthetic
augauugugccacuguacuacagc

SEQ ID NO: 141637 - RNA, 19 nt, Artificial Sequence
  Synthetic
agauaguaagugguacagc

SEQ ID NO: 141638 - RNA, 20 nt, Artificial Sequence
  Synthetic
cagauaguaagugguacagc

SEQ ID NO: 141639 - RNA, 21 nt, Artificial Sequence
  Synthetic
acagauaguaagugguacagc

SEQ ID NO: 141640 - RNA, 22 nt, Artificial Sequence
  Synthetic
cacagauaguaagugguacagc

SEQ ID NO: 141641 - RNA, 23 nt, Artificial Sequence
  Synthetic
ucacagauaguaagugguacagc

SEQ ID NO: 141642 - RNA, 24 nt, Artificial Sequence
  Synthetic
cucacagauaguaagugguacagc

SEQ ID NO: 141643 - RNA, 18 nt, Artificial Sequence
  Synthetic
caggaguccaagaccagc

SEQ ID NO: 141644 - RNA, 19 nt, Artificial Sequence
  Synthetic
ccaggaguccaagaccagc

SEQ ID NO: 141645 - RNA, 20 nt, Artificial Sequence
  Synthetic
cccaggaguccaagaccagc

SEQ ID NO: 141646 - RNA, 22 nt, Artificial Sequence
  Synthetic
agcccaggaguccaagaccagc

SEQ ID NO: 141647 - RNA, 24 nt, Artificial Sequence
  Synthetic
ugagcccaggaguccaagaccagc

SEQ ID NO: 141648 - RNA, 18 nt, Artificial Sequence
  Synthetic
uagcaguucaagaccagc

SEQ ID NO: 141649 - RNA, 19 nt, Artificial Sequence
  Synthetic
cuagcaguucaagaccagc

SEQ ID NO: 141650 - RNA, 22 nt, Artificial Sequence
  Synthetic
aggcuagcaguucaagaccagc

SEQ ID NO: 141651 - RNA, 24 nt, Artificial Sequence
  Synthetic
ugaggcuagcaguucaagaccagc

SEQ ID NO: 141652 - RNA, 19 nt, Artificial Sequence
  Synthetic
cgcgccacugcaccccagc

SEQ ID NO: 141653 - RNA, 20 nt, Artificial Sequence
  Synthetic
ucgcgccacugcaccccagc

SEQ ID NO: 141654 - RNA, 21 nt, Artificial Sequence
  Synthetic
aucgcgccacugcaccccagc

SEQ ID NO: 141655 - RNA, 23 nt, Artificial Sequence
  Synthetic
agaucgcgccacugcaccccagc

SEQ ID NO: 141656 - RNA, 24 nt, Artificial Sequence
  Synthetic
aagaucgcgccacugcaccccagc

SEQ ID NO: 141657 - RNA, 18 nt, Artificial Sequence
  Synthetic
ugggagacaccucccagc

SEQ ID NO: 141658 - RNA, 19 nt, Artificial Sequence
  Synthetic
cugggagacaccucccagc

SEQ ID NO: 141659 - RNA, 20 nt, Artificial Sequence
  Synthetic
acugggagacaccucccagc

SEQ ID NO: 141660 - RNA, 22 nt, Artificial Sequence
  Synthetic
ugacugggagacaccucccagc

SEQ ID NO: 141661 - RNA, 23 nt, Artificial Sequence
  Synthetic
cugacugggagacaccucccagc

SEQ ID NO: 141662 - RNA, 24 nt, Artificial Sequence
  Synthetic
ccugacugggagacaccucccagc

SEQ ID NO: 141663 - RNA, 18 nt, Artificial Sequence
  Synthetic
aaaaaaaaacaggccagc

SEQ ID NO: 141664 - RNA, 19 nt, Artificial Sequence
  Synthetic
aaaaaaaaaacaggccagc

SEQ ID NO: 141665 - RNA, 20 nt, Artificial Sequence
  Synthetic
uaaaaaaaaaacaggccagc

SEQ ID NO: 141666 - RNA, 18 nt, Artificial Sequence
  Synthetic
acgacacuccacuccagc

SEQ ID NO: 141667 - RNA, 19 nt, Artificial Sequence
  Synthetic
cacgacacuccacuccagc

SEQ ID NO: 141668 - RNA, 20 nt, Artificial Sequence
  Synthetic
ucacgacacuccacuccagc

SEQ ID NO: 141669 - RNA, 21 nt, Artificial Sequence
  Synthetic
aucacgacacuccacuccagc

SEQ ID NO: 141670 - RNA, 23 nt, Artificial Sequence
  Synthetic
agaucacgacacuccacuccagc

SEQ ID NO: 141671 - RNA, 20 nt, Artificial Sequence
  Synthetic
uggcacaacugcacuccagc

SEQ ID NO: 141672 - RNA, 21 nt, Artificial Sequence
  Synthetic
auggcacaacugcacuccagc

SEQ ID NO: 141673 - RNA, 22 nt, Artificial Sequence
  Synthetic
aauggcacaacugcacuccagc

SEQ ID NO: 141674 - RNA, 23 nt, Artificial Sequence
  Synthetic
uaauggcacaacugcacuccagc

SEQ ID NO: 141675 - RNA, 24 nt, Artificial Sequence
  Synthetic
auaauggcacaacugcacuccagc

SEQ ID NO: 141676 - RNA, 19 nt, Artificial Sequence
  Synthetic
cgcaccacugcacuccagc

SEQ ID NO: 141677 - RNA, 21 nt, Artificial Sequence
  Synthetic
cgcgcaccacugcacuccagc

SEQ ID NO: 141678 - RNA, 22 nt, Artificial Sequence
  Synthetic
ucgcgcaccacugcacuccagc

SEQ ID NO: 141679 - RNA, 23 nt, Artificial Sequence
  Synthetic
aucgcgcaccacugcacuccagc

SEQ ID NO: 141680 - RNA, 19 nt, Artificial Sequence
  Synthetic
ugcaccacugcacuccagc

SEQ ID NO: 141681 - RNA, 20 nt, Artificial Sequence
  Synthetic
uugcaccacugcacuccagc

SEQ ID NO: 141682 - RNA, 24 nt, Artificial Sequence
  Synthetic
aagauugcaccacugcacuccagc

SEQ ID NO: 141683 - RNA, 18 nt, Artificial Sequence
  Synthetic
agaccacugcacuccagc

SEQ ID NO: 141684 - RNA, 19 nt, Artificial Sequence
  Synthetic
cagaccacugcacuccagc

SEQ ID NO: 141685 - RNA, 20 nt, Artificial Sequence
  Synthetic
ucagaccacugcacuccagc

SEQ ID NO: 141686 - RNA, 21 nt, Artificial Sequence
  Synthetic
aucagaccacugcacuccagc

SEQ ID NO: 141687 - RNA, 23 nt, Artificial Sequence
  Synthetic
agaucagaccacugcacuccagc

SEQ ID NO: 141688 - RNA, 24 nt, Artificial Sequence
  Synthetic
uagaucagaccacugcacuccagc

SEQ ID NO: 141689 - RNA, 18 nt, Artificial Sequence
  Synthetic
acgccacugcacuccagc

SEQ ID NO: 141690 - RNA, 19 nt, Artificial Sequence
  Synthetic
cacgccacugcacuccagc

SEQ ID NO: 141691 - RNA, 20 nt, Artificial Sequence
  Synthetic
ucacgccacugcacuccagc

SEQ ID NO: 141692 - RNA, 21 nt, Artificial Sequence
  Synthetic
aucacgccacugcacuccagc

SEQ ID NO: 141693 - RNA, 23 nt, Artificial Sequence
  Synthetic
agaucacgccacugcacuccagc

SEQ ID NO: 141694 - RNA, 24 nt, Artificial Sequence
  Synthetic
aagaucacgccacugcacuccagc

SEQ ID NO: 141695 - RNA, 19 nt, Artificial Sequence
  Synthetic
cgcgccacugcacuccagc

SEQ ID NO: 141696 - RNA, 20 nt, Artificial Sequence
  Synthetic
ucgcgccacugcacuccagc

SEQ ID NO: 141697 - RNA, 21 nt, Artificial Sequence
  Synthetic
aucgcgccacugcacuccagc

SEQ ID NO: 141698 - RNA, 23 nt, Artificial Sequence
  Synthetic
agaucgcgccacugcacuccagc

SEQ ID NO: 141699 - RNA, 20 nt, Artificial Sequence
  Synthetic
uggcgccacugcacuccagc

SEQ ID NO: 141700 - RNA, 23 nt, Artificial Sequence
  Synthetic
agguggcgccacugcacuccagc

SEQ ID NO: 141701 - RNA, 18 nt, Artificial Sequence
  Synthetic
cugccacugcacuccagc

SEQ ID NO: 141702 - RNA, 19 nt, Artificial Sequence
  Synthetic
ccugccacugcacuccagc

SEQ ID NO: 141703 - RNA, 20 nt, Artificial Sequence
  Synthetic
uccugccacugcacuccagc

SEQ ID NO: 141704 - RNA, 21 nt, Artificial Sequence
  Synthetic
cuccugccacugcacuccagc

SEQ ID NO: 141705 - RNA, 22 nt, Artificial Sequence
  Synthetic
ccuccugccacugcacuccagc

SEQ ID NO: 141706 - RNA, 23 nt, Artificial Sequence
  Synthetic
cccuccugccacugcacuccagc

SEQ ID NO: 141707 - RNA, 24 nt, Artificial Sequence
  Synthetic
ucccuccugccacugcacuccagc

SEQ ID NO: 141708 - RNA, 19 nt, Artificial Sequence
  Synthetic
ugcaccauugcacuccagc

SEQ ID NO: 141709 - RNA, 20 nt, Artificial Sequence
  Synthetic
uugcaccauugcacuccagc

SEQ ID NO: 141710 - RNA, 21 nt, Artificial Sequence
  Synthetic
auugcaccauugcacuccagc

SEQ ID NO: 141711 - RNA, 23 nt, Artificial Sequence
  Synthetic
agauugcaccauugcacuccagc

SEQ ID NO: 141712 - RNA, 18 nt, Artificial Sequence
  Synthetic
augccauugcacuccagc

SEQ ID NO: 141713 - RNA, 19 nt, Artificial Sequence
  Synthetic
caugccauugcacuccagc

SEQ ID NO: 141714 - RNA, 20 nt, Artificial Sequence
  Synthetic
ucaugccauugcacuccagc

SEQ ID NO: 141715 - RNA, 21 nt, Artificial Sequence
  Synthetic
aucaugccauugcacuccagc

SEQ ID NO: 141716 - RNA, 23 nt, Artificial Sequence
  Synthetic
agaucaugccauugcacuccagc

SEQ ID NO: 141717 - RNA, 24 nt, Artificial Sequence
  Synthetic
aagaucaugccauugcacuccagc

SEQ ID NO: 141718 - RNA, 19 nt, Artificial Sequence
  Synthetic
cgugccauugcacuccagc

SEQ ID NO: 141719 - RNA, 20 nt, Artificial Sequence
  Synthetic
ucgugccauugcacuccagc

SEQ ID NO: 141720 - RNA, 21 nt, Artificial Sequence
  Synthetic
aucgugccauugcacuccagc

SEQ ID NO: 141721 - RNA, 23 nt, Artificial Sequence
  Synthetic
agaucgugccauugcacuccagc

SEQ ID NO: 141722 - RNA, 24 nt, Artificial Sequence
  Synthetic
aagaucgugccauugcacuccagc

SEQ ID NO: 141723 - RNA, 18 nt, Artificial Sequence
  Synthetic
augccaguguacuccagc

SEQ ID NO: 141724 - RNA, 19 nt, Artificial Sequence
  Synthetic
caugccaguguacuccagc

SEQ ID NO: 141725 - RNA, 20 nt, Artificial Sequence
  Synthetic
ucaugccaguguacuccagc

SEQ ID NO: 141726 - RNA, 21 nt, Artificial Sequence
  Synthetic
aucaugccaguguacuccagc

SEQ ID NO: 141727 - RNA, 23 nt, Artificial Sequence
  Synthetic
ugaucaugccaguguacuccagc

SEQ ID NO: 141728 - RNA, 24 nt, Artificial Sequence
  Synthetic
augaucaugccaguguacuccagc

SEQ ID NO: 141729 - RNA, 18 nt, Artificial Sequence
  Synthetic
acuccagugcccuccagc

SEQ ID NO: 141730 - RNA, 19 nt, Artificial Sequence
  Synthetic
cacuccagugcccuccagc

SEQ ID NO: 141731 - RNA, 20 nt, Artificial Sequence
  Synthetic
ucacuccagugcccuccagc

SEQ ID NO: 141732 - RNA, 21 nt, Artificial Sequence
  Synthetic
uucacuccagugcccuccagc

SEQ ID NO: 141733 - RNA, 23 nt, Artificial Sequence
  Synthetic
uguucacuccagugcccuccagc

SEQ ID NO: 141734 - RNA, 24 nt, Artificial Sequence
  Synthetic
auguucacuccagugcccuccagc

SEQ ID NO: 141735 - RNA, 19 nt, Artificial Sequence
  Synthetic
cgcgccacugugcuccagc

SEQ ID NO: 141736 - RNA, 20 nt, Artificial Sequence
  Synthetic
ucgcgccacugugcuccagc

SEQ ID NO: 141737 - RNA, 21 nt, Artificial Sequence
  Synthetic
aucgcgccacugugcuccagc

SEQ ID NO: 141738 - RNA, 23 nt, Artificial Sequence
  Synthetic
agaucgcgccacugugcuccagc

SEQ ID NO: 141739 - RNA, 24 nt, Artificial Sequence
  Synthetic
aagaucgcgccacugugcuccagc

SEQ ID NO: 141740 - RNA, 18 nt, Artificial Sequence
  Synthetic
agcaccaucaucuccagc

SEQ ID NO: 141741 - RNA, 19 nt, Artificial Sequence
  Synthetic
aagcaccaucaucuccagc

SEQ ID NO: 141742 - RNA, 20 nt, Artificial Sequence
  Synthetic
aaagcaccaucaucuccagc

SEQ ID NO: 141743 - RNA, 18 nt, Artificial Sequence
  Synthetic
ccaccacugcauuccagc

SEQ ID NO: 141744 - RNA, 19 nt, Artificial Sequence
  Synthetic
uccaccacugcauuccagc

SEQ ID NO: 141745 - RNA, 20 nt, Artificial Sequence
  Synthetic
auccaccacugcauuccagc

SEQ ID NO: 141746 - RNA, 21 nt, Artificial Sequence
  Synthetic
aauccaccacugcauuccagc

SEQ ID NO: 141747 - RNA, 22 nt, Artificial Sequence
  Synthetic
aaauccaccacugcauuccagc

SEQ ID NO: 141748 - RNA, 23 nt, Artificial Sequence
  Synthetic
caaauccaccacugcauuccagc

SEQ ID NO: 141749 - RNA, 24 nt, Artificial Sequence
  Synthetic
ccaaauccaccacugcauuccagc

SEQ ID NO: 141750 - RNA, 19 nt, Artificial Sequence
  Synthetic
ugcgccacugcauuccagc

SEQ ID NO: 141751 - RNA, 20 nt, Artificial Sequence
  Synthetic
uugcgccacugcauuccagc

SEQ ID NO: 141752 - RNA, 21 nt, Artificial Sequence
  Synthetic
auugcgccacugcauuccagc

SEQ ID NO: 141753 - RNA, 23 nt, Artificial Sequence
  Synthetic
agauugcgccacugcauuccagc

SEQ ID NO: 141754 - RNA, 18 nt, Artificial Sequence
  Synthetic
cucggccucccaagcagc

SEQ ID NO: 141755 - RNA, 19 nt, Artificial Sequence
  Synthetic
ccucggccucccaagcagc

SEQ ID NO: 141756 - RNA, 21 nt, Artificial Sequence
  Synthetic
ugccucggccucccaagcagc

SEQ ID NO: 141757 - RNA, 23 nt, Artificial Sequence
  Synthetic
ugugccucggccucccaagcagc

SEQ ID NO: 141758 - RNA, 24 nt, Artificial Sequence
  Synthetic
uugugccucggccucccaagcagc

SEQ ID NO: 141759 - RNA, 18 nt, Artificial Sequence
  Synthetic
uaaucuuaauacagcagc

SEQ ID NO: 141760 - RNA, 19 nt, Artificial Sequence
  Synthetic
cuaaucuuaauacagcagc

SEQ ID NO: 141761 - RNA, 20 nt, Artificial Sequence
  Synthetic
ucuaaucuuaauacagcagc

SEQ ID NO: 141762 - RNA, 18 nt, Artificial Sequence
  Synthetic
aguagcacuaccagcagc

SEQ ID NO: 141763 - RNA, 19 nt, Artificial Sequence
  Synthetic
caguagcacuaccagcagc

SEQ ID NO: 141764 - RNA, 20 nt, Artificial Sequence
  Synthetic
ccaguagcacuaccagcagc

SEQ ID NO: 141765 - RNA, 22 nt, Artificial Sequence
  Synthetic
agccaguagcacuaccagcagc

SEQ ID NO: 141766 - RNA, 23 nt, Artificial Sequence
  Synthetic
cagccaguagcacuaccagcagc

SEQ ID NO: 141767 - RNA, 24 nt, Artificial Sequence
  Synthetic
ucagccaguagcacuaccagcagc

SEQ ID NO: 141768 - RNA, 19 nt, Artificial Sequence
  Synthetic
uggguauauacccagcagc

SEQ ID NO: 141769 - RNA, 20 nt, Artificial Sequence
  Synthetic
uuggguauauacccagcagc

SEQ ID NO: 141770 - RNA, 21 nt, Artificial Sequence
  Synthetic
uuuggguauauacccagcagc

SEQ ID NO: 141771 - RNA, 22 nt, Artificial Sequence
  Synthetic
uuuuggguauauacccagcagc

SEQ ID NO: 141772 - RNA, 23 nt, Artificial Sequence
  Synthetic
cuuuuggguauauacccagcagc

SEQ ID NO: 141773 - RNA, 24 nt, Artificial Sequence
  Synthetic
ucuuuuggguauauacccagcagc

SEQ ID NO: 141774 - RNA, 18 nt, Artificial Sequence
  Synthetic
cagcaguccacaggcagc

SEQ ID NO: 141775 - RNA, 19 nt, Artificial Sequence
  Synthetic
ucagcaguccacaggcagc

SEQ ID NO: 141776 - RNA, 21 nt, Artificial Sequence
  Synthetic
ugucagcaguccacaggcagc

SEQ ID NO: 141777 - RNA, 22 nt, Artificial Sequence
  Synthetic
cugucagcaguccacaggcagc

SEQ ID NO: 141778 - RNA, 23 nt, Artificial Sequence
  Synthetic
ccugucagcaguccacaggcagc

SEQ ID NO: 141779 - RNA, 24 nt, Artificial Sequence
  Synthetic
uccugucagcaguccacaggcagc

SEQ ID NO: 141780 - RNA, 18 nt, Artificial Sequence
  Synthetic
uacuccagccugggcagc

SEQ ID NO: 141781 - RNA, 20 nt, Artificial Sequence
  Synthetic
uguacuccagccugggcagc

SEQ ID NO: 141782 - RNA, 21 nt, Artificial Sequence
  Synthetic
uuguacuccagccugggcagc

SEQ ID NO: 141783 - RNA, 22 nt, Artificial Sequence
  Synthetic
auuguacuccagccugggcagc

SEQ ID NO: 141784 - RNA, 23 nt, Artificial Sequence
  Synthetic
cauuguacuccagccugggcagc

SEQ ID NO: 141785 - RNA, 24 nt, Artificial Sequence
  Synthetic
ccauuguacuccagccugggcagc

SEQ ID NO: 141786 - RNA, 18 nt, Artificial Sequence
  Synthetic
acagagguuacagucagc

SEQ ID NO: 141787 - RNA, 20 nt, Artificial Sequence
  Synthetic
agacagagguuacagucagc

SEQ ID NO: 141788 - RNA, 24 nt, Artificial Sequence
  Synthetic
ugggagacagagguuacagucagc

SEQ ID NO: 141789 - RNA, 20 nt, Artificial Sequence
  Synthetic
uggugccacugcacuucagc

SEQ ID NO: 141790 - RNA, 21 nt, Artificial Sequence
  Synthetic
auggugccacugcacuucagc

SEQ ID NO: 141791 - RNA, 23 nt, Artificial Sequence
  Synthetic
agauggugccacugcacuucagc

SEQ ID NO: 141792 - RNA, 24 nt, Artificial Sequence
  Synthetic
aagauggugccacugcacuucagc

SEQ ID NO: 141793 - RNA, 18 nt, Artificial Sequence
  Synthetic
uccccuacagguuucagc

SEQ ID NO: 141794 - RNA, 19 nt, Artificial Sequence
  Synthetic
cuccccuacagguuucagc

SEQ ID NO: 141795 - RNA, 20 nt, Artificial Sequence
  Synthetic
ucuccccuacagguuucagc

SEQ ID NO: 141796 - RNA, 21 nt, Artificial Sequence
  Synthetic
uucuccccuacagguuucagc

SEQ ID NO: 141797 - RNA, 22 nt, Artificial Sequence
  Synthetic
auucuccccuacagguuucagc

SEQ ID NO: 141798 - RNA, 23 nt, Artificial Sequence
  Synthetic
aauucuccccuacagguuucagc

SEQ ID NO: 141799 - RNA, 24 nt, Artificial Sequence
  Synthetic
aaauucuccccuacagguuucagc

SEQ ID NO: 141800 - RNA, 18 nt, Artificial Sequence
  Synthetic
cuuguucccccaaagagc

SEQ ID NO: 141801 - RNA, 19 nt, Artificial Sequence
  Synthetic
ccuuguucccccaaagagc

SEQ ID NO: 141802 - RNA, 21 nt, Artificial Sequence
  Synthetic
ugccuuguucccccaaagagc

SEQ ID NO: 141803 - RNA, 22 nt, Artificial Sequence
  Synthetic
cugccuuguucccccaaagagc

SEQ ID NO: 141804 - RNA, 23 nt, Artificial Sequence
  Synthetic
ucugccuuguucccccaaagagc

SEQ ID NO: 141805 - RNA, 18 nt, Artificial Sequence
  Synthetic
ugcagugacgcccagagc

SEQ ID NO: 141806 - RNA, 20 nt, Artificial Sequence
  Synthetic
ugugcagugacgcccagagc

SEQ ID NO: 141807 - RNA, 18 nt, Artificial Sequence
  Synthetic
aaaaaaaaauuauagagc

SEQ ID NO: 141808 - RNA, 19 nt, Artificial Sequence
  Synthetic
aaaaaaaaaauuauagagc

SEQ ID NO: 141809 - RNA, 20 nt, Artificial Sequence
  Synthetic
aaaaaaaaaaauuauagagc

SEQ ID NO: 141810 - RNA, 21 nt, Artificial Sequence
  Synthetic
aaaaaaaaaaaauuauagagc

SEQ ID NO: 141811 - RNA, 22 nt, Artificial Sequence
  Synthetic
aaaaaaaaaaaaauuauagagc

SEQ ID NO: 141812 - RNA, 23 nt, Artificial Sequence
  Synthetic
aaaaaaaaaaaaaauuauagagc

SEQ ID NO: 141813 - RNA, 24 nt, Artificial Sequence
  Synthetic
uaaaaaaaaaaaaaauuauagagc

SEQ ID NO: 141814 - RNA, 18 nt, Artificial Sequence
  Synthetic
ugaggcaaguguuagagc

SEQ ID NO: 141815 - RNA, 19 nt, Artificial Sequence
  Synthetic
cugaggcaaguguuagagc

SEQ ID NO: 141816 - RNA, 20 nt, Artificial Sequence
  Synthetic
acugaggcaaguguuagagc

SEQ ID NO: 141817 - RNA, 22 nt, Artificial Sequence
  Synthetic
agacugaggcaaguguuagagc

SEQ ID NO: 141818 - RNA, 24 nt, Artificial Sequence
  Synthetic
agagacugaggcaaguguuagagc

SEQ ID NO: 141819 - RNA, 18 nt, Artificial Sequence
  Synthetic
uaagccacaacaccgagc

SEQ ID NO: 141820 - RNA, 20 nt, Artificial Sequence
  Synthetic
cguaagccacaacaccgagc

SEQ ID NO: 141821 - RNA, 23 nt, Artificial Sequence
  Synthetic
aggcguaagccacaacaccgagc

SEQ ID NO: 141822 - RNA, 24 nt, Artificial Sequence
  Synthetic
caggcguaagccacaacaccgagc

SEQ ID NO: 141823 - RNA, 18 nt, Artificial Sequence
  Synthetic
cugaagcauuuggggagc

SEQ ID NO: 141824 - RNA, 19 nt, Artificial Sequence
  Synthetic
ucugaagcauuuggggagc

SEQ ID NO: 141825 - RNA, 20 nt, Artificial Sequence
  Synthetic
aucugaagcauuuggggagc

SEQ ID NO: 141826 - RNA, 18 nt, Artificial Sequence
  Synthetic
ugaggccauggcuggagc

SEQ ID NO: 141827 - RNA, 20 nt, Artificial Sequence
  Synthetic
ugugaggccauggcuggagc

SEQ ID NO: 141828 - RNA, 18 nt, Artificial Sequence
  Synthetic
agcaaaugguaaaugagc

SEQ ID NO: 141829 - RNA, 19 nt, Artificial Sequence
  Synthetic
uagcaaaugguaaaugagc

SEQ ID NO: 141830 - RNA, 20 nt, Artificial Sequence
  Synthetic
uuagcaaaugguaaaugagc

SEQ ID NO: 141831 - RNA, 20 nt, Artificial Sequence
  Synthetic
aggcagagguugcagugagc

SEQ ID NO: 141832 - RNA, 18 nt, Artificial Sequence
  Synthetic
cuuuuccugccuuugagc

SEQ ID NO: 141833 - RNA, 19 nt, Artificial Sequence
  Synthetic
ucuuuuccugccuuugagc

SEQ ID NO: 141834 - RNA, 20 nt, Artificial Sequence
  Synthetic
aucuuuuccugccuuugagc

SEQ ID NO: 141835 - RNA, 18 nt, Artificial Sequence
  Synthetic
cucagccuccugaauagc

SEQ ID NO: 141836 - RNA, 19 nt, Artificial Sequence
  Synthetic
ccucagccuccugaauagc

SEQ ID NO: 141837 - RNA, 21 nt, Artificial Sequence
  Synthetic
ugccucagccuccugaauagc

SEQ ID NO: 141838 - RNA, 22 nt, Artificial Sequence
  Synthetic
cugccucagccuccugaauagc

SEQ ID NO: 141839 - RNA, 23 nt, Artificial Sequence
  Synthetic
ccugccucagccuccugaauagc

SEQ ID NO: 141840 - RNA, 24 nt, Artificial Sequence
  Synthetic
uccugccucagccuccugaauagc

SEQ ID NO: 141841 - RNA, 21 nt, Artificial Sequence
  Synthetic
caccgcacccagccgcauagc

SEQ ID NO: 141842 - RNA, 22 nt, Artificial Sequence
  Synthetic
ccaccgcacccagccgcauagc

SEQ ID NO: 141843 - RNA, 24 nt, Artificial Sequence
  Synthetic
agccaccgcacccagccgcauagc

SEQ ID NO: 141844 - RNA, 18 nt, Artificial Sequence
  Synthetic
acaacaccagaugcuagc

SEQ ID NO: 141845 - RNA, 19 nt, Artificial Sequence
  Synthetic
uacaacaccagaugcuagc

SEQ ID NO: 141846 - RNA, 20 nt, Artificial Sequence
  Synthetic
uuacaacaccagaugcuagc

SEQ ID NO: 141847 - RNA, 19 nt, Artificial Sequence
  Synthetic
ugcaccacugcacucuagc

SEQ ID NO: 141848 - RNA, 20 nt, Artificial Sequence
  Synthetic
uugcaccacugcacucuagc

SEQ ID NO: 141849 - RNA, 21 nt, Artificial Sequence
  Synthetic
auugcaccacugcacucuagc

SEQ ID NO: 141850 - RNA, 23 nt, Artificial Sequence
  Synthetic
agauugcaccacugcacucuagc

SEQ ID NO: 141851 - RNA, 19 nt, Artificial Sequence
  Synthetic
ugugccacugcacucuagc

SEQ ID NO: 141852 - RNA, 20 nt, Artificial Sequence
  Synthetic
uugugccacugcacucuagc

SEQ ID NO: 141853 - RNA, 21 nt, Artificial Sequence
  Synthetic
auugugccacugcacucuagc

SEQ ID NO: 141854 - RNA, 23 nt, Artificial Sequence
  Synthetic
agauugugccacugcacucuagc

SEQ ID NO: 141855 - RNA, 24 nt, Artificial Sequence
  Synthetic
aagauugugccacugcacucuagc

SEQ ID NO: 141856 - RNA, 18 nt, Artificial Sequence
  Synthetic
cacagccucccaaguagc

SEQ ID NO: 141857 - RNA, 19 nt, Artificial Sequence
  Synthetic
ccacagccucccaaguagc

SEQ ID NO: 141858 - RNA, 21 nt, Artificial Sequence
  Synthetic
ugccacagccucccaaguagc

SEQ ID NO: 141859 - RNA, 22 nt, Artificial Sequence
  Synthetic
augccacagccucccaaguagc

SEQ ID NO: 141860 - RNA, 23 nt, Artificial Sequence
  Synthetic
caugccacagccucccaaguagc

SEQ ID NO: 141861 - RNA, 24 nt, Artificial Sequence
  Synthetic
ucaugccacagccucccaaguagc

SEQ ID NO: 141862 - RNA, 18 nt, Artificial Sequence
  Synthetic
cucagccucccaaguagc

SEQ ID NO: 141863 - RNA, 19 nt, Artificial Sequence
  Synthetic
ccucagccucccaaguagc

SEQ ID NO: 141864 - RNA, 18 nt, Artificial Sequence
  Synthetic
cuuagccucccaaguagc

SEQ ID NO: 141865 - RNA, 19 nt, Artificial Sequence
  Synthetic
ccuuagccucccaaguagc

SEQ ID NO: 141866 - RNA, 20 nt, Artificial Sequence
  Synthetic
accuuagccucccaaguagc

SEQ ID NO: 141867 - RNA, 21 nt, Artificial Sequence
  Synthetic
uaccuuagccucccaaguagc

SEQ ID NO: 141868 - RNA, 22 nt, Artificial Sequence
  Synthetic
cuaccuuagccucccaaguagc

SEQ ID NO: 141869 - RNA, 23 nt, Artificial Sequence
  Synthetic
ccuaccuuagccucccaaguagc

SEQ ID NO: 141870 - RNA, 24 nt, Artificial Sequence
  Synthetic
uccuaccuuagccucccaaguagc

SEQ ID NO: 141871 - RNA, 18 nt, Artificial Sequence
  Synthetic
cucagacugccaaguagc

SEQ ID NO: 141872 - RNA, 19 nt, Artificial Sequence
  Synthetic
ccucagacugccaaguagc

SEQ ID NO: 141873 - RNA, 21 nt, Artificial Sequence
  Synthetic
ugccucagacugccaaguagc

SEQ ID NO: 141874 - RNA, 22 nt, Artificial Sequence
  Synthetic
cugccucagacugccaaguagc

SEQ ID NO: 141875 - RNA, 23 nt, Artificial Sequence
  Synthetic
ccugccucagacugccaaguagc

SEQ ID NO: 141876 - RNA, 24 nt, Artificial Sequence
  Synthetic
uccugccucagacugccaaguagc

SEQ ID NO: 141877 - RNA, 18 nt, Artificial Sequence
  Synthetic
cucagccuuccaaguagc

SEQ ID NO: 141878 - RNA, 19 nt, Artificial Sequence
  Synthetic
ccucagccuuccaaguagc

SEQ ID NO: 141879 - RNA, 21 nt, Artificial Sequence
  Synthetic
ugccucagccuuccaaguagc

SEQ ID NO: 141880 - RNA, 22 nt, Artificial Sequence
  Synthetic
cugccucagccuuccaaguagc

SEQ ID NO: 141881 - RNA, 23 nt, Artificial Sequence
  Synthetic
ccugccucagccuuccaaguagc

SEQ ID NO: 141882 - RNA, 24 nt, Artificial Sequence
  Synthetic
uccugccucagccuuccaaguagc

SEQ ID NO: 141883 - RNA, 18 nt, Artificial Sequence
  Synthetic
cucagccuccuaaguagc

SEQ ID NO: 141884 - RNA, 19 nt, Artificial Sequence
  Synthetic
ccucagccuccuaaguagc

SEQ ID NO: 141885 - RNA, 20 nt, Artificial Sequence
  Synthetic
accucagccuccuaaguagc

SEQ ID NO: 141886 - RNA, 21 nt, Artificial Sequence
  Synthetic
caccucagccuccuaaguagc

SEQ ID NO: 141887 - RNA, 22 nt, Artificial Sequence
  Synthetic
ccaccucagccuccuaaguagc

SEQ ID NO: 141888 - RNA, 23 nt, Artificial Sequence
  Synthetic
cccaccucagccuccuaaguagc

SEQ ID NO: 141889 - RNA, 24 nt, Artificial Sequence
  Synthetic
ucccaccucagccuccuaaguagc

SEQ ID NO: 141890 - RNA, 18 nt, Artificial Sequence
  Synthetic
ccucugucuuccaguagc

SEQ ID NO: 141891 - RNA, 20 nt, Artificial Sequence
  Synthetic
ugccucugucuuccaguagc

SEQ ID NO: 141892 - RNA, 21 nt, Artificial Sequence
  Synthetic
cugccucugucuuccaguagc

SEQ ID NO: 141893 - RNA, 22 nt, Artificial Sequence
  Synthetic
ccugccucugucuuccaguagc

SEQ ID NO: 141894 - RNA, 23 nt, Artificial Sequence
  Synthetic
uccugccucugucuuccaguagc

SEQ ID NO: 141895 - RNA, 24 nt, Artificial Sequence
  Synthetic
cuccugccucugucuuccaguagc

SEQ ID NO: 141896 - RNA, 18 nt, Artificial Sequence
  Synthetic
cucagccuaccgaguagc

SEQ ID NO: 141897 - RNA, 19 nt, Artificial Sequence
  Synthetic
ccucagccuaccgaguagc

SEQ ID NO: 141898 - RNA, 21 nt, Artificial Sequence
  Synthetic
ugccucagccuaccgaguagc

SEQ ID NO: 141899 - RNA, 22 nt, Artificial Sequence
  Synthetic
cugccucagccuaccgaguagc

SEQ ID NO: 141900 - RNA, 23 nt, Artificial Sequence
  Synthetic
ccugccucagccuaccgaguagc

SEQ ID NO: 141901 - RNA, 24 nt, Artificial Sequence
  Synthetic
uccugccucagccuaccgaguagc

SEQ ID NO: 141902 - RNA, 18 nt, Artificial Sequence
  Synthetic
cucagccucccgaguagc

SEQ ID NO: 141903 - RNA, 19 nt, Artificial Sequence
  Synthetic
ccucagccucccgaguagc

SEQ ID NO: 141904 - RNA, 21 nt, Artificial Sequence
  Synthetic
ugccucagccucccgaguagc

SEQ ID NO: 141905 - RNA, 22 nt, Artificial Sequence
  Synthetic
cugccucagccucccgaguagc

SEQ ID NO: 141906 - RNA, 23 nt, Artificial Sequence
  Synthetic
ucugccucagccucccgaguagc

SEQ ID NO: 141907 - RNA, 24 nt, Artificial Sequence
  Synthetic
cucugccucagccucccgaguagc

SEQ ID NO: 141908 - RNA, 18 nt, Artificial Sequence
  Synthetic
cuuagccucccgaguagc

SEQ ID NO: 141909 - RNA, 19 nt, Artificial Sequence
  Synthetic
ccuuagccucccgaguagc

SEQ ID NO: 141910 - RNA, 21 nt, Artificial Sequence
  Synthetic
ugccuuagccucccgaguagc

SEQ ID NO: 141911 - RNA, 22 nt, Artificial Sequence
  Synthetic
cugccuuagccucccgaguagc

SEQ ID NO: 141912 - RNA, 23 nt, Artificial Sequence
  Synthetic
ccugccuuagccucccgaguagc

SEQ ID NO: 141913 - RNA, 24 nt, Artificial Sequence
  Synthetic
uccugccuuagccucccgaguagc

SEQ ID NO: 141914 - RNA, 18 nt, Artificial Sequence
  Synthetic
cucagcuucccgaguagc

SEQ ID NO: 141915 - RNA, 19 nt, Artificial Sequence
  Synthetic
ccucagcuucccgaguagc

SEQ ID NO: 141916 - RNA, 21 nt, Artificial Sequence
  Synthetic
ugccucagcuucccgaguagc

SEQ ID NO: 141917 - RNA, 22 nt, Artificial Sequence
  Synthetic
cugccucagcuucccgaguagc

SEQ ID NO: 141918 - RNA, 23 nt, Artificial Sequence
  Synthetic
ccugccucagcuucccgaguagc

SEQ ID NO: 141919 - RNA, 24 nt, Artificial Sequence
  Synthetic
uccugccucagcuucccgaguagc

SEQ ID NO: 141920 - RNA, 18 nt, Artificial Sequence
  Synthetic
uucagccuacugaguagc

SEQ ID NO: 141921 - RNA, 19 nt, Artificial Sequence
  Synthetic
cuucagccuacugaguagc

SEQ ID NO: 141922 - RNA, 20 nt, Artificial Sequence
  Synthetic
ccuucagccuacugaguagc

SEQ ID NO: 141923 - RNA, 21 nt, Artificial Sequence
  Synthetic
uccuucagccuacugaguagc

SEQ ID NO: 141924 - RNA, 22 nt, Artificial Sequence
  Synthetic
cuccuucagccuacugaguagc

SEQ ID NO: 141925 - RNA, 23 nt, Artificial Sequence
  Synthetic
ccuccuucagccuacugaguagc

SEQ ID NO: 141926 - RNA, 24 nt, Artificial Sequence
  Synthetic
uccuccuucagccuacugaguagc

SEQ ID NO: 141927 - RNA, 23 nt, Artificial Sequence
  Synthetic
ucugccucagccuccugaguagc

SEQ ID NO: 141928 - RNA, 24 nt, Artificial Sequence
  Synthetic
cucugccucagccuccugaguagc

SEQ ID NO: 141929 - RNA, 18 nt, Artificial Sequence
  Synthetic
uucagccuccugaguagc

SEQ ID NO: 141930 - RNA, 19 nt, Artificial Sequence
  Synthetic
cuucagccuccugaguagc

SEQ ID NO: 141931 - RNA, 21 nt, Artificial Sequence
  Synthetic
ugcuucagccuccugaguagc

SEQ ID NO: 141932 - RNA, 22 nt, Artificial Sequence
  Synthetic
cugcuucagccuccugaguagc

SEQ ID NO: 141933 - RNA, 23 nt, Artificial Sequence
  Synthetic
ccugcuucagccuccugaguagc

SEQ ID NO: 141934 - RNA, 24 nt, Artificial Sequence
  Synthetic
uccugcuucagccuccugaguagc

SEQ ID NO: 141935 - RNA, 18 nt, Artificial Sequence
  Synthetic
cucagccaucugaguagc

SEQ ID NO: 141936 - RNA, 19 nt, Artificial Sequence
  Synthetic
ccucagccaucugaguagc

SEQ ID NO: 141937 - RNA, 21 nt, Artificial Sequence
  Synthetic
ugccucagccaucugaguagc

SEQ ID NO: 141938 - RNA, 22 nt, Artificial Sequence
  Synthetic
cugccucagccaucugaguagc

SEQ ID NO: 141939 - RNA, 23 nt, Artificial Sequence
  Synthetic
ccugccucagccaucugaguagc

SEQ ID NO: 141940 - RNA, 24 nt, Artificial Sequence
  Synthetic
uccugccucagccaucugaguagc

SEQ ID NO: 141941 - RNA, 18 nt, Artificial Sequence
  Synthetic
uucuuguuauugaguagc

SEQ ID NO: 141942 - RNA, 19 nt, Artificial Sequence
  Synthetic
uuucuuguuauugaguagc

SEQ ID NO: 141943 - RNA, 20 nt, Artificial Sequence
  Synthetic
uuuucuuguuauugaguagc

SEQ ID NO: 141944 - RNA, 22 nt, Artificial Sequence
  Synthetic
uguuuucuuguuauugaguagc

SEQ ID NO: 141945 - RNA, 23 nt, Artificial Sequence
  Synthetic
uuguuuucuuguuauugaguagc

SEQ ID NO: 141946 - RNA, 24 nt, Artificial Sequence
  Synthetic
uuuguuuucuuguuauugaguagc

SEQ ID NO: 141947 - RNA, 18 nt, Artificial Sequence
  Synthetic
cucagccucccuaguagc

SEQ ID NO: 141948 - RNA, 19 nt, Artificial Sequence
  Synthetic
ccucagccucccuaguagc

SEQ ID NO: 141949 - RNA, 21 nt, Artificial Sequence
  Synthetic
ugccucagccucccuaguagc

SEQ ID NO: 141950 - RNA, 22 nt, Artificial Sequence
  Synthetic
cugccucagccucccuaguagc

SEQ ID NO: 141951 - RNA, 23 nt, Artificial Sequence
  Synthetic
ccugccucagccucccuaguagc

SEQ ID NO: 141952 - RNA, 24 nt, Artificial Sequence
  Synthetic
uccugccucagccucccuaguagc

SEQ ID NO: 141953 - RNA, 18 nt, Artificial Sequence
  Synthetic
uaaauuuaaaaaguuagc

SEQ ID NO: 141954 - RNA, 19 nt, Artificial Sequence
  Synthetic
uuaaauuuaaaaaguuagc

SEQ ID NO: 141955 - RNA, 20 nt, Artificial Sequence
  Synthetic
uuuaaauuuaaaaaguuagc

SEQ ID NO: 141956 - RNA, 18 nt, Artificial Sequence
  Synthetic
auuuuaaauaugguuagc

SEQ ID NO: 141957 - RNA, 19 nt, Artificial Sequence
  Synthetic
aauuuuaaauaugguuagc

SEQ ID NO: 141958 - RNA, 20 nt, Artificial Sequence
  Synthetic
aaauuuuaaauaugguuagc

SEQ ID NO: 141959 - RNA, 20 nt, Artificial Sequence
  Synthetic
cgggguuucaccauguuagc

SEQ ID NO: 141960 - RNA, 23 nt, Artificial Sequence
  Synthetic
aggcgggguuucaccauguuagc

SEQ ID NO: 141961 - RNA, 20 nt, Artificial Sequence
  Synthetic
cgggguuucaccguguuagc

SEQ ID NO: 141962 - RNA, 20 nt, Artificial Sequence
  Synthetic
ugggguuucaccguguuagc

SEQ ID NO: 141963 - RNA, 21 nt, Artificial Sequence
  Synthetic
augggguuucaccguguuagc

SEQ ID NO: 141964 - RNA, 23 nt, Artificial Sequence
  Synthetic
agaugggguuucaccguguuagc

SEQ ID NO: 141965 - RNA, 20 nt, Artificial Sequence
  Synthetic
cgggguuucacuguguuagc

SEQ ID NO: 141966 - RNA, 20 nt, Artificial Sequence
  Synthetic
ugggguuucuccuuguuagc

SEQ ID NO: 141967 - RNA, 21 nt, Artificial Sequence
  Synthetic
augggguuucuccuuguuagc

SEQ ID NO: 141968 - RNA, 23 nt, Artificial Sequence
  Synthetic
agaugggguuucuccuuguuagc

SEQ ID NO: 141969 - RNA, 18 nt, Artificial Sequence
  Synthetic
cucgaauaagaaaaacgc

SEQ ID NO: 141970 - RNA, 19 nt, Artificial Sequence
  Synthetic
acucgaauaagaaaaacgc

SEQ ID NO: 141971 - RNA, 20 nt, Artificial Sequence
  Synthetic
aacucgaauaagaaaaacgc

SEQ ID NO: 141972 - RNA, 22 nt, Artificial Sequence
  Synthetic
ugaacucgaauaagaaaaacgc

SEQ ID NO: 141973 - RNA, 23 nt, Artificial Sequence
  Synthetic
uugaacucgaauaagaaaaacgc

SEQ ID NO: 141974 - RNA, 24 nt, Artificial Sequence
  Synthetic
uuugaacucgaauaagaaaaacgc

SEQ ID NO: 141975 - RNA, 18 nt, Artificial Sequence
  Synthetic
aggcaugugccaccacgc

SEQ ID NO: 141976 - RNA, 19 nt, Artificial Sequence
  Synthetic
caggcaugugccaccacgc

SEQ ID NO: 141977 - RNA, 20 nt, Artificial Sequence
  Synthetic
acaggcaugugccaccacgc

SEQ ID NO: 141978 - RNA, 21 nt, Artificial Sequence
  Synthetic
uacaggcaugugccaccacgc

SEQ ID NO: 141979 - RNA, 22 nt, Artificial Sequence
  Synthetic
cuacaggcaugugccaccacgc

SEQ ID NO: 141980 - RNA, 23 nt, Artificial Sequence
  Synthetic
acuacaggcaugugccaccacgc

SEQ ID NO: 141981 - RNA, 24 nt, Artificial Sequence
  Synthetic
uacuacaggcaugugccaccacgc

SEQ ID NO: 141982 - RNA, 18 nt, Artificial Sequence
  Synthetic
uugccacugcucucccgc

SEQ ID NO: 141983 - RNA, 19 nt, Artificial Sequence
  Synthetic
cuugccacugcucucccgc

SEQ ID NO: 141984 - RNA, 20 nt, Artificial Sequence
  Synthetic
ucuugccacugcucucccgc

SEQ ID NO: 141985 - RNA, 21 nt, Artificial Sequence
  Synthetic
aucuugccacugcucucccgc

SEQ ID NO: 141986 - RNA, 23 nt, Artificial Sequence
  Synthetic
agaucuugccacugcucucccgc

SEQ ID NO: 141987 - RNA, 18 nt, Artificial Sequence
  Synthetic
cacugcaaccucugccgc

SEQ ID NO: 141988 - RNA, 19 nt, Artificial Sequence
  Synthetic
ucacugcaaccucugccgc

SEQ ID NO: 141989 - RNA, 20 nt, Artificial Sequence
  Synthetic
cucacugcaaccucugccgc

SEQ ID NO: 141990 - RNA, 23 nt, Artificial Sequence
  Synthetic
cggcucacugcaaccucugccgc

SEQ ID NO: 141991 - RNA, 24 nt, Artificial Sequence
  Synthetic
ucggcucacugcaaccucugccgc

SEQ ID NO: 141992 - RNA, 18 nt, Artificial Sequence
  Synthetic
aucggccucccuaagcgc

SEQ ID NO: 141993 - RNA, 19 nt, Artificial Sequence
  Synthetic
caucggccucccuaagcgc

SEQ ID NO: 141994 - RNA, 20 nt, Artificial Sequence
  Synthetic
acaucggccucccuaagcgc

SEQ ID NO: 141995 - RNA, 21 nt, Artificial Sequence
  Synthetic
cacaucggccucccuaagcgc

SEQ ID NO: 141996 - RNA, 22 nt, Artificial Sequence
  Synthetic
ccacaucggccucccuaagcgc

SEQ ID NO: 141997 - RNA, 23 nt, Artificial Sequence
  Synthetic
cccacaucggccucccuaagcgc

SEQ ID NO: 141998 - RNA, 18 nt, Artificial Sequence
  Synthetic
ugcuguuuuaaugagcgc

SEQ ID NO: 141999 - RNA, 19 nt, Artificial Sequence
  Synthetic
augcuguuuuaaugagcgc

SEQ ID NO: 142000 - RNA, 20 nt, Artificial Sequence
  Synthetic
caugcuguuuuaaugagcgc

SEQ ID NO: 142001 - RNA, 21 nt, Artificial Sequence
  Synthetic
acaugcuguuuuaaugagcgc

SEQ ID NO: 142002 - RNA, 22 nt, Artificial Sequence
  Synthetic
aacaugcuguuuuaaugagcgc

SEQ ID NO: 142003 - RNA, 23 nt, Artificial Sequence
  Synthetic
caacaugcuguuuuaaugagcgc

SEQ ID NO: 142004 - RNA, 18 nt, Artificial Sequence
  Synthetic
caaauguagugguuucgc

SEQ ID NO: 142005 - RNA, 19 nt, Artificial Sequence
  Synthetic
ucaaauguagugguuucgc

SEQ ID NO: 142006 - RNA, 20 nt, Artificial Sequence
  Synthetic
cucaaauguagugguuucgc

SEQ ID NO: 142007 - RNA, 21 nt, Artificial Sequence
  Synthetic
ucucaaauguagugguuucgc

SEQ ID NO: 142008 - RNA, 22 nt, Artificial Sequence
  Synthetic
uucucaaauguagugguuucgc

SEQ ID NO: 142009 - RNA, 23 nt, Artificial Sequence
  Synthetic
cuucucaaauguagugguuucgc

SEQ ID NO: 142010 - RNA, 24 nt, Artificial Sequence
  Synthetic
acuucucaaauguagugguuucgc

SEQ ID NO: 142011 - RNA, 18 nt, Artificial Sequence
  Synthetic
aagggacuacacaaaggc

SEQ ID NO: 142012 - RNA, 20 nt, Artificial Sequence
  Synthetic
agaagggacuacacaaaggc

SEQ ID NO: 142013 - RNA, 18 nt, Artificial Sequence
  Synthetic
aggugaauucaugaaggc

SEQ ID NO: 142014 - RNA, 19 nt, Artificial Sequence
  Synthetic
caggugaauucaugaaggc

SEQ ID NO: 142015 - RNA, 20 nt, Artificial Sequence
  Synthetic
acaggugaauucaugaaggc

SEQ ID NO: 142016 - RNA, 18 nt, Artificial Sequence
  Synthetic
uguggaaacauaacaggc

SEQ ID NO: 142017 - RNA, 19 nt, Artificial Sequence
  Synthetic
cuguggaaacauaacaggc

SEQ ID NO: 142018 - RNA, 20 nt, Artificial Sequence
  Synthetic
ucuguggaaacauaacaggc

SEQ ID NO: 142019 - RNA, 18 nt, Artificial Sequence
  Synthetic
auguucuuacucacaggc

SEQ ID NO: 142020 - RNA, 19 nt, Artificial Sequence
  Synthetic
cauguucuuacucacaggc

SEQ ID NO: 142021 - RNA, 20 nt, Artificial Sequence
  Synthetic
acauguucuuacucacaggc

SEQ ID NO: 142022 - RNA, 21 nt, Artificial Sequence
  Synthetic
cacauguucuuacucacaggc

SEQ ID NO: 142023 - RNA, 22 nt, Artificial Sequence
  Synthetic
ccacauguucuuacucacaggc

SEQ ID NO: 142024 - RNA, 23 nt, Artificial Sequence
  Synthetic
accacauguucuuacucacaggc

SEQ ID NO: 142025 - RNA, 24 nt, Artificial Sequence
  Synthetic
caccacauguucuuacucacaggc

SEQ ID NO: 142026 - RNA, 18 nt, Artificial Sequence
  Synthetic
agcacuaggauuacaggc

SEQ ID NO: 142027 - RNA, 19 nt, Artificial Sequence
  Synthetic
aagcacuaggauuacaggc

SEQ ID NO: 142028 - RNA, 20 nt, Artificial Sequence
  Synthetic
aaagcacuaggauuacaggc

SEQ ID NO: 142029 - RNA, 21 nt, Artificial Sequence
  Synthetic
caaagcacuaggauuacaggc

SEQ ID NO: 142030 - RNA, 22 nt, Artificial Sequence
  Synthetic
ccaaagcacuaggauuacaggc

SEQ ID NO: 142031 - RNA, 23 nt, Artificial Sequence
  Synthetic
cccaaagcacuaggauuacaggc

SEQ ID NO: 142032 - RNA, 24 nt, Artificial Sequence
  Synthetic
ucccaaagcacuaggauuacaggc

SEQ ID NO: 142033 - RNA, 18 nt, Artificial Sequence
  Synthetic
cucacucugucaccaggc

SEQ ID NO: 142034 - RNA, 19 nt, Artificial Sequence
  Synthetic
ucucacucugucaccaggc

SEQ ID NO: 142035 - RNA, 21 nt, Artificial Sequence
  Synthetic
agucucacucugucaccaggc

SEQ ID NO: 142036 - RNA, 23 nt, Artificial Sequence
  Synthetic
agagucucacucugucaccaggc

SEQ ID NO: 142037 - RNA, 24 nt, Artificial Sequence
  Synthetic
cagagucucacucugucaccaggc

SEQ ID NO: 142038 - RNA, 18 nt, Artificial Sequence
  Synthetic
cuugcucugucaccaggc

SEQ ID NO: 142039 - RNA, 19 nt, Artificial Sequence
  Synthetic
ucuugcucugucaccaggc

SEQ ID NO: 142040 - RNA, 23 nt, Artificial Sequence
  Synthetic
ugggucuugcucugucaccaggc

SEQ ID NO: 142041 - RNA, 24 nt, Artificial Sequence
  Synthetic
cugggucuugcucugucaccaggc

SEQ ID NO: 142042 - RNA, 18 nt, Artificial Sequence
  Synthetic
ucacccuguaacccaggc

SEQ ID NO: 142043 - RNA, 19 nt, Artificial Sequence
  Synthetic
cucacccuguaacccaggc

SEQ ID NO: 142044 - RNA, 20 nt, Artificial Sequence
  Synthetic
ucucacccuguaacccaggc

SEQ ID NO: 142045 - RNA, 22 nt, Artificial Sequence
  Synthetic
agucucacccuguaacccaggc

SEQ ID NO: 142046 - RNA, 18 nt, Artificial Sequence
  Synthetic
uugcuccaucacccaggc

SEQ ID NO: 142047 - RNA, 19 nt, Artificial Sequence
  Synthetic
cuugcuccaucacccaggc

SEQ ID NO: 142048 - RNA, 20 nt, Artificial Sequence
  Synthetic
ucuugcuccaucacccaggc

SEQ ID NO: 142049 - RNA, 22 nt, Artificial Sequence
  Synthetic
agucuugcuccaucacccaggc

SEQ ID NO: 142050 - RNA, 18 nt, Artificial Sequence
  Synthetic
uugcugggucacccaggc

SEQ ID NO: 142051 - RNA, 19 nt, Artificial Sequence
  Synthetic
cuugcugggucacccaggc

SEQ ID NO: 142052 - RNA, 20 nt, Artificial Sequence
  Synthetic
ucuugcugggucacccaggc

SEQ ID NO: 142053 - RNA, 22 nt, Artificial Sequence
  Synthetic
agucuugcugggucacccaggc

SEQ ID NO: 142054 - RNA, 24 nt, Artificial Sequence
  Synthetic
agagucuugcugggucacccaggc

SEQ ID NO: 142055 - RNA, 18 nt, Artificial Sequence
  Synthetic
ucacccugucacccaggc

SEQ ID NO: 142056 - RNA, 19 nt, Artificial Sequence
  Synthetic
cucacccugucacccaggc

SEQ ID NO: 142057 - RNA, 20 nt, Artificial Sequence
  Synthetic
ucucacccugucacccaggc

SEQ ID NO: 142058 - RNA, 21 nt, Artificial Sequence
  Synthetic
uucucacccugucacccaggc

SEQ ID NO: 142059 - RNA, 22 nt, Artificial Sequence
  Synthetic
auucucacccugucacccaggc

SEQ ID NO: 142060 - RNA, 24 nt, Artificial Sequence
  Synthetic
agauucucacccugucacccaggc

SEQ ID NO: 142061 - RNA, 18 nt, Artificial Sequence
  Synthetic
auacccugucacccaggc

SEQ ID NO: 142062 - RNA, 19 nt, Artificial Sequence
  Synthetic
cauacccugucacccaggc

SEQ ID NO: 142063 - RNA, 20 nt, Artificial Sequence
  Synthetic
ucauacccugucacccaggc

SEQ ID NO: 142064 - RNA, 24 nt, Artificial Sequence
  Synthetic
agggucauacccugucacccaggc

SEQ ID NO: 142065 - RNA, 22 nt, Artificial Sequence
  Synthetic
agucucacucugucacccaggc

SEQ ID NO: 142066 - RNA, 23 nt, Artificial Sequence
  Synthetic
cagucucacucugucacccaggc

SEQ ID NO: 142067 - RNA, 24 nt, Artificial Sequence
  Synthetic
acagucucacucugucacccaggc

SEQ ID NO: 142068 - RNA, 18 nt, Artificial Sequence
  Synthetic
ucgcucugucacccaggc

SEQ ID NO: 142069 - RNA, 19 nt, Artificial Sequence
  Synthetic
cucgcucugucacccaggc

SEQ ID NO: 142070 - RNA, 20 nt, Artificial Sequence
  Synthetic
ucucgcucugucacccaggc

SEQ ID NO: 142071 - RNA, 23 nt, Artificial Sequence
  Synthetic
cagucucgcucugucacccaggc

SEQ ID NO: 142072 - RNA, 24 nt, Artificial Sequence
  Synthetic
acagucucgcucugucacccaggc

SEQ ID NO: 142073 - RNA, 18 nt, Artificial Sequence
  Synthetic
uugcucugucacccaggc

SEQ ID NO: 142074 - RNA, 19 nt, Artificial Sequence
  Synthetic
cuugcucugucacccaggc

SEQ ID NO: 142075 - RNA, 20 nt, Artificial Sequence
  Synthetic
ucuugcucugucacccaggc

SEQ ID NO: 142076 - RNA, 24 nt, Artificial Sequence
  Synthetic
ugagucuugcucugucacccaggc

SEQ ID NO: 142077 - RNA, 19 nt, Artificial Sequence
  Synthetic
uuugcucugucacccaggc

SEQ ID NO: 142078 - RNA, 20 nt, Artificial Sequence
  Synthetic
uuuugcucugucacccaggc

SEQ ID NO: 142079 - RNA, 22 nt, Artificial Sequence
  Synthetic
aguuuugcucugucacccaggc

SEQ ID NO: 142080 - RNA, 18 nt, Artificial Sequence
  Synthetic
ucguucugucacccaggc

SEQ ID NO: 142081 - RNA, 19 nt, Artificial Sequence
  Synthetic
cucguucugucacccaggc

SEQ ID NO: 142082 - RNA, 20 nt, Artificial Sequence
  Synthetic
ucucguucugucacccaggc

SEQ ID NO: 142083 - RNA, 22 nt, Artificial Sequence
  Synthetic
agucucguucugucacccaggc

SEQ ID NO: 142084 - RNA, 24 nt, Artificial Sequence
  Synthetic
agagucucguucugucacccaggc

SEQ ID NO: 142085 - RNA, 18 nt, Artificial Sequence
  Synthetic
ugcuuuugucacccaggc

SEQ ID NO: 142086 - RNA, 19 nt, Artificial Sequence
  Synthetic
uugcuuuugucacccaggc

SEQ ID NO: 142087 - RNA, 20 nt, Artificial Sequence
  Synthetic
uuugcuuuugucacccaggc

SEQ ID NO: 142088 - RNA, 21 nt, Artificial Sequence
  Synthetic
uuuugcuuuugucacccaggc

SEQ ID NO: 142089 - RNA, 22 nt, Artificial Sequence
  Synthetic
auuuugcuuuugucacccaggc

SEQ ID NO: 142090 - RNA, 23 nt, Artificial Sequence
  Synthetic
aauuuugcuuuugucacccaggc

SEQ ID NO: 142091 - RNA, 18 nt, Artificial Sequence
  Synthetic
ucacucuguuacccaggc

SEQ ID NO: 142092 - RNA, 19 nt, Artificial Sequence
  Synthetic
cucacucuguuacccaggc

SEQ ID NO: 142093 - RNA, 20 nt, Artificial Sequence
  Synthetic
ucucacucuguuacccaggc

SEQ ID NO: 142094 - RNA, 22 nt, Artificial Sequence
  Synthetic
agucucacucuguuacccaggc

SEQ ID NO: 142095 - RNA, 24 nt, Artificial Sequence
  Synthetic
agagucucacucuguuacccaggc

SEQ ID NO: 142096 - RNA, 18 nt, Artificial Sequence
  Synthetic
cgcucugucaccccaggc

SEQ ID NO: 142097 - RNA, 19 nt, Artificial Sequence
  Synthetic
ucgcucugucaccccaggc

SEQ ID NO: 142098 - RNA, 20 nt, Artificial Sequence
  Synthetic
cucgcucugucaccccaggc

SEQ ID NO: 142099 - RNA, 21 nt, Artificial Sequence
  Synthetic
ucucgcucugucaccccaggc

SEQ ID NO: 142100 - RNA, 23 nt, Artificial Sequence
  Synthetic
agucucgcucugucaccccaggc

SEQ ID NO: 142101 - RNA, 18 nt, Artificial Sequence
  Synthetic
cgcucuugucccccaggc

SEQ ID NO: 142102 - RNA, 19 nt, Artificial Sequence
  Synthetic
ucgcucuugucccccaggc

SEQ ID NO: 142103 - RNA, 20 nt, Artificial Sequence
  Synthetic
cucgcucuugucccccaggc

SEQ ID NO: 142104 - RNA, 21 nt, Artificial Sequence
  Synthetic
ucucgcucuugucccccaggc

SEQ ID NO: 142105 - RNA, 23 nt, Artificial Sequence
  Synthetic
agucucgcucuugucccccaggc

SEQ ID NO: 142106 - RNA, 24 nt, Artificial Sequence
  Synthetic
aagucucgcucuugucccccaggc

SEQ ID NO: 142107 - RNA, 18 nt, Artificial Sequence
  Synthetic
cucgccugcagcccaggc

SEQ ID NO: 142108 - RNA, 19 nt, Artificial Sequence
  Synthetic
ucucgccugcagcccaggc

SEQ ID NO: 142109 - RNA, 21 nt, Artificial Sequence
  Synthetic
agucucgccugcagcccaggc

SEQ ID NO: 142110 - RNA, 24 nt, Artificial Sequence
  Synthetic
uggagucucgccugcagcccaggc

SEQ ID NO: 142111 - RNA, 18 nt, Artificial Sequence
  Synthetic
uugcucagucgcccaggc

SEQ ID NO: 142112 - RNA, 19 nt, Artificial Sequence
  Synthetic
cuugcucagucgcccaggc

SEQ ID NO: 142113 - RNA, 20 nt, Artificial Sequence
  Synthetic
ucuugcucagucgcccaggc

SEQ ID NO: 142114 - RNA, 22 nt, Artificial Sequence
  Synthetic
agucuugcucagucgcccaggc

SEQ ID NO: 142115 - RNA, 18 nt, Artificial Sequence
  Synthetic
ucacucugucgcccaggc

SEQ ID NO: 142116 - RNA, 19 nt, Artificial Sequence
  Synthetic
cucacucugucgcccaggc

SEQ ID NO: 142117 - RNA, 20 nt, Artificial Sequence
  Synthetic
ucucacucugucgcccaggc

SEQ ID NO: 142118 - RNA, 22 nt, Artificial Sequence
  Synthetic
agucucacucugucgcccaggc

SEQ ID NO: 142119 - RNA, 18 nt, Artificial Sequence
  Synthetic
ucgcucugucgcccaggc

SEQ ID NO: 142120 - RNA, 19 nt, Artificial Sequence
  Synthetic
cucgcucugucgcccaggc

SEQ ID NO: 142121 - RNA, 20 nt, Artificial Sequence
  Synthetic
ucucgcucugucgcccaggc

SEQ ID NO: 142122 - RNA, 19 nt, Artificial Sequence
  Synthetic
uucgcucugucgcccaggc

SEQ ID NO: 142123 - RNA, 20 nt, Artificial Sequence
  Synthetic
uuucgcucugucgcccaggc

SEQ ID NO: 142124 - RNA, 22 nt, Artificial Sequence
  Synthetic
aguuucgcucugucgcccaggc

SEQ ID NO: 142125 - RNA, 19 nt, Artificial Sequence
  Synthetic
uuugcucugucgcccaggc

SEQ ID NO: 142126 - RNA, 20 nt, Artificial Sequence
  Synthetic
uuuugcucugucgcccaggc

SEQ ID NO: 142127 - RNA, 22 nt, Artificial Sequence
  Synthetic
aguuuugcucugucgcccaggc

SEQ ID NO: 142128 - RNA, 24 nt, Artificial Sequence
  Synthetic
agaguuuugcucugucgcccaggc

SEQ ID NO: 142129 - RNA, 18 nt, Artificial Sequence
  Synthetic
ucgcucuuucgcccaggc

SEQ ID NO: 142130 - RNA, 19 nt, Artificial Sequence
  Synthetic
uucgcucuuucgcccaggc

SEQ ID NO: 142131 - RNA, 20 nt, Artificial Sequence
  Synthetic
uuucgcucuuucgcccaggc

SEQ ID NO: 142132 - RNA, 22 nt, Artificial Sequence
  Synthetic
aguuucgcucuuucgcccaggc

SEQ ID NO: 142133 - RNA, 18 nt, Artificial Sequence
  Synthetic
uugcucugcugcccaggc

SEQ ID NO: 142134 - RNA, 19 nt, Artificial Sequence
  Synthetic
cuugcucugcugcccaggc

SEQ ID NO: 142135 - RNA, 20 nt, Artificial Sequence
  Synthetic
ucuugcucugcugcccaggc

SEQ ID NO: 142136 - RNA, 22 nt, Artificial Sequence
  Synthetic
agucuugcucugcugcccaggc

SEQ ID NO: 142137 - RNA, 23 nt, Artificial Sequence
  Synthetic
aagucuugcucugcugcccaggc

SEQ ID NO: 142138 - RNA, 24 nt, Artificial Sequence
  Synthetic
aaagucuugcucugcugcccaggc

SEQ ID NO: 142139 - RNA, 18 nt, Artificial Sequence
  Synthetic
cugcuccauugcccaggc

SEQ ID NO: 142140 - RNA, 19 nt, Artificial Sequence
  Synthetic
ccugcuccauugcccaggc

SEQ ID NO: 142141 - RNA, 20 nt, Artificial Sequence
  Synthetic
uccugcuccauugcccaggc

SEQ ID NO: 142142 - RNA, 22 nt, Artificial Sequence
  Synthetic
aguccugcuccauugcccaggc

SEQ ID NO: 142143 - RNA, 24 nt, Artificial Sequence
  Synthetic
agaguccugcuccauugcccaggc

SEQ ID NO: 142144 - RNA, 18 nt, Artificial Sequence
  Synthetic
ucacucuguugcccaggc

SEQ ID NO: 142145 - RNA, 19 nt, Artificial Sequence
  Synthetic
cucacucuguugcccaggc

SEQ ID NO: 142146 - RNA, 20 nt, Artificial Sequence
  Synthetic
ucucacucuguugcccaggc

SEQ ID NO: 142147 - RNA, 21 nt, Artificial Sequence
  Synthetic
aucucacucuguugcccaggc

SEQ ID NO: 142148 - RNA, 22 nt, Artificial Sequence
  Synthetic
aaucucacucuguugcccaggc

SEQ ID NO: 142149 - RNA, 23 nt, Artificial Sequence
  Synthetic
caaucucacucuguugcccaggc

SEQ ID NO: 142150 - RNA, 24 nt, Artificial Sequence
  Synthetic
acaaucucacucuguugcccaggc

SEQ ID NO: 142151 - RNA, 22 nt, Artificial Sequence
  Synthetic
caucucacucuguugcccaggc

SEQ ID NO: 142152 - RNA, 24 nt, Artificial Sequence
  Synthetic
agcaucucacucuguugcccaggc

SEQ ID NO: 142153 - RNA, 22 nt, Artificial Sequence
  Synthetic
agucucacucuguugcccaggc

SEQ ID NO: 142154 - RNA, 18 nt, Artificial Sequence
  Synthetic
uugcucuguugcccaggc

SEQ ID NO: 142155 - RNA, 19 nt, Artificial Sequence
  Synthetic
cuugcucuguugcccaggc

SEQ ID NO: 142156 - RNA, 20 nt, Artificial Sequence
  Synthetic
ucuugcucuguugcccaggc

SEQ ID NO: 142157 - RNA, 21 nt, Artificial Sequence
  Synthetic
aucuugcucuguugcccaggc

SEQ ID NO: 142158 - RNA, 22 nt, Artificial Sequence
  Synthetic
aaucuugcucuguugcccaggc

SEQ ID NO: 142159 - RNA, 24 nt, Artificial Sequence
  Synthetic
agaaucuugcucuguugcccaggc

SEQ ID NO: 142160 - RNA, 21 nt, Artificial Sequence
  Synthetic
uuucacucuuguugcccaggc

SEQ ID NO: 142161 - RNA, 23 nt, Artificial Sequence
  Synthetic
aguuucacucuuguugcccaggc

SEQ ID NO: 142162 - RNA, 23 nt, Artificial Sequence
  Synthetic
uguuucacucuuguugcccaggc

SEQ ID NO: 142163 - RNA, 18 nt, Artificial Sequence
  Synthetic
cgcucuuguugcccaggc

SEQ ID NO: 142164 - RNA, 19 nt, Artificial Sequence
  Synthetic
ucgcucuuguugcccaggc

SEQ ID NO: 142165 - RNA, 20 nt, Artificial Sequence
  Synthetic
uucgcucuuguugcccaggc

SEQ ID NO: 142166 - RNA, 21 nt, Artificial Sequence
  Synthetic
uuucgcucuuguugcccaggc

SEQ ID NO: 142167 - RNA, 23 nt, Artificial Sequence
  Synthetic
aguuucgcucuuguugcccaggc

SEQ ID NO: 142168 - RNA, 18 nt, Artificial Sequence
  Synthetic
ugcucuuguugcccaggc

SEQ ID NO: 142169 - RNA, 19 nt, Artificial Sequence
  Synthetic
uugcucuuguugcccaggc

SEQ ID NO: 142170 - RNA, 20 nt, Artificial Sequence
  Synthetic
uuugcucuuguugcccaggc

SEQ ID NO: 142171 - RNA, 18 nt, Artificial Sequence
  Synthetic
uugcuuugucucccaggc

SEQ ID NO: 142172 - RNA, 19 nt, Artificial Sequence
  Synthetic
cuugcuuugucucccaggc

SEQ ID NO: 142173 - RNA, 20 nt, Artificial Sequence
  Synthetic
ucuugcuuugucucccaggc

SEQ ID NO: 142174 - RNA, 21 nt, Artificial Sequence
  Synthetic
uucuugcuuugucucccaggc

SEQ ID NO: 142175 - RNA, 22 nt, Artificial Sequence
  Synthetic
auucuugcuuugucucccaggc

SEQ ID NO: 142176 - RNA, 24 nt, Artificial Sequence
  Synthetic
ugauucuugcuuugucucccaggc

SEQ ID NO: 142177 - RNA, 18 nt, Artificial Sequence
  Synthetic
cucgcucugucgccaggc

SEQ ID NO: 142178 - RNA, 19 nt, Artificial Sequence
  Synthetic
ucucgcucugucgccaggc

SEQ ID NO: 142179 - RNA, 21 nt, Artificial Sequence
  Synthetic
agucucgcucugucgccaggc

SEQ ID NO: 142180 - RNA, 22 nt, Artificial Sequence
  Synthetic
aagucucgcucugucgccaggc

SEQ ID NO: 142181 - RNA, 24 nt, Artificial Sequence
  Synthetic
cgaagucucgcucugucgccaggc

SEQ ID NO: 142182 - RNA, 20 nt, Artificial Sequence
  Synthetic
uggagucucugucgccaggc

SEQ ID NO: 142183 - RNA, 21 nt, Artificial Sequence
  Synthetic
auggagucucugucgccaggc

SEQ ID NO: 142184 - RNA, 23 nt, Artificial Sequence
  Synthetic
agauggagucucugucgccaggc

SEQ ID NO: 142185 - RNA, 18 nt, Artificial Sequence
  Synthetic
uggcucugucacucaggc

SEQ ID NO: 142186 - RNA, 19 nt, Artificial Sequence
  Synthetic
cuggcucugucacucaggc

SEQ ID NO: 142187 - RNA, 20 nt, Artificial Sequence
  Synthetic
ucuggcucugucacucaggc

SEQ ID NO: 142188 - RNA, 21 nt, Artificial Sequence
  Synthetic
uucuggcucugucacucaggc

SEQ ID NO: 142189 - RNA, 18 nt, Artificial Sequence
  Synthetic
ucgcugugucgcucaggc

SEQ ID NO: 142190 - RNA, 19 nt, Artificial Sequence
  Synthetic
cucgcugugucgcucaggc

SEQ ID NO: 142191 - RNA, 20 nt, Artificial Sequence
  Synthetic
ucucgcugugucgcucaggc

SEQ ID NO: 142192 - RNA, 22 nt, Artificial Sequence
  Synthetic
agucucgcugugucgcucaggc

SEQ ID NO: 142193 - RNA, 24 nt, Artificial Sequence
  Synthetic
agagucucgcugugucgcucaggc

SEQ ID NO: 142194 - RNA, 18 nt, Artificial Sequence
  Synthetic
cccagcacuuugggaggc

SEQ ID NO: 142195 - RNA, 19 nt, Artificial Sequence
  Synthetic
ucccagcacuuugggaggc

SEQ ID NO: 142196 - RNA, 20 nt, Artificial Sequence
  Synthetic
aucccagcacuuugggaggc

SEQ ID NO: 142197 - RNA, 21 nt, Artificial Sequence
  Synthetic
aaucccagcacuuugggaggc

SEQ ID NO: 142198 - RNA, 22 nt, Artificial Sequence
  Synthetic
uaaucccagcacuuugggaggc

SEQ ID NO: 142199 - RNA, 23 nt, Artificial Sequence
  Synthetic
auaaucccagcacuuugggaggc

SEQ ID NO: 142200 - RNA, 24 nt, Artificial Sequence
  Synthetic
uauaaucccagcacuuugggaggc

SEQ ID NO: 142201 - RNA, 18 nt, Artificial Sequence
  Synthetic
uccagcgcuuugggaggc

SEQ ID NO: 142202 - RNA, 19 nt, Artificial Sequence
  Synthetic
uuccagcgcuuugggaggc

SEQ ID NO: 142203 - RNA, 20 nt, Artificial Sequence
  Synthetic
auuccagcgcuuugggaggc

SEQ ID NO: 142204 - RNA, 21 nt, Artificial Sequence
  Synthetic
aauuccagcgcuuugggaggc

SEQ ID NO: 142205 - RNA, 22 nt, Artificial Sequence
  Synthetic
uaauuccagcgcuuugggaggc

SEQ ID NO: 142206 - RNA, 24 nt, Artificial Sequence
  Synthetic
uguaauuccagcgcuuugggaggc

SEQ ID NO: 142207 - RNA, 18 nt, Artificial Sequence
  Synthetic
ucucacaguucuggaggc

SEQ ID NO: 142208 - RNA, 19 nt, Artificial Sequence
  Synthetic
uucucacaguucuggaggc

SEQ ID NO: 142209 - RNA, 20 nt, Artificial Sequence
  Synthetic
uuucucacaguucuggaggc

SEQ ID NO: 142210 - RNA, 21 nt, Artificial Sequence
  Synthetic
auuucucacaguucuggaggc

SEQ ID NO: 142211 - RNA, 22 nt, Artificial Sequence
  Synthetic
uauuucucacaguucuggaggc

SEQ ID NO: 142212 - RNA, 23 nt, Artificial Sequence
  Synthetic
uuauuucucacaguucuggaggc

SEQ ID NO: 142213 - RNA, 24 nt, Artificial Sequence
  Synthetic
cuuauuucucacaguucuggaggc

SEQ ID NO: 142214 - RNA, 18 nt, Artificial Sequence
  Synthetic
auguaagguccaugaggc

SEQ ID NO: 142215 - RNA, 18 nt, Artificial Sequence
  Synthetic
uucuugcugaagauaggc

SEQ ID NO: 142216 - RNA, 19 nt, Artificial Sequence
  Synthetic
auucuugcugaagauaggc

SEQ ID NO: 142217 - RNA, 22 nt, Artificial Sequence
  Synthetic
aggauucuugcugaagauaggc

SEQ ID NO: 142218 - RNA, 23 nt, Artificial Sequence
  Synthetic
caggauucuugcugaagauaggc

SEQ ID NO: 142219 - RNA, 24 nt, Artificial Sequence
  Synthetic
acaggauucuugcugaagauaggc

SEQ ID NO: 142220 - RNA, 18 nt, Artificial Sequence
  Synthetic
ucacuauguugccuaggc

SEQ ID NO: 142221 - RNA, 19 nt, Artificial Sequence
  Synthetic
cucacuauguugccuaggc

SEQ ID NO: 142222 - RNA, 20 nt, Artificial Sequence
  Synthetic
ucucacuauguugccuaggc

SEQ ID NO: 142223 - RNA, 22 nt, Artificial Sequence
  Synthetic
agucucacuauguugccuaggc

SEQ ID NO: 142224 - RNA, 24 nt, Artificial Sequence
  Synthetic
agagucucacuauguugccuaggc

SEQ ID NO: 142225 - RNA, 18 nt, Artificial Sequence
  Synthetic
ucacucuguugccuaggc

SEQ ID NO: 142226 - RNA, 19 nt, Artificial Sequence
  Synthetic
cucacucuguugccuaggc

SEQ ID NO: 142227 - RNA, 20 nt, Artificial Sequence
  Synthetic
ucucacucuguugccuaggc

SEQ ID NO: 142228 - RNA, 24 nt, Artificial Sequence
  Synthetic
agggucucacucuguugccuaggc

SEQ ID NO: 142229 - RNA, 18 nt, Artificial Sequence
  Synthetic
ugagccaccgcgcccggc

SEQ ID NO: 142230 - RNA, 20 nt, Artificial Sequence
  Synthetic
cgugagccaccgcgcccggc

SEQ ID NO: 142231 - RNA, 23 nt, Artificial Sequence
  Synthetic
aggcgugagccaccgcgcccggc

SEQ ID NO: 142232 - RNA, 24 nt, Artificial Sequence
  Synthetic
caggcgugagccaccgcgcccggc

SEQ ID NO: 142233 - RNA, 18 nt, Artificial Sequence
  Synthetic
aucuucaggcucuagggc

SEQ ID NO: 142234 - RNA, 19 nt, Artificial Sequence
  Synthetic
aaucuucaggcucuagggc

SEQ ID NO: 142235 - RNA, 20 nt, Artificial Sequence
  Synthetic
aaaucuucaggcucuagggc

SEQ ID NO: 142236 - RNA, 21 nt, Artificial Sequence
  Synthetic
aaaaucuucaggcucuagggc

SEQ ID NO: 142237 - RNA, 23 nt, Artificial Sequence
  Synthetic
agaaaaucuucaggcucuagggc

SEQ ID NO: 142238 - RNA, 18 nt, Artificial Sequence
  Synthetic
ucgcacuguugcccgggc

SEQ ID NO: 142239 - RNA, 19 nt, Artificial Sequence
  Synthetic
cucgcacuguugcccgggc

SEQ ID NO: 142240 - RNA, 20 nt, Artificial Sequence
  Synthetic
ucucgcacuguugcccgggc

SEQ ID NO: 142241 - RNA, 22 nt, Artificial Sequence
  Synthetic
agucucgcacuguugcccgggc

SEQ ID NO: 142242 - RNA, 18 nt, Artificial Sequence
  Synthetic
aguccaagaucaaggggc

SEQ ID NO: 142243 - RNA, 19 nt, Artificial Sequence
  Synthetic
aaguccaagaucaaggggc

SEQ ID NO: 142244 - RNA, 21 nt, Artificial Sequence
  Synthetic
cgaaguccaagaucaaggggc

SEQ ID NO: 142245 - RNA, 23 nt, Artificial Sequence
  Synthetic
ugcgaaguccaagaucaaggggc

SEQ ID NO: 142246 - RNA, 24 nt, Artificial Sequence
  Synthetic
cugcgaaguccaagaucaaggggc

SEQ ID NO: 142247 - RNA, 18 nt, Artificial Sequence
  Synthetic
aagagauaaggaaggggc

SEQ ID NO: 142248 - RNA, 21 nt, Artificial Sequence
  Synthetic
agggggaggaaggagaggggc

SEQ ID NO: 142249 - RNA, 22 nt, Artificial Sequence
  Synthetic
aagggggaggaaggagaggggc

SEQ ID NO: 142250 - RNA, 24 nt, Artificial Sequence
  Synthetic
agaagggggaggaaggagaggggc

SEQ ID NO: 142251 - RNA, 18 nt, Artificial Sequence
  Synthetic
acuuugggaagcuggggc

SEQ ID NO: 142252 - RNA, 19 nt, Artificial Sequence
  Synthetic
cacuuugggaagcuggggc

SEQ ID NO: 142253 - RNA, 21 nt, Artificial Sequence
  Synthetic
agcacuuugggaagcuggggc

SEQ ID NO: 142254 - RNA, 22 nt, Artificial Sequence
  Synthetic
cagcacuuugggaagcuggggc

SEQ ID NO: 142255 - RNA, 23 nt, Artificial Sequence
  Synthetic
ccagcacuuugggaagcuggggc

SEQ ID NO: 142256 - RNA, 24 nt, Artificial Sequence
  Synthetic
cccagcacuuugggaagcuggggc

SEQ ID NO: 142257 - RNA, 18 nt, Artificial Sequence
  Synthetic
aaccuccaccuccugggc

SEQ ID NO: 142258 - RNA, 19 nt, Artificial Sequence
  Synthetic
caaccuccaccuccugggc

SEQ ID NO: 142259 - RNA, 21 nt, Artificial Sequence
  Synthetic
ugcaaccuccaccuccugggc

SEQ ID NO: 142260 - RNA, 22 nt, Artificial Sequence
  Synthetic
cugcaaccuccaccuccugggc

SEQ ID NO: 142261 - RNA, 23 nt, Artificial Sequence
  Synthetic
acugcaaccuccaccuccugggc

SEQ ID NO: 142262 - RNA, 24 nt, Artificial Sequence
  Synthetic
cacugcaaccuccaccuccugggc

SEQ ID NO: 142263 - RNA, 19 nt, Artificial Sequence
  Synthetic
ugaaaagguauguuugggc

SEQ ID NO: 142264 - RNA, 20 nt, Artificial Sequence
  Synthetic
uugaaaagguauguuugggc

SEQ ID NO: 142265 - RNA, 20 nt, Artificial Sequence
  Synthetic
uggcuccuuuuagccauggc

SEQ ID NO: 142266 - RNA, 21 nt, Artificial Sequence
  Synthetic
uuggcuccuuuuagccauggc

SEQ ID NO: 142267 - RNA, 22 nt, Artificial Sequence
  Synthetic
cuuggcuccuuuuagccauggc

SEQ ID NO: 142268 - RNA, 23 nt, Artificial Sequence
  Synthetic
ucuuggcuccuuuuagccauggc

SEQ ID NO: 142269 - RNA, 24 nt, Artificial Sequence
  Synthetic
aucuuggcuccuuuuagccauggc

SEQ ID NO: 142270 - RNA, 20 nt, Artificial Sequence
  Synthetic
uggccccuuuuauccauggc

SEQ ID NO: 142271 - RNA, 21 nt, Artificial Sequence
  Synthetic
uuggccccuuuuauccauggc

SEQ ID NO: 142272 - RNA, 22 nt, Artificial Sequence
  Synthetic
cuuggccccuuuuauccauggc

SEQ ID NO: 142273 - RNA, 23 nt, Artificial Sequence
  Synthetic
ccuuggccccuuuuauccauggc

SEQ ID NO: 142274 - RNA, 24 nt, Artificial Sequence
  Synthetic
accuuggccccuuuuauccauggc

SEQ ID NO: 142275 - RNA, 19 nt, Artificial Sequence
  Synthetic
agagagagagagagauggc

SEQ ID NO: 142276 - RNA, 21 nt, Artificial Sequence
  Synthetic
agagagagagagagagauggc

SEQ ID NO: 142277 - RNA, 23 nt, Artificial Sequence
  Synthetic
agagagagagagagagagauggc

SEQ ID NO: 142278 - RNA, 18 nt, Artificial Sequence
  Synthetic
cugaggcaggaggauggc

SEQ ID NO: 142279 - RNA, 21 nt, Artificial Sequence
  Synthetic
aggcugaggcaggaggauggc

SEQ ID NO: 142280 - RNA, 24 nt, Artificial Sequence
  Synthetic
aggaggcugaggcaggaggauggc

SEQ ID NO: 142281 - RNA, 18 nt, Artificial Sequence
  Synthetic
cucacucugcacccuggc

SEQ ID NO: 142282 - RNA, 19 nt, Artificial Sequence
  Synthetic
ucucacucugcacccuggc

SEQ ID NO: 142283 - RNA, 21 nt, Artificial Sequence
  Synthetic
agucucacucugcacccuggc

SEQ ID NO: 142284 - RNA, 24 nt, Artificial Sequence
  Synthetic
uggagucucacucugcacccuggc

SEQ ID NO: 142285 - RNA, 18 nt, Artificial Sequence
  Synthetic
cagguugccgcugcuggc

SEQ ID NO: 142286 - RNA, 20 nt, Artificial Sequence
  Synthetic
agcagguugccgcugcuggc

SEQ ID NO: 142287 - RNA, 21 nt, Artificial Sequence
  Synthetic
aagcagguugccgcugcuggc

SEQ ID NO: 142288 - RNA, 22 nt, Artificial Sequence
  Synthetic
caagcagguugccgcugcuggc

SEQ ID NO: 142289 - RNA, 23 nt, Artificial Sequence
  Synthetic
ccaagcagguugccgcugcuggc

SEQ ID NO: 142290 - RNA, 24 nt, Artificial Sequence
  Synthetic
cccaagcagguugccgcugcuggc

SEQ ID NO: 142291 - RNA, 18 nt, Artificial Sequence
  Synthetic
cucagccuccagaguggc

SEQ ID NO: 142292 - RNA, 19 nt, Artificial Sequence
  Synthetic
ccucagccuccagaguggc

SEQ ID NO: 142293 - RNA, 21 nt, Artificial Sequence
  Synthetic
ugccucagccuccagaguggc

SEQ ID NO: 142294 - RNA, 22 nt, Artificial Sequence
  Synthetic
cugccucagccuccagaguggc

SEQ ID NO: 142295 - RNA, 23 nt, Artificial Sequence
  Synthetic
ccugccucagccuccagaguggc

SEQ ID NO: 142296 - RNA, 24 nt, Artificial Sequence
  Synthetic
uccugccucagccuccagaguggc

SEQ ID NO: 142297 - RNA, 18 nt, Artificial Sequence
  Synthetic
cucagccucccgaguggc

SEQ ID NO: 142298 - RNA, 19 nt, Artificial Sequence
  Synthetic
ucucagccucccgaguggc

SEQ ID NO: 142299 - RNA, 21 nt, Artificial Sequence
  Synthetic
ugucucagccucccgaguggc

SEQ ID NO: 142300 - RNA, 22 nt, Artificial Sequence
  Synthetic
cugucucagccucccgaguggc

SEQ ID NO: 142301 - RNA, 23 nt, Artificial Sequence
  Synthetic
ucugucucagccucccgaguggc

SEQ ID NO: 142302 - RNA, 24 nt, Artificial Sequence
  Synthetic
cucugucucagccucccgaguggc

SEQ ID NO: 142303 - RNA, 18 nt, Artificial Sequence
  Synthetic
agccauggcuggaguggc

SEQ ID NO: 142304 - RNA, 19 nt, Artificial Sequence
  Synthetic
uagccauggcuggaguggc

SEQ ID NO: 142305 - RNA, 20 nt, Artificial Sequence
  Synthetic
uuagccauggcuggaguggc

SEQ ID NO: 142306 - RNA, 21 nt, Artificial Sequence
  Synthetic
uuuagccauggcuggaguggc

SEQ ID NO: 142307 - RNA, 22 nt, Artificial Sequence
  Synthetic
uuuuagccauggcuggaguggc

SEQ ID NO: 142308 - RNA, 23 nt, Artificial Sequence
  Synthetic
cuuuuagccauggcuggaguggc

SEQ ID NO: 142309 - RNA, 24 nt, Artificial Sequence
  Synthetic
ccuuuuagccauggcuggaguggc

SEQ ID NO: 142310 - RNA, 22 nt, Artificial Sequence
  Synthetic
ugacauuccugguugggguggc

SEQ ID NO: 142311 - RNA, 23 nt, Artificial Sequence
  Synthetic
cugacauuccugguugggguggc

SEQ ID NO: 142312 - RNA, 24 nt, Artificial Sequence
  Synthetic
ccugacauuccugguugggguggc

SEQ ID NO: 142313 - RNA, 18 nt, Artificial Sequence
  Synthetic
augguguguguguguggc

SEQ ID NO: 142314 - RNA, 19 nt, Artificial Sequence
  Synthetic
caugguguguguguguggc

SEQ ID NO: 142315 - RNA, 20 nt, Artificial Sequence
  Synthetic
ccaugguguguguguguggc

SEQ ID NO: 142316 - RNA, 18 nt, Artificial Sequence
  Synthetic
ugagccaaugugauuggc

SEQ ID NO: 142317 - RNA, 19 nt, Artificial Sequence
  Synthetic
augagccaaugugauuggc

SEQ ID NO: 142318 - RNA, 20 nt, Artificial Sequence
  Synthetic
caugagccaaugugauuggc

SEQ ID NO: 142319 - RNA, 23 nt, Artificial Sequence
  Synthetic
aggcaugagccaaugugauuggc

SEQ ID NO: 142320 - RNA, 24 nt, Artificial Sequence
  Synthetic
caggcaugagccaaugugauuggc

SEQ ID NO: 142321 - RNA, 20 nt, Artificial Sequence
  Synthetic
cgggguuucaccauguuggc

SEQ ID NO: 142322 - RNA, 18 nt, Artificial Sequence
  Synthetic
cuuuugugcauuuuuggc

SEQ ID NO: 142323 - RNA, 19 nt, Artificial Sequence
  Synthetic
acuuuugugcauuuuuggc

SEQ ID NO: 142324 - RNA, 21 nt, Artificial Sequence
  Synthetic
ugacuuuugugcauuuuuggc

SEQ ID NO: 142325 - RNA, 22 nt, Artificial Sequence
  Synthetic
uugacuuuugugcauuuuuggc

SEQ ID NO: 142326 - RNA, 23 nt, Artificial Sequence
  Synthetic
uuugacuuuugugcauuuuuggc

SEQ ID NO: 142327 - RNA, 24 nt, Artificial Sequence
  Synthetic
auuugacuuuugugcauuuuuggc

SEQ ID NO: 142328 - RNA, 19 nt, Artificial Sequence
  Synthetic
ugaauuauuuuaaaaaugc

SEQ ID NO: 142329 - RNA, 20 nt, Artificial Sequence
  Synthetic
augaauuauuuuaaaaaugc

SEQ ID NO: 142330 - RNA, 19 nt, Artificial Sequence
  Synthetic
cgacaacuaaaagcaaugc

SEQ ID NO: 142331 - RNA, 20 nt, Artificial Sequence
  Synthetic
acgacaacuaaaagcaaugc

SEQ ID NO: 142332 - RNA, 21 nt, Artificial Sequence
  Synthetic
uacgacaacuaaaagcaaugc

SEQ ID NO: 142333 - RNA, 22 nt, Artificial Sequence
  Synthetic
auacgacaacuaaaagcaaugc

SEQ ID NO: 142334 - RNA, 24 nt, Artificial Sequence
  Synthetic
agauacgacaacuaaaagcaaugc

SEQ ID NO: 142335 - RNA, 21 nt, Artificial Sequence
  Synthetic
uagcugugcauggaagaaugc

SEQ ID NO: 142336 - RNA, 22 nt, Artificial Sequence
  Synthetic
auagcugugcauggaagaaugc

SEQ ID NO: 142337 - RNA, 23 nt, Artificial Sequence
  Synthetic
cauagcugugcauggaagaaugc

SEQ ID NO: 142338 - RNA, 18 nt, Artificial Sequence
  Synthetic
aaaaaaauauauacaugc

SEQ ID NO: 142339 - RNA, 20 nt, Artificial Sequence
  Synthetic
ugaaaaaaauauauacaugc

SEQ ID NO: 142340 - RNA, 21 nt, Artificial Sequence
  Synthetic
augaaaaaaauauauacaugc

SEQ ID NO: 142341 - RNA, 22 nt, Artificial Sequence
  Synthetic
aaugaaaaaaauauauacaugc

SEQ ID NO: 142342 - RNA, 23 nt, Artificial Sequence
  Synthetic
aaaugaaaaaaauauauacaugc

SEQ ID NO: 142343 - RNA, 24 nt, Artificial Sequence
  Synthetic
aaaaugaaaaaaauauauacaugc

SEQ ID NO: 142344 - RNA, 18 nt, Artificial Sequence
  Synthetic
uccauggaugaaagaugc

SEQ ID NO: 142345 - RNA, 19 nt, Artificial Sequence
  Synthetic
auccauggaugaaagaugc

SEQ ID NO: 142346 - RNA, 20 nt, Artificial Sequence
  Synthetic
aauccauggaugaaagaugc

SEQ ID NO: 142347 - RNA, 18 nt, Artificial Sequence
  Synthetic
uuagguauguuuagaugc

SEQ ID NO: 142348 - RNA, 19 nt, Artificial Sequence
  Synthetic
uuuagguauguuuagaugc

SEQ ID NO: 142349 - RNA, 21 nt, Artificial Sequence
  Synthetic
uguuuagguauguuuagaugc

SEQ ID NO: 142350 - RNA, 22 nt, Artificial Sequence
  Synthetic
auguuuagguauguuuagaugc

SEQ ID NO: 142351 - RNA, 23 nt, Artificial Sequence
  Synthetic
uauguuuagguauguuuagaugc

SEQ ID NO: 142352 - RNA, 24 nt, Artificial Sequence
  Synthetic
cuauguuuagguauguuuagaugc

SEQ ID NO: 142353 - RNA, 18 nt, Artificial Sequence
  Synthetic
uagguacggaauggaugc

SEQ ID NO: 142354 - RNA, 19 nt, Artificial Sequence
  Synthetic
auagguacggaauggaugc

SEQ ID NO: 142355 - RNA, 20 nt, Artificial Sequence
  Synthetic
aauagguacggaauggaugc

SEQ ID NO: 142356 - RNA, 18 nt, Artificial Sequence
  Synthetic
uaaaguaauaaaugaugc

SEQ ID NO: 142357 - RNA, 19 nt, Artificial Sequence
  Synthetic
auaaaguaauaaaugaugc

SEQ ID NO: 142358 - RNA, 20 nt, Artificial Sequence
  Synthetic
aauaaaguaauaaaugaugc

SEQ ID NO: 142359 - RNA, 18 nt, Artificial Sequence
  Synthetic
ccugucauuaagugaugc

SEQ ID NO: 142360 - RNA, 19 nt, Artificial Sequence
  Synthetic
uccugucauuaagugaugc

SEQ ID NO: 142361 - RNA, 20 nt, Artificial Sequence
  Synthetic
uuccugucauuaagugaugc

SEQ ID NO: 142362 - RNA, 21 nt, Artificial Sequence
  Synthetic
auuccugucauuaagugaugc

SEQ ID NO: 142363 - RNA, 22 nt, Artificial Sequence
  Synthetic
uauuccugucauuaagugaugc

SEQ ID NO: 142364 - RNA, 24 nt, Artificial Sequence
  Synthetic
uguauuccugucauuaagugaugc

SEQ ID NO: 142365 - RNA, 18 nt, Artificial Sequence
  Synthetic
cacugcaagcuccacugc

SEQ ID NO: 142366 - RNA, 19 nt, Artificial Sequence
  Synthetic
ucacugcaagcuccacugc

SEQ ID NO: 142367 - RNA, 20 nt, Artificial Sequence
  Synthetic
cucacugcaagcuccacugc

SEQ ID NO: 142368 - RNA, 23 nt, Artificial Sequence
  Synthetic
cggcucacugcaagcuccacugc

SEQ ID NO: 142369 - RNA, 24 nt, Artificial Sequence
  Synthetic
ucggcucacugcaagcuccacugc

SEQ ID NO: 142370 - RNA, 18 nt, Artificial Sequence
  Synthetic
acuuugaagcccgacugc

SEQ ID NO: 142371 - RNA, 19 nt, Artificial Sequence
  Synthetic
aacuuugaagcccgacugc

SEQ ID NO: 142372 - RNA, 21 nt, Artificial Sequence
  Synthetic
ugaacuuugaagcccgacugc

SEQ ID NO: 142373 - RNA, 23 nt, Artificial Sequence
  Synthetic
ugugaacuuugaagcccgacugc

SEQ ID NO: 142374 - RNA, 18 nt, Artificial Sequence
  Synthetic
aacuugaguucugacugc

SEQ ID NO: 142375 - RNA, 19 nt, Artificial Sequence
  Synthetic
aaacuugaguucugacugc

SEQ ID NO: 142376 - RNA, 21 nt, Artificial Sequence
  Synthetic
agaaacuugaguucugacugc

SEQ ID NO: 142377 - RNA, 22 nt, Artificial Sequence
  Synthetic
aagaaacuugaguucugacugc

SEQ ID NO: 142378 - RNA, 23 nt, Artificial Sequence
  Synthetic
caagaaacuugaguucugacugc

SEQ ID NO: 142379 - RNA, 24 nt, Artificial Sequence
  Synthetic
ccaagaaacuugaguucugacugc

SEQ ID NO: 142380 - RNA, 22 nt, Artificial Sequence
  Synthetic
ugauuagcugaaacuugacugc

SEQ ID NO: 142381 - RNA, 24 nt, Artificial Sequence
  Synthetic
ugugauuagcugaaacuugacugc

SEQ ID NO: 142382 - RNA, 18 nt, Artificial Sequence
  Synthetic
auaucccaguuuuccugc

SEQ ID NO: 142383 - RNA, 19 nt, Artificial Sequence
  Synthetic
uauaucccaguuuuccugc

SEQ ID NO: 142384 - RNA, 20 nt, Artificial Sequence
  Synthetic
uuauaucccaguuuuccugc

SEQ ID NO: 142385 - RNA, 21 nt, Artificial Sequence
  Synthetic
cuuauaucccaguuuuccugc

SEQ ID NO: 142386 - RNA, 22 nt, Artificial Sequence
  Synthetic
acuuauaucccaguuuuccugc

SEQ ID NO: 142387 - RNA, 23 nt, Artificial Sequence
  Synthetic
aacuuauaucccaguuuuccugc

SEQ ID NO: 142388 - RNA, 18 nt, Artificial Sequence
  Synthetic
ucugcagcaaacuucugc

SEQ ID NO: 142389 - RNA, 19 nt, Artificial Sequence
  Synthetic
cucugcagcaaacuucugc

SEQ ID NO: 142390 - RNA, 20 nt, Artificial Sequence
  Synthetic
ucucugcagcaaacuucugc

SEQ ID NO: 142391 - RNA, 21 nt, Artificial Sequence
  Synthetic
aucucugcagcaaacuucugc

SEQ ID NO: 142392 - RNA, 22 nt, Artificial Sequence
  Synthetic
caucucugcagcaaacuucugc

SEQ ID NO: 142393 - RNA, 23 nt, Artificial Sequence
  Synthetic
ccaucucugcagcaaacuucugc

SEQ ID NO: 142394 - RNA, 24 nt, Artificial Sequence
  Synthetic
cccaucucugcagcaaacuucugc

SEQ ID NO: 142395 - RNA, 18 nt, Artificial Sequence
  Synthetic
ucggccuccccaaagugc

SEQ ID NO: 142396 - RNA, 19 nt, Artificial Sequence
  Synthetic
cucggccuccccaaagugc

SEQ ID NO: 142397 - RNA, 20 nt, Artificial Sequence
  Synthetic
ccucggccuccccaaagugc

SEQ ID NO: 142398 - RNA, 22 nt, Artificial Sequence
  Synthetic
cgccucggccuccccaaagugc

SEQ ID NO: 142399 - RNA, 23 nt, Artificial Sequence
  Synthetic
ccgccucggccuccccaaagugc

SEQ ID NO: 142400 - RNA, 24 nt, Artificial Sequence
  Synthetic
cccgccucggccuccccaaagugc

SEQ ID NO: 142401 - RNA, 18 nt, Artificial Sequence
  Synthetic
cucagccucccaaagugc

SEQ ID NO: 142402 - RNA, 19 nt, Artificial Sequence
  Synthetic
ccucagccucccaaagugc

SEQ ID NO: 142403 - RNA, 21 nt, Artificial Sequence
  Synthetic
caccucagccucccaaagugc

SEQ ID NO: 142404 - RNA, 22 nt, Artificial Sequence
  Synthetic
ccaccucagccucccaaagugc

SEQ ID NO: 142405 - RNA, 23 nt, Artificial Sequence
  Synthetic
cccaccucagccucccaaagugc

SEQ ID NO: 142406 - RNA, 23 nt, Artificial Sequence
  Synthetic
uccaccucagccucccaaagugc

SEQ ID NO: 142407 - RNA, 24 nt, Artificial Sequence
  Synthetic
auccaccucagccucccaaagugc

SEQ ID NO: 142408 - RNA, 21 nt, Artificial Sequence
  Synthetic
ugccucagccucccaaagugc

SEQ ID NO: 142409 - RNA, 22 nt, Artificial Sequence
  Synthetic
cugccucagccucccaaagugc

SEQ ID NO: 142410 - RNA, 23 nt, Artificial Sequence
  Synthetic
ccugccucagccucccaaagugc

SEQ ID NO: 142411 - RNA, 24 nt, Artificial Sequence
  Synthetic
uccugccucagccucccaaagugc

SEQ ID NO: 142412 - RNA, 19 nt, Artificial Sequence
  Synthetic
ucucagccucccaaagugc

SEQ ID NO: 142413 - RNA, 21 nt, Artificial Sequence
  Synthetic
ugucucagccucccaaagugc

SEQ ID NO: 142414 - RNA, 22 nt, Artificial Sequence
  Synthetic
cugucucagccucccaaagugc

SEQ ID NO: 142415 - RNA, 23 nt, Artificial Sequence
  Synthetic
ccugucucagccucccaaagugc

SEQ ID NO: 142416 - RNA, 18 nt, Artificial Sequence
  Synthetic
uucagccucccaaagugc

SEQ ID NO: 142417 - RNA, 19 nt, Artificial Sequence
  Synthetic
cuucagccucccaaagugc

SEQ ID NO: 142418 - RNA, 20 nt, Artificial Sequence
  Synthetic
acuucagccucccaaagugc

SEQ ID NO: 142419 - RNA, 21 nt, Artificial Sequence
  Synthetic
cacuucagccucccaaagugc

SEQ ID NO: 142420 - RNA, 22 nt, Artificial Sequence
  Synthetic
ccacuucagccucccaaagugc

SEQ ID NO: 142421 - RNA, 23 nt, Artificial Sequence
  Synthetic
cccacuucagccucccaaagugc

SEQ ID NO: 142422 - RNA, 18 nt, Artificial Sequence
  Synthetic
cacggccucccaaagugc

SEQ ID NO: 142423 - RNA, 19 nt, Artificial Sequence
  Synthetic
ccacggccucccaaagugc

SEQ ID NO: 142424 - RNA, 20 nt, Artificial Sequence
  Synthetic
uccacggccucccaaagugc

SEQ ID NO: 142425 - RNA, 21 nt, Artificial Sequence
  Synthetic
cuccacggccucccaaagugc

SEQ ID NO: 142426 - RNA, 22 nt, Artificial Sequence
  Synthetic
ccuccacggccucccaaagugc

SEQ ID NO: 142427 - RNA, 23 nt, Artificial Sequence
  Synthetic
cccuccacggccucccaaagugc

SEQ ID NO: 142428 - RNA, 18 nt, Artificial Sequence
  Synthetic
cucggccucccaaagugc

SEQ ID NO: 142429 - RNA, 19 nt, Artificial Sequence
  Synthetic
ccucggccucccaaagugc

SEQ ID NO: 142430 - RNA, 20 nt, Artificial Sequence
  Synthetic
accucggccucccaaagugc

SEQ ID NO: 142431 - RNA, 22 nt, Artificial Sequence
  Synthetic
ucaccucggccucccaaagugc

SEQ ID NO: 142432 - RNA, 23 nt, Artificial Sequence
  Synthetic
uucaccucggccucccaaagugc

SEQ ID NO: 142433 - RNA, 21 nt, Artificial Sequence
  Synthetic
uaccucggccucccaaagugc

SEQ ID NO: 142434 - RNA, 22 nt, Artificial Sequence
  Synthetic
cuaccucggccucccaaagugc

SEQ ID NO: 142435 - RNA, 23 nt, Artificial Sequence
  Synthetic
ccuaccucggccucccaaagugc

SEQ ID NO: 142436 - RNA, 24 nt, Artificial Sequence
  Synthetic
accuaccucggccucccaaagugc

SEQ ID NO: 142437 - RNA, 24 nt, Artificial Sequence
  Synthetic
acccgccucggccucccaaagugc

SEQ ID NO: 142438 - RNA, 20 nt, Artificial Sequence
  Synthetic
uccucggccucccaaagugc

SEQ ID NO: 142439 - RNA, 21 nt, Artificial Sequence
  Synthetic
uuccucggccucccaaagugc

SEQ ID NO: 142440 - RNA, 22 nt, Artificial Sequence
  Synthetic
cuuccucggccucccaaagugc

SEQ ID NO: 142441 - RNA, 23 nt, Artificial Sequence
  Synthetic
ccuuccucggccucccaaagugc

SEQ ID NO: 142442 - RNA, 24 nt, Artificial Sequence
  Synthetic
uccuuccucggccucccaaagugc

SEQ ID NO: 142443 - RNA, 19 nt, Artificial Sequence
  Synthetic
ucucggccucccaaagugc

SEQ ID NO: 142444 - RNA, 21 nt, Artificial Sequence
  Synthetic
cgucucggccucccaaagugc

SEQ ID NO: 142445 - RNA, 22 nt, Artificial Sequence
  Synthetic
ccgucucggccucccaaagugc

SEQ ID NO: 142446 - RNA, 23 nt, Artificial Sequence
  Synthetic
cccgucucggccucccaaagugc

SEQ ID NO: 142447 - RNA, 18 nt, Artificial Sequence
  Synthetic
uucggccucccaaagugc

SEQ ID NO: 142448 - RNA, 19 nt, Artificial Sequence
  Synthetic
cuucggccucccaaagugc

SEQ ID NO: 142449 - RNA, 20 nt, Artificial Sequence
  Synthetic
acuucggccucccaaagugc

SEQ ID NO: 142450 - RNA, 21 nt, Artificial Sequence
  Synthetic
uacuucggccucccaaagugc

SEQ ID NO: 142451 - RNA, 22 nt, Artificial Sequence
  Synthetic
cuacuucggccucccaaagugc

SEQ ID NO: 142452 - RNA, 23 nt, Artificial Sequence
  Synthetic
ccuacuucggccucccaaagugc

SEQ ID NO: 142453 - RNA, 24 nt, Artificial Sequence
  Synthetic
accuacuucggccucccaaagugc

SEQ ID NO: 142454 - RNA, 18 nt, Artificial Sequence
  Synthetic
cuuggccucccaaagugc

SEQ ID NO: 142455 - RNA, 19 nt, Artificial Sequence
  Synthetic
ccuuggccucccaaagugc

SEQ ID NO: 142456 - RNA, 20 nt, Artificial Sequence
  Synthetic
accuuggccucccaaagugc

SEQ ID NO: 142457 - RNA, 21 nt, Artificial Sequence
  Synthetic
caccuuggccucccaaagugc

SEQ ID NO: 142458 - RNA, 22 nt, Artificial Sequence
  Synthetic
ccaccuuggccucccaaagugc

SEQ ID NO: 142459 - RNA, 23 nt, Artificial Sequence
  Synthetic
cccaccuuggccucccaaagugc

SEQ ID NO: 142460 - RNA, 24 nt, Artificial Sequence
  Synthetic
acccaccuuggccucccaaagugc

SEQ ID NO: 142461 - RNA, 22 nt, Artificial Sequence
  Synthetic
ucaccuuggccucccaaagugc

SEQ ID NO: 142462 - RNA, 23 nt, Artificial Sequence
  Synthetic
uucaccuuggccucccaaagugc

SEQ ID NO: 142463 - RNA, 21 nt, Artificial Sequence
  Synthetic
ugccuuggccucccaaagugc

SEQ ID NO: 142464 - RNA, 22 nt, Artificial Sequence
  Synthetic
cugccuuggccucccaaagugc

SEQ ID NO: 142465 - RNA, 23 nt, Artificial Sequence
  Synthetic
ccugccuuggccucccaaagugc

SEQ ID NO: 142466 - RNA, 24 nt, Artificial Sequence
  Synthetic
accugccuuggccucccaaagugc

SEQ ID NO: 142467 - RNA, 19 nt, Artificial Sequence
  Synthetic
ucuuggccucccaaagugc

SEQ ID NO: 142468 - RNA, 21 nt, Artificial Sequence
  Synthetic
ugucuuggccucccaaagugc

SEQ ID NO: 142469 - RNA, 22 nt, Artificial Sequence
  Synthetic
cugucuuggccucccaaagugc

SEQ ID NO: 142470 - RNA, 23 nt, Artificial Sequence
  Synthetic
ccugucuuggccucccaaagugc

SEQ ID NO: 142471 - RNA, 18 nt, Artificial Sequence
  Synthetic
uucugccucccaaagugc

SEQ ID NO: 142472 - RNA, 19 nt, Artificial Sequence
  Synthetic
cuucugccucccaaagugc

SEQ ID NO: 142473 - RNA, 20 nt, Artificial Sequence
  Synthetic
acuucugccucccaaagugc

SEQ ID NO: 142474 - RNA, 21 nt, Artificial Sequence
  Synthetic
cacuucugccucccaaagugc

SEQ ID NO: 142475 - RNA, 22 nt, Artificial Sequence
  Synthetic
ccacuucugccucccaaagugc

SEQ ID NO: 142476 - RNA, 23 nt, Artificial Sequence
  Synthetic
cccacuucugccucccaaagugc

SEQ ID NO: 142477 - RNA, 24 nt, Artificial Sequence
  Synthetic
acccacuucugccucccaaagugc

SEQ ID NO: 142478 - RNA, 18 nt, Artificial Sequence
  Synthetic
cucggccuuccaaagugc

SEQ ID NO: 142479 - RNA, 19 nt, Artificial Sequence
  Synthetic
ccucggccuuccaaagugc

SEQ ID NO: 142480 - RNA, 21 nt, Artificial Sequence
  Synthetic
cgccucggccuuccaaagugc

SEQ ID NO: 142481 - RNA, 22 nt, Artificial Sequence
  Synthetic
ccgccucggccuuccaaagugc

SEQ ID NO: 142482 - RNA, 23 nt, Artificial Sequence
  Synthetic
cccgccucggccuuccaaagugc

SEQ ID NO: 142483 - RNA, 18 nt, Artificial Sequence
  Synthetic
cucagccucucaaagugc

SEQ ID NO: 142484 - RNA, 19 nt, Artificial Sequence
  Synthetic
ccucagccucucaaagugc

SEQ ID NO: 142485 - RNA, 21 nt, Artificial Sequence
  Synthetic
ugccucagccucucaaagugc

SEQ ID NO: 142486 - RNA, 22 nt, Artificial Sequence
  Synthetic
cugccucagccucucaaagugc

SEQ ID NO: 142487 - RNA, 23 nt, Artificial Sequence
  Synthetic
ccugccucagccucucaaagugc

SEQ ID NO: 142488 - RNA, 18 nt, Artificial Sequence
  Synthetic
cucagcauccgaaagugc

SEQ ID NO: 142489 - RNA, 19 nt, Artificial Sequence
  Synthetic
ccucagcauccgaaagugc

SEQ ID NO: 142490 - RNA, 21 nt, Artificial Sequence
  Synthetic
agccucagcauccgaaagugc

SEQ ID NO: 142491 - RNA, 22 nt, Artificial Sequence
  Synthetic
cagccucagcauccgaaagugc

SEQ ID NO: 142492 - RNA, 23 nt, Artificial Sequence
  Synthetic
ucagccucagcauccgaaagugc

SEQ ID NO: 142493 - RNA, 18 nt, Artificial Sequence
  Synthetic
cucagccuccgaaagugc

SEQ ID NO: 142494 - RNA, 19 nt, Artificial Sequence
  Synthetic
ccucagccuccgaaagugc

SEQ ID NO: 142495 - RNA, 20 nt, Artificial Sequence
  Synthetic
accucagccuccgaaagugc

SEQ ID NO: 142496 - RNA, 21 nt, Artificial Sequence
  Synthetic
caccucagccuccgaaagugc

SEQ ID NO: 142497 - RNA, 22 nt, Artificial Sequence
  Synthetic
ucaccucagccuccgaaagugc

SEQ ID NO: 142498 - RNA, 23 nt, Artificial Sequence
  Synthetic
cucaccucagccuccgaaagugc

SEQ ID NO: 142499 - RNA, 18 nt, Artificial Sequence
  Synthetic
cucagccuccuaaagugc

SEQ ID NO: 142500 - RNA, 19 nt, Artificial Sequence
  Synthetic
ccucagccuccuaaagugc

SEQ ID NO: 142501 - RNA, 20 nt, Artificial Sequence
  Synthetic
accucagccuccuaaagugc

SEQ ID NO: 142502 - RNA, 21 nt, Artificial Sequence
  Synthetic
caccucagccuccuaaagugc

SEQ ID NO: 142503 - RNA, 22 nt, Artificial Sequence
  Synthetic
ucaccucagccuccuaaagugc

SEQ ID NO: 142504 - RNA, 23 nt, Artificial Sequence
  Synthetic
cucaccucagccuccuaaagugc

SEQ ID NO: 142505 - RNA, 24 nt, Artificial Sequence
  Synthetic
ucucaccucagccuccuaaagugc

SEQ ID NO: 142506 - RNA, 18 nt, Artificial Sequence
  Synthetic
cuuggccucccuaagugc

SEQ ID NO: 142507 - RNA, 19 nt, Artificial Sequence
  Synthetic
ccuuggccucccuaagugc

SEQ ID NO: 142508 - RNA, 21 nt, Artificial Sequence
  Synthetic
cgccuuggccucccuaagugc

SEQ ID NO: 142509 - RNA, 22 nt, Artificial Sequence
  Synthetic
ccgccuuggccucccuaagugc

SEQ ID NO: 142510 - RNA, 23 nt, Artificial Sequence
  Synthetic
cccgccuuggccucccuaagugc

SEQ ID NO: 142511 - RNA, 24 nt, Artificial Sequence
  Synthetic
acccgccuuggccucccuaagugc

SEQ ID NO: 142512 - RNA, 18 nt, Artificial Sequence
  Synthetic
cuuagccucccacagugc

SEQ ID NO: 142513 - RNA, 19 nt, Artificial Sequence
  Synthetic
ucuuagccucccacagugc

SEQ ID NO: 142514 - RNA, 20 nt, Artificial Sequence
  Synthetic
aucuuagccucccacagugc

SEQ ID NO: 142515 - RNA, 21 nt, Artificial Sequence
  Synthetic
caucuuagccucccacagugc

SEQ ID NO: 142516 - RNA, 22 nt, Artificial Sequence
  Synthetic
ucaucuuagccucccacagugc

SEQ ID NO: 142517 - RNA, 23 nt, Artificial Sequence
  Synthetic
cucaucuuagccucccacagugc

SEQ ID NO: 142518 - RNA, 24 nt, Artificial Sequence
  Synthetic
acucaucuuagccucccacagugc

SEQ ID NO: 142519 - RNA, 18 nt, Artificial Sequence
  Synthetic
cuuggccucccacagugc

SEQ ID NO: 142520 - RNA, 19 nt, Artificial Sequence
  Synthetic
ccuuggccucccacagugc

SEQ ID NO: 142521 - RNA, 21 nt, Artificial Sequence
  Synthetic
cgccuuggccucccacagugc

SEQ ID NO: 142522 - RNA, 22 nt, Artificial Sequence
  Synthetic
ccgccuuggccucccacagugc

SEQ ID NO: 142523 - RNA, 23 nt, Artificial Sequence
  Synthetic
cccgccuuggccucccacagugc

SEQ ID NO: 142524 - RNA, 18 nt, Artificial Sequence
  Synthetic
uuuuuucagaagcagugc

SEQ ID NO: 142525 - RNA, 19 nt, Artificial Sequence
  Synthetic
auuuuuucagaagcagugc

SEQ ID NO: 142526 - RNA, 20 nt, Artificial Sequence
  Synthetic
uauuuuuucagaagcagugc

SEQ ID NO: 142527 - RNA, 21 nt, Artificial Sequence
  Synthetic
auauuuuuucagaagcagugc

SEQ ID NO: 142528 - RNA, 22 nt, Artificial Sequence
  Synthetic
cauauuuuuucagaagcagugc

SEQ ID NO: 142529 - RNA, 23 nt, Artificial Sequence
  Synthetic
acauauuuuuucagaagcagugc

SEQ ID NO: 142530 - RNA, 24 nt, Artificial Sequence
  Synthetic
uacauauuuuuucagaagcagugc

SEQ ID NO: 142531 - RNA, 18 nt, Artificial Sequence
  Synthetic
cacuuguaauaucagugc

SEQ ID NO: 142532 - RNA, 19 nt, Artificial Sequence
  Synthetic
acacuuguaauaucagugc

SEQ ID NO: 142533 - RNA, 20 nt, Artificial Sequence
  Synthetic
cacacuuguaauaucagugc

SEQ ID NO: 142534 - RNA, 21 nt, Artificial Sequence
  Synthetic
ucacacuuguaauaucagugc

SEQ ID NO: 142535 - RNA, 22 nt, Artificial Sequence
  Synthetic
cucacacuuguaauaucagugc

SEQ ID NO: 142536 - RNA, 18 nt, Artificial Sequence
  Synthetic
cucggccucccagagugc

SEQ ID NO: 142537 - RNA, 19 nt, Artificial Sequence
  Synthetic
ccucggccucccagagugc

SEQ ID NO: 142538 - RNA, 21 nt, Artificial Sequence
  Synthetic
cgccucggccucccagagugc

SEQ ID NO: 142539 - RNA, 22 nt, Artificial Sequence
  Synthetic
ccgccucggccucccagagugc

SEQ ID NO: 142540 - RNA, 23 nt, Artificial Sequence
  Synthetic
cccgccucggccucccagagugc

SEQ ID NO: 142541 - RNA, 18 nt, Artificial Sequence
  Synthetic
cucagccucccauagugc

SEQ ID NO: 142542 - RNA, 19 nt, Artificial Sequence
  Synthetic
ccucagccucccauagugc

SEQ ID NO: 142543 - RNA, 21 nt, Artificial Sequence
  Synthetic
ugccucagccucccauagugc

SEQ ID NO: 142544 - RNA, 22 nt, Artificial Sequence
  Synthetic
cugccucagccucccauagugc

SEQ ID NO: 142545 - RNA, 23 nt, Artificial Sequence
  Synthetic
ccugccucagccucccauagugc

SEQ ID NO: 142546 - RNA, 24 nt, Artificial Sequence
  Synthetic
accugccucagccucccauagugc

SEQ ID NO: 142547 - RNA, 18 nt, Artificial Sequence
  Synthetic
cuuggccugacaacgugc

SEQ ID NO: 142548 - RNA, 19 nt, Artificial Sequence
  Synthetic
ccuuggccugacaacgugc

SEQ ID NO: 142549 - RNA, 20 nt, Artificial Sequence
  Synthetic
accuuggccugacaacgugc

SEQ ID NO: 142550 - RNA, 21 nt, Artificial Sequence
  Synthetic
caccuuggccugacaacgugc

SEQ ID NO: 142551 - RNA, 22 nt, Artificial Sequence
  Synthetic
ccaccuuggccugacaacgugc

SEQ ID NO: 142552 - RNA, 23 nt, Artificial Sequence
  Synthetic
cccaccuuggccugacaacgugc

SEQ ID NO: 142553 - RNA, 24 nt, Artificial Sequence
  Synthetic
acccaccuuggccugacaacgugc

SEQ ID NO: 142554 - RNA, 18 nt, Artificial Sequence
  Synthetic
aucuaccuccuaaggugc

SEQ ID NO: 142555 - RNA, 19 nt, Artificial Sequence
  Synthetic
caucuaccuccuaaggugc

SEQ ID NO: 142556 - RNA, 20 nt, Artificial Sequence
  Synthetic
acaucuaccuccuaaggugc

SEQ ID NO: 142557 - RNA, 21 nt, Artificial Sequence
  Synthetic
cacaucuaccuccuaaggugc

SEQ ID NO: 142558 - RNA, 22 nt, Artificial Sequence
  Synthetic
ccacaucuaccuccuaaggugc

SEQ ID NO: 142559 - RNA, 23 nt, Artificial Sequence
  Synthetic
cccacaucuaccuccuaaggugc

SEQ ID NO: 142560 - RNA, 24 nt, Artificial Sequence
  Synthetic
acccacaucuaccuccuaaggugc

SEQ ID NO: 142561 - RNA, 18 nt, Artificial Sequence
  Synthetic
cuacucaauaaacggugc

SEQ ID NO: 142562 - RNA, 19 nt, Artificial Sequence
  Synthetic
ccuacucaauaaacggugc

SEQ ID NO: 142563 - RNA, 20 nt, Artificial Sequence
  Synthetic
cccuacucaauaaacggugc

SEQ ID NO: 142564 - RNA, 21 nt, Artificial Sequence
  Synthetic
ucccuacucaauaaacggugc

SEQ ID NO: 142565 - RNA, 22 nt, Artificial Sequence
  Synthetic
cucccuacucaauaaacggugc

SEQ ID NO: 142566 - RNA, 23 nt, Artificial Sequence
  Synthetic
acucccuacucaauaaacggugc

SEQ ID NO: 142567 - RNA, 21 nt, Artificial Sequence
  Synthetic
uagucuuucacaaccuggugc

SEQ ID NO: 142568 - RNA, 22 nt, Artificial Sequence
  Synthetic
auagucuuucacaaccuggugc

SEQ ID NO: 142569 - RNA, 23 nt, Artificial Sequence
  Synthetic
aauagucuuucacaaccuggugc

SEQ ID NO: 142570 - RNA, 19 nt, Artificial Sequence
  Synthetic
ugggaagguguaugugugc

SEQ ID NO: 142571 - RNA, 20 nt, Artificial Sequence
  Synthetic
uugggaagguguaugugugc

SEQ ID NO: 142572 - RNA, 21 nt, Artificial Sequence
  Synthetic
cuugggaagguguaugugugc

SEQ ID NO: 142573 - RNA, 22 nt, Artificial Sequence
  Synthetic
ucuugggaagguguaugugugc

SEQ ID NO: 142574 - RNA, 24 nt, Artificial Sequence
  Synthetic
agucuugggaagguguaugugugc

SEQ ID NO: 142575 - RNA, 18 nt, Artificial Sequence
  Synthetic
uuugguugugacaauugc

SEQ ID NO: 142576 - RNA, 19 nt, Artificial Sequence
  Synthetic
uuuugguugugacaauugc

SEQ ID NO: 142577 - RNA, 20 nt, Artificial Sequence
  Synthetic
uuuuugguugugacaauugc

SEQ ID NO: 142578 - RNA, 21 nt, Artificial Sequence
  Synthetic
auuuuugguugugacaauugc

SEQ ID NO: 142579 - RNA, 22 nt, Artificial Sequence
  Synthetic
cauuuuugguugugacaauugc

SEQ ID NO: 142580 - RNA, 23 nt, Artificial Sequence
  Synthetic
acauuuuugguugugacaauugc

SEQ ID NO: 142581 - RNA, 18 nt, Artificial Sequence
  Synthetic
cucaaccuccagaguugc

SEQ ID NO: 142582 - RNA, 19 nt, Artificial Sequence
  Synthetic
ccucaaccuccagaguugc

SEQ ID NO: 142583 - RNA, 21 nt, Artificial Sequence
  Synthetic
ugccucaaccuccagaguugc

SEQ ID NO: 142584 - RNA, 22 nt, Artificial Sequence
  Synthetic
cugccucaaccuccagaguugc

SEQ ID NO: 142585 - RNA, 23 nt, Artificial Sequence
  Synthetic
ccugccucaaccuccagaguugc

SEQ ID NO: 142586 - RNA, 24 nt, Artificial Sequence
  Synthetic
uccugccucaaccuccagaguugc

SEQ ID NO: 142587 - RNA, 19 nt, Artificial Sequence
  Synthetic
uggaguuucgcucuguugc

SEQ ID NO: 142588 - RNA, 20 nt, Artificial Sequence
  Synthetic
auggaguuucgcucuguugc

SEQ ID NO: 142589 - RNA, 22 nt, Artificial Sequence
  Synthetic
agauggaguuucgcucuguugc

SEQ ID NO: 142590 - RNA, 24 nt, Artificial Sequence
  Synthetic
ugagauggaguuucgcucuguugc

SEQ ID NO: 142591 - RNA, 18 nt, Artificial Sequence
  Synthetic
auuuguauaaaguguugc

SEQ ID NO: 142592 - RNA, 19 nt, Artificial Sequence
  Synthetic
uauuuguauaaaguguugc

SEQ ID NO: 142593 - RNA, 20 nt, Artificial Sequence
  Synthetic
uuauuuguauaaaguguugc

SEQ ID NO: 142594 - RNA, 21 nt, Artificial Sequence
  Synthetic
auuauuuguauaaaguguugc

SEQ ID NO: 142595 - RNA, 23 nt, Artificial Sequence
  Synthetic
ugauuauuuguauaaaguguugc

SEQ ID NO: 142596 - RNA, 24 nt, Artificial Sequence
  Synthetic
cugauuauuuguauaaaguguugc

SEQ ID NO: 142597 - RNA, 18 nt, Artificial Sequence
  Synthetic
aaaauaaaucaguuuugc

SEQ ID NO: 142598 - RNA, 18 nt, Artificial Sequence
  Synthetic
uccuguucuuauaaaauc

SEQ ID NO: 142599 - RNA, 19 nt, Artificial Sequence
  Synthetic
uuccuguucuuauaaaauc

SEQ ID NO: 142600 - RNA, 20 nt, Artificial Sequence
  Synthetic
cuuccuguucuuauaaaauc

SEQ ID NO: 142601 - RNA, 18 nt, Artificial Sequence
  Synthetic
caaacagagagccaaauc

SEQ ID NO: 142602 - RNA, 19 nt, Artificial Sequence
  Synthetic
acaaacagagagccaaauc

SEQ ID NO: 142603 - RNA, 18 nt, Artificial Sequence
  Synthetic
caagcugagagccaaauc

SEQ ID NO: 142604 - RNA, 19 nt, Artificial Sequence
  Synthetic
ucaagcugagagccaaauc

SEQ ID NO: 142605 - RNA, 20 nt, Artificial Sequence
  Synthetic
uucaagcugagagccaaauc

SEQ ID NO: 142606 - RNA, 22 nt, Artificial Sequence
  Synthetic
uguucaagcugagagccaaauc

SEQ ID NO: 142607 - RNA, 24 nt, Artificial Sequence
  Synthetic
aguguucaagcugagagccaaauc

SEQ ID NO: 142608 - RNA, 18 nt, Artificial Sequence
  Synthetic
caaagagagugccaaauc

SEQ ID NO: 142609 - RNA, 19 nt, Artificial Sequence
  Synthetic
acaaagagagugccaaauc

SEQ ID NO: 142610 - RNA, 21 nt, Artificial Sequence
  Synthetic
agacaaagagagugccaaauc

SEQ ID NO: 142611 - RNA, 22 nt, Artificial Sequence
  Synthetic
uagacaaagagagugccaaauc

SEQ ID NO: 142612 - RNA, 23 nt, Artificial Sequence
  Synthetic
auagacaaagagagugccaaauc

SEQ ID NO: 142613 - RNA, 24 nt, Artificial Sequence
  Synthetic
aauagacaaagagagugccaaauc

SEQ ID NO: 142614 - RNA, 18 nt, Artificial Sequence
  Synthetic
agaguugauguugcaauc

SEQ ID NO: 142615 - RNA, 19 nt, Artificial Sequence
  Synthetic
aagaguugauguugcaauc

SEQ ID NO: 142616 - RNA, 23 nt, Artificial Sequence
  Synthetic
agggaagaguugauguugcaauc

SEQ ID NO: 142617 - RNA, 24 nt, Artificial Sequence
  Synthetic
aagggaagaguugauguugcaauc

SEQ ID NO: 142618 - RNA, 19 nt, Artificial Sequence
  Synthetic
ugagggagagagaagaauc

SEQ ID NO: 142619 - RNA, 21 nt, Artificial Sequence
  Synthetic
agugagggagagagaagaauc

SEQ ID NO: 142620 - RNA, 21 nt, Artificial Sequence
  Synthetic
aaagcuaauaaaugaagaauc

SEQ ID NO: 142621 - RNA, 22 nt, Artificial Sequence
  Synthetic
uaaagcuaauaaaugaagaauc

SEQ ID NO: 142622 - RNA, 23 nt, Artificial Sequence
  Synthetic
auaaagcuaauaaaugaagaauc

SEQ ID NO: 142623 - RNA, 24 nt, Artificial Sequence
  Synthetic
cauaaagcuaauaaaugaagaauc

SEQ ID NO: 142624 - RNA, 18 nt, Artificial Sequence
  Synthetic
agagagagagagagaauc

SEQ ID NO: 142625 - RNA, 20 nt, Artificial Sequence
  Synthetic
agagagagagagagagaauc

SEQ ID NO: 142626 - RNA, 22 nt, Artificial Sequence
  Synthetic
agagagagagagagagagaauc

SEQ ID NO: 142627 - RNA, 24 nt, Artificial Sequence
  Synthetic
agagagagagagagagagagaauc

SEQ ID NO: 142628 - RNA, 19 nt, Artificial Sequence
  Synthetic
agggggaaguaauugaauc

SEQ ID NO: 142629 - RNA, 20 nt, Artificial Sequence
  Synthetic
cagggggaaguaauugaauc

SEQ ID NO: 142630 - RNA, 21 nt, Artificial Sequence
  Synthetic
ccagggggaaguaauugaauc

SEQ ID NO: 142631 - RNA, 22 nt, Artificial Sequence
  Synthetic
cccagggggaaguaauugaauc

SEQ ID NO: 142632 - RNA, 23 nt, Artificial Sequence
  Synthetic
acccagggggaaguaauugaauc

SEQ ID NO: 142633 - RNA, 18 nt, Artificial Sequence
  Synthetic
auugaaaaaauaauaauc

SEQ ID NO: 142634 - RNA, 19 nt, Artificial Sequence
  Synthetic
cauugaaaaaauaauaauc

SEQ ID NO: 142635 - RNA, 20 nt, Artificial Sequence
  Synthetic
acauugaaaaaauaauaauc

SEQ ID NO: 142636 - RNA, 18 nt, Artificial Sequence
  Synthetic
ugagugagauucuuaauc

SEQ ID NO: 142637 - RNA, 19 nt, Artificial Sequence
  Synthetic
uugagugagauucuuaauc

SEQ ID NO: 142638 - RNA, 20 nt, Artificial Sequence
  Synthetic
uuugagugagauucuuaauc

SEQ ID NO: 142639 - RNA, 21 nt, Artificial Sequence
  Synthetic
cuuugagugagauucuuaauc

SEQ ID NO: 142640 - RNA, 24 nt, Artificial Sequence
  Synthetic
cggcuuugagugagauucuuaauc

SEQ ID NO: 142641 - RNA, 18 nt, Artificial Sequence
  Synthetic
uuauuaagaggaaacauc

SEQ ID NO: 142642 - RNA, 19 nt, Artificial Sequence
  Synthetic
auuauuaagaggaaacauc

SEQ ID NO: 142643 - RNA, 20 nt, Artificial Sequence
  Synthetic
aauuauuaagaggaaacauc

SEQ ID NO: 142644 - RNA, 21 nt, Artificial Sequence
  Synthetic
aaauuauuaagaggaaacauc

SEQ ID NO: 142645 - RNA, 22 nt, Artificial Sequence
  Synthetic
aaaauuauuaagaggaaacauc

SEQ ID NO: 142646 - RNA, 18 nt, Artificial Sequence
  Synthetic
auaaaaauaugaaacauc

SEQ ID NO: 142647 - RNA, 19 nt, Artificial Sequence
  Synthetic
aauaaaaauaugaaacauc

SEQ ID NO: 142648 - RNA, 20 nt, Artificial Sequence
  Synthetic
aaauaaaaauaugaaacauc

SEQ ID NO: 142649 - RNA, 18 nt, Artificial Sequence
  Synthetic
uuaagucuucaauccauc

SEQ ID NO: 142650 - RNA, 19 nt, Artificial Sequence
  Synthetic
auuaagucuucaauccauc

SEQ ID NO: 142651 - RNA, 20 nt, Artificial Sequence
  Synthetic
cauuaagucuucaauccauc

SEQ ID NO: 142652 - RNA, 21 nt, Artificial Sequence
  Synthetic
acauuaagucuucaauccauc

SEQ ID NO: 142653 - RNA, 22 nt, Artificial Sequence
  Synthetic
aacauuaagucuucaauccauc

SEQ ID NO: 142654 - RNA, 23 nt, Artificial Sequence
  Synthetic
uaacauuaagucuucaauccauc

SEQ ID NO: 142655 - RNA, 24 nt, Artificial Sequence
  Synthetic
cuaacauuaagucuucaauccauc

SEQ ID NO: 142656 - RNA, 18 nt, Artificial Sequence
  Synthetic
uuaaaucuuuaauccauc

SEQ ID NO: 142657 - RNA, 19 nt, Artificial Sequence
  Synthetic
uuuaaaucuuuaauccauc

SEQ ID NO: 142658 - RNA, 21 nt, Artificial Sequence
  Synthetic
cguuuaaaucuuuaauccauc

SEQ ID NO: 142659 - RNA, 22 nt, Artificial Sequence
  Synthetic
acguuuaaaucuuuaauccauc

SEQ ID NO: 142660 - RNA, 23 nt, Artificial Sequence
  Synthetic
aacguuuaaaucuuuaauccauc

SEQ ID NO: 142661 - RNA, 24 nt, Artificial Sequence
  Synthetic
uaacguuuaaaucuuuaauccauc

SEQ ID NO: 142662 - RNA, 19 nt, Artificial Sequence
  Synthetic
uguaagucuuuaauccauc

SEQ ID NO: 142663 - RNA, 20 nt, Artificial Sequence
  Synthetic
auguaagucuuuaauccauc

SEQ ID NO: 142664 - RNA, 21 nt, Artificial Sequence
  Synthetic
cauguaagucuuuaauccauc

SEQ ID NO: 142665 - RNA, 22 nt, Artificial Sequence
  Synthetic
acauguaagucuuuaauccauc

SEQ ID NO: 142666 - RNA, 23 nt, Artificial Sequence
  Synthetic
aacauguaagucuuuaauccauc

SEQ ID NO: 142667 - RNA, 24 nt, Artificial Sequence
  Synthetic
uaacauguaagucuuuaauccauc

SEQ ID NO: 142668 - RNA, 22 nt, Artificial Sequence
  Synthetic
agguuuaagucuuuaauccauc

SEQ ID NO: 142669 - RNA, 23 nt, Artificial Sequence
  Synthetic
uagguuuaagucuuuaauccauc

SEQ ID NO: 142670 - RNA, 24 nt, Artificial Sequence
  Synthetic
uuagguuuaagucuuuaauccauc

SEQ ID NO: 142671 - RNA, 18 nt, Artificial Sequence
  Synthetic
uuaaaccuuuauuccauc

SEQ ID NO: 142672 - RNA, 19 nt, Artificial Sequence
  Synthetic
uuuaaaccuuuauuccauc

SEQ ID NO: 142673 - RNA, 21 nt, Artificial Sequence
  Synthetic
uguuuaaaccuuuauuccauc

SEQ ID NO: 142674 - RNA, 22 nt, Artificial Sequence
  Synthetic
auguuuaaaccuuuauuccauc

SEQ ID NO: 142675 - RNA, 23 nt, Artificial Sequence
  Synthetic
aauguuuaaaccuuuauuccauc

SEQ ID NO: 142676 - RNA, 24 nt, Artificial Sequence
  Synthetic
uaauguuuaaaccuuuauuccauc

SEQ ID NO: 142677 - RNA, 18 nt, Artificial Sequence
  Synthetic
aauuuucuuaauggcauc

SEQ ID NO: 142678 - RNA, 19 nt, Artificial Sequence
  Synthetic
aaauuuucuuaauggcauc

SEQ ID NO: 142679 - RNA, 20 nt, Artificial Sequence
  Synthetic
caaauuuucuuaauggcauc

SEQ ID NO: 142680 - RNA, 21 nt, Artificial Sequence
  Synthetic
acaaauuuucuuaauggcauc

SEQ ID NO: 142681 - RNA, 22 nt, Artificial Sequence
  Synthetic
cacaaauuuucuuaauggcauc

SEQ ID NO: 142682 - RNA, 23 nt, Artificial Sequence
  Synthetic
ucacaaauuuucuuaauggcauc

SEQ ID NO: 142683 - RNA, 24 nt, Artificial Sequence
  Synthetic
aucacaaauuuucuuaauggcauc

SEQ ID NO: 142684 - RNA, 18 nt, Artificial Sequence
  Synthetic
uuaagucuuuaaugcauc

SEQ ID NO: 142685 - RNA, 19 nt, Artificial Sequence
  Synthetic
uuuaagucuuuaaugcauc

SEQ ID NO: 142686 - RNA, 22 nt, Artificial Sequence
  Synthetic
agguuuaagucuuuaaugcauc

SEQ ID NO: 142687 - RNA, 23 nt, Artificial Sequence
  Synthetic
uagguuuaagucuuuaaugcauc

SEQ ID NO: 142688 - RNA, 24 nt, Artificial Sequence
  Synthetic
uuagguuuaagucuuuaaugcauc

SEQ ID NO: 142689 - RNA, 18 nt, Artificial Sequence
  Synthetic
ccccacccaaaucucauc

SEQ ID NO: 142690 - RNA, 19 nt, Artificial Sequence
  Synthetic
uccccacccaaaucucauc

SEQ ID NO: 142691 - RNA, 21 nt, Artificial Sequence
  Synthetic
uguccccacccaaaucucauc

SEQ ID NO: 142692 - RNA, 23 nt, Artificial Sequence
  Synthetic
uguguccccacccaaaucucauc

SEQ ID NO: 142693 - RNA, 24 nt, Artificial Sequence
  Synthetic
cuguguccccacccaaaucucauc

SEQ ID NO: 142694 - RNA, 19 nt, Artificial Sequence
  Synthetic
ugggucucagucugucauc

SEQ ID NO: 142695 - RNA, 20 nt, Artificial Sequence
  Synthetic
cugggucucagucugucauc

SEQ ID NO: 142696 - RNA, 21 nt, Artificial Sequence
  Synthetic
aguuuugcaucaauguucauc

SEQ ID NO: 142697 - RNA, 24 nt, Artificial Sequence
  Synthetic
aggaguuuugcaucaauguucauc

SEQ ID NO: 142698 - RNA, 18 nt, Artificial Sequence
  Synthetic
uuugcaucgauguucauc

SEQ ID NO: 142699 - RNA, 19 nt, Artificial Sequence
  Synthetic
uuuugcaucgauguucauc

SEQ ID NO: 142700 - RNA, 20 nt, Artificial Sequence
  Synthetic
uuuuugcaucgauguucauc

SEQ ID NO: 142701 - RNA, 21 nt, Artificial Sequence
  Synthetic
auuuuugcaucgauguucauc

SEQ ID NO: 142702 - RNA, 24 nt, Artificial Sequence
  Synthetic
aggauuuuugcaucgauguucauc

SEQ ID NO: 142703 - RNA, 18 nt, Artificial Sequence
  Synthetic
ccuccacugccagagauc

SEQ ID NO: 142704 - RNA, 19 nt, Artificial Sequence
  Synthetic
uccuccacugccagagauc

SEQ ID NO: 142705 - RNA, 20 nt, Artificial Sequence
  Synthetic
uuccuccacugccagagauc

SEQ ID NO: 142706 - RNA, 21 nt, Artificial Sequence
  Synthetic
cuuccuccacugccagagauc

SEQ ID NO: 142707 - RNA, 22 nt, Artificial Sequence
  Synthetic
acuuccuccacugccagagauc

SEQ ID NO: 142708 - RNA, 24 nt, Artificial Sequence
  Synthetic
agacuuccuccacugccagagauc

SEQ ID NO: 142709 - RNA, 18 nt, Artificial Sequence
  Synthetic
caggcagaucacgagauc

SEQ ID NO: 142710 - RNA, 21 nt, Artificial Sequence
  Synthetic
aggcaggcagaucacgagauc

SEQ ID NO: 142711 - RNA, 23 nt, Artificial Sequence
  Synthetic
cgaggcaggcagaucacgagauc

SEQ ID NO: 142712 - RNA, 24 nt, Artificial Sequence
  Synthetic
ccgaggcaggcagaucacgagauc

SEQ ID NO: 142713 - RNA, 18 nt, Artificial Sequence
  Synthetic
cuucugauucaguagauc

SEQ ID NO: 142714 - RNA, 20 nt, Artificial Sequence
  Synthetic
agcuucugauucaguagauc

SEQ ID NO: 142715 - RNA, 22 nt, Artificial Sequence
  Synthetic
agagcuucugauucaguagauc

SEQ ID NO: 142716 - RNA, 23 nt, Artificial Sequence
  Synthetic
uagagcuucugauucaguagauc

SEQ ID NO: 142717 - RNA, 24 nt, Artificial Sequence
  Synthetic
auagagcuucugauucaguagauc

SEQ ID NO: 142718 - RNA, 18 nt, Artificial Sequence
  Synthetic
aaguuucuaaggcugauc

SEQ ID NO: 142719 - RNA, 19 nt, Artificial Sequence
  Synthetic
uaaguuucuaaggcugauc

SEQ ID NO: 142720 - RNA, 20 nt, Artificial Sequence
  Synthetic
cuaaguuucuaaggcugauc

SEQ ID NO: 142721 - RNA, 18 nt, Artificial Sequence
  Synthetic
uucuugucuugcuugauc

SEQ ID NO: 142722 - RNA, 19 nt, Artificial Sequence
  Synthetic
auucuugucuugcuugauc

SEQ ID NO: 142723 - RNA, 20 nt, Artificial Sequence
  Synthetic
aauucuugucuugcuugauc

SEQ ID NO: 142724 - RNA, 21 nt, Artificial Sequence
  Synthetic
uaauucuugucuugcuugauc

SEQ ID NO: 142725 - RNA, 22 nt, Artificial Sequence
  Synthetic
uuaauucuugucuugcuugauc

SEQ ID NO: 142726 - RNA, 24 nt, Artificial Sequence
  Synthetic
aguuaauucuugucuugcuugauc

SEQ ID NO: 142727 - RNA, 18 nt, Artificial Sequence
  Synthetic
aagagagaaugaaauauc

SEQ ID NO: 142728 - RNA, 19 nt, Artificial Sequence
  Synthetic
aaagagagaaugaaauauc

SEQ ID NO: 142729 - RNA, 18 nt, Artificial Sequence
  Synthetic
ugacaaagagcuaauauc

SEQ ID NO: 142730 - RNA, 19 nt, Artificial Sequence
  Synthetic
cugacaaagagcuaauauc

SEQ ID NO: 142731 - RNA, 20 nt, Artificial Sequence
  Synthetic
ucugacaaagagcuaauauc

SEQ ID NO: 142732 - RNA, 21 nt, Artificial Sequence
  Synthetic
aucugacaaagagcuaauauc

SEQ ID NO: 142733 - RNA, 22 nt, Artificial Sequence
  Synthetic
uaucugacaaagagcuaauauc

SEQ ID NO: 142734 - RNA, 23 nt, Artificial Sequence
  Synthetic
uuaucugacaaagagcuaauauc

SEQ ID NO: 142735 - RNA, 24 nt, Artificial Sequence
  Synthetic
cuuaucugacaaagagcuaauauc

SEQ ID NO: 142736 - RNA, 18 nt, Artificial Sequence
  Synthetic
ugacaaagggcuaauauc

SEQ ID NO: 142737 - RNA, 19 nt, Artificial Sequence
  Synthetic
cugacaaagggcuaauauc

SEQ ID NO: 142738 - RNA, 20 nt, Artificial Sequence
  Synthetic
ucugacaaagggcuaauauc

SEQ ID NO: 142739 - RNA, 18 nt, Artificial Sequence
  Synthetic
ugauaaagggcuaauauc

SEQ ID NO: 142740 - RNA, 19 nt, Artificial Sequence
  Synthetic
cugauaaagggcuaauauc

SEQ ID NO: 142741 - RNA, 20 nt, Artificial Sequence
  Synthetic
ucugauaaagggcuaauauc

SEQ ID NO: 142742 - RNA, 21 nt, Artificial Sequence
  Synthetic
aucugauaaagggcuaauauc

SEQ ID NO: 142743 - RNA, 22 nt, Artificial Sequence
  Synthetic
caucugauaaagggcuaauauc

SEQ ID NO: 142744 - RNA, 23 nt, Artificial Sequence
  Synthetic
ucaucugauaaagggcuaauauc

SEQ ID NO: 142745 - RNA, 24 nt, Artificial Sequence
  Synthetic
cucaucugauaaagggcuaauauc

SEQ ID NO: 142746 - RNA, 18 nt, Artificial Sequence
  Synthetic
ugacggugguguaauauc

SEQ ID NO: 142747 - RNA, 19 nt, Artificial Sequence
  Synthetic
cugacggugguguaauauc

SEQ ID NO: 142748 - RNA, 20 nt, Artificial Sequence
  Synthetic
ucugacggugguguaauauc

SEQ ID NO: 142749 - RNA, 18 nt, Artificial Sequence
  Synthetic
ugacaaagggcugauauc

SEQ ID NO: 142750 - RNA, 19 nt, Artificial Sequence
  Synthetic
cugacaaagggcugauauc

SEQ ID NO: 142751 - RNA, 20 nt, Artificial Sequence
  Synthetic
ucugacaaagggcugauauc

SEQ ID NO: 142752 - RNA, 21 nt, Artificial Sequence
  Synthetic
aucugacaaagggcugauauc

SEQ ID NO: 142753 - RNA, 22 nt, Artificial Sequence
  Synthetic
caucugacaaagggcugauauc

SEQ ID NO: 142754 - RNA, 23 nt, Artificial Sequence
  Synthetic
ucaucugacaaagggcugauauc

SEQ ID NO: 142755 - RNA, 24 nt, Artificial Sequence
  Synthetic
uucaucugacaaagggcugauauc

SEQ ID NO: 142756 - RNA, 18 nt, Artificial Sequence
  Synthetic
uaaaugagaugauauauc

SEQ ID NO: 142757 - RNA, 20 nt, Artificial Sequence
  Synthetic
aguaaaugagaugauauauc

SEQ ID NO: 142758 - RNA, 23 nt, Artificial Sequence
  Synthetic
aggaguaaaugagaugauauauc

SEQ ID NO: 142759 - RNA, 18 nt, Artificial Sequence
  Synthetic
aagacagcuuuggcuauc

SEQ ID NO: 142760 - RNA, 19 nt, Artificial Sequence
  Synthetic
aaagacagcuuuggcuauc

SEQ ID NO: 142761 - RNA, 20 nt, Artificial Sequence
  Synthetic
uaaagacagcuuuggcuauc

SEQ ID NO: 142762 - RNA, 18 nt, Artificial Sequence
  Synthetic
cucaaacucccaaguauc

SEQ ID NO: 142763 - RNA, 19 nt, Artificial Sequence
  Synthetic
ccucaaacucccaaguauc

SEQ ID NO: 142764 - RNA, 21 nt, Artificial Sequence
  Synthetic
ugccucaaacucccaaguauc

SEQ ID NO: 142765 - RNA, 22 nt, Artificial Sequence
  Synthetic
cugccucaaacucccaaguauc

SEQ ID NO: 142766 - RNA, 23 nt, Artificial Sequence
  Synthetic
ucugccucaaacucccaaguauc

SEQ ID NO: 142767 - RNA, 24 nt, Artificial Sequence
  Synthetic
uucugccucaaacucccaaguauc

SEQ ID NO: 142768 - RNA, 18 nt, Artificial Sequence
  Synthetic
cugccuuuacaauguauc

SEQ ID NO: 142769 - RNA, 19 nt, Artificial Sequence
  Synthetic
ucugccuuuacaauguauc

SEQ ID NO: 142770 - RNA, 20 nt, Artificial Sequence
  Synthetic
uucugccuuuacaauguauc

SEQ ID NO: 142771 - RNA, 18 nt, Artificial Sequence
  Synthetic
uuugcccaugccuguauc

SEQ ID NO: 142772 - RNA, 19 nt, Artificial Sequence
  Synthetic
cuuugcccaugccuguauc

SEQ ID NO: 142773 - RNA, 20 nt, Artificial Sequence
  Synthetic
ucuuugcccaugccuguauc

SEQ ID NO: 142774 - RNA, 22 nt, Artificial Sequence
  Synthetic
agucuuugcccaugccuguauc

SEQ ID NO: 142775 - RNA, 23 nt, Artificial Sequence
  Synthetic
aagucuuugcccaugccuguauc

SEQ ID NO: 142776 - RNA, 18 nt, Artificial Sequence
  Synthetic
ugauaagauacuuguauc

SEQ ID NO: 142777 - RNA, 19 nt, Artificial Sequence
  Synthetic
uugauaagauacuuguauc

SEQ ID NO: 142778 - RNA, 20 nt, Artificial Sequence
  Synthetic
uuugauaagauacuuguauc

SEQ ID NO: 142779 - RNA, 21 nt, Artificial Sequence
  Synthetic
auuugauaagauacuuguauc

SEQ ID NO: 142780 - RNA, 22 nt, Artificial Sequence
  Synthetic
uauuugauaagauacuuguauc

SEQ ID NO: 142781 - RNA, 23 nt, Artificial Sequence
  Synthetic
auauuugauaagauacuuguauc

SEQ ID NO: 142782 - RNA, 24 nt, Artificial Sequence
  Synthetic
uauauuugauaagauacuuguauc

SEQ ID NO: 142783 - RNA, 18 nt, Artificial Sequence
  Synthetic
caaaauaucaacauuauc

SEQ ID NO: 142784 - RNA, 19 nt, Artificial Sequence
  Synthetic
ucaaaauaucaacauuauc

SEQ ID NO: 142785 - RNA, 22 nt, Artificial Sequence
  Synthetic
aggucaaaauaucaacauuauc

SEQ ID NO: 142786 - RNA, 18 nt, Artificial Sequence
  Synthetic
aucaauaccuaauuuauc

SEQ ID NO: 142787 - RNA, 19 nt, Artificial Sequence
  Synthetic
caucaauaccuaauuuauc

SEQ ID NO: 142788 - RNA, 20 nt, Artificial Sequence
  Synthetic
ccaucaauaccuaauuuauc

SEQ ID NO: 142789 - RNA, 21 nt, Artificial Sequence
  Synthetic
cccaucaauaccuaauuuauc

SEQ ID NO: 142790 - RNA, 22 nt, Artificial Sequence
  Synthetic
ucccaucaauaccuaauuuauc

SEQ ID NO: 142791 - RNA, 24 nt, Artificial Sequence
  Synthetic
cgucccaucaauaccuaauuuauc

SEQ ID NO: 142792 - RNA, 18 nt, Artificial Sequence
  Synthetic
aaguauaccucauuuauc

SEQ ID NO: 142793 - RNA, 19 nt, Artificial Sequence
  Synthetic
aaaguauaccucauuuauc

SEQ ID NO: 142794 - RNA, 20 nt, Artificial Sequence
  Synthetic
caaaguauaccucauuuauc

SEQ ID NO: 142795 - RNA, 18 nt, Artificial Sequence
  Synthetic
agaucuguugguuuuauc

SEQ ID NO: 142796 - RNA, 20 nt, Artificial Sequence
  Synthetic
cgagaucuguugguuuuauc

SEQ ID NO: 142797 - RNA, 21 nt, Artificial Sequence
  Synthetic
acgagaucuguugguuuuauc

SEQ ID NO: 142798 - RNA, 22 nt, Artificial Sequence
  Synthetic
cacgagaucuguugguuuuauc

SEQ ID NO: 142799 - RNA, 23 nt, Artificial Sequence
  Synthetic
ucacgagaucuguugguuuuauc

SEQ ID NO: 142800 - RNA, 24 nt, Artificial Sequence
  Synthetic
cucacgagaucuguugguuuuauc

SEQ ID NO: 142801 - RNA, 18 nt, Artificial Sequence
  Synthetic
aaaguugucauuuuuauc

SEQ ID NO: 142802 - RNA, 19 nt, Artificial Sequence
  Synthetic
aaaaguugucauuuuuauc

SEQ ID NO: 142803 - RNA, 20 nt, Artificial Sequence
  Synthetic
aaaaaguugucauuuuuauc

SEQ ID NO: 142804 - RNA, 18 nt, Artificial Sequence
  Synthetic
caggcugguccugaacuc

SEQ ID NO: 142805 - RNA, 19 nt, Artificial Sequence
  Synthetic
ucaggcugguccugaacuc

SEQ ID NO: 142806 - RNA, 22 nt, Artificial Sequence
  Synthetic
uggucaggcugguccugaacuc

SEQ ID NO: 142807 - RNA, 23 nt, Artificial Sequence
  Synthetic
uuggucaggcugguccugaacuc

SEQ ID NO: 142808 - RNA, 18 nt, Artificial Sequence
  Synthetic
uauauauaaaaaacacuc

SEQ ID NO: 142809 - RNA, 19 nt, Artificial Sequence
  Synthetic
auauauauaaaaaacacuc

SEQ ID NO: 142810 - RNA, 20 nt, Artificial Sequence
  Synthetic
uauauauauaaaaaacacuc

SEQ ID NO: 142811 - RNA, 19 nt, Artificial Sequence
  Synthetic
ugauccagcaaccucacuc

SEQ ID NO: 142812 - RNA, 20 nt, Artificial Sequence
  Synthetic
augauccagcaaccucacuc

SEQ ID NO: 142813 - RNA, 21 nt, Artificial Sequence
  Synthetic
uaugauccagcaaccucacuc

SEQ ID NO: 142814 - RNA, 22 nt, Artificial Sequence
  Synthetic
auaugauccagcaaccucacuc

SEQ ID NO: 142815 - RNA, 23 nt, Artificial Sequence
  Synthetic
cauaugauccagcaaccucacuc

SEQ ID NO: 142816 - RNA, 24 nt, Artificial Sequence
  Synthetic
ccauaugauccagcaaccucacuc

SEQ ID NO: 142817 - RNA, 18 nt, Artificial Sequence
  Synthetic
ugaucauuguagucacuc

SEQ ID NO: 142818 - RNA, 19 nt, Artificial Sequence
  Synthetic
cugaucauuguagucacuc

SEQ ID NO: 142819 - RNA, 20 nt, Artificial Sequence
  Synthetic
ucugaucauuguagucacuc

SEQ ID NO: 142820 - RNA, 21 nt, Artificial Sequence
  Synthetic
uucugaucauuguagucacuc

SEQ ID NO: 142821 - RNA, 21 nt, Artificial Sequence
  Synthetic
cuggcucuguuuuguucacuc

SEQ ID NO: 142822 - RNA, 22 nt, Artificial Sequence
  Synthetic
acuggcucuguuuuguucacuc

SEQ ID NO: 142823 - RNA, 18 nt, Artificial Sequence
  Synthetic
aaagagucaagaagacuc

SEQ ID NO: 142824 - RNA, 20 nt, Artificial Sequence
  Synthetic
agaaagagucaagaagacuc

SEQ ID NO: 142825 - RNA, 18 nt, Artificial Sequence
  Synthetic
uucuccugccucaaccuc

SEQ ID NO: 142826 - RNA, 19 nt, Artificial Sequence
  Synthetic
auucuccugccucaaccuc

SEQ ID NO: 142827 - RNA, 21 nt, Artificial Sequence
  Synthetic
ugauucuccugccucaaccuc

SEQ ID NO: 142828 - RNA, 23 nt, Artificial Sequence
  Synthetic
agugauucuccugccucaaccuc

SEQ ID NO: 142829 - RNA, 24 nt, Artificial Sequence
  Synthetic
aagugauucuccugccucaaccuc

SEQ ID NO: 142830 - RNA, 18 nt, Artificial Sequence
  Synthetic
cucggcucgcugaaccuc

SEQ ID NO: 142831 - RNA, 19 nt, Artificial Sequence
  Synthetic
ucucggcucgcugaaccuc

SEQ ID NO: 142832 - RNA, 20 nt, Artificial Sequence
  Synthetic
aucucggcucgcugaaccuc

SEQ ID NO: 142833 - RNA, 23 nt, Artificial Sequence
  Synthetic
uggcucacugcaaccuccaccuc

SEQ ID NO: 142834 - RNA, 24 nt, Artificial Sequence
  Synthetic
uuggcucacugcaaccuccaccuc

SEQ ID NO: 142835 - RNA, 18 nt, Artificial Sequence
  Synthetic
caccgcaagcuccaccuc

SEQ ID NO: 142836 - RNA, 19 nt, Artificial Sequence
  Synthetic
ucaccgcaagcuccaccuc

SEQ ID NO: 142837 - RNA, 20 nt, Artificial Sequence
  Synthetic
cucaccgcaagcuccaccuc

SEQ ID NO: 142838 - RNA, 23 nt, Artificial Sequence
  Synthetic
cggcucaccgcaagcuccaccuc

SEQ ID NO: 142839 - RNA, 24 nt, Artificial Sequence
  Synthetic
ucggcucaccgcaagcuccaccuc

SEQ ID NO: 142840 - RNA, 18 nt, Artificial Sequence
  Synthetic
cacugcaagcuccaccuc

SEQ ID NO: 142841 - RNA, 19 nt, Artificial Sequence
  Synthetic
ucacugcaagcuccaccuc

SEQ ID NO: 142842 - RNA, 20 nt, Artificial Sequence
  Synthetic
cucacugcaagcuccaccuc

SEQ ID NO: 142843 - RNA, 18 nt, Artificial Sequence
  Synthetic
uuuaugcucugugaccuc

SEQ ID NO: 142844 - RNA, 19 nt, Artificial Sequence
  Synthetic
uuuuaugcucugugaccuc

SEQ ID NO: 142845 - RNA, 20 nt, Artificial Sequence
  Synthetic
cuuuuaugcucugugaccuc

SEQ ID NO: 142846 - RNA, 21 nt, Artificial Sequence
  Synthetic
acuuuuaugcucugugaccuc

SEQ ID NO: 142847 - RNA, 22 nt, Artificial Sequence
  Synthetic
aacuuuuaugcucugugaccuc

SEQ ID NO: 142848 - RNA, 23 nt, Artificial Sequence
  Synthetic
aaacuuuuaugcucugugaccuc

SEQ ID NO: 142849 - RNA, 24 nt, Artificial Sequence
  Synthetic
caaacuuuuaugcucugugaccuc

SEQ ID NO: 142850 - RNA, 18 nt, Artificial Sequence
  Synthetic
aucuggcaggugccccuc

SEQ ID NO: 142851 - RNA, 19 nt, Artificial Sequence
  Synthetic
caucuggcaggugccccuc

SEQ ID NO: 142852 - RNA, 22 nt, Artificial Sequence
  Synthetic
uggcaucuggcaggugccccuc

SEQ ID NO: 142853 - RNA, 23 nt, Artificial Sequence
  Synthetic
cuggcaucuggcaggugccccuc

SEQ ID NO: 142854 - RNA, 18 nt, Artificial Sequence
  Synthetic
cacugcaaccucucccuc

SEQ ID NO: 142855 - RNA, 19 nt, Artificial Sequence
  Synthetic
ucacugcaaccucucccuc

SEQ ID NO: 142856 - RNA, 20 nt, Artificial Sequence
  Synthetic
cucacugcaaccucucccuc

SEQ ID NO: 142857 - RNA, 23 nt, Artificial Sequence
  Synthetic
uggcucacugcaaccucucccuc

SEQ ID NO: 142858 - RNA, 24 nt, Artificial Sequence
  Synthetic
uuggcucacugcaaccucucccuc

SEQ ID NO: 142859 - RNA, 18 nt, Artificial Sequence
  Synthetic
uccuccaaccucagccuc

SEQ ID NO: 142860 - RNA, 19 nt, Artificial Sequence
  Synthetic
auccuccaaccucagccuc

SEQ ID NO: 142861 - RNA, 21 nt, Artificial Sequence
  Synthetic
cgauccuccaaccucagccuc

SEQ ID NO: 142862 - RNA, 23 nt, Artificial Sequence
  Synthetic
agcgauccuccaaccucagccuc

SEQ ID NO: 142863 - RNA, 24 nt, Artificial Sequence
  Synthetic
aagcgauccuccaaccucagccuc

SEQ ID NO: 142864 - RNA, 21 nt, Artificial Sequence
  Synthetic
ugauccucccaccucagccuc

SEQ ID NO: 142865 - RNA, 24 nt, Artificial Sequence
  Synthetic
aggugauccucccaccucagccuc

SEQ ID NO: 142866 - RNA, 18 nt, Artificial Sequence
  Synthetic
uucuccuaccucagccuc

SEQ ID NO: 142867 - RNA, 19 nt, Artificial Sequence
  Synthetic
auucuccuaccucagccuc

SEQ ID NO: 142868 - RNA, 21 nt, Artificial Sequence
  Synthetic
agauucuccuaccucagccuc

SEQ ID NO: 142869 - RNA, 22 nt, Artificial Sequence
  Synthetic
aagauucuccuaccucagccuc

SEQ ID NO: 142870 - RNA, 23 nt, Artificial Sequence
  Synthetic
aaagauucuccuaccucagccuc

SEQ ID NO: 142871 - RNA, 24 nt, Artificial Sequence
  Synthetic
aaaagauucuccuaccucagccuc

SEQ ID NO: 142872 - RNA, 18 nt, Artificial Sequence
  Synthetic
uucucccgccucagccuc

SEQ ID NO: 142873 - RNA, 19 nt, Artificial Sequence
  Synthetic
auucucccgccucagccuc

SEQ ID NO: 142874 - RNA, 20 nt, Artificial Sequence
  Synthetic
aauucucccgccucagccuc

SEQ ID NO: 142875 - RNA, 21 nt, Artificial Sequence
  Synthetic
caauucucccgccucagccuc

SEQ ID NO: 142876 - RNA, 23 nt, Artificial Sequence
  Synthetic
agcaauucucccgccucagccuc

SEQ ID NO: 142877 - RNA, 24 nt, Artificial Sequence
  Synthetic
aagcaauucucccgccucagccuc

SEQ ID NO: 142878 - RNA, 18 nt, Artificial Sequence
  Synthetic
uucuccugccucagccuc

SEQ ID NO: 142879 - RNA, 22 nt, Artificial Sequence
  Synthetic
accauucuccugccucagccuc

SEQ ID NO: 142880 - RNA, 23 nt, Artificial Sequence
  Synthetic
caccauucuccugccucagccuc

SEQ ID NO: 142881 - RNA, 24 nt, Artificial Sequence
  Synthetic
acaccauucuccugccucagccuc

SEQ ID NO: 142882 - RNA, 24 nt, Artificial Sequence
  Synthetic
aagggauucuccugccucagccuc

SEQ ID NO: 142883 - RNA, 21 nt, Artificial Sequence
  Synthetic
ugauucuccugccucagccuc

SEQ ID NO: 142884 - RNA, 23 nt, Artificial Sequence
  Synthetic
agugauucuccugccucagccuc

SEQ ID NO: 142885 - RNA, 21 nt, Artificial Sequence
  Synthetic
cgguucuccugccucagccuc

SEQ ID NO: 142886 - RNA, 23 nt, Artificial Sequence
  Synthetic
agcgguucuccugccucagccuc

SEQ ID NO: 142887 - RNA, 24 nt, Artificial Sequence
  Synthetic
aagcgguucuccugccucagccuc

SEQ ID NO: 142888 - RNA, 18 nt, Artificial Sequence
  Synthetic
uucuucugccucagccuc

SEQ ID NO: 142889 - RNA, 19 nt, Artificial Sequence
  Synthetic
auucuucugccucagccuc

SEQ ID NO: 142890 - RNA, 21 nt, Artificial Sequence
  Synthetic
ugauucuucugccucagccuc

SEQ ID NO: 142891 - RNA, 23 nt, Artificial Sequence
  Synthetic
agugauucuucugccucagccuc

SEQ ID NO: 142892 - RNA, 24 nt, Artificial Sequence
  Synthetic
aagugauucuucugccucagccuc

SEQ ID NO: 142893 - RNA, 18 nt, Artificial Sequence
  Synthetic
auucucugucucagccuc

SEQ ID NO: 142894 - RNA, 19 nt, Artificial Sequence
  Synthetic
aauucucugucucagccuc

SEQ ID NO: 142895 - RNA, 20 nt, Artificial Sequence
  Synthetic
caauucucugucucagccuc

SEQ ID NO: 142896 - RNA, 22 nt, Artificial Sequence
  Synthetic
agcaauucucugucucagccuc

SEQ ID NO: 142897 - RNA, 23 nt, Artificial Sequence
  Synthetic
aagcaauucucugucucagccuc

SEQ ID NO: 142898 - RNA, 24 nt, Artificial Sequence
  Synthetic
caagcaauucucugucucagccuc

SEQ ID NO: 142899 - RNA, 18 nt, Artificial Sequence
  Synthetic
uucuccugcuucagccuc

SEQ ID NO: 142900 - RNA, 19 nt, Artificial Sequence
  Synthetic
auucuccugcuucagccuc

SEQ ID NO: 142901 - RNA, 21 nt, Artificial Sequence
  Synthetic
cgauucuccugcuucagccuc

SEQ ID NO: 142902 - RNA, 23 nt, Artificial Sequence
  Synthetic
agcgauucuccugcuucagccuc

SEQ ID NO: 142903 - RNA, 24 nt, Artificial Sequence
  Synthetic
aagcgauucuccugcuucagccuc

SEQ ID NO: 142904 - RNA, 18 nt, Artificial Sequence
  Synthetic
uucuccugccuuagccuc

SEQ ID NO: 142905 - RNA, 19 nt, Artificial Sequence
  Synthetic
auucuccugccuuagccuc

SEQ ID NO: 142906 - RNA, 20 nt, Artificial Sequence
  Synthetic
aauucuccugccuuagccuc

SEQ ID NO: 142907 - RNA, 21 nt, Artificial Sequence
  Synthetic
caauucuccugccuuagccuc

SEQ ID NO: 142908 - RNA, 23 nt, Artificial Sequence
  Synthetic
agcaauucuccugccuuagccuc

SEQ ID NO: 142909 - RNA, 24 nt, Artificial Sequence
  Synthetic
aagcaauucuccugccuuagccuc

SEQ ID NO: 142910 - RNA, 18 nt, Artificial Sequence
  Synthetic
cacagcaaccuccgccuc

SEQ ID NO: 142911 - RNA, 19 nt, Artificial Sequence
  Synthetic
ucacagcaaccuccgccuc

SEQ ID NO: 142912 - RNA, 20 nt, Artificial Sequence
  Synthetic
cucacagcaaccuccgccuc

SEQ ID NO: 142913 - RNA, 23 nt, Artificial Sequence
  Synthetic
uggcucacagcaaccuccgccuc

SEQ ID NO: 142914 - RNA, 24 nt, Artificial Sequence
  Synthetic
uuggcucacagcaaccuccgccuc

SEQ ID NO: 142915 - RNA, 18 nt, Artificial Sequence
  Synthetic
cacugcaaccuccgccuc

SEQ ID NO: 142916 - RNA, 19 nt, Artificial Sequence
  Synthetic
ucacugcaaccuccgccuc

SEQ ID NO: 142917 - RNA, 20 nt, Artificial Sequence
  Synthetic
cucacugcaaccuccgccuc

SEQ ID NO: 142918 - RNA, 23 nt, Artificial Sequence
  Synthetic
cggcucacugcaaccuccgccuc

SEQ ID NO: 142919 - RNA, 24 nt, Artificial Sequence
  Synthetic
ucggcucacugcaaccuccgccuc

SEQ ID NO: 142920 - RNA, 18 nt, Artificial Sequence
  Synthetic
cgcugcaaccuccgccuc

SEQ ID NO: 142921 - RNA, 19 nt, Artificial Sequence
  Synthetic
ucgcugcaaccuccgccuc

SEQ ID NO: 142922 - RNA, 20 nt, Artificial Sequence
  Synthetic
uucgcugcaaccuccgccuc

SEQ ID NO: 142923 - RNA, 22 nt, Artificial Sequence
  Synthetic
aguucgcugcaaccuccgccuc

SEQ ID NO: 142924 - RNA, 23 nt, Artificial Sequence
  Synthetic
caguucgcugcaaccuccgccuc

SEQ ID NO: 142925 - RNA, 24 nt, Artificial Sequence
  Synthetic
ucaguucgcugcaaccuccgccuc

SEQ ID NO: 142926 - RNA, 18 nt, Artificial Sequence
  Synthetic
cacugcagccuccgccuc

SEQ ID NO: 142927 - RNA, 19 nt, Artificial Sequence
  Synthetic
ucacugcagccuccgccuc

SEQ ID NO: 142928 - RNA, 20 nt, Artificial Sequence
  Synthetic
cucacugcagccuccgccuc

SEQ ID NO: 142929 - RNA, 22 nt, Artificial Sequence
  Synthetic
agcucacugcagccuccgccuc

SEQ ID NO: 142930 - RNA, 23 nt, Artificial Sequence
  Synthetic
cagcucacugcagccuccgccuc

SEQ ID NO: 142931 - RNA, 24 nt, Artificial Sequence
  Synthetic
ucagcucacugcagccuccgccuc

SEQ ID NO: 142932 - RNA, 21 nt, Artificial Sequence
  Synthetic
acucacugcaagcuccgccuc

SEQ ID NO: 142933 - RNA, 23 nt, Artificial Sequence
  Synthetic
cgacucacugcaagcuccgccuc

SEQ ID NO: 142934 - RNA, 24 nt, Artificial Sequence
  Synthetic
ucgacucacugcaagcuccgccuc

SEQ ID NO: 142935 - RNA, 22 nt, Artificial Sequence
  Synthetic
agcucacugcaagcuccgccuc

SEQ ID NO: 142936 - RNA, 23 nt, Artificial Sequence
  Synthetic
cagcucacugcaagcuccgccuc

SEQ ID NO: 142937 - RNA, 24 nt, Artificial Sequence
  Synthetic
ucagcucacugcaagcuccgccuc

SEQ ID NO: 142938 - RNA, 18 nt, Artificial Sequence
  Synthetic
cacugcaaccacugccuc

SEQ ID NO: 142939 - RNA, 19 nt, Artificial Sequence
  Synthetic
ucacugcaaccacugccuc

SEQ ID NO: 142940 - RNA, 20 nt, Artificial Sequence
  Synthetic
cucacugcaaccacugccuc

SEQ ID NO: 142941 - RNA, 23 nt, Artificial Sequence
  Synthetic
cggcucacugcaaccacugccuc

SEQ ID NO: 142942 - RNA, 24 nt, Artificial Sequence
  Synthetic
ucggcucacugcaaccacugccuc

SEQ ID NO: 142943 - RNA, 18 nt, Artificial Sequence
  Synthetic
cacagcaaccucugccuc

SEQ ID NO: 142944 - RNA, 19 nt, Artificial Sequence
  Synthetic
ucacagcaaccucugccuc

SEQ ID NO: 142945 - RNA, 20 nt, Artificial Sequence
  Synthetic
cucacagcaaccucugccuc

SEQ ID NO: 142946 - RNA, 23 nt, Artificial Sequence
  Synthetic
cggcucacagcaaccucugccuc

SEQ ID NO: 142947 - RNA, 24 nt, Artificial Sequence
  Synthetic
ucggcucacagcaaccucugccuc

SEQ ID NO: 142948 - RNA, 18 nt, Artificial Sequence
  Synthetic
cacugcaaccucugccuc

SEQ ID NO: 142949 - RNA, 19 nt, Artificial Sequence
  Synthetic
ucacugcaaccucugccuc

SEQ ID NO: 142950 - RNA, 20 nt, Artificial Sequence
  Synthetic
cucacugcaaccucugccuc

SEQ ID NO: 142951 - RNA, 23 nt, Artificial Sequence
  Synthetic
cggcucacugcaaccucugccuc

SEQ ID NO: 142952 - RNA, 24 nt, Artificial Sequence
  Synthetic
ucggcucacugcaaccucugccuc

SEQ ID NO: 142953 - RNA, 22 nt, Artificial Sequence
  Synthetic
ugcucacugcaaccucugccuc

SEQ ID NO: 142954 - RNA, 23 nt, Artificial Sequence
  Synthetic
cugcucacugcaaccucugccuc

SEQ ID NO: 142955 - RNA, 24 nt, Artificial Sequence
  Synthetic
ucugcucacugcaaccucugccuc

SEQ ID NO: 142956 - RNA, 18 nt, Artificial Sequence
  Synthetic
cacugcaagcucugccuc

SEQ ID NO: 142957 - RNA, 19 nt, Artificial Sequence
  Synthetic
ucacugcaagcucugccuc

SEQ ID NO: 142958 - RNA, 20 nt, Artificial Sequence
  Synthetic
cucacugcaagcucugccuc

SEQ ID NO: 142959 - RNA, 23 nt, Artificial Sequence
  Synthetic
uggcucacugcaagcucugccuc

SEQ ID NO: 142960 - RNA, 24 nt, Artificial Sequence
  Synthetic
uuggcucacugcaagcucugccuc

SEQ ID NO: 142961 - RNA, 18 nt, Artificial Sequence
  Synthetic
uuaguacccaggugccuc

SEQ ID NO: 142962 - RNA, 19 nt, Artificial Sequence
  Synthetic
uuuaguacccaggugccuc

SEQ ID NO: 142963 - RNA, 20 nt, Artificial Sequence
  Synthetic
auuuaguacccaggugccuc

SEQ ID NO: 142964 - RNA, 21 nt, Artificial Sequence
  Synthetic
uauuuaguacccaggugccuc

SEQ ID NO: 142965 - RNA, 22 nt, Artificial Sequence
  Synthetic
auauuuaguacccaggugccuc

SEQ ID NO: 142966 - RNA, 23 nt, Artificial Sequence
  Synthetic
aauauuuaguacccaggugccuc

SEQ ID NO: 142967 - RNA, 18 nt, Artificial Sequence
  Synthetic
uucuuuuuuuggcuccuc

SEQ ID NO: 142968 - RNA, 19 nt, Artificial Sequence
  Synthetic
uuucuuuuuuuggcuccuc

SEQ ID NO: 142969 - RNA, 20 nt, Artificial Sequence
  Synthetic
uuuucuuuuuuuggcuccuc

SEQ ID NO: 142970 - RNA, 18 nt, Artificial Sequence
  Synthetic
acaguguggcaauuccuc

SEQ ID NO: 142971 - RNA, 20 nt, Artificial Sequence
  Synthetic
agacaguguggcaauuccuc

SEQ ID NO: 142972 - RNA, 21 nt, Artificial Sequence
  Synthetic
aagacaguguggcaauuccuc

SEQ ID NO: 142973 - RNA, 24 nt, Artificial Sequence
  Synthetic
uggaagacaguguggcaauuccuc

SEQ ID NO: 142974 - RNA, 18 nt, Artificial Sequence
  Synthetic
ucaguguggcgauuccuc

SEQ ID NO: 142975 - RNA, 20 nt, Artificial Sequence
  Synthetic
agucaguguggcgauuccuc

SEQ ID NO: 142976 - RNA, 21 nt, Artificial Sequence
  Synthetic
aagucaguguggcgauuccuc

SEQ ID NO: 142977 - RNA, 24 nt, Artificial Sequence
  Synthetic
uggaagucaguguggcgauuccuc

SEQ ID NO: 142978 - RNA, 18 nt, Artificial Sequence
  Synthetic
accguguggcgauuccuc

SEQ ID NO: 142979 - RNA, 20 nt, Artificial Sequence
  Synthetic
agaccguguggcgauuccuc

SEQ ID NO: 142980 - RNA, 21 nt, Artificial Sequence
  Synthetic
aagaccguguggcgauuccuc

SEQ ID NO: 142981 - RNA, 24 nt, Artificial Sequence
  Synthetic
uggaagaccguguggcgauuccuc

SEQ ID NO: 142982 - RNA, 18 nt, Artificial Sequence
  Synthetic
ucgguguggcgauuccuc

SEQ ID NO: 142983 - RNA, 20 nt, Artificial Sequence
  Synthetic
agucgguguggcgauuccuc

SEQ ID NO: 142984 - RNA, 21 nt, Artificial Sequence
  Synthetic
aagucgguguggcgauuccuc

SEQ ID NO: 142985 - RNA, 24 nt, Artificial Sequence
  Synthetic
uggaagucgguguggcgauuccuc

SEQ ID NO: 142986 - RNA, 18 nt, Artificial Sequence
  Synthetic
uuuuucaaaaucuuccuc

SEQ ID NO: 142987 - RNA, 19 nt, Artificial Sequence
  Synthetic
uuuuuucaaaaucuuccuc

SEQ ID NO: 142988 - RNA, 20 nt, Artificial Sequence
  Synthetic
uuuuuuucaaaaucuuccuc

SEQ ID NO: 142989 - RNA, 18 nt, Artificial Sequence
  Synthetic
cuuuuaaaaaauuuccuc

SEQ ID NO: 142990 - RNA, 19 nt, Artificial Sequence
  Synthetic
acuuuuaaaaaauuuccuc

SEQ ID NO: 142991 - RNA, 18 nt, Artificial Sequence
  Synthetic
ucaauuacuuuuuuccuc

SEQ ID NO: 142992 - RNA, 19 nt, Artificial Sequence
  Synthetic
aucaauuacuuuuuuccuc

SEQ ID NO: 142993 - RNA, 20 nt, Artificial Sequence
  Synthetic
aaucaauuacuuuuuuccuc

SEQ ID NO: 142994 - RNA, 18 nt, Artificial Sequence
  Synthetic
cuuucaaaaaaccagcuc

SEQ ID NO: 142995 - RNA, 19 nt, Artificial Sequence
  Synthetic
ccuuucaaaaaaccagcuc

SEQ ID NO: 142996 - RNA, 20 nt, Artificial Sequence
  Synthetic
uccuuucaaaaaaccagcuc

SEQ ID NO: 142997 - RNA, 21 nt, Artificial Sequence
  Synthetic
auccuuucaaaaaaccagcuc

SEQ ID NO: 142998 - RNA, 23 nt, Artificial Sequence
  Synthetic
ugauccuuucaaaaaaccagcuc

SEQ ID NO: 142999 - RNA, 24 nt, Artificial Sequence
  Synthetic
uugauccuuucaaaaaaccagcuc

SEQ ID NO: 143000 - RNA, 18 nt, Artificial Sequence
  Synthetic
uuuucaaaagaccagcuc

SEQ ID NO: 143001 - RNA, 19 nt, Artificial Sequence
  Synthetic
cuuuucaaaagaccagcuc

SEQ ID NO: 143002 - RNA, 20 nt, Artificial Sequence
  Synthetic
ucuuuucaaaagaccagcuc

SEQ ID NO: 143003 - RNA, 21 nt, Artificial Sequence
  Synthetic
aucuuuucaaaagaccagcuc

SEQ ID NO: 143004 - RNA, 22 nt, Artificial Sequence
  Synthetic
aaucuuuucaaaagaccagcuc

SEQ ID NO: 143005 - RNA, 23 nt, Artificial Sequence
  Synthetic
uaaucuuuucaaaagaccagcuc

SEQ ID NO: 143006 - RNA, 24 nt, Artificial Sequence
  Synthetic
uuaaucuuuucaaaagaccagcuc

SEQ ID NO: 143007 - RNA, 19 nt, Artificial Sequence
  Synthetic
uggaggaucaccagagcuc

SEQ ID NO: 143008 - RNA, 22 nt, Artificial Sequence
  Synthetic
agguggaggaucaccagagcuc

SEQ ID NO: 143009 - RNA, 24 nt, Artificial Sequence
  Synthetic
ugagguggaggaucaccagagcuc

SEQ ID NO: 143010 - RNA, 20 nt, Artificial Sequence
  Synthetic
uggguggguugcaugagcuc

SEQ ID NO: 143011 - RNA, 23 nt, Artificial Sequence
  Synthetic
agguggguggguugcaugagcuc

SEQ ID NO: 143012 - RNA, 19 nt, Artificial Sequence
  Synthetic
aggaggaucacuugagcuc

SEQ ID NO: 143013 - RNA, 20 nt, Artificial Sequence
  Synthetic
caggaggaucacuugagcuc

SEQ ID NO: 143014 - RNA, 22 nt, Artificial Sequence
  Synthetic
agcaggaggaucacuugagcuc

SEQ ID NO: 143015 - RNA, 23 nt, Artificial Sequence
  Synthetic
aagcaggaggaucacuugagcuc

SEQ ID NO: 143016 - RNA, 24 nt, Artificial Sequence
  Synthetic
aaagcaggaggaucacuugagcuc

SEQ ID NO: 143017 - RNA, 18 nt, Artificial Sequence
  Synthetic
uuucugauuuacuagcuc

SEQ ID NO: 143018 - RNA, 20 nt, Artificial Sequence
  Synthetic
aguuucugauuuacuagcuc

SEQ ID NO: 143019 - RNA, 22 nt, Artificial Sequence
  Synthetic
agaguuucugauuuacuagcuc

SEQ ID NO: 143020 - RNA, 23 nt, Artificial Sequence
  Synthetic
cagaguuucugauuuacuagcuc

SEQ ID NO: 143021 - RNA, 24 nt, Artificial Sequence
  Synthetic
ccagaguuucugauuuacuagcuc

SEQ ID NO: 143022 - RNA, 18 nt, Artificial Sequence
  Synthetic
auuuugauucauuagcuc

SEQ ID NO: 143023 - RNA, 20 nt, Artificial Sequence
  Synthetic
agauuuugauucauuagcuc

SEQ ID NO: 143024 - RNA, 21 nt, Artificial Sequence
  Synthetic
cagauuuugauucauuagcuc

SEQ ID NO: 143025 - RNA, 23 nt, Artificial Sequence
  Synthetic
ugcagauuuugauucauuagcuc

SEQ ID NO: 143026 - RNA, 24 nt, Artificial Sequence
  Synthetic
augcagauuuugauucauuagcuc

SEQ ID NO: 143027 - RNA, 18 nt, Artificial Sequence
  Synthetic
agcagugcugggaggcuc

SEQ ID NO: 143028 - RNA, 19 nt, Artificial Sequence
  Synthetic
cagcagugcugggaggcuc

SEQ ID NO: 143029 - RNA, 20 nt, Artificial Sequence
  Synthetic
acagcagugcugggaggcuc

SEQ ID NO: 143030 - RNA, 18 nt, Artificial Sequence
  Synthetic
cuuugaguaguagggcuc

SEQ ID NO: 143031 - RNA, 19 nt, Artificial Sequence
  Synthetic
acuuugaguaguagggcuc

SEQ ID NO: 143032 - RNA, 20 nt, Artificial Sequence
  Synthetic
cacuuugaguaguagggcuc

SEQ ID NO: 143033 - RNA, 18 nt, Artificial Sequence
  Synthetic
uuuucaaaaaacuggcuc

SEQ ID NO: 143034 - RNA, 19 nt, Artificial Sequence
  Synthetic
cuuuucaaaaaacuggcuc

SEQ ID NO: 143035 - RNA, 20 nt, Artificial Sequence
  Synthetic
ucuuuucaaaaaacuggcuc

SEQ ID NO: 143036 - RNA, 21 nt, Artificial Sequence
  Synthetic
aucuuuucaaaaaacuggcuc

SEQ ID NO: 143037 - RNA, 23 nt, Artificial Sequence
  Synthetic
ugaucuuuucaaaaaacuggcuc

SEQ ID NO: 143038 - RNA, 24 nt, Artificial Sequence
  Synthetic
uugaucuuuucaaaaaacuggcuc

SEQ ID NO: 143039 - RNA, 18 nt, Artificial Sequence
  Synthetic
aaacugagcaaccugcuc

SEQ ID NO: 143040 - RNA, 21 nt, Artificial Sequence
  Synthetic
uggaaacugagcaaccugcuc

SEQ ID NO: 143041 - RNA, 22 nt, Artificial Sequence
  Synthetic
auggaaacugagcaaccugcuc

SEQ ID NO: 143042 - RNA, 23 nt, Artificial Sequence
  Synthetic
cauggaaacugagcaaccugcuc

SEQ ID NO: 143043 - RNA, 24 nt, Artificial Sequence
  Synthetic
acauggaaacugagcaaccugcuc

SEQ ID NO: 143044 - RNA, 20 nt, Artificial Sequence
  Synthetic
uggacccaaccccacaucuc

SEQ ID NO: 143045 - RNA, 21 nt, Artificial Sequence
  Synthetic
cuggacccaaccccacaucuc

SEQ ID NO: 143046 - RNA, 22 nt, Artificial Sequence
  Synthetic
ucuggacccaaccccacaucuc

SEQ ID NO: 143047 - RNA, 23 nt, Artificial Sequence
  Synthetic
aucuggacccaaccccacaucuc

SEQ ID NO: 143048 - RNA, 24 nt, Artificial Sequence
  Synthetic
aaucuggacccaaccccacaucuc

SEQ ID NO: 143049 - RNA, 18 nt, Artificial Sequence
  Synthetic
cacugcaacuuccaucuc

SEQ ID NO: 143050 - RNA, 19 nt, Artificial Sequence
  Synthetic
ucacugcaacuuccaucuc

SEQ ID NO: 143051 - RNA, 20 nt, Artificial Sequence
  Synthetic
cucacugcaacuuccaucuc

SEQ ID NO: 143052 - RNA, 23 nt, Artificial Sequence
  Synthetic
uggcucacugcaacuuccaucuc

SEQ ID NO: 143053 - RNA, 24 nt, Artificial Sequence
  Synthetic
uuggcucacugcaacuuccaucuc

SEQ ID NO: 143054 - RNA, 18 nt, Artificial Sequence
  Synthetic
uguuauucaacagaucuc

SEQ ID NO: 143055 - RNA, 19 nt, Artificial Sequence
  Synthetic
uuguuauucaacagaucuc

SEQ ID NO: 143056 - RNA, 20 nt, Artificial Sequence
  Synthetic
auuguuauucaacagaucuc

SEQ ID NO: 143057 - RNA, 18 nt, Artificial Sequence
  Synthetic
auuuuauuuaaauaucuc

SEQ ID NO: 143058 - RNA, 19 nt, Artificial Sequence
  Synthetic
aauuuuauuuaaauaucuc

SEQ ID NO: 143059 - RNA, 20 nt, Artificial Sequence
  Synthetic
uaauuuuauuuaaauaucuc

SEQ ID NO: 143060 - RNA, 18 nt, Artificial Sequence
  Synthetic
acuacacuaucagcucuc

SEQ ID NO: 143061 - RNA, 19 nt, Artificial Sequence
  Synthetic
aacuacacuaucagcucuc

SEQ ID NO: 143062 - RNA, 22 nt, Artificial Sequence
  Synthetic
uggaacuacacuaucagcucuc

SEQ ID NO: 143063 - RNA, 23 nt, Artificial Sequence
  Synthetic
uuggaacuacacuaucagcucuc

SEQ ID NO: 143064 - RNA, 24 nt, Artificial Sequence
  Synthetic
auuggaacuacacuaucagcucuc

SEQ ID NO: 143065 - RNA, 18 nt, Artificial Sequence
  Synthetic
auuacaguuccugcucuc

SEQ ID NO: 143066 - RNA, 20 nt, Artificial Sequence
  Synthetic
agauuacaguuccugcucuc

SEQ ID NO: 143067 - RNA, 18 nt, Artificial Sequence
  Synthetic
aauuuaaaaaucucucuc

SEQ ID NO: 143068 - RNA, 19 nt, Artificial Sequence
  Synthetic
aaauuuaaaaaucucucuc

SEQ ID NO: 143069 - RNA, 20 nt, Artificial Sequence
  Synthetic
caaauuuaaaaaucucucuc

SEQ ID NO: 143070 - RNA, 18 nt, Artificial Sequence
  Synthetic
cacugcaaccucugucuc

SEQ ID NO: 143071 - RNA, 19 nt, Artificial Sequence
  Synthetic
ucacugcaaccucugucuc

SEQ ID NO: 143072 - RNA, 20 nt, Artificial Sequence
  Synthetic
cucacugcaaccucugucuc

SEQ ID NO: 143073 - RNA, 21 nt, Artificial Sequence
  Synthetic
acucacugcaaccucugucuc

SEQ ID NO: 143074 - RNA, 22 nt, Artificial Sequence
  Synthetic
cacucacugcaaccucugucuc

SEQ ID NO: 143075 - RNA, 23 nt, Artificial Sequence
  Synthetic
ccacucacugcaaccucugucuc

SEQ ID NO: 143076 - RNA, 24 nt, Artificial Sequence
  Synthetic
uccacucacugcaaccucugucuc

SEQ ID NO: 143077 - RNA, 21 nt, Artificial Sequence
  Synthetic
aacuguacacgaaauauucuc

SEQ ID NO: 143078 - RNA, 22 nt, Artificial Sequence
  Synthetic
caacuguacacgaaauauucuc

SEQ ID NO: 143079 - RNA, 23 nt, Artificial Sequence
  Synthetic
ucaacuguacacgaaauauucuc

SEQ ID NO: 143080 - RNA, 24 nt, Artificial Sequence
  Synthetic
uucaacuguacacgaaauauucuc

SEQ ID NO: 143081 - RNA, 18 nt, Artificial Sequence
  Synthetic
uauacucauuuacuucuc

SEQ ID NO: 143082 - RNA, 19 nt, Artificial Sequence
  Synthetic
cuauacucauuuacuucuc

SEQ ID NO: 143083 - RNA, 20 nt, Artificial Sequence
  Synthetic
ucuauacucauuuacuucuc

SEQ ID NO: 143084 - RNA, 18 nt, Artificial Sequence
  Synthetic
uagauuggggaaguucuc

SEQ ID NO: 143085 - RNA, 19 nt, Artificial Sequence
  Synthetic
cuagauuggggaaguucuc

SEQ ID NO: 143086 - RNA, 20 nt, Artificial Sequence
  Synthetic
acuagauuggggaaguucuc

SEQ ID NO: 143087 - RNA, 21 nt, Artificial Sequence
  Synthetic
uacuagauuggggaaguucuc

SEQ ID NO: 143088 - RNA, 22 nt, Artificial Sequence
  Synthetic
uuacuagauuggggaaguucuc

SEQ ID NO: 143089 - RNA, 23 nt, Artificial Sequence
  Synthetic
cuuacuagauuggggaaguucuc

SEQ ID NO: 143090 - RNA, 24 nt, Artificial Sequence
  Synthetic
ccuuacuagauuggggaaguucuc

SEQ ID NO: 143091 - RNA, 18 nt, Artificial Sequence
  Synthetic
ugcacaugaaauuuucuc

SEQ ID NO: 143092 - RNA, 20 nt, Artificial Sequence
  Synthetic
agugcacaugaaauuuucuc

SEQ ID NO: 143093 - RNA, 21 nt, Artificial Sequence
  Synthetic
aagugcacaugaaauuuucuc

SEQ ID NO: 143094 - RNA, 22 nt, Artificial Sequence
  Synthetic
aaagugcacaugaaauuuucuc

SEQ ID NO: 143095 - RNA, 23 nt, Artificial Sequence
  Synthetic
uaaagugcacaugaaauuuucuc

SEQ ID NO: 143096 - RNA, 24 nt, Artificial Sequence
  Synthetic
uuaaagugcacaugaaauuuucuc

SEQ ID NO: 143097 - RNA, 18 nt, Artificial Sequence
  Synthetic
uuauugaauguuuuucuc

SEQ ID NO: 143098 - RNA, 19 nt, Artificial Sequence
  Synthetic
uuuauugaauguuuuucuc

SEQ ID NO: 143099 - RNA, 20 nt, Artificial Sequence
  Synthetic
auuuauugaauguuuuucuc

SEQ ID NO: 143100 - RNA, 20 nt, Artificial Sequence
  Synthetic
aggaaggaaaugggaaaguc

SEQ ID NO: 143101 - RNA, 18 nt, Artificial Sequence
  Synthetic
uuuucccuuuggaaaguc

SEQ ID NO: 143102 - RNA, 19 nt, Artificial Sequence
  Synthetic
uuuuucccuuuggaaaguc

SEQ ID NO: 143103 - RNA, 20 nt, Artificial Sequence
  Synthetic
auuuuucccuuuggaaaguc

SEQ ID NO: 143104 - RNA, 18 nt, Artificial Sequence
  Synthetic
ugggguuggacagaaguc

SEQ ID NO: 143105 - RNA, 19 nt, Artificial Sequence
  Synthetic
cugggguuggacagaaguc

SEQ ID NO: 143106 - RNA, 20 nt, Artificial Sequence
  Synthetic
ccugggguuggacagaaguc

SEQ ID NO: 143107 - RNA, 24 nt, Artificial Sequence
  Synthetic
ugggccugggguuggacagaaguc

SEQ ID NO: 143108 - RNA, 20 nt, Artificial Sequence
  Synthetic
uggguggaucaccugaaguc

SEQ ID NO: 143109 - RNA, 23 nt, Artificial Sequence
  Synthetic
agguggguggaucaccugaaguc

SEQ ID NO: 143110 - RNA, 18 nt, Artificial Sequence
  Synthetic
uucauaaauuacccaguc

SEQ ID NO: 143111 - RNA, 19 nt, Artificial Sequence
  Synthetic
cuucauaaauuacccaguc

SEQ ID NO: 143112 - RNA, 20 nt, Artificial Sequence
  Synthetic
ucuucauaaauuacccaguc

SEQ ID NO: 143113 - RNA, 21 nt, Artificial Sequence
  Synthetic
uucuucauaaauuacccaguc

SEQ ID NO: 143114 - RNA, 22 nt, Artificial Sequence
  Synthetic
uuucuucauaaauuacccaguc

SEQ ID NO: 143115 - RNA, 23 nt, Artificial Sequence
  Synthetic
uuuucuucauaaauuacccaguc

SEQ ID NO: 143116 - RNA, 18 nt, Artificial Sequence
  Synthetic
auaaccccauccucaguc

SEQ ID NO: 143117 - RNA, 19 nt, Artificial Sequence
  Synthetic
uauaaccccauccucaguc

SEQ ID NO: 143118 - RNA, 20 nt, Artificial Sequence
  Synthetic
auauaaccccauccucaguc

SEQ ID NO: 143119 - RNA, 22 nt, Artificial Sequence
  Synthetic
agauauaaccccauccucaguc

SEQ ID NO: 143120 - RNA, 23 nt, Artificial Sequence
  Synthetic
cagauauaaccccauccucaguc

SEQ ID NO: 143121 - RNA, 24 nt, Artificial Sequence
  Synthetic
ccagauauaaccccauccucaguc

SEQ ID NO: 143122 - RNA, 18 nt, Artificial Sequence
  Synthetic
ugggagaaaaauggaguc

SEQ ID NO: 143123 - RNA, 19 nt, Artificial Sequence
  Synthetic
augggagaaaaauggaguc

SEQ ID NO: 143124 - RNA, 20 nt, Artificial Sequence
  Synthetic
caugggagaaaaauggaguc

SEQ ID NO: 143125 - RNA, 19 nt, Artificial Sequence
  Synthetic
aggcagaucccuggacguc

SEQ ID NO: 143126 - RNA, 20 nt, Artificial Sequence
  Synthetic
caggcagaucccuggacguc

SEQ ID NO: 143127 - RNA, 21 nt, Artificial Sequence
  Synthetic
acaggcagaucccuggacguc

SEQ ID NO: 143128 - RNA, 22 nt, Artificial Sequence
  Synthetic
aacaggcagaucccuggacguc

SEQ ID NO: 143129 - RNA, 23 nt, Artificial Sequence
  Synthetic
aaacaggcagaucccuggacguc

SEQ ID NO: 143130 - RNA, 18 nt, Artificial Sequence
  Synthetic
cuugcccaugccuacguc

SEQ ID NO: 143131 - RNA, 19 nt, Artificial Sequence
  Synthetic
ccuugcccaugccuacguc

SEQ ID NO: 143132 - RNA, 20 nt, Artificial Sequence
  Synthetic
uccuugcccaugccuacguc

SEQ ID NO: 143133 - RNA, 22 nt, Artificial Sequence
  Synthetic
aguccuugcccaugccuacguc

SEQ ID NO: 143134 - RNA, 23 nt, Artificial Sequence
  Synthetic
aaguccuugcccaugccuacguc

SEQ ID NO: 143135 - RNA, 18 nt, Artificial Sequence
  Synthetic
aucaaacucccacagguc

SEQ ID NO: 143136 - RNA, 19 nt, Artificial Sequence
  Synthetic
aaucaaacucccacagguc

SEQ ID NO: 143137 - RNA, 20 nt, Artificial Sequence
  Synthetic
uaaucaaacucccacagguc

SEQ ID NO: 143138 - RNA, 21 nt, Artificial Sequence
  Synthetic
auaaucaaacucccacagguc

SEQ ID NO: 143139 - RNA, 22 nt, Artificial Sequence
  Synthetic
aauaaucaaacucccacagguc

SEQ ID NO: 143140 - RNA, 23 nt, Artificial Sequence
  Synthetic
caauaaucaaacucccacagguc

SEQ ID NO: 143141 - RNA, 18 nt, Artificial Sequence
  Synthetic
cgggcagaucacgagguc

SEQ ID NO: 143142 - RNA, 21 nt, Artificial Sequence
  Synthetic
aggcgggcagaucacgagguc

SEQ ID NO: 143143 - RNA, 23 nt, Artificial Sequence
  Synthetic
cgaggcgggcagaucacgagguc

SEQ ID NO: 143144 - RNA, 24 nt, Artificial Sequence
  Synthetic
ccgaggcgggcagaucacgagguc

SEQ ID NO: 143145 - RNA, 18 nt, Artificial Sequence
  Synthetic
ugggcagaucacgagguc

SEQ ID NO: 143146 - RNA, 21 nt, Artificial Sequence
  Synthetic
aggcagguggaucacgagguc

SEQ ID NO: 143147 - RNA, 23 nt, Artificial Sequence
  Synthetic
ugaggcagguggaucacgagguc

SEQ ID NO: 143148 - RNA, 24 nt, Artificial Sequence
  Synthetic
cugaggcagguggaucacgagguc

SEQ ID NO: 143149 - RNA, 18 nt, Artificial Sequence
  Synthetic
cgggcagauuaugagguc

SEQ ID NO: 143150 - RNA, 19 nt, Artificial Sequence
  Synthetic
acgggcagauuaugagguc

SEQ ID NO: 143151 - RNA, 21 nt, Artificial Sequence
  Synthetic
agacgggcagauuaugagguc

SEQ ID NO: 143152 - RNA, 23 nt, Artificial Sequence
  Synthetic
ugagacgggcagauuaugagguc

SEQ ID NO: 143153 - RNA, 24 nt, Artificial Sequence
  Synthetic
cugagacgggcagauuaugagguc

SEQ ID NO: 143154 - RNA, 20 nt, Artificial Sequence
  Synthetic
ugggcagaucaccugagguc

SEQ ID NO: 143155 - RNA, 23 nt, Artificial Sequence
  Synthetic
aggugggcagaucaccugagguc

SEQ ID NO: 143156 - RNA, 18 nt, Artificial Sequence
  Synthetic
aacggaucaccugagguc

SEQ ID NO: 143157 - RNA, 19 nt, Artificial Sequence
  Synthetic
aaacggaucaccugagguc

SEQ ID NO: 143158 - RNA, 20 nt, Artificial Sequence
  Synthetic
caaacggaucaccugagguc

SEQ ID NO: 143159 - RNA, 23 nt, Artificial Sequence
  Synthetic
aggcaaacggaucaccugagguc

SEQ ID NO: 143160 - RNA, 19 nt, Artificial Sequence
  Synthetic
aggcggaucaccugagguc

SEQ ID NO: 143161 - RNA, 20 nt, Artificial Sequence
  Synthetic
caggcggaucaccugagguc

SEQ ID NO: 143162 - RNA, 23 nt, Artificial Sequence
  Synthetic
aggcaggcggaucaccugagguc

SEQ ID NO: 143163 - RNA, 19 nt, Artificial Sequence
  Synthetic
cgauggaucaccugagguc

SEQ ID NO: 143164 - RNA, 21 nt, Artificial Sequence
  Synthetic
agcgauggaucaccugagguc

SEQ ID NO: 143165 - RNA, 22 nt, Artificial Sequence
  Synthetic
aagcgauggaucaccugagguc

SEQ ID NO: 143166 - RNA, 24 nt, Artificial Sequence
  Synthetic
ugaagcgauggaucaccugagguc

SEQ ID NO: 143167 - RNA, 22 nt, Artificial Sequence
  Synthetic
cguggguggaucaccugagguc

SEQ ID NO: 143168 - RNA, 23 nt, Artificial Sequence
  Synthetic
acguggguggaucaccugagguc

SEQ ID NO: 143169 - RNA, 24 nt, Artificial Sequence
  Synthetic
uacguggguggaucaccugagguc

SEQ ID NO: 143170 - RNA, 23 nt, Artificial Sequence
  Synthetic
agguggguggaucaccugagguc

SEQ ID NO: 143171 - RNA, 20 nt, Artificial Sequence
  Synthetic
cggguguaucaccugagguc

SEQ ID NO: 143172 - RNA, 23 nt, Artificial Sequence
  Synthetic
aggcggguguaucaccugagguc

SEQ ID NO: 143173 - RNA, 20 nt, Artificial Sequence
  Synthetic
ugggcagaucaucugagguc

SEQ ID NO: 143174 - RNA, 21 nt, Artificial Sequence
  Synthetic
augggcagaucaucugagguc

SEQ ID NO: 143175 - RNA, 23 nt, Artificial Sequence
  Synthetic
agaugggcagaucaucugagguc

SEQ ID NO: 143176 - RNA, 24 nt, Artificial Sequence
  Synthetic
aagaugggcagaucaucugagguc

SEQ ID NO: 143177 - RNA, 20 nt, Artificial Sequence
  Synthetic
uggguggaacacuugagguc

SEQ ID NO: 143178 - RNA, 23 nt, Artificial Sequence
  Synthetic
agguggguggaacacuugagguc

SEQ ID NO: 143179 - RNA, 20 nt, Artificial Sequence
  Synthetic
agggcagaucacuugagguc

SEQ ID NO: 143180 - RNA, 23 nt, Artificial Sequence
  Synthetic
aggagggcagaucacuugagguc

SEQ ID NO: 143181 - RNA, 19 nt, Artificial Sequence
  Synthetic
agguggaucacuugagguc

SEQ ID NO: 143182 - RNA, 20 nt, Artificial Sequence
  Synthetic
cagguggaucacuugagguc

SEQ ID NO: 143183 - RNA, 23 nt, Artificial Sequence
  Synthetic
aggcagguggaucacuugagguc

SEQ ID NO: 143184 - RNA, 20 nt, Artificial Sequence
  Synthetic
cgggcacaucauuugagguc

SEQ ID NO: 143185 - RNA, 23 nt, Artificial Sequence
  Synthetic
aggcgggcacaucauuugagguc

SEQ ID NO: 143186 - RNA, 24 nt, Artificial Sequence
  Synthetic
aaggcgggcacaucauuugagguc

SEQ ID NO: 143187 - RNA, 18 nt, Artificial Sequence
  Synthetic
augcugauucaguagguc

SEQ ID NO: 143188 - RNA, 20 nt, Artificial Sequence
  Synthetic
ugaugcugauucaguagguc

SEQ ID NO: 143189 - RNA, 18 nt, Artificial Sequence
  Synthetic
uuuauaaauuacccgguc

SEQ ID NO: 143190 - RNA, 19 nt, Artificial Sequence
  Synthetic
cuuuauaaauuacccgguc

SEQ ID NO: 143191 - RNA, 20 nt, Artificial Sequence
  Synthetic
ucuuuauaaauuacccgguc

SEQ ID NO: 143192 - RNA, 21 nt, Artificial Sequence
  Synthetic
uucuuuauaaauuacccgguc

SEQ ID NO: 143193 - RNA, 22 nt, Artificial Sequence
  Synthetic
uuucuuuauaaauuacccgguc

SEQ ID NO: 143194 - RNA, 23 nt, Artificial Sequence
  Synthetic
uuuucuuuauaaauuacccgguc

SEQ ID NO: 143195 - RNA, 24 nt, Artificial Sequence
  Synthetic
cuuuucuuuauaaauuacccgguc

SEQ ID NO: 143196 - RNA, 18 nt, Artificial Sequence
  Synthetic
acucaggcaaacaggguc

SEQ ID NO: 143197 - RNA, 19 nt, Artificial Sequence
  Synthetic
uacucaggcaaacaggguc

SEQ ID NO: 143198 - RNA, 20 nt, Artificial Sequence
  Synthetic
auacucaggcaaacaggguc

SEQ ID NO: 143199 - RNA, 22 nt, Artificial Sequence
  Synthetic
ugauacucaggcaaacaggguc

SEQ ID NO: 143200 - RNA, 20 nt, Artificial Sequence
  Synthetic
aggcgggugaccacaggguc

SEQ ID NO: 143201 - RNA, 21 nt, Artificial Sequence
  Synthetic
aaggcgggugaccacaggguc

SEQ ID NO: 143202 - RNA, 22 nt, Artificial Sequence
  Synthetic
caaggcgggugaccacaggguc

SEQ ID NO: 143203 - RNA, 23 nt, Artificial Sequence
  Synthetic
ccaaggcgggugaccacaggguc

SEQ ID NO: 143204 - RNA, 18 nt, Artificial Sequence
  Synthetic
uuugcaagccacaugguc

SEQ ID NO: 143205 - RNA, 19 nt, Artificial Sequence
  Synthetic
auuugcaagccacaugguc

SEQ ID NO: 143206 - RNA, 20 nt, Artificial Sequence
  Synthetic
cauuugcaagccacaugguc

SEQ ID NO: 143207 - RNA, 23 nt, Artificial Sequence
  Synthetic
aggaggcugaauuugaccugguc

SEQ ID NO: 143208 - RNA, 18 nt, Artificial Sequence
  Synthetic
auguugaccaggcugguc

SEQ ID NO: 143209 - RNA, 19 nt, Artificial Sequence
  Synthetic
cauguugaccaggcugguc

SEQ ID NO: 143210 - RNA, 20 nt, Artificial Sequence
  Synthetic
ccauguugaccaggcugguc

SEQ ID NO: 143211 - RNA, 21 nt, Artificial Sequence
  Synthetic
accauguugaccaggcugguc

SEQ ID NO: 143212 - RNA, 22 nt, Artificial Sequence
  Synthetic
caccauguugaccaggcugguc

SEQ ID NO: 143213 - RNA, 23 nt, Artificial Sequence
  Synthetic
ucaccauguugaccaggcugguc

SEQ ID NO: 143214 - RNA, 24 nt, Artificial Sequence
  Synthetic
uucaccauguugaccaggcugguc

SEQ ID NO: 143215 - RNA, 22 nt, Artificial Sequence
  Synthetic
agaaauacugauuaaguugguc

SEQ ID NO: 143216 - RNA, 23 nt, Artificial Sequence
  Synthetic
cagaaauacugauuaaguugguc

SEQ ID NO: 143217 - RNA, 24 nt, Artificial Sequence
  Synthetic
ccagaaauacugauuaaguugguc

SEQ ID NO: 143218 - RNA, 18 nt, Artificial Sequence
  Synthetic
uuucugugucaguugguc

SEQ ID NO: 143219 - RNA, 20 nt, Artificial Sequence
  Synthetic
aguuucugugucaguugguc

SEQ ID NO: 143220 - RNA, 22 nt, Artificial Sequence
  Synthetic
agaguuucugugucaguugguc

SEQ ID NO: 143221 - RNA, 23 nt, Artificial Sequence
  Synthetic
cagaguuucugugucaguugguc

SEQ ID NO: 143222 - RNA, 24 nt, Artificial Sequence
  Synthetic
ccagaguuucugugucaguugguc

SEQ ID NO: 143223 - RNA, 18 nt, Artificial Sequence
  Synthetic
cauggauggauuuugguc

SEQ ID NO: 143224 - RNA, 19 nt, Artificial Sequence
  Synthetic
ucauggauggauuuugguc

SEQ ID NO: 143225 - RNA, 20 nt, Artificial Sequence
  Synthetic
aucauggauggauuuugguc

SEQ ID NO: 143226 - RNA, 21 nt, Artificial Sequence
  Synthetic
uaaccaaaaagaaagaauguc

SEQ ID NO: 143227 - RNA, 22 nt, Artificial Sequence
  Synthetic
auaaccaaaaagaaagaauguc

SEQ ID NO: 143228 - RNA, 24 nt, Artificial Sequence
  Synthetic
ugauaaccaaaaagaaagaauguc

SEQ ID NO: 143229 - RNA, 18 nt, Artificial Sequence
  Synthetic
ugguaauccccacauguc

SEQ ID NO: 143230 - RNA, 19 nt, Artificial Sequence
  Synthetic
augguaauccccacauguc

SEQ ID NO: 143231 - RNA, 20 nt, Artificial Sequence
  Synthetic
uaugguaauccccacauguc

SEQ ID NO: 143232 - RNA, 21 nt, Artificial Sequence
  Synthetic
uuaugguaauccccacauguc

SEQ ID NO: 143233 - RNA, 22 nt, Artificial Sequence
  Synthetic
auuaugguaauccccacauguc

SEQ ID NO: 143234 - RNA, 23 nt, Artificial Sequence
  Synthetic
aauuaugguaauccccacauguc

SEQ ID NO: 143235 - RNA, 20 nt, Artificial Sequence
  Synthetic
cggguggaucaucugauguc

SEQ ID NO: 143236 - RNA, 23 nt, Artificial Sequence
  Synthetic
aggcggguggaucaucugauguc

SEQ ID NO: 143237 - RNA, 18 nt, Artificial Sequence
  Synthetic
uuucccaagucugauguc

SEQ ID NO: 143238 - RNA, 19 nt, Artificial Sequence
  Synthetic
cuuucccaagucugauguc

SEQ ID NO: 143239 - RNA, 20 nt, Artificial Sequence
  Synthetic
ucuuucccaagucugauguc

SEQ ID NO: 143240 - RNA, 21 nt, Artificial Sequence
  Synthetic
uucuuucccaagucugauguc

SEQ ID NO: 143241 - RNA, 22 nt, Artificial Sequence
  Synthetic
auucuuucccaagucugauguc

SEQ ID NO: 143242 - RNA, 23 nt, Artificial Sequence
  Synthetic
aauucuuucccaagucugauguc

SEQ ID NO: 143243 - RNA, 24 nt, Artificial Sequence
  Synthetic
aaauucuuucccaagucugauguc

SEQ ID NO: 143244 - RNA, 20 nt, Artificial Sequence
  Synthetic
uggguggaccacuugauguc

SEQ ID NO: 143245 - RNA, 23 nt, Artificial Sequence
  Synthetic
agguggguggaccacuugauguc

SEQ ID NO: 143246 - RNA, 18 nt, Artificial Sequence
  Synthetic
ugaagggaaaaauauguc

SEQ ID NO: 143247 - RNA, 19 nt, Artificial Sequence
  Synthetic
augaagggaaaaauauguc

SEQ ID NO: 143248 - RNA, 20 nt, Artificial Sequence
  Synthetic
aaugaagggaaaaauauguc

SEQ ID NO: 143249 - RNA, 18 nt, Artificial Sequence
  Synthetic
cuugcccacgccuauguc

SEQ ID NO: 143250 - RNA, 19 nt, Artificial Sequence
  Synthetic
ccuugcccacgccuauguc

SEQ ID NO: 143251 - RNA, 20 nt, Artificial Sequence
  Synthetic
uccuugcccacgccuauguc

SEQ ID NO: 143252 - RNA, 22 nt, Artificial Sequence
  Synthetic
aguccuugcccacgccuauguc

SEQ ID NO: 143253 - RNA, 23 nt, Artificial Sequence
  Synthetic
aaguccuugcccacgccuauguc

SEQ ID NO: 143254 - RNA, 23 nt, Artificial Sequence
  Synthetic
ugggcuggcugugcagagcuguc

SEQ ID NO: 143255 - RNA, 24 nt, Artificial Sequence
  Synthetic
cugggcuggcugugcagagcuguc

SEQ ID NO: 143256 - RNA, 21 nt, Artificial Sequence
  Synthetic
aauaacuuacauacauguguc

SEQ ID NO: 143257 - RNA, 22 nt, Artificial Sequence
  Synthetic
aaauaacuuacauacauguguc

SEQ ID NO: 143258 - RNA, 24 nt, Artificial Sequence
  Synthetic
ugaaauaacuuacauacauguguc

SEQ ID NO: 143259 - RNA, 18 nt, Artificial Sequence
  Synthetic
uagcccuucagaauuguc

SEQ ID NO: 143260 - RNA, 19 nt, Artificial Sequence
  Synthetic
auagcccuucagaauuguc

SEQ ID NO: 143261 - RNA, 20 nt, Artificial Sequence
  Synthetic
aauagcccuucagaauuguc

SEQ ID NO: 143262 - RNA, 19 nt, Artificial Sequence
  Synthetic
agaggcuaagugaguuguc

SEQ ID NO: 143263 - RNA, 21 nt, Artificial Sequence
  Synthetic
agagaggcuaagugaguuguc

SEQ ID NO: 143264 - RNA, 22 nt, Artificial Sequence
  Synthetic
cagagaggcuaagugaguuguc

SEQ ID NO: 143265 - RNA, 23 nt, Artificial Sequence
  Synthetic
acagagaggcuaagugaguuguc

SEQ ID NO: 143266 - RNA, 24 nt, Artificial Sequence
  Synthetic
cacagagaggcuaagugaguuguc

SEQ ID NO: 143267 - RNA, 18 nt, Artificial Sequence
  Synthetic
cuugcccaugccuuuguc

SEQ ID NO: 143268 - RNA, 19 nt, Artificial Sequence
  Synthetic
ccuugcccaugccuuuguc

SEQ ID NO: 143269 - RNA, 20 nt, Artificial Sequence
  Synthetic
uccuugcccaugccuuuguc

SEQ ID NO: 143270 - RNA, 22 nt, Artificial Sequence
  Synthetic
aguccuugcccaugccuuuguc

SEQ ID NO: 143271 - RNA, 23 nt, Artificial Sequence
  Synthetic
aaguccuugcccaugccuuuguc

SEQ ID NO: 143272 - RNA, 21 nt, Artificial Sequence
  Synthetic
agcauuuugauaucaaaauuc

SEQ ID NO: 143273 - RNA, 22 nt, Artificial Sequence
  Synthetic
cagcauuuugauaucaaaauuc

SEQ ID NO: 143274 - RNA, 23 nt, Artificial Sequence
  Synthetic
ucagcauuuugauaucaaaauuc

SEQ ID NO: 143275 - RNA, 24 nt, Artificial Sequence
  Synthetic
uucagcauuuugauaucaaaauuc

SEQ ID NO: 143276 - RNA, 18 nt, Artificial Sequence
  Synthetic
agaaccaaaugaaaauuc

SEQ ID NO: 143277 - RNA, 19 nt, Artificial Sequence
  Synthetic
aagaaccaaaugaaaauuc

SEQ ID NO: 143278 - RNA, 20 nt, Artificial Sequence
  Synthetic
aaagaaccaaaugaaaauuc

SEQ ID NO: 143279 - RNA, 21 nt, Artificial Sequence
  Synthetic
aaaagaaccaaaugaaaauuc

SEQ ID NO: 143280 - RNA, 22 nt, Artificial Sequence
  Synthetic
uaaaagaaccaaaugaaaauuc

SEQ ID NO: 143281 - RNA, 23 nt, Artificial Sequence
  Synthetic
auaaaagaaccaaaugaaaauuc

SEQ ID NO: 143282 - RNA, 24 nt, Artificial Sequence
  Synthetic
uauaaaagaaccaaaugaaaauuc

SEQ ID NO: 143283 - RNA, 18 nt, Artificial Sequence
  Synthetic
aaaauuguaguaaaauuc

SEQ ID NO: 143284 - RNA, 19 nt, Artificial Sequence
  Synthetic
aaaaauuguaguaaaauuc

SEQ ID NO: 143285 - RNA, 20 nt, Artificial Sequence
  Synthetic
aaaaaauuguaguaaaauuc

SEQ ID NO: 143286 - RNA, 18 nt, Artificial Sequence
  Synthetic
ucuaagaaaugcaaauuc

SEQ ID NO: 143287 - RNA, 19 nt, Artificial Sequence
  Synthetic
uucuaagaaaugcaaauuc

SEQ ID NO: 143288 - RNA, 20 nt, Artificial Sequence
  Synthetic
cuucuaagaaaugcaaauuc

SEQ ID NO: 143289 - RNA, 21 nt, Artificial Sequence
  Synthetic
acuucuaagaaaugcaaauuc

SEQ ID NO: 143290 - RNA, 22 nt, Artificial Sequence
  Synthetic
aacuucuaagaaaugcaaauuc

SEQ ID NO: 143291 - RNA, 18 nt, Artificial Sequence
  Synthetic
uugagcaaaaaacaauuc

SEQ ID NO: 143292 - RNA, 19 nt, Artificial Sequence
  Synthetic
uuugagcaaaaaacaauuc

SEQ ID NO: 143293 - RNA, 20 nt, Artificial Sequence
  Synthetic
auuugagcaaaaaacaauuc

SEQ ID NO: 143294 - RNA, 21 nt, Artificial Sequence
  Synthetic
uauuugagcaaaaaacaauuc

SEQ ID NO: 143295 - RNA, 22 nt, Artificial Sequence
  Synthetic
uuauuugagcaaaaaacaauuc

SEQ ID NO: 143296 - RNA, 23 nt, Artificial Sequence
  Synthetic
uuuauuugagcaaaaaacaauuc

SEQ ID NO: 143297 - RNA, 20 nt, Artificial Sequence
  Synthetic
agguucccaaacuucaauuc

SEQ ID NO: 143298 - RNA, 22 nt, Artificial Sequence
  Synthetic
agagguucccaaacuucaauuc

SEQ ID NO: 143299 - RNA, 23 nt, Artificial Sequence
  Synthetic
cagagguucccaaacuucaauuc

SEQ ID NO: 143300 - RNA, 18 nt, Artificial Sequence
  Synthetic
cagagcugaguucaauuc

SEQ ID NO: 143301 - RNA, 20 nt, Artificial Sequence
  Synthetic
ugcagagcugaguucaauuc

SEQ ID NO: 143302 - RNA, 23 nt, Artificial Sequence
  Synthetic
uggugcagagcugaguucaauuc

SEQ ID NO: 143303 - RNA, 24 nt, Artificial Sequence
  Synthetic
uuggugcagagcugaguucaauuc

SEQ ID NO: 143304 - RNA, 18 nt, Artificial Sequence
  Synthetic
ucaucagagauauaauuc

SEQ ID NO: 143305 - RNA, 19 nt, Artificial Sequence
  Synthetic
aucaucagagauauaauuc

SEQ ID NO: 143306 - RNA, 20 nt, Artificial Sequence
  Synthetic
aaucaucagagauauaauuc

SEQ ID NO: 143307 - RNA, 18 nt, Artificial Sequence
  Synthetic
uucuaagugaaguaauuc

SEQ ID NO: 143308 - RNA, 19 nt, Artificial Sequence
  Synthetic
auucuaagugaaguaauuc

SEQ ID NO: 143309 - RNA, 20 nt, Artificial Sequence
  Synthetic
uauucuaagugaaguaauuc

SEQ ID NO: 143310 - RNA, 21 nt, Artificial Sequence
  Synthetic
uuauucuaagugaaguaauuc

SEQ ID NO: 143311 - RNA, 22 nt, Artificial Sequence
  Synthetic
auuauucuaagugaaguaauuc

SEQ ID NO: 143312 - RNA, 23 nt, Artificial Sequence
  Synthetic
cauuauucuaagugaaguaauuc

SEQ ID NO: 143313 - RNA, 24 nt, Artificial Sequence
  Synthetic
ccauuauucuaagugaaguaauuc

SEQ ID NO: 143314 - RNA, 18 nt, Artificial Sequence
  Synthetic
uuauuauacuuuacauuc

SEQ ID NO: 143315 - RNA, 19 nt, Artificial Sequence
  Synthetic
auuauuauacuuuacauuc

SEQ ID NO: 143316 - RNA, 20 nt, Artificial Sequence
  Synthetic
uauuauuauacuuuacauuc

SEQ ID NO: 143317 - RNA, 21 nt, Artificial Sequence
  Synthetic
uuauuauuauacuuuacauuc

SEQ ID NO: 143318 - RNA, 22 nt, Artificial Sequence
  Synthetic
uuuauuauuauacuuuacauuc

SEQ ID NO: 143319 - RNA, 23 nt, Artificial Sequence
  Synthetic
uuuuauuauuauacuuuacauuc

SEQ ID NO: 143320 - RNA, 24 nt, Artificial Sequence
  Synthetic
uuuuuauuauuauacuuuacauuc

SEQ ID NO: 143321 - RNA, 18 nt, Artificial Sequence
  Synthetic
ccagucacauggccauuc

SEQ ID NO: 143322 - RNA, 19 nt, Artificial Sequence
  Synthetic
accagucacauggccauuc

SEQ ID NO: 143323 - RNA, 20 nt, Artificial Sequence
  Synthetic
aaccagucacauggccauuc

SEQ ID NO: 143324 - RNA, 18 nt, Artificial Sequence
  Synthetic
cuguuugguuuuccauuc

SEQ ID NO: 143325 - RNA, 20 nt, Artificial Sequence
  Synthetic
ugcuguuugguuuuccauuc

SEQ ID NO: 143326 - RNA, 21 nt, Artificial Sequence
  Synthetic
augcuguuugguuuuccauuc

SEQ ID NO: 143327 - RNA, 22 nt, Artificial Sequence
  Synthetic
uaugcuguuugguuuuccauuc

SEQ ID NO: 143328 - RNA, 23 nt, Artificial Sequence
  Synthetic
auaugcuguuugguuuuccauuc

SEQ ID NO: 143329 - RNA, 24 nt, Artificial Sequence
  Synthetic
cauaugcuguuugguuuuccauuc

SEQ ID NO: 143330 - RNA, 18 nt, Artificial Sequence
  Synthetic
caaguguauuuuagauuc

SEQ ID NO: 143331 - RNA, 19 nt, Artificial Sequence
  Synthetic
ucaaguguauuuuagauuc

SEQ ID NO: 143332 - RNA, 20 nt, Artificial Sequence
  Synthetic
uucaaguguauuuuagauuc

SEQ ID NO: 143333 - RNA, 21 nt, Artificial Sequence
  Synthetic
uuucaaguguauuuuagauuc

SEQ ID NO: 143334 - RNA, 22 nt, Artificial Sequence
  Synthetic
auuucaaguguauuuuagauuc

SEQ ID NO: 143335 - RNA, 23 nt, Artificial Sequence
  Synthetic
aauuucaaguguauuuuagauuc

SEQ ID NO: 143336 - RNA, 24 nt, Artificial Sequence
  Synthetic
uaauuucaaguguauuuuagauuc

SEQ ID NO: 143337 - RNA, 18 nt, Artificial Sequence
  Synthetic
uuuacaauuucaauauuc

SEQ ID NO: 143338 - RNA, 19 nt, Artificial Sequence
  Synthetic
uuuuacaauuucaauauuc

SEQ ID NO: 143339 - RNA, 20 nt, Artificial Sequence
  Synthetic
auuuuacaauuucaauauuc

SEQ ID NO: 143340 - RNA, 20 nt, Artificial Sequence
  Synthetic
agggagacaugagaauauuc

SEQ ID NO: 143341 - RNA, 18 nt, Artificial Sequence
  Synthetic
ccuguuauuggucuauuc

SEQ ID NO: 143342 - RNA, 20 nt, Artificial Sequence
  Synthetic
agccuguuauuggucuauuc

SEQ ID NO: 143343 - RNA, 22 nt, Artificial Sequence
  Synthetic
agagccuguuauuggucuauuc

SEQ ID NO: 143344 - RNA, 23 nt, Artificial Sequence
  Synthetic
cagagccuguuauuggucuauuc

SEQ ID NO: 143345 - RNA, 24 nt, Artificial Sequence
  Synthetic
ucagagccuguuauuggucuauuc

SEQ ID NO: 143346 - RNA, 18 nt, Artificial Sequence
  Synthetic
cuuguuauuggucuauuc

SEQ ID NO: 143347 - RNA, 19 nt, Artificial Sequence
  Synthetic
acuuguuauuggucuauuc

SEQ ID NO: 143348 - RNA, 20 nt, Artificial Sequence
  Synthetic
aacuuguuauuggucuauuc

SEQ ID NO: 143349 - RNA, 22 nt, Artificial Sequence
  Synthetic
agaacuuguuauuggucuauuc

SEQ ID NO: 143350 - RNA, 23 nt, Artificial Sequence
  Synthetic
cagaacuuguuauuggucuauuc

SEQ ID NO: 143351 - RNA, 24 nt, Artificial Sequence
  Synthetic
ucagaacuuguuauuggucuauuc

SEQ ID NO: 143352 - RNA, 18 nt, Artificial Sequence
  Synthetic
auuuuuaaaaaaguauuc

SEQ ID NO: 143353 - RNA, 19 nt, Artificial Sequence
  Synthetic
aauuuuuaaaaaaguauuc

SEQ ID NO: 143354 - RNA, 18 nt, Artificial Sequence
  Synthetic
acaagggguggauuauuc

SEQ ID NO: 143355 - RNA, 19 nt, Artificial Sequence
  Synthetic
aacaagggguggauuauuc

SEQ ID NO: 143356 - RNA, 20 nt, Artificial Sequence
  Synthetic
aaacaagggguggauuauuc

SEQ ID NO: 143357 - RNA, 21 nt, Artificial Sequence
  Synthetic
uaaacaagggguggauuauuc

SEQ ID NO: 143358 - RNA, 22 nt, Artificial Sequence
  Synthetic
cuaaacaagggguggauuauuc

SEQ ID NO: 143359 - RNA, 24 nt, Artificial Sequence
  Synthetic
ugcuaaacaagggguggauuauuc

SEQ ID NO: 143360 - RNA, 21 nt, Artificial Sequence
  Synthetic
uguguuuuguuuuaauccuuc

SEQ ID NO: 143361 - RNA, 22 nt, Artificial Sequence
  Synthetic
auguguuuuguuuuaauccuuc

SEQ ID NO: 143362 - RNA, 23 nt, Artificial Sequence
  Synthetic
aauguguuuuguuuuaauccuuc

SEQ ID NO: 143363 - RNA, 24 nt, Artificial Sequence
  Synthetic
uaauguguuuuguuuuaauccuuc

SEQ ID NO: 143364 - RNA, 18 nt, Artificial Sequence
  Synthetic
cauguggguggauccuuc

SEQ ID NO: 143365 - RNA, 19 nt, Artificial Sequence
  Synthetic
ucauguggguggauccuuc

SEQ ID NO: 143366 - RNA, 20 nt, Artificial Sequence
  Synthetic
aucauguggguggauccuuc

SEQ ID NO: 143367 - RNA, 23 nt, Artificial Sequence
  Synthetic
uggaucauguggguggauccuuc

SEQ ID NO: 143368 - RNA, 24 nt, Artificial Sequence
  Synthetic
uuggaucauguggguggauccuuc

SEQ ID NO: 143369 - RNA, 18 nt, Artificial Sequence
  Synthetic
cacuaaacuuuaagcuuc

SEQ ID NO: 143370 - RNA, 19 nt, Artificial Sequence
  Synthetic
ccacuaaacuuuaagcuuc

SEQ ID NO: 143371 - RNA, 20 nt, Artificial Sequence
  Synthetic
accacuaaacuuuaagcuuc

SEQ ID NO: 143372 - RNA, 18 nt, Artificial Sequence
  Synthetic
cccuccuaccucagcuuc

SEQ ID NO: 143373 - RNA, 19 nt, Artificial Sequence
  Synthetic
acccuccuaccucagcuuc

SEQ ID NO: 143374 - RNA, 20 nt, Artificial Sequence
  Synthetic
cacccuccuaccucagcuuc

SEQ ID NO: 143375 - RNA, 18 nt, Artificial Sequence
  Synthetic
uucuccugccucagcuuc

SEQ ID NO: 143376 - RNA, 19 nt, Artificial Sequence
  Synthetic
auucuccugccucagcuuc

SEQ ID NO: 143377 - RNA, 21 nt, Artificial Sequence
  Synthetic
cgauucuccugccucagcuuc

SEQ ID NO: 143378 - RNA, 23 nt, Artificial Sequence
  Synthetic
agcgauucuccugccucagcuuc

SEQ ID NO: 143379 - RNA, 24 nt, Artificial Sequence
  Synthetic
aagcgauucuccugccucagcuuc

SEQ ID NO: 143380 - RNA, 18 nt, Artificial Sequence
  Synthetic
aauaaguuacuuagcuuc

SEQ ID NO: 143381 - RNA, 19 nt, Artificial Sequence
  Synthetic
aaauaaguuacuuagcuuc

SEQ ID NO: 143382 - RNA, 20 nt, Artificial Sequence
  Synthetic
uaaauaaguuacuuagcuuc

SEQ ID NO: 143383 - RNA, 21 nt, Artificial Sequence
  Synthetic
uuaaauaaguuacuuagcuuc

SEQ ID NO: 143384 - RNA, 22 nt, Artificial Sequence
  Synthetic
cuuaaauaaguuacuuagcuuc

SEQ ID NO: 143385 - RNA, 23 nt, Artificial Sequence
  Synthetic
ccuuaaauaaguuacuuagcuuc

SEQ ID NO: 143386 - RNA, 24 nt, Artificial Sequence
  Synthetic
accuuaaauaaguuacuuagcuuc

SEQ ID NO: 143387 - RNA, 18 nt, Artificial Sequence
  Synthetic
cacacccucuggggcuuc

SEQ ID NO: 143388 - RNA, 19 nt, Artificial Sequence
  Synthetic
acacacccucuggggcuuc

SEQ ID NO: 143389 - RNA, 20 nt, Artificial Sequence
  Synthetic
aacacacccucuggggcuuc

SEQ ID NO: 143390 - RNA, 21 nt, Artificial Sequence
  Synthetic
uaacacacccucuggggcuuc

SEQ ID NO: 143391 - RNA, 23 nt, Artificial Sequence
  Synthetic
uguaacacacccucuggggcuuc

SEQ ID NO: 143392 - RNA, 24 nt, Artificial Sequence
  Synthetic
cuguaacacacccucuggggcuuc

SEQ ID NO: 143393 - RNA, 18 nt, Artificial Sequence
  Synthetic
aaugccuagguuaucuuc

SEQ ID NO: 143394 - RNA, 19 nt, Artificial Sequence
  Synthetic
uaaugccuagguuaucuuc

SEQ ID NO: 143395 - RNA, 21 nt, Artificial Sequence
  Synthetic
uguaaugccuagguuaucuuc

SEQ ID NO: 143396 - RNA, 22 nt, Artificial Sequence
  Synthetic
uuguaaugccuagguuaucuuc

SEQ ID NO: 143397 - RNA, 23 nt, Artificial Sequence
  Synthetic
auuguaaugccuagguuaucuuc

SEQ ID NO: 143398 - RNA, 24 nt, Artificial Sequence
  Synthetic
aauuguaaugccuagguuaucuuc

SEQ ID NO: 143399 - RNA, 18 nt, Artificial Sequence
  Synthetic
uuuuccuucuuuaucuuc

SEQ ID NO: 143400 - RNA, 19 nt, Artificial Sequence
  Synthetic
auuuuccuucuuuaucuuc

SEQ ID NO: 143401 - RNA, 20 nt, Artificial Sequence
  Synthetic
uauuuuccuucuuuaucuuc

SEQ ID NO: 143402 - RNA, 22 nt, Artificial Sequence
  Synthetic
ugaauugaaaccuugggucuuc

SEQ ID NO: 143403 - RNA, 23 nt, Artificial Sequence
  Synthetic
uugaauugaaaccuugggucuuc

SEQ ID NO: 143404 - RNA, 24 nt, Artificial Sequence
  Synthetic
cuugaauugaaaccuugggucuuc

SEQ ID NO: 143405 - RNA, 20 nt, Artificial Sequence
  Synthetic
uggcacuuuuaauuuucuuc

SEQ ID NO: 143406 - RNA, 21 nt, Artificial Sequence
  Synthetic
cuggcacuuuuaauuuucuuc

SEQ ID NO: 143407 - RNA, 22 nt, Artificial Sequence
  Synthetic
acuggcacuuuuaauuuucuuc

SEQ ID NO: 143408 - RNA, 24 nt, Artificial Sequence
  Synthetic
agacuggcacuuuuaauuuucuuc

SEQ ID NO: 143409 - RNA, 18 nt, Artificial Sequence
  Synthetic
aaugccuagguuuucuuc

SEQ ID NO: 143410 - RNA, 19 nt, Artificial Sequence
  Synthetic
uaaugccuagguuuucuuc

SEQ ID NO: 143411 - RNA, 18 nt, Artificial Sequence
  Synthetic
aauacauuuuuuuucuuc

SEQ ID NO: 143412 - RNA, 19 nt, Artificial Sequence
  Synthetic
aaauacauuuuuuuucuuc

SEQ ID NO: 143413 - RNA, 20 nt, Artificial Sequence
  Synthetic
uaaauacauuuuuuuucuuc

SEQ ID NO: 143414 - RNA, 18 nt, Artificial Sequence
  Synthetic
caauucucuaggaaguuc

SEQ ID NO: 143415 - RNA, 19 nt, Artificial Sequence
  Synthetic
ccaauucucuaggaaguuc

SEQ ID NO: 143416 - RNA, 20 nt, Artificial Sequence
  Synthetic
uccaauucucuaggaaguuc

SEQ ID NO: 143417 - RNA, 21 nt, Artificial Sequence
  Synthetic
cuccaauucucuaggaaguuc

SEQ ID NO: 143418 - RNA, 22 nt, Artificial Sequence
  Synthetic
ccuccaauucucuaggaaguuc

SEQ ID NO: 143419 - RNA, 23 nt, Artificial Sequence
  Synthetic
cccuccaauucucuaggaaguuc

SEQ ID NO: 143420 - RNA, 24 nt, Artificial Sequence
  Synthetic
ccccuccaauucucuaggaaguuc

SEQ ID NO: 143421 - RNA, 18 nt, Artificial Sequence
  Synthetic
uauauauacuugaaguuc

SEQ ID NO: 143422 - RNA, 19 nt, Artificial Sequence
  Synthetic
auauauauacuugaaguuc

SEQ ID NO: 143423 - RNA, 20 nt, Artificial Sequence
  Synthetic
uauauauauacuugaaguuc

SEQ ID NO: 143424 - RNA, 21 nt, Artificial Sequence
  Synthetic
auauauauauacuugaaguuc

SEQ ID NO: 143425 - RNA, 22 nt, Artificial Sequence
  Synthetic
uauauauauauacuugaaguuc

SEQ ID NO: 143426 - RNA, 24 nt, Artificial Sequence
  Synthetic
aguauauauauauacuugaaguuc

SEQ ID NO: 143427 - RNA, 18 nt, Artificial Sequence
  Synthetic
uuaauuauacuuaaguuc

SEQ ID NO: 143428 - RNA, 19 nt, Artificial Sequence
  Synthetic
uuuaauuauacuuaaguuc

SEQ ID NO: 143429 - RNA, 20 nt, Artificial Sequence
  Synthetic
uuuuaauuauacuuaaguuc

SEQ ID NO: 143430 - RNA, 21 nt, Artificial Sequence
  Synthetic
uuuuuaauuauacuuaaguuc

SEQ ID NO: 143431 - RNA, 22 nt, Artificial Sequence
  Synthetic
uuuuuuaauuauacuuaaguuc

SEQ ID NO: 143432 - RNA, 23 nt, Artificial Sequence
  Synthetic
uuuuuuuaauuauacuuaaguuc

SEQ ID NO: 143433 - RNA, 24 nt, Artificial Sequence
  Synthetic
uuuuuuuuaauuauacuuaaguuc

SEQ ID NO: 143434 - RNA, 18 nt, Artificial Sequence
  Synthetic
uaauuauacuuuaaguuc

SEQ ID NO: 143435 - RNA, 19 nt, Artificial Sequence
  Synthetic
uuaauuauacuuuaaguuc

SEQ ID NO: 143436 - RNA, 20 nt, Artificial Sequence
  Synthetic
uuuaauuauacuuuaaguuc

SEQ ID NO: 143437 - RNA, 21 nt, Artificial Sequence
  Synthetic
uuuuaauuauacuuuaaguuc

SEQ ID NO: 143438 - RNA, 22 nt, Artificial Sequence
  Synthetic
uuuuuaauuauacuuuaaguuc

SEQ ID NO: 143439 - RNA, 23 nt, Artificial Sequence
  Synthetic
uuuuuuaauuauacuuuaaguuc

SEQ ID NO: 143440 - RNA, 24 nt, Artificial Sequence
  Synthetic
uuuuuuuaauuauacuuuaaguuc

SEQ ID NO: 143441 - RNA, 18 nt, Artificial Sequence
  Synthetic
uuauuauacuuuaaguuc

SEQ ID NO: 143442 - RNA, 19 nt, Artificial Sequence
  Synthetic
auuauuauacuuuaaguuc

SEQ ID NO: 143443 - RNA, 20 nt, Artificial Sequence
  Synthetic
uauuauuauacuuuaaguuc

SEQ ID NO: 143444 - RNA, 22 nt, Artificial Sequence
  Synthetic
uuuauuauuauacuuuaaguuc

SEQ ID NO: 143445 - RNA, 23 nt, Artificial Sequence
  Synthetic
uuuuauuauuauacuuuaaguuc

SEQ ID NO: 143446 - RNA, 24 nt, Artificial Sequence
  Synthetic
uuuuuauuauuauacuuuaaguuc

SEQ ID NO: 143447 - RNA, 18 nt, Artificial Sequence
  Synthetic
uaauuuuacuuuaaguuc

SEQ ID NO: 143448 - RNA, 19 nt, Artificial Sequence
  Synthetic
uuaauuuuacuuuaaguuc

SEQ ID NO: 143449 - RNA, 20 nt, Artificial Sequence
  Synthetic
uuuaauuuuacuuuaaguuc

SEQ ID NO: 143450 - RNA, 21 nt, Artificial Sequence
  Synthetic
uuuuaauuuuacuuuaaguuc

SEQ ID NO: 143451 - RNA, 22 nt, Artificial Sequence
  Synthetic
uuuuuaauuuuacuuuaaguuc

SEQ ID NO: 143452 - RNA, 23 nt, Artificial Sequence
  Synthetic
uuuuuuaauuuuacuuuaaguuc

SEQ ID NO: 143453 - RNA, 18 nt, Artificial Sequence
  Synthetic
uuuuucacuuuuaaguuc

SEQ ID NO: 143454 - RNA, 19 nt, Artificial Sequence
  Synthetic
uuuuuucacuuuuaaguuc

SEQ ID NO: 143455 - RNA, 20 nt, Artificial Sequence
  Synthetic
auuuuuucacuuuuaaguuc

SEQ ID NO: 143456 - RNA, 21 nt, Artificial Sequence
  Synthetic
uauuuuuucacuuuuaaguuc

SEQ ID NO: 143457 - RNA, 22 nt, Artificial Sequence
  Synthetic
uuauuuuuucacuuuuaaguuc

SEQ ID NO: 143458 - RNA, 23 nt, Artificial Sequence
  Synthetic
uuuauuuuuucacuuuuaaguuc

SEQ ID NO: 143459 - RNA, 24 nt, Artificial Sequence
  Synthetic
uuuuauuuuuucacuuuuaaguuc

SEQ ID NO: 143460 - RNA, 18 nt, Artificial Sequence
  Synthetic
cagggaagccaucaguuc

SEQ ID NO: 143461 - RNA, 19 nt, Artificial Sequence
  Synthetic
ucagggaagccaucaguuc

SEQ ID NO: 143462 - RNA, 20 nt, Artificial Sequence
  Synthetic
cucagggaagccaucaguuc

SEQ ID NO: 143463 - RNA, 19 nt, Artificial Sequence
  Synthetic
ugaccacauuacucaguuc

SEQ ID NO: 143464 - RNA, 20 nt, Artificial Sequence
  Synthetic
augaccacauuacucaguuc

SEQ ID NO: 143465 - RNA, 18 nt, Artificial Sequence
  Synthetic
uuauuauacuuuacguuc

SEQ ID NO: 143466 - RNA, 19 nt, Artificial Sequence
  Synthetic
auuauuauacuuuacguuc

SEQ ID NO: 143467 - RNA, 20 nt, Artificial Sequence
  Synthetic
uauuauuauacuuuacguuc

SEQ ID NO: 143468 - RNA, 21 nt, Artificial Sequence
  Synthetic
uuauuauuauacuuuacguuc

SEQ ID NO: 143469 - RNA, 22 nt, Artificial Sequence
  Synthetic
auuauuauuauacuuuacguuc

SEQ ID NO: 143470 - RNA, 23 nt, Artificial Sequence
  Synthetic
aauuauuauuauacuuuacguuc

SEQ ID NO: 143471 - RNA, 24 nt, Artificial Sequence
  Synthetic
uaauuauuauuauacuuuacguuc

SEQ ID NO: 143472 - RNA, 20 nt, Artificial Sequence
  Synthetic
ugguauuuaguuuuccguuc

SEQ ID NO: 143473 - RNA, 21 nt, Artificial Sequence
  Synthetic
augguauuuaguuuuccguuc

SEQ ID NO: 143474 - RNA, 22 nt, Artificial Sequence
  Synthetic
uaugguauuuaguuuuccguuc

SEQ ID NO: 143475 - RNA, 23 nt, Artificial Sequence
  Synthetic
auaugguauuuaguuuuccguuc

SEQ ID NO: 143476 - RNA, 24 nt, Artificial Sequence
  Synthetic
cauaugguauuuaguuuuccguuc

SEQ ID NO: 143477 - RNA, 18 nt, Artificial Sequence
  Synthetic
acucaggcaguuugguuc

SEQ ID NO: 143478 - RNA, 19 nt, Artificial Sequence
  Synthetic
aacucaggcaguuugguuc

SEQ ID NO: 143479 - RNA, 21 nt, Artificial Sequence
  Synthetic
ugaacucaggcaguuugguuc

SEQ ID NO: 143480 - RNA, 23 nt, Artificial Sequence
  Synthetic
ugugaacucaggcaguuugguuc

SEQ ID NO: 143481 - RNA, 24 nt, Artificial Sequence
  Synthetic
augugaacucaggcaguuugguuc

SEQ ID NO: 143482 - RNA, 20 nt, Artificial Sequence
  Synthetic
ugggaccauauuccauguuc

SEQ ID NO: 143483 - RNA, 21 nt, Artificial Sequence
  Synthetic
augggaccauauuccauguuc

SEQ ID NO: 143484 - RNA, 22 nt, Artificial Sequence
  Synthetic
aaugggaccauauuccauguuc

SEQ ID NO: 143485 - RNA, 23 nt, Artificial Sequence
  Synthetic
aaaugggaccauauuccauguuc

SEQ ID NO: 143486 - RNA, 24 nt, Artificial Sequence
  Synthetic
uaaaugggaccauauuccauguuc

SEQ ID NO: 143487 - RNA, 19 nt, Artificial Sequence
  Synthetic
agguugagaaacacuguuc

SEQ ID NO: 143488 - RNA, 20 nt, Artificial Sequence
  Synthetic
aagguugagaaacacuguuc

SEQ ID NO: 143489 - RNA, 21 nt, Artificial Sequence
  Synthetic
uaagguugagaaacacuguuc

SEQ ID NO: 143490 - RNA, 22 nt, Artificial Sequence
  Synthetic
cuaagguugagaaacacuguuc

SEQ ID NO: 143491 - RNA, 24 nt, Artificial Sequence
  Synthetic
agcuaagguugagaaacacuguuc

SEQ ID NO: 143492 - RNA, 18 nt, Artificial Sequence
  Synthetic
auuuccuuauuucuguuc

SEQ ID NO: 143493 - RNA, 19 nt, Artificial Sequence
  Synthetic
cauuuccuuauuucuguuc

SEQ ID NO: 143494 - RNA, 20 nt, Artificial Sequence
  Synthetic
ucauuuccuuauuucuguuc

SEQ ID NO: 143495 - RNA, 21 nt, Artificial Sequence
  Synthetic
uucauuuccuuauuucuguuc

SEQ ID NO: 143496 - RNA, 22 nt, Artificial Sequence
  Synthetic
uuucauuuccuuauuucuguuc

SEQ ID NO: 143497 - RNA, 23 nt, Artificial Sequence
  Synthetic
auuucauuuccuuauuucuguuc

SEQ ID NO: 143498 - RNA, 18 nt, Artificial Sequence
  Synthetic
uguuaaguccauuuguuc

SEQ ID NO: 143499 - RNA, 19 nt, Artificial Sequence
  Synthetic
cuguuaaguccauuuguuc

SEQ ID NO: 143500 - RNA, 20 nt, Artificial Sequence
  Synthetic
ucuguuaaguccauuuguuc

SEQ ID NO: 143501 - RNA, 21 nt, Artificial Sequence
  Synthetic
aucuguuaaguccauuuguuc

SEQ ID NO: 143502 - RNA, 22 nt, Artificial Sequence
  Synthetic
uaucuguuaaguccauuuguuc

SEQ ID NO: 143503 - RNA, 23 nt, Artificial Sequence
  Synthetic
auaucuguuaaguccauuuguuc

SEQ ID NO: 143504 - RNA, 24 nt, Artificial Sequence
  Synthetic
aauaucuguuaaguccauuuguuc

SEQ ID NO: 143505 - RNA, 18 nt, Artificial Sequence
  Synthetic
aagauauuuguaaauuuc

SEQ ID NO: 143506 - RNA, 19 nt, Artificial Sequence
  Synthetic
uaagauauuuguaaauuuc

SEQ ID NO: 143507 - RNA, 20 nt, Artificial Sequence
  Synthetic
uuaagauauuuguaaauuuc

SEQ ID NO: 143508 - RNA, 18 nt, Artificial Sequence
  Synthetic
aguauuuuaaaauauuuc

SEQ ID NO: 143509 - RNA, 19 nt, Artificial Sequence
  Synthetic
caguauuuuaaaauauuuc

SEQ ID NO: 143510 - RNA, 20 nt, Artificial Sequence
  Synthetic
ucaguauuuuaaaauauuuc

SEQ ID NO: 143511 - RNA, 18 nt, Artificial Sequence
  Synthetic
uuuuucaacaaauauuuc

SEQ ID NO: 143512 - RNA, 19 nt, Artificial Sequence
  Synthetic
uuuuuucaacaaauauuuc

SEQ ID NO: 143513 - RNA, 18 nt, Artificial Sequence
  Synthetic
aaaugaaauacauauuuc

SEQ ID NO: 143514 - RNA, 19 nt, Artificial Sequence
  Synthetic
uaaaugaaauacauauuuc

SEQ ID NO: 143515 - RNA, 18 nt, Artificial Sequence
  Synthetic
uggcguucucuguauuuc

SEQ ID NO: 143516 - RNA, 20 nt, Artificial Sequence
  Synthetic
uguggcguucucuguauuuc

SEQ ID NO: 143517 - RNA, 21 nt, Artificial Sequence
  Synthetic
uuguggcguucucuguauuuc

SEQ ID NO: 143518 - RNA, 22 nt, Artificial Sequence
  Synthetic
uuuguggcguucucuguauuuc

SEQ ID NO: 143519 - RNA, 23 nt, Artificial Sequence
  Synthetic
cuuuguggcguucucuguauuuc

SEQ ID NO: 143520 - RNA, 24 nt, Artificial Sequence
  Synthetic
ucuuuguggcguucucuguauuuc

SEQ ID NO: 143521 - RNA, 18 nt, Artificial Sequence
  Synthetic
acuacaucauuggcuuuc

SEQ ID NO: 143522 - RNA, 19 nt, Artificial Sequence
  Synthetic
aacuacaucauuggcuuuc

SEQ ID NO: 143523 - RNA, 22 nt, Artificial Sequence
  Synthetic
aggaacuacaucauuggcuuuc

SEQ ID NO: 143524 - RNA, 23 nt, Artificial Sequence
  Synthetic
caggaacuacaucauuggcuuuc

SEQ ID NO: 143525 - RNA, 24 nt, Artificial Sequence
  Synthetic
acaggaacuacaucauuggcuuuc

SEQ ID NO: 143526 - RNA, 21 nt, Artificial Sequence
  Synthetic
acagucuaggcaauaucuuuc

SEQ ID NO: 143527 - RNA, 23 nt, Artificial Sequence
  Synthetic
agacagucuaggcaauaucuuuc

SEQ ID NO: 143528 - RNA, 24 nt, Artificial Sequence
  Synthetic
uagacagucuaggcaauaucuuuc

SEQ ID NO: 143529 - RNA, 18 nt, Artificial Sequence
  Synthetic
ugauagaaacucucuuuc

SEQ ID NO: 143530 - RNA, 19 nt, Artificial Sequence
  Synthetic
cugauagaaacucucuuuc

SEQ ID NO: 143531 - RNA, 20 nt, Artificial Sequence
  Synthetic
acugauagaaacucucuuuc

SEQ ID NO: 143532 - RNA, 23 nt, Artificial Sequence
  Synthetic
aggauaaacuugagaacaguuuc

SEQ ID NO: 143533 - RNA, 24 nt, Artificial Sequence
  Synthetic
aaggauaaacuugagaacaguuuc

SEQ ID NO: 143534 - RNA, 19 nt, Artificial Sequence
  Synthetic
ugccaagguuuucaguuuc

SEQ ID NO: 143535 - RNA, 20 nt, Artificial Sequence
  Synthetic
cugccaagguuuucaguuuc

SEQ ID NO: 143536 - RNA, 19 nt, Artificial Sequence
  Synthetic
ugcacgugagauggguuuc

SEQ ID NO: 143537 - RNA, 20 nt, Artificial Sequence
  Synthetic
cugcacgugagauggguuuc

SEQ ID NO: 143538 - RNA, 21 nt, Artificial Sequence
  Synthetic
ucugcacgugagauggguuuc

SEQ ID NO: 143539 - RNA, 22 nt, Artificial Sequence
  Synthetic
cucugcacgugagauggguuuc

SEQ ID NO: 143540 - RNA, 23 nt, Artificial Sequence
  Synthetic
ucucugcacgugagauggguuuc

SEQ ID NO: 143541 - RNA, 18 nt, Artificial Sequence
  Synthetic
uuguauguauuuuguuuc

SEQ ID NO: 143542 - RNA, 19 nt, Artificial Sequence
  Synthetic
uuuguauguauuuuguuuc

SEQ ID NO: 143543 - RNA, 20 nt, Artificial Sequence
  Synthetic
auuuguauguauuuuguuuc

SEQ ID NO: 143544 - RNA, 18 nt, Artificial Sequence
  Synthetic
aauacuuguuaaauuuuc

SEQ ID NO: 143545 - RNA, 19 nt, Artificial Sequence
  Synthetic
aaauacuuguuaaauuuuc

SEQ ID NO: 143546 - RNA, 18 nt, Artificial Sequence
  Synthetic
uaacuuuucuuaauuuuc

SEQ ID NO: 143547 - RNA, 19 nt, Artificial Sequence
  Synthetic
uuaacuuuucuuaauuuuc

SEQ ID NO: 143548 - RNA, 20 nt, Artificial Sequence
  Synthetic
auuaacuuuucuuaauuuuc

SEQ ID NO: 143549 - RNA, 18 nt, Artificial Sequence
  Synthetic
aaagauauguuuauuuuc

SEQ ID NO: 143550 - RNA, 19 nt, Artificial Sequence
  Synthetic
aaaagauauguuuauuuuc

SEQ ID NO: 143551 - RNA, 18 nt, Artificial Sequence
  Synthetic
aauaaauguuuacuuuuc

SEQ ID NO: 143552 - RNA, 19 nt, Artificial Sequence
  Synthetic
caauaaauguuuacuuuuc

SEQ ID NO: 143553 - RNA, 20 nt, Artificial Sequence
  Synthetic
acaauaaauguuuacuuuuc

SEQ ID NO: 143554 - RNA, 18 nt, Artificial Sequence
  Synthetic
uuacaaaaacuucuuuuc

SEQ ID NO: 143555 - RNA, 20 nt, Artificial Sequence
  Synthetic
aguuacaaaaacuucuuuuc

SEQ ID NO: 143556 - RNA, 18 nt, Artificial Sequence
  Synthetic
auaauauauaaaguuuuc

SEQ ID NO: 143557 - RNA, 19 nt, Artificial Sequence
  Synthetic
aauaauauauaaaguuuuc

SEQ ID NO: 143558 - RNA, 20 nt, Artificial Sequence
  Synthetic
aaauaauauauaaaguuuuc

SEQ ID NO: 143559 - RNA, 21 nt, Artificial Sequence
  Synthetic
auuuuuagaaguuugguuuuc

SEQ ID NO: 143560 - RNA, 22 nt, Artificial Sequence
  Synthetic
uauuuuuagaaguuugguuuuc

SEQ ID NO: 143561 - RNA, 23 nt, Artificial Sequence
  Synthetic
uuauuuuuagaaguuugguuuuc

SEQ ID NO: 143562 - RNA, 24 nt, Artificial Sequence
  Synthetic
cuuauuuuuagaaguuugguuuuc

SEQ ID NO: 143563 - RNA, 18 nt, Artificial Sequence
  Synthetic
ccugaacaauuauuuuuc

SEQ ID NO: 143564 - RNA, 19 nt, Artificial Sequence
  Synthetic
accugaacaauuauuuuuc

SEQ ID NO: 143565 - RNA, 20 nt, Artificial Sequence
  Synthetic
caccugaacaauuauuuuuc

SEQ ID NO: 143566 - RNA, 18 nt, Artificial Sequence
  Synthetic
aaaguuuccuucuuuuuc

SEQ ID NO: 143567 - RNA, 19 nt, Artificial Sequence
  Synthetic
aaaaguuuccuucuuuuuc

SEQ ID NO: 143568 - RNA, 20 nt, Artificial Sequence
  Synthetic
uaaaaguuuccuucuuuuuc

SEQ ID NO: 143569 - RNA, 18 nt, Artificial Sequence
  Synthetic
uuuugccuuuguuuuuuc

SEQ ID NO: 143570 - RNA, 20 nt, Artificial Sequence
  Synthetic
uguuuugccuuuguuuuuuc

SEQ ID NO: 143571 - RNA, 21 nt, Artificial Sequence
  Synthetic
uuguuuugccuuuguuuuuuc

SEQ ID NO: 143572 - RNA, 22 nt, Artificial Sequence
  Synthetic
cuuguuuugccuuuguuuuuuc

SEQ ID NO: 143573 - RNA, 23 nt, Artificial Sequence
  Synthetic
ucuuguuuugccuuuguuuuuuc

SEQ ID NO: 143574 - RNA, 24 nt, Artificial Sequence
  Synthetic
aucuuguuuugccuuuguuuuuuc

SEQ ID NO: 143575 - RNA, 18 nt, Artificial Sequence
  Synthetic
aaaugagggaaaaaaaag

SEQ ID NO: 143576 - RNA, 19 nt, Artificial Sequence
  Synthetic
uaaaugagggaaaaaaaag

SEQ ID NO: 143577 - RNA, 20 nt, Artificial Sequence
  Synthetic
uuaaaugagggaaaaaaaag

SEQ ID NO: 143578 - RNA, 18 nt, Artificial Sequence
  Synthetic
augauacauauaaaaaag

SEQ ID NO: 143579 - RNA, 19 nt, Artificial Sequence
  Synthetic
aaugauacauauaaaaaag

SEQ ID NO: 143580 - RNA, 20 nt, Artificial Sequence
  Synthetic
aaaugauacauauaaaaaag

SEQ ID NO: 143581 - RNA, 18 nt, Artificial Sequence
  Synthetic
uguaaaauuuucaaaaag

SEQ ID NO: 143582 - RNA, 19 nt, Artificial Sequence
  Synthetic
auguaaaauuuucaaaaag

SEQ ID NO: 143583 - RNA, 20 nt, Artificial Sequence
  Synthetic
aauguaaaauuuucaaaaag

SEQ ID NO: 143584 - RNA, 18 nt, Artificial Sequence
  Synthetic
augguuaauaauaaaaag

SEQ ID NO: 143585 - RNA, 19 nt, Artificial Sequence
  Synthetic
aaugguuaauaauaaaaag

SEQ ID NO: 143586 - RNA, 20 nt, Artificial Sequence
  Synthetic
aaaugguuaauaauaaaaag

SEQ ID NO: 143587 - RNA, 18 nt, Artificial Sequence
  Synthetic
acaauauucaaacaaaag

SEQ ID NO: 143588 - RNA, 20 nt, Artificial Sequence
  Synthetic
ugacaauauucaaacaaaag

SEQ ID NO: 143589 - RNA, 21 nt, Artificial Sequence
  Synthetic
cugacaauauucaaacaaaag

SEQ ID NO: 143590 - RNA, 22 nt, Artificial Sequence
  Synthetic
ucugacaauauucaaacaaaag

SEQ ID NO: 143591 - RNA, 23 nt, Artificial Sequence
  Synthetic
uucugacaauauucaaacaaaag

SEQ ID NO: 143592 - RNA, 24 nt, Artificial Sequence
  Synthetic
cuucugacaauauucaaacaaaag

SEQ ID NO: 143593 - RNA, 18 nt, Artificial Sequence
  Synthetic
uauuaaagaggacaaaag

SEQ ID NO: 143594 - RNA, 19 nt, Artificial Sequence
  Synthetic
auauuaaagaggacaaaag

SEQ ID NO: 143595 - RNA, 20 nt, Artificial Sequence
  Synthetic
aauauuaaagaggacaaaag

SEQ ID NO: 143596 - RNA, 18 nt, Artificial Sequence
  Synthetic
aggacaugccaucaaaag

SEQ ID NO: 143597 - RNA, 19 nt, Artificial Sequence
  Synthetic
aaggacaugccaucaaaag

SEQ ID NO: 143598 - RNA, 20 nt, Artificial Sequence
  Synthetic
uaaggacaugccaucaaaag

SEQ ID NO: 143599 - RNA, 18 nt, Artificial Sequence
  Synthetic
acugaagacacagaaaag

SEQ ID NO: 143600 - RNA, 19 nt, Artificial Sequence
  Synthetic
aacugaagacacagaaaag

SEQ ID NO: 143601 - RNA, 20 nt, Artificial Sequence
  Synthetic
aaacugaagacacagaaaag

SEQ ID NO: 143602 - RNA, 18 nt, Artificial Sequence
  Synthetic
agaaaaacacuggaaaag

SEQ ID NO: 143603 - RNA, 20 nt, Artificial Sequence
  Synthetic
agagaaaaacacuggaaaag

SEQ ID NO: 143604 - RNA, 18 nt, Artificial Sequence
  Synthetic
aauuacaaggaauaaaag

SEQ ID NO: 143605 - RNA, 19 nt, Artificial Sequence
  Synthetic
uaauuacaaggaauaaaag

SEQ ID NO: 143606 - RNA, 20 nt, Artificial Sequence
  Synthetic
uuaauuacaaggaauaaaag

SEQ ID NO: 143607 - RNA, 18 nt, Artificial Sequence
  Synthetic
uauagaauuuuauaaaag

SEQ ID NO: 143608 - RNA, 19 nt, Artificial Sequence
  Synthetic
uuauagaauuuuauaaaag

SEQ ID NO: 143609 - RNA, 20 nt, Artificial Sequence
  Synthetic
uuuauagaauuuuauaaaag

SEQ ID NO: 143610 - RNA, 21 nt, Artificial Sequence
  Synthetic
uuuuauagaauuuuauaaaag

SEQ ID NO: 143611 - RNA, 23 nt, Artificial Sequence
  Synthetic
cguuuuauagaauuuuauaaaag

SEQ ID NO: 143612 - RNA, 18 nt, Artificial Sequence
  Synthetic
caacagaagcauuaaaag

SEQ ID NO: 143613 - RNA, 20 nt, Artificial Sequence
  Synthetic
agcaacagaagcauuaaaag

SEQ ID NO: 143614 - RNA, 22 nt, Artificial Sequence
  Synthetic
aguaccauagaaauuuuaaaag

SEQ ID NO: 143615 - RNA, 23 nt, Artificial Sequence
  Synthetic
aaguaccauagaaauuuuaaaag

SEQ ID NO: 143616 - RNA, 24 nt, Artificial Sequence
  Synthetic
aaaguaccauagaaauuuuaaaag

SEQ ID NO: 143617 - RNA, 18 nt, Artificial Sequence
  Synthetic
cagcagucuagaacaaag

SEQ ID NO: 143618 - RNA, 19 nt, Artificial Sequence
  Synthetic
acagcagucuagaacaaag

SEQ ID NO: 143619 - RNA, 20 nt, Artificial Sequence
  Synthetic
aacagcagucuagaacaaag

SEQ ID NO: 143620 - RNA, 18 nt, Artificial Sequence
  Synthetic
agaucaagaaagacaaag

SEQ ID NO: 143621 - RNA, 19 nt, Artificial Sequence
  Synthetic
aagaucaagaaagacaaag

SEQ ID NO: 143622 - RNA, 20 nt, Artificial Sequence
  Synthetic
aaagaucaagaaagacaaag

SEQ ID NO: 143623 - RNA, 21 nt, Artificial Sequence
  Synthetic
caaagaucaagaaagacaaag

SEQ ID NO: 143624 - RNA, 22 nt, Artificial Sequence
  Synthetic
acaaagaucaagaaagacaaag

SEQ ID NO: 143625 - RNA, 23 nt, Artificial Sequence
  Synthetic
aacaaagaucaagaaagacaaag

SEQ ID NO: 143626 - RNA, 24 nt, Artificial Sequence
  Synthetic
caacaaagaucaagaaagacaaag

SEQ ID NO: 143627 - RNA, 18 nt, Artificial Sequence
  Synthetic
aguccuucauuuccaaag

SEQ ID NO: 143628 - RNA, 19 nt, Artificial Sequence
  Synthetic
aaguccuucauuuccaaag

SEQ ID NO: 143629 - RNA, 20 nt, Artificial Sequence
  Synthetic
uaaguccuucauuuccaaag

SEQ ID NO: 143630 - RNA, 20 nt, Artificial Sequence
  Synthetic
aggaggcacagagagcaaag

SEQ ID NO: 143631 - RNA, 18 nt, Artificial Sequence
  Synthetic
uuuauuauaaaaagaaag

SEQ ID NO: 143632 - RNA, 19 nt, Artificial Sequence
  Synthetic
auuuauuauaaaaagaaag

SEQ ID NO: 143633 - RNA, 20 nt, Artificial Sequence
  Synthetic
cauuuauuauaaaaagaaag

SEQ ID NO: 143634 - RNA, 20 nt, Artificial Sequence
  Synthetic
uggaaaugcuggaaagaaag

SEQ ID NO: 143635 - RNA, 18 nt, Artificial Sequence
  Synthetic
aaaguauaaggaagaaag

SEQ ID NO: 143636 - RNA, 19 nt, Artificial Sequence
  Synthetic
uaaaguauaaggaagaaag

SEQ ID NO: 143637 - RNA, 20 nt, Artificial Sequence
  Synthetic
uuaaaguauaaggaagaaag

SEQ ID NO: 143638 - RNA, 19 nt, Artificial Sequence
  Synthetic
ugagagaaaauagagaaag

SEQ ID NO: 143639 - RNA, 18 nt, Artificial Sequence
  Synthetic
aaaagaauuaagggaaag

SEQ ID NO: 143640 - RNA, 19 nt, Artificial Sequence
  Synthetic
aaaaagaauuaagggaaag

SEQ ID NO: 143641 - RNA, 20 nt, Artificial Sequence
  Synthetic
aaaaaagaauuaagggaaag

SEQ ID NO: 143642 - RNA, 18 nt, Artificial Sequence
  Synthetic
aauucuagaauuggaaag

SEQ ID NO: 143643 - RNA, 19 nt, Artificial Sequence
  Synthetic
aaauucuagaauuggaaag

SEQ ID NO: 143644 - RNA, 20 nt, Artificial Sequence
  Synthetic
aaaauucuagaauuggaaag

SEQ ID NO: 143645 - RNA, 22 nt, Artificial Sequence
  Synthetic
ugaaaauucuagaauuggaaag

SEQ ID NO: 143646 - RNA, 23 nt, Artificial Sequence
  Synthetic
augaaaauucuagaauuggaaag

SEQ ID NO: 143647 - RNA, 24 nt, Artificial Sequence
  Synthetic
aaugaaaauucuagaauuggaaag

SEQ ID NO: 143648 - RNA, 18 nt, Artificial Sequence
  Synthetic
aacugacugaacugaaag

SEQ ID NO: 143649 - RNA, 19 nt, Artificial Sequence
  Synthetic
aaacugacugaacugaaag

SEQ ID NO: 143650 - RNA, 20 nt, Artificial Sequence
  Synthetic
aaaacugacugaacugaaag

SEQ ID NO: 143651 - RNA, 21 nt, Artificial Sequence
  Synthetic
aaaaacugacugaacugaaag

SEQ ID NO: 143652 - RNA, 22 nt, Artificial Sequence
  Synthetic
caaaaacugacugaacugaaag

SEQ ID NO: 143653 - RNA, 24 nt, Artificial Sequence
  Synthetic
agcaaaaacugacugaacugaaag

SEQ ID NO: 143654 - RNA, 18 nt, Artificial Sequence
  Synthetic
ucugcccaauguugaaag

SEQ ID NO: 143655 - RNA, 19 nt, Artificial Sequence
  Synthetic
aucugcccaauguugaaag

SEQ ID NO: 143656 - RNA, 21 nt, Artificial Sequence
  Synthetic
agaucugcccaauguugaaag

SEQ ID NO: 143657 - RNA, 18 nt, Artificial Sequence
  Synthetic
auuuuuauauuuugaaag

SEQ ID NO: 143658 - RNA, 19 nt, Artificial Sequence
  Synthetic
aauuuuuauauuuugaaag

SEQ ID NO: 143659 - RNA, 20 nt, Artificial Sequence
  Synthetic
aaauuuuuauauuuugaaag

SEQ ID NO: 143660 - RNA, 21 nt, Artificial Sequence
  Synthetic
caaauuuuuauauuuugaaag

SEQ ID NO: 143661 - RNA, 22 nt, Artificial Sequence
  Synthetic
ucaaauuuuuauauuuugaaag

SEQ ID NO: 143662 - RNA, 23 nt, Artificial Sequence
  Synthetic
aucaaauuuuuauauuuugaaag

SEQ ID NO: 143663 - RNA, 24 nt, Artificial Sequence
  Synthetic
uaucaaauuuuuauauuuugaaag

SEQ ID NO: 143664 - RNA, 18 nt, Artificial Sequence
  Synthetic
cucccauuuuuacuaaag

SEQ ID NO: 143665 - RNA, 19 nt, Artificial Sequence
  Synthetic
ucucccauuuuuacuaaag

SEQ ID NO: 143666 - RNA, 21 nt, Artificial Sequence
  Synthetic
agucucccauuuuuacuaaag

SEQ ID NO: 143667 - RNA, 22 nt, Artificial Sequence
  Synthetic
cagucucccauuuuuacuaaag

SEQ ID NO: 143668 - RNA, 23 nt, Artificial Sequence
  Synthetic
ccagucucccauuuuuacuaaag

SEQ ID NO: 143669 - RNA, 24 nt, Artificial Sequence
  Synthetic
uccagucucccauuuuuacuaaag

SEQ ID NO: 143670 - RNA, 18 nt, Artificial Sequence
  Synthetic
auauaauuaauguuaaag

SEQ ID NO: 143671 - RNA, 19 nt, Artificial Sequence
  Synthetic
aauauaauuaauguuaaag

SEQ ID NO: 143672 - RNA, 20 nt, Artificial Sequence
  Synthetic
uaauauaauuaauguuaaag

SEQ ID NO: 143673 - RNA, 18 nt, Artificial Sequence
  Synthetic
aagcuuuuuuuuuuaaag

SEQ ID NO: 143674 - RNA, 19 nt, Artificial Sequence
  Synthetic
uaagcuuuuuuuuuuaaag

SEQ ID NO: 143675 - RNA, 20 nt, Artificial Sequence
  Synthetic
auaagcuuuuuuuuuuaaag

SEQ ID NO: 143676 - RNA, 18 nt, Artificial Sequence
  Synthetic
aaaccaaaaauuaacaag

SEQ ID NO: 143677 - RNA, 19 nt, Artificial Sequence
  Synthetic
aaaaccaaaaauuaacaag

SEQ ID NO: 143678 - RNA, 20 nt, Artificial Sequence
  Synthetic
caaaaccaaaaauuaacaag

SEQ ID NO: 143679 - RNA, 21 nt, Artificial Sequence
  Synthetic
acaaaaccaaaaauuaacaag

SEQ ID NO: 143680 - RNA, 22 nt, Artificial Sequence
  Synthetic
aacaaaaccaaaaauuaacaag

SEQ ID NO: 143681 - RNA, 23 nt, Artificial Sequence
  Synthetic
uaacaaaaccaaaaauuaacaag

SEQ ID NO: 143682 - RNA, 19 nt, Artificial Sequence
  Synthetic
uguaacaaauuaccacaag

SEQ ID NO: 143683 - RNA, 20 nt, Artificial Sequence
  Synthetic
auguaacaaauuaccacaag

SEQ ID NO: 143684 - RNA, 18 nt, Artificial Sequence
  Synthetic
ccugagacuucccacaag

SEQ ID NO: 143685 - RNA, 19 nt, Artificial Sequence
  Synthetic
uccugagacuucccacaag

SEQ ID NO: 143686 - RNA, 20 nt, Artificial Sequence
  Synthetic
uuccugagacuucccacaag

SEQ ID NO: 143687 - RNA, 18 nt, Artificial Sequence
  Synthetic
aaguuauagaacaccaag

SEQ ID NO: 143688 - RNA, 19 nt, Artificial Sequence
  Synthetic
aaaguuauagaacaccaag

SEQ ID NO: 143689 - RNA, 20 nt, Artificial Sequence
  Synthetic
caaaguuauagaacaccaag

SEQ ID NO: 143690 - RNA, 21 nt, Artificial Sequence
  Synthetic
acaaaguuauagaacaccaag

SEQ ID NO: 143691 - RNA, 23 nt, Artificial Sequence
  Synthetic
cgacaaaguuauagaacaccaag

SEQ ID NO: 143692 - RNA, 24 nt, Artificial Sequence
  Synthetic
acgacaaaguuauagaacaccaag

SEQ ID NO: 143693 - RNA, 19 nt, Artificial Sequence
  Synthetic
agcacuucgggaggccaag

SEQ ID NO: 143694 - RNA, 20 nt, Artificial Sequence
  Synthetic
cagcacuucgggaggccaag

SEQ ID NO: 143695 - RNA, 21 nt, Artificial Sequence
  Synthetic
ccagcacuucgggaggccaag

SEQ ID NO: 143696 - RNA, 22 nt, Artificial Sequence
  Synthetic
cccagcacuucgggaggccaag

SEQ ID NO: 143697 - RNA, 23 nt, Artificial Sequence
  Synthetic
ucccagcacuucgggaggccaag

SEQ ID NO: 143698 - RNA, 24 nt, Artificial Sequence
  Synthetic
aucccagcacuucgggaggccaag

SEQ ID NO: 143699 - RNA, 19 nt, Artificial Sequence
  Synthetic
agcccaggaugaguccaag

SEQ ID NO: 143700 - RNA, 18 nt, Artificial Sequence
  Synthetic
uagagaaaaccaggcaag

SEQ ID NO: 143701 - RNA, 19 nt, Artificial Sequence
  Synthetic
auagagaaaaccaggcaag

SEQ ID NO: 143702 - RNA, 20 nt, Artificial Sequence
  Synthetic
uauagagaaaaccaggcaag

SEQ ID NO: 143703 - RNA, 18 nt, Artificial Sequence
  Synthetic
uacaaaaauuaacucaag

SEQ ID NO: 143704 - RNA, 19 nt, Artificial Sequence
  Synthetic
auacaaaaauuaacucaag

SEQ ID NO: 143705 - RNA, 20 nt, Artificial Sequence
  Synthetic
uauacaaaaauuaacucaag

SEQ ID NO: 143706 - RNA, 21 nt, Artificial Sequence
  Synthetic
auauacaaaaauuaacucaag

SEQ ID NO: 143707 - RNA, 22 nt, Artificial Sequence
  Synthetic
uauauacaaaaauuaacucaag

SEQ ID NO: 143708 - RNA, 23 nt, Artificial Sequence
  Synthetic
cuauauacaaaaauuaacucaag

SEQ ID NO: 143709 - RNA, 24 nt, Artificial Sequence
  Synthetic
acuauauacaaaaauuaacucaag

SEQ ID NO: 143710 - RNA, 18 nt, Artificial Sequence
  Synthetic
acagacugccuucucaag

SEQ ID NO: 143711 - RNA, 22 nt, Artificial Sequence
  Synthetic
agggacagacugccuucucaag

SEQ ID NO: 143712 - RNA, 23 nt, Artificial Sequence
  Synthetic
aagggacagacugccuucucaag

SEQ ID NO: 143713 - RNA, 24 nt, Artificial Sequence
  Synthetic
uaagggacagacugccuucucaag

SEQ ID NO: 143714 - RNA, 18 nt, Artificial Sequence
  Synthetic
uacaaaaaucaauucaag

SEQ ID NO: 143715 - RNA, 19 nt, Artificial Sequence
  Synthetic
auacaaaaaucaauucaag

SEQ ID NO: 143716 - RNA, 20 nt, Artificial Sequence
  Synthetic
uauacaaaaaucaauucaag

SEQ ID NO: 143717 - RNA, 20 nt, Artificial Sequence
  Synthetic
agggcauuaagccauucaag

SEQ ID NO: 143718 - RNA, 21 nt, Artificial Sequence
  Synthetic
aagggcauuaagccauucaag

SEQ ID NO: 143719 - RNA, 24 nt, Artificial Sequence
  Synthetic
aggaagggcauuaagccauucaag

SEQ ID NO: 143720 - RNA, 19 nt, Artificial Sequence
  Synthetic
ugcugugaaaaaaaagaag

SEQ ID NO: 143721 - RNA, 21 nt, Artificial Sequence
  Synthetic
agugcugugaaaaaaaagaag

SEQ ID NO: 143722 - RNA, 22 nt, Artificial Sequence
  Synthetic
aagugcugugaaaaaaaagaag

SEQ ID NO: 143723 - RNA, 23 nt, Artificial Sequence
  Synthetic
uaagugcugugaaaaaaaagaag

SEQ ID NO: 143724 - RNA, 24 nt, Artificial Sequence
  Synthetic
auaagugcugugaaaaaaaagaag

SEQ ID NO: 143725 - RNA, 19 nt, Artificial Sequence
  Synthetic
agacuaaaccaggaagaag

SEQ ID NO: 143726 - RNA, 20 nt, Artificial Sequence
  Synthetic
aagacuaaaccaggaagaag

SEQ ID NO: 143727 - RNA, 19 nt, Artificial Sequence
  Synthetic
agugagaucaacacagaag

SEQ ID NO: 143728 - RNA, 20 nt, Artificial Sequence
  Synthetic
uagugagaucaacacagaag

SEQ ID NO: 143729 - RNA, 21 nt, Artificial Sequence
  Synthetic
cuagugagaucaacacagaag

SEQ ID NO: 143730 - RNA, 22 nt, Artificial Sequence
  Synthetic
ccuagugagaucaacacagaag

SEQ ID NO: 143731 - RNA, 23 nt, Artificial Sequence
  Synthetic
cccuagugagaucaacacagaag

SEQ ID NO: 143732 - RNA, 24 nt, Artificial Sequence
  Synthetic
ccccuagugagaucaacacagaag

SEQ ID NO: 143733 - RNA, 18 nt, Artificial Sequence
  Synthetic
ugaguauguacccagaag

SEQ ID NO: 143734 - RNA, 19 nt, Artificial Sequence
  Synthetic
uugaguauguacccagaag

SEQ ID NO: 143735 - RNA, 20 nt, Artificial Sequence
  Synthetic
uuugaguauguacccagaag

SEQ ID NO: 143736 - RNA, 21 nt, Artificial Sequence
  Synthetic
uuuugaguauguacccagaag

SEQ ID NO: 143737 - RNA, 22 nt, Artificial Sequence
  Synthetic
cuuuugaguauguacccagaag

SEQ ID NO: 143738 - RNA, 23 nt, Artificial Sequence
  Synthetic
ucuuuugaguauguacccagaag

SEQ ID NO: 143739 - RNA, 24 nt, Artificial Sequence
  Synthetic
uucuuuugaguauguacccagaag

SEQ ID NO: 143740 - RNA, 19 nt, Artificial Sequence
  Synthetic
cggaaguaggcuucagaag

SEQ ID NO: 143741 - RNA, 20 nt, Artificial Sequence
  Synthetic
acggaaguaggcuucagaag

SEQ ID NO: 143742 - RNA, 22 nt, Artificial Sequence
  Synthetic
ugacggaaguaggcuucagaag

SEQ ID NO: 143743 - RNA, 23 nt, Artificial Sequence
  Synthetic
uugacggaaguaggcuucagaag

SEQ ID NO: 143744 - RNA, 24 nt, Artificial Sequence
  Synthetic
auugacggaaguaggcuucagaag

SEQ ID NO: 143745 - RNA, 18 nt, Artificial Sequence
  Synthetic
ccaagacagagagagaag

SEQ ID NO: 143746 - RNA, 20 nt, Artificial Sequence
  Synthetic
ugccaagacagagagagaag

SEQ ID NO: 143747 - RNA, 18 nt, Artificial Sequence
  Synthetic
ugcuaucauugggagaag

SEQ ID NO: 143748 - RNA, 19 nt, Artificial Sequence
  Synthetic
augcuaucauugggagaag

SEQ ID NO: 143749 - RNA, 20 nt, Artificial Sequence
  Synthetic
aaugcuaucauugggagaag

SEQ ID NO: 143750 - RNA, 21 nt, Artificial Sequence
  Synthetic
aaaugcuaucauugggagaag

SEQ ID NO: 143751 - RNA, 22 nt, Artificial Sequence
  Synthetic
aaaaugcuaucauugggagaag

SEQ ID NO: 143752 - RNA, 23 nt, Artificial Sequence
  Synthetic
uaaaaugcuaucauugggagaag

SEQ ID NO: 143753 - RNA, 24 nt, Artificial Sequence
  Synthetic
uuaaaaugcuaucauugggagaag

SEQ ID NO: 143754 - RNA, 19 nt, Artificial Sequence
  Synthetic
ugagaaccagaaugagaag

SEQ ID NO: 143755 - RNA, 20 nt, Artificial Sequence
  Synthetic
augagaaccagaaugagaag

SEQ ID NO: 143756 - RNA, 21 nt, Artificial Sequence
  Synthetic
caugagaaccagaaugagaag

SEQ ID NO: 143757 - RNA, 23 nt, Artificial Sequence
  Synthetic
agcaugagaaccagaaugagaag

SEQ ID NO: 143758 - RNA, 24 nt, Artificial Sequence
  Synthetic
uagcaugagaaccagaaugagaag

SEQ ID NO: 143759 - RNA, 18 nt, Artificial Sequence
  Synthetic
aaucugugugcugagaag

SEQ ID NO: 143760 - RNA, 19 nt, Artificial Sequence
  Synthetic
uaaucugugugcugagaag

SEQ ID NO: 143761 - RNA, 20 nt, Artificial Sequence
  Synthetic
auaaucugugugcugagaag

SEQ ID NO: 143762 - RNA, 21 nt, Artificial Sequence
  Synthetic
aauaaucugugugcugagaag

SEQ ID NO: 143763 - RNA, 22 nt, Artificial Sequence
  Synthetic
uaauaaucugugugcugagaag

SEQ ID NO: 143764 - RNA, 23 nt, Artificial Sequence
  Synthetic
auaauaaucugugugcugagaag

SEQ ID NO: 143765 - RNA, 18 nt, Artificial Sequence
  Synthetic
uucucucaguccuagaag

SEQ ID NO: 143766 - RNA, 19 nt, Artificial Sequence
  Synthetic
uuucucucaguccuagaag

SEQ ID NO: 143767 - RNA, 20 nt, Artificial Sequence
  Synthetic
auuucucucaguccuagaag

SEQ ID NO: 143768 - RNA, 18 nt, Artificial Sequence
  Synthetic
ucacauggacacaggaag

SEQ ID NO: 143769 - RNA, 19 nt, Artificial Sequence
  Synthetic
aucacauggacacaggaag

SEQ ID NO: 143770 - RNA, 21 nt, Artificial Sequence
  Synthetic
agaucacauggacacaggaag

SEQ ID NO: 143771 - RNA, 23 nt, Artificial Sequence
  Synthetic
ugagaucacauggacacaggaag

SEQ ID NO: 143772 - RNA, 24 nt, Artificial Sequence
  Synthetic
augagaucacauggacacaggaag

SEQ ID NO: 143773 - RNA, 18 nt, Artificial Sequence
  Synthetic
cuucugagggcucggaag

SEQ ID NO: 143774 - RNA, 19 nt, Artificial Sequence
  Synthetic
ccuucugagggcucggaag

SEQ ID NO: 143775 - RNA, 20 nt, Artificial Sequence
  Synthetic
uccuucugagggcucggaag

SEQ ID NO: 143776 - RNA, 21 nt, Artificial Sequence
  Synthetic
uuccuucugagggcucggaag

SEQ ID NO: 143777 - RNA, 24 nt, Artificial Sequence
  Synthetic
ugguuccuucugagggcucggaag

SEQ ID NO: 143778 - RNA, 23 nt, Artificial Sequence
  Synthetic
aggccaaagggagagaugggaag

SEQ ID NO: 143779 - RNA, 18 nt, Artificial Sequence
  Synthetic
aagcaaggcagugggaag

SEQ ID NO: 143780 - RNA, 20 nt, Artificial Sequence
  Synthetic
aggaaaggaggaaauggaag

SEQ ID NO: 143781 - RNA, 19 nt, Artificial Sequence
  Synthetic
agagagagggagguggaag

SEQ ID NO: 143782 - RNA, 21 nt, Artificial Sequence
  Synthetic
agagagagagggagguggaag

SEQ ID NO: 143783 - RNA, 24 nt, Artificial Sequence
  Synthetic
uggagagagagagggagguggaag

SEQ ID NO: 143784 - RNA, 18 nt, Artificial Sequence
  Synthetic
cugaguucugauuggaag

SEQ ID NO: 143785 - RNA, 20 nt, Artificial Sequence
  Synthetic
agcugaguucugauuggaag

SEQ ID NO: 143786 - RNA, 21 nt, Artificial Sequence
  Synthetic
aagcugaguucugauuggaag

SEQ ID NO: 143787 - RNA, 22 nt, Artificial Sequence
  Synthetic
caagcugaguucugauuggaag

SEQ ID NO: 143788 - RNA, 23 nt, Artificial Sequence
  Synthetic
ccaagcugaguucugauuggaag

SEQ ID NO: 143789 - RNA, 24 nt, Artificial Sequence
  Synthetic
cccaagcugaguucugauuggaag

SEQ ID NO: 143790 - RNA, 18 nt, Artificial Sequence
  Synthetic
uccuccaaaacauugaag

SEQ ID NO: 143791 - RNA, 19 nt, Artificial Sequence
  Synthetic
auccuccaaaacauugaag

SEQ ID NO: 143792 - RNA, 20 nt, Artificial Sequence
  Synthetic
cauccuccaaaacauugaag

SEQ ID NO: 143793 - RNA, 21 nt, Artificial Sequence
  Synthetic
ucauccuccaaaacauugaag

SEQ ID NO: 143794 - RNA, 22 nt, Artificial Sequence
  Synthetic
uucauccuccaaaacauugaag

SEQ ID NO: 143795 - RNA, 23 nt, Artificial Sequence
  Synthetic
cuucauccuccaaaacauugaag

SEQ ID NO: 143796 - RNA, 24 nt, Artificial Sequence
  Synthetic
ccuucauccuccaaaacauugaag

SEQ ID NO: 143797 - RNA, 18 nt, Artificial Sequence
  Synthetic
aaaauugaaaaaaauaag

SEQ ID NO: 143798 - RNA, 19 nt, Artificial Sequence
  Synthetic
aaaaauugaaaaaaauaag

SEQ ID NO: 143799 - RNA, 20 nt, Artificial Sequence
  Synthetic
caaaaauugaaaaaaauaag

SEQ ID NO: 143800 - RNA, 18 nt, Artificial Sequence
  Synthetic
caaaaauacauaaauaag

SEQ ID NO: 143801 - RNA, 19 nt, Artificial Sequence
  Synthetic
ucaaaaauacauaaauaag

SEQ ID NO: 143802 - RNA, 20 nt, Artificial Sequence
  Synthetic
cucaaaaauacauaaauaag

SEQ ID NO: 143803 - RNA, 21 nt, Artificial Sequence
  Synthetic
ucucaaaaauacauaaauaag

SEQ ID NO: 143804 - RNA, 23 nt, Artificial Sequence
  Synthetic
ugucucaaaaauacauaaauaag

SEQ ID NO: 143805 - RNA, 24 nt, Artificial Sequence
  Synthetic
cugucucaaaaauacauaaauaag

SEQ ID NO: 143806 - RNA, 18 nt, Artificial Sequence
  Synthetic
cagguucacaggaauaag

SEQ ID NO: 143807 - RNA, 21 nt, Artificial Sequence
  Synthetic
uggcagguucacaggaauaag

SEQ ID NO: 143808 - RNA, 22 nt, Artificial Sequence
  Synthetic
cuggcagguucacaggaauaag

SEQ ID NO: 143809 - RNA, 23 nt, Artificial Sequence
  Synthetic
acuggcagguucacaggaauaag

SEQ ID NO: 143810 - RNA, 24 nt, Artificial Sequence
  Synthetic
cacuggcagguucacaggaauaag

SEQ ID NO: 143811 - RNA, 19 nt, Artificial Sequence
  Synthetic
aggaaacaucagggguaag

SEQ ID NO: 143812 - RNA, 21 nt, Artificial Sequence
  Synthetic
agaggaaacaucagggguaag

SEQ ID NO: 143813 - RNA, 22 nt, Artificial Sequence
  Synthetic
aagaggaaacaucagggguaag

SEQ ID NO: 143814 - RNA, 23 nt, Artificial Sequence
  Synthetic
uaagaggaaacaucagggguaag

SEQ ID NO: 143815 - RNA, 24 nt, Artificial Sequence
  Synthetic
uuaagaggaaacaucagggguaag

SEQ ID NO: 143816 - RNA, 18 nt, Artificial Sequence
  Synthetic
auaauaacaauauguaag

SEQ ID NO: 143817 - RNA, 19 nt, Artificial Sequence
  Synthetic
aauaauaacaauauguaag

SEQ ID NO: 143818 - RNA, 20 nt, Artificial Sequence
  Synthetic
uaauaauaacaauauguaag

SEQ ID NO: 143819 - RNA, 18 nt, Artificial Sequence
  Synthetic
cuucacaucccuuguaag

SEQ ID NO: 143820 - RNA, 19 nt, Artificial Sequence
  Synthetic
ccuucacaucccuuguaag

SEQ ID NO: 143821 - RNA, 20 nt, Artificial Sequence
  Synthetic
uccuucacaucccuuguaag

SEQ ID NO: 143822 - RNA, 23 nt, Artificial Sequence
  Synthetic
agguccuucacaucccuuguaag

SEQ ID NO: 143823 - RNA, 18 nt, Artificial Sequence
  Synthetic
cuucacaucgcuuguaag

SEQ ID NO: 143824 - RNA, 19 nt, Artificial Sequence
  Synthetic
ccuucacaucgcuuguaag

SEQ ID NO: 143825 - RNA, 20 nt, Artificial Sequence
  Synthetic
uccuucacaucgcuuguaag

SEQ ID NO: 143826 - RNA, 23 nt, Artificial Sequence
  Synthetic
agguccuucacaucgcuuguaag

SEQ ID NO: 143827 - RNA, 18 nt, Artificial Sequence
  Synthetic
auuuuguuugaaauuaag

SEQ ID NO: 143828 - RNA, 19 nt, Artificial Sequence
  Synthetic
aauuuuguuugaaauuaag

SEQ ID NO: 143829 - RNA, 20 nt, Artificial Sequence
  Synthetic
uaauuuuguuugaaauuaag

SEQ ID NO: 143830 - RNA, 21 nt, Artificial Sequence
  Synthetic
uuaauuuuguuugaaauuaag

SEQ ID NO: 143831 - RNA, 22 nt, Artificial Sequence
  Synthetic
auuaauuuuguuugaaauuaag

SEQ ID NO: 143832 - RNA, 23 nt, Artificial Sequence
  Synthetic
aauuaauuuuguuugaaauuaag

SEQ ID NO: 143833 - RNA, 24 nt, Artificial Sequence
  Synthetic
aaauuaauuuuguuugaaauuaag

SEQ ID NO: 143834 - RNA, 18 nt, Artificial Sequence
  Synthetic
uauuuuucaauuauuaag

SEQ ID NO: 143835 - RNA, 20 nt, Artificial Sequence
  Synthetic
uguauuuuucaauuauuaag

SEQ ID NO: 143836 - RNA, 18 nt, Artificial Sequence
  Synthetic
aaaaaagcccaggaacag

SEQ ID NO: 143837 - RNA, 19 nt, Artificial Sequence
  Synthetic
aaaaaaagcccaggaacag

SEQ ID NO: 143838 - RNA, 20 nt, Artificial Sequence
  Synthetic
caaaaaaagcccaggaacag

SEQ ID NO: 143839 - RNA, 21 nt, Artificial Sequence
  Synthetic
ccaaaaaaagcccaggaacag

SEQ ID NO: 143840 - RNA, 22 nt, Artificial Sequence
  Synthetic
accaaaaaaagcccaggaacag

SEQ ID NO: 143841 - RNA, 23 nt, Artificial Sequence
  Synthetic
aaccaaaaaaagcccaggaacag

SEQ ID NO: 143842 - RNA, 24 nt, Artificial Sequence
  Synthetic
caaccaaaaaaagcccaggaacag

SEQ ID NO: 143843 - RNA, 18 nt, Artificial Sequence
  Synthetic
caugggaggcugacacag

SEQ ID NO: 143844 - RNA, 20 nt, Artificial Sequence
  Synthetic
ugcaugggaggcugacacag

SEQ ID NO: 143845 - RNA, 21 nt, Artificial Sequence
  Synthetic
cugcaugggaggcugacacag

SEQ ID NO: 143846 - RNA, 23 nt, Artificial Sequence
  Synthetic
agcugcaugggaggcugacacag

SEQ ID NO: 143847 - RNA, 24 nt, Artificial Sequence
  Synthetic
cagcugcaugggaggcugacacag

SEQ ID NO: 143848 - RNA, 18 nt, Artificial Sequence
  Synthetic
aauuuuacuucugcacag

SEQ ID NO: 143849 - RNA, 19 nt, Artificial Sequence
  Synthetic
caauuuuacuucugcacag

SEQ ID NO: 143850 - RNA, 21 nt, Artificial Sequence
  Synthetic
agcaauuuuacuucugcacag

SEQ ID NO: 143851 - RNA, 22 nt, Artificial Sequence
  Synthetic
aagcaauuuuacuucugcacag

SEQ ID NO: 143852 - RNA, 23 nt, Artificial Sequence
  Synthetic
aaagcaauuuuacuucugcacag

SEQ ID NO: 143853 - RNA, 24 nt, Artificial Sequence
  Synthetic
caaagcaauuuuacuucugcacag

SEQ ID NO: 143854 - RNA, 21 nt, Artificial Sequence
  Synthetic
acauguacaggcuugucacag

SEQ ID NO: 143855 - RNA, 22 nt, Artificial Sequence
  Synthetic
uacauguacaggcuugucacag

SEQ ID NO: 143856 - RNA, 20 nt, Artificial Sequence
  Synthetic
aggaacagauggauucacag

SEQ ID NO: 143857 - RNA, 21 nt, Artificial Sequence
  Synthetic
caggaacagauggauucacag

SEQ ID NO: 143858 - RNA, 22 nt, Artificial Sequence
  Synthetic
ccaggaacagauggauucacag

SEQ ID NO: 143859 - RNA, 23 nt, Artificial Sequence
  Synthetic
cccaggaacagauggauucacag

SEQ ID NO: 143860 - RNA, 20 nt, Artificial Sequence
  Synthetic
aggaccagauggauucacag

SEQ ID NO: 143861 - RNA, 21 nt, Artificial Sequence
  Synthetic
caggaccagauggauucacag

SEQ ID NO: 143862 - RNA, 22 nt, Artificial Sequence
  Synthetic
ccaggaccagauggauucacag

SEQ ID NO: 143863 - RNA, 23 nt, Artificial Sequence
  Synthetic
uccaggaccagauggauucacag

SEQ ID NO: 143864 - RNA, 18 nt, Artificial Sequence
  Synthetic
acaaaauguguaagacag

SEQ ID NO: 143865 - RNA, 18 nt, Artificial Sequence
  Synthetic
cucgggaggcugagacag

SEQ ID NO: 143866 - RNA, 19 nt, Artificial Sequence
  Synthetic
acucgggaggcugagacag

SEQ ID NO: 143867 - RNA, 20 nt, Artificial Sequence
  Synthetic
uacucgggaggcugagacag

SEQ ID NO: 143868 - RNA, 21 nt, Artificial Sequence
  Synthetic
cuacucgggaggcugagacag

SEQ ID NO: 143869 - RNA, 23 nt, Artificial Sequence
  Synthetic
ugcuacucgggaggcugagacag

SEQ ID NO: 143870 - RNA, 24 nt, Artificial Sequence
  Synthetic
cugcuacucgggaggcugagacag

SEQ ID NO: 143871 - RNA, 18 nt, Artificial Sequence
  Synthetic
agguagauagauagacag

SEQ ID NO: 143872 - RNA, 19 nt, Artificial Sequence
  Synthetic
uagguagauagauagacag

SEQ ID NO: 143873 - RNA, 22 nt, Artificial Sequence
  Synthetic
ugguagguagauagauagacag

SEQ ID NO: 143874 - RNA, 23 nt, Artificial Sequence
  Synthetic
uugguagguagauagauagacag

SEQ ID NO: 143875 - RNA, 21 nt, Artificial Sequence
  Synthetic
agacaaaaaauuuugggacag

SEQ ID NO: 143876 - RNA, 22 nt, Artificial Sequence
  Synthetic
cagacaaaaaauuuugggacag

SEQ ID NO: 143877 - RNA, 23 nt, Artificial Sequence
  Synthetic
acagacaaaaaauuuugggacag

SEQ ID NO: 143878 - RNA, 18 nt, Artificial Sequence
  Synthetic
ucugucuaauguugacag

SEQ ID NO: 143879 - RNA, 19 nt, Artificial Sequence
  Synthetic
aucugucuaauguugacag

SEQ ID NO: 143880 - RNA, 21 nt, Artificial Sequence
  Synthetic
ugaucugucuaauguugacag

SEQ ID NO: 143881 - RNA, 22 nt, Artificial Sequence
  Synthetic
uugaucugucuaauguugacag

SEQ ID NO: 143882 - RNA, 24 nt, Artificial Sequence
  Synthetic
cguugaucugucuaauguugacag

SEQ ID NO: 143883 - RNA, 18 nt, Artificial Sequence
  Synthetic
auuuuuuucauuugacag

SEQ ID NO: 143884 - RNA, 19 nt, Artificial Sequence
  Synthetic
uauuuuuuucauuugacag

SEQ ID NO: 143885 - RNA, 20 nt, Artificial Sequence
  Synthetic
uuauuuuuuucauuugacag

SEQ ID NO: 143886 - RNA, 22 nt, Artificial Sequence
  Synthetic
uguuauuuuuuucauuugacag

SEQ ID NO: 143887 - RNA, 18 nt, Artificial Sequence
  Synthetic
auaagauaaaaaguacag

SEQ ID NO: 143888 - RNA, 19 nt, Artificial Sequence
  Synthetic
uauaagauaaaaaguacag

SEQ ID NO: 143889 - RNA, 20 nt, Artificial Sequence
  Synthetic
auauaagauaaaaaguacag

SEQ ID NO: 143890 - RNA, 18 nt, Artificial Sequence
  Synthetic
agcucuuacuuauuacag

SEQ ID NO: 143891 - RNA, 19 nt, Artificial Sequence
  Synthetic
aagcucuuacuuauuacag

SEQ ID NO: 143892 - RNA, 20 nt, Artificial Sequence
  Synthetic
caagcucuuacuuauuacag

SEQ ID NO: 143893 - RNA, 18 nt, Artificial Sequence
  Synthetic
auaaucgccacuuuacag

SEQ ID NO: 143894 - RNA, 19 nt, Artificial Sequence
  Synthetic
uauaaucgccacuuuacag

SEQ ID NO: 143895 - RNA, 20 nt, Artificial Sequence
  Synthetic
uuauaaucgccacuuuacag

SEQ ID NO: 143896 - RNA, 21 nt, Artificial Sequence
  Synthetic
auuauaaucgccacuuuacag

SEQ ID NO: 143897 - RNA, 22 nt, Artificial Sequence
  Synthetic
uauuauaaucgccacuuuacag

SEQ ID NO: 143898 - RNA, 23 nt, Artificial Sequence
  Synthetic
cuauuauaaucgccacuuuacag

SEQ ID NO: 143899 - RNA, 24 nt, Artificial Sequence
  Synthetic
acuauuauaaucgccacuuuacag

SEQ ID NO: 143900 - RNA, 21 nt, Artificial Sequence
  Synthetic
uagauuaaguauuuaaaccag

SEQ ID NO: 143901 - RNA, 22 nt, Artificial Sequence
  Synthetic
uuagauuaaguauuuaaaccag

SEQ ID NO: 143902 - RNA, 23 nt, Artificial Sequence
  Synthetic
auuagauuaaguauuuaaaccag

SEQ ID NO: 143903 - RNA, 24 nt, Artificial Sequence
  Synthetic
cauuagauuaaguauuuaaaccag

SEQ ID NO: 143904 - RNA, 18 nt, Artificial Sequence
  Synthetic
ccaaacagcaggcaccag

SEQ ID NO: 143905 - RNA, 19 nt, Artificial Sequence
  Synthetic
accaaacagcaggcaccag

SEQ ID NO: 143906 - RNA, 20 nt, Artificial Sequence
  Synthetic
caccaaacagcaggcaccag

SEQ ID NO: 143907 - RNA, 21 nt, Artificial Sequence
  Synthetic
acaccaaacagcaggcaccag

SEQ ID NO: 143908 - RNA, 22 nt, Artificial Sequence
  Synthetic
uacaccaaacagcaggcaccag

SEQ ID NO: 143909 - RNA, 23 nt, Artificial Sequence
  Synthetic
auacaccaaacagcaggcaccag

SEQ ID NO: 143910 - RNA, 24 nt, Artificial Sequence
  Synthetic
cauacaccaaacagcaggcaccag

SEQ ID NO: 143911 - RNA, 18 nt, Artificial Sequence
  Synthetic
aaaagaguccaggaccag

SEQ ID NO: 143912 - RNA, 19 nt, Artificial Sequence
  Synthetic
aaaaagaguccaggaccag

SEQ ID NO: 143913 - RNA, 20 nt, Artificial Sequence
  Synthetic
caaaaagaguccaggaccag

SEQ ID NO: 143914 - RNA, 21 nt, Artificial Sequence
  Synthetic
ccaaaaagaguccaggaccag

SEQ ID NO: 143915 - RNA, 22 nt, Artificial Sequence
  Synthetic
accaaaaagaguccaggaccag

SEQ ID NO: 143916 - RNA, 23 nt, Artificial Sequence
  Synthetic
aaccaaaaagaguccaggaccag

SEQ ID NO: 143917 - RNA, 24 nt, Artificial Sequence
  Synthetic
caaccaaaaagaguccaggaccag

SEQ ID NO: 143918 - RNA, 18 nt, Artificial Sequence
  Synthetic
uauugggcauauacccag

SEQ ID NO: 143919 - RNA, 19 nt, Artificial Sequence
  Synthetic
uuauugggcauauacccag

SEQ ID NO: 143920 - RNA, 20 nt, Artificial Sequence
  Synthetic
auuauugggcauauacccag

SEQ ID NO: 143921 - RNA, 21 nt, Artificial Sequence
  Synthetic
cauuauugggcauauacccag

SEQ ID NO: 143922 - RNA, 22 nt, Artificial Sequence
  Synthetic
ccauuauugggcauauacccag

SEQ ID NO: 143923 - RNA, 23 nt, Artificial Sequence
  Synthetic
cccauuauugggcauauacccag

SEQ ID NO: 143924 - RNA, 24 nt, Artificial Sequence
  Synthetic
ucccauuauugggcauauacccag

SEQ ID NO: 143925 - RNA, 18 nt, Artificial Sequence
  Synthetic
uuuuaauagaauccccag

SEQ ID NO: 143926 - RNA, 19 nt, Artificial Sequence
  Synthetic
auuuuaauagaauccccag

SEQ ID NO: 143927 - RNA, 20 nt, Artificial Sequence
  Synthetic
cauuuuaauagaauccccag

SEQ ID NO: 143928 - RNA, 22 nt, Artificial Sequence
  Synthetic
ugcauuuuaauagaauccccag

SEQ ID NO: 143929 - RNA, 23 nt, Artificial Sequence
  Synthetic
cugcauuuuaauagaauccccag

SEQ ID NO: 143930 - RNA, 24 nt, Artificial Sequence
  Synthetic
ucugcauuuuaauagaauccccag

SEQ ID NO: 143931 - RNA, 18 nt, Artificial Sequence
  Synthetic
uaugggcucugcgcccag

SEQ ID NO: 143932 - RNA, 19 nt, Artificial Sequence
  Synthetic
auaugggcucugcgcccag

SEQ ID NO: 143933 - RNA, 20 nt, Artificial Sequence
  Synthetic
cauaugggcucugcgcccag

SEQ ID NO: 143934 - RNA, 18 nt, Artificial Sequence
  Synthetic
cuggcuaaccguauccag

SEQ ID NO: 143935 - RNA, 20 nt, Artificial Sequence
  Synthetic
agcuggcuaaccguauccag

SEQ ID NO: 143936 - RNA, 21 nt, Artificial Sequence
  Synthetic
uagcuggcuaaccguauccag

SEQ ID NO: 143937 - RNA, 22 nt, Artificial Sequence
  Synthetic
auagcuggcuaaccguauccag

SEQ ID NO: 143938 - RNA, 18 nt, Artificial Sequence
  Synthetic
uuugggaggccaaagcag

SEQ ID NO: 143939 - RNA, 19 nt, Artificial Sequence
  Synthetic
cuuugggaggccaaagcag

SEQ ID NO: 143940 - RNA, 20 nt, Artificial Sequence
  Synthetic
acuuugggaggccaaagcag

SEQ ID NO: 143941 - RNA, 23 nt, Artificial Sequence
  Synthetic
aggacuuugggaggccaaagcag

SEQ ID NO: 143942 - RNA, 24 nt, Artificial Sequence
  Synthetic
uaggacuuugggaggccaaagcag

SEQ ID NO: 143943 - RNA, 18 nt, Artificial Sequence
  Synthetic
ugugggaggcuaaagcag

SEQ ID NO: 143944 - RNA, 19 nt, Artificial Sequence
  Synthetic
cugugggaggcuaaagcag

SEQ ID NO: 143945 - RNA, 20 nt, Artificial Sequence
  Synthetic
acugugggaggcuaaagcag

SEQ ID NO: 143946 - RNA, 21 nt, Artificial Sequence
  Synthetic
aacugugggaggcuaaagcag

SEQ ID NO: 143947 - RNA, 23 nt, Artificial Sequence
  Synthetic
agaacugugggaggcuaaagcag

SEQ ID NO: 143948 - RNA, 24 nt, Artificial Sequence
  Synthetic
cagaacugugggaggcuaaagcag

SEQ ID NO: 143949 - RNA, 18 nt, Artificial Sequence
  Synthetic
cucgggaggcugaagcag

SEQ ID NO: 143950 - RNA, 19 nt, Artificial Sequence
  Synthetic
acucgggaggcugaagcag

SEQ ID NO: 143951 - RNA, 20 nt, Artificial Sequence
  Synthetic
uacucgggaggcugaagcag

SEQ ID NO: 143952 - RNA, 21 nt, Artificial Sequence
  Synthetic
cuacucgggaggcugaagcag

SEQ ID NO: 143953 - RNA, 23 nt, Artificial Sequence
  Synthetic
agcuacucgggaggcugaagcag

SEQ ID NO: 143954 - RNA, 24 nt, Artificial Sequence
  Synthetic
cagcuacucgggaggcugaagcag

SEQ ID NO: 143955 - RNA, 18 nt, Artificial Sequence
  Synthetic
cuugggaggcugaagcag

SEQ ID NO: 143956 - RNA, 19 nt, Artificial Sequence
  Synthetic
acuugggaggcugaagcag

SEQ ID NO: 143957 - RNA, 20 nt, Artificial Sequence
  Synthetic
aacuugggaggcugaagcag

SEQ ID NO: 143958 - RNA, 21 nt, Artificial Sequence
  Synthetic
uaacuugggaggcugaagcag

SEQ ID NO: 143959 - RNA, 22 nt, Artificial Sequence
  Synthetic
cuaacuugggaggcugaagcag

SEQ ID NO: 143960 - RNA, 20 nt, Artificial Sequence
  Synthetic
uacuugggaggcugaagcag

SEQ ID NO: 143961 - RNA, 21 nt, Artificial Sequence
  Synthetic
cuacuugggaggcugaagcag

SEQ ID NO: 143962 - RNA, 23 nt, Artificial Sequence
  Synthetic
agcuacuugggaggcugaagcag

SEQ ID NO: 143963 - RNA, 24 nt, Artificial Sequence
  Synthetic
cagcuacuugggaggcugaagcag

SEQ ID NO: 143964 - RNA, 18 nt, Artificial Sequence
  Synthetic
uuugggaggcugaagcag

SEQ ID NO: 143965 - RNA, 19 nt, Artificial Sequence
  Synthetic
cuuugggaggcugaagcag

SEQ ID NO: 143966 - RNA, 20 nt, Artificial Sequence
  Synthetic
acuuugggaggcugaagcag

SEQ ID NO: 143967 - RNA, 21 nt, Artificial Sequence
  Synthetic
cacuuugggaggcugaagcag

SEQ ID NO: 143968 - RNA, 23 nt, Artificial Sequence
  Synthetic
agcacuuugggaggcugaagcag

SEQ ID NO: 143969 - RNA, 24 nt, Artificial Sequence
  Synthetic
cagcacuuugggaggcugaagcag

SEQ ID NO: 143970 - RNA, 18 nt, Artificial Sequence
  Synthetic
cuugggagguugaagcag

SEQ ID NO: 143971 - RNA, 19 nt, Artificial Sequence
  Synthetic
acuugggagguugaagcag

SEQ ID NO: 143972 - RNA, 20 nt, Artificial Sequence
  Synthetic
uacuugggagguugaagcag

SEQ ID NO: 143973 - RNA, 21 nt, Artificial Sequence
  Synthetic
cuacuugggagguugaagcag

SEQ ID NO: 143974 - RNA, 23 nt, Artificial Sequence
  Synthetic
agcuacuugggagguugaagcag

SEQ ID NO: 143975 - RNA, 24 nt, Artificial Sequence
  Synthetic
cagcuacuugggagguugaagcag

SEQ ID NO: 143976 - RNA, 22 nt, Artificial Sequence
  Synthetic
aguacaucucaucuaacagcag

SEQ ID NO: 143977 - RNA, 23 nt, Artificial Sequence
  Synthetic
caguacaucucaucuaacagcag

SEQ ID NO: 143978 - RNA, 24 nt, Artificial Sequence
  Synthetic
acaguacaucucaucuaacagcag

SEQ ID NO: 143979 - RNA, 18 nt, Artificial Sequence
  Synthetic
cauguaucuuuacagcag

SEQ ID NO: 143980 - RNA, 20 nt, Artificial Sequence
  Synthetic
ugcauguaucuuuacagcag

SEQ ID NO: 143981 - RNA, 22 nt, Artificial Sequence
  Synthetic
ugugcauguaucuuuacagcag

SEQ ID NO: 143982 - RNA, 23 nt, Artificial Sequence
  Synthetic
cugugcauguaucuuuacagcag

SEQ ID NO: 143983 - RNA, 24 nt, Artificial Sequence
  Synthetic
ccugugcauguaucuuuacagcag

SEQ ID NO: 143984 - RNA, 19 nt, Artificial Sequence
  Synthetic
ugggauauauacccagcag

SEQ ID NO: 143985 - RNA, 20 nt, Artificial Sequence
  Synthetic
uugggauauauacccagcag

SEQ ID NO: 143986 - RNA, 21 nt, Artificial Sequence
  Synthetic
uuugggauauauacccagcag

SEQ ID NO: 143987 - RNA, 22 nt, Artificial Sequence
  Synthetic
cuuugggauauauacccagcag

SEQ ID NO: 143988 - RNA, 23 nt, Artificial Sequence
  Synthetic
ucuuugggauauauacccagcag

SEQ ID NO: 143989 - RNA, 24 nt, Artificial Sequence
  Synthetic
uucuuugggauauauacccagcag

SEQ ID NO: 143990 - RNA, 21 nt, Artificial Sequence
  Synthetic
cuuuggguauauacccagcag

SEQ ID NO: 143991 - RNA, 22 nt, Artificial Sequence
  Synthetic
ucuuuggguauauacccagcag

SEQ ID NO: 143992 - RNA, 23 nt, Artificial Sequence
  Synthetic
uucuuuggguauauacccagcag

SEQ ID NO: 143993 - RNA, 24 nt, Artificial Sequence
  Synthetic
uuucuuuggguauauacccagcag

SEQ ID NO: 143994 - RNA, 18 nt, Artificial Sequence
  Synthetic
aguucaagacuucagcag

SEQ ID NO: 143995 - RNA, 21 nt, Artificial Sequence
  Synthetic
cacuuugggaggccaaggcag

SEQ ID NO: 143996 - RNA, 22 nt, Artificial Sequence
  Synthetic
acacuuugggaggccaaggcag

SEQ ID NO: 143997 - RNA, 23 nt, Artificial Sequence
  Synthetic
aacacuuugggaggccaaggcag

SEQ ID NO: 143998 - RNA, 24 nt, Artificial Sequence
  Synthetic
caacacuuugggaggccaaggcag

SEQ ID NO: 143999 - RNA, 24 nt, Artificial Sequence
  Synthetic
uaacacuuugggaggccaaggcag

SEQ ID NO: 144000 - RNA, 18 nt, Artificial Sequence
  Synthetic
uuugggaggcuaaggcag

SEQ ID NO: 144001 - RNA, 19 nt, Artificial Sequence
  Synthetic
auuugggaggcuaaggcag

SEQ ID NO: 144002 - RNA, 20 nt, Artificial Sequence
  Synthetic
aauuugggaggcuaaggcag

SEQ ID NO: 144003 - RNA, 21 nt, Artificial Sequence
  Synthetic
caauuugggaggcuaaggcag

SEQ ID NO: 144004 - RNA, 23 nt, Artificial Sequence
  Synthetic
agcaauuugggaggcuaaggcag

SEQ ID NO: 144005 - RNA, 24 nt, Artificial Sequence
  Synthetic
cagcaauuugggaggcuaaggcag

SEQ ID NO: 144006 - RNA, 18 nt, Artificial Sequence
  Synthetic
cucgggagguuaaggcag

SEQ ID NO: 144007 - RNA, 19 nt, Artificial Sequence
  Synthetic
acucgggagguuaaggcag

SEQ ID NO: 144008 - RNA, 20 nt, Artificial Sequence
  Synthetic
uacucgggagguuaaggcag

SEQ ID NO: 144009 - RNA, 21 nt, Artificial Sequence
  Synthetic
cuacucgggagguuaaggcag

SEQ ID NO: 144010 - RNA, 23 nt, Artificial Sequence
  Synthetic
agcuacucgggagguuaaggcag

SEQ ID NO: 144011 - RNA, 24 nt, Artificial Sequence
  Synthetic
cagcuacucgggagguuaaggcag

SEQ ID NO: 144012 - RNA, 18 nt, Artificial Sequence
  Synthetic
cucgggaggcagaggcag

SEQ ID NO: 144013 - RNA, 19 nt, Artificial Sequence
  Synthetic
acucgggaggcagaggcag

SEQ ID NO: 144014 - RNA, 20 nt, Artificial Sequence
  Synthetic
uacucgggaggcagaggcag

SEQ ID NO: 144015 - RNA, 21 nt, Artificial Sequence
  Synthetic
cuacucgggaggcagaggcag

SEQ ID NO: 144016 - RNA, 22 nt, Artificial Sequence
  Synthetic
acuacucgggaggcagaggcag

SEQ ID NO: 144017 - RNA, 23 nt, Artificial Sequence
  Synthetic
aacuacucgggaggcagaggcag

SEQ ID NO: 144018 - RNA, 24 nt, Artificial Sequence
  Synthetic
caacuacucgggaggcagaggcag

SEQ ID NO: 144019 - RNA, 18 nt, Artificial Sequence
  Synthetic
uuugcgaggccgaggcag

SEQ ID NO: 144020 - RNA, 19 nt, Artificial Sequence
  Synthetic
cuuugcgaggccgaggcag

SEQ ID NO: 144021 - RNA, 20 nt, Artificial Sequence
  Synthetic
acuuugcgaggccgaggcag

SEQ ID NO: 144022 - RNA, 21 nt, Artificial Sequence
  Synthetic
cacuuugcgaggccgaggcag

SEQ ID NO: 144023 - RNA, 23 nt, Artificial Sequence
  Synthetic
agcacuuugcgaggccgaggcag

SEQ ID NO: 144024 - RNA, 24 nt, Artificial Sequence
  Synthetic
cagcacuuugcgaggccgaggcag

SEQ ID NO: 144025 - RNA, 18 nt, Artificial Sequence
  Synthetic
uuugggaagcugaggcag

SEQ ID NO: 144026 - RNA, 19 nt, Artificial Sequence
  Synthetic
cuuugggaagcugaggcag

SEQ ID NO: 144027 - RNA, 20 nt, Artificial Sequence
  Synthetic
acuuugggaagcugaggcag

SEQ ID NO: 144028 - RNA, 21 nt, Artificial Sequence
  Synthetic
cacuuugggaagcugaggcag

SEQ ID NO: 144029 - RNA, 23 nt, Artificial Sequence
  Synthetic
agcacuuugggaagcugaggcag

SEQ ID NO: 144030 - RNA, 24 nt, Artificial Sequence
  Synthetic
cagcacuuugggaagcugaggcag

SEQ ID NO: 144031 - RNA, 18 nt, Artificial Sequence
  Synthetic
cucaggacgcugaggcag

SEQ ID NO: 144032 - RNA, 19 nt, Artificial Sequence
  Synthetic
acucaggacgcugaggcag

SEQ ID NO: 144033 - RNA, 20 nt, Artificial Sequence
  Synthetic
uacucaggacgcugaggcag

SEQ ID NO: 144034 - RNA, 21 nt, Artificial Sequence
  Synthetic
cuacucaggacgcugaggcag

SEQ ID NO: 144035 - RNA, 23 nt, Artificial Sequence
  Synthetic
agcuacucaggacgcugaggcag

SEQ ID NO: 144036 - RNA, 24 nt, Artificial Sequence
  Synthetic
cagcuacucaggacgcugaggcag

SEQ ID NO: 144037 - RNA, 18 nt, Artificial Sequence
  Synthetic
cuuagcaggcugaggcag

SEQ ID NO: 144038 - RNA, 19 nt, Artificial Sequence
  Synthetic
acuuagcaggcugaggcag

SEQ ID NO: 144039 - RNA, 20 nt, Artificial Sequence
  Synthetic
uacuuagcaggcugaggcag

SEQ ID NO: 144040 - RNA, 21 nt, Artificial Sequence
  Synthetic
cuacuuagcaggcugaggcag

SEQ ID NO: 144041 - RNA, 23 nt, Artificial Sequence
  Synthetic
agcuacuuagcaggcugaggcag

SEQ ID NO: 144042 - RNA, 24 nt, Artificial Sequence
  Synthetic
cagcuacuuagcaggcugaggcag

SEQ ID NO: 144043 - RNA, 21 nt, Artificial Sequence
  Synthetic
auacucaggaggcugaggcag

SEQ ID NO: 144044 - RNA, 23 nt, Artificial Sequence
  Synthetic
agauacucaggaggcugaggcag

SEQ ID NO: 144045 - RNA, 24 nt, Artificial Sequence
  Synthetic
cagauacucaggaggcugaggcag

SEQ ID NO: 144046 - RNA, 21 nt, Artificial Sequence
  Synthetic
cuacucaggaggcugaggcag

SEQ ID NO: 144047 - RNA, 22 nt, Artificial Sequence
  Synthetic
ucuacucaggaggcugaggcag

SEQ ID NO: 144048 - RNA, 23 nt, Artificial Sequence
  Synthetic
aucuacucaggaggcugaggcag

SEQ ID NO: 144049 - RNA, 24 nt, Artificial Sequence
  Synthetic
caucuacucaggaggcugaggcag

SEQ ID NO: 144050 - RNA, 18 nt, Artificial Sequence
  Synthetic
acucggaggcugaggcag

SEQ ID NO: 144051 - RNA, 19 nt, Artificial Sequence
  Synthetic
uacucggaggcugaggcag

SEQ ID NO: 144052 - RNA, 20 nt, Artificial Sequence
  Synthetic
cuacucggaggcugaggcag

SEQ ID NO: 144053 - RNA, 22 nt, Artificial Sequence
  Synthetic
agcuacucggaggcugaggcag

SEQ ID NO: 144054 - RNA, 23 nt, Artificial Sequence
  Synthetic
cagcuacucggaggcugaggcag

SEQ ID NO: 144055 - RNA, 24 nt, Artificial Sequence
  Synthetic
ccagcuacucggaggcugaggcag

SEQ ID NO: 144056 - RNA, 18 nt, Artificial Sequence
  Synthetic
cuagggaggcugaggcag

SEQ ID NO: 144057 - RNA, 19 nt, Artificial Sequence
  Synthetic
acuagggaggcugaggcag

SEQ ID NO: 144058 - RNA, 20 nt, Artificial Sequence
  Synthetic
uacuagggaggcugaggcag

SEQ ID NO: 144059 - RNA, 21 nt, Artificial Sequence
  Synthetic
cuacuagggaggcugaggcag

SEQ ID NO: 144060 - RNA, 23 nt, Artificial Sequence
  Synthetic
agcuacuagggaggcugaggcag

SEQ ID NO: 144061 - RNA, 24 nt, Artificial Sequence
  Synthetic
cagcuacuagggaggcugaggcag

SEQ ID NO: 144062 - RNA, 18 nt, Artificial Sequence
  Synthetic
accgggaggcugaggcag

SEQ ID NO: 144063 - RNA, 19 nt, Artificial Sequence
  Synthetic
uaccgggaggcugaggcag

SEQ ID NO: 144064 - RNA, 20 nt, Artificial Sequence
  Synthetic
cuaccgggaggcugaggcag

SEQ ID NO: 144065 - RNA, 22 nt, Artificial Sequence
  Synthetic
agcuaccgggaggcugaggcag

SEQ ID NO: 144066 - RNA, 23 nt, Artificial Sequence
  Synthetic
cagcuaccgggaggcugaggcag

SEQ ID NO: 144067 - RNA, 24 nt, Artificial Sequence
  Synthetic
ccagcuaccgggaggcugaggcag

SEQ ID NO: 144068 - RNA, 19 nt, Artificial Sequence
  Synthetic
acucgggaggcugaggcag

SEQ ID NO: 144069 - RNA, 20 nt, Artificial Sequence
  Synthetic
uacucgggaggcugaggcag

SEQ ID NO: 144070 - RNA, 21 nt, Artificial Sequence
  Synthetic
cuacucgggaggcugaggcag

SEQ ID NO: 144071 - RNA, 23 nt, Artificial Sequence
  Synthetic
agcuacucgggaggcugaggcag

SEQ ID NO: 144072 - RNA, 24 nt, Artificial Sequence
  Synthetic
cagcuacucgggaggcugaggcag

SEQ ID NO: 144073 - RNA, 23 nt, Artificial Sequence
  Synthetic
agguacuugggaggcugaggcag

SEQ ID NO: 144074 - RNA, 24 nt, Artificial Sequence
  Synthetic
cagguacuugggaggcugaggcag

SEQ ID NO: 144075 - RNA, 18 nt, Artificial Sequence
  Synthetic
uuugggaggcugaggcag

SEQ ID NO: 144076 - RNA, 19 nt, Artificial Sequence
  Synthetic
auuugggaggcugaggcag

SEQ ID NO: 144077 - RNA, 20 nt, Artificial Sequence
  Synthetic
uauuugggaggcugaggcag

SEQ ID NO: 144078 - RNA, 21 nt, Artificial Sequence
  Synthetic
cuauuugggaggcugaggcag

SEQ ID NO: 144079 - RNA, 23 nt, Artificial Sequence
  Synthetic
agcuauuugggaggcugaggcag

SEQ ID NO: 144080 - RNA, 24 nt, Artificial Sequence
  Synthetic
cagcuauuugggaggcugaggcag

SEQ ID NO: 144081 - RNA, 19 nt, Artificial Sequence
  Synthetic
cuuugggaggcugaggcag

SEQ ID NO: 144082 - RNA, 20 nt, Artificial Sequence
  Synthetic
acuuugggaggcugaggcag

SEQ ID NO: 144083 - RNA, 22 nt, Artificial Sequence
  Synthetic
acacuuugggaggcugaggcag

SEQ ID NO: 144084 - RNA, 23 nt, Artificial Sequence
  Synthetic
aacacuuugggaggcugaggcag

SEQ ID NO: 144085 - RNA, 24 nt, Artificial Sequence
  Synthetic
caacacuuugggaggcugaggcag

SEQ ID NO: 144086 - RNA, 24 nt, Artificial Sequence
  Synthetic
cagcacuuugggaggcugaggcag

SEQ ID NO: 144087 - RNA, 21 nt, Artificial Sequence
  Synthetic
cgcuuugggaggcugaggcag

SEQ ID NO: 144088 - RNA, 23 nt, Artificial Sequence
  Synthetic
agcgcuuugggaggcugaggcag

SEQ ID NO: 144089 - RNA, 24 nt, Artificial Sequence
  Synthetic
cagcgcuuugggaggcugaggcag

SEQ ID NO: 144090 - RNA, 21 nt, Artificial Sequence
  Synthetic
ugcuuugggaggcugaggcag

SEQ ID NO: 144091 - RNA, 23 nt, Artificial Sequence
  Synthetic
ugugcuuugggaggcugaggcag

SEQ ID NO: 144092 - RNA, 24 nt, Artificial Sequence
  Synthetic
cugugcuuugggaggcugaggcag

SEQ ID NO: 144093 - RNA, 18 nt, Artificial Sequence
  Synthetic
cacuggaggcugaggcag

SEQ ID NO: 144094 - RNA, 19 nt, Artificial Sequence
  Synthetic
acacuggaggcugaggcag

SEQ ID NO: 144095 - RNA, 20 nt, Artificial Sequence
  Synthetic
cacacuggaggcugaggcag

SEQ ID NO: 144096 - RNA, 21 nt, Artificial Sequence
  Synthetic
acacacuggaggcugaggcag

SEQ ID NO: 144097 - RNA, 23 nt, Artificial Sequence
  Synthetic
agacacacuggaggcugaggcag

SEQ ID NO: 144098 - RNA, 24 nt, Artificial Sequence
  Synthetic
cagacacacuggaggcugaggcag

SEQ ID NO: 144099 - RNA, 18 nt, Artificial Sequence
  Synthetic
cucuggaggcugaggcag

SEQ ID NO: 144100 - RNA, 20 nt, Artificial Sequence
  Synthetic
ugcucuggaggcugaggcag

SEQ ID NO: 144101 - RNA, 21 nt, Artificial Sequence
  Synthetic
cugcucuggaggcugaggcag

SEQ ID NO: 144102 - RNA, 23 nt, Artificial Sequence
  Synthetic
agcugcucuggaggcugaggcag

SEQ ID NO: 144103 - RNA, 24 nt, Artificial Sequence
  Synthetic
cagcugcucuggaggcugaggcag

SEQ ID NO: 144104 - RNA, 18 nt, Artificial Sequence
  Synthetic
cuccugaggcugaggcag

SEQ ID NO: 144105 - RNA, 19 nt, Artificial Sequence
  Synthetic
acuccugaggcugaggcag

SEQ ID NO: 144106 - RNA, 20 nt, Artificial Sequence
  Synthetic
uacuccugaggcugaggcag

SEQ ID NO: 144107 - RNA, 21 nt, Artificial Sequence
  Synthetic
cuacuccugaggcugaggcag

SEQ ID NO: 144108 - RNA, 23 nt, Artificial Sequence
  Synthetic
agcuacuccugaggcugaggcag

SEQ ID NO: 144109 - RNA, 24 nt, Artificial Sequence
  Synthetic
cagcuacuccugaggcugaggcag

SEQ ID NO: 144110 - RNA, 18 nt, Artificial Sequence
  Synthetic
uuugggaugcugaggcag

SEQ ID NO: 144111 - RNA, 19 nt, Artificial Sequence
  Synthetic
cuuugggaugcugaggcag

SEQ ID NO: 144112 - RNA, 20 nt, Artificial Sequence
  Synthetic
acuuugggaugcugaggcag

SEQ ID NO: 144113 - RNA, 21 nt, Artificial Sequence
  Synthetic
cacuuugggaugcugaggcag

SEQ ID NO: 144114 - RNA, 23 nt, Artificial Sequence
  Synthetic
agcacuuugggaugcugaggcag

SEQ ID NO: 144115 - RNA, 24 nt, Artificial Sequence
  Synthetic
cagcacuuugggaugcugaggcag

SEQ ID NO: 144116 - RNA, 19 nt, Artificial Sequence
  Synthetic
ugcacuccagcuugggcag

SEQ ID NO: 144117 - RNA, 20 nt, Artificial Sequence
  Synthetic
cugcacuccagcuugggcag

SEQ ID NO: 144118 - RNA, 21 nt, Artificial Sequence
  Synthetic
acugcacuccagcuugggcag

SEQ ID NO: 144119 - RNA, 22 nt, Artificial Sequence
  Synthetic
cacugcacuccagcuugggcag

SEQ ID NO: 144120 - RNA, 23 nt, Artificial Sequence
  Synthetic
ccacugcacuccagcuugggcag

SEQ ID NO: 144121 - RNA, 24 nt, Artificial Sequence
  Synthetic
accacugcacuccagcuugggcag

SEQ ID NO: 144122 - RNA, 18 nt, Artificial Sequence
  Synthetic
uccucuccaaaauggcag

SEQ ID NO: 144123 - RNA, 19 nt, Artificial Sequence
  Synthetic
cuccucuccaaaauggcag

SEQ ID NO: 144124 - RNA, 18 nt, Artificial Sequence
  Synthetic
cuugggaggcugaugcag

SEQ ID NO: 144125 - RNA, 19 nt, Artificial Sequence
  Synthetic
acuugggaggcugaugcag

SEQ ID NO: 144126 - RNA, 20 nt, Artificial Sequence
  Synthetic
cacuugggaggcugaugcag

SEQ ID NO: 144127 - RNA, 21 nt, Artificial Sequence
  Synthetic
ccacuugggaggcugaugcag

SEQ ID NO: 144128 - RNA, 23 nt, Artificial Sequence
  Synthetic
agccacuugggaggcugaugcag

SEQ ID NO: 144129 - RNA, 24 nt, Artificial Sequence
  Synthetic
cagccacuugggaggcugaugcag

SEQ ID NO: 144130 - RNA, 18 nt, Artificial Sequence
  Synthetic
cuggcuagccauaugcag

SEQ ID NO: 144131 - RNA, 19 nt, Artificial Sequence
  Synthetic
acuggcuagccauaugcag

SEQ ID NO: 144132 - RNA, 20 nt, Artificial Sequence
  Synthetic
aacuggcuagccauaugcag

SEQ ID NO: 144133 - RNA, 22 nt, Artificial Sequence
  Synthetic
agaacuggcuagccauaugcag

SEQ ID NO: 144134 - RNA, 19 nt, Artificial Sequence
  Synthetic
ugaaaauacaaaaaaucag

SEQ ID NO: 144135 - RNA, 20 nt, Artificial Sequence
  Synthetic
cugaaaauacaaaaaaucag

SEQ ID NO: 144136 - RNA, 21 nt, Artificial Sequence
  Synthetic
acugaaaauacaaaaaaucag

SEQ ID NO: 144137 - RNA, 22 nt, Artificial Sequence
  Synthetic
uacugaaaauacaaaaaaucag

SEQ ID NO: 144138 - RNA, 23 nt, Artificial Sequence
  Synthetic
cuacugaaaauacaaaaaaucag

SEQ ID NO: 144139 - RNA, 24 nt, Artificial Sequence
  Synthetic
ucuacugaaaauacaaaaaaucag

SEQ ID NO: 144140 - RNA, 19 nt, Artificial Sequence
  Synthetic
ugaaagaauucagaaucag

SEQ ID NO: 144141 - RNA, 20 nt, Artificial Sequence
  Synthetic
uugaaagaauucagaaucag

SEQ ID NO: 144142 - RNA, 18 nt, Artificial Sequence
  Synthetic
aagugauuagagaaucag

SEQ ID NO: 144143 - RNA, 19 nt, Artificial Sequence
  Synthetic
aaagugauuagagaaucag

SEQ ID NO: 144144 - RNA, 20 nt, Artificial Sequence
  Synthetic
aaaagugauuagagaaucag

SEQ ID NO: 144145 - RNA, 18 nt, Artificial Sequence
  Synthetic
uuuacccagauccaucag

SEQ ID NO: 144146 - RNA, 20 nt, Artificial Sequence
  Synthetic
aguuuacccagauccaucag

SEQ ID NO: 144147 - RNA, 21 nt, Artificial Sequence
  Synthetic
caguuuacccagauccaucag

SEQ ID NO: 144148 - RNA, 22 nt, Artificial Sequence
  Synthetic
ucaguuuacccagauccaucag

SEQ ID NO: 144149 - RNA, 23 nt, Artificial Sequence
  Synthetic
uucaguuuacccagauccaucag

SEQ ID NO: 144150 - RNA, 24 nt, Artificial Sequence
  Synthetic
uuucaguuuacccagauccaucag

SEQ ID NO: 144151 - RNA, 18 nt, Artificial Sequence
  Synthetic
aaaaacagaguauaucag

SEQ ID NO: 144152 - RNA, 19 nt, Artificial Sequence
  Synthetic
aaaaaacagaguauaucag

SEQ ID NO: 144153 - RNA, 20 nt, Artificial Sequence
  Synthetic
aaaaaaacagaguauaucag

SEQ ID NO: 144154 - RNA, 18 nt, Artificial Sequence
  Synthetic
aaaaaaaaauuguaucag

SEQ ID NO: 144155 - RNA, 19 nt, Artificial Sequence
  Synthetic
aaaaaaaaaauuguaucag

SEQ ID NO: 144156 - RNA, 20 nt, Artificial Sequence
  Synthetic
aaaaaaaaaaauuguaucag

SEQ ID NO: 144157 - RNA, 21 nt, Artificial Sequence
  Synthetic
aaaaaaaaaaaauuguaucag

SEQ ID NO: 144158 - RNA, 22 nt, Artificial Sequence
  Synthetic
aaaaaaaaaaaaauuguaucag

SEQ ID NO: 144159 - RNA, 23 nt, Artificial Sequence
  Synthetic
aaaaaaaaaaaaaauuguaucag

SEQ ID NO: 144160 - RNA, 24 nt, Artificial Sequence
  Synthetic
uaaaaaaaaaaaaaauuguaucag

SEQ ID NO: 144161 - RNA, 18 nt, Artificial Sequence
  Synthetic
agaaauggagaaagucag

SEQ ID NO: 144162 - RNA, 20 nt, Artificial Sequence
  Synthetic
agagaaauggagaaagucag

SEQ ID NO: 144163 - RNA, 21 nt, Artificial Sequence
  Synthetic
uagagaaauggagaaagucag

SEQ ID NO: 144164 - RNA, 22 nt, Artificial Sequence
  Synthetic
uuagagaaauggagaaagucag

SEQ ID NO: 144165 - RNA, 24 nt, Artificial Sequence
  Synthetic
uguuagagaaauggagaaagucag

SEQ ID NO: 144166 - RNA, 18 nt, Artificial Sequence
  Synthetic
aaagcaugugucugucag

SEQ ID NO: 144167 - RNA, 19 nt, Artificial Sequence
  Synthetic
caaagcaugugucugucag

SEQ ID NO: 144168 - RNA, 20 nt, Artificial Sequence
  Synthetic
acaaagcaugugucugucag

SEQ ID NO: 144169 - RNA, 18 nt, Artificial Sequence
  Synthetic
cugagaucaaggugucag

SEQ ID NO: 144170 - RNA, 19 nt, Artificial Sequence
  Synthetic
ucugagaucaaggugucag

SEQ ID NO: 144171 - RNA, 21 nt, Artificial Sequence
  Synthetic
agucugagaucaaggugucag

SEQ ID NO: 144172 - RNA, 22 nt, Artificial Sequence
  Synthetic
aagucugagaucaaggugucag

SEQ ID NO: 144173 - RNA, 24 nt, Artificial Sequence
  Synthetic
agaagucugagaucaaggugucag

SEQ ID NO: 144174 - RNA, 18 nt, Artificial Sequence
  Synthetic
auaauagcccuuugucag

SEQ ID NO: 144175 - RNA, 21 nt, Artificial Sequence
  Synthetic
uggauaauagcccuuugucag

SEQ ID NO: 144176 - RNA, 22 nt, Artificial Sequence
  Synthetic
cuggauaauagcccuuugucag

SEQ ID NO: 144177 - RNA, 23 nt, Artificial Sequence
  Synthetic
ucuggauaauagcccuuugucag

SEQ ID NO: 144178 - RNA, 24 nt, Artificial Sequence
  Synthetic
uucuggauaauagcccuuugucag

SEQ ID NO: 144179 - RNA, 18 nt, Artificial Sequence
  Synthetic
auauuagcccuuugucag

SEQ ID NO: 144180 - RNA, 20 nt, Artificial Sequence
  Synthetic
cgauauuagcccuuugucag

SEQ ID NO: 144181 - RNA, 21 nt, Artificial Sequence
  Synthetic
ucgauauuagcccuuugucag

SEQ ID NO: 144182 - RNA, 22 nt, Artificial Sequence
  Synthetic
cucgauauuagcccuuugucag

SEQ ID NO: 144183 - RNA, 23 nt, Artificial Sequence
  Synthetic
ucucgauauuagcccuuugucag

SEQ ID NO: 144184 - RNA, 24 nt, Artificial Sequence
  Synthetic
uucucgauauuagcccuuugucag

SEQ ID NO: 144185 - RNA, 21 nt, Artificial Sequence
  Synthetic
uggauauuagcccuuugucag

SEQ ID NO: 144186 - RNA, 22 nt, Artificial Sequence
  Synthetic
cuggauauuagcccuuugucag

SEQ ID NO: 144187 - RNA, 23 nt, Artificial Sequence
  Synthetic
ucuggauauuagcccuuugucag

SEQ ID NO: 144188 - RNA, 24 nt, Artificial Sequence
  Synthetic
uucuggauauuagcccuuugucag

SEQ ID NO: 144189 - RNA, 18 nt, Artificial Sequence
  Synthetic
aaaaggagaaaaauucag

SEQ ID NO: 144190 - RNA, 20 nt, Artificial Sequence
  Synthetic
agaaaaggagaaaaauucag

SEQ ID NO: 144191 - RNA, 21 nt, Artificial Sequence
  Synthetic
aagaaaaggagaaaaauucag

SEQ ID NO: 144192 - RNA, 22 nt, Artificial Sequence
  Synthetic
aaagaaaaggagaaaaauucag

SEQ ID NO: 144193 - RNA, 23 nt, Artificial Sequence
  Synthetic
aaaagaaaaggagaaaaauucag

SEQ ID NO: 144194 - RNA, 18 nt, Artificial Sequence
  Synthetic
uuguugcuaauauuucag

SEQ ID NO: 144195 - RNA, 19 nt, Artificial Sequence
  Synthetic
auuguugcuaauauuucag

SEQ ID NO: 144196 - RNA, 20 nt, Artificial Sequence
  Synthetic
uauuguugcuaauauuucag

SEQ ID NO: 144197 - RNA, 18 nt, Artificial Sequence
  Synthetic
cucauuaaaaauuuucag

SEQ ID NO: 144198 - RNA, 19 nt, Artificial Sequence
  Synthetic
acucauuaaaaauuuucag

SEQ ID NO: 144199 - RNA, 20 nt, Artificial Sequence
  Synthetic
aacucauuaaaaauuuucag

SEQ ID NO: 144200 - RNA, 18 nt, Artificial Sequence
  Synthetic
aauucuaacaguuuucag

SEQ ID NO: 144201 - RNA, 20 nt, Artificial Sequence
  Synthetic
ugaauucuaacaguuuucag

SEQ ID NO: 144202 - RNA, 18 nt, Artificial Sequence
  Synthetic
uagauucaaauuuuucag

SEQ ID NO: 144203 - RNA, 19 nt, Artificial Sequence
  Synthetic
auagauucaaauuuuucag

SEQ ID NO: 144204 - RNA, 20 nt, Artificial Sequence
  Synthetic
aauagauucaaauuuuucag

SEQ ID NO: 144205 - RNA, 21 nt, Artificial Sequence
  Synthetic
uaauagauucaaauuuuucag

SEQ ID NO: 144206 - RNA, 22 nt, Artificial Sequence
  Synthetic
uuaauagauucaaauuuuucag

SEQ ID NO: 144207 - RNA, 23 nt, Artificial Sequence
  Synthetic
cuuaauagauucaaauuuuucag

SEQ ID NO: 144208 - RNA, 24 nt, Artificial Sequence
  Synthetic
ucuuaauagauucaaauuuuucag

SEQ ID NO: 144209 - RNA, 18 nt, Artificial Sequence
  Synthetic
aaaauacacaaaaaagag

SEQ ID NO: 144210 - RNA, 19 nt, Artificial Sequence
  Synthetic
caaaauacacaaaaaagag

SEQ ID NO: 144211 - RNA, 20 nt, Artificial Sequence
  Synthetic
acaaaauacacaaaaaagag

SEQ ID NO: 144212 - RNA, 18 nt, Artificial Sequence
  Synthetic
cuuaaaagggaaaaagag

SEQ ID NO: 144213 - RNA, 19 nt, Artificial Sequence
  Synthetic
acuuaaaagggaaaaagag

SEQ ID NO: 144214 - RNA, 20 nt, Artificial Sequence
  Synthetic
uacuuaaaagggaaaaagag

SEQ ID NO: 144215 - RNA, 18 nt, Artificial Sequence
  Synthetic
uggcuguuauaaaaagag

SEQ ID NO: 144216 - RNA, 19 nt, Artificial Sequence
  Synthetic
auggcuguuauaaaaagag

SEQ ID NO: 144217 - RNA, 20 nt, Artificial Sequence
  Synthetic
aauggcuguuauaaaaagag

SEQ ID NO: 144218 - RNA, 22 nt, Artificial Sequence
  Synthetic
agaauggcuguuauaaaaagag

SEQ ID NO: 144219 - RNA, 23 nt, Artificial Sequence
  Synthetic
uagaauggcuguuauaaaaagag

SEQ ID NO: 144220 - RNA, 24 nt, Artificial Sequence
  Synthetic
uuagaauggcuguuauaaaaagag

SEQ ID NO: 144221 - RNA, 18 nt, Artificial Sequence
  Synthetic
acauauggacacaaagag

SEQ ID NO: 144222 - RNA, 19 nt, Artificial Sequence
  Synthetic
aacauauggacacaaagag

SEQ ID NO: 144223 - RNA, 21 nt, Artificial Sequence
  Synthetic
agaacauauggacacaaagag

SEQ ID NO: 144224 - RNA, 23 nt, Artificial Sequence
  Synthetic
ugagaacauauggacacaaagag

SEQ ID NO: 144225 - RNA, 24 nt, Artificial Sequence
  Synthetic
augagaacauauggacacaaagag

SEQ ID NO: 144226 - RNA, 20 nt, Artificial Sequence
  Synthetic
agguaagaaaaaagaaagag

SEQ ID NO: 144227 - RNA, 21 nt, Artificial Sequence
  Synthetic
aagguaagaaaaaagaaagag

SEQ ID NO: 144228 - RNA, 23 nt, Artificial Sequence
  Synthetic
agaagguaagaaaaaagaaagag

SEQ ID NO: 144229 - RNA, 24 nt, Artificial Sequence
  Synthetic
aagaagguaagaaaaaagaaagag

SEQ ID NO: 144230 - RNA, 21 nt, Artificial Sequence
  Synthetic
agggaagagggaaggaaagag

SEQ ID NO: 144231 - RNA, 20 nt, Artificial Sequence
  Synthetic
agguaacacugaugcaagag

SEQ ID NO: 144232 - RNA, 21 nt, Artificial Sequence
  Synthetic
cagguaacacugaugcaagag

SEQ ID NO: 144233 - RNA, 22 nt, Artificial Sequence
  Synthetic
ccagguaacacugaugcaagag

SEQ ID NO: 144234 - RNA, 23 nt, Artificial Sequence
  Synthetic
uccagguaacacugaugcaagag

SEQ ID NO: 144235 - RNA, 24 nt, Artificial Sequence
  Synthetic
auccagguaacacugaugcaagag

SEQ ID NO: 144236 - RNA, 18 nt, Artificial Sequence
  Synthetic
auaagggaaagagaagag

SEQ ID NO: 144237 - RNA, 19 nt, Artificial Sequence
  Synthetic
aauaagggaaagagaagag

SEQ ID NO: 144238 - RNA, 20 nt, Artificial Sequence
  Synthetic
uaauaagggaaagagaagag

SEQ ID NO: 144239 - RNA, 18 nt, Artificial Sequence
  Synthetic
aggcaguggggagaagag

SEQ ID NO: 144240 - RNA, 19 nt, Artificial Sequence
  Synthetic
aaggcaguggggagaagag

SEQ ID NO: 144241 - RNA, 18 nt, Artificial Sequence
  Synthetic
aaaaugaaacccacagag

SEQ ID NO: 144242 - RNA, 19 nt, Artificial Sequence
  Synthetic
aaaaaugaaacccacagag

SEQ ID NO: 144243 - RNA, 20 nt, Artificial Sequence
  Synthetic
uaaaaaugaaacccacagag

SEQ ID NO: 144244 - RNA, 22 nt, Artificial Sequence
  Synthetic
aguaaaaaugaaacccacagag

SEQ ID NO: 144245 - RNA, 24 nt, Artificial Sequence
  Synthetic
agaguaaaaaugaaacccacagag

SEQ ID NO: 144246 - RNA, 18 nt, Artificial Sequence
  Synthetic
acuucugaaaaggcagag

SEQ ID NO: 144247 - RNA, 19 nt, Artificial Sequence
  Synthetic
aacuucugaaaaggcagag

SEQ ID NO: 144248 - RNA, 20 nt, Artificial Sequence
  Synthetic
aaacuucugaaaaggcagag

SEQ ID NO: 144249 - RNA, 19 nt, Artificial Sequence
  Synthetic
aggucuccuuggugcagag

SEQ ID NO: 144250 - RNA, 20 nt, Artificial Sequence
  Synthetic
uaggucuccuuggugcagag

SEQ ID NO: 144251 - RNA, 21 nt, Artificial Sequence
  Synthetic
uuaggucuccuuggugcagag

SEQ ID NO: 144252 - RNA, 22 nt, Artificial Sequence
  Synthetic
auuaggucuccuuggugcagag

SEQ ID NO: 144253 - RNA, 23 nt, Artificial Sequence
  Synthetic
uauuaggucuccuuggugcagag

SEQ ID NO: 144254 - RNA, 24 nt, Artificial Sequence
  Synthetic
cuauuaggucuccuuggugcagag

SEQ ID NO: 144255 - RNA, 18 nt, Artificial Sequence
  Synthetic
aauucaucaagaucagag

SEQ ID NO: 144256 - RNA, 20 nt, Artificial Sequence
  Synthetic
agaauucaucaagaucagag

SEQ ID NO: 144257 - RNA, 18 nt, Artificial Sequence
  Synthetic
aauuaauuaucuucagag

SEQ ID NO: 144258 - RNA, 19 nt, Artificial Sequence
  Synthetic
aaauuaauuaucuucagag

SEQ ID NO: 144259 - RNA, 20 nt, Artificial Sequence
  Synthetic
uaaauuaauuaucuucagag

SEQ ID NO: 144260 - RNA, 18 nt, Artificial Sequence
  Synthetic
aaagaacauauuucagag

SEQ ID NO: 144261 - RNA, 19 nt, Artificial Sequence
  Synthetic
aaaagaacauauuucagag

SEQ ID NO: 144262 - RNA, 18 nt, Artificial Sequence
  Synthetic
auaaagaagaaaagagag

SEQ ID NO: 144263 - RNA, 19 nt, Artificial Sequence
  Synthetic
aauaaagaagaaaagagag

SEQ ID NO: 144264 - RNA, 20 nt, Artificial Sequence
  Synthetic
uaauaaagaagaaaagagag

SEQ ID NO: 144265 - RNA, 18 nt, Artificial Sequence
  Synthetic
agaggcauacacagagag

SEQ ID NO: 144266 - RNA, 19 nt, Artificial Sequence
  Synthetic
aagaggcauacacagagag

SEQ ID NO: 144267 - RNA, 20 nt, Artificial Sequence
  Synthetic
aaagaggcauacacagagag

SEQ ID NO: 144268 - RNA, 18 nt, Artificial Sequence
  Synthetic
acucguagaaccagagag

SEQ ID NO: 144269 - RNA, 19 nt, Artificial Sequence
  Synthetic
aacucguagaaccagagag

SEQ ID NO: 144270 - RNA, 20 nt, Artificial Sequence
  Synthetic
aaacucguagaaccagagag

SEQ ID NO: 144271 - RNA, 21 nt, Artificial Sequence
  Synthetic
caaacucguagaaccagagag

SEQ ID NO: 144272 - RNA, 22 nt, Artificial Sequence
  Synthetic
ucaaacucguagaaccagagag

SEQ ID NO: 144273 - RNA, 24 nt, Artificial Sequence
  Synthetic
agucaaacucguagaaccagagag

SEQ ID NO: 144274 - RNA, 18 nt, Artificial Sequence
  Synthetic
aauugguacugcagagag

SEQ ID NO: 144275 - RNA, 19 nt, Artificial Sequence
  Synthetic
aaauugguacugcagagag

SEQ ID NO: 144276 - RNA, 20 nt, Artificial Sequence
  Synthetic
uaaauugguacugcagagag

SEQ ID NO: 144277 - RNA, 22 nt, Artificial Sequence
  Synthetic
aguaaauugguacugcagagag

SEQ ID NO: 144278 - RNA, 23 nt, Artificial Sequence
  Synthetic
caguaaauugguacugcagagag

SEQ ID NO: 144279 - RNA, 24 nt, Artificial Sequence
  Synthetic
acaguaaauugguacugcagagag

SEQ ID NO: 144280 - RNA, 19 nt, Artificial Sequence
  Synthetic
agauaaaaaugucagagag

SEQ ID NO: 144281 - RNA, 20 nt, Artificial Sequence
  Synthetic
aagauaaaaaugucagagag

SEQ ID NO: 144282 - RNA, 18 nt, Artificial Sequence
  Synthetic
agagagagacagagagag

SEQ ID NO: 144283 - RNA, 20 nt, Artificial Sequence
  Synthetic
agagagagagacagagagag

SEQ ID NO: 144284 - RNA, 24 nt, Artificial Sequence
  Synthetic
agggagagagagagacagagagag

SEQ ID NO: 144285 - RNA, 21 nt, Artificial Sequence
  Synthetic
aggggaaagagagagagagag

SEQ ID NO: 144286 - RNA, 22 nt, Artificial Sequence
  Synthetic
caggggaaagagagagagagag

SEQ ID NO: 144287 - RNA, 23 nt, Artificial Sequence
  Synthetic
acaggggaaagagagagagagag

SEQ ID NO: 144288 - RNA, 24 nt, Artificial Sequence
  Synthetic
aacaggggaaagagagagagagag

SEQ ID NO: 144289 - RNA, 18 nt, Artificial Sequence
  Synthetic
agagagagagagagagag

SEQ ID NO: 144290 - RNA, 20 nt, Artificial Sequence
  Synthetic
agagagagagagagagagag

SEQ ID NO: 144291 - RNA, 24 nt, Artificial Sequence
  Synthetic
agggagagagagagagagagagag

SEQ ID NO: 144292 - RNA, 19 nt, Artificial Sequence
  Synthetic
agcaggauugaggagagag

SEQ ID NO: 144293 - RNA, 20 nt, Artificial Sequence
  Synthetic
cagcaggauugaggagagag

SEQ ID NO: 144294 - RNA, 18 nt, Artificial Sequence
  Synthetic
ugggagugagggagagag

SEQ ID NO: 144295 - RNA, 19 nt, Artificial Sequence
  Synthetic
cugggagugagggagagag

SEQ ID NO: 144296 - RNA, 20 nt, Artificial Sequence
  Synthetic
ucugggagugagggagagag

SEQ ID NO: 144297 - RNA, 18 nt, Artificial Sequence
  Synthetic
uccucugagacuagagag

SEQ ID NO: 144298 - RNA, 19 nt, Artificial Sequence
  Synthetic
uuccucugagacuagagag

SEQ ID NO: 144299 - RNA, 20 nt, Artificial Sequence
  Synthetic
cuuccucugagacuagagag

SEQ ID NO: 144300 - RNA, 18 nt, Artificial Sequence
  Synthetic
acucauugaaguagagag

SEQ ID NO: 144301 - RNA, 19 nt, Artificial Sequence
  Synthetic
aacucauugaaguagagag

SEQ ID NO: 144302 - RNA, 20 nt, Artificial Sequence
  Synthetic
aaacucauugaaguagagag

SEQ ID NO: 144303 - RNA, 21 nt, Artificial Sequence
  Synthetic
caaacucauugaaguagagag

SEQ ID NO: 144304 - RNA, 22 nt, Artificial Sequence
  Synthetic
ucaaacucauugaaguagagag

SEQ ID NO: 144305 - RNA, 24 nt, Artificial Sequence
  Synthetic
agucaaacucauugaaguagagag

SEQ ID NO: 144306 - RNA, 18 nt, Artificial Sequence
  Synthetic
ccuuguguuuuuauagag

SEQ ID NO: 144307 - RNA, 19 nt, Artificial Sequence
  Synthetic
accuuguguuuuuauagag

SEQ ID NO: 144308 - RNA, 20 nt, Artificial Sequence
  Synthetic
aaccuuguguuuuuauagag

SEQ ID NO: 144309 - RNA, 18 nt, Artificial Sequence
  Synthetic
augaggcaauagcuagag

SEQ ID NO: 144310 - RNA, 19 nt, Artificial Sequence
  Synthetic
aaugaggcaauagcuagag

SEQ ID NO: 144311 - RNA, 20 nt, Artificial Sequence
  Synthetic
aaaugaggcaauagcuagag

SEQ ID NO: 144312 - RNA, 22 nt, Artificial Sequence
  Synthetic
agaaaugaggcaauagcuagag

SEQ ID NO: 144313 - RNA, 24 nt, Artificial Sequence
  Synthetic
ugagaaaugaggcaauagcuagag

SEQ ID NO: 144314 - RNA, 19 nt, Artificial Sequence
  Synthetic
ugaugaaaacauucuagag

SEQ ID NO: 144315 - RNA, 20 nt, Artificial Sequence
  Synthetic
augaugaaaacauucuagag

SEQ ID NO: 144316 - RNA, 24 nt, Artificial Sequence
  Synthetic
ugggaugaugaaaacauucuagag

SEQ ID NO: 144317 - RNA, 18 nt, Artificial Sequence
  Synthetic
uuauucuuuaugguagag

SEQ ID NO: 144318 - RNA, 19 nt, Artificial Sequence
  Synthetic
auuauucuuuaugguagag

SEQ ID NO: 144319 - RNA, 20 nt, Artificial Sequence
  Synthetic
uauuauucuuuaugguagag

SEQ ID NO: 144320 - RNA, 18 nt, Artificial Sequence
  Synthetic
auucauagagauguagag

SEQ ID NO: 144321 - RNA, 19 nt, Artificial Sequence
  Synthetic
aauucauagagauguagag

SEQ ID NO: 144322 - RNA, 18 nt, Artificial Sequence
  Synthetic
uuuuuguuuucuguagag

SEQ ID NO: 144323 - RNA, 19 nt, Artificial Sequence
  Synthetic
auuuuuguuuucuguagag

SEQ ID NO: 144324 - RNA, 20 nt, Artificial Sequence
  Synthetic
aauuuuuguuuucuguagag

SEQ ID NO: 144325 - RNA, 21 nt, Artificial Sequence
  Synthetic
aaauuuuuguuuucuguagag

SEQ ID NO: 144326 - RNA, 22 nt, Artificial Sequence
  Synthetic
aaaauuuuuguuuucuguagag

SEQ ID NO: 144327 - RNA, 23 nt, Artificial Sequence
  Synthetic
aaaaauuuuuguuuucuguagag

SEQ ID NO: 144328 - RNA, 24 nt, Artificial Sequence
  Synthetic
uaaaaauuuuuguuuucuguagag

SEQ ID NO: 144329 - RNA, 19 nt, Artificial Sequence
  Synthetic
ugauggcauaacuuuagag

SEQ ID NO: 144330 - RNA, 20 nt, Artificial Sequence
  Synthetic
uugauggcauaacuuuagag

SEQ ID NO: 144331 - RNA, 21 nt, Artificial Sequence
  Synthetic
cuugauggcauaacuuuagag

SEQ ID NO: 144332 - RNA, 22 nt, Artificial Sequence
  Synthetic
acuugauggcauaacuuuagag

SEQ ID NO: 144333 - RNA, 23 nt, Artificial Sequence
  Synthetic
aacuugauggcauaacuuuagag

SEQ ID NO: 144334 - RNA, 24 nt, Artificial Sequence
  Synthetic
caacuugauggcauaacuuuagag

SEQ ID NO: 144335 - RNA, 18 nt, Artificial Sequence
  Synthetic
agaaccuuaauuuuagag

SEQ ID NO: 144336 - RNA, 20 nt, Artificial Sequence
  Synthetic
agagaaccuuaauuuuagag

SEQ ID NO: 144337 - RNA, 23 nt, Artificial Sequence
  Synthetic
aggaacucugguuacuuuuagag

SEQ ID NO: 144338 - RNA, 24 nt, Artificial Sequence
  Synthetic
aaggaacucugguuacuuuuagag

SEQ ID NO: 144339 - RNA, 21 nt, Artificial Sequence
  Synthetic
ccagcacuuugggaggccgag

SEQ ID NO: 144340 - RNA, 22 nt, Artificial Sequence
  Synthetic
cccagcacuuugggaggccgag

SEQ ID NO: 144341 - RNA, 23 nt, Artificial Sequence
  Synthetic
ccccagcacuuugggaggccgag

SEQ ID NO: 144342 - RNA, 24 nt, Artificial Sequence
  Synthetic
accccagcacuuugggaggccgag

SEQ ID NO: 144343 - RNA, 18 nt, Artificial Sequence
  Synthetic
acacuuuggggggccgag

SEQ ID NO: 144344 - RNA, 19 nt, Artificial Sequence
  Synthetic
aacacuuuggggggccgag

SEQ ID NO: 144345 - RNA, 20 nt, Artificial Sequence
  Synthetic
caacacuuuggggggccgag

SEQ ID NO: 144346 - RNA, 21 nt, Artificial Sequence
  Synthetic
ccaacacuuuggggggccgag

SEQ ID NO: 144347 - RNA, 22 nt, Artificial Sequence
  Synthetic
cccaacacuuuggggggccgag

SEQ ID NO: 144348 - RNA, 23 nt, Artificial Sequence
  Synthetic
ucccaacacuuuggggggccgag

SEQ ID NO: 144349 - RNA, 24 nt, Artificial Sequence
  Synthetic
aucccaacacuuuggggggccgag

SEQ ID NO: 144350 - RNA, 18 nt, Artificial Sequence
  Synthetic
uggcaggcuacaaaggag

SEQ ID NO: 144351 - RNA, 19 nt, Artificial Sequence
  Synthetic
auggcaggcuacaaaggag

SEQ ID NO: 144352 - RNA, 20 nt, Artificial Sequence
  Synthetic
aauggcaggcuacaaaggag

SEQ ID NO: 144353 - RNA, 18 nt, Artificial Sequence
  Synthetic
uuuggggaaagaaaggag

SEQ ID NO: 144354 - RNA, 19 nt, Artificial Sequence
  Synthetic
auuuggggaaagaaaggag

SEQ ID NO: 144355 - RNA, 20 nt, Artificial Sequence
  Synthetic
cauuuggggaaagaaaggag

SEQ ID NO: 144356 - RNA, 18 nt, Artificial Sequence
  Synthetic
cauggcagcaggaaggag

SEQ ID NO: 144357 - RNA, 19 nt, Artificial Sequence
  Synthetic
acauggcagcaggaaggag

SEQ ID NO: 144358 - RNA, 20 nt, Artificial Sequence
  Synthetic
cacauggcagcaggaaggag

SEQ ID NO: 144359 - RNA, 21 nt, Artificial Sequence
  Synthetic
ucacauggcagcaggaaggag

SEQ ID NO: 144360 - RNA, 22 nt, Artificial Sequence
  Synthetic
uucacauggcagcaggaaggag

SEQ ID NO: 144361 - RNA, 23 nt, Artificial Sequence
  Synthetic
cuucacauggcagcaggaaggag

SEQ ID NO: 144362 - RNA, 24 nt, Artificial Sequence
  Synthetic
ucuucacauggcagcaggaaggag

SEQ ID NO: 144363 - RNA, 21 nt, Artificial Sequence
  Synthetic
aaagaacuauuagauaaggag

SEQ ID NO: 144364 - RNA, 22 nt, Artificial Sequence
  Synthetic
aaaagaacuauuagauaaggag

SEQ ID NO: 144365 - RNA, 23 nt, Artificial Sequence
  Synthetic
uaaaagaacuauuagauaaggag

SEQ ID NO: 144366 - RNA, 24 nt, Artificial Sequence
  Synthetic
auaaaagaacuauuagauaaggag

SEQ ID NO: 144367 - RNA, 18 nt, Artificial Sequence
  Synthetic
uuugggaggggccaggag

SEQ ID NO: 144368 - RNA, 19 nt, Artificial Sequence
  Synthetic
auuugggaggggccaggag

SEQ ID NO: 144369 - RNA, 21 nt, Artificial Sequence
  Synthetic
agauuugggaggggccaggag

SEQ ID NO: 144370 - RNA, 23 nt, Artificial Sequence
  Synthetic
ugagauuugggaggggccaggag

SEQ ID NO: 144371 - RNA, 24 nt, Artificial Sequence
  Synthetic
augagauuugggaggggccaggag

SEQ ID NO: 144372 - RNA, 18 nt, Artificial Sequence
  Synthetic
agacugugguagcaggag

SEQ ID NO: 144373 - RNA, 19 nt, Artificial Sequence
  Synthetic
cagacugugguagcaggag

SEQ ID NO: 144374 - RNA, 20 nt, Artificial Sequence
  Synthetic
ucagacugugguagcaggag

SEQ ID NO: 144375 - RNA, 18 nt, Artificial Sequence
  Synthetic
cagaagaagaaagaggag

SEQ ID NO: 144376 - RNA, 20 nt, Artificial Sequence
  Synthetic
ugcagaagaagaaagaggag

SEQ ID NO: 144377 - RNA, 19 nt, Artificial Sequence
  Synthetic
agaauugaagacagaggag

SEQ ID NO: 144378 - RNA, 20 nt, Artificial Sequence
  Synthetic
aagaauugaagacagaggag

SEQ ID NO: 144379 - RNA, 18 nt, Artificial Sequence
  Synthetic
auugaggagagagaggag

SEQ ID NO: 144380 - RNA, 18 nt, Artificial Sequence
  Synthetic
uagaaucugggagaggag

SEQ ID NO: 144381 - RNA, 19 nt, Artificial Sequence
  Synthetic
cuagaaucugggagaggag

SEQ ID NO: 144382 - RNA, 20 nt, Artificial Sequence
  Synthetic
ccuagaaucugggagaggag

SEQ ID NO: 144383 - RNA, 18 nt, Artificial Sequence
  Synthetic
uuguggguggaggaggag

SEQ ID NO: 144384 - RNA, 20 nt, Artificial Sequence
  Synthetic
uguuguggguggaggaggag

SEQ ID NO: 144385 - RNA, 19 nt, Artificial Sequence
  Synthetic
cggaggaaaggaaagggag

SEQ ID NO: 144386 - RNA, 19 nt, Artificial Sequence
  Synthetic
agagacagaacgaagggag

SEQ ID NO: 144387 - RNA, 20 nt, Artificial Sequence
  Synthetic
aagagacagaacgaagggag

SEQ ID NO: 144388 - RNA, 19 nt, Artificial Sequence
  Synthetic
uguguguguguggcgggag

SEQ ID NO: 144389 - RNA, 22 nt, Artificial Sequence
  Synthetic
ugguguguguguguggcgggag

SEQ ID NO: 144390 - RNA, 23 nt, Artificial Sequence
  Synthetic
augguguguguguguggcgggag

SEQ ID NO: 144391 - RNA, 24 nt, Artificial Sequence
  Synthetic
caugguguguguguguggcgggag

SEQ ID NO: 144392 - RNA, 18 nt, Artificial Sequence
  Synthetic
ccacagaccuggggggag

SEQ ID NO: 144393 - RNA, 19 nt, Artificial Sequence
  Synthetic
uccacagaccuggggggag

SEQ ID NO: 144394 - RNA, 20 nt, Artificial Sequence
  Synthetic
uuccacagaccuggggggag

SEQ ID NO: 144395 - RNA, 18 nt, Artificial Sequence
  Synthetic
cuugugcuuuguggggag

SEQ ID NO: 144396 - RNA, 20 nt, Artificial Sequence
  Synthetic
ugcuugugcuuuguggggag

SEQ ID NO: 144397 - RNA, 18 nt, Artificial Sequence
  Synthetic
uggauauacaccugggag

SEQ ID NO: 144398 - RNA, 19 nt, Artificial Sequence
  Synthetic
uuggauauacaccugggag

SEQ ID NO: 144399 - RNA, 21 nt, Artificial Sequence
  Synthetic
uguuggauauacaccugggag

SEQ ID NO: 144400 - RNA, 22 nt, Artificial Sequence
  Synthetic
cuguuggauauacaccugggag

SEQ ID NO: 144401 - RNA, 23 nt, Artificial Sequence
  Synthetic
ucuguuggauauacaccugggag

SEQ ID NO: 144402 - RNA, 24 nt, Artificial Sequence
  Synthetic
uucuguuggauauacaccugggag

SEQ ID NO: 144403 - RNA, 18 nt, Artificial Sequence
  Synthetic
cauuugaauuugugggag

SEQ ID NO: 144404 - RNA, 19 nt, Artificial Sequence
  Synthetic
acauuugaauuugugggag

SEQ ID NO: 144405 - RNA, 20 nt, Artificial Sequence
  Synthetic
aacauuugaauuugugggag

SEQ ID NO: 144406 - RNA, 18 nt, Artificial Sequence
  Synthetic
aagugauagaauugggag

SEQ ID NO: 144407 - RNA, 19 nt, Artificial Sequence
  Synthetic
aaagugauagaauugggag

SEQ ID NO: 144408 - RNA, 20 nt, Artificial Sequence
  Synthetic
caaagugauagaauugggag

SEQ ID NO: 144409 - RNA, 19 nt, Artificial Sequence
  Synthetic
ugcagcaacuuugauggag

SEQ ID NO: 144410 - RNA, 20 nt, Artificial Sequence
  Synthetic
uugcagcaacuuugauggag

SEQ ID NO: 144411 - RNA, 21 nt, Artificial Sequence
  Synthetic
uuugcagcaacuuugauggag

SEQ ID NO: 144412 - RNA, 22 nt, Artificial Sequence
  Synthetic
uuuugcagcaacuuugauggag

SEQ ID NO: 144413 - RNA, 23 nt, Artificial Sequence
  Synthetic
cuuuugcagcaacuuugauggag

SEQ ID NO: 144414 - RNA, 24 nt, Artificial Sequence
  Synthetic
ucuuuugcagcaacuuugauggag

SEQ ID NO: 144415 - RNA, 18 nt, Artificial Sequence
  Synthetic
cugucacccaggcuggag

SEQ ID NO: 144416 - RNA, 19 nt, Artificial Sequence
  Synthetic
ucugucacccaggcuggag

SEQ ID NO: 144417 - RNA, 20 nt, Artificial Sequence
  Synthetic
cucugucacccaggcuggag

SEQ ID NO: 144418 - RNA, 22 nt, Artificial Sequence
  Synthetic
ugcucugucacccaggcuggag

SEQ ID NO: 144419 - RNA, 23 nt, Artificial Sequence
  Synthetic
uugcucugucacccaggcuggag

SEQ ID NO: 144420 - RNA, 24 nt, Artificial Sequence
  Synthetic
cuugcucugucacccaggcuggag

SEQ ID NO: 144421 - RNA, 18 nt, Artificial Sequence
  Synthetic
cagaagacuucucuggag

SEQ ID NO: 144422 - RNA, 19 nt, Artificial Sequence
  Synthetic
ucagaagacuucucuggag

SEQ ID NO: 144423 - RNA, 20 nt, Artificial Sequence
  Synthetic
uucagaagacuucucuggag

SEQ ID NO: 144424 - RNA, 19 nt, Artificial Sequence
  Synthetic
agagagggaguauguggag

SEQ ID NO: 144425 - RNA, 19 nt, Artificial Sequence
  Synthetic
uguuucugccuuuuuggag

SEQ ID NO: 144426 - RNA, 20 nt, Artificial Sequence
  Synthetic
uuguuucugccuuuuuggag

SEQ ID NO: 144427 - RNA, 18 nt, Artificial Sequence
  Synthetic
uuguuuugggaggcugag

SEQ ID NO: 144428 - RNA, 19 nt, Artificial Sequence
  Synthetic
uuuguuuugggaggcugag

SEQ ID NO: 144429 - RNA, 20 nt, Artificial Sequence
  Synthetic
cuuuguuuugggaggcugag

SEQ ID NO: 144430 - RNA, 21 nt, Artificial Sequence
  Synthetic
ccuuuguuuugggaggcugag

SEQ ID NO: 144431 - RNA, 22 nt, Artificial Sequence
  Synthetic
cccuuuguuuugggaggcugag

SEQ ID NO: 144432 - RNA, 23 nt, Artificial Sequence
  Synthetic
ucccuuuguuuugggaggcugag

SEQ ID NO: 144433 - RNA, 24 nt, Artificial Sequence
  Synthetic
uucccuuuguuuugggaggcugag

SEQ ID NO: 144434 - RNA, 18 nt, Artificial Sequence
  Synthetic
caauaaaaguuugcugag

SEQ ID NO: 144435 - RNA, 19 nt, Artificial Sequence
  Synthetic
ccaauaaaaguuugcugag

SEQ ID NO: 144436 - RNA, 20 nt, Artificial Sequence
  Synthetic
cccaauaaaaguuugcugag

SEQ ID NO: 144437 - RNA, 19 nt, Artificial Sequence
  Synthetic
agcacuuugggagucugag

SEQ ID NO: 144438 - RNA, 20 nt, Artificial Sequence
  Synthetic
cagcacuuugggagucugag

SEQ ID NO: 144439 - RNA, 21 nt, Artificial Sequence
  Synthetic
ccagcacuuugggagucugag

SEQ ID NO: 144440 - RNA, 22 nt, Artificial Sequence
  Synthetic
cccagcacuuugggagucugag

SEQ ID NO: 144441 - RNA, 23 nt, Artificial Sequence
  Synthetic
ucccagcacuuugggagucugag

SEQ ID NO: 144442 - RNA, 24 nt, Artificial Sequence
  Synthetic
aucccagcacuuugggagucugag

SEQ ID NO: 144443 - RNA, 18 nt, Artificial Sequence
  Synthetic
ugugucucugcacgugag

SEQ ID NO: 144444 - RNA, 20 nt, Artificial Sequence
  Synthetic
ugugugucucugcacgugag

SEQ ID NO: 144445 - RNA, 21 nt, Artificial Sequence
  Synthetic
augugugucucugcacgugag

SEQ ID NO: 144446 - RNA, 22 nt, Artificial Sequence
  Synthetic
uaugugugucucugcacgugag

SEQ ID NO: 144447 - RNA, 23 nt, Artificial Sequence
  Synthetic
cuaugugugucucugcacgugag

SEQ ID NO: 144448 - RNA, 24 nt, Artificial Sequence
  Synthetic
ccuaugugugucucugcacgugag

SEQ ID NO: 144449 - RNA, 18 nt, Artificial Sequence
  Synthetic
uuauuaaucccuugugag

SEQ ID NO: 144450 - RNA, 21 nt, Artificial Sequence
  Synthetic
ugguuauuaaucccuugugag

SEQ ID NO: 144451 - RNA, 22 nt, Artificial Sequence
  Synthetic
cugguuauuaaucccuugugag

SEQ ID NO: 144452 - RNA, 23 nt, Artificial Sequence
  Synthetic
ucugguuauuaaucccuugugag

SEQ ID NO: 144453 - RNA, 24 nt, Artificial Sequence
  Synthetic
uucugguuauuaaucccuugugag

SEQ ID NO: 144454 - RNA, 21 nt, Artificial Sequence
  Synthetic
aguauugauuaauauauugag

SEQ ID NO: 144455 - RNA, 22 nt, Artificial Sequence
  Synthetic
aaguauugauuaauauauugag

SEQ ID NO: 144456 - RNA, 24 nt, Artificial Sequence
  Synthetic
ugaaguauugauuaauauauugag

SEQ ID NO: 144457 - RNA, 19 nt, Artificial Sequence
  Synthetic
uguuacauguguacuugag

SEQ ID NO: 144458 - RNA, 20 nt, Artificial Sequence
  Synthetic
auguuacauguguacuugag

SEQ ID NO: 144459 - RNA, 21 nt, Artificial Sequence
  Synthetic
aauguuacauguguacuugag

SEQ ID NO: 144460 - RNA, 23 nt, Artificial Sequence
  Synthetic
agaauguuacauguguacuugag

SEQ ID NO: 144461 - RNA, 18 nt, Artificial Sequence
  Synthetic
uuuucugaagaauuugag

SEQ ID NO: 144462 - RNA, 19 nt, Artificial Sequence
  Synthetic
uuuuucugaagaauuugag

SEQ ID NO: 144463 - RNA, 20 nt, Artificial Sequence
  Synthetic
auuuuucugaagaauuugag

SEQ ID NO: 144464 - RNA, 21 nt, Artificial Sequence
  Synthetic
aauuuuucugaagaauuugag

SEQ ID NO: 144465 - RNA, 22 nt, Artificial Sequence
  Synthetic
uaauuuuucugaagaauuugag

SEQ ID NO: 144466 - RNA, 23 nt, Artificial Sequence
  Synthetic
uuaauuuuucugaagaauuugag

SEQ ID NO: 144467 - RNA, 24 nt, Artificial Sequence
  Synthetic
uuuaauuuuucugaagaauuugag

SEQ ID NO: 144468 - RNA, 20 nt, Artificial Sequence
  Synthetic
uggaaaugaaagcauuugag

SEQ ID NO: 144469 - RNA, 18 nt, Artificial Sequence
  Synthetic
uuuccauuuucauuugag

SEQ ID NO: 144470 - RNA, 19 nt, Artificial Sequence
  Synthetic
auuuccauuuucauuugag

SEQ ID NO: 144471 - RNA, 20 nt, Artificial Sequence
  Synthetic
uauuuccauuuucauuugag

SEQ ID NO: 144472 - RNA, 18 nt, Artificial Sequence
  Synthetic
aaauuuuuuaaaaaauag

SEQ ID NO: 144473 - RNA, 19 nt, Artificial Sequence
  Synthetic
aaaauuuuuuaaaaaauag

SEQ ID NO: 144474 - RNA, 20 nt, Artificial Sequence
  Synthetic
aaaaauuuuuuaaaaaauag

SEQ ID NO: 144475 - RNA, 21 nt, Artificial Sequence
  Synthetic
aaaaaauuuuuuaaaaaauag

SEQ ID NO: 144476 - RNA, 22 nt, Artificial Sequence
  Synthetic
aaaaaaauuuuuuaaaaaauag

SEQ ID NO: 144477 - RNA, 23 nt, Artificial Sequence
  Synthetic
caaaaaaauuuuuuaaaaaauag

SEQ ID NO: 144478 - RNA, 24 nt, Artificial Sequence
  Synthetic
ccaaaaaaauuuuuuaaaaaauag

SEQ ID NO: 144479 - RNA, 18 nt, Artificial Sequence
  Synthetic
auuucagaaagaaaauag

SEQ ID NO: 144480 - RNA, 19 nt, Artificial Sequence
  Synthetic
cauuucagaaagaaaauag

SEQ ID NO: 144481 - RNA, 20 nt, Artificial Sequence
  Synthetic
acauuucagaaagaaaauag

SEQ ID NO: 144482 - RNA, 19 nt, Artificial Sequence
  Synthetic
uguuucuuuuauuaaauag

SEQ ID NO: 144483 - RNA, 20 nt, Artificial Sequence
  Synthetic
uuguuucuuuuauuaaauag

SEQ ID NO: 144484 - RNA, 18 nt, Artificial Sequence
  Synthetic
cucuugcuugcugaauag

SEQ ID NO: 144485 - RNA, 19 nt, Artificial Sequence
  Synthetic
ucucuugcuugcugaauag

SEQ ID NO: 144486 - RNA, 20 nt, Artificial Sequence
  Synthetic
uucucuugcuugcugaauag

SEQ ID NO: 144487 - RNA, 18 nt, Artificial Sequence
  Synthetic
ccaucauccacauaauag

SEQ ID NO: 144488 - RNA, 19 nt, Artificial Sequence
  Synthetic
cccaucauccacauaauag

SEQ ID NO: 144489 - RNA, 20 nt, Artificial Sequence
  Synthetic
acccaucauccacauaauag

SEQ ID NO: 144490 - RNA, 18 nt, Artificial Sequence
  Synthetic
auuauccccauauaauag

SEQ ID NO: 144491 - RNA, 19 nt, Artificial Sequence
  Synthetic
uauuauccccauauaauag

SEQ ID NO: 144492 - RNA, 20 nt, Artificial Sequence
  Synthetic
uuauuauccccauauaauag

SEQ ID NO: 144493 - RNA, 21 nt, Artificial Sequence
  Synthetic
aucuugcaacacaguacauag

SEQ ID NO: 144494 - RNA, 22 nt, Artificial Sequence
  Synthetic
caucuugcaacacaguacauag

SEQ ID NO: 144495 - RNA, 23 nt, Artificial Sequence
  Synthetic
ucaucuugcaacacaguacauag

SEQ ID NO: 144496 - RNA, 24 nt, Artificial Sequence
  Synthetic
aucaucuugcaacacaguacauag

SEQ ID NO: 144497 - RNA, 19 nt, Artificial Sequence
  Synthetic
uggauuuucaggcucauag

SEQ ID NO: 144498 - RNA, 20 nt, Artificial Sequence
  Synthetic
uuggauuuucaggcucauag

SEQ ID NO: 144499 - RNA, 21 nt, Artificial Sequence
  Synthetic
uuuggauuuucaggcucauag

SEQ ID NO: 144500 - RNA, 22 nt, Artificial Sequence
  Synthetic
uuuuggauuuucaggcucauag

SEQ ID NO: 144501 - RNA, 24 nt, Artificial Sequence
  Synthetic
uguuuuggauuuucaggcucauag

SEQ ID NO: 144502 - RNA, 18 nt, Artificial Sequence
  Synthetic
uuugggaggccaggauag

SEQ ID NO: 144503 - RNA, 19 nt, Artificial Sequence
  Synthetic
cuuugggaggccaggauag

SEQ ID NO: 144504 - RNA, 20 nt, Artificial Sequence
  Synthetic
acuuugggaggccaggauag

SEQ ID NO: 144505 - RNA, 21 nt, Artificial Sequence
  Synthetic
cacuuugggaggccaggauag

SEQ ID NO: 144506 - RNA, 23 nt, Artificial Sequence
  Synthetic
agcacuuugggaggccaggauag

SEQ ID NO: 144507 - RNA, 24 nt, Artificial Sequence
  Synthetic
cagcacuuugggaggccaggauag

SEQ ID NO: 144508 - RNA, 18 nt, Artificial Sequence
  Synthetic
uacccaguaaugggauag

SEQ ID NO: 144509 - RNA, 19 nt, Artificial Sequence
  Synthetic
auacccaguaaugggauag

SEQ ID NO: 144510 - RNA, 20 nt, Artificial Sequence
  Synthetic
uauacccaguaaugggauag

SEQ ID NO: 144511 - RNA, 21 nt, Artificial Sequence
  Synthetic
auauacccaguaaugggauag

SEQ ID NO: 144512 - RNA, 22 nt, Artificial Sequence
  Synthetic
uauauacccaguaaugggauag

SEQ ID NO: 144513 - RNA, 18 nt, Artificial Sequence
  Synthetic
aucacccaugugugauag

SEQ ID NO: 144514 - RNA, 19 nt, Artificial Sequence
  Synthetic
caucacccaugugugauag

SEQ ID NO: 144515 - RNA, 20 nt, Artificial Sequence
  Synthetic
ucaucacccaugugugauag

SEQ ID NO: 144516 - RNA, 18 nt, Artificial Sequence
  Synthetic
auaauaacauauugauag

SEQ ID NO: 144517 - RNA, 19 nt, Artificial Sequence
  Synthetic
uauaauaacauauugauag

SEQ ID NO: 144518 - RNA, 20 nt, Artificial Sequence
  Synthetic
cuauaauaacauauugauag

SEQ ID NO: 144519 - RNA, 19 nt, Artificial Sequence
  Synthetic
uggugugggauguugauag

SEQ ID NO: 144520 - RNA, 20 nt, Artificial Sequence
  Synthetic
cuggugugggauguugauag

SEQ ID NO: 144521 - RNA, 21 nt, Artificial Sequence
  Synthetic
ucuggugugggauguugauag

SEQ ID NO: 144522 - RNA, 22 nt, Artificial Sequence
  Synthetic
cucuggugugggauguugauag

SEQ ID NO: 144523 - RNA, 23 nt, Artificial Sequence
  Synthetic
acucuggugugggauguugauag

SEQ ID NO: 144524 - RNA, 24 nt, Artificial Sequence
  Synthetic
cacucuggugugggauguugauag

SEQ ID NO: 144525 - RNA, 18 nt, Artificial Sequence
  Synthetic
aaaauagcaacaauauag

SEQ ID NO: 144526 - RNA, 19 nt, Artificial Sequence
  Synthetic
aaaaauagcaacaauauag

SEQ ID NO: 144527 - RNA, 21 nt, Artificial Sequence
  Synthetic
agaaaaauagcaacaauauag

SEQ ID NO: 144528 - RNA, 22 nt, Artificial Sequence
  Synthetic
cagaaaaauagcaacaauauag

SEQ ID NO: 144529 - RNA, 23 nt, Artificial Sequence
  Synthetic
acagaaaaauagcaacaauauag

SEQ ID NO: 144530 - RNA, 18 nt, Artificial Sequence
  Synthetic
auguuuuaaaguauauag

SEQ ID NO: 144531 - RNA, 20 nt, Artificial Sequence
  Synthetic
agauguuuuaaaguauauag

SEQ ID NO: 144532 - RNA, 22 nt, Artificial Sequence
  Synthetic
agagauguuuuaaaguauauag

SEQ ID NO: 144533 - RNA, 23 nt, Artificial Sequence
  Synthetic
uagagauguuuuaaaguauauag

SEQ ID NO: 144534 - RNA, 24 nt, Artificial Sequence
  Synthetic
cuagagauguuuuaaaguauauag

SEQ ID NO: 144535 - RNA, 18 nt, Artificial Sequence
  Synthetic
auuaucuccacuuuauag

SEQ ID NO: 144536 - RNA, 19 nt, Artificial Sequence
  Synthetic
aauuaucuccacuuuauag

SEQ ID NO: 144537 - RNA, 20 nt, Artificial Sequence
  Synthetic
uaauuaucuccacuuuauag

SEQ ID NO: 144538 - RNA, 22 nt, Artificial Sequence
  Synthetic
uguaauuaucuccacuuuauag

SEQ ID NO: 144539 - RNA, 23 nt, Artificial Sequence
  Synthetic
auguaauuaucuccacuuuauag

SEQ ID NO: 144540 - RNA, 24 nt, Artificial Sequence
  Synthetic
aauguaauuaucuccacuuuauag

SEQ ID NO: 144541 - RNA, 18 nt, Artificial Sequence
  Synthetic
cuucuugauuuaaacuag

SEQ ID NO: 144542 - RNA, 19 nt, Artificial Sequence
  Synthetic
ucuucuugauuuaaacuag

SEQ ID NO: 144543 - RNA, 20 nt, Artificial Sequence
  Synthetic
uucuucuugauuuaaacuag

SEQ ID NO: 144544 - RNA, 21 nt, Artificial Sequence
  Synthetic
uuucuucuugauuuaaacuag

SEQ ID NO: 144545 - RNA, 22 nt, Artificial Sequence
  Synthetic
auuucuucuugauuuaaacuag

SEQ ID NO: 144546 - RNA, 23 nt, Artificial Sequence
  Synthetic
uauuucuucuugauuuaaacuag

SEQ ID NO: 144547 - RNA, 24 nt, Artificial Sequence
  Synthetic
cuauuucuucuugauuuaaacuag

SEQ ID NO: 144548 - RNA, 18 nt, Artificial Sequence
  Synthetic
aaaguggcaagaggcuag

SEQ ID NO: 144549 - RNA, 19 nt, Artificial Sequence
  Synthetic
aaaaguggcaagaggcuag

SEQ ID NO: 144550 - RNA, 20 nt, Artificial Sequence
  Synthetic
uaaaaguggcaagaggcuag

SEQ ID NO: 144551 - RNA, 21 nt, Artificial Sequence
  Synthetic
auaaaaguggcaagaggcuag

SEQ ID NO: 144552 - RNA, 22 nt, Artificial Sequence
  Synthetic
uauaaaaguggcaagaggcuag

SEQ ID NO: 144553 - RNA, 22 nt, Artificial Sequence
  Synthetic
ugcaacucacaaaaguugcuag

SEQ ID NO: 144554 - RNA, 23 nt, Artificial Sequence
  Synthetic
augcaacucacaaaaguugcuag

SEQ ID NO: 144555 - RNA, 24 nt, Artificial Sequence
  Synthetic
aaugcaacucacaaaaguugcuag

SEQ ID NO: 144556 - RNA, 18 nt, Artificial Sequence
  Synthetic
cccaggaaguaccaguag

SEQ ID NO: 144557 - RNA, 19 nt, Artificial Sequence
  Synthetic
ucccaggaaguaccaguag

SEQ ID NO: 144558 - RNA, 20 nt, Artificial Sequence
  Synthetic
aucccaggaaguaccaguag

SEQ ID NO: 144559 - RNA, 22 nt, Artificial Sequence
  Synthetic
ugaucccaggaaguaccaguag

SEQ ID NO: 144560 - RNA, 24 nt, Artificial Sequence
  Synthetic
ugugaucccaggaaguaccaguag

SEQ ID NO: 144561 - RNA, 19 nt, Artificial Sequence
  Synthetic
aggagaggaagagagguag

SEQ ID NO: 144562 - RNA, 20 nt, Artificial Sequence
  Synthetic
aaggagaggaagagagguag

SEQ ID NO: 144563 - RNA, 21 nt, Artificial Sequence
  Synthetic
caaggagaggaagagagguag

SEQ ID NO: 144564 - RNA, 22 nt, Artificial Sequence
  Synthetic
ccaaggagaggaagagagguag

SEQ ID NO: 144565 - RNA, 23 nt, Artificial Sequence
  Synthetic
cccaaggagaggaagagagguag

SEQ ID NO: 144566 - RNA, 18 nt, Artificial Sequence
  Synthetic
cucgggagccugagguag

SEQ ID NO: 144567 - RNA, 19 nt, Artificial Sequence
  Synthetic
acucgggagccugagguag

SEQ ID NO: 144568 - RNA, 20 nt, Artificial Sequence
  Synthetic
uacucgggagccugagguag

SEQ ID NO: 144569 - RNA, 21 nt, Artificial Sequence
  Synthetic
cuacucgggagccugagguag

SEQ ID NO: 144570 - RNA, 23 nt, Artificial Sequence
  Synthetic
agcuacucgggagccugagguag

SEQ ID NO: 144571 - RNA, 24 nt, Artificial Sequence
  Synthetic
cagcuacucgggagccugagguag

SEQ ID NO: 144572 - RNA, 18 nt, Artificial Sequence
  Synthetic
cucgggaggcugagguag

SEQ ID NO: 144573 - RNA, 19 nt, Artificial Sequence
  Synthetic
acucgggaggcugagguag

SEQ ID NO: 144574 - RNA, 20 nt, Artificial Sequence
  Synthetic
uacucgggaggcugagguag

SEQ ID NO: 144575 - RNA, 18 nt, Artificial Sequence
  Synthetic
ccuuaauccuaaggguag

SEQ ID NO: 144576 - RNA, 19 nt, Artificial Sequence
  Synthetic
cccuuaauccuaaggguag

SEQ ID NO: 144577 - RNA, 20 nt, Artificial Sequence
  Synthetic
acccuuaauccuaaggguag

SEQ ID NO: 144578 - RNA, 21 nt, Artificial Sequence
  Synthetic
aacccuuaauccuaaggguag

SEQ ID NO: 144579 - RNA, 18 nt, Artificial Sequence
  Synthetic
cucagaugccugggguag

SEQ ID NO: 144580 - RNA, 19 nt, Artificial Sequence
  Synthetic
ucucagaugccugggguag

SEQ ID NO: 144581 - RNA, 20 nt, Artificial Sequence
  Synthetic
uucucagaugccugggguag

SEQ ID NO: 144582 - RNA, 19 nt, Artificial Sequence
  Synthetic
agaauugagaaaaugguag

SEQ ID NO: 144583 - RNA, 20 nt, Artificial Sequence
  Synthetic
uagaauugagaaaaugguag

SEQ ID NO: 144584 - RNA, 18 nt, Artificial Sequence
  Synthetic
uaaauauacaaaaauuag

SEQ ID NO: 144585 - RNA, 19 nt, Artificial Sequence
  Synthetic
cuaaauauacaaaaauuag

SEQ ID NO: 144586 - RNA, 20 nt, Artificial Sequence
  Synthetic
acuaaauauacaaaaauuag

SEQ ID NO: 144587 - RNA, 21 nt, Artificial Sequence
  Synthetic
uacuaaauauacaaaaauuag

SEQ ID NO: 144588 - RNA, 22 nt, Artificial Sequence
  Synthetic
cuacuaaauauacaaaaauuag

SEQ ID NO: 144589 - RNA, 23 nt, Artificial Sequence
  Synthetic
ucuacuaaauauacaaaaauuag

SEQ ID NO: 144590 - RNA, 24 nt, Artificial Sequence
  Synthetic
cucuacuaaauauacaaaaauuag

SEQ ID NO: 144591 - RNA, 18 nt, Artificial Sequence
  Synthetic
aaaaauaccaaaaauuag

SEQ ID NO: 144592 - RNA, 19 nt, Artificial Sequence
  Synthetic
uaaaaauaccaaaaauuag

SEQ ID NO: 144593 - RNA, 20 nt, Artificial Sequence
  Synthetic
cuaaaaauaccaaaaauuag

SEQ ID NO: 144594 - RNA, 21 nt, Artificial Sequence
  Synthetic
acuaaaaauaccaaaaauuag

SEQ ID NO: 144595 - RNA, 22 nt, Artificial Sequence
  Synthetic
uacuaaaaauaccaaaaauuag

SEQ ID NO: 144596 - RNA, 23 nt, Artificial Sequence
  Synthetic
cuacuaaaaauaccaaaaauuag

SEQ ID NO: 144597 - RNA, 24 nt, Artificial Sequence
  Synthetic
ucuacuaaaaauaccaaaaauuag

SEQ ID NO: 144598 - RNA, 18 nt, Artificial Sequence
  Synthetic
agaauaauaacaaauuag

SEQ ID NO: 144599 - RNA, 19 nt, Artificial Sequence
  Synthetic
uagaauaauaacaaauuag

SEQ ID NO: 144600 - RNA, 20 nt, Artificial Sequence
  Synthetic
auagaauaauaacaaauuag

SEQ ID NO: 144601 - RNA, 19 nt, Artificial Sequence
  Synthetic
agaaauaaaagcagauuag

SEQ ID NO: 144602 - RNA, 20 nt, Artificial Sequence
  Synthetic
aagaaauaaaagcagauuag

SEQ ID NO: 144603 - RNA, 18 nt, Artificial Sequence
  Synthetic
ccccacugucaauauuag

SEQ ID NO: 144604 - RNA, 19 nt, Artificial Sequence
  Synthetic
accccacugucaauauuag

SEQ ID NO: 144605 - RNA, 20 nt, Artificial Sequence
  Synthetic
caccccacugucaauauuag

SEQ ID NO: 144606 - RNA, 21 nt, Artificial Sequence
  Synthetic
acaccccacugucaauauuag

SEQ ID NO: 144607 - RNA, 22 nt, Artificial Sequence
  Synthetic
aacaccccacugucaauauuag

SEQ ID NO: 144608 - RNA, 23 nt, Artificial Sequence
  Synthetic
uaacaccccacugucaauauuag

SEQ ID NO: 144609 - RNA, 24 nt, Artificial Sequence
  Synthetic
uuaacaccccacugucaauauuag

SEQ ID NO: 144610 - RNA, 18 nt, Artificial Sequence
  Synthetic
uaaaaauaaaaaacuuag

SEQ ID NO: 144611 - RNA, 19 nt, Artificial Sequence
  Synthetic
auaaaaauaaaaaacuuag

SEQ ID NO: 144612 - RNA, 20 nt, Artificial Sequence
  Synthetic
aauaaaaauaaaaaacuuag

SEQ ID NO: 144613 - RNA, 21 nt, Artificial Sequence
  Synthetic
uaauaaaaauaaaaaacuuag

SEQ ID NO: 144614 - RNA, 22 nt, Artificial Sequence
  Synthetic
cuaauaaaaauaaaaaacuuag

SEQ ID NO: 144615 - RNA, 23 nt, Artificial Sequence
  Synthetic
ucuaauaaaaauaaaaaacuuag

SEQ ID NO: 144616 - RNA, 24 nt, Artificial Sequence
  Synthetic
cucuaauaaaaauaaaaaacuuag

SEQ ID NO: 144617 - RNA, 20 nt, Artificial Sequence
  Synthetic
uggauuaggcuuuggcuuag

SEQ ID NO: 144618 - RNA, 21 nt, Artificial Sequence
  Synthetic
cuggauuaggcuuuggcuuag

SEQ ID NO: 144619 - RNA, 22 nt, Artificial Sequence
  Synthetic
ucuggauuaggcuuuggcuuag

SEQ ID NO: 144620 - RNA, 23 nt, Artificial Sequence
  Synthetic
cucuggauuaggcuuuggcuuag

SEQ ID NO: 144621 - RNA, 19 nt, Artificial Sequence
  Synthetic
uggguagguggauaguuag

SEQ ID NO: 144622 - RNA, 22 nt, Artificial Sequence
  Synthetic
ugucccaaacugugcacguuag

SEQ ID NO: 144623 - RNA, 23 nt, Artificial Sequence
  Synthetic
augucccaaacugugcacguuag

SEQ ID NO: 144624 - RNA, 24 nt, Artificial Sequence
  Synthetic
caugucccaaacugugcacguuag

SEQ ID NO: 144625 - RNA, 18 nt, Artificial Sequence
  Synthetic
ccuuaaaaaaaagguuag

SEQ ID NO: 144626 - RNA, 19 nt, Artificial Sequence
  Synthetic
accuuaaaaaaaagguuag

SEQ ID NO: 144627 - RNA, 20 nt, Artificial Sequence
  Synthetic
aaccuuaaaaaaaagguuag

SEQ ID NO: 144628 - RNA, 22 nt, Artificial Sequence
  Synthetic
agaaccuuaaaaaaaagguuag

SEQ ID NO: 144629 - RNA, 23 nt, Artificial Sequence
  Synthetic
aagaaccuuaaaaaaaagguuag

SEQ ID NO: 144630 - RNA, 24 nt, Artificial Sequence
  Synthetic
uaagaaccuuaaaaaaaagguuag

SEQ ID NO: 144631 - RNA, 21 nt, Artificial Sequence
  Synthetic
uaccaauuaaaagagauuuag

SEQ ID NO: 144632 - RNA, 22 nt, Artificial Sequence
  Synthetic
auaccaauuaaaagagauuuag

SEQ ID NO: 144633 - RNA, 23 nt, Artificial Sequence
  Synthetic
uauaccaauuaaaagagauuuag

SEQ ID NO: 144634 - RNA, 24 nt, Artificial Sequence
  Synthetic
auauaccaauuaaaagagauuuag

SEQ ID NO: 144635 - RNA, 18 nt, Artificial Sequence
  Synthetic
aaauaaauauuuauuuag

SEQ ID NO: 144636 - RNA, 19 nt, Artificial Sequence
  Synthetic
aaaauaaauauuuauuuag

SEQ ID NO: 144637 - RNA, 20 nt, Artificial Sequence
  Synthetic
uaaaauaaauauuuauuuag

SEQ ID NO: 144638 - RNA, 19 nt, Artificial Sequence
  Synthetic
ugcaguuaacacauuuuag

SEQ ID NO: 144639 - RNA, 20 nt, Artificial Sequence
  Synthetic
cugcaguuaacacauuuuag

SEQ ID NO: 144640 - RNA, 18 nt, Artificial Sequence
  Synthetic
uaauuuuuguauuuuuag

SEQ ID NO: 144641 - RNA, 19 nt, Artificial Sequence
  Synthetic
cuaauuuuuguauuuuuag

SEQ ID NO: 144642 - RNA, 21 nt, Artificial Sequence
  Synthetic
agcuaauuuuuguauuuuuag

SEQ ID NO: 144643 - RNA, 22 nt, Artificial Sequence
  Synthetic
cagcuaauuuuuguauuuuuag

SEQ ID NO: 144644 - RNA, 23 nt, Artificial Sequence
  Synthetic
ccagcuaauuuuuguauuuuuag

SEQ ID NO: 144645 - RNA, 24 nt, Artificial Sequence
  Synthetic
cccagcuaauuuuuguauuuuuag

SEQ ID NO: 144646 - RNA, 22 nt, Artificial Sequence
  Synthetic
uggcuaauuuuuguauuuuuag

SEQ ID NO: 144647 - RNA, 24 nt, Artificial Sequence
  Synthetic
cguggcuaauuuuuguauuuuuag

SEQ ID NO: 144648 - RNA, 18 nt, Artificial Sequence
  Synthetic
cauagguguccgucaacg

SEQ ID NO: 144649 - RNA, 19 nt, Artificial Sequence
  Synthetic
acauagguguccgucaacg

SEQ ID NO: 144650 - RNA, 20 nt, Artificial Sequence
  Synthetic
aacauagguguccgucaacg

SEQ ID NO: 144651 - RNA, 18 nt, Artificial Sequence
  Synthetic
aucacaucauggagaacg

SEQ ID NO: 144652 - RNA, 19 nt, Artificial Sequence
  Synthetic
aaucacaucauggagaacg

SEQ ID NO: 144653 - RNA, 20 nt, Artificial Sequence
  Synthetic
uaaucacaucauggagaacg

SEQ ID NO: 144654 - RNA, 21 nt, Artificial Sequence
  Synthetic
auaaucacaucauggagaacg

SEQ ID NO: 144655 - RNA, 22 nt, Artificial Sequence
  Synthetic
aauaaucacaucauggagaacg

SEQ ID NO: 144656 - RNA, 23 nt, Artificial Sequence
  Synthetic
uaauaaucacaucauggagaacg

SEQ ID NO: 144657 - RNA, 24 nt, Artificial Sequence
  Synthetic
auaauaaucacaucauggagaacg

SEQ ID NO: 144658 - RNA, 18 nt, Artificial Sequence
  Synthetic
uugugaacuguccacacg

SEQ ID NO: 144659 - RNA, 19 nt, Artificial Sequence
  Synthetic
auugugaacuguccacacg

SEQ ID NO: 144660 - RNA, 20 nt, Artificial Sequence
  Synthetic
uauugugaacuguccacacg

SEQ ID NO: 144661 - RNA, 21 nt, Artificial Sequence
  Synthetic
cuauugugaacuguccacacg

SEQ ID NO: 144662 - RNA, 22 nt, Artificial Sequence
  Synthetic
ccuauugugaacuguccacacg

SEQ ID NO: 144663 - RNA, 23 nt, Artificial Sequence
  Synthetic
cccuauugugaacuguccacacg

SEQ ID NO: 144664 - RNA, 24 nt, Artificial Sequence
  Synthetic
acccuauugugaacuguccacacg

SEQ ID NO: 144665 - RNA, 19 nt, Artificial Sequence
  Synthetic
uggcuguuccaugcacacg

SEQ ID NO: 144666 - RNA, 21 nt, Artificial Sequence
  Synthetic
uguggcuguuccaugcacacg

SEQ ID NO: 144667 - RNA, 22 nt, Artificial Sequence
  Synthetic
cuguggcuguuccaugcacacg

SEQ ID NO: 144668 - RNA, 23 nt, Artificial Sequence
  Synthetic
ucuguggcuguuccaugcacacg

SEQ ID NO: 144669 - RNA, 19 nt, Artificial Sequence
  Synthetic
uggucagaaaagauacacg

SEQ ID NO: 144670 - RNA, 21 nt, Artificial Sequence
  Synthetic
uguggucagaaaagauacacg

SEQ ID NO: 144671 - RNA, 22 nt, Artificial Sequence
  Synthetic
uuguggucagaaaagauacacg

SEQ ID NO: 144672 - RNA, 23 nt, Artificial Sequence
  Synthetic
auuguggucagaaaagauacacg

SEQ ID NO: 144673 - RNA, 24 nt, Artificial Sequence
  Synthetic
uauuguggucagaaaagauacacg

SEQ ID NO: 144674 - RNA, 18 nt, Artificial Sequence
  Synthetic
cagaguugguucccgccg

SEQ ID NO: 144675 - RNA, 19 nt, Artificial Sequence
  Synthetic
ccagaguugguucccgccg

SEQ ID NO: 144676 - RNA, 20 nt, Artificial Sequence
  Synthetic
uccagaguugguucccgccg

SEQ ID NO: 144677 - RNA, 22 nt, Artificial Sequence
  Synthetic
uguccagaguugguucccgccg

SEQ ID NO: 144678 - RNA, 24 nt, Artificial Sequence
  Synthetic
uguguccagaguugguucccgccg

SEQ ID NO: 144679 - RNA, 19 nt, Artificial Sequence
  Synthetic
ugucaacuuggcugggccg

SEQ ID NO: 144680 - RNA, 21 nt, Artificial Sequence
  Synthetic
ugugucaacuuggcugggccg

SEQ ID NO: 144681 - RNA, 22 nt, Artificial Sequence
  Synthetic
augugucaacuuggcugggccg

SEQ ID NO: 144682 - RNA, 23 nt, Artificial Sequence
  Synthetic
caugugucaacuuggcugggccg

SEQ ID NO: 144683 - RNA, 24 nt, Artificial Sequence
  Synthetic
ucaugugucaacuuggcugggccg

SEQ ID NO: 144684 - RNA, 18 nt, Artificial Sequence
  Synthetic
auuuaccccaauuuuccg

SEQ ID NO: 144685 - RNA, 19 nt, Artificial Sequence
  Synthetic
uauuuaccccaauuuuccg

SEQ ID NO: 144686 - RNA, 20 nt, Artificial Sequence
  Synthetic
auauuuaccccaauuuuccg

SEQ ID NO: 144687 - RNA, 18 nt, Artificial Sequence
  Synthetic
cuuugggaggcugaagcg

SEQ ID NO: 144688 - RNA, 19 nt, Artificial Sequence
  Synthetic
acuuugggaggcugaagcg

SEQ ID NO: 144689 - RNA, 20 nt, Artificial Sequence
  Synthetic
cacuuugggaggcugaagcg

SEQ ID NO: 144690 - RNA, 22 nt, Artificial Sequence
  Synthetic
agcacuuugggaggcugaagcg

SEQ ID NO: 144691 - RNA, 23 nt, Artificial Sequence
  Synthetic
cagcacuuugggaggcugaagcg

SEQ ID NO: 144692 - RNA, 24 nt, Artificial Sequence
  Synthetic
ccagcacuuugggaggcugaagcg

SEQ ID NO: 144693 - RNA, 18 nt, Artificial Sequence
  Synthetic
cucaaaauaaagggaucg

SEQ ID NO: 144694 - RNA, 21 nt, Artificial Sequence
  Synthetic
aggcucaaaauaaagggaucg

SEQ ID NO: 144695 - RNA, 22 nt, Artificial Sequence
  Synthetic
uaggcucaaaauaaagggaucg

SEQ ID NO: 144696 - RNA, 23 nt, Artificial Sequence
  Synthetic
auaggcucaaaauaaagggaucg

SEQ ID NO: 144697 - RNA, 24 nt, Artificial Sequence
  Synthetic
cauaggcucaaaauaaagggaucg

SEQ ID NO: 144698 - RNA, 18 nt, Artificial Sequence
  Synthetic
uuggaguugcucuucucg

SEQ ID NO: 144699 - RNA, 19 nt, Artificial Sequence
  Synthetic
cuuggaguugcucuucucg

SEQ ID NO: 144700 - RNA, 20 nt, Artificial Sequence
  Synthetic
ucuuggaguugcucuucucg

SEQ ID NO: 144701 - RNA, 22 nt, Artificial Sequence
  Synthetic
ugucuuggaguugcucuucucg

SEQ ID NO: 144702 - RNA, 24 nt, Artificial Sequence
  Synthetic
ugugucuuggaguugcucuucucg

SEQ ID NO: 144703 - RNA, 19 nt, Artificial Sequence
  Synthetic
aguugcucugggugagucg

SEQ ID NO: 144704 - RNA, 20 nt, Artificial Sequence
  Synthetic
aaguugcucugggugagucg

SEQ ID NO: 144705 - RNA, 21 nt, Artificial Sequence
  Synthetic
aaaguugcucugggugagucg

SEQ ID NO: 144706 - RNA, 22 nt, Artificial Sequence
  Synthetic
caaaguugcucugggugagucg

SEQ ID NO: 144707 - RNA, 23 nt, Artificial Sequence
  Synthetic
ucaaaguugcucugggugagucg

SEQ ID NO: 144708 - RNA, 24 nt, Artificial Sequence
  Synthetic
cucaaaguugcucugggugagucg

SEQ ID NO: 144709 - RNA, 18 nt, Artificial Sequence
  Synthetic
acacacugaggccugucg

SEQ ID NO: 144710 - RNA, 19 nt, Artificial Sequence
  Synthetic
cacacacugaggccugucg

SEQ ID NO: 144711 - RNA, 20 nt, Artificial Sequence
  Synthetic
acacacacugaggccugucg

SEQ ID NO: 144712 - RNA, 21 nt, Artificial Sequence
  Synthetic
aacacacacugaggccugucg

SEQ ID NO: 144713 - RNA, 22 nt, Artificial Sequence
  Synthetic
caacacacacugaggccugucg

SEQ ID NO: 144714 - RNA, 23 nt, Artificial Sequence
  Synthetic
acaacacacacugaggccugucg

SEQ ID NO: 144715 - RNA, 24 nt, Artificial Sequence
  Synthetic
aacaacacacacugaggccugucg

SEQ ID NO: 144716 - RNA, 18 nt, Artificial Sequence
  Synthetic
acacaccagggccugucg

SEQ ID NO: 144717 - RNA, 19 nt, Artificial Sequence
  Synthetic
cacacaccagggccugucg

SEQ ID NO: 144718 - RNA, 20 nt, Artificial Sequence
  Synthetic
ucacacaccagggccugucg

SEQ ID NO: 144719 - RNA, 21 nt, Artificial Sequence
  Synthetic
aucacacaccagggccugucg

SEQ ID NO: 144720 - RNA, 22 nt, Artificial Sequence
  Synthetic
caucacacaccagggccugucg

SEQ ID NO: 144721 - RNA, 23 nt, Artificial Sequence
  Synthetic
acaucacacaccagggccugucg

SEQ ID NO: 144722 - RNA, 24 nt, Artificial Sequence
  Synthetic
aacaucacacaccagggccugucg

SEQ ID NO: 144723 - RNA, 18 nt, Artificial Sequence
  Synthetic
acacaccggggccugucg

SEQ ID NO: 144724 - RNA, 19 nt, Artificial Sequence
  Synthetic
cacacaccggggccugucg

SEQ ID NO: 144725 - RNA, 20 nt, Artificial Sequence
  Synthetic
ucacacaccggggccugucg

SEQ ID NO: 144726 - RNA, 24 nt, Artificial Sequence
  Synthetic
aacaucacacaccggggccugucg

SEQ ID NO: 144727 - RNA, 19 nt, Artificial Sequence
  Synthetic
ugggagaguguaugugucg

SEQ ID NO: 144728 - RNA, 20 nt, Artificial Sequence
  Synthetic
uugggagaguguaugugucg

SEQ ID NO: 144729 - RNA, 21 nt, Artificial Sequence
  Synthetic
cuugggagaguguaugugucg

SEQ ID NO: 144730 - RNA, 22 nt, Artificial Sequence
  Synthetic
ucuugggagaguguaugugucg

SEQ ID NO: 144731 - RNA, 24 nt, Artificial Sequence
  Synthetic
agucuugggagaguguaugugucg

SEQ ID NO: 144732 - RNA, 18 nt, Artificial Sequence
  Synthetic
ugcagccauaaaaaaagg

SEQ ID NO: 144733 - RNA, 19 nt, Artificial Sequence
  Synthetic
augcagccauaaaaaaagg

SEQ ID NO: 144734 - RNA, 20 nt, Artificial Sequence
  Synthetic
uaugcagccauaaaaaaagg

SEQ ID NO: 144735 - RNA, 21 nt, Artificial Sequence
  Synthetic
cuaugcagccauaaaaaaagg

SEQ ID NO: 144736 - RNA, 22 nt, Artificial Sequence
  Synthetic
acuaugcagccauaaaaaaagg

SEQ ID NO: 144737 - RNA, 23 nt, Artificial Sequence
  Synthetic
uacuaugcagccauaaaaaaagg

SEQ ID NO: 144738 - RNA, 24 nt, Artificial Sequence
  Synthetic
auacuaugcagccauaaaaaaagg

SEQ ID NO: 144739 - RNA, 18 nt, Artificial Sequence
  Synthetic
augcagccauaaaaaagg

SEQ ID NO: 144740 - RNA, 19 nt, Artificial Sequence
  Synthetic
uaugcagccauaaaaaagg

SEQ ID NO: 144741 - RNA, 20 nt, Artificial Sequence
  Synthetic
cuaugcagccauaaaaaagg

SEQ ID NO: 144742 - RNA, 21 nt, Artificial Sequence
  Synthetic
acuaugcagccauaaaaaagg

SEQ ID NO: 144743 - RNA, 22 nt, Artificial Sequence
  Synthetic
uacuaugcagccauaaaaaagg

SEQ ID NO: 144744 - RNA, 23 nt, Artificial Sequence
  Synthetic
auacuaugcagccauaaaaaagg

SEQ ID NO: 144745 - RNA, 24 nt, Artificial Sequence
  Synthetic
aauacuaugcagccauaaaaaagg

SEQ ID NO: 144746 - RNA, 19 nt, Artificial Sequence
  Synthetic
ugugcagccauaaaaaagg

SEQ ID NO: 144747 - RNA, 20 nt, Artificial Sequence
  Synthetic
cugugcagccauaaaaaagg

SEQ ID NO: 144748 - RNA, 21 nt, Artificial Sequence
  Synthetic
acugugcagccauaaaaaagg

SEQ ID NO: 144749 - RNA, 22 nt, Artificial Sequence
  Synthetic
uacugugcagccauaaaaaagg

SEQ ID NO: 144750 - RNA, 23 nt, Artificial Sequence
  Synthetic
auacugugcagccauaaaaaagg

SEQ ID NO: 144751 - RNA, 24 nt, Artificial Sequence
  Synthetic
aauacugugcagccauaaaaaagg

SEQ ID NO: 144752 - RNA, 18 nt, Artificial Sequence
  Synthetic
auagaagaaagaaaaagg

SEQ ID NO: 144753 - RNA, 19 nt, Artificial Sequence
  Synthetic
aauagaagaaagaaaaagg

SEQ ID NO: 144754 - RNA, 21 nt, Artificial Sequence
  Synthetic
agaauagaagaaagaaaaagg

SEQ ID NO: 144755 - RNA, 22 nt, Artificial Sequence
  Synthetic
aagaauagaagaaagaaaaagg

SEQ ID NO: 144756 - RNA, 24 nt, Artificial Sequence
  Synthetic
agaagaauagaagaaagaaaaagg

SEQ ID NO: 144757 - RNA, 18 nt, Artificial Sequence
  Synthetic
uguauauuaaugaaaagg

SEQ ID NO: 144758 - RNA, 19 nt, Artificial Sequence
  Synthetic
auguauauuaaugaaaagg

SEQ ID NO: 144759 - RNA, 20 nt, Artificial Sequence
  Synthetic
aauguauauuaaugaaaagg

SEQ ID NO: 144760 - RNA, 18 nt, Artificial Sequence
  Synthetic
ucacaaaaagugaaaagg

SEQ ID NO: 144761 - RNA, 19 nt, Artificial Sequence
  Synthetic
uucacaaaaagugaaaagg

SEQ ID NO: 144762 - RNA, 20 nt, Artificial Sequence
  Synthetic
uuucacaaaaagugaaaagg

SEQ ID NO: 144763 - RNA, 19 nt, Artificial Sequence
  Synthetic
uguguguggggauaaaagg

SEQ ID NO: 144764 - RNA, 20 nt, Artificial Sequence
  Synthetic
uuguguguggggauaaaagg

SEQ ID NO: 144765 - RNA, 18 nt, Artificial Sequence
  Synthetic
augcagccauaagaaagg

SEQ ID NO: 144766 - RNA, 19 nt, Artificial Sequence
  Synthetic
uaugcagccauaagaaagg

SEQ ID NO: 144767 - RNA, 20 nt, Artificial Sequence
  Synthetic
cuaugcagccauaagaaagg

SEQ ID NO: 144768 - RNA, 21 nt, Artificial Sequence
  Synthetic
acuaugcagccauaagaaagg

SEQ ID NO: 144769 - RNA, 22 nt, Artificial Sequence
  Synthetic
uacuaugcagccauaagaaagg

SEQ ID NO: 144770 - RNA, 23 nt, Artificial Sequence
  Synthetic
auacuaugcagccauaagaaagg

SEQ ID NO: 144771 - RNA, 24 nt, Artificial Sequence
  Synthetic
aauacuaugcagccauaagaaagg

SEQ ID NO: 144772 - RNA, 21 nt, Artificial Sequence
  Synthetic
aggggcagccagagagaaagg

SEQ ID NO: 144773 - RNA, 22 nt, Artificial Sequence
  Synthetic
uaggggcagccagagagaaagg

SEQ ID NO: 144774 - RNA, 23 nt, Artificial Sequence
  Synthetic
uuaggggcagccagagagaaagg

SEQ ID NO: 144775 - RNA, 20 nt, Artificial Sequence
  Synthetic
aggaaugggccugagaaagg

SEQ ID NO: 144776 - RNA, 21 nt, Artificial Sequence
  Synthetic
uaggaaugggccugagaaagg

SEQ ID NO: 144777 - RNA, 22 nt, Artificial Sequence
  Synthetic
uuaggaaugggccugagaaagg

SEQ ID NO: 144778 - RNA, 23 nt, Artificial Sequence
  Synthetic
cuuaggaaugggccugagaaagg

SEQ ID NO: 144779 - RNA, 24 nt, Artificial Sequence
  Synthetic
ccuuaggaaugggccugagaaagg

SEQ ID NO: 144780 - RNA, 21 nt, Artificial Sequence
  Synthetic
acaaagucacgauuagaaagg

SEQ ID NO: 144781 - RNA, 22 nt, Artificial Sequence
  Synthetic
uacaaagucacgauuagaaagg

SEQ ID NO: 144782 - RNA, 18 nt, Artificial Sequence
  Synthetic
uccauguuaauggaaagg

SEQ ID NO: 144783 - RNA, 19 nt, Artificial Sequence
  Synthetic
uuccauguuaauggaaagg

SEQ ID NO: 144784 - RNA, 20 nt, Artificial Sequence
  Synthetic
auuccauguuaauggaaagg

SEQ ID NO: 144785 - RNA, 21 nt, Artificial Sequence
  Synthetic
cauuccauguuaauggaaagg

SEQ ID NO: 144786 - RNA, 22 nt, Artificial Sequence
  Synthetic
acauuccauguuaauggaaagg

SEQ ID NO: 144787 - RNA, 23 nt, Artificial Sequence
  Synthetic
aacauuccauguuaauggaaagg

SEQ ID NO: 144788 - RNA, 24 nt, Artificial Sequence
  Synthetic
aaacauuccauguuaauggaaagg

SEQ ID NO: 144789 - RNA, 18 nt, Artificial Sequence
  Synthetic
auaggaguuucauaaagg

SEQ ID NO: 144790 - RNA, 19 nt, Artificial Sequence
  Synthetic
aauaggaguuucauaaagg

SEQ ID NO: 144791 - RNA, 20 nt, Artificial Sequence
  Synthetic
uaauaggaguuucauaaagg

SEQ ID NO: 144792 - RNA, 18 nt, Artificial Sequence
  Synthetic
aauuuccuuuuauaaagg

SEQ ID NO: 144793 - RNA, 20 nt, Artificial Sequence
  Synthetic
agaauuuccuuuuauaaagg

SEQ ID NO: 144794 - RNA, 21 nt, Artificial Sequence
  Synthetic
cagaauuuccuuuuauaaagg

SEQ ID NO: 144795 - RNA, 23 nt, Artificial Sequence
  Synthetic
ugcagaauuuccuuuuauaaagg

SEQ ID NO: 144796 - RNA, 24 nt, Artificial Sequence
  Synthetic
uugcagaauuuccuuuuauaaagg

SEQ ID NO: 144797 - RNA, 18 nt, Artificial Sequence
  Synthetic
caagaaaggaaaacaagg

SEQ ID NO: 144798 - RNA, 19 nt, Artificial Sequence
  Synthetic
acaagaaaggaaaacaagg

SEQ ID NO: 144799 - RNA, 20 nt, Artificial Sequence
  Synthetic
uacaagaaaggaaaacaagg

SEQ ID NO: 144800 - RNA, 18 nt, Artificial Sequence
  Synthetic
cauuuuuggaggccaagg

SEQ ID NO: 144801 - RNA, 20 nt, Artificial Sequence
  Synthetic
agcauuuuuggaggccaagg

SEQ ID NO: 144802 - RNA, 21 nt, Artificial Sequence
  Synthetic
cagcauuuuuggaggccaagg

SEQ ID NO: 144803 - RNA, 22 nt, Artificial Sequence
  Synthetic
ccagcauuuuuggaggccaagg

SEQ ID NO: 144804 - RNA, 23 nt, Artificial Sequence
  Synthetic
cccagcauuuuuggaggccaagg

SEQ ID NO: 144805 - RNA, 24 nt, Artificial Sequence
  Synthetic
ucccagcauuuuuggaggccaagg

SEQ ID NO: 144806 - RNA, 19 nt, Artificial Sequence
  Synthetic
aguagucaaaggaagaagg

SEQ ID NO: 144807 - RNA, 20 nt, Artificial Sequence
  Synthetic
aaguagucaaaggaagaagg

SEQ ID NO: 144808 - RNA, 18 nt, Artificial Sequence
  Synthetic
aucucugaagucugaagg

SEQ ID NO: 144809 - RNA, 18 nt, Artificial Sequence
  Synthetic
uuucuuucuuuccuaagg

SEQ ID NO: 144810 - RNA, 19 nt, Artificial Sequence
  Synthetic
auuucuuucuuuccuaagg

SEQ ID NO: 144811 - RNA, 22 nt, Artificial Sequence
  Synthetic
aggauuucuuucuuuccuaagg

SEQ ID NO: 144812 - RNA, 23 nt, Artificial Sequence
  Synthetic
caggauuucuuucuuuccuaagg

SEQ ID NO: 144813 - RNA, 24 nt, Artificial Sequence
  Synthetic
acaggauuucuuucuuuccuaagg

SEQ ID NO: 144814 - RNA, 19 nt, Artificial Sequence
  Synthetic
ugaagagaaggagguaagg

SEQ ID NO: 144815 - RNA, 20 nt, Artificial Sequence
  Synthetic
cugaagagaaggagguaagg

SEQ ID NO: 144816 - RNA, 18 nt, Artificial Sequence
  Synthetic
uuuaagaaauuauacagg

SEQ ID NO: 144817 - RNA, 19 nt, Artificial Sequence
  Synthetic
cuuuaagaaauuauacagg

SEQ ID NO: 144818 - RNA, 19 nt, Artificial Sequence
  Synthetic
agaaagagaagagcccagg

SEQ ID NO: 144819 - RNA, 20 nt, Artificial Sequence
  Synthetic
aagaaagagaagagcccagg

SEQ ID NO: 144820 - RNA, 18 nt, Artificial Sequence
  Synthetic
acuccacuguacuccagg

SEQ ID NO: 144821 - RNA, 19 nt, Artificial Sequence
  Synthetic
cacuccacuguacuccagg

SEQ ID NO: 144822 - RNA, 20 nt, Artificial Sequence
  Synthetic
ucacuccacuguacuccagg

SEQ ID NO: 144823 - RNA, 21 nt, Artificial Sequence
  Synthetic
uucacuccacuguacuccagg

SEQ ID NO: 144824 - RNA, 23 nt, Artificial Sequence
  Synthetic
uguucacuccacuguacuccagg

SEQ ID NO: 144825 - RNA, 24 nt, Artificial Sequence
  Synthetic
cuguucacuccacuguacuccagg

SEQ ID NO: 144826 - RNA, 18 nt, Artificial Sequence
  Synthetic
aggacacagaggagcagg

SEQ ID NO: 144827 - RNA, 20 nt, Artificial Sequence
  Synthetic
ugaggacacagaggagcagg

SEQ ID NO: 144828 - RNA, 18 nt, Artificial Sequence
  Synthetic
cugugguaagguugcagg

SEQ ID NO: 144829 - RNA, 18 nt, Artificial Sequence
  Synthetic
uucuguaacuucuucagg

SEQ ID NO: 144830 - RNA, 19 nt, Artificial Sequence
  Synthetic
cuucuguaacuucuucagg

SEQ ID NO: 144831 - RNA, 20 nt, Artificial Sequence
  Synthetic
ucuucuguaacuucuucagg

SEQ ID NO: 144832 - RNA, 21 nt, Artificial Sequence
  Synthetic
aucuucuguaacuucuucagg

SEQ ID NO: 144833 - RNA, 22 nt, Artificial Sequence
  Synthetic
caucuucuguaacuucuucagg

SEQ ID NO: 144834 - RNA, 23 nt, Artificial Sequence
  Synthetic
acaucuucuguaacuucuucagg

SEQ ID NO: 144835 - RNA, 24 nt, Artificial Sequence
  Synthetic
uacaucuucuguaacuucuucagg

SEQ ID NO: 144836 - RNA, 18 nt, Artificial Sequence
  Synthetic
aaaauuucuuuuuucagg

SEQ ID NO: 144837 - RNA, 19 nt, Artificial Sequence
  Synthetic
aaaaauuucuuuuuucagg

SEQ ID NO: 144838 - RNA, 20 nt, Artificial Sequence
  Synthetic
uaaaaauuucuuuuuucagg

SEQ ID NO: 144839 - RNA, 18 nt, Artificial Sequence
  Synthetic
aagaagggcaaaaagagg

SEQ ID NO: 144840 - RNA, 19 nt, Artificial Sequence
  Synthetic
aaagaagggcaaaaagagg

SEQ ID NO: 144841 - RNA, 20 nt, Artificial Sequence
  Synthetic
aaaagaagggcaaaaagagg

SEQ ID NO: 144842 - RNA, 18 nt, Artificial Sequence
  Synthetic
uaugcagccauaaagagg

SEQ ID NO: 144843 - RNA, 19 nt, Artificial Sequence
  Synthetic
cuaugcagccauaaagagg

SEQ ID NO: 144844 - RNA, 20 nt, Artificial Sequence
  Synthetic
acuaugcagccauaaagagg

SEQ ID NO: 144845 - RNA, 21 nt, Artificial Sequence
  Synthetic
uacuaugcagccauaaagagg

SEQ ID NO: 144846 - RNA, 22 nt, Artificial Sequence
  Synthetic
auacuaugcagccauaaagagg

SEQ ID NO: 144847 - RNA, 23 nt, Artificial Sequence
  Synthetic
aauacuaugcagccauaaagagg

SEQ ID NO: 144848 - RNA, 18 nt, Artificial Sequence
  Synthetic
ugugcuaguacuaagagg

SEQ ID NO: 144849 - RNA, 19 nt, Artificial Sequence
  Synthetic
augugcuaguacuaagagg

SEQ ID NO: 144850 - RNA, 20 nt, Artificial Sequence
  Synthetic
aaugugcuaguacuaagagg

SEQ ID NO: 144851 - RNA, 19 nt, Artificial Sequence
  Synthetic
agaacaggaaggacagagg

SEQ ID NO: 144852 - RNA, 19 nt, Artificial Sequence
  Synthetic
agcaucugauagucagagg

SEQ ID NO: 144853 - RNA, 20 nt, Artificial Sequence
  Synthetic
aagcaucugauagucagagg

SEQ ID NO: 144854 - RNA, 18 nt, Artificial Sequence
  Synthetic
aagugugaaggagagagg

SEQ ID NO: 144855 - RNA, 20 nt, Artificial Sequence
  Synthetic
agaagugugaaggagagagg

SEQ ID NO: 144856 - RNA, 18 nt, Artificial Sequence
  Synthetic
aggagguggagggagagg

SEQ ID NO: 144857 - RNA, 20 nt, Artificial Sequence
  Synthetic
ugaggagguggagggagagg

SEQ ID NO: 144858 - RNA, 21 nt, Artificial Sequence
  Synthetic
cugaggagguggagggagagg

SEQ ID NO: 144859 - RNA, 24 nt, Artificial Sequence
  Synthetic
aggcugaggagguggagggagagg

SEQ ID NO: 144860 - RNA, 18 nt, Artificial Sequence
  Synthetic
uugagagaaaacuagagg

SEQ ID NO: 144861 - RNA, 20 nt, Artificial Sequence
  Synthetic
uguugagagaaaacuagagg

SEQ ID NO: 144862 - RNA, 20 nt, Artificial Sequence
  Synthetic
uuguguauuuuuaguagagg

SEQ ID NO: 144863 - RNA, 21 nt, Artificial Sequence
  Synthetic
uuuguguauuuuuaguagagg

SEQ ID NO: 144864 - RNA, 22 nt, Artificial Sequence
  Synthetic
uuuuguguauuuuuaguagagg

SEQ ID NO: 144865 - RNA, 23 nt, Artificial Sequence
  Synthetic
auuuuguguauuuuuaguagagg

SEQ ID NO: 144866 - RNA, 24 nt, Artificial Sequence
  Synthetic
aauuuuguguauuuuuaguagagg

SEQ ID NO: 144867 - RNA, 18 nt, Artificial Sequence
  Synthetic
uuuuuuuuuugguagagg

SEQ ID NO: 144868 - RNA, 19 nt, Artificial Sequence
  Synthetic
uuuuuuuuuuugguagagg

SEQ ID NO: 144869 - RNA, 20 nt, Artificial Sequence
  Synthetic
uuuuuuuuuuuugguagagg

SEQ ID NO: 144870 - RNA, 21 nt, Artificial Sequence
  Synthetic
uuuuuuuuuuuuugguagagg

SEQ ID NO: 144871 - RNA, 22 nt, Artificial Sequence
  Synthetic
uuuuuuuuuuuuuugguagagg

SEQ ID NO: 144872 - RNA, 23 nt, Artificial Sequence
  Synthetic
uuuuuuuuuuuuuuugguagagg

SEQ ID NO: 144873 - RNA, 24 nt, Artificial Sequence
  Synthetic
uuuuuuuuuuuuuuuugguagagg

SEQ ID NO: 144874 - RNA, 18 nt, Artificial Sequence
  Synthetic
uuuuuuuuuuuuccgagg

SEQ ID NO: 144875 - RNA, 19 nt, Artificial Sequence
  Synthetic
uuuuuuuuuuuuuccgagg

SEQ ID NO: 144876 - RNA, 20 nt, Artificial Sequence
  Synthetic
uuuuuuuuuuuuuuccgagg

SEQ ID NO: 144877 - RNA, 21 nt, Artificial Sequence
  Synthetic
uuuuuuuuuuuuuuuccgagg

SEQ ID NO: 144878 - RNA, 22 nt, Artificial Sequence
  Synthetic
uuuuuuuuuuuuuuuuccgagg

SEQ ID NO: 144879 - RNA, 23 nt, Artificial Sequence
  Synthetic
uuuuuuuuuuuuuuuuuccgagg

SEQ ID NO: 144880 - RNA, 24 nt, Artificial Sequence
  Synthetic
uuuuuuuuuuuuuuuuuuccgagg

SEQ ID NO: 144881 - RNA, 18 nt, Artificial Sequence
  Synthetic
aaaaagagaacaaggagg

SEQ ID NO: 144882 - RNA, 19 nt, Artificial Sequence
  Synthetic
uaaaaagagaacaaggagg

SEQ ID NO: 144883 - RNA, 20 nt, Artificial Sequence
  Synthetic
auaaaaagagaacaaggagg

SEQ ID NO: 144884 - RNA, 18 nt, Artificial Sequence
  Synthetic
cuuauuugggagaggagg

SEQ ID NO: 144885 - RNA, 19 nt, Artificial Sequence
  Synthetic
acuuauuugggagaggagg

SEQ ID NO: 144886 - RNA, 18 nt, Artificial Sequence
  Synthetic
aaugcuuccaggaggagg

SEQ ID NO: 144887 - RNA, 19 nt, Artificial Sequence
  Synthetic
agugagggaaggagggagg

SEQ ID NO: 144888 - RNA, 21 nt, Artificial Sequence
  Synthetic
agagugagggaaggagggagg

SEQ ID NO: 144889 - RNA, 23 nt, Artificial Sequence
  Synthetic
agagagugagggaaggagggagg

SEQ ID NO: 144890 - RNA, 24 nt, Artificial Sequence
  Synthetic
aagagagugagggaaggagggagg

SEQ ID NO: 144891 - RNA, 18 nt, Artificial Sequence
  Synthetic
ucacuugaacccgggagg

SEQ ID NO: 144892 - RNA, 19 nt, Artificial Sequence
  Synthetic
aucacuugaacccgggagg

SEQ ID NO: 144893 - RNA, 20 nt, Artificial Sequence
  Synthetic
aaucacuugaacccgggagg

SEQ ID NO: 144894 - RNA, 22 nt, Artificial Sequence
  Synthetic
agaaucacuugaacccgggagg

SEQ ID NO: 144895 - RNA, 18 nt, Artificial Sequence
  Synthetic
uccuagaugcucgggagg

SEQ ID NO: 144896 - RNA, 20 nt, Artificial Sequence
  Synthetic
aguccuagaugcucgggagg

SEQ ID NO: 144897 - RNA, 21 nt, Artificial Sequence
  Synthetic
uaguccuagaugcucgggagg

SEQ ID NO: 144898 - RNA, 23 nt, Artificial Sequence
  Synthetic
uguaguccuagaugcucgggagg

SEQ ID NO: 144899 - RNA, 24 nt, Artificial Sequence
  Synthetic
cuguaguccuagaugcucgggagg

SEQ ID NO: 144900 - RNA, 18 nt, Artificial Sequence
  Synthetic
uaacagaggcuugggagg

SEQ ID NO: 144901 - RNA, 19 nt, Artificial Sequence
  Synthetic
uuaacagaggcuugggagg

SEQ ID NO: 144902 - RNA, 18 nt, Artificial Sequence
  Synthetic
uggcgcgaacccuggagg

SEQ ID NO: 144903 - RNA, 19 nt, Artificial Sequence
  Synthetic
auggcgcgaacccuggagg

SEQ ID NO: 144904 - RNA, 20 nt, Artificial Sequence
  Synthetic
aauggcgcgaacccuggagg

SEQ ID NO: 144905 - RNA, 22 nt, Artificial Sequence
  Synthetic
agaauggcgcgaacccuggagg

SEQ ID NO: 144906 - RNA, 18 nt, Artificial Sequence
  Synthetic
augugugugagguggagg

SEQ ID NO: 144907 - RNA, 19 nt, Artificial Sequence
  Synthetic
uaugugugugagguggagg

SEQ ID NO: 144908 - RNA, 18 nt, Artificial Sequence
  Synthetic
aaacaaaacaaaaugagg

SEQ ID NO: 144909 - RNA, 19 nt, Artificial Sequence
  Synthetic
aaaacaaaacaaaaugagg

SEQ ID NO: 144910 - RNA, 20 nt, Artificial Sequence
  Synthetic
aaaaacaaaacaaaaugagg

SEQ ID NO: 144911 - RNA, 18 nt, Artificial Sequence
  Synthetic
uucuaaaugaaaaugagg

SEQ ID NO: 144912 - RNA, 19 nt, Artificial Sequence
  Synthetic
uuucuaaaugaaaaugagg

SEQ ID NO: 144913 - RNA, 20 nt, Artificial Sequence
  Synthetic
uuuucuaaaugaaaaugagg

SEQ ID NO: 144914 - RNA, 18 nt, Artificial Sequence
  Synthetic
aggaagaaauugaugagg

SEQ ID NO: 144915 - RNA, 20 nt, Artificial Sequence
  Synthetic
ugaggaagaaauugaugagg

SEQ ID NO: 144916 - RNA, 20 nt, Artificial Sequence
  Synthetic
aggaaaagaaaugagugagg

SEQ ID NO: 144917 - RNA, 21 nt, Artificial Sequence
  Synthetic
aaggaaaagaaaugagugagg

SEQ ID NO: 144918 - RNA, 22 nt, Artificial Sequence
  Synthetic
caaggaaaagaaaugagugagg

SEQ ID NO: 144919 - RNA, 23 nt, Artificial Sequence
  Synthetic
ccaaggaaaagaaaugagugagg

SEQ ID NO: 144920 - RNA, 24 nt, Artificial Sequence
  Synthetic
uccaaggaaaagaaaugagugagg

SEQ ID NO: 144921 - RNA, 18 nt, Artificial Sequence
  Synthetic
ugggcggaucacuugagg

SEQ ID NO: 144922 - RNA, 21 nt, Artificial Sequence
  Synthetic
aggugggcggaucacuugagg

SEQ ID NO: 144923 - RNA, 23 nt, Artificial Sequence
  Synthetic
cgaggugggcggaucacuugagg

SEQ ID NO: 144924 - RNA, 24 nt, Artificial Sequence
  Synthetic
ccgaggugggcggaucacuugagg

SEQ ID NO: 144925 - RNA, 18 nt, Artificial Sequence
  Synthetic
cccuuuauagagcauagg

SEQ ID NO: 144926 - RNA, 19 nt, Artificial Sequence
  Synthetic
ucccuuuauagagcauagg

SEQ ID NO: 144927 - RNA, 20 nt, Artificial Sequence
  Synthetic
uucccuuuauagagcauagg

SEQ ID NO: 144928 - RNA, 22 nt, Artificial Sequence
  Synthetic
uguucccuuuauagagcauagg

SEQ ID NO: 144929 - RNA, 23 nt, Artificial Sequence
  Synthetic
uuguucccuuuauagagcauagg

SEQ ID NO: 144930 - RNA, 18 nt, Artificial Sequence
  Synthetic
cauauucucacucauagg

SEQ ID NO: 144931 - RNA, 20 nt, Artificial Sequence
  Synthetic
ugcauauucucacucauagg

SEQ ID NO: 144932 - RNA, 21 nt, Artificial Sequence
  Synthetic
cugcauauucucacucauagg

SEQ ID NO: 144933 - RNA, 22 nt, Artificial Sequence
  Synthetic
acugcauauucucacucauagg

SEQ ID NO: 144934 - RNA, 23 nt, Artificial Sequence
  Synthetic
cacugcauauucucacucauagg

SEQ ID NO: 144935 - RNA, 24 nt, Artificial Sequence
  Synthetic
acacugcauauucucacucauagg

SEQ ID NO: 144936 - RNA, 18 nt, Artificial Sequence
  Synthetic
ugcuuuuaggcagauagg

SEQ ID NO: 144937 - RNA, 19 nt, Artificial Sequence
  Synthetic
uugcuuuuaggcagauagg

SEQ ID NO: 144938 - RNA, 20 nt, Artificial Sequence
  Synthetic
uuugcuuuuaggcagauagg

SEQ ID NO: 144939 - RNA, 18 nt, Artificial Sequence
  Synthetic
uccaugcucauggauagg

SEQ ID NO: 144940 - RNA, 19 nt, Artificial Sequence
  Synthetic
uuccaugcucauggauagg

SEQ ID NO: 144941 - RNA, 20 nt, Artificial Sequence
  Synthetic
auuccaugcucauggauagg

SEQ ID NO: 144942 - RNA, 21 nt, Artificial Sequence
  Synthetic
cugcacguuagaaucacuagg

SEQ ID NO: 144943 - RNA, 24 nt, Artificial Sequence
  Synthetic
uggcugcacguuagaaucacuagg

SEQ ID NO: 144944 - RNA, 18 nt, Artificial Sequence
  Synthetic
uccaugcucauggguagg

SEQ ID NO: 144945 - RNA, 19 nt, Artificial Sequence
  Synthetic
uuccaugcucauggguagg

SEQ ID NO: 144946 - RNA, 20 nt, Artificial Sequence
  Synthetic
auuccaugcucauggguagg

SEQ ID NO: 144947 - RNA, 21 nt, Artificial Sequence
  Synthetic
cauuccaugcucauggguagg

SEQ ID NO: 144948 - RNA, 22 nt, Artificial Sequence
  Synthetic
acauuccaugcucauggguagg

SEQ ID NO: 144949 - RNA, 23 nt, Artificial Sequence
  Synthetic
aacauuccaugcucauggguagg

SEQ ID NO: 144950 - RNA, 18 nt, Artificial Sequence
  Synthetic
cucauaaaaugaguuagg

SEQ ID NO: 144951 - RNA, 19 nt, Artificial Sequence
  Synthetic
ccucauaaaaugaguuagg

SEQ ID NO: 144952 - RNA, 18 nt, Artificial Sequence
  Synthetic
uauucuauaauuguuagg

SEQ ID NO: 144953 - RNA, 19 nt, Artificial Sequence
  Synthetic
auauucuauaauuguuagg

SEQ ID NO: 144954 - RNA, 20 nt, Artificial Sequence
  Synthetic
uauauucuauaauuguuagg

SEQ ID NO: 144955 - RNA, 22 nt, Artificial Sequence
  Synthetic
uguauauucuauaauuguuagg

SEQ ID NO: 144956 - RNA, 23 nt, Artificial Sequence
  Synthetic
auguauauucuauaauuguuagg

SEQ ID NO: 144957 - RNA, 24 nt, Artificial Sequence
  Synthetic
aauguauauucuauaauuguuagg

SEQ ID NO: 144958 - RNA, 18 nt, Artificial Sequence
  Synthetic
uucauagaaugauuuagg

SEQ ID NO: 144959 - RNA, 19 nt, Artificial Sequence
  Synthetic
cuucauagaaugauuuagg

SEQ ID NO: 144960 - RNA, 20 nt, Artificial Sequence
  Synthetic
acuucauagaaugauuuagg

SEQ ID NO: 144961 - RNA, 22 nt, Artificial Sequence
  Synthetic
ugacuucauagaaugauuuagg

SEQ ID NO: 144962 - RNA, 23 nt, Artificial Sequence
  Synthetic
cugacuucauagaaugauuuagg

SEQ ID NO: 144963 - RNA, 24 nt, Artificial Sequence
  Synthetic
acugacuucauagaaugauuuagg

SEQ ID NO: 144964 - RNA, 21 nt, Artificial Sequence
  Synthetic
acagagggcgcagaagcacgg

SEQ ID NO: 144965 - RNA, 22 nt, Artificial Sequence
  Synthetic
cacagagggcgcagaagcacgg

SEQ ID NO: 144966 - RNA, 23 nt, Artificial Sequence
  Synthetic
ccacagagggcgcagaagcacgg

SEQ ID NO: 144967 - RNA, 24 nt, Artificial Sequence
  Synthetic
cccacagagggcgcagaagcacgg

SEQ ID NO: 144968 - RNA, 18 nt, Artificial Sequence
  Synthetic
uaaacuguauagaaccgg

SEQ ID NO: 144969 - RNA, 20 nt, Artificial Sequence
  Synthetic
uguaaacuguauagaaccgg

SEQ ID NO: 144970 - RNA, 18 nt, Artificial Sequence
  Synthetic
uuugggaggccaaggcgg

SEQ ID NO: 144971 - RNA, 19 nt, Artificial Sequence
  Synthetic
cuuugggaggccaaggcgg

SEQ ID NO: 144972 - RNA, 20 nt, Artificial Sequence
  Synthetic
acuuugggaggccaaggcgg

SEQ ID NO: 144973 - RNA, 21 nt, Artificial Sequence
  Synthetic
cacuuugggaggccaaggcgg

SEQ ID NO: 144974 - RNA, 23 nt, Artificial Sequence
  Synthetic
agcacuuugggaggccaaggcgg

SEQ ID NO: 144975 - RNA, 24 nt, Artificial Sequence
  Synthetic
cagcacuuugggaggccaaggcgg

SEQ ID NO: 144976 - RNA, 18 nt, Artificial Sequence
  Synthetic
uuugggaggcagaggcgg

SEQ ID NO: 144977 - RNA, 19 nt, Artificial Sequence
  Synthetic
cuuugggaggcagaggcgg

SEQ ID NO: 144978 - RNA, 20 nt, Artificial Sequence
  Synthetic
acuuugggaggcagaggcgg

SEQ ID NO: 144979 - RNA, 21 nt, Artificial Sequence
  Synthetic
cacuuugggaggcagaggcgg

SEQ ID NO: 144980 - RNA, 23 nt, Artificial Sequence
  Synthetic
agcacuuugggaggcagaggcgg

SEQ ID NO: 144981 - RNA, 24 nt, Artificial Sequence
  Synthetic
cagcacuuugggaggcagaggcgg

SEQ ID NO: 144982 - RNA, 18 nt, Artificial Sequence
  Synthetic
uucaggaggccgaggcgg

SEQ ID NO: 144983 - RNA, 19 nt, Artificial Sequence
  Synthetic
cuucaggaggccgaggcgg

SEQ ID NO: 144984 - RNA, 21 nt, Artificial Sequence
  Synthetic
cgcuucaggaggccgaggcgg

SEQ ID NO: 144985 - RNA, 23 nt, Artificial Sequence
  Synthetic
agcgcuucaggaggccgaggcgg

SEQ ID NO: 144986 - RNA, 24 nt, Artificial Sequence
  Synthetic
cagcgcuucaggaggccgaggcgg

SEQ ID NO: 144987 - RNA, 18 nt, Artificial Sequence
  Synthetic
uuggggaggccgaggcgg

SEQ ID NO: 144988 - RNA, 19 nt, Artificial Sequence
  Synthetic
cuuggggaggccgaggcgg

SEQ ID NO: 144989 - RNA, 20 nt, Artificial Sequence
  Synthetic
acuuggggaggccgaggcgg

SEQ ID NO: 144990 - RNA, 21 nt, Artificial Sequence
  Synthetic
cacuuggggaggccgaggcgg

SEQ ID NO: 144991 - RNA, 23 nt, Artificial Sequence
  Synthetic
agcacuuggggaggccgaggcgg

SEQ ID NO: 144992 - RNA, 24 nt, Artificial Sequence
  Synthetic
cagcacuuggggaggccgaggcgg

SEQ ID NO: 144993 - RNA, 18 nt, Artificial Sequence
  Synthetic
ucugggaggccgaggcgg

SEQ ID NO: 144994 - RNA, 19 nt, Artificial Sequence
  Synthetic
cucugggaggccgaggcgg

SEQ ID NO: 144995 - RNA, 20 nt, Artificial Sequence
  Synthetic
acucugggaggccgaggcgg

SEQ ID NO: 144996 - RNA, 21 nt, Artificial Sequence
  Synthetic
cacucugggaggccgaggcgg

SEQ ID NO: 144997 - RNA, 23 nt, Artificial Sequence
  Synthetic
agcacucugggaggccgaggcgg

SEQ ID NO: 144998 - RNA, 24 nt, Artificial Sequence
  Synthetic
cagcacucugggaggccgaggcgg

SEQ ID NO: 144999 - RNA, 18 nt, Artificial Sequence
  Synthetic
uuugggaggaugaggcgg

SEQ ID NO: 145000 - RNA, 19 nt, Artificial Sequence
  Synthetic
cuuugggaggaugaggcgg

SEQ ID NO: 145001 - RNA, 20 nt, Artificial Sequence
  Synthetic
acuuugggaggaugaggcgg

SEQ ID NO: 145002 - RNA, 21 nt, Artificial Sequence
  Synthetic
cacuuugggaggaugaggcgg

SEQ ID NO: 145003 - RNA, 23 nt, Artificial Sequence
  Synthetic
agcacuuugggaggaugaggcgg

SEQ ID NO: 145004 - RNA, 24 nt, Artificial Sequence
  Synthetic
cagcacuuugggaggaugaggcgg

SEQ ID NO: 145005 - RNA, 18 nt, Artificial Sequence
  Synthetic
uuugggagccugaggcgg

SEQ ID NO: 145006 - RNA, 19 nt, Artificial Sequence
  Synthetic
cuuugggagccugaggcgg

SEQ ID NO: 145007 - RNA, 20 nt, Artificial Sequence
  Synthetic
acuuugggagccugaggcgg

SEQ ID NO: 145008 - RNA, 21 nt, Artificial Sequence
  Synthetic
cacuuugggagccugaggcgg

SEQ ID NO: 145009 - RNA, 23 nt, Artificial Sequence
  Synthetic
agcacuuugggagccugaggcgg

SEQ ID NO: 145010 - RNA, 24 nt, Artificial Sequence
  Synthetic
cagcacuuugggagccugaggcgg

SEQ ID NO: 145011 - RNA, 21 nt, Artificial Sequence
  Synthetic
ugcuuugggaggcugaggcgg

SEQ ID NO: 145012 - RNA, 23 nt, Artificial Sequence
  Synthetic
agugcuuugggaggcugaggcgg

SEQ ID NO: 145013 - RNA, 24 nt, Artificial Sequence
  Synthetic
cagugcuuugggaggcugaggcgg

SEQ ID NO: 145014 - RNA, 19 nt, Artificial Sequence
  Synthetic
uuuugggaggcugaggcgg

SEQ ID NO: 145015 - RNA, 21 nt, Artificial Sequence
  Synthetic
uguuuugggaggcugaggcgg

SEQ ID NO: 145016 - RNA, 22 nt, Artificial Sequence
  Synthetic
uuguuuugggaggcugaggcgg

SEQ ID NO: 145017 - RNA, 23 nt, Artificial Sequence
  Synthetic
uuuguuuugggaggcugaggcgg

SEQ ID NO: 145018 - RNA, 24 nt, Artificial Sequence
  Synthetic
cuuuguuuugggaggcugaggcgg

SEQ ID NO: 145019 - RNA, 19 nt, Artificial Sequence
  Synthetic
aguacuauaaagaaaaggg

SEQ ID NO: 145020 - RNA, 20 nt, Artificial Sequence
  Synthetic
aaguacuauaaagaaaaggg

SEQ ID NO: 145021 - RNA, 18 nt, Artificial Sequence
  Synthetic
uuaaaaccaagcaaaggg

SEQ ID NO: 145022 - RNA, 19 nt, Artificial Sequence
  Synthetic
cuuaaaaccaagcaaaggg

SEQ ID NO: 145023 - RNA, 20 nt, Artificial Sequence
  Synthetic
ccuuaaaaccaagcaaaggg

SEQ ID NO: 145024 - RNA, 21 nt, Artificial Sequence
  Synthetic
uccuuaaaaccaagcaaaggg

SEQ ID NO: 145025 - RNA, 22 nt, Artificial Sequence
  Synthetic
auccuuaaaaccaagcaaaggg

SEQ ID NO: 145026 - RNA, 23 nt, Artificial Sequence
  Synthetic
cauccuuaaaaccaagcaaaggg

SEQ ID NO: 145027 - RNA, 24 nt, Artificial Sequence
  Synthetic
acauccuuaaaaccaagcaaaggg

SEQ ID NO: 145028 - RNA, 18 nt, Artificial Sequence
  Synthetic
uagacacugaagaaaggg

SEQ ID NO: 145029 - RNA, 19 nt, Artificial Sequence
  Synthetic
auagacacugaagaaaggg

SEQ ID NO: 145030 - RNA, 20 nt, Artificial Sequence
  Synthetic
aauagacacugaagaaaggg

SEQ ID NO: 145031 - RNA, 18 nt, Artificial Sequence
  Synthetic
uuauaugcuaaacaaggg

SEQ ID NO: 145032 - RNA, 19 nt, Artificial Sequence
  Synthetic
auuauaugcuaaacaaggg

SEQ ID NO: 145033 - RNA, 21 nt, Artificial Sequence
  Synthetic
ugauuauaugcuaaacaaggg

SEQ ID NO: 145034 - RNA, 22 nt, Artificial Sequence
  Synthetic
uugauuauaugcuaaacaaggg

SEQ ID NO: 145035 - RNA, 23 nt, Artificial Sequence
  Synthetic
cuugauuauaugcuaaacaaggg

SEQ ID NO: 145036 - RNA, 24 nt, Artificial Sequence
  Synthetic
ucuugauuauaugcuaaacaaggg

SEQ ID NO: 145037 - RNA, 18 nt, Artificial Sequence
  Synthetic
caggauggagaccaaggg

SEQ ID NO: 145038 - RNA, 21 nt, Artificial Sequence
  Synthetic
uggcaggauggagaccaaggg

SEQ ID NO: 145039 - RNA, 22 nt, Artificial Sequence
  Synthetic
cuggcaggauggagaccaaggg

SEQ ID NO: 145040 - RNA, 23 nt, Artificial Sequence
  Synthetic
ccuggcaggauggagaccaaggg

SEQ ID NO: 145041 - RNA, 18 nt, Artificial Sequence
  Synthetic
acucacaguucucaaggg

SEQ ID NO: 145042 - RNA, 19 nt, Artificial Sequence
  Synthetic
uacucacaguucucaaggg

SEQ ID NO: 145043 - RNA, 20 nt, Artificial Sequence
  Synthetic
uuacucacaguucucaaggg

SEQ ID NO: 145044 - RNA, 21 nt, Artificial Sequence
  Synthetic
auuacucacaguucucaaggg

SEQ ID NO: 145045 - RNA, 23 nt, Artificial Sequence
  Synthetic
ugauuacucacaguucucaaggg

SEQ ID NO: 145046 - RNA, 24 nt, Artificial Sequence
  Synthetic
uugauuacucacaguucucaaggg

SEQ ID NO: 145047 - RNA, 18 nt, Artificial Sequence
  Synthetic
augugugugugggaaggg

SEQ ID NO: 145048 - RNA, 19 nt, Artificial Sequence
  Synthetic
aggagaaaugcuugaaggg

SEQ ID NO: 145049 - RNA, 20 nt, Artificial Sequence
  Synthetic
aaggagaaaugcuugaaggg

SEQ ID NO: 145050 - RNA, 21 nt, Artificial Sequence
  Synthetic
aaaggagaaaugcuugaaggg

SEQ ID NO: 145051 - RNA, 22 nt, Artificial Sequence
  Synthetic
caaaggagaaaugcuugaaggg

SEQ ID NO: 145052 - RNA, 23 nt, Artificial Sequence
  Synthetic
acaaaggagaaaugcuugaaggg

SEQ ID NO: 145053 - RNA, 24 nt, Artificial Sequence
  Synthetic
cacaaaggagaaaugcuugaaggg

SEQ ID NO: 145054 - RNA, 19 nt, Artificial Sequence
  Synthetic
ugguugccagggaccaggg

SEQ ID NO: 145055 - RNA, 20 nt, Artificial Sequence
  Synthetic
augguugccagggaccaggg

SEQ ID NO: 145056 - RNA, 18 nt, Artificial Sequence
  Synthetic
ugaagaaugaaagcaggg

SEQ ID NO: 145057 - RNA, 19 nt, Artificial Sequence
  Synthetic
augaagaaugaaagcaggg

SEQ ID NO: 145058 - RNA, 20 nt, Artificial Sequence
  Synthetic
aaugaagaaugaaagcaggg

SEQ ID NO: 145059 - RNA, 18 nt, Artificial Sequence
  Synthetic
aagagaauagacagaggg

SEQ ID NO: 145060 - RNA, 19 nt, Artificial Sequence
  Synthetic
aaagagaauagacagaggg

SEQ ID NO: 145061 - RNA, 20 nt, Artificial Sequence
  Synthetic
aaaagagaauagacagaggg

SEQ ID NO: 145062 - RNA, 19 nt, Artificial Sequence
  Synthetic
agaaggaagcuggagaggg

SEQ ID NO: 145063 - RNA, 20 nt, Artificial Sequence
  Synthetic
cagaaggaagcuggagaggg

SEQ ID NO: 145064 - RNA, 22 nt, Artificial Sequence
  Synthetic
agcagaaggaagcuggagaggg

SEQ ID NO: 145065 - RNA, 23 nt, Artificial Sequence
  Synthetic
aagcagaaggaagcuggagaggg

SEQ ID NO: 145066 - RNA, 24 nt, Artificial Sequence
  Synthetic
aaagcagaaggaagcuggagaggg

SEQ ID NO: 145067 - RNA, 18 nt, Artificial Sequence
  Synthetic
uuuuauauacacauaggg

SEQ ID NO: 145068 - RNA, 19 nt, Artificial Sequence
  Synthetic
auuuuauauacacauaggg

SEQ ID NO: 145069 - RNA, 20 nt, Artificial Sequence
  Synthetic
uauuuuauauacacauaggg

SEQ ID NO: 145070 - RNA, 18 nt, Artificial Sequence
  Synthetic
ucauaaaaagaguuaggg

SEQ ID NO: 145071 - RNA, 19 nt, Artificial Sequence
  Synthetic
cucauaaaaagaguuaggg

SEQ ID NO: 145072 - RNA, 20 nt, Artificial Sequence
  Synthetic
ccucauaaaaagaguuaggg

SEQ ID NO: 145073 - RNA, 23 nt, Artificial Sequence
  Synthetic
uggccucauaaaaagaguuaggg

SEQ ID NO: 145074 - RNA, 24 nt, Artificial Sequence
  Synthetic
cuggccucauaaaaagaguuaggg

SEQ ID NO: 145075 - RNA, 18 nt, Artificial Sequence
  Synthetic
uugaagacucagaagggg

SEQ ID NO: 145076 - RNA, 19 nt, Artificial Sequence
  Synthetic
uuugaagacucagaagggg

SEQ ID NO: 145077 - RNA, 20 nt, Artificial Sequence
  Synthetic
cuuugaagacucagaagggg

SEQ ID NO: 145078 - RNA, 21 nt, Artificial Sequence
  Synthetic
acuuugaagacucagaagggg

SEQ ID NO: 145079 - RNA, 24 nt, Artificial Sequence
  Synthetic
uggacuuugaagacucagaagggg

SEQ ID NO: 145080 - RNA, 19 nt, Artificial Sequence
  Synthetic
aggggugggagguuagggg

SEQ ID NO: 145081 - RNA, 21 nt, Artificial Sequence
  Synthetic
cgaggggugggagguuagggg

SEQ ID NO: 145082 - RNA, 22 nt, Artificial Sequence
  Synthetic
ucgaggggugggagguuagggg

SEQ ID NO: 145083 - RNA, 24 nt, Artificial Sequence
  Synthetic
ugucgaggggugggagguuagggg

SEQ ID NO: 145084 - RNA, 18 nt, Artificial Sequence
  Synthetic
uuucucuguugcccgggg

SEQ ID NO: 145085 - RNA, 19 nt, Artificial Sequence
  Synthetic
cuuucucuguugcccgggg

SEQ ID NO: 145086 - RNA, 20 nt, Artificial Sequence
  Synthetic
ucuuucucuguugcccgggg

SEQ ID NO: 145087 - RNA, 22 nt, Artificial Sequence
  Synthetic
agucuuucucuguugcccgggg

SEQ ID NO: 145088 - RNA, 19 nt, Artificial Sequence
  Synthetic
uggggugggggaagggggg

SEQ ID NO: 145089 - RNA, 21 nt, Artificial Sequence
  Synthetic
uguggggugggggaagggggg

SEQ ID NO: 145090 - RNA, 22 nt, Artificial Sequence
  Synthetic
uuguggggugggggaagggggg

SEQ ID NO: 145091 - RNA, 24 nt, Artificial Sequence
  Synthetic
uguuguggggugggggaagggggg

SEQ ID NO: 145092 - RNA, 19 nt, Artificial Sequence
  Synthetic
uggggucgggggagggggg

SEQ ID NO: 145093 - RNA, 22 nt, Artificial Sequence
  Synthetic
ugguggggucgggggagggggg

SEQ ID NO: 145094 - RNA, 24 nt, Artificial Sequence
  Synthetic
ugugguggggucgggggagggggg

SEQ ID NO: 145095 - RNA, 21 nt, Artificial Sequence
  Synthetic
uguggggucgggggagggggg

SEQ ID NO: 145096 - RNA, 22 nt, Artificial Sequence
  Synthetic
uuguggggucgggggagggggg

SEQ ID NO: 145097 - RNA, 24 nt, Artificial Sequence
  Synthetic
uguuguggggucgggggagggggg

SEQ ID NO: 145098 - RNA, 19 nt, Artificial Sequence
  Synthetic
ugggguggggggagggggg

SEQ ID NO: 145099 - RNA, 21 nt, Artificial Sequence
  Synthetic
cgugggguggggggagggggg

SEQ ID NO: 145100 - RNA, 22 nt, Artificial Sequence
  Synthetic
ucgugggguggggggagggggg

SEQ ID NO: 145101 - RNA, 24 nt, Artificial Sequence
  Synthetic
ugucgugggguggggggagggggg

SEQ ID NO: 145102 - RNA, 22 nt, Artificial Sequence
  Synthetic
uggugggguggggggagggggg

SEQ ID NO: 145103 - RNA, 24 nt, Artificial Sequence
  Synthetic
uguggugggguggggggagggggg

SEQ ID NO: 145104 - RNA, 22 nt, Artificial Sequence
  Synthetic
uugugggguggggggagggggg

SEQ ID NO: 145105 - RNA, 24 nt, Artificial Sequence
  Synthetic
uguugugggguggggggagggggg

SEQ ID NO: 145106 - RNA, 19 nt, Artificial Sequence
  Synthetic
uguguguguguuggggggg

SEQ ID NO: 145107 - RNA, 20 nt, Artificial Sequence
  Synthetic
uuguguguguguuggggggg

SEQ ID NO: 145108 - RNA, 21 nt, Artificial Sequence
  Synthetic
auuguguguguguuggggggg

SEQ ID NO: 145109 - RNA, 22 nt, Artificial Sequence
  Synthetic
uauuguguguguguuggggggg

SEQ ID NO: 145110 - RNA, 23 nt, Artificial Sequence
  Synthetic
cuauuguguguguguuggggggg

SEQ ID NO: 145111 - RNA, 24 nt, Artificial Sequence
  Synthetic
acuauuguguguguguuggggggg

SEQ ID NO: 145112 - RNA, 18 nt, Artificial Sequence
  Synthetic
cccaucaaaaaguggggg

SEQ ID NO: 145113 - RNA, 19 nt, Artificial Sequence
  Synthetic
ccccaucaaaaaguggggg

SEQ ID NO: 145114 - RNA, 20 nt, Artificial Sequence
  Synthetic
accccaucaaaaaguggggg

SEQ ID NO: 145115 - RNA, 21 nt, Artificial Sequence
  Synthetic
aaccccaucaaaaaguggggg

SEQ ID NO: 145116 - RNA, 22 nt, Artificial Sequence
  Synthetic
caaccccaucaaaaaguggggg

SEQ ID NO: 145117 - RNA, 23 nt, Artificial Sequence
  Synthetic
acaaccccaucaaaaaguggggg

SEQ ID NO: 145118 - RNA, 24 nt, Artificial Sequence
  Synthetic
aacaaccccaucaaaaaguggggg

SEQ ID NO: 145119 - RNA, 18 nt, Artificial Sequence
  Synthetic
cacugcuugagguggggg

SEQ ID NO: 145120 - RNA, 20 nt, Artificial Sequence
  Synthetic
ugcacugcuugagguggggg

SEQ ID NO: 145121 - RNA, 21 nt, Artificial Sequence
  Synthetic
cugcacugcuugagguggggg

SEQ ID NO: 145122 - RNA, 18 nt, Artificial Sequence
  Synthetic
ccuguugugggguggggg

SEQ ID NO: 145123 - RNA, 18 nt, Artificial Sequence
  Synthetic
uucuuucuuuuuuggggg

SEQ ID NO: 145124 - RNA, 19 nt, Artificial Sequence
  Synthetic
uuucuuucuuuuuuggggg

SEQ ID NO: 145125 - RNA, 20 nt, Artificial Sequence
  Synthetic
uuuucuuucuuuuuuggggg

SEQ ID NO: 145126 - RNA, 21 nt, Artificial Sequence
  Synthetic
auuuucuuucuuuuuuggggg

SEQ ID NO: 145127 - RNA, 23 nt, Artificial Sequence
  Synthetic
ugauuuucuuucuuuuuuggggg

SEQ ID NO: 145128 - RNA, 24 nt, Artificial Sequence
  Synthetic
augauuuucuuucuuuuuuggggg

SEQ ID NO: 145129 - RNA, 18 nt, Artificial Sequence
  Synthetic
ccucugaaggcucugggg

SEQ ID NO: 145130 - RNA, 19 nt, Artificial Sequence
  Synthetic
cccucugaaggcucugggg

SEQ ID NO: 145131 - RNA, 20 nt, Artificial Sequence
  Synthetic
ucccucugaaggcucugggg

SEQ ID NO: 145132 - RNA, 21 nt, Artificial Sequence
  Synthetic
aucccucugaaggcucugggg

SEQ ID NO: 145133 - RNA, 22 nt, Artificial Sequence
  Synthetic
uaucccucugaaggcucugggg

SEQ ID NO: 145134 - RNA, 23 nt, Artificial Sequence
  Synthetic
uuaucccucugaaggcucugggg

SEQ ID NO: 145135 - RNA, 24 nt, Artificial Sequence
  Synthetic
auuaucccucugaaggcucugggg

SEQ ID NO: 145136 - RNA, 18 nt, Artificial Sequence
  Synthetic
agagaguugguggugggg

SEQ ID NO: 145137 - RNA, 20 nt, Artificial Sequence
  Synthetic
agagagaguugguggugggg

SEQ ID NO: 145138 - RNA, 22 nt, Artificial Sequence
  Synthetic
agagagagaguugguggugggg

SEQ ID NO: 145139 - RNA, 24 nt, Artificial Sequence
  Synthetic
agagagagagaguugguggugggg

SEQ ID NO: 145140 - RNA, 18 nt, Artificial Sequence
  Synthetic
caacauuuuaagaauggg

SEQ ID NO: 145141 - RNA, 20 nt, Artificial Sequence
  Synthetic
agcaacauuuuaagaauggg

SEQ ID NO: 145142 - RNA, 19 nt, Artificial Sequence
  Synthetic
uguaccugaaagugauggg

SEQ ID NO: 145143 - RNA, 22 nt, Artificial Sequence
  Synthetic
ugguguaccugaaagugauggg

SEQ ID NO: 145144 - RNA, 23 nt, Artificial Sequence
  Synthetic
uugguguaccugaaagugauggg

SEQ ID NO: 145145 - RNA, 24 nt, Artificial Sequence
  Synthetic
auugguguaccugaaagugauggg

SEQ ID NO: 145146 - RNA, 18 nt, Artificial Sequence
  Synthetic
aggauaaguaaguauggg

SEQ ID NO: 145147 - RNA, 19 nt, Artificial Sequence
  Synthetic
aaggauaaguaaguauggg

SEQ ID NO: 145148 - RNA, 19 nt, Artificial Sequence
  Synthetic
uguucaucuaggcacuggg

SEQ ID NO: 145149 - RNA, 20 nt, Artificial Sequence
  Synthetic
uuguucaucuaggcacuggg

SEQ ID NO: 145150 - RNA, 21 nt, Artificial Sequence
  Synthetic
uccaaauaggcauauucuggg

SEQ ID NO: 145151 - RNA, 22 nt, Artificial Sequence
  Synthetic
uuccaaauaggcauauucuggg

SEQ ID NO: 145152 - RNA, 23 nt, Artificial Sequence
  Synthetic
auuccaaauaggcauauucuggg

SEQ ID NO: 145153 - RNA, 24 nt, Artificial Sequence
  Synthetic
uauuccaaauaggcauauucuggg

SEQ ID NO: 145154 - RNA, 18 nt, Artificial Sequence
  Synthetic
auuccuacuuguuguggg

SEQ ID NO: 145155 - RNA, 19 nt, Artificial Sequence
  Synthetic
aauuccuacuuguuguggg

SEQ ID NO: 145156 - RNA, 20 nt, Artificial Sequence
  Synthetic
uaauuccuacuuguuguggg

SEQ ID NO: 145157 - RNA, 21 nt, Artificial Sequence
  Synthetic
auaauuccuacuuguuguggg

SEQ ID NO: 145158 - RNA, 22 nt, Artificial Sequence
  Synthetic
cauaauuccuacuuguuguggg

SEQ ID NO: 145159 - RNA, 23 nt, Artificial Sequence
  Synthetic
ccauaauuccuacuuguuguggg

SEQ ID NO: 145160 - RNA, 24 nt, Artificial Sequence
  Synthetic
cccauaauuccuacuuguuguggg

SEQ ID NO: 145161 - RNA, 18 nt, Artificial Sequence
  Synthetic
uuaugagaagaguuuggg

SEQ ID NO: 145162 - RNA, 19 nt, Artificial Sequence
  Synthetic
uuuaugagaagaguuuggg

SEQ ID NO: 145163 - RNA, 20 nt, Artificial Sequence
  Synthetic
uuuuaugagaagaguuuggg

SEQ ID NO: 145164 - RNA, 18 nt, Artificial Sequence
  Synthetic
auucaggaaggaaaaugg

SEQ ID NO: 145165 - RNA, 19 nt, Artificial Sequence
  Synthetic
uauucaggaaggaaaaugg

SEQ ID NO: 145166 - RNA, 20 nt, Artificial Sequence
  Synthetic
uuauucaggaaggaaaaugg

SEQ ID NO: 145167 - RNA, 18 nt, Artificial Sequence
  Synthetic
cucauccucuuaaaaugg

SEQ ID NO: 145168 - RNA, 19 nt, Artificial Sequence
  Synthetic
ccucauccucuuaaaaugg

SEQ ID NO: 145169 - RNA, 21 nt, Artificial Sequence
  Synthetic
cgccucauccucuuaaaaugg

SEQ ID NO: 145170 - RNA, 22 nt, Artificial Sequence
  Synthetic
ccgccucauccucuuaaaaugg

SEQ ID NO: 145171 - RNA, 23 nt, Artificial Sequence
  Synthetic
cccgccucauccucuuaaaaugg

SEQ ID NO: 145172 - RNA, 24 nt, Artificial Sequence
  Synthetic
ucccgccucauccucuuaaaaugg

SEQ ID NO: 145173 - RNA, 18 nt, Artificial Sequence
  Synthetic
uuugagaggccgaaaugg

SEQ ID NO: 145174 - RNA, 19 nt, Artificial Sequence
  Synthetic
cuuugagaggccgaaaugg

SEQ ID NO: 145175 - RNA, 20 nt, Artificial Sequence
  Synthetic
acuuugagaggccgaaaugg

SEQ ID NO: 145176 - RNA, 21 nt, Artificial Sequence
  Synthetic
cacuuugagaggccgaaaugg

SEQ ID NO: 145177 - RNA, 23 nt, Artificial Sequence
  Synthetic
agcacuuugagaggccgaaaugg

SEQ ID NO: 145178 - RNA, 24 nt, Artificial Sequence
  Synthetic
cagcacuuugagaggccgaaaugg

SEQ ID NO: 145179 - RNA, 21 nt, Artificial Sequence
  Synthetic
aacucuguagaaguggaaugg

SEQ ID NO: 145180 - RNA, 22 nt, Artificial Sequence
  Synthetic
uaacucuguagaaguggaaugg

SEQ ID NO: 145181 - RNA, 24 nt, Artificial Sequence
  Synthetic
aguaacucuguagaaguggaaugg

SEQ ID NO: 145182 - RNA, 18 nt, Artificial Sequence
  Synthetic
auuuauuaaaaugaaugg

SEQ ID NO: 145183 - RNA, 19 nt, Artificial Sequence
  Synthetic
uauuuauuaaaaugaaugg

SEQ ID NO: 145184 - RNA, 20 nt, Artificial Sequence
  Synthetic
auauuuauuaaaaugaaugg

SEQ ID NO: 145185 - RNA, 21 nt, Artificial Sequence
  Synthetic
aaccuauuaauuuaugaaugg

SEQ ID NO: 145186 - RNA, 22 nt, Artificial Sequence
  Synthetic
uaaccuauuaauuuaugaaugg

SEQ ID NO: 145187 - RNA, 23 nt, Artificial Sequence
  Synthetic
uuaaccuauuaauuuaugaaugg

SEQ ID NO: 145188 - RNA, 24 nt, Artificial Sequence
  Synthetic
auuaaccuauuaauuuaugaaugg

SEQ ID NO: 145189 - RNA, 18 nt, Artificial Sequence
  Synthetic
cauuuggugaauuaaugg

SEQ ID NO: 145190 - RNA, 19 nt, Artificial Sequence
  Synthetic
acauuuggugaauuaaugg

SEQ ID NO: 145191 - RNA, 20 nt, Artificial Sequence
  Synthetic
aacauuuggugaauuaaugg

SEQ ID NO: 145192 - RNA, 18 nt, Artificial Sequence
  Synthetic
aagaagacauuuuaaugg

SEQ ID NO: 145193 - RNA, 19 nt, Artificial Sequence
  Synthetic
aaagaagacauuuuaaugg

SEQ ID NO: 145194 - RNA, 20 nt, Artificial Sequence
  Synthetic
aaaagaagacauuuuaaugg

SEQ ID NO: 145195 - RNA, 18 nt, Artificial Sequence
  Synthetic
acucacaguuccacaugg

SEQ ID NO: 145196 - RNA, 20 nt, Artificial Sequence
  Synthetic
ugacucacaguuccacaugg

SEQ ID NO: 145197 - RNA, 21 nt, Artificial Sequence
  Synthetic
uugacucacaguuccacaugg

SEQ ID NO: 145198 - RNA, 22 nt, Artificial Sequence
  Synthetic
auugacucacaguuccacaugg

SEQ ID NO: 145199 - RNA, 23 nt, Artificial Sequence
  Synthetic
aauugacucacaguuccacaugg

SEQ ID NO: 145200 - RNA, 24 nt, Artificial Sequence
  Synthetic
uaauugacucacaguuccacaugg

SEQ ID NO: 145201 - RNA, 18 nt, Artificial Sequence
  Synthetic
uacuuuguagggacaugg

SEQ ID NO: 145202 - RNA, 19 nt, Artificial Sequence
  Synthetic
auacuuuguagggacaugg

SEQ ID NO: 145203 - RNA, 20 nt, Artificial Sequence
  Synthetic
aauacuuuguagggacaugg

SEQ ID NO: 145204 - RNA, 18 nt, Artificial Sequence
  Synthetic
ugguuuuugguuacaugg

SEQ ID NO: 145205 - RNA, 21 nt, Artificial Sequence
  Synthetic
aggugguuuuugguuacaugg

SEQ ID NO: 145206 - RNA, 22 nt, Artificial Sequence
  Synthetic
uaggugguuuuugguuacaugg

SEQ ID NO: 145207 - RNA, 23 nt, Artificial Sequence
  Synthetic
auaggugguuuuugguuacaugg

SEQ ID NO: 145208 - RNA, 24 nt, Artificial Sequence
  Synthetic
uauaggugguuuuugguuacaugg

SEQ ID NO: 145209 - RNA, 18 nt, Artificial Sequence
  Synthetic
ucauuaagugaugcaugg

SEQ ID NO: 145210 - RNA, 20 nt, Artificial Sequence
  Synthetic
ugucauuaagugaugcaugg

SEQ ID NO: 145211 - RNA, 21 nt, Artificial Sequence
  Synthetic
cugucauuaagugaugcaugg

SEQ ID NO: 145212 - RNA, 22 nt, Artificial Sequence
  Synthetic
ccugucauuaagugaugcaugg

SEQ ID NO: 145213 - RNA, 23 nt, Artificial Sequence
  Synthetic
uccugucauuaagugaugcaugg

SEQ ID NO: 145214 - RNA, 24 nt, Artificial Sequence
  Synthetic
uuccugucauuaagugaugcaugg

SEQ ID NO: 145215 - RNA, 18 nt, Artificial Sequence
  Synthetic
auaguaaaauguucaugg

SEQ ID NO: 145216 - RNA, 19 nt, Artificial Sequence
  Synthetic
uauaguaaaauguucaugg

SEQ ID NO: 145217 - RNA, 21 nt, Artificial Sequence
  Synthetic
aguauaguaaaauguucaugg

SEQ ID NO: 145218 - RNA, 23 nt, Artificial Sequence
  Synthetic
cgaguauaguaaaauguucaugg

SEQ ID NO: 145219 - RNA, 24 nt, Artificial Sequence
  Synthetic
acgaguauaguaaaauguucaugg

SEQ ID NO: 145220 - RNA, 18 nt, Artificial Sequence
  Synthetic
aaaagcaaaaaaagaugg

SEQ ID NO: 145221 - RNA, 20 nt, Artificial Sequence
  Synthetic
agaaaagcaaaaaaagaugg

SEQ ID NO: 145222 - RNA, 18 nt, Artificial Sequence
  Synthetic
aaguggcuggcaagaugg

SEQ ID NO: 145223 - RNA, 20 nt, Artificial Sequence
  Synthetic
agaaguggcuggcaagaugg

SEQ ID NO: 145224 - RNA, 18 nt, Artificial Sequence
  Synthetic
uuugggaggccgagaugg

SEQ ID NO: 145225 - RNA, 19 nt, Artificial Sequence
  Synthetic
cuuugggaggccgagaugg

SEQ ID NO: 145226 - RNA, 20 nt, Artificial Sequence
  Synthetic
acuuugggaggccgagaugg

SEQ ID NO: 145227 - RNA, 21 nt, Artificial Sequence
  Synthetic
cacuuugggaggccgagaugg

SEQ ID NO: 145228 - RNA, 23 nt, Artificial Sequence
  Synthetic
agcacuuugggaggccgagaugg

SEQ ID NO: 145229 - RNA, 24 nt, Artificial Sequence
  Synthetic
cagcacuuugggaggccgagaugg

SEQ ID NO: 145230 - RNA, 18 nt, Artificial Sequence
  Synthetic
aaaauaagaaugagaugg

SEQ ID NO: 145231 - RNA, 20 nt, Artificial Sequence
  Synthetic
ugaaaauaagaaugagaugg

SEQ ID NO: 145232 - RNA, 18 nt, Artificial Sequence
  Synthetic
cucaggaggcugagaugg

SEQ ID NO: 145233 - RNA, 19 nt, Artificial Sequence
  Synthetic
acucaggaggcugagaugg

SEQ ID NO: 145234 - RNA, 20 nt, Artificial Sequence
  Synthetic
uacucaggaggcugagaugg

SEQ ID NO: 145235 - RNA, 21 nt, Artificial Sequence
  Synthetic
cuacucaggaggcugagaugg

SEQ ID NO: 145236 - RNA, 23 nt, Artificial Sequence
  Synthetic
agcuacucaggaggcugagaugg

SEQ ID NO: 145237 - RNA, 24 nt, Artificial Sequence
  Synthetic
cagcuacucaggaggcugagaugg

SEQ ID NO: 145238 - RNA, 18 nt, Artificial Sequence
  Synthetic
cucaaagcaaagggaugg

SEQ ID NO: 145239 - RNA, 21 nt, Artificial Sequence
  Synthetic
aggcucaaagcaaagggaugg

SEQ ID NO: 145240 - RNA, 22 nt, Artificial Sequence
  Synthetic
uaggcucaaagcaaagggaugg

SEQ ID NO: 145241 - RNA, 23 nt, Artificial Sequence
  Synthetic
auaggcucaaagcaaagggaugg

SEQ ID NO: 145242 - RNA, 24 nt, Artificial Sequence
  Synthetic
cauaggcucaaagcaaagggaugg

SEQ ID NO: 145243 - RNA, 18 nt, Artificial Sequence
  Synthetic
uggugaauuaauggaugg

SEQ ID NO: 145244 - RNA, 19 nt, Artificial Sequence
  Synthetic
uuggugaauuaauggaugg

SEQ ID NO: 145245 - RNA, 20 nt, Artificial Sequence
  Synthetic
uuuggugaauuaauggaugg

SEQ ID NO: 145246 - RNA, 21 nt, Artificial Sequence
  Synthetic
auuuggugaauuaauggaugg

SEQ ID NO: 145247 - RNA, 22 nt, Artificial Sequence
  Synthetic
cauuuggugaauuaauggaugg

SEQ ID NO: 145248 - RNA, 23 nt, Artificial Sequence
  Synthetic
acauuuggugaauuaauggaugg

SEQ ID NO: 145249 - RNA, 24 nt, Artificial Sequence
  Synthetic
aacauuuggugaauuaauggaugg

SEQ ID NO: 145250 - RNA, 18 nt, Artificial Sequence
  Synthetic
aauaugauugauugaugg

SEQ ID NO: 145251 - RNA, 19 nt, Artificial Sequence
  Synthetic
aaauaugauugauugaugg

SEQ ID NO: 145252 - RNA, 20 nt, Artificial Sequence
  Synthetic
aaaauaugauugauugaugg

SEQ ID NO: 145253 - RNA, 21 nt, Artificial Sequence
  Synthetic
aaaaauaugauugauugaugg

SEQ ID NO: 145254 - RNA, 22 nt, Artificial Sequence
  Synthetic
caaaaauaugauugauugaugg

SEQ ID NO: 145255 - RNA, 23 nt, Artificial Sequence
  Synthetic
ucaaaaauaugauugauugaugg

SEQ ID NO: 145256 - RNA, 24 nt, Artificial Sequence
  Synthetic
aucaaaaauaugauugauugaugg

SEQ ID NO: 145257 - RNA, 18 nt, Artificial Sequence
  Synthetic
aaggaaagagaaauaugg

SEQ ID NO: 145258 - RNA, 19 nt, Artificial Sequence
  Synthetic
aaaggaaagagaaauaugg

SEQ ID NO: 145259 - RNA, 20 nt, Artificial Sequence
  Synthetic
caaaggaaagagaaauaugg

SEQ ID NO: 145260 - RNA, 18 nt, Artificial Sequence
  Synthetic
ucucaaucuuuucuaugg

SEQ ID NO: 145261 - RNA, 19 nt, Artificial Sequence
  Synthetic
aucucaaucuuuucuaugg

SEQ ID NO: 145262 - RNA, 22 nt, Artificial Sequence
  Synthetic
aggaucucaaucuuuucuaugg

SEQ ID NO: 145263 - RNA, 23 nt, Artificial Sequence
  Synthetic
caggaucucaaucuuuucuaugg

SEQ ID NO: 145264 - RNA, 24 nt, Artificial Sequence
  Synthetic
acaggaucucaaucuuuucuaugg

SEQ ID NO: 145265 - RNA, 18 nt, Artificial Sequence
  Synthetic
auuucacccuuuguaugg

SEQ ID NO: 145266 - RNA, 21 nt, Artificial Sequence
  Synthetic
aggauuucacccuuuguaugg

SEQ ID NO: 145267 - RNA, 22 nt, Artificial Sequence
  Synthetic
caggauuucacccuuuguaugg

SEQ ID NO: 145268 - RNA, 23 nt, Artificial Sequence
  Synthetic
acaggauuucacccuuuguaugg

SEQ ID NO: 145269 - RNA, 18 nt, Artificial Sequence
  Synthetic
cugcaugugucuuuaugg

SEQ ID NO: 145270 - RNA, 20 nt, Artificial Sequence
  Synthetic
agcugcaugugucuuuaugg

SEQ ID NO: 145271 - RNA, 21 nt, Artificial Sequence
  Synthetic
cagcugcaugugucuuuaugg

SEQ ID NO: 145272 - RNA, 22 nt, Artificial Sequence
  Synthetic
acagcugcaugugucuuuaugg

SEQ ID NO: 145273 - RNA, 23 nt, Artificial Sequence
  Synthetic
uacagcugcaugugucuuuaugg

SEQ ID NO: 145274 - RNA, 24 nt, Artificial Sequence
  Synthetic
auacagcugcaugugucuuuaugg

SEQ ID NO: 145275 - RNA, 18 nt, Artificial Sequence
  Synthetic
aaauauaguauuuuaugg

SEQ ID NO: 145276 - RNA, 19 nt, Artificial Sequence
  Synthetic
aaaauauaguauuuuaugg

SEQ ID NO: 145277 - RNA, 20 nt, Artificial Sequence
  Synthetic
aaaaauauaguauuuuaugg

SEQ ID NO: 145278 - RNA, 21 nt, Artificial Sequence
  Synthetic
aaaaaauauaguauuuuaugg

SEQ ID NO: 145279 - RNA, 22 nt, Artificial Sequence
  Synthetic
aaaaaaauauaguauuuuaugg

SEQ ID NO: 145280 - RNA, 24 nt, Artificial Sequence
  Synthetic
ugaaaaaaauauaguauuuuaugg

SEQ ID NO: 145281 - RNA, 18 nt, Artificial Sequence
  Synthetic
auucauuccuuuuuaugg

SEQ ID NO: 145282 - RNA, 19 nt, Artificial Sequence
  Synthetic
aauucauuccuuuuuaugg

SEQ ID NO: 145283 - RNA, 20 nt, Artificial Sequence
  Synthetic
uaauucauuccuuuuuaugg

SEQ ID NO: 145284 - RNA, 21 nt, Artificial Sequence
  Synthetic
uuaauucauuccuuuuuaugg

SEQ ID NO: 145285 - RNA, 23 nt, Artificial Sequence
  Synthetic
uguuaauucauuccuuuuuaugg

SEQ ID NO: 145286 - RNA, 24 nt, Artificial Sequence
  Synthetic
cuguuaauucauuccuuuuuaugg

SEQ ID NO: 145287 - RNA, 18 nt, Artificial Sequence
  Synthetic
aucucauucuuuuuaugg

SEQ ID NO: 145288 - RNA, 21 nt, Artificial Sequence
  Synthetic
aggaucucauucuuuuuaugg

SEQ ID NO: 145289 - RNA, 22 nt, Artificial Sequence
  Synthetic
aaggaucucauucuuuuuaugg

SEQ ID NO: 145290 - RNA, 23 nt, Artificial Sequence
  Synthetic
aaaggaucucauucuuuuuaugg

SEQ ID NO: 145291 - RNA, 18 nt, Artificial Sequence
  Synthetic
caagcuuuucuuuacugg

SEQ ID NO: 145292 - RNA, 19 nt, Artificial Sequence
  Synthetic
ccaagcuuuucuuuacugg

SEQ ID NO: 145293 - RNA, 20 nt, Artificial Sequence
  Synthetic
cccaagcuuuucuuuacugg

SEQ ID NO: 145294 - RNA, 21 nt, Artificial Sequence
  Synthetic
ucccaagcuuuucuuuacugg

SEQ ID NO: 145295 - RNA, 18 nt, Artificial Sequence
  Synthetic
uccucuuugcaccucugg

SEQ ID NO: 145296 - RNA, 19 nt, Artificial Sequence
  Synthetic
uuccucuuugcaccucugg

SEQ ID NO: 145297 - RNA, 21 nt, Artificial Sequence
  Synthetic
aguuccucuuugcaccucugg

SEQ ID NO: 145298 - RNA, 22 nt, Artificial Sequence
  Synthetic
caguuccucuuugcaccucugg

SEQ ID NO: 145299 - RNA, 23 nt, Artificial Sequence
  Synthetic
ccaguuccucuuugcaccucugg

SEQ ID NO: 145300 - RNA, 24 nt, Artificial Sequence
  Synthetic
accaguuccucuuugcaccucugg

SEQ ID NO: 145301 - RNA, 18 nt, Artificial Sequence
  Synthetic
uccuccuuguaccucugg

SEQ ID NO: 145302 - RNA, 19 nt, Artificial Sequence
  Synthetic
uuccuccuuguaccucugg

SEQ ID NO: 145303 - RNA, 21 nt, Artificial Sequence
  Synthetic
aguuccuccuuguaccucugg

SEQ ID NO: 145304 - RNA, 22 nt, Artificial Sequence
  Synthetic
caguuccuccuuguaccucugg

SEQ ID NO: 145305 - RNA, 23 nt, Artificial Sequence
  Synthetic
ccaguuccuccuuguaccucugg

SEQ ID NO: 145306 - RNA, 24 nt, Artificial Sequence
  Synthetic
accaguuccuccuuguaccucugg

SEQ ID NO: 145307 - RNA, 20 nt, Artificial Sequence
  Synthetic
aggacucaaaguugcucugg

SEQ ID NO: 145308 - RNA, 21 nt, Artificial Sequence
  Synthetic
caggacucaaaguugcucugg

SEQ ID NO: 145309 - RNA, 23 nt, Artificial Sequence
  Synthetic
ugcaggacucaaaguugcucugg

SEQ ID NO: 145310 - RNA, 24 nt, Artificial Sequence
  Synthetic
uugcaggacucaaaguugcucugg

SEQ ID NO: 145311 - RNA, 18 nt, Artificial Sequence
  Synthetic
uccucuuuguaucucugg

SEQ ID NO: 145312 - RNA, 19 nt, Artificial Sequence
  Synthetic
cuccucuuuguaucucugg

SEQ ID NO: 145313 - RNA, 21 nt, Artificial Sequence
  Synthetic
agcuccucuuuguaucucugg

SEQ ID NO: 145314 - RNA, 22 nt, Artificial Sequence
  Synthetic
cagcuccucuuuguaucucugg

SEQ ID NO: 145315 - RNA, 23 nt, Artificial Sequence
  Synthetic
ccagcuccucuuuguaucucugg

SEQ ID NO: 145316 - RNA, 24 nt, Artificial Sequence
  Synthetic
accagcuccucuuuguaucucugg

SEQ ID NO: 145317 - RNA, 18 nt, Artificial Sequence
  Synthetic
ucuucuuugaaugucugg

SEQ ID NO: 145318 - RNA, 19 nt, Artificial Sequence
  Synthetic
uucuucuuugaaugucugg

SEQ ID NO: 145319 - RNA, 20 nt, Artificial Sequence
  Synthetic
auucuucuuugaaugucugg

SEQ ID NO: 145320 - RNA, 21 nt, Artificial Sequence
  Synthetic
aauucuucuuugaaugucugg

SEQ ID NO: 145321 - RNA, 22 nt, Artificial Sequence
  Synthetic
caauucuucuuugaaugucugg

SEQ ID NO: 145322 - RNA, 23 nt, Artificial Sequence
  Synthetic
ccaauucuucuuugaaugucugg

SEQ ID NO: 145323 - RNA, 24 nt, Artificial Sequence
  Synthetic
accaauucuucuuugaaugucugg

SEQ ID NO: 145324 - RNA, 18 nt, Artificial Sequence
  Synthetic
cucagccucccaaagugg

SEQ ID NO: 145325 - RNA, 19 nt, Artificial Sequence
  Synthetic
ccucagccucccaaagugg

SEQ ID NO: 145326 - RNA, 21 nt, Artificial Sequence
  Synthetic
ugccucagccucccaaagugg

SEQ ID NO: 145327 - RNA, 22 nt, Artificial Sequence
  Synthetic
cugccucagccucccaaagugg

SEQ ID NO: 145328 - RNA, 23 nt, Artificial Sequence
  Synthetic
ccugccucagccucccaaagugg

SEQ ID NO: 145329 - RNA, 21 nt, Artificial Sequence
  Synthetic
agcuuaagugucugaaagugg

SEQ ID NO: 145330 - RNA, 23 nt, Artificial Sequence
  Synthetic
agagcuuaagugucugaaagugg

SEQ ID NO: 145331 - RNA, 18 nt, Artificial Sequence
  Synthetic
uuugggaggccgaagugg

SEQ ID NO: 145332 - RNA, 19 nt, Artificial Sequence
  Synthetic
cuuugggaggccgaagugg

SEQ ID NO: 145333 - RNA, 20 nt, Artificial Sequence
  Synthetic
acuuugggaggccgaagugg

SEQ ID NO: 145334 - RNA, 21 nt, Artificial Sequence
  Synthetic
cacuuugggaggccgaagugg

SEQ ID NO: 145335 - RNA, 22 nt, Artificial Sequence
  Synthetic
acacuuugggaggccgaagugg

SEQ ID NO: 145336 - RNA, 23 nt, Artificial Sequence
  Synthetic
aacacuuugggaggccgaagugg

SEQ ID NO: 145337 - RNA, 24 nt, Artificial Sequence
  Synthetic
caacacuuugggaggccgaagugg

SEQ ID NO: 145338 - RNA, 18 nt, Artificial Sequence
  Synthetic
auuaugcacuuuaagugg

SEQ ID NO: 145339 - RNA, 19 nt, Artificial Sequence
  Synthetic
aauuaugcacuuuaagugg

SEQ ID NO: 145340 - RNA, 20 nt, Artificial Sequence
  Synthetic
aaauuaugcacuuuaagugg

SEQ ID NO: 145341 - RNA, 18 nt, Artificial Sequence
  Synthetic
caggcuggagugcagugg

SEQ ID NO: 145342 - RNA, 19 nt, Artificial Sequence
  Synthetic
ccaggcuggagugcagugg

SEQ ID NO: 145343 - RNA, 20 nt, Artificial Sequence
  Synthetic
cccaggcuggagugcagugg

SEQ ID NO: 145344 - RNA, 18 nt, Artificial Sequence
  Synthetic
cuaaacguccaucagugg

SEQ ID NO: 145345 - RNA, 19 nt, Artificial Sequence
  Synthetic
ccuaaacguccaucagugg

SEQ ID NO: 145346 - RNA, 20 nt, Artificial Sequence
  Synthetic
accuaaacguccaucagugg

SEQ ID NO: 145347 - RNA, 21 nt, Artificial Sequence
  Synthetic
aaccuaaacguccaucagugg

SEQ ID NO: 145348 - RNA, 22 nt, Artificial Sequence
  Synthetic
caaccuaaacguccaucagugg

SEQ ID NO: 145349 - RNA, 23 nt, Artificial Sequence
  Synthetic
ucaaccuaaacguccaucagugg

SEQ ID NO: 145350 - RNA, 24 nt, Artificial Sequence
  Synthetic
aucaaccuaaacguccaucagugg

SEQ ID NO: 145351 - RNA, 18 nt, Artificial Sequence
  Synthetic
cuaaguuuccaucagugg

SEQ ID NO: 145352 - RNA, 19 nt, Artificial Sequence
  Synthetic
ccuaaguuuccaucagugg

SEQ ID NO: 145353 - RNA, 20 nt, Artificial Sequence
  Synthetic
accuaaguuuccaucagugg

SEQ ID NO: 145354 - RNA, 21 nt, Artificial Sequence
  Synthetic
aaccuaaguuuccaucagugg

SEQ ID NO: 145355 - RNA, 22 nt, Artificial Sequence
  Synthetic
caaccuaaguuuccaucagugg

SEQ ID NO: 145356 - RNA, 23 nt, Artificial Sequence
  Synthetic
ucaaccuaaguuuccaucagugg

SEQ ID NO: 145357 - RNA, 24 nt, Artificial Sequence
  Synthetic
aucaaccuaaguuuccaucagugg

SEQ ID NO: 145358 - RNA, 18 nt, Artificial Sequence
  Synthetic
uuugggaggccuacgugg

SEQ ID NO: 145359 - RNA, 19 nt, Artificial Sequence
  Synthetic
cuuugggaggccuacgugg

SEQ ID NO: 145360 - RNA, 20 nt, Artificial Sequence
  Synthetic
acuuugggaggccuacgugg

SEQ ID NO: 145361 - RNA, 21 nt, Artificial Sequence
  Synthetic
cacuuugggaggccuacgugg

SEQ ID NO: 145362 - RNA, 23 nt, Artificial Sequence
  Synthetic
agcacuuugggaggccuacgugg

SEQ ID NO: 145363 - RNA, 24 nt, Artificial Sequence
  Synthetic
cagcacuuugggaggccuacgugg

SEQ ID NO: 145364 - RNA, 18 nt, Artificial Sequence
  Synthetic
uuugagagaccaaggugg

SEQ ID NO: 145365 - RNA, 19 nt, Artificial Sequence
  Synthetic
cuuugagagaccaaggugg

SEQ ID NO: 145366 - RNA, 20 nt, Artificial Sequence
  Synthetic
acuuugagagaccaaggugg

SEQ ID NO: 145367 - RNA, 21 nt, Artificial Sequence
  Synthetic
cacuuugagagaccaaggugg

SEQ ID NO: 145368 - RNA, 23 nt, Artificial Sequence
  Synthetic
agcacuuugagagaccaaggugg

SEQ ID NO: 145369 - RNA, 24 nt, Artificial Sequence
  Synthetic
cagcacuuugagagaccaaggugg

SEQ ID NO: 145370 - RNA, 18 nt, Artificial Sequence
  Synthetic
uucgggaggccaaggugg

SEQ ID NO: 145371 - RNA, 19 nt, Artificial Sequence
  Synthetic
cuucgggaggccaaggugg

SEQ ID NO: 145372 - RNA, 20 nt, Artificial Sequence
  Synthetic
acuucgggaggccaaggugg

SEQ ID NO: 145373 - RNA, 21 nt, Artificial Sequence
  Synthetic
cacuucgggaggccaaggugg

SEQ ID NO: 145374 - RNA, 23 nt, Artificial Sequence
  Synthetic
agcacuucgggaggccaaggugg

SEQ ID NO: 145375 - RNA, 24 nt, Artificial Sequence
  Synthetic
cagcacuucgggaggccaaggugg

SEQ ID NO: 145376 - RNA, 18 nt, Artificial Sequence
  Synthetic
uuugggaggccaaggugg

SEQ ID NO: 145377 - RNA, 19 nt, Artificial Sequence
  Synthetic
cuuugggaggccaaggugg

SEQ ID NO: 145378 - RNA, 20 nt, Artificial Sequence
  Synthetic
acuuugggaggccaaggugg

SEQ ID NO: 145379 - RNA, 21 nt, Artificial Sequence
  Synthetic
cacuuugggaggccaaggugg

SEQ ID NO: 145380 - RNA, 23 nt, Artificial Sequence
  Synthetic
agcacuuugggaggccaaggugg

SEQ ID NO: 145381 - RNA, 24 nt, Artificial Sequence
  Synthetic
aagcacuuugggaggccaaggugg

SEQ ID NO: 145382 - RNA, 24 nt, Artificial Sequence
  Synthetic
cagcacuuugggaggccaaggugg

SEQ ID NO: 145383 - RNA, 18 nt, Artificial Sequence
  Synthetic
uuuggaaggcuaaggugg

SEQ ID NO: 145384 - RNA, 19 nt, Artificial Sequence
  Synthetic
cuuuggaaggcuaaggugg

SEQ ID NO: 145385 - RNA, 20 nt, Artificial Sequence
  Synthetic
acuuuggaaggcuaaggugg

SEQ ID NO: 145386 - RNA, 21 nt, Artificial Sequence
  Synthetic
cacuuuggaaggcuaaggugg

SEQ ID NO: 145387 - RNA, 23 nt, Artificial Sequence
  Synthetic
agcacuuuggaaggcuaaggugg

SEQ ID NO: 145388 - RNA, 24 nt, Artificial Sequence
  Synthetic
uagcacuuuggaaggcuaaggugg

SEQ ID NO: 145389 - RNA, 18 nt, Artificial Sequence
  Synthetic
uuugugaggccgaggugg

SEQ ID NO: 145390 - RNA, 19 nt, Artificial Sequence
  Synthetic
cuuugugaggccgaggugg

SEQ ID NO: 145391 - RNA, 20 nt, Artificial Sequence
  Synthetic
ucuuugugaggccgaggugg

SEQ ID NO: 145392 - RNA, 21 nt, Artificial Sequence
  Synthetic
cucuuugugaggccgaggugg

SEQ ID NO: 145393 - RNA, 23 nt, Artificial Sequence
  Synthetic
agcucuuugugaggccgaggugg

SEQ ID NO: 145394 - RNA, 24 nt, Artificial Sequence
  Synthetic
cagcucuuugugaggccgaggugg

SEQ ID NO: 145395 - RNA, 18 nt, Artificial Sequence
  Synthetic
uuuggggggccgaggugg

SEQ ID NO: 145396 - RNA, 19 nt, Artificial Sequence
  Synthetic
cuuuggggggccgaggugg

SEQ ID NO: 145397 - RNA, 20 nt, Artificial Sequence
  Synthetic
acuuuggggggccgaggugg

SEQ ID NO: 145398 - RNA, 21 nt, Artificial Sequence
  Synthetic
cacuuuggggggccgaggugg

SEQ ID NO: 145399 - RNA, 22 nt, Artificial Sequence
  Synthetic
acacuuuggggggccgaggugg

SEQ ID NO: 145400 - RNA, 23 nt, Artificial Sequence
  Synthetic
aacacuuuggggggccgaggugg

SEQ ID NO: 145401 - RNA, 24 nt, Artificial Sequence
  Synthetic
caacacuuuggggggccgaggugg

SEQ ID NO: 145402 - RNA, 18 nt, Artificial Sequence
  Synthetic
cucaggaggcugaggugg

SEQ ID NO: 145403 - RNA, 19 nt, Artificial Sequence
  Synthetic
acucaggaggcugaggugg

SEQ ID NO: 145404 - RNA, 20 nt, Artificial Sequence
  Synthetic
uacucaggaggcugaggugg

SEQ ID NO: 145405 - RNA, 21 nt, Artificial Sequence
  Synthetic
cuacucaggaggcugaggugg

SEQ ID NO: 145406 - RNA, 22 nt, Artificial Sequence
  Synthetic
acuacucaggaggcugaggugg

SEQ ID NO: 145407 - RNA, 23 nt, Artificial Sequence
  Synthetic
aacuacucaggaggcugaggugg

SEQ ID NO: 145408 - RNA, 24 nt, Artificial Sequence
  Synthetic
caacuacucaggaggcugaggugg

SEQ ID NO: 145409 - RNA, 23 nt, Artificial Sequence
  Synthetic
agcuacucaggaggcugaggugg

SEQ ID NO: 145410 - RNA, 24 nt, Artificial Sequence
  Synthetic
uagcuacucaggaggcugaggugg

SEQ ID NO: 145411 - RNA, 18 nt, Artificial Sequence
  Synthetic
cuugggaggcugaggugg

SEQ ID NO: 145412 - RNA, 19 nt, Artificial Sequence
  Synthetic
acuugggaggcugaggugg

SEQ ID NO: 145413 - RNA, 20 nt, Artificial Sequence
  Synthetic
uacuugggaggcugaggugg

SEQ ID NO: 145414 - RNA, 21 nt, Artificial Sequence
  Synthetic
cuacuugggaggcugaggugg

SEQ ID NO: 145415 - RNA, 23 nt, Artificial Sequence
  Synthetic
agcuacuugggaggcugaggugg

SEQ ID NO: 145416 - RNA, 24 nt, Artificial Sequence
  Synthetic
uagcuacuugggaggcugaggugg

SEQ ID NO: 145417 - RNA, 18 nt, Artificial Sequence
  Synthetic
caugggagucugaggugg

SEQ ID NO: 145418 - RNA, 19 nt, Artificial Sequence
  Synthetic
acaugggagucugaggugg

SEQ ID NO: 145419 - RNA, 20 nt, Artificial Sequence
  Synthetic
uacaugggagucugaggugg

SEQ ID NO: 145420 - RNA, 21 nt, Artificial Sequence
  Synthetic
cuacaugggagucugaggugg

SEQ ID NO: 145421 - RNA, 23 nt, Artificial Sequence
  Synthetic
agcuacaugggagucugaggugg

SEQ ID NO: 145422 - RNA, 24 nt, Artificial Sequence
  Synthetic
cagcuacaugggagucugaggugg

SEQ ID NO: 145423 - RNA, 18 nt, Artificial Sequence
  Synthetic
uuugggagucugaggugg

SEQ ID NO: 145424 - RNA, 19 nt, Artificial Sequence
  Synthetic
cuuugggagucugaggugg

SEQ ID NO: 145425 - RNA, 20 nt, Artificial Sequence
  Synthetic
acuuugggagucugaggugg

SEQ ID NO: 145426 - RNA, 21 nt, Artificial Sequence
  Synthetic
cacuuugggagucugaggugg

SEQ ID NO: 145427 - RNA, 23 nt, Artificial Sequence
  Synthetic
agcacuuugggagucugaggugg

SEQ ID NO: 145428 - RNA, 24 nt, Artificial Sequence
  Synthetic
cagcacuuugggagucugaggugg

SEQ ID NO: 145429 - RNA, 18 nt, Artificial Sequence
  Synthetic
cacagaaaaggagggugg

SEQ ID NO: 145430 - RNA, 19 nt, Artificial Sequence
  Synthetic
acacagaaaaggagggugg

SEQ ID NO: 145431 - RNA, 19 nt, Artificial Sequence
  Synthetic
ugggguggggggagggugg

SEQ ID NO: 145432 - RNA, 21 nt, Artificial Sequence
  Synthetic
ugugggguggggggagggugg

SEQ ID NO: 145433 - RNA, 22 nt, Artificial Sequence
  Synthetic
uugugggguggggggagggugg

SEQ ID NO: 145434 - RNA, 24 nt, Artificial Sequence
  Synthetic
uguugugggguggggggagggugg

SEQ ID NO: 145435 - RNA, 18 nt, Artificial Sequence
  Synthetic
aggccgaggugggggugg

SEQ ID NO: 145436 - RNA, 22 nt, Artificial Sequence
  Synthetic
ugggaggccgaggugggggugg

SEQ ID NO: 145437 - RNA, 23 nt, Artificial Sequence
  Synthetic
uugggaggccgaggugggggugg

SEQ ID NO: 145438 - RNA, 24 nt, Artificial Sequence
  Synthetic
uuugggaggccgaggugggggugg

SEQ ID NO: 145439 - RNA, 19 nt, Artificial Sequence
  Synthetic
ugcacucuagccugggugg

SEQ ID NO: 145440 - RNA, 20 nt, Artificial Sequence
  Synthetic
cugcacucuagccugggugg

SEQ ID NO: 145441 - RNA, 21 nt, Artificial Sequence
  Synthetic
acugcacucuagccugggugg

SEQ ID NO: 145442 - RNA, 22 nt, Artificial Sequence
  Synthetic
cacugcacucuagccugggugg

SEQ ID NO: 145443 - RNA, 23 nt, Artificial Sequence
  Synthetic
ccacugcacucuagccugggugg

SEQ ID NO: 145444 - RNA, 18 nt, Artificial Sequence
  Synthetic
uuccccacagcuuggugg

SEQ ID NO: 145445 - RNA, 19 nt, Artificial Sequence
  Synthetic
cuuccccacagcuuggugg

SEQ ID NO: 145446 - RNA, 22 nt, Artificial Sequence
  Synthetic
uggcuuccccacagcuuggugg

SEQ ID NO: 145447 - RNA, 23 nt, Artificial Sequence
  Synthetic
uuggcuuccccacagcuuggugg

SEQ ID NO: 145448 - RNA, 24 nt, Artificial Sequence
  Synthetic
uuuggcuuccccacagcuuggugg

SEQ ID NO: 145449 - RNA, 18 nt, Artificial Sequence
  Synthetic
ugugauuggaucaugugg

SEQ ID NO: 145450 - RNA, 18 nt, Artificial Sequence
  Synthetic
acacucuggggacugugg

SEQ ID NO: 145451 - RNA, 19 nt, Artificial Sequence
  Synthetic
cacacucuggggacugugg

SEQ ID NO: 145452 - RNA, 20 nt, Artificial Sequence
  Synthetic
ucacacucuggggacugugg

SEQ ID NO: 145453 - RNA, 21 nt, Artificial Sequence
  Synthetic
aucacacucuggggacugugg

SEQ ID NO: 145454 - RNA, 22 nt, Artificial Sequence
  Synthetic
uaucacacucuggggacugugg

SEQ ID NO: 145455 - RNA, 23 nt, Artificial Sequence
  Synthetic
auaucacacucuggggacugugg

SEQ ID NO: 145456 - RNA, 24 nt, Artificial Sequence
  Synthetic
aauaucacacucuggggacugugg

SEQ ID NO: 145457 - RNA, 19 nt, Artificial Sequence
  Synthetic
ugauucuaggaagcugugg

SEQ ID NO: 145458 - RNA, 18 nt, Artificial Sequence
  Synthetic
aaaauuagccgggugugg

SEQ ID NO: 145459 - RNA, 19 nt, Artificial Sequence
  Synthetic
aaaaauuagccgggugugg

SEQ ID NO: 145460 - RNA, 20 nt, Artificial Sequence
  Synthetic
caaaaauuagccgggugugg

SEQ ID NO: 145461 - RNA, 21 nt, Artificial Sequence
  Synthetic
acaaaaauuagccgggugugg

SEQ ID NO: 145462 - RNA, 22 nt, Artificial Sequence
  Synthetic
uacaaaaauuagccgggugugg

SEQ ID NO: 145463 - RNA, 23 nt, Artificial Sequence
  Synthetic
auacaaaaauuagccgggugugg

SEQ ID NO: 145464 - RNA, 24 nt, Artificial Sequence
  Synthetic
aauacaaaaauuagccgggugugg

SEQ ID NO: 145465 - RNA, 18 nt, Artificial Sequence
  Synthetic
cucacuaccugugugugg

SEQ ID NO: 145466 - RNA, 20 nt, Artificial Sequence
  Synthetic
ugcucacuaccugugugugg

SEQ ID NO: 145467 - RNA, 18 nt, Artificial Sequence
  Synthetic
aagaucauuuuguugugg

SEQ ID NO: 145468 - RNA, 19 nt, Artificial Sequence
  Synthetic
caagaucauuuuguugugg

SEQ ID NO: 145469 - RNA, 18 nt, Artificial Sequence
  Synthetic
ucucauucuuuuuugugg

SEQ ID NO: 145470 - RNA, 19 nt, Artificial Sequence
  Synthetic
aucucauucuuuuuugugg

SEQ ID NO: 145471 - RNA, 20 nt, Artificial Sequence
  Synthetic
aaucucauucuuuuuugugg

SEQ ID NO: 145472 - RNA, 22 nt, Artificial Sequence
  Synthetic
agaaucucauucuuuuuugugg

SEQ ID NO: 145473 - RNA, 23 nt, Artificial Sequence
  Synthetic
cagaaucucauucuuuuuugugg

SEQ ID NO: 145474 - RNA, 24 nt, Artificial Sequence
  Synthetic
acagaaucucauucuuuuuugugg

SEQ ID NO: 145475 - RNA, 18 nt, Artificial Sequence
  Synthetic
uuccuucuuuuuuugugg

SEQ ID NO: 145476 - RNA, 19 nt, Artificial Sequence
  Synthetic
uuuccuucuuuuuuugugg

SEQ ID NO: 145477 - RNA, 20 nt, Artificial Sequence
  Synthetic
auuuccuucuuuuuuugugg

SEQ ID NO: 145478 - RNA, 23 nt, Artificial Sequence
  Synthetic
aggauuuccuucuuuuuuugugg

SEQ ID NO: 145479 - RNA, 24 nt, Artificial Sequence
  Synthetic
aaggauuuccuucuuuuuuugugg

SEQ ID NO: 145480 - RNA, 18 nt, Artificial Sequence
  Synthetic
cauaaaaauaaaaauugg

SEQ ID NO: 145481 - RNA, 19 nt, Artificial Sequence
  Synthetic
acauaaaaauaaaaauugg

SEQ ID NO: 145482 - RNA, 20 nt, Artificial Sequence
  Synthetic
uacauaaaaauaaaaauugg

SEQ ID NO: 145483 - RNA, 18 nt, Artificial Sequence
  Synthetic
aaaaaagaacaacauugg

SEQ ID NO: 145484 - RNA, 20 nt, Artificial Sequence
  Synthetic
ugaaaaaagaacaacauugg

SEQ ID NO: 145485 - RNA, 18 nt, Artificial Sequence
  Synthetic
acuuucaugccacauugg

SEQ ID NO: 145486 - RNA, 19 nt, Artificial Sequence
  Synthetic
uacuuucaugccacauugg

SEQ ID NO: 145487 - RNA, 20 nt, Artificial Sequence
  Synthetic
cuacuuucaugccacauugg

SEQ ID NO: 145488 - RNA, 18 nt, Artificial Sequence
  Synthetic
uuuccuucaguucauugg

SEQ ID NO: 145489 - RNA, 19 nt, Artificial Sequence
  Synthetic
uuuuccuucaguucauugg

SEQ ID NO: 145490 - RNA, 20 nt, Artificial Sequence
  Synthetic
auuuuccuucaguucauugg

SEQ ID NO: 145491 - RNA, 18 nt, Artificial Sequence
  Synthetic
uguuuuuuggcaucuugg

SEQ ID NO: 145492 - RNA, 20 nt, Artificial Sequence
  Synthetic
uguguuuuuuggcaucuugg

SEQ ID NO: 145493 - RNA, 19 nt, Artificial Sequence
  Synthetic
ugcaagaacaggcaguugg

SEQ ID NO: 145494 - RNA, 20 nt, Artificial Sequence
  Synthetic
uugcaagaacaggcaguugg

SEQ ID NO: 145495 - RNA, 18 nt, Artificial Sequence
  Synthetic
cucgggaggcugaguugg

SEQ ID NO: 145496 - RNA, 20 nt, Artificial Sequence
  Synthetic
ugcucgggaggcugaguugg

SEQ ID NO: 145497 - RNA, 21 nt, Artificial Sequence
  Synthetic
augcucgggaggcugaguugg

SEQ ID NO: 145498 - RNA, 23 nt, Artificial Sequence
  Synthetic
agaugcucgggaggcugaguugg

SEQ ID NO: 145499 - RNA, 24 nt, Artificial Sequence
  Synthetic
uagaugcucgggaggcugaguugg

SEQ ID NO: 145500 - RNA, 18 nt, Artificial Sequence
  Synthetic
acacuuuuacacuguugg

SEQ ID NO: 145501 - RNA, 19 nt, Artificial Sequence
  Synthetic
aacacuuuuacacuguugg

SEQ ID NO: 145502 - RNA, 22 nt, Artificial Sequence
  Synthetic
aggaacacuuuuacacuguugg

SEQ ID NO: 145503 - RNA, 23 nt, Artificial Sequence
  Synthetic
uaggaacacuuuuacacuguugg

SEQ ID NO: 145504 - RNA, 24 nt, Artificial Sequence
  Synthetic
auaggaacacuuuuacacuguugg

SEQ ID NO: 145505 - RNA, 18 nt, Artificial Sequence
  Synthetic
cuuguaaaauaaauuugg

SEQ ID NO: 145506 - RNA, 19 nt, Artificial Sequence
  Synthetic
ccuuguaaaauaaauuugg

SEQ ID NO: 145507 - RNA, 22 nt, Artificial Sequence
  Synthetic
uggccuuguaaaauaaauuugg

SEQ ID NO: 145508 - RNA, 23 nt, Artificial Sequence
  Synthetic
cuggccuuguaaaauaaauuugg

SEQ ID NO: 145509 - RNA, 19 nt, Artificial Sequence
  Synthetic
uguaaucccagcacuuugg

SEQ ID NO: 145510 - RNA, 20 nt, Artificial Sequence
  Synthetic
cuguaaucccagcacuuugg

SEQ ID NO: 145511 - RNA, 21 nt, Artificial Sequence
  Synthetic
ccuguaaucccagcacuuugg

SEQ ID NO: 145512 - RNA, 23 nt, Artificial Sequence
  Synthetic
cgccuguaaucccagcacuuugg

SEQ ID NO: 145513 - RNA, 24 nt, Artificial Sequence
  Synthetic
acgccuguaaucccagcacuuugg

SEQ ID NO: 145514 - RNA, 21 nt, Artificial Sequence
  Synthetic
aaaaaaaaccgcuuccuuugg

SEQ ID NO: 145515 - RNA, 22 nt, Artificial Sequence
  Synthetic
aaaaaaaaaccgcuuccuuugg

SEQ ID NO: 145516 - RNA, 23 nt, Artificial Sequence
  Synthetic
aaaaaaaaaaccgcuuccuuugg

SEQ ID NO: 145517 - RNA, 24 nt, Artificial Sequence
  Synthetic
aaaaaaaaaaaccgcuuccuuugg

SEQ ID NO: 145518 - RNA, 18 nt, Artificial Sequence
  Synthetic
uuaugaagcuuaguuugg

SEQ ID NO: 145519 - RNA, 19 nt, Artificial Sequence
  Synthetic
cuuaugaagcuuaguuugg

SEQ ID NO: 145520 - RNA, 20 nt, Artificial Sequence
  Synthetic
acuuaugaagcuuaguuugg

SEQ ID NO: 145521 - RNA, 21 nt, Artificial Sequence
  Synthetic
cacuuaugaagcuuaguuugg

SEQ ID NO: 145522 - RNA, 22 nt, Artificial Sequence
  Synthetic
ucacuuaugaagcuuaguuugg

SEQ ID NO: 145523 - RNA, 23 nt, Artificial Sequence
  Synthetic
uucacuuaugaagcuuaguuugg

SEQ ID NO: 145524 - RNA, 24 nt, Artificial Sequence
  Synthetic
cuucacuuaugaagcuuaguuugg

SEQ ID NO: 145525 - RNA, 18 nt, Artificial Sequence
  Synthetic
uagaagguggggguuugg

SEQ ID NO: 145526 - RNA, 19 nt, Artificial Sequence
  Synthetic
uuagaagguggggguuugg

SEQ ID NO: 145527 - RNA, 20 nt, Artificial Sequence
  Synthetic
auuagaagguggggguuugg

SEQ ID NO: 145528 - RNA, 21 nt, Artificial Sequence
  Synthetic
uauuagaagguggggguuugg

SEQ ID NO: 145529 - RNA, 24 nt, Artificial Sequence
  Synthetic
ugguauuagaagguggggguuugg

SEQ ID NO: 145530 - RNA, 18 nt, Artificial Sequence
  Synthetic
aaaaccaucagauuuugg

SEQ ID NO: 145531 - RNA, 19 nt, Artificial Sequence
  Synthetic
uaaaaccaucagauuuugg

SEQ ID NO: 145532 - RNA, 20 nt, Artificial Sequence
  Synthetic
auaaaaccaucagauuuugg

SEQ ID NO: 145533 - RNA, 21 nt, Artificial Sequence
  Synthetic
uauaaaaccaucagauuuugg

SEQ ID NO: 145534 - RNA, 22 nt, Artificial Sequence
  Synthetic
uuauaaaaccaucagauuuugg

SEQ ID NO: 145535 - RNA, 23 nt, Artificial Sequence
  Synthetic
cuuauaaaaccaucagauuuugg

SEQ ID NO: 145536 - RNA, 24 nt, Artificial Sequence
  Synthetic
ccuuauaaaaccaucagauuuugg

SEQ ID NO: 145537 - RNA, 19 nt, Artificial Sequence
  Synthetic
uggagcagugauguuuugg

SEQ ID NO: 145538 - RNA, 20 nt, Artificial Sequence
  Synthetic
cuggagcagugauguuuugg

SEQ ID NO: 145539 - RNA, 18 nt, Artificial Sequence
  Synthetic
aaauaagaaauuuuuugg

SEQ ID NO: 145540 - RNA, 19 nt, Artificial Sequence
  Synthetic
uaaauaagaaauuuuuugg

SEQ ID NO: 145541 - RNA, 20 nt, Artificial Sequence
  Synthetic
auaaauaagaaauuuuuugg

SEQ ID NO: 145542 - RNA, 18 nt, Artificial Sequence
  Synthetic
augcagccagaaaaaaug

SEQ ID NO: 145543 - RNA, 19 nt, Artificial Sequence
  Synthetic
uaugcagccagaaaaaaug

SEQ ID NO: 145544 - RNA, 20 nt, Artificial Sequence
  Synthetic
cuaugcagccagaaaaaaug

SEQ ID NO: 145545 - RNA, 18 nt, Artificial Sequence
  Synthetic
auaaauaaauaaaaaaug

SEQ ID NO: 145546 - RNA, 19 nt, Artificial Sequence
  Synthetic
aauaaauaaauaaaaaaug

SEQ ID NO: 145547 - RNA, 20 nt, Artificial Sequence
  Synthetic
aaauaaauaaauaaaaaaug

SEQ ID NO: 145548 - RNA, 21 nt, Artificial Sequence
  Synthetic
uaaauaaauaaauaaaaaaug

SEQ ID NO: 145549 - RNA, 22 nt, Artificial Sequence
  Synthetic
auaaauaaauaaauaaaaaaug

SEQ ID NO: 145550 - RNA, 23 nt, Artificial Sequence
  Synthetic
aauaaauaaauaaauaaaaaaug

SEQ ID NO: 145551 - RNA, 24 nt, Artificial Sequence
  Synthetic
aaauaaauaaauaaauaaaaaaug

SEQ ID NO: 145552 - RNA, 18 nt, Artificial Sequence
  Synthetic
augcagccauaaaaaaug

SEQ ID NO: 145553 - RNA, 19 nt, Artificial Sequence
  Synthetic
uaugcagccauaaaaaaug

SEQ ID NO: 145554 - RNA, 20 nt, Artificial Sequence
  Synthetic
cuaugcagccauaaaaaaug

SEQ ID NO: 145555 - RNA, 21 nt, Artificial Sequence
  Synthetic
agguugaucuucugaaaaaug

SEQ ID NO: 145556 - RNA, 22 nt, Artificial Sequence
  Synthetic
cagguugaucuucugaaaaaug

SEQ ID NO: 145557 - RNA, 23 nt, Artificial Sequence
  Synthetic
ucagguugaucuucugaaaaaug

SEQ ID NO: 145558 - RNA, 24 nt, Artificial Sequence
  Synthetic
cucagguugaucuucugaaaaaug

SEQ ID NO: 145559 - RNA, 18 nt, Artificial Sequence
  Synthetic
cagugcagaaggaaaaug

SEQ ID NO: 145560 - RNA, 19 nt, Artificial Sequence
  Synthetic
acagugcagaaggaaaaug

SEQ ID NO: 145561 - RNA, 23 nt, Artificial Sequence
  Synthetic
ugggacagugcagaaggaaaaug

SEQ ID NO: 145562 - RNA, 24 nt, Artificial Sequence
  Synthetic
cugggacagugcagaaggaaaaug

SEQ ID NO: 145563 - RNA, 20 nt, Artificial Sequence
  Synthetic
uggcaaaauguuaacaaaug

SEQ ID NO: 145564 - RNA, 22 nt, Artificial Sequence
  Synthetic
uguggcaaaauguuaacaaaug

SEQ ID NO: 145565 - RNA, 23 nt, Artificial Sequence
  Synthetic
auguggcaaaauguuaacaaaug

SEQ ID NO: 145566 - RNA, 24 nt, Artificial Sequence
  Synthetic
aauguggcaaaauguuaacaaaug

SEQ ID NO: 145567 - RNA, 18 nt, Artificial Sequence
  Synthetic
uuuacagacaagcaaaug

SEQ ID NO: 145568 - RNA, 19 nt, Artificial Sequence
  Synthetic
cuuuacagacaagcaaaug

SEQ ID NO: 145569 - RNA, 20 nt, Artificial Sequence
  Synthetic
ccuuuacagacaagcaaaug

SEQ ID NO: 145570 - RNA, 21 nt, Artificial Sequence
  Synthetic
uccuuuacagacaagcaaaug

SEQ ID NO: 145571 - RNA, 22 nt, Artificial Sequence
  Synthetic
auccuuuacagacaagcaaaug

SEQ ID NO: 145572 - RNA, 23 nt, Artificial Sequence
  Synthetic
aauccuuuacagacaagcaaaug

SEQ ID NO: 145573 - RNA, 24 nt, Artificial Sequence
  Synthetic
aaauccuuuacagacaagcaaaug

SEQ ID NO: 145574 - RNA, 18 nt, Artificial Sequence
  Synthetic
uuccaucuuuuucaaaug

SEQ ID NO: 145575 - RNA, 19 nt, Artificial Sequence
  Synthetic
cuuccaucuuuuucaaaug

SEQ ID NO: 145576 - RNA, 20 nt, Artificial Sequence
  Synthetic
ucuuccaucuuuuucaaaug

SEQ ID NO: 145577 - RNA, 18 nt, Artificial Sequence
  Synthetic
ugaaguuuguaggaaaug

SEQ ID NO: 145578 - RNA, 19 nt, Artificial Sequence
  Synthetic
uugaaguuuguaggaaaug

SEQ ID NO: 145579 - RNA, 20 nt, Artificial Sequence
  Synthetic
uuugaaguuuguaggaaaug

SEQ ID NO: 145580 - RNA, 18 nt, Artificial Sequence
  Synthetic
ucauaaagcuaauaaaug

SEQ ID NO: 145581 - RNA, 19 nt, Artificial Sequence
  Synthetic
aucauaaagcuaauaaaug

SEQ ID NO: 145582 - RNA, 20 nt, Artificial Sequence
  Synthetic
aaucauaaagcuaauaaaug

SEQ ID NO: 145583 - RNA, 21 nt, Artificial Sequence
  Synthetic
aaaucauaaagcuaauaaaug

SEQ ID NO: 145584 - RNA, 22 nt, Artificial Sequence
  Synthetic
caaaucauaaagcuaauaaaug

SEQ ID NO: 145585 - RNA, 23 nt, Artificial Sequence
  Synthetic
ccaaaucauaaagcuaauaaaug

SEQ ID NO: 145586 - RNA, 24 nt, Artificial Sequence
  Synthetic
cccaaaucauaaagcuaauaaaug

SEQ ID NO: 145587 - RNA, 20 nt, Artificial Sequence
  Synthetic
cggggcuuaaaaccuaaaug

SEQ ID NO: 145588 - RNA, 22 nt, Artificial Sequence
  Synthetic
ugcggggcuuaaaaccuaaaug

SEQ ID NO: 145589 - RNA, 23 nt, Artificial Sequence
  Synthetic
augcggggcuuaaaaccuaaaug

SEQ ID NO: 145590 - RNA, 24 nt, Artificial Sequence
  Synthetic
caugcggggcuuaaaaccuaaaug

SEQ ID NO: 145591 - RNA, 18 nt, Artificial Sequence
  Synthetic
cuuaccuaaugguaaaug

SEQ ID NO: 145592 - RNA, 19 nt, Artificial Sequence
  Synthetic
acuuaccuaaugguaaaug

SEQ ID NO: 145593 - RNA, 20 nt, Artificial Sequence
  Synthetic
aacuuaccuaaugguaaaug

SEQ ID NO: 145594 - RNA, 18 nt, Artificial Sequence
  Synthetic
auauaccuaauguaaaug

SEQ ID NO: 145595 - RNA, 20 nt, Artificial Sequence
  Synthetic
agauauaccuaauguaaaug

SEQ ID NO: 145596 - RNA, 23 nt, Artificial Sequence
  Synthetic
aggagauauaccuaauguaaaug

SEQ ID NO: 145597 - RNA, 24 nt, Artificial Sequence
  Synthetic
uaggagauauaccuaauguaaaug

SEQ ID NO: 145598 - RNA, 19 nt, Artificial Sequence
  Synthetic
ugggucucugcuaucaaug

SEQ ID NO: 145599 - RNA, 20 nt, Artificial Sequence
  Synthetic
cugggucucugcuaucaaug

SEQ ID NO: 145600 - RNA, 19 nt, Artificial Sequence
  Synthetic
ugucuuguuuuggucaaug

SEQ ID NO: 145601 - RNA, 20 nt, Artificial Sequence
  Synthetic
augucuuguuuuggucaaug

SEQ ID NO: 145602 - RNA, 18 nt, Artificial Sequence
  Synthetic
uaguauuuuuaaagaaug

SEQ ID NO: 145603 - RNA, 19 nt, Artificial Sequence
  Synthetic
auaguauuuuuaaagaaug

SEQ ID NO: 145604 - RNA, 20 nt, Artificial Sequence
  Synthetic
cauaguauuuuuaaagaaug

SEQ ID NO: 145605 - RNA, 18 nt, Artificial Sequence
  Synthetic
aaggaagaaagaagaaug

SEQ ID NO: 145606 - RNA, 19 nt, Artificial Sequence
  Synthetic
uaaggaagaaagaagaaug

SEQ ID NO: 145607 - RNA, 20 nt, Artificial Sequence
  Synthetic
auaaggaagaaagaagaaug

SEQ ID NO: 145608 - RNA, 21 nt, Artificial Sequence
  Synthetic
uauaaggaagaaagaagaaug

SEQ ID NO: 145609 - RNA, 23 nt, Artificial Sequence
  Synthetic
aguauaaggaagaaagaagaaug

SEQ ID NO: 145610 - RNA, 24 nt, Artificial Sequence
  Synthetic
aaguauaaggaagaaagaagaaug

SEQ ID NO: 145611 - RNA, 18 nt, Artificial Sequence
  Synthetic
aaaaaaaugauaagaaug

SEQ ID NO: 145612 - RNA, 19 nt, Artificial Sequence
  Synthetic
uaaaaaaaugauaagaaug

SEQ ID NO: 145613 - RNA, 20 nt, Artificial Sequence
  Synthetic
auaaaaaaaugauaagaaug

SEQ ID NO: 145614 - RNA, 18 nt, Artificial Sequence
  Synthetic
uucuuuucuuuaagaaug

SEQ ID NO: 145615 - RNA, 19 nt, Artificial Sequence
  Synthetic
auucuuuucuuuaagaaug

SEQ ID NO: 145616 - RNA, 20 nt, Artificial Sequence
  Synthetic
aauucuuuucuuuaagaaug

SEQ ID NO: 145617 - RNA, 18 nt, Artificial Sequence
  Synthetic
ccccagccaugcagaaug

SEQ ID NO: 145618 - RNA, 19 nt, Artificial Sequence
  Synthetic
uccccagccaugcagaaug

SEQ ID NO: 145619 - RNA, 20 nt, Artificial Sequence
  Synthetic
cuccccagccaugcagaaug

SEQ ID NO: 145620 - RNA, 21 nt, Artificial Sequence
  Synthetic
ccuccccagccaugcagaaug

SEQ ID NO: 145621 - RNA, 24 nt, Artificial Sequence
  Synthetic
aggccuccccagccaugcagaaug

SEQ ID NO: 145622 - RNA, 18 nt, Artificial Sequence
  Synthetic
aaaggggugguuagaaug

SEQ ID NO: 145623 - RNA, 19 nt, Artificial Sequence
  Synthetic
caaaggggugguuagaaug

SEQ ID NO: 145624 - RNA, 20 nt, Artificial Sequence
  Synthetic
ucaaaggggugguuagaaug

SEQ ID NO: 145625 - RNA, 21 nt, Artificial Sequence
  Synthetic
cucaaaggggugguuagaaug

SEQ ID NO: 145626 - RNA, 22 nt, Artificial Sequence
  Synthetic
acucaaaggggugguuagaaug

SEQ ID NO: 145627 - RNA, 23 nt, Artificial Sequence
  Synthetic
aacucaaaggggugguuagaaug

SEQ ID NO: 145628 - RNA, 24 nt, Artificial Sequence
  Synthetic
uaacucaaaggggugguuagaaug

SEQ ID NO: 145629 - RNA, 18 nt, Artificial Sequence
  Synthetic
uuaauggcaucuggaaug

SEQ ID NO: 145630 - RNA, 19 nt, Artificial Sequence
  Synthetic
cuuaauggcaucuggaaug

SEQ ID NO: 145631 - RNA, 20 nt, Artificial Sequence
  Synthetic
ucuuaauggcaucuggaaug

SEQ ID NO: 145632 - RNA, 21 nt, Artificial Sequence
  Synthetic
uucuuaauggcaucuggaaug

SEQ ID NO: 145633 - RNA, 22 nt, Artificial Sequence
  Synthetic
uuucuuaauggcaucuggaaug

SEQ ID NO: 145634 - RNA, 23 nt, Artificial Sequence
  Synthetic
uuuucuuaauggcaucuggaaug

SEQ ID NO: 145635 - RNA, 24 nt, Artificial Sequence
  Synthetic
auuuucuuaauggcaucuggaaug

SEQ ID NO: 145636 - RNA, 19 nt, Artificial Sequence
  Synthetic
agugugacgucauugaaug

SEQ ID NO: 145637 - RNA, 20 nt, Artificial Sequence
  Synthetic
cagugugacgucauugaaug

SEQ ID NO: 145638 - RNA, 21 nt, Artificial Sequence
  Synthetic
ccagugugacgucauugaaug

SEQ ID NO: 145639 - RNA, 22 nt, Artificial Sequence
  Synthetic
accagugugacgucauugaaug

SEQ ID NO: 145640 - RNA, 23 nt, Artificial Sequence
  Synthetic
uaccagugugacgucauugaaug

SEQ ID NO: 145641 - RNA, 24 nt, Artificial Sequence
  Synthetic
cuaccagugugacgucauugaaug

SEQ ID NO: 145642 - RNA, 18 nt, Artificial Sequence
  Synthetic
uuuacauucaaaauaaug

SEQ ID NO: 145643 - RNA, 19 nt, Artificial Sequence
  Synthetic
auuuacauucaaaauaaug

SEQ ID NO: 145644 - RNA, 20 nt, Artificial Sequence
  Synthetic
uauuuacauucaaaauaaug

SEQ ID NO: 145645 - RNA, 18 nt, Artificial Sequence
  Synthetic
aggggaauuauaauaaug

SEQ ID NO: 145646 - RNA, 19 nt, Artificial Sequence
  Synthetic
caggggaauuauaauaaug

SEQ ID NO: 145647 - RNA, 20 nt, Artificial Sequence
  Synthetic
acaggggaauuauaauaaug

SEQ ID NO: 145648 - RNA, 18 nt, Artificial Sequence
  Synthetic
cugugugauacuauaaug

SEQ ID NO: 145649 - RNA, 19 nt, Artificial Sequence
  Synthetic
ucugugugauacuauaaug

SEQ ID NO: 145650 - RNA, 20 nt, Artificial Sequence
  Synthetic
cucugugugauacuauaaug

SEQ ID NO: 145651 - RNA, 21 nt, Artificial Sequence
  Synthetic
acucugugugauacuauaaug

SEQ ID NO: 145652 - RNA, 22 nt, Artificial Sequence
  Synthetic
uacucugugugauacuauaaug

SEQ ID NO: 145653 - RNA, 23 nt, Artificial Sequence
  Synthetic
cuacucugugugauacuauaaug

SEQ ID NO: 145654 - RNA, 24 nt, Artificial Sequence
  Synthetic
acuacucugugugauacuauaaug

SEQ ID NO: 145655 - RNA, 19 nt, Artificial Sequence
  Synthetic
ugaagccuauggucuaaug

SEQ ID NO: 145656 - RNA, 20 nt, Artificial Sequence
  Synthetic
augaagccuauggucuaaug

SEQ ID NO: 145657 - RNA, 21 nt, Artificial Sequence
  Synthetic
caugaagccuauggucuaaug

SEQ ID NO: 145658 - RNA, 22 nt, Artificial Sequence
  Synthetic
ucaugaagccuauggucuaaug

SEQ ID NO: 145659 - RNA, 23 nt, Artificial Sequence
  Synthetic
uucaugaagccuauggucuaaug

SEQ ID NO: 145660 - RNA, 24 nt, Artificial Sequence
  Synthetic
cuucaugaagccuauggucuaaug

SEQ ID NO: 145661 - RNA, 18 nt, Artificial Sequence
  Synthetic
uuaauuagaaaaguaaug

SEQ ID NO: 145662 - RNA, 19 nt, Artificial Sequence
  Synthetic
uuuaauuagaaaaguaaug

SEQ ID NO: 145663 - RNA, 20 nt, Artificial Sequence
  Synthetic
uuuuaauuagaaaaguaaug

SEQ ID NO: 145664 - RNA, 21 nt, Artificial Sequence
  Synthetic
aaaaacgcacugauuguaaug

SEQ ID NO: 145665 - RNA, 23 nt, Artificial Sequence
  Synthetic
agaaaaacgcacugauuguaaug

SEQ ID NO: 145666 - RNA, 24 nt, Artificial Sequence
  Synthetic
cagaaaaacgcacugauuguaaug

SEQ ID NO: 145667 - RNA, 18 nt, Artificial Sequence
  Synthetic
uucaauaaauuauuaaug

SEQ ID NO: 145668 - RNA, 19 nt, Artificial Sequence
  Synthetic
auucaauaaauuauuaaug

SEQ ID NO: 145669 - RNA, 20 nt, Artificial Sequence
  Synthetic
uauucaauaaauuauuaaug

SEQ ID NO: 145670 - RNA, 18 nt, Artificial Sequence
  Synthetic
uuauauaaauauuuaaug

SEQ ID NO: 145671 - RNA, 19 nt, Artificial Sequence
  Synthetic
auuauauaaauauuuaaug

SEQ ID NO: 145672 - RNA, 20 nt, Artificial Sequence
  Synthetic
uauuauauaaauauuuaaug

SEQ ID NO: 145673 - RNA, 18 nt, Artificial Sequence
  Synthetic
uagggggaaggaaacaug

SEQ ID NO: 145674 - RNA, 21 nt, Artificial Sequence
  Synthetic
agguagggggaaggaaacaug

SEQ ID NO: 145675 - RNA, 22 nt, Artificial Sequence
  Synthetic
cagguagggggaaggaaacaug

SEQ ID NO: 145676 - RNA, 23 nt, Artificial Sequence
  Synthetic
ucagguagggggaaggaaacaug

SEQ ID NO: 145677 - RNA, 18 nt, Artificial Sequence
  Synthetic
accauccuggccaacaug

SEQ ID NO: 145678 - RNA, 19 nt, Artificial Sequence
  Synthetic
caccauccuggccaacaug

SEQ ID NO: 145679 - RNA, 20 nt, Artificial Sequence
  Synthetic
acaccauccuggccaacaug

SEQ ID NO: 145680 - RNA, 22 nt, Artificial Sequence
  Synthetic
cgacaccauccuggccaacaug

SEQ ID NO: 145681 - RNA, 23 nt, Artificial Sequence
  Synthetic
ucgacaccauccuggccaacaug

SEQ ID NO: 145682 - RNA, 24 nt, Artificial Sequence
  Synthetic
aucgacaccauccuggccaacaug

SEQ ID NO: 145683 - RNA, 18 nt, Artificial Sequence
  Synthetic
auacuauaacaauacaug

SEQ ID NO: 145684 - RNA, 19 nt, Artificial Sequence
  Synthetic
aauacuauaacaauacaug

SEQ ID NO: 145685 - RNA, 20 nt, Artificial Sequence
  Synthetic
aaauacuauaacaauacaug

SEQ ID NO: 145686 - RNA, 18 nt, Artificial Sequence
  Synthetic
aggcccccccccgccaug

SEQ ID NO: 145687 - RNA, 20 nt, Artificial Sequence
  Synthetic
ugaggcccccccccgccaug

SEQ ID NO: 145688 - RNA, 22 nt, Artificial Sequence
  Synthetic
ugugaggcccccccccgccaug

SEQ ID NO: 145689 - RNA, 23 nt, Artificial Sequence
  Synthetic
uugugaggcccccccccgccaug

SEQ ID NO: 145690 - RNA, 24 nt, Artificial Sequence
  Synthetic
auugugaggcccccccccgccaug

SEQ ID NO: 145691 - RNA, 18 nt, Artificial Sequence
  Synthetic
cucuucccugcugccaug

SEQ ID NO: 145692 - RNA, 19 nt, Artificial Sequence
  Synthetic
ucucuucccugcugccaug

SEQ ID NO: 145693 - RNA, 20 nt, Artificial Sequence
  Synthetic
cucucuucccugcugccaug

SEQ ID NO: 145694 - RNA, 22 nt, Artificial Sequence
  Synthetic
agcucucuucccugcugccaug

SEQ ID NO: 145695 - RNA, 23 nt, Artificial Sequence
  Synthetic
aagcucucuucccugcugccaug

SEQ ID NO: 145696 - RNA, 24 nt, Artificial Sequence
  Synthetic
caagcucucuucccugcugccaug

SEQ ID NO: 145697 - RNA, 18 nt, Artificial Sequence
  Synthetic
uugagaguuuuuagcaug

SEQ ID NO: 145698 - RNA, 19 nt, Artificial Sequence
  Synthetic
auugagaguuuuuagcaug

SEQ ID NO: 145699 - RNA, 20 nt, Artificial Sequence
  Synthetic
uauugagaguuuuuagcaug

SEQ ID NO: 145700 - RNA, 18 nt, Artificial Sequence
  Synthetic
ccacugcacuccggcaug

SEQ ID NO: 145701 - RNA, 19 nt, Artificial Sequence
  Synthetic
accacugcacuccggcaug

SEQ ID NO: 145702 - RNA, 20 nt, Artificial Sequence
  Synthetic
caccacugcacuccggcaug

SEQ ID NO: 145703 - RNA, 21 nt, Artificial Sequence
  Synthetic
acaccacugcacuccggcaug

SEQ ID NO: 145704 - RNA, 22 nt, Artificial Sequence
  Synthetic
cacaccacugcacuccggcaug

SEQ ID NO: 145705 - RNA, 23 nt, Artificial Sequence
  Synthetic
ucacaccacugcacuccggcaug

SEQ ID NO: 145706 - RNA, 24 nt, Artificial Sequence
  Synthetic
aucacaccacugcacuccggcaug

SEQ ID NO: 145707 - RNA, 18 nt, Artificial Sequence
  Synthetic
ugaaacaagcacaucaug

SEQ ID NO: 145708 - RNA, 20 nt, Artificial Sequence
  Synthetic
ugugaaacaagcacaucaug

SEQ ID NO: 145709 - RNA, 21 nt, Artificial Sequence
  Synthetic
augugaaacaagcacaucaug

SEQ ID NO: 145710 - RNA, 22 nt, Artificial Sequence
  Synthetic
aaugugaaacaagcacaucaug

SEQ ID NO: 145711 - RNA, 23 nt, Artificial Sequence
  Synthetic
uaaugugaaacaagcacaucaug

SEQ ID NO: 145712 - RNA, 18 nt, Artificial Sequence
  Synthetic
ugaaauagucacaucaug

SEQ ID NO: 145713 - RNA, 19 nt, Artificial Sequence
  Synthetic
augaaauagucacaucaug

SEQ ID NO: 145714 - RNA, 20 nt, Artificial Sequence
  Synthetic
uaugaaauagucacaucaug

SEQ ID NO: 145715 - RNA, 21 nt, Artificial Sequence
  Synthetic
auaugaaauagucacaucaug

SEQ ID NO: 145716 - RNA, 22 nt, Artificial Sequence
  Synthetic
aauaugaaauagucacaucaug

SEQ ID NO: 145717 - RNA, 23 nt, Artificial Sequence
  Synthetic
caauaugaaauagucacaucaug

SEQ ID NO: 145718 - RNA, 24 nt, Artificial Sequence
  Synthetic
ucaauaugaaauagucacaucaug

SEQ ID NO: 145719 - RNA, 19 nt, Artificial Sequence
  Synthetic
ugaagcccacuugaucaug

SEQ ID NO: 145720 - RNA, 20 nt, Artificial Sequence
  Synthetic
augaagcccacuugaucaug

SEQ ID NO: 145721 - RNA, 24 nt, Artificial Sequence
  Synthetic
agggaugaagcccacuugaucaug

SEQ ID NO: 145722 - RNA, 18 nt, Artificial Sequence
  Synthetic
aaaucccucuuggucaug

SEQ ID NO: 145723 - RNA, 19 nt, Artificial Sequence
  Synthetic
uaaaucccucuuggucaug

SEQ ID NO: 145724 - RNA, 20 nt, Artificial Sequence
  Synthetic
auaaaucccucuuggucaug

SEQ ID NO: 145725 - RNA, 24 nt, Artificial Sequence
  Synthetic
agggauaaaucccucuuggucaug

SEQ ID NO: 145726 - RNA, 18 nt, Artificial Sequence
  Synthetic
acacuaauaaaguucaug

SEQ ID NO: 145727 - RNA, 19 nt, Artificial Sequence
  Synthetic
uacacuaauaaaguucaug

SEQ ID NO: 145728 - RNA, 20 nt, Artificial Sequence
  Synthetic
auacacuaauaaaguucaug

SEQ ID NO: 145729 - RNA, 19 nt, Artificial Sequence
  Synthetic
agccauguccuaaaagaug

SEQ ID NO: 145730 - RNA, 20 nt, Artificial Sequence
  Synthetic
aagccauguccuaaaagaug

SEQ ID NO: 145731 - RNA, 18 nt, Artificial Sequence
  Synthetic
uuucaguuuagaaagaug

SEQ ID NO: 145732 - RNA, 20 nt, Artificial Sequence
  Synthetic
aguuucaguuuagaaagaug

SEQ ID NO: 145733 - RNA, 22 nt, Artificial Sequence
  Synthetic
agaguuucaguuuagaaagaug

SEQ ID NO: 145734 - RNA, 23 nt, Artificial Sequence
  Synthetic
uagaguuucaguuuagaaagaug

SEQ ID NO: 145735 - RNA, 24 nt, Artificial Sequence
  Synthetic
auagaguuucaguuuagaaagaug

SEQ ID NO: 145736 - RNA, 18 nt, Artificial Sequence
  Synthetic
acaaguguugagaagaug

SEQ ID NO: 145737 - RNA, 19 nt, Artificial Sequence
  Synthetic
aacaaguguugagaagaug

SEQ ID NO: 145738 - RNA, 20 nt, Artificial Sequence
  Synthetic
uaacaaguguugagaagaug

SEQ ID NO: 145739 - RNA, 21 nt, Artificial Sequence
  Synthetic
auaacaaguguugagaagaug

SEQ ID NO: 145740 - RNA, 22 nt, Artificial Sequence
  Synthetic
aauaacaaguguugagaagaug

SEQ ID NO: 145741 - RNA, 23 nt, Artificial Sequence
  Synthetic
caauaacaaguguugagaagaug

SEQ ID NO: 145742 - RNA, 24 nt, Artificial Sequence
  Synthetic
acaauaacaaguguugagaagaug

SEQ ID NO: 145743 - RNA, 18 nt, Artificial Sequence
  Synthetic
uagauaaauauccagaug

SEQ ID NO: 145744 - RNA, 19 nt, Artificial Sequence
  Synthetic
uuagauaaauauccagaug

SEQ ID NO: 145745 - RNA, 20 nt, Artificial Sequence
  Synthetic
uuuagauaaauauccagaug

SEQ ID NO: 145746 - RNA, 18 nt, Artificial Sequence
  Synthetic
uuuuuaaaaaugcagaug

SEQ ID NO: 145747 - RNA, 20 nt, Artificial Sequence
  Synthetic
uguuuuuaaaaaugcagaug

SEQ ID NO: 145748 - RNA, 19 nt, Artificial Sequence
  Synthetic
aguugaauucauagagaug

SEQ ID NO: 145749 - RNA, 20 nt, Artificial Sequence
  Synthetic
aaguugaauucauagagaug

SEQ ID NO: 145750 - RNA, 19 nt, Artificial Sequence
  Synthetic
uguauuuuuaguagagaug

SEQ ID NO: 145751 - RNA, 20 nt, Artificial Sequence
  Synthetic
uuguauuuuuaguagagaug

SEQ ID NO: 145752 - RNA, 21 nt, Artificial Sequence
  Synthetic
uuuguauuuuuaguagagaug

SEQ ID NO: 145753 - RNA, 22 nt, Artificial Sequence
  Synthetic
uuuuguauuuuuaguagagaug

SEQ ID NO: 145754 - RNA, 23 nt, Artificial Sequence
  Synthetic
uuuuuguauuuuuaguagagaug

SEQ ID NO: 145755 - RNA, 24 nt, Artificial Sequence
  Synthetic
auuuuuguauuuuuaguagagaug

SEQ ID NO: 145756 - RNA, 18 nt, Artificial Sequence
  Synthetic
uuuugaugauuagagaug

SEQ ID NO: 145757 - RNA, 19 nt, Artificial Sequence
  Synthetic
uuuuugaugauuagagaug

SEQ ID NO: 145758 - RNA, 20 nt, Artificial Sequence
  Synthetic
uuuuuugaugauuagagaug

SEQ ID NO: 145759 - RNA, 21 nt, Artificial Sequence
  Synthetic
auuuuuugaugauuagagaug

SEQ ID NO: 145760 - RNA, 22 nt, Artificial Sequence
  Synthetic
cauuuuuugaugauuagagaug

SEQ ID NO: 145761 - RNA, 24 nt, Artificial Sequence
  Synthetic
ugcauuuuuugaugauuagagaug

SEQ ID NO: 145762 - RNA, 18 nt, Artificial Sequence
  Synthetic
uuaccauuuauugagaug

SEQ ID NO: 145763 - RNA, 19 nt, Artificial Sequence
  Synthetic
auuaccauuuauugagaug

SEQ ID NO: 145764 - RNA, 20 nt, Artificial Sequence
  Synthetic
uauuaccauuuauugagaug

SEQ ID NO: 145765 - RNA, 24 nt, Artificial Sequence
  Synthetic
aggguauuaccauuuauugagaug

SEQ ID NO: 145766 - RNA, 18 nt, Artificial Sequence
  Synthetic
uuagucauuuuauagaug

SEQ ID NO: 145767 - RNA, 20 nt, Artificial Sequence
  Synthetic
aguuagucauuuuauagaug

SEQ ID NO: 145768 - RNA, 18 nt, Artificial Sequence
  Synthetic
aaauaccuaauguagaug

SEQ ID NO: 145769 - RNA, 20 nt, Artificial Sequence
  Synthetic
agaaauaccuaauguagaug

SEQ ID NO: 145770 - RNA, 23 nt, Artificial Sequence
  Synthetic
aggagaaauaccuaauguagaug

SEQ ID NO: 145771 - RNA, 24 nt, Artificial Sequence
  Synthetic
uaggagaaauaccuaauguagaug

SEQ ID NO: 145772 - RNA, 18 nt, Artificial Sequence
  Synthetic
ccccgaugauugacgaug

SEQ ID NO: 145773 - RNA, 19 nt, Artificial Sequence
  Synthetic
uccccgaugauugacgaug

SEQ ID NO: 145774 - RNA, 20 nt, Artificial Sequence
  Synthetic
uuccccgaugauugacgaug

SEQ ID NO: 145775 - RNA, 21 nt, Artificial Sequence
  Synthetic
uuuccccgaugauugacgaug

SEQ ID NO: 145776 - RNA, 22 nt, Artificial Sequence
  Synthetic
auuuccccgaugauugacgaug

SEQ ID NO: 145777 - RNA, 23 nt, Artificial Sequence
  Synthetic
cauuuccccgaugauugacgaug

SEQ ID NO: 145778 - RNA, 18 nt, Artificial Sequence
  Synthetic
uuuucucauaaaaggaug

SEQ ID NO: 145779 - RNA, 19 nt, Artificial Sequence
  Synthetic
uuuuucucauaaaaggaug

SEQ ID NO: 145780 - RNA, 21 nt, Artificial Sequence
  Synthetic
aguuuuucucauaaaaggaug

SEQ ID NO: 145781 - RNA, 23 nt, Artificial Sequence
  Synthetic
agaguuuuucucauaaaaggaug

SEQ ID NO: 145782 - RNA, 24 nt, Artificial Sequence
  Synthetic
aagaguuuuucucauaaaaggaug

SEQ ID NO: 145783 - RNA, 18 nt, Artificial Sequence
  Synthetic
ccuggggggagggggaug

SEQ ID NO: 145784 - RNA, 19 nt, Artificial Sequence
  Synthetic
accuggggggagggggaug

SEQ ID NO: 145785 - RNA, 18 nt, Artificial Sequence
  Synthetic
agggaacaaaacuggaug

SEQ ID NO: 145786 - RNA, 19 nt, Artificial Sequence
  Synthetic
aagggaacaaaacuggaug

SEQ ID NO: 145787 - RNA, 20 nt, Artificial Sequence
  Synthetic
caagggaacaaaacuggaug

SEQ ID NO: 145788 - RNA, 22 nt, Artificial Sequence
  Synthetic
agcaagggaacaaaacuggaug

SEQ ID NO: 145789 - RNA, 23 nt, Artificial Sequence
  Synthetic
cagcaagggaacaaaacuggaug

SEQ ID NO: 145790 - RNA, 24 nt, Artificial Sequence
  Synthetic
ccagcaagggaacaaaacuggaug

SEQ ID NO: 145791 - RNA, 19 nt, Artificial Sequence
  Synthetic
agaugaaauagagaugaug

SEQ ID NO: 145792 - RNA, 18 nt, Artificial Sequence
  Synthetic
uuaaucuuuuugcugaug

SEQ ID NO: 145793 - RNA, 19 nt, Artificial Sequence
  Synthetic
cuuaaucuuuuugcugaug

SEQ ID NO: 145794 - RNA, 20 nt, Artificial Sequence
  Synthetic
ucuuaaucuuuuugcugaug

SEQ ID NO: 145795 - RNA, 22 nt, Artificial Sequence
  Synthetic
agucuuaaucuuuuugcugaug

SEQ ID NO: 145796 - RNA, 24 nt, Artificial Sequence
  Synthetic
ugagucuuaaucuuuuugcugaug

SEQ ID NO: 145797 - RNA, 18 nt, Artificial Sequence
  Synthetic
auuugcauuucucugaug

SEQ ID NO: 145798 - RNA, 20 nt, Artificial Sequence
  Synthetic
ugauuugcauuucucugaug

SEQ ID NO: 145799 - RNA, 18 nt, Artificial Sequence
  Synthetic
ugauagacuugcuugaug

SEQ ID NO: 145800 - RNA, 19 nt, Artificial Sequence
  Synthetic
cugauagacuugcuugaug

SEQ ID NO: 145801 - RNA, 21 nt, Artificial Sequence
  Synthetic
ugcugauagacuugcuugaug

SEQ ID NO: 145802 - RNA, 22 nt, Artificial Sequence
  Synthetic
uugcugauagacuugcuugaug

SEQ ID NO: 145803 - RNA, 24 nt, Artificial Sequence
  Synthetic
uguugcugauagacuugcuugaug

SEQ ID NO: 145804 - RNA, 20 nt, Artificial Sequence
  Synthetic
agguauuuaaugaaaauaug

SEQ ID NO: 145805 - RNA, 21 nt, Artificial Sequence
  Synthetic
cagguauuuaaugaaaauaug

SEQ ID NO: 145806 - RNA, 23 nt, Artificial Sequence
  Synthetic
agcagguauuuaaugaaaauaug

SEQ ID NO: 145807 - RNA, 18 nt, Artificial Sequence
  Synthetic
auauauagaauauauaug

SEQ ID NO: 145808 - RNA, 19 nt, Artificial Sequence
  Synthetic
uauauauagaauauauaug

SEQ ID NO: 145809 - RNA, 20 nt, Artificial Sequence
  Synthetic
auauauauagaauauauaug

SEQ ID NO: 145810 - RNA, 21 nt, Artificial Sequence
  Synthetic
uauauauauagaauauauaug

SEQ ID NO: 145811 - RNA, 22 nt, Artificial Sequence
  Synthetic
auauauauauagaauauauaug

SEQ ID NO: 145812 - RNA, 23 nt, Artificial Sequence
  Synthetic
uauauauauauagaauauauaug

SEQ ID NO: 145813 - RNA, 24 nt, Artificial Sequence
  Synthetic
auauauauauauagaauauauaug

SEQ ID NO: 145814 - RNA, 19 nt, Artificial Sequence
  Synthetic
ugggguacauauauauaug

SEQ ID NO: 145815 - RNA, 21 nt, Artificial Sequence
  Synthetic
ugugggguacauauauauaug

SEQ ID NO: 145816 - RNA, 22 nt, Artificial Sequence
  Synthetic
augugggguacauauauauaug

SEQ ID NO: 145817 - RNA, 23 nt, Artificial Sequence
  Synthetic
uaugugggguacauauauauaug

SEQ ID NO: 145818 - RNA, 24 nt, Artificial Sequence
  Synthetic
auaugugggguacauauauauaug

SEQ ID NO: 145819 - RNA, 21 nt, Artificial Sequence
  Synthetic
ugggguacauauauauauaug

SEQ ID NO: 145820 - RNA, 23 nt, Artificial Sequence
  Synthetic
ugugggguacauauauauauaug

SEQ ID NO: 145821 - RNA, 24 nt, Artificial Sequence
  Synthetic
augugggguacauauauauauaug

SEQ ID NO: 145822 - RNA, 19 nt, Artificial Sequence
  Synthetic
ugugggguauauauauaug

SEQ ID NO: 145823 - RNA, 20 nt, Artificial Sequence
  Synthetic
augugggguauauauauaug

SEQ ID NO: 145824 - RNA, 21 nt, Artificial Sequence
  Synthetic
uaugugggguauauauauaug

SEQ ID NO: 145825 - RNA, 22 nt, Artificial Sequence
  Synthetic
auaugugggguauauauauaug

SEQ ID NO: 145826 - RNA, 23 nt, Artificial Sequence
  Synthetic
uauaugugggguauauauauaug

SEQ ID NO: 145827 - RNA, 24 nt, Artificial Sequence
  Synthetic
auauaugugggguauauauauaug

SEQ ID NO: 145828 - RNA, 18 nt, Artificial Sequence
  Synthetic
uauauauguguauauaug

SEQ ID NO: 145829 - RNA, 19 nt, Artificial Sequence
  Synthetic
auauauauguguauauaug

SEQ ID NO: 145830 - RNA, 20 nt, Artificial Sequence
  Synthetic
cauauauauguguauauaug

SEQ ID NO: 145831 - RNA, 21 nt, Artificial Sequence
  Synthetic
acauauauauguguauauaug

SEQ ID NO: 145832 - RNA, 22 nt, Artificial Sequence
  Synthetic
cacauauauauguguauauaug

SEQ ID NO: 145833 - RNA, 23 nt, Artificial Sequence
  Synthetic
acacauauauauguguauauaug

SEQ ID NO: 145834 - RNA, 24 nt, Artificial Sequence
  Synthetic
uacacauauauauguguauauaug

SEQ ID NO: 145835 - RNA, 21 nt, Artificial Sequence
  Synthetic
uguacuucauucuguuauaug

SEQ ID NO: 145836 - RNA, 22 nt, Artificial Sequence
  Synthetic
uuguacuucauucuguuauaug

SEQ ID NO: 145837 - RNA, 23 nt, Artificial Sequence
  Synthetic
uuuguacuucauucuguuauaug

SEQ ID NO: 145838 - RNA, 24 nt, Artificial Sequence
  Synthetic
uuuuguacuucauucuguuauaug

SEQ ID NO: 145839 - RNA, 18 nt, Artificial Sequence
  Synthetic
uuuggcucuguuuauaug

SEQ ID NO: 145840 - RNA, 19 nt, Artificial Sequence
  Synthetic
cuuuggcucuguuuauaug

SEQ ID NO: 145841 - RNA, 20 nt, Artificial Sequence
  Synthetic
ucuuuggcucuguuuauaug

SEQ ID NO: 145842 - RNA, 19 nt, Artificial Sequence
  Synthetic
cguugguucuguuuauaug

SEQ ID NO: 145843 - RNA, 20 nt, Artificial Sequence
  Synthetic
ucguugguucuguuuauaug

SEQ ID NO: 145844 - RNA, 22 nt, Artificial Sequence
  Synthetic
ugucguugguucuguuuauaug

SEQ ID NO: 145845 - RNA, 23 nt, Artificial Sequence
  Synthetic
uugucguugguucuguuuauaug

SEQ ID NO: 145846 - RNA, 24 nt, Artificial Sequence
  Synthetic
uuugucguugguucuguuuauaug

SEQ ID NO: 145847 - RNA, 18 nt, Artificial Sequence
  Synthetic
agaacuuccaacacuaug

SEQ ID NO: 145848 - RNA, 19 nt, Artificial Sequence
  Synthetic
cagaacuuccaacacuaug

SEQ ID NO: 145849 - RNA, 20 nt, Artificial Sequence
  Synthetic
ccagaacuuccaacacuaug

SEQ ID NO: 145850 - RNA, 18 nt, Artificial Sequence
  Synthetic
aggacuuccaauacuaug

SEQ ID NO: 145851 - RNA, 19 nt, Artificial Sequence
  Synthetic
caggacuuccaauacuaug

SEQ ID NO: 145852 - RNA, 20 nt, Artificial Sequence
  Synthetic
ccaggacuuccaauacuaug

SEQ ID NO: 145853 - RNA, 23 nt, Artificial Sequence
  Synthetic
uggccaggacuuccaauacuaug

SEQ ID NO: 145854 - RNA, 24 nt, Artificial Sequence
  Synthetic
cuggccaggacuuccaauacuaug

SEQ ID NO: 145855 - RNA, 18 nt, Artificial Sequence
  Synthetic
ugauguuuucaacguaug

SEQ ID NO: 145856 - RNA, 19 nt, Artificial Sequence
  Synthetic
augauguuuucaacguaug

SEQ ID NO: 145857 - RNA, 20 nt, Artificial Sequence
  Synthetic
uaugauguuuucaacguaug

SEQ ID NO: 145858 - RNA, 21 nt, Artificial Sequence
  Synthetic
uuaugauguuuucaacguaug

SEQ ID NO: 145859 - RNA, 22 nt, Artificial Sequence
  Synthetic
uuuaugauguuuucaacguaug

SEQ ID NO: 145860 - RNA, 23 nt, Artificial Sequence
  Synthetic
auuuaugauguuuucaacguaug

SEQ ID NO: 145861 - RNA, 24 nt, Artificial Sequence
  Synthetic
aauuuaugauguuuucaacguaug

SEQ ID NO: 145862 - RNA, 18 nt, Artificial Sequence
  Synthetic
cagagggaacauuguaug

SEQ ID NO: 145863 - RNA, 21 nt, Artificial Sequence
  Synthetic
aggcagagggaacauuguaug

SEQ ID NO: 145864 - RNA, 22 nt, Artificial Sequence
  Synthetic
caggcagagggaacauuguaug

SEQ ID NO: 145865 - RNA, 23 nt, Artificial Sequence
  Synthetic
ccaggcagagggaacauuguaug

SEQ ID NO: 145866 - RNA, 24 nt, Artificial Sequence
  Synthetic
cccaggcagagggaacauuguaug

SEQ ID NO: 145867 - RNA, 18 nt, Artificial Sequence
  Synthetic
auuguccaaaguuguaug

SEQ ID NO: 145868 - RNA, 19 nt, Artificial Sequence
  Synthetic
aauuguccaaaguuguaug

SEQ ID NO: 145869 - RNA, 18 nt, Artificial Sequence
  Synthetic
aaucuccacagaauuaug

SEQ ID NO: 145870 - RNA, 19 nt, Artificial Sequence
  Synthetic
caaucuccacagaauuaug

SEQ ID NO: 145871 - RNA, 20 nt, Artificial Sequence
  Synthetic
ucaaucuccacagaauuaug

SEQ ID NO: 145872 - RNA, 21 nt, Artificial Sequence
  Synthetic
aucaaucuccacagaauuaug

SEQ ID NO: 145873 - RNA, 23 nt, Artificial Sequence
  Synthetic
agaucaaucuccacagaauuaug

SEQ ID NO: 145874 - RNA, 24 nt, Artificial Sequence
  Synthetic
uagaucaaucuccacagaauuaug

SEQ ID NO: 145875 - RNA, 18 nt, Artificial Sequence
  Synthetic
cacugaaucuacauuaug

SEQ ID NO: 145876 - RNA, 19 nt, Artificial Sequence
  Synthetic
ccacugaaucuacauuaug

SEQ ID NO: 145877 - RNA, 20 nt, Artificial Sequence
  Synthetic
cccacugaaucuacauuaug

SEQ ID NO: 145878 - RNA, 21 nt, Artificial Sequence
  Synthetic
ucccacugaaucuacauuaug

SEQ ID NO: 145879 - RNA, 22 nt, Artificial Sequence
  Synthetic
cucccacugaaucuacauuaug

SEQ ID NO: 145880 - RNA, 18 nt, Artificial Sequence
  Synthetic
ugauguuuucaacuuaug

SEQ ID NO: 145881 - RNA, 19 nt, Artificial Sequence
  Synthetic
augauguuuucaacuuaug

SEQ ID NO: 145882 - RNA, 20 nt, Artificial Sequence
  Synthetic
uaugauguuuucaacuuaug

SEQ ID NO: 145883 - RNA, 21 nt, Artificial Sequence
  Synthetic
uuaugauguuuucaacuuaug

SEQ ID NO: 145884 - RNA, 22 nt, Artificial Sequence
  Synthetic
uuuaugauguuuucaacuuaug

SEQ ID NO: 145885 - RNA, 23 nt, Artificial Sequence
  Synthetic
auuuaugauguuuucaacuuaug

SEQ ID NO: 145886 - RNA, 24 nt, Artificial Sequence
  Synthetic
aauuuaugauguuuucaacuuaug

SEQ ID NO: 145887 - RNA, 18 nt, Artificial Sequence
  Synthetic
ucucuuaaaaaauuuaug

SEQ ID NO: 145888 - RNA, 19 nt, Artificial Sequence
  Synthetic
uucucuuaaaaaauuuaug

SEQ ID NO: 145889 - RNA, 20 nt, Artificial Sequence
  Synthetic
uuucucuuaaaaaauuuaug

SEQ ID NO: 145890 - RNA, 19 nt, Artificial Sequence
  Synthetic
aggccccacuucaaaacug

SEQ ID NO: 145891 - RNA, 20 nt, Artificial Sequence
  Synthetic
caggccccacuucaaaacug

SEQ ID NO: 145892 - RNA, 21 nt, Artificial Sequence
  Synthetic
ccaggccccacuucaaaacug

SEQ ID NO: 145893 - RNA, 22 nt, Artificial Sequence
  Synthetic
cccaggccccacuucaaaacug

SEQ ID NO: 145894 - RNA, 23 nt, Artificial Sequence
  Synthetic
ucccaggccccacuucaaaacug

SEQ ID NO: 145895 - RNA, 24 nt, Artificial Sequence
  Synthetic
aucccaggccccacuucaaaacug

SEQ ID NO: 145896 - RNA, 18 nt, Artificial Sequence
  Synthetic
aucuuuaguuuuaaacug

SEQ ID NO: 145897 - RNA, 19 nt, Artificial Sequence
  Synthetic
aaucuuuaguuuuaaacug

SEQ ID NO: 145898 - RNA, 20 nt, Artificial Sequence
  Synthetic
aaaucuuuaguuuuaaacug

SEQ ID NO: 145899 - RNA, 21 nt, Artificial Sequence
  Synthetic
aaaaucuuuaguuuuaaacug

SEQ ID NO: 145900 - RNA, 22 nt, Artificial Sequence
  Synthetic
uaaaaucuuuaguuuuaaacug

SEQ ID NO: 145901 - RNA, 23 nt, Artificial Sequence
  Synthetic
auaaaaucuuuaguuuuaaacug

SEQ ID NO: 145902 - RNA, 24 nt, Artificial Sequence
  Synthetic
aauaaaaucuuuaguuuuaaacug

SEQ ID NO: 145903 - RNA, 19 nt, Artificial Sequence
  Synthetic
uguugaaugaacagaacug

SEQ ID NO: 145904 - RNA, 20 nt, Artificial Sequence
  Synthetic
uuguugaaugaacagaacug

SEQ ID NO: 145905 - RNA, 19 nt, Artificial Sequence
  Synthetic
aggccccacuucagaacug

SEQ ID NO: 145906 - RNA, 20 nt, Artificial Sequence
  Synthetic
caggccccacuucagaacug

SEQ ID NO: 145907 - RNA, 21 nt, Artificial Sequence
  Synthetic
ccaggccccacuucagaacug

SEQ ID NO: 145908 - RNA, 22 nt, Artificial Sequence
  Synthetic
cccaggccccacuucagaacug

SEQ ID NO: 145909 - RNA, 23 nt, Artificial Sequence
  Synthetic
ucccaggccccacuucagaacug

SEQ ID NO: 145910 - RNA, 24 nt, Artificial Sequence
  Synthetic
aucccaggccccacuucagaacug

SEQ ID NO: 145911 - RNA, 18 nt, Artificial Sequence
  Synthetic
uacaccuaauguuaacug

SEQ ID NO: 145912 - RNA, 19 nt, Artificial Sequence
  Synthetic
auacaccuaauguuaacug

SEQ ID NO: 145913 - RNA, 21 nt, Artificial Sequence
  Synthetic
agauacaccuaauguuaacug

SEQ ID NO: 145914 - RNA, 24 nt, Artificial Sequence
  Synthetic
uggagauacaccuaauguuaacug

SEQ ID NO: 145915 - RNA, 18 nt, Artificial Sequence
  Synthetic
ccugaauacagcacacug

SEQ ID NO: 145916 - RNA, 19 nt, Artificial Sequence
  Synthetic
uccugaauacagcacacug

SEQ ID NO: 145917 - RNA, 20 nt, Artificial Sequence
  Synthetic
uuccugaauacagcacacug

SEQ ID NO: 145918 - RNA, 21 nt, Artificial Sequence
  Synthetic
uuuccugaauacagcacacug

SEQ ID NO: 145919 - RNA, 18 nt, Artificial Sequence
  Synthetic
ccugcuccugaaugacug

SEQ ID NO: 145920 - RNA, 19 nt, Artificial Sequence
  Synthetic
accugcuccugaaugacug

SEQ ID NO: 145921 - RNA, 20 nt, Artificial Sequence
  Synthetic
aaccugcuccugaaugacug

SEQ ID NO: 145922 - RNA, 21 nt, Artificial Sequence
  Synthetic
caaccugcuccugaaugacug

SEQ ID NO: 145923 - RNA, 23 nt, Artificial Sequence
  Synthetic
agcaaccugcuccugaaugacug

SEQ ID NO: 145924 - RNA, 18 nt, Artificial Sequence
  Synthetic
aauccuuucaauauacug

SEQ ID NO: 145925 - RNA, 19 nt, Artificial Sequence
  Synthetic
uaauccuuucaauauacug

SEQ ID NO: 145926 - RNA, 20 nt, Artificial Sequence
  Synthetic
auaauccuuucaauauacug

SEQ ID NO: 145927 - RNA, 21 nt, Artificial Sequence
  Synthetic
uauaauccuuucaauauacug

SEQ ID NO: 145928 - RNA, 23 nt, Artificial Sequence
  Synthetic
uguauaauccuuucaauauacug

SEQ ID NO: 145929 - RNA, 18 nt, Artificial Sequence
  Synthetic
ugcaaggcuuguauacug

SEQ ID NO: 145930 - RNA, 19 nt, Artificial Sequence
  Synthetic
augcaaggcuuguauacug

SEQ ID NO: 145931 - RNA, 21 nt, Artificial Sequence
  Synthetic
agaugcaaggcuuguauacug

SEQ ID NO: 145932 - RNA, 23 nt, Artificial Sequence
  Synthetic
agagaugcaaggcuuguauacug

SEQ ID NO: 145933 - RNA, 24 nt, Artificial Sequence
  Synthetic
aagagaugcaaggcuuguauacug

SEQ ID NO: 145934 - RNA, 18 nt, Artificial Sequence
  Synthetic
acacacuggggccuacug

SEQ ID NO: 145935 - RNA, 19 nt, Artificial Sequence
  Synthetic
cacacacuggggccuacug

SEQ ID NO: 145936 - RNA, 20 nt, Artificial Sequence
  Synthetic
acacacacuggggccuacug

SEQ ID NO: 145937 - RNA, 21 nt, Artificial Sequence
  Synthetic
aacacacacuggggccuacug

SEQ ID NO: 145938 - RNA, 22 nt, Artificial Sequence
  Synthetic
uaacacacacuggggccuacug

SEQ ID NO: 145939 - RNA, 23 nt, Artificial Sequence
  Synthetic
auaacacacacuggggccuacug

SEQ ID NO: 145940 - RNA, 24 nt, Artificial Sequence
  Synthetic
aauaacacacacuggggccuacug

SEQ ID NO: 145941 - RNA, 18 nt, Artificial Sequence
  Synthetic
cgcccaccgccacaccug

SEQ ID NO: 145942 - RNA, 21 nt, Artificial Sequence
  Synthetic
aggcgcccaccgccacaccug

SEQ ID NO: 145943 - RNA, 22 nt, Artificial Sequence
  Synthetic
caggcgcccaccgccacaccug

SEQ ID NO: 145944 - RNA, 23 nt, Artificial Sequence
  Synthetic
acaggcgcccaccgccacaccug

SEQ ID NO: 145945 - RNA, 24 nt, Artificial Sequence
  Synthetic
uacaggcgcccaccgccacaccug

SEQ ID NO: 145946 - RNA, 21 nt, Artificial Sequence
  Synthetic
augcuuauauucauauaccug

SEQ ID NO: 145947 - RNA, 22 nt, Artificial Sequence
  Synthetic
aaugcuuauauucauauaccug

SEQ ID NO: 145948 - RNA, 23 nt, Artificial Sequence
  Synthetic
aaaugcuuauauucauauaccug

SEQ ID NO: 145949 - RNA, 24 nt, Artificial Sequence
  Synthetic
aaaaugcuuauauucauauaccug

SEQ ID NO: 145950 - RNA, 21 nt, Artificial Sequence
  Synthetic
aggauggaggggcucuaccug

SEQ ID NO: 145951 - RNA, 22 nt, Artificial Sequence
  Synthetic
uaggauggaggggcucuaccug

SEQ ID NO: 145952 - RNA, 23 nt, Artificial Sequence
  Synthetic
auaggauggaggggcucuaccug

SEQ ID NO: 145953 - RNA, 18 nt, Artificial Sequence
  Synthetic
agguggguggauuaccug

SEQ ID NO: 145954 - RNA, 20 nt, Artificial Sequence
  Synthetic
ugagguggguggauuaccug

SEQ ID NO: 145955 - RNA, 21 nt, Artificial Sequence
  Synthetic
cugagguggguggauuaccug

SEQ ID NO: 145956 - RNA, 22 nt, Artificial Sequence
  Synthetic
ucugagguggguggauuaccug

SEQ ID NO: 145957 - RNA, 24 nt, Artificial Sequence
  Synthetic
agucugagguggguggauuaccug

SEQ ID NO: 145958 - RNA, 18 nt, Artificial Sequence
  Synthetic
caaagacaacaaacccug

SEQ ID NO: 145959 - RNA, 20 nt, Artificial Sequence
  Synthetic
agcaaagacaacaaacccug

SEQ ID NO: 145960 - RNA, 18 nt, Artificial Sequence
  Synthetic
ucuaguucuaggccccug

SEQ ID NO: 145961 - RNA, 19 nt, Artificial Sequence
  Synthetic
uucuaguucuaggccccug

SEQ ID NO: 145962 - RNA, 20 nt, Artificial Sequence
  Synthetic
uuucuaguucuaggccccug

SEQ ID NO: 145963 - RNA, 21 nt, Artificial Sequence
  Synthetic
auuucuaguucuaggccccug

SEQ ID NO: 145964 - RNA, 22 nt, Artificial Sequence
  Synthetic
uauuucuaguucuaggccccug

SEQ ID NO: 145965 - RNA, 19 nt, Artificial Sequence
  Synthetic
uggucacccaagagcccug

SEQ ID NO: 145966 - RNA, 20 nt, Artificial Sequence
  Synthetic
cuggucacccaagagcccug

SEQ ID NO: 145967 - RNA, 21 nt, Artificial Sequence
  Synthetic
ccuggucacccaagagcccug

SEQ ID NO: 145968 - RNA, 22 nt, Artificial Sequence
  Synthetic
cccuggucacccaagagcccug

SEQ ID NO: 145969 - RNA, 23 nt, Artificial Sequence
  Synthetic
ucccuggucacccaagagcccug

SEQ ID NO: 145970 - RNA, 18 nt, Artificial Sequence
  Synthetic
ucuaguucuagaucccug

SEQ ID NO: 145971 - RNA, 19 nt, Artificial Sequence
  Synthetic
uucuaguucuagaucccug

SEQ ID NO: 145972 - RNA, 20 nt, Artificial Sequence
  Synthetic
uuucuaguucuagaucccug

SEQ ID NO: 145973 - RNA, 18 nt, Artificial Sequence
  Synthetic
auuauuuaacuuagccug

SEQ ID NO: 145974 - RNA, 19 nt, Artificial Sequence
  Synthetic
aauuauuuaacuuagccug

SEQ ID NO: 145975 - RNA, 20 nt, Artificial Sequence
  Synthetic
aaauuauuuaacuuagccug

SEQ ID NO: 145976 - RNA, 18 nt, Artificial Sequence
  Synthetic
aauccuaaaacaauccug

SEQ ID NO: 145977 - RNA, 19 nt, Artificial Sequence
  Synthetic
uaauccuaaaacaauccug

SEQ ID NO: 145978 - RNA, 20 nt, Artificial Sequence
  Synthetic
uuaauccuaaaacaauccug

SEQ ID NO: 145979 - RNA, 18 nt, Artificial Sequence
  Synthetic
cuaacuauaauaauccug

SEQ ID NO: 145980 - RNA, 19 nt, Artificial Sequence
  Synthetic
ccuaacuauaauaauccug

SEQ ID NO: 145981 - RNA, 20 nt, Artificial Sequence
  Synthetic
cccuaacuauaauaauccug

SEQ ID NO: 145982 - RNA, 18 nt, Artificial Sequence
  Synthetic
cuccuggauaauauccug

SEQ ID NO: 145983 - RNA, 19 nt, Artificial Sequence
  Synthetic
ucuccuggauaauauccug

SEQ ID NO: 145984 - RNA, 20 nt, Artificial Sequence
  Synthetic
uucuccuggauaauauccug

SEQ ID NO: 145985 - RNA, 22 nt, Artificial Sequence
  Synthetic
aguucuccuggauaauauccug

SEQ ID NO: 145986 - RNA, 23 nt, Artificial Sequence
  Synthetic
aaguucuccuggauaauauccug

SEQ ID NO: 145987 - RNA, 18 nt, Artificial Sequence
  Synthetic
aacauaugaucuauccug

SEQ ID NO: 145988 - RNA, 19 nt, Artificial Sequence
  Synthetic
uaacauaugaucuauccug

SEQ ID NO: 145989 - RNA, 20 nt, Artificial Sequence
  Synthetic
cuaacauaugaucuauccug

SEQ ID NO: 145990 - RNA, 21 nt, Artificial Sequence
  Synthetic
ccuaacauaugaucuauccug

SEQ ID NO: 145991 - RNA, 24 nt, Artificial Sequence
  Synthetic
uggccuaacauaugaucuauccug

SEQ ID NO: 145992 - RNA, 19 nt, Artificial Sequence
  Synthetic
agugcugcaaaacuuccug

SEQ ID NO: 145993 - RNA, 20 nt, Artificial Sequence
  Synthetic
aagugcugcaaaacuuccug

SEQ ID NO: 145994 - RNA, 21 nt, Artificial Sequence
  Synthetic
caagugcugcaaaacuuccug

SEQ ID NO: 145995 - RNA, 23 nt, Artificial Sequence
  Synthetic
agcaagugcugcaaaacuuccug

SEQ ID NO: 145996 - RNA, 19 nt, Artificial Sequence
  Synthetic
uguggugaaguucuuccug

SEQ ID NO: 145997 - RNA, 20 nt, Artificial Sequence
  Synthetic
auguggugaaguucuuccug

SEQ ID NO: 145998 - RNA, 21 nt, Artificial Sequence
  Synthetic
uauguggugaaguucuuccug

SEQ ID NO: 145999 - RNA, 22 nt, Artificial Sequence
  Synthetic
uuauguggugaaguucuuccug

SEQ ID NO: 146000 - RNA, 23 nt, Artificial Sequence
  Synthetic
auuauguggugaaguucuuccug

SEQ ID NO: 146001 - RNA, 24 nt, Artificial Sequence
  Synthetic
uauuauguggugaaguucuuccug

SEQ ID NO: 146002 - RNA, 18 nt, Artificial Sequence
  Synthetic
accaauggacaaaagcug

SEQ ID NO: 146003 - RNA, 19 nt, Artificial Sequence
  Synthetic
aaccaauggacaaaagcug

SEQ ID NO: 146004 - RNA, 20 nt, Artificial Sequence
  Synthetic
uaaccaauggacaaaagcug

SEQ ID NO: 146005 - RNA, 18 nt, Artificial Sequence
  Synthetic
uucucuucagaaaagcug

SEQ ID NO: 146006 - RNA, 19 nt, Artificial Sequence
  Synthetic
uuucucuucagaaaagcug

SEQ ID NO: 146007 - RNA, 18 nt, Artificial Sequence
  Synthetic
caaccaucacagcagcug

SEQ ID NO: 146008 - RNA, 19 nt, Artificial Sequence
  Synthetic
ucaaccaucacagcagcug

SEQ ID NO: 146009 - RNA, 18 nt, Artificial Sequence
  Synthetic
ucacaucagaaucagcug

SEQ ID NO: 146010 - RNA, 19 nt, Artificial Sequence
  Synthetic
cucacaucagaaucagcug

SEQ ID NO: 146011 - RNA, 20 nt, Artificial Sequence
  Synthetic
acucacaucagaaucagcug

SEQ ID NO: 146012 - RNA, 21 nt, Artificial Sequence
  Synthetic
uacucacaucagaaucagcug

SEQ ID NO: 146013 - RNA, 22 nt, Artificial Sequence
  Synthetic
auacucacaucagaaucagcug

SEQ ID NO: 146014 - RNA, 23 nt, Artificial Sequence
  Synthetic
aauacucacaucagaaucagcug

SEQ ID NO: 146015 - RNA, 24 nt, Artificial Sequence
  Synthetic
uaauacucacaucagaaucagcug

SEQ ID NO: 146016 - RNA, 18 nt, Artificial Sequence
  Synthetic
ucacgucagaaucagcug

SEQ ID NO: 146017 - RNA, 19 nt, Artificial Sequence
  Synthetic
cucacgucagaaucagcug

SEQ ID NO: 146018 - RNA, 20 nt, Artificial Sequence
  Synthetic
acucacgucagaaucagcug

SEQ ID NO: 146019 - RNA, 21 nt, Artificial Sequence
  Synthetic
uacucacgucagaaucagcug

SEQ ID NO: 146020 - RNA, 23 nt, Artificial Sequence
  Synthetic
aguacucacgucagaaucagcug

SEQ ID NO: 146021 - RNA, 24 nt, Artificial Sequence
  Synthetic
uaguacucacgucagaaucagcug

SEQ ID NO: 146022 - RNA, 18 nt, Artificial Sequence
  Synthetic
caggagaaaagagagcug

SEQ ID NO: 146023 - RNA, 19 nt, Artificial Sequence
  Synthetic
ccaggagaaaagagagcug

SEQ ID NO: 146024 - RNA, 20 nt, Artificial Sequence
  Synthetic
cccaggagaaaagagagcug

SEQ ID NO: 146025 - RNA, 18 nt, Artificial Sequence
  Synthetic
cucuuuaguuaguagcug

SEQ ID NO: 146026 - RNA, 19 nt, Artificial Sequence
  Synthetic
ccucuuuaguuaguagcug

SEQ ID NO: 146027 - RNA, 22 nt, Artificial Sequence
  Synthetic
aggccucuuuaguuaguagcug

SEQ ID NO: 146028 - RNA, 23 nt, Artificial Sequence
  Synthetic
aaggccucuuuaguuaguagcug

SEQ ID NO: 146029 - RNA, 24 nt, Artificial Sequence
  Synthetic
caaggccucuuuaguuaguagcug

SEQ ID NO: 146030 - RNA, 18 nt, Artificial Sequence
  Synthetic
ugauucugcugcacgcug

SEQ ID NO: 146031 - RNA, 18 nt, Artificial Sequence
  Synthetic
cucaggaggccgaggcug

SEQ ID NO: 146032 - RNA, 19 nt, Artificial Sequence
  Synthetic
acucaggaggccgaggcug

SEQ ID NO: 146033 - RNA, 20 nt, Artificial Sequence
  Synthetic
uacucaggaggccgaggcug

SEQ ID NO: 146034 - RNA, 21 nt, Artificial Sequence
  Synthetic
auacucaggaggccgaggcug

SEQ ID NO: 146035 - RNA, 23 nt, Artificial Sequence
  Synthetic
agauacucaggaggccgaggcug

SEQ ID NO: 146036 - RNA, 24 nt, Artificial Sequence
  Synthetic
cagauacucaggaggccgaggcug

SEQ ID NO: 146037 - RNA, 18 nt, Artificial Sequence
  Synthetic
uuuuagcaugaagggcug

SEQ ID NO: 146038 - RNA, 19 nt, Artificial Sequence
  Synthetic
uuuuuagcaugaagggcug

SEQ ID NO: 146039 - RNA, 21 nt, Artificial Sequence
  Synthetic
aguuuuuagcaugaagggcug

SEQ ID NO: 146040 - RNA, 23 nt, Artificial Sequence
  Synthetic
agaguuuuuagcaugaagggcug

SEQ ID NO: 146041 - RNA, 18 nt, Artificial Sequence
  Synthetic
auggcuugacuggggcug

SEQ ID NO: 146042 - RNA, 20 nt, Artificial Sequence
  Synthetic
ugauggcuugacuggggcug

SEQ ID NO: 146043 - RNA, 21 nt, Artificial Sequence
  Synthetic
augauggcuugacuggggcug

SEQ ID NO: 146044 - RNA, 22 nt, Artificial Sequence
  Synthetic
uaugauggcuugacuggggcug

SEQ ID NO: 146045 - RNA, 23 nt, Artificial Sequence
  Synthetic
auaugauggcuugacuggggcug

SEQ ID NO: 146046 - RNA, 24 nt, Artificial Sequence
  Synthetic
cauaugauggcuugacuggggcug

SEQ ID NO: 146047 - RNA, 18 nt, Artificial Sequence
  Synthetic
cauuccuuuuuauggcug

SEQ ID NO: 146048 - RNA, 19 nt, Artificial Sequence
  Synthetic
ucauuccuuuuuauggcug

SEQ ID NO: 146049 - RNA, 20 nt, Artificial Sequence
  Synthetic
cucauuccuuuuuauggcug

SEQ ID NO: 146050 - RNA, 21 nt, Artificial Sequence
  Synthetic
ucucauuccuuuuuauggcug

SEQ ID NO: 146051 - RNA, 22 nt, Artificial Sequence
  Synthetic
aucucauuccuuuuuauggcug

SEQ ID NO: 146052 - RNA, 24 nt, Artificial Sequence
  Synthetic
ugaucucauuccuuuuuauggcug

SEQ ID NO: 146053 - RNA, 19 nt, Artificial Sequence
  Synthetic
agagggauuacucuggcug

SEQ ID NO: 146054 - RNA, 20 nt, Artificial Sequence
  Synthetic
uagagggauuacucuggcug

SEQ ID NO: 146055 - RNA, 20 nt, Artificial Sequence
  Synthetic
aggauuagaaaagacugcug

SEQ ID NO: 146056 - RNA, 21 nt, Artificial Sequence
  Synthetic
aaaaaaaaaaccacggugcug

SEQ ID NO: 146057 - RNA, 22 nt, Artificial Sequence
  Synthetic
aaaaaaaaaaaccacggugcug

SEQ ID NO: 146058 - RNA, 23 nt, Artificial Sequence
  Synthetic
aaaaaaaaaaaaccacggugcug

SEQ ID NO: 146059 - RNA, 24 nt, Artificial Sequence
  Synthetic
aaaaaaaaaaaaaccacggugcug

SEQ ID NO: 146060 - RNA, 18 nt, Artificial Sequence
  Synthetic
aggaugaagagggugcug

SEQ ID NO: 146061 - RNA, 20 nt, Artificial Sequence
  Synthetic
agaggaugaagagggugcug

SEQ ID NO: 146062 - RNA, 18 nt, Artificial Sequence
  Synthetic
aagcuuuuugaugugcug

SEQ ID NO: 146063 - RNA, 19 nt, Artificial Sequence
  Synthetic
uaagcuuuuugaugugcug

SEQ ID NO: 146064 - RNA, 20 nt, Artificial Sequence
  Synthetic
auaagcuuuuugaugugcug

SEQ ID NO: 146065 - RNA, 23 nt, Artificial Sequence
  Synthetic
uggauaagcuuuuugaugugcug

SEQ ID NO: 146066 - RNA, 18 nt, Artificial Sequence
  Synthetic
uguuguuguuuugaucug

SEQ ID NO: 146067 - RNA, 19 nt, Artificial Sequence
  Synthetic
uuguuguuguuuugaucug

SEQ ID NO: 146068 - RNA, 21 nt, Artificial Sequence
  Synthetic
uguuguuguuguuuugaucug

SEQ ID NO: 146069 - RNA, 22 nt, Artificial Sequence
  Synthetic
uuguuguuguuguuuugaucug

SEQ ID NO: 146070 - RNA, 24 nt, Artificial Sequence
  Synthetic
uguuguuguuguuguuuugaucug

SEQ ID NO: 146071 - RNA, 18 nt, Artificial Sequence
  Synthetic
uucuuuuuacuuuaucug

SEQ ID NO: 146072 - RNA, 19 nt, Artificial Sequence
  Synthetic
uuucuuuuuacuuuaucug

SEQ ID NO: 146073 - RNA, 20 nt, Artificial Sequence
  Synthetic
uuuucuuuuuacuuuaucug

SEQ ID NO: 146074 - RNA, 21 nt, Artificial Sequence
  Synthetic
cuuuucuuuuuacuuuaucug

SEQ ID NO: 146075 - RNA, 22 nt, Artificial Sequence
  Synthetic
ucuuuucuuuuuacuuuaucug

SEQ ID NO: 146076 - RNA, 23 nt, Artificial Sequence
  Synthetic
uucuuuucuuuuuacuuuaucug

SEQ ID NO: 146077 - RNA, 24 nt, Artificial Sequence
  Synthetic
uuucuuuucuuuuuacuuuaucug

SEQ ID NO: 146078 - RNA, 18 nt, Artificial Sequence
  Synthetic
auuuugcuucauucucug

SEQ ID NO: 146079 - RNA, 19 nt, Artificial Sequence
  Synthetic
uauuuugcuucauucucug

SEQ ID NO: 146080 - RNA, 20 nt, Artificial Sequence
  Synthetic
uuauuuugcuucauucucug

SEQ ID NO: 146081 - RNA, 22 nt, Artificial Sequence
  Synthetic
aguugguucaaaggagagucug

SEQ ID NO: 146082 - RNA, 23 nt, Artificial Sequence
  Synthetic
caguugguucaaaggagagucug

SEQ ID NO: 146083 - RNA, 24 nt, Artificial Sequence
  Synthetic
acaguugguucaaaggagagucug

SEQ ID NO: 146084 - RNA, 21 nt, Artificial Sequence
  Synthetic
acaaaacuauguaacauucug

SEQ ID NO: 146085 - RNA, 22 nt, Artificial Sequence
  Synthetic
aacaaaacuauguaacauucug

SEQ ID NO: 146086 - RNA, 23 nt, Artificial Sequence
  Synthetic
uaacaaaacuauguaacauucug

SEQ ID NO: 146087 - RNA, 24 nt, Artificial Sequence
  Synthetic
cuaacaaaacuauguaacauucug

SEQ ID NO: 146088 - RNA, 18 nt, Artificial Sequence
  Synthetic
aauuuuguucauauucug

SEQ ID NO: 146089 - RNA, 19 nt, Artificial Sequence
  Synthetic
uaauuuuguucauauucug

SEQ ID NO: 146090 - RNA, 20 nt, Artificial Sequence
  Synthetic
uuaauuuuguucauauucug

SEQ ID NO: 146091 - RNA, 18 nt, Artificial Sequence
  Synthetic
cuuuaaaacauuauucug

SEQ ID NO: 146092 - RNA, 22 nt, Artificial Sequence
  Synthetic
ugggcuuuaaaacauuauucug

SEQ ID NO: 146093 - RNA, 23 nt, Artificial Sequence
  Synthetic
uugggcuuuaaaacauuauucug

SEQ ID NO: 146094 - RNA, 18 nt, Artificial Sequence
  Synthetic
uauaaaaauugucuucug

SEQ ID NO: 146095 - RNA, 19 nt, Artificial Sequence
  Synthetic
uuauaaaaauugucuucug

SEQ ID NO: 146096 - RNA, 20 nt, Artificial Sequence
  Synthetic
auuauaaaaauugucuucug

SEQ ID NO: 146097 - RNA, 18 nt, Artificial Sequence
  Synthetic
ccugccuucuuucuucug

SEQ ID NO: 146098 - RNA, 19 nt, Artificial Sequence
  Synthetic
uccugccuucuuucuucug

SEQ ID NO: 146099 - RNA, 20 nt, Artificial Sequence
  Synthetic
auccugccuucuuucuucug

SEQ ID NO: 146100 - RNA, 19 nt, Artificial Sequence
  Synthetic
uguuauuucuuuucuucug

SEQ ID NO: 146101 - RNA, 20 nt, Artificial Sequence
  Synthetic
uuguuauuucuuuucuucug

SEQ ID NO: 146102 - RNA, 21 nt, Artificial Sequence
  Synthetic
uuuguuauuucuuuucuucug

SEQ ID NO: 146103 - RNA, 22 nt, Artificial Sequence
  Synthetic
cuuuguuauuucuuuucuucug

SEQ ID NO: 146104 - RNA, 23 nt, Artificial Sequence
  Synthetic
ucuuuguuauuucuuuucuucug

SEQ ID NO: 146105 - RNA, 24 nt, Artificial Sequence
  Synthetic
aucuuuguuauuucuuuucuucug

SEQ ID NO: 146106 - RNA, 18 nt, Artificial Sequence
  Synthetic
uguugucuuacaguucug

SEQ ID NO: 146107 - RNA, 19 nt, Artificial Sequence
  Synthetic
cuguugucuuacaguucug

SEQ ID NO: 146108 - RNA, 20 nt, Artificial Sequence
  Synthetic
ucuguugucuuacaguucug

SEQ ID NO: 146109 - RNA, 22 nt, Artificial Sequence
  Synthetic
agucuguugucuuacaguucug

SEQ ID NO: 146110 - RNA, 23 nt, Artificial Sequence
  Synthetic
aagucuguugucuuacaguucug

SEQ ID NO: 146111 - RNA, 18 nt, Artificial Sequence
  Synthetic
cuuuuguauauauuucug

SEQ ID NO: 146112 - RNA, 19 nt, Artificial Sequence
  Synthetic
ucuuuuguauauauuucug

SEQ ID NO: 146113 - RNA, 18 nt, Artificial Sequence
  Synthetic
ugguaguuuguauuucug

SEQ ID NO: 146114 - RNA, 19 nt, Artificial Sequence
  Synthetic
augguaguuuguauuucug

SEQ ID NO: 146115 - RNA, 21 nt, Artificial Sequence
  Synthetic
ugaugguaguuuguauuucug

SEQ ID NO: 146116 - RNA, 22 nt, Artificial Sequence
  Synthetic
cugaugguaguuuguauuucug

SEQ ID NO: 146117 - RNA, 23 nt, Artificial Sequence
  Synthetic
ucugaugguaguuuguauuucug

SEQ ID NO: 146118 - RNA, 24 nt, Artificial Sequence
  Synthetic
cucugaugguaguuuguauuucug

SEQ ID NO: 146119 - RNA, 18 nt, Artificial Sequence
  Synthetic
uccuuagcccacuuucug

SEQ ID NO: 146120 - RNA, 19 nt, Artificial Sequence
  Synthetic
auccuuagcccacuuucug

SEQ ID NO: 146121 - RNA, 20 nt, Artificial Sequence
  Synthetic
uauccuuagcccacuuucug

SEQ ID NO: 146122 - RNA, 21 nt, Artificial Sequence
  Synthetic
auauccuuagcccacuuucug

SEQ ID NO: 146123 - RNA, 22 nt, Artificial Sequence
  Synthetic
cauauccuuagcccacuuucug

SEQ ID NO: 146124 - RNA, 23 nt, Artificial Sequence
  Synthetic
ucauauccuuagcccacuuucug

SEQ ID NO: 146125 - RNA, 24 nt, Artificial Sequence
  Synthetic
uucauauccuuagcccacuuucug

SEQ ID NO: 146126 - RNA, 18 nt, Artificial Sequence
  Synthetic
ugacaggguugguuucug

SEQ ID NO: 146127 - RNA, 19 nt, Artificial Sequence
  Synthetic
augacaggguugguuucug

SEQ ID NO: 146128 - RNA, 21 nt, Artificial Sequence
  Synthetic
ugaugacaggguugguuucug

SEQ ID NO: 146129 - RNA, 24 nt, Artificial Sequence
  Synthetic
aggugaugacaggguugguuucug

SEQ ID NO: 146130 - RNA, 18 nt, Artificial Sequence
  Synthetic
uucucuuuaauuuuucug

SEQ ID NO: 146131 - RNA, 19 nt, Artificial Sequence
  Synthetic
cuucucuuuaauuuuucug

SEQ ID NO: 146132 - RNA, 20 nt, Artificial Sequence
  Synthetic
ucuucucuuuaauuuuucug

SEQ ID NO: 146133 - RNA, 21 nt, Artificial Sequence
  Synthetic
cugccucagccucccaaagug

SEQ ID NO: 146134 - RNA, 22 nt, Artificial Sequence
  Synthetic
ucugccucagccucccaaagug

SEQ ID NO: 146135 - RNA, 23 nt, Artificial Sequence
  Synthetic
aucugccucagccucccaaagug

SEQ ID NO: 146136 - RNA, 24 nt, Artificial Sequence
  Synthetic
caucugccucagccucccaaagug

SEQ ID NO: 146137 - RNA, 18 nt, Artificial Sequence
  Synthetic
cuauuuuauaguaaagug

SEQ ID NO: 146138 - RNA, 19 nt, Artificial Sequence
  Synthetic
ccuauuuuauaguaaagug

SEQ ID NO: 146139 - RNA, 20 nt, Artificial Sequence
  Synthetic
accuauuuuauaguaaagug

SEQ ID NO: 146140 - RNA, 22 nt, Artificial Sequence
  Synthetic
agaccuauuuuauaguaaagug

SEQ ID NO: 146141 - RNA, 23 nt, Artificial Sequence
  Synthetic
aagaccuauuuuauaguaaagug

SEQ ID NO: 146142 - RNA, 24 nt, Artificial Sequence
  Synthetic
caagaccuauuuuauaguaaagug

SEQ ID NO: 146143 - RNA, 18 nt, Artificial Sequence
  Synthetic
cuuugaaaaauccaagug

SEQ ID NO: 146144 - RNA, 19 nt, Artificial Sequence
  Synthetic
ccuuugaaaaauccaagug

SEQ ID NO: 146145 - RNA, 20 nt, Artificial Sequence
  Synthetic
accuuugaaaaauccaagug

SEQ ID NO: 146146 - RNA, 18 nt, Artificial Sequence
  Synthetic
ccuaggugcccaccagug

SEQ ID NO: 146147 - RNA, 19 nt, Artificial Sequence
  Synthetic
accuaggugcccaccagug

SEQ ID NO: 146148 - RNA, 20 nt, Artificial Sequence
  Synthetic
aaccuaggugcccaccagug

SEQ ID NO: 146149 - RNA, 21 nt, Artificial Sequence
  Synthetic
caaccuaggugcccaccagug

SEQ ID NO: 146150 - RNA, 22 nt, Artificial Sequence
  Synthetic
ucaaccuaggugcccaccagug

SEQ ID NO: 146151 - RNA, 23 nt, Artificial Sequence
  Synthetic
aucaaccuaggugcccaccagug

SEQ ID NO: 146152 - RNA, 24 nt, Artificial Sequence
  Synthetic
aaucaaccuaggugcccaccagug

SEQ ID NO: 146153 - RNA, 18 nt, Artificial Sequence
  Synthetic
uauauauauacuccagug

SEQ ID NO: 146154 - RNA, 19 nt, Artificial Sequence
  Synthetic
auauauauauacuccagug

SEQ ID NO: 146155 - RNA, 20 nt, Artificial Sequence
  Synthetic
uauauauauauacuccagug

SEQ ID NO: 146156 - RNA, 18 nt, Artificial Sequence
  Synthetic
ugcacacucccuccagug

SEQ ID NO: 146157 - RNA, 19 nt, Artificial Sequence
  Synthetic
uugcacacucccuccagug

SEQ ID NO: 146158 - RNA, 20 nt, Artificial Sequence
  Synthetic
cuugcacacucccuccagug

SEQ ID NO: 146159 - RNA, 22 nt, Artificial Sequence
  Synthetic
ugcuugcacacucccuccagug

SEQ ID NO: 146160 - RNA, 23 nt, Artificial Sequence
  Synthetic
uugcuugcacacucccuccagug

SEQ ID NO: 146161 - RNA, 24 nt, Artificial Sequence
  Synthetic
uuugcuugcacacucccuccagug

SEQ ID NO: 146162 - RNA, 18 nt, Artificial Sequence
  Synthetic
ccugguagaaacucagug

SEQ ID NO: 146163 - RNA, 19 nt, Artificial Sequence
  Synthetic
accugguagaaacucagug

SEQ ID NO: 146164 - RNA, 20 nt, Artificial Sequence
  Synthetic
caccugguagaaacucagug

SEQ ID NO: 146165 - RNA, 21 nt, Artificial Sequence
  Synthetic
acaccugguagaaacucagug

SEQ ID NO: 146166 - RNA, 22 nt, Artificial Sequence
  Synthetic
uacaccugguagaaacucagug

SEQ ID NO: 146167 - RNA, 23 nt, Artificial Sequence
  Synthetic
auacaccugguagaaacucagug

SEQ ID NO: 146168 - RNA, 24 nt, Artificial Sequence
  Synthetic
cauacaccugguagaaacucagug

SEQ ID NO: 146169 - RNA, 18 nt, Artificial Sequence
  Synthetic
uggaugaguucuauagug

SEQ ID NO: 146170 - RNA, 19 nt, Artificial Sequence
  Synthetic
auggaugaguucuauagug

SEQ ID NO: 146171 - RNA, 20 nt, Artificial Sequence
  Synthetic
cauggaugaguucuauagug

SEQ ID NO: 146172 - RNA, 21 nt, Artificial Sequence
  Synthetic
acauggaugaguucuauagug

SEQ ID NO: 146173 - RNA, 22 nt, Artificial Sequence
  Synthetic
uacauggaugaguucuauagug

SEQ ID NO: 146174 - RNA, 23 nt, Artificial Sequence
  Synthetic
uuacauggaugaguucuauagug

SEQ ID NO: 146175 - RNA, 18 nt, Artificial Sequence
  Synthetic
aaaucacauuauuuagug

SEQ ID NO: 146176 - RNA, 19 nt, Artificial Sequence
  Synthetic
aaaaucacauuauuuagug

SEQ ID NO: 146177 - RNA, 20 nt, Artificial Sequence
  Synthetic
caaaaucacauuauuuagug

SEQ ID NO: 146178 - RNA, 18 nt, Artificial Sequence
  Synthetic
aguucugggauacacgug

SEQ ID NO: 146179 - RNA, 19 nt, Artificial Sequence
  Synthetic
aaguucugggauacacgug

SEQ ID NO: 146180 - RNA, 20 nt, Artificial Sequence
  Synthetic
uaaguucugggauacacgug

SEQ ID NO: 146181 - RNA, 21 nt, Artificial Sequence
  Synthetic
uuaaguucugggauacacgug

SEQ ID NO: 146182 - RNA, 22 nt, Artificial Sequence
  Synthetic
uuuaaguucugggauacacgug

SEQ ID NO: 146183 - RNA, 23 nt, Artificial Sequence
  Synthetic
cuuuaaguucugggauacacgug

SEQ ID NO: 146184 - RNA, 24 nt, Artificial Sequence
  Synthetic
acuuuaaguucugggauacacgug

SEQ ID NO: 146185 - RNA, 18 nt, Artificial Sequence
  Synthetic
ucuccuccaaaaugcgug

SEQ ID NO: 146186 - RNA, 19 nt, Artificial Sequence
  Synthetic
uucuccuccaaaaugcgug

SEQ ID NO: 146187 - RNA, 20 nt, Artificial Sequence
  Synthetic
uuucuccuccaaaaugcgug

SEQ ID NO: 146188 - RNA, 18 nt, Artificial Sequence
  Synthetic
acucaagaggcugaggug

SEQ ID NO: 146189 - RNA, 19 nt, Artificial Sequence
  Synthetic
uacucaagaggcugaggug

SEQ ID NO: 146190 - RNA, 20 nt, Artificial Sequence
  Synthetic
cuacucaagaggcugaggug

SEQ ID NO: 146191 - RNA, 22 nt, Artificial Sequence
  Synthetic
agcuacucaagaggcugaggug

SEQ ID NO: 146192 - RNA, 23 nt, Artificial Sequence
  Synthetic
cagcuacucaagaggcugaggug

SEQ ID NO: 146193 - RNA, 24 nt, Artificial Sequence
  Synthetic
ucagcuacucaagaggcugaggug

SEQ ID NO: 146194 - RNA, 21 nt, Artificial Sequence
  Synthetic
cuguguguagcuuuauaggug

SEQ ID NO: 146195 - RNA, 22 nt, Artificial Sequence
  Synthetic
ucuguguguagcuuuauaggug

SEQ ID NO: 146196 - RNA, 24 nt, Artificial Sequence
  Synthetic
agucuguguguagcuuuauaggug

SEQ ID NO: 146197 - RNA, 21 nt, Artificial Sequence
  Synthetic
auauauauauaucucuaggug

SEQ ID NO: 146198 - RNA, 22 nt, Artificial Sequence
  Synthetic
uauauauauauaucucuaggug

SEQ ID NO: 146199 - RNA, 23 nt, Artificial Sequence
  Synthetic
auauauauauauaucucuaggug

SEQ ID NO: 146200 - RNA, 24 nt, Artificial Sequence
  Synthetic
uauauauauauauaucucuaggug

SEQ ID NO: 146201 - RNA, 21 nt, Artificial Sequence
  Synthetic
ugccaaauguuuuucuaggug

SEQ ID NO: 146202 - RNA, 22 nt, Artificial Sequence
  Synthetic
augccaaauguuuuucuaggug

SEQ ID NO: 146203 - RNA, 23 nt, Artificial Sequence
  Synthetic
uaugccaaauguuuuucuaggug

SEQ ID NO: 146204 - RNA, 24 nt, Artificial Sequence
  Synthetic
auaugccaaauguuuuucuaggug

SEQ ID NO: 146205 - RNA, 18 nt, Artificial Sequence
  Synthetic
uuuuaacaugaaagggug

SEQ ID NO: 146206 - RNA, 19 nt, Artificial Sequence
  Synthetic
uuuuuaacaugaaagggug

SEQ ID NO: 146207 - RNA, 21 nt, Artificial Sequence
  Synthetic
uguuuuuaacaugaaagggug

SEQ ID NO: 146208 - RNA, 23 nt, Artificial Sequence
  Synthetic
aguguuuuuaacaugaaagggug

SEQ ID NO: 146209 - RNA, 20 nt, Artificial Sequence
  Synthetic
ugguugggguggcgggggug

SEQ ID NO: 146210 - RNA, 18 nt, Artificial Sequence
  Synthetic
uucuguugauuuggggug

SEQ ID NO: 146211 - RNA, 19 nt, Artificial Sequence
  Synthetic
auucuguugauuuggggug

SEQ ID NO: 146212 - RNA, 20 nt, Artificial Sequence
  Synthetic
uauucuguugauuuggggug

SEQ ID NO: 146213 - RNA, 21 nt, Artificial Sequence
  Synthetic
auauucuguugauuuggggug

SEQ ID NO: 146214 - RNA, 22 nt, Artificial Sequence
  Synthetic
uauauucuguugauuuggggug

SEQ ID NO: 146215 - RNA, 24 nt, Artificial Sequence
  Synthetic
uguauauucuguugauuuggggug

SEQ ID NO: 146216 - RNA, 18 nt, Artificial Sequence
  Synthetic
auguacauaauuugggug

SEQ ID NO: 146217 - RNA, 19 nt, Artificial Sequence
  Synthetic
aauguacauaauuugggug

SEQ ID NO: 146218 - RNA, 20 nt, Artificial Sequence
  Synthetic
caauguacauaauuugggug

SEQ ID NO: 146219 - RNA, 21 nt, Artificial Sequence
  Synthetic
acaauguacauaauuugggug

SEQ ID NO: 146220 - RNA, 22 nt, Artificial Sequence
  Synthetic
uacaauguacauaauuugggug

SEQ ID NO: 146221 - RNA, 23 nt, Artificial Sequence
  Synthetic
cuacaauguacauaauuugggug

SEQ ID NO: 146222 - RNA, 18 nt, Artificial Sequence
  Synthetic
ccuauucaguaaauggug

SEQ ID NO: 146223 - RNA, 19 nt, Artificial Sequence
  Synthetic
cccuauucaguaaauggug

SEQ ID NO: 146224 - RNA, 20 nt, Artificial Sequence
  Synthetic
ucccuauucaguaaauggug

SEQ ID NO: 146225 - RNA, 21 nt, Artificial Sequence
  Synthetic
uucccuauucaguaaauggug

SEQ ID NO: 146226 - RNA, 22 nt, Artificial Sequence
  Synthetic
auucccuauucaguaaauggug

SEQ ID NO: 146227 - RNA, 18 nt, Artificial Sequence
  Synthetic
ccuauaaauuaaauggug

SEQ ID NO: 146228 - RNA, 19 nt, Artificial Sequence
  Synthetic
uccuauaaauuaaauggug

SEQ ID NO: 146229 - RNA, 20 nt, Artificial Sequence
  Synthetic
uuccuauaaauuaaauggug

SEQ ID NO: 146230 - RNA, 18 nt, Artificial Sequence
  Synthetic
aauuagcugggcauggug

SEQ ID NO: 146231 - RNA, 19 nt, Artificial Sequence
  Synthetic
aaauuagcugggcauggug

SEQ ID NO: 146232 - RNA, 20 nt, Artificial Sequence
  Synthetic
aaaauuagcugggcauggug

SEQ ID NO: 146233 - RNA, 21 nt, Artificial Sequence
  Synthetic
aaaaauuagcugggcauggug

SEQ ID NO: 146234 - RNA, 22 nt, Artificial Sequence
  Synthetic
caaaaauuagcugggcauggug

SEQ ID NO: 146235 - RNA, 23 nt, Artificial Sequence
  Synthetic
acaaaaauuagcugggcauggug

SEQ ID NO: 146236 - RNA, 24 nt, Artificial Sequence
  Synthetic
uacaaaaauuagcugggcauggug

SEQ ID NO: 146237 - RNA, 18 nt, Artificial Sequence
  Synthetic
ccaagaagucuuauggug

SEQ ID NO: 146238 - RNA, 20 nt, Artificial Sequence
  Synthetic
agccaagaagucuuauggug

SEQ ID NO: 146239 - RNA, 18 nt, Artificial Sequence
  Synthetic
aaauguaccacucuggug

SEQ ID NO: 146240 - RNA, 19 nt, Artificial Sequence
  Synthetic
caaauguaccacucuggug

SEQ ID NO: 146241 - RNA, 20 nt, Artificial Sequence
  Synthetic
acaaauguaccacucuggug

SEQ ID NO: 146242 - RNA, 21 nt, Artificial Sequence
  Synthetic
aacaaauguaccacucuggug

SEQ ID NO: 146243 - RNA, 22 nt, Artificial Sequence
  Synthetic
uaacaaauguaccacucuggug

SEQ ID NO: 146244 - RNA, 23 nt, Artificial Sequence
  Synthetic
auaacaaauguaccacucuggug

SEQ ID NO: 146245 - RNA, 24 nt, Artificial Sequence
  Synthetic
uauaacaaauguaccacucuggug

SEQ ID NO: 146246 - RNA, 21 nt, Artificial Sequence
  Synthetic
aaaaauuagccaggcguggug

SEQ ID NO: 146247 - RNA, 22 nt, Artificial Sequence
  Synthetic
aaaaaauuagccaggcguggug

SEQ ID NO: 146248 - RNA, 23 nt, Artificial Sequence
  Synthetic
caaaaaauuagccaggcguggug

SEQ ID NO: 146249 - RNA, 24 nt, Artificial Sequence
  Synthetic
acaaaaaauuagccaggcguggug

SEQ ID NO: 146250 - RNA, 18 nt, Artificial Sequence
  Synthetic
aauaagggaaaaaaugug

SEQ ID NO: 146251 - RNA, 19 nt, Artificial Sequence
  Synthetic
aaauaagggaaaaaaugug

SEQ ID NO: 146252 - RNA, 22 nt, Artificial Sequence
  Synthetic
ugucagugcugaagcaaaugug

SEQ ID NO: 146253 - RNA, 23 nt, Artificial Sequence
  Synthetic
cugucagugcugaagcaaaugug

SEQ ID NO: 146254 - RNA, 24 nt, Artificial Sequence
  Synthetic
acugucagugcugaagcaaaugug

SEQ ID NO: 146255 - RNA, 18 nt, Artificial Sequence
  Synthetic
uguuuuguguaugaugug

SEQ ID NO: 146256 - RNA, 19 nt, Artificial Sequence
  Synthetic
auguuuuguguaugaugug

SEQ ID NO: 146257 - RNA, 20 nt, Artificial Sequence
  Synthetic
uauguuuuguguaugaugug

SEQ ID NO: 146258 - RNA, 18 nt, Artificial Sequence
  Synthetic
cgugaucucacuuaugug

SEQ ID NO: 146259 - RNA, 20 nt, Artificial Sequence
  Synthetic
ugcgugaucucacuuaugug

SEQ ID NO: 146260 - RNA, 21 nt, Artificial Sequence
  Synthetic
cugcgugaucucacuuaugug

SEQ ID NO: 146261 - RNA, 22 nt, Artificial Sequence
  Synthetic
acugcgugaucucacuuaugug

SEQ ID NO: 146262 - RNA, 23 nt, Artificial Sequence
  Synthetic
uacugcgugaucucacuuaugug

SEQ ID NO: 146263 - RNA, 24 nt, Artificial Sequence
  Synthetic
auacugcgugaucucacuuaugug

SEQ ID NO: 146264 - RNA, 18 nt, Artificial Sequence
  Synthetic
auugguucuguuuaugug

SEQ ID NO: 146265 - RNA, 19 nt, Artificial Sequence
  Synthetic
cauugguucuguuuaugug

SEQ ID NO: 146266 - RNA, 20 nt, Artificial Sequence
  Synthetic
ucauugguucuguuuaugug

SEQ ID NO: 146267 - RNA, 23 nt, Artificial Sequence
  Synthetic
uggucauugguucuguuuaugug

SEQ ID NO: 146268 - RNA, 24 nt, Artificial Sequence
  Synthetic
uuggucauugguucuguuuaugug

SEQ ID NO: 146269 - RNA, 19 nt, Artificial Sequence
  Synthetic
aggacagcaucaagcugug

SEQ ID NO: 146270 - RNA, 21 nt, Artificial Sequence
  Synthetic
ugaggacagcaucaagcugug

SEQ ID NO: 146271 - RNA, 22 nt, Artificial Sequence
  Synthetic
augaggacagcaucaagcugug

SEQ ID NO: 146272 - RNA, 23 nt, Artificial Sequence
  Synthetic
caugaggacagcaucaagcugug

SEQ ID NO: 146273 - RNA, 24 nt, Artificial Sequence
  Synthetic
ucaugaggacagcaucaagcugug

SEQ ID NO: 146274 - RNA, 18 nt, Artificial Sequence
  Synthetic
acugugccaggugcugug

SEQ ID NO: 146275 - RNA, 19 nt, Artificial Sequence
  Synthetic
cacugugccaggugcugug

SEQ ID NO: 146276 - RNA, 20 nt, Artificial Sequence
  Synthetic
acacugugccaggugcugug

SEQ ID NO: 146277 - RNA, 21 nt, Artificial Sequence
  Synthetic
aacacugugccaggugcugug

SEQ ID NO: 146278 - RNA, 22 nt, Artificial Sequence
  Synthetic
uaacacugugccaggugcugug

SEQ ID NO: 146279 - RNA, 23 nt, Artificial Sequence
  Synthetic
uuaacacugugccaggugcugug

SEQ ID NO: 146280 - RNA, 24 nt, Artificial Sequence
  Synthetic
cuuaacacugugccaggugcugug

SEQ ID NO: 146281 - RNA, 18 nt, Artificial Sequence
  Synthetic
aaaaaaaauguaugugug

SEQ ID NO: 146282 - RNA, 18 nt, Artificial Sequence
  Synthetic
uguauguguaugugugug

SEQ ID NO: 146283 - RNA, 19 nt, Artificial Sequence
  Synthetic
uuguauguguaugugugug

SEQ ID NO: 146284 - RNA, 21 nt, Artificial Sequence
  Synthetic
aguuguauguguaugugugug

SEQ ID NO: 146285 - RNA, 22 nt, Artificial Sequence
  Synthetic
caguuguauguguaugugugug

SEQ ID NO: 146286 - RNA, 23 nt, Artificial Sequence
  Synthetic
acaguuguauguguaugugugug

SEQ ID NO: 146287 - RNA, 24 nt, Artificial Sequence
  Synthetic
cacaguuguauguguaugugugug

SEQ ID NO: 146288 - RNA, 18 nt, Artificial Sequence
  Synthetic
ugugugugugugugugug

SEQ ID NO: 146289 - RNA, 20 nt, Artificial Sequence
  Synthetic
ugugugugugugugugugug

SEQ ID NO: 146290 - RNA, 18 nt, Artificial Sequence
  Synthetic
aggcccacccacauugug

SEQ ID NO: 146291 - RNA, 19 nt, Artificial Sequence
  Synthetic
aaggcccacccacauugug

SEQ ID NO: 146292 - RNA, 21 nt, Artificial Sequence
  Synthetic
agaaggcccacccacauugug

SEQ ID NO: 146293 - RNA, 24 nt, Artificial Sequence
  Synthetic
uggagaaggcccacccacauugug

SEQ ID NO: 146294 - RNA, 19 nt, Artificial Sequence
  Synthetic
ugaagccuacuugauugug

SEQ ID NO: 146295 - RNA, 20 nt, Artificial Sequence
  Synthetic
augaagccuacuugauugug

SEQ ID NO: 146296 - RNA, 24 nt, Artificial Sequence
  Synthetic
agggaugaagccuacuugauugug

SEQ ID NO: 146297 - RNA, 18 nt, Artificial Sequence
  Synthetic
ccaagaagucuuauugug

SEQ ID NO: 146298 - RNA, 20 nt, Artificial Sequence
  Synthetic
agccaagaagucuuauugug

SEQ ID NO: 146299 - RNA, 18 nt, Artificial Sequence
  Synthetic
cucuuccaucagcuugug

SEQ ID NO: 146300 - RNA, 22 nt, Artificial Sequence
  Synthetic
agggcucuuccaucagcuugug

SEQ ID NO: 146301 - RNA, 23 nt, Artificial Sequence
  Synthetic
aagggcucuuccaucagcuugug

SEQ ID NO: 146302 - RNA, 24 nt, Artificial Sequence
  Synthetic
caagggcucuuccaucagcuugug

SEQ ID NO: 146303 - RNA, 19 nt, Artificial Sequence
  Synthetic
uguguguguguguguugug

SEQ ID NO: 146304 - RNA, 21 nt, Artificial Sequence
  Synthetic
uguguguguguguguguugug

SEQ ID NO: 146305 - RNA, 23 nt, Artificial Sequence
  Synthetic
uguguguguguguguguguugug

SEQ ID NO: 146306 - RNA, 18 nt, Artificial Sequence
  Synthetic
uuaauacugaaaaaauug

SEQ ID NO: 146307 - RNA, 19 nt, Artificial Sequence
  Synthetic
auuaauacugaaaaaauug

SEQ ID NO: 146308 - RNA, 20 nt, Artificial Sequence
  Synthetic
aauuaauacugaaaaaauug

SEQ ID NO: 146309 - RNA, 18 nt, Artificial Sequence
  Synthetic
cauaaaaaugguaaauug

SEQ ID NO: 146310 - RNA, 19 nt, Artificial Sequence
  Synthetic
acauaaaaaugguaaauug

SEQ ID NO: 146311 - RNA, 20 nt, Artificial Sequence
  Synthetic
aacauaaaaaugguaaauug

SEQ ID NO: 146312 - RNA, 19 nt, Artificial Sequence
  Synthetic
agagaaauuuauugaauug

SEQ ID NO: 146313 - RNA, 20 nt, Artificial Sequence
  Synthetic
aagagaaauuuauugaauug

SEQ ID NO: 146314 - RNA, 18 nt, Artificial Sequence
  Synthetic
uagcuguugacuuaauug

SEQ ID NO: 146315 - RNA, 19 nt, Artificial Sequence
  Synthetic
uuagcuguugacuuaauug

SEQ ID NO: 146316 - RNA, 20 nt, Artificial Sequence
  Synthetic
uuuagcuguugacuuaauug

SEQ ID NO: 146317 - RNA, 19 nt, Artificial Sequence
  Synthetic
agucugugucuuuuaauug

SEQ ID NO: 146318 - RNA, 20 nt, Artificial Sequence
  Synthetic
cagucugugucuuuuaauug

SEQ ID NO: 146319 - RNA, 21 nt, Artificial Sequence
  Synthetic
ccagucugugucuuuuaauug

SEQ ID NO: 146320 - RNA, 23 nt, Artificial Sequence
  Synthetic
ugccagucugugucuuuuaauug

SEQ ID NO: 146321 - RNA, 24 nt, Artificial Sequence
  Synthetic
uugccagucugugucuuuuaauug

SEQ ID NO: 146322 - RNA, 18 nt, Artificial Sequence
  Synthetic
ugauauacccauacauug

SEQ ID NO: 146323 - RNA, 19 nt, Artificial Sequence
  Synthetic
uugauauacccauacauug

SEQ ID NO: 146324 - RNA, 20 nt, Artificial Sequence
  Synthetic
uuugauauacccauacauug

SEQ ID NO: 146325 - RNA, 21 nt, Artificial Sequence
  Synthetic
uuuugauauacccauacauug

SEQ ID NO: 146326 - RNA, 23 nt, Artificial Sequence
  Synthetic
uguuuugauauacccauacauug

SEQ ID NO: 146327 - RNA, 24 nt, Artificial Sequence
  Synthetic
auguuuugauauacccauacauug

SEQ ID NO: 146328 - RNA, 18 nt, Artificial Sequence
  Synthetic
ugauauauguuuacauug

SEQ ID NO: 146329 - RNA, 19 nt, Artificial Sequence
  Synthetic
uugauauauguuuacauug

SEQ ID NO: 146330 - RNA, 20 nt, Artificial Sequence
  Synthetic
uuugauauauguuuacauug

SEQ ID NO: 146331 - RNA, 21 nt, Artificial Sequence
  Synthetic
uuuugauauauguuuacauug

SEQ ID NO: 146332 - RNA, 23 nt, Artificial Sequence
  Synthetic
uguuuugauauauguuuacauug

SEQ ID NO: 146333 - RNA, 24 nt, Artificial Sequence
  Synthetic
auguuuugauauauguuuacauug

SEQ ID NO: 146334 - RNA, 21 nt, Artificial Sequence
  Synthetic
aauaucuaugucguagcauug

SEQ ID NO: 146335 - RNA, 22 nt, Artificial Sequence
  Synthetic
uaauaucuaugucguagcauug

SEQ ID NO: 146336 - RNA, 23 nt, Artificial Sequence
  Synthetic
auaauaucuaugucguagcauug

SEQ ID NO: 146337 - RNA, 24 nt, Artificial Sequence
  Synthetic
aauaauaucuaugucguagcauug

SEQ ID NO: 146338 - RNA, 18 nt, Artificial Sequence
  Synthetic
uacccaguaauggcauug

SEQ ID NO: 146339 - RNA, 19 nt, Artificial Sequence
  Synthetic
auacccaguaauggcauug

SEQ ID NO: 146340 - RNA, 20 nt, Artificial Sequence
  Synthetic
uauacccaguaauggcauug

SEQ ID NO: 146341 - RNA, 21 nt, Artificial Sequence
  Synthetic
auauacccaguaauggcauug

SEQ ID NO: 146342 - RNA, 22 nt, Artificial Sequence
  Synthetic
uauauacccaguaauggcauug

SEQ ID NO: 146343 - RNA, 18 nt, Artificial Sequence
  Synthetic
uuugacaggacaucauug

SEQ ID NO: 146344 - RNA, 19 nt, Artificial Sequence
  Synthetic
uuuugacaggacaucauug

SEQ ID NO: 146345 - RNA, 20 nt, Artificial Sequence
  Synthetic
auuuugacaggacaucauug

SEQ ID NO: 146346 - RNA, 18 nt, Artificial Sequence
  Synthetic
caauuuaagaugagauug

SEQ ID NO: 146347 - RNA, 19 nt, Artificial Sequence
  Synthetic
acaauuuaagaugagauug

SEQ ID NO: 146348 - RNA, 20 nt, Artificial Sequence
  Synthetic
uacaauuuaagaugagauug

SEQ ID NO: 146349 - RNA, 21 nt, Artificial Sequence
  Synthetic
uuacaauuuaagaugagauug

SEQ ID NO: 146350 - RNA, 22 nt, Artificial Sequence
  Synthetic
auuacaauuuaagaugagauug

SEQ ID NO: 146351 - RNA, 18 nt, Artificial Sequence
  Synthetic
cacccagaaaugggauug

SEQ ID NO: 146352 - RNA, 19 nt, Artificial Sequence
  Synthetic
acacccagaaaugggauug

SEQ ID NO: 146353 - RNA, 20 nt, Artificial Sequence
  Synthetic
uacacccagaaaugggauug

SEQ ID NO: 146354 - RNA, 18 nt, Artificial Sequence
  Synthetic
uaaccaauaaugggauug

SEQ ID NO: 146355 - RNA, 19 nt, Artificial Sequence
  Synthetic
auaaccaauaaugggauug

SEQ ID NO: 146356 - RNA, 20 nt, Artificial Sequence
  Synthetic
uauaaccaauaaugggauug

SEQ ID NO: 146357 - RNA, 21 nt, Artificial Sequence
  Synthetic
auauaaccaauaaugggauug

SEQ ID NO: 146358 - RNA, 22 nt, Artificial Sequence
  Synthetic
uauauaaccaauaaugggauug

SEQ ID NO: 146359 - RNA, 18 nt, Artificial Sequence
  Synthetic
uauccaguaaugggauug

SEQ ID NO: 146360 - RNA, 19 nt, Artificial Sequence
  Synthetic
auauccaguaaugggauug

SEQ ID NO: 146361 - RNA, 20 nt, Artificial Sequence
  Synthetic
uauauccaguaaugggauug

SEQ ID NO: 146362 - RNA, 21 nt, Artificial Sequence
  Synthetic
auauauccaguaaugggauug

SEQ ID NO: 146363 - RNA, 22 nt, Artificial Sequence
  Synthetic
uauauauccaguaaugggauug

SEQ ID NO: 146364 - RNA, 18 nt, Artificial Sequence
  Synthetic
uaugcaguaaugggauug

SEQ ID NO: 146365 - RNA, 19 nt, Artificial Sequence
  Synthetic
auaugcaguaaugggauug

SEQ ID NO: 146366 - RNA, 20 nt, Artificial Sequence
  Synthetic
uauaugcaguaaugggauug

SEQ ID NO: 146367 - RNA, 21 nt, Artificial Sequence
  Synthetic
auauaugcaguaaugggauug

SEQ ID NO: 146368 - RNA, 22 nt, Artificial Sequence
  Synthetic
uauauaugcaguaaugggauug

SEQ ID NO: 146369 - RNA, 18 nt, Artificial Sequence
  Synthetic
uacccagcagugggauug

SEQ ID NO: 146370 - RNA, 19 nt, Artificial Sequence
  Synthetic
auacccagcagugggauug

SEQ ID NO: 146371 - RNA, 20 nt, Artificial Sequence
  Synthetic
uauacccagcagugggauug

SEQ ID NO: 146372 - RNA, 21 nt, Artificial Sequence
  Synthetic
auauacccagcagugggauug

SEQ ID NO: 146373 - RNA, 22 nt, Artificial Sequence
  Synthetic
uauauacccagcagugggauug

SEQ ID NO: 146374 - RNA, 23 nt, Artificial Sequence
  Synthetic
auauauacccagcagugggauug

SEQ ID NO: 146375 - RNA, 18 nt, Artificial Sequence
  Synthetic
uguguagaaaauggauug

SEQ ID NO: 146376 - RNA, 19 nt, Artificial Sequence
  Synthetic
uuguguagaaaauggauug

SEQ ID NO: 146377 - RNA, 20 nt, Artificial Sequence
  Synthetic
auuguguagaaaauggauug

SEQ ID NO: 146378 - RNA, 18 nt, Artificial Sequence
  Synthetic
cuguaucucucuugauug

SEQ ID NO: 146379 - RNA, 19 nt, Artificial Sequence
  Synthetic
acuguaucucucuugauug

SEQ ID NO: 146380 - RNA, 20 nt, Artificial Sequence
  Synthetic
cacuguaucucucuugauug

SEQ ID NO: 146381 - RNA, 18 nt, Artificial Sequence
  Synthetic
cucuaugccuuuugauug

SEQ ID NO: 146382 - RNA, 19 nt, Artificial Sequence
  Synthetic
acucuaugccuuuugauug

SEQ ID NO: 146383 - RNA, 20 nt, Artificial Sequence
  Synthetic
cacucuaugccuuuugauug

SEQ ID NO: 146384 - RNA, 21 nt, Artificial Sequence
  Synthetic
ccacucuaugccuuuugauug

SEQ ID NO: 146385 - RNA, 22 nt, Artificial Sequence
  Synthetic
accacucuaugccuuuugauug

SEQ ID NO: 146386 - RNA, 23 nt, Artificial Sequence
  Synthetic
aaccacucuaugccuuuugauug

SEQ ID NO: 146387 - RNA, 24 nt, Artificial Sequence
  Synthetic
caaccacucuaugccuuuugauug

SEQ ID NO: 146388 - RNA, 18 nt, Artificial Sequence
  Synthetic
ccauauuguuucauauug

SEQ ID NO: 146389 - RNA, 19 nt, Artificial Sequence
  Synthetic
uccauauuguuucauauug

SEQ ID NO: 146390 - RNA, 20 nt, Artificial Sequence
  Synthetic
auccauauuguuucauauug

SEQ ID NO: 146391 - RNA, 18 nt, Artificial Sequence
  Synthetic
uguuacauggauauauug

SEQ ID NO: 146392 - RNA, 19 nt, Artificial Sequence
  Synthetic
uuguuacauggauauauug

SEQ ID NO: 146393 - RNA, 20 nt, Artificial Sequence
  Synthetic
uuuguuacauggauauauug

SEQ ID NO: 146394 - RNA, 21 nt, Artificial Sequence
  Synthetic
uuuuguuacauggauauauug

SEQ ID NO: 146395 - RNA, 22 nt, Artificial Sequence
  Synthetic
uuuuuguuacauggauauauug

SEQ ID NO: 146396 - RNA, 23 nt, Artificial Sequence
  Synthetic
auuuuuguuacauggauauauug

SEQ ID NO: 146397 - RNA, 24 nt, Artificial Sequence
  Synthetic
cauuuuuguuacauggauauauug

SEQ ID NO: 146398 - RNA, 19 nt, Artificial Sequence
  Synthetic
agaagccauaaaucuauug

SEQ ID NO: 146399 - RNA, 20 nt, Artificial Sequence
  Synthetic
uagaagccauaaaucuauug

SEQ ID NO: 146400 - RNA, 18 nt, Artificial Sequence
  Synthetic
aaauaaauguguuuauug

SEQ ID NO: 146401 - RNA, 19 nt, Artificial Sequence
  Synthetic
uaaauaaauguguuuauug

SEQ ID NO: 146402 - RNA, 20 nt, Artificial Sequence
  Synthetic
auaaauaaauguguuuauug

SEQ ID NO: 146403 - RNA, 18 nt, Artificial Sequence
  Synthetic
caugaaggaauuuuauug

SEQ ID NO: 146404 - RNA, 20 nt, Artificial Sequence
  Synthetic
agcaugaaggaauuuuauug

SEQ ID NO: 146405 - RNA, 21 nt, Artificial Sequence
  Synthetic
uagcaugaaggaauuuuauug

SEQ ID NO: 146406 - RNA, 22 nt, Artificial Sequence
  Synthetic
uuagcaugaaggaauuuuauug

SEQ ID NO: 146407 - RNA, 23 nt, Artificial Sequence
  Synthetic
auuagcaugaaggaauuuuauug

SEQ ID NO: 146408 - RNA, 18 nt, Artificial Sequence
  Synthetic
uuugccaguauuuuauug

SEQ ID NO: 146409 - RNA, 21 nt, Artificial Sequence
  Synthetic
cgguuugccaguauuuuauug

SEQ ID NO: 146410 - RNA, 22 nt, Artificial Sequence
  Synthetic
ucgguuugccaguauuuuauug

SEQ ID NO: 146411 - RNA, 23 nt, Artificial Sequence
  Synthetic
uucgguuugccaguauuuuauug

SEQ ID NO: 146412 - RNA, 24 nt, Artificial Sequence
  Synthetic
auucgguuugccaguauuuuauug

SEQ ID NO: 146413 - RNA, 18 nt, Artificial Sequence
  Synthetic
uuccuucauuucaacuug

SEQ ID NO: 146414 - RNA, 19 nt, Artificial Sequence
  Synthetic
uuuccuucauuucaacuug

SEQ ID NO: 146415 - RNA, 20 nt, Artificial Sequence
  Synthetic
uuuuccuucauuucaacuug

SEQ ID NO: 146416 - RNA, 21 nt, Artificial Sequence
  Synthetic
uuuuuccuucauuucaacuug

SEQ ID NO: 146417 - RNA, 22 nt, Artificial Sequence
  Synthetic
uuuuuuccuucauuucaacuug

SEQ ID NO: 146418 - RNA, 23 nt, Artificial Sequence
  Synthetic
auuuuuuccuucauuucaacuug

SEQ ID NO: 146419 - RNA, 24 nt, Artificial Sequence
  Synthetic
cauuuuuuccuucauuucaacuug

SEQ ID NO: 146420 - RNA, 18 nt, Artificial Sequence
  Synthetic
aaacuuccuagagacuug

SEQ ID NO: 146421 - RNA, 20 nt, Artificial Sequence
  Synthetic
ugaaacuuccuagagacuug

SEQ ID NO: 146422 - RNA, 21 nt, Artificial Sequence
  Synthetic
uugaaacuuccuagagacuug

SEQ ID NO: 146423 - RNA, 22 nt, Artificial Sequence
  Synthetic
uuugaaacuuccuagagacuug

SEQ ID NO: 146424 - RNA, 23 nt, Artificial Sequence
  Synthetic
auuugaaacuuccuagagacuug

SEQ ID NO: 146425 - RNA, 24 nt, Artificial Sequence
  Synthetic
aauuugaaacuuccuagagacuug

SEQ ID NO: 146426 - RNA, 18 nt, Artificial Sequence
  Synthetic
auuugaagaugagacuug

SEQ ID NO: 146427 - RNA, 19 nt, Artificial Sequence
  Synthetic
aauuugaagaugagacuug

SEQ ID NO: 146428 - RNA, 20 nt, Artificial Sequence
  Synthetic
aaauuugaagaugagacuug

SEQ ID NO: 146429 - RNA, 18 nt, Artificial Sequence
  Synthetic
uuauuuguuuuugacuug

SEQ ID NO: 146430 - RNA, 23 nt, Artificial Sequence
  Synthetic
ugggguuauuuguuuuugacuug

SEQ ID NO: 146431 - RNA, 24 nt, Artificial Sequence
  Synthetic
augggguuauuuguuuuugacuug

SEQ ID NO: 146432 - RNA, 18 nt, Artificial Sequence
  Synthetic
aggaaacaaucuaccuug

SEQ ID NO: 146433 - RNA, 21 nt, Artificial Sequence
  Synthetic
aggaggaaacaaucuaccuug

SEQ ID NO: 146434 - RNA, 23 nt, Artificial Sequence
  Synthetic
agaggaggaaacaaucuaccuug

SEQ ID NO: 146435 - RNA, 24 nt, Artificial Sequence
  Synthetic
uagaggaggaaacaaucuaccuug

SEQ ID NO: 146436 - RNA, 18 nt, Artificial Sequence
  Synthetic
ucuaguucuagauccuug

SEQ ID NO: 146437 - RNA, 19 nt, Artificial Sequence
  Synthetic
uucuaguucuagauccuug

SEQ ID NO: 146438 - RNA, 20 nt, Artificial Sequence
  Synthetic
uuucuaguucuagauccuug

SEQ ID NO: 146439 - RNA, 21 nt, Artificial Sequence
  Synthetic
auuucuaguucuagauccuug

SEQ ID NO: 146440 - RNA, 22 nt, Artificial Sequence
  Synthetic
uauuucuaguucuagauccuug

SEQ ID NO: 146441 - RNA, 18 nt, Artificial Sequence
  Synthetic
ucugguucuagauccuug

SEQ ID NO: 146442 - RNA, 19 nt, Artificial Sequence
  Synthetic
uucugguucuagauccuug

SEQ ID NO: 146443 - RNA, 20 nt, Artificial Sequence
  Synthetic
uuucugguucuagauccuug

SEQ ID NO: 146444 - RNA, 21 nt, Artificial Sequence
  Synthetic
auuucugguucuagauccuug

SEQ ID NO: 146445 - RNA, 22 nt, Artificial Sequence
  Synthetic
uauuucugguucuagauccuug

SEQ ID NO: 146446 - RNA, 18 nt, Artificial Sequence
  Synthetic
ucugguucuguauccuug

SEQ ID NO: 146447 - RNA, 19 nt, Artificial Sequence
  Synthetic
uucugguucuguauccuug

SEQ ID NO: 146448 - RNA, 20 nt, Artificial Sequence
  Synthetic
uuucugguucuguauccuug

SEQ ID NO: 146449 - RNA, 21 nt, Artificial Sequence
  Synthetic
auuucugguucuguauccuug

SEQ ID NO: 146450 - RNA, 22 nt, Artificial Sequence
  Synthetic
uauuucugguucuguauccuug

SEQ ID NO: 146451 - RNA, 18 nt, Artificial Sequence
  Synthetic
agaaguaaaauuuccuug

SEQ ID NO: 146452 - RNA, 19 nt, Artificial Sequence
  Synthetic
aagaaguaaaauuuccuug

SEQ ID NO: 146453 - RNA, 18 nt, Artificial Sequence
  Synthetic
aaagaaauaaaaagcuug

SEQ ID NO: 146454 - RNA, 19 nt, Artificial Sequence
  Synthetic
uaaagaaauaaaaagcuug

SEQ ID NO: 146455 - RNA, 20 nt, Artificial Sequence
  Synthetic
auaaagaaauaaaaagcuug

SEQ ID NO: 146456 - RNA, 21 nt, Artificial Sequence
  Synthetic
aauaaagaaauaaaaagcuug

SEQ ID NO: 146457 - RNA, 22 nt, Artificial Sequence
  Synthetic
aaauaaagaaauaaaaagcuug

SEQ ID NO: 146458 - RNA, 23 nt, Artificial Sequence
  Synthetic
uaaauaaagaaauaaaaagcuug

SEQ ID NO: 146459 - RNA, 24 nt, Artificial Sequence
  Synthetic
auaaauaaagaaauaaaaagcuug

SEQ ID NO: 146460 - RNA, 18 nt, Artificial Sequence
  Synthetic
uuguuaaaacacagcuug

SEQ ID NO: 146461 - RNA, 19 nt, Artificial Sequence
  Synthetic
cuuguuaaaacacagcuug

SEQ ID NO: 146462 - RNA, 22 nt, Artificial Sequence
  Synthetic
aggcuuguuaaaacacagcuug

SEQ ID NO: 146463 - RNA, 23 nt, Artificial Sequence
  Synthetic
aaggcuuguuaaaacacagcuug

SEQ ID NO: 146464 - RNA, 18 nt, Artificial Sequence
  Synthetic
ccacucucuucuggcuug

SEQ ID NO: 146465 - RNA, 19 nt, Artificial Sequence
  Synthetic
cccacucucuucuggcuug

SEQ ID NO: 146466 - RNA, 20 nt, Artificial Sequence
  Synthetic
ccccacucucuucuggcuug

SEQ ID NO: 146467 - RNA, 21 nt, Artificial Sequence
  Synthetic
cuaccauuuauuuagugcuug

SEQ ID NO: 146468 - RNA, 23 nt, Artificial Sequence
  Synthetic
agcuaccauuuauuuagugcuug

SEQ ID NO: 146469 - RNA, 24 nt, Artificial Sequence
  Synthetic
uagcuaccauuuauuuagugcuug

SEQ ID NO: 146470 - RNA, 20 nt, Artificial Sequence
  Synthetic
aggauuuucugaugugcuug

SEQ ID NO: 146471 - RNA, 21 nt, Artificial Sequence
  Synthetic
aaggauuuucugaugugcuug

SEQ ID NO: 146472 - RNA, 22 nt, Artificial Sequence
  Synthetic
aaaggauuuucugaugugcuug

SEQ ID NO: 146473 - RNA, 23 nt, Artificial Sequence
  Synthetic
uaaaggauuuucugaugugcuug

SEQ ID NO: 146474 - RNA, 18 nt, Artificial Sequence
  Synthetic
ucucccuucucuugcuug

SEQ ID NO: 146475 - RNA, 19 nt, Artificial Sequence
  Synthetic
aucucccuucucuugcuug

SEQ ID NO: 146476 - RNA, 20 nt, Artificial Sequence
  Synthetic
aaucucccuucucuugcuug

SEQ ID NO: 146477 - RNA, 18 nt, Artificial Sequence
  Synthetic
aaauuauuuccacucuug

SEQ ID NO: 146478 - RNA, 19 nt, Artificial Sequence
  Synthetic
uaaauuauuuccacucuug

SEQ ID NO: 146479 - RNA, 20 nt, Artificial Sequence
  Synthetic
aggauaguuagcuccucuug

SEQ ID NO: 146480 - RNA, 21 nt, Artificial Sequence
  Synthetic
uaggauaguuagcuccucuug

SEQ ID NO: 146481 - RNA, 22 nt, Artificial Sequence
  Synthetic
uuaggauaguuagcuccucuug

SEQ ID NO: 146482 - RNA, 23 nt, Artificial Sequence
  Synthetic
uuuaggauaguuagcuccucuug

SEQ ID NO: 146483 - RNA, 24 nt, Artificial Sequence
  Synthetic
auuuaggauaguuagcuccucuug

SEQ ID NO: 146484 - RNA, 18 nt, Artificial Sequence
  Synthetic
uuuggagacagagucuug

SEQ ID NO: 146485 - RNA, 19 nt, Artificial Sequence
  Synthetic
uuuuggagacagagucuug

SEQ ID NO: 146486 - RNA, 20 nt, Artificial Sequence
  Synthetic
uuuuuggagacagagucuug

SEQ ID NO: 146487 - RNA, 21 nt, Artificial Sequence
  Synthetic
uuuuuuggagacagagucuug

SEQ ID NO: 146488 - RNA, 22 nt, Artificial Sequence
  Synthetic
uuuuuuuggagacagagucuug

SEQ ID NO: 146489 - RNA, 23 nt, Artificial Sequence
  Synthetic
uuuuuuuuggagacagagucuug

SEQ ID NO: 146490 - RNA, 24 nt, Artificial Sequence
  Synthetic
uuuuuuuuuggagacagagucuug

SEQ ID NO: 146491 - RNA, 18 nt, Artificial Sequence
  Synthetic
cugaaacagaaauucuug

SEQ ID NO: 146492 - RNA, 19 nt, Artificial Sequence
  Synthetic
acugaaacagaaauucuug

SEQ ID NO: 146493 - RNA, 20 nt, Artificial Sequence
  Synthetic
uacugaaacagaaauucuug

SEQ ID NO: 146494 - RNA, 21 nt, Artificial Sequence
  Synthetic
cuacugaaacagaaauucuug

SEQ ID NO: 146495 - RNA, 22 nt, Artificial Sequence
  Synthetic
ccuacugaaacagaaauucuug

SEQ ID NO: 146496 - RNA, 23 nt, Artificial Sequence
  Synthetic
accuacugaaacagaaauucuug

SEQ ID NO: 146497 - RNA, 18 nt, Artificial Sequence
  Synthetic
aauaaauauuucuucuug

SEQ ID NO: 146498 - RNA, 19 nt, Artificial Sequence
  Synthetic
aaauaaauauuucuucuug

SEQ ID NO: 146499 - RNA, 20 nt, Artificial Sequence
  Synthetic
aaaauaaauauuucuucuug

SEQ ID NO: 146500 - RNA, 21 nt, Artificial Sequence
  Synthetic
auuuauacagacguaaaguug

SEQ ID NO: 146501 - RNA, 22 nt, Artificial Sequence
  Synthetic
aauuuauacagacguaaaguug

SEQ ID NO: 146502 - RNA, 23 nt, Artificial Sequence
  Synthetic
aaauuuauacagacguaaaguug

SEQ ID NO: 146503 - RNA, 24 nt, Artificial Sequence
  Synthetic
caaauuuauacagacguaaaguug

SEQ ID NO: 146504 - RNA, 21 nt, Artificial Sequence
  Synthetic
cccugaagggacugacaguug

SEQ ID NO: 146505 - RNA, 22 nt, Artificial Sequence
  Synthetic
ucccugaagggacugacaguug

SEQ ID NO: 146506 - RNA, 24 nt, Artificial Sequence
  Synthetic
agucccugaagggacugacaguug

SEQ ID NO: 146507 - RNA, 18 nt, Artificial Sequence
  Synthetic
ccugaugaauuacaguug

SEQ ID NO: 146508 - RNA, 19 nt, Artificial Sequence
  Synthetic
uccugaugaauuacaguug

SEQ ID NO: 146509 - RNA, 20 nt, Artificial Sequence
  Synthetic
auccugaugaauuacaguug

SEQ ID NO: 146510 - RNA, 18 nt, Artificial Sequence
  Synthetic
aacaucacacaccaguug

SEQ ID NO: 146511 - RNA, 23 nt, Artificial Sequence
  Synthetic
aggggaacaucacacaccaguug

SEQ ID NO: 146512 - RNA, 18 nt, Artificial Sequence
  Synthetic
uccacuccuuuggcguug

SEQ ID NO: 146513 - RNA, 19 nt, Artificial Sequence
  Synthetic
cuccacuccuuuggcguug

SEQ ID NO: 146514 - RNA, 21 nt, Artificial Sequence
  Synthetic
agcuccacuccuuuggcguug

SEQ ID NO: 146515 - RNA, 22 nt, Artificial Sequence
  Synthetic
uagcuccacuccuuuggcguug

SEQ ID NO: 146516 - RNA, 18 nt, Artificial Sequence
  Synthetic
aauguagaugacagguug

SEQ ID NO: 146517 - RNA, 19 nt, Artificial Sequence
  Synthetic
uaauguagaugacagguug

SEQ ID NO: 146518 - RNA, 20 nt, Artificial Sequence
  Synthetic
cuaauguagaugacagguug

SEQ ID NO: 146519 - RNA, 21 nt, Artificial Sequence
  Synthetic
ccuaauguagaugacagguug

SEQ ID NO: 146520 - RNA, 22 nt, Artificial Sequence
  Synthetic
accuaauguagaugacagguug

SEQ ID NO: 146521 - RNA, 23 nt, Artificial Sequence
  Synthetic
uaccuaauguagaugacagguug

SEQ ID NO: 146522 - RNA, 24 nt, Artificial Sequence
  Synthetic
auaccuaauguagaugacagguug

SEQ ID NO: 146523 - RNA, 18 nt, Artificial Sequence
  Synthetic
uuuuagcaugaaggguug

SEQ ID NO: 146524 - RNA, 19 nt, Artificial Sequence
  Synthetic
uuuuuagcaugaaggguug

SEQ ID NO: 146525 - RNA, 18 nt, Artificial Sequence
  Synthetic
aauguagaugaaggguug

SEQ ID NO: 146526 - RNA, 19 nt, Artificial Sequence
  Synthetic
uaauguagaugaaggguug

SEQ ID NO: 146527 - RNA, 20 nt, Artificial Sequence
  Synthetic
cuaauguagaugaaggguug

SEQ ID NO: 146528 - RNA, 21 nt, Artificial Sequence
  Synthetic
ccuaauguagaugaaggguug

SEQ ID NO: 146529 - RNA, 22 nt, Artificial Sequence
  Synthetic
accuaauguagaugaaggguug

SEQ ID NO: 146530 - RNA, 23 nt, Artificial Sequence
  Synthetic
uaccuaauguagaugaaggguug

SEQ ID NO: 146531 - RNA, 24 nt, Artificial Sequence
  Synthetic
auaccuaauguagaugaaggguug

SEQ ID NO: 146532 - RNA, 18 nt, Artificial Sequence
  Synthetic
aaugauguggguauguug

SEQ ID NO: 146533 - RNA, 19 nt, Artificial Sequence
  Synthetic
caaugauguggguauguug

SEQ ID NO: 146534 - RNA, 20 nt, Artificial Sequence
  Synthetic
ucaaugauguggguauguug

SEQ ID NO: 146535 - RNA, 18 nt, Artificial Sequence
  Synthetic
acacucuggggacuguug

SEQ ID NO: 146536 - RNA, 19 nt, Artificial Sequence
  Synthetic
cacacucuggggacuguug

SEQ ID NO: 146537 - RNA, 20 nt, Artificial Sequence
  Synthetic
ucacacucuggggacuguug

SEQ ID NO: 146538 - RNA, 18 nt, Artificial Sequence
  Synthetic
auuuuuuuuauacuguug

SEQ ID NO: 146539 - RNA, 19 nt, Artificial Sequence
  Synthetic
uauuuuuuuuauacuguug

SEQ ID NO: 146540 - RNA, 20 nt, Artificial Sequence
  Synthetic
uuauuuuuuuuauacuguug

SEQ ID NO: 146541 - RNA, 18 nt, Artificial Sequence
  Synthetic
acacaccagggccuguug

SEQ ID NO: 146542 - RNA, 19 nt, Artificial Sequence
  Synthetic
cacacaccagggccuguug

SEQ ID NO: 146543 - RNA, 20 nt, Artificial Sequence
  Synthetic
ucacacaccagggccuguug

SEQ ID NO: 146544 - RNA, 21 nt, Artificial Sequence
  Synthetic
aucacacaccagggccuguug

SEQ ID NO: 146545 - RNA, 22 nt, Artificial Sequence
  Synthetic
caucacacaccagggccuguug

SEQ ID NO: 146546 - RNA, 23 nt, Artificial Sequence
  Synthetic
acaucacacaccagggccuguug

SEQ ID NO: 146547 - RNA, 24 nt, Artificial Sequence
  Synthetic
aacaucacacaccagggccuguug

SEQ ID NO: 146548 - RNA, 18 nt, Artificial Sequence
  Synthetic
acacaccggggccuguug

SEQ ID NO: 146549 - RNA, 19 nt, Artificial Sequence
  Synthetic
cacacaccggggccuguug

SEQ ID NO: 146550 - RNA, 20 nt, Artificial Sequence
  Synthetic
ucacacaccggggccuguug

SEQ ID NO: 146551 - RNA, 18 nt, Artificial Sequence
  Synthetic
aauuguuauauccuguug

SEQ ID NO: 146552 - RNA, 19 nt, Artificial Sequence
  Synthetic
uaauuguuauauccuguug

SEQ ID NO: 146553 - RNA, 20 nt, Artificial Sequence
  Synthetic
auaauuguuauauccuguug

SEQ ID NO: 146554 - RNA, 21 nt, Artificial Sequence
  Synthetic
uauaauuguuauauccuguug

SEQ ID NO: 146555 - RNA, 22 nt, Artificial Sequence
  Synthetic
auauaauuguuauauccuguug

SEQ ID NO: 146556 - RNA, 23 nt, Artificial Sequence
  Synthetic
uauauaauuguuauauccuguug

SEQ ID NO: 146557 - RNA, 24 nt, Artificial Sequence
  Synthetic
auauauaauuguuauauccuguug

SEQ ID NO: 146558 - RNA, 18 nt, Artificial Sequence
  Synthetic
aagggcaaagaaaauuug

SEQ ID NO: 146559 - RNA, 20 nt, Artificial Sequence
  Synthetic
agaagggcaaagaaaauuug

SEQ ID NO: 146560 - RNA, 18 nt, Artificial Sequence
  Synthetic
cuuuuaugaccaaauuug

SEQ ID NO: 146561 - RNA, 19 nt, Artificial Sequence
  Synthetic
acuuuuaugaccaaauuug

SEQ ID NO: 146562 - RNA, 21 nt, Artificial Sequence
  Synthetic
agacuuuuaugaccaaauuug

SEQ ID NO: 146563 - RNA, 22 nt, Artificial Sequence
  Synthetic
aagacuuuuaugaccaaauuug

SEQ ID NO: 146564 - RNA, 24 nt, Artificial Sequence
  Synthetic
agaagacuuuuaugaccaaauuug

SEQ ID NO: 146565 - RNA, 18 nt, Artificial Sequence
  Synthetic
aauaauucagcaaauuug

SEQ ID NO: 146566 - RNA, 19 nt, Artificial Sequence
  Synthetic
aaauaauucagcaaauuug

SEQ ID NO: 146567 - RNA, 20 nt, Artificial Sequence
  Synthetic
aaaauaauucagcaaauuug

SEQ ID NO: 146568 - RNA, 21 nt, Artificial Sequence
  Synthetic
uaaaauaauucagcaaauuug

SEQ ID NO: 146569 - RNA, 22 nt, Artificial Sequence
  Synthetic
auaaaauaauucagcaaauuug

SEQ ID NO: 146570 - RNA, 23 nt, Artificial Sequence
  Synthetic
aauaaaauaauucagcaaauuug

SEQ ID NO: 146571 - RNA, 24 nt, Artificial Sequence
  Synthetic
uaauaaaauaauucagcaaauuug

SEQ ID NO: 146572 - RNA, 18 nt, Artificial Sequence
  Synthetic
accacagcugggaauuug

SEQ ID NO: 146573 - RNA, 19 nt, Artificial Sequence
  Synthetic
caccacagcugggaauuug

SEQ ID NO: 146574 - RNA, 20 nt, Artificial Sequence
  Synthetic
ccaccacagcugggaauuug

SEQ ID NO: 146575 - RNA, 21 nt, Artificial Sequence
  Synthetic
accaccacagcugggaauuug

SEQ ID NO: 146576 - RNA, 22 nt, Artificial Sequence
  Synthetic
aaccaccacagcugggaauuug

SEQ ID NO: 146577 - RNA, 23 nt, Artificial Sequence
  Synthetic
uaaccaccacagcugggaauuug

SEQ ID NO: 146578 - RNA, 24 nt, Artificial Sequence
  Synthetic
auaaccaccacagcugggaauuug

SEQ ID NO: 146579 - RNA, 18 nt, Artificial Sequence
  Synthetic
auuugaaauguuaauuug

SEQ ID NO: 146580 - RNA, 19 nt, Artificial Sequence
  Synthetic
aauuugaaauguuaauuug

SEQ ID NO: 146581 - RNA, 20 nt, Artificial Sequence
  Synthetic
aaauuugaaauguuaauuug

SEQ ID NO: 146582 - RNA, 21 nt, Artificial Sequence
  Synthetic
aaaauuugaaauguuaauuug

SEQ ID NO: 146583 - RNA, 22 nt, Artificial Sequence
  Synthetic
aaaaauuugaaauguuaauuug

SEQ ID NO: 146584 - RNA, 24 nt, Artificial Sequence
  Synthetic
agaaaaauuugaaauguuaauuug

SEQ ID NO: 146585 - RNA, 18 nt, Artificial Sequence
  Synthetic
cugcauuuuaaacauuug

SEQ ID NO: 146586 - RNA, 19 nt, Artificial Sequence
  Synthetic
acugcauuuuaaacauuug

SEQ ID NO: 146587 - RNA, 20 nt, Artificial Sequence
  Synthetic
uacugcauuuuaaacauuug

SEQ ID NO: 146588 - RNA, 18 nt, Artificial Sequence
  Synthetic
uaauucaucaaauauuug

SEQ ID NO: 146589 - RNA, 19 nt, Artificial Sequence
  Synthetic
uuaauucaucaaauauuug

SEQ ID NO: 146590 - RNA, 20 nt, Artificial Sequence
  Synthetic
auuaauucaucaaauauuug

SEQ ID NO: 146591 - RNA, 21 nt, Artificial Sequence
  Synthetic
uauuaauucaucaaauauuug

SEQ ID NO: 146592 - RNA, 22 nt, Artificial Sequence
  Synthetic
uuauuaauucaucaaauauuug

SEQ ID NO: 146593 - RNA, 23 nt, Artificial Sequence
  Synthetic
uuuauuaauucaucaaauauuug

SEQ ID NO: 146594 - RNA, 24 nt, Artificial Sequence
  Synthetic
auuuauuaauucaucaaauauuug

SEQ ID NO: 146595 - RNA, 20 nt, Artificial Sequence
  Synthetic
agguguucaauaaauauuug

SEQ ID NO: 146596 - RNA, 21 nt, Artificial Sequence
  Synthetic
uagguguucaauaaauauuug

SEQ ID NO: 146597 - RNA, 22 nt, Artificial Sequence
  Synthetic
uuagguguucaauaaauauuug

SEQ ID NO: 146598 - RNA, 23 nt, Artificial Sequence
  Synthetic
auuagguguucaauaaauauuug

SEQ ID NO: 146599 - RNA, 24 nt, Artificial Sequence
  Synthetic
uauuagguguucaauaaauauuug

SEQ ID NO: 146600 - RNA, 19 nt, Artificial Sequence
  Synthetic
agcaauugauaaauauuug

SEQ ID NO: 146601 - RNA, 22 nt, Artificial Sequence
  Synthetic
uggagcaauugauaaauauuug

SEQ ID NO: 146602 - RNA, 23 nt, Artificial Sequence
  Synthetic
auggagcaauugauaaauauuug

SEQ ID NO: 146603 - RNA, 24 nt, Artificial Sequence
  Synthetic
uauggagcaauugauaaauauuug

SEQ ID NO: 146604 - RNA, 19 nt, Artificial Sequence
  Synthetic
aguagguucucaauauuug

SEQ ID NO: 146605 - RNA, 20 nt, Artificial Sequence
  Synthetic
uaguagguucucaauauuug

SEQ ID NO: 146606 - RNA, 18 nt, Artificial Sequence
  Synthetic
aauaauuguacauauuug

SEQ ID NO: 146607 - RNA, 19 nt, Artificial Sequence
  Synthetic
uaauaauuguacauauuug

SEQ ID NO: 146608 - RNA, 20 nt, Artificial Sequence
  Synthetic
auaauaauuguacauauuug

SEQ ID NO: 146609 - RNA, 21 nt, Artificial Sequence
  Synthetic
cauaauaauuguacauauuug

SEQ ID NO: 146610 - RNA, 22 nt, Artificial Sequence
  Synthetic
acauaauaauuguacauauuug

SEQ ID NO: 146611 - RNA, 23 nt, Artificial Sequence
  Synthetic
uacauaauaauuguacauauuug

SEQ ID NO: 146612 - RNA, 24 nt, Artificial Sequence
  Synthetic
auacauaauaauuguacauauuug

SEQ ID NO: 146613 - RNA, 18 nt, Artificial Sequence
  Synthetic
ucaaacacauuuuauuug

SEQ ID NO: 146614 - RNA, 19 nt, Artificial Sequence
  Synthetic
aucaaacacauuuuauuug

SEQ ID NO: 146615 - RNA, 20 nt, Artificial Sequence
  Synthetic
aaucaaacacauuuuauuug

SEQ ID NO: 146616 - RNA, 18 nt, Artificial Sequence
  Synthetic
uuguauccugcaacuuug

SEQ ID NO: 146617 - RNA, 19 nt, Artificial Sequence
  Synthetic
uuuguauccugcaacuuug

SEQ ID NO: 146618 - RNA, 20 nt, Artificial Sequence
  Synthetic
cuuuguauccugcaacuuug

SEQ ID NO: 146619 - RNA, 21 nt, Artificial Sequence
  Synthetic
acuuuguauccugcaacuuug

SEQ ID NO: 146620 - RNA, 23 nt, Artificial Sequence
  Synthetic
ugacuuuguauccugcaacuuug

SEQ ID NO: 146621 - RNA, 24 nt, Artificial Sequence
  Synthetic
augacuuuguauccugcaacuuug

SEQ ID NO: 146622 - RNA, 18 nt, Artificial Sequence
  Synthetic
auuuuuuauaagacuuug

SEQ ID NO: 146623 - RNA, 19 nt, Artificial Sequence
  Synthetic
aauuuuuuauaagacuuug

SEQ ID NO: 146624 - RNA, 20 nt, Artificial Sequence
  Synthetic
aaauuuuuuauaagacuuug

SEQ ID NO: 146625 - RNA, 18 nt, Artificial Sequence
  Synthetic
auuuauauaucuccuuug

SEQ ID NO: 146626 - RNA, 19 nt, Artificial Sequence
  Synthetic
cauuuauauaucuccuuug

SEQ ID NO: 146627 - RNA, 20 nt, Artificial Sequence
  Synthetic
ccauuuauauaucuccuuug

SEQ ID NO: 146628 - RNA, 21 nt, Artificial Sequence
  Synthetic
cccauuuauauaucuccuuug

SEQ ID NO: 146629 - RNA, 23 nt, Artificial Sequence
  Synthetic
ugcccauuuauauaucuccuuug

SEQ ID NO: 146630 - RNA, 24 nt, Artificial Sequence
  Synthetic
augcccauuuauauaucuccuuug

SEQ ID NO: 146631 - RNA, 18 nt, Artificial Sequence
  Synthetic
agcugugguuuaucuuug

SEQ ID NO: 146632 - RNA, 19 nt, Artificial Sequence
  Synthetic
aagcugugguuuaucuuug

SEQ ID NO: 146633 - RNA, 20 nt, Artificial Sequence
  Synthetic
aaagcugugguuuaucuuug

SEQ ID NO: 146634 - RNA, 18 nt, Artificial Sequence
  Synthetic
uuuaaaguguacaguuug

SEQ ID NO: 146635 - RNA, 19 nt, Artificial Sequence
  Synthetic
uuuuaaaguguacaguuug

SEQ ID NO: 146636 - RNA, 20 nt, Artificial Sequence
  Synthetic
uuuuuaaaguguacaguuug

SEQ ID NO: 146637 - RNA, 21 nt, Artificial Sequence
  Synthetic
cuuuuuaaaguguacaguuug

SEQ ID NO: 146638 - RNA, 22 nt, Artificial Sequence
  Synthetic
ccuuuuuaaaguguacaguuug

SEQ ID NO: 146639 - RNA, 24 nt, Artificial Sequence
  Synthetic
cgccuuuuuaaaguguacaguuug

SEQ ID NO: 146640 - RNA, 19 nt, Artificial Sequence
  Synthetic
uggauggagaaugaguuug

SEQ ID NO: 146641 - RNA, 20 nt, Artificial Sequence
  Synthetic
cuggauggagaaugaguuug

SEQ ID NO: 146642 - RNA, 21 nt, Artificial Sequence
  Synthetic
acuggauggagaaugaguuug

SEQ ID NO: 146643 - RNA, 22 nt, Artificial Sequence
  Synthetic
aacuggauggagaaugaguuug

SEQ ID NO: 146644 - RNA, 23 nt, Artificial Sequence
  Synthetic
aaacuggauggagaaugaguuug

SEQ ID NO: 146645 - RNA, 24 nt, Artificial Sequence
  Synthetic
aaaacuggauggagaaugaguuug

SEQ ID NO: 146646 - RNA, 18 nt, Artificial Sequence
  Synthetic
acuuuuauuuuagguuug

SEQ ID NO: 146647 - RNA, 19 nt, Artificial Sequence
  Synthetic
aacuuuuauuuuagguuug

SEQ ID NO: 146648 - RNA, 20 nt, Artificial Sequence
  Synthetic
uaacuuuuauuuuagguuug

SEQ ID NO: 146649 - RNA, 21 nt, Artificial Sequence
  Synthetic
uuaacuuuuauuuuagguuug

SEQ ID NO: 146650 - RNA, 22 nt, Artificial Sequence
  Synthetic
uuuaacuuuuauuuuagguuug

SEQ ID NO: 146651 - RNA, 23 nt, Artificial Sequence
  Synthetic
uuuuaacuuuuauuuuagguuug

SEQ ID NO: 146652 - RNA, 24 nt, Artificial Sequence
  Synthetic
uuuuuaacuuuuauuuuagguuug

SEQ ID NO: 146653 - RNA, 18 nt, Artificial Sequence
  Synthetic
uccaccccuguggguuug

SEQ ID NO: 146654 - RNA, 19 nt, Artificial Sequence
  Synthetic
cuccaccccuguggguuug

SEQ ID NO: 146655 - RNA, 21 nt, Artificial Sequence
  Synthetic
agcuccaccccuguggguuug

SEQ ID NO: 146656 - RNA, 22 nt, Artificial Sequence
  Synthetic
aagcuccaccccuguggguuug

SEQ ID NO: 146657 - RNA, 23 nt, Artificial Sequence
  Synthetic
uaagcuccaccccuguggguuug

SEQ ID NO: 146658 - RNA, 19 nt, Artificial Sequence
  Synthetic
agcacugaauaaauguuug

SEQ ID NO: 146659 - RNA, 20 nt, Artificial Sequence
  Synthetic
aagcacugaauaaauguuug

SEQ ID NO: 146660 - RNA, 21 nt, Artificial Sequence
  Synthetic
uaagcacugaauaaauguuug

SEQ ID NO: 146661 - RNA, 23 nt, Artificial Sequence
  Synthetic
aguaagcacugaauaaauguuug

SEQ ID NO: 146662 - RNA, 24 nt, Artificial Sequence
  Synthetic
uaguaagcacugaauaaauguuug

SEQ ID NO: 146663 - RNA, 18 nt, Artificial Sequence
  Synthetic
auguguaauaaauguuug

SEQ ID NO: 146664 - RNA, 20 nt, Artificial Sequence
  Synthetic
agauguguaauaaauguuug

SEQ ID NO: 146665 - RNA, 21 nt, Artificial Sequence
  Synthetic
uagauguguaauaaauguuug

SEQ ID NO: 146666 - RNA, 24 nt, Artificial Sequence
  Synthetic
ugguagauguguaauaaauguuug

SEQ ID NO: 146667 - RNA, 20 nt, Artificial Sequence
  Synthetic
aggucuucuuuaaauguuug

SEQ ID NO: 146668 - RNA, 21 nt, Artificial Sequence
  Synthetic
uaggucuucuuuaaauguuug

SEQ ID NO: 146669 - RNA, 22 nt, Artificial Sequence
  Synthetic
uuaggucuucuuuaaauguuug

SEQ ID NO: 146670 - RNA, 24 nt, Artificial Sequence
  Synthetic
uguuaggucuucuuuaaauguuug

SEQ ID NO: 146671 - RNA, 18 nt, Artificial Sequence
  Synthetic
uaaauuuuuguuuguuug

SEQ ID NO: 146672 - RNA, 19 nt, Artificial Sequence
  Synthetic
uuaaauuuuuguuuguuug

SEQ ID NO: 146673 - RNA, 20 nt, Artificial Sequence
  Synthetic
cuuaaauuuuuguuuguuug

SEQ ID NO: 146674 - RNA, 18 nt, Artificial Sequence
  Synthetic
ucauuuauuuauauuuug

SEQ ID NO: 146675 - RNA, 19 nt, Artificial Sequence
  Synthetic
uucauuuauuuauauuuug

SEQ ID NO: 146676 - RNA, 20 nt, Artificial Sequence
  Synthetic
uuucauuuauuuauauuuug

SEQ ID NO: 146677 - RNA, 21 nt, Artificial Sequence
  Synthetic
uuuucauuuauuuauauuuug

SEQ ID NO: 146678 - RNA, 22 nt, Artificial Sequence
  Synthetic
auuuucauuuauuuauauuuug

SEQ ID NO: 146679 - RNA, 24 nt, Artificial Sequence
  Synthetic
ugauuuucauuuauuuauauuuug

SEQ ID NO: 146680 - RNA, 18 nt, Artificial Sequence
  Synthetic
uggggucuugcuauuuug

SEQ ID NO: 146681 - RNA, 19 nt, Artificial Sequence
  Synthetic
auggggucuugcuauuuug

SEQ ID NO: 146682 - RNA, 21 nt, Artificial Sequence
  Synthetic
agauggggucuugcuauuuug

SEQ ID NO: 146683 - RNA, 23 nt, Artificial Sequence
  Synthetic
ugagauggggucuugcuauuuug

SEQ ID NO: 146684 - RNA, 24 nt, Artificial Sequence
  Synthetic
uugagauggggucuugcuauuuug

SEQ ID NO: 146685 - RNA, 18 nt, Artificial Sequence
  Synthetic
uucugauuauaacuuuug

SEQ ID NO: 146686 - RNA, 19 nt, Artificial Sequence
  Synthetic
auucugauuauaacuuuug

SEQ ID NO: 146687 - RNA, 20 nt, Artificial Sequence
  Synthetic
aauucugauuauaacuuuug

SEQ ID NO: 146688 - RNA, 18 nt, Artificial Sequence
  Synthetic
uucaccagcuugguuuug

SEQ ID NO: 146689 - RNA, 19 nt, Artificial Sequence
  Synthetic
uuucaccagcuugguuuug

SEQ ID NO: 146690 - RNA, 20 nt, Artificial Sequence
  Synthetic
uuuucaccagcuugguuuug

SEQ ID NO: 146691 - RNA, 21 nt, Artificial Sequence
  Synthetic
uuuuucaccagcuugguuuug

SEQ ID NO: 146692 - RNA, 22 nt, Artificial Sequence
  Synthetic
uuuuuucaccagcuugguuuug

SEQ ID NO: 146693 - RNA, 23 nt, Artificial Sequence
  Synthetic
cuuuuuucaccagcuugguuuug

SEQ ID NO: 146694 - RNA, 24 nt, Artificial Sequence
  Synthetic
acuuuuuucaccagcuugguuuug

SEQ ID NO: 146695 - RNA, 19 nt, Artificial Sequence
  Synthetic
uggauucauugauuuuuug

SEQ ID NO: 146696 - RNA, 20 nt, Artificial Sequence
  Synthetic
cuggauucauugauuuuuug

SEQ ID NO: 146697 - RNA, 21 nt, Artificial Sequence
  Synthetic
ccuggauucauugauuuuuug

SEQ ID NO: 146698 - RNA, 22 nt, Artificial Sequence
  Synthetic
uccuggauucauugauuuuuug

SEQ ID NO: 146699 - RNA, 23 nt, Artificial Sequence
  Synthetic
cuccuggauucauugauuuuuug

SEQ ID NO: 146700 - RNA, 19 nt, Artificial Sequence
  Synthetic
ugauuuucuuucuuuuuug

SEQ ID NO: 146701 - RNA, 20 nt, Artificial Sequence
  Synthetic
augauuuucuuucuuuuuug

SEQ ID NO: 146702 - RNA, 20 nt, Artificial Sequence
  Synthetic
uggauucauugauuuuuuug

SEQ ID NO: 146703 - RNA, 21 nt, Artificial Sequence
  Synthetic
cuggauucauugauuuuuuug

SEQ ID NO: 146704 - RNA, 22 nt, Artificial Sequence
  Synthetic
ccuggauucauugauuuuuuug

SEQ ID NO: 146705 - RNA, 23 nt, Artificial Sequence
  Synthetic
uccuggauucauugauuuuuuug

SEQ ID NO: 146706 - RNA, 24 nt, Artificial Sequence
  Synthetic
cuccuggauucauugauuuuuuug

SEQ ID NO: 146707 - RNA, 18 nt, Artificial Sequence
  Synthetic
ccauuagggaaaaaaaau

SEQ ID NO: 146708 - RNA, 20 nt, Artificial Sequence
  Synthetic
agccauuagggaaaaaaaau

SEQ ID NO: 146709 - RNA, 18 nt, Artificial Sequence
  Synthetic
caaacacuugaaaaaaau

SEQ ID NO: 146710 - RNA, 19 nt, Artificial Sequence
  Synthetic
ucaaacacuugaaaaaaau

SEQ ID NO: 146711 - RNA, 20 nt, Artificial Sequence
  Synthetic
uucaaacacuugaaaaaaau

SEQ ID NO: 146712 - RNA, 18 nt, Artificial Sequence
  Synthetic
uuucaaguugaaaaaaau

SEQ ID NO: 146713 - RNA, 20 nt, Artificial Sequence
  Synthetic
aguuucaaguugaaaaaaau

SEQ ID NO: 146714 - RNA, 18 nt, Artificial Sequence
  Synthetic
cucauuuuuuaaaaaaau

SEQ ID NO: 146715 - RNA, 19 nt, Artificial Sequence
  Synthetic
ccucauuuuuuaaaaaaau

SEQ ID NO: 146716 - RNA, 20 nt, Artificial Sequence
  Synthetic
accucauuuuuuaaaaaaau

SEQ ID NO: 146717 - RNA, 22 nt, Artificial Sequence
  Synthetic
agaccucauuuuuuaaaaaaau

SEQ ID NO: 146718 - RNA, 24 nt, Artificial Sequence
  Synthetic
agagaccucauuuuuuaaaaaaau

SEQ ID NO: 146719 - RNA, 19 nt, Artificial Sequence
  Synthetic
uguuuuuuuuuaaaaaaau

SEQ ID NO: 146720 - RNA, 20 nt, Artificial Sequence
  Synthetic
cuguuuuuuuuuaaaaaaau

SEQ ID NO: 146721 - RNA, 22 nt, Artificial Sequence
  Synthetic
ugcuguuuuuuuuuaaaaaaau

SEQ ID NO: 146722 - RNA, 23 nt, Artificial Sequence
  Synthetic
uugcuguuuuuuuuuaaaaaaau

SEQ ID NO: 146723 - RNA, 18 nt, Artificial Sequence
  Synthetic
aaaaaagagacaaaaaau

SEQ ID NO: 146724 - RNA, 19 nt, Artificial Sequence
  Synthetic
aaaaaaagagacaaaaaau

SEQ ID NO: 146725 - RNA, 20 nt, Artificial Sequence
  Synthetic
aaaaaaaagagacaaaaaau

SEQ ID NO: 146726 - RNA, 21 nt, Artificial Sequence
  Synthetic
aaaaaaaaagagacaaaaaau

SEQ ID NO: 146727 - RNA, 22 nt, Artificial Sequence
  Synthetic
aaaaaaaaaagagacaaaaaau

SEQ ID NO: 146728 - RNA, 23 nt, Artificial Sequence
  Synthetic
uaaaaaaaaaagagacaaaaaau

SEQ ID NO: 146729 - RNA, 24 nt, Artificial Sequence
  Synthetic
auaaaaaaaaaagagacaaaaaau

SEQ ID NO: 146730 - RNA, 18 nt, Artificial Sequence
  Synthetic
auacaaauggcaaaaaau

SEQ ID NO: 146731 - RNA, 19 nt, Artificial Sequence
  Synthetic
aauacaaauggcaaaaaau

SEQ ID NO: 146732 - RNA, 20 nt, Artificial Sequence
  Synthetic
aaauacaaauggcaaaaaau

SEQ ID NO: 146733 - RNA, 18 nt, Artificial Sequence
  Synthetic
cuuucuauuguaaaaaau

SEQ ID NO: 146734 - RNA, 19 nt, Artificial Sequence
  Synthetic
ucuuucuauuguaaaaaau

SEQ ID NO: 146735 - RNA, 20 nt, Artificial Sequence
  Synthetic
aucuuucuauuguaaaaaau

SEQ ID NO: 146736 - RNA, 18 nt, Artificial Sequence
  Synthetic
uuuuuaaaaaacaaaaau

SEQ ID NO: 146737 - RNA, 19 nt, Artificial Sequence
  Synthetic
uuuuuuaaaaaacaaaaau

SEQ ID NO: 146738 - RNA, 20 nt, Artificial Sequence
  Synthetic
auuuuuuaaaaaacaaaaau

SEQ ID NO: 146739 - RNA, 18 nt, Artificial Sequence
  Synthetic
auauauaugaucaaaaau

SEQ ID NO: 146740 - RNA, 19 nt, Artificial Sequence
  Synthetic
uauauauaugaucaaaaau

SEQ ID NO: 146741 - RNA, 20 nt, Artificial Sequence
  Synthetic
auauauauaugaucaaaaau

SEQ ID NO: 146742 - RNA, 21 nt, Artificial Sequence
  Synthetic
uauauauauaugaucaaaaau

SEQ ID NO: 146743 - RNA, 22 nt, Artificial Sequence
  Synthetic
auauauauauaugaucaaaaau

SEQ ID NO: 146744 - RNA, 23 nt, Artificial Sequence
  Synthetic
uauauauauauaugaucaaaaau

SEQ ID NO: 146745 - RNA, 24 nt, Artificial Sequence
  Synthetic
auauauauauauaugaucaaaaau

SEQ ID NO: 146746 - RNA, 18 nt, Artificial Sequence
  Synthetic
uaauaaauaaauaaaaau

SEQ ID NO: 146747 - RNA, 19 nt, Artificial Sequence
  Synthetic
auaauaaauaaauaaaaau

SEQ ID NO: 146748 - RNA, 20 nt, Artificial Sequence
  Synthetic
aauaauaaauaaauaaaaau

SEQ ID NO: 146749 - RNA, 21 nt, Artificial Sequence
  Synthetic
aaauaauaaauaaauaaaaau

SEQ ID NO: 146750 - RNA, 22 nt, Artificial Sequence
  Synthetic
aaaauaauaaauaaauaaaaau

SEQ ID NO: 146751 - RNA, 23 nt, Artificial Sequence
  Synthetic
uaaaauaauaaauaaauaaaaau

SEQ ID NO: 146752 - RNA, 24 nt, Artificial Sequence
  Synthetic
cuaaaauaauaaauaaauaaaaau

SEQ ID NO: 146753 - RNA, 19 nt, Artificial Sequence
  Synthetic
agaaguuuaggcuaaaaau

SEQ ID NO: 146754 - RNA, 18 nt, Artificial Sequence
  Synthetic
auaaauaugguuaaaaau

SEQ ID NO: 146755 - RNA, 19 nt, Artificial Sequence
  Synthetic
aauaaauaugguuaaaaau

SEQ ID NO: 146756 - RNA, 20 nt, Artificial Sequence
  Synthetic
aaauaaauaugguuaaaaau

SEQ ID NO: 146757 - RNA, 18 nt, Artificial Sequence
  Synthetic
aaauaguucuuuaaaaau

SEQ ID NO: 146758 - RNA, 19 nt, Artificial Sequence
  Synthetic
aaaauaguucuuuaaaaau

SEQ ID NO: 146759 - RNA, 20 nt, Artificial Sequence
  Synthetic
aaaaauaguucuuuaaaaau

SEQ ID NO: 146760 - RNA, 21 nt, Artificial Sequence
  Synthetic
uaaaaauaguucuuuaaaaau

SEQ ID NO: 146761 - RNA, 22 nt, Artificial Sequence
  Synthetic
uuaaaaauaguucuuuaaaaau

SEQ ID NO: 146762 - RNA, 23 nt, Artificial Sequence
  Synthetic
uuuaaaaauaguucuuuaaaaau

SEQ ID NO: 146763 - RNA, 24 nt, Artificial Sequence
  Synthetic
uuuuaaaaauaguucuuuaaaaau

SEQ ID NO: 146764 - RNA, 18 nt, Artificial Sequence
  Synthetic
uaaaaaacaaaacaaaau

SEQ ID NO: 146765 - RNA, 19 nt, Artificial Sequence
  Synthetic
uuaaaaaacaaaacaaaau

SEQ ID NO: 146766 - RNA, 19 nt, Artificial Sequence
  Synthetic
aguuagaaaauggcaaaau

SEQ ID NO: 146767 - RNA, 20 nt, Artificial Sequence
  Synthetic
caguuagaaaauggcaaaau

SEQ ID NO: 146768 - RNA, 18 nt, Artificial Sequence
  Synthetic
aaaagugggcaagaaaau

SEQ ID NO: 146769 - RNA, 19 nt, Artificial Sequence
  Synthetic
aaaaagugggcaagaaaau

SEQ ID NO: 146770 - RNA, 20 nt, Artificial Sequence
  Synthetic
caaaaagugggcaagaaaau

SEQ ID NO: 146771 - RNA, 18 nt, Artificial Sequence
  Synthetic
agacugaaugcagaaaau

SEQ ID NO: 146772 - RNA, 19 nt, Artificial Sequence
  Synthetic
aagacugaaugcagaaaau

SEQ ID NO: 146773 - RNA, 20 nt, Artificial Sequence
  Synthetic
aaagacugaaugcagaaaau

SEQ ID NO: 146774 - RNA, 18 nt, Artificial Sequence
  Synthetic
uaucauugaagagaaaau

SEQ ID NO: 146775 - RNA, 19 nt, Artificial Sequence
  Synthetic
auaucauugaagagaaaau

SEQ ID NO: 146776 - RNA, 20 nt, Artificial Sequence
  Synthetic
cauaucauugaagagaaaau

SEQ ID NO: 146777 - RNA, 18 nt, Artificial Sequence
  Synthetic
uuuucuccaauggaaaau

SEQ ID NO: 146778 - RNA, 20 nt, Artificial Sequence
  Synthetic
uguuuucuccaauggaaaau

SEQ ID NO: 146779 - RNA, 21 nt, Artificial Sequence
  Synthetic
cuguuuucuccaauggaaaau

SEQ ID NO: 146780 - RNA, 22 nt, Artificial Sequence
  Synthetic
ucuguuuucuccaauggaaaau

SEQ ID NO: 146781 - RNA, 23 nt, Artificial Sequence
  Synthetic
cucuguuuucuccaauggaaaau

SEQ ID NO: 146782 - RNA, 24 nt, Artificial Sequence
  Synthetic
ccucuguuuucuccaauggaaaau

SEQ ID NO: 146783 - RNA, 18 nt, Artificial Sequence
  Synthetic
uuauauugccaugaaaau

SEQ ID NO: 146784 - RNA, 19 nt, Artificial Sequence
  Synthetic
auuauauugccaugaaaau

SEQ ID NO: 146785 - RNA, 20 nt, Artificial Sequence
  Synthetic
aauuauauugccaugaaaau

SEQ ID NO: 146786 - RNA, 21 nt, Artificial Sequence
  Synthetic
uaauuauauugccaugaaaau

SEQ ID NO: 146787 - RNA, 22 nt, Artificial Sequence
  Synthetic
auaauuauauugccaugaaaau

SEQ ID NO: 146788 - RNA, 23 nt, Artificial Sequence
  Synthetic
aauaauuauauugccaugaaaau

SEQ ID NO: 146789 - RNA, 24 nt, Artificial Sequence
  Synthetic
aaauaauuauauugccaugaaaau

SEQ ID NO: 146790 - RNA, 18 nt, Artificial Sequence
  Synthetic
uuuuugugcuuugaaaau

SEQ ID NO: 146791 - RNA, 19 nt, Artificial Sequence
  Synthetic
uuuuuugugcuuugaaaau

SEQ ID NO: 146792 - RNA, 20 nt, Artificial Sequence
  Synthetic
uuuuuuugugcuuugaaaau

SEQ ID NO: 146793 - RNA, 21 nt, Artificial Sequence
  Synthetic
auuuuuuugugcuuugaaaau

SEQ ID NO: 146794 - RNA, 22 nt, Artificial Sequence
  Synthetic
uauuuuuuugugcuuugaaaau

SEQ ID NO: 146795 - RNA, 24 nt, Artificial Sequence
  Synthetic
uguauuuuuuugugcuuugaaaau

SEQ ID NO: 146796 - RNA, 18 nt, Artificial Sequence
  Synthetic
uuuaucuagcuauaaaau

SEQ ID NO: 146797 - RNA, 20 nt, Artificial Sequence
  Synthetic
aguuuaucuagcuauaaaau

SEQ ID NO: 146798 - RNA, 21 nt, Artificial Sequence
  Synthetic
aaguuuaucuagcuauaaaau

SEQ ID NO: 146799 - RNA, 22 nt, Artificial Sequence
  Synthetic
caaguuuaucuagcuauaaaau

SEQ ID NO: 146800 - RNA, 23 nt, Artificial Sequence
  Synthetic
ccaaguuuaucuagcuauaaaau

SEQ ID NO: 146801 - RNA, 24 nt, Artificial Sequence
  Synthetic
cccaaguuuaucuagcuauaaaau

SEQ ID NO: 146802 - RNA, 18 nt, Artificial Sequence
  Synthetic
uuuucucauguauaaaau

SEQ ID NO: 146803 - RNA, 20 nt, Artificial Sequence
  Synthetic
uguuuucucauguauaaaau

SEQ ID NO: 146804 - RNA, 21 nt, Artificial Sequence
  Synthetic
uuguuuucucauguauaaaau

SEQ ID NO: 146805 - RNA, 22 nt, Artificial Sequence
  Synthetic
uuuguuuucucauguauaaaau

SEQ ID NO: 146806 - RNA, 24 nt, Artificial Sequence
  Synthetic
aguuuguuuucucauguauaaaau

SEQ ID NO: 146807 - RNA, 18 nt, Artificial Sequence
  Synthetic
ucugucacauccuaaaau

SEQ ID NO: 146808 - RNA, 19 nt, Artificial Sequence
  Synthetic
uucugucacauccuaaaau

SEQ ID NO: 146809 - RNA, 20 nt, Artificial Sequence
  Synthetic
auucugucacauccuaaaau

SEQ ID NO: 146810 - RNA, 18 nt, Artificial Sequence
  Synthetic
cauuuauuuuucuaaaau

SEQ ID NO: 146811 - RNA, 20 nt, Artificial Sequence
  Synthetic
agcauuuauuuuucuaaaau

SEQ ID NO: 146812 - RNA, 21 nt, Artificial Sequence
  Synthetic
ccaaauguagagacuuaaaau

SEQ ID NO: 146813 - RNA, 22 nt, Artificial Sequence
  Synthetic
cccaaauguagagacuuaaaau

SEQ ID NO: 146814 - RNA, 23 nt, Artificial Sequence
  Synthetic
ccccaaauguagagacuuaaaau

SEQ ID NO: 146815 - RNA, 24 nt, Artificial Sequence
  Synthetic
accccaaauguagagacuuaaaau

SEQ ID NO: 146816 - RNA, 19 nt, Artificial Sequence
  Synthetic
ugauguaaaauuuuaaaau

SEQ ID NO: 146817 - RNA, 20 nt, Artificial Sequence
  Synthetic
augauguaaaauuuuaaaau

SEQ ID NO: 146818 - RNA, 18 nt, Artificial Sequence
  Synthetic
aagagcucacaaucaaau

SEQ ID NO: 146819 - RNA, 19 nt, Artificial Sequence
  Synthetic
aaagagcucacaaucaaau

SEQ ID NO: 146820 - RNA, 20 nt, Artificial Sequence
  Synthetic
uaaagagcucacaaucaaau

SEQ ID NO: 146821 - RNA, 21 nt, Artificial Sequence
  Synthetic
uuaaagagcucacaaucaaau

SEQ ID NO: 146822 - RNA, 22 nt, Artificial Sequence
  Synthetic
uuuaaagagcucacaaucaaau

SEQ ID NO: 146823 - RNA, 23 nt, Artificial Sequence
  Synthetic
cuuuaaagagcucacaaucaaau

SEQ ID NO: 146824 - RNA, 24 nt, Artificial Sequence
  Synthetic
ucuuuaaagagcucacaaucaaau

SEQ ID NO: 146825 - RNA, 18 nt, Artificial Sequence
  Synthetic
aauauauaaugaucaaau

SEQ ID NO: 146826 - RNA, 19 nt, Artificial Sequence
  Synthetic
uaauauauaaugaucaaau

SEQ ID NO: 146827 - RNA, 20 nt, Artificial Sequence
  Synthetic
auaauauauaaugaucaaau

SEQ ID NO: 146828 - RNA, 21 nt, Artificial Sequence
  Synthetic
uauaauauauaaugaucaaau

SEQ ID NO: 146829 - RNA, 22 nt, Artificial Sequence
  Synthetic
auauaauauauaaugaucaaau

SEQ ID NO: 146830 - RNA, 23 nt, Artificial Sequence
  Synthetic
cauauaauauauaaugaucaaau

SEQ ID NO: 146831 - RNA, 18 nt, Artificial Sequence
  Synthetic
aauguguaaugaucaaau

SEQ ID NO: 146832 - RNA, 19 nt, Artificial Sequence
  Synthetic
uaauguguaaugaucaaau

SEQ ID NO: 146833 - RNA, 20 nt, Artificial Sequence
  Synthetic
auaauguguaaugaucaaau

SEQ ID NO: 146834 - RNA, 21 nt, Artificial Sequence
  Synthetic
uauaauguguaaugaucaaau

SEQ ID NO: 146835 - RNA, 23 nt, Artificial Sequence
  Synthetic
cguauaauguguaaugaucaaau

SEQ ID NO: 146836 - RNA, 18 nt, Artificial Sequence
  Synthetic
cauguguaauuaucaaau

SEQ ID NO: 146837 - RNA, 19 nt, Artificial Sequence
  Synthetic
ccauguguaauuaucaaau

SEQ ID NO: 146838 - RNA, 20 nt, Artificial Sequence
  Synthetic
accauguguaauuaucaaau

SEQ ID NO: 146839 - RNA, 21 nt, Artificial Sequence
  Synthetic
uaccauguguaauuaucaaau

SEQ ID NO: 146840 - RNA, 22 nt, Artificial Sequence
  Synthetic
auaccauguguaauuaucaaau

SEQ ID NO: 146841 - RNA, 23 nt, Artificial Sequence
  Synthetic
cauaccauguguaauuaucaaau

SEQ ID NO: 146842 - RNA, 18 nt, Artificial Sequence
  Synthetic
uuuucauccuccagaaau

SEQ ID NO: 146843 - RNA, 19 nt, Artificial Sequence
  Synthetic
cuuuucauccuccagaaau

SEQ ID NO: 146844 - RNA, 18 nt, Artificial Sequence
  Synthetic
acauaaacauuuagaaau

SEQ ID NO: 146845 - RNA, 19 nt, Artificial Sequence
  Synthetic
aacauaaacauuuagaaau

SEQ ID NO: 146846 - RNA, 20 nt, Artificial Sequence
  Synthetic
aaacauaaacauuuagaaau

SEQ ID NO: 146847 - RNA, 18 nt, Artificial Sequence
  Synthetic
aaaauuguugcaugaaau

SEQ ID NO: 146848 - RNA, 19 nt, Artificial Sequence
  Synthetic
caaaauuguugcaugaaau

SEQ ID NO: 146849 - RNA, 20 nt, Artificial Sequence
  Synthetic
acaaaauuguugcaugaaau

SEQ ID NO: 146850 - RNA, 21 nt, Artificial Sequence
  Synthetic
aacaaaauuguugcaugaaau

SEQ ID NO: 146851 - RNA, 23 nt, Artificial Sequence
  Synthetic
ugaacaaaauuguugcaugaaau

SEQ ID NO: 146852 - RNA, 24 nt, Artificial Sequence
  Synthetic
uugaacaaaauuguugcaugaaau

SEQ ID NO: 146853 - RNA, 18 nt, Artificial Sequence
  Synthetic
ugugaauagugcugaaau

SEQ ID NO: 146854 - RNA, 19 nt, Artificial Sequence
  Synthetic
uugugaauagugcugaaau

SEQ ID NO: 146855 - RNA, 20 nt, Artificial Sequence
  Synthetic
auugugaauagugcugaaau

SEQ ID NO: 146856 - RNA, 21 nt, Artificial Sequence
  Synthetic
uauugugaauagugcugaaau

SEQ ID NO: 146857 - RNA, 22 nt, Artificial Sequence
  Synthetic
cuauugugaauagugcugaaau

SEQ ID NO: 146858 - RNA, 24 nt, Artificial Sequence
  Synthetic
ugcuauugugaauagugcugaaau

SEQ ID NO: 146859 - RNA, 18 nt, Artificial Sequence
  Synthetic
uggaaaaacuggugaaau

SEQ ID NO: 146860 - RNA, 20 nt, Artificial Sequence
  Synthetic
aguggaaaaacuggugaaau

SEQ ID NO: 146861 - RNA, 22 nt, Artificial Sequence
  Synthetic
ugaguggaaaaacuggugaaau

SEQ ID NO: 146862 - RNA, 23 nt, Artificial Sequence
  Synthetic
augaguggaaaaacuggugaaau

SEQ ID NO: 146863 - RNA, 24 nt, Artificial Sequence
  Synthetic
caugaguggaaaaacuggugaaau

SEQ ID NO: 146864 - RNA, 18 nt, Artificial Sequence
  Synthetic
aaaaauaaaaguugaaau

SEQ ID NO: 146865 - RNA, 19 nt, Artificial Sequence
  Synthetic
caaaaauaaaaguugaaau

SEQ ID NO: 146866 - RNA, 20 nt, Artificial Sequence
  Synthetic
ucaaaaauaaaaguugaaau

SEQ ID NO: 146867 - RNA, 21 nt, Artificial Sequence
  Synthetic
aucaaaaauaaaaguugaaau

SEQ ID NO: 146868 - RNA, 24 nt, Artificial Sequence
  Synthetic
uggaucaaaaauaaaaguugaaau

SEQ ID NO: 146869 - RNA, 18 nt, Artificial Sequence
  Synthetic
aaaggaucaagaauaaau

SEQ ID NO: 146870 - RNA, 19 nt, Artificial Sequence
  Synthetic
uaaaggaucaagaauaaau

SEQ ID NO: 146871 - RNA, 21 nt, Artificial Sequence
  Synthetic
aguaaaggaucaagaauaaau

SEQ ID NO: 146872 - RNA, 23 nt, Artificial Sequence
  Synthetic
agaguaaaggaucaagaauaaau

SEQ ID NO: 146873 - RNA, 24 nt, Artificial Sequence
  Synthetic
aagaguaaaggaucaagaauaaau

SEQ ID NO: 146874 - RNA, 18 nt, Artificial Sequence
  Synthetic
aauuguaagauaauaaau

SEQ ID NO: 146875 - RNA, 19 nt, Artificial Sequence
  Synthetic
aaauuguaagauaauaaau

SEQ ID NO: 146876 - RNA, 20 nt, Artificial Sequence
  Synthetic
aaaauuguaagauaauaaau

SEQ ID NO: 146877 - RNA, 21 nt, Artificial Sequence
  Synthetic
caaaauuguaagauaauaaau

SEQ ID NO: 146878 - RNA, 22 nt, Artificial Sequence
  Synthetic
ccaaaauuguaagauaauaaau

SEQ ID NO: 146879 - RNA, 23 nt, Artificial Sequence
  Synthetic
uccaaaauuguaagauaauaaau

SEQ ID NO: 146880 - RNA, 24 nt, Artificial Sequence
  Synthetic
cuccaaaauuguaagauaauaaau

SEQ ID NO: 146881 - RNA, 18 nt, Artificial Sequence
  Synthetic
cacauagaaaagauaaau

SEQ ID NO: 146882 - RNA, 19 nt, Artificial Sequence
  Synthetic
acacauagaaaagauaaau

SEQ ID NO: 146883 - RNA, 20 nt, Artificial Sequence
  Synthetic
uacacauagaaaagauaaau

SEQ ID NO: 146884 - RNA, 18 nt, Artificial Sequence
  Synthetic
uuuccuuaugugauaaau

SEQ ID NO: 146885 - RNA, 19 nt, Artificial Sequence
  Synthetic
uuuuccuuaugugauaaau

SEQ ID NO: 146886 - RNA, 20 nt, Artificial Sequence
  Synthetic
auuuuccuuaugugauaaau

SEQ ID NO: 146887 - RNA, 18 nt, Artificial Sequence
  Synthetic
uuuuccuguuauauaaau

SEQ ID NO: 146888 - RNA, 19 nt, Artificial Sequence
  Synthetic
uuuuuccuguuauauaaau

SEQ ID NO: 146889 - RNA, 20 nt, Artificial Sequence
  Synthetic
uuuuuuccuguuauauaaau

SEQ ID NO: 146890 - RNA, 18 nt, Artificial Sequence
  Synthetic
cuuucauuuucuauaaau

SEQ ID NO: 146891 - RNA, 19 nt, Artificial Sequence
  Synthetic
acuuucauuuucuauaaau

SEQ ID NO: 146892 - RNA, 20 nt, Artificial Sequence
  Synthetic
cacuuucauuuucuauaaau

SEQ ID NO: 146893 - RNA, 18 nt, Artificial Sequence
  Synthetic
ucugauaguuuuauaaau

SEQ ID NO: 146894 - RNA, 19 nt, Artificial Sequence
  Synthetic
aucugauaguuuuauaaau

SEQ ID NO: 146895 - RNA, 21 nt, Artificial Sequence
  Synthetic
agaucugauaguuuuauaaau

SEQ ID NO: 146896 - RNA, 22 nt, Artificial Sequence
  Synthetic
aagaucugauaguuuuauaaau

SEQ ID NO: 146897 - RNA, 23 nt, Artificial Sequence
  Synthetic
caagaucugauaguuuuauaaau

SEQ ID NO: 146898 - RNA, 24 nt, Artificial Sequence
  Synthetic
acaagaucugauaguuuuauaaau

SEQ ID NO: 146899 - RNA, 18 nt, Artificial Sequence
  Synthetic
accccaagccuacuaaau

SEQ ID NO: 146900 - RNA, 19 nt, Artificial Sequence
  Synthetic
caccccaagccuacuaaau

SEQ ID NO: 146901 - RNA, 20 nt, Artificial Sequence
  Synthetic
ccaccccaagccuacuaaau

SEQ ID NO: 146902 - RNA, 21 nt, Artificial Sequence
  Synthetic
cccaccccaagccuacuaaau

SEQ ID NO: 146903 - RNA, 22 nt, Artificial Sequence
  Synthetic
ccccaccccaagccuacuaaau

SEQ ID NO: 146904 - RNA, 18 nt, Artificial Sequence
  Synthetic
uaaaaucuaaaucuaaau

SEQ ID NO: 146905 - RNA, 19 nt, Artificial Sequence
  Synthetic
auaaaaucuaaaucuaaau

SEQ ID NO: 146906 - RNA, 20 nt, Artificial Sequence
  Synthetic
cauaaaaucuaaaucuaaau

SEQ ID NO: 146907 - RNA, 19 nt, Artificial Sequence
  Synthetic
ugagcauacagaaguaaau

SEQ ID NO: 146908 - RNA, 20 nt, Artificial Sequence
  Synthetic
uugagcauacagaaguaaau

SEQ ID NO: 146909 - RNA, 18 nt, Artificial Sequence
  Synthetic
ucaauaguuauaguaaau

SEQ ID NO: 146910 - RNA, 19 nt, Artificial Sequence
  Synthetic
aucaauaguuauaguaaau

SEQ ID NO: 146911 - RNA, 20 nt, Artificial Sequence
  Synthetic
uaucaauaguuauaguaaau

SEQ ID NO: 146912 - RNA, 21 nt, Artificial Sequence
  Synthetic
auaucaauaguuauaguaaau

SEQ ID NO: 146913 - RNA, 22 nt, Artificial Sequence
  Synthetic
cauaucaauaguuauaguaaau

SEQ ID NO: 146914 - RNA, 23 nt, Artificial Sequence
  Synthetic
acauaucaauaguuauaguaaau

SEQ ID NO: 146915 - RNA, 24 nt, Artificial Sequence
  Synthetic
uacauaucaauaguuauaguaaau

SEQ ID NO: 146916 - RNA, 18 nt, Artificial Sequence
  Synthetic
cauuucagggugguaaau

SEQ ID NO: 146917 - RNA, 19 nt, Artificial Sequence
  Synthetic
ucauuucagggugguaaau

SEQ ID NO: 146918 - RNA, 20 nt, Artificial Sequence
  Synthetic
uucauuucagggugguaaau

SEQ ID NO: 146919 - RNA, 21 nt, Artificial Sequence
  Synthetic
uuucauuucagggugguaaau

SEQ ID NO: 146920 - RNA, 22 nt, Artificial Sequence
  Synthetic
auuucauuucagggugguaaau

SEQ ID NO: 146921 - RNA, 23 nt, Artificial Sequence
  Synthetic
cauuucauuucagggugguaaau

SEQ ID NO: 146922 - RNA, 24 nt, Artificial Sequence
  Synthetic
ucauuucauuucagggugguaaau

SEQ ID NO: 146923 - RNA, 18 nt, Artificial Sequence
  Synthetic
aaugacacuaauguaaau

SEQ ID NO: 146924 - RNA, 19 nt, Artificial Sequence
  Synthetic
uaaugacacuaauguaaau

SEQ ID NO: 146925 - RNA, 18 nt, Artificial Sequence
  Synthetic
uuuccucauuuguuaaau

SEQ ID NO: 146926 - RNA, 19 nt, Artificial Sequence
  Synthetic
auuuccucauuuguuaaau

SEQ ID NO: 146927 - RNA, 20 nt, Artificial Sequence
  Synthetic
uauuuccucauuuguuaaau

SEQ ID NO: 146928 - RNA, 21 nt, Artificial Sequence
  Synthetic
uuauuuccucauuuguuaaau

SEQ ID NO: 146929 - RNA, 22 nt, Artificial Sequence
  Synthetic
uuuauuuccucauuuguuaaau

SEQ ID NO: 146930 - RNA, 23 nt, Artificial Sequence
  Synthetic
cuuuauuuccucauuuguuaaau

SEQ ID NO: 146931 - RNA, 24 nt, Artificial Sequence
  Synthetic
ucuuuauuuccucauuuguuaaau

SEQ ID NO: 146932 - RNA, 19 nt, Artificial Sequence
  Synthetic
uguaaaaauauguuuaaau

SEQ ID NO: 146933 - RNA, 20 nt, Artificial Sequence
  Synthetic
auguaaaaauauguuuaaau

SEQ ID NO: 146934 - RNA, 18 nt, Artificial Sequence
  Synthetic
ucaguggcuuaacacaau

SEQ ID NO: 146935 - RNA, 19 nt, Artificial Sequence
  Synthetic
uucaguggcuuaacacaau

SEQ ID NO: 146936 - RNA, 20 nt, Artificial Sequence
  Synthetic
uuucaguggcuuaacacaau

SEQ ID NO: 146937 - RNA, 21 nt, Artificial Sequence
  Synthetic
auuucaguggcuuaacacaau

SEQ ID NO: 146938 - RNA, 22 nt, Artificial Sequence
  Synthetic
uauuucaguggcuuaacacaau

SEQ ID NO: 146939 - RNA, 23 nt, Artificial Sequence
  Synthetic
auauuucaguggcuuaacacaau

SEQ ID NO: 146940 - RNA, 24 nt, Artificial Sequence
  Synthetic
aauauuucaguggcuuaacacaau

SEQ ID NO: 146941 - RNA, 18 nt, Artificial Sequence
  Synthetic
uaaaaauauuuagacaau

SEQ ID NO: 146942 - RNA, 19 nt, Artificial Sequence
  Synthetic
auaaaaauauuuagacaau

SEQ ID NO: 146943 - RNA, 20 nt, Artificial Sequence
  Synthetic
uauaaaaauauuuagacaau

SEQ ID NO: 146944 - RNA, 18 nt, Artificial Sequence
  Synthetic
aaguucuuucaaaccaau

SEQ ID NO: 146945 - RNA, 19 nt, Artificial Sequence
  Synthetic
uaaguucuuucaaaccaau

SEQ ID NO: 146946 - RNA, 20 nt, Artificial Sequence
  Synthetic
auaaguucuuucaaaccaau

SEQ ID NO: 146947 - RNA, 21 nt, Artificial Sequence
  Synthetic
aauaaguucuuucaaaccaau

SEQ ID NO: 146948 - RNA, 23 nt, Artificial Sequence
  Synthetic
ugaauaaguucuuucaaaccaau

SEQ ID NO: 146949 - RNA, 24 nt, Artificial Sequence
  Synthetic
augaauaaguucuuucaaaccaau

SEQ ID NO: 146950 - RNA, 18 nt, Artificial Sequence
  Synthetic
aaauaaaaauuauccaau

SEQ ID NO: 146951 - RNA, 19 nt, Artificial Sequence
  Synthetic
uaaauaaaaauuauccaau

SEQ ID NO: 146952 - RNA, 20 nt, Artificial Sequence
  Synthetic
auaaauaaaaauuauccaau

SEQ ID NO: 146953 - RNA, 22 nt, Artificial Sequence
  Synthetic
agauaaauaaaaauuauccaau

SEQ ID NO: 146954 - RNA, 23 nt, Artificial Sequence
  Synthetic
uagauaaauaaaaauuauccaau

SEQ ID NO: 146955 - RNA, 24 nt, Artificial Sequence
  Synthetic
auagauaaauaaaaauuauccaau

SEQ ID NO: 146956 - RNA, 18 nt, Artificial Sequence
  Synthetic
ccacauuaaaaaaucaau

SEQ ID NO: 146957 - RNA, 19 nt, Artificial Sequence
  Synthetic
uccacauuaaaaaaucaau

SEQ ID NO: 146958 - RNA, 20 nt, Artificial Sequence
  Synthetic
auccacauuaaaaaaucaau

SEQ ID NO: 146959 - RNA, 21 nt, Artificial Sequence
  Synthetic
aaauaaugugcacaggucaau

SEQ ID NO: 146960 - RNA, 22 nt, Artificial Sequence
  Synthetic
aaaauaaugugcacaggucaau

SEQ ID NO: 146961 - RNA, 24 nt, Artificial Sequence
  Synthetic
ugaaaauaaugugcacaggucaau

SEQ ID NO: 146962 - RNA, 18 nt, Artificial Sequence
  Synthetic
uuaaauuuacaauucaau

SEQ ID NO: 146963 - RNA, 19 nt, Artificial Sequence
  Synthetic
uuuaaauuuacaauucaau

SEQ ID NO: 146964 - RNA, 20 nt, Artificial Sequence
  Synthetic
uuuuaaauuuacaauucaau

SEQ ID NO: 146965 - RNA, 18 nt, Artificial Sequence
  Synthetic
ccaauacaugcccagaau

SEQ ID NO: 146966 - RNA, 19 nt, Artificial Sequence
  Synthetic
uccaauacaugcccagaau

SEQ ID NO: 146967 - RNA, 20 nt, Artificial Sequence
  Synthetic
uuccaauacaugcccagaau

SEQ ID NO: 146968 - RNA, 21 nt, Artificial Sequence
  Synthetic
auuccaauacaugcccagaau

SEQ ID NO: 146969 - RNA, 23 nt, Artificial Sequence
  Synthetic
ugauuccaauacaugcccagaau

SEQ ID NO: 146970 - RNA, 24 nt, Artificial Sequence
  Synthetic
cugauuccaauacaugcccagaau

SEQ ID NO: 146971 - RNA, 18 nt, Artificial Sequence
  Synthetic
uggaaaccaaaagagaau

SEQ ID NO: 146972 - RNA, 19 nt, Artificial Sequence
  Synthetic
auggaaaccaaaagagaau

SEQ ID NO: 146973 - RNA, 20 nt, Artificial Sequence
  Synthetic
aauggaaaccaaaagagaau

SEQ ID NO: 146974 - RNA, 21 nt, Artificial Sequence
  Synthetic
aaauggaaaccaaaagagaau

SEQ ID NO: 146975 - RNA, 22 nt, Artificial Sequence
  Synthetic
caaauggaaaccaaaagagaau

SEQ ID NO: 146976 - RNA, 24 nt, Artificial Sequence
  Synthetic
ugcaaauggaaaccaaaagagaau

SEQ ID NO: 146977 - RNA, 18 nt, Artificial Sequence
  Synthetic
acaaaaauauuagagaau

SEQ ID NO: 146978 - RNA, 19 nt, Artificial Sequence
  Synthetic
uacaaaaauauuagagaau

SEQ ID NO: 146979 - RNA, 20 nt, Artificial Sequence
  Synthetic
auacaaaaauauuagagaau

SEQ ID NO: 146980 - RNA, 21 nt, Artificial Sequence
  Synthetic
ucuggugcgagaccugagaau

SEQ ID NO: 146981 - RNA, 22 nt, Artificial Sequence
  Synthetic
uucuggugcgagaccugagaau

SEQ ID NO: 146982 - RNA, 23 nt, Artificial Sequence
  Synthetic
uuucuggugcgagaccugagaau

SEQ ID NO: 146983 - RNA, 24 nt, Artificial Sequence
  Synthetic
uuuucuggugcgagaccugagaau

SEQ ID NO: 146984 - RNA, 21 nt, Artificial Sequence
  Synthetic
auauauuaccaaguugagaau

SEQ ID NO: 146985 - RNA, 22 nt, Artificial Sequence
  Synthetic
aauauauuaccaaguugagaau

SEQ ID NO: 146986 - RNA, 23 nt, Artificial Sequence
  Synthetic
aaauauauuaccaaguugagaau

SEQ ID NO: 146987 - RNA, 24 nt, Artificial Sequence
  Synthetic
uaaauauauuaccaaguugagaau

SEQ ID NO: 146988 - RNA, 18 nt, Artificial Sequence
  Synthetic
aaucuugaaagcaggaau

SEQ ID NO: 146989 - RNA, 19 nt, Artificial Sequence
  Synthetic
caaucuugaaagcaggaau

SEQ ID NO: 146990 - RNA, 20 nt, Artificial Sequence
  Synthetic
ccaaucuugaaagcaggaau

SEQ ID NO: 146991 - RNA, 18 nt, Artificial Sequence
  Synthetic
aggacuugcuuuaugaau

SEQ ID NO: 146992 - RNA, 19 nt, Artificial Sequence
  Synthetic
caggacuugcuuuaugaau

SEQ ID NO: 146993 - RNA, 20 nt, Artificial Sequence
  Synthetic
ucaggacuugcuuuaugaau

SEQ ID NO: 146994 - RNA, 21 nt, Artificial Sequence
  Synthetic
cucaggacuugcuuuaugaau

SEQ ID NO: 146995 - RNA, 22 nt, Artificial Sequence
  Synthetic
acucaggacuugcuuuaugaau

SEQ ID NO: 146996 - RNA, 23 nt, Artificial Sequence
  Synthetic
cacucaggacuugcuuuaugaau

SEQ ID NO: 146997 - RNA, 24 nt, Artificial Sequence
  Synthetic
ucacucaggacuugcuuuaugaau

SEQ ID NO: 146998 - RNA, 18 nt, Artificial Sequence
  Synthetic
aacuucuucaggcugaau

SEQ ID NO: 146999 - RNA, 19 nt, Artificial Sequence
  Synthetic
uaacuucuucaggcugaau

SEQ ID NO: 147000 - RNA, 21 nt, Artificial Sequence
  Synthetic
uguaacuucuucaggcugaau

SEQ ID NO: 147001 - RNA, 22 nt, Artificial Sequence
  Synthetic
cuguaacuucuucaggcugaau

SEQ ID NO: 147002 - RNA, 23 nt, Artificial Sequence
  Synthetic
ucuguaacuucuucaggcugaau

SEQ ID NO: 147003 - RNA, 24 nt, Artificial Sequence
  Synthetic
uucuguaacuucuucaggcugaau

SEQ ID NO: 147004 - RNA, 18 nt, Artificial Sequence
  Synthetic
uuuguagcaauugugaau

SEQ ID NO: 147005 - RNA, 19 nt, Artificial Sequence
  Synthetic
cuuuguagcaauugugaau

SEQ ID NO: 147006 - RNA, 20 nt, Artificial Sequence
  Synthetic
ucuuuguagcaauugugaau

SEQ ID NO: 147007 - RNA, 21 nt, Artificial Sequence
  Synthetic
cucuuuguagcaauugugaau

SEQ ID NO: 147008 - RNA, 22 nt, Artificial Sequence
  Synthetic
ucucuuuguagcaauugugaau

SEQ ID NO: 147009 - RNA, 23 nt, Artificial Sequence
  Synthetic
uucucuuuguagcaauugugaau

SEQ ID NO: 147010 - RNA, 24 nt, Artificial Sequence
  Synthetic
auucucuuuguagcaauugugaau

SEQ ID NO: 147011 - RNA, 18 nt, Artificial Sequence
  Synthetic
caucuagaccaauugaau

SEQ ID NO: 147012 - RNA, 19 nt, Artificial Sequence
  Synthetic
acaucuagaccaauugaau

SEQ ID NO: 147013 - RNA, 20 nt, Artificial Sequence
  Synthetic
cacaucuagaccaauugaau

SEQ ID NO: 147014 - RNA, 18 nt, Artificial Sequence
  Synthetic
cauggauaucaauugaau

SEQ ID NO: 147015 - RNA, 19 nt, Artificial Sequence
  Synthetic
ucauggauaucaauugaau

SEQ ID NO: 147016 - RNA, 20 nt, Artificial Sequence
  Synthetic
aucauggauaucaauugaau

SEQ ID NO: 147017 - RNA, 18 nt, Artificial Sequence
  Synthetic
uccaacacuauguugaau

SEQ ID NO: 147018 - RNA, 19 nt, Artificial Sequence
  Synthetic
uuccaacacuauguugaau

SEQ ID NO: 147019 - RNA, 20 nt, Artificial Sequence
  Synthetic
cuuccaacacuauguugaau

SEQ ID NO: 147020 - RNA, 21 nt, Artificial Sequence
  Synthetic
acuuccaacacuauguugaau

SEQ ID NO: 147021 - RNA, 22 nt, Artificial Sequence
  Synthetic
aacuuccaacacuauguugaau

SEQ ID NO: 147022 - RNA, 24 nt, Artificial Sequence
  Synthetic
agaacuuccaacacuauguugaau

SEQ ID NO: 147023 - RNA, 18 nt, Artificial Sequence
  Synthetic
uccaauacuauguugaau

SEQ ID NO: 147024 - RNA, 19 nt, Artificial Sequence
  Synthetic
uuccaauacuauguugaau

SEQ ID NO: 147025 - RNA, 20 nt, Artificial Sequence
  Synthetic
cuuccaauacuauguugaau

SEQ ID NO: 147026 - RNA, 21 nt, Artificial Sequence
  Synthetic
acuuccaauacuauguugaau

SEQ ID NO: 147027 - RNA, 24 nt, Artificial Sequence
  Synthetic
aggacuuccaauacuauguugaau

SEQ ID NO: 147028 - RNA, 18 nt, Artificial Sequence
  Synthetic
acuucaaaacuguugaau

SEQ ID NO: 147029 - RNA, 19 nt, Artificial Sequence
  Synthetic
cacuucaaaacuguugaau

SEQ ID NO: 147030 - RNA, 20 nt, Artificial Sequence
  Synthetic
ccacuucaaaacuguugaau

SEQ ID NO: 147031 - RNA, 21 nt, Artificial Sequence
  Synthetic
cccacuucaaaacuguugaau

SEQ ID NO: 147032 - RNA, 22 nt, Artificial Sequence
  Synthetic
ccccacuucaaaacuguugaau

SEQ ID NO: 147033 - RNA, 18 nt, Artificial Sequence
  Synthetic
acuucagaacuguugaau

SEQ ID NO: 147034 - RNA, 19 nt, Artificial Sequence
  Synthetic
cacuucagaacuguugaau

SEQ ID NO: 147035 - RNA, 20 nt, Artificial Sequence
  Synthetic
ccacuucagaacuguugaau

SEQ ID NO: 147036 - RNA, 21 nt, Artificial Sequence
  Synthetic
cccacuucagaacuguugaau

SEQ ID NO: 147037 - RNA, 22 nt, Artificial Sequence
  Synthetic
ccccacuucagaacuguugaau

SEQ ID NO: 147038 - RNA, 18 nt, Artificial Sequence
  Synthetic
ugcaaaugcuuuuugaau

SEQ ID NO: 147039 - RNA, 19 nt, Artificial Sequence
  Synthetic
uugcaaaugcuuuuugaau

SEQ ID NO: 147040 - RNA, 20 nt, Artificial Sequence
  Synthetic
uuugcaaaugcuuuuugaau

SEQ ID NO: 147041 - RNA, 22 nt, Artificial Sequence
  Synthetic
uguuugcaaaugcuuuuugaau

SEQ ID NO: 147042 - RNA, 23 nt, Artificial Sequence
  Synthetic
uuguuugcaaaugcuuuuugaau

SEQ ID NO: 147043 - RNA, 24 nt, Artificial Sequence
  Synthetic
uuuguuugcaaaugcuuuuugaau

SEQ ID NO: 147044 - RNA, 18 nt, Artificial Sequence
  Synthetic
uaauucuuuauaaauaau

SEQ ID NO: 147045 - RNA, 20 nt, Artificial Sequence
  Synthetic
aguaauucuuuauaaauaau

SEQ ID NO: 147046 - RNA, 19 nt, Artificial Sequence
  Synthetic
uggcuacaauguacauaau

SEQ ID NO: 147047 - RNA, 20 nt, Artificial Sequence
  Synthetic
auggcuacaauguacauaau

SEQ ID NO: 147048 - RNA, 21 nt, Artificial Sequence
  Synthetic
aauggcuacaauguacauaau

SEQ ID NO: 147049 - RNA, 22 nt, Artificial Sequence
  Synthetic
uaauggcuacaauguacauaau

SEQ ID NO: 147050 - RNA, 23 nt, Artificial Sequence
  Synthetic
uuaauggcuacaauguacauaau

SEQ ID NO: 147051 - RNA, 24 nt, Artificial Sequence
  Synthetic
auuaauggcuacaauguacauaau

SEQ ID NO: 147052 - RNA, 19 nt, Artificial Sequence
  Synthetic
uguccaauggaaauauaau

SEQ ID NO: 147053 - RNA, 20 nt, Artificial Sequence
  Synthetic
uuguccaauggaaauauaau

SEQ ID NO: 147054 - RNA, 22 nt, Artificial Sequence
  Synthetic
uguuguccaauggaaauauaau

SEQ ID NO: 147055 - RNA, 18 nt, Artificial Sequence
  Synthetic
cuagaucuuuuauauaau

SEQ ID NO: 147056 - RNA, 19 nt, Artificial Sequence
  Synthetic
ucuagaucuuuuauauaau

SEQ ID NO: 147057 - RNA, 20 nt, Artificial Sequence
  Synthetic
uucuagaucuuuuauauaau

SEQ ID NO: 147058 - RNA, 18 nt, Artificial Sequence
  Synthetic
auauauuuuaauuauaau

SEQ ID NO: 147059 - RNA, 19 nt, Artificial Sequence
  Synthetic
cauauauuuuaauuauaau

SEQ ID NO: 147060 - RNA, 20 nt, Artificial Sequence
  Synthetic
acauauauuuuaauuauaau

SEQ ID NO: 147061 - RNA, 21 nt, Artificial Sequence
  Synthetic
ugaauuuaauacaguuauaau

SEQ ID NO: 147062 - RNA, 22 nt, Artificial Sequence
  Synthetic
uugaauuuaauacaguuauaau

SEQ ID NO: 147063 - RNA, 23 nt, Artificial Sequence
  Synthetic
uuugaauuuaauacaguuauaau

SEQ ID NO: 147064 - RNA, 24 nt, Artificial Sequence
  Synthetic
auuugaauuuaauacaguuauaau

SEQ ID NO: 147065 - RNA, 19 nt, Artificial Sequence
  Synthetic
ugugacaucacuagguaau

SEQ ID NO: 147066 - RNA, 20 nt, Artificial Sequence
  Synthetic
cugugacaucacuagguaau

SEQ ID NO: 147067 - RNA, 21 nt, Artificial Sequence
  Synthetic
acugugacaucacuagguaau

SEQ ID NO: 147068 - RNA, 22 nt, Artificial Sequence
  Synthetic
cacugugacaucacuagguaau

SEQ ID NO: 147069 - RNA, 24 nt, Artificial Sequence
  Synthetic
ugcacugugacaucacuagguaau

SEQ ID NO: 147070 - RNA, 18 nt, Artificial Sequence
  Synthetic
ugaucaaaucaggguaau

SEQ ID NO: 147071 - RNA, 19 nt, Artificial Sequence
  Synthetic
augaucaaaucaggguaau

SEQ ID NO: 147072 - RNA, 20 nt, Artificial Sequence
  Synthetic
aaugaucaaaucaggguaau

SEQ ID NO: 147073 - RNA, 21 nt, Artificial Sequence
  Synthetic
uaaugaucaaaucaggguaau

SEQ ID NO: 147074 - RNA, 23 nt, Artificial Sequence
  Synthetic
uguaaugaucaaaucaggguaau

SEQ ID NO: 147075 - RNA, 18 nt, Artificial Sequence
  Synthetic
auuauauuucuauguaau

SEQ ID NO: 147076 - RNA, 19 nt, Artificial Sequence
  Synthetic
aauuauauuucuauguaau

SEQ ID NO: 147077 - RNA, 20 nt, Artificial Sequence
  Synthetic
aaauuauauuucuauguaau

SEQ ID NO: 147078 - RNA, 18 nt, Artificial Sequence
  Synthetic
aaaaaaauguucauuaau

SEQ ID NO: 147079 - RNA, 19 nt, Artificial Sequence
  Synthetic
aaaaaaaauguucauuaau

SEQ ID NO: 147080 - RNA, 20 nt, Artificial Sequence
  Synthetic
caaaaaaaauguucauuaau

SEQ ID NO: 147081 - RNA, 18 nt, Artificial Sequence
  Synthetic
uuacuguuuuugauuaau

SEQ ID NO: 147082 - RNA, 19 nt, Artificial Sequence
  Synthetic
uuuacuguuuuugauuaau

SEQ ID NO: 147083 - RNA, 18 nt, Artificial Sequence
  Synthetic
uuucaauauuuacuuaau

SEQ ID NO: 147084 - RNA, 19 nt, Artificial Sequence
  Synthetic
auuucaauauuuacuuaau

SEQ ID NO: 147085 - RNA, 20 nt, Artificial Sequence
  Synthetic
aauuucaauauuuacuuaau

SEQ ID NO: 147086 - RNA, 18 nt, Artificial Sequence
  Synthetic
uuucuaauuuuucuuaau

SEQ ID NO: 147087 - RNA, 19 nt, Artificial Sequence
  Synthetic
auuucuaauuuuucuuaau

SEQ ID NO: 147088 - RNA, 20 nt, Artificial Sequence
  Synthetic
uauuucuaauuuuucuuaau

SEQ ID NO: 147089 - RNA, 21 nt, Artificial Sequence
  Synthetic
uuauuucuaauuuuucuuaau

SEQ ID NO: 147090 - RNA, 22 nt, Artificial Sequence
  Synthetic
uuuauuucuaauuuuucuuaau

SEQ ID NO: 147091 - RNA, 23 nt, Artificial Sequence
  Synthetic
uuuuauuucuaauuuuucuuaau

SEQ ID NO: 147092 - RNA, 24 nt, Artificial Sequence
  Synthetic
uuuuuauuucuaauuuuucuuaau

SEQ ID NO: 147093 - RNA, 22 nt, Artificial Sequence
  Synthetic
ugugaauuaugccgcaguuaau

SEQ ID NO: 147094 - RNA, 23 nt, Artificial Sequence
  Synthetic
uugugaauuaugccgcaguuaau

SEQ ID NO: 147095 - RNA, 24 nt, Artificial Sequence
  Synthetic
auugugaauuaugccgcaguuaau

SEQ ID NO: 147096 - RNA, 18 nt, Artificial Sequence
  Synthetic
uauccuuuuguauuuaau

SEQ ID NO: 147097 - RNA, 19 nt, Artificial Sequence
  Synthetic
uuauccuuuuguauuuaau

SEQ ID NO: 147098 - RNA, 20 nt, Artificial Sequence
  Synthetic
uuuauccuuuuguauuuaau

SEQ ID NO: 147099 - RNA, 18 nt, Artificial Sequence
  Synthetic
cuuaugagaaauuuuaau

SEQ ID NO: 147100 - RNA, 19 nt, Artificial Sequence
  Synthetic
ucuuaugagaaauuuuaau

SEQ ID NO: 147101 - RNA, 20 nt, Artificial Sequence
  Synthetic
aucuuaugagaaauuuuaau

SEQ ID NO: 147102 - RNA, 21 nt, Artificial Sequence
  Synthetic
uuuuggauaugucguuuuaau

SEQ ID NO: 147103 - RNA, 22 nt, Artificial Sequence
  Synthetic
cuuuuggauaugucguuuuaau

SEQ ID NO: 147104 - RNA, 23 nt, Artificial Sequence
  Synthetic
ucuuuuggauaugucguuuuaau

SEQ ID NO: 147105 - RNA, 18 nt, Artificial Sequence
  Synthetic
uuuguagcaauuuuuaau

SEQ ID NO: 147106 - RNA, 19 nt, Artificial Sequence
  Synthetic
cuuuguagcaauuuuuaau

SEQ ID NO: 147107 - RNA, 20 nt, Artificial Sequence
  Synthetic
ucuuuguagcaauuuuuaau

SEQ ID NO: 147108 - RNA, 21 nt, Artificial Sequence
  Synthetic
cucuuuguagcaauuuuuaau

SEQ ID NO: 147109 - RNA, 22 nt, Artificial Sequence
  Synthetic
ucucuuuguagcaauuuuuaau

SEQ ID NO: 147110 - RNA, 23 nt, Artificial Sequence
  Synthetic
uucucuuuguagcaauuuuuaau

SEQ ID NO: 147111 - RNA, 24 nt, Artificial Sequence
  Synthetic
auucucuuuguagcaauuuuuaau

SEQ ID NO: 147112 - RNA, 18 nt, Artificial Sequence
  Synthetic
aauuagcaagacaaacau

SEQ ID NO: 147113 - RNA, 19 nt, Artificial Sequence
  Synthetic
aaauuagcaagacaaacau

SEQ ID NO: 147114 - RNA, 20 nt, Artificial Sequence
  Synthetic
aaaauuagcaagacaaacau

SEQ ID NO: 147115 - RNA, 18 nt, Artificial Sequence
  Synthetic
aaaugcuacaauaaacau

SEQ ID NO: 147116 - RNA, 19 nt, Artificial Sequence
  Synthetic
aaaaugcuacaauaaacau

SEQ ID NO: 147117 - RNA, 20 nt, Artificial Sequence
  Synthetic
aaaaaugcuacaauaaacau

SEQ ID NO: 147118 - RNA, 21 nt, Artificial Sequence
  Synthetic
uaaaaaugcuacaauaaacau

SEQ ID NO: 147119 - RNA, 23 nt, Artificial Sequence
  Synthetic
uguaaaaaugcuacaauaaacau

SEQ ID NO: 147120 - RNA, 24 nt, Artificial Sequence
  Synthetic
cuguaaaaaugcuacaauaaacau

SEQ ID NO: 147121 - RNA, 18 nt, Artificial Sequence
  Synthetic
uagagcugcaauaaacau

SEQ ID NO: 147122 - RNA, 19 nt, Artificial Sequence
  Synthetic
auagagcugcaauaaacau

SEQ ID NO: 147123 - RNA, 20 nt, Artificial Sequence
  Synthetic
aauagagcugcaauaaacau

SEQ ID NO: 147124 - RNA, 22 nt, Artificial Sequence
  Synthetic
ugaauagagcugcaauaaacau

SEQ ID NO: 147125 - RNA, 24 nt, Artificial Sequence
  Synthetic
ugugaauagagcugcaauaaacau

SEQ ID NO: 147126 - RNA, 18 nt, Artificial Sequence
  Synthetic
uagcgcugcaauaaacau

SEQ ID NO: 147127 - RNA, 19 nt, Artificial Sequence
  Synthetic
auagcgcugcaauaaacau

SEQ ID NO: 147128 - RNA, 20 nt, Artificial Sequence
  Synthetic
aauagcgcugcaauaaacau

SEQ ID NO: 147129 - RNA, 22 nt, Artificial Sequence
  Synthetic
ugaauagcgcugcaauaaacau

SEQ ID NO: 147130 - RNA, 24 nt, Artificial Sequence
  Synthetic
ugugaauagcgcugcaauaaacau

SEQ ID NO: 147131 - RNA, 18 nt, Artificial Sequence
  Synthetic
uaaugcugcaauaaacau

SEQ ID NO: 147132 - RNA, 19 nt, Artificial Sequence
  Synthetic
auaaugcugcaauaaacau

SEQ ID NO: 147133 - RNA, 20 nt, Artificial Sequence
  Synthetic
aauaaugcugcaauaaacau

SEQ ID NO: 147134 - RNA, 22 nt, Artificial Sequence
  Synthetic
ugaauaaugcugcaauaaacau

SEQ ID NO: 147135 - RNA, 24 nt, Artificial Sequence
  Synthetic
ugugaauaaugcugcaauaaacau

SEQ ID NO: 147136 - RNA, 18 nt, Artificial Sequence
  Synthetic
uuuuugaaaauuaaacau

SEQ ID NO: 147137 - RNA, 20 nt, Artificial Sequence
  Synthetic
uguuuuugaaaauuaaacau

SEQ ID NO: 147138 - RNA, 18 nt, Artificial Sequence
  Synthetic
uaaaauuuuauuaaacau

SEQ ID NO: 147139 - RNA, 19 nt, Artificial Sequence
  Synthetic
uuaaaauuuuauuaaacau

SEQ ID NO: 147140 - RNA, 20 nt, Artificial Sequence
  Synthetic
uuuaaaauuuuauuaaacau

SEQ ID NO: 147141 - RNA, 18 nt, Artificial Sequence
  Synthetic
uauauaugcacccaacau

SEQ ID NO: 147142 - RNA, 19 nt, Artificial Sequence
  Synthetic
auauauaugcacccaacau

SEQ ID NO: 147143 - RNA, 20 nt, Artificial Sequence
  Synthetic
aauauauaugcacccaacau

SEQ ID NO: 147144 - RNA, 21 nt, Artificial Sequence
  Synthetic
aaauauauaugcacccaacau

SEQ ID NO: 147145 - RNA, 22 nt, Artificial Sequence
  Synthetic
uaaauauauaugcacccaacau

SEQ ID NO: 147146 - RNA, 24 nt, Artificial Sequence
  Synthetic
uguaaauauauaugcacccaacau

SEQ ID NO: 147147 - RNA, 20 nt, Artificial Sequence
  Synthetic
agggguuaaaacuucaacau

SEQ ID NO: 147148 - RNA, 18 nt, Artificial Sequence
  Synthetic
uuuuuaggauuucaacau

SEQ ID NO: 147149 - RNA, 19 nt, Artificial Sequence
  Synthetic
uuuuuuaggauuucaacau

SEQ ID NO: 147150 - RNA, 20 nt, Artificial Sequence
  Synthetic
auuuuuuaggauuucaacau

SEQ ID NO: 147151 - RNA, 21 nt, Artificial Sequence
  Synthetic
uauuuuuuaggauuucaacau

SEQ ID NO: 147152 - RNA, 22 nt, Artificial Sequence
  Synthetic
uuauuuuuuaggauuucaacau

SEQ ID NO: 147153 - RNA, 23 nt, Artificial Sequence
  Synthetic
uuuauuuuuuaggauuucaacau

SEQ ID NO: 147154 - RNA, 24 nt, Artificial Sequence
  Synthetic
uuuuauuuuuuaggauuucaacau

SEQ ID NO: 147155 - RNA, 18 nt, Artificial Sequence
  Synthetic
auaugaagugcagaacau

SEQ ID NO: 147156 - RNA, 19 nt, Artificial Sequence
  Synthetic
aauaugaagugcagaacau

SEQ ID NO: 147157 - RNA, 20 nt, Artificial Sequence
  Synthetic
uaauaugaagugcagaacau

SEQ ID NO: 147158 - RNA, 21 nt, Artificial Sequence
  Synthetic
cuaauaugaagugcagaacau

SEQ ID NO: 147159 - RNA, 22 nt, Artificial Sequence
  Synthetic
acuaauaugaagugcagaacau

SEQ ID NO: 147160 - RNA, 23 nt, Artificial Sequence
  Synthetic
cacuaauaugaagugcagaacau

SEQ ID NO: 147161 - RNA, 24 nt, Artificial Sequence
  Synthetic
ccacuaauaugaagugcagaacau

SEQ ID NO: 147162 - RNA, 21 nt, Artificial Sequence
  Synthetic
ugggucccucccauaacacau

SEQ ID NO: 147163 - RNA, 22 nt, Artificial Sequence
  Synthetic
cugggucccucccauaacacau

SEQ ID NO: 147164 - RNA, 23 nt, Artificial Sequence
  Synthetic
acugggucccucccauaacacau

SEQ ID NO: 147165 - RNA, 24 nt, Artificial Sequence
  Synthetic
cacugggucccucccauaacacau

SEQ ID NO: 147166 - RNA, 21 nt, Artificial Sequence
  Synthetic
ugggucccucacaugacacau

SEQ ID NO: 147167 - RNA, 22 nt, Artificial Sequence
  Synthetic
cugggucccucacaugacacau

SEQ ID NO: 147168 - RNA, 23 nt, Artificial Sequence
  Synthetic
acugggucccucacaugacacau

SEQ ID NO: 147169 - RNA, 24 nt, Artificial Sequence
  Synthetic
aacugggucccucacaugacacau

SEQ ID NO: 147170 - RNA, 20 nt, Artificial Sequence
  Synthetic
aggucacucccaugacacau

SEQ ID NO: 147171 - RNA, 21 nt, Artificial Sequence
  Synthetic
caggucacucccaugacacau

SEQ ID NO: 147172 - RNA, 22 nt, Artificial Sequence
  Synthetic
ccaggucacucccaugacacau

SEQ ID NO: 147173 - RNA, 23 nt, Artificial Sequence
  Synthetic
accaggucacucccaugacacau

SEQ ID NO: 147174 - RNA, 24 nt, Artificial Sequence
  Synthetic
caccaggucacucccaugacacau

SEQ ID NO: 147175 - RNA, 18 nt, Artificial Sequence
  Synthetic
uguuuuuagcucccacau

SEQ ID NO: 147176 - RNA, 19 nt, Artificial Sequence
  Synthetic
auguuuuuagcucccacau

SEQ ID NO: 147177 - RNA, 20 nt, Artificial Sequence
  Synthetic
cauguuuuuagcucccacau

SEQ ID NO: 147178 - RNA, 21 nt, Artificial Sequence
  Synthetic
ccauguuuuuagcucccacau

SEQ ID NO: 147179 - RNA, 22 nt, Artificial Sequence
  Synthetic
uccauguuuuuagcucccacau

SEQ ID NO: 147180 - RNA, 23 nt, Artificial Sequence
  Synthetic
auccauguuuuuagcucccacau

SEQ ID NO: 147181 - RNA, 21 nt, Artificial Sequence
  Synthetic
cuaggccaguaauacucacau

SEQ ID NO: 147182 - RNA, 22 nt, Artificial Sequence
  Synthetic
ucuaggccaguaauacucacau

SEQ ID NO: 147183 - RNA, 23 nt, Artificial Sequence
  Synthetic
cucuaggccaguaauacucacau

SEQ ID NO: 147184 - RNA, 24 nt, Artificial Sequence
  Synthetic
acucuaggccaguaauacucacau

SEQ ID NO: 147185 - RNA, 18 nt, Artificial Sequence
  Synthetic
aauguguaacagucacau

SEQ ID NO: 147186 - RNA, 19 nt, Artificial Sequence
  Synthetic
caauguguaacagucacau

SEQ ID NO: 147187 - RNA, 20 nt, Artificial Sequence
  Synthetic
acaauguguaacagucacau

SEQ ID NO: 147188 - RNA, 21 nt, Artificial Sequence
  Synthetic
uacaauguguaacagucacau

SEQ ID NO: 147189 - RNA, 22 nt, Artificial Sequence
  Synthetic
auacaauguguaacagucacau

SEQ ID NO: 147190 - RNA, 23 nt, Artificial Sequence
  Synthetic
cauacaauguguaacagucacau

SEQ ID NO: 147191 - RNA, 18 nt, Artificial Sequence
  Synthetic
uucuggagagauucacau

SEQ ID NO: 147192 - RNA, 19 nt, Artificial Sequence
  Synthetic
uuucuggagagauucacau

SEQ ID NO: 147193 - RNA, 21 nt, Artificial Sequence
  Synthetic
uguuucuggagagauucacau

SEQ ID NO: 147194 - RNA, 22 nt, Artificial Sequence
  Synthetic
cuguuucuggagagauucacau

SEQ ID NO: 147195 - RNA, 18 nt, Artificial Sequence
  Synthetic
uucuucucugaaagacau

SEQ ID NO: 147196 - RNA, 19 nt, Artificial Sequence
  Synthetic
auucuucucugaaagacau

SEQ ID NO: 147197 - RNA, 20 nt, Artificial Sequence
  Synthetic
aauucuucucugaaagacau

SEQ ID NO: 147198 - RNA, 18 nt, Artificial Sequence
  Synthetic
caagaaaaaaauagacau

SEQ ID NO: 147199 - RNA, 19 nt, Artificial Sequence
  Synthetic
ucaagaaaaaaauagacau

SEQ ID NO: 147200 - RNA, 20 nt, Artificial Sequence
  Synthetic
uucaagaaaaaaauagacau

SEQ ID NO: 147201 - RNA, 18 nt, Artificial Sequence
  Synthetic
uuugcauuucauagacau

SEQ ID NO: 147202 - RNA, 19 nt, Artificial Sequence
  Synthetic
uuuugcauuucauagacau

SEQ ID NO: 147203 - RNA, 20 nt, Artificial Sequence
  Synthetic
uuuuugcauuucauagacau

SEQ ID NO: 147204 - RNA, 18 nt, Artificial Sequence
  Synthetic
ucuaucacugauggacau

SEQ ID NO: 147205 - RNA, 20 nt, Artificial Sequence
  Synthetic
agucuaucacugauggacau

SEQ ID NO: 147206 - RNA, 21 nt, Artificial Sequence
  Synthetic
cagucuaucacugauggacau

SEQ ID NO: 147207 - RNA, 22 nt, Artificial Sequence
  Synthetic
ccagucuaucacugauggacau

SEQ ID NO: 147208 - RNA, 23 nt, Artificial Sequence
  Synthetic
uccagucuaucacugauggacau

SEQ ID NO: 147209 - RNA, 24 nt, Artificial Sequence
  Synthetic
auccagucuaucacugauggacau

SEQ ID NO: 147210 - RNA, 20 nt, Artificial Sequence
  Synthetic
agucuaucauugauggacau

SEQ ID NO: 147211 - RNA, 21 nt, Artificial Sequence
  Synthetic
cagucuaucauugauggacau

SEQ ID NO: 147212 - RNA, 22 nt, Artificial Sequence
  Synthetic
ccagucuaucauugauggacau

SEQ ID NO: 147213 - RNA, 23 nt, Artificial Sequence
  Synthetic
uccagucuaucauugauggacau

SEQ ID NO: 147214 - RNA, 24 nt, Artificial Sequence
  Synthetic
auccagucuaucauugauggacau

SEQ ID NO: 147215 - RNA, 18 nt, Artificial Sequence
  Synthetic
ucuaucauuguuggacau

SEQ ID NO: 147216 - RNA, 20 nt, Artificial Sequence
  Synthetic
agucuaucauuguuggacau

SEQ ID NO: 147217 - RNA, 18 nt, Artificial Sequence
  Synthetic
cugaaaaaaauccuacau

SEQ ID NO: 147218 - RNA, 19 nt, Artificial Sequence
  Synthetic
acugaaaaaaauccuacau

SEQ ID NO: 147219 - RNA, 20 nt, Artificial Sequence
  Synthetic
aacugaaaaaaauccuacau

SEQ ID NO: 147220 - RNA, 18 nt, Artificial Sequence
  Synthetic
cuguagucccagcuacau

SEQ ID NO: 147221 - RNA, 19 nt, Artificial Sequence
  Synthetic
ccuguagucccagcuacau

SEQ ID NO: 147222 - RNA, 23 nt, Artificial Sequence
  Synthetic
ugggccuguagucccagcuacau

SEQ ID NO: 147223 - RNA, 18 nt, Artificial Sequence
  Synthetic
uuaaaaaauaaacaccau

SEQ ID NO: 147224 - RNA, 19 nt, Artificial Sequence
  Synthetic
uuuaaaaaauaaacaccau

SEQ ID NO: 147225 - RNA, 20 nt, Artificial Sequence
  Synthetic
uuuuaaaaaauaaacaccau

SEQ ID NO: 147226 - RNA, 18 nt, Artificial Sequence
  Synthetic
ucacaagaacagcaccau

SEQ ID NO: 147227 - RNA, 19 nt, Artificial Sequence
  Synthetic
aucacaagaacagcaccau

SEQ ID NO: 147228 - RNA, 20 nt, Artificial Sequence
  Synthetic
uaucacaagaacagcaccau

SEQ ID NO: 147229 - RNA, 21 nt, Artificial Sequence
  Synthetic
cuaucacaagaacagcaccau

SEQ ID NO: 147230 - RNA, 22 nt, Artificial Sequence
  Synthetic
acuaucacaagaacagcaccau

SEQ ID NO: 147231 - RNA, 23 nt, Artificial Sequence
  Synthetic
cacuaucacaagaacagcaccau

SEQ ID NO: 147232 - RNA, 24 nt, Artificial Sequence
  Synthetic
ucacuaucacaagaacagcaccau

SEQ ID NO: 147233 - RNA, 18 nt, Artificial Sequence
  Synthetic
agcaaaagaaacuaccau

SEQ ID NO: 147234 - RNA, 19 nt, Artificial Sequence
  Synthetic
cagcaaaagaaacuaccau

SEQ ID NO: 147235 - RNA, 20 nt, Artificial Sequence
  Synthetic
acagcaaaagaaacuaccau

SEQ ID NO: 147236 - RNA, 18 nt, Artificial Sequence
  Synthetic
agcaauuuucacacccau

SEQ ID NO: 147237 - RNA, 19 nt, Artificial Sequence
  Synthetic
aagcaauuuucacacccau

SEQ ID NO: 147238 - RNA, 20 nt, Artificial Sequence
  Synthetic
aaagcaauuuucacacccau

SEQ ID NO: 147239 - RNA, 21 nt, Artificial Sequence
  Synthetic
caaagcaauuuucacacccau

SEQ ID NO: 147240 - RNA, 22 nt, Artificial Sequence
  Synthetic
ucaaagcaauuuucacacccau

SEQ ID NO: 147241 - RNA, 23 nt, Artificial Sequence
  Synthetic
cucaaagcaauuuucacacccau

SEQ ID NO: 147242 - RNA, 24 nt, Artificial Sequence
  Synthetic
ccucaaagcaauuuucacacccau

SEQ ID NO: 147243 - RNA, 23 nt, Artificial Sequence
  Synthetic
uggugugucuacauuguccccau

SEQ ID NO: 147244 - RNA, 24 nt, Artificial Sequence
  Synthetic
uuggugugucuacauuguccccau

SEQ ID NO: 147245 - RNA, 18 nt, Artificial Sequence
  Synthetic
uucuccugccucagccau

SEQ ID NO: 147246 - RNA, 19 nt, Artificial Sequence
  Synthetic
auucuccugccucagccau

SEQ ID NO: 147247 - RNA, 21 nt, Artificial Sequence
  Synthetic
cgauucuccugccucagccau

SEQ ID NO: 147248 - RNA, 23 nt, Artificial Sequence
  Synthetic
agcgauucuccugccucagccau

SEQ ID NO: 147249 - RNA, 24 nt, Artificial Sequence
  Synthetic
aagcgauucuccugccucagccau

SEQ ID NO: 147250 - RNA, 18 nt, Artificial Sequence
  Synthetic
cucaccaucacuggccau

SEQ ID NO: 147251 - RNA, 19 nt, Artificial Sequence
  Synthetic
ccucaccaucacuggccau

SEQ ID NO: 147252 - RNA, 20 nt, Artificial Sequence
  Synthetic
uccucaccaucacuggccau

SEQ ID NO: 147253 - RNA, 21 nt, Artificial Sequence
  Synthetic
auccucaccaucacuggccau

SEQ ID NO: 147254 - RNA, 22 nt, Artificial Sequence
  Synthetic
aauccucaccaucacuggccau

SEQ ID NO: 147255 - RNA, 23 nt, Artificial Sequence
  Synthetic
aaauccucaccaucacuggccau

SEQ ID NO: 147256 - RNA, 24 nt, Artificial Sequence
  Synthetic
aaaauccucaccaucacuggccau

SEQ ID NO: 147257 - RNA, 18 nt, Artificial Sequence
  Synthetic
uacuggcagugaauccau

SEQ ID NO: 147258 - RNA, 19 nt, Artificial Sequence
  Synthetic
uuacuggcagugaauccau

SEQ ID NO: 147259 - RNA, 21 nt, Artificial Sequence
  Synthetic
uguuacuggcagugaauccau

SEQ ID NO: 147260 - RNA, 22 nt, Artificial Sequence
  Synthetic
cuguuacuggcagugaauccau

SEQ ID NO: 147261 - RNA, 23 nt, Artificial Sequence
  Synthetic
ccuguuacuggcagugaauccau

SEQ ID NO: 147262 - RNA, 24 nt, Artificial Sequence
  Synthetic
uccuguuacuggcagugaauccau

SEQ ID NO: 147263 - RNA, 18 nt, Artificial Sequence
  Synthetic
ucuugucacuucuuccau

SEQ ID NO: 147264 - RNA, 19 nt, Artificial Sequence
  Synthetic
aucuugucacuucuuccau

SEQ ID NO: 147265 - RNA, 20 nt, Artificial Sequence
  Synthetic
aaucuugucacuucuuccau

SEQ ID NO: 147266 - RNA, 18 nt, Artificial Sequence
  Synthetic
ucaacaacauaaaagcau

SEQ ID NO: 147267 - RNA, 19 nt, Artificial Sequence
  Synthetic
aucaacaacauaaaagcau

SEQ ID NO: 147268 - RNA, 20 nt, Artificial Sequence
  Synthetic
aaucaacaacauaaaagcau

SEQ ID NO: 147269 - RNA, 18 nt, Artificial Sequence
  Synthetic
cugucacaagaacagcau

SEQ ID NO: 147270 - RNA, 19 nt, Artificial Sequence
  Synthetic
acugucacaagaacagcau

SEQ ID NO: 147271 - RNA, 20 nt, Artificial Sequence
  Synthetic
cacugucacaagaacagcau

SEQ ID NO: 147272 - RNA, 21 nt, Artificial Sequence
  Synthetic
ucacugucacaagaacagcau

SEQ ID NO: 147273 - RNA, 22 nt, Artificial Sequence
  Synthetic
cucacugucacaagaacagcau

SEQ ID NO: 147274 - RNA, 23 nt, Artificial Sequence
  Synthetic
acucacugucacaagaacagcau

SEQ ID NO: 147275 - RNA, 24 nt, Artificial Sequence
  Synthetic
aacucacugucacaagaacagcau

SEQ ID NO: 147276 - RNA, 18 nt, Artificial Sequence
  Synthetic
ccauaucacuaucagcau

SEQ ID NO: 147277 - RNA, 19 nt, Artificial Sequence
  Synthetic
uccauaucacuaucagcau

SEQ ID NO: 147278 - RNA, 21 nt, Artificial Sequence
  Synthetic
uguccauaucacuaucagcau

SEQ ID NO: 147279 - RNA, 22 nt, Artificial Sequence
  Synthetic
uuguccauaucacuaucagcau

SEQ ID NO: 147280 - RNA, 23 nt, Artificial Sequence
  Synthetic
auuguccauaucacuaucagcau

SEQ ID NO: 147281 - RNA, 24 nt, Artificial Sequence
  Synthetic
uauuguccauaucacuaucagcau

SEQ ID NO: 147282 - RNA, 18 nt, Artificial Sequence
  Synthetic
uaguugauaaauuagcau

SEQ ID NO: 147283 - RNA, 19 nt, Artificial Sequence
  Synthetic
uuaguugauaaauuagcau

SEQ ID NO: 147284 - RNA, 20 nt, Artificial Sequence
  Synthetic
cuuaguugauaaauuagcau

SEQ ID NO: 147285 - RNA, 21 nt, Artificial Sequence
  Synthetic
acuuaguugauaaauuagcau

SEQ ID NO: 147286 - RNA, 22 nt, Artificial Sequence
  Synthetic
aacuuaguugauaaauuagcau

SEQ ID NO: 147287 - RNA, 23 nt, Artificial Sequence
  Synthetic
aaacuuaguugauaaauuagcau

SEQ ID NO: 147288 - RNA, 24 nt, Artificial Sequence
  Synthetic
uaaacuuaguugauaaauuagcau

SEQ ID NO: 147289 - RNA, 18 nt, Artificial Sequence
  Synthetic
ucucagaggcugaggcau

SEQ ID NO: 147290 - RNA, 19 nt, Artificial Sequence
  Synthetic
uucucagaggcugaggcau

SEQ ID NO: 147291 - RNA, 20 nt, Artificial Sequence
  Synthetic
cuucucagaggcugaggcau

SEQ ID NO: 147292 - RNA, 22 nt, Artificial Sequence
  Synthetic
agcuucucagaggcugaggcau

SEQ ID NO: 147293 - RNA, 23 nt, Artificial Sequence
  Synthetic
aagcuucucagaggcugaggcau

SEQ ID NO: 147294 - RNA, 24 nt, Artificial Sequence
  Synthetic
caagcuucucagaggcugaggcau

SEQ ID NO: 147295 - RNA, 18 nt, Artificial Sequence
  Synthetic
ccugggaggcugaggcau

SEQ ID NO: 147296 - RNA, 19 nt, Artificial Sequence
  Synthetic
accugggaggcugaggcau

SEQ ID NO: 147297 - RNA, 20 nt, Artificial Sequence
  Synthetic
uaccugggaggcugaggcau

SEQ ID NO: 147298 - RNA, 21 nt, Artificial Sequence
  Synthetic
cuaccugggaggcugaggcau

SEQ ID NO: 147299 - RNA, 23 nt, Artificial Sequence
  Synthetic
agcuaccugggaggcugaggcau

SEQ ID NO: 147300 - RNA, 24 nt, Artificial Sequence
  Synthetic
cagcuaccugggaggcugaggcau

SEQ ID NO: 147301 - RNA, 18 nt, Artificial Sequence
  Synthetic
ucuaucacugaugggcau

SEQ ID NO: 147302 - RNA, 20 nt, Artificial Sequence
  Synthetic
agucuaucacugaugggcau

SEQ ID NO: 147303 - RNA, 21 nt, Artificial Sequence
  Synthetic
cagucuaucacugaugggcau

SEQ ID NO: 147304 - RNA, 22 nt, Artificial Sequence
  Synthetic
ccagucuaucacugaugggcau

SEQ ID NO: 147305 - RNA, 23 nt, Artificial Sequence
  Synthetic
uccagucuaucacugaugggcau

SEQ ID NO: 147306 - RNA, 24 nt, Artificial Sequence
  Synthetic
auccagucuaucacugaugggcau

SEQ ID NO: 147307 - RNA, 18 nt, Artificial Sequence
  Synthetic
uauaucauugaugggcau

SEQ ID NO: 147308 - RNA, 20 nt, Artificial Sequence
  Synthetic
aguauaucauugaugggcau

SEQ ID NO: 147309 - RNA, 21 nt, Artificial Sequence
  Synthetic
caguauaucauugaugggcau

SEQ ID NO: 147310 - RNA, 22 nt, Artificial Sequence
  Synthetic
ccaguauaucauugaugggcau

SEQ ID NO: 147311 - RNA, 23 nt, Artificial Sequence
  Synthetic
uccaguauaucauugaugggcau

SEQ ID NO: 147312 - RNA, 24 nt, Artificial Sequence
  Synthetic
auccaguauaucauugaugggcau

SEQ ID NO: 147313 - RNA, 18 nt, Artificial Sequence
  Synthetic
ucuaucauugaugggcau

SEQ ID NO: 147314 - RNA, 20 nt, Artificial Sequence
  Synthetic
agucuaucauugaugggcau

SEQ ID NO: 147315 - RNA, 21 nt, Artificial Sequence
  Synthetic
cagucuaucauugaugggcau

SEQ ID NO: 147316 - RNA, 22 nt, Artificial Sequence
  Synthetic
ccagucuaucauugaugggcau

SEQ ID NO: 147317 - RNA, 23 nt, Artificial Sequence
  Synthetic
uccagucuaucauugaugggcau

SEQ ID NO: 147318 - RNA, 24 nt, Artificial Sequence
  Synthetic
auccagucuaucauugaugggcau

SEQ ID NO: 147319 - RNA, 18 nt, Artificial Sequence
  Synthetic
uugucgauugaugggcau

SEQ ID NO: 147320 - RNA, 19 nt, Artificial Sequence
  Synthetic
cuugucgauugaugggcau

SEQ ID NO: 147321 - RNA, 20 nt, Artificial Sequence
  Synthetic
acuugucgauugaugggcau

SEQ ID NO: 147322 - RNA, 21 nt, Artificial Sequence
  Synthetic
uacuugucgauugaugggcau

SEQ ID NO: 147323 - RNA, 22 nt, Artificial Sequence
  Synthetic
cuacuugucgauugaugggcau

SEQ ID NO: 147324 - RNA, 23 nt, Artificial Sequence
  Synthetic
ucuacuugucgauugaugggcau

SEQ ID NO: 147325 - RNA, 24 nt, Artificial Sequence
  Synthetic
aucuacuugucgauugaugggcau

SEQ ID NO: 147326 - RNA, 18 nt, Artificial Sequence
  Synthetic
ucuaucacuggugggcau

SEQ ID NO: 147327 - RNA, 20 nt, Artificial Sequence
  Synthetic
agucuaucacuggugggcau

SEQ ID NO: 147328 - RNA, 21 nt, Artificial Sequence
  Synthetic
cagucuaucacuggugggcau

SEQ ID NO: 147329 - RNA, 22 nt, Artificial Sequence
  Synthetic
ccagucuaucacuggugggcau

SEQ ID NO: 147330 - RNA, 23 nt, Artificial Sequence
  Synthetic
uccagucuaucacuggugggcau

SEQ ID NO: 147331 - RNA, 24 nt, Artificial Sequence
  Synthetic
auccagucuaucacuggugggcau

SEQ ID NO: 147332 - RNA, 18 nt, Artificial Sequence
  Synthetic
ucuagauucauucugcau

SEQ ID NO: 147333 - RNA, 23 nt, Artificial Sequence
  Synthetic
aggggucuagauucauucugcau

SEQ ID NO: 147334 - RNA, 24 nt, Artificial Sequence
  Synthetic
uaggggucuagauucauucugcau

SEQ ID NO: 147335 - RNA, 18 nt, Artificial Sequence
  Synthetic
uucccaccaacagugcau

SEQ ID NO: 147336 - RNA, 19 nt, Artificial Sequence
  Synthetic
auucccaccaacagugcau

SEQ ID NO: 147337 - RNA, 20 nt, Artificial Sequence
  Synthetic
cauucccaccaacagugcau

SEQ ID NO: 147338 - RNA, 21 nt, Artificial Sequence
  Synthetic
acauucccaccaacagugcau

SEQ ID NO: 147339 - RNA, 22 nt, Artificial Sequence
  Synthetic
uacauucccaccaacagugcau

SEQ ID NO: 147340 - RNA, 23 nt, Artificial Sequence
  Synthetic
uuacauucccaccaacagugcau

SEQ ID NO: 147341 - RNA, 24 nt, Artificial Sequence
  Synthetic
uuuacauucccaccaacagugcau

SEQ ID NO: 147342 - RNA, 18 nt, Artificial Sequence
  Synthetic
ucaaacuuugaugugcau

SEQ ID NO: 147343 - RNA, 19 nt, Artificial Sequence
  Synthetic
cucaaacuuugaugugcau

SEQ ID NO: 147344 - RNA, 20 nt, Artificial Sequence
  Synthetic
ucucaaacuuugaugugcau

SEQ ID NO: 147345 - RNA, 21 nt, Artificial Sequence
  Synthetic
uucucaaacuuugaugugcau

SEQ ID NO: 147346 - RNA, 22 nt, Artificial Sequence
  Synthetic
cuucucaaacuuugaugugcau

SEQ ID NO: 147347 - RNA, 24 nt, Artificial Sequence
  Synthetic
ugcuucucaaacuuugaugugcau

SEQ ID NO: 147348 - RNA, 21 nt, Artificial Sequence
  Synthetic
aaacuaaccuuugaauugcau

SEQ ID NO: 147349 - RNA, 22 nt, Artificial Sequence
  Synthetic
aaaacuaaccuuugaauugcau

SEQ ID NO: 147350 - RNA, 23 nt, Artificial Sequence
  Synthetic
caaaacuaaccuuugaauugcau

SEQ ID NO: 147351 - RNA, 24 nt, Artificial Sequence
  Synthetic
ucaaaacuaaccuuugaauugcau

SEQ ID NO: 147352 - RNA, 18 nt, Artificial Sequence
  Synthetic
acacuaugauguuugcau

SEQ ID NO: 147353 - RNA, 19 nt, Artificial Sequence
  Synthetic
cacacuaugauguuugcau

SEQ ID NO: 147354 - RNA, 20 nt, Artificial Sequence
  Synthetic
acacacuaugauguuugcau

SEQ ID NO: 147355 - RNA, 21 nt, Artificial Sequence
  Synthetic
uacacacuaugauguuugcau

SEQ ID NO: 147356 - RNA, 24 nt, Artificial Sequence
  Synthetic
agguacacacuaugauguuugcau

SEQ ID NO: 147357 - RNA, 19 nt, Artificial Sequence
  Synthetic
agaaaaguacacaaaucau

SEQ ID NO: 147358 - RNA, 20 nt, Artificial Sequence
  Synthetic
uagaaaaguacacaaaucau

SEQ ID NO: 147359 - RNA, 21 nt, Artificial Sequence
  Synthetic
auagaaaaguacacaaaucau

SEQ ID NO: 147360 - RNA, 22 nt, Artificial Sequence
  Synthetic
cauagaaaaguacacaaaucau

SEQ ID NO: 147361 - RNA, 23 nt, Artificial Sequence
  Synthetic
acauagaaaaguacacaaaucau

SEQ ID NO: 147362 - RNA, 24 nt, Artificial Sequence
  Synthetic
cacauagaaaaguacacaaaucau

SEQ ID NO: 147363 - RNA, 18 nt, Artificial Sequence
  Synthetic
auaauuugaucaaaucau

SEQ ID NO: 147364 - RNA, 19 nt, Artificial Sequence
  Synthetic
cauaauuugaucaaaucau

SEQ ID NO: 147365 - RNA, 20 nt, Artificial Sequence
  Synthetic
acauaauuugaucaaaucau

SEQ ID NO: 147366 - RNA, 21 nt, Artificial Sequence
  Synthetic
aacauaauuugaucaaaucau

SEQ ID NO: 147367 - RNA, 22 nt, Artificial Sequence
  Synthetic
uaacauaauuugaucaaaucau

SEQ ID NO: 147368 - RNA, 23 nt, Artificial Sequence
  Synthetic
auaacauaauuugaucaaaucau

SEQ ID NO: 147369 - RNA, 24 nt, Artificial Sequence
  Synthetic
aauaacauaauuugaucaaaucau

SEQ ID NO: 147370 - RNA, 18 nt, Artificial Sequence
  Synthetic
caaaaaaacagaaaucau

SEQ ID NO: 147371 - RNA, 20 nt, Artificial Sequence
  Synthetic
ugcaaaaaaacagaaaucau

SEQ ID NO: 147372 - RNA, 21 nt, Artificial Sequence
  Synthetic
augcaaaaaaacagaaaucau

SEQ ID NO: 147373 - RNA, 22 nt, Artificial Sequence
  Synthetic
aaugcaaaaaaacagaaaucau

SEQ ID NO: 147374 - RNA, 23 nt, Artificial Sequence
  Synthetic
aaaugcaaaaaaacagaaaucau

SEQ ID NO: 147375 - RNA, 24 nt, Artificial Sequence
  Synthetic
caaaugcaaaaaaacagaaaucau

SEQ ID NO: 147376 - RNA, 18 nt, Artificial Sequence
  Synthetic
uugcuuuucugcaaucau

SEQ ID NO: 147377 - RNA, 19 nt, Artificial Sequence
  Synthetic
uuugcuuuucugcaaucau

SEQ ID NO: 147378 - RNA, 20 nt, Artificial Sequence
  Synthetic
cuuugcuuuucugcaaucau

SEQ ID NO: 147379 - RNA, 19 nt, Artificial Sequence
  Synthetic
agaacucacucaucaucau

SEQ ID NO: 147380 - RNA, 21 nt, Artificial Sequence
  Synthetic
agagaacucacucaucaucau

SEQ ID NO: 147381 - RNA, 22 nt, Artificial Sequence
  Synthetic
cagagaacucacucaucaucau

SEQ ID NO: 147382 - RNA, 23 nt, Artificial Sequence
  Synthetic
ucagagaacucacucaucaucau

SEQ ID NO: 147383 - RNA, 24 nt, Artificial Sequence
  Synthetic
cucagagaacucacucaucaucau

SEQ ID NO: 147384 - RNA, 18 nt, Artificial Sequence
  Synthetic
uuguguuuuuuucaucau

SEQ ID NO: 147385 - RNA, 19 nt, Artificial Sequence
  Synthetic
uuuguguuuuuuucaucau

SEQ ID NO: 147386 - RNA, 18 nt, Artificial Sequence
  Synthetic
uaggugugauuggaucau

SEQ ID NO: 147387 - RNA, 21 nt, Artificial Sequence
  Synthetic
ugguaggugugauuggaucau

SEQ ID NO: 147388 - RNA, 22 nt, Artificial Sequence
  Synthetic
cugguaggugugauuggaucau

SEQ ID NO: 147389 - RNA, 23 nt, Artificial Sequence
  Synthetic
ccugguaggugugauuggaucau

SEQ ID NO: 147390 - RNA, 18 nt, Artificial Sequence
  Synthetic
agcaaaagaaacuaucau

SEQ ID NO: 147391 - RNA, 19 nt, Artificial Sequence
  Synthetic
cagcaaaagaaacuaucau

SEQ ID NO: 147392 - RNA, 20 nt, Artificial Sequence
  Synthetic
acagcaaaagaaacuaucau

SEQ ID NO: 147393 - RNA, 21 nt, Artificial Sequence
  Synthetic
cacagcaaaagaaacuaucau

SEQ ID NO: 147394 - RNA, 23 nt, Artificial Sequence
  Synthetic
ugcacagcaaaagaaacuaucau

SEQ ID NO: 147395 - RNA, 24 nt, Artificial Sequence
  Synthetic
cugcacagcaaaagaaacuaucau

SEQ ID NO: 147396 - RNA, 18 nt, Artificial Sequence
  Synthetic
ucaauucaccauuaucau

SEQ ID NO: 147397 - RNA, 19 nt, Artificial Sequence
  Synthetic
aucaauucaccauuaucau

SEQ ID NO: 147398 - RNA, 20 nt, Artificial Sequence
  Synthetic
uaucaauucaccauuaucau

SEQ ID NO: 147399 - RNA, 19 nt, Artificial Sequence
  Synthetic
aguggaauuguuaccucau

SEQ ID NO: 147400 - RNA, 20 nt, Artificial Sequence
  Synthetic
aaguggaauuguuaccucau

SEQ ID NO: 147401 - RNA, 22 nt, Artificial Sequence
  Synthetic
agaaguggaauuguuaccucau

SEQ ID NO: 147402 - RNA, 23 nt, Artificial Sequence
  Synthetic
uagaaguggaauuguuaccucau

SEQ ID NO: 147403 - RNA, 24 nt, Artificial Sequence
  Synthetic
cuagaaguggaauuguuaccucau

SEQ ID NO: 147404 - RNA, 18 nt, Artificial Sequence
  Synthetic
ugagccaccgcgccucau

SEQ ID NO: 147405 - RNA, 20 nt, Artificial Sequence
  Synthetic
ugugagccaccgcgccucau

SEQ ID NO: 147406 - RNA, 23 nt, Artificial Sequence
  Synthetic
aggugugagccaccgcgccucau

SEQ ID NO: 147407 - RNA, 24 nt, Artificial Sequence
  Synthetic
caggugugagccaccgcgccucau

SEQ ID NO: 147408 - RNA, 19 nt, Artificial Sequence
  Synthetic
agcuaccaucgucucucau

SEQ ID NO: 147409 - RNA, 20 nt, Artificial Sequence
  Synthetic
aagcuaccaucgucucucau

SEQ ID NO: 147410 - RNA, 21 nt, Artificial Sequence
  Synthetic
caagcuaccaucgucucucau

SEQ ID NO: 147411 - RNA, 23 nt, Artificial Sequence
  Synthetic
ugcaagcuaccaucgucucucau

SEQ ID NO: 147412 - RNA, 19 nt, Artificial Sequence
  Synthetic
uggaauuuauuuuucucau

SEQ ID NO: 147413 - RNA, 20 nt, Artificial Sequence
  Synthetic
cuggaauuuauuuuucucau

SEQ ID NO: 147414 - RNA, 19 nt, Artificial Sequence
  Synthetic
agggcauggaaaaagucau

SEQ ID NO: 147415 - RNA, 20 nt, Artificial Sequence
  Synthetic
uagggcauggaaaaagucau

SEQ ID NO: 147416 - RNA, 21 nt, Artificial Sequence
  Synthetic
agggauccagugggaggucau

SEQ ID NO: 147417 - RNA, 19 nt, Artificial Sequence
  Synthetic
uggguaaauugcaugucau

SEQ ID NO: 147418 - RNA, 20 nt, Artificial Sequence
  Synthetic
auggguaaauugcaugucau

SEQ ID NO: 147419 - RNA, 21 nt, Artificial Sequence
  Synthetic
cauggguaaauugcaugucau

SEQ ID NO: 147420 - RNA, 22 nt, Artificial Sequence
  Synthetic
acauggguaaauugcaugucau

SEQ ID NO: 147421 - RNA, 23 nt, Artificial Sequence
  Synthetic
uacauggguaaauugcaugucau

SEQ ID NO: 147422 - RNA, 24 nt, Artificial Sequence
  Synthetic
uuacauggguaaauugcaugucau

SEQ ID NO: 147423 - RNA, 18 nt, Artificial Sequence
  Synthetic
uagguaaacucaugucau

SEQ ID NO: 147424 - RNA, 19 nt, Artificial Sequence
  Synthetic
auagguaaacucaugucau

SEQ ID NO: 147425 - RNA, 20 nt, Artificial Sequence
  Synthetic
uauagguaaacucaugucau

SEQ ID NO: 147426 - RNA, 21 nt, Artificial Sequence
  Synthetic
auauagguaaacucaugucau

SEQ ID NO: 147427 - RNA, 22 nt, Artificial Sequence
  Synthetic
uauauagguaaacucaugucau

SEQ ID NO: 147428 - RNA, 23 nt, Artificial Sequence
  Synthetic
uuauauagguaaacucaugucau

SEQ ID NO: 147429 - RNA, 18 nt, Artificial Sequence
  Synthetic
uagguaaacuugugucau

SEQ ID NO: 147430 - RNA, 19 nt, Artificial Sequence
  Synthetic
auagguaaacuugugucau

SEQ ID NO: 147431 - RNA, 20 nt, Artificial Sequence
  Synthetic
cauagguaaacuugugucau

SEQ ID NO: 147432 - RNA, 21 nt, Artificial Sequence
  Synthetic
acauagguaaacuugugucau

SEQ ID NO: 147433 - RNA, 22 nt, Artificial Sequence
  Synthetic
uacauagguaaacuugugucau

SEQ ID NO: 147434 - RNA, 23 nt, Artificial Sequence
  Synthetic
uuacauagguaaacuugugucau

SEQ ID NO: 147435 - RNA, 18 nt, Artificial Sequence
  Synthetic
ugccuugcaguuugucau

SEQ ID NO: 147436 - RNA, 19 nt, Artificial Sequence
  Synthetic
cugccuugcaguuugucau

SEQ ID NO: 147437 - RNA, 20 nt, Artificial Sequence
  Synthetic
ucugccuugcaguuugucau

SEQ ID NO: 147438 - RNA, 21 nt, Artificial Sequence
  Synthetic
aucugccuugcaguuugucau

SEQ ID NO: 147439 - RNA, 22 nt, Artificial Sequence
  Synthetic
uaucugccuugcaguuugucau

SEQ ID NO: 147440 - RNA, 23 nt, Artificial Sequence
  Synthetic
cuaucugccuugcaguuugucau

SEQ ID NO: 147441 - RNA, 24 nt, Artificial Sequence
  Synthetic
acuaucugccuugcaguuugucau

SEQ ID NO: 147442 - RNA, 18 nt, Artificial Sequence
  Synthetic
aacuauccuaaaauucau

SEQ ID NO: 147443 - RNA, 19 nt, Artificial Sequence
  Synthetic
aaacuauccuaaaauucau

SEQ ID NO: 147444 - RNA, 20 nt, Artificial Sequence
  Synthetic
aaaacuauccuaaaauucau

SEQ ID NO: 147445 - RNA, 21 nt, Artificial Sequence
  Synthetic
aaaaacuauccuaaaauucau

SEQ ID NO: 147446 - RNA, 22 nt, Artificial Sequence
  Synthetic
aaaaaacuauccuaaaauucau

SEQ ID NO: 147447 - RNA, 23 nt, Artificial Sequence
  Synthetic
uaaaaaacuauccuaaaauucau

SEQ ID NO: 147448 - RNA, 24 nt, Artificial Sequence
  Synthetic
auaaaaaacuauccuaaaauucau

SEQ ID NO: 147449 - RNA, 18 nt, Artificial Sequence
  Synthetic
acuuucuuaaguguucau

SEQ ID NO: 147450 - RNA, 19 nt, Artificial Sequence
  Synthetic
aacuuucuuaaguguucau

SEQ ID NO: 147451 - RNA, 20 nt, Artificial Sequence
  Synthetic
uaacuuucuuaaguguucau

SEQ ID NO: 147452 - RNA, 18 nt, Artificial Sequence
  Synthetic
aaaaaacuauacuuucau

SEQ ID NO: 147453 - RNA, 19 nt, Artificial Sequence
  Synthetic
aaaaaaacuauacuuucau

SEQ ID NO: 147454 - RNA, 20 nt, Artificial Sequence
  Synthetic
aaaaaaaacuauacuuucau

SEQ ID NO: 147455 - RNA, 18 nt, Artificial Sequence
  Synthetic
agucguuugugguuucau

SEQ ID NO: 147456 - RNA, 21 nt, Artificial Sequence
  Synthetic
uggagucguuugugguuucau

SEQ ID NO: 147457 - RNA, 22 nt, Artificial Sequence
  Synthetic
uuggagucguuugugguuucau

SEQ ID NO: 147458 - RNA, 23 nt, Artificial Sequence
  Synthetic
uuuggagucguuugugguuucau

SEQ ID NO: 147459 - RNA, 24 nt, Artificial Sequence
  Synthetic
auuuggagucguuugugguuucau

SEQ ID NO: 147460 - RNA, 18 nt, Artificial Sequence
  Synthetic
uaagguuuggaaaaagau

SEQ ID NO: 147461 - RNA, 19 nt, Artificial Sequence
  Synthetic
cuaagguuuggaaaaagau

SEQ ID NO: 147462 - RNA, 20 nt, Artificial Sequence
  Synthetic
ucuaagguuuggaaaaagau

SEQ ID NO: 147463 - RNA, 18 nt, Artificial Sequence
  Synthetic
uguuuuuuauaaaaagau

SEQ ID NO: 147464 - RNA, 19 nt, Artificial Sequence
  Synthetic
uuguuuuuuauaaaaagau

SEQ ID NO: 147465 - RNA, 20 nt, Artificial Sequence
  Synthetic
auuguuuuuuauaaaaagau

SEQ ID NO: 147466 - RNA, 18 nt, Artificial Sequence
  Synthetic
cuuuuuaaggggaaagau

SEQ ID NO: 147467 - RNA, 19 nt, Artificial Sequence
  Synthetic
ucuuuuuaaggggaaagau

SEQ ID NO: 147468 - RNA, 20 nt, Artificial Sequence
  Synthetic
uucuuuuuaaggggaaagau

SEQ ID NO: 147469 - RNA, 18 nt, Artificial Sequence
  Synthetic
auagaggaaaaagaagau

SEQ ID NO: 147470 - RNA, 19 nt, Artificial Sequence
  Synthetic
cauagaggaaaaagaagau

SEQ ID NO: 147471 - RNA, 20 nt, Artificial Sequence
  Synthetic
acauagaggaaaaagaagau

SEQ ID NO: 147472 - RNA, 18 nt, Artificial Sequence
  Synthetic
auauuuugggaggaagau

SEQ ID NO: 147473 - RNA, 19 nt, Artificial Sequence
  Synthetic
cauauuuugggaggaagau

SEQ ID NO: 147474 - RNA, 20 nt, Artificial Sequence
  Synthetic
acauauuuugggaggaagau

SEQ ID NO: 147475 - RNA, 18 nt, Artificial Sequence
  Synthetic
uagcuuccaagaucagau

SEQ ID NO: 147476 - RNA, 19 nt, Artificial Sequence
  Synthetic
uuagcuuccaagaucagau

SEQ ID NO: 147477 - RNA, 20 nt, Artificial Sequence
  Synthetic
cuuagcuuccaagaucagau

SEQ ID NO: 147478 - RNA, 18 nt, Artificial Sequence
  Synthetic
aauguauagugaucagau

SEQ ID NO: 147479 - RNA, 19 nt, Artificial Sequence
  Synthetic
uaauguauagugaucagau

SEQ ID NO: 147480 - RNA, 21 nt, Artificial Sequence
  Synthetic
uguaauguauagugaucagau

SEQ ID NO: 147481 - RNA, 22 nt, Artificial Sequence
  Synthetic
auguaauguauagugaucagau

SEQ ID NO: 147482 - RNA, 23 nt, Artificial Sequence
  Synthetic
uauguaauguauagugaucagau

SEQ ID NO: 147483 - RNA, 24 nt, Artificial Sequence
  Synthetic
auauguaauguauagugaucagau

SEQ ID NO: 147484 - RNA, 18 nt, Artificial Sequence
  Synthetic
cagauggcacauucagau

SEQ ID NO: 147485 - RNA, 19 nt, Artificial Sequence
  Synthetic
acagauggcacauucagau

SEQ ID NO: 147486 - RNA, 20 nt, Artificial Sequence
  Synthetic
aacagauggcacauucagau

SEQ ID NO: 147487 - RNA, 21 nt, Artificial Sequence
  Synthetic
aaacagauggcacauucagau

SEQ ID NO: 147488 - RNA, 23 nt, Artificial Sequence
  Synthetic
agaaacagauggcacauucagau

SEQ ID NO: 147489 - RNA, 24 nt, Artificial Sequence
  Synthetic
aagaaacagauggcacauucagau

SEQ ID NO: 147490 - RNA, 19 nt, Artificial Sequence
  Synthetic
aggagguagagaaagagau

SEQ ID NO: 147491 - RNA, 20 nt, Artificial Sequence
  Synthetic
caggagguagagaaagagau

SEQ ID NO: 147492 - RNA, 21 nt, Artificial Sequence
  Synthetic
acaggagguagagaaagagau

SEQ ID NO: 147493 - RNA, 22 nt, Artificial Sequence
  Synthetic
aacaggagguagagaaagagau

SEQ ID NO: 147494 - RNA, 23 nt, Artificial Sequence
  Synthetic
aaacaggagguagagaaagagau

SEQ ID NO: 147495 - RNA, 24 nt, Artificial Sequence
  Synthetic
uaaacaggagguagagaaagagau

SEQ ID NO: 147496 - RNA, 18 nt, Artificial Sequence
  Synthetic
acuguaguagaaagagau

SEQ ID NO: 147497 - RNA, 19 nt, Artificial Sequence
  Synthetic
aacuguaguagaaagagau

SEQ ID NO: 147498 - RNA, 20 nt, Artificial Sequence
  Synthetic
caacuguaguagaaagagau

SEQ ID NO: 147499 - RNA, 21 nt, Artificial Sequence
  Synthetic
aggggagggaggaagagagau

SEQ ID NO: 147500 - RNA, 22 nt, Artificial Sequence
  Synthetic
uaggggagggaggaagagagau

SEQ ID NO: 147501 - RNA, 18 nt, Artificial Sequence
  Synthetic
uuguauauggugagagau

SEQ ID NO: 147502 - RNA, 19 nt, Artificial Sequence
  Synthetic
uuuguauauggugagagau

SEQ ID NO: 147503 - RNA, 20 nt, Artificial Sequence
  Synthetic
uuuuguauauggugagagau

SEQ ID NO: 147504 - RNA, 21 nt, Artificial Sequence
  Synthetic
uuuuuguauauggugagagau

SEQ ID NO: 147505 - RNA, 22 nt, Artificial Sequence
  Synthetic
auuuuuguauauggugagagau

SEQ ID NO: 147506 - RNA, 24 nt, Artificial Sequence
  Synthetic
ugauuuuuguauauggugagagau

SEQ ID NO: 147507 - RNA, 18 nt, Artificial Sequence
  Synthetic
caucuguacaauagagau

SEQ ID NO: 147508 - RNA, 19 nt, Artificial Sequence
  Synthetic
ucaucuguacaauagagau

SEQ ID NO: 147509 - RNA, 20 nt, Artificial Sequence
  Synthetic
uucaucuguacaauagagau

SEQ ID NO: 147510 - RNA, 18 nt, Artificial Sequence
  Synthetic
aaaacauauuguagagau

SEQ ID NO: 147511 - RNA, 19 nt, Artificial Sequence
  Synthetic
uaaaacauauuguagagau

SEQ ID NO: 147512 - RNA, 20 nt, Artificial Sequence
  Synthetic
uuaaaacauauuguagagau

SEQ ID NO: 147513 - RNA, 21 nt, Artificial Sequence
  Synthetic
uuuaaaacauauuguagagau

SEQ ID NO: 147514 - RNA, 22 nt, Artificial Sequence
  Synthetic
uuuuaaaacauauuguagagau

SEQ ID NO: 147515 - RNA, 23 nt, Artificial Sequence
  Synthetic
uuuuuaaaacauauuguagagau

SEQ ID NO: 147516 - RNA, 24 nt, Artificial Sequence
  Synthetic
auuuuuaaaacauauuguagagau

SEQ ID NO: 147517 - RNA, 18 nt, Artificial Sequence
  Synthetic
uuuuuuuuuuguagagau

SEQ ID NO: 147518 - RNA, 20 nt, Artificial Sequence
  Synthetic
uguuuuuuuuuuguagagau

SEQ ID NO: 147519 - RNA, 21 nt, Artificial Sequence
  Synthetic
uuguuuuuuuuuuguagagau

SEQ ID NO: 147520 - RNA, 22 nt, Artificial Sequence
  Synthetic
uuuguuuuuuuuuuguagagau

SEQ ID NO: 147521 - RNA, 23 nt, Artificial Sequence
  Synthetic
uuuuguuuuuuuuuuguagagau

SEQ ID NO: 147522 - RNA, 24 nt, Artificial Sequence
  Synthetic
uuuuuguuuuuuuuuuguagagau

SEQ ID NO: 147523 - RNA, 18 nt, Artificial Sequence
  Synthetic
uacaauucagaaugagau

SEQ ID NO: 147524 - RNA, 19 nt, Artificial Sequence
  Synthetic
cuacaauucagaaugagau

SEQ ID NO: 147525 - RNA, 20 nt, Artificial Sequence
  Synthetic
acuacaauucagaaugagau

SEQ ID NO: 147526 - RNA, 21 nt, Artificial Sequence
  Synthetic
aacuacaauucagaaugagau

SEQ ID NO: 147527 - RNA, 24 nt, Artificial Sequence
  Synthetic
aggaacuacaauucagaaugagau

SEQ ID NO: 147528 - RNA, 18 nt, Artificial Sequence
  Synthetic
uuuuaaucugaaugagau

SEQ ID NO: 147529 - RNA, 19 nt, Artificial Sequence
  Synthetic
cuuuuaaucugaaugagau

SEQ ID NO: 147530 - RNA, 21 nt, Artificial Sequence
  Synthetic
agcuuuuaaucugaaugagau

SEQ ID NO: 147531 - RNA, 22 nt, Artificial Sequence
  Synthetic
uagcuuuuaaucugaaugagau

SEQ ID NO: 147532 - RNA, 23 nt, Artificial Sequence
  Synthetic
uuagcuuuuaaucugaaugagau

SEQ ID NO: 147533 - RNA, 24 nt, Artificial Sequence
  Synthetic
uuuagcuuuuaaucugaaugagau

SEQ ID NO: 147534 - RNA, 19 nt, Artificial Sequence
  Synthetic
ugggaauucaacaugagau

SEQ ID NO: 147535 - RNA, 20 nt, Artificial Sequence
  Synthetic
augggaauucaacaugagau

SEQ ID NO: 147536 - RNA, 21 nt, Artificial Sequence
  Synthetic
caugggaauucaacaugagau

SEQ ID NO: 147537 - RNA, 22 nt, Artificial Sequence
  Synthetic
acaugggaauucaacaugagau

SEQ ID NO: 147538 - RNA, 23 nt, Artificial Sequence
  Synthetic
cacaugggaauucaacaugagau

SEQ ID NO: 147539 - RNA, 24 nt, Artificial Sequence
  Synthetic
acacaugggaauucaacaugagau

SEQ ID NO: 147540 - RNA, 18 nt, Artificial Sequence
  Synthetic
uacaauucaagaugagau

SEQ ID NO: 147541 - RNA, 19 nt, Artificial Sequence
  Synthetic
cuacaauucaagaugagau

SEQ ID NO: 147542 - RNA, 21 nt, Artificial Sequence
  Synthetic
agcuacaauucaagaugagau

SEQ ID NO: 147543 - RNA, 19 nt, Artificial Sequence
  Synthetic
uuacaauucaagaugagau

SEQ ID NO: 147544 - RNA, 20 nt, Artificial Sequence
  Synthetic
auuacaauucaagaugagau

SEQ ID NO: 147545 - RNA, 23 nt, Artificial Sequence
  Synthetic
aggauuacaauucaagaugagau

SEQ ID NO: 147546 - RNA, 24 nt, Artificial Sequence
  Synthetic
aaggauuacaauucaagaugagau

SEQ ID NO: 147547 - RNA, 21 nt, Artificial Sequence
  Synthetic
aguuacaauucaagaugagau

SEQ ID NO: 147548 - RNA, 24 nt, Artificial Sequence
  Synthetic
uggaguuacaauucaagaugagau

SEQ ID NO: 147549 - RNA, 18 nt, Artificial Sequence
  Synthetic
aggaauucaagaugagau

SEQ ID NO: 147550 - RNA, 19 nt, Artificial Sequence
  Synthetic
uaggaauucaagaugagau

SEQ ID NO: 147551 - RNA, 21 nt, Artificial Sequence
  Synthetic
uguaggaauucaagaugagau

SEQ ID NO: 147552 - RNA, 22 nt, Artificial Sequence
  Synthetic
auguaggaauucaagaugagau

SEQ ID NO: 147553 - RNA, 23 nt, Artificial Sequence
  Synthetic
cauguaggaauucaagaugagau

SEQ ID NO: 147554 - RNA, 24 nt, Artificial Sequence
  Synthetic
acauguaggaauucaagaugagau

SEQ ID NO: 147555 - RNA, 18 nt, Artificial Sequence
  Synthetic
uacaguucuagaugagau

SEQ ID NO: 147556 - RNA, 19 nt, Artificial Sequence
  Synthetic
uuacaguucuagaugagau

SEQ ID NO: 147557 - RNA, 20 nt, Artificial Sequence
  Synthetic
auuacaguucuagaugagau

SEQ ID NO: 147558 - RNA, 23 nt, Artificial Sequence
  Synthetic
cggauuacaguucuagaugagau

SEQ ID NO: 147559 - RNA, 24 nt, Artificial Sequence
  Synthetic
ccggauuacaguucuagaugagau

SEQ ID NO: 147560 - RNA, 18 nt, Artificial Sequence
  Synthetic
uacaauuuaauaugagau

SEQ ID NO: 147561 - RNA, 19 nt, Artificial Sequence
  Synthetic
uuacaauuuaauaugagau

SEQ ID NO: 147562 - RNA, 20 nt, Artificial Sequence
  Synthetic
auuacaauuuaauaugagau

SEQ ID NO: 147563 - RNA, 18 nt, Artificial Sequence
  Synthetic
uuguauaaggggugagau

SEQ ID NO: 147564 - RNA, 19 nt, Artificial Sequence
  Synthetic
cuuguauaaggggugagau

SEQ ID NO: 147565 - RNA, 20 nt, Artificial Sequence
  Synthetic
ucuuguauaaggggugagau

SEQ ID NO: 147566 - RNA, 21 nt, Artificial Sequence
  Synthetic
uucuuguauaaggggugagau

SEQ ID NO: 147567 - RNA, 22 nt, Artificial Sequence
  Synthetic
auucuuguauaaggggugagau

SEQ ID NO: 147568 - RNA, 24 nt, Artificial Sequence
  Synthetic
ugauucuuguauaaggggugagau

SEQ ID NO: 147569 - RNA, 18 nt, Artificial Sequence
  Synthetic
uauauuuccacuugagau

SEQ ID NO: 147570 - RNA, 19 nt, Artificial Sequence
  Synthetic
uuauauuuccacuugagau

SEQ ID NO: 147571 - RNA, 20 nt, Artificial Sequence
  Synthetic
auuauauuuccacuugagau

SEQ ID NO: 147572 - RNA, 21 nt, Artificial Sequence
  Synthetic
aauuauauuuccacuugagau

SEQ ID NO: 147573 - RNA, 18 nt, Artificial Sequence
  Synthetic
uucuguaaaaaaugcgau

SEQ ID NO: 147574 - RNA, 19 nt, Artificial Sequence
  Synthetic
uuucuguaaaaaaugcgau

SEQ ID NO: 147575 - RNA, 20 nt, Artificial Sequence
  Synthetic
auuucuguaaaaaaugcgau

SEQ ID NO: 147576 - RNA, 21 nt, Artificial Sequence
  Synthetic
uauuucuguaaaaaaugcgau

SEQ ID NO: 147577 - RNA, 22 nt, Artificial Sequence
  Synthetic
uuauuucuguaaaaaaugcgau

SEQ ID NO: 147578 - RNA, 23 nt, Artificial Sequence
  Synthetic
cuuauuucuguaaaaaaugcgau

SEQ ID NO: 147579 - RNA, 24 nt, Artificial Sequence
  Synthetic
ccuuauuucuguaaaaaaugcgau

SEQ ID NO: 147580 - RNA, 18 nt, Artificial Sequence
  Synthetic
aaauccugagacaaggau

SEQ ID NO: 147581 - RNA, 19 nt, Artificial Sequence
  Synthetic
caaauccugagacaaggau

SEQ ID NO: 147582 - RNA, 21 nt, Artificial Sequence
  Synthetic
agcaaauccugagacaaggau

SEQ ID NO: 147583 - RNA, 22 nt, Artificial Sequence
  Synthetic
aagcaaauccugagacaaggau

SEQ ID NO: 147584 - RNA, 23 nt, Artificial Sequence
  Synthetic
uaagcaaauccugagacaaggau

SEQ ID NO: 147585 - RNA, 24 nt, Artificial Sequence
  Synthetic
auaagcaaauccugagacaaggau

SEQ ID NO: 147586 - RNA, 18 nt, Artificial Sequence
  Synthetic
uagugcugaaaugaggau

SEQ ID NO: 147587 - RNA, 19 nt, Artificial Sequence
  Synthetic
auagugcugaaaugaggau

SEQ ID NO: 147588 - RNA, 20 nt, Artificial Sequence
  Synthetic
aauagugcugaaaugaggau

SEQ ID NO: 147589 - RNA, 22 nt, Artificial Sequence
  Synthetic
ugaauagugcugaaaugaggau

SEQ ID NO: 147590 - RNA, 24 nt, Artificial Sequence
  Synthetic
ugugaauagugcugaaaugaggau

SEQ ID NO: 147591 - RNA, 18 nt, Artificial Sequence
  Synthetic
aauagcaauggugaggau

SEQ ID NO: 147592 - RNA, 19 nt, Artificial Sequence
  Synthetic
caauagcaauggugaggau

SEQ ID NO: 147593 - RNA, 20 nt, Artificial Sequence
  Synthetic
acaauagcaauggugaggau

SEQ ID NO: 147594 - RNA, 18 nt, Artificial Sequence
  Synthetic
ugcaauucaagacgggau

SEQ ID NO: 147595 - RNA, 19 nt, Artificial Sequence
  Synthetic
cugcaauucaagacgggau

SEQ ID NO: 147596 - RNA, 20 nt, Artificial Sequence
  Synthetic
acugcaauucaagacgggau

SEQ ID NO: 147597 - RNA, 21 nt, Artificial Sequence
  Synthetic
aacugcaauucaagacgggau

SEQ ID NO: 147598 - RNA, 18 nt, Artificial Sequence
  Synthetic
aacccuugagcuggggau

SEQ ID NO: 147599 - RNA, 19 nt, Artificial Sequence
  Synthetic
ugaugcugagauuugggau

SEQ ID NO: 147600 - RNA, 20 nt, Artificial Sequence
  Synthetic
uugaugcugagauuugggau

SEQ ID NO: 147601 - RNA, 21 nt, Artificial Sequence
  Synthetic
uuugaugcugagauuugggau

SEQ ID NO: 147602 - RNA, 23 nt, Artificial Sequence
  Synthetic
uguuugaugcugagauuugggau

SEQ ID NO: 147603 - RNA, 24 nt, Artificial Sequence
  Synthetic
uuguuugaugcugagauuugggau

SEQ ID NO: 147604 - RNA, 18 nt, Artificial Sequence
  Synthetic
uuugccuggcuuugggau

SEQ ID NO: 147605 - RNA, 19 nt, Artificial Sequence
  Synthetic
cuuugccuggcuuugggau

SEQ ID NO: 147606 - RNA, 20 nt, Artificial Sequence
  Synthetic
ucuuugccuggcuuugggau

SEQ ID NO: 147607 - RNA, 22 nt, Artificial Sequence
  Synthetic
ugucuuugccuggcuuugggau

SEQ ID NO: 147608 - RNA, 24 nt, Artificial Sequence
  Synthetic
agugucuuugccuggcuuugggau

SEQ ID NO: 147609 - RNA, 18 nt, Artificial Sequence
  Synthetic
aaagaagggaaaauggau

SEQ ID NO: 147610 - RNA, 19 nt, Artificial Sequence
  Synthetic
aaaagaagggaaaauggau

SEQ ID NO: 147611 - RNA, 20 nt, Artificial Sequence
  Synthetic
aaaaagaagggaaaauggau

SEQ ID NO: 147612 - RNA, 20 nt, Artificial Sequence
  Synthetic
uggugaguccacugauggau

SEQ ID NO: 147613 - RNA, 18 nt, Artificial Sequence
  Synthetic
ucuuuucuucugcuggau

SEQ ID NO: 147614 - RNA, 19 nt, Artificial Sequence
  Synthetic
uucuuuucuucugcuggau

SEQ ID NO: 147615 - RNA, 20 nt, Artificial Sequence
  Synthetic
uuucuuuucuucugcuggau

SEQ ID NO: 147616 - RNA, 21 nt, Artificial Sequence
  Synthetic
auuucuuuucuucugcuggau

SEQ ID NO: 147617 - RNA, 22 nt, Artificial Sequence
  Synthetic
uauuucuuuucuucugcuggau

SEQ ID NO: 147618 - RNA, 23 nt, Artificial Sequence
  Synthetic
uuauuucuuuucuucugcuggau

SEQ ID NO: 147619 - RNA, 18 nt, Artificial Sequence
  Synthetic
uauuuucauccucuggau

SEQ ID NO: 147620 - RNA, 19 nt, Artificial Sequence
  Synthetic
auauuuucauccucuggau

SEQ ID NO: 147621 - RNA, 20 nt, Artificial Sequence
  Synthetic
aauauuuucauccucuggau

SEQ ID NO: 147622 - RNA, 21 nt, Artificial Sequence
  Synthetic
aaauauuuucauccucuggau

SEQ ID NO: 147623 - RNA, 22 nt, Artificial Sequence
  Synthetic
uaaauauuuucauccucuggau

SEQ ID NO: 147624 - RNA, 23 nt, Artificial Sequence
  Synthetic
auaaauauuuucauccucuggau

SEQ ID NO: 147625 - RNA, 24 nt, Artificial Sequence
  Synthetic
uauaaauauuuucauccucuggau

SEQ ID NO: 147626 - RNA, 18 nt, Artificial Sequence
  Synthetic
ucaccauaaaaaaaugau

SEQ ID NO: 147627 - RNA, 19 nt, Artificial Sequence
  Synthetic
cucaccauaaaaaaaugau

SEQ ID NO: 147628 - RNA, 20 nt, Artificial Sequence
  Synthetic
ucucaccauaaaaaaaugau

SEQ ID NO: 147629 - RNA, 21 nt, Artificial Sequence
  Synthetic
uucucaccauaaaaaaaugau

SEQ ID NO: 147630 - RNA, 22 nt, Artificial Sequence
  Synthetic
auucucaccauaaaaaaaugau

SEQ ID NO: 147631 - RNA, 23 nt, Artificial Sequence
  Synthetic
cauucucaccauaaaaaaaugau

SEQ ID NO: 147632 - RNA, 24 nt, Artificial Sequence
  Synthetic
acauucucaccauaaaaaaaugau

SEQ ID NO: 147633 - RNA, 18 nt, Artificial Sequence
  Synthetic
uauuagaaauaaaaugau

SEQ ID NO: 147634 - RNA, 19 nt, Artificial Sequence
  Synthetic
uuauuagaaauaaaaugau

SEQ ID NO: 147635 - RNA, 19 nt, Artificial Sequence
  Synthetic
ugauuguuuuuuuaaugau

SEQ ID NO: 147636 - RNA, 20 nt, Artificial Sequence
  Synthetic
augauuguuuuuuuaaugau

SEQ ID NO: 147637 - RNA, 21 nt, Artificial Sequence
  Synthetic
aaugauuguuuuuuuaaugau

SEQ ID NO: 147638 - RNA, 22 nt, Artificial Sequence
  Synthetic
uaaugauuguuuuuuuaaugau

SEQ ID NO: 147639 - RNA, 23 nt, Artificial Sequence
  Synthetic
auaaugauuguuuuuuuaaugau

SEQ ID NO: 147640 - RNA, 24 nt, Artificial Sequence
  Synthetic
uauaaugauuguuuuuuuaaugau

SEQ ID NO: 147641 - RNA, 18 nt, Artificial Sequence
  Synthetic
ugcgauugggauuaugau

SEQ ID NO: 147642 - RNA, 19 nt, Artificial Sequence
  Synthetic
augcgauugggauuaugau

SEQ ID NO: 147643 - RNA, 20 nt, Artificial Sequence
  Synthetic
aaugcgauugggauuaugau

SEQ ID NO: 147644 - RNA, 21 nt, Artificial Sequence
  Synthetic
aaaugcgauugggauuaugau

SEQ ID NO: 147645 - RNA, 22 nt, Artificial Sequence
  Synthetic
aaaaugcgauugggauuaugau

SEQ ID NO: 147646 - RNA, 23 nt, Artificial Sequence
  Synthetic
aaaaaugcgauugggauuaugau

SEQ ID NO: 147647 - RNA, 24 nt, Artificial Sequence
  Synthetic
aaaaaaugcgauugggauuaugau

SEQ ID NO: 147648 - RNA, 18 nt, Artificial Sequence
  Synthetic
cguccccacuuuacugau

SEQ ID NO: 147649 - RNA, 19 nt, Artificial Sequence
  Synthetic
ccguccccacuuuacugau

SEQ ID NO: 147650 - RNA, 20 nt, Artificial Sequence
  Synthetic
accguccccacuuuacugau

SEQ ID NO: 147651 - RNA, 18 nt, Artificial Sequence
  Synthetic
aaugguccaucugcugau

SEQ ID NO: 147652 - RNA, 20 nt, Artificial Sequence
  Synthetic
agaaugguccaucugcugau

SEQ ID NO: 147653 - RNA, 23 nt, Artificial Sequence
  Synthetic
uggagaaugguccaucugcugau

SEQ ID NO: 147654 - RNA, 24 nt, Artificial Sequence
  Synthetic
uuggagaaugguccaucugcugau

SEQ ID NO: 147655 - RNA, 19 nt, Artificial Sequence
  Synthetic
agguuguugugagggugau

SEQ ID NO: 147656 - RNA, 20 nt, Artificial Sequence
  Synthetic
cagguuguugugagggugau

SEQ ID NO: 147657 - RNA, 18 nt, Artificial Sequence
  Synthetic
aauauaaaauacugugau

SEQ ID NO: 147658 - RNA, 19 nt, Artificial Sequence
  Synthetic
aaauauaaaauacugugau

SEQ ID NO: 147659 - RNA, 18 nt, Artificial Sequence
  Synthetic
agaaaaauauugugugau

SEQ ID NO: 147660 - RNA, 19 nt, Artificial Sequence
  Synthetic
aagaaaaauauugugugau

SEQ ID NO: 147661 - RNA, 20 nt, Artificial Sequence
  Synthetic
aaagaaaaauauugugugau

SEQ ID NO: 147662 - RNA, 18 nt, Artificial Sequence
  Synthetic
aaguaguagaguugugau

SEQ ID NO: 147663 - RNA, 19 nt, Artificial Sequence
  Synthetic
aaaguaguagaguugugau

SEQ ID NO: 147664 - RNA, 18 nt, Artificial Sequence
  Synthetic
uauauauauauaauugau

SEQ ID NO: 147665 - RNA, 19 nt, Artificial Sequence
  Synthetic
auauauauauauaauugau

SEQ ID NO: 147666 - RNA, 20 nt, Artificial Sequence
  Synthetic
uauauauauauauaauugau

SEQ ID NO: 147667 - RNA, 21 nt, Artificial Sequence
  Synthetic
auauauauauauauaauugau

SEQ ID NO: 147668 - RNA, 22 nt, Artificial Sequence
  Synthetic
uauauauauauauauaauugau

SEQ ID NO: 147669 - RNA, 23 nt, Artificial Sequence
  Synthetic
cuauauauauauauauaauugau

SEQ ID NO: 147670 - RNA, 24 nt, Artificial Sequence
  Synthetic
ucuauauauauauauauaauugau

SEQ ID NO: 147671 - RNA, 18 nt, Artificial Sequence
  Synthetic
cccucuuuuucuauugau

SEQ ID NO: 147672 - RNA, 19 nt, Artificial Sequence
  Synthetic
ucccucuuuuucuauugau

SEQ ID NO: 147673 - RNA, 20 nt, Artificial Sequence
  Synthetic
uucccucuuuuucuauugau

SEQ ID NO: 147674 - RNA, 21 nt, Artificial Sequence
  Synthetic
auucccucuuuuucuauugau

SEQ ID NO: 147675 - RNA, 24 nt, Artificial Sequence
  Synthetic
aggauucccucuuuuucuauugau

SEQ ID NO: 147676 - RNA, 18 nt, Artificial Sequence
  Synthetic
agucaaugguagcuugau

SEQ ID NO: 147677 - RNA, 19 nt, Artificial Sequence
  Synthetic
aagucaaugguagcuugau

SEQ ID NO: 147678 - RNA, 20 nt, Artificial Sequence
  Synthetic
aaagucaaugguagcuugau

SEQ ID NO: 147679 - RNA, 22 nt, Artificial Sequence
  Synthetic
agaaagucaaugguagcuugau

SEQ ID NO: 147680 - RNA, 23 nt, Artificial Sequence
  Synthetic
aagaaagucaaugguagcuugau

SEQ ID NO: 147681 - RNA, 18 nt, Artificial Sequence
  Synthetic
aggcauugguagcuugau

SEQ ID NO: 147682 - RNA, 19 nt, Artificial Sequence
  Synthetic
aaggcauugguagcuugau

SEQ ID NO: 147683 - RNA, 20 nt, Artificial Sequence
  Synthetic
aaaggcauugguagcuugau

SEQ ID NO: 147684 - RNA, 22 nt, Artificial Sequence
  Synthetic
agaaaggcauugguagcuugau

SEQ ID NO: 147685 - RNA, 23 nt, Artificial Sequence
  Synthetic
aagaaaggcauugguagcuugau

SEQ ID NO: 147686 - RNA, 18 nt, Artificial Sequence
  Synthetic
agucauugguagcuugau

SEQ ID NO: 147687 - RNA, 19 nt, Artificial Sequence
  Synthetic
aagucauugguagcuugau

SEQ ID NO: 147688 - RNA, 20 nt, Artificial Sequence
  Synthetic
aaagucauugguagcuugau

SEQ ID NO: 147689 - RNA, 22 nt, Artificial Sequence
  Synthetic
agaaagucauugguagcuugau

SEQ ID NO: 147690 - RNA, 23 nt, Artificial Sequence
  Synthetic
aagaaagucauugguagcuugau

SEQ ID NO: 147691 - RNA, 18 nt, Artificial Sequence
  Synthetic
aguauucuauuucuugau

SEQ ID NO: 147692 - RNA, 19 nt, Artificial Sequence
  Synthetic
caguauucuauuucuugau

SEQ ID NO: 147693 - RNA, 21 nt, Artificial Sequence
  Synthetic
agcaguauucuauuucuugau

SEQ ID NO: 147694 - RNA, 22 nt, Artificial Sequence
  Synthetic
uagcaguauucuauuucuugau

SEQ ID NO: 147695 - RNA, 23 nt, Artificial Sequence
  Synthetic
uuagcaguauucuauuucuugau

SEQ ID NO: 147696 - RNA, 24 nt, Artificial Sequence
  Synthetic
auuagcaguauucuauuucuugau

SEQ ID NO: 147697 - RNA, 18 nt, Artificial Sequence
  Synthetic
aauguuuuguuucuugau

SEQ ID NO: 147698 - RNA, 19 nt, Artificial Sequence
  Synthetic
uaauguuuuguuucuugau

SEQ ID NO: 147699 - RNA, 23 nt, Artificial Sequence
  Synthetic
uggguaauguuuuguuucuugau

SEQ ID NO: 147700 - RNA, 24 nt, Artificial Sequence
  Synthetic
cuggguaauguuuuguuucuugau

SEQ ID NO: 147701 - RNA, 18 nt, Artificial Sequence
  Synthetic
auaaauuaacaaaaauau

SEQ ID NO: 147702 - RNA, 19 nt, Artificial Sequence
  Synthetic
aauaaauuaacaaaaauau

SEQ ID NO: 147703 - RNA, 20 nt, Artificial Sequence
  Synthetic
aaauaaauuaacaaaaauau

SEQ ID NO: 147704 - RNA, 21 nt, Artificial Sequence
  Synthetic
aaaauaaauuaacaaaaauau

SEQ ID NO: 147705 - RNA, 22 nt, Artificial Sequence
  Synthetic
uaaaauaaauuaacaaaaauau

SEQ ID NO: 147706 - RNA, 23 nt, Artificial Sequence
  Synthetic
cuaaaauaaauuaacaaaaauau

SEQ ID NO: 147707 - RNA, 24 nt, Artificial Sequence
  Synthetic
ucuaaaauaaauuaacaaaaauau

SEQ ID NO: 147708 - RNA, 23 nt, Artificial Sequence
  Synthetic
aggcaauagcuagagaagaauau

SEQ ID NO: 147709 - RNA, 21 nt, Artificial Sequence
  Synthetic
uaagagugggaaagauaauau

SEQ ID NO: 147710 - RNA, 22 nt, Artificial Sequence
  Synthetic
auaagagugggaaagauaauau

SEQ ID NO: 147711 - RNA, 23 nt, Artificial Sequence
  Synthetic
aauaagagugggaaagauaauau

SEQ ID NO: 147712 - RNA, 24 nt, Artificial Sequence
  Synthetic
aaauaagagugggaaagauaauau

SEQ ID NO: 147713 - RNA, 19 nt, Artificial Sequence
  Synthetic
uggguacuaggcuuaauau

SEQ ID NO: 147714 - RNA, 20 nt, Artificial Sequence
  Synthetic
auggguacuaggcuuaauau

SEQ ID NO: 147715 - RNA, 21 nt, Artificial Sequence
  Synthetic
aauggguacuaggcuuaauau

SEQ ID NO: 147716 - RNA, 22 nt, Artificial Sequence
  Synthetic
uaauggguacuaggcuuaauau

SEQ ID NO: 147717 - RNA, 23 nt, Artificial Sequence
  Synthetic
cuaauggguacuaggcuuaauau

SEQ ID NO: 147718 - RNA, 24 nt, Artificial Sequence
  Synthetic
acuaauggguacuaggcuuaauau

SEQ ID NO: 147719 - RNA, 18 nt, Artificial Sequence
  Synthetic
auuaauaucaaaacauau

SEQ ID NO: 147720 - RNA, 18 nt, Artificial Sequence
  Synthetic
cuuguaggcagcacauau

SEQ ID NO: 147721 - RNA, 19 nt, Artificial Sequence
  Synthetic
acuuguaggcagcacauau

SEQ ID NO: 147722 - RNA, 20 nt, Artificial Sequence
  Synthetic
cacuuguaggcagcacauau

SEQ ID NO: 147723 - RNA, 21 nt, Artificial Sequence
  Synthetic
ccacuuguaggcagcacauau

SEQ ID NO: 147724 - RNA, 23 nt, Artificial Sequence
  Synthetic
agccacuuguaggcagcacauau

SEQ ID NO: 147725 - RNA, 20 nt, Artificial Sequence
  Synthetic
uggaguagauagcuggauau

SEQ ID NO: 147726 - RNA, 19 nt, Artificial Sequence
  Synthetic
agcccauuuugucugauau

SEQ ID NO: 147727 - RNA, 20 nt, Artificial Sequence
  Synthetic
aagcccauuuugucugauau

SEQ ID NO: 147728 - RNA, 21 nt, Artificial Sequence
  Synthetic
aaagcccauuuugucugauau

SEQ ID NO: 147729 - RNA, 22 nt, Artificial Sequence
  Synthetic
uaaagcccauuuugucugauau

SEQ ID NO: 147730 - RNA, 23 nt, Artificial Sequence
  Synthetic
uuaaagcccauuuugucugauau

SEQ ID NO: 147731 - RNA, 24 nt, Artificial Sequence
  Synthetic
uuuaaagcccauuuugucugauau

SEQ ID NO: 147732 - RNA, 19 nt, Artificial Sequence
  Synthetic
ugaggaagaaaucauauau

SEQ ID NO: 147733 - RNA, 20 nt, Artificial Sequence
  Synthetic
uugaggaagaaaucauauau

SEQ ID NO: 147734 - RNA, 18 nt, Artificial Sequence
  Synthetic
ugugggguacauauauau

SEQ ID NO: 147735 - RNA, 19 nt, Artificial Sequence
  Synthetic
augugggguacauauauau

SEQ ID NO: 147736 - RNA, 20 nt, Artificial Sequence
  Synthetic
uaugugggguacauauauau

SEQ ID NO: 147737 - RNA, 21 nt, Artificial Sequence
  Synthetic
auaugugggguacauauauau

SEQ ID NO: 147738 - RNA, 22 nt, Artificial Sequence
  Synthetic
uauaugugggguacauauauau

SEQ ID NO: 147739 - RNA, 23 nt, Artificial Sequence
  Synthetic
auauaugugggguacauauauau

SEQ ID NO: 147740 - RNA, 24 nt, Artificial Sequence
  Synthetic
uauauaugugggguacauauauau

SEQ ID NO: 147741 - RNA, 18 nt, Artificial Sequence
  Synthetic
uauauacuguauauauau

SEQ ID NO: 147742 - RNA, 19 nt, Artificial Sequence
  Synthetic
uuauauacuguauauauau

SEQ ID NO: 147743 - RNA, 20 nt, Artificial Sequence
  Synthetic
auuauauacuguauauauau

SEQ ID NO: 147744 - RNA, 18 nt, Artificial Sequence
  Synthetic
uuucuacuauuauuauau

SEQ ID NO: 147745 - RNA, 19 nt, Artificial Sequence
  Synthetic
uuuucuacuauuauuauau

SEQ ID NO: 147746 - RNA, 18 nt, Artificial Sequence
  Synthetic
uggccuauuuauuuauau

SEQ ID NO: 147747 - RNA, 19 nt, Artificial Sequence
  Synthetic
cuggccuauuuauuuauau

SEQ ID NO: 147748 - RNA, 20 nt, Artificial Sequence
  Synthetic
acuggccuauuuauuuauau

SEQ ID NO: 147749 - RNA, 18 nt, Artificial Sequence
  Synthetic
uaacaaaauauuuuauau

SEQ ID NO: 147750 - RNA, 19 nt, Artificial Sequence
  Synthetic
uuaacaaaauauuuuauau

SEQ ID NO: 147751 - RNA, 20 nt, Artificial Sequence
  Synthetic
uuuaacaaaauauuuuauau

SEQ ID NO: 147752 - RNA, 21 nt, Artificial Sequence
  Synthetic
auuuaacaaaauauuuuauau

SEQ ID NO: 147753 - RNA, 22 nt, Artificial Sequence
  Synthetic
aauuuaacaaaauauuuuauau

SEQ ID NO: 147754 - RNA, 23 nt, Artificial Sequence
  Synthetic
aaauuuaacaaaauauuuuauau

SEQ ID NO: 147755 - RNA, 24 nt, Artificial Sequence
  Synthetic
caaauuuaacaaaauauuuuauau

SEQ ID NO: 147756 - RNA, 18 nt, Artificial Sequence
  Synthetic
uucuuuuaaaaaaacuau

SEQ ID NO: 147757 - RNA, 19 nt, Artificial Sequence
  Synthetic
uuucuuuuaaaaaaacuau

SEQ ID NO: 147758 - RNA, 20 nt, Artificial Sequence
  Synthetic
uuuucuuuuaaaaaaacuau

SEQ ID NO: 147759 - RNA, 21 nt, Artificial Sequence
  Synthetic
auuuucuuuuaaaaaaacuau

SEQ ID NO: 147760 - RNA, 22 nt, Artificial Sequence
  Synthetic
uauuuucuuuuaaaaaaacuau

SEQ ID NO: 147761 - RNA, 23 nt, Artificial Sequence
  Synthetic
uuauuuucuuuuaaaaaaacuau

SEQ ID NO: 147762 - RNA, 24 nt, Artificial Sequence
  Synthetic
uuuauuuucuuuuaaaaaaacuau

SEQ ID NO: 147763 - RNA, 18 nt, Artificial Sequence
  Synthetic
auauuucugccuaacuau

SEQ ID NO: 147764 - RNA, 20 nt, Artificial Sequence
  Synthetic
ugauauuucugccuaacuau

SEQ ID NO: 147765 - RNA, 21 nt, Artificial Sequence
  Synthetic
augauauuucugccuaacuau

SEQ ID NO: 147766 - RNA, 23 nt, Artificial Sequence
  Synthetic
ugaugauauuucugccuaacuau

SEQ ID NO: 147767 - RNA, 19 nt, Artificial Sequence
  Synthetic
uggguacuauguucacuau

SEQ ID NO: 147768 - RNA, 20 nt, Artificial Sequence
  Synthetic
uuggguacuauguucacuau

SEQ ID NO: 147769 - RNA, 22 nt, Artificial Sequence
  Synthetic
uguuggguacuauguucacuau

SEQ ID NO: 147770 - RNA, 23 nt, Artificial Sequence
  Synthetic
cuguuggguacuauguucacuau

SEQ ID NO: 147771 - RNA, 24 nt, Artificial Sequence
  Synthetic
ccuguuggguacuauguucacuau

SEQ ID NO: 147772 - RNA, 18 nt, Artificial Sequence
  Synthetic
uauuuuuugaaagacuau

SEQ ID NO: 147773 - RNA, 19 nt, Artificial Sequence
  Synthetic
auauuuuuugaaagacuau

SEQ ID NO: 147774 - RNA, 20 nt, Artificial Sequence
  Synthetic
uauauuuuuugaaagacuau

SEQ ID NO: 147775 - RNA, 19 nt, Artificial Sequence
  Synthetic
agagaagcuuuaagacuau

SEQ ID NO: 147776 - RNA, 20 nt, Artificial Sequence
  Synthetic
uagagaagcuuuaagacuau

SEQ ID NO: 147777 - RNA, 21 nt, Artificial Sequence
  Synthetic
auagagaagcuuuaagacuau

SEQ ID NO: 147778 - RNA, 22 nt, Artificial Sequence
  Synthetic
uauagagaagcuuuaagacuau

SEQ ID NO: 147779 - RNA, 23 nt, Artificial Sequence
  Synthetic
auauagagaagcuuuaagacuau

SEQ ID NO: 147780 - RNA, 24 nt, Artificial Sequence
  Synthetic
aauauagagaagcuuuaagacuau

SEQ ID NO: 147781 - RNA, 18 nt, Artificial Sequence
  Synthetic
uuuuuuuccuuuuacuau

SEQ ID NO: 147782 - RNA, 19 nt, Artificial Sequence
  Synthetic
uuuuuuuuccuuuuacuau

SEQ ID NO: 147783 - RNA, 20 nt, Artificial Sequence
  Synthetic
auuuuuuuuccuuuuacuau

SEQ ID NO: 147784 - RNA, 18 nt, Artificial Sequence
  Synthetic
cuuuugagaaaugccuau

SEQ ID NO: 147785 - RNA, 19 nt, Artificial Sequence
  Synthetic
ucuuuugagaaaugccuau

SEQ ID NO: 147786 - RNA, 20 nt, Artificial Sequence
  Synthetic
uucuuuugagaaaugccuau

SEQ ID NO: 147787 - RNA, 21 nt, Artificial Sequence
  Synthetic
cuucuuuugagaaaugccuau

SEQ ID NO: 147788 - RNA, 22 nt, Artificial Sequence
  Synthetic
ucuucuuuugagaaaugccuau

SEQ ID NO: 147789 - RNA, 24 nt, Artificial Sequence
  Synthetic
ugucuucuuuugagaaaugccuau

SEQ ID NO: 147790 - RNA, 18 nt, Artificial Sequence
  Synthetic
caaaccauaucauccuau

SEQ ID NO: 147791 - RNA, 19 nt, Artificial Sequence
  Synthetic
ccaaaccauaucauccuau

SEQ ID NO: 147792 - RNA, 21 nt, Artificial Sequence
  Synthetic
agccaaaccauaucauccuau

SEQ ID NO: 147793 - RNA, 22 nt, Artificial Sequence
  Synthetic
cagccaaaccauaucauccuau

SEQ ID NO: 147794 - RNA, 23 nt, Artificial Sequence
  Synthetic
acagccaaaccauaucauccuau

SEQ ID NO: 147795 - RNA, 24 nt, Artificial Sequence
  Synthetic
cacagccaaaccauaucauccuau

SEQ ID NO: 147796 - RNA, 19 nt, Artificial Sequence
  Synthetic
uguuccauuucuguccuau

SEQ ID NO: 147797 - RNA, 20 nt, Artificial Sequence
  Synthetic
auguuccauuucuguccuau

SEQ ID NO: 147798 - RNA, 21 nt, Artificial Sequence
  Synthetic
cauguuccauuucuguccuau

SEQ ID NO: 147799 - RNA, 22 nt, Artificial Sequence
  Synthetic
ccauguuccauuucuguccuau

SEQ ID NO: 147800 - RNA, 23 nt, Artificial Sequence
  Synthetic
cccauguuccauuucuguccuau

SEQ ID NO: 147801 - RNA, 24 nt, Artificial Sequence
  Synthetic
ucccauguuccauuucuguccuau

SEQ ID NO: 147802 - RNA, 19 nt, Artificial Sequence
  Synthetic
ugacuuccucucuuccuau

SEQ ID NO: 147803 - RNA, 20 nt, Artificial Sequence
  Synthetic
uugacuuccucucuuccuau

SEQ ID NO: 147804 - RNA, 21 nt, Artificial Sequence
  Synthetic
uuugacuuccucucuuccuau

SEQ ID NO: 147805 - RNA, 22 nt, Artificial Sequence
  Synthetic
auuugacuuccucucuuccuau

SEQ ID NO: 147806 - RNA, 23 nt, Artificial Sequence
  Synthetic
aauuugacuuccucucuuccuau

SEQ ID NO: 147807 - RNA, 24 nt, Artificial Sequence
  Synthetic
uaauuugacuuccucucuuccuau

SEQ ID NO: 147808 - RNA, 18 nt, Artificial Sequence
  Synthetic
uguaagacuucaagcuau

SEQ ID NO: 147809 - RNA, 19 nt, Artificial Sequence
  Synthetic
auguaagacuucaagcuau

SEQ ID NO: 147810 - RNA, 20 nt, Artificial Sequence
  Synthetic
aauguaagacuucaagcuau

SEQ ID NO: 147811 - RNA, 21 nt, Artificial Sequence
  Synthetic
aaauguaagacuucaagcuau

SEQ ID NO: 147812 - RNA, 22 nt, Artificial Sequence
  Synthetic
uaaauguaagacuucaagcuau

SEQ ID NO: 147813 - RNA, 23 nt, Artificial Sequence
  Synthetic
uuaaauguaagacuucaagcuau

SEQ ID NO: 147814 - RNA, 24 nt, Artificial Sequence
  Synthetic
uuuaaauguaagacuucaagcuau

SEQ ID NO: 147815 - RNA, 19 nt, Artificial Sequence
  Synthetic
aguauacauggugggcuau

SEQ ID NO: 147816 - RNA, 20 nt, Artificial Sequence
  Synthetic
caguauacauggugggcuau

SEQ ID NO: 147817 - RNA, 18 nt, Artificial Sequence
  Synthetic
auuuuaauuauaaucuau

SEQ ID NO: 147818 - RNA, 19 nt, Artificial Sequence
  Synthetic
uauuuuaauuauaaucuau

SEQ ID NO: 147819 - RNA, 20 nt, Artificial Sequence
  Synthetic
uuauuuuaauuauaaucuau

SEQ ID NO: 147820 - RNA, 22 nt, Artificial Sequence
  Synthetic
uguuauuuuaauuauaaucuau

SEQ ID NO: 147821 - RNA, 23 nt, Artificial Sequence
  Synthetic
uuguuauuuuaauuauaaucuau

SEQ ID NO: 147822 - RNA, 24 nt, Artificial Sequence
  Synthetic
uuuguuauuuuaauuauaaucuau

SEQ ID NO: 147823 - RNA, 18 nt, Artificial Sequence
  Synthetic
auauuccuacacaucuau

SEQ ID NO: 147824 - RNA, 19 nt, Artificial Sequence
  Synthetic
uauauuccuacacaucuau

SEQ ID NO: 147825 - RNA, 20 nt, Artificial Sequence
  Synthetic
auauauuccuacacaucuau

SEQ ID NO: 147826 - RNA, 18 nt, Artificial Sequence
  Synthetic
uuaacucauuuucucuau

SEQ ID NO: 147827 - RNA, 19 nt, Artificial Sequence
  Synthetic
ugaauuagauguaaaguau

SEQ ID NO: 147828 - RNA, 20 nt, Artificial Sequence
  Synthetic
augaauuagauguaaaguau

SEQ ID NO: 147829 - RNA, 22 nt, Artificial Sequence
  Synthetic
ugaugaauuagauguaaaguau

SEQ ID NO: 147830 - RNA, 24 nt, Artificial Sequence
  Synthetic
ugugaugaauuagauguaaaguau

SEQ ID NO: 147831 - RNA, 21 nt, Artificial Sequence
  Synthetic
uucucagcuuugauugcguau

SEQ ID NO: 147832 - RNA, 24 nt, Artificial Sequence
  Synthetic
ugguucucagcuuugauugcguau

SEQ ID NO: 147833 - RNA, 18 nt, Artificial Sequence
  Synthetic
aauuucuaccuaagguau

SEQ ID NO: 147834 - RNA, 19 nt, Artificial Sequence
  Synthetic
uaauuucuaccuaagguau

SEQ ID NO: 147835 - RNA, 20 nt, Artificial Sequence
  Synthetic
cuaauuucuaccuaagguau

SEQ ID NO: 147836 - RNA, 18 nt, Artificial Sequence
  Synthetic
ucugccaggcuuugguau

SEQ ID NO: 147837 - RNA, 19 nt, Artificial Sequence
  Synthetic
cucugccaggcuuugguau

SEQ ID NO: 147838 - RNA, 20 nt, Artificial Sequence
  Synthetic
ucucugccaggcuuugguau

SEQ ID NO: 147839 - RNA, 22 nt, Artificial Sequence
  Synthetic
ugucucugccaggcuuugguau

SEQ ID NO: 147840 - RNA, 24 nt, Artificial Sequence
  Synthetic
ugugucucugccaggcuuugguau

SEQ ID NO: 147841 - RNA, 18 nt, Artificial Sequence
  Synthetic
ucugcccggcuuugguau

SEQ ID NO: 147842 - RNA, 19 nt, Artificial Sequence
  Synthetic
cucugcccggcuuugguau

SEQ ID NO: 147843 - RNA, 20 nt, Artificial Sequence
  Synthetic
ucucugcccggcuuugguau

SEQ ID NO: 147844 - RNA, 22 nt, Artificial Sequence
  Synthetic
ugucucugcccggcuuugguau

SEQ ID NO: 147845 - RNA, 24 nt, Artificial Sequence
  Synthetic
ugugucucugcccggcuuugguau

SEQ ID NO: 147846 - RNA, 18 nt, Artificial Sequence
  Synthetic
uuacaugucuuuugguau

SEQ ID NO: 147847 - RNA, 19 nt, Artificial Sequence
  Synthetic
auuacaugucuuuugguau

SEQ ID NO: 147848 - RNA, 20 nt, Artificial Sequence
  Synthetic
uauuacaugucuuuugguau

SEQ ID NO: 147849 - RNA, 18 nt, Artificial Sequence
  Synthetic
uuugccagguuuugguau

SEQ ID NO: 147850 - RNA, 19 nt, Artificial Sequence
  Synthetic
cuuugccagguuuugguau

SEQ ID NO: 147851 - RNA, 20 nt, Artificial Sequence
  Synthetic
ucuuugccagguuuugguau

SEQ ID NO: 147852 - RNA, 22 nt, Artificial Sequence
  Synthetic
ugucuuugccagguuuugguau

SEQ ID NO: 147853 - RNA, 24 nt, Artificial Sequence
  Synthetic
ugugucuuugccagguuuugguau

SEQ ID NO: 147854 - RNA, 18 nt, Artificial Sequence
  Synthetic
cuuuucugguuuugguau

SEQ ID NO: 147855 - RNA, 19 nt, Artificial Sequence
  Synthetic
ccuuuucugguuuugguau

SEQ ID NO: 147856 - RNA, 20 nt, Artificial Sequence
  Synthetic
uccuuuucugguuuugguau

SEQ ID NO: 147857 - RNA, 21 nt, Artificial Sequence
  Synthetic
uuccuuuucugguuuugguau

SEQ ID NO: 147858 - RNA, 22 nt, Artificial Sequence
  Synthetic
uuuccuuuucugguuuugguau

SEQ ID NO: 147859 - RNA, 23 nt, Artificial Sequence
  Synthetic
auuuccuuuucugguuuugguau

SEQ ID NO: 147860 - RNA, 24 nt, Artificial Sequence
  Synthetic
uauuuccuuuucugguuuugguau

SEQ ID NO: 147861 - RNA, 18 nt, Artificial Sequence
  Synthetic
aaaaaaaaucuaauguau

SEQ ID NO: 147862 - RNA, 19 nt, Artificial Sequence
  Synthetic
aaaaaaaaaucuaauguau

SEQ ID NO: 147863 - RNA, 20 nt, Artificial Sequence
  Synthetic
aaaaaaaaaaucuaauguau

SEQ ID NO: 147864 - RNA, 21 nt, Artificial Sequence
  Synthetic
uacaaauuuauuaagcuguau

SEQ ID NO: 147865 - RNA, 22 nt, Artificial Sequence
  Synthetic
auacaaauuuauuaagcuguau

SEQ ID NO: 147866 - RNA, 23 nt, Artificial Sequence
  Synthetic
aauacaaauuuauuaagcuguau

SEQ ID NO: 147867 - RNA, 19 nt, Artificial Sequence
  Synthetic
uggaaaaugugaaguguau

SEQ ID NO: 147868 - RNA, 20 nt, Artificial Sequence
  Synthetic
cuggaaaaugugaaguguau

SEQ ID NO: 147869 - RNA, 21 nt, Artificial Sequence
  Synthetic
ucuggaaaaugugaaguguau

SEQ ID NO: 147870 - RNA, 22 nt, Artificial Sequence
  Synthetic
uucuggaaaaugugaaguguau

SEQ ID NO: 147871 - RNA, 23 nt, Artificial Sequence
  Synthetic
auucuggaaaaugugaaguguau

SEQ ID NO: 147872 - RNA, 24 nt, Artificial Sequence
  Synthetic
cauucuggaaaaugugaaguguau

SEQ ID NO: 147873 - RNA, 18 nt, Artificial Sequence
  Synthetic
uucccagcaacaguguau

SEQ ID NO: 147874 - RNA, 19 nt, Artificial Sequence
  Synthetic
auucccagcaacaguguau

SEQ ID NO: 147875 - RNA, 20 nt, Artificial Sequence
  Synthetic
cauucccagcaacaguguau

SEQ ID NO: 147876 - RNA, 22 nt, Artificial Sequence
  Synthetic
ugcauucccagcaacaguguau

SEQ ID NO: 147877 - RNA, 23 nt, Artificial Sequence
  Synthetic
uugcauucccagcaacaguguau

SEQ ID NO: 147878 - RNA, 24 nt, Artificial Sequence
  Synthetic
uuugcauucccagcaacaguguau

SEQ ID NO: 147879 - RNA, 18 nt, Artificial Sequence
  Synthetic
ugucuguuauugguguau

SEQ ID NO: 147880 - RNA, 19 nt, Artificial Sequence
  Synthetic
uugucuguuauugguguau

SEQ ID NO: 147881 - RNA, 20 nt, Artificial Sequence
  Synthetic
uuugucuguuauugguguau

SEQ ID NO: 147882 - RNA, 22 nt, Artificial Sequence
  Synthetic
uguuugucuguuauugguguau

SEQ ID NO: 147883 - RNA, 23 nt, Artificial Sequence
  Synthetic
cuguuugucuguuauugguguau

SEQ ID NO: 147884 - RNA, 24 nt, Artificial Sequence
  Synthetic
ucuguuugucuguuauugguguau

SEQ ID NO: 147885 - RNA, 18 nt, Artificial Sequence
  Synthetic
ugucuauucuugguguau

SEQ ID NO: 147886 - RNA, 19 nt, Artificial Sequence
  Synthetic
uugucuauucuugguguau

SEQ ID NO: 147887 - RNA, 20 nt, Artificial Sequence
  Synthetic
uuugucuauucuugguguau

SEQ ID NO: 147888 - RNA, 22 nt, Artificial Sequence
  Synthetic
uguuugucuauucuugguguau

SEQ ID NO: 147889 - RNA, 23 nt, Artificial Sequence
  Synthetic
cuguuugucuauucuugguguau

SEQ ID NO: 147890 - RNA, 24 nt, Artificial Sequence
  Synthetic
ucuguuugucuauucuugguguau

SEQ ID NO: 147891 - RNA, 18 nt, Artificial Sequence
  Synthetic
ugucugucguugguguau

SEQ ID NO: 147892 - RNA, 19 nt, Artificial Sequence
  Synthetic
uugucugucguugguguau

SEQ ID NO: 147893 - RNA, 20 nt, Artificial Sequence
  Synthetic
uuugucugucguugguguau

SEQ ID NO: 147894 - RNA, 22 nt, Artificial Sequence
  Synthetic
uguuugucugucguugguguau

SEQ ID NO: 147895 - RNA, 23 nt, Artificial Sequence
  Synthetic
cuguuugucugucguugguguau

SEQ ID NO: 147896 - RNA, 24 nt, Artificial Sequence
  Synthetic
ucuguuugucugucguugguguau

SEQ ID NO: 147897 - RNA, 18 nt, Artificial Sequence
  Synthetic
ugucuguuguugguguau

SEQ ID NO: 147898 - RNA, 19 nt, Artificial Sequence
  Synthetic
uugucuguuguugguguau

SEQ ID NO: 147899 - RNA, 20 nt, Artificial Sequence
  Synthetic
uuugucuguuguugguguau

SEQ ID NO: 147900 - RNA, 18 nt, Artificial Sequence
  Synthetic
ucuauaguuugauuguau

SEQ ID NO: 147901 - RNA, 19 nt, Artificial Sequence
  Synthetic
uucuauaguuugauuguau

SEQ ID NO: 147902 - RNA, 18 nt, Artificial Sequence
  Synthetic
auuaauuaaaauuuguau

SEQ ID NO: 147903 - RNA, 19 nt, Artificial Sequence
  Synthetic
uauuaauuaaaauuuguau

SEQ ID NO: 147904 - RNA, 20 nt, Artificial Sequence
  Synthetic
uuauuaauuaaaauuuguau

SEQ ID NO: 147905 - RNA, 21 nt, Artificial Sequence
  Synthetic
ccuuaucucccuauuuuguau

SEQ ID NO: 147906 - RNA, 22 nt, Artificial Sequence
  Synthetic
uccuuaucucccuauuuuguau

SEQ ID NO: 147907 - RNA, 23 nt, Artificial Sequence
  Synthetic
uuccuuaucucccuauuuuguau

SEQ ID NO: 147908 - RNA, 18 nt, Artificial Sequence
  Synthetic
aaaaauuuuaaaaauuau

SEQ ID NO: 147909 - RNA, 19 nt, Artificial Sequence
  Synthetic
aaaaaauuuuaaaaauuau

SEQ ID NO: 147910 - RNA, 20 nt, Artificial Sequence
  Synthetic
aaaaaaauuuuaaaaauuau

SEQ ID NO: 147911 - RNA, 21 nt, Artificial Sequence
  Synthetic
caaaaaaauuuuaaaaauuau

SEQ ID NO: 147912 - RNA, 22 nt, Artificial Sequence
  Synthetic
acaaaaaaauuuuaaaaauuau

SEQ ID NO: 147913 - RNA, 23 nt, Artificial Sequence
  Synthetic
cacaaaaaaauuuuaaaaauuau

SEQ ID NO: 147914 - RNA, 24 nt, Artificial Sequence
  Synthetic
ccacaaaaaaauuuuaaaaauuau

SEQ ID NO: 147915 - RNA, 18 nt, Artificial Sequence
  Synthetic
cuuuuaaauuaaaauuau

SEQ ID NO: 147916 - RNA, 18 nt, Artificial Sequence
  Synthetic
aauauggauauaaauuau

SEQ ID NO: 147917 - RNA, 19 nt, Artificial Sequence
  Synthetic
aaauauggauauaaauuau

SEQ ID NO: 147918 - RNA, 20 nt, Artificial Sequence
  Synthetic
uaaauauggauauaaauuau

SEQ ID NO: 147919 - RNA, 18 nt, Artificial Sequence
  Synthetic
uauuuuucuguaaauuau

SEQ ID NO: 147920 - RNA, 19 nt, Artificial Sequence
  Synthetic
uuauuuuucuguaaauuau

SEQ ID NO: 147921 - RNA, 20 nt, Artificial Sequence
  Synthetic
uuuauuuuucuguaaauuau

SEQ ID NO: 147922 - RNA, 21 nt, Artificial Sequence
  Synthetic
uuuuauuuuucuguaaauuau

SEQ ID NO: 147923 - RNA, 22 nt, Artificial Sequence
  Synthetic
auuuuauuuuucuguaaauuau

SEQ ID NO: 147924 - RNA, 23 nt, Artificial Sequence
  Synthetic
uauuuuauuuuucuguaaauuau

SEQ ID NO: 147925 - RNA, 24 nt, Artificial Sequence
  Synthetic
uuauuuuauuuuucuguaaauuau

SEQ ID NO: 147926 - RNA, 18 nt, Artificial Sequence
  Synthetic
auccuaguguuccauuau

SEQ ID NO: 147927 - RNA, 19 nt, Artificial Sequence
  Synthetic
uauccuaguguuccauuau

SEQ ID NO: 147928 - RNA, 20 nt, Artificial Sequence
  Synthetic
uuauccuaguguuccauuau

SEQ ID NO: 147929 - RNA, 21 nt, Artificial Sequence
  Synthetic
uuuauccuaguguuccauuau

SEQ ID NO: 147930 - RNA, 22 nt, Artificial Sequence
  Synthetic
auuuauccuaguguuccauuau

SEQ ID NO: 147931 - RNA, 23 nt, Artificial Sequence
  Synthetic
uauuuauccuaguguuccauuau

SEQ ID NO: 147932 - RNA, 24 nt, Artificial Sequence
  Synthetic
cuauuuauccuaguguuccauuau

SEQ ID NO: 147933 - RNA, 19 nt, Artificial Sequence
  Synthetic
uggggauuauggggauuau

SEQ ID NO: 147934 - RNA, 20 nt, Artificial Sequence
  Synthetic
cuggggauuauggggauuau

SEQ ID NO: 147935 - RNA, 21 nt, Artificial Sequence
  Synthetic
ccuggggauuauggggauuau

SEQ ID NO: 147936 - RNA, 22 nt, Artificial Sequence
  Synthetic
accuggggauuauggggauuau

SEQ ID NO: 147937 - RNA, 23 nt, Artificial Sequence
  Synthetic
caccuggggauuauggggauuau

SEQ ID NO: 147938 - RNA, 24 nt, Artificial Sequence
  Synthetic
acaccuggggauuauggggauuau

SEQ ID NO: 147939 - RNA, 18 nt, Artificial Sequence
  Synthetic
uugacaccuggggauuau

SEQ ID NO: 147940 - RNA, 19 nt, Artificial Sequence
  Synthetic
uuugacaccuggggauuau

SEQ ID NO: 147941 - RNA, 20 nt, Artificial Sequence
  Synthetic
cuuugacaccuggggauuau

SEQ ID NO: 147942 - RNA, 21 nt, Artificial Sequence
  Synthetic
ccuuugacaccuggggauuau

SEQ ID NO: 147943 - RNA, 22 nt, Artificial Sequence
  Synthetic
uccuuugacaccuggggauuau

SEQ ID NO: 147944 - RNA, 23 nt, Artificial Sequence
  Synthetic
cuccuuugacaccuggggauuau

SEQ ID NO: 147945 - RNA, 24 nt, Artificial Sequence
  Synthetic
ucuccuuugacaccuggggauuau

SEQ ID NO: 147946 - RNA, 18 nt, Artificial Sequence
  Synthetic
acaacacguggggauuau

SEQ ID NO: 147947 - RNA, 19 nt, Artificial Sequence
  Synthetic
cacaacacguggggauuau

SEQ ID NO: 147948 - RNA, 20 nt, Artificial Sequence
  Synthetic
ccacaacacguggggauuau

SEQ ID NO: 147949 - RNA, 21 nt, Artificial Sequence
  Synthetic
cccacaacacguggggauuau

SEQ ID NO: 147950 - RNA, 22 nt, Artificial Sequence
  Synthetic
ucccacaacacguggggauuau

SEQ ID NO: 147951 - RNA, 23 nt, Artificial Sequence
  Synthetic
cucccacaacacguggggauuau

SEQ ID NO: 147952 - RNA, 24 nt, Artificial Sequence
  Synthetic
ccucccacaacacguggggauuau

SEQ ID NO: 147953 - RNA, 21 nt, Artificial Sequence
  Synthetic
uauuguaagauuauggauuau

SEQ ID NO: 147954 - RNA, 22 nt, Artificial Sequence
  Synthetic
cuauuguaagauuauggauuau

SEQ ID NO: 147955 - RNA, 24 nt, Artificial Sequence
  Synthetic
ugcuauuguaagauuauggauuau

SEQ ID NO: 147956 - RNA, 19 nt, Artificial Sequence
  Synthetic
aguuauugauuauuauuau

SEQ ID NO: 147957 - RNA, 20 nt, Artificial Sequence
  Synthetic
uaguuauugauuauuauuau

SEQ ID NO: 147958 - RNA, 21 nt, Artificial Sequence
  Synthetic
cucauuucugauuuuacuuau

SEQ ID NO: 147959 - RNA, 22 nt, Artificial Sequence
  Synthetic
ucucauuucugauuuuacuuau

SEQ ID NO: 147960 - RNA, 23 nt, Artificial Sequence
  Synthetic
uucucauuucugauuuuacuuau

SEQ ID NO: 147961 - RNA, 24 nt, Artificial Sequence
  Synthetic
uuucucauuucugauuuuacuuau

SEQ ID NO: 147962 - RNA, 21 nt, Artificial Sequence
  Synthetic
uucauuucugauuuuacuuau

SEQ ID NO: 147963 - RNA, 22 nt, Artificial Sequence
  Synthetic
uuucauuucugauuuuacuuau

SEQ ID NO: 147964 - RNA, 23 nt, Artificial Sequence
  Synthetic
cuuucauuucugauuuuacuuau

SEQ ID NO: 147965 - RNA, 24 nt, Artificial Sequence
  Synthetic
ucuuucauuucugauuuuacuuau

SEQ ID NO: 147966 - RNA, 18 nt, Artificial Sequence
  Synthetic
agguugcaugcuccuuau

SEQ ID NO: 147967 - RNA, 19 nt, Artificial Sequence
  Synthetic
uagguugcaugcuccuuau

SEQ ID NO: 147968 - RNA, 20 nt, Artificial Sequence
  Synthetic
cuagguugcaugcuccuuau

SEQ ID NO: 147969 - RNA, 21 nt, Artificial Sequence
  Synthetic
ucuagguugcaugcuccuuau

SEQ ID NO: 147970 - RNA, 22 nt, Artificial Sequence
  Synthetic
aucuagguugcaugcuccuuau

SEQ ID NO: 147971 - RNA, 18 nt, Artificial Sequence
  Synthetic
agguugugugcuccuuau

SEQ ID NO: 147972 - RNA, 19 nt, Artificial Sequence
  Synthetic
uagguugugugcuccuuau

SEQ ID NO: 147973 - RNA, 20 nt, Artificial Sequence
  Synthetic
cuagguugugugcuccuuau

SEQ ID NO: 147974 - RNA, 21 nt, Artificial Sequence
  Synthetic
ucuagguugugugcuccuuau

SEQ ID NO: 147975 - RNA, 22 nt, Artificial Sequence
  Synthetic
aucuagguugugugcuccuuau

SEQ ID NO: 147976 - RNA, 18 nt, Artificial Sequence
  Synthetic
auuucuacuugagcuuau

SEQ ID NO: 147977 - RNA, 19 nt, Artificial Sequence
  Synthetic
cauuucuacuugagcuuau

SEQ ID NO: 147978 - RNA, 20 nt, Artificial Sequence
  Synthetic
ucauuucuacuugagcuuau

SEQ ID NO: 147979 - RNA, 21 nt, Artificial Sequence
  Synthetic
uucauuucuacuugagcuuau

SEQ ID NO: 147980 - RNA, 22 nt, Artificial Sequence
  Synthetic
uuucauuucuacuugagcuuau

SEQ ID NO: 147981 - RNA, 24 nt, Artificial Sequence
  Synthetic
aguuucauuucuacuugagcuuau

SEQ ID NO: 147982 - RNA, 18 nt, Artificial Sequence
  Synthetic
aauaauauuuaaaguuau

SEQ ID NO: 147983 - RNA, 19 nt, Artificial Sequence
  Synthetic
aaauaauauuuaaaguuau

SEQ ID NO: 147984 - RNA, 20 nt, Artificial Sequence
  Synthetic
uaaauaauauuuaaaguuau

SEQ ID NO: 147985 - RNA, 21 nt, Artificial Sequence
  Synthetic
aauuucuuuguaacaaguuau

SEQ ID NO: 147986 - RNA, 22 nt, Artificial Sequence
  Synthetic
aaauuucuuuguaacaaguuau

SEQ ID NO: 147987 - RNA, 23 nt, Artificial Sequence
  Synthetic
aaaauuucuuuguaacaaguuau

SEQ ID NO: 147988 - RNA, 19 nt, Artificial Sequence
  Synthetic
ugggaaaaggucagguuau

SEQ ID NO: 147989 - RNA, 20 nt, Artificial Sequence
  Synthetic
augggaaaaggucagguuau

SEQ ID NO: 147990 - RNA, 19 nt, Artificial Sequence
  Synthetic
uggggauuauggagguuau

SEQ ID NO: 147991 - RNA, 21 nt, Artificial Sequence
  Synthetic
cguggggauuauggagguuau

SEQ ID NO: 147992 - RNA, 22 nt, Artificial Sequence
  Synthetic
acguggggauuauggagguuau

SEQ ID NO: 147993 - RNA, 23 nt, Artificial Sequence
  Synthetic
cacguggggauuauggagguuau

SEQ ID NO: 147994 - RNA, 24 nt, Artificial Sequence
  Synthetic
acacguggggauuauggagguuau

SEQ ID NO: 147995 - RNA, 18 nt, Artificial Sequence
  Synthetic
augucacaggguuguuau

SEQ ID NO: 147996 - RNA, 19 nt, Artificial Sequence
  Synthetic
uaugucacaggguuguuau

SEQ ID NO: 147997 - RNA, 20 nt, Artificial Sequence
  Synthetic
cuaugucacaggguuguuau

SEQ ID NO: 147998 - RNA, 21 nt, Artificial Sequence
  Synthetic
ucuaugucacaggguuguuau

SEQ ID NO: 147999 - RNA, 23 nt, Artificial Sequence
  Synthetic
ugucuaugucacaggguuguuau

SEQ ID NO: 148000 - RNA, 18 nt, Artificial Sequence
  Synthetic
accucauaggguuguuau

SEQ ID NO: 148001 - RNA, 20 nt, Artificial Sequence
  Synthetic
ugaccucauaggguuguuau

SEQ ID NO: 148002 - RNA, 21 nt, Artificial Sequence
  Synthetic
augaccucauaggguuguuau

SEQ ID NO: 148003 - RNA, 22 nt, Artificial Sequence
  Synthetic
aaugaccucauaggguuguuau

SEQ ID NO: 148004 - RNA, 23 nt, Artificial Sequence
  Synthetic
uaaugaccucauaggguuguuau

SEQ ID NO: 148005 - RNA, 24 nt, Artificial Sequence
  Synthetic
uuaaugaccucauaggguuguuau

SEQ ID NO: 148006 - RNA, 18 nt, Artificial Sequence
  Synthetic
ccaguguaauuuuguuau

SEQ ID NO: 148007 - RNA, 19 nt, Artificial Sequence
  Synthetic
accaguguaauuuuguuau

SEQ ID NO: 148008 - RNA, 20 nt, Artificial Sequence
  Synthetic
uaccaguguaauuuuguuau

SEQ ID NO: 148009 - RNA, 21 nt, Artificial Sequence
  Synthetic
uuaccaguguaauuuuguuau

SEQ ID NO: 148010 - RNA, 18 nt, Artificial Sequence
  Synthetic
cuguaucuacaaauuuau

SEQ ID NO: 148011 - RNA, 19 nt, Artificial Sequence
  Synthetic
ucuguaucuacaaauuuau

SEQ ID NO: 148012 - RNA, 20 nt, Artificial Sequence
  Synthetic
aucuguaucuacaaauuuau

SEQ ID NO: 148013 - RNA, 21 nt, Artificial Sequence
  Synthetic
aaauaaacaggugaaauuuau

SEQ ID NO: 148014 - RNA, 22 nt, Artificial Sequence
  Synthetic
aaaauaaacaggugaaauuuau

SEQ ID NO: 148015 - RNA, 23 nt, Artificial Sequence
  Synthetic
aaaaauaaacaggugaaauuuau

SEQ ID NO: 148016 - RNA, 24 nt, Artificial Sequence
  Synthetic
uaaaaauaaacaggugaaauuuau

SEQ ID NO: 148017 - RNA, 18 nt, Artificial Sequence
  Synthetic
auauuuuguguaauuuau

SEQ ID NO: 148018 - RNA, 19 nt, Artificial Sequence
  Synthetic
cauauuuuguguaauuuau

SEQ ID NO: 148019 - RNA, 20 nt, Artificial Sequence
  Synthetic
acauauuuuguguaauuuau

SEQ ID NO: 148020 - RNA, 19 nt, Artificial Sequence
  Synthetic
uguuaugcuucccauuuau

SEQ ID NO: 148021 - RNA, 20 nt, Artificial Sequence
  Synthetic
uuguuaugcuucccauuuau

SEQ ID NO: 148022 - RNA, 18 nt, Artificial Sequence
  Synthetic
ugaggaaaauuuauuuau

SEQ ID NO: 148023 - RNA, 19 nt, Artificial Sequence
  Synthetic
uugaggaaaauuuauuuau

SEQ ID NO: 148024 - RNA, 20 nt, Artificial Sequence
  Synthetic
auugaggaaaauuuauuuau

SEQ ID NO: 148025 - RNA, 18 nt, Artificial Sequence
  Synthetic
uuccuuaaauuucuuuau

SEQ ID NO: 148026 - RNA, 19 nt, Artificial Sequence
  Synthetic
uuuccuuaaauuucuuuau

SEQ ID NO: 148027 - RNA, 20 nt, Artificial Sequence
  Synthetic
uuuuccuuaaauuucuuuau

SEQ ID NO: 148028 - RNA, 19 nt, Artificial Sequence
  Synthetic
ugugaauuacacaguuuau

SEQ ID NO: 148029 - RNA, 18 nt, Artificial Sequence
  Synthetic
ugucuguuauugguuuau

SEQ ID NO: 148030 - RNA, 19 nt, Artificial Sequence
  Synthetic
cugucuguuauugguuuau

SEQ ID NO: 148031 - RNA, 20 nt, Artificial Sequence
  Synthetic
ucugucuguuauugguuuau

SEQ ID NO: 148032 - RNA, 21 nt, Artificial Sequence
  Synthetic
cucugucuguuauugguuuau

SEQ ID NO: 148033 - RNA, 22 nt, Artificial Sequence
  Synthetic
ucucugucuguuauugguuuau

SEQ ID NO: 148034 - RNA, 23 nt, Artificial Sequence
  Synthetic
cucucugucuguuauugguuuau

SEQ ID NO: 148035 - RNA, 18 nt, Artificial Sequence
  Synthetic
ugcuuauacacuguuuau

SEQ ID NO: 148036 - RNA, 19 nt, Artificial Sequence
  Synthetic
augcuuauacacuguuuau

SEQ ID NO: 148037 - RNA, 20 nt, Artificial Sequence
  Synthetic
aaugcuuauacacuguuuau

SEQ ID NO: 148038 - RNA, 24 nt, Artificial Sequence
  Synthetic
agggaaugcuuauacacuguuuau

SEQ ID NO: 148039 - RNA, 18 nt, Artificial Sequence
  Synthetic
auuuauauauuuguuuau

SEQ ID NO: 148040 - RNA, 19 nt, Artificial Sequence
  Synthetic
aauuuauauauuuguuuau

SEQ ID NO: 148041 - RNA, 20 nt, Artificial Sequence
  Synthetic
aaauuuauauauuuguuuau

SEQ ID NO: 148042 - RNA, 21 nt, Artificial Sequence
  Synthetic
aaaauuuauauauuuguuuau

SEQ ID NO: 148043 - RNA, 22 nt, Artificial Sequence
  Synthetic
uaaaauuuauauauuuguuuau

SEQ ID NO: 148044 - RNA, 23 nt, Artificial Sequence
  Synthetic
uuaaaauuuauauauuuguuuau

SEQ ID NO: 148045 - RNA, 24 nt, Artificial Sequence
  Synthetic
uuuaaaauuuauauauuuguuuau

SEQ ID NO: 148046 - RNA, 18 nt, Artificial Sequence
  Synthetic
aauaaauuugcauuuuau

SEQ ID NO: 148047 - RNA, 19 nt, Artificial Sequence
  Synthetic
aaauaaauuugcauuuuau

SEQ ID NO: 148048 - RNA, 20 nt, Artificial Sequence
  Synthetic
uaaauaaauuugcauuuuau

SEQ ID NO: 148049 - RNA, 18 nt, Artificial Sequence
  Synthetic
uucuuuugaagauuuuau

SEQ ID NO: 148050 - RNA, 19 nt, Artificial Sequence
  Synthetic
cuucuuuugaagauuuuau

SEQ ID NO: 148051 - RNA, 20 nt, Artificial Sequence
  Synthetic
ucuucuuuugaagauuuuau

SEQ ID NO: 148052 - RNA, 19 nt, Artificial Sequence
  Synthetic
ugaguuuucguauuuuuau

SEQ ID NO: 148053 - RNA, 20 nt, Artificial Sequence
  Synthetic
augaguuuucguauuuuuau

SEQ ID NO: 148054 - RNA, 18 nt, Artificial Sequence
  Synthetic
ugucuaaauuauuuuuau

SEQ ID NO: 148055 - RNA, 19 nt, Artificial Sequence
  Synthetic
cugucuaaauuauuuuuau

SEQ ID NO: 148056 - RNA, 20 nt, Artificial Sequence
  Synthetic
acugucuaaauuauuuuuau

SEQ ID NO: 148057 - RNA, 18 nt, Artificial Sequence
  Synthetic
auuugcccauuuuuuuau

SEQ ID NO: 148058 - RNA, 19 nt, Artificial Sequence
  Synthetic
uauuugcccauuuuuuuau

SEQ ID NO: 148059 - RNA, 20 nt, Artificial Sequence
  Synthetic
auauuugcccauuuuuuuau

SEQ ID NO: 148060 - RNA, 18 nt, Artificial Sequence
  Synthetic
aaaaacuaugagaaaacu

SEQ ID NO: 148061 - RNA, 19 nt, Artificial Sequence
  Synthetic
uaaaaacuaugagaaaacu

SEQ ID NO: 148062 - RNA, 20 nt, Artificial Sequence
  Synthetic
auaaaaacuaugagaaaacu

SEQ ID NO: 148063 - RNA, 22 nt, Artificial Sequence
  Synthetic
ugauaaaaacuaugagaaaacu

SEQ ID NO: 148064 - RNA, 23 nt, Artificial Sequence
  Synthetic
augauaaaaacuaugagaaaacu

SEQ ID NO: 148065 - RNA, 24 nt, Artificial Sequence
  Synthetic
caugauaaaaacuaugagaaaacu

SEQ ID NO: 148066 - RNA, 18 nt, Artificial Sequence
  Synthetic
cacauguacccuaaaacu

SEQ ID NO: 148067 - RNA, 20 nt, Artificial Sequence
  Synthetic
ugcacauguacccuaaaacu

SEQ ID NO: 148068 - RNA, 22 nt, Artificial Sequence
  Synthetic
ugugcacauguacccuaaaacu

SEQ ID NO: 148069 - RNA, 23 nt, Artificial Sequence
  Synthetic
augugcacauguacccuaaaacu

SEQ ID NO: 148070 - RNA, 24 nt, Artificial Sequence
  Synthetic
aaugugcacauguacccuaaaacu

SEQ ID NO: 148071 - RNA, 18 nt, Artificial Sequence
  Synthetic
uuccaagauggagaaacu

SEQ ID NO: 148072 - RNA, 19 nt, Artificial Sequence
  Synthetic
uuuccaagauggagaaacu

SEQ ID NO: 148073 - RNA, 20 nt, Artificial Sequence
  Synthetic
auuuccaagauggagaaacu

SEQ ID NO: 148074 - RNA, 18 nt, Artificial Sequence
  Synthetic
acaaagccuuuuuaaacu

SEQ ID NO: 148075 - RNA, 19 nt, Artificial Sequence
  Synthetic
aacaaagccuuuuuaaacu

SEQ ID NO: 148076 - RNA, 18 nt, Artificial Sequence
  Synthetic
acacuuuggaaaacaacu

SEQ ID NO: 148077 - RNA, 19 nt, Artificial Sequence
  Synthetic
aacacuuuggaaaacaacu

SEQ ID NO: 148078 - RNA, 20 nt, Artificial Sequence
  Synthetic
caacacuuuggaaaacaacu

SEQ ID NO: 148079 - RNA, 18 nt, Artificial Sequence
  Synthetic
uucccagccuccagaacu

SEQ ID NO: 148080 - RNA, 19 nt, Artificial Sequence
  Synthetic
cuucccagccuccagaacu

SEQ ID NO: 148081 - RNA, 20 nt, Artificial Sequence
  Synthetic
acuucccagccuccagaacu

SEQ ID NO: 148082 - RNA, 23 nt, Artificial Sequence
  Synthetic
uggacuucccagccuccagaacu

SEQ ID NO: 148083 - RNA, 24 nt, Artificial Sequence
  Synthetic
uuggacuucccagccuccagaacu

SEQ ID NO: 148084 - RNA, 18 nt, Artificial Sequence
  Synthetic
ucagcaauuccuagaacu

SEQ ID NO: 148085 - RNA, 20 nt, Artificial Sequence
  Synthetic
agucagcaauuccuagaacu

SEQ ID NO: 148086 - RNA, 23 nt, Artificial Sequence
  Synthetic
aggagucagcaauuccuagaacu

SEQ ID NO: 148087 - RNA, 24 nt, Artificial Sequence
  Synthetic
aaggagucagcaauuccuagaacu

SEQ ID NO: 148088 - RNA, 18 nt, Artificial Sequence
  Synthetic
uacaaucaaauuagaacu

SEQ ID NO: 148089 - RNA, 20 nt, Artificial Sequence
  Synthetic
aguacaaucaaauuagaacu

SEQ ID NO: 148090 - RNA, 21 nt, Artificial Sequence
  Synthetic
caguacaaucaaauuagaacu

SEQ ID NO: 148091 - RNA, 22 nt, Artificial Sequence
  Synthetic
acaguacaaucaaauuagaacu

SEQ ID NO: 148092 - RNA, 23 nt, Artificial Sequence
  Synthetic
cacaguacaaucaaauuagaacu

SEQ ID NO: 148093 - RNA, 24 nt, Artificial Sequence
  Synthetic
ccacaguacaaucaaauuagaacu

SEQ ID NO: 148094 - RNA, 18 nt, Artificial Sequence
  Synthetic
cugaagccaugcggaacu

SEQ ID NO: 148095 - RNA, 19 nt, Artificial Sequence
  Synthetic
ucugaagccaugcggaacu

SEQ ID NO: 148096 - RNA, 20 nt, Artificial Sequence
  Synthetic
cucugaagccaugcggaacu

SEQ ID NO: 148097 - RNA, 21 nt, Artificial Sequence
  Synthetic
ccucugaagccaugcggaacu

SEQ ID NO: 148098 - RNA, 24 nt, Artificial Sequence
  Synthetic
aggccucugaagccaugcggaacu

SEQ ID NO: 148099 - RNA, 23 nt, Artificial Sequence
  Synthetic
aggggcugggcgaagggggaacu

SEQ ID NO: 148100 - RNA, 24 nt, Artificial Sequence
  Synthetic
caggggcugggcgaagggggaacu

SEQ ID NO: 148101 - RNA, 18 nt, Artificial Sequence
  Synthetic
ccccagccaugcugaacu

SEQ ID NO: 148102 - RNA, 19 nt, Artificial Sequence
  Synthetic
uccccagccaugcugaacu

SEQ ID NO: 148103 - RNA, 20 nt, Artificial Sequence
  Synthetic
cuccccagccaugcugaacu

SEQ ID NO: 148104 - RNA, 21 nt, Artificial Sequence
  Synthetic
ucuccccagccaugcugaacu

SEQ ID NO: 148105 - RNA, 24 nt, Artificial Sequence
  Synthetic
aggucuccccagccaugcugaacu

SEQ ID NO: 148106 - RNA, 19 nt, Artificial Sequence
  Synthetic
aggccccaccuccaacacu

SEQ ID NO: 148107 - RNA, 20 nt, Artificial Sequence
  Synthetic
caggccccaccuccaacacu

SEQ ID NO: 148108 - RNA, 21 nt, Artificial Sequence
  Synthetic
ccaggccccaccuccaacacu

SEQ ID NO: 148109 - RNA, 22 nt, Artificial Sequence
  Synthetic
accaggccccaccuccaacacu

SEQ ID NO: 148110 - RNA, 23 nt, Artificial Sequence
  Synthetic
caccaggccccaccuccaacacu

SEQ ID NO: 148111 - RNA, 24 nt, Artificial Sequence
  Synthetic
ccaccaggccccaccuccaacacu

SEQ ID NO: 148112 - RNA, 18 nt, Artificial Sequence
  Synthetic
auuuguggugagaacacu

SEQ ID NO: 148113 - RNA, 19 nt, Artificial Sequence
  Synthetic
uauuuguggugagaacacu

SEQ ID NO: 148114 - RNA, 20 nt, Artificial Sequence
  Synthetic
uuauuuguggugagaacacu

SEQ ID NO: 148115 - RNA, 21 nt, Artificial Sequence
  Synthetic
uuuauuuguggugagaacacu

SEQ ID NO: 148116 - RNA, 22 nt, Artificial Sequence
  Synthetic
cuuuauuuguggugagaacacu

SEQ ID NO: 148117 - RNA, 23 nt, Artificial Sequence
  Synthetic
acuuuauuuguggugagaacacu

SEQ ID NO: 148118 - RNA, 24 nt, Artificial Sequence
  Synthetic
cacuuuauuuguggugagaacacu

SEQ ID NO: 148119 - RNA, 18 nt, Artificial Sequence
  Synthetic
uuaguccauuuucacacu

SEQ ID NO: 148120 - RNA, 19 nt, Artificial Sequence
  Synthetic
auuaguccauuuucacacu

SEQ ID NO: 148121 - RNA, 20 nt, Artificial Sequence
  Synthetic
uauuaguccauuuucacacu

SEQ ID NO: 148122 - RNA, 22 nt, Artificial Sequence
  Synthetic
uguauuaguccauuuucacacu

SEQ ID NO: 148123 - RNA, 23 nt, Artificial Sequence
  Synthetic
cuguauuaguccauuuucacacu

SEQ ID NO: 148124 - RNA, 24 nt, Artificial Sequence
  Synthetic
acuguauuaguccauuuucacacu

SEQ ID NO: 148125 - RNA, 18 nt, Artificial Sequence
  Synthetic
caguuucagacauccacu

SEQ ID NO: 148126 - RNA, 20 nt, Artificial Sequence
  Synthetic
ugcaguuucagacauccacu

SEQ ID NO: 148127 - RNA, 21 nt, Artificial Sequence
  Synthetic
cugcaguuucagacauccacu

SEQ ID NO: 148128 - RNA, 22 nt, Artificial Sequence
  Synthetic
ucugcaguuucagacauccacu

SEQ ID NO: 148129 - RNA, 23 nt, Artificial Sequence
  Synthetic
aucugcaguuucagacauccacu

SEQ ID NO: 148130 - RNA, 24 nt, Artificial Sequence
  Synthetic
uaucugcaguuucagacauccacu

SEQ ID NO: 148131 - RNA, 21 nt, Artificial Sequence
  Synthetic
caugccuguaaucccagcacu

SEQ ID NO: 148132 - RNA, 22 nt, Artificial Sequence
  Synthetic
ucaugccuguaaucccagcacu

SEQ ID NO: 148133 - RNA, 23 nt, Artificial Sequence
  Synthetic
cucaugccuguaaucccagcacu

SEQ ID NO: 148134 - RNA, 18 nt, Artificial Sequence
  Synthetic
cagagggagggcagcacu

SEQ ID NO: 148135 - RNA, 19 nt, Artificial Sequence
  Synthetic
agacuucgagagaaucacu

SEQ ID NO: 148136 - RNA, 18 nt, Artificial Sequence
  Synthetic
uuucugcauuaauucacu

SEQ ID NO: 148137 - RNA, 20 nt, Artificial Sequence
  Synthetic
uguuucugcauuaauucacu

SEQ ID NO: 148138 - RNA, 22 nt, Artificial Sequence
  Synthetic
uguguuucugcauuaauucacu

SEQ ID NO: 148139 - RNA, 23 nt, Artificial Sequence
  Synthetic
uuguguuucugcauuaauucacu

SEQ ID NO: 148140 - RNA, 24 nt, Artificial Sequence
  Synthetic
auuguguuucugcauuaauucacu

SEQ ID NO: 148141 - RNA, 18 nt, Artificial Sequence
  Synthetic
uuaaaugugauauucacu

SEQ ID NO: 148142 - RNA, 19 nt, Artificial Sequence
  Synthetic
auuaaaugugauauucacu

SEQ ID NO: 148143 - RNA, 20 nt, Artificial Sequence
  Synthetic
cauuaaaugugauauucacu

SEQ ID NO: 148144 - RNA, 18 nt, Artificial Sequence
  Synthetic
uuggaaugaguuaagacu

SEQ ID NO: 148145 - RNA, 20 nt, Artificial Sequence
  Synthetic
uguuggaaugaguuaagacu

SEQ ID NO: 148146 - RNA, 21 nt, Artificial Sequence
  Synthetic
auguuggaaugaguuaagacu

SEQ ID NO: 148147 - RNA, 22 nt, Artificial Sequence
  Synthetic
aauguuggaaugaguuaagacu

SEQ ID NO: 148148 - RNA, 23 nt, Artificial Sequence
  Synthetic
uaauguuggaaugaguuaagacu

SEQ ID NO: 148149 - RNA, 24 nt, Artificial Sequence
  Synthetic
uuaauguuggaaugaguuaagacu

SEQ ID NO: 148150 - RNA, 18 nt, Artificial Sequence
  Synthetic
uaaaauagacaugagacu

SEQ ID NO: 148151 - RNA, 20 nt, Artificial Sequence
  Synthetic
uguaaaauagacaugagacu

SEQ ID NO: 148152 - RNA, 18 nt, Artificial Sequence
  Synthetic
auucugauucaguagacu

SEQ ID NO: 148153 - RNA, 19 nt, Artificial Sequence
  Synthetic
aauucugauucaguagacu

SEQ ID NO: 148154 - RNA, 20 nt, Artificial Sequence
  Synthetic
aaauucugauucaguagacu

SEQ ID NO: 148155 - RNA, 22 nt, Artificial Sequence
  Synthetic
agaaauucugauucaguagacu

SEQ ID NO: 148156 - RNA, 23 nt, Artificial Sequence
  Synthetic
cagaaauucugauucaguagacu

SEQ ID NO: 148157 - RNA, 24 nt, Artificial Sequence
  Synthetic
ccagaaauucugauucaguagacu

SEQ ID NO: 148158 - RNA, 18 nt, Artificial Sequence
  Synthetic
uauuauuauuuuuagacu

SEQ ID NO: 148159 - RNA, 19 nt, Artificial Sequence
  Synthetic
uuauuauuauuuuuagacu

SEQ ID NO: 148160 - RNA, 20 nt, Artificial Sequence
  Synthetic
uuuauuauuauuuuuagacu

SEQ ID NO: 148161 - RNA, 18 nt, Artificial Sequence
  Synthetic
uaauguaaacuauggacu

SEQ ID NO: 148162 - RNA, 19 nt, Artificial Sequence
  Synthetic
cuaauguaaacuauggacu

SEQ ID NO: 148163 - RNA, 20 nt, Artificial Sequence
  Synthetic
ucuaauguaaacuauggacu

SEQ ID NO: 148164 - RNA, 21 nt, Artificial Sequence
  Synthetic
cucuaauguaaacuauggacu

SEQ ID NO: 148165 - RNA, 22 nt, Artificial Sequence
  Synthetic
acucuaauguaaacuauggacu

SEQ ID NO: 148166 - RNA, 23 nt, Artificial Sequence
  Synthetic
aacucuaauguaaacuauggacu

SEQ ID NO: 148167 - RNA, 24 nt, Artificial Sequence
  Synthetic
aaacucuaauguaaacuauggacu

SEQ ID NO: 148168 - RNA, 18 nt, Artificial Sequence
  Synthetic
uuaucucauccugugacu

SEQ ID NO: 148169 - RNA, 19 nt, Artificial Sequence
  Synthetic
cuuaucucauccugugacu

SEQ ID NO: 148170 - RNA, 20 nt, Artificial Sequence
  Synthetic
ucuuaucucauccugugacu

SEQ ID NO: 148171 - RNA, 21 nt, Artificial Sequence
  Synthetic
cucuuaucucauccugugacu

SEQ ID NO: 148172 - RNA, 22 nt, Artificial Sequence
  Synthetic
ccucuuaucucauccugugacu

SEQ ID NO: 148173 - RNA, 18 nt, Artificial Sequence
  Synthetic
acucugauauaauugacu

SEQ ID NO: 148174 - RNA, 20 nt, Artificial Sequence
  Synthetic
agacucugauauaauugacu

SEQ ID NO: 148175 - RNA, 19 nt, Artificial Sequence
  Synthetic
uggcaugggcugcuugacu

SEQ ID NO: 148176 - RNA, 21 nt, Artificial Sequence
  Synthetic
aguggcaugggcugcuugacu

SEQ ID NO: 148177 - RNA, 22 nt, Artificial Sequence
  Synthetic
caguggcaugggcugcuugacu

SEQ ID NO: 148178 - RNA, 24 nt, Artificial Sequence
  Synthetic
ugcaguggcaugggcugcuugacu

SEQ ID NO: 148179 - RNA, 18 nt, Artificial Sequence
  Synthetic
uacacaccauggaauacu

SEQ ID NO: 148180 - RNA, 19 nt, Artificial Sequence
  Synthetic
auacacaccauggaauacu

SEQ ID NO: 148181 - RNA, 20 nt, Artificial Sequence
  Synthetic
cauacacaccauggaauacu

SEQ ID NO: 148182 - RNA, 21 nt, Artificial Sequence
  Synthetic
acauacacaccauggaauacu

SEQ ID NO: 148183 - RNA, 22 nt, Artificial Sequence
  Synthetic
cacauacacaccauggaauacu

SEQ ID NO: 148184 - RNA, 18 nt, Artificial Sequence
  Synthetic
agaaugauuuauaauacu

SEQ ID NO: 148185 - RNA, 21 nt, Artificial Sequence
  Synthetic
aggagaaugauuuauaauacu

SEQ ID NO: 148186 - RNA, 22 nt, Artificial Sequence
  Synthetic
uaggagaaugauuuauaauacu

SEQ ID NO: 148187 - RNA, 23 nt, Artificial Sequence
  Synthetic
auaggagaaugauuuauaauacu

SEQ ID NO: 148188 - RNA, 24 nt, Artificial Sequence
  Synthetic
uauaggagaaugauuuauaauacu

SEQ ID NO: 148189 - RNA, 22 nt, Artificial Sequence
  Synthetic
ugguuuuguguaguaguauacu

SEQ ID NO: 148190 - RNA, 23 nt, Artificial Sequence
  Synthetic
augguuuuguguaguaguauacu

SEQ ID NO: 148191 - RNA, 18 nt, Artificial Sequence
  Synthetic
caugaaucagacaguacu

SEQ ID NO: 148192 - RNA, 19 nt, Artificial Sequence
  Synthetic
ucaugaaucagacaguacu

SEQ ID NO: 148193 - RNA, 20 nt, Artificial Sequence
  Synthetic
uucaugaaucagacaguacu

SEQ ID NO: 148194 - RNA, 21 nt, Artificial Sequence
  Synthetic
auucaugaaucagacaguacu

SEQ ID NO: 148195 - RNA, 22 nt, Artificial Sequence
  Synthetic
aauucaugaaucagacaguacu

SEQ ID NO: 148196 - RNA, 23 nt, Artificial Sequence
  Synthetic
caauucaugaaucagacaguacu

SEQ ID NO: 148197 - RNA, 24 nt, Artificial Sequence
  Synthetic
acaauucaugaaucagacaguacu

SEQ ID NO: 148198 - RNA, 18 nt, Artificial Sequence
  Synthetic
uaccuaucaauauuuacu

SEQ ID NO: 148199 - RNA, 19 nt, Artificial Sequence
  Synthetic
cuaccuaucaauauuuacu

SEQ ID NO: 148200 - RNA, 20 nt, Artificial Sequence
  Synthetic
ccuaccuaucaauauuuacu

SEQ ID NO: 148201 - RNA, 18 nt, Artificial Sequence
  Synthetic
aacuacauaauauuuacu

SEQ ID NO: 148202 - RNA, 19 nt, Artificial Sequence
  Synthetic
uaacuacauaauauuuacu

SEQ ID NO: 148203 - RNA, 20 nt, Artificial Sequence
  Synthetic
uuaacuacauaauauuuacu

SEQ ID NO: 148204 - RNA, 18 nt, Artificial Sequence
  Synthetic
uuccugaguuacuuuacu

SEQ ID NO: 148205 - RNA, 20 nt, Artificial Sequence
  Synthetic
cguuccugaguuacuuuacu

SEQ ID NO: 148206 - RNA, 21 nt, Artificial Sequence
  Synthetic
ccguuccugaguuacuuuacu

SEQ ID NO: 148207 - RNA, 22 nt, Artificial Sequence
  Synthetic
uccguuccugaguuacuuuacu

SEQ ID NO: 148208 - RNA, 23 nt, Artificial Sequence
  Synthetic
uuccguuccugaguuacuuuacu

SEQ ID NO: 148209 - RNA, 24 nt, Artificial Sequence
  Synthetic
uuuccguuccugaguuacuuuacu

SEQ ID NO: 148210 - RNA, 18 nt, Artificial Sequence
  Synthetic
uccuugcgauaguuuacu

SEQ ID NO: 148211 - RNA, 20 nt, Artificial Sequence
  Synthetic
uguccuugcgauaguuuacu

SEQ ID NO: 148212 - RNA, 21 nt, Artificial Sequence
  Synthetic
uuguccuugcgauaguuuacu

SEQ ID NO: 148213 - RNA, 22 nt, Artificial Sequence
  Synthetic
uuuguccuugcgauaguuuacu

SEQ ID NO: 148214 - RNA, 23 nt, Artificial Sequence
  Synthetic
uuuuguccuugcgauaguuuacu

SEQ ID NO: 148215 - RNA, 24 nt, Artificial Sequence
  Synthetic
uuuuuguccuugcgauaguuuacu

SEQ ID NO: 148216 - RNA, 18 nt, Artificial Sequence
  Synthetic
uucuugcgauaguuuacu

SEQ ID NO: 148217 - RNA, 20 nt, Artificial Sequence
  Synthetic
uguucuugcgauaguuuacu

SEQ ID NO: 148218 - RNA, 18 nt, Artificial Sequence
  Synthetic
agcuuuguucauuuuacu

SEQ ID NO: 148219 - RNA, 19 nt, Artificial Sequence
  Synthetic
cagcuuuguucauuuuacu

SEQ ID NO: 148220 - RNA, 20 nt, Artificial Sequence
  Synthetic
ccagcuuuguucauuuuacu

SEQ ID NO: 148221 - RNA, 21 nt, Artificial Sequence
  Synthetic
uccagcuuuguucauuuuacu

SEQ ID NO: 148222 - RNA, 22 nt, Artificial Sequence
  Synthetic
cuccagcuuuguucauuuuacu

SEQ ID NO: 148223 - RNA, 23 nt, Artificial Sequence
  Synthetic
ccuccagcuuuguucauuuuacu

SEQ ID NO: 148224 - RNA, 18 nt, Artificial Sequence
  Synthetic
uuuuuucuccucaaaccu

SEQ ID NO: 148225 - RNA, 19 nt, Artificial Sequence
  Synthetic
uuuuuuucuccucaaaccu

SEQ ID NO: 148226 - RNA, 20 nt, Artificial Sequence
  Synthetic
uuuuuuuucuccucaaaccu

SEQ ID NO: 148227 - RNA, 18 nt, Artificial Sequence
  Synthetic
uguuaauccccagaaccu

SEQ ID NO: 148228 - RNA, 19 nt, Artificial Sequence
  Synthetic
auguuaauccccagaaccu

SEQ ID NO: 148229 - RNA, 18 nt, Artificial Sequence
  Synthetic
uccuaaucccaggaaccu

SEQ ID NO: 148230 - RNA, 19 nt, Artificial Sequence
  Synthetic
auccuaaucccaggaaccu

SEQ ID NO: 148231 - RNA, 20 nt, Artificial Sequence
  Synthetic
uauccuaaucccaggaaccu

SEQ ID NO: 148232 - RNA, 21 nt, Artificial Sequence
  Synthetic
auauccuaaucccaggaaccu

SEQ ID NO: 148233 - RNA, 22 nt, Artificial Sequence
  Synthetic
cauauccuaaucccaggaaccu

SEQ ID NO: 148234 - RNA, 23 nt, Artificial Sequence
  Synthetic
ccauauccuaaucccaggaaccu

SEQ ID NO: 148235 - RNA, 24 nt, Artificial Sequence
  Synthetic
uccauauccuaaucccaggaaccu

SEQ ID NO: 148236 - RNA, 18 nt, Artificial Sequence
  Synthetic
agaggauuucuugaaccu

SEQ ID NO: 148237 - RNA, 19 nt, Artificial Sequence
  Synthetic
aagaggauuucuugaaccu

SEQ ID NO: 148238 - RNA, 20 nt, Artificial Sequence
  Synthetic
caagaggauuucuugaaccu

SEQ ID NO: 148239 - RNA, 23 nt, Artificial Sequence
  Synthetic
aggcaagaggauuucuugaaccu

SEQ ID NO: 148240 - RNA, 18 nt, Artificial Sequence
  Synthetic
ucuguuggauauacaccu

SEQ ID NO: 148241 - RNA, 19 nt, Artificial Sequence
  Synthetic
uucuguuggauauacaccu

SEQ ID NO: 148242 - RNA, 20 nt, Artificial Sequence
  Synthetic
uuucuguuggauauacaccu

SEQ ID NO: 148243 - RNA, 21 nt, Artificial Sequence
  Synthetic
auuucuguuggauauacaccu

SEQ ID NO: 148244 - RNA, 22 nt, Artificial Sequence
  Synthetic
cauuucuguuggauauacaccu

SEQ ID NO: 148245 - RNA, 24 nt, Artificial Sequence
  Synthetic
ugcauuucuguuggauauacaccu

SEQ ID NO: 148246 - RNA, 21 nt, Artificial Sequence
  Synthetic
uucauuguucaauucccaccu

SEQ ID NO: 148247 - RNA, 22 nt, Artificial Sequence
  Synthetic
uuucauuguucaauucccaccu

SEQ ID NO: 148248 - RNA, 23 nt, Artificial Sequence
  Synthetic
uuuucauuguucaauucccaccu

SEQ ID NO: 148249 - RNA, 18 nt, Artificial Sequence
  Synthetic
auuguuccauucccaccu

SEQ ID NO: 148250 - RNA, 19 nt, Artificial Sequence
  Synthetic
cauuguuccauucccaccu

SEQ ID NO: 148251 - RNA, 20 nt, Artificial Sequence
  Synthetic
ucauuguuccauucccaccu

SEQ ID NO: 148252 - RNA, 21 nt, Artificial Sequence
  Synthetic
cucauuguuccauucccaccu

SEQ ID NO: 148253 - RNA, 22 nt, Artificial Sequence
  Synthetic
ucucauuguuccauucccaccu

SEQ ID NO: 148254 - RNA, 23 nt, Artificial Sequence
  Synthetic
uucucauuguuccauucccaccu

SEQ ID NO: 148255 - RNA, 18 nt, Artificial Sequence
  Synthetic
ugugcaucagaaucaccu

SEQ ID NO: 148256 - RNA, 19 nt, Artificial Sequence
  Synthetic
augugcaucagaaucaccu

SEQ ID NO: 148257 - RNA, 21 nt, Artificial Sequence
  Synthetic
ugaugugcaucagaaucaccu

SEQ ID NO: 148258 - RNA, 22 nt, Artificial Sequence
  Synthetic
uugaugugcaucagaaucaccu

SEQ ID NO: 148259 - RNA, 23 nt, Artificial Sequence
  Synthetic
uuugaugugcaucagaaucaccu

SEQ ID NO: 148260 - RNA, 24 nt, Artificial Sequence
  Synthetic
cuuugaugugcaucagaaucaccu

SEQ ID NO: 148261 - RNA, 18 nt, Artificial Sequence
  Synthetic
agagcacagacaucaccu

SEQ ID NO: 148262 - RNA, 19 nt, Artificial Sequence
  Synthetic
cagagcacagacaucaccu

SEQ ID NO: 148263 - RNA, 20 nt, Artificial Sequence
  Synthetic
ccagagcacagacaucaccu

SEQ ID NO: 148264 - RNA, 18 nt, Artificial Sequence
  Synthetic
uacagaugcuccucaccu

SEQ ID NO: 148265 - RNA, 19 nt, Artificial Sequence
  Synthetic
auacagaugcuccucaccu

SEQ ID NO: 148266 - RNA, 20 nt, Artificial Sequence
  Synthetic
uauacagaugcuccucaccu

SEQ ID NO: 148267 - RNA, 19 nt, Artificial Sequence
  Synthetic
agcaaauucuaaaagaccu

SEQ ID NO: 148268 - RNA, 20 nt, Artificial Sequence
  Synthetic
aagcaaauucuaaaagaccu

SEQ ID NO: 148269 - RNA, 19 nt, Artificial Sequence
  Synthetic
agacacaagagggagaccu

SEQ ID NO: 148270 - RNA, 20 nt, Artificial Sequence
  Synthetic
cagacacaagagggagaccu

SEQ ID NO: 148271 - RNA, 18 nt, Artificial Sequence
  Synthetic
uuuuugccuccuagaccu

SEQ ID NO: 148272 - RNA, 19 nt, Artificial Sequence
  Synthetic
auuuuugccuccuagaccu

SEQ ID NO: 148273 - RNA, 20 nt, Artificial Sequence
  Synthetic
cauuuuugccuccuagaccu

SEQ ID NO: 148274 - RNA, 21 nt, Artificial Sequence
  Synthetic
ccauuuuugccuccuagaccu

SEQ ID NO: 148275 - RNA, 22 nt, Artificial Sequence
  Synthetic
accauuuuugccuccuagaccu

SEQ ID NO: 148276 - RNA, 23 nt, Artificial Sequence
  Synthetic
aaccauuuuugccuccuagaccu

SEQ ID NO: 148277 - RNA, 24 nt, Artificial Sequence
  Synthetic
aaaccauuuuugccuccuagaccu

SEQ ID NO: 148278 - RNA, 18 nt, Artificial Sequence
  Synthetic
aaagagaauaaaauaccu

SEQ ID NO: 148279 - RNA, 19 nt, Artificial Sequence
  Synthetic
caaagagaauaaaauaccu

SEQ ID NO: 148280 - RNA, 20 nt, Artificial Sequence
  Synthetic
ucaaagagaauaaaauaccu

SEQ ID NO: 148281 - RNA, 21 nt, Artificial Sequence
  Synthetic
uucaaagagaauaaaauaccu

SEQ ID NO: 148282 - RNA, 22 nt, Artificial Sequence
  Synthetic
cuucaaagagaauaaaauaccu

SEQ ID NO: 148283 - RNA, 24 nt, Artificial Sequence
  Synthetic
ugcuucaaagagaauaaaauaccu

SEQ ID NO: 148284 - RNA, 18 nt, Artificial Sequence
  Synthetic
ucgccuuuucugaacccu

SEQ ID NO: 148285 - RNA, 19 nt, Artificial Sequence
  Synthetic
aucgccuuuucugaacccu

SEQ ID NO: 148286 - RNA, 20 nt, Artificial Sequence
  Synthetic
caucgccuuuucugaacccu

SEQ ID NO: 148287 - RNA, 18 nt, Artificial Sequence
  Synthetic
aaaugcaaauagcacccu

SEQ ID NO: 148288 - RNA, 19 nt, Artificial Sequence
  Synthetic
aaaaugcaaauagcacccu

SEQ ID NO: 148289 - RNA, 20 nt, Artificial Sequence
  Synthetic
uaaaaugcaaauagcacccu

SEQ ID NO: 148290 - RNA, 21 nt, Artificial Sequence
  Synthetic
uuaaaaugcaaauagcacccu

SEQ ID NO: 148291 - RNA, 22 nt, Artificial Sequence
  Synthetic
uuuaaaaugcaaauagcacccu

SEQ ID NO: 148292 - RNA, 23 nt, Artificial Sequence
  Synthetic
uuuuaaaaugcaaauagcacccu

SEQ ID NO: 148293 - RNA, 24 nt, Artificial Sequence
  Synthetic
cuuuuaaaaugcaaauagcacccu

SEQ ID NO: 148294 - RNA, 18 nt, Artificial Sequence
  Synthetic
aaccugaacauguacccu

SEQ ID NO: 148295 - RNA, 19 nt, Artificial Sequence
  Synthetic
aaaccugaacauguacccu

SEQ ID NO: 148296 - RNA, 20 nt, Artificial Sequence
  Synthetic
caaaccugaacauguacccu

SEQ ID NO: 148297 - RNA, 21 nt, Artificial Sequence
  Synthetic
acaaaccugaacauguacccu

SEQ ID NO: 148298 - RNA, 22 nt, Artificial Sequence
  Synthetic
aacaaaccugaacauguacccu

SEQ ID NO: 148299 - RNA, 23 nt, Artificial Sequence
  Synthetic
uaacaaaccugaacauguacccu

SEQ ID NO: 148300 - RNA, 18 nt, Artificial Sequence
  Synthetic
uugguaagcuccaccccu

SEQ ID NO: 148301 - RNA, 19 nt, Artificial Sequence
  Synthetic
cuugguaagcuccaccccu

SEQ ID NO: 148302 - RNA, 20 nt, Artificial Sequence
  Synthetic
ucuugguaagcuccaccccu

SEQ ID NO: 148303 - RNA, 23 nt, Artificial Sequence
  Synthetic
uggucuugguaagcuccaccccu

SEQ ID NO: 148304 - RNA, 24 nt, Artificial Sequence
  Synthetic
auggucuugguaagcuccaccccu

SEQ ID NO: 148305 - RNA, 18 nt, Artificial Sequence
  Synthetic
caaugacugugggccccu

SEQ ID NO: 148306 - RNA, 19 nt, Artificial Sequence
  Synthetic
acaaugacugugggccccu

SEQ ID NO: 148307 - RNA, 20 nt, Artificial Sequence
  Synthetic
cacaaugacugugggccccu

SEQ ID NO: 148308 - RNA, 21 nt, Artificial Sequence
  Synthetic
augcauauacuuacuuccccu

SEQ ID NO: 148309 - RNA, 22 nt, Artificial Sequence
  Synthetic
aaugcauauacuuacuuccccu

SEQ ID NO: 148310 - RNA, 18 nt, Artificial Sequence
  Synthetic
ccugagaauauuuccccu

SEQ ID NO: 148311 - RNA, 19 nt, Artificial Sequence
  Synthetic
accugagaauauuuccccu

SEQ ID NO: 148312 - RNA, 20 nt, Artificial Sequence
  Synthetic
aaccugagaauauuuccccu

SEQ ID NO: 148313 - RNA, 18 nt, Artificial Sequence
  Synthetic
uguguuuuaaugagcccu

SEQ ID NO: 148314 - RNA, 19 nt, Artificial Sequence
  Synthetic
cuguguuuuaaugagcccu

SEQ ID NO: 148315 - RNA, 20 nt, Artificial Sequence
  Synthetic
ccuguguuuuaaugagcccu

SEQ ID NO: 148316 - RNA, 22 nt, Artificial Sequence
  Synthetic
agccuguguuuuaaugagcccu

SEQ ID NO: 148317 - RNA, 23 nt, Artificial Sequence
  Synthetic
cagccuguguuuuaaugagcccu

SEQ ID NO: 148318 - RNA, 18 nt, Artificial Sequence
  Synthetic
uuucuugcaaacugcccu

SEQ ID NO: 148319 - RNA, 20 nt, Artificial Sequence
  Synthetic
aguuucuugcaaacugcccu

SEQ ID NO: 148320 - RNA, 18 nt, Artificial Sequence
  Synthetic
aacaaauuuucacucccu

SEQ ID NO: 148321 - RNA, 20 nt, Artificial Sequence
  Synthetic
agaacaaauuuucacucccu

SEQ ID NO: 148322 - RNA, 21 nt, Artificial Sequence
  Synthetic
aagaacaaauuuucacucccu

SEQ ID NO: 148323 - RNA, 22 nt, Artificial Sequence
  Synthetic
caagaacaaauuuucacucccu

SEQ ID NO: 148324 - RNA, 23 nt, Artificial Sequence
  Synthetic
ucaagaacaaauuuucacucccu

SEQ ID NO: 148325 - RNA, 24 nt, Artificial Sequence
  Synthetic
cucaagaacaaauuuucacucccu

SEQ ID NO: 148326 - RNA, 18 nt, Artificial Sequence
  Synthetic
ucuccccaauucuucccu

SEQ ID NO: 148327 - RNA, 19 nt, Artificial Sequence
  Synthetic
uucuccccaauucuucccu

SEQ ID NO: 148328 - RNA, 20 nt, Artificial Sequence
  Synthetic
cuucuccccaauucuucccu

SEQ ID NO: 148329 - RNA, 21 nt, Artificial Sequence
  Synthetic
ccuucuccccaauucuucccu

SEQ ID NO: 148330 - RNA, 22 nt, Artificial Sequence
  Synthetic
accuucuccccaauucuucccu

SEQ ID NO: 148331 - RNA, 23 nt, Artificial Sequence
  Synthetic
uaccuucuccccaauucuucccu

SEQ ID NO: 148332 - RNA, 24 nt, Artificial Sequence
  Synthetic
auaccuucuccccaauucuucccu

SEQ ID NO: 148333 - RNA, 18 nt, Artificial Sequence
  Synthetic
caucauuuaaauuucccu

SEQ ID NO: 148334 - RNA, 19 nt, Artificial Sequence
  Synthetic
ucaucauuuaaauuucccu

SEQ ID NO: 148335 - RNA, 20 nt, Artificial Sequence
  Synthetic
aucaucauuuaaauuucccu

SEQ ID NO: 148336 - RNA, 19 nt, Artificial Sequence
  Synthetic
aguagccacuaaugagccu

SEQ ID NO: 148337 - RNA, 20 nt, Artificial Sequence
  Synthetic
uaguagccacuaaugagccu

SEQ ID NO: 148338 - RNA, 21 nt, Artificial Sequence
  Synthetic
auaguagccacuaaugagccu

SEQ ID NO: 148339 - RNA, 22 nt, Artificial Sequence
  Synthetic
cauaguagccacuaaugagccu

SEQ ID NO: 148340 - RNA, 23 nt, Artificial Sequence
  Synthetic
ucauaguagccacuaaugagccu

SEQ ID NO: 148341 - RNA, 24 nt, Artificial Sequence
  Synthetic
cucauaguagccacuaaugagccu

SEQ ID NO: 148342 - RNA, 18 nt, Artificial Sequence
  Synthetic
uggucugggauggggccu

SEQ ID NO: 148343 - RNA, 19 nt, Artificial Sequence
  Synthetic
uuggucugggauggggccu

SEQ ID NO: 148344 - RNA, 21 nt, Artificial Sequence
  Synthetic
aguuggucugggauggggccu

SEQ ID NO: 148345 - RNA, 22 nt, Artificial Sequence
  Synthetic
caguuggucugggauggggccu

SEQ ID NO: 148346 - RNA, 23 nt, Artificial Sequence
  Synthetic
ucaguuggucugggauggggccu

SEQ ID NO: 148347 - RNA, 18 nt, Artificial Sequence
  Synthetic
agucauugcuuaaugccu

SEQ ID NO: 148348 - RNA, 19 nt, Artificial Sequence
  Synthetic
aagucauugcuuaaugccu

SEQ ID NO: 148349 - RNA, 20 nt, Artificial Sequence
  Synthetic
aaagucauugcuuaaugccu

SEQ ID NO: 148350 - RNA, 18 nt, Artificial Sequence
  Synthetic
aggggcuggcugcugccu

SEQ ID NO: 148351 - RNA, 19 nt, Artificial Sequence
  Synthetic
caggggcuggcugcugccu

SEQ ID NO: 148352 - RNA, 20 nt, Artificial Sequence
  Synthetic
ccaggggcuggcugcugccu

SEQ ID NO: 148353 - RNA, 18 nt, Artificial Sequence
  Synthetic
aagggaaaagacaauccu

SEQ ID NO: 148354 - RNA, 19 nt, Artificial Sequence
  Synthetic
aaagggaaaagacaauccu

SEQ ID NO: 148355 - RNA, 18 nt, Artificial Sequence
  Synthetic
agcaggauuuauaauccu

SEQ ID NO: 148356 - RNA, 19 nt, Artificial Sequence
  Synthetic
cagcaggauuuauaauccu

SEQ ID NO: 148357 - RNA, 21 nt, Artificial Sequence
  Synthetic
agcagcaggauuuauaauccu

SEQ ID NO: 148358 - RNA, 22 nt, Artificial Sequence
  Synthetic
cagcagcaggauuuauaauccu

SEQ ID NO: 148359 - RNA, 23 nt, Artificial Sequence
  Synthetic
acagcagcaggauuuauaauccu

SEQ ID NO: 148360 - RNA, 24 nt, Artificial Sequence
  Synthetic
uacagcagcaggauuuauaauccu

SEQ ID NO: 148361 - RNA, 18 nt, Artificial Sequence
  Synthetic
agcaugauuuauaauccu

SEQ ID NO: 148362 - RNA, 19 nt, Artificial Sequence
  Synthetic
cagcaugauuuauaauccu

SEQ ID NO: 148363 - RNA, 21 nt, Artificial Sequence
  Synthetic
agcagcaugauuuauaauccu

SEQ ID NO: 148364 - RNA, 22 nt, Artificial Sequence
  Synthetic
uagcagcaugauuuauaauccu

SEQ ID NO: 148365 - RNA, 23 nt, Artificial Sequence
  Synthetic
auagcagcaugauuuauaauccu

SEQ ID NO: 148366 - RNA, 24 nt, Artificial Sequence
  Synthetic
uauagcagcaugauuuauaauccu

SEQ ID NO: 148367 - RNA, 18 nt, Artificial Sequence
  Synthetic
aggaugauuuauaauccu

SEQ ID NO: 148368 - RNA, 19 nt, Artificial Sequence
  Synthetic
uaggaugauuuauaauccu

SEQ ID NO: 148369 - RNA, 21 nt, Artificial Sequence
  Synthetic
aguaggaugauuuauaauccu

SEQ ID NO: 148370 - RNA, 22 nt, Artificial Sequence
  Synthetic
uaguaggaugauuuauaauccu

SEQ ID NO: 148371 - RNA, 23 nt, Artificial Sequence
  Synthetic
auaguaggaugauuuauaauccu

SEQ ID NO: 148372 - RNA, 24 nt, Artificial Sequence
  Synthetic
uauaguaggaugauuuauaauccu

SEQ ID NO: 148373 - RNA, 18 nt, Artificial Sequence
  Synthetic
aagggaacccuuaauccu

SEQ ID NO: 148374 - RNA, 19 nt, Artificial Sequence
  Synthetic
caagggaacccuuaauccu

SEQ ID NO: 148375 - RNA, 20 nt, Artificial Sequence
  Synthetic
acaagggaacccuuaauccu

SEQ ID NO: 148376 - RNA, 21 nt, Artificial Sequence
  Synthetic
uacaagggaacccuuaauccu

SEQ ID NO: 148377 - RNA, 22 nt, Artificial Sequence
  Synthetic
uuacaagggaacccuuaauccu

SEQ ID NO: 148378 - RNA, 23 nt, Artificial Sequence
  Synthetic
uuuacaagggaacccuuaauccu

SEQ ID NO: 148379 - RNA, 24 nt, Artificial Sequence
  Synthetic
uuuuacaagggaacccuuaauccu

SEQ ID NO: 148380 - RNA, 18 nt, Artificial Sequence
  Synthetic
ucaagugggcuucauccu

SEQ ID NO: 148381 - RNA, 19 nt, Artificial Sequence
  Synthetic
aucaagugggcuucauccu

SEQ ID NO: 148382 - RNA, 21 nt, Artificial Sequence
  Synthetic
ugaucaagugggcuucauccu

SEQ ID NO: 148383 - RNA, 22 nt, Artificial Sequence
  Synthetic
augaucaagugggcuucauccu

SEQ ID NO: 148384 - RNA, 23 nt, Artificial Sequence
  Synthetic
caugaucaagugggcuucauccu

SEQ ID NO: 148385 - RNA, 24 nt, Artificial Sequence
  Synthetic
ccaugaucaagugggcuucauccu

SEQ ID NO: 148386 - RNA, 18 nt, Artificial Sequence
  Synthetic
aagaaugcccaaccuccu

SEQ ID NO: 148387 - RNA, 19 nt, Artificial Sequence
  Synthetic
uaagaaugcccaaccuccu

SEQ ID NO: 148388 - RNA, 20 nt, Artificial Sequence
  Synthetic
cuaagaaugcccaaccuccu

SEQ ID NO: 148389 - RNA, 21 nt, Artificial Sequence
  Synthetic
acuaagaaugcccaaccuccu

SEQ ID NO: 148390 - RNA, 23 nt, Artificial Sequence
  Synthetic
ugacuaagaaugcccaaccuccu

SEQ ID NO: 148391 - RNA, 18 nt, Artificial Sequence
  Synthetic
ugguuuccugggucuccu

SEQ ID NO: 148392 - RNA, 19 nt, Artificial Sequence
  Synthetic
uugguuuccugggucuccu

SEQ ID NO: 148393 - RNA, 20 nt, Artificial Sequence
  Synthetic
cuugguuuccugggucuccu

SEQ ID NO: 148394 - RNA, 21 nt, Artificial Sequence
  Synthetic
aacaguuuucaguggaguccu

SEQ ID NO: 148395 - RNA, 22 nt, Artificial Sequence
  Synthetic
uaacaguuuucaguggaguccu

SEQ ID NO: 148396 - RNA, 23 nt, Artificial Sequence
  Synthetic
cuaacaguuuucaguggaguccu

SEQ ID NO: 148397 - RNA, 24 nt, Artificial Sequence
  Synthetic
ucuaacaguuuucaguggaguccu

SEQ ID NO: 148398 - RNA, 18 nt, Artificial Sequence
  Synthetic
agcaugauuuauaguccu

SEQ ID NO: 148399 - RNA, 19 nt, Artificial Sequence
  Synthetic
cagcaugauuuauaguccu

SEQ ID NO: 148400 - RNA, 18 nt, Artificial Sequence
  Synthetic
ucuacagaacuagguccu

SEQ ID NO: 148401 - RNA, 19 nt, Artificial Sequence
  Synthetic
uucuacagaacuagguccu

SEQ ID NO: 148402 - RNA, 20 nt, Artificial Sequence
  Synthetic
cuucuacagaacuagguccu

SEQ ID NO: 148403 - RNA, 21 nt, Artificial Sequence
  Synthetic
ucuucuacagaacuagguccu

SEQ ID NO: 148404 - RNA, 23 nt, Artificial Sequence
  Synthetic
ugucuucuacagaacuagguccu

SEQ ID NO: 148405 - RNA, 24 nt, Artificial Sequence
  Synthetic
augucuucuacagaacuagguccu

SEQ ID NO: 148406 - RNA, 18 nt, Artificial Sequence
  Synthetic
uacucucucugauguccu

SEQ ID NO: 148407 - RNA, 20 nt, Artificial Sequence
  Synthetic
aguacucucucugauguccu

SEQ ID NO: 148408 - RNA, 22 nt, Artificial Sequence
  Synthetic
ugaguacucucucugauguccu

SEQ ID NO: 148409 - RNA, 23 nt, Artificial Sequence
  Synthetic
cugaguacucucucugauguccu

SEQ ID NO: 148410 - RNA, 24 nt, Artificial Sequence
  Synthetic
ucugaguacucucucugauguccu

SEQ ID NO: 148411 - RNA, 18 nt, Artificial Sequence
  Synthetic
ucuacaaaauaaauuccu

SEQ ID NO: 148412 - RNA, 19 nt, Artificial Sequence
  Synthetic
aucuacaaaauaaauuccu

SEQ ID NO: 148413 - RNA, 20 nt, Artificial Sequence
  Synthetic
aaucuacaaaauaaauuccu

SEQ ID NO: 148414 - RNA, 18 nt, Artificial Sequence
  Synthetic
acaauaaaauaaauuccu

SEQ ID NO: 148415 - RNA, 19 nt, Artificial Sequence
  Synthetic
uacaauaaaauaaauuccu

SEQ ID NO: 148416 - RNA, 20 nt, Artificial Sequence
  Synthetic
auacaauaaaauaaauuccu

SEQ ID NO: 148417 - RNA, 18 nt, Artificial Sequence
  Synthetic
agaaugauuuauauuccu

SEQ ID NO: 148418 - RNA, 19 nt, Artificial Sequence
  Synthetic
uagaaugauuuauauuccu

SEQ ID NO: 148419 - RNA, 22 nt, Artificial Sequence
  Synthetic
ugguagaaugauuuauauuccu

SEQ ID NO: 148420 - RNA, 23 nt, Artificial Sequence
  Synthetic
augguagaaugauuuauauuccu

SEQ ID NO: 148421 - RNA, 24 nt, Artificial Sequence
  Synthetic
uaugguagaaugauuuauauuccu

SEQ ID NO: 148422 - RNA, 18 nt, Artificial Sequence
  Synthetic
agaaugguuuauauuccu

SEQ ID NO: 148423 - RNA, 19 nt, Artificial Sequence
  Synthetic
uagaaugguuuauauuccu

SEQ ID NO: 148424 - RNA, 20 nt, Artificial Sequence
  Synthetic
auagaaugguuuauauuccu

SEQ ID NO: 148425 - RNA, 21 nt, Artificial Sequence
  Synthetic
aauagaaugguuuauauuccu

SEQ ID NO: 148426 - RNA, 22 nt, Artificial Sequence
  Synthetic
aaauagaaugguuuauauuccu

SEQ ID NO: 148427 - RNA, 23 nt, Artificial Sequence
  Synthetic
aaaauagaaugguuuauauuccu

SEQ ID NO: 148428 - RNA, 24 nt, Artificial Sequence
  Synthetic
uaaaauagaaugguuuauauuccu

SEQ ID NO: 148429 - RNA, 18 nt, Artificial Sequence
  Synthetic
cauuuuuaaaaacuuccu

SEQ ID NO: 148430 - RNA, 19 nt, Artificial Sequence
  Synthetic
acauuuuuaaaaacuuccu

SEQ ID NO: 148431 - RNA, 20 nt, Artificial Sequence
  Synthetic
aacauuuuuaaaaacuuccu

SEQ ID NO: 148432 - RNA, 18 nt, Artificial Sequence
  Synthetic
uggguccaauuucuuccu

SEQ ID NO: 148433 - RNA, 20 nt, Artificial Sequence
  Synthetic
uguggguccaauuucuuccu

SEQ ID NO: 148434 - RNA, 19 nt, Artificial Sequence
  Synthetic
agaggcuaaauaauuuccu

SEQ ID NO: 148435 - RNA, 18 nt, Artificial Sequence
  Synthetic
uuaaaaaugauauuuccu

SEQ ID NO: 148436 - RNA, 19 nt, Artificial Sequence
  Synthetic
auuaaaaaugauauuuccu

SEQ ID NO: 148437 - RNA, 20 nt, Artificial Sequence
  Synthetic
uauuaaaaaugauauuuccu

SEQ ID NO: 148438 - RNA, 21 nt, Artificial Sequence
  Synthetic
auauuaaaaaugauauuuccu

SEQ ID NO: 148439 - RNA, 22 nt, Artificial Sequence
  Synthetic
aauauuaaaaaugauauuuccu

SEQ ID NO: 148440 - RNA, 23 nt, Artificial Sequence
  Synthetic
aaauauuaaaaaugauauuuccu

SEQ ID NO: 148441 - RNA, 24 nt, Artificial Sequence
  Synthetic
aaaauauuaaaaaugauauuuccu

SEQ ID NO: 148442 - RNA, 18 nt, Artificial Sequence
  Synthetic
ucauuuacauuuuuuccu

SEQ ID NO: 148443 - RNA, 19 nt, Artificial Sequence
  Synthetic
uucauuuacauuuuuuccu

SEQ ID NO: 148444 - RNA, 20 nt, Artificial Sequence
  Synthetic
uuucauuuacauuuuuuccu

SEQ ID NO: 148445 - RNA, 18 nt, Artificial Sequence
  Synthetic
accauaaccaccacagcu

SEQ ID NO: 148446 - RNA, 19 nt, Artificial Sequence
  Synthetic
caccauaaccaccacagcu

SEQ ID NO: 148447 - RNA, 20 nt, Artificial Sequence
  Synthetic
ucaccauaaccaccacagcu

SEQ ID NO: 148448 - RNA, 21 nt, Artificial Sequence
  Synthetic
uucaccauaaccaccacagcu

SEQ ID NO: 148449 - RNA, 22 nt, Artificial Sequence
  Synthetic
uuucaccauaaccaccacagcu

SEQ ID NO: 148450 - RNA, 23 nt, Artificial Sequence
  Synthetic
cuuucaccauaaccaccacagcu

SEQ ID NO: 148451 - RNA, 24 nt, Artificial Sequence
  Synthetic
ucuuucaccauaaccaccacagcu

SEQ ID NO: 148452 - RNA, 19 nt, Artificial Sequence
  Synthetic
agcuugacugguuacagcu

SEQ ID NO: 148453 - RNA, 20 nt, Artificial Sequence
  Synthetic
cagcuugacugguuacagcu

SEQ ID NO: 148454 - RNA, 21 nt, Artificial Sequence
  Synthetic
acagcuugacugguuacagcu

SEQ ID NO: 148455 - RNA, 22 nt, Artificial Sequence
  Synthetic
aacagcuugacugguuacagcu

SEQ ID NO: 148456 - RNA, 23 nt, Artificial Sequence
  Synthetic
aaacagcuugacugguuacagcu

SEQ ID NO: 148457 - RNA, 18 nt, Artificial Sequence
  Synthetic
cacggggaaggggcagcu

SEQ ID NO: 148458 - RNA, 19 nt, Artificial Sequence
  Synthetic
ccacggggaaggggcagcu

SEQ ID NO: 148459 - RNA, 20 nt, Artificial Sequence
  Synthetic
accacggggaaggggcagcu

SEQ ID NO: 148460 - RNA, 21 nt, Artificial Sequence
  Synthetic
caccacggggaaggggcagcu

SEQ ID NO: 148461 - RNA, 23 nt, Artificial Sequence
  Synthetic
agcaccacggggaaggggcagcu

SEQ ID NO: 148462 - RNA, 19 nt, Artificial Sequence
  Synthetic
ucucugguagaauucagcu

SEQ ID NO: 148463 - RNA, 20 nt, Artificial Sequence
  Synthetic
aucucugguagaauucagcu

SEQ ID NO: 148464 - RNA, 21 nt, Artificial Sequence
  Synthetic
uaucucugguagaauucagcu

SEQ ID NO: 148465 - RNA, 23 nt, Artificial Sequence
  Synthetic
uguaucucugguagaauucagcu

SEQ ID NO: 148466 - RNA, 24 nt, Artificial Sequence
  Synthetic
uuguaucucugguagaauucagcu

SEQ ID NO: 148467 - RNA, 19 nt, Artificial Sequence
  Synthetic
ugucugguagaauucagcu

SEQ ID NO: 148468 - RNA, 20 nt, Artificial Sequence
  Synthetic
augucugguagaauucagcu

SEQ ID NO: 148469 - RNA, 21 nt, Artificial Sequence
  Synthetic
aaugucugguagaauucagcu

SEQ ID NO: 148470 - RNA, 23 nt, Artificial Sequence
  Synthetic
ugaaugucugguagaauucagcu

SEQ ID NO: 148471 - RNA, 24 nt, Artificial Sequence
  Synthetic
uugaaugucugguagaauucagcu

SEQ ID NO: 148472 - RNA, 18 nt, Artificial Sequence
  Synthetic
uucuuucagaaaagagcu

SEQ ID NO: 148473 - RNA, 19 nt, Artificial Sequence
  Synthetic
auucuuucagaaaagagcu

SEQ ID NO: 148474 - RNA, 20 nt, Artificial Sequence
  Synthetic
aauucuuucagaaaagagcu

SEQ ID NO: 148475 - RNA, 18 nt, Artificial Sequence
  Synthetic
caagcaaagaacagagcu

SEQ ID NO: 148476 - RNA, 19 nt, Artificial Sequence
  Synthetic
acaagcaaagaacagagcu

SEQ ID NO: 148477 - RNA, 20 nt, Artificial Sequence
  Synthetic
aacaagcaaagaacagagcu

SEQ ID NO: 148478 - RNA, 18 nt, Artificial Sequence
  Synthetic
aaaauacaaaaaauagcu

SEQ ID NO: 148479 - RNA, 19 nt, Artificial Sequence
  Synthetic
aaaaauacaaaaaauagcu

SEQ ID NO: 148480 - RNA, 20 nt, Artificial Sequence
  Synthetic
uaaaaauacaaaaaauagcu

SEQ ID NO: 148481 - RNA, 21 nt, Artificial Sequence
  Synthetic
cuaaaaauacaaaaaauagcu

SEQ ID NO: 148482 - RNA, 22 nt, Artificial Sequence
  Synthetic
acuaaaaauacaaaaaauagcu

SEQ ID NO: 148483 - RNA, 23 nt, Artificial Sequence
  Synthetic
uacuaaaaauacaaaaaauagcu

SEQ ID NO: 148484 - RNA, 24 nt, Artificial Sequence
  Synthetic
cuacuaaaaauacaaaaaauagcu

SEQ ID NO: 148485 - RNA, 18 nt, Artificial Sequence
  Synthetic
ugugacucagaaauagcu

SEQ ID NO: 148486 - RNA, 19 nt, Artificial Sequence
  Synthetic
uugugacucagaaauagcu

SEQ ID NO: 148487 - RNA, 20 nt, Artificial Sequence
  Synthetic
auugugacucagaaauagcu

SEQ ID NO: 148488 - RNA, 18 nt, Artificial Sequence
  Synthetic
uucauucuuagucuagcu

SEQ ID NO: 148489 - RNA, 19 nt, Artificial Sequence
  Synthetic
cuucauucuuagucuagcu

SEQ ID NO: 148490 - RNA, 20 nt, Artificial Sequence
  Synthetic
ucuucauucuuagucuagcu

SEQ ID NO: 148491 - RNA, 18 nt, Artificial Sequence
  Synthetic
uggugguuaccagaggcu

SEQ ID NO: 148492 - RNA, 19 nt, Artificial Sequence
  Synthetic
auggugguuaccagaggcu

SEQ ID NO: 148493 - RNA, 20 nt, Artificial Sequence
  Synthetic
aauggugguuaccagaggcu

SEQ ID NO: 148494 - RNA, 22 nt, Artificial Sequence
  Synthetic
agaauggugguuaccagaggcu

SEQ ID NO: 148495 - RNA, 23 nt, Artificial Sequence
  Synthetic
uagaauggugguuaccagaggcu

SEQ ID NO: 148496 - RNA, 18 nt, Artificial Sequence
  Synthetic
ccauguaguugagcggcu

SEQ ID NO: 148497 - RNA, 19 nt, Artificial Sequence
  Synthetic
uccauguaguugagcggcu

SEQ ID NO: 148498 - RNA, 20 nt, Artificial Sequence
  Synthetic
uuccauguaguugagcggcu

SEQ ID NO: 148499 - RNA, 21 nt, Artificial Sequence
  Synthetic
uuuccauguaguugagcggcu

SEQ ID NO: 148500 - RNA, 23 nt, Artificial Sequence
  Synthetic
aguuuccauguaguugagcggcu

SEQ ID NO: 148501 - RNA, 24 nt, Artificial Sequence
  Synthetic
caguuuccauguaguugagcggcu

SEQ ID NO: 148502 - RNA, 18 nt, Artificial Sequence
  Synthetic
cucugguagaauucggcu

SEQ ID NO: 148503 - RNA, 19 nt, Artificial Sequence
  Synthetic
ccucugguagaauucggcu

SEQ ID NO: 148504 - RNA, 20 nt, Artificial Sequence
  Synthetic
accucugguagaauucggcu

SEQ ID NO: 148505 - RNA, 21 nt, Artificial Sequence
  Synthetic
caccucugguagaauucggcu

SEQ ID NO: 148506 - RNA, 23 nt, Artificial Sequence
  Synthetic
ugcaccucugguagaauucggcu

SEQ ID NO: 148507 - RNA, 24 nt, Artificial Sequence
  Synthetic
uugcaccucugguagaauucggcu

SEQ ID NO: 148508 - RNA, 21 nt, Artificial Sequence
  Synthetic
uaccucugguagaauucggcu

SEQ ID NO: 148509 - RNA, 23 nt, Artificial Sequence
  Synthetic
uguaccucugguagaauucggcu

SEQ ID NO: 148510 - RNA, 24 nt, Artificial Sequence
  Synthetic
uuguaccucugguagaauucggcu

SEQ ID NO: 148511 - RNA, 18 nt, Artificial Sequence
  Synthetic
aaaacuguaacaagggcu

SEQ ID NO: 148512 - RNA, 19 nt, Artificial Sequence
  Synthetic
aaaaacuguaacaagggcu

SEQ ID NO: 148513 - RNA, 20 nt, Artificial Sequence
  Synthetic
aaaaaacuguaacaagggcu

SEQ ID NO: 148514 - RNA, 21 nt, Artificial Sequence
  Synthetic
caaaaaacuguaacaagggcu

SEQ ID NO: 148515 - RNA, 22 nt, Artificial Sequence
  Synthetic
acaaaaaacuguaacaagggcu

SEQ ID NO: 148516 - RNA, 23 nt, Artificial Sequence
  Synthetic
aacaaaaaacuguaacaagggcu

SEQ ID NO: 148517 - RNA, 24 nt, Artificial Sequence
  Synthetic
uaacaaaaaacuguaacaagggcu

SEQ ID NO: 148518 - RNA, 18 nt, Artificial Sequence
  Synthetic
augcgucccaggauggcu

SEQ ID NO: 148519 - RNA, 19 nt, Artificial Sequence
  Synthetic
caugcgucccaggauggcu

SEQ ID NO: 148520 - RNA, 20 nt, Artificial Sequence
  Synthetic
acaugcgucccaggauggcu

SEQ ID NO: 148521 - RNA, 21 nt, Artificial Sequence
  Synthetic
cacaugcgucccaggauggcu

SEQ ID NO: 148522 - RNA, 22 nt, Artificial Sequence
  Synthetic
ccacaugcgucccaggauggcu

SEQ ID NO: 148523 - RNA, 24 nt, Artificial Sequence
  Synthetic
agccacaugcgucccaggauggcu

SEQ ID NO: 148524 - RNA, 18 nt, Artificial Sequence
  Synthetic
uucaguaugauacuggcu

SEQ ID NO: 148525 - RNA, 19 nt, Artificial Sequence
  Synthetic
auucaguaugauacuggcu

SEQ ID NO: 148526 - RNA, 20 nt, Artificial Sequence
  Synthetic
cauucaguaugauacuggcu

SEQ ID NO: 148527 - RNA, 21 nt, Artificial Sequence
  Synthetic
ccauucaguaugauacuggcu

SEQ ID NO: 148528 - RNA, 22 nt, Artificial Sequence
  Synthetic
cccauucaguaugauacuggcu

SEQ ID NO: 148529 - RNA, 24 nt, Artificial Sequence
  Synthetic
ugcccauucaguaugauacuggcu

SEQ ID NO: 148530 - RNA, 18 nt, Artificial Sequence
  Synthetic
uucaguaugauauuggcu

SEQ ID NO: 148531 - RNA, 19 nt, Artificial Sequence
  Synthetic
auucaguaugauauuggcu

SEQ ID NO: 148532 - RNA, 20 nt, Artificial Sequence
  Synthetic
cauucaguaugauauuggcu

SEQ ID NO: 148533 - RNA, 21 nt, Artificial Sequence
  Synthetic
ccauucaguaugauauuggcu

SEQ ID NO: 148534 - RNA, 22 nt, Artificial Sequence
  Synthetic
cccauucaguaugauauuggcu

SEQ ID NO: 148535 - RNA, 24 nt, Artificial Sequence
  Synthetic
ugcccauucaguaugauauuggcu

SEQ ID NO: 148536 - RNA, 18 nt, Artificial Sequence
  Synthetic
uucccucuacacacugcu

SEQ ID NO: 148537 - RNA, 19 nt, Artificial Sequence
  Synthetic
uuucccucuacacacugcu

SEQ ID NO: 148538 - RNA, 20 nt, Artificial Sequence
  Synthetic
auuucccucuacacacugcu

SEQ ID NO: 148539 - RNA, 21 nt, Artificial Sequence
  Synthetic
aauuucccucuacacacugcu

SEQ ID NO: 148540 - RNA, 22 nt, Artificial Sequence
  Synthetic
aaauuucccucuacacacugcu

SEQ ID NO: 148541 - RNA, 23 nt, Artificial Sequence
  Synthetic
uaaauuucccucuacacacugcu

SEQ ID NO: 148542 - RNA, 24 nt, Artificial Sequence
  Synthetic
auaaauuucccucuacacacugcu

SEQ ID NO: 148543 - RNA, 18 nt, Artificial Sequence
  Synthetic
accugucauggcacugcu

SEQ ID NO: 148544 - RNA, 19 nt, Artificial Sequence
  Synthetic
aaccugucauggcacugcu

SEQ ID NO: 148545 - RNA, 20 nt, Artificial Sequence
  Synthetic
uaaccugucauggcacugcu

SEQ ID NO: 148546 - RNA, 22 nt, Artificial Sequence
  Synthetic
uguaaccugucauggcacugcu

SEQ ID NO: 148547 - RNA, 23 nt, Artificial Sequence
  Synthetic
uuguaaccugucauggcacugcu

SEQ ID NO: 148548 - RNA, 24 nt, Artificial Sequence
  Synthetic
uuuguaaccugucauggcacugcu

SEQ ID NO: 148549 - RNA, 19 nt, Artificial Sequence
  Synthetic
ugcugcaagcuucacugcu

SEQ ID NO: 148550 - RNA, 20 nt, Artificial Sequence
  Synthetic
uugcugcaagcuucacugcu

SEQ ID NO: 148551 - RNA, 22 nt, Artificial Sequence
  Synthetic
uguugcugcaagcuucacugcu

SEQ ID NO: 148552 - RNA, 23 nt, Artificial Sequence
  Synthetic
cuguugcugcaagcuucacugcu

SEQ ID NO: 148553 - RNA, 24 nt, Artificial Sequence
  Synthetic
ucuguugcugcaagcuucacugcu

SEQ ID NO: 148554 - RNA, 19 nt, Artificial Sequence
  Synthetic
ugcauuucuagcaagugcu

SEQ ID NO: 148555 - RNA, 20 nt, Artificial Sequence
  Synthetic
cugcauuucuagcaagugcu

SEQ ID NO: 148556 - RNA, 21 nt, Artificial Sequence
  Synthetic
ucugcauuucuagcaagugcu

SEQ ID NO: 148557 - RNA, 22 nt, Artificial Sequence
  Synthetic
uucugcauuucuagcaagugcu

SEQ ID NO: 148558 - RNA, 23 nt, Artificial Sequence
  Synthetic
auucugcauuucuagcaagugcu

SEQ ID NO: 148559 - RNA, 18 nt, Artificial Sequence
  Synthetic
uuuaauauuagaagugcu

SEQ ID NO: 148560 - RNA, 20 nt, Artificial Sequence
  Synthetic
aguuuaauauuagaagugcu

SEQ ID NO: 148561 - RNA, 21 nt, Artificial Sequence
  Synthetic
uggacagaguuguuaagugcu

SEQ ID NO: 148562 - RNA, 22 nt, Artificial Sequence
  Synthetic
uuggacagaguuguuaagugcu

SEQ ID NO: 148563 - RNA, 23 nt, Artificial Sequence
  Synthetic
uuuggacagaguuguuaagugcu

SEQ ID NO: 148564 - RNA, 23 nt, Artificial Sequence
  Synthetic
ugggaggaggcugaagcagugcu

SEQ ID NO: 148565 - RNA, 24 nt, Artificial Sequence
  Synthetic
augggaggaggcugaagcagugcu

SEQ ID NO: 148566 - RNA, 18 nt, Artificial Sequence
  Synthetic
uuccugcguuaacgugcu

SEQ ID NO: 148567 - RNA, 20 nt, Artificial Sequence
  Synthetic
uguuccugcguuaacgugcu

SEQ ID NO: 148568 - RNA, 21 nt, Artificial Sequence
  Synthetic
cuguuccugcguuaacgugcu

SEQ ID NO: 148569 - RNA, 22 nt, Artificial Sequence
  Synthetic
ucuguuccugcguuaacgugcu

SEQ ID NO: 148570 - RNA, 24 nt, Artificial Sequence
  Synthetic
ugucuguuccugcguuaacgugcu

SEQ ID NO: 148571 - RNA, 19 nt, Artificial Sequence
  Synthetic
aggcucuaugcuaggugcu

SEQ ID NO: 148572 - RNA, 20 nt, Artificial Sequence
  Synthetic
caggcucuaugcuaggugcu

SEQ ID NO: 148573 - RNA, 21 nt, Artificial Sequence
  Synthetic
ucaggcucuaugcuaggugcu

SEQ ID NO: 148574 - RNA, 23 nt, Artificial Sequence
  Synthetic
ugucaggcucuaugcuaggugcu

SEQ ID NO: 148575 - RNA, 19 nt, Artificial Sequence
  Synthetic
ugagcaucauacuggugcu

SEQ ID NO: 148576 - RNA, 20 nt, Artificial Sequence
  Synthetic
uugagcaucauacuggugcu

SEQ ID NO: 148577 - RNA, 18 nt, Artificial Sequence
  Synthetic
auuuucuuuuguauugcu

SEQ ID NO: 148578 - RNA, 19 nt, Artificial Sequence
  Synthetic
uauuuucuuuuguauugcu

SEQ ID NO: 148579 - RNA, 20 nt, Artificial Sequence
  Synthetic
uuauuuucuuuuguauugcu

SEQ ID NO: 148580 - RNA, 21 nt, Artificial Sequence
  Synthetic
ugaacagaauugggccuugcu

SEQ ID NO: 148581 - RNA, 22 nt, Artificial Sequence
  Synthetic
cugaacagaauugggccuugcu

SEQ ID NO: 148582 - RNA, 23 nt, Artificial Sequence
  Synthetic
acugaacagaauugggccuugcu

SEQ ID NO: 148583 - RNA, 24 nt, Artificial Sequence
  Synthetic
aacugaacagaauugggccuugcu

SEQ ID NO: 148584 - RNA, 18 nt, Artificial Sequence
  Synthetic
agcuuuguuauucuugcu

SEQ ID NO: 148585 - RNA, 19 nt, Artificial Sequence
  Synthetic
cagcuuuguuauucuugcu

SEQ ID NO: 148586 - RNA, 20 nt, Artificial Sequence
  Synthetic
ccagcuuuguuauucuugcu

SEQ ID NO: 148587 - RNA, 21 nt, Artificial Sequence
  Synthetic
uccagcuuuguuauucuugcu

SEQ ID NO: 148588 - RNA, 22 nt, Artificial Sequence
  Synthetic
cuccagcuuuguuauucuugcu

SEQ ID NO: 148589 - RNA, 23 nt, Artificial Sequence
  Synthetic
ccuccagcuuuguuauucuugcu

SEQ ID NO: 148590 - RNA, 19 nt, Artificial Sequence
  Synthetic
ugcaggacucaaaguugcu

SEQ ID NO: 148591 - RNA, 20 nt, Artificial Sequence
  Synthetic
uugcaggacucaaaguugcu

SEQ ID NO: 148592 - RNA, 21 nt, Artificial Sequence
  Synthetic
cuugcaggacucaaaguugcu

SEQ ID NO: 148593 - RNA, 23 nt, Artificial Sequence
  Synthetic
agcuugcaggacucaaaguugcu

SEQ ID NO: 148594 - RNA, 18 nt, Artificial Sequence
  Synthetic
uucuauaccuaauuugcu

SEQ ID NO: 148595 - RNA, 19 nt, Artificial Sequence
  Synthetic
cuucuauaccuaauuugcu

SEQ ID NO: 148596 - RNA, 20 nt, Artificial Sequence
  Synthetic
ucuucuauaccuaauuugcu

SEQ ID NO: 148597 - RNA, 21 nt, Artificial Sequence
  Synthetic
uucuucuauaccuaauuugcu

SEQ ID NO: 148598 - RNA, 22 nt, Artificial Sequence
  Synthetic
uuucuucuauaccuaauuugcu

SEQ ID NO: 148599 - RNA, 23 nt, Artificial Sequence
  Synthetic
auuucuucuauaccuaauuugcu

SEQ ID NO: 148600 - RNA, 24 nt, Artificial Sequence
  Synthetic
cauuucuucuauaccuaauuugcu

SEQ ID NO: 148601 - RNA, 18 nt, Artificial Sequence
  Synthetic
uccuugcgauaguuugcu

SEQ ID NO: 148602 - RNA, 20 nt, Artificial Sequence
  Synthetic
uguccuugcgauaguuugcu

SEQ ID NO: 148603 - RNA, 21 nt, Artificial Sequence
  Synthetic
uuguccuugcgauaguuugcu

SEQ ID NO: 148604 - RNA, 22 nt, Artificial Sequence
  Synthetic
uuuguccuugcgauaguuugcu

SEQ ID NO: 148605 - RNA, 23 nt, Artificial Sequence
  Synthetic
uuuuguccuugcgauaguuugcu

SEQ ID NO: 148606 - RNA, 24 nt, Artificial Sequence
  Synthetic
uuuuuguccuugcgauaguuugcu

SEQ ID NO: 148607 - RNA, 18 nt, Artificial Sequence
  Synthetic
uuccucuguuaguuugcu

SEQ ID NO: 148608 - RNA, 21 nt, Artificial Sequence
  Synthetic
cgguuccucuguuaguuugcu

SEQ ID NO: 148609 - RNA, 22 nt, Artificial Sequence
  Synthetic
ucgguuccucuguuaguuugcu

SEQ ID NO: 148610 - RNA, 23 nt, Artificial Sequence
  Synthetic
uucgguuccucuguuaguuugcu

SEQ ID NO: 148611 - RNA, 24 nt, Artificial Sequence
  Synthetic
uuucgguuccucuguuaguuugcu

SEQ ID NO: 148612 - RNA, 18 nt, Artificial Sequence
  Synthetic
aaauaacuggaaaaaucu

SEQ ID NO: 148613 - RNA, 19 nt, Artificial Sequence
  Synthetic
aaaauaacuggaaaaaucu

SEQ ID NO: 148614 - RNA, 20 nt, Artificial Sequence
  Synthetic
caaaauaacuggaaaaaucu

SEQ ID NO: 148615 - RNA, 18 nt, Artificial Sequence
  Synthetic
caaaaaucaaauaaaucu

SEQ ID NO: 148616 - RNA, 19 nt, Artificial Sequence
  Synthetic
acaaaaaucaaauaaaucu

SEQ ID NO: 148617 - RNA, 19 nt, Artificial Sequence
  Synthetic
ugcacuuacauauaaaucu

SEQ ID NO: 148618 - RNA, 20 nt, Artificial Sequence
  Synthetic
uugcacuuacauauaaaucu

SEQ ID NO: 148619 - RNA, 21 nt, Artificial Sequence
  Synthetic
uuugcacuuacauauaaaucu

SEQ ID NO: 148620 - RNA, 22 nt, Artificial Sequence
  Synthetic
cuuugcacuuacauauaaaucu

SEQ ID NO: 148621 - RNA, 23 nt, Artificial Sequence
  Synthetic
ccuuugcacuuacauauaaaucu

SEQ ID NO: 148622 - RNA, 24 nt, Artificial Sequence
  Synthetic
cccuuugcacuuacauauaaaucu

SEQ ID NO: 148623 - RNA, 18 nt, Artificial Sequence
  Synthetic
aauaucuucucccaaucu

SEQ ID NO: 148624 - RNA, 19 nt, Artificial Sequence
  Synthetic
aaauaucuucucccaaucu

SEQ ID NO: 148625 - RNA, 20 nt, Artificial Sequence
  Synthetic
caaauaucuucucccaaucu

SEQ ID NO: 148626 - RNA, 22 nt, Artificial Sequence
  Synthetic
ugcaaauaucuucucccaaucu

SEQ ID NO: 148627 - RNA, 23 nt, Artificial Sequence
  Synthetic
uugcaaauaucuucucccaaucu

SEQ ID NO: 148628 - RNA, 24 nt, Artificial Sequence
  Synthetic
uuugcaaauaucuucucccaaucu

SEQ ID NO: 148629 - RNA, 18 nt, Artificial Sequence
  Synthetic
ccucaaaagggucaaucu

SEQ ID NO: 148630 - RNA, 20 nt, Artificial Sequence
  Synthetic
agccucaaaagggucaaucu

SEQ ID NO: 148631 - RNA, 21 nt, Artificial Sequence
  Synthetic
uagccucaaaagggucaaucu

SEQ ID NO: 148632 - RNA, 22 nt, Artificial Sequence
  Synthetic
auagccucaaaagggucaaucu

SEQ ID NO: 148633 - RNA, 23 nt, Artificial Sequence
  Synthetic
aauagccucaaaagggucaaucu

SEQ ID NO: 148634 - RNA, 24 nt, Artificial Sequence
  Synthetic
aaauagccucaaaagggucaaucu

SEQ ID NO: 148635 - RNA, 18 nt, Artificial Sequence
  Synthetic
caggaagaaguugaaucu

SEQ ID NO: 148636 - RNA, 19 nt, Artificial Sequence
  Synthetic
ccaggaagaaguugaaucu

SEQ ID NO: 148637 - RNA, 20 nt, Artificial Sequence
  Synthetic
accaggaagaaguugaaucu

SEQ ID NO: 148638 - RNA, 21 nt, Artificial Sequence
  Synthetic
auguuuucguauauuuaaucu

SEQ ID NO: 148639 - RNA, 22 nt, Artificial Sequence
  Synthetic
aauguuuucguauauuuaaucu

SEQ ID NO: 148640 - RNA, 23 nt, Artificial Sequence
  Synthetic
uaauguuuucguauauuuaaucu

SEQ ID NO: 148641 - RNA, 24 nt, Artificial Sequence
  Synthetic
uuaauguuuucguauauuuaaucu

SEQ ID NO: 148642 - RNA, 18 nt, Artificial Sequence
  Synthetic
aucccucccaugacaucu

SEQ ID NO: 148643 - RNA, 21 nt, Artificial Sequence
  Synthetic
uggaucccucccaugacaucu

SEQ ID NO: 148644 - RNA, 22 nt, Artificial Sequence
  Synthetic
cuggaucccucccaugacaucu

SEQ ID NO: 148645 - RNA, 23 nt, Artificial Sequence
  Synthetic
acuggaucccucccaugacaucu

SEQ ID NO: 148646 - RNA, 24 nt, Artificial Sequence
  Synthetic
cacuggaucccucccaugacaucu

SEQ ID NO: 148647 - RNA, 19 nt, Artificial Sequence
  Synthetic
agcaacaucagcaccaucu

SEQ ID NO: 148648 - RNA, 20 nt, Artificial Sequence
  Synthetic
cagcaacaucagcaccaucu

SEQ ID NO: 148649 - RNA, 21 nt, Artificial Sequence
  Synthetic
ccagcaacaucagcaccaucu

SEQ ID NO: 148650 - RNA, 22 nt, Artificial Sequence
  Synthetic
accagcaacaucagcaccaucu

SEQ ID NO: 148651 - RNA, 18 nt, Artificial Sequence
  Synthetic
ugaagaacugagucaucu

SEQ ID NO: 148652 - RNA, 19 nt, Artificial Sequence
  Synthetic
cugaagaacugagucaucu

SEQ ID NO: 148653 - RNA, 20 nt, Artificial Sequence
  Synthetic
acugaagaacugagucaucu

SEQ ID NO: 148654 - RNA, 18 nt, Artificial Sequence
  Synthetic
uuaggcuaauuuucaucu

SEQ ID NO: 148655 - RNA, 19 nt, Artificial Sequence
  Synthetic
uuuaggcuaauuuucaucu

SEQ ID NO: 148656 - RNA, 20 nt, Artificial Sequence
  Synthetic
uuuuaggcuaauuuucaucu

SEQ ID NO: 148657 - RNA, 18 nt, Artificial Sequence
  Synthetic
uuguacaauuugugaucu

SEQ ID NO: 148658 - RNA, 20 nt, Artificial Sequence
  Synthetic
uguuguacaauuugugaucu

SEQ ID NO: 148659 - RNA, 18 nt, Artificial Sequence
  Synthetic
cugcugaugucuugaucu

SEQ ID NO: 148660 - RNA, 19 nt, Artificial Sequence
  Synthetic
ucugcugaugucuugaucu

SEQ ID NO: 148661 - RNA, 20 nt, Artificial Sequence
  Synthetic
aucugcugaugucuugaucu

SEQ ID NO: 148662 - RNA, 21 nt, Artificial Sequence
  Synthetic
aaucugcugaugucuugaucu

SEQ ID NO: 148663 - RNA, 23 nt, Artificial Sequence
  Synthetic
ugaaucugcugaugucuugaucu

SEQ ID NO: 148664 - RNA, 24 nt, Artificial Sequence
  Synthetic
augaaucugcugaugucuugaucu

SEQ ID NO: 148665 - RNA, 18 nt, Artificial Sequence
  Synthetic
cagaaagagaaaauaucu

SEQ ID NO: 148666 - RNA, 19 nt, Artificial Sequence
  Synthetic
acagaaagagaaaauaucu

SEQ ID NO: 148667 - RNA, 20 nt, Artificial Sequence
  Synthetic
uacagaaagagaaaauaucu

SEQ ID NO: 148668 - RNA, 18 nt, Artificial Sequence
  Synthetic
acaaaaaauaaaauaucu

SEQ ID NO: 148669 - RNA, 19 nt, Artificial Sequence
  Synthetic
cacaaaaaauaaaauaucu

SEQ ID NO: 148670 - RNA, 20 nt, Artificial Sequence
  Synthetic
ccacaaaaaauaaaauaucu

SEQ ID NO: 148671 - RNA, 21 nt, Artificial Sequence
  Synthetic
accacaaaaaauaaaauaucu

SEQ ID NO: 148672 - RNA, 22 nt, Artificial Sequence
  Synthetic
aaccacaaaaaauaaaauaucu

SEQ ID NO: 148673 - RNA, 23 nt, Artificial Sequence
  Synthetic
uaaccacaaaaaauaaaauaucu

SEQ ID NO: 148674 - RNA, 24 nt, Artificial Sequence
  Synthetic
auaaccacaaaaaauaaaauaucu

SEQ ID NO: 148675 - RNA, 18 nt, Artificial Sequence
  Synthetic
cuauaaaauaaaauaucu

SEQ ID NO: 148676 - RNA, 19 nt, Artificial Sequence
  Synthetic
acuauaaaauaaaauaucu

SEQ ID NO: 148677 - RNA, 21 nt, Artificial Sequence
  Synthetic
uauuauauuucacuauuaucu

SEQ ID NO: 148678 - RNA, 22 nt, Artificial Sequence
  Synthetic
uuauuauauuucacuauuaucu

SEQ ID NO: 148679 - RNA, 23 nt, Artificial Sequence
  Synthetic
uuuauuauauuucacuauuaucu

SEQ ID NO: 148680 - RNA, 24 nt, Artificial Sequence
  Synthetic
uuuuauuauauuucacuauuaucu

SEQ ID NO: 148681 - RNA, 18 nt, Artificial Sequence
  Synthetic
cugagugcaccacccucu

SEQ ID NO: 148682 - RNA, 19 nt, Artificial Sequence
  Synthetic
ccugagugcaccacccucu

SEQ ID NO: 148683 - RNA, 20 nt, Artificial Sequence
  Synthetic
cccugagugcaccacccucu

SEQ ID NO: 148684 - RNA, 21 nt, Artificial Sequence
  Synthetic
ucccugagugcaccacccucu

SEQ ID NO: 148685 - RNA, 22 nt, Artificial Sequence
  Synthetic
cucccugagugcaccacccucu

SEQ ID NO: 148686 - RNA, 23 nt, Artificial Sequence
  Synthetic
ccucccugagugcaccacccucu

SEQ ID NO: 148687 - RNA, 24 nt, Artificial Sequence
  Synthetic
cccucccugagugcaccacccucu

SEQ ID NO: 148688 - RNA, 19 nt, Artificial Sequence
  Synthetic
uguuugcuuuuuuuccucu

SEQ ID NO: 148689 - RNA, 18 nt, Artificial Sequence
  Synthetic
uuuauuggagagugcucu

SEQ ID NO: 148690 - RNA, 19 nt, Artificial Sequence
  Synthetic
uuuuauuggagagugcucu

SEQ ID NO: 148691 - RNA, 20 nt, Artificial Sequence
  Synthetic
auuuuauuggagagugcucu

SEQ ID NO: 148692 - RNA, 21 nt, Artificial Sequence
  Synthetic
aauuuuauuggagagugcucu

SEQ ID NO: 148693 - RNA, 24 nt, Artificial Sequence
  Synthetic
aggaauuuuauuggagagugcucu

SEQ ID NO: 148694 - RNA, 19 nt, Artificial Sequence
  Synthetic
ugaacagacuucuugcucu

SEQ ID NO: 148695 - RNA, 20 nt, Artificial Sequence
  Synthetic
uugaacagacuucuugcucu

SEQ ID NO: 148696 - RNA, 18 nt, Artificial Sequence
  Synthetic
ucuuugucuucaaucucu

SEQ ID NO: 148697 - RNA, 19 nt, Artificial Sequence
  Synthetic
uucuuugucuucaaucucu

SEQ ID NO: 148698 - RNA, 20 nt, Artificial Sequence
  Synthetic
uuucuuugucuucaaucucu

SEQ ID NO: 148699 - RNA, 18 nt, Artificial Sequence
  Synthetic
aacuaaaucagaaucucu

SEQ ID NO: 148700 - RNA, 19 nt, Artificial Sequence
  Synthetic
caacuaaaucagaaucucu

SEQ ID NO: 148701 - RNA, 20 nt, Artificial Sequence
  Synthetic
ccaacuaaaucagaaucucu

SEQ ID NO: 148702 - RNA, 21 nt, Artificial Sequence
  Synthetic
uccaacuaaaucagaaucucu

SEQ ID NO: 148703 - RNA, 22 nt, Artificial Sequence
  Synthetic
auccaacuaaaucagaaucucu

SEQ ID NO: 148704 - RNA, 23 nt, Artificial Sequence
  Synthetic
cauccaacuaaaucagaaucucu

SEQ ID NO: 148705 - RNA, 24 nt, Artificial Sequence
  Synthetic
ccauccaacuaaaucagaaucucu

SEQ ID NO: 148706 - RNA, 18 nt, Artificial Sequence
  Synthetic
accuaaugacacaucucu

SEQ ID NO: 148707 - RNA, 19 nt, Artificial Sequence
  Synthetic
caccuaaugacacaucucu

SEQ ID NO: 148708 - RNA, 20 nt, Artificial Sequence
  Synthetic
ucaccuaaugacacaucucu

SEQ ID NO: 148709 - RNA, 21 nt, Artificial Sequence
  Synthetic
aucaccuaaugacacaucucu

SEQ ID NO: 148710 - RNA, 22 nt, Artificial Sequence
  Synthetic
aaucaccuaaugacacaucucu

SEQ ID NO: 148711 - RNA, 23 nt, Artificial Sequence
  Synthetic
aaaucaccuaaugacacaucucu

SEQ ID NO: 148712 - RNA, 24 nt, Artificial Sequence
  Synthetic
aaaaucaccuaaugacacaucucu

SEQ ID NO: 148713 - RNA, 20 nt, Artificial Sequence
  Synthetic
uggcaaauccuuucaucucu

SEQ ID NO: 148714 - RNA, 21 nt, Artificial Sequence
  Synthetic
acauacagaaucaugaucucu

SEQ ID NO: 148715 - RNA, 23 nt, Artificial Sequence
  Synthetic
agacauacagaaucaugaucucu

SEQ ID NO: 148716 - RNA, 24 nt, Artificial Sequence
  Synthetic
cagacauacagaaucaugaucucu

SEQ ID NO: 148717 - RNA, 22 nt, Artificial Sequence
  Synthetic
ugggguucccaugacccucucu

SEQ ID NO: 148718 - RNA, 23 nt, Artificial Sequence
  Synthetic
uugggguucccaugacccucucu

SEQ ID NO: 148719 - RNA, 18 nt, Artificial Sequence
  Synthetic
uuguucaucguagucucu

SEQ ID NO: 148720 - RNA, 19 nt, Artificial Sequence
  Synthetic
auuguucaucguagucucu

SEQ ID NO: 148721 - RNA, 20 nt, Artificial Sequence
  Synthetic
aauuguucaucguagucucu

SEQ ID NO: 148722 - RNA, 21 nt, Artificial Sequence
  Synthetic
uaauuguucaucguagucucu

SEQ ID NO: 148723 - RNA, 22 nt, Artificial Sequence
  Synthetic
auaauuguucaucguagucucu

SEQ ID NO: 148724 - RNA, 23 nt, Artificial Sequence
  Synthetic
uauaauuguucaucguagucucu

SEQ ID NO: 148725 - RNA, 24 nt, Artificial Sequence
  Synthetic
auauaauuguucaucguagucucu

SEQ ID NO: 148726 - RNA, 18 nt, Artificial Sequence
  Synthetic
auuuugacagcauucucu

SEQ ID NO: 148727 - RNA, 19 nt, Artificial Sequence
  Synthetic
aauuuugacagcauucucu

SEQ ID NO: 148728 - RNA, 20 nt, Artificial Sequence
  Synthetic
caauuuugacagcauucucu

SEQ ID NO: 148729 - RNA, 19 nt, Artificial Sequence
  Synthetic
agcaacuucagcaaagucu

SEQ ID NO: 148730 - RNA, 20 nt, Artificial Sequence
  Synthetic
aagcaacuucagcaaagucu

SEQ ID NO: 148731 - RNA, 18 nt, Artificial Sequence
  Synthetic
cuacacauuucaaagucu

SEQ ID NO: 148732 - RNA, 19 nt, Artificial Sequence
  Synthetic
acuacacauuucaaagucu

SEQ ID NO: 148733 - RNA, 20 nt, Artificial Sequence
  Synthetic
aacuacacauuucaaagucu

SEQ ID NO: 148734 - RNA, 19 nt, Artificial Sequence
  Synthetic
agacauccacugggagucu

SEQ ID NO: 148735 - RNA, 20 nt, Artificial Sequence
  Synthetic
cagacauccacugggagucu

SEQ ID NO: 148736 - RNA, 21 nt, Artificial Sequence
  Synthetic
ucagacauccacugggagucu

SEQ ID NO: 148737 - RNA, 22 nt, Artificial Sequence
  Synthetic
uucagacauccacugggagucu

SEQ ID NO: 148738 - RNA, 23 nt, Artificial Sequence
  Synthetic
uuucagacauccacugggagucu

SEQ ID NO: 148739 - RNA, 18 nt, Artificial Sequence
  Synthetic
uuaaaauuacauaugucu

SEQ ID NO: 148740 - RNA, 19 nt, Artificial Sequence
  Synthetic
uuuaaaauuacauaugucu

SEQ ID NO: 148741 - RNA, 20 nt, Artificial Sequence
  Synthetic
auuuaaaauuacauaugucu

SEQ ID NO: 148742 - RNA, 19 nt, Artificial Sequence
  Synthetic
ugguagguuguaugugucu

SEQ ID NO: 148743 - RNA, 20 nt, Artificial Sequence
  Synthetic
uugguagguuguaugugucu

SEQ ID NO: 148744 - RNA, 21 nt, Artificial Sequence
  Synthetic
cuugguagguuguaugugucu

SEQ ID NO: 148745 - RNA, 22 nt, Artificial Sequence
  Synthetic
ucuugguagguuguaugugucu

SEQ ID NO: 148746 - RNA, 23 nt, Artificial Sequence
  Synthetic
aucuugguagguuguaugugucu

SEQ ID NO: 148747 - RNA, 24 nt, Artificial Sequence
  Synthetic
aaucuugguagguuguaugugucu

SEQ ID NO: 148748 - RNA, 18 nt, Artificial Sequence
  Synthetic
ucugacaauuaugugucu

SEQ ID NO: 148749 - RNA, 19 nt, Artificial Sequence
  Synthetic
aucugacaauuaugugucu

SEQ ID NO: 148750 - RNA, 20 nt, Artificial Sequence
  Synthetic
aaucugacaauuaugugucu

SEQ ID NO: 148751 - RNA, 22 nt, Artificial Sequence
  Synthetic
ugaaucugacaauuaugugucu

SEQ ID NO: 148752 - RNA, 18 nt, Artificial Sequence
  Synthetic
uucaauauuguugugucu

SEQ ID NO: 148753 - RNA, 19 nt, Artificial Sequence
  Synthetic
uuucaauauuguugugucu

SEQ ID NO: 148754 - RNA, 20 nt, Artificial Sequence
  Synthetic
auuucaauauuguugugucu

SEQ ID NO: 148755 - RNA, 21 nt, Artificial Sequence
  Synthetic
aauuucaauauuguugugucu

SEQ ID NO: 148756 - RNA, 22 nt, Artificial Sequence
  Synthetic
uaauuucaauauuguugugucu

SEQ ID NO: 148757 - RNA, 23 nt, Artificial Sequence
  Synthetic
auaauuucaauauuguugugucu

SEQ ID NO: 148758 - RNA, 24 nt, Artificial Sequence
  Synthetic
cauaauuucaauauuguugugucu

SEQ ID NO: 148759 - RNA, 21 nt, Artificial Sequence
  Synthetic
ccagcuaaaaguccauugucu

SEQ ID NO: 148760 - RNA, 22 nt, Artificial Sequence
  Synthetic
uccagcuaaaaguccauugucu

SEQ ID NO: 148761 - RNA, 23 nt, Artificial Sequence
  Synthetic
auccagcuaaaaguccauugucu

SEQ ID NO: 148762 - RNA, 24 nt, Artificial Sequence
  Synthetic
cauccagcuaaaaguccauugucu

SEQ ID NO: 148763 - RNA, 19 nt, Artificial Sequence
  Synthetic
uguauuuaaauccuugucu

SEQ ID NO: 148764 - RNA, 20 nt, Artificial Sequence
  Synthetic
uuguauuuaaauccuugucu

SEQ ID NO: 148765 - RNA, 21 nt, Artificial Sequence
  Synthetic
uuuguauuuaaauccuugucu

SEQ ID NO: 148766 - RNA, 22 nt, Artificial Sequence
  Synthetic
auuuguauuuaaauccuugucu

SEQ ID NO: 148767 - RNA, 23 nt, Artificial Sequence
  Synthetic
uauuuguauuuaaauccuugucu

SEQ ID NO: 148768 - RNA, 24 nt, Artificial Sequence
  Synthetic
uuauuuguauuuaaauccuugucu

SEQ ID NO: 148769 - RNA, 18 nt, Artificial Sequence
  Synthetic
uguaaaaacaaaaauucu

SEQ ID NO: 148770 - RNA, 19 nt, Artificial Sequence
  Synthetic
auguaaaaacaaaaauucu

SEQ ID NO: 148771 - RNA, 20 nt, Artificial Sequence
  Synthetic
aauguaaaaacaaaaauucu

SEQ ID NO: 148772 - RNA, 22 nt, Artificial Sequence
  Synthetic
aggacuaauucucugcaauucu

SEQ ID NO: 148773 - RNA, 23 nt, Artificial Sequence
  Synthetic
aaggacuaauucucugcaauucu

SEQ ID NO: 148774 - RNA, 24 nt, Artificial Sequence
  Synthetic
aaaggacuaauucucugcaauucu

SEQ ID NO: 148775 - RNA, 18 nt, Artificial Sequence
  Synthetic
acgauuucucauaauucu

SEQ ID NO: 148776 - RNA, 19 nt, Artificial Sequence
  Synthetic
uacgauuucucauaauucu

SEQ ID NO: 148777 - RNA, 20 nt, Artificial Sequence
  Synthetic
uuacgauuucucauaauucu

SEQ ID NO: 148778 - RNA, 21 nt, Artificial Sequence
  Synthetic
uuuacgauuucucauaauucu

SEQ ID NO: 148779 - RNA, 22 nt, Artificial Sequence
  Synthetic
uuuuacgauuucucauaauucu

SEQ ID NO: 148780 - RNA, 24 nt, Artificial Sequence
  Synthetic
aguuuuacgauuucucauaauucu

SEQ ID NO: 148781 - RNA, 18 nt, Artificial Sequence
  Synthetic
uauuaucaucuccauucu

SEQ ID NO: 148782 - RNA, 18 nt, Artificial Sequence
  Synthetic
auuuuuuuuuaauauucu

SEQ ID NO: 148783 - RNA, 19 nt, Artificial Sequence
  Synthetic
cauuuuuuuuuaauauucu

SEQ ID NO: 148784 - RNA, 20 nt, Artificial Sequence
  Synthetic
ucauuuuuuuuuaauauucu

SEQ ID NO: 148785 - RNA, 18 nt, Artificial Sequence
  Synthetic
aaaucaguauuuccuucu

SEQ ID NO: 148786 - RNA, 19 nt, Artificial Sequence
  Synthetic
aaaaucaguauuuccuucu

SEQ ID NO: 148787 - RNA, 20 nt, Artificial Sequence
  Synthetic
uaaaaucaguauuuccuucu

SEQ ID NO: 148788 - RNA, 18 nt, Artificial Sequence
  Synthetic
cuugcauuuuccucuucu

SEQ ID NO: 148789 - RNA, 19 nt, Artificial Sequence
  Synthetic
acuugcauuuuccucuucu

SEQ ID NO: 148790 - RNA, 20 nt, Artificial Sequence
  Synthetic
cacuugcauuuuccucuucu

SEQ ID NO: 148791 - RNA, 22 nt, Artificial Sequence
  Synthetic
ugcacuugcauuuuccucuucu

SEQ ID NO: 148792 - RNA, 23 nt, Artificial Sequence
  Synthetic
cugcacuugcauuuuccucuucu

SEQ ID NO: 148793 - RNA, 24 nt, Artificial Sequence
  Synthetic
ucugcacuugcauuuuccucuucu

SEQ ID NO: 148794 - RNA, 18 nt, Artificial Sequence
  Synthetic
uuuguaauccucucuucu

SEQ ID NO: 148795 - RNA, 19 nt, Artificial Sequence
  Synthetic
uuuuguaauccucucuucu

SEQ ID NO: 148796 - RNA, 20 nt, Artificial Sequence
  Synthetic
uuuuuguaauccucucuucu

SEQ ID NO: 148797 - RNA, 18 nt, Artificial Sequence
  Synthetic
auugguaccaauucuucu

SEQ ID NO: 148798 - RNA, 19 nt, Artificial Sequence
  Synthetic
aauugguaccaauucuucu

SEQ ID NO: 148799 - RNA, 20 nt, Artificial Sequence
  Synthetic
uaauugguaccaauucuucu

SEQ ID NO: 148800 - RNA, 21 nt, Artificial Sequence
  Synthetic
auaauugguaccaauucuucu

SEQ ID NO: 148801 - RNA, 22 nt, Artificial Sequence
  Synthetic
uauaauugguaccaauucuucu

SEQ ID NO: 148802 - RNA, 23 nt, Artificial Sequence
  Synthetic
uuauaauugguaccaauucuucu

SEQ ID NO: 148803 - RNA, 24 nt, Artificial Sequence
  Synthetic
auuauaauugguaccaauucuucu

SEQ ID NO: 148804 - RNA, 18 nt, Artificial Sequence
  Synthetic
ucccuuauguuuucuucu

SEQ ID NO: 148805 - RNA, 19 nt, Artificial Sequence
  Synthetic
uucccuuauguuuucuucu

SEQ ID NO: 148806 - RNA, 20 nt, Artificial Sequence
  Synthetic
uuucccuuauguuuucuucu

SEQ ID NO: 148807 - RNA, 21 nt, Artificial Sequence
  Synthetic
uuuucccuuauguuuucuucu

SEQ ID NO: 148808 - RNA, 22 nt, Artificial Sequence
  Synthetic
uuuuucccuuauguuuucuucu

SEQ ID NO: 148809 - RNA, 23 nt, Artificial Sequence
  Synthetic
auuuuucccuuauguuuucuucu

SEQ ID NO: 148810 - RNA, 24 nt, Artificial Sequence
  Synthetic
aauuuuucccuuauguuuucuucu

SEQ ID NO: 148811 - RNA, 21 nt, Artificial Sequence
  Synthetic
uuuagcagaagacugaguucu

SEQ ID NO: 148812 - RNA, 22 nt, Artificial Sequence
  Synthetic
auuuagcagaagacugaguucu

SEQ ID NO: 148813 - RNA, 23 nt, Artificial Sequence
  Synthetic
uauuuagcagaagacugaguucu

SEQ ID NO: 148814 - RNA, 24 nt, Artificial Sequence
  Synthetic
uuauuuagcagaagacugaguucu

SEQ ID NO: 148815 - RNA, 18 nt, Artificial Sequence
  Synthetic
agaugaaaaccagguucu

SEQ ID NO: 148816 - RNA, 19 nt, Artificial Sequence
  Synthetic
aagaugaaaaccagguucu

SEQ ID NO: 148817 - RNA, 20 nt, Artificial Sequence
  Synthetic
aaagaugaaaaccagguucu

SEQ ID NO: 148818 - RNA, 18 nt, Artificial Sequence
  Synthetic
ucuauuuaggaguguucu

SEQ ID NO: 148819 - RNA, 20 nt, Artificial Sequence
  Synthetic
ugucuauuuaggaguguucu

SEQ ID NO: 148820 - RNA, 18 nt, Artificial Sequence
  Synthetic
uauaauucuggaauuucu

SEQ ID NO: 148821 - RNA, 19 nt, Artificial Sequence
  Synthetic
auauaauucuggaauuucu

SEQ ID NO: 148822 - RNA, 18 nt, Artificial Sequence
  Synthetic
uuuuuuuuucacauuucu

SEQ ID NO: 148823 - RNA, 19 nt, Artificial Sequence
  Synthetic
uuuuuuuuuucacauuucu

SEQ ID NO: 148824 - RNA, 20 nt, Artificial Sequence
  Synthetic
uuuuuuuuuuucacauuucu

SEQ ID NO: 148825 - RNA, 21 nt, Artificial Sequence
  Synthetic
uuuuuuuuuuuucacauuucu

SEQ ID NO: 148826 - RNA, 22 nt, Artificial Sequence
  Synthetic
uuuuuuuuuuuuucacauuucu

SEQ ID NO: 148827 - RNA, 23 nt, Artificial Sequence
  Synthetic
uuuuuuuuuuuuuucacauuucu

SEQ ID NO: 148828 - RNA, 24 nt, Artificial Sequence
  Synthetic
uuuuuuuuuuuuuuucacauuucu

SEQ ID NO: 148829 - RNA, 18 nt, Artificial Sequence
  Synthetic
auaauacucuccauuucu

SEQ ID NO: 148830 - RNA, 19 nt, Artificial Sequence
  Synthetic
cauaauacucuccauuucu

SEQ ID NO: 148831 - RNA, 20 nt, Artificial Sequence
  Synthetic
ccauaauacucuccauuucu

SEQ ID NO: 148832 - RNA, 21 nt, Artificial Sequence
  Synthetic
accauaauacucuccauuucu

SEQ ID NO: 148833 - RNA, 22 nt, Artificial Sequence
  Synthetic
caccauaauacucuccauuucu

SEQ ID NO: 148834 - RNA, 23 nt, Artificial Sequence
  Synthetic
ccaccauaauacucuccauuucu

SEQ ID NO: 148835 - RNA, 24 nt, Artificial Sequence
  Synthetic
accaccauaauacucuccauuucu

SEQ ID NO: 148836 - RNA, 19 nt, Artificial Sequence
  Synthetic
ugguagauuauguauuucu

SEQ ID NO: 148837 - RNA, 20 nt, Artificial Sequence
  Synthetic
uugguagauuauguauuucu

SEQ ID NO: 148838 - RNA, 21 nt, Artificial Sequence
  Synthetic
uuugguagauuauguauuucu

SEQ ID NO: 148839 - RNA, 22 nt, Artificial Sequence
  Synthetic
uuuugguagauuauguauuucu

SEQ ID NO: 148840 - RNA, 24 nt, Artificial Sequence
  Synthetic
aguuuugguagauuauguauuucu

SEQ ID NO: 148841 - RNA, 18 nt, Artificial Sequence
  Synthetic
uauacugauuuccuuucu

SEQ ID NO: 148842 - RNA, 19 nt, Artificial Sequence
  Synthetic
auauacugauuuccuuucu

SEQ ID NO: 148843 - RNA, 20 nt, Artificial Sequence
  Synthetic
aauauacugauuuccuuucu

SEQ ID NO: 148844 - RNA, 21 nt, Artificial Sequence
  Synthetic
caauauacugauuuccuuucu

SEQ ID NO: 148845 - RNA, 22 nt, Artificial Sequence
  Synthetic
ucaauauacugauuuccuuucu

SEQ ID NO: 148846 - RNA, 24 nt, Artificial Sequence
  Synthetic
cgucaauauacugauuuccuuucu

SEQ ID NO: 148847 - RNA, 18 nt, Artificial Sequence
  Synthetic
aauuguuuaacucuuucu

SEQ ID NO: 148848 - RNA, 19 nt, Artificial Sequence
  Synthetic
aaauuguuuaacucuuucu

SEQ ID NO: 148849 - RNA, 20 nt, Artificial Sequence
  Synthetic
uaaauuguuuaacucuuucu

SEQ ID NO: 148850 - RNA, 18 nt, Artificial Sequence
  Synthetic
ccauuuuucucuguuucu

SEQ ID NO: 148851 - RNA, 19 nt, Artificial Sequence
  Synthetic
accauuuuucucuguuucu

SEQ ID NO: 148852 - RNA, 20 nt, Artificial Sequence
  Synthetic
caccauuuuucucuguuucu

SEQ ID NO: 148853 - RNA, 21 nt, Artificial Sequence
  Synthetic
ccaccauuuuucucuguuucu

SEQ ID NO: 148854 - RNA, 22 nt, Artificial Sequence
  Synthetic
accaccauuuuucucuguuucu

SEQ ID NO: 148855 - RNA, 23 nt, Artificial Sequence
  Synthetic
aaccaccauuuuucucuguuucu

SEQ ID NO: 148856 - RNA, 24 nt, Artificial Sequence
  Synthetic
uaaccaccauuuuucucuguuucu

SEQ ID NO: 148857 - RNA, 19 nt, Artificial Sequence
  Synthetic
uggacuacuuucuguuucu

SEQ ID NO: 148858 - RNA, 20 nt, Artificial Sequence
  Synthetic
cuggacuacuuucuguuucu

SEQ ID NO: 148859 - RNA, 21 nt, Artificial Sequence
  Synthetic
aauucagaauuugauuuuucu

SEQ ID NO: 148860 - RNA, 22 nt, Artificial Sequence
  Synthetic
aaauucagaauuugauuuuucu

SEQ ID NO: 148861 - RNA, 23 nt, Artificial Sequence
  Synthetic
aaaauucagaauuugauuuuucu

SEQ ID NO: 148862 - RNA, 24 nt, Artificial Sequence
  Synthetic
aaaaauucagaauuugauuuuucu

SEQ ID NO: 148863 - RNA, 18 nt, Artificial Sequence
  Synthetic
aguggaggaggaaaaagu

SEQ ID NO: 148864 - RNA, 19 nt, Artificial Sequence
  Synthetic
aaguggaggaggaaaaagu

SEQ ID NO: 148865 - RNA, 20 nt, Artificial Sequence
  Synthetic
aaaguggaggaggaaaaagu

SEQ ID NO: 148866 - RNA, 18 nt, Artificial Sequence
  Synthetic
aaauguuauuuaaaaagu

SEQ ID NO: 148867 - RNA, 20 nt, Artificial Sequence
  Synthetic
ugaaauguuauuuaaaaagu

SEQ ID NO: 148868 - RNA, 18 nt, Artificial Sequence
  Synthetic
uuaccucaccugaaaagu

SEQ ID NO: 148869 - RNA, 20 nt, Artificial Sequence
  Synthetic
aguuaccucaccugaaaagu

SEQ ID NO: 148870 - RNA, 18 nt, Artificial Sequence
  Synthetic
uaauauagaaauaaaagu

SEQ ID NO: 148871 - RNA, 20 nt, Artificial Sequence
  Synthetic
uguaauauagaaauaaaagu

SEQ ID NO: 148872 - RNA, 18 nt, Artificial Sequence
  Synthetic
aaaaaaaaaaaccaaagu

SEQ ID NO: 148873 - RNA, 19 nt, Artificial Sequence
  Synthetic
aaaaaaaaaaaaccaaagu

SEQ ID NO: 148874 - RNA, 20 nt, Artificial Sequence
  Synthetic
aaaaaaaaaaaaaccaaagu

SEQ ID NO: 148875 - RNA, 21 nt, Artificial Sequence
  Synthetic
aaaaaaaaaaaaaaccaaagu

SEQ ID NO: 148876 - RNA, 22 nt, Artificial Sequence
  Synthetic
caaaaaaaaaaaaaaccaaagu

SEQ ID NO: 148877 - RNA, 23 nt, Artificial Sequence
  Synthetic
acaaaaaaaaaaaaaaccaaagu

SEQ ID NO: 148878 - RNA, 24 nt, Artificial Sequence
  Synthetic
aacaaaaaaaaaaaaaaccaaagu

SEQ ID NO: 148879 - RNA, 18 nt, Artificial Sequence
  Synthetic
agcaguuguuuucaaagu

SEQ ID NO: 148880 - RNA, 20 nt, Artificial Sequence
  Synthetic
agagcaguuguuuucaaagu

SEQ ID NO: 148881 - RNA, 18 nt, Artificial Sequence
  Synthetic
uaaaaagguaaauaaagu

SEQ ID NO: 148882 - RNA, 19 nt, Artificial Sequence
  Synthetic
uuaaaaagguaaauaaagu

SEQ ID NO: 148883 - RNA, 20 nt, Artificial Sequence
  Synthetic
uuuaaaaagguaaauaaagu

SEQ ID NO: 148884 - RNA, 21 nt, Artificial Sequence
  Synthetic
uuuuaaaaagguaaauaaagu

SEQ ID NO: 148885 - RNA, 22 nt, Artificial Sequence
  Synthetic
cuuuuaaaaagguaaauaaagu

SEQ ID NO: 148886 - RNA, 23 nt, Artificial Sequence
  Synthetic
ucuuuuaaaaagguaaauaaagu

SEQ ID NO: 148887 - RNA, 18 nt, Artificial Sequence
  Synthetic
aauaagagaagguaaagu

SEQ ID NO: 148888 - RNA, 20 nt, Artificial Sequence
  Synthetic
agaauaagagaagguaaagu

SEQ ID NO: 148889 - RNA, 24 nt, Artificial Sequence
  Synthetic
cgggagaauaagagaagguaaagu

SEQ ID NO: 148890 - RNA, 18 nt, Artificial Sequence
  Synthetic
agcucaggagccacaagu

SEQ ID NO: 148891 - RNA, 20 nt, Artificial Sequence
  Synthetic
agagcucaggagccacaagu

SEQ ID NO: 148892 - RNA, 21 nt, Artificial Sequence
  Synthetic
aagagcucaggagccacaagu

SEQ ID NO: 148893 - RNA, 22 nt, Artificial Sequence
  Synthetic
caagagcucaggagccacaagu

SEQ ID NO: 148894 - RNA, 23 nt, Artificial Sequence
  Synthetic
acaagagcucaggagccacaagu

SEQ ID NO: 148895 - RNA, 18 nt, Artificial Sequence
  Synthetic
ucaaucuuagcuacaagu

SEQ ID NO: 148896 - RNA, 19 nt, Artificial Sequence
  Synthetic
uucaaucuuagcuacaagu

SEQ ID NO: 148897 - RNA, 20 nt, Artificial Sequence
  Synthetic
uuucaaucuuagcuacaagu

SEQ ID NO: 148898 - RNA, 18 nt, Artificial Sequence
  Synthetic
uagagcaugaaaccaagu

SEQ ID NO: 148899 - RNA, 20 nt, Artificial Sequence
  Synthetic
aguagagcaugaaaccaagu

SEQ ID NO: 148900 - RNA, 21 nt, Artificial Sequence
  Synthetic
caguagagcaugaaaccaagu

SEQ ID NO: 148901 - RNA, 22 nt, Artificial Sequence
  Synthetic
acaguagagcaugaaaccaagu

SEQ ID NO: 148902 - RNA, 23 nt, Artificial Sequence
  Synthetic
aacaguagagcaugaaaccaagu

SEQ ID NO: 148903 - RNA, 24 nt, Artificial Sequence
  Synthetic
caacaguagagcaugaaaccaagu

SEQ ID NO: 148904 - RNA, 18 nt, Artificial Sequence
  Synthetic
uucucagugucaccaagu

SEQ ID NO: 148905 - RNA, 20 nt, Artificial Sequence
  Synthetic
aguucucagugucaccaagu

SEQ ID NO: 148906 - RNA, 21 nt, Artificial Sequence
  Synthetic
uaguucucagugucaccaagu

SEQ ID NO: 148907 - RNA, 22 nt, Artificial Sequence
  Synthetic
uuaguucucagugucaccaagu

SEQ ID NO: 148908 - RNA, 23 nt, Artificial Sequence
  Synthetic
uuuaguucucagugucaccaagu

SEQ ID NO: 148909 - RNA, 24 nt, Artificial Sequence
  Synthetic
uuuuaguucucagugucaccaagu

SEQ ID NO: 148910 - RNA, 19 nt, Artificial Sequence
  Synthetic
ugacccaugggcuucaagu

SEQ ID NO: 148911 - RNA, 20 nt, Artificial Sequence
  Synthetic
cugacccaugggcuucaagu

SEQ ID NO: 148912 - RNA, 21 nt, Artificial Sequence
  Synthetic
ucugacccaugggcuucaagu

SEQ ID NO: 148913 - RNA, 22 nt, Artificial Sequence
  Synthetic
uucugacccaugggcuucaagu

SEQ ID NO: 148914 - RNA, 23 nt, Artificial Sequence
  Synthetic
cuucugacccaugggcuucaagu

SEQ ID NO: 148915 - RNA, 24 nt, Artificial Sequence
  Synthetic
acuucugacccaugggcuucaagu

SEQ ID NO: 148916 - RNA, 18 nt, Artificial Sequence
  Synthetic
uauuuuaagucaagaagu

SEQ ID NO: 148917 - RNA, 19 nt, Artificial Sequence
  Synthetic
uuauuuuaagucaagaagu

SEQ ID NO: 148918 - RNA, 20 nt, Artificial Sequence
  Synthetic
cuuauuuuaagucaagaagu

SEQ ID NO: 148919 - RNA, 18 nt, Artificial Sequence
  Synthetic
uugcuugagcccagaagu

SEQ ID NO: 148920 - RNA, 19 nt, Artificial Sequence
  Synthetic
auugcuugagcccagaagu

SEQ ID NO: 148921 - RNA, 20 nt, Artificial Sequence
  Synthetic
uauugcuugagcccagaagu

SEQ ID NO: 148922 - RNA, 22 nt, Artificial Sequence
  Synthetic
aguauugcuugagcccagaagu

SEQ ID NO: 148923 - RNA, 24 nt, Artificial Sequence
  Synthetic
agaguauugcuugagcccagaagu

SEQ ID NO: 148924 - RNA, 19 nt, Artificial Sequence
  Synthetic
ugaaaaagaaaagugaagu

SEQ ID NO: 148925 - RNA, 19 nt, Artificial Sequence
  Synthetic
uguaugauagugaauaagu

SEQ ID NO: 148926 - RNA, 18 nt, Artificial Sequence
  Synthetic
auguucucacucauaagu

SEQ ID NO: 148927 - RNA, 19 nt, Artificial Sequence
  Synthetic
cauguucucacucauaagu

SEQ ID NO: 148928 - RNA, 21 nt, Artificial Sequence
  Synthetic
cgcauguucucacucauaagu

SEQ ID NO: 148929 - RNA, 22 nt, Artificial Sequence
  Synthetic
ccgcauguucucacucauaagu

SEQ ID NO: 148930 - RNA, 23 nt, Artificial Sequence
  Synthetic
accgcauguucucacucauaagu

SEQ ID NO: 148931 - RNA, 24 nt, Artificial Sequence
  Synthetic
caccgcauguucucacucauaagu

SEQ ID NO: 148932 - RNA, 18 nt, Artificial Sequence
  Synthetic
uuagcuccacuuauaagu

SEQ ID NO: 148933 - RNA, 19 nt, Artificial Sequence
  Synthetic
uuuagcuccacuuauaagu

SEQ ID NO: 148934 - RNA, 21 nt, Artificial Sequence
  Synthetic
uguuuagcuccacuuauaagu

SEQ ID NO: 148935 - RNA, 23 nt, Artificial Sequence
  Synthetic
aguguuuagcuccacuuauaagu

SEQ ID NO: 148936 - RNA, 24 nt, Artificial Sequence
  Synthetic
caguguuuagcuccacuuauaagu

SEQ ID NO: 148937 - RNA, 18 nt, Artificial Sequence
  Synthetic
agaaacaaaagacuaagu

SEQ ID NO: 148938 - RNA, 19 nt, Artificial Sequence
  Synthetic
aagaaacaaaagacuaagu

SEQ ID NO: 148939 - RNA, 20 nt, Artificial Sequence
  Synthetic
aaagaaacaaaagacuaagu

SEQ ID NO: 148940 - RNA, 18 nt, Artificial Sequence
  Synthetic
auguucucacucguaagu

SEQ ID NO: 148941 - RNA, 19 nt, Artificial Sequence
  Synthetic
cauguucucacucguaagu

SEQ ID NO: 148942 - RNA, 21 nt, Artificial Sequence
  Synthetic
cgcauguucucacucguaagu

SEQ ID NO: 148943 - RNA, 22 nt, Artificial Sequence
  Synthetic
ccgcauguucucacucguaagu

SEQ ID NO: 148944 - RNA, 23 nt, Artificial Sequence
  Synthetic
accgcauguucucacucguaagu

SEQ ID NO: 148945 - RNA, 24 nt, Artificial Sequence
  Synthetic
caccgcauguucucacucguaagu

SEQ ID NO: 148946 - RNA, 18 nt, Artificial Sequence
  Synthetic
aauguauaaugauuaagu

SEQ ID NO: 148947 - RNA, 20 nt, Artificial Sequence
  Synthetic
agaauguauaaugauuaagu

SEQ ID NO: 148948 - RNA, 21 nt, Artificial Sequence
  Synthetic
uagaauguauaaugauuaagu

SEQ ID NO: 148949 - RNA, 22 nt, Artificial Sequence
  Synthetic
auagaauguauaaugauuaagu

SEQ ID NO: 148950 - RNA, 23 nt, Artificial Sequence
  Synthetic
cauagaauguauaaugauuaagu

SEQ ID NO: 148951 - RNA, 21 nt, Artificial Sequence
  Synthetic
aaauguuagauuaaaaacagu

SEQ ID NO: 148952 - RNA, 22 nt, Artificial Sequence
  Synthetic
aaaauguuagauuaaaaacagu

SEQ ID NO: 148953 - RNA, 23 nt, Artificial Sequence
  Synthetic
aaaaauguuagauuaaaaacagu

SEQ ID NO: 148954 - RNA, 24 nt, Artificial Sequence
  Synthetic
aaaaaauguuagauuaaaaacagu

SEQ ID NO: 148955 - RNA, 18 nt, Artificial Sequence
  Synthetic
auaucaucucacaccagu

SEQ ID NO: 148956 - RNA, 20 nt, Artificial Sequence
  Synthetic
agauaucaucucacaccagu

SEQ ID NO: 148957 - RNA, 22 nt, Artificial Sequence
  Synthetic
ugagauaucaucucacaccagu

SEQ ID NO: 148958 - RNA, 23 nt, Artificial Sequence
  Synthetic
augagauaucaucucacaccagu

SEQ ID NO: 148959 - RNA, 24 nt, Artificial Sequence
  Synthetic
uaugagauaucaucucacaccagu

SEQ ID NO: 148960 - RNA, 18 nt, Artificial Sequence
  Synthetic
uuuuuaauaauagccagu

SEQ ID NO: 148961 - RNA, 19 nt, Artificial Sequence
  Synthetic
cuuuuuaauaauagccagu

SEQ ID NO: 148962 - RNA, 20 nt, Artificial Sequence
  Synthetic
acuuuuuaauaauagccagu

SEQ ID NO: 148963 - RNA, 22 nt, Artificial Sequence
  Synthetic
ugacuuuuuaauaauagccagu

SEQ ID NO: 148964 - RNA, 23 nt, Artificial Sequence
  Synthetic
uugacuuuuuaauaauagccagu

SEQ ID NO: 148965 - RNA, 24 nt, Artificial Sequence
  Synthetic
uuugacuuuuuaauaauagccagu

SEQ ID NO: 148966 - RNA, 20 nt, Artificial Sequence
  Synthetic
agguaccaucucacgccagu

SEQ ID NO: 148967 - RNA, 22 nt, Artificial Sequence
  Synthetic
cgagguaccaucucacgccagu

SEQ ID NO: 148968 - RNA, 23 nt, Artificial Sequence
  Synthetic
acgagguaccaucucacgccagu

SEQ ID NO: 148969 - RNA, 24 nt, Artificial Sequence
  Synthetic
cacgagguaccaucucacgccagu

SEQ ID NO: 148970 - RNA, 21 nt, Artificial Sequence
  Synthetic
uuaaauggauuuuuuuccagu

SEQ ID NO: 148971 - RNA, 22 nt, Artificial Sequence
  Synthetic
auuaaauggauuuuuuuccagu

SEQ ID NO: 148972 - RNA, 23 nt, Artificial Sequence
  Synthetic
aauuaaauggauuuuuuuccagu

SEQ ID NO: 148973 - RNA, 24 nt, Artificial Sequence
  Synthetic
aaauuaaauggauuuuuuuccagu

SEQ ID NO: 148974 - RNA, 18 nt, Artificial Sequence
  Synthetic
aaaaaaaaaaagagcagu

SEQ ID NO: 148975 - RNA, 19 nt, Artificial Sequence
  Synthetic
aaaaaaaaaaaagagcagu

SEQ ID NO: 148976 - RNA, 20 nt, Artificial Sequence
  Synthetic
aaaaaaaaaaaaagagcagu

SEQ ID NO: 148977 - RNA, 21 nt, Artificial Sequence
  Synthetic
aaaaaaaaaaaaaagagcagu

SEQ ID NO: 148978 - RNA, 22 nt, Artificial Sequence
  Synthetic
aaaaaaaaaaaaaaagagcagu

SEQ ID NO: 148979 - RNA, 23 nt, Artificial Sequence
  Synthetic
aaaaaaaaaaaaaaaagagcagu

SEQ ID NO: 148980 - RNA, 24 nt, Artificial Sequence
  Synthetic
aaaaaaaaaaaaaaaaagagcagu

SEQ ID NO: 148981 - RNA, 18 nt, Artificial Sequence
  Synthetic
cagcuaacaugcugcagu

SEQ ID NO: 148982 - RNA, 19 nt, Artificial Sequence
  Synthetic
ucagcuaacaugcugcagu

SEQ ID NO: 148983 - RNA, 20 nt, Artificial Sequence
  Synthetic
cucagcuaacaugcugcagu

SEQ ID NO: 148984 - RNA, 18 nt, Artificial Sequence
  Synthetic
uguuuuauucuuugcagu

SEQ ID NO: 148985 - RNA, 19 nt, Artificial Sequence
  Synthetic
uuguuuuauucuuugcagu

SEQ ID NO: 148986 - RNA, 20 nt, Artificial Sequence
  Synthetic
uuuguuuuauucuuugcagu

SEQ ID NO: 148987 - RNA, 21 nt, Artificial Sequence
  Synthetic
auuuguuuuauucuuugcagu

SEQ ID NO: 148988 - RNA, 22 nt, Artificial Sequence
  Synthetic
uauuuguuuuauucuuugcagu

SEQ ID NO: 148989 - RNA, 23 nt, Artificial Sequence
  Synthetic
cuauuuguuuuauucuuugcagu

SEQ ID NO: 148990 - RNA, 18 nt, Artificial Sequence
  Synthetic
ucccacuuaugcaagagu

SEQ ID NO: 148991 - RNA, 19 nt, Artificial Sequence
  Synthetic
uucccacuuaugcaagagu

SEQ ID NO: 148992 - RNA, 20 nt, Artificial Sequence
  Synthetic
uuucccacuuaugcaagagu

SEQ ID NO: 148993 - RNA, 18 nt, Artificial Sequence
  Synthetic
aaauggaagcaggagagu

SEQ ID NO: 148994 - RNA, 19 nt, Artificial Sequence
  Synthetic
aaaauggaagcaggagagu

SEQ ID NO: 148995 - RNA, 21 nt, Artificial Sequence
  Synthetic
ugaaaauggaagcaggagagu

SEQ ID NO: 148996 - RNA, 23 nt, Artificial Sequence
  Synthetic
agugaaaauggaagcaggagagu

SEQ ID NO: 148997 - RNA, 24 nt, Artificial Sequence
  Synthetic
aagugaaaauggaagcaggagagu

SEQ ID NO: 148998 - RNA, 19 nt, Artificial Sequence
  Synthetic
agaaggagggagaaggagu

SEQ ID NO: 148999 - RNA, 20 nt, Artificial Sequence
  Synthetic
aagaaggagggagaaggagu

SEQ ID NO: 149000 - RNA, 21 nt, Artificial Sequence
  Synthetic
caagaaggagggagaaggagu

SEQ ID NO: 149001 - RNA, 24 nt, Artificial Sequence
  Synthetic
aggcaagaaggagggagaaggagu

SEQ ID NO: 149002 - RNA, 21 nt, Artificial Sequence
  Synthetic
agaucacuugaggccaggagu

SEQ ID NO: 149003 - RNA, 22 nt, Artificial Sequence
  Synthetic
cagaucacuugaggccaggagu

SEQ ID NO: 149004 - RNA, 18 nt, Artificial Sequence
  Synthetic
aagaugaaaacagggagu

SEQ ID NO: 149005 - RNA, 19 nt, Artificial Sequence
  Synthetic
caagaugaaaacagggagu

SEQ ID NO: 149006 - RNA, 20 nt, Artificial Sequence
  Synthetic
acaagaugaaaacagggagu

SEQ ID NO: 149007 - RNA, 18 nt, Artificial Sequence
  Synthetic
uacacuguuggugggagu

SEQ ID NO: 149008 - RNA, 19 nt, Artificial Sequence
  Synthetic
uuacacuguuggugggagu

SEQ ID NO: 149009 - RNA, 20 nt, Artificial Sequence
  Synthetic
uuuacacuguuggugggagu

SEQ ID NO: 149010 - RNA, 21 nt, Artificial Sequence
  Synthetic
uuuuacacuguuggugggagu

SEQ ID NO: 149011 - RNA, 22 nt, Artificial Sequence
  Synthetic
cuuuuacacuguuggugggagu

SEQ ID NO: 149012 - RNA, 24 nt, Artificial Sequence
  Synthetic
cgcuuuuacacuguuggugggagu

SEQ ID NO: 149013 - RNA, 19 nt, Artificial Sequence
  Synthetic
ugaugcugagguuuggagu

SEQ ID NO: 149014 - RNA, 20 nt, Artificial Sequence
  Synthetic
augaugcugagguuuggagu

SEQ ID NO: 149015 - RNA, 21 nt, Artificial Sequence
  Synthetic
caugaugcugagguuuggagu

SEQ ID NO: 149016 - RNA, 23 nt, Artificial Sequence
  Synthetic
ugcaugaugcugagguuuggagu

SEQ ID NO: 149017 - RNA, 24 nt, Artificial Sequence
  Synthetic
uugcaugaugcugagguuuggagu

SEQ ID NO: 149018 - RNA, 21 nt, Artificial Sequence
  Synthetic
uggaauuagauugaccugagu

SEQ ID NO: 149019 - RNA, 22 nt, Artificial Sequence
  Synthetic
uuggaauuagauugaccugagu

SEQ ID NO: 149020 - RNA, 23 nt, Artificial Sequence
  Synthetic
uuuggaauuagauugaccugagu

SEQ ID NO: 149021 - RNA, 24 nt, Artificial Sequence
  Synthetic
cuuuggaauuagauugaccugagu

SEQ ID NO: 149022 - RNA, 18 nt, Artificial Sequence
  Synthetic
uugauugauugauugagu

SEQ ID NO: 149023 - RNA, 19 nt, Artificial Sequence
  Synthetic
auugauugauugauugagu

SEQ ID NO: 149024 - RNA, 21 nt, Artificial Sequence
  Synthetic
ugauugauugauugauugagu

SEQ ID NO: 149025 - RNA, 22 nt, Artificial Sequence
  Synthetic
uugauugauugauugauugagu

SEQ ID NO: 149026 - RNA, 23 nt, Artificial Sequence
  Synthetic
auugauugauugauugauugagu

SEQ ID NO: 149027 - RNA, 18 nt, Artificial Sequence
  Synthetic
auuuauuuuuuuuugagu

SEQ ID NO: 149028 - RNA, 19 nt, Artificial Sequence
  Synthetic
uauuuauuuuuuuuugagu

SEQ ID NO: 149029 - RNA, 20 nt, Artificial Sequence
  Synthetic
uuauuuauuuuuuuuugagu

SEQ ID NO: 149030 - RNA, 21 nt, Artificial Sequence
  Synthetic
cuuauuuauuuuuuuuugagu

SEQ ID NO: 149031 - RNA, 22 nt, Artificial Sequence
  Synthetic
acuuauuuauuuuuuuuugagu

SEQ ID NO: 149032 - RNA, 23 nt, Artificial Sequence
  Synthetic
uacuuauuuauuuuuuuuugagu

SEQ ID NO: 149033 - RNA, 24 nt, Artificial Sequence
  Synthetic
uuacuuauuuauuuuuuuuugagu

SEQ ID NO: 149034 - RNA, 21 nt, Artificial Sequence
  Synthetic
aucuaggauauuaaaaauagu

SEQ ID NO: 149035 - RNA, 22 nt, Artificial Sequence
  Synthetic
aaucuaggauauuaaaaauagu

SEQ ID NO: 149036 - RNA, 24 nt, Artificial Sequence
  Synthetic
ugaaucuaggauauuaaaaauagu

SEQ ID NO: 149037 - RNA, 20 nt, Artificial Sequence
  Synthetic
aggaggagaaacagaauagu

SEQ ID NO: 149038 - RNA, 18 nt, Artificial Sequence
  Synthetic
ugauuaagucaggauagu

SEQ ID NO: 149039 - RNA, 19 nt, Artificial Sequence
  Synthetic
augauuaagucaggauagu

SEQ ID NO: 149040 - RNA, 20 nt, Artificial Sequence
  Synthetic
aaugauuaagucaggauagu

SEQ ID NO: 149041 - RNA, 21 nt, Artificial Sequence
  Synthetic
uaaugauuaagucaggauagu

SEQ ID NO: 149042 - RNA, 22 nt, Artificial Sequence
  Synthetic
auaaugauuaagucaggauagu

SEQ ID NO: 149043 - RNA, 23 nt, Artificial Sequence
  Synthetic
uauaaugauuaagucaggauagu

SEQ ID NO: 149044 - RNA, 18 nt, Artificial Sequence
  Synthetic
accucagguaauuauagu

SEQ ID NO: 149045 - RNA, 19 nt, Artificial Sequence
  Synthetic
aaccucagguaauuauagu

SEQ ID NO: 149046 - RNA, 20 nt, Artificial Sequence
  Synthetic
uaaccucagguaauuauagu

SEQ ID NO: 149047 - RNA, 18 nt, Artificial Sequence
  Synthetic
acuugaaaugugcuuagu

SEQ ID NO: 149048 - RNA, 19 nt, Artificial Sequence
  Synthetic
aacuugaaaugugcuuagu

SEQ ID NO: 149049 - RNA, 21 nt, Artificial Sequence
  Synthetic
agaacuugaaaugugcuuagu

SEQ ID NO: 149050 - RNA, 23 nt, Artificial Sequence
  Synthetic
ugagaacuugaaaugugcuuagu

SEQ ID NO: 149051 - RNA, 24 nt, Artificial Sequence
  Synthetic
uugagaacuugaaaugugcuuagu

SEQ ID NO: 149052 - RNA, 21 nt, Artificial Sequence
  Synthetic
agaugaagcuagaaaguuagu

SEQ ID NO: 149053 - RNA, 23 nt, Artificial Sequence
  Synthetic
agagaugaagcuagaaaguuagu

SEQ ID NO: 149054 - RNA, 18 nt, Artificial Sequence
  Synthetic
ccuuccuguugcuuuagu

SEQ ID NO: 149055 - RNA, 19 nt, Artificial Sequence
  Synthetic
uccuuccuguugcuuuagu

SEQ ID NO: 149056 - RNA, 20 nt, Artificial Sequence
  Synthetic
uuccuuccuguugcuuuagu

SEQ ID NO: 149057 - RNA, 18 nt, Artificial Sequence
  Synthetic
cagugcuucaacaaacgu

SEQ ID NO: 149058 - RNA, 19 nt, Artificial Sequence
  Synthetic
acagugcuucaacaaacgu

SEQ ID NO: 149059 - RNA, 20 nt, Artificial Sequence
  Synthetic
aacagugcuucaacaaacgu

SEQ ID NO: 149060 - RNA, 22 nt, Artificial Sequence
  Synthetic
ugaacagugcuucaacaaacgu

SEQ ID NO: 149061 - RNA, 23 nt, Artificial Sequence
  Synthetic
augaacagugcuucaacaaacgu

SEQ ID NO: 149062 - RNA, 24 nt, Artificial Sequence
  Synthetic
uaugaacagugcuucaacaaacgu

SEQ ID NO: 149063 - RNA, 18 nt, Artificial Sequence
  Synthetic
cagcaucaccacaaacgu

SEQ ID NO: 149064 - RNA, 19 nt, Artificial Sequence
  Synthetic
ccagcaucaccacaaacgu

SEQ ID NO: 149065 - RNA, 20 nt, Artificial Sequence
  Synthetic
accagcaucaccacaaacgu

SEQ ID NO: 149066 - RNA, 21 nt, Artificial Sequence
  Synthetic
caccagcaucaccacaaacgu

SEQ ID NO: 149067 - RNA, 22 nt, Artificial Sequence
  Synthetic
acaccagcaucaccacaaacgu

SEQ ID NO: 149068 - RNA, 23 nt, Artificial Sequence
  Synthetic
uacaccagcaucaccacaaacgu

SEQ ID NO: 149069 - RNA, 24 nt, Artificial Sequence
  Synthetic
uuacaccagcaucaccacaaacgu

SEQ ID NO: 149070 - RNA, 20 nt, Artificial Sequence
  Synthetic
uggucccucccacaacacgu

SEQ ID NO: 149071 - RNA, 21 nt, Artificial Sequence
  Synthetic
auggucccucccacaacacgu

SEQ ID NO: 149072 - RNA, 22 nt, Artificial Sequence
  Synthetic
cauggucccucccacaacacgu

SEQ ID NO: 149073 - RNA, 23 nt, Artificial Sequence
  Synthetic
acauggucccucccacaacacgu

SEQ ID NO: 149074 - RNA, 24 nt, Artificial Sequence
  Synthetic
cacauggucccucccacaacacgu

SEQ ID NO: 149075 - RNA, 20 nt, Artificial Sequence
  Synthetic
uggucucucccuugacacgu

SEQ ID NO: 149076 - RNA, 21 nt, Artificial Sequence
  Synthetic
cuggucucucccuugacacgu

SEQ ID NO: 149077 - RNA, 22 nt, Artificial Sequence
  Synthetic
ccuggucucucccuugacacgu

SEQ ID NO: 149078 - RNA, 23 nt, Artificial Sequence
  Synthetic
accuggucucucccuugacacgu

SEQ ID NO: 149079 - RNA, 24 nt, Artificial Sequence
  Synthetic
caccuggucucucccuugacacgu

SEQ ID NO: 149080 - RNA, 18 nt, Artificial Sequence
  Synthetic
aggcggccgccaccacgu

SEQ ID NO: 149081 - RNA, 19 nt, Artificial Sequence
  Synthetic
caggcggccgccaccacgu

SEQ ID NO: 149082 - RNA, 20 nt, Artificial Sequence
  Synthetic
acaggcggccgccaccacgu

SEQ ID NO: 149083 - RNA, 21 nt, Artificial Sequence
  Synthetic
uacaggcggccgccaccacgu

SEQ ID NO: 149084 - RNA, 22 nt, Artificial Sequence
  Synthetic
cuacaggcggccgccaccacgu

SEQ ID NO: 149085 - RNA, 23 nt, Artificial Sequence
  Synthetic
acuacaggcggccgccaccacgu

SEQ ID NO: 149086 - RNA, 18 nt, Artificial Sequence
  Synthetic
ucaucccuggcugcacgu

SEQ ID NO: 149087 - RNA, 19 nt, Artificial Sequence
  Synthetic
cucaucccuggcugcacgu

SEQ ID NO: 149088 - RNA, 20 nt, Artificial Sequence
  Synthetic
ucucaucccuggcugcacgu

SEQ ID NO: 149089 - RNA, 21 nt, Artificial Sequence
  Synthetic
uucucaucccuggcugcacgu

SEQ ID NO: 149090 - RNA, 24 nt, Artificial Sequence
  Synthetic
ugguucucaucccuggcugcacgu

SEQ ID NO: 149091 - RNA, 21 nt, Artificial Sequence
  Synthetic
cuaggccaguaguacucacgu

SEQ ID NO: 149092 - RNA, 22 nt, Artificial Sequence
  Synthetic
ucuaggccaguaguacucacgu

SEQ ID NO: 149093 - RNA, 23 nt, Artificial Sequence
  Synthetic
cucuaggccaguaguacucacgu

SEQ ID NO: 149094 - RNA, 24 nt, Artificial Sequence
  Synthetic
acucuaggccaguaguacucacgu

SEQ ID NO: 149095 - RNA, 18 nt, Artificial Sequence
  Synthetic
ugugcagauuugucacgu

SEQ ID NO: 149096 - RNA, 19 nt, Artificial Sequence
  Synthetic
augugcagauuugucacgu

SEQ ID NO: 149097 - RNA, 20 nt, Artificial Sequence
  Synthetic
caugugcagauuugucacgu

SEQ ID NO: 149098 - RNA, 22 nt, Artificial Sequence
  Synthetic
ugcaugugcagauuugucacgu

SEQ ID NO: 149099 - RNA, 18 nt, Artificial Sequence
  Synthetic
uucuguguguguauacgu

SEQ ID NO: 149100 - RNA, 19 nt, Artificial Sequence
  Synthetic
uuucuguguguguauacgu

SEQ ID NO: 149101 - RNA, 18 nt, Artificial Sequence
  Synthetic
uaaaucuuuuuuaaaggu

SEQ ID NO: 149102 - RNA, 19 nt, Artificial Sequence
  Synthetic
auaaaucuuuuuuaaaggu

SEQ ID NO: 149103 - RNA, 20 nt, Artificial Sequence
  Synthetic
uauaaaucuuuuuuaaaggu

SEQ ID NO: 149104 - RNA, 20 nt, Artificial Sequence
  Synthetic
aggugaugguauuagaaggu

SEQ ID NO: 149105 - RNA, 21 nt, Artificial Sequence
  Synthetic
aaggugaugguauuagaaggu

SEQ ID NO: 149106 - RNA, 22 nt, Artificial Sequence
  Synthetic
caaggugaugguauuagaaggu

SEQ ID NO: 149107 - RNA, 23 nt, Artificial Sequence
  Synthetic
ucaaggugaugguauuagaaggu

SEQ ID NO: 149108 - RNA, 24 nt, Artificial Sequence
  Synthetic
cucaaggugaugguauuagaaggu

SEQ ID NO: 149109 - RNA, 18 nt, Artificial Sequence
  Synthetic
aagggggaaggggaaggu

SEQ ID NO: 149110 - RNA, 20 nt, Artificial Sequence
  Synthetic
agaagggggaaggggaaggu

SEQ ID NO: 149111 - RNA, 18 nt, Artificial Sequence
  Synthetic
auguucucacucacaggu

SEQ ID NO: 149112 - RNA, 19 nt, Artificial Sequence
  Synthetic
cauguucucacucacaggu

SEQ ID NO: 149113 - RNA, 20 nt, Artificial Sequence
  Synthetic
acauguucucacucacaggu

SEQ ID NO: 149114 - RNA, 21 nt, Artificial Sequence
  Synthetic
cacauguucucacucacaggu

SEQ ID NO: 149115 - RNA, 22 nt, Artificial Sequence
  Synthetic
ccacauguucucacucacaggu

SEQ ID NO: 149116 - RNA, 23 nt, Artificial Sequence
  Synthetic
accacauguucucacucacaggu

SEQ ID NO: 149117 - RNA, 24 nt, Artificial Sequence
  Synthetic
caccacauguucucacucacaggu

SEQ ID NO: 149118 - RNA, 18 nt, Artificial Sequence
  Synthetic
acuuugggaggccgaggu

SEQ ID NO: 149119 - RNA, 19 nt, Artificial Sequence
  Synthetic
cacuuugggaggccgaggu

SEQ ID NO: 149120 - RNA, 21 nt, Artificial Sequence
  Synthetic
agcacuuugggaggccgaggu

SEQ ID NO: 149121 - RNA, 22 nt, Artificial Sequence
  Synthetic
cagcacuuugggaggccgaggu

SEQ ID NO: 149122 - RNA, 23 nt, Artificial Sequence
  Synthetic
ccagcacuuugggaggccgaggu

SEQ ID NO: 149123 - RNA, 24 nt, Artificial Sequence
  Synthetic
cccagcacuuugggaggccgaggu

SEQ ID NO: 149124 - RNA, 19 nt, Artificial Sequence
  Synthetic
uguucuaagaaacggaggu

SEQ ID NO: 149125 - RNA, 20 nt, Artificial Sequence
  Synthetic
auguucuaagaaacggaggu

SEQ ID NO: 149126 - RNA, 21 nt, Artificial Sequence
  Synthetic
aauguucuaagaaacggaggu

SEQ ID NO: 149127 - RNA, 22 nt, Artificial Sequence
  Synthetic
aaauguucuaagaaacggaggu

SEQ ID NO: 149128 - RNA, 23 nt, Artificial Sequence
  Synthetic
uaaauguucuaagaaacggaggu

SEQ ID NO: 149129 - RNA, 19 nt, Artificial Sequence
  Synthetic
uggguggaucaccugaggu

SEQ ID NO: 149130 - RNA, 20 nt, Artificial Sequence
  Synthetic
auggguggaucaccugaggu

SEQ ID NO: 149131 - RNA, 22 nt, Artificial Sequence
  Synthetic
agauggguggaucaccugaggu

SEQ ID NO: 149132 - RNA, 24 nt, Artificial Sequence
  Synthetic
cgagauggguggaucaccugaggu

SEQ ID NO: 149133 - RNA, 18 nt, Artificial Sequence
  Synthetic
uacuuggaaugcugaggu

SEQ ID NO: 149134 - RNA, 19 nt, Artificial Sequence
  Synthetic
agggcaggccacuugaggu

SEQ ID NO: 149135 - RNA, 22 nt, Artificial Sequence
  Synthetic
aggagggcaggccacuugaggu

SEQ ID NO: 149136 - RNA, 23 nt, Artificial Sequence
  Synthetic
aaggagggcaggccacuugaggu

SEQ ID NO: 149137 - RNA, 24 nt, Artificial Sequence
  Synthetic
caaggagggcaggccacuugaggu

SEQ ID NO: 149138 - RNA, 18 nt, Artificial Sequence
  Synthetic
auauucucacucauaggu

SEQ ID NO: 149139 - RNA, 19 nt, Artificial Sequence
  Synthetic
cauauucucacucauaggu

SEQ ID NO: 149140 - RNA, 21 nt, Artificial Sequence
  Synthetic
cgcauauucucacucauaggu

SEQ ID NO: 149141 - RNA, 22 nt, Artificial Sequence
  Synthetic
ccgcauauucucacucauaggu

SEQ ID NO: 149142 - RNA, 23 nt, Artificial Sequence
  Synthetic
accgcauauucucacucauaggu

SEQ ID NO: 149143 - RNA, 24 nt, Artificial Sequence
  Synthetic
caccgcauauucucacucauaggu

SEQ ID NO: 149144 - RNA, 18 nt, Artificial Sequence
  Synthetic
auguucucacucauaggu

SEQ ID NO: 149145 - RNA, 19 nt, Artificial Sequence
  Synthetic
cauguucucacucauaggu

SEQ ID NO: 149146 - RNA, 21 nt, Artificial Sequence
  Synthetic
cgcauguucucacucauaggu

SEQ ID NO: 149147 - RNA, 22 nt, Artificial Sequence
  Synthetic
ccgcauguucucacucauaggu

SEQ ID NO: 149148 - RNA, 23 nt, Artificial Sequence
  Synthetic
accgcauguucucacucauaggu

SEQ ID NO: 149149 - RNA, 24 nt, Artificial Sequence
  Synthetic
caccgcauguucucacucauaggu

SEQ ID NO: 149150 - RNA, 18 nt, Artificial Sequence
  Synthetic
auauucucauucauaggu

SEQ ID NO: 149151 - RNA, 19 nt, Artificial Sequence
  Synthetic
cauauucucauucauaggu

SEQ ID NO: 149152 - RNA, 21 nt, Artificial Sequence
  Synthetic
cgcauauucucauucauaggu

SEQ ID NO: 149153 - RNA, 22 nt, Artificial Sequence
  Synthetic
ccgcauauucucauucauaggu

SEQ ID NO: 149154 - RNA, 23 nt, Artificial Sequence
  Synthetic
accgcauauucucauucauaggu

SEQ ID NO: 149155 - RNA, 24 nt, Artificial Sequence
  Synthetic
caccgcauauucucauucauaggu

SEQ ID NO: 149156 - RNA, 18 nt, Artificial Sequence
  Synthetic
uuccacagaucucuaggu

SEQ ID NO: 149157 - RNA, 20 nt, Artificial Sequence
  Synthetic
aguuccacagaucucuaggu

SEQ ID NO: 149158 - RNA, 21 nt, Artificial Sequence
  Synthetic
aaguuccacagaucucuaggu

SEQ ID NO: 149159 - RNA, 22 nt, Artificial Sequence
  Synthetic
aaaguuccacagaucucuaggu

SEQ ID NO: 149160 - RNA, 23 nt, Artificial Sequence
  Synthetic
caaaguuccacagaucucuaggu

SEQ ID NO: 149161 - RNA, 24 nt, Artificial Sequence
  Synthetic
ucaaaguuccacagaucucuaggu

SEQ ID NO: 149162 - RNA, 19 nt, Artificial Sequence
  Synthetic
ugaaagugaauauguaggu

SEQ ID NO: 149163 - RNA, 20 nt, Artificial Sequence
  Synthetic
augaaagugaauauguaggu

SEQ ID NO: 149164 - RNA, 18 nt, Artificial Sequence
  Synthetic
cucauagguucuguaggu

SEQ ID NO: 149165 - RNA, 19 nt, Artificial Sequence
  Synthetic
acucauagguucuguaggu

SEQ ID NO: 149166 - RNA, 20 nt, Artificial Sequence
  Synthetic
cacucauagguucuguaggu

SEQ ID NO: 149167 - RNA, 21 nt, Artificial Sequence
  Synthetic
augaaaauaagaauacucggu

SEQ ID NO: 149168 - RNA, 22 nt, Artificial Sequence
  Synthetic
caugaaaauaagaauacucggu

SEQ ID NO: 149169 - RNA, 23 nt, Artificial Sequence
  Synthetic
ccaugaaaauaagaauacucggu

SEQ ID NO: 149170 - RNA, 18 nt, Artificial Sequence
  Synthetic
aacagugguuaccagggu

SEQ ID NO: 149171 - RNA, 19 nt, Artificial Sequence
  Synthetic
aaacagugguuaccagggu

SEQ ID NO: 149172 - RNA, 20 nt, Artificial Sequence
  Synthetic
uaaacagugguuaccagggu

SEQ ID NO: 149173 - RNA, 21 nt, Artificial Sequence
  Synthetic
uuaaacagugguuaccagggu

SEQ ID NO: 149174 - RNA, 22 nt, Artificial Sequence
  Synthetic
auuaaacagugguuaccagggu

SEQ ID NO: 149175 - RNA, 23 nt, Artificial Sequence
  Synthetic
aauuaaacagugguuaccagggu

SEQ ID NO: 149176 - RNA, 18 nt, Artificial Sequence
  Synthetic
auaggcauucaugagggu

SEQ ID NO: 149177 - RNA, 19 nt, Artificial Sequence
  Synthetic
cauaggcauucaugagggu

SEQ ID NO: 149178 - RNA, 20 nt, Artificial Sequence
  Synthetic
ucauaggcauucaugagggu

SEQ ID NO: 149179 - RNA, 21 nt, Artificial Sequence
  Synthetic
cucauaggcauucaugagggu

SEQ ID NO: 149180 - RNA, 22 nt, Artificial Sequence
  Synthetic
ccucauaggcauucaugagggu

SEQ ID NO: 149181 - RNA, 23 nt, Artificial Sequence
  Synthetic
cccucauaggcauucaugagggu

SEQ ID NO: 149182 - RNA, 24 nt, Artificial Sequence
  Synthetic
acccucauaggcauucaugagggu

SEQ ID NO: 149183 - RNA, 18 nt, Artificial Sequence
  Synthetic
uuaccucugggugagggu

SEQ ID NO: 149184 - RNA, 21 nt, Artificial Sequence
  Synthetic
ugguuaccucugggugagggu

SEQ ID NO: 149185 - RNA, 23 nt, Artificial Sequence
  Synthetic
agugguuaccucugggugagggu

SEQ ID NO: 149186 - RNA, 24 nt, Artificial Sequence
  Synthetic
aagugguuaccucugggugagggu

SEQ ID NO: 149187 - RNA, 18 nt, Artificial Sequence
  Synthetic
ugucaucaccuugagggu

SEQ ID NO: 149188 - RNA, 19 nt, Artificial Sequence
  Synthetic
augucaucaccuugagggu

SEQ ID NO: 149189 - RNA, 20 nt, Artificial Sequence
  Synthetic
aaugucaucaccuugagggu

SEQ ID NO: 149190 - RNA, 21 nt, Artificial Sequence
  Synthetic
uaaugucaucaccuugagggu

SEQ ID NO: 149191 - RNA, 22 nt, Artificial Sequence
  Synthetic
cuaaugucaucaccuugagggu

SEQ ID NO: 149192 - RNA, 23 nt, Artificial Sequence
  Synthetic
ccuaaugucaucaccuugagggu

SEQ ID NO: 149193 - RNA, 24 nt, Artificial Sequence
  Synthetic
uccuaaugucaucaccuugagggu

SEQ ID NO: 149194 - RNA, 18 nt, Artificial Sequence
  Synthetic
ucgcucuguugcccgggu

SEQ ID NO: 149195 - RNA, 19 nt, Artificial Sequence
  Synthetic
uucgcucuguugcccgggu

SEQ ID NO: 149196 - RNA, 20 nt, Artificial Sequence
  Synthetic
uuucgcucuguugcccgggu

SEQ ID NO: 149197 - RNA, 22 nt, Artificial Sequence
  Synthetic
aguuucgcucuguugcccgggu

SEQ ID NO: 149198 - RNA, 18 nt, Artificial Sequence
  Synthetic
cucacucauagguggggu

SEQ ID NO: 149199 - RNA, 19 nt, Artificial Sequence
  Synthetic
ucucacucauagguggggu

SEQ ID NO: 149200 - RNA, 20 nt, Artificial Sequence
  Synthetic
uucucacucauagguggggu

SEQ ID NO: 149201 - RNA, 21 nt, Artificial Sequence
  Synthetic
auucucacucauagguggggu

SEQ ID NO: 149202 - RNA, 22 nt, Artificial Sequence
  Synthetic
uauucucacucauagguggggu

SEQ ID NO: 149203 - RNA, 23 nt, Artificial Sequence
  Synthetic
auauucucacucauagguggggu

SEQ ID NO: 149204 - RNA, 24 nt, Artificial Sequence
  Synthetic
cauauucucacucauagguggggu

SEQ ID NO: 149205 - RNA, 18 nt, Artificial Sequence
  Synthetic
ucaagaaccucuuggggu

SEQ ID NO: 149206 - RNA, 19 nt, Artificial Sequence
  Synthetic
aucaagaaccucuuggggu

SEQ ID NO: 149207 - RNA, 20 nt, Artificial Sequence
  Synthetic
aaucaagaaccucuuggggu

SEQ ID NO: 149208 - RNA, 18 nt, Artificial Sequence
  Synthetic
caacucccacuuaugggu

SEQ ID NO: 149209 - RNA, 19 nt, Artificial Sequence
  Synthetic
ucaacucccacuuaugggu

SEQ ID NO: 149210 - RNA, 20 nt, Artificial Sequence
  Synthetic
uucaacucccacuuaugggu

SEQ ID NO: 149211 - RNA, 22 nt, Artificial Sequence
  Synthetic
cguucaacucccacuuaugggu

SEQ ID NO: 149212 - RNA, 23 nt, Artificial Sequence
  Synthetic
ucguucaacucccacuuaugggu

SEQ ID NO: 149213 - RNA, 24 nt, Artificial Sequence
  Synthetic
aucguucaacucccacuuaugggu

SEQ ID NO: 149214 - RNA, 18 nt, Artificial Sequence
  Synthetic
aagugguuaccucugggu

SEQ ID NO: 149215 - RNA, 19 nt, Artificial Sequence
  Synthetic
aaagugguuaccucugggu

SEQ ID NO: 149216 - RNA, 18 nt, Artificial Sequence
  Synthetic
uaagggggcugcuauggu

SEQ ID NO: 149217 - RNA, 19 nt, Artificial Sequence
  Synthetic
auaagggggcugcuauggu

SEQ ID NO: 149218 - RNA, 20 nt, Artificial Sequence
  Synthetic
cauaagggggcugcuauggu

SEQ ID NO: 149219 - RNA, 18 nt, Artificial Sequence
  Synthetic
cauagggugagguauggu

SEQ ID NO: 149220 - RNA, 20 nt, Artificial Sequence
  Synthetic
ugcauagggugagguauggu

SEQ ID NO: 149221 - RNA, 21 nt, Artificial Sequence
  Synthetic
augcauagggugagguauggu

SEQ ID NO: 149222 - RNA, 23 nt, Artificial Sequence
  Synthetic
agaugcauagggugagguauggu

SEQ ID NO: 149223 - RNA, 18 nt, Artificial Sequence
  Synthetic
ugagccaccccaccuggu

SEQ ID NO: 149224 - RNA, 19 nt, Artificial Sequence
  Synthetic
uugagccaccccaccuggu

SEQ ID NO: 149225 - RNA, 20 nt, Artificial Sequence
  Synthetic
cuugagccaccccaccuggu

SEQ ID NO: 149226 - RNA, 21 nt, Artificial Sequence
  Synthetic
ucuugagccaccccaccuggu

SEQ ID NO: 149227 - RNA, 23 nt, Artificial Sequence
  Synthetic
agucuugagccaccccaccuggu

SEQ ID NO: 149228 - RNA, 24 nt, Artificial Sequence
  Synthetic
cagucuugagccaccccaccuggu

SEQ ID NO: 149229 - RNA, 18 nt, Artificial Sequence
  Synthetic
uugccugacauuccuggu

SEQ ID NO: 149230 - RNA, 21 nt, Artificial Sequence
  Synthetic
ugguugccugacauuccuggu

SEQ ID NO: 149231 - RNA, 22 nt, Artificial Sequence
  Synthetic
augguugccugacauuccuggu

SEQ ID NO: 149232 - RNA, 24 nt, Artificial Sequence
  Synthetic
ugaugguugccugacauuccuggu

SEQ ID NO: 149233 - RNA, 20 nt, Artificial Sequence
  Synthetic
aggaaacaacaggugcuggu

SEQ ID NO: 149234 - RNA, 21 nt, Artificial Sequence
  Synthetic
caggaaacaacaggugcuggu

SEQ ID NO: 149235 - RNA, 22 nt, Artificial Sequence
  Synthetic
ucaggaaacaacaggugcuggu

SEQ ID NO: 149236 - RNA, 23 nt, Artificial Sequence
  Synthetic
aucaggaaacaacaggugcuggu

SEQ ID NO: 149237 - RNA, 24 nt, Artificial Sequence
  Synthetic
aaucaggaaacaacaggugcuggu

SEQ ID NO: 149238 - RNA, 19 nt, Artificial Sequence
  Synthetic
uggagaaugucuuaguggu

SEQ ID NO: 149239 - RNA, 20 nt, Artificial Sequence
  Synthetic
auggagaaugucuuaguggu

SEQ ID NO: 149240 - RNA, 21 nt, Artificial Sequence
  Synthetic
uauggagaaugucuuaguggu

SEQ ID NO: 149241 - RNA, 22 nt, Artificial Sequence
  Synthetic
auauggagaaugucuuaguggu

SEQ ID NO: 149242 - RNA, 23 nt, Artificial Sequence
  Synthetic
aauauggagaaugucuuaguggu

SEQ ID NO: 149243 - RNA, 24 nt, Artificial Sequence
  Synthetic
uaauauggagaaugucuuaguggu

SEQ ID NO: 149244 - RNA, 19 nt, Artificial Sequence
  Synthetic
aguaacucaaagggguggu

SEQ ID NO: 149245 - RNA, 21 nt, Artificial Sequence
  Synthetic
ugaguaacucaaagggguggu

SEQ ID NO: 149246 - RNA, 22 nt, Artificial Sequence
  Synthetic
augaguaacucaaagggguggu

SEQ ID NO: 149247 - RNA, 24 nt, Artificial Sequence
  Synthetic
ugaugaguaacucaaagggguggu

SEQ ID NO: 149248 - RNA, 18 nt, Artificial Sequence
  Synthetic
agagagagaguugguggu

SEQ ID NO: 149249 - RNA, 20 nt, Artificial Sequence
  Synthetic
agagagagagaguugguggu

SEQ ID NO: 149250 - RNA, 18 nt, Artificial Sequence
  Synthetic
acuucucauuuuuguggu

SEQ ID NO: 149251 - RNA, 19 nt, Artificial Sequence
  Synthetic
uacuucucauuuuuguggu

SEQ ID NO: 149252 - RNA, 20 nt, Artificial Sequence
  Synthetic
auacuucucauuuuuguggu

SEQ ID NO: 149253 - RNA, 21 nt, Artificial Sequence
  Synthetic
aauacuucucauuuuuguggu

SEQ ID NO: 149254 - RNA, 22 nt, Artificial Sequence
  Synthetic
aaauacuucucauuuuuguggu

SEQ ID NO: 149255 - RNA, 23 nt, Artificial Sequence
  Synthetic
caaauacuucucauuuuuguggu

SEQ ID NO: 149256 - RNA, 24 nt, Artificial Sequence
  Synthetic
ucaaauacuucucauuuuuguggu

SEQ ID NO: 149257 - RNA, 18 nt, Artificial Sequence
  Synthetic
cacuuguauaucauuggu

SEQ ID NO: 149258 - RNA, 19 nt, Artificial Sequence
  Synthetic
acacuuguauaucauuggu

SEQ ID NO: 149259 - RNA, 20 nt, Artificial Sequence
  Synthetic
aacacuuguauaucauuggu

SEQ ID NO: 149260 - RNA, 21 nt, Artificial Sequence
  Synthetic
uaacacuuguauaucauuggu

SEQ ID NO: 149261 - RNA, 24 nt, Artificial Sequence
  Synthetic
agguaacacuuguauaucauuggu

SEQ ID NO: 149262 - RNA, 18 nt, Artificial Sequence
  Synthetic
cgcuuuuacacuguuggu

SEQ ID NO: 149263 - RNA, 19 nt, Artificial Sequence
  Synthetic
acgcuuuuacacuguuggu

SEQ ID NO: 149264 - RNA, 20 nt, Artificial Sequence
  Synthetic
aacgcuuuuacacuguuggu

SEQ ID NO: 149265 - RNA, 23 nt, Artificial Sequence
  Synthetic
aggaacgcuuuuacacuguuggu

SEQ ID NO: 149266 - RNA, 24 nt, Artificial Sequence
  Synthetic
uaggaacgcuuuuacacuguuggu

SEQ ID NO: 149267 - RNA, 18 nt, Artificial Sequence
  Synthetic
ugcuuuuacacuguuggu

SEQ ID NO: 149268 - RNA, 20 nt, Artificial Sequence
  Synthetic
ugugcuuuuacacuguuggu

SEQ ID NO: 149269 - RNA, 23 nt, Artificial Sequence
  Synthetic
aggugugcuuuuacacuguuggu

SEQ ID NO: 149270 - RNA, 24 nt, Artificial Sequence
  Synthetic
uaggugugcuuuuacacuguuggu

SEQ ID NO: 149271 - RNA, 18 nt, Artificial Sequence
  Synthetic
acauuauacgcuguuggu

SEQ ID NO: 149272 - RNA, 19 nt, Artificial Sequence
  Synthetic
aacauuauacgcuguuggu

SEQ ID NO: 149273 - RNA, 23 nt, Artificial Sequence
  Synthetic
agggaacauuauacgcuguuggu

SEQ ID NO: 149274 - RNA, 24 nt, Artificial Sequence
  Synthetic
aagggaacauuauacgcuguuggu

SEQ ID NO: 149275 - RNA, 18 nt, Artificial Sequence
  Synthetic
acucuucuaagaaaaugu

SEQ ID NO: 149276 - RNA, 19 nt, Artificial Sequence
  Synthetic
aacucuucuaagaaaaugu

SEQ ID NO: 149277 - RNA, 20 nt, Artificial Sequence
  Synthetic
aaacucuucuaagaaaaugu

SEQ ID NO: 149278 - RNA, 18 nt, Artificial Sequence
  Synthetic
aauauguuuaucaaaugu

SEQ ID NO: 149279 - RNA, 19 nt, Artificial Sequence
  Synthetic
aaauauguuuaucaaaugu

SEQ ID NO: 149280 - RNA, 20 nt, Artificial Sequence
  Synthetic
aaaauauguuuaucaaaugu

SEQ ID NO: 149281 - RNA, 18 nt, Artificial Sequence
  Synthetic
uuauucucaaagaaaugu

SEQ ID NO: 149282 - RNA, 19 nt, Artificial Sequence
  Synthetic
uuuauucucaaagaaaugu

SEQ ID NO: 149283 - RNA, 20 nt, Artificial Sequence
  Synthetic
cuuuauucucaaagaaaugu

SEQ ID NO: 149284 - RNA, 21 nt, Artificial Sequence
  Synthetic
ucuuuauucucaaagaaaugu

SEQ ID NO: 149285 - RNA, 22 nt, Artificial Sequence
  Synthetic
uucuuuauucucaaagaaaugu

SEQ ID NO: 149286 - RNA, 23 nt, Artificial Sequence
  Synthetic
cuucuuuauucucaaagaaaugu

SEQ ID NO: 149287 - RNA, 24 nt, Artificial Sequence
  Synthetic
ucuucuuuauucucaaagaaaugu

SEQ ID NO: 149288 - RNA, 18 nt, Artificial Sequence
  Synthetic
uugacccucaaacaaugu

SEQ ID NO: 149289 - RNA, 20 nt, Artificial Sequence
  Synthetic
aguugacccucaaacaaugu

SEQ ID NO: 149290 - RNA, 21 nt, Artificial Sequence
  Synthetic
caguugacccucaaacaaugu

SEQ ID NO: 149291 - RNA, 22 nt, Artificial Sequence
  Synthetic
acaguugacccucaaacaaugu

SEQ ID NO: 149292 - RNA, 23 nt, Artificial Sequence
  Synthetic
uacaguugacccucaaacaaugu

SEQ ID NO: 149293 - RNA, 24 nt, Artificial Sequence
  Synthetic
auacaguugacccucaaacaaugu

SEQ ID NO: 149294 - RNA, 21 nt, Artificial Sequence
  Synthetic
ugaacagugcuacaacaaugu

SEQ ID NO: 149295 - RNA, 23 nt, Artificial Sequence
  Synthetic
ugugaacagugcuacaacaaugu

SEQ ID NO: 149296 - RNA, 24 nt, Artificial Sequence
  Synthetic
uugugaacagugcuacaacaaugu

SEQ ID NO: 149297 - RNA, 19 nt, Artificial Sequence
  Synthetic
ugauuaagaaaaauaaugu

SEQ ID NO: 149298 - RNA, 20 nt, Artificial Sequence
  Synthetic
augauuaagaaaaauaaugu

SEQ ID NO: 149299 - RNA, 19 nt, Artificial Sequence
  Synthetic
uggacuuuuggguuaaugu

SEQ ID NO: 149300 - RNA, 20 nt, Artificial Sequence
  Synthetic
uuggacuuuuggguuaaugu

SEQ ID NO: 149301 - RNA, 21 nt, Artificial Sequence
  Synthetic
cuuggacuuuuggguuaaugu

SEQ ID NO: 149302 - RNA, 22 nt, Artificial Sequence
  Synthetic
acuuggacuuuuggguuaaugu

SEQ ID NO: 149303 - RNA, 20 nt, Artificial Sequence
  Synthetic
agguccuucccacaacaugu

SEQ ID NO: 149304 - RNA, 22 nt, Artificial Sequence
  Synthetic
cgagguccuucccacaacaugu

SEQ ID NO: 149305 - RNA, 23 nt, Artificial Sequence
  Synthetic
acgagguccuucccacaacaugu

SEQ ID NO: 149306 - RNA, 24 nt, Artificial Sequence
  Synthetic
cacgagguccuucccacaacaugu

SEQ ID NO: 149307 - RNA, 18 nt, Artificial Sequence
  Synthetic
auuacaggaaaaccaugu

SEQ ID NO: 149308 - RNA, 19 nt, Artificial Sequence
  Synthetic
aauuacaggaaaaccaugu

SEQ ID NO: 149309 - RNA, 18 nt, Artificial Sequence
  Synthetic
uguauaccugugccaugu

SEQ ID NO: 149310 - RNA, 19 nt, Artificial Sequence
  Synthetic
auguauaccugugccaugu

SEQ ID NO: 149311 - RNA, 20 nt, Artificial Sequence
  Synthetic
uauguauaccugugccaugu

SEQ ID NO: 149312 - RNA, 21 nt, Artificial Sequence
  Synthetic
auauguauaccugugccaugu

SEQ ID NO: 149313 - RNA, 22 nt, Artificial Sequence
  Synthetic
cauauguauaccugugccaugu

SEQ ID NO: 149314 - RNA, 23 nt, Artificial Sequence
  Synthetic
acauauguauaccugugccaugu

SEQ ID NO: 149315 - RNA, 24 nt, Artificial Sequence
  Synthetic
uacauauguauaccugugccaugu

SEQ ID NO: 149316 - RNA, 18 nt, Artificial Sequence
  Synthetic
ugcucucguuguccaugu

SEQ ID NO: 149317 - RNA, 19 nt, Artificial Sequence
  Synthetic
uugcucucguuguccaugu

SEQ ID NO: 149318 - RNA, 20 nt, Artificial Sequence
  Synthetic
uuugcucucguuguccaugu

SEQ ID NO: 149319 - RNA, 21 nt, Artificial Sequence
  Synthetic
uuuugcucucguuguccaugu

SEQ ID NO: 149320 - RNA, 22 nt, Artificial Sequence
  Synthetic
auuuugcucucguuguccaugu

SEQ ID NO: 149321 - RNA, 23 nt, Artificial Sequence
  Synthetic
aauuuugcucucguuguccaugu

SEQ ID NO: 149322 - RNA, 18 nt, Artificial Sequence
  Synthetic
uuggaauacuaagcaugu

SEQ ID NO: 149323 - RNA, 19 nt, Artificial Sequence
  Synthetic
auuggaauacuaagcaugu

SEQ ID NO: 149324 - RNA, 20 nt, Artificial Sequence
  Synthetic
uauuggaauacuaagcaugu

SEQ ID NO: 149325 - RNA, 21 nt, Artificial Sequence
  Synthetic
uuauuggaauacuaagcaugu

SEQ ID NO: 149326 - RNA, 22 nt, Artificial Sequence
  Synthetic
auuauuggaauacuaagcaugu

SEQ ID NO: 149327 - RNA, 23 nt, Artificial Sequence
  Synthetic
cauuauuggaauacuaagcaugu

SEQ ID NO: 149328 - RNA, 24 nt, Artificial Sequence
  Synthetic
ccauuauuggaauacuaagcaugu

SEQ ID NO: 149329 - RNA, 18 nt, Artificial Sequence
  Synthetic
ugccauggcugagcaugu

SEQ ID NO: 149330 - RNA, 19 nt, Artificial Sequence
  Synthetic
augccauggcugagcaugu

SEQ ID NO: 149331 - RNA, 20 nt, Artificial Sequence
  Synthetic
caugccauggcugagcaugu

SEQ ID NO: 149332 - RNA, 18 nt, Artificial Sequence
  Synthetic
ugucuaaauaaaucaugu

SEQ ID NO: 149333 - RNA, 19 nt, Artificial Sequence
  Synthetic
uugucuaaauaaaucaugu

SEQ ID NO: 149334 - RNA, 20 nt, Artificial Sequence
  Synthetic
uuugucuaaauaaaucaugu

SEQ ID NO: 149335 - RNA, 21 nt, Artificial Sequence
  Synthetic
uguuucuaaaaauaaucaugu

SEQ ID NO: 149336 - RNA, 22 nt, Artificial Sequence
  Synthetic
uuguuucuaaaaauaaucaugu

SEQ ID NO: 149337 - RNA, 23 nt, Artificial Sequence
  Synthetic
uuuguuucuaaaaauaaucaugu

SEQ ID NO: 149338 - RNA, 24 nt, Artificial Sequence
  Synthetic
auuuguuucuaaaaauaaucaugu

SEQ ID NO: 149339 - RNA, 18 nt, Artificial Sequence
  Synthetic
uucuuuuaauugugaugu

SEQ ID NO: 149340 - RNA, 20 nt, Artificial Sequence
  Synthetic
aguucuuuuaauugugaugu

SEQ ID NO: 149341 - RNA, 21 nt, Artificial Sequence
  Synthetic
uaguucuuuuaauugugaugu

SEQ ID NO: 149342 - RNA, 22 nt, Artificial Sequence
  Synthetic
cuaguucuuuuaauugugaugu

SEQ ID NO: 149343 - RNA, 23 nt, Artificial Sequence
  Synthetic
ucuaguucuuuuaauugugaugu

SEQ ID NO: 149344 - RNA, 24 nt, Artificial Sequence
  Synthetic
uucuaguucuuuuaauugugaugu

SEQ ID NO: 149345 - RNA, 18 nt, Artificial Sequence
  Synthetic
uuucuucuuuuuugaugu

SEQ ID NO: 149346 - RNA, 19 nt, Artificial Sequence
  Synthetic
auuucuucuuuuuugaugu

SEQ ID NO: 149347 - RNA, 20 nt, Artificial Sequence
  Synthetic
uauuucuucuuuuuugaugu

SEQ ID NO: 149348 - RNA, 21 nt, Artificial Sequence
  Synthetic
auauuucuucuuuuuugaugu

SEQ ID NO: 149349 - RNA, 23 nt, Artificial Sequence
  Synthetic
agauauuucuucuuuuuugaugu

SEQ ID NO: 149350 - RNA, 19 nt, Artificial Sequence
  Synthetic
ugucaaagaaacgcuaugu

SEQ ID NO: 149351 - RNA, 20 nt, Artificial Sequence
  Synthetic
uugucaaagaaacgcuaugu

SEQ ID NO: 149352 - RNA, 18 nt, Artificial Sequence
  Synthetic
aaaugaaaauguguaugu

SEQ ID NO: 149353 - RNA, 19 nt, Artificial Sequence
  Synthetic
aaaaugaaaauguguaugu

SEQ ID NO: 149354 - RNA, 20 nt, Artificial Sequence
  Synthetic
uaaaaugaaaauguguaugu

SEQ ID NO: 149355 - RNA, 18 nt, Artificial Sequence
  Synthetic
aaaaaaaucugguuaugu

SEQ ID NO: 149356 - RNA, 19 nt, Artificial Sequence
  Synthetic
aaaaaaaaucugguuaugu

SEQ ID NO: 149357 - RNA, 20 nt, Artificial Sequence
  Synthetic
caaaaaaaaucugguuaugu

SEQ ID NO: 149358 - RNA, 18 nt, Artificial Sequence
  Synthetic
aaguuaauauuguuaugu

SEQ ID NO: 149359 - RNA, 19 nt, Artificial Sequence
  Synthetic
aaaguuaauauuguuaugu

SEQ ID NO: 149360 - RNA, 20 nt, Artificial Sequence
  Synthetic
uaaaguuaauauuguuaugu

SEQ ID NO: 149361 - RNA, 21 nt, Artificial Sequence
  Synthetic
uuaaaguuaauauuguuaugu

SEQ ID NO: 149362 - RNA, 22 nt, Artificial Sequence
  Synthetic
uuuaaaguuaauauuguuaugu

SEQ ID NO: 149363 - RNA, 23 nt, Artificial Sequence
  Synthetic
auuuaaaguuaauauuguuaugu

SEQ ID NO: 149364 - RNA, 24 nt, Artificial Sequence
  Synthetic
uauuuaaaguuaauauuguuaugu

SEQ ID NO: 149365 - RNA, 18 nt, Artificial Sequence
  Synthetic
aaaguuauccuuuuaugu

SEQ ID NO: 149366 - RNA, 19 nt, Artificial Sequence
  Synthetic
aaaaguuauccuuuuaugu

SEQ ID NO: 149367 - RNA, 20 nt, Artificial Sequence
  Synthetic
aaaaaguuauccuuuuaugu

SEQ ID NO: 149368 - RNA, 21 nt, Artificial Sequence
  Synthetic
uuuacaaaguucuuuuuaugu

SEQ ID NO: 149369 - RNA, 22 nt, Artificial Sequence
  Synthetic
auuuacaaaguucuuuuuaugu

SEQ ID NO: 149370 - RNA, 23 nt, Artificial Sequence
  Synthetic
uauuuacaaaguucuuuuuaugu

SEQ ID NO: 149371 - RNA, 24 nt, Artificial Sequence
  Synthetic
uuauuuacaaaguucuuuuuaugu

SEQ ID NO: 149372 - RNA, 18 nt, Artificial Sequence
  Synthetic
uccaaauuccaaaacugu

SEQ ID NO: 149373 - RNA, 19 nt, Artificial Sequence
  Synthetic
uuccaaauuccaaaacugu

SEQ ID NO: 149374 - RNA, 21 nt, Artificial Sequence
  Synthetic
uguuccaaauuccaaaacugu

SEQ ID NO: 149375 - RNA, 22 nt, Artificial Sequence
  Synthetic
auguuccaaauuccaaaacugu

SEQ ID NO: 149376 - RNA, 23 nt, Artificial Sequence
  Synthetic
aauguuccaaauuccaaaacugu

SEQ ID NO: 149377 - RNA, 24 nt, Artificial Sequence
  Synthetic
aaauguuccaaauuccaaaacugu

SEQ ID NO: 149378 - RNA, 18 nt, Artificial Sequence
  Synthetic
ucauugauuacuaacugu

SEQ ID NO: 149379 - RNA, 19 nt, Artificial Sequence
  Synthetic
uucauugauuacuaacugu

SEQ ID NO: 149380 - RNA, 20 nt, Artificial Sequence
  Synthetic
uuucauugauuacuaacugu

SEQ ID NO: 149381 - RNA, 18 nt, Artificial Sequence
  Synthetic
uuuuguguuuuuaacugu

SEQ ID NO: 149382 - RNA, 19 nt, Artificial Sequence
  Synthetic
uuuuuguguuuuuaacugu

SEQ ID NO: 149383 - RNA, 19 nt, Artificial Sequence
  Synthetic
aguuuggaaagaagacugu

SEQ ID NO: 149384 - RNA, 18 nt, Artificial Sequence
  Synthetic
caaacaaacaaaaccugu

SEQ ID NO: 149385 - RNA, 19 nt, Artificial Sequence
  Synthetic
acaaacaaacaaaaccugu

SEQ ID NO: 149386 - RNA, 20 nt, Artificial Sequence
  Synthetic
aacaaacaaacaaaaccugu

SEQ ID NO: 149387 - RNA, 21 nt, Artificial Sequence
  Synthetic
aaacaaacaaacaaaaccugu

SEQ ID NO: 149388 - RNA, 22 nt, Artificial Sequence
  Synthetic
aaaacaaacaaacaaaaccugu

SEQ ID NO: 149389 - RNA, 23 nt, Artificial Sequence
  Synthetic
aaaaacaaacaaacaaaaccugu

SEQ ID NO: 149390 - RNA, 24 nt, Artificial Sequence
  Synthetic
aaaaaacaaacaaacaaaaccugu

SEQ ID NO: 149391 - RNA, 18 nt, Artificial Sequence
  Synthetic
augucaccuuacaccugu

SEQ ID NO: 149392 - RNA, 20 nt, Artificial Sequence
  Synthetic
agaugucaccuuacaccugu

SEQ ID NO: 149393 - RNA, 22 nt, Artificial Sequence
  Synthetic
ugagaugucaccuuacaccugu

SEQ ID NO: 149394 - RNA, 24 nt, Artificial Sequence
  Synthetic
agugagaugucaccuuacaccugu

SEQ ID NO: 149395 - RNA, 18 nt, Artificial Sequence
  Synthetic
cuaucaucucaccccugu

SEQ ID NO: 149396 - RNA, 19 nt, Artificial Sequence
  Synthetic
acuaucaucucaccccugu

SEQ ID NO: 149397 - RNA, 20 nt, Artificial Sequence
  Synthetic
cacuaucaucucaccccugu

SEQ ID NO: 149398 - RNA, 18 nt, Artificial Sequence
  Synthetic
uaucacacauuugccugu

SEQ ID NO: 149399 - RNA, 19 nt, Artificial Sequence
  Synthetic
auaucacacauuugccugu

SEQ ID NO: 149400 - RNA, 20 nt, Artificial Sequence
  Synthetic
uauaucacacauuugccugu

SEQ ID NO: 149401 - RNA, 18 nt, Artificial Sequence
  Synthetic
acuauucaacucugcugu

SEQ ID NO: 149402 - RNA, 19 nt, Artificial Sequence
  Synthetic
aacuauucaacucugcugu

SEQ ID NO: 149403 - RNA, 20 nt, Artificial Sequence
  Synthetic
caacuauucaacucugcugu

SEQ ID NO: 149404 - RNA, 22 nt, Artificial Sequence
  Synthetic
ugcaacuauucaacucugcugu

SEQ ID NO: 149405 - RNA, 23 nt, Artificial Sequence
  Synthetic
uugcaacuauucaacucugcugu

SEQ ID NO: 149406 - RNA, 21 nt, Artificial Sequence
  Synthetic
uucaaaugguuauuacucugu

SEQ ID NO: 149407 - RNA, 22 nt, Artificial Sequence
  Synthetic
auucaaaugguuauuacucugu

SEQ ID NO: 149408 - RNA, 24 nt, Artificial Sequence
  Synthetic
agauucaaaugguuauuacucugu

SEQ ID NO: 149409 - RNA, 18 nt, Artificial Sequence
  Synthetic
aaaugcuguucucucugu

SEQ ID NO: 149410 - RNA, 19 nt, Artificial Sequence
  Synthetic
caaaugcuguucucucugu

SEQ ID NO: 149411 - RNA, 21 nt, Artificial Sequence
  Synthetic
ugcaaaugcuguucucucugu

SEQ ID NO: 149412 - RNA, 22 nt, Artificial Sequence
  Synthetic
uugcaaaugcuguucucucugu

SEQ ID NO: 149413 - RNA, 23 nt, Artificial Sequence
  Synthetic
uuugcaaaugcuguucucucugu

SEQ ID NO: 149414 - RNA, 24 nt, Artificial Sequence
  Synthetic
cuuugcaaaugcuguucucucugu

SEQ ID NO: 149415 - RNA, 18 nt, Artificial Sequence
  Synthetic
auauuaaaauaagucugu

SEQ ID NO: 149416 - RNA, 19 nt, Artificial Sequence
  Synthetic
uauauuaaaauaagucugu

SEQ ID NO: 149417 - RNA, 18 nt, Artificial Sequence
  Synthetic
cucagccucccaaagugu

SEQ ID NO: 149418 - RNA, 19 nt, Artificial Sequence
  Synthetic
acucagccucccaaagugu

SEQ ID NO: 149419 - RNA, 21 nt, Artificial Sequence
  Synthetic
cgacucagccucccaaagugu

SEQ ID NO: 149420 - RNA, 22 nt, Artificial Sequence
  Synthetic
ccgacucagccucccaaagugu

SEQ ID NO: 149421 - RNA, 23 nt, Artificial Sequence
  Synthetic
cccgacucagccucccaaagugu

SEQ ID NO: 149422 - RNA, 24 nt, Artificial Sequence
  Synthetic
acccgacucagccucccaaagugu

SEQ ID NO: 149423 - RNA, 18 nt, Artificial Sequence
  Synthetic
uugacccucaaacagugu

SEQ ID NO: 149424 - RNA, 20 nt, Artificial Sequence
  Synthetic
aguugacccucaaacagugu

SEQ ID NO: 149425 - RNA, 21 nt, Artificial Sequence
  Synthetic
caguugacccucaaacagugu

SEQ ID NO: 149426 - RNA, 22 nt, Artificial Sequence
  Synthetic
acaguugacccucaaacagugu

SEQ ID NO: 149427 - RNA, 23 nt, Artificial Sequence
  Synthetic
uacaguugacccucaaacagugu

SEQ ID NO: 149428 - RNA, 24 nt, Artificial Sequence
  Synthetic
auacaguugacccucaaacagugu

SEQ ID NO: 149429 - RNA, 18 nt, Artificial Sequence
  Synthetic
auagccaaggagcagugu

SEQ ID NO: 149430 - RNA, 19 nt, Artificial Sequence
  Synthetic
uauagccaaggagcagugu

SEQ ID NO: 149431 - RNA, 20 nt, Artificial Sequence
  Synthetic
uuauagccaaggagcagugu

SEQ ID NO: 149432 - RNA, 21 nt, Artificial Sequence
  Synthetic
uuuauagccaaggagcagugu

SEQ ID NO: 149433 - RNA, 22 nt, Artificial Sequence
  Synthetic
auuuauagccaaggagcagugu

SEQ ID NO: 149434 - RNA, 23 nt, Artificial Sequence
  Synthetic
aauuuauagccaaggagcagugu

SEQ ID NO: 149435 - RNA, 18 nt, Artificial Sequence
  Synthetic
aucccucccaggacgugu

SEQ ID NO: 149436 - RNA, 20 nt, Artificial Sequence
  Synthetic
ugaucccucccaggacgugu

SEQ ID NO: 149437 - RNA, 21 nt, Artificial Sequence
  Synthetic
cugaucccucccaggacgugu

SEQ ID NO: 149438 - RNA, 22 nt, Artificial Sequence
  Synthetic
ccugaucccucccaggacgugu

SEQ ID NO: 149439 - RNA, 23 nt, Artificial Sequence
  Synthetic
accugaucccucccaggacgugu

SEQ ID NO: 149440 - RNA, 24 nt, Artificial Sequence
  Synthetic
caccugaucccucccaggacgugu

SEQ ID NO: 149441 - RNA, 18 nt, Artificial Sequence
  Synthetic
cagugaugaggaaggugu

SEQ ID NO: 149442 - RNA, 19 nt, Artificial Sequence
  Synthetic
ccagugaugaggaaggugu

SEQ ID NO: 149443 - RNA, 20 nt, Artificial Sequence
  Synthetic
cccagugaugaggaaggugu

SEQ ID NO: 149444 - RNA, 18 nt, Artificial Sequence
  Synthetic
ugaguuaacuguaggugu

SEQ ID NO: 149445 - RNA, 19 nt, Artificial Sequence
  Synthetic
augaguuaacuguaggugu

SEQ ID NO: 149446 - RNA, 20 nt, Artificial Sequence
  Synthetic
aaugaguuaacuguaggugu

SEQ ID NO: 149447 - RNA, 21 nt, Artificial Sequence
  Synthetic
aaaugaguuaacuguaggugu

SEQ ID NO: 149448 - RNA, 22 nt, Artificial Sequence
  Synthetic
aaaaugaguuaacuguaggugu

SEQ ID NO: 149449 - RNA, 23 nt, Artificial Sequence
  Synthetic
aaaaaugaguuaacuguaggugu

SEQ ID NO: 149450 - RNA, 24 nt, Artificial Sequence
  Synthetic
caaaaaugaguuaacuguaggugu

SEQ ID NO: 149451 - RNA, 18 nt, Artificial Sequence
  Synthetic
uggggggggggggggugu

SEQ ID NO: 149452 - RNA, 19 nt, Artificial Sequence
  Synthetic
uuggggggggggggggugu

SEQ ID NO: 149453 - RNA, 22 nt, Artificial Sequence
  Synthetic
agcagaauuucagagugggugu

SEQ ID NO: 149454 - RNA, 23 nt, Artificial Sequence
  Synthetic
aagcagaauuucagagugggugu

SEQ ID NO: 149455 - RNA, 24 nt, Artificial Sequence
  Synthetic
aaagcagaauuucagagugggugu

SEQ ID NO: 149456 - RNA, 18 nt, Artificial Sequence
  Synthetic
acuggggggcuguggugu

SEQ ID NO: 149457 - RNA, 19 nt, Artificial Sequence
  Synthetic
cacuggggggcuguggugu

SEQ ID NO: 149458 - RNA, 20 nt, Artificial Sequence
  Synthetic
acacuggggggcuguggugu

SEQ ID NO: 149459 - RNA, 21 nt, Artificial Sequence
  Synthetic
aacacuggggggcuguggugu

SEQ ID NO: 149460 - RNA, 22 nt, Artificial Sequence
  Synthetic
caacacuggggggcuguggugu

SEQ ID NO: 149461 - RNA, 23 nt, Artificial Sequence
  Synthetic
ccaacacuggggggcuguggugu

SEQ ID NO: 149462 - RNA, 24 nt, Artificial Sequence
  Synthetic
cccaacacuggggggcuguggugu

SEQ ID NO: 149463 - RNA, 18 nt, Artificial Sequence
  Synthetic
cucccauuauuaaugugu

SEQ ID NO: 149464 - RNA, 19 nt, Artificial Sequence
  Synthetic
ucucccauuauuaaugugu

SEQ ID NO: 149465 - RNA, 21 nt, Artificial Sequence
  Synthetic
agucucccauuauuaaugugu

SEQ ID NO: 149466 - RNA, 22 nt, Artificial Sequence
  Synthetic
aagucucccauuauuaaugugu

SEQ ID NO: 149467 - RNA, 23 nt, Artificial Sequence
  Synthetic
aaagucucccauuauuaaugugu

SEQ ID NO: 149468 - RNA, 24 nt, Artificial Sequence
  Synthetic
uaaagucucccauuauuaaugugu

SEQ ID NO: 149469 - RNA, 18 nt, Artificial Sequence
  Synthetic
auaaaaaugugucugugu

SEQ ID NO: 149470 - RNA, 19 nt, Artificial Sequence
  Synthetic
uauaaaaaugugucugugu

SEQ ID NO: 149471 - RNA, 18 nt, Artificial Sequence
  Synthetic
ucuaccauuuuucugugu

SEQ ID NO: 149472 - RNA, 19 nt, Artificial Sequence
  Synthetic
aucuaccauuuuucugugu

SEQ ID NO: 149473 - RNA, 20 nt, Artificial Sequence
  Synthetic
uaucuaccauuuuucugugu

SEQ ID NO: 149474 - RNA, 18 nt, Artificial Sequence
  Synthetic
uugaaggguuuuuugugu

SEQ ID NO: 149475 - RNA, 19 nt, Artificial Sequence
  Synthetic
uuugaaggguuuuuugugu

SEQ ID NO: 149476 - RNA, 20 nt, Artificial Sequence
  Synthetic
uuuugaaggguuuuuugugu

SEQ ID NO: 149477 - RNA, 21 nt, Artificial Sequence
  Synthetic
uuuuugaaggguuuuuugugu

SEQ ID NO: 149478 - RNA, 22 nt, Artificial Sequence
  Synthetic
uuuuuugaaggguuuuuugugu

SEQ ID NO: 149479 - RNA, 23 nt, Artificial Sequence
  Synthetic
uuuuuuugaaggguuuuuugugu

SEQ ID NO: 149480 - RNA, 24 nt, Artificial Sequence
  Synthetic
auuuuuuugaaggguuuuuugugu

SEQ ID NO: 149481 - RNA, 20 nt, Artificial Sequence
  Synthetic
agguuuugaaguuacauugu

SEQ ID NO: 149482 - RNA, 19 nt, Artificial Sequence
  Synthetic
ugcauguuugggucauugu

SEQ ID NO: 149483 - RNA, 20 nt, Artificial Sequence
  Synthetic
augcauguuugggucauugu

SEQ ID NO: 149484 - RNA, 18 nt, Artificial Sequence
  Synthetic
aaaagcuugaaauauugu

SEQ ID NO: 149485 - RNA, 19 nt, Artificial Sequence
  Synthetic
aaaaagcuugaaauauugu

SEQ ID NO: 149486 - RNA, 21 nt, Artificial Sequence
  Synthetic
ugaaaaagcuugaaauauugu

SEQ ID NO: 149487 - RNA, 22 nt, Artificial Sequence
  Synthetic
uugaaaaagcuugaaauauugu

SEQ ID NO: 149488 - RNA, 23 nt, Artificial Sequence
  Synthetic
auugaaaaagcuugaaauauugu

SEQ ID NO: 149489 - RNA, 24 nt, Artificial Sequence
  Synthetic
uauugaaaaagcuugaaauauugu

SEQ ID NO: 149490 - RNA, 18 nt, Artificial Sequence
  Synthetic
caacuucucugauauugu

SEQ ID NO: 149491 - RNA, 19 nt, Artificial Sequence
  Synthetic
ucaacuucucugauauugu

SEQ ID NO: 149492 - RNA, 20 nt, Artificial Sequence
  Synthetic
uucaacuucucugauauugu

SEQ ID NO: 149493 - RNA, 18 nt, Artificial Sequence
  Synthetic
uguaugguauucuauugu

SEQ ID NO: 149494 - RNA, 19 nt, Artificial Sequence
  Synthetic
auguaugguauucuauugu

SEQ ID NO: 149495 - RNA, 20 nt, Artificial Sequence
  Synthetic
uauguaugguauucuauugu

SEQ ID NO: 149496 - RNA, 18 nt, Artificial Sequence
  Synthetic
uucuugcuauugaguugu

SEQ ID NO: 149497 - RNA, 19 nt, Artificial Sequence
  Synthetic
uuucuugcuauugaguugu

SEQ ID NO: 149498 - RNA, 20 nt, Artificial Sequence
  Synthetic
uuuucuugcuauugaguugu

SEQ ID NO: 149499 - RNA, 22 nt, Artificial Sequence
  Synthetic
uguuuucuugcuauugaguugu

SEQ ID NO: 149500 - RNA, 23 nt, Artificial Sequence
  Synthetic
uuguuuucuugcuauugaguugu

SEQ ID NO: 149501 - RNA, 24 nt, Artificial Sequence
  Synthetic
uuuguuuucuugcuauugaguugu

SEQ ID NO: 149502 - RNA, 21 nt, Artificial Sequence
  Synthetic
uaacauuguaaaaguuguugu

SEQ ID NO: 149503 - RNA, 22 nt, Artificial Sequence
  Synthetic
uuaacauuguaaaaguuguugu

SEQ ID NO: 149504 - RNA, 24 nt, Artificial Sequence
  Synthetic
uguuaacauuguaaaaguuguugu

SEQ ID NO: 149505 - RNA, 18 nt, Artificial Sequence
  Synthetic
accucuucagguuguugu

SEQ ID NO: 149506 - RNA, 19 nt, Artificial Sequence
  Synthetic
uaccucuucagguuguugu

SEQ ID NO: 149507 - RNA, 20 nt, Artificial Sequence
  Synthetic
cuaccucuucagguuguugu

SEQ ID NO: 149508 - RNA, 20 nt, Artificial Sequence
  Synthetic
uggaauguuuuuccauuugu

SEQ ID NO: 149509 - RNA, 21 nt, Artificial Sequence
  Synthetic
auggaauguuuuuccauuugu

SEQ ID NO: 149510 - RNA, 22 nt, Artificial Sequence
  Synthetic
cauggaauguuuuuccauuugu

SEQ ID NO: 149511 - RNA, 24 nt, Artificial Sequence
  Synthetic
agcauggaauguuuuuccauuugu

SEQ ID NO: 149512 - RNA, 18 nt, Artificial Sequence
  Synthetic
uuuuuucuacugauuugu

SEQ ID NO: 149513 - RNA, 19 nt, Artificial Sequence
  Synthetic
uuuuuuucuacugauuugu

SEQ ID NO: 149514 - RNA, 20 nt, Artificial Sequence
  Synthetic
cuuuuuuucuacugauuugu

SEQ ID NO: 149515 - RNA, 21 nt, Artificial Sequence
  Synthetic
ucuuuuuuucuacugauuugu

SEQ ID NO: 149516 - RNA, 23 nt, Artificial Sequence
  Synthetic
ugucuuuuuuucuacugauuugu

SEQ ID NO: 149517 - RNA, 24 nt, Artificial Sequence
  Synthetic
uugucuuuuuuucuacugauuugu

SEQ ID NO: 149518 - RNA, 18 nt, Artificial Sequence
  Synthetic
uuuuucuuguaaguuugu

SEQ ID NO: 149519 - RNA, 19 nt, Artificial Sequence
  Synthetic
uuuuuucuuguaaguuugu

SEQ ID NO: 149520 - RNA, 21 nt, Artificial Sequence
  Synthetic
uguuuuuucuuguaaguuugu

SEQ ID NO: 149521 - RNA, 22 nt, Artificial Sequence
  Synthetic
uuguuuuuucuuguaaguuugu

SEQ ID NO: 149522 - RNA, 23 nt, Artificial Sequence
  Synthetic
uuuguuuuuucuuguaaguuugu

SEQ ID NO: 149523 - RNA, 18 nt, Artificial Sequence
  Synthetic
uuuuucuuguacguuugu

SEQ ID NO: 149524 - RNA, 19 nt, Artificial Sequence
  Synthetic
uuuuuucuuguacguuugu

SEQ ID NO: 149525 - RNA, 20 nt, Artificial Sequence
  Synthetic
uuuuuuucuuguacguuugu

SEQ ID NO: 149526 - RNA, 22 nt, Artificial Sequence
  Synthetic
uguuuuuuucuuguacguuugu

SEQ ID NO: 149527 - RNA, 23 nt, Artificial Sequence
  Synthetic
uuguuuuuuucuuguacguuugu

SEQ ID NO: 149528 - RNA, 24 nt, Artificial Sequence
  Synthetic
uuuguuuuuuucuuguacguuugu

SEQ ID NO: 149529 - RNA, 18 nt, Artificial Sequence
  Synthetic
uauucuuuaauauuuugu

SEQ ID NO: 149530 - RNA, 19 nt, Artificial Sequence
  Synthetic
uuauucuuuaauauuuugu

SEQ ID NO: 149531 - RNA, 20 nt, Artificial Sequence
  Synthetic
uuuauucuuuaauauuuugu

SEQ ID NO: 149532 - RNA, 19 nt, Artificial Sequence
  Synthetic
ugucuugggccucuuuugu

SEQ ID NO: 149533 - RNA, 20 nt, Artificial Sequence
  Synthetic
cugucuugggccucuuuugu

SEQ ID NO: 149534 - RNA, 21 nt, Artificial Sequence
  Synthetic
acugucuugggccucuuuugu

SEQ ID NO: 149535 - RNA, 22 nt, Artificial Sequence
  Synthetic
aacugucuugggccucuuuugu

SEQ ID NO: 149536 - RNA, 18 nt, Artificial Sequence
  Synthetic
cuauuucucucuuuuugu

SEQ ID NO: 149537 - RNA, 19 nt, Artificial Sequence
  Synthetic
acuauuucucucuuuuugu

SEQ ID NO: 149538 - RNA, 20 nt, Artificial Sequence
  Synthetic
aacuauuucucucuuuuugu

SEQ ID NO: 149539 - RNA, 18 nt, Artificial Sequence
  Synthetic
uuccugccuuguuuuugu

SEQ ID NO: 149540 - RNA, 19 nt, Artificial Sequence
  Synthetic
uuuccugccuuguuuuugu

SEQ ID NO: 149541 - RNA, 21 nt, Artificial Sequence
  Synthetic
uguuuccugccuuguuuuugu

SEQ ID NO: 149542 - RNA, 22 nt, Artificial Sequence
  Synthetic
cuguuuccugccuuguuuuugu

SEQ ID NO: 149543 - RNA, 23 nt, Artificial Sequence
  Synthetic
ucuguuuccugccuuguuuuugu

SEQ ID NO: 149544 - RNA, 24 nt, Artificial Sequence
  Synthetic
uucuguuuccugccuuguuuuugu

SEQ ID NO: 149545 - RNA, 18 nt, Artificial Sequence
  Synthetic
cuugguuaaaaaaaaauu

SEQ ID NO: 149546 - RNA, 19 nt, Artificial Sequence
  Synthetic
ccuugguuaaaaaaaaauu

SEQ ID NO: 149547 - RNA, 20 nt, Artificial Sequence
  Synthetic
cccuugguuaaaaaaaaauu

SEQ ID NO: 149548 - RNA, 18 nt, Artificial Sequence
  Synthetic
aucuguaaucaaaaaauu

SEQ ID NO: 149549 - RNA, 19 nt, Artificial Sequence
  Synthetic
uaucuguaaucaaaaaauu

SEQ ID NO: 149550 - RNA, 20 nt, Artificial Sequence
  Synthetic
auaucuguaaucaaaaaauu

SEQ ID NO: 149551 - RNA, 18 nt, Artificial Sequence
  Synthetic
uggcaauugucaaaaauu

SEQ ID NO: 149552 - RNA, 20 nt, Artificial Sequence
  Synthetic
aguggcaauugucaaaaauu

SEQ ID NO: 149553 - RNA, 18 nt, Artificial Sequence
  Synthetic
aucaucauuuuaaaaauu

SEQ ID NO: 149554 - RNA, 19 nt, Artificial Sequence
  Synthetic
caucaucauuuuaaaaauu

SEQ ID NO: 149555 - RNA, 20 nt, Artificial Sequence
  Synthetic
acaucaucauuuuaaaaauu

SEQ ID NO: 149556 - RNA, 18 nt, Artificial Sequence
  Synthetic
uucuaaagagacaaaauu

SEQ ID NO: 149557 - RNA, 19 nt, Artificial Sequence
  Synthetic
uuucuaaagagacaaaauu

SEQ ID NO: 149558 - RNA, 20 nt, Artificial Sequence
  Synthetic
auuucuaaagagacaaaauu

SEQ ID NO: 149559 - RNA, 18 nt, Artificial Sequence
  Synthetic
aaaaaaaaacccaaaauu

SEQ ID NO: 149560 - RNA, 19 nt, Artificial Sequence
  Synthetic
aaaaaaaaaacccaaaauu

SEQ ID NO: 149561 - RNA, 19 nt, Artificial Sequence
  Synthetic
agaucacugaagcaaaauu

SEQ ID NO: 149562 - RNA, 20 nt, Artificial Sequence
  Synthetic
uagaucacugaagcaaaauu

SEQ ID NO: 149563 - RNA, 18 nt, Artificial Sequence
  Synthetic
auagacaaaaagaaaauu

SEQ ID NO: 149564 - RNA, 19 nt, Artificial Sequence
  Synthetic
uauagacaaaaagaaaauu

SEQ ID NO: 149565 - RNA, 20 nt, Artificial Sequence
  Synthetic
uuauagacaaaaagaaaauu

SEQ ID NO: 149566 - RNA, 21 nt, Artificial Sequence
  Synthetic
auuauagacaaaaagaaaauu

SEQ ID NO: 149567 - RNA, 22 nt, Artificial Sequence
  Synthetic
aauuauagacaaaaagaaaauu

SEQ ID NO: 149568 - RNA, 23 nt, Artificial Sequence
  Synthetic
caauuauagacaaaaagaaaauu

SEQ ID NO: 149569 - RNA, 24 nt, Artificial Sequence
  Synthetic
acaauuauagacaaaaagaaaauu

SEQ ID NO: 149570 - RNA, 18 nt, Artificial Sequence
  Synthetic
aacauuauuuagaaaauu

SEQ ID NO: 149571 - RNA, 20 nt, Artificial Sequence
  Synthetic
ugaacauuauuuagaaaauu

SEQ ID NO: 149572 - RNA, 18 nt, Artificial Sequence
  Synthetic
aggggacaagaggaaauu

SEQ ID NO: 149573 - RNA, 19 nt, Artificial Sequence
  Synthetic
aaggggacaagaggaaauu

SEQ ID NO: 149574 - RNA, 20 nt, Artificial Sequence
  Synthetic
aaaggggacaagaggaaauu

SEQ ID NO: 149575 - RNA, 21 nt, Artificial Sequence
  Synthetic
uaaaggggacaagaggaaauu

SEQ ID NO: 149576 - RNA, 22 nt, Artificial Sequence
  Synthetic
auaaaggggacaagaggaaauu

SEQ ID NO: 149577 - RNA, 23 nt, Artificial Sequence
  Synthetic
aauaaaggggacaagaggaaauu

SEQ ID NO: 149578 - RNA, 24 nt, Artificial Sequence
  Synthetic
uaauaaaggggacaagaggaaauu

SEQ ID NO: 149579 - RNA, 18 nt, Artificial Sequence
  Synthetic
uuggcuggauaugaaauu

SEQ ID NO: 149580 - RNA, 19 nt, Artificial Sequence
  Synthetic
uuuggcuggauaugaaauu

SEQ ID NO: 149581 - RNA, 21 nt, Artificial Sequence
  Synthetic
aguuuggcuggauaugaaauu

SEQ ID NO: 149582 - RNA, 22 nt, Artificial Sequence
  Synthetic
uaguuuggcuggauaugaaauu

SEQ ID NO: 149583 - RNA, 23 nt, Artificial Sequence
  Synthetic
uuaguuuggcuggauaugaaauu

SEQ ID NO: 149584 - RNA, 24 nt, Artificial Sequence
  Synthetic
cuuaguuuggcuggauaugaaauu

SEQ ID NO: 149585 - RNA, 18 nt, Artificial Sequence
  Synthetic
cugugugagucugaaauu

SEQ ID NO: 149586 - RNA, 21 nt, Artificial Sequence
  Synthetic
uggcugugugagucugaaauu

SEQ ID NO: 149587 - RNA, 22 nt, Artificial Sequence
  Synthetic
uuggcugugugagucugaaauu

SEQ ID NO: 149588 - RNA, 24 nt, Artificial Sequence
  Synthetic
aguuggcugugugagucugaaauu

SEQ ID NO: 149589 - RNA, 18 nt, Artificial Sequence
  Synthetic
agggaaggaauugaaauu

SEQ ID NO: 149590 - RNA, 19 nt, Artificial Sequence
  Synthetic
cagggaaggaauugaaauu

SEQ ID NO: 149591 - RNA, 20 nt, Artificial Sequence
  Synthetic
ccagggaaggaauugaaauu

SEQ ID NO: 149592 - RNA, 18 nt, Artificial Sequence
  Synthetic
ucuguuagaauauaaauu

SEQ ID NO: 149593 - RNA, 19 nt, Artificial Sequence
  Synthetic
uucuguuagaauauaaauu

SEQ ID NO: 149594 - RNA, 20 nt, Artificial Sequence
  Synthetic
uuucuguuagaauauaaauu

SEQ ID NO: 149595 - RNA, 18 nt, Artificial Sequence
  Synthetic
accuuuauaugcuaaauu

SEQ ID NO: 149596 - RNA, 19 nt, Artificial Sequence
  Synthetic
uaccuuuauaugcuaaauu

SEQ ID NO: 149597 - RNA, 20 nt, Artificial Sequence
  Synthetic
uuaccuuuauaugcuaaauu

SEQ ID NO: 149598 - RNA, 18 nt, Artificial Sequence
  Synthetic
auuacaggaacuacaauu

SEQ ID NO: 149599 - RNA, 23 nt, Artificial Sequence
  Synthetic
uggggauuacaggaacuacaauu

SEQ ID NO: 149600 - RNA, 24 nt, Artificial Sequence
  Synthetic
auggggauuacaggaacuacaauu

SEQ ID NO: 149601 - RNA, 18 nt, Artificial Sequence
  Synthetic
ugaaagcuauguacaauu

SEQ ID NO: 149602 - RNA, 19 nt, Artificial Sequence
  Synthetic
uugaaagcuauguacaauu

SEQ ID NO: 149603 - RNA, 20 nt, Artificial Sequence
  Synthetic
cuugaaagcuauguacaauu

SEQ ID NO: 149604 - RNA, 18 nt, Artificial Sequence
  Synthetic
aaguugguacaaccaauu

SEQ ID NO: 149605 - RNA, 19 nt, Artificial Sequence
  Synthetic
uaaguugguacaaccaauu

SEQ ID NO: 149606 - RNA, 20 nt, Artificial Sequence
  Synthetic
uuaaguugguacaaccaauu

SEQ ID NO: 149607 - RNA, 21 nt, Artificial Sequence
  Synthetic
uuuaaguugguacaaccaauu

SEQ ID NO: 149608 - RNA, 22 nt, Artificial Sequence
  Synthetic
auuuaaguugguacaaccaauu

SEQ ID NO: 149609 - RNA, 23 nt, Artificial Sequence
  Synthetic
aauuuaaguugguacaaccaauu

SEQ ID NO: 149610 - RNA, 24 nt, Artificial Sequence
  Synthetic
aaauuuaaguugguacaaccaauu

SEQ ID NO: 149611 - RNA, 18 nt, Artificial Sequence
  Synthetic
auucucuuugaagcaauu

SEQ ID NO: 149612 - RNA, 19 nt, Artificial Sequence
  Synthetic
uauucucuuugaagcaauu

SEQ ID NO: 149613 - RNA, 20 nt, Artificial Sequence
  Synthetic
uuauucucuuugaagcaauu

SEQ ID NO: 149614 - RNA, 18 nt, Artificial Sequence
  Synthetic
auucucuuuguagcaauu

SEQ ID NO: 149615 - RNA, 19 nt, Artificial Sequence
  Synthetic
uauucucuuuguagcaauu

SEQ ID NO: 149616 - RNA, 20 nt, Artificial Sequence
  Synthetic
uuauucucuuuguagcaauu

SEQ ID NO: 149617 - RNA, 21 nt, Artificial Sequence
  Synthetic
uuuauucucuuuguagcaauu

SEQ ID NO: 149618 - RNA, 22 nt, Artificial Sequence
  Synthetic
cuuuauucucuuuguagcaauu

SEQ ID NO: 149619 - RNA, 23 nt, Artificial Sequence
  Synthetic
acuuuauucucuuuguagcaauu

SEQ ID NO: 149620 - RNA, 24 nt, Artificial Sequence
  Synthetic
cacuuuauucucuuuguagcaauu

SEQ ID NO: 149621 - RNA, 19 nt, Artificial Sequence
  Synthetic
ugauguuagggugucaauu

SEQ ID NO: 149622 - RNA, 21 nt, Artificial Sequence
  Synthetic
ugugauguuagggugucaauu

SEQ ID NO: 149623 - RNA, 22 nt, Artificial Sequence
  Synthetic
uugugauguuagggugucaauu

SEQ ID NO: 149624 - RNA, 23 nt, Artificial Sequence
  Synthetic
auugugauguuagggugucaauu

SEQ ID NO: 149625 - RNA, 24 nt, Artificial Sequence
  Synthetic
aauugugauguuagggugucaauu

SEQ ID NO: 149626 - RNA, 19 nt, Artificial Sequence
  Synthetic
uguaaaaaggaaaagaauu

SEQ ID NO: 149627 - RNA, 20 nt, Artificial Sequence
  Synthetic
uuguaaaaaggaaaagaauu

SEQ ID NO: 149628 - RNA, 18 nt, Artificial Sequence
  Synthetic
auucuaguugaaagaauu

SEQ ID NO: 149629 - RNA, 19 nt, Artificial Sequence
  Synthetic
uauucuaguugaaagaauu

SEQ ID NO: 149630 - RNA, 20 nt, Artificial Sequence
  Synthetic
uuauucuaguugaaagaauu

SEQ ID NO: 149631 - RNA, 18 nt, Artificial Sequence
  Synthetic
agaauaugccugugaauu

SEQ ID NO: 149632 - RNA, 19 nt, Artificial Sequence
  Synthetic
aagaauaugccugugaauu

SEQ ID NO: 149633 - RNA, 20 nt, Artificial Sequence
  Synthetic
aaagaauaugccugugaauu

SEQ ID NO: 149634 - RNA, 18 nt, Artificial Sequence
  Synthetic
uaaauaguagaaauaauu

SEQ ID NO: 149635 - RNA, 19 nt, Artificial Sequence
  Synthetic
uuaaauaguagaaauaauu

SEQ ID NO: 149636 - RNA, 20 nt, Artificial Sequence
  Synthetic
auuaaauaguagaaauaauu

SEQ ID NO: 149637 - RNA, 18 nt, Artificial Sequence
  Synthetic
uuuaaaaagucaauaauu

SEQ ID NO: 149638 - RNA, 19 nt, Artificial Sequence
  Synthetic
cuuuaaaaagucaauaauu

SEQ ID NO: 149639 - RNA, 20 nt, Artificial Sequence
  Synthetic
acuuuaaaaagucaauaauu

SEQ ID NO: 149640 - RNA, 18 nt, Artificial Sequence
  Synthetic
uaaaguaugagaauaauu

SEQ ID NO: 149641 - RNA, 20 nt, Artificial Sequence
  Synthetic
uguaaaguaugagaauaauu

SEQ ID NO: 149642 - RNA, 18 nt, Artificial Sequence
  Synthetic
auuuucucacucauaauu

SEQ ID NO: 149643 - RNA, 19 nt, Artificial Sequence
  Synthetic
cauuuucucacucauaauu

SEQ ID NO: 149644 - RNA, 21 nt, Artificial Sequence
  Synthetic
cgcauuuucucacucauaauu

SEQ ID NO: 149645 - RNA, 22 nt, Artificial Sequence
  Synthetic
ccgcauuuucucacucauaauu

SEQ ID NO: 149646 - RNA, 23 nt, Artificial Sequence
  Synthetic
accgcauuuucucacucauaauu

SEQ ID NO: 149647 - RNA, 24 nt, Artificial Sequence
  Synthetic
caccgcauuuucucacucauaauu

SEQ ID NO: 149648 - RNA, 18 nt, Artificial Sequence
  Synthetic
aggaagccaaagauaauu

SEQ ID NO: 149649 - RNA, 19 nt, Artificial Sequence
  Synthetic
uaggaagccaaagauaauu

SEQ ID NO: 149650 - RNA, 20 nt, Artificial Sequence
  Synthetic
auaggaagccaaagauaauu

SEQ ID NO: 149651 - RNA, 20 nt, Artificial Sequence
  Synthetic
uggaaaauuauuuuauaauu

SEQ ID NO: 149652 - RNA, 18 nt, Artificial Sequence
  Synthetic
uucuuucuuccacuaauu

SEQ ID NO: 149653 - RNA, 19 nt, Artificial Sequence
  Synthetic
uuucuuucuuccacuaauu

SEQ ID NO: 149654 - RNA, 20 nt, Artificial Sequence
  Synthetic
auuucuuucuuccacuaauu

SEQ ID NO: 149655 - RNA, 21 nt, Artificial Sequence
  Synthetic
uauuucuuucuuccacuaauu

SEQ ID NO: 149656 - RNA, 22 nt, Artificial Sequence
  Synthetic
uuauuucuuucuuccacuaauu

SEQ ID NO: 149657 - RNA, 23 nt, Artificial Sequence
  Synthetic
auuauuucuuucuuccacuaauu

SEQ ID NO: 149658 - RNA, 24 nt, Artificial Sequence
  Synthetic
uauuauuucuuucuuccacuaauu

SEQ ID NO: 149659 - RNA, 19 nt, Artificial Sequence
  Synthetic
ugaaaaaaaaucaguaauu

SEQ ID NO: 149660 - RNA, 20 nt, Artificial Sequence
  Synthetic
uugaaaaaaaaucaguaauu

SEQ ID NO: 149661 - RNA, 18 nt, Artificial Sequence
  Synthetic
ucauuuuauuuaaacauu

SEQ ID NO: 149662 - RNA, 19 nt, Artificial Sequence
  Synthetic
aucauuuuauuuaaacauu

SEQ ID NO: 149663 - RNA, 20 nt, Artificial Sequence
  Synthetic
aaucauuuuauuuaaacauu

SEQ ID NO: 149664 - RNA, 19 nt, Artificial Sequence
  Synthetic
aggccccaccaccaacauu

SEQ ID NO: 149665 - RNA, 20 nt, Artificial Sequence
  Synthetic
caggccccaccaccaacauu

SEQ ID NO: 149666 - RNA, 21 nt, Artificial Sequence
  Synthetic
ccaggccccaccaccaacauu

SEQ ID NO: 149667 - RNA, 23 nt, Artificial Sequence
  Synthetic
cgccaggccccaccaccaacauu

SEQ ID NO: 149668 - RNA, 24 nt, Artificial Sequence
  Synthetic
ccgccaggccccaccaccaacauu

SEQ ID NO: 149669 - RNA, 19 nt, Artificial Sequence
  Synthetic
aggccccaccuccaacauu

SEQ ID NO: 149670 - RNA, 20 nt, Artificial Sequence
  Synthetic
caggccccaccuccaacauu

SEQ ID NO: 149671 - RNA, 21 nt, Artificial Sequence
  Synthetic
ccaggccccaccuccaacauu

SEQ ID NO: 149672 - RNA, 22 nt, Artificial Sequence
  Synthetic
accaggccccaccuccaacauu

SEQ ID NO: 149673 - RNA, 23 nt, Artificial Sequence
  Synthetic
caccaggccccaccuccaacauu

SEQ ID NO: 149674 - RNA, 24 nt, Artificial Sequence
  Synthetic
ucaccaggccccaccuccaacauu

SEQ ID NO: 149675 - RNA, 19 nt, Artificial Sequence
  Synthetic
ugacuauaugccagacauu

SEQ ID NO: 149676 - RNA, 20 nt, Artificial Sequence
  Synthetic
uugacuauaugccagacauu

SEQ ID NO: 149677 - RNA, 21 nt, Artificial Sequence
  Synthetic
uuugacuauaugccagacauu

SEQ ID NO: 149678 - RNA, 22 nt, Artificial Sequence
  Synthetic
uuuugacuauaugccagacauu

SEQ ID NO: 149679 - RNA, 23 nt, Artificial Sequence
  Synthetic
uuuuugacuauaugccagacauu

SEQ ID NO: 149680 - RNA, 24 nt, Artificial Sequence
  Synthetic
auuuuugacuauaugccagacauu

SEQ ID NO: 149681 - RNA, 18 nt, Artificial Sequence
  Synthetic
agaaggaaaggagacauu

SEQ ID NO: 149682 - RNA, 20 nt, Artificial Sequence
  Synthetic
agagaaggaaaggagacauu

SEQ ID NO: 149683 - RNA, 18 nt, Artificial Sequence
  Synthetic
auuuucaaaaccuacauu

SEQ ID NO: 149684 - RNA, 19 nt, Artificial Sequence
  Synthetic
uauuuucaaaaccuacauu

SEQ ID NO: 149685 - RNA, 20 nt, Artificial Sequence
  Synthetic
cuauuuucaaaaccuacauu

SEQ ID NO: 149686 - RNA, 18 nt, Artificial Sequence
  Synthetic
aaccuaggcaauaccauu

SEQ ID NO: 149687 - RNA, 19 nt, Artificial Sequence
  Synthetic
aaaccuaggcaauaccauu

SEQ ID NO: 149688 - RNA, 20 nt, Artificial Sequence
  Synthetic
aaaaccuaggcaauaccauu

SEQ ID NO: 149689 - RNA, 18 nt, Artificial Sequence
  Synthetic
uugcaugucuuugccauu

SEQ ID NO: 149690 - RNA, 19 nt, Artificial Sequence
  Synthetic
auugcaugucuuugccauu

SEQ ID NO: 149691 - RNA, 21 nt, Artificial Sequence
  Synthetic
ugauugcaugucuuugccauu

SEQ ID NO: 149692 - RNA, 22 nt, Artificial Sequence
  Synthetic
uugauugcaugucuuugccauu

SEQ ID NO: 149693 - RNA, 18 nt, Artificial Sequence
  Synthetic
uuaaggcuuuaauccauu

SEQ ID NO: 149694 - RNA, 19 nt, Artificial Sequence
  Synthetic
uuuaaggcuuuaauccauu

SEQ ID NO: 149695 - RNA, 20 nt, Artificial Sequence
  Synthetic
auuuaaggcuuuaauccauu

SEQ ID NO: 149696 - RNA, 21 nt, Artificial Sequence
  Synthetic
cauuuaaggcuuuaauccauu

SEQ ID NO: 149697 - RNA, 22 nt, Artificial Sequence
  Synthetic
acauuuaaggcuuuaauccauu

SEQ ID NO: 149698 - RNA, 23 nt, Artificial Sequence
  Synthetic
uacauuuaaggcuuuaauccauu

SEQ ID NO: 149699 - RNA, 24 nt, Artificial Sequence
  Synthetic
uuacauuuaaggcuuuaauccauu

SEQ ID NO: 149700 - RNA, 18 nt, Artificial Sequence
  Synthetic
uuuuuacuucauuccauu

SEQ ID NO: 149701 - RNA, 19 nt, Artificial Sequence
  Synthetic
uuuuuuacuucauuccauu

SEQ ID NO: 149702 - RNA, 20 nt, Artificial Sequence
  Synthetic
uuuuuuuacuucauuccauu

SEQ ID NO: 149703 - RNA, 21 nt, Artificial Sequence
  Synthetic
uuuuuuuuacuucauuccauu

SEQ ID NO: 149704 - RNA, 22 nt, Artificial Sequence
  Synthetic
uuuuuuuuuacuucauuccauu

SEQ ID NO: 149705 - RNA, 23 nt, Artificial Sequence
  Synthetic
uuuuuuuuuuacuucauuccauu

SEQ ID NO: 149706 - RNA, 24 nt, Artificial Sequence
  Synthetic
uuuuuuuuuuuacuucauuccauu

SEQ ID NO: 149707 - RNA, 18 nt, Artificial Sequence
  Synthetic
cuuccaaucccaagcauu

SEQ ID NO: 149708 - RNA, 19 nt, Artificial Sequence
  Synthetic
acuuccaaucccaagcauu

SEQ ID NO: 149709 - RNA, 20 nt, Artificial Sequence
  Synthetic
cacuuccaaucccaagcauu

SEQ ID NO: 149710 - RNA, 21 nt, Artificial Sequence
  Synthetic
acacuuccaaucccaagcauu

SEQ ID NO: 149711 - RNA, 22 nt, Artificial Sequence
  Synthetic
aacacuuccaaucccaagcauu

SEQ ID NO: 149712 - RNA, 23 nt, Artificial Sequence
  Synthetic
aaacacuuccaaucccaagcauu

SEQ ID NO: 149713 - RNA, 24 nt, Artificial Sequence
  Synthetic
aaaacacuuccaaucccaagcauu

SEQ ID NO: 149714 - RNA, 23 nt, Artificial Sequence
  Synthetic
uggccucaccucucaauagcauu

SEQ ID NO: 149715 - RNA, 24 nt, Artificial Sequence
  Synthetic
cuggccucaccucucaauagcauu

SEQ ID NO: 149716 - RNA, 18 nt, Artificial Sequence
  Synthetic
uugucagaucuaugcauu

SEQ ID NO: 149717 - RNA, 19 nt, Artificial Sequence
  Synthetic
uuugucagaucuaugcauu

SEQ ID NO: 149718 - RNA, 20 nt, Artificial Sequence
  Synthetic
cuuugucagaucuaugcauu

SEQ ID NO: 149719 - RNA, 21 nt, Artificial Sequence
  Synthetic
ccuuugucagaucuaugcauu

SEQ ID NO: 149720 - RNA, 22 nt, Artificial Sequence
  Synthetic
uccuuugucagaucuaugcauu

SEQ ID NO: 149721 - RNA, 24 nt, Artificial Sequence
  Synthetic
aguccuuugucagaucuaugcauu

SEQ ID NO: 149722 - RNA, 18 nt, Artificial Sequence
  Synthetic
acaaaauaucaaaucauu

SEQ ID NO: 149723 - RNA, 19 nt, Artificial Sequence
  Synthetic
aacaaaauaucaaaucauu

SEQ ID NO: 149724 - RNA, 20 nt, Artificial Sequence
  Synthetic
aaacaaaauaucaaaucauu

SEQ ID NO: 149725 - RNA, 18 nt, Artificial Sequence
  Synthetic
acauauuuauaaaucauu

SEQ ID NO: 149726 - RNA, 19 nt, Artificial Sequence
  Synthetic
uacauauuuauaaaucauu

SEQ ID NO: 149727 - RNA, 20 nt, Artificial Sequence
  Synthetic
uuacauauuuauaaaucauu

SEQ ID NO: 149728 - RNA, 18 nt, Artificial Sequence
  Synthetic
ccuucccuagagaucauu

SEQ ID NO: 149729 - RNA, 19 nt, Artificial Sequence
  Synthetic
cccuucccuagagaucauu

SEQ ID NO: 149730 - RNA, 20 nt, Artificial Sequence
  Synthetic
ucccuucccuagagaucauu

SEQ ID NO: 149731 - RNA, 21 nt, Artificial Sequence
  Synthetic
aucccuucccuagagaucauu

SEQ ID NO: 149732 - RNA, 22 nt, Artificial Sequence
  Synthetic
aaucccuucccuagagaucauu

SEQ ID NO: 149733 - RNA, 23 nt, Artificial Sequence
  Synthetic
uaaucccuucccuagagaucauu

SEQ ID NO: 149734 - RNA, 24 nt, Artificial Sequence
  Synthetic
auaaucccuucccuagagaucauu

SEQ ID NO: 149735 - RNA, 18 nt, Artificial Sequence
  Synthetic
ccccacccaaaucucauu

SEQ ID NO: 149736 - RNA, 19 nt, Artificial Sequence
  Synthetic
uccccacccaaaucucauu

SEQ ID NO: 149737 - RNA, 21 nt, Artificial Sequence
  Synthetic
uguccccacccaaaucucauu

SEQ ID NO: 149738 - RNA, 23 nt, Artificial Sequence
  Synthetic
uguguccccacccaaaucucauu

SEQ ID NO: 149739 - RNA, 24 nt, Artificial Sequence
  Synthetic
uuguguccccacccaaaucucauu

SEQ ID NO: 149740 - RNA, 18 nt, Artificial Sequence
  Synthetic
ccccacucaaaucucauu

SEQ ID NO: 149741 - RNA, 19 nt, Artificial Sequence
  Synthetic
uccccacucaaaucucauu

SEQ ID NO: 149742 - RNA, 21 nt, Artificial Sequence
  Synthetic
uguccccacucaaaucucauu

SEQ ID NO: 149743 - RNA, 22 nt, Artificial Sequence
  Synthetic
cuguccccacucaaaucucauu

SEQ ID NO: 149744 - RNA, 23 nt, Artificial Sequence
  Synthetic
ucuguccccacucaaaucucauu

SEQ ID NO: 149745 - RNA, 24 nt, Artificial Sequence
  Synthetic
uucuguccccacucaaaucucauu

SEQ ID NO: 149746 - RNA, 18 nt, Artificial Sequence
  Synthetic
cauguguuaagauucauu

SEQ ID NO: 149747 - RNA, 19 nt, Artificial Sequence
  Synthetic
ccauguguuaagauucauu

SEQ ID NO: 149748 - RNA, 20 nt, Artificial Sequence
  Synthetic
uccauguguuaagauucauu

SEQ ID NO: 149749 - RNA, 21 nt, Artificial Sequence
  Synthetic
aaauguucuauaauguucauu

SEQ ID NO: 149750 - RNA, 22 nt, Artificial Sequence
  Synthetic
uaaauguucuauaauguucauu

SEQ ID NO: 149751 - RNA, 23 nt, Artificial Sequence
  Synthetic
auaaauguucuauaauguucauu

SEQ ID NO: 149752 - RNA, 24 nt, Artificial Sequence
  Synthetic
aauaaauguucuauaauguucauu

SEQ ID NO: 149753 - RNA, 20 nt, Artificial Sequence
  Synthetic
ugguucacuaguauuucauu

SEQ ID NO: 149754 - RNA, 21 nt, Artificial Sequence
  Synthetic
augguucacuaguauuucauu

SEQ ID NO: 149755 - RNA, 22 nt, Artificial Sequence
  Synthetic
uaugguucacuaguauuucauu

SEQ ID NO: 149756 - RNA, 23 nt, Artificial Sequence
  Synthetic
auaugguucacuaguauuucauu

SEQ ID NO: 149757 - RNA, 24 nt, Artificial Sequence
  Synthetic
aauaugguucacuaguauuucauu

SEQ ID NO: 149758 - RNA, 18 nt, Artificial Sequence
  Synthetic
auauauauuuuuuucauu

SEQ ID NO: 149759 - RNA, 19 nt, Artificial Sequence
  Synthetic
uauauauauuuuuuucauu

SEQ ID NO: 149760 - RNA, 20 nt, Artificial Sequence
  Synthetic
auauauauauuuuuuucauu

SEQ ID NO: 149761 - RNA, 21 nt, Artificial Sequence
  Synthetic
uauauauauauuuuuuucauu

SEQ ID NO: 149762 - RNA, 22 nt, Artificial Sequence
  Synthetic
auauauauauauuuuuuucauu

SEQ ID NO: 149763 - RNA, 23 nt, Artificial Sequence
  Synthetic
aauauauauauauuuuuuucauu

SEQ ID NO: 149764 - RNA, 24 nt, Artificial Sequence
  Synthetic
aaauauauauauauuuuuuucauu

SEQ ID NO: 149765 - RNA, 21 nt, Artificial Sequence
  Synthetic
uccuuacucaguuguaagauu

SEQ ID NO: 149766 - RNA, 22 nt, Artificial Sequence
  Synthetic
uuccuuacucaguuguaagauu

SEQ ID NO: 149767 - RNA, 23 nt, Artificial Sequence
  Synthetic
cuuccuuacucaguuguaagauu

SEQ ID NO: 149768 - RNA, 24 nt, Artificial Sequence
  Synthetic
ccuuccuuacucaguuguaagauu

SEQ ID NO: 149769 - RNA, 18 nt, Artificial Sequence
  Synthetic
aaaauucauuuucagauu

SEQ ID NO: 149770 - RNA, 19 nt, Artificial Sequence
  Synthetic
caaaauucauuuucagauu

SEQ ID NO: 149771 - RNA, 20 nt, Artificial Sequence
  Synthetic
ucaaaauucauuuucagauu

SEQ ID NO: 149772 - RNA, 18 nt, Artificial Sequence
  Synthetic
auuuuggauuuucagauu

SEQ ID NO: 149773 - RNA, 21 nt, Artificial Sequence
  Synthetic
uggauuuuggauuuucagauu

SEQ ID NO: 149774 - RNA, 22 nt, Artificial Sequence
  Synthetic
uuggauuuuggauuuucagauu

SEQ ID NO: 149775 - RNA, 23 nt, Artificial Sequence
  Synthetic
uuuggauuuuggauuuucagauu

SEQ ID NO: 149776 - RNA, 24 nt, Artificial Sequence
  Synthetic
uuuuggauuuuggauuuucagauu

SEQ ID NO: 149777 - RNA, 18 nt, Artificial Sequence
  Synthetic
uucagauuuuuucagauu

SEQ ID NO: 149778 - RNA, 19 nt, Artificial Sequence
  Synthetic
uuucagauuuuuucagauu

SEQ ID NO: 149779 - RNA, 20 nt, Artificial Sequence
  Synthetic
auuucagauuuuuucagauu

SEQ ID NO: 149780 - RNA, 23 nt, Artificial Sequence
  Synthetic
uggauuucagauuuuuucagauu

SEQ ID NO: 149781 - RNA, 24 nt, Artificial Sequence
  Synthetic
uuggauuucagauuuuuucagauu

SEQ ID NO: 149782 - RNA, 18 nt, Artificial Sequence
  Synthetic
uuguuugaugcugagauu

SEQ ID NO: 149783 - RNA, 19 nt, Artificial Sequence
  Synthetic
auuguuugaugcugagauu

SEQ ID NO: 149784 - RNA, 20 nt, Artificial Sequence
  Synthetic
uauuguuugaugcugagauu

SEQ ID NO: 149785 - RNA, 21 nt, Artificial Sequence
  Synthetic
auauuguuugaugcugagauu

SEQ ID NO: 149786 - RNA, 22 nt, Artificial Sequence
  Synthetic
uauauuguuugaugcugagauu

SEQ ID NO: 149787 - RNA, 23 nt, Artificial Sequence
  Synthetic
auauauuguuugaugcugagauu

SEQ ID NO: 149788 - RNA, 18 nt, Artificial Sequence
  Synthetic
uuaaguucccuauagauu

SEQ ID NO: 149789 - RNA, 19 nt, Artificial Sequence
  Synthetic
uuuaaguucccuauagauu

SEQ ID NO: 149790 - RNA, 21 nt, Artificial Sequence
  Synthetic
uguuuaaguucccuauagauu

SEQ ID NO: 149791 - RNA, 22 nt, Artificial Sequence
  Synthetic
uuguuuaaguucccuauagauu

SEQ ID NO: 149792 - RNA, 23 nt, Artificial Sequence
  Synthetic
auuguuuaaguucccuauagauu

SEQ ID NO: 149793 - RNA, 24 nt, Artificial Sequence
  Synthetic
aauuguuuaaguucccuauagauu

SEQ ID NO: 149794 - RNA, 18 nt, Artificial Sequence
  Synthetic
uugaguucauuguagauu

SEQ ID NO: 149795 - RNA, 19 nt, Artificial Sequence
  Synthetic
uuugaguucauuguagauu

SEQ ID NO: 149796 - RNA, 18 nt, Artificial Sequence
  Synthetic
uugaguucuuuguagauu

SEQ ID NO: 149797 - RNA, 19 nt, Artificial Sequence
  Synthetic
uuugaguucuuuguagauu

SEQ ID NO: 149798 - RNA, 21 nt, Artificial Sequence
  Synthetic
uguuugaguucuuuguagauu

SEQ ID NO: 149799 - RNA, 22 nt, Artificial Sequence
  Synthetic
uuguuugaguucuuuguagauu

SEQ ID NO: 149800 - RNA, 23 nt, Artificial Sequence
  Synthetic
uuuguuugaguucuuuguagauu

SEQ ID NO: 149801 - RNA, 18 nt, Artificial Sequence
  Synthetic
aaaugacaacaaaggauu

SEQ ID NO: 149802 - RNA, 20 nt, Artificial Sequence
  Synthetic
ugaaaugacaacaaaggauu

SEQ ID NO: 149803 - RNA, 21 nt, Artificial Sequence
  Synthetic
uugaaaugacaacaaaggauu

SEQ ID NO: 149804 - RNA, 23 nt, Artificial Sequence
  Synthetic
uguugaaaugacaacaaaggauu

SEQ ID NO: 149805 - RNA, 24 nt, Artificial Sequence
  Synthetic
uuguugaaaugacaacaaaggauu

SEQ ID NO: 149806 - RNA, 21 nt, Artificial Sequence
  Synthetic
aauuguaccaggaaguggauu

SEQ ID NO: 149807 - RNA, 22 nt, Artificial Sequence
  Synthetic
aaauuguaccaggaaguggauu

SEQ ID NO: 149808 - RNA, 24 nt, Artificial Sequence
  Synthetic
agaaauuguaccaggaaguggauu

SEQ ID NO: 149809 - RNA, 18 nt, Artificial Sequence
  Synthetic
uuuagaguuuuuuggauu

SEQ ID NO: 149810 - RNA, 19 nt, Artificial Sequence
  Synthetic
uuuuagaguuuuuuggauu

SEQ ID NO: 149811 - RNA, 20 nt, Artificial Sequence
  Synthetic
cuuuuagaguuuuuuggauu

SEQ ID NO: 149812 - RNA, 22 nt, Artificial Sequence
  Synthetic
agcuuuuagaguuuuuuggauu

SEQ ID NO: 149813 - RNA, 23 nt, Artificial Sequence
  Synthetic
cagcuuuuagaguuuuuuggauu

SEQ ID NO: 149814 - RNA, 24 nt, Artificial Sequence
  Synthetic
ucagcuuuuagaguuuuuuggauu

SEQ ID NO: 149815 - RNA, 18 nt, Artificial Sequence
  Synthetic
uauuuaggugcucugauu

SEQ ID NO: 149816 - RNA, 19 nt, Artificial Sequence
  Synthetic
auauuuaggugcucugauu

SEQ ID NO: 149817 - RNA, 20 nt, Artificial Sequence
  Synthetic
uauauuuaggugcucugauu

SEQ ID NO: 149818 - RNA, 21 nt, Artificial Sequence
  Synthetic
auauauuuaggugcucugauu

SEQ ID NO: 149819 - RNA, 22 nt, Artificial Sequence
  Synthetic
uauauauuuaggugcucugauu

SEQ ID NO: 149820 - RNA, 23 nt, Artificial Sequence
  Synthetic
uuauauauuuaggugcucugauu

SEQ ID NO: 149821 - RNA, 24 nt, Artificial Sequence
  Synthetic
uuuauauauuuaggugcucugauu

SEQ ID NO: 149822 - RNA, 18 nt, Artificial Sequence
  Synthetic
uuucuuagcugugugauu

SEQ ID NO: 149823 - RNA, 19 nt, Artificial Sequence
  Synthetic
auuucuuagcugugugauu

SEQ ID NO: 149824 - RNA, 20 nt, Artificial Sequence
  Synthetic
cauuucuuagcugugugauu

SEQ ID NO: 149825 - RNA, 21 nt, Artificial Sequence
  Synthetic
ucauuucuuagcugugugauu

SEQ ID NO: 149826 - RNA, 23 nt, Artificial Sequence
  Synthetic
cgucauuucuuagcugugugauu

SEQ ID NO: 149827 - RNA, 24 nt, Artificial Sequence
  Synthetic
ccgucauuucuuagcugugugauu

SEQ ID NO: 149828 - RNA, 20 nt, Artificial Sequence
  Synthetic
aaauguauauucuguugauu

SEQ ID NO: 149829 - RNA, 21 nt, Artificial Sequence
  Synthetic
aaaauguauauucuguugauu

SEQ ID NO: 149830 - RNA, 22 nt, Artificial Sequence
  Synthetic
aaaaauguauauucuguugauu

SEQ ID NO: 149831 - RNA, 23 nt, Artificial Sequence
  Synthetic
aaaaaauguauauucuguugauu

SEQ ID NO: 149832 - RNA, 24 nt, Artificial Sequence
  Synthetic
aaaaaaauguauauucuguugauu

SEQ ID NO: 149833 - RNA, 18 nt, Artificial Sequence
  Synthetic
uuuuguuuugauuugauu

SEQ ID NO: 149834 - RNA, 18 nt, Artificial Sequence
  Synthetic
agaggggaguguuugauu

SEQ ID NO: 149835 - RNA, 19 nt, Artificial Sequence
  Synthetic
aagaggggaguguuugauu

SEQ ID NO: 149836 - RNA, 20 nt, Artificial Sequence
  Synthetic
aaagaggggaguguuugauu

SEQ ID NO: 149837 - RNA, 18 nt, Artificial Sequence
  Synthetic
uuuucuaccagaaauauu

SEQ ID NO: 149838 - RNA, 19 nt, Artificial Sequence
  Synthetic
uuuuucuaccagaaauauu

SEQ ID NO: 149839 - RNA, 20 nt, Artificial Sequence
  Synthetic
uuuuuucuaccagaaauauu

SEQ ID NO: 149840 - RNA, 18 nt, Artificial Sequence
  Synthetic
auugggugcauaaauauu

SEQ ID NO: 149841 - RNA, 19 nt, Artificial Sequence
  Synthetic
uauugggugcauaaauauu

SEQ ID NO: 149842 - RNA, 21 nt, Artificial Sequence
  Synthetic
uguauugggugcauaaauauu

SEQ ID NO: 149843 - RNA, 22 nt, Artificial Sequence
  Synthetic
cuguauugggugcauaaauauu

SEQ ID NO: 149844 - RNA, 23 nt, Artificial Sequence
  Synthetic
ccuguauugggugcauaaauauu

SEQ ID NO: 149845 - RNA, 24 nt, Artificial Sequence
  Synthetic
uccuguauugggugcauaaauauu

SEQ ID NO: 149846 - RNA, 18 nt, Artificial Sequence
  Synthetic
agccagauaguaaauauu

SEQ ID NO: 149847 - RNA, 19 nt, Artificial Sequence
  Synthetic
aagccagauaguaaauauu

SEQ ID NO: 149848 - RNA, 20 nt, Artificial Sequence
  Synthetic
aaagccagauaguaaauauu

SEQ ID NO: 149849 - RNA, 21 nt, Artificial Sequence
  Synthetic
aaaagccagauaguaaauauu

SEQ ID NO: 149850 - RNA, 22 nt, Artificial Sequence
  Synthetic
aaaaagccagauaguaaauauu

SEQ ID NO: 149851 - RNA, 23 nt, Artificial Sequence
  Synthetic
uaaaaagccagauaguaaauauu

SEQ ID NO: 149852 - RNA, 18 nt, Artificial Sequence
  Synthetic
agccccaccuccaauauu

SEQ ID NO: 149853 - RNA, 19 nt, Artificial Sequence
  Synthetic
aagccccaccuccaauauu

SEQ ID NO: 149854 - RNA, 20 nt, Artificial Sequence
  Synthetic
uaagccccaccuccaauauu

SEQ ID NO: 149855 - RNA, 21 nt, Artificial Sequence
  Synthetic
uuaagccccaccuccaauauu

SEQ ID NO: 149856 - RNA, 23 nt, Artificial Sequence
  Synthetic
cguuaagccccaccuccaauauu

SEQ ID NO: 149857 - RNA, 24 nt, Artificial Sequence
  Synthetic
ccguuaagccccaccuccaauauu

SEQ ID NO: 149858 - RNA, 18 nt, Artificial Sequence
  Synthetic
aagaaaauucagaauauu

SEQ ID NO: 149859 - RNA, 19 nt, Artificial Sequence
  Synthetic
aaagaaaauucagaauauu

SEQ ID NO: 149860 - RNA, 20 nt, Artificial Sequence
  Synthetic
aaaagaaaauucagaauauu

SEQ ID NO: 149861 - RNA, 18 nt, Artificial Sequence
  Synthetic
auuuuacaaacacauauu

SEQ ID NO: 149862 - RNA, 19 nt, Artificial Sequence
  Synthetic
uauuuuacaaacacauauu

SEQ ID NO: 149863 - RNA, 20 nt, Artificial Sequence
  Synthetic
uuauuuuacaaacacauauu

SEQ ID NO: 149864 - RNA, 21 nt, Artificial Sequence
  Synthetic
uuuauuuuacaaacacauauu

SEQ ID NO: 149865 - RNA, 22 nt, Artificial Sequence
  Synthetic
auuuauuuuacaaacacauauu

SEQ ID NO: 149866 - RNA, 23 nt, Artificial Sequence
  Synthetic
aauuuauuuuacaaacacauauu

SEQ ID NO: 149867 - RNA, 24 nt, Artificial Sequence
  Synthetic
aaauuuauuuuacaaacacauauu

SEQ ID NO: 149868 - RNA, 18 nt, Artificial Sequence
  Synthetic
auaccaagcugccauauu

SEQ ID NO: 149869 - RNA, 19 nt, Artificial Sequence
  Synthetic
aauaccaagcugccauauu

SEQ ID NO: 149870 - RNA, 20 nt, Artificial Sequence
  Synthetic
aaauaccaagcugccauauu

SEQ ID NO: 149871 - RNA, 21 nt, Artificial Sequence
  Synthetic
caaauaccaagcugccauauu

SEQ ID NO: 149872 - RNA, 22 nt, Artificial Sequence
  Synthetic
ucaaauaccaagcugccauauu

SEQ ID NO: 149873 - RNA, 23 nt, Artificial Sequence
  Synthetic
cucaaauaccaagcugccauauu

SEQ ID NO: 149874 - RNA, 24 nt, Artificial Sequence
  Synthetic
ucucaaauaccaagcugccauauu

SEQ ID NO: 149875 - RNA, 18 nt, Artificial Sequence
  Synthetic
aauaaacaccuauauauu

SEQ ID NO: 149876 - RNA, 19 nt, Artificial Sequence
  Synthetic
aaauaaacaccuauauauu

SEQ ID NO: 149877 - RNA, 20 nt, Artificial Sequence
  Synthetic
aaaauaaacaccuauauauu

SEQ ID NO: 149878 - RNA, 18 nt, Artificial Sequence
  Synthetic
uugaguuccuuguauauu

SEQ ID NO: 149879 - RNA, 19 nt, Artificial Sequence
  Synthetic
cuugaguuccuuguauauu

SEQ ID NO: 149880 - RNA, 21 nt, Artificial Sequence
  Synthetic
agcuugaguuccuuguauauu

SEQ ID NO: 149881 - RNA, 22 nt, Artificial Sequence
  Synthetic
uagcuugaguuccuuguauauu

SEQ ID NO: 149882 - RNA, 24 nt, Artificial Sequence
  Synthetic
aguagcuugaguuccuuguauauu

SEQ ID NO: 149883 - RNA, 18 nt, Artificial Sequence
  Synthetic
aaaaacaaaaauuauauu

SEQ ID NO: 149884 - RNA, 19 nt, Artificial Sequence
  Synthetic
caaaaacaaaaauuauauu

SEQ ID NO: 149885 - RNA, 20 nt, Artificial Sequence
  Synthetic
ucaaaaacaaaaauuauauu

SEQ ID NO: 149886 - RNA, 18 nt, Artificial Sequence
  Synthetic
cauauaguaauuuauauu

SEQ ID NO: 149887 - RNA, 19 nt, Artificial Sequence
  Synthetic
acauauaguaauuuauauu

SEQ ID NO: 149888 - RNA, 20 nt, Artificial Sequence
  Synthetic
uacauauaguaauuuauauu

SEQ ID NO: 149889 - RNA, 18 nt, Artificial Sequence
  Synthetic
accuauuaucuuuauauu

SEQ ID NO: 149890 - RNA, 19 nt, Artificial Sequence
  Synthetic
uaccuauuaucuuuauauu

SEQ ID NO: 149891 - RNA, 20 nt, Artificial Sequence
  Synthetic
auaccuauuaucuuuauauu

SEQ ID NO: 149892 - RNA, 20 nt, Artificial Sequence
  Synthetic
aggucaucaguuuuuauauu

SEQ ID NO: 149893 - RNA, 18 nt, Artificial Sequence
  Synthetic
uaaagaaaacuuccuauu

SEQ ID NO: 149894 - RNA, 19 nt, Artificial Sequence
  Synthetic
auaaagaaaacuuccuauu

SEQ ID NO: 149895 - RNA, 20 nt, Artificial Sequence
  Synthetic
aauaaagaaaacuuccuauu

SEQ ID NO: 149896 - RNA, 21 nt, Artificial Sequence
  Synthetic
aaauaaagaaaacuuccuauu

SEQ ID NO: 149897 - RNA, 22 nt, Artificial Sequence
  Synthetic
aaaauaaagaaaacuuccuauu

SEQ ID NO: 149898 - RNA, 23 nt, Artificial Sequence
  Synthetic
aaaaauaaagaaaacuuccuauu

SEQ ID NO: 149899 - RNA, 24 nt, Artificial Sequence
  Synthetic
uaaaaauaaagaaaacuuccuauu

SEQ ID NO: 149900 - RNA, 18 nt, Artificial Sequence
  Synthetic
uucugcaucuuagcuauu

SEQ ID NO: 149901 - RNA, 19 nt, Artificial Sequence
  Synthetic
uuucugcaucuuagcuauu

SEQ ID NO: 149902 - RNA, 21 nt, Artificial Sequence
  Synthetic
uguuucugcaucuuagcuauu

SEQ ID NO: 149903 - RNA, 22 nt, Artificial Sequence
  Synthetic
uuguuucugcaucuuagcuauu

SEQ ID NO: 149904 - RNA, 18 nt, Artificial Sequence
  Synthetic
aucuguacuuuagcuauu

SEQ ID NO: 149905 - RNA, 20 nt, Artificial Sequence
  Synthetic
agaucuguacuuuagcuauu

SEQ ID NO: 149906 - RNA, 18 nt, Artificial Sequence
  Synthetic
uuccaaaccuuggcuauu

SEQ ID NO: 149907 - RNA, 19 nt, Artificial Sequence
  Synthetic
uuuccaaaccuuggcuauu

SEQ ID NO: 149908 - RNA, 20 nt, Artificial Sequence
  Synthetic
uuuuccaaaccuuggcuauu

SEQ ID NO: 149909 - RNA, 21 nt, Artificial Sequence
  Synthetic
uuuuuccaaaccuuggcuauu

SEQ ID NO: 149910 - RNA, 22 nt, Artificial Sequence
  Synthetic
uuuuuuccaaaccuuggcuauu

SEQ ID NO: 149911 - RNA, 23 nt, Artificial Sequence
  Synthetic
auuuuuuccaaaccuuggcuauu

SEQ ID NO: 149912 - RNA, 24 nt, Artificial Sequence
  Synthetic
aauuuuuuccaaaccuuggcuauu

SEQ ID NO: 149913 - RNA, 18 nt, Artificial Sequence
  Synthetic
uucuauaucuuggcuauu

SEQ ID NO: 149914 - RNA, 19 nt, Artificial Sequence
  Synthetic
auucuauaucuuggcuauu

SEQ ID NO: 149915 - RNA, 21 nt, Artificial Sequence
  Synthetic
ugauucuauaucuuggcuauu

SEQ ID NO: 149916 - RNA, 22 nt, Artificial Sequence
  Synthetic
uugauucuauaucuuggcuauu

SEQ ID NO: 149917 - RNA, 24 nt, Artificial Sequence
  Synthetic
aguugauucuauaucuuggcuauu

SEQ ID NO: 149918 - RNA, 18 nt, Artificial Sequence
  Synthetic
aagacuguuuuggcuauu

SEQ ID NO: 149919 - RNA, 19 nt, Artificial Sequence
  Synthetic
caagacuguuuuggcuauu

SEQ ID NO: 149920 - RNA, 20 nt, Artificial Sequence
  Synthetic
ucaagacuguuuuggcuauu

SEQ ID NO: 149921 - RNA, 21 nt, Artificial Sequence
  Synthetic
cucaagacuguuuuggcuauu

SEQ ID NO: 149922 - RNA, 22 nt, Artificial Sequence
  Synthetic
ccucaagacuguuuuggcuauu

SEQ ID NO: 149923 - RNA, 23 nt, Artificial Sequence
  Synthetic
uccucaagacuguuuuggcuauu

SEQ ID NO: 149924 - RNA, 24 nt, Artificial Sequence
  Synthetic
uuccucaagacuguuuuggcuauu

SEQ ID NO: 149925 - RNA, 18 nt, Artificial Sequence
  Synthetic
cuucaauuuuuggcuauu

SEQ ID NO: 149926 - RNA, 19 nt, Artificial Sequence
  Synthetic
acuucaauuuuuggcuauu

SEQ ID NO: 149927 - RNA, 20 nt, Artificial Sequence
  Synthetic
uacuucaauuuuuggcuauu

SEQ ID NO: 149928 - RNA, 18 nt, Artificial Sequence
  Synthetic
cuucauaccuuugcuauu

SEQ ID NO: 149929 - RNA, 19 nt, Artificial Sequence
  Synthetic
acuucauaccuuugcuauu

SEQ ID NO: 149930 - RNA, 21 nt, Artificial Sequence
  Synthetic
ugacuucauaccuuugcuauu

SEQ ID NO: 149931 - RNA, 22 nt, Artificial Sequence
  Synthetic
cugacuucauaccuuugcuauu

SEQ ID NO: 149932 - RNA, 18 nt, Artificial Sequence
  Synthetic
uuccacgccuuugcuauu

SEQ ID NO: 149933 - RNA, 21 nt, Artificial Sequence
  Synthetic
ugguuccacgccuuugcuauu

SEQ ID NO: 149934 - RNA, 22 nt, Artificial Sequence
  Synthetic
uugguuccacgccuuugcuauu

SEQ ID NO: 149935 - RNA, 18 nt, Artificial Sequence
  Synthetic
uuccaagucuuugcuauu

SEQ ID NO: 149936 - RNA, 18 nt, Artificial Sequence
  Synthetic
uuccaggucuuugcuauu

SEQ ID NO: 149937 - RNA, 21 nt, Artificial Sequence
  Synthetic
ugguuccaggucuuugcuauu

SEQ ID NO: 149938 - RNA, 22 nt, Artificial Sequence
  Synthetic
uugguuccaggucuuugcuauu

SEQ ID NO: 149939 - RNA, 23 nt, Artificial Sequence
  Synthetic
auugguuccaggucuuugcuauu

SEQ ID NO: 149940 - RNA, 18 nt, Artificial Sequence
  Synthetic
uuccaugucuuugcuauu

SEQ ID NO: 149941 - RNA, 19 nt, Artificial Sequence
  Synthetic
auuccaugucuuugcuauu

SEQ ID NO: 149942 - RNA, 22 nt, Artificial Sequence
  Synthetic
uggauuccaugucuuugcuauu

SEQ ID NO: 149943 - RNA, 23 nt, Artificial Sequence
  Synthetic
auggauuccaugucuuugcuauu

SEQ ID NO: 149944 - RNA, 21 nt, Artificial Sequence
  Synthetic
ugauuccaugucuuugcuauu

SEQ ID NO: 149945 - RNA, 22 nt, Artificial Sequence
  Synthetic
uugauuccaugucuuugcuauu

SEQ ID NO: 149946 - RNA, 18 nt, Artificial Sequence
  Synthetic
uuaucaucugugucuauu

SEQ ID NO: 149947 - RNA, 19 nt, Artificial Sequence
  Synthetic
uuuaucaucugugucuauu

SEQ ID NO: 149948 - RNA, 20 nt, Artificial Sequence
  Synthetic
uuuuaucaucugugucuauu

SEQ ID NO: 149949 - RNA, 21 nt, Artificial Sequence
  Synthetic
auuuuaucaucugugucuauu

SEQ ID NO: 149950 - RNA, 22 nt, Artificial Sequence
  Synthetic
aauuuuaucaucugugucuauu

SEQ ID NO: 149951 - RNA, 23 nt, Artificial Sequence
  Synthetic
uaauuuuaucaucugugucuauu

SEQ ID NO: 149952 - RNA, 24 nt, Artificial Sequence
  Synthetic
cuaauuuuaucaucugugucuauu

SEQ ID NO: 149953 - RNA, 18 nt, Artificial Sequence
  Synthetic
ugucauaaaagcaguauu

SEQ ID NO: 149954 - RNA, 19 nt, Artificial Sequence
  Synthetic
augucauaaaagcaguauu

SEQ ID NO: 149955 - RNA, 18 nt, Artificial Sequence
  Synthetic
uuccaugucuuugguauu

SEQ ID NO: 149956 - RNA, 19 nt, Artificial Sequence
  Synthetic
auuccaugucuuugguauu

SEQ ID NO: 149957 - RNA, 21 nt, Artificial Sequence
  Synthetic
ugauuccaugucuuugguauu

SEQ ID NO: 149958 - RNA, 22 nt, Artificial Sequence
  Synthetic
uugauuccaugucuuugguauu

SEQ ID NO: 149959 - RNA, 18 nt, Artificial Sequence
  Synthetic
cuaaaccaguacuguauu

SEQ ID NO: 149960 - RNA, 19 nt, Artificial Sequence
  Synthetic
ucuaaaccaguacuguauu

SEQ ID NO: 149961 - RNA, 20 nt, Artificial Sequence
  Synthetic
uucuaaaccaguacuguauu

SEQ ID NO: 149962 - RNA, 18 nt, Artificial Sequence
  Synthetic
aggaguuccuuguguauu

SEQ ID NO: 149963 - RNA, 19 nt, Artificial Sequence
  Synthetic
uaggaguuccuuguguauu

SEQ ID NO: 149964 - RNA, 21 nt, Artificial Sequence
  Synthetic
uguaggaguuccuuguguauu

SEQ ID NO: 149965 - RNA, 22 nt, Artificial Sequence
  Synthetic
uuguaggaguuccuuguguauu

SEQ ID NO: 149966 - RNA, 24 nt, Artificial Sequence
  Synthetic
aguuguaggaguuccuuguguauu

SEQ ID NO: 149967 - RNA, 18 nt, Artificial Sequence
  Synthetic
auuagggucucuuguauu

SEQ ID NO: 149968 - RNA, 19 nt, Artificial Sequence
  Synthetic
uauuagggucucuuguauu

SEQ ID NO: 149969 - RNA, 20 nt, Artificial Sequence
  Synthetic
cuauuagggucucuuguauu

SEQ ID NO: 149970 - RNA, 21 nt, Artificial Sequence
  Synthetic
acuauuagggucucuuguauu

SEQ ID NO: 149971 - RNA, 22 nt, Artificial Sequence
  Synthetic
aacuauuagggucucuuguauu

SEQ ID NO: 149972 - RNA, 23 nt, Artificial Sequence
  Synthetic
uaacuauuagggucucuuguauu

SEQ ID NO: 149973 - RNA, 24 nt, Artificial Sequence
  Synthetic
cuaacuauuagggucucuuguauu

SEQ ID NO: 149974 - RNA, 18 nt, Artificial Sequence
  Synthetic
ccauauacauguuguauu

SEQ ID NO: 149975 - RNA, 19 nt, Artificial Sequence
  Synthetic
uccauauacauguuguauu

SEQ ID NO: 149976 - RNA, 20 nt, Artificial Sequence
  Synthetic
uuccauauacauguuguauu

SEQ ID NO: 149977 - RNA, 18 nt, Artificial Sequence
  Synthetic
auuuggucaaacauuauu

SEQ ID NO: 149978 - RNA, 19 nt, Artificial Sequence
  Synthetic
cauuuggucaaacauuauu

SEQ ID NO: 149979 - RNA, 20 nt, Artificial Sequence
  Synthetic
acauuuggucaaacauuauu

SEQ ID NO: 149980 - RNA, 22 nt, Artificial Sequence
  Synthetic
agacauuuggucaaacauuauu

SEQ ID NO: 149981 - RNA, 24 nt, Artificial Sequence
  Synthetic
cgagacauuuggucaaacauuauu

SEQ ID NO: 149982 - RNA, 19 nt, Artificial Sequence
  Synthetic
uauuuggucaaacauuauu

SEQ ID NO: 149983 - RNA, 20 nt, Artificial Sequence
  Synthetic
auauuuggucaaacauuauu

SEQ ID NO: 149984 - RNA, 22 nt, Artificial Sequence
  Synthetic
agauauuuggucaaacauuauu

SEQ ID NO: 149985 - RNA, 23 nt, Artificial Sequence
  Synthetic
cagauauuuggucaaacauuauu

SEQ ID NO: 149986 - RNA, 24 nt, Artificial Sequence
  Synthetic
ccagauauuuggucaaacauuauu

SEQ ID NO: 149987 - RNA, 18 nt, Artificial Sequence
  Synthetic
agccuccagcauauuauu

SEQ ID NO: 149988 - RNA, 19 nt, Artificial Sequence
  Synthetic
uagccuccagcauauuauu

SEQ ID NO: 149989 - RNA, 18 nt, Artificial Sequence
  Synthetic
uuuauucaauauauuauu

SEQ ID NO: 149990 - RNA, 19 nt, Artificial Sequence
  Synthetic
auuuauucaauauauuauu

SEQ ID NO: 149991 - RNA, 20 nt, Artificial Sequence
  Synthetic
uauuuauucaauauauuauu

SEQ ID NO: 149992 - RNA, 18 nt, Artificial Sequence
  Synthetic
ugucuccaaaaauuuauu

SEQ ID NO: 149993 - RNA, 19 nt, Artificial Sequence
  Synthetic
cugucuccaaaaauuuauu

SEQ ID NO: 149994 - RNA, 20 nt, Artificial Sequence
  Synthetic
ucugucuccaaaaauuuauu

SEQ ID NO: 149995 - RNA, 19 nt, Artificial Sequence
  Synthetic
aguuuuuagcaaauuuauu

SEQ ID NO: 149996 - RNA, 20 nt, Artificial Sequence
  Synthetic
uaguuuuuagcaaauuuauu

SEQ ID NO: 149997 - RNA, 18 nt, Artificial Sequence
  Synthetic
aucaauaccuaauuuauu

SEQ ID NO: 149998 - RNA, 19 nt, Artificial Sequence
  Synthetic
caucaauaccuaauuuauu

SEQ ID NO: 149999 - RNA, 20 nt, Artificial Sequence
  Synthetic
ccaucaauaccuaauuuauu

SEQ ID NO: 150000 - RNA, 24 nt, Artificial Sequence
  Synthetic
cgucccaucaauaccuaauuuauu

SEQ ID NO: 150001 - RNA, 18 nt, Artificial Sequence
  Synthetic
uauuuuuauauauuuauu

SEQ ID NO: 150002 - RNA, 19 nt, Artificial Sequence
  Synthetic
uuauuuuuauauauuuauu

SEQ ID NO: 150003 - RNA, 20 nt, Artificial Sequence
  Synthetic
uuuauuuuuauauauuuauu

SEQ ID NO: 150004 - RNA, 21 nt, Artificial Sequence
  Synthetic
auuuauuuuuauauauuuauu

SEQ ID NO: 150005 - RNA, 22 nt, Artificial Sequence
  Synthetic
aauuuauuuuuauauauuuauu

SEQ ID NO: 150006 - RNA, 19 nt, Artificial Sequence
  Synthetic
aguuuuaaaaguauuuauu

SEQ ID NO: 150007 - RNA, 20 nt, Artificial Sequence
  Synthetic
uaguuuuaaaaguauuuauu

SEQ ID NO: 150008 - RNA, 19 nt, Artificial Sequence
  Synthetic
ugguaaggaagacuuuauu

SEQ ID NO: 150009 - RNA, 21 nt, Artificial Sequence
  Synthetic
ugugguaaggaagacuuuauu

SEQ ID NO: 150010 - RNA, 23 nt, Artificial Sequence
  Synthetic
agugugguaaggaagacuuuauu

SEQ ID NO: 150011 - RNA, 24 nt, Artificial Sequence
  Synthetic
aagugugguaaggaagacuuuauu

SEQ ID NO: 150012 - RNA, 18 nt, Artificial Sequence
  Synthetic
uuaucuuugcuguuuauu

SEQ ID NO: 150013 - RNA, 19 nt, Artificial Sequence
  Synthetic
uuuaucuuugcuguuuauu

SEQ ID NO: 150014 - RNA, 20 nt, Artificial Sequence
  Synthetic
auuuaucuuugcuguuuauu

SEQ ID NO: 150015 - RNA, 20 nt, Artificial Sequence
  Synthetic
cgguuugccaguauuuuauu

SEQ ID NO: 150016 - RNA, 20 nt, Artificial Sequence
  Synthetic
ugguuugccaguauuuuauu

SEQ ID NO: 150017 - RNA, 21 nt, Artificial Sequence
  Synthetic
uugguuugccaguauuuuauu

SEQ ID NO: 150018 - RNA, 22 nt, Artificial Sequence
  Synthetic
uuugguuugccaguauuuuauu

SEQ ID NO: 150019 - RNA, 23 nt, Artificial Sequence
  Synthetic
auuugguuugccaguauuuuauu

SEQ ID NO: 150020 - RNA, 18 nt, Artificial Sequence
  Synthetic
auaaauucaaguuuuauu

SEQ ID NO: 150021 - RNA, 19 nt, Artificial Sequence
  Synthetic
aauaaauucaaguuuuauu

SEQ ID NO: 150022 - RNA, 20 nt, Artificial Sequence
  Synthetic
aaauaaauucaaguuuuauu

SEQ ID NO: 150023 - RNA, 18 nt, Artificial Sequence
  Synthetic
aaaaaauguuaaaaacuu

SEQ ID NO: 150024 - RNA, 19 nt, Artificial Sequence
  Synthetic
caaaaaauguuaaaaacuu

SEQ ID NO: 150025 - RNA, 20 nt, Artificial Sequence
  Synthetic
ucaaaaaauguuaaaaacuu

SEQ ID NO: 150026 - RNA, 18 nt, Artificial Sequence
  Synthetic
auuauucuuugaaaacuu

SEQ ID NO: 150027 - RNA, 19 nt, Artificial Sequence
  Synthetic
aauuauucuuugaaaacuu

SEQ ID NO: 150028 - RNA, 20 nt, Artificial Sequence
  Synthetic
aaauuauucuuugaaaacuu

SEQ ID NO: 150029 - RNA, 18 nt, Artificial Sequence
  Synthetic
aaauaugccuuaaaacuu

SEQ ID NO: 150030 - RNA, 19 nt, Artificial Sequence
  Synthetic
caaauaugccuuaaaacuu

SEQ ID NO: 150031 - RNA, 20 nt, Artificial Sequence
  Synthetic
ucaaauaugccuuaaaacuu

SEQ ID NO: 150032 - RNA, 21 nt, Artificial Sequence
  Synthetic
auuguuucuuaaaugaaacuu

SEQ ID NO: 150033 - RNA, 22 nt, Artificial Sequence
  Synthetic
aauuguuucuuaaaugaaacuu

SEQ ID NO: 150034 - RNA, 23 nt, Artificial Sequence
  Synthetic
aaauuguuucuuaaaugaaacuu

SEQ ID NO: 150035 - RNA, 24 nt, Artificial Sequence
  Synthetic
uaaauuguuucuuaaaugaaacuu

SEQ ID NO: 150036 - RNA, 19 nt, Artificial Sequence
  Synthetic
ugaaaaauauuucacacuu

SEQ ID NO: 150037 - RNA, 20 nt, Artificial Sequence
  Synthetic
augaaaaauauuucacacuu

SEQ ID NO: 150038 - RNA, 21 nt, Artificial Sequence
  Synthetic
aaugaaaaauauuucacacuu

SEQ ID NO: 150039 - RNA, 22 nt, Artificial Sequence
  Synthetic
aaaugaaaaauauuucacacuu

SEQ ID NO: 150040 - RNA, 23 nt, Artificial Sequence
  Synthetic
aaaaugaaaaauauuucacacuu

SEQ ID NO: 150041 - RNA, 24 nt, Artificial Sequence
  Synthetic
uaaaaugaaaaauauuucacacuu

SEQ ID NO: 150042 - RNA, 20 nt, Artificial Sequence
  Synthetic
aggauccagcaaucccacuu

SEQ ID NO: 150043 - RNA, 21 nt, Artificial Sequence
  Synthetic
uaggauccagcaaucccacuu

SEQ ID NO: 150044 - RNA, 22 nt, Artificial Sequence
  Synthetic
auaggauccagcaaucccacuu

SEQ ID NO: 150045 - RNA, 23 nt, Artificial Sequence
  Synthetic
cauaggauccagcaaucccacuu

SEQ ID NO: 150046 - RNA, 24 nt, Artificial Sequence
  Synthetic
ccauaggauccagcaaucccacuu

SEQ ID NO: 150047 - RNA, 18 nt, Artificial Sequence
  Synthetic
aucguucaacucccacuu

SEQ ID NO: 150048 - RNA, 19 nt, Artificial Sequence
  Synthetic
caucguucaacucccacuu

SEQ ID NO: 150049 - RNA, 20 nt, Artificial Sequence
  Synthetic
ucaucguucaacucccacuu

SEQ ID NO: 150050 - RNA, 21 nt, Artificial Sequence
  Synthetic
cucaucguucaacucccacuu

SEQ ID NO: 150051 - RNA, 22 nt, Artificial Sequence
  Synthetic
ucucaucguucaacucccacuu

SEQ ID NO: 150052 - RNA, 23 nt, Artificial Sequence
  Synthetic
uucucaucguucaacucccacuu

SEQ ID NO: 150053 - RNA, 18 nt, Artificial Sequence
  Synthetic
acuguuccacucccacuu

SEQ ID NO: 150054 - RNA, 19 nt, Artificial Sequence
  Synthetic
cacuguuccacucccacuu

SEQ ID NO: 150055 - RNA, 20 nt, Artificial Sequence
  Synthetic
ucacuguuccacucccacuu

SEQ ID NO: 150056 - RNA, 21 nt, Artificial Sequence
  Synthetic
cucacuguuccacucccacuu

SEQ ID NO: 150057 - RNA, 22 nt, Artificial Sequence
  Synthetic
ucucacuguuccacucccacuu

SEQ ID NO: 150058 - RNA, 23 nt, Artificial Sequence
  Synthetic
uucucacuguuccacucccacuu

SEQ ID NO: 150059 - RNA, 18 nt, Artificial Sequence
  Synthetic
auagcuuagcucccacuu

SEQ ID NO: 150060 - RNA, 19 nt, Artificial Sequence
  Synthetic
cauagcuuagcucccacuu

SEQ ID NO: 150061 - RNA, 20 nt, Artificial Sequence
  Synthetic
ucauagcuuagcucccacuu

SEQ ID NO: 150062 - RNA, 21 nt, Artificial Sequence
  Synthetic
cucauagcuuagcucccacuu

SEQ ID NO: 150063 - RNA, 22 nt, Artificial Sequence
  Synthetic
ccucauagcuuagcucccacuu

SEQ ID NO: 150064 - RNA, 23 nt, Artificial Sequence
  Synthetic
uccucauagcuuagcucccacuu

SEQ ID NO: 150065 - RNA, 24 nt, Artificial Sequence
  Synthetic
auccucauagcuuagcucccacuu

SEQ ID NO: 150066 - RNA, 18 nt, Artificial Sequence
  Synthetic
auuguuuaucucccacuu

SEQ ID NO: 150067 - RNA, 19 nt, Artificial Sequence
  Synthetic
cauuguuuaucucccacuu

SEQ ID NO: 150068 - RNA, 20 nt, Artificial Sequence
  Synthetic
ucauuguuuaucucccacuu

SEQ ID NO: 150069 - RNA, 21 nt, Artificial Sequence
  Synthetic
uucauuguuuaucucccacuu

SEQ ID NO: 150070 - RNA, 22 nt, Artificial Sequence
  Synthetic
uuucauuguuuaucucccacuu

SEQ ID NO: 150071 - RNA, 23 nt, Artificial Sequence
  Synthetic
uuuucauuguuuaucucccacuu

SEQ ID NO: 150072 - RNA, 18 nt, Artificial Sequence
  Synthetic
auuguucaauucccacuu

SEQ ID NO: 150073 - RNA, 19 nt, Artificial Sequence
  Synthetic
cauuguucaauucccacuu

SEQ ID NO: 150074 - RNA, 20 nt, Artificial Sequence
  Synthetic
ucauuguucaauucccacuu

SEQ ID NO: 150075 - RNA, 21 nt, Artificial Sequence
  Synthetic
cucauuguucaauucccacuu

SEQ ID NO: 150076 - RNA, 22 nt, Artificial Sequence
  Synthetic
ucucauuguucaauucccacuu

SEQ ID NO: 150077 - RNA, 23 nt, Artificial Sequence
  Synthetic
uucucauuguucaauucccacuu

SEQ ID NO: 150078 - RNA, 19 nt, Artificial Sequence
  Synthetic
ugauccaauaauuccacuu

SEQ ID NO: 150079 - RNA, 20 nt, Artificial Sequence
  Synthetic
augauccaauaauuccacuu

SEQ ID NO: 150080 - RNA, 21 nt, Artificial Sequence
  Synthetic
uaugauccaauaauuccacuu

SEQ ID NO: 150081 - RNA, 22 nt, Artificial Sequence
  Synthetic
auaugauccaauaauuccacuu

SEQ ID NO: 150082 - RNA, 23 nt, Artificial Sequence
  Synthetic
uauaugauccaauaauuccacuu

SEQ ID NO: 150083 - RNA, 24 nt, Artificial Sequence
  Synthetic
uuauaugauccaauaauuccacuu

SEQ ID NO: 150084 - RNA, 20 nt, Artificial Sequence
  Synthetic
agguauuauuaauuccacuu

SEQ ID NO: 150085 - RNA, 18 nt, Artificial Sequence
  Synthetic
ccuguaaucucagcacuu

SEQ ID NO: 150086 - RNA, 20 nt, Artificial Sequence
  Synthetic
ugccuguaaucucagcacuu

SEQ ID NO: 150087 - RNA, 21 nt, Artificial Sequence
  Synthetic
augccuguaaucucagcacuu

SEQ ID NO: 150088 - RNA, 22 nt, Artificial Sequence
  Synthetic
caugccuguaaucucagcacuu

SEQ ID NO: 150089 - RNA, 23 nt, Artificial Sequence
  Synthetic
ucaugccuguaaucucagcacuu

SEQ ID NO: 150090 - RNA, 24 nt, Artificial Sequence
  Synthetic
uucaugccuguaaucucagcacuu

SEQ ID NO: 150091 - RNA, 21 nt, Artificial Sequence
  Synthetic
aaaaaaauggucuugagacuu

SEQ ID NO: 150092 - RNA, 22 nt, Artificial Sequence
  Synthetic
aaaaaaaauggucuugagacuu

SEQ ID NO: 150093 - RNA, 23 nt, Artificial Sequence
  Synthetic
aaaaaaaaauggucuugagacuu

SEQ ID NO: 150094 - RNA, 24 nt, Artificial Sequence
  Synthetic
aaaaaaaaaauggucuugagacuu

SEQ ID NO: 150095 - RNA, 18 nt, Artificial Sequence
  Synthetic
aacuuuggacuuggacuu

SEQ ID NO: 150096 - RNA, 19 nt, Artificial Sequence
  Synthetic
aaacuuuggacuuggacuu

SEQ ID NO: 150097 - RNA, 21 nt, Artificial Sequence
  Synthetic
ugaaacuuuggacuuggacuu

SEQ ID NO: 150098 - RNA, 22 nt, Artificial Sequence
  Synthetic
augaaacuuuggacuuggacuu

SEQ ID NO: 150099 - RNA, 24 nt, Artificial Sequence
  Synthetic
agaugaaacuuuggacuuggacuu

SEQ ID NO: 150100 - RNA, 18 nt, Artificial Sequence
  Synthetic
ucuguuguugccugacuu

SEQ ID NO: 150101 - RNA, 19 nt, Artificial Sequence
  Synthetic
aucuguuguugccugacuu

SEQ ID NO: 150102 - RNA, 20 nt, Artificial Sequence
  Synthetic
caucuguuguugccugacuu

SEQ ID NO: 150103 - RNA, 22 nt, Artificial Sequence
  Synthetic
agcaucuguuguugccugacuu

SEQ ID NO: 150104 - RNA, 23 nt, Artificial Sequence
  Synthetic
cagcaucuguuguugccugacuu

SEQ ID NO: 150105 - RNA, 24 nt, Artificial Sequence
  Synthetic
ccagcaucuguuguugccugacuu

SEQ ID NO: 150106 - RNA, 18 nt, Artificial Sequence
  Synthetic
aaucagggagucugacuu

SEQ ID NO: 150107 - RNA, 19 nt, Artificial Sequence
  Synthetic
aaaucagggagucugacuu

SEQ ID NO: 150108 - RNA, 18 nt, Artificial Sequence
  Synthetic
cauaaaauauauugacuu

SEQ ID NO: 150109 - RNA, 19 nt, Artificial Sequence
  Synthetic
acauaaaauauauugacuu

SEQ ID NO: 150110 - RNA, 20 nt, Artificial Sequence
  Synthetic
cacauaaaauauauugacuu

SEQ ID NO: 150111 - RNA, 18 nt, Artificial Sequence
  Synthetic
uauguagagaaaauacuu

SEQ ID NO: 150112 - RNA, 20 nt, Artificial Sequence
  Synthetic
uguauguagagaaaauacuu

SEQ ID NO: 150113 - RNA, 21 nt, Artificial Sequence
  Synthetic
auguauguagagaaaauacuu

SEQ ID NO: 150114 - RNA, 22 nt, Artificial Sequence
  Synthetic
aauguauguagagaaaauacuu

SEQ ID NO: 150115 - RNA, 23 nt, Artificial Sequence
  Synthetic
caauguauguagagaaaauacuu

SEQ ID NO: 150116 - RNA, 24 nt, Artificial Sequence
  Synthetic
ucaauguauguagagaaaauacuu

SEQ ID NO: 150117 - RNA, 18 nt, Artificial Sequence
  Synthetic
cgcuuuccagauauacuu

SEQ ID NO: 150118 - RNA, 19 nt, Artificial Sequence
  Synthetic
ucgcuuuccagauauacuu

SEQ ID NO: 150119 - RNA, 20 nt, Artificial Sequence
  Synthetic
aucgcuuuccagauauacuu

SEQ ID NO: 150120 - RNA, 22 nt, Artificial Sequence
  Synthetic
agaucgcuuuccagauauacuu

SEQ ID NO: 150121 - RNA, 23 nt, Artificial Sequence
  Synthetic
cagaucgcuuuccagauauacuu

SEQ ID NO: 150122 - RNA, 18 nt, Artificial Sequence
  Synthetic
uuauuucauuuuauacuu

SEQ ID NO: 150123 - RNA, 19 nt, Artificial Sequence
  Synthetic
uuuauuucauuuuauacuu

SEQ ID NO: 150124 - RNA, 21 nt, Artificial Sequence
  Synthetic
uucuaucuuuaaaauguacuu

SEQ ID NO: 150125 - RNA, 22 nt, Artificial Sequence
  Synthetic
uuucuaucuuuaaaauguacuu

SEQ ID NO: 150126 - RNA, 23 nt, Artificial Sequence
  Synthetic
auuucuaucuuuaaaauguacuu

SEQ ID NO: 150127 - RNA, 24 nt, Artificial Sequence
  Synthetic
cauuucuaucuuuaaaauguacuu

SEQ ID NO: 150128 - RNA, 18 nt, Artificial Sequence
  Synthetic
uuuguauuaaaauuacuu

SEQ ID NO: 150129 - RNA, 19 nt, Artificial Sequence
  Synthetic
auuuguauuaaaauuacuu

SEQ ID NO: 150130 - RNA, 20 nt, Artificial Sequence
  Synthetic
uauuuguauuaaaauuacuu

SEQ ID NO: 150131 - RNA, 21 nt, Artificial Sequence
  Synthetic
uuauuuguauuaaaauuacuu

SEQ ID NO: 150132 - RNA, 22 nt, Artificial Sequence
  Synthetic
auuauuuguauuaaaauuacuu

SEQ ID NO: 150133 - RNA, 23 nt, Artificial Sequence
  Synthetic
aauuauuuguauuaaaauuacuu

SEQ ID NO: 150134 - RNA, 24 nt, Artificial Sequence
  Synthetic
caauuauuuguauuaaaauuacuu

SEQ ID NO: 150135 - RNA, 18 nt, Artificial Sequence
  Synthetic
uccuaaugucaucaccuu

SEQ ID NO: 150136 - RNA, 19 nt, Artificial Sequence
  Synthetic
uuccuaaugucaucaccuu

SEQ ID NO: 150137 - RNA, 20 nt, Artificial Sequence
  Synthetic
cuuccuaaugucaucaccuu

SEQ ID NO: 150138 - RNA, 21 nt, Artificial Sequence
  Synthetic
acuuccuaaugucaucaccuu

SEQ ID NO: 150139 - RNA, 22 nt, Artificial Sequence
  Synthetic
cacuuccuaaugucaucaccuu

SEQ ID NO: 150140 - RNA, 23 nt, Artificial Sequence
  Synthetic
ccacuuccuaaugucaucaccuu

SEQ ID NO: 150141 - RNA, 24 nt, Artificial Sequence
  Synthetic
cccacuuccuaaugucaucaccuu

SEQ ID NO: 150142 - RNA, 19 nt, Artificial Sequence
  Synthetic
uguacuuccuuaugaccuu

SEQ ID NO: 150143 - RNA, 20 nt, Artificial Sequence
  Synthetic
uuguacuuccuuaugaccuu

SEQ ID NO: 150144 - RNA, 18 nt, Artificial Sequence
  Synthetic
caauugaauaaauaccuu

SEQ ID NO: 150145 - RNA, 19 nt, Artificial Sequence
  Synthetic
agggauaaaaaauuaccuu

SEQ ID NO: 150146 - RNA, 21 nt, Artificial Sequence
  Synthetic
ugagggauaaaaaauuaccuu

SEQ ID NO: 150147 - RNA, 23 nt, Artificial Sequence
  Synthetic
agugagggauaaaaaauuaccuu

SEQ ID NO: 150148 - RNA, 24 nt, Artificial Sequence
  Synthetic
uagugagggauaaaaaauuaccuu

SEQ ID NO: 150149 - RNA, 18 nt, Artificial Sequence
  Synthetic
uacugaggcaaaacccuu

SEQ ID NO: 150150 - RNA, 19 nt, Artificial Sequence
  Synthetic
cuacugaggcaaaacccuu

SEQ ID NO: 150151 - RNA, 20 nt, Artificial Sequence
  Synthetic
acuacugaggcaaaacccuu

SEQ ID NO: 150152 - RNA, 21 nt, Artificial Sequence
  Synthetic
cacuacugaggcaaaacccuu

SEQ ID NO: 150153 - RNA, 22 nt, Artificial Sequence
  Synthetic
ccacuacugaggcaaaacccuu

SEQ ID NO: 150154 - RNA, 23 nt, Artificial Sequence
  Synthetic
cccacuacugaggcaaaacccuu

SEQ ID NO: 150155 - RNA, 24 nt, Artificial Sequence
  Synthetic
ccccacuacugaggcaaaacccuu

SEQ ID NO: 150156 - RNA, 18 nt, Artificial Sequence
  Synthetic
ucccacccucucgcccuu

SEQ ID NO: 150157 - RNA, 19 nt, Artificial Sequence
  Synthetic
aucccacccucucgcccuu

SEQ ID NO: 150158 - RNA, 20 nt, Artificial Sequence
  Synthetic
caucccacccucucgcccuu

SEQ ID NO: 150159 - RNA, 21 nt, Artificial Sequence
  Synthetic
ccaucccacccucucgcccuu

SEQ ID NO: 150160 - RNA, 22 nt, Artificial Sequence
  Synthetic
cccaucccacccucucgcccuu

SEQ ID NO: 150161 - RNA, 23 nt, Artificial Sequence
  Synthetic
ccccaucccacccucucgcccuu

SEQ ID NO: 150162 - RNA, 24 nt, Artificial Sequence
  Synthetic
cccccaucccacccucucgcccuu

SEQ ID NO: 150163 - RNA, 18 nt, Artificial Sequence
  Synthetic
augcuuucauucucccuu

SEQ ID NO: 150164 - RNA, 19 nt, Artificial Sequence
  Synthetic
aaugcuuucauucucccuu

SEQ ID NO: 150165 - RNA, 20 nt, Artificial Sequence
  Synthetic
aaaugcuuucauucucccuu

SEQ ID NO: 150166 - RNA, 18 nt, Artificial Sequence
  Synthetic
uuaucuaaaauuucccuu

SEQ ID NO: 150167 - RNA, 19 nt, Artificial Sequence
  Synthetic
auuaucuaaaauuucccuu

SEQ ID NO: 150168 - RNA, 20 nt, Artificial Sequence
  Synthetic
uauuaucuaaaauuucccuu

SEQ ID NO: 150169 - RNA, 21 nt, Artificial Sequence
  Synthetic
auauuaucuaaaauuucccuu

SEQ ID NO: 150170 - RNA, 22 nt, Artificial Sequence
  Synthetic
uauauuaucuaaaauuucccuu

SEQ ID NO: 150171 - RNA, 23 nt, Artificial Sequence
  Synthetic
auauauuaucuaaaauuucccuu

SEQ ID NO: 150172 - RNA, 24 nt, Artificial Sequence
  Synthetic
uauauauuaucuaaaauuucccuu

SEQ ID NO: 150173 - RNA, 18 nt, Artificial Sequence
  Synthetic
cacuguaauuuccgccuu

SEQ ID NO: 150174 - RNA, 19 nt, Artificial Sequence
  Synthetic
ucacuguaauuuccgccuu

SEQ ID NO: 150175 - RNA, 20 nt, Artificial Sequence
  Synthetic
cucacuguaauuuccgccuu

SEQ ID NO: 150176 - RNA, 21 nt, Artificial Sequence
  Synthetic
ucucacuguaauuuccgccuu

SEQ ID NO: 150177 - RNA, 23 nt, Artificial Sequence
  Synthetic
cgucucacuguaauuuccgccuu

SEQ ID NO: 150178 - RNA, 24 nt, Artificial Sequence
  Synthetic
ucgucucacuguaauuuccgccuu

SEQ ID NO: 150179 - RNA, 18 nt, Artificial Sequence
  Synthetic
uacagagcaauaugccuu

SEQ ID NO: 150180 - RNA, 19 nt, Artificial Sequence
  Synthetic
cuacagagcaauaugccuu

SEQ ID NO: 150181 - RNA, 18 nt, Artificial Sequence
  Synthetic
uuuucaguacuaugccuu

SEQ ID NO: 150182 - RNA, 19 nt, Artificial Sequence
  Synthetic
uuuuucaguacuaugccuu

SEQ ID NO: 150183 - RNA, 20 nt, Artificial Sequence
  Synthetic
uuuuuucaguacuaugccuu

SEQ ID NO: 150184 - RNA, 18 nt, Artificial Sequence
  Synthetic
uagaaaaagagagagcuu

SEQ ID NO: 150185 - RNA, 19 nt, Artificial Sequence
  Synthetic
agguggauugccugagcuu

SEQ ID NO: 150186 - RNA, 20 nt, Artificial Sequence
  Synthetic
cagguggauugccugagcuu

SEQ ID NO: 150187 - RNA, 22 nt, Artificial Sequence
  Synthetic
agcagguggauugccugagcuu

SEQ ID NO: 150188 - RNA, 23 nt, Artificial Sequence
  Synthetic
aagcagguggauugccugagcuu

SEQ ID NO: 150189 - RNA, 24 nt, Artificial Sequence
  Synthetic
aaagcagguggauugccugagcuu

SEQ ID NO: 150190 - RNA, 18 nt, Artificial Sequence
  Synthetic
cuugccuucugcuagcuu

SEQ ID NO: 150191 - RNA, 19 nt, Artificial Sequence
  Synthetic
ucuugccuucugcuagcuu

SEQ ID NO: 150192 - RNA, 20 nt, Artificial Sequence
  Synthetic
uucuugccuucugcuagcuu

SEQ ID NO: 150193 - RNA, 21 nt, Artificial Sequence
  Synthetic
uuucuugccuucugcuagcuu

SEQ ID NO: 150194 - RNA, 22 nt, Artificial Sequence
  Synthetic
auuucuugccuucugcuagcuu

SEQ ID NO: 150195 - RNA, 23 nt, Artificial Sequence
  Synthetic
uauuucuugccuucugcuagcuu

SEQ ID NO: 150196 - RNA, 24 nt, Artificial Sequence
  Synthetic
uuauuucuugccuucugcuagcuu

SEQ ID NO: 150197 - RNA, 18 nt, Artificial Sequence
  Synthetic
uccauguccucuuagcuu

SEQ ID NO: 150198 - RNA, 19 nt, Artificial Sequence
  Synthetic
uuccauguccucuuagcuu

SEQ ID NO: 150199 - RNA, 20 nt, Artificial Sequence
  Synthetic
uuuccauguccucuuagcuu

SEQ ID NO: 150200 - RNA, 18 nt, Artificial Sequence
  Synthetic
uaaaaaaaaaaaacgcuu

SEQ ID NO: 150201 - RNA, 19 nt, Artificial Sequence
  Synthetic
uuaaaaaaaaaaaacgcuu

SEQ ID NO: 150202 - RNA, 20 nt, Artificial Sequence
  Synthetic
auuaaaaaaaaaaaacgcuu

SEQ ID NO: 150203 - RNA, 21 nt, Artificial Sequence
  Synthetic
aauuaaaaaaaaaaaacgcuu

SEQ ID NO: 150204 - RNA, 22 nt, Artificial Sequence
  Synthetic
aaauuaaaaaaaaaaaacgcuu

SEQ ID NO: 150205 - RNA, 24 nt, Artificial Sequence
  Synthetic
ugaaauuaaaaaaaaaaaacgcuu

SEQ ID NO: 150206 - RNA, 18 nt, Artificial Sequence
  Synthetic
agugucuuugccuggcuu

SEQ ID NO: 150207 - RNA, 19 nt, Artificial Sequence
  Synthetic
uagugucuuugccuggcuu

SEQ ID NO: 150208 - RNA, 19 nt, Artificial Sequence
  Synthetic
agcauaaaaauucaugcuu

SEQ ID NO: 150209 - RNA, 20 nt, Artificial Sequence
  Synthetic
uagcauaaaaauucaugcuu

SEQ ID NO: 150210 - RNA, 22 nt, Artificial Sequence
  Synthetic
uguagcauaaaaauucaugcuu

SEQ ID NO: 150211 - RNA, 23 nt, Artificial Sequence
  Synthetic
cuguagcauaaaaauucaugcuu

SEQ ID NO: 150212 - RNA, 24 nt, Artificial Sequence
  Synthetic
ccuguagcauaaaaauucaugcuu

SEQ ID NO: 150213 - RNA, 19 nt, Artificial Sequence
  Synthetic
uguauguaugaaucugcuu

SEQ ID NO: 150214 - RNA, 20 nt, Artificial Sequence
  Synthetic
uuguauguaugaaucugcuu

SEQ ID NO: 150215 - RNA, 18 nt, Artificial Sequence
  Synthetic
uggauuguuguauugcuu

SEQ ID NO: 150216 - RNA, 19 nt, Artificial Sequence
  Synthetic
uuggauuguuguauugcuu

SEQ ID NO: 150217 - RNA, 20 nt, Artificial Sequence
  Synthetic
cuuggauuguuguauugcuu

SEQ ID NO: 150218 - RNA, 18 nt, Artificial Sequence
  Synthetic
auuauuuuuuguuugcuu

SEQ ID NO: 150219 - RNA, 19 nt, Artificial Sequence
  Synthetic
cauuauuuuuuguuugcuu

SEQ ID NO: 150220 - RNA, 18 nt, Artificial Sequence
  Synthetic
uuuuucucuuuuuugcuu

SEQ ID NO: 150221 - RNA, 19 nt, Artificial Sequence
  Synthetic
uuuuuucucuuuuuugcuu

SEQ ID NO: 150222 - RNA, 20 nt, Artificial Sequence
  Synthetic
uuuuuuucucuuuuuugcuu

SEQ ID NO: 150223 - RNA, 19 nt, Artificial Sequence
  Synthetic
aguuuuaaaagguaaucuu

SEQ ID NO: 150224 - RNA, 20 nt, Artificial Sequence
  Synthetic
caguuuuaaaagguaaucuu

SEQ ID NO: 150225 - RNA, 18 nt, Artificial Sequence
  Synthetic
uggaggcaauuggaucuu

SEQ ID NO: 150226 - RNA, 21 nt, Artificial Sequence
  Synthetic
agguggaggcaauuggaucuu

SEQ ID NO: 150227 - RNA, 22 nt, Artificial Sequence
  Synthetic
cagguggaggcaauuggaucuu

SEQ ID NO: 150228 - RNA, 23 nt, Artificial Sequence
  Synthetic
ccagguggaggcaauuggaucuu

SEQ ID NO: 150229 - RNA, 24 nt, Artificial Sequence
  Synthetic
accagguggaggcaauuggaucuu

SEQ ID NO: 150230 - RNA, 18 nt, Artificial Sequence
  Synthetic
agauauuagcuugaucuu

SEQ ID NO: 150231 - RNA, 19 nt, Artificial Sequence
  Synthetic
uagauauuagcuugaucuu

SEQ ID NO: 150232 - RNA, 20 nt, Artificial Sequence
  Synthetic
uuagauauuagcuugaucuu

SEQ ID NO: 150233 - RNA, 21 nt, Artificial Sequence
  Synthetic
cuuagauauuagcuugaucuu

SEQ ID NO: 150234 - RNA, 22 nt, Artificial Sequence
  Synthetic
ucuuagauauuagcuugaucuu

SEQ ID NO: 150235 - RNA, 23 nt, Artificial Sequence
  Synthetic
aucuuagauauuagcuugaucuu

SEQ ID NO: 150236 - RNA, 24 nt, Artificial Sequence
  Synthetic
caucuuagauauuagcuugaucuu

SEQ ID NO: 150237 - RNA, 18 nt, Artificial Sequence
  Synthetic
uuuuaaauuaauuaucuu

SEQ ID NO: 150238 - RNA, 19 nt, Artificial Sequence
  Synthetic
uuuuuaaauuaauuaucuu

SEQ ID NO: 150239 - RNA, 18 nt, Artificial Sequence
  Synthetic
uuuauauuugcuuaucuu

SEQ ID NO: 150240 - RNA, 19 nt, Artificial Sequence
  Synthetic
uuuuauauuugcuuaucuu

SEQ ID NO: 150241 - RNA, 20 nt, Artificial Sequence
  Synthetic
auuuuauauuugcuuaucuu

SEQ ID NO: 150242 - RNA, 18 nt, Artificial Sequence
  Synthetic
uauauuuuauuuacucuu

SEQ ID NO: 150243 - RNA, 19 nt, Artificial Sequence
  Synthetic
auauauuuuauuuacucuu

SEQ ID NO: 150244 - RNA, 20 nt, Artificial Sequence
  Synthetic
cauauauuuuauuuacucuu

SEQ ID NO: 150245 - RNA, 18 nt, Artificial Sequence
  Synthetic
uuuguaauugccugucuu

SEQ ID NO: 150246 - RNA, 19 nt, Artificial Sequence
  Synthetic
auuuguaauugccugucuu

SEQ ID NO: 150247 - RNA, 20 nt, Artificial Sequence
  Synthetic
cauuuguaauugccugucuu

SEQ ID NO: 150248 - RNA, 22 nt, Artificial Sequence
  Synthetic
agcauuuguaauugccugucuu

SEQ ID NO: 150249 - RNA, 23 nt, Artificial Sequence
  Synthetic
cagcauuuguaauugccugucuu

SEQ ID NO: 150250 - RNA, 24 nt, Artificial Sequence
  Synthetic
ccagcauuuguaauugccugucuu

SEQ ID NO: 150251 - RNA, 18 nt, Artificial Sequence
  Synthetic
uugguuauugccugucuu

SEQ ID NO: 150252 - RNA, 19 nt, Artificial Sequence
  Synthetic
auugguuauugccugucuu

SEQ ID NO: 150253 - RNA, 20 nt, Artificial Sequence
  Synthetic
cauugguuauugccugucuu

SEQ ID NO: 150254 - RNA, 21 nt, Artificial Sequence
  Synthetic
acauugguuauugccugucuu

SEQ ID NO: 150255 - RNA, 22 nt, Artificial Sequence
  Synthetic
aacauugguuauugccugucuu

SEQ ID NO: 150256 - RNA, 23 nt, Artificial Sequence
  Synthetic
caacauugguuauugccugucuu

SEQ ID NO: 150257 - RNA, 24 nt, Artificial Sequence
  Synthetic
ucaacauugguuauugccugucuu

SEQ ID NO: 150258 - RNA, 18 nt, Artificial Sequence
  Synthetic
ugccugcuuugcugucuu

SEQ ID NO: 150259 - RNA, 19 nt, Artificial Sequence
  Synthetic
cugccugcuuugcugucuu

SEQ ID NO: 150260 - RNA, 20 nt, Artificial Sequence
  Synthetic
ccugccugcuuugcugucuu

SEQ ID NO: 150261 - RNA, 19 nt, Artificial Sequence
  Synthetic
agguagauuauucugucuu

SEQ ID NO: 150262 - RNA, 20 nt, Artificial Sequence
  Synthetic
uagguagauuauucugucuu

SEQ ID NO: 150263 - RNA, 18 nt, Artificial Sequence
  Synthetic
auccuguuuuuaauucuu

SEQ ID NO: 150264 - RNA, 20 nt, Artificial Sequence
  Synthetic
agauccuguuuuuaauucuu

SEQ ID NO: 150265 - RNA, 21 nt, Artificial Sequence
  Synthetic
aagauccuguuuuuaauucuu

SEQ ID NO: 150266 - RNA, 22 nt, Artificial Sequence
  Synthetic
uaagauccuguuuuuaauucuu

SEQ ID NO: 150267 - RNA, 23 nt, Artificial Sequence
  Synthetic
uuaagauccuguuuuuaauucuu

SEQ ID NO: 150268 - RNA, 24 nt, Artificial Sequence
  Synthetic
uuuaagauccuguuuuuaauucuu

SEQ ID NO: 150269 - RNA, 18 nt, Artificial Sequence
  Synthetic
auucuuagugucauucuu

SEQ ID NO: 150270 - RNA, 19 nt, Artificial Sequence
  Synthetic
uauucuuagugucauucuu

SEQ ID NO: 150271 - RNA, 20 nt, Artificial Sequence
  Synthetic
uuauucuuagugucauucuu

SEQ ID NO: 150272 - RNA, 18 nt, Artificial Sequence
  Synthetic
ucuuguucucuacuucuu

SEQ ID NO: 150273 - RNA, 19 nt, Artificial Sequence
  Synthetic
uucuuguucucuacuucuu

SEQ ID NO: 150274 - RNA, 20 nt, Artificial Sequence
  Synthetic
uuucuuguucucuacuucuu

SEQ ID NO: 150275 - RNA, 18 nt, Artificial Sequence
  Synthetic
ccacuuguaugucuucuu

SEQ ID NO: 150276 - RNA, 21 nt, Artificial Sequence
  Synthetic
uggccacuuguaugucuucuu

SEQ ID NO: 150277 - RNA, 22 nt, Artificial Sequence
  Synthetic
uuggccacuuguaugucuucuu

SEQ ID NO: 150278 - RNA, 24 nt, Artificial Sequence
  Synthetic
uguuggccacuuguaugucuucuu

SEQ ID NO: 150279 - RNA, 18 nt, Artificial Sequence
  Synthetic
auacuuuccugucuucuu

SEQ ID NO: 150280 - RNA, 19 nt, Artificial Sequence
  Synthetic
cauacuuuccugucuucuu

SEQ ID NO: 150281 - RNA, 20 nt, Artificial Sequence
  Synthetic
ccauacuuuccugucuucuu

SEQ ID NO: 150282 - RNA, 21 nt, Artificial Sequence
  Synthetic
cccauacuuuccugucuucuu

SEQ ID NO: 150283 - RNA, 22 nt, Artificial Sequence
  Synthetic
ucccauacuuuccugucuucuu

SEQ ID NO: 150284 - RNA, 23 nt, Artificial Sequence
  Synthetic
uucccauacuuuccugucuucuu

SEQ ID NO: 150285 - RNA, 24 nt, Artificial Sequence
  Synthetic
uuucccauacuuuccugucuucuu

SEQ ID NO: 150286 - RNA, 18 nt, Artificial Sequence
  Synthetic
auacugauuucaguucuu

SEQ ID NO: 150287 - RNA, 19 nt, Artificial Sequence
  Synthetic
aauacugauuucaguucuu

SEQ ID NO: 150288 - RNA, 20 nt, Artificial Sequence
  Synthetic
aaauacugauuucaguucuu

SEQ ID NO: 150289 - RNA, 21 nt, Artificial Sequence
  Synthetic
aaaauacugauuucaguucuu

SEQ ID NO: 150290 - RNA, 22 nt, Artificial Sequence
  Synthetic
caaaauacugauuucaguucuu

SEQ ID NO: 150291 - RNA, 23 nt, Artificial Sequence
  Synthetic
ucaaaauacugauuucaguucuu

SEQ ID NO: 150292 - RNA, 24 nt, Artificial Sequence
  Synthetic
uucaaaauacugauuucaguucuu

SEQ ID NO: 150293 - RNA, 18 nt, Artificial Sequence
  Synthetic
uuuuaaauauaauuucuu

SEQ ID NO: 150294 - RNA, 20 nt, Artificial Sequence
  Synthetic
aguuuuaaauauaauuucuu

SEQ ID NO: 150295 - RNA, 21 nt, Artificial Sequence
  Synthetic
uaguuuuaaauauaauuucuu

SEQ ID NO: 150296 - RNA, 22 nt, Artificial Sequence
  Synthetic
uuaguuuuaaauauaauuucuu

SEQ ID NO: 150297 - RNA, 23 nt, Artificial Sequence
  Synthetic
uuuaguuuuaaauauaauuucuu

SEQ ID NO: 150298 - RNA, 18 nt, Artificial Sequence
  Synthetic
auacugauuugcuuucuu

SEQ ID NO: 150299 - RNA, 19 nt, Artificial Sequence
  Synthetic
uauacugauuugcuuucuu

SEQ ID NO: 150300 - RNA, 20 nt, Artificial Sequence
  Synthetic
auauacugauuugcuuucuu

SEQ ID NO: 150301 - RNA, 22 nt, Artificial Sequence
  Synthetic
ugauauacugauuugcuuucuu

SEQ ID NO: 150302 - RNA, 23 nt, Artificial Sequence
  Synthetic
uugauauacugauuugcuuucuu

SEQ ID NO: 150303 - RNA, 24 nt, Artificial Sequence
  Synthetic
uuugauauacugauuugcuuucuu

SEQ ID NO: 150304 - RNA, 18 nt, Artificial Sequence
  Synthetic
cuuuuguccaauuuucuu

SEQ ID NO: 150305 - RNA, 19 nt, Artificial Sequence
  Synthetic
ucuuuuguccaauuuucuu

SEQ ID NO: 150306 - RNA, 20 nt, Artificial Sequence
  Synthetic
aucuuuuguccaauuuucuu

SEQ ID NO: 150307 - RNA, 18 nt, Artificial Sequence
  Synthetic
aucagaugugauuuucuu

SEQ ID NO: 150308 - RNA, 19 nt, Artificial Sequence
  Synthetic
aaucagaugugauuuucuu

SEQ ID NO: 150309 - RNA, 20 nt, Artificial Sequence
  Synthetic
aaaucagaugugauuuucuu

SEQ ID NO: 150310 - RNA, 18 nt, Artificial Sequence
  Synthetic
auacugauuuauuuucuu

SEQ ID NO: 150311 - RNA, 19 nt, Artificial Sequence
  Synthetic
uauacugauuuauuuucuu

SEQ ID NO: 150312 - RNA, 20 nt, Artificial Sequence
  Synthetic
auauacugauuuauuuucuu

SEQ ID NO: 150313 - RNA, 21 nt, Artificial Sequence
  Synthetic
aauauacugauuuauuuucuu

SEQ ID NO: 150314 - RNA, 22 nt, Artificial Sequence
  Synthetic
caauauacugauuuauuuucuu

SEQ ID NO: 150315 - RNA, 23 nt, Artificial Sequence
  Synthetic
ucaauauacugauuuauuuucuu

SEQ ID NO: 150316 - RNA, 24 nt, Artificial Sequence
  Synthetic
uucaauauacugauuuauuuucuu

SEQ ID NO: 150317 - RNA, 18 nt, Artificial Sequence
  Synthetic
caaguccaauguuuucuu

SEQ ID NO: 150318 - RNA, 19 nt, Artificial Sequence
  Synthetic
ucaaguccaauguuuucuu

SEQ ID NO: 150319 - RNA, 20 nt, Artificial Sequence
  Synthetic
uucaaguccaauguuuucuu

SEQ ID NO: 150320 - RNA, 18 nt, Artificial Sequence
  Synthetic
acacucauuuuuuuucuu

SEQ ID NO: 150321 - RNA, 19 nt, Artificial Sequence
  Synthetic
uacacucauuuuuuuucuu

SEQ ID NO: 150322 - RNA, 20 nt, Artificial Sequence
  Synthetic
auacacucauuuuuuuucuu

SEQ ID NO: 150323 - RNA, 18 nt, Artificial Sequence
  Synthetic
uaaauauauuaccaaguu

SEQ ID NO: 150324 - RNA, 19 nt, Artificial Sequence
  Synthetic
auaaauauauuaccaaguu

SEQ ID NO: 150325 - RNA, 20 nt, Artificial Sequence
  Synthetic
aauaaauauauuaccaaguu

SEQ ID NO: 150326 - RNA, 21 nt, Artificial Sequence
  Synthetic
agccaggcauauggccaaguu

SEQ ID NO: 150327 - RNA, 22 nt, Artificial Sequence
  Synthetic
aagccaggcauauggccaaguu

SEQ ID NO: 150328 - RNA, 23 nt, Artificial Sequence
  Synthetic
aaagccaggcauauggccaaguu

SEQ ID NO: 150329 - RNA, 24 nt, Artificial Sequence
  Synthetic
caaagccaggcauauggccaaguu

SEQ ID NO: 150330 - RNA, 19 nt, Artificial Sequence
  Synthetic
ugugccaguuggccaaguu

SEQ ID NO: 150331 - RNA, 20 nt, Artificial Sequence
  Synthetic
uugugccaguuggccaaguu

SEQ ID NO: 150332 - RNA, 21 nt, Artificial Sequence
  Synthetic
cuugugccaguuggccaaguu

SEQ ID NO: 150333 - RNA, 22 nt, Artificial Sequence
  Synthetic
ucuugugccaguuggccaaguu

SEQ ID NO: 150334 - RNA, 23 nt, Artificial Sequence
  Synthetic
cucuugugccaguuggccaaguu

SEQ ID NO: 150335 - RNA, 24 nt, Artificial Sequence
  Synthetic
ccucuugugccaguuggccaaguu

SEQ ID NO: 150336 - RNA, 18 nt, Artificial Sequence
  Synthetic
cugaaggcuagagaaguu

SEQ ID NO: 150337 - RNA, 19 nt, Artificial Sequence
  Synthetic
acugaaggcuagagaaguu

SEQ ID NO: 150338 - RNA, 20 nt, Artificial Sequence
  Synthetic
aacugaaggcuagagaaguu

SEQ ID NO: 150339 - RNA, 21 nt, Artificial Sequence
  Synthetic
aaacugaaggcuagagaaguu

SEQ ID NO: 150340 - RNA, 22 nt, Artificial Sequence
  Synthetic
aaaacugaaggcuagagaaguu

SEQ ID NO: 150341 - RNA, 24 nt, Artificial Sequence
  Synthetic
agaaaacugaaggcuagagaaguu

SEQ ID NO: 150342 - RNA, 18 nt, Artificial Sequence
  Synthetic
uuguuuuacuucuaaguu

SEQ ID NO: 150343 - RNA, 19 nt, Artificial Sequence
  Synthetic
uuuguuuuacuucuaaguu

SEQ ID NO: 150344 - RNA, 20 nt, Artificial Sequence
  Synthetic
uuuuguuuuacuucuaaguu

SEQ ID NO: 150345 - RNA, 18 nt, Artificial Sequence
  Synthetic
acucugauucaguaaguu

SEQ ID NO: 150346 - RNA, 20 nt, Artificial Sequence
  Synthetic
agacucugauucaguaaguu

SEQ ID NO: 150347 - RNA, 18 nt, Artificial Sequence
  Synthetic
auaaacccauuguaaguu

SEQ ID NO: 150348 - RNA, 20 nt, Artificial Sequence
  Synthetic
agauaaacccauuguaaguu

SEQ ID NO: 150349 - RNA, 21 nt, Artificial Sequence
  Synthetic
cagauaaacccauuguaaguu

SEQ ID NO: 150350 - RNA, 22 nt, Artificial Sequence
  Synthetic
ccagauaaacccauuguaaguu

SEQ ID NO: 150351 - RNA, 23 nt, Artificial Sequence
  Synthetic
uccagauaaacccauuguaaguu

SEQ ID NO: 150352 - RNA, 24 nt, Artificial Sequence
  Synthetic
auccagauaaacccauuguaaguu

SEQ ID NO: 150353 - RNA, 18 nt, Artificial Sequence
  Synthetic
aaggguaauauuuaaguu

SEQ ID NO: 150354 - RNA, 19 nt, Artificial Sequence
  Synthetic
caaggguaauauuuaaguu

SEQ ID NO: 150355 - RNA, 20 nt, Artificial Sequence
  Synthetic
ucaaggguaauauuuaaguu

SEQ ID NO: 150356 - RNA, 18 nt, Artificial Sequence
  Synthetic
aggguuuauaguacaguu

SEQ ID NO: 150357 - RNA, 19 nt, Artificial Sequence
  Synthetic
aaggguuuauaguacaguu

SEQ ID NO: 150358 - RNA, 20 nt, Artificial Sequence
  Synthetic
aaaggguuuauaguacaguu

SEQ ID NO: 150359 - RNA, 19 nt, Artificial Sequence
  Synthetic
aguugaugaacaggcaguu

SEQ ID NO: 150360 - RNA, 20 nt, Artificial Sequence
  Synthetic
caguugaugaacaggcaguu

SEQ ID NO: 150361 - RNA, 21 nt, Artificial Sequence
  Synthetic
aaauacuauauguacucaguu

SEQ ID NO: 150362 - RNA, 22 nt, Artificial Sequence
  Synthetic
caaauacuauauguacucaguu

SEQ ID NO: 150363 - RNA, 23 nt, Artificial Sequence
  Synthetic
ccaaauacuauauguacucaguu

SEQ ID NO: 150364 - RNA, 24 nt, Artificial Sequence
  Synthetic
accaaauacuauauguacucaguu

SEQ ID NO: 150365 - RNA, 18 nt, Artificial Sequence
  Synthetic
uugaacgguaguucaguu

SEQ ID NO: 150366 - RNA, 22 nt, Artificial Sequence
  Synthetic
uggguugaacgguaguucaguu

SEQ ID NO: 150367 - RNA, 23 nt, Artificial Sequence
  Synthetic
cuggguugaacgguaguucaguu

SEQ ID NO: 150368 - RNA, 18 nt, Artificial Sequence
  Synthetic
aaaccauaucauagaguu

SEQ ID NO: 150369 - RNA, 19 nt, Artificial Sequence
  Synthetic
caaaccauaucauagaguu

SEQ ID NO: 150370 - RNA, 20 nt, Artificial Sequence
  Synthetic
ccaaaccauaucauagaguu

SEQ ID NO: 150371 - RNA, 22 nt, Artificial Sequence
  Synthetic
agccaaaccauaucauagaguu

SEQ ID NO: 150372 - RNA, 23 nt, Artificial Sequence
  Synthetic
cagccaaaccauaucauagaguu

SEQ ID NO: 150373 - RNA, 24 nt, Artificial Sequence
  Synthetic
acagccaaaccauaucauagaguu

SEQ ID NO: 150374 - RNA, 19 nt, Artificial Sequence
  Synthetic
agaugaggauaugggaguu

SEQ ID NO: 150375 - RNA, 19 nt, Artificial Sequence
  Synthetic
agucuuauuguggugaguu

SEQ ID NO: 150376 - RNA, 20 nt, Artificial Sequence
  Synthetic
aagucuuauuguggugaguu

SEQ ID NO: 150377 - RNA, 22 nt, Artificial Sequence
  Synthetic
agaagucuuauuguggugaguu

SEQ ID NO: 150378 - RNA, 23 nt, Artificial Sequence
  Synthetic
aagaagucuuauuguggugaguu

SEQ ID NO: 150379 - RNA, 24 nt, Artificial Sequence
  Synthetic
caagaagucuuauuguggugaguu

SEQ ID NO: 150380 - RNA, 18 nt, Artificial Sequence
  Synthetic
cacauucacaauauaguu

SEQ ID NO: 150381 - RNA, 19 nt, Artificial Sequence
  Synthetic
ucacauucacaauauaguu

SEQ ID NO: 150382 - RNA, 20 nt, Artificial Sequence
  Synthetic
uucacauucacaauauaguu

SEQ ID NO: 150383 - RNA, 18 nt, Artificial Sequence
  Synthetic
uagaugaagaagguaguu

SEQ ID NO: 150384 - RNA, 19 nt, Artificial Sequence
  Synthetic
uuagaugaagaagguaguu

SEQ ID NO: 150385 - RNA, 18 nt, Artificial Sequence
  Synthetic
ucuggugccgaaaagguu

SEQ ID NO: 150386 - RNA, 19 nt, Artificial Sequence
  Synthetic
cucuggugccgaaaagguu

SEQ ID NO: 150387 - RNA, 20 nt, Artificial Sequence
  Synthetic
ucucuggugccgaaaagguu

SEQ ID NO: 150388 - RNA, 22 nt, Artificial Sequence
  Synthetic
agucucuggugccgaaaagguu

SEQ ID NO: 150389 - RNA, 23 nt, Artificial Sequence
  Synthetic
cagucucuggugccgaaaagguu

SEQ ID NO: 150390 - RNA, 24 nt, Artificial Sequence
  Synthetic
ccagucucuggugccgaaaagguu

SEQ ID NO: 150391 - RNA, 19 nt, Artificial Sequence
  Synthetic
aggugggucacauaagguu

SEQ ID NO: 150392 - RNA, 20 nt, Artificial Sequence
  Synthetic
caggugggucacauaagguu

SEQ ID NO: 150393 - RNA, 23 nt, Artificial Sequence
  Synthetic
aggcaggugggucacauaagguu

SEQ ID NO: 150394 - RNA, 18 nt, Artificial Sequence
  Synthetic
uacugguccguucagguu

SEQ ID NO: 150395 - RNA, 19 nt, Artificial Sequence
  Synthetic
uuacugguccguucagguu

SEQ ID NO: 150396 - RNA, 21 nt, Artificial Sequence
  Synthetic
cguuacugguccguucagguu

SEQ ID NO: 150397 - RNA, 22 nt, Artificial Sequence
  Synthetic
ucguuacugguccguucagguu

SEQ ID NO: 150398 - RNA, 23 nt, Artificial Sequence
  Synthetic
cucguuacugguccguucagguu

SEQ ID NO: 150399 - RNA, 24 nt, Artificial Sequence
  Synthetic
acucguuacugguccguucagguu

SEQ ID NO: 150400 - RNA, 18 nt, Artificial Sequence
  Synthetic
ugcuguaucccagagguu

SEQ ID NO: 150401 - RNA, 19 nt, Artificial Sequence
  Synthetic
uugcuguaucccagagguu

SEQ ID NO: 150402 - RNA, 20 nt, Artificial Sequence
  Synthetic
uuugcuguaucccagagguu

SEQ ID NO: 150403 - RNA, 21 nt, Artificial Sequence
  Synthetic
uuuugcuguaucccagagguu

SEQ ID NO: 150404 - RNA, 22 nt, Artificial Sequence
  Synthetic
cuuuugcuguaucccagagguu

SEQ ID NO: 150405 - RNA, 24 nt, Artificial Sequence
  Synthetic
ugcuuuugcuguaucccagagguu

SEQ ID NO: 150406 - RNA, 18 nt, Artificial Sequence
  Synthetic
uuacaugaugccgagguu

SEQ ID NO: 150407 - RNA, 19 nt, Artificial Sequence
  Synthetic
auuacaugaugccgagguu

SEQ ID NO: 150408 - RNA, 20 nt, Artificial Sequence
  Synthetic
uauuacaugaugccgagguu

SEQ ID NO: 150409 - RNA, 21 nt, Artificial Sequence
  Synthetic
auauuacaugaugccgagguu

SEQ ID NO: 150410 - RNA, 22 nt, Artificial Sequence
  Synthetic
uauauuacaugaugccgagguu

SEQ ID NO: 150411 - RNA, 23 nt, Artificial Sequence
  Synthetic
auauauuacaugaugccgagguu

SEQ ID NO: 150412 - RNA, 19 nt, Artificial Sequence
  Synthetic
agcgcaugaugcugagguu

SEQ ID NO: 150413 - RNA, 20 nt, Artificial Sequence
  Synthetic
uagcgcaugaugcugagguu

SEQ ID NO: 150414 - RNA, 21 nt, Artificial Sequence
  Synthetic
auagcgcaugaugcugagguu

SEQ ID NO: 150415 - RNA, 22 nt, Artificial Sequence
  Synthetic
aauagcgcaugaugcugagguu

SEQ ID NO: 150416 - RNA, 18 nt, Artificial Sequence
  Synthetic
uugcaugaugcugagguu

SEQ ID NO: 150417 - RNA, 19 nt, Artificial Sequence
  Synthetic
auugcaugaugcugagguu

SEQ ID NO: 150418 - RNA, 20 nt, Artificial Sequence
  Synthetic
uauugcaugaugcugagguu

SEQ ID NO: 150419 - RNA, 22 nt, Artificial Sequence
  Synthetic
aguauugcaugaugcugagguu

SEQ ID NO: 150420 - RNA, 18 nt, Artificial Sequence
  Synthetic
aucuugguguugacgguu

SEQ ID NO: 150421 - RNA, 20 nt, Artificial Sequence
  Synthetic
ugaucuugguguugacgguu

SEQ ID NO: 150422 - RNA, 21 nt, Artificial Sequence
  Synthetic
uugaucuugguguugacgguu

SEQ ID NO: 150423 - RNA, 22 nt, Artificial Sequence
  Synthetic
uuugaucuugguguugacgguu

SEQ ID NO: 150424 - RNA, 23 nt, Artificial Sequence
  Synthetic
uuuugaucuugguguugacgguu

SEQ ID NO: 150425 - RNA, 24 nt, Artificial Sequence
  Synthetic
cuuuugaucuugguguugacgguu

SEQ ID NO: 150426 - RNA, 19 nt, Artificial Sequence
  Synthetic
ugggaguuauuggaggguu

SEQ ID NO: 150427 - RNA, 20 nt, Artificial Sequence
  Synthetic
augggaguuauuggaggguu

SEQ ID NO: 150428 - RNA, 22 nt, Artificial Sequence
  Synthetic
agaugggaguuauuggaggguu

SEQ ID NO: 150429 - RNA, 24 nt, Artificial Sequence
  Synthetic
ugagaugggaguuauuggaggguu

SEQ ID NO: 150430 - RNA, 18 nt, Artificial Sequence
  Synthetic
uuguuuguuugggggguu

SEQ ID NO: 150431 - RNA, 19 nt, Artificial Sequence
  Synthetic
uuuguuuguuugggggguu

SEQ ID NO: 150432 - RNA, 20 nt, Artificial Sequence
  Synthetic
uuuuguuuguuugggggguu

SEQ ID NO: 150433 - RNA, 18 nt, Artificial Sequence
  Synthetic
cacacuggcuucuggguu

SEQ ID NO: 150434 - RNA, 19 nt, Artificial Sequence
  Synthetic
ucacacuggcuucuggguu

SEQ ID NO: 150435 - RNA, 20 nt, Artificial Sequence
  Synthetic
aucacacuggcuucuggguu

SEQ ID NO: 150436 - RNA, 23 nt, Artificial Sequence
  Synthetic
aggaucacacuggcuucuggguu

SEQ ID NO: 150437 - RNA, 24 nt, Artificial Sequence
  Synthetic
aaggaucacacuggcuucuggguu

SEQ ID NO: 150438 - RNA, 18 nt, Artificial Sequence
  Synthetic
caaggguuugaaaugguu

SEQ ID NO: 150439 - RNA, 20 nt, Artificial Sequence
  Synthetic
ugcaaggguuugaaaugguu

SEQ ID NO: 150440 - RNA, 18 nt, Artificial Sequence
  Synthetic
aaaauauauuuguugguu

SEQ ID NO: 150441 - RNA, 19 nt, Artificial Sequence
  Synthetic
uaaaauauauuuguugguu

SEQ ID NO: 150442 - RNA, 20 nt, Artificial Sequence
  Synthetic
uuaaaauauauuuguugguu

SEQ ID NO: 150443 - RNA, 18 nt, Artificial Sequence
  Synthetic
ucauaaauugaaaauguu

SEQ ID NO: 150444 - RNA, 19 nt, Artificial Sequence
  Synthetic
aucauaaauugaaaauguu

SEQ ID NO: 150445 - RNA, 20 nt, Artificial Sequence
  Synthetic
caucauaaauugaaaauguu

SEQ ID NO: 150446 - RNA, 21 nt, Artificial Sequence
  Synthetic
ccaucauaaauugaaaauguu

SEQ ID NO: 150447 - RNA, 22 nt, Artificial Sequence
  Synthetic
cccaucauaaauugaaaauguu

SEQ ID NO: 150448 - RNA, 23 nt, Artificial Sequence
  Synthetic
acccaucauaaauugaaaauguu

SEQ ID NO: 150449 - RNA, 24 nt, Artificial Sequence
  Synthetic
aacccaucauaaauugaaaauguu

SEQ ID NO: 150450 - RNA, 18 nt, Artificial Sequence
  Synthetic
agacuuuuuuaaaauguu

SEQ ID NO: 150451 - RNA, 19 nt, Artificial Sequence
  Synthetic
aagacuuuuuuaaaauguu

SEQ ID NO: 150452 - RNA, 20 nt, Artificial Sequence
  Synthetic
caagacuuuuuuaaaauguu

SEQ ID NO: 150453 - RNA, 18 nt, Artificial Sequence
  Synthetic
caauuuuauaaacauguu

SEQ ID NO: 150454 - RNA, 19 nt, Artificial Sequence
  Synthetic
ucaauuuuauaaacauguu

SEQ ID NO: 150455 - RNA, 20 nt, Artificial Sequence
  Synthetic
uucaauuuuauaaacauguu

SEQ ID NO: 150456 - RNA, 18 nt, Artificial Sequence
  Synthetic
cuaccucacuaggauguu

SEQ ID NO: 150457 - RNA, 19 nt, Artificial Sequence
  Synthetic
ccuaccucacuaggauguu

SEQ ID NO: 150458 - RNA, 20 nt, Artificial Sequence
  Synthetic
cccuaccucacuaggauguu

SEQ ID NO: 150459 - RNA, 18 nt, Artificial Sequence
  Synthetic
caguuuaauaaugauguu

SEQ ID NO: 150460 - RNA, 19 nt, Artificial Sequence
  Synthetic
ucaguuuaauaaugauguu

SEQ ID NO: 150461 - RNA, 20 nt, Artificial Sequence
  Synthetic
aucaguuuaauaaugauguu

SEQ ID NO: 150462 - RNA, 19 nt, Artificial Sequence
  Synthetic
ugcucguuacugguauguu

SEQ ID NO: 150463 - RNA, 20 nt, Artificial Sequence
  Synthetic
cugcucguuacugguauguu

SEQ ID NO: 150464 - RNA, 22 nt, Artificial Sequence
  Synthetic
ugcugcucguuacugguauguu

SEQ ID NO: 150465 - RNA, 23 nt, Artificial Sequence
  Synthetic
uugcugcucguuacugguauguu

SEQ ID NO: 150466 - RNA, 24 nt, Artificial Sequence
  Synthetic
cuugcugcucguuacugguauguu

SEQ ID NO: 150467 - RNA, 18 nt, Artificial Sequence
  Synthetic
aaauaaggcaccccuguu

SEQ ID NO: 150468 - RNA, 19 nt, Artificial Sequence
  Synthetic
uaaauaaggcaccccuguu

SEQ ID NO: 150469 - RNA, 21 nt, Artificial Sequence
  Synthetic
aguaaauaaggcaccccuguu

SEQ ID NO: 150470 - RNA, 22 nt, Artificial Sequence
  Synthetic
aaguaaauaaggcaccccuguu

SEQ ID NO: 150471 - RNA, 23 nt, Artificial Sequence
  Synthetic
uaaguaaauaaggcaccccuguu

SEQ ID NO: 150472 - RNA, 24 nt, Artificial Sequence
  Synthetic
cuaaguaaauaaggcaccccuguu

SEQ ID NO: 150473 - RNA, 18 nt, Artificial Sequence
  Synthetic
agucagugguagccuguu

SEQ ID NO: 150474 - RNA, 19 nt, Artificial Sequence
  Synthetic
aagucagugguagccuguu

SEQ ID NO: 150475 - RNA, 20 nt, Artificial Sequence
  Synthetic
aaagucagugguagccuguu

SEQ ID NO: 150476 - RNA, 22 nt, Artificial Sequence
  Synthetic
agaaagucagugguagccuguu

SEQ ID NO: 150477 - RNA, 23 nt, Artificial Sequence
  Synthetic
aagaaagucagugguagccuguu

SEQ ID NO: 150478 - RNA, 24 nt, Artificial Sequence
  Synthetic
aaagaaagucagugguagccuguu

SEQ ID NO: 150479 - RNA, 18 nt, Artificial Sequence
  Synthetic
auuuauugaaugccuguu

SEQ ID NO: 150480 - RNA, 19 nt, Artificial Sequence
  Synthetic
uauuuauugaaugccuguu

SEQ ID NO: 150481 - RNA, 21 nt, Artificial Sequence
  Synthetic
aguauuuauugaaugccuguu

SEQ ID NO: 150482 - RNA, 22 nt, Artificial Sequence
  Synthetic
aaguauuuauugaaugccuguu

SEQ ID NO: 150483 - RNA, 23 nt, Artificial Sequence
  Synthetic
caaguauuuauugaaugccuguu

SEQ ID NO: 150484 - RNA, 24 nt, Artificial Sequence
  Synthetic
acaaguauuuauugaaugccuguu

SEQ ID NO: 150485 - RNA, 18 nt, Artificial Sequence
  Synthetic
caaccuccaccuccuguu

SEQ ID NO: 150486 - RNA, 20 nt, Artificial Sequence
  Synthetic
ugcaaccuccaccuccuguu

SEQ ID NO: 150487 - RNA, 21 nt, Artificial Sequence
  Synthetic
cugcaaccuccaccuccuguu

SEQ ID NO: 150488 - RNA, 22 nt, Artificial Sequence
  Synthetic
acugcaaccuccaccuccuguu

SEQ ID NO: 150489 - RNA, 23 nt, Artificial Sequence
  Synthetic
cacugcaaccuccaccuccuguu

SEQ ID NO: 150490 - RNA, 24 nt, Artificial Sequence
  Synthetic
ucacugcaaccuccaccuccuguu

SEQ ID NO: 150491 - RNA, 18 nt, Artificial Sequence
  Synthetic
uuucaguuuuuggcuguu

SEQ ID NO: 150492 - RNA, 19 nt, Artificial Sequence
  Synthetic
uuuucaguuuuuggcuguu

SEQ ID NO: 150493 - RNA, 22 nt, Artificial Sequence
  Synthetic
ugguuuucaguuuuuggcuguu

SEQ ID NO: 150494 - RNA, 19 nt, Artificial Sequence
  Synthetic
agucuuuuuauuuucuguu

SEQ ID NO: 150495 - RNA, 20 nt, Artificial Sequence
  Synthetic
aagucuuuuuauuuucuguu

SEQ ID NO: 150496 - RNA, 18 nt, Artificial Sequence
  Synthetic
cuugggaccacaaguguu

SEQ ID NO: 150497 - RNA, 19 nt, Artificial Sequence
  Synthetic
acuugggaccacaaguguu

SEQ ID NO: 150498 - RNA, 20 nt, Artificial Sequence
  Synthetic
cacuugggaccacaaguguu

SEQ ID NO: 150499 - RNA, 21 nt, Artificial Sequence
  Synthetic
acacuugggaccacaaguguu

SEQ ID NO: 150500 - RNA, 22 nt, Artificial Sequence
  Synthetic
aacacuugggaccacaaguguu

SEQ ID NO: 150501 - RNA, 23 nt, Artificial Sequence
  Synthetic
aaacacuugggaccacaaguguu

SEQ ID NO: 150502 - RNA, 24 nt, Artificial Sequence
  Synthetic
aaaacacuugggaccacaaguguu

SEQ ID NO: 150503 - RNA, 18 nt, Artificial Sequence
  Synthetic
uccaugaguucaauuguu

SEQ ID NO: 150504 - RNA, 20 nt, Artificial Sequence
  Synthetic
uguccaugaguucaauuguu

SEQ ID NO: 150505 - RNA, 21 nt, Artificial Sequence
  Synthetic
auguccaugaguucaauuguu

SEQ ID NO: 150506 - RNA, 22 nt, Artificial Sequence
  Synthetic
uauguccaugaguucaauuguu

SEQ ID NO: 150507 - RNA, 23 nt, Artificial Sequence
  Synthetic
cuauguccaugaguucaauuguu

SEQ ID NO: 150508 - RNA, 24 nt, Artificial Sequence
  Synthetic
ucuauguccaugaguucaauuguu

SEQ ID NO: 150509 - RNA, 21 nt, Artificial Sequence
  Synthetic
aagaaagaugcuauaauuguu

SEQ ID NO: 150510 - RNA, 22 nt, Artificial Sequence
  Synthetic
aaagaaagaugcuauaauuguu

SEQ ID NO: 150511 - RNA, 23 nt, Artificial Sequence
  Synthetic
aaaagaaagaugcuauaauuguu

SEQ ID NO: 150512 - RNA, 24 nt, Artificial Sequence
  Synthetic
aaaaagaaagaugcuauaauuguu

SEQ ID NO: 150513 - RNA, 18 nt, Artificial Sequence
  Synthetic
uuuuuaugcuuuauuguu

SEQ ID NO: 150514 - RNA, 20 nt, Artificial Sequence
  Synthetic
uguuuuuaugcuuuauuguu

SEQ ID NO: 150515 - RNA, 19 nt, Artificial Sequence
  Synthetic
uggaaguaacuaacuuguu

SEQ ID NO: 150516 - RNA, 20 nt, Artificial Sequence
  Synthetic
cuggaaguaacuaacuuguu

SEQ ID NO: 150517 - RNA, 21 nt, Artificial Sequence
  Synthetic
ccuggaaguaacuaacuuguu

SEQ ID NO: 150518 - RNA, 22 nt, Artificial Sequence
  Synthetic
uccuggaaguaacuaacuuguu

SEQ ID NO: 150519 - RNA, 23 nt, Artificial Sequence
  Synthetic
auccuggaaguaacuaacuuguu

SEQ ID NO: 150520 - RNA, 24 nt, Artificial Sequence
  Synthetic
uauccuggaaguaacuaacuuguu

SEQ ID NO: 150521 - RNA, 19 nt, Artificial Sequence
  Synthetic
agagauaagaaauguuguu

SEQ ID NO: 150522 - RNA, 20 nt, Artificial Sequence
  Synthetic
aagagauaagaaauguuguu

SEQ ID NO: 150523 - RNA, 18 nt, Artificial Sequence
  Synthetic
ugcuuauacacuguuguu

SEQ ID NO: 150524 - RNA, 19 nt, Artificial Sequence
  Synthetic
augcuuauacacuguuguu

SEQ ID NO: 150525 - RNA, 24 nt, Artificial Sequence
  Synthetic
aggggaugcuuauacacuguuguu

SEQ ID NO: 150526 - RNA, 18 nt, Artificial Sequence
  Synthetic
uaauaaguaacauuuguu

SEQ ID NO: 150527 - RNA, 19 nt, Artificial Sequence
  Synthetic
auaauaaguaacauuuguu

SEQ ID NO: 150528 - RNA, 20 nt, Artificial Sequence
  Synthetic
cauaauaaguaacauuuguu

SEQ ID NO: 150529 - RNA, 18 nt, Artificial Sequence
  Synthetic
ucaagauuuaaguuuguu

SEQ ID NO: 150530 - RNA, 19 nt, Artificial Sequence
  Synthetic
uucaagauuuaaguuuguu

SEQ ID NO: 150531 - RNA, 20 nt, Artificial Sequence
  Synthetic
uuucaagauuuaaguuuguu

SEQ ID NO: 150532 - RNA, 18 nt, Artificial Sequence
  Synthetic
uaaauguuuaauuuuguu

SEQ ID NO: 150533 - RNA, 19 nt, Artificial Sequence
  Synthetic
uuaaauguuuaauuuuguu

SEQ ID NO: 150534 - RNA, 20 nt, Artificial Sequence
  Synthetic
auuaaauguuuaauuuuguu

SEQ ID NO: 150535 - RNA, 18 nt, Artificial Sequence
  Synthetic
uuguacuucauuuuuguu

SEQ ID NO: 150536 - RNA, 19 nt, Artificial Sequence
  Synthetic
auuguacuucauuuuuguu

SEQ ID NO: 150537 - RNA, 20 nt, Artificial Sequence
  Synthetic
uauuguacuucauuuuuguu

SEQ ID NO: 150538 - RNA, 18 nt, Artificial Sequence
  Synthetic
aaaaaagauaaaaaauuu

SEQ ID NO: 150539 - RNA, 19 nt, Artificial Sequence
  Synthetic
uaaaaaagauaaaaaauuu

SEQ ID NO: 150540 - RNA, 20 nt, Artificial Sequence
  Synthetic
auaaaaaagauaaaaaauuu

SEQ ID NO: 150541 - RNA, 21 nt, Artificial Sequence
  Synthetic
aauaaaaaagauaaaaaauuu

SEQ ID NO: 150542 - RNA, 22 nt, Artificial Sequence
  Synthetic
aaauaaaaaagauaaaaaauuu

SEQ ID NO: 150543 - RNA, 23 nt, Artificial Sequence
  Synthetic
aaaauaaaaaagauaaaaaauuu

SEQ ID NO: 150544 - RNA, 24 nt, Artificial Sequence
  Synthetic
uaaaauaaaaaagauaaaaaauuu

SEQ ID NO: 150545 - RNA, 18 nt, Artificial Sequence
  Synthetic
agcugaaaaacaaaauuu

SEQ ID NO: 150546 - RNA, 19 nt, Artificial Sequence
  Synthetic
aagcugaaaaacaaaauuu

SEQ ID NO: 150547 - RNA, 20 nt, Artificial Sequence
  Synthetic
aaagcugaaaaacaaaauuu

SEQ ID NO: 150548 - RNA, 18 nt, Artificial Sequence
  Synthetic
caaaauauuugaaaauuu

SEQ ID NO: 150549 - RNA, 19 nt, Artificial Sequence
  Synthetic
ucaaaauauuugaaaauuu

SEQ ID NO: 150550 - RNA, 20 nt, Artificial Sequence
  Synthetic
aucaaaauauuugaaaauuu

SEQ ID NO: 150551 - RNA, 19 nt, Artificial Sequence
  Synthetic
ugugguuccaugcaaauuu

SEQ ID NO: 150552 - RNA, 20 nt, Artificial Sequence
  Synthetic
uugugguuccaugcaaauuu

SEQ ID NO: 150553 - RNA, 21 nt, Artificial Sequence
  Synthetic
uuugugguuccaugcaaauuu

SEQ ID NO: 150554 - RNA, 22 nt, Artificial Sequence
  Synthetic
uuuugugguuccaugcaaauuu

SEQ ID NO: 150555 - RNA, 23 nt, Artificial Sequence
  Synthetic
cuuuugugguuccaugcaaauuu

SEQ ID NO: 150556 - RNA, 24 nt, Artificial Sequence
  Synthetic
ucuuuugugguuccaugcaaauuu

SEQ ID NO: 150557 - RNA, 18 nt, Artificial Sequence
  Synthetic
auauuuuaacagaaauuu

SEQ ID NO: 150558 - RNA, 19 nt, Artificial Sequence
  Synthetic
aauauuuuaacagaaauuu

SEQ ID NO: 150559 - RNA, 20 nt, Artificial Sequence
  Synthetic
aaauauuuuaacagaaauuu

SEQ ID NO: 150560 - RNA, 21 nt, Artificial Sequence
  Synthetic
caaauauuuuaacagaaauuu

SEQ ID NO: 150561 - RNA, 22 nt, Artificial Sequence
  Synthetic
ucaaauauuuuaacagaaauuu

SEQ ID NO: 150562 - RNA, 24 nt, Artificial Sequence
  Synthetic
ugucaaauauuuuaacagaaauuu

SEQ ID NO: 150563 - RNA, 23 nt, Artificial Sequence
  Synthetic
uggugaaugaguucgagaaauuu

SEQ ID NO: 150564 - RNA, 18 nt, Artificial Sequence
  Synthetic
ucuauuagacugaaauuu

SEQ ID NO: 150565 - RNA, 19 nt, Artificial Sequence
  Synthetic
cucuauuagacugaaauuu

SEQ ID NO: 150566 - RNA, 20 nt, Artificial Sequence
  Synthetic
acucuauuagacugaaauuu

SEQ ID NO: 150567 - RNA, 21 nt, Artificial Sequence
  Synthetic
aacucuauuagacugaaauuu

SEQ ID NO: 150568 - RNA, 22 nt, Artificial Sequence
  Synthetic
uaacucuauuagacugaaauuu

SEQ ID NO: 150569 - RNA, 23 nt, Artificial Sequence
  Synthetic
auaacucuauuagacugaaauuu

SEQ ID NO: 150570 - RNA, 24 nt, Artificial Sequence
  Synthetic
aauaacucuauuagacugaaauuu

SEQ ID NO: 150571 - RNA, 18 nt, Artificial Sequence
  Synthetic
ucuuaauuguauaaauuu

SEQ ID NO: 150572 - RNA, 19 nt, Artificial Sequence
  Synthetic
uucuuaauuguauaaauuu

SEQ ID NO: 150573 - RNA, 20 nt, Artificial Sequence
  Synthetic
auucuuaauuguauaaauuu

SEQ ID NO: 150574 - RNA, 21 nt, Artificial Sequence
  Synthetic
aauucuuaauuguauaaauuu

SEQ ID NO: 150575 - RNA, 22 nt, Artificial Sequence
  Synthetic
aaauucuuaauuguauaaauuu

SEQ ID NO: 150576 - RNA, 23 nt, Artificial Sequence
  Synthetic
uaaauucuuaauuguauaaauuu

SEQ ID NO: 150577 - RNA, 24 nt, Artificial Sequence
  Synthetic
uuaaauucuuaauuguauaaauuu

SEQ ID NO: 150578 - RNA, 18 nt, Artificial Sequence
  Synthetic
uuuuaagcugcuaaauuu

SEQ ID NO: 150579 - RNA, 19 nt, Artificial Sequence
  Synthetic
uuuuuaagcugcuaaauuu

SEQ ID NO: 150580 - RNA, 21 nt, Artificial Sequence
  Synthetic
uguuuuuaagcugcuaaauuu

SEQ ID NO: 150581 - RNA, 22 nt, Artificial Sequence
  Synthetic
uuguuuuuaagcugcuaaauuu

SEQ ID NO: 150582 - RNA, 23 nt, Artificial Sequence
  Synthetic
uuuguuuuuaagcugcuaaauuu

SEQ ID NO: 150583 - RNA, 24 nt, Artificial Sequence
  Synthetic
uuuuguuuuuaagcugcuaaauuu

SEQ ID NO: 150584 - RNA, 18 nt, Artificial Sequence
  Synthetic
aguaacagauguaaauuu

SEQ ID NO: 150585 - RNA, 19 nt, Artificial Sequence
  Synthetic
caguaacagauguaaauuu

SEQ ID NO: 150586 - RNA, 20 nt, Artificial Sequence
  Synthetic
ucaguaacagauguaaauuu

SEQ ID NO: 150587 - RNA, 21 nt, Artificial Sequence
  Synthetic
aucaguaacagauguaaauuu

SEQ ID NO: 150588 - RNA, 22 nt, Artificial Sequence
  Synthetic
aaucaguaacagauguaaauuu

SEQ ID NO: 150589 - RNA, 23 nt, Artificial Sequence
  Synthetic
aaaucaguaacagauguaaauuu

SEQ ID NO: 150590 - RNA, 24 nt, Artificial Sequence
  Synthetic
aaaaucaguaacagauguaaauuu

SEQ ID NO: 150591 - RNA, 18 nt, Artificial Sequence
  Synthetic
caaguauguggucaauuu

SEQ ID NO: 150592 - RNA, 19 nt, Artificial Sequence
  Synthetic
ccaaguauguggucaauuu

SEQ ID NO: 150593 - RNA, 20 nt, Artificial Sequence
  Synthetic
uccaaguauguggucaauuu

SEQ ID NO: 150594 - RNA, 21 nt, Artificial Sequence
  Synthetic
uuccaaguauguggucaauuu

SEQ ID NO: 150595 - RNA, 22 nt, Artificial Sequence
  Synthetic
cuuccaaguauguggucaauuu

SEQ ID NO: 150596 - RNA, 23 nt, Artificial Sequence
  Synthetic
acuuccaaguauguggucaauuu

SEQ ID NO: 150597 - RNA, 24 nt, Artificial Sequence
  Synthetic
uacuuccaaguauguggucaauuu

SEQ ID NO: 150598 - RNA, 19 nt, Artificial Sequence
  Synthetic
ugcgccuggccaggaauuu

SEQ ID NO: 150599 - RNA, 20 nt, Artificial Sequence
  Synthetic
cugcgccuggccaggaauuu

SEQ ID NO: 150600 - RNA, 21 nt, Artificial Sequence
  Synthetic
acugcgccuggccaggaauuu

SEQ ID NO: 150601 - RNA, 22 nt, Artificial Sequence
  Synthetic
cacugcgccuggccaggaauuu

SEQ ID NO: 150602 - RNA, 23 nt, Artificial Sequence
  Synthetic
ccacugcgccuggccaggaauuu

SEQ ID NO: 150603 - RNA, 18 nt, Artificial Sequence
  Synthetic
uaauaucuuaaugaauuu

SEQ ID NO: 150604 - RNA, 19 nt, Artificial Sequence
  Synthetic
uuaauaucuuaaugaauuu

SEQ ID NO: 150605 - RNA, 20 nt, Artificial Sequence
  Synthetic
uuuaauaucuuaaugaauuu

SEQ ID NO: 150606 - RNA, 18 nt, Artificial Sequence
  Synthetic
uuucauaagcaugaauuu

SEQ ID NO: 150607 - RNA, 19 nt, Artificial Sequence
  Synthetic
auuucauaagcaugaauuu

SEQ ID NO: 150608 - RNA, 20 nt, Artificial Sequence
  Synthetic
aauuucauaagcaugaauuu

SEQ ID NO: 150609 - RNA, 18 nt, Artificial Sequence
  Synthetic
aaugaaacuucugaauuu

SEQ ID NO: 150610 - RNA, 19 nt, Artificial Sequence
  Synthetic
aaaugaaacuucugaauuu

SEQ ID NO: 150611 - RNA, 20 nt, Artificial Sequence
  Synthetic
uaaaugaaacuucugaauuu

SEQ ID NO: 150612 - RNA, 18 nt, Artificial Sequence
  Synthetic
aaucaaaaucaguaauuu

SEQ ID NO: 150613 - RNA, 19 nt, Artificial Sequence
  Synthetic
aaaucaaaaucaguaauuu

SEQ ID NO: 150614 - RNA, 20 nt, Artificial Sequence
  Synthetic
aaaaucaaaaucaguaauuu

SEQ ID NO: 150615 - RNA, 18 nt, Artificial Sequence
  Synthetic
ccauuaaccuauuaauuu

SEQ ID NO: 150616 - RNA, 19 nt, Artificial Sequence
  Synthetic
cccauuaaccuauuaauuu

SEQ ID NO: 150617 - RNA, 20 nt, Artificial Sequence
  Synthetic
acccauuaaccuauuaauuu

SEQ ID NO: 150618 - RNA, 21 nt, Artificial Sequence
  Synthetic
aacccauuaaccuauuaauuu

SEQ ID NO: 150619 - RNA, 22 nt, Artificial Sequence
  Synthetic
uaacccauuaaccuauuaauuu

SEQ ID NO: 150620 - RNA, 23 nt, Artificial Sequence
  Synthetic
auaacccauuaaccuauuaauuu

SEQ ID NO: 150621 - RNA, 18 nt, Artificial Sequence
  Synthetic
uugguuugguuuuaauuu

SEQ ID NO: 150622 - RNA, 20 nt, Artificial Sequence
  Synthetic
aguugguuugguuuuaauuu

SEQ ID NO: 150623 - RNA, 19 nt, Artificial Sequence
  Synthetic
ugaacauauucaaacauuu

SEQ ID NO: 150624 - RNA, 20 nt, Artificial Sequence
  Synthetic
uugaacauauucaaacauuu

SEQ ID NO: 150625 - RNA, 21 nt, Artificial Sequence
  Synthetic
auugaacauauucaaacauuu

SEQ ID NO: 150626 - RNA, 22 nt, Artificial Sequence
  Synthetic
uauugaacauauucaaacauuu

SEQ ID NO: 150627 - RNA, 23 nt, Artificial Sequence
  Synthetic
cuauugaacauauucaaacauuu

SEQ ID NO: 150628 - RNA, 24 nt, Artificial Sequence
  Synthetic
ucuauugaacauauucaaacauuu

SEQ ID NO: 150629 - RNA, 21 nt, Artificial Sequence
  Synthetic
uuauaugucacuugaacauuu

SEQ ID NO: 150630 - RNA, 22 nt, Artificial Sequence
  Synthetic
uuuauaugucacuugaacauuu

SEQ ID NO: 150631 - RNA, 23 nt, Artificial Sequence
  Synthetic
uuuuauaugucacuugaacauuu

SEQ ID NO: 150632 - RNA, 24 nt, Artificial Sequence
  Synthetic
auuuuauaugucacuugaacauuu

SEQ ID NO: 150633 - RNA, 18 nt, Artificial Sequence
  Synthetic
aaagucgcuuccacauuu

SEQ ID NO: 150634 - RNA, 19 nt, Artificial Sequence
  Synthetic
caaagucgcuuccacauuu

SEQ ID NO: 150635 - RNA, 20 nt, Artificial Sequence
  Synthetic
ccaaagucgcuuccacauuu

SEQ ID NO: 150636 - RNA, 21 nt, Artificial Sequence
  Synthetic
uccaaagucgcuuccacauuu

SEQ ID NO: 150637 - RNA, 22 nt, Artificial Sequence
  Synthetic
uuccaaagucgcuuccacauuu

SEQ ID NO: 150638 - RNA, 23 nt, Artificial Sequence
  Synthetic
cuuccaaagucgcuuccacauuu

SEQ ID NO: 150639 - RNA, 24 nt, Artificial Sequence
  Synthetic
acuuccaaagucgcuuccacauuu

SEQ ID NO: 150640 - RNA, 18 nt, Artificial Sequence
  Synthetic
aaaguugcuuccacauuu

SEQ ID NO: 150641 - RNA, 19 nt, Artificial Sequence
  Synthetic
caaaguugcuuccacauuu

SEQ ID NO: 150642 - RNA, 20 nt, Artificial Sequence
  Synthetic
ccaaaguugcuuccacauuu

SEQ ID NO: 150643 - RNA, 21 nt, Artificial Sequence
  Synthetic
uccaaaguugcuuccacauuu

SEQ ID NO: 150644 - RNA, 22 nt, Artificial Sequence
  Synthetic
uuccaaaguugcuuccacauuu

SEQ ID NO: 150645 - RNA, 24 nt, Artificial Sequence
  Synthetic
aguuccaaaguugcuuccacauuu

SEQ ID NO: 150646 - RNA, 18 nt, Artificial Sequence
  Synthetic
uuuuaaaaguugacauuu

SEQ ID NO: 150647 - RNA, 19 nt, Artificial Sequence
  Synthetic
auuuuaaaaguugacauuu

SEQ ID NO: 150648 - RNA, 20 nt, Artificial Sequence
  Synthetic
aauuuuaaaaguugacauuu

SEQ ID NO: 150649 - RNA, 19 nt, Artificial Sequence
  Synthetic
agaucacugagugccauuu

SEQ ID NO: 150650 - RNA, 18 nt, Artificial Sequence
  Synthetic
uucauagaaguagcauuu

SEQ ID NO: 150651 - RNA, 19 nt, Artificial Sequence
  Synthetic
auucauagaaguagcauuu

SEQ ID NO: 150652 - RNA, 20 nt, Artificial Sequence
  Synthetic
aauucauagaaguagcauuu

SEQ ID NO: 150653 - RNA, 18 nt, Artificial Sequence
  Synthetic
uguauguuuuacucauuu

SEQ ID NO: 150654 - RNA, 19 nt, Artificial Sequence
  Synthetic
auguauguuuuacucauuu

SEQ ID NO: 150655 - RNA, 19 nt, Artificial Sequence
  Synthetic
uguauuaaaaagaagauuu

SEQ ID NO: 150656 - RNA, 20 nt, Artificial Sequence
  Synthetic
auguauuaaaaagaagauuu

SEQ ID NO: 150657 - RNA, 18 nt, Artificial Sequence
  Synthetic
ugcuagagaugcagauuu

SEQ ID NO: 150658 - RNA, 20 nt, Artificial Sequence
  Synthetic
ugugcuagagaugcagauuu

SEQ ID NO: 150659 - RNA, 18 nt, Artificial Sequence
  Synthetic
accagaggcuguggauuu

SEQ ID NO: 150660 - RNA, 19 nt, Artificial Sequence
  Synthetic
uaccagaggcuguggauuu

SEQ ID NO: 150661 - RNA, 20 nt, Artificial Sequence
  Synthetic
uuaccagaggcuguggauuu

SEQ ID NO: 150662 - RNA, 23 nt, Artificial Sequence
  Synthetic
ugguuaccagaggcuguggauuu

SEQ ID NO: 150663 - RNA, 18 nt, Artificial Sequence
  Synthetic
aauuuuuuucagugauuu

SEQ ID NO: 150664 - RNA, 19 nt, Artificial Sequence
  Synthetic
uaauuuuuuucagugauuu

SEQ ID NO: 150665 - RNA, 20 nt, Artificial Sequence
  Synthetic
cuaauuuuuuucagugauuu

SEQ ID NO: 150666 - RNA, 18 nt, Artificial Sequence
  Synthetic
uucaguuuucauugauuu

SEQ ID NO: 150667 - RNA, 19 nt, Artificial Sequence
  Synthetic
auucaguuuucauugauuu

SEQ ID NO: 150668 - RNA, 20 nt, Artificial Sequence
  Synthetic
aauucaguuuucauugauuu

SEQ ID NO: 150669 - RNA, 18 nt, Artificial Sequence
  Synthetic
aauccccauucuugauuu

SEQ ID NO: 150670 - RNA, 19 nt, Artificial Sequence
  Synthetic
uaauccccauucuugauuu

SEQ ID NO: 150671 - RNA, 20 nt, Artificial Sequence
  Synthetic
uuaauccccauucuugauuu

SEQ ID NO: 150672 - RNA, 18 nt, Artificial Sequence
  Synthetic
cuuacucucuaaauauuu

SEQ ID NO: 150673 - RNA, 19 nt, Artificial Sequence
  Synthetic
ucuuacucucuaaauauuu

SEQ ID NO: 150674 - RNA, 20 nt, Artificial Sequence
  Synthetic
uucuuacucucuaaauauuu

SEQ ID NO: 150675 - RNA, 18 nt, Artificial Sequence
  Synthetic
uuugaaaagaacauauuu

SEQ ID NO: 150676 - RNA, 19 nt, Artificial Sequence
  Synthetic
auuugaaaagaacauauuu

SEQ ID NO: 150677 - RNA, 20 nt, Artificial Sequence
  Synthetic
uauuugaaaagaacauauuu

SEQ ID NO: 150678 - RNA, 18 nt, Artificial Sequence
  Synthetic
agaaaaaaauacauauuu

SEQ ID NO: 150679 - RNA, 19 nt, Artificial Sequence
  Synthetic
uagaaaaaaauacauauuu

SEQ ID NO: 150680 - RNA, 21 nt, Artificial Sequence
  Synthetic
uguagaaaaaaauacauauuu

SEQ ID NO: 150681 - RNA, 22 nt, Artificial Sequence
  Synthetic
cuguagaaaaaaauacauauuu

SEQ ID NO: 150682 - RNA, 23 nt, Artificial Sequence
  Synthetic
ucuguagaaaaaaauacauauuu

SEQ ID NO: 150683 - RNA, 24 nt, Artificial Sequence
  Synthetic
uucuguagaaaaaaauacauauuu

SEQ ID NO: 150684 - RNA, 18 nt, Artificial Sequence
  Synthetic
ugucaaagugccauauuu

SEQ ID NO: 150685 - RNA, 19 nt, Artificial Sequence
  Synthetic
augucaaagugccauauuu

SEQ ID NO: 150686 - RNA, 20 nt, Artificial Sequence
  Synthetic
uaugucaaagugccauauuu

SEQ ID NO: 150687 - RNA, 21 nt, Artificial Sequence
  Synthetic
uuaugucaaagugccauauuu

SEQ ID NO: 150688 - RNA, 22 nt, Artificial Sequence
  Synthetic
uuuaugucaaagugccauauuu

SEQ ID NO: 150689 - RNA, 23 nt, Artificial Sequence
  Synthetic
cuuuaugucaaagugccauauuu

SEQ ID NO: 150690 - RNA, 24 nt, Artificial Sequence
  Synthetic
ucuuuaugucaaagugccauauuu

SEQ ID NO: 150691 - RNA, 18 nt, Artificial Sequence
  Synthetic
uuuucuacuuucauauuu

SEQ ID NO: 150692 - RNA, 19 nt, Artificial Sequence
  Synthetic
uuuuucuacuuucauauuu

SEQ ID NO: 150693 - RNA, 20 nt, Artificial Sequence
  Synthetic
cuuuuucuacuuucauauuu

SEQ ID NO: 150694 - RNA, 18 nt, Artificial Sequence
  Synthetic
uaauauugugugauauuu

SEQ ID NO: 150695 - RNA, 19 nt, Artificial Sequence
  Synthetic
auaauauugugugauauuu

SEQ ID NO: 150696 - RNA, 20 nt, Artificial Sequence
  Synthetic
aauaauauugugugauauuu

SEQ ID NO: 150697 - RNA, 18 nt, Artificial Sequence
  Synthetic
auauuuaaaauuauauuu

SEQ ID NO: 150698 - RNA, 19 nt, Artificial Sequence
  Synthetic
aauauuuaaaauuauauuu

SEQ ID NO: 150699 - RNA, 18 nt, Artificial Sequence
  Synthetic
uauauaucuuuuauauuu

SEQ ID NO: 150700 - RNA, 19 nt, Artificial Sequence
  Synthetic
cuauauaucuuuuauauuu

SEQ ID NO: 150701 - RNA, 20 nt, Artificial Sequence
  Synthetic
acuauauaucuuuuauauuu

SEQ ID NO: 150702 - RNA, 21 nt, Artificial Sequence
  Synthetic
uacuauauaucuuuuauauuu

SEQ ID NO: 150703 - RNA, 22 nt, Artificial Sequence
  Synthetic
auacuauauaucuuuuauauuu

SEQ ID NO: 150704 - RNA, 23 nt, Artificial Sequence
  Synthetic
uauacuauauaucuuuuauauuu

SEQ ID NO: 150705 - RNA, 24 nt, Artificial Sequence
  Synthetic
auauacuauauaucuuuuauauuu

SEQ ID NO: 150706 - RNA, 18 nt, Artificial Sequence
  Synthetic
auaaaauuauuucuauuu

SEQ ID NO: 150707 - RNA, 19 nt, Artificial Sequence
  Synthetic
aauaaaauuauuucuauuu

SEQ ID NO: 150708 - RNA, 20 nt, Artificial Sequence
  Synthetic
aaauaaaauuauuucuauuu

SEQ ID NO: 150709 - RNA, 21 nt, Artificial Sequence
  Synthetic
aaaauaaaauuauuucuauuu

SEQ ID NO: 150710 - RNA, 22 nt, Artificial Sequence
  Synthetic
uaaaauaaaauuauuucuauuu

SEQ ID NO: 150711 - RNA, 23 nt, Artificial Sequence
  Synthetic
auaaaauaaaauuauuucuauuu

SEQ ID NO: 150712 - RNA, 24 nt, Artificial Sequence
  Synthetic
uauaaaauaaaauuauuucuauuu

SEQ ID NO: 150713 - RNA, 18 nt, Artificial Sequence
  Synthetic
auaaaaccuaaaguauuu

SEQ ID NO: 150714 - RNA, 19 nt, Artificial Sequence
  Synthetic
aauaaaaccuaaaguauuu

SEQ ID NO: 150715 - RNA, 20 nt, Artificial Sequence
  Synthetic
aaauaaaaccuaaaguauuu

SEQ ID NO: 150716 - RNA, 18 nt, Artificial Sequence
  Synthetic
cuaaacuauggaguauuu

SEQ ID NO: 150717 - RNA, 19 nt, Artificial Sequence
  Synthetic
acuaaacuauggaguauuu

SEQ ID NO: 150718 - RNA, 20 nt, Artificial Sequence
  Synthetic
uacuaaacuauggaguauuu

SEQ ID NO: 150719 - RNA, 18 nt, Artificial Sequence
  Synthetic
auuaauuuuuuaguauuu

SEQ ID NO: 150720 - RNA, 19 nt, Artificial Sequence
  Synthetic
aauuaauuuuuuaguauuu

SEQ ID NO: 150721 - RNA, 20 nt, Artificial Sequence
  Synthetic
uaauuaauuuuuuaguauuu

SEQ ID NO: 150722 - RNA, 18 nt, Artificial Sequence
  Synthetic
ugcaaaauaauuguauuu

SEQ ID NO: 150723 - RNA, 19 nt, Artificial Sequence
  Synthetic
uugcaaaauaauuguauuu

SEQ ID NO: 150724 - RNA, 20 nt, Artificial Sequence
  Synthetic
uuugcaaaauaauuguauuu

SEQ ID NO: 150725 - RNA, 18 nt, Artificial Sequence
  Synthetic
uuauauuucauauuauuu

SEQ ID NO: 150726 - RNA, 19 nt, Artificial Sequence
  Synthetic
uuuauauuucauauuauuu

SEQ ID NO: 150727 - RNA, 20 nt, Artificial Sequence
  Synthetic
uuuuauauuucauauuauuu

SEQ ID NO: 150728 - RNA, 18 nt, Artificial Sequence
  Synthetic
aauuguuuuuacuuauuu

SEQ ID NO: 150729 - RNA, 19 nt, Artificial Sequence
  Synthetic
uaauuguuuuuacuuauuu

SEQ ID NO: 150730 - RNA, 20 nt, Artificial Sequence
  Synthetic
cuaauuguuuuuacuuauuu

SEQ ID NO: 150731 - RNA, 21 nt, Artificial Sequence
  Synthetic
ucuaauuguuuuuacuuauuu

SEQ ID NO: 150732 - RNA, 22 nt, Artificial Sequence
  Synthetic
uucuaauuguuuuuacuuauuu

SEQ ID NO: 150733 - RNA, 23 nt, Artificial Sequence
  Synthetic
uuucuaauuguuuuuacuuauuu

SEQ ID NO: 150734 - RNA, 24 nt, Artificial Sequence
  Synthetic
uuuucuaauuguuuuuacuuauuu

SEQ ID NO: 150735 - RNA, 18 nt, Artificial Sequence
  Synthetic
uugucucugcucuuauuu

SEQ ID NO: 150736 - RNA, 19 nt, Artificial Sequence
  Synthetic
cuugucucugcucuuauuu

SEQ ID NO: 150737 - RNA, 20 nt, Artificial Sequence
  Synthetic
ucuugucucugcucuuauuu

SEQ ID NO: 150738 - RNA, 18 nt, Artificial Sequence
  Synthetic
auaccaaauuaguuauuu

SEQ ID NO: 150739 - RNA, 19 nt, Artificial Sequence
  Synthetic
uauaccaaauuaguuauuu

SEQ ID NO: 150740 - RNA, 20 nt, Artificial Sequence
  Synthetic
cuauaccaaauuaguuauuu

SEQ ID NO: 150741 - RNA, 18 nt, Artificial Sequence
  Synthetic
uuuuguaggaauuuauuu

SEQ ID NO: 150742 - RNA, 19 nt, Artificial Sequence
  Synthetic
auuuuguaggaauuuauuu

SEQ ID NO: 150743 - RNA, 20 nt, Artificial Sequence
  Synthetic
cauuuuguaggaauuuauuu

SEQ ID NO: 150744 - RNA, 18 nt, Artificial Sequence
  Synthetic
acauaaucacauuuauuu

SEQ ID NO: 150745 - RNA, 19 nt, Artificial Sequence
  Synthetic
aacauaaucacauuuauuu

SEQ ID NO: 150746 - RNA, 20 nt, Artificial Sequence
  Synthetic
uaacauaaucacauuuauuu

SEQ ID NO: 150747 - RNA, 21 nt, Artificial Sequence
  Synthetic
auaacauaaucacauuuauuu

SEQ ID NO: 150748 - RNA, 22 nt, Artificial Sequence
  Synthetic
uauaacauaaucacauuuauuu

SEQ ID NO: 150749 - RNA, 24 nt, Artificial Sequence
  Synthetic
uguauaacauaaucacauuuauuu

SEQ ID NO: 150750 - RNA, 18 nt, Artificial Sequence
  Synthetic
uauaucucacauuuauuu

SEQ ID NO: 150751 - RNA, 20 nt, Artificial Sequence
  Synthetic
uguauaucucacauuuauuu

SEQ ID NO: 150752 - RNA, 18 nt, Artificial Sequence
  Synthetic
uuaaaaaaaauuuuauuu

SEQ ID NO: 150753 - RNA, 19 nt, Artificial Sequence
  Synthetic
auuaaaaaaaauuuuauuu

SEQ ID NO: 150754 - RNA, 21 nt, Artificial Sequence
  Synthetic
agauuaaaaaaaauuuuauuu

SEQ ID NO: 150755 - RNA, 23 nt, Artificial Sequence
  Synthetic
ugagauuaaaaaaaauuuuauuu

SEQ ID NO: 150756 - RNA, 24 nt, Artificial Sequence
  Synthetic
cugagauuaaaaaaaauuuuauuu

SEQ ID NO: 150757 - RNA, 20 nt, Artificial Sequence
  Synthetic
agggggcaugagcaaacuuu

SEQ ID NO: 150758 - RNA, 18 nt, Artificial Sequence
  Synthetic
uucaguccuugaaacuuu

SEQ ID NO: 150759 - RNA, 19 nt, Artificial Sequence
  Synthetic
uuucaguccuugaaacuuu

SEQ ID NO: 150760 - RNA, 20 nt, Artificial Sequence
  Synthetic
uuuucaguccuugaaacuuu

SEQ ID NO: 150761 - RNA, 18 nt, Artificial Sequence
  Synthetic
cuguaaucccagcacuuu

SEQ ID NO: 150762 - RNA, 21 nt, Artificial Sequence
  Synthetic
cgccuguaaucccagcacuuu

SEQ ID NO: 150763 - RNA, 22 nt, Artificial Sequence
  Synthetic
acgccuguaaucccagcacuuu

SEQ ID NO: 150764 - RNA, 23 nt, Artificial Sequence
  Synthetic
uacgccuguaaucccagcacuuu

SEQ ID NO: 150765 - RNA, 24 nt, Artificial Sequence
  Synthetic
uuacgccuguaaucccagcacuuu

SEQ ID NO: 150766 - RNA, 21 nt, Artificial Sequence
  Synthetic
ugccuguaaucccagcacuuu

SEQ ID NO: 150767 - RNA, 22 nt, Artificial Sequence
  Synthetic
augccuguaaucccagcacuuu

SEQ ID NO: 150768 - RNA, 23 nt, Artificial Sequence
  Synthetic
caugccuguaaucccagcacuuu

SEQ ID NO: 150769 - RNA, 19 nt, Artificial Sequence
  Synthetic
ucuguaaucccagcacuuu

SEQ ID NO: 150770 - RNA, 21 nt, Artificial Sequence
  Synthetic
ugucuguaaucccagcacuuu

SEQ ID NO: 150771 - RNA, 22 nt, Artificial Sequence
  Synthetic
augucuguaaucccagcacuuu

SEQ ID NO: 150772 - RNA, 23 nt, Artificial Sequence
  Synthetic
caugucuguaaucccagcacuuu

SEQ ID NO: 150773 - RNA, 24 nt, Artificial Sequence
  Synthetic
ucaugucuguaaucccagcacuuu

SEQ ID NO: 150774 - RNA, 18 nt, Artificial Sequence
  Synthetic
cuuuuucucucucacuuu

SEQ ID NO: 150775 - RNA, 19 nt, Artificial Sequence
  Synthetic
ccuuuuucucucucacuuu

SEQ ID NO: 150776 - RNA, 20 nt, Artificial Sequence
  Synthetic
uccuuuuucucucucacuuu

SEQ ID NO: 150777 - RNA, 18 nt, Artificial Sequence
  Synthetic
acacucaucaaugacuuu

SEQ ID NO: 150778 - RNA, 19 nt, Artificial Sequence
  Synthetic
aacacucaucaaugacuuu

SEQ ID NO: 150779 - RNA, 20 nt, Artificial Sequence
  Synthetic
caacacucaucaaugacuuu

SEQ ID NO: 150780 - RNA, 21 nt, Artificial Sequence
  Synthetic
ccaacacucaucaaugacuuu

SEQ ID NO: 150781 - RNA, 22 nt, Artificial Sequence
  Synthetic
uccaacacucaucaaugacuuu

SEQ ID NO: 150782 - RNA, 23 nt, Artificial Sequence
  Synthetic
uuccaacacucaucaaugacuuu

SEQ ID NO: 150783 - RNA, 24 nt, Artificial Sequence
  Synthetic
auuccaacacucaucaaugacuuu

SEQ ID NO: 150784 - RNA, 18 nt, Artificial Sequence
  Synthetic
uaauuuuaaaaauacuuu

SEQ ID NO: 150785 - RNA, 19 nt, Artificial Sequence
  Synthetic
auaauuuuaaaaauacuuu

SEQ ID NO: 150786 - RNA, 20 nt, Artificial Sequence
  Synthetic
aauaauuuuaaaaauacuuu

SEQ ID NO: 150787 - RNA, 18 nt, Artificial Sequence
  Synthetic
cccacgauuggcuacuuu

SEQ ID NO: 150788 - RNA, 19 nt, Artificial Sequence
  Synthetic
ccccacgauuggcuacuuu

SEQ ID NO: 150789 - RNA, 20 nt, Artificial Sequence
  Synthetic
uccccacgauuggcuacuuu

SEQ ID NO: 150790 - RNA, 21 nt, Artificial Sequence
  Synthetic
cuccccacgauuggcuacuuu

SEQ ID NO: 150791 - RNA, 22 nt, Artificial Sequence
  Synthetic
ccuccccacgauuggcuacuuu

SEQ ID NO: 150792 - RNA, 23 nt, Artificial Sequence
  Synthetic
uccuccccacgauuggcuacuuu

SEQ ID NO: 150793 - RNA, 24 nt, Artificial Sequence
  Synthetic
auccuccccacgauuggcuacuuu

SEQ ID NO: 150794 - RNA, 18 nt, Artificial Sequence
  Synthetic
cuccagggaaguuacuuu

SEQ ID NO: 150795 - RNA, 19 nt, Artificial Sequence
  Synthetic
acuccagggaaguuacuuu

SEQ ID NO: 150796 - RNA, 20 nt, Artificial Sequence
  Synthetic
aacuccagggaaguuacuuu

SEQ ID NO: 150797 - RNA, 18 nt, Artificial Sequence
  Synthetic
ccaaugagcauuuacuuu

SEQ ID NO: 150798 - RNA, 19 nt, Artificial Sequence
  Synthetic
uccaaugagcauuuacuuu

SEQ ID NO: 150799 - RNA, 20 nt, Artificial Sequence
  Synthetic
cuccaaugagcauuuacuuu

SEQ ID NO: 150800 - RNA, 21 nt, Artificial Sequence
  Synthetic
acuccaaugagcauuuacuuu

SEQ ID NO: 150801 - RNA, 22 nt, Artificial Sequence
  Synthetic
uacuccaaugagcauuuacuuu

SEQ ID NO: 150802 - RNA, 23 nt, Artificial Sequence
  Synthetic
auacuccaaugagcauuuacuuu

SEQ ID NO: 150803 - RNA, 24 nt, Artificial Sequence
  Synthetic
aauacuccaaugagcauuuacuuu

SEQ ID NO: 150804 - RNA, 18 nt, Artificial Sequence
  Synthetic
cuuuuuacuucucccuuu

SEQ ID NO: 150805 - RNA, 19 nt, Artificial Sequence
  Synthetic
ccuuuuuacuucucccuuu

SEQ ID NO: 150806 - RNA, 20 nt, Artificial Sequence
  Synthetic
uccuuuuuacuucucccuuu

SEQ ID NO: 150807 - RNA, 21 nt, Artificial Sequence
  Synthetic
uuccuuuuuacuucucccuuu

SEQ ID NO: 150808 - RNA, 22 nt, Artificial Sequence
  Synthetic
uuuccuuuuuacuucucccuuu

SEQ ID NO: 150809 - RNA, 23 nt, Artificial Sequence
  Synthetic
uuuuccuuuuuacuucucccuuu

SEQ ID NO: 150810 - RNA, 24 nt, Artificial Sequence
  Synthetic
uuuuuccuuuuuacuucucccuuu

SEQ ID NO: 150811 - RNA, 21 nt, Artificial Sequence
  Synthetic
uaauggucacgucaggccuuu

SEQ ID NO: 150812 - RNA, 23 nt, Artificial Sequence
  Synthetic
uguaauggucacgucaggccuuu

SEQ ID NO: 150813 - RNA, 18 nt, Artificial Sequence
  Synthetic
cuuuuucuuucugccuuu

SEQ ID NO: 150814 - RNA, 19 nt, Artificial Sequence
  Synthetic
ucuuuuucuuucugccuuu

SEQ ID NO: 150815 - RNA, 20 nt, Artificial Sequence
  Synthetic
uucuuuuucuuucugccuuu

SEQ ID NO: 150816 - RNA, 21 nt, Artificial Sequence
  Synthetic
uuucuuuuucuuucugccuuu

SEQ ID NO: 150817 - RNA, 22 nt, Artificial Sequence
  Synthetic
cuuucuuuuucuuucugccuuu

SEQ ID NO: 150818 - RNA, 23 nt, Artificial Sequence
  Synthetic
ucuuucuuuuucuuucugccuuu

SEQ ID NO: 150819 - RNA, 24 nt, Artificial Sequence
  Synthetic
uucuuucuuuuucuuucugccuuu

SEQ ID NO: 150820 - RNA, 18 nt, Artificial Sequence
  Synthetic
aguuuugaggguuccuuu

SEQ ID NO: 150821 - RNA, 19 nt, Artificial Sequence
  Synthetic
uaguuuugaggguuccuuu

SEQ ID NO: 150822 - RNA, 20 nt, Artificial Sequence
  Synthetic
auaguuuugaggguuccuuu

SEQ ID NO: 150823 - RNA, 21 nt, Artificial Sequence
  Synthetic
uauaguuuugaggguuccuuu

SEQ ID NO: 150824 - RNA, 23 nt, Artificial Sequence
  Synthetic
uguauaguuuugaggguuccuuu

SEQ ID NO: 150825 - RNA, 24 nt, Artificial Sequence
  Synthetic
uuguauaguuuugaggguuccuuu

SEQ ID NO: 150826 - RNA, 18 nt, Artificial Sequence
  Synthetic
ucugaugggcuuuccuuu

SEQ ID NO: 150827 - RNA, 20 nt, Artificial Sequence
  Synthetic
agucugaugggcuuuccuuu

SEQ ID NO: 150828 - RNA, 21 nt, Artificial Sequence
  Synthetic
uagucugaugggcuuuccuuu

SEQ ID NO: 150829 - RNA, 22 nt, Artificial Sequence
  Synthetic
uuagucugaugggcuuuccuuu

SEQ ID NO: 150830 - RNA, 24 nt, Artificial Sequence
  Synthetic
uguuagucugaugggcuuuccuuu

SEQ ID NO: 150831 - RNA, 18 nt, Artificial Sequence
  Synthetic
ucaaaaauuuucagcuuu

SEQ ID NO: 150832 - RNA, 19 nt, Artificial Sequence
  Synthetic
cucaaaaauuuucagcuuu

SEQ ID NO: 150833 - RNA, 21 nt, Artificial Sequence
  Synthetic
cgcucaaaaauuuucagcuuu

SEQ ID NO: 150834 - RNA, 24 nt, Artificial Sequence
  Synthetic
cggcgcucaaaaauuuucagcuuu

SEQ ID NO: 150835 - RNA, 19 nt, Artificial Sequence
  Synthetic
agcauuucuagugagcuuu

SEQ ID NO: 150836 - RNA, 20 nt, Artificial Sequence
  Synthetic
aagcauuucuagugagcuuu

SEQ ID NO: 150837 - RNA, 18 nt, Artificial Sequence
  Synthetic
uuauugauguugagcuuu

SEQ ID NO: 150838 - RNA, 19 nt, Artificial Sequence
  Synthetic
uuuauugauguugagcuuu

SEQ ID NO: 150839 - RNA, 20 nt, Artificial Sequence
  Synthetic
auuuauugauguugagcuuu

SEQ ID NO: 150840 - RNA, 18 nt, Artificial Sequence
  Synthetic
uuuguuugcaaaugcuuu

SEQ ID NO: 150841 - RNA, 19 nt, Artificial Sequence
  Synthetic
auuuguuugcaaaugcuuu

SEQ ID NO: 150842 - RNA, 20 nt, Artificial Sequence
  Synthetic
aauuuguuugcaaaugcuuu

SEQ ID NO: 150843 - RNA, 18 nt, Artificial Sequence
  Synthetic
uauuuuuaaauaugcuuu

SEQ ID NO: 150844 - RNA, 19 nt, Artificial Sequence
  Synthetic
uuauuuuuaaauaugcuuu

SEQ ID NO: 150845 - RNA, 20 nt, Artificial Sequence
  Synthetic
uuuauuuuuaaauaugcuuu

SEQ ID NO: 150846 - RNA, 18 nt, Artificial Sequence
  Synthetic
cuagauauuuucugcuuu

SEQ ID NO: 150847 - RNA, 19 nt, Artificial Sequence
  Synthetic
acuagauauuuucugcuuu

SEQ ID NO: 150848 - RNA, 20 nt, Artificial Sequence
  Synthetic
uacuagauauuuucugcuuu

SEQ ID NO: 150849 - RNA, 18 nt, Artificial Sequence
  Synthetic
ucacucaggacuugcuuu

SEQ ID NO: 150850 - RNA, 21 nt, Artificial Sequence
  Synthetic
aggucacucaggacuugcuuu

SEQ ID NO: 150851 - RNA, 22 nt, Artificial Sequence
  Synthetic
uaggucacucaggacuugcuuu

SEQ ID NO: 150852 - RNA, 24 nt, Artificial Sequence
  Synthetic
uguaggucacucaggacuugcuuu

SEQ ID NO: 150853 - RNA, 18 nt, Artificial Sequence
  Synthetic
auuccaaaccauaucuuu

SEQ ID NO: 150854 - RNA, 19 nt, Artificial Sequence
  Synthetic
aauuccaaaccauaucuuu

SEQ ID NO: 150855 - RNA, 20 nt, Artificial Sequence
  Synthetic
caauuccaaaccauaucuuu

SEQ ID NO: 150856 - RNA, 21 nt, Artificial Sequence
  Synthetic
ccaauuccaaaccauaucuuu

SEQ ID NO: 150857 - RNA, 22 nt, Artificial Sequence
  Synthetic
uccaauuccaaaccauaucuuu

SEQ ID NO: 150858 - RNA, 23 nt, Artificial Sequence
  Synthetic
uuccaauuccaaaccauaucuuu

SEQ ID NO: 150859 - RNA, 24 nt, Artificial Sequence
  Synthetic
uuuccaauuccaaaccauaucuuu

SEQ ID NO: 150860 - RNA, 18 nt, Artificial Sequence
  Synthetic
auaauuuuuucuaucuuu

SEQ ID NO: 150861 - RNA, 19 nt, Artificial Sequence
  Synthetic
aauaauuuuuucuaucuuu

SEQ ID NO: 150862 - RNA, 20 nt, Artificial Sequence
  Synthetic
aaauaauuuuuucuaucuuu

SEQ ID NO: 150863 - RNA, 18 nt, Artificial Sequence
  Synthetic
auauguuucuuccucuuu

SEQ ID NO: 150864 - RNA, 19 nt, Artificial Sequence
  Synthetic
uauauguuucuuccucuuu

SEQ ID NO: 150865 - RNA, 20 nt, Artificial Sequence
  Synthetic
auauauguuucuuccucuuu

SEQ ID NO: 150866 - RNA, 18 nt, Artificial Sequence
  Synthetic
uuuugucaaaugcucuuu

SEQ ID NO: 150867 - RNA, 19 nt, Artificial Sequence
  Synthetic
auuuugucaaaugcucuuu

SEQ ID NO: 150868 - RNA, 20 nt, Artificial Sequence
  Synthetic
aauuuugucaaaugcucuuu

SEQ ID NO: 150869 - RNA, 22 nt, Artificial Sequence
  Synthetic
ugaauuuugucaaaugcucuuu

SEQ ID NO: 150870 - RNA, 23 nt, Artificial Sequence
  Synthetic
uugaauuuugucaaaugcucuuu

SEQ ID NO: 150871 - RNA, 18 nt, Artificial Sequence
  Synthetic
ugucaauuugugcucuuu

SEQ ID NO: 150872 - RNA, 19 nt, Artificial Sequence
  Synthetic
uugucaauuugugcucuuu

SEQ ID NO: 150873 - RNA, 22 nt, Artificial Sequence
  Synthetic
agguugucaauuugugcucuuu

SEQ ID NO: 150874 - RNA, 23 nt, Artificial Sequence
  Synthetic
uagguugucaauuugugcucuuu

SEQ ID NO: 150875 - RNA, 24 nt, Artificial Sequence
  Synthetic
uuagguugucaauuugugcucuuu

SEQ ID NO: 150876 - RNA, 18 nt, Artificial Sequence
  Synthetic
ccuucuuucucucucuuu

SEQ ID NO: 150877 - RNA, 19 nt, Artificial Sequence
  Synthetic
accuucuuucucucucuuu

SEQ ID NO: 150878 - RNA, 18 nt, Artificial Sequence
  Synthetic
ucuucacaccaagucuuu

SEQ ID NO: 150879 - RNA, 19 nt, Artificial Sequence
  Synthetic
cucuucacaccaagucuuu

SEQ ID NO: 150880 - RNA, 21 nt, Artificial Sequence
  Synthetic
agcucuucacaccaagucuuu

SEQ ID NO: 150881 - RNA, 23 nt, Artificial Sequence
  Synthetic
agagcucuucacaccaagucuuu

SEQ ID NO: 150882 - RNA, 24 nt, Artificial Sequence
  Synthetic
cagagcucuucacaccaagucuuu

SEQ ID NO: 150883 - RNA, 19 nt, Artificial Sequence
  Synthetic
uggagcugggauggucuuu

SEQ ID NO: 150884 - RNA, 20 nt, Artificial Sequence
  Synthetic
cuggagcugggauggucuuu

SEQ ID NO: 150885 - RNA, 21 nt, Artificial Sequence
  Synthetic
acuggagcugggauggucuuu

SEQ ID NO: 150886 - RNA, 22 nt, Artificial Sequence
  Synthetic
cacuggagcugggauggucuuu

SEQ ID NO: 150887 - RNA, 23 nt, Artificial Sequence
  Synthetic
acacuggagcugggauggucuuu

SEQ ID NO: 150888 - RNA, 18 nt, Artificial Sequence
  Synthetic
uugaaaauucuuuucuuu

SEQ ID NO: 150889 - RNA, 22 nt, Artificial Sequence
  Synthetic
uggguugaaaauucuuuucuuu

SEQ ID NO: 150890 - RNA, 23 nt, Artificial Sequence
  Synthetic
cuggguugaaaauucuuuucuuu

SEQ ID NO: 150891 - RNA, 24 nt, Artificial Sequence
  Synthetic
ucuggguugaaaauucuuuucuuu

SEQ ID NO: 150892 - RNA, 18 nt, Artificial Sequence
  Synthetic
uauaaaaugaaaaaguuu

SEQ ID NO: 150893 - RNA, 19 nt, Artificial Sequence
  Synthetic
uuauaaaaugaaaaaguuu

SEQ ID NO: 150894 - RNA, 20 nt, Artificial Sequence
  Synthetic
uuuauaaaaugaaaaaguuu

SEQ ID NO: 150895 - RNA, 18 nt, Artificial Sequence
  Synthetic
aaagggaaaaggaaguuu

SEQ ID NO: 150896 - RNA, 19 nt, Artificial Sequence
  Synthetic
caaagggaaaaggaaguuu

SEQ ID NO: 150897 - RNA, 18 nt, Artificial Sequence
  Synthetic
uaaaacauaaggaaguuu

SEQ ID NO: 150898 - RNA, 19 nt, Artificial Sequence
  Synthetic
uuaaaacauaaggaaguuu

SEQ ID NO: 150899 - RNA, 20 nt, Artificial Sequence
  Synthetic
auuaaaacauaaggaaguuu

SEQ ID NO: 150900 - RNA, 18 nt, Artificial Sequence
  Synthetic
uaauuauacuuuaaguuu

SEQ ID NO: 150901 - RNA, 19 nt, Artificial Sequence
  Synthetic
uuaauuauacuuuaaguuu

SEQ ID NO: 150902 - RNA, 20 nt, Artificial Sequence
  Synthetic
uuuaauuauacuuuaaguuu

SEQ ID NO: 150903 - RNA, 21 nt, Artificial Sequence
  Synthetic
uuuuaauuauacuuuaaguuu

SEQ ID NO: 150904 - RNA, 22 nt, Artificial Sequence
  Synthetic
uuuuuaauuauacuuuaaguuu

SEQ ID NO: 150905 - RNA, 23 nt, Artificial Sequence
  Synthetic
uuuuuuaauuauacuuuaaguuu

SEQ ID NO: 150906 - RNA, 24 nt, Artificial Sequence
  Synthetic
uuuuuuuaauuauacuuuaaguuu

SEQ ID NO: 150907 - RNA, 18 nt, Artificial Sequence
  Synthetic
uuauuauacuuuaaguuu

SEQ ID NO: 150908 - RNA, 19 nt, Artificial Sequence
  Synthetic
auuauuauacuuuaaguuu

SEQ ID NO: 150909 - RNA, 20 nt, Artificial Sequence
  Synthetic
uauuauuauacuuuaaguuu

SEQ ID NO: 150910 - RNA, 19 nt, Artificial Sequence
  Synthetic
uuuauuauacuuuaaguuu

SEQ ID NO: 150911 - RNA, 20 nt, Artificial Sequence
  Synthetic
uuuuauuauacuuuaaguuu

SEQ ID NO: 150912 - RNA, 18 nt, Artificial Sequence
  Synthetic
uuauucuacuuuaaguuu

SEQ ID NO: 150913 - RNA, 19 nt, Artificial Sequence
  Synthetic
uuuauucuacuuuaaguuu

SEQ ID NO: 150914 - RNA, 20 nt, Artificial Sequence
  Synthetic
uuuuauucuacuuuaaguuu

SEQ ID NO: 150915 - RNA, 21 nt, Artificial Sequence
  Synthetic
uuuuuauucuacuuuaaguuu

SEQ ID NO: 150916 - RNA, 22 nt, Artificial Sequence
  Synthetic
uuuuuuauucuacuuuaaguuu

SEQ ID NO: 150917 - RNA, 23 nt, Artificial Sequence
  Synthetic
uuuuuuuauucuacuuuaaguuu

SEQ ID NO: 150918 - RNA, 24 nt, Artificial Sequence
  Synthetic
uuuuuuuuauucuacuuuaaguuu

SEQ ID NO: 150919 - RNA, 18 nt, Artificial Sequence
  Synthetic
auaaauuuaacacaguuu

SEQ ID NO: 150920 - RNA, 19 nt, Artificial Sequence
  Synthetic
aauaaauuuaacacaguuu

SEQ ID NO: 150921 - RNA, 20 nt, Artificial Sequence
  Synthetic
aaauaaauuuaacacaguuu

SEQ ID NO: 150922 - RNA, 19 nt, Artificial Sequence
  Synthetic
agauuaauuuugccaguuu

SEQ ID NO: 150923 - RNA, 20 nt, Artificial Sequence
  Synthetic
uagauuaauuuugccaguuu

SEQ ID NO: 150924 - RNA, 21 nt, Artificial Sequence
  Synthetic
auagauuaauuuugccaguuu

SEQ ID NO: 150925 - RNA, 22 nt, Artificial Sequence
  Synthetic
cauagauuaauuuugccaguuu

SEQ ID NO: 150926 - RNA, 23 nt, Artificial Sequence
  Synthetic
ccauagauuaauuuugccaguuu

SEQ ID NO: 150927 - RNA, 24 nt, Artificial Sequence
  Synthetic
accauagauuaauuuugccaguuu

SEQ ID NO: 150928 - RNA, 18 nt, Artificial Sequence
  Synthetic
cacuguggaaagcaguuu

SEQ ID NO: 150929 - RNA, 19 nt, Artificial Sequence
  Synthetic
ccacuguggaaagcaguuu

SEQ ID NO: 150930 - RNA, 20 nt, Artificial Sequence
  Synthetic
cccacuguggaaagcaguuu

SEQ ID NO: 150931 - RNA, 21 nt, Artificial Sequence
  Synthetic
acccacuguggaaagcaguuu

SEQ ID NO: 150932 - RNA, 22 nt, Artificial Sequence
  Synthetic
cacccacuguggaaagcaguuu

SEQ ID NO: 150933 - RNA, 23 nt, Artificial Sequence
  Synthetic
ucacccacuguggaaagcaguuu

SEQ ID NO: 150934 - RNA, 24 nt, Artificial Sequence
  Synthetic
uucacccacuguggaaagcaguuu

SEQ ID NO: 150935 - RNA, 18 nt, Artificial Sequence
  Synthetic
agacugcaaacucaguuu

SEQ ID NO: 150936 - RNA, 19 nt, Artificial Sequence
  Synthetic
cagacugcaaacucaguuu

SEQ ID NO: 150937 - RNA, 18 nt, Artificial Sequence
  Synthetic
acgaauaauuuugaguuu

SEQ ID NO: 150938 - RNA, 20 nt, Artificial Sequence
  Synthetic
agacgaauaauuuugaguuu

SEQ ID NO: 150939 - RNA, 18 nt, Artificial Sequence
  Synthetic
uguuuuauauaauaguuu

SEQ ID NO: 150940 - RNA, 19 nt, Artificial Sequence
  Synthetic
uuguuuuauauaauaguuu

SEQ ID NO: 150941 - RNA, 20 nt, Artificial Sequence
  Synthetic
uuuguuuuauauaauaguuu

SEQ ID NO: 150942 - RNA, 21 nt, Artificial Sequence
  Synthetic
auggggaauucuucauaguuu

SEQ ID NO: 150943 - RNA, 22 nt, Artificial Sequence
  Synthetic
cauggggaauucuucauaguuu

SEQ ID NO: 150944 - RNA, 18 nt, Artificial Sequence
  Synthetic
cuagaaaucuuauaguuu

SEQ ID NO: 150945 - RNA, 19 nt, Artificial Sequence
  Synthetic
ucuagaaaucuuauaguuu

SEQ ID NO: 150946 - RNA, 20 nt, Artificial Sequence
  Synthetic
uucuagaaaucuuauaguuu

SEQ ID NO: 150947 - RNA, 18 nt, Artificial Sequence
  Synthetic
auguuauuuuuaacguuu

SEQ ID NO: 150948 - RNA, 19 nt, Artificial Sequence
  Synthetic
aauguuauuuuuaacguuu

SEQ ID NO: 150949 - RNA, 20 nt, Artificial Sequence
  Synthetic
aaauguuauuuuuaacguuu

SEQ ID NO: 150950 - RNA, 18 nt, Artificial Sequence
  Synthetic
agguguguggauucguuu

SEQ ID NO: 150951 - RNA, 19 nt, Artificial Sequence
  Synthetic
uagguguguggauucguuu

SEQ ID NO: 150952 - RNA, 21 nt, Artificial Sequence
  Synthetic
uguagguguguggauucguuu

SEQ ID NO: 150953 - RNA, 22 nt, Artificial Sequence
  Synthetic
cuguagguguguggauucguuu

SEQ ID NO: 150954 - RNA, 23 nt, Artificial Sequence
  Synthetic
acuguagguguguggauucguuu

SEQ ID NO: 150955 - RNA, 24 nt, Artificial Sequence
  Synthetic
aacuguagguguguggauucguuu

SEQ ID NO: 150956 - RNA, 18 nt, Artificial Sequence
  Synthetic
agagaauaaagcagguuu

SEQ ID NO: 150957 - RNA, 18 nt, Artificial Sequence
  Synthetic
agaauauaaaguggguuu

SEQ ID NO: 150958 - RNA, 19 nt, Artificial Sequence
  Synthetic
cagaauauaaaguggguuu

SEQ ID NO: 150959 - RNA, 20 nt, Artificial Sequence
  Synthetic
acagaauauaaaguggguuu

SEQ ID NO: 150960 - RNA, 21 nt, Artificial Sequence
  Synthetic
aacagaauauaaaguggguuu

SEQ ID NO: 150961 - RNA, 22 nt, Artificial Sequence
  Synthetic
aaacagaauauaaaguggguuu

SEQ ID NO: 150962 - RNA, 24 nt, Artificial Sequence
  Synthetic
agaaacagaauauaaaguggguuu

SEQ ID NO: 150963 - RNA, 18 nt, Artificial Sequence
  Synthetic
uaaaguuacaaaugguuu

SEQ ID NO: 150964 - RNA, 19 nt, Artificial Sequence
  Synthetic
uuaaaguuacaaaugguuu

SEQ ID NO: 150965 - RNA, 20 nt, Artificial Sequence
  Synthetic
cuuaaaguuacaaaugguuu

SEQ ID NO: 150966 - RNA, 18 nt, Artificial Sequence
  Synthetic
aaugguaucagaugguuu

SEQ ID NO: 150967 - RNA, 20 nt, Artificial Sequence
  Synthetic
ugaaugguaucagaugguuu

SEQ ID NO: 150968 - RNA, 18 nt, Artificial Sequence
  Synthetic
uaaaauauuuucauguuu

SEQ ID NO: 150969 - RNA, 19 nt, Artificial Sequence
  Synthetic
uuaaaauauuuucauguuu

SEQ ID NO: 150970 - RNA, 20 nt, Artificial Sequence
  Synthetic
uuuaaaauauuuucauguuu

SEQ ID NO: 150971 - RNA, 18 nt, Artificial Sequence
  Synthetic
agaaagcauuugauguuu

SEQ ID NO: 150972 - RNA, 19 nt, Artificial Sequence
  Synthetic
aagaaagcauuugauguuu

SEQ ID NO: 150973 - RNA, 20 nt, Artificial Sequence
  Synthetic
aaagaaagcauuugauguuu

SEQ ID NO: 150974 - RNA, 18 nt, Artificial Sequence
  Synthetic
uucacucaacaacuguuu

SEQ ID NO: 150975 - RNA, 19 nt, Artificial Sequence
  Synthetic
auucacucaacaacuguuu

SEQ ID NO: 150976 - RNA, 20 nt, Artificial Sequence
  Synthetic
uauucacucaacaacuguuu

SEQ ID NO: 150977 - RNA, 21 nt, Artificial Sequence
  Synthetic
uuauucacucaacaacuguuu

SEQ ID NO: 150978 - RNA, 22 nt, Artificial Sequence
  Synthetic
uuuauucacucaacaacuguuu

SEQ ID NO: 150979 - RNA, 23 nt, Artificial Sequence
  Synthetic
auuuauucacucaacaacuguuu

SEQ ID NO: 150980 - RNA, 24 nt, Artificial Sequence
  Synthetic
cauuuauucacucaacaacuguuu

SEQ ID NO: 150981 - RNA, 18 nt, Artificial Sequence
  Synthetic
uacucaacucugcuguuu

SEQ ID NO: 150982 - RNA, 19 nt, Artificial Sequence
  Synthetic
cuacucaacucugcuguuu

SEQ ID NO: 150983 - RNA, 20 nt, Artificial Sequence
  Synthetic
acuacucaacucugcuguuu

SEQ ID NO: 150984 - RNA, 21 nt, Artificial Sequence
  Synthetic
aacuacucaacucugcuguuu

SEQ ID NO: 150985 - RNA, 22 nt, Artificial Sequence
  Synthetic
caacuacucaacucugcuguuu

SEQ ID NO: 150986 - RNA, 23 nt, Artificial Sequence
  Synthetic
acaacuacucaacucugcuguuu

SEQ ID NO: 150987 - RNA, 24 nt, Artificial Sequence
  Synthetic
cacaacuacucaacucugcuguuu

SEQ ID NO: 150988 - RNA, 18 nt, Artificial Sequence
  Synthetic
auauuugacuuucuguuu

SEQ ID NO: 150989 - RNA, 19 nt, Artificial Sequence
  Synthetic
aauauuugacuuucuguuu

SEQ ID NO: 150990 - RNA, 20 nt, Artificial Sequence
  Synthetic
caauauuugacuuucuguuu

SEQ ID NO: 150991 - RNA, 22 nt, Artificial Sequence
  Synthetic
ugcaauauuugacuuucuguuu

SEQ ID NO: 150992 - RNA, 23 nt, Artificial Sequence
  Synthetic
augcaauauuugacuuucuguuu

SEQ ID NO: 150993 - RNA, 24 nt, Artificial Sequence
  Synthetic
caugcaauauuugacuuucuguuu

SEQ ID NO: 150994 - RNA, 21 nt, Artificial Sequence
  Synthetic
uuguucauuacuuuucuguuu

SEQ ID NO: 150995 - RNA, 22 nt, Artificial Sequence
  Synthetic
auuguucauuacuuuucuguuu

SEQ ID NO: 150996 - RNA, 23 nt, Artificial Sequence
  Synthetic
cauuguucauuacuuuucuguuu

SEQ ID NO: 150997 - RNA, 24 nt, Artificial Sequence
  Synthetic
ucauuguucauuacuuuucuguuu

SEQ ID NO: 150998 - RNA, 18 nt, Artificial Sequence
  Synthetic
uaaaggauuaauguguuu

SEQ ID NO: 150999 - RNA, 19 nt, Artificial Sequence
  Synthetic
uuaaaggauuaauguguuu

SEQ ID NO: 151000 - RNA, 20 nt, Artificial Sequence
  Synthetic
auuaaaggauuaauguguuu

SEQ ID NO: 151001 - RNA, 18 nt, Artificial Sequence
  Synthetic
uguuugugcucuguguuu

SEQ ID NO: 151002 - RNA, 19 nt, Artificial Sequence
  Synthetic
uuguuugugcucuguguuu

SEQ ID NO: 151003 - RNA, 20 nt, Artificial Sequence
  Synthetic
uuuguuugugcucuguguuu

SEQ ID NO: 151004 - RNA, 18 nt, Artificial Sequence
  Synthetic
uuuguguugauuguguuu

SEQ ID NO: 151005 - RNA, 19 nt, Artificial Sequence
  Synthetic
uuuuguguugauuguguuu

SEQ ID NO: 151006 - RNA, 20 nt, Artificial Sequence
  Synthetic
uuuuuguguugauuguguuu

SEQ ID NO: 151007 - RNA, 18 nt, Artificial Sequence
  Synthetic
cacaaaaaauaauuguuu

SEQ ID NO: 151008 - RNA, 19 nt, Artificial Sequence
  Synthetic
acacaaaaaauaauuguuu

SEQ ID NO: 151009 - RNA, 20 nt, Artificial Sequence
  Synthetic
uacacaaaaaauaauuguuu

SEQ ID NO: 151010 - RNA, 20 nt, Artificial Sequence
  Synthetic
uggaagcaauaauuuuguuu

SEQ ID NO: 151011 - RNA, 18 nt, Artificial Sequence
  Synthetic
uagggaagaaauaauuuu

SEQ ID NO: 151012 - RNA, 19 nt, Artificial Sequence
  Synthetic
auagggaagaaauaauuuu

SEQ ID NO: 151013 - RNA, 20 nt, Artificial Sequence
  Synthetic
aauagggaagaaauaauuuu

SEQ ID NO: 151014 - RNA, 18 nt, Artificial Sequence
  Synthetic
uaaagaaaacauaauuuu

SEQ ID NO: 151015 - RNA, 19 nt, Artificial Sequence
  Synthetic
uuaaagaaaacauaauuuu

SEQ ID NO: 151016 - RNA, 20 nt, Artificial Sequence
  Synthetic
auuaaagaaaacauaauuuu

SEQ ID NO: 151017 - RNA, 18 nt, Artificial Sequence
  Synthetic
cacauauucuuuaauuuu

SEQ ID NO: 151018 - RNA, 19 nt, Artificial Sequence
  Synthetic
ucacauauucuuuaauuuu

SEQ ID NO: 151019 - RNA, 20 nt, Artificial Sequence
  Synthetic
uucacauauucuuuaauuuu

SEQ ID NO: 151020 - RNA, 18 nt, Artificial Sequence
  Synthetic
aaaauaugaauacauuuu

SEQ ID NO: 151021 - RNA, 19 nt, Artificial Sequence
  Synthetic
aaaaauaugaauacauuuu

SEQ ID NO: 151022 - RNA, 20 nt, Artificial Sequence
  Synthetic
caaaaauaugaauacauuuu

SEQ ID NO: 151023 - RNA, 18 nt, Artificial Sequence
  Synthetic
caucaauuuauacauuuu

SEQ ID NO: 151024 - RNA, 19 nt, Artificial Sequence
  Synthetic
ucaucaauuuauacauuuu

SEQ ID NO: 151025 - RNA, 20 nt, Artificial Sequence
  Synthetic
uucaucaauuuauacauuuu

SEQ ID NO: 151026 - RNA, 21 nt, Artificial Sequence
  Synthetic
auucaucaauuuauacauuuu

SEQ ID NO: 151027 - RNA, 22 nt, Artificial Sequence
  Synthetic
uauucaucaauuuauacauuuu

SEQ ID NO: 151028 - RNA, 23 nt, Artificial Sequence
  Synthetic
uuauucaucaauuuauacauuuu

SEQ ID NO: 151029 - RNA, 24 nt, Artificial Sequence
  Synthetic
auuauucaucaauuuauacauuuu

SEQ ID NO: 151030 - RNA, 18 nt, Artificial Sequence
  Synthetic
uacauauuguuccauuuu

SEQ ID NO: 151031 - RNA, 19 nt, Artificial Sequence
  Synthetic
cuacauauuguuccauuuu

SEQ ID NO: 151032 - RNA, 20 nt, Artificial Sequence
  Synthetic
acuacauauuguuccauuuu

SEQ ID NO: 151033 - RNA, 22 nt, Artificial Sequence
  Synthetic
ugacuacauauuguuccauuuu

SEQ ID NO: 151034 - RNA, 23 nt, Artificial Sequence
  Synthetic
augacuacauauuguuccauuuu

SEQ ID NO: 151035 - RNA, 24 nt, Artificial Sequence
  Synthetic
aaugacuacauauuguuccauuuu

SEQ ID NO: 151036 - RNA, 18 nt, Artificial Sequence
  Synthetic
aggggaaaaaaucauuuu

SEQ ID NO: 151037 - RNA, 19 nt, Artificial Sequence
  Synthetic
aaggggaaaaaaucauuuu

SEQ ID NO: 151038 - RNA, 20 nt, Artificial Sequence
  Synthetic
aaaggggaaaaaaucauuuu

SEQ ID NO: 151039 - RNA, 18 nt, Artificial Sequence
  Synthetic
auaaaagcaacucauuuu

SEQ ID NO: 151040 - RNA, 19 nt, Artificial Sequence
  Synthetic
aauaaaagcaacucauuuu

SEQ ID NO: 151041 - RNA, 20 nt, Artificial Sequence
  Synthetic
uaauaaaagcaacucauuuu

SEQ ID NO: 151042 - RNA, 19 nt, Artificial Sequence
  Synthetic
ugaauucuuuauucauuuu

SEQ ID NO: 151043 - RNA, 20 nt, Artificial Sequence
  Synthetic
uugaauucuuuauucauuuu

SEQ ID NO: 151044 - RNA, 18 nt, Artificial Sequence
  Synthetic
acauauuuuguagauuuu

SEQ ID NO: 151045 - RNA, 19 nt, Artificial Sequence
  Synthetic
uacauauuuuguagauuuu

SEQ ID NO: 151046 - RNA, 20 nt, Artificial Sequence
  Synthetic
uuacauauuuuguagauuuu

SEQ ID NO: 151047 - RNA, 18 nt, Artificial Sequence
  Synthetic
uaagggcccuaggauuuu

SEQ ID NO: 151048 - RNA, 19 nt, Artificial Sequence
  Synthetic
uuaagggcccuaggauuuu

SEQ ID NO: 151049 - RNA, 20 nt, Artificial Sequence
  Synthetic
cuuaagggcccuaggauuuu

SEQ ID NO: 151050 - RNA, 21 nt, Artificial Sequence
  Synthetic
ucuuaagggcccuaggauuuu

SEQ ID NO: 151051 - RNA, 22 nt, Artificial Sequence
  Synthetic
aucuuaagggcccuaggauuuu

SEQ ID NO: 151052 - RNA, 23 nt, Artificial Sequence
  Synthetic
aaucuuaagggcccuaggauuuu

SEQ ID NO: 151053 - RNA, 24 nt, Artificial Sequence
  Synthetic
uaaucuuaagggcccuaggauuuu

SEQ ID NO: 151054 - RNA, 18 nt, Artificial Sequence
  Synthetic
aguccagucuuugauuuu

SEQ ID NO: 151055 - RNA, 19 nt, Artificial Sequence
  Synthetic
caguccagucuuugauuuu

SEQ ID NO: 151056 - RNA, 20 nt, Artificial Sequence
  Synthetic
ccaguccagucuuugauuuu

SEQ ID NO: 151057 - RNA, 21 nt, Artificial Sequence
  Synthetic
accaguccagucuuugauuuu

SEQ ID NO: 151058 - RNA, 22 nt, Artificial Sequence
  Synthetic
caccaguccagucuuugauuuu

SEQ ID NO: 151059 - RNA, 23 nt, Artificial Sequence
  Synthetic
ccaccaguccagucuuugauuuu

SEQ ID NO: 151060 - RNA, 24 nt, Artificial Sequence
  Synthetic
accaccaguccagucuuugauuuu

SEQ ID NO: 151061 - RNA, 20 nt, Artificial Sequence
  Synthetic
agguucaaaauaaauauuuu

SEQ ID NO: 151062 - RNA, 21 nt, Artificial Sequence
  Synthetic
uagguucaaaauaaauauuuu

SEQ ID NO: 151063 - RNA, 22 nt, Artificial Sequence
  Synthetic
auagguucaaaauaaauauuuu

SEQ ID NO: 151064 - RNA, 23 nt, Artificial Sequence
  Synthetic
aauagguucaaaauaaauauuuu

SEQ ID NO: 151065 - RNA, 24 nt, Artificial Sequence
  Synthetic
uaauagguucaaaauaaauauuuu

SEQ ID NO: 151066 - RNA, 18 nt, Artificial Sequence
  Synthetic
aucaauugucaauauuuu

SEQ ID NO: 151067 - RNA, 19 nt, Artificial Sequence
  Synthetic
uaucaauugucaauauuuu

SEQ ID NO: 151068 - RNA, 20 nt, Artificial Sequence
  Synthetic
uuaucaauugucaauauuuu

SEQ ID NO: 151069 - RNA, 18 nt, Artificial Sequence
  Synthetic
uuaauaaaauaauauuuu

SEQ ID NO: 151070 - RNA, 19 nt, Artificial Sequence
  Synthetic
auuaauaaaauaauauuuu

SEQ ID NO: 151071 - RNA, 20 nt, Artificial Sequence
  Synthetic
aauuaauaaaauaauauuuu

SEQ ID NO: 151072 - RNA, 21 nt, Artificial Sequence
  Synthetic
aaauuaauaaaauaauauuuu

SEQ ID NO: 151073 - RNA, 22 nt, Artificial Sequence
  Synthetic
aaaauuaauaaaauaauauuuu

SEQ ID NO: 151074 - RNA, 23 nt, Artificial Sequence
  Synthetic
aaaaauuaauaaaauaauauuuu

SEQ ID NO: 151075 - RNA, 24 nt, Artificial Sequence
  Synthetic
uaaaaauuaauaaaauaauauuuu

SEQ ID NO: 151076 - RNA, 18 nt, Artificial Sequence
  Synthetic
auuuuagauuauuauuuu

SEQ ID NO: 151077 - RNA, 19 nt, Artificial Sequence
  Synthetic
aauuuuagauuauuauuuu

SEQ ID NO: 151078 - RNA, 20 nt, Artificial Sequence
  Synthetic
aaauuuuagauuauuauuuu

SEQ ID NO: 151079 - RNA, 21 nt, Artificial Sequence
  Synthetic
aaaauuuuagauuauuauuuu

SEQ ID NO: 151080 - RNA, 22 nt, Artificial Sequence
  Synthetic
uaaaauuuuagauuauuauuuu

SEQ ID NO: 151081 - RNA, 23 nt, Artificial Sequence
  Synthetic
auaaaauuuuagauuauuauuuu

SEQ ID NO: 151082 - RNA, 24 nt, Artificial Sequence
  Synthetic
aauaaaauuuuagauuauuauuuu

SEQ ID NO: 151083 - RNA, 18 nt, Artificial Sequence
  Synthetic
ucucauaguauuuauuuu

SEQ ID NO: 151084 - RNA, 19 nt, Artificial Sequence
  Synthetic
uucucauaguauuuauuuu

SEQ ID NO: 151085 - RNA, 20 nt, Artificial Sequence
  Synthetic
uuucucauaguauuuauuuu

SEQ ID NO: 151086 - RNA, 18 nt, Artificial Sequence
  Synthetic
ugcuaauguauuuauuuu

SEQ ID NO: 151087 - RNA, 19 nt, Artificial Sequence
  Synthetic
uugcuaauguauuuauuuu

SEQ ID NO: 151088 - RNA, 20 nt, Artificial Sequence
  Synthetic
auugcuaauguauuuauuuu

SEQ ID NO: 151089 - RNA, 18 nt, Artificial Sequence
  Synthetic
ugguuuccuucuacuuuu

SEQ ID NO: 151090 - RNA, 19 nt, Artificial Sequence
  Synthetic
uugguuuccuucuacuuuu

SEQ ID NO: 151091 - RNA, 20 nt, Artificial Sequence
  Synthetic
cuugguuuccuucuacuuuu

SEQ ID NO: 151092 - RNA, 21 nt, Artificial Sequence
  Synthetic
ccuugguuuccuucuacuuuu

SEQ ID NO: 151093 - RNA, 22 nt, Artificial Sequence
  Synthetic
uccuugguuuccuucuacuuuu

SEQ ID NO: 151094 - RNA, 23 nt, Artificial Sequence
  Synthetic
cuccuugguuuccuucuacuuuu

SEQ ID NO: 151095 - RNA, 24 nt, Artificial Sequence
  Synthetic
acuccuugguuuccuucuacuuuu

SEQ ID NO: 151096 - RNA, 19 nt, Artificial Sequence
  Synthetic
uguuuuuguuuuuccuuuu

SEQ ID NO: 151097 - RNA, 20 nt, Artificial Sequence
  Synthetic
uuguuuuuguuuuuccuuuu

SEQ ID NO: 151098 - RNA, 21 nt, Artificial Sequence
  Synthetic
uuuguuuuuguuuuuccuuuu

SEQ ID NO: 151099 - RNA, 22 nt, Artificial Sequence
  Synthetic
uuuuguuuuuguuuuuccuuuu

SEQ ID NO: 151100 - RNA, 24 nt, Artificial Sequence
  Synthetic
aguuuuguuuuuguuuuuccuuuu

SEQ ID NO: 151101 - RNA, 18 nt, Artificial Sequence
  Synthetic
agaaaacaaagggcuuuu

SEQ ID NO: 151102 - RNA, 19 nt, Artificial Sequence
  Synthetic
cagaaaacaaagggcuuuu

SEQ ID NO: 151103 - RNA, 20 nt, Artificial Sequence
  Synthetic
acagaaaacaaagggcuuuu

SEQ ID NO: 151104 - RNA, 20 nt, Artificial Sequence
  Synthetic
uggaaacaauuugaucuuuu

SEQ ID NO: 151105 - RNA, 21 nt, Artificial Sequence
  Synthetic
uuggaaacaauuugaucuuuu

SEQ ID NO: 151106 - RNA, 22 nt, Artificial Sequence
  Synthetic
cuuggaaacaauuugaucuuuu

SEQ ID NO: 151107 - RNA, 23 nt, Artificial Sequence
  Synthetic
acuuggaaacaauuugaucuuuu

SEQ ID NO: 151108 - RNA, 24 nt, Artificial Sequence
  Synthetic
cacuuggaaacaauuugaucuuuu

SEQ ID NO: 151109 - RNA, 18 nt, Artificial Sequence
  Synthetic
ucuaagcuuuugucuuuu

SEQ ID NO: 151110 - RNA, 19 nt, Artificial Sequence
  Synthetic
uucuaagcuuuugucuuuu

SEQ ID NO: 151111 - RNA, 20 nt, Artificial Sequence
  Synthetic
uuucuaagcuuuugucuuuu

SEQ ID NO: 151112 - RNA, 18 nt, Artificial Sequence
  Synthetic
aaauuucuauaaaguuuu

SEQ ID NO: 151113 - RNA, 19 nt, Artificial Sequence
  Synthetic
aaaauuucuauaaaguuuu

SEQ ID NO: 151114 - RNA, 20 nt, Artificial Sequence
  Synthetic
caaaauuucuauaaaguuuu

SEQ ID NO: 151115 - RNA, 18 nt, Artificial Sequence
  Synthetic
uuuauauuuuuaaguuuu

SEQ ID NO: 151116 - RNA, 19 nt, Artificial Sequence
  Synthetic
uuuuauauuuuuaaguuuu

SEQ ID NO: 151117 - RNA, 20 nt, Artificial Sequence
  Synthetic
uuuuuauauuuuuaaguuuu

SEQ ID NO: 151118 - RNA, 21 nt, Artificial Sequence
  Synthetic
auuuuuauauuuuuaaguuuu

SEQ ID NO: 151119 - RNA, 22 nt, Artificial Sequence
  Synthetic
uauuuuuauauuuuuaaguuuu

SEQ ID NO: 151120 - RNA, 23 nt, Artificial Sequence
  Synthetic
uuauuuuuauauuuuuaaguuuu

SEQ ID NO: 151121 - RNA, 24 nt, Artificial Sequence
  Synthetic
uuuauuuuuauauuuuuaaguuuu

SEQ ID NO: 151122 - RNA, 18 nt, Artificial Sequence
  Synthetic
uuaauuuuuuuaaguuuu

SEQ ID NO: 151123 - RNA, 19 nt, Artificial Sequence
  Synthetic
uuuaauuuuuuuaaguuuu

SEQ ID NO: 151124 - RNA, 20 nt, Artificial Sequence
  Synthetic
cuuuaauuuuuuuaaguuuu

SEQ ID NO: 151125 - RNA, 18 nt, Artificial Sequence
  Synthetic
uucagcuuuuagaguuuu

SEQ ID NO: 151126 - RNA, 19 nt, Artificial Sequence
  Synthetic
uuucagcuuuuagaguuuu

SEQ ID NO: 151127 - RNA, 20 nt, Artificial Sequence
  Synthetic
uuuucagcuuuuagaguuuu

SEQ ID NO: 151128 - RNA, 21 nt, Artificial Sequence
  Synthetic
uagguacccaauaauaguuuu

SEQ ID NO: 151129 - RNA, 22 nt, Artificial Sequence
  Synthetic
auagguacccaauaauaguuuu

SEQ ID NO: 151130 - RNA, 23 nt, Artificial Sequence
  Synthetic
aauagguacccaauaauaguuuu

SEQ ID NO: 151131 - RNA, 24 nt, Artificial Sequence
  Synthetic
uaauagguacccaauaauaguuuu

SEQ ID NO: 151132 - RNA, 18 nt, Artificial Sequence
  Synthetic
auguguuuguauaguuuu

SEQ ID NO: 151133 - RNA, 19 nt, Artificial Sequence
  Synthetic
cauguguuuguauaguuuu

SEQ ID NO: 151134 - RNA, 20 nt, Artificial Sequence
  Synthetic
ccauguguuuguauaguuuu

SEQ ID NO: 151135 - RNA, 21 nt, Artificial Sequence
  Synthetic
uccauguguuuguauaguuuu

SEQ ID NO: 151136 - RNA, 22 nt, Artificial Sequence
  Synthetic
uuccauguguuuguauaguuuu

SEQ ID NO: 151137 - RNA, 23 nt, Artificial Sequence
  Synthetic
uuuccauguguuuguauaguuuu

SEQ ID NO: 151138 - RNA, 24 nt, Artificial Sequence
  Synthetic
auuuccauguguuuguauaguuuu

SEQ ID NO: 151139 - RNA, 18 nt, Artificial Sequence
  Synthetic
uauaauuucaguaguuuu

SEQ ID NO: 151140 - RNA, 19 nt, Artificial Sequence
  Synthetic
uuauaauuucaguaguuuu

SEQ ID NO: 151141 - RNA, 20 nt, Artificial Sequence
  Synthetic
uuuauaauuucaguaguuuu

SEQ ID NO: 151142 - RNA, 21 nt, Artificial Sequence
  Synthetic
uuuuauaauuucaguaguuuu

SEQ ID NO: 151143 - RNA, 22 nt, Artificial Sequence
  Synthetic
uuuuuauaauuucaguaguuuu

SEQ ID NO: 151144 - RNA, 23 nt, Artificial Sequence
  Synthetic
uuuuuuauaauuucaguaguuuu

SEQ ID NO: 151145 - RNA, 24 nt, Artificial Sequence
  Synthetic
auuuuuuauaauuucaguaguuuu

SEQ ID NO: 151146 - RNA, 18 nt, Artificial Sequence
  Synthetic
uguuuaaaauuuaguuuu

SEQ ID NO: 151147 - RNA, 19 nt, Artificial Sequence
  Synthetic
uuguuuaaaauuuaguuuu

SEQ ID NO: 151148 - RNA, 20 nt, Artificial Sequence
  Synthetic
uuuguuuaaaauuuaguuuu

SEQ ID NO: 151149 - RNA, 18 nt, Artificial Sequence
  Synthetic
aaaaaaaaagaagguuuu

SEQ ID NO: 151150 - RNA, 19 nt, Artificial Sequence
  Synthetic
aaaaaaaaaagaagguuuu

SEQ ID NO: 151151 - RNA, 20 nt, Artificial Sequence
  Synthetic
aaaaaaaaaaagaagguuuu

SEQ ID NO: 151152 - RNA, 21 nt, Artificial Sequence
  Synthetic
aaaaaaaaaaaagaagguuuu

SEQ ID NO: 151153 - RNA, 22 nt, Artificial Sequence
  Synthetic
aaaaaaaaaaaaagaagguuuu

SEQ ID NO: 151154 - RNA, 23 nt, Artificial Sequence
  Synthetic
aaaaaaaaaaaaaagaagguuuu

SEQ ID NO: 151155 - RNA, 24 nt, Artificial Sequence
  Synthetic
aaaaaaaaaaaaaaagaagguuuu

SEQ ID NO: 151156 - RNA, 21 nt, Artificial Sequence
  Synthetic
cuucaugguggcgaugguuuu

SEQ ID NO: 151157 - RNA, 22 nt, Artificial Sequence
  Synthetic
ccuucaugguggcgaugguuuu

SEQ ID NO: 151158 - RNA, 24 nt, Artificial Sequence
  Synthetic
agccuucaugguggcgaugguuuu

SEQ ID NO: 151159 - RNA, 18 nt, Artificial Sequence
  Synthetic
uucuauuuuuaauguuuu

SEQ ID NO: 151160 - RNA, 20 nt, Artificial Sequence
  Synthetic
aguucuauuuuuaauguuuu

SEQ ID NO: 151161 - RNA, 21 nt, Artificial Sequence
  Synthetic
uaguucuauuuuuaauguuuu

SEQ ID NO: 151162 - RNA, 24 nt, Artificial Sequence
  Synthetic
ugguaguucuauuuuuaauguuuu

SEQ ID NO: 151163 - RNA, 18 nt, Artificial Sequence
  Synthetic
agguccuuuggguguuuu

SEQ ID NO: 151164 - RNA, 19 nt, Artificial Sequence
  Synthetic
uagguccuuuggguguuuu

SEQ ID NO: 151165 - RNA, 20 nt, Artificial Sequence
  Synthetic
cuagguccuuuggguguuuu

SEQ ID NO: 151166 - RNA, 21 nt, Artificial Sequence
  Synthetic
acuagguccuuuggguguuuu

SEQ ID NO: 151167 - RNA, 22 nt, Artificial Sequence
  Synthetic
aacuagguccuuuggguguuuu

SEQ ID NO: 151168 - RNA, 24 nt, Artificial Sequence
  Synthetic
agaacuagguccuuuggguguuuu

SEQ ID NO: 151169 - RNA, 18 nt, Artificial Sequence
  Synthetic
aaaaaagaagaaauuuuu

SEQ ID NO: 151170 - RNA, 19 nt, Artificial Sequence
  Synthetic
aaaaaaagaagaaauuuuu

SEQ ID NO: 151171 - RNA, 20 nt, Artificial Sequence
  Synthetic
aaaaaaaagaagaaauuuuu

SEQ ID NO: 151172 - RNA, 21 nt, Artificial Sequence
  Synthetic
aaaaaaaaagaagaaauuuuu

SEQ ID NO: 151173 - RNA, 22 nt, Artificial Sequence
  Synthetic
aaaaaaaaaagaagaaauuuuu

SEQ ID NO: 151174 - RNA, 23 nt, Artificial Sequence
  Synthetic
aaaaaaaaaaagaagaaauuuuu

SEQ ID NO: 151175 - RNA, 24 nt, Artificial Sequence
  Synthetic
aaaaaaaaaaaagaagaaauuuuu

SEQ ID NO: 151176 - RNA, 18 nt, Artificial Sequence
  Synthetic
aaauuuuuuuaaauuuuu

SEQ ID NO: 151177 - RNA, 19 nt, Artificial Sequence
  Synthetic
aaaauuuuuuuaaauuuuu

SEQ ID NO: 151178 - RNA, 20 nt, Artificial Sequence
  Synthetic
uaaaauuuuuuuaaauuuuu

SEQ ID NO: 151179 - RNA, 21 nt, Artificial Sequence
  Synthetic
uuaaaauuuuuuuaaauuuuu

SEQ ID NO: 151180 - RNA, 22 nt, Artificial Sequence
  Synthetic
uuuaaaauuuuuuuaaauuuuu

SEQ ID NO: 151181 - RNA, 23 nt, Artificial Sequence
  Synthetic
uuuuaaaauuuuuuuaaauuuuu

SEQ ID NO: 151182 - RNA, 24 nt, Artificial Sequence
  Synthetic
uuuuuaaaauuuuuuuaaauuuuu

SEQ ID NO: 151183 - RNA, 18 nt, Artificial Sequence
  Synthetic
uuuuaauuuuuaauuuuu

SEQ ID NO: 151184 - RNA, 19 nt, Artificial Sequence
  Synthetic
uuuuuaauuuuuaauuuuu

SEQ ID NO: 151185 - RNA, 20 nt, Artificial Sequence
  Synthetic
uuuuuuaauuuuuaauuuuu

SEQ ID NO: 151186 - RNA, 21 nt, Artificial Sequence
  Synthetic
uuuuuuuaauuuuuaauuuuu

SEQ ID NO: 151187 - RNA, 22 nt, Artificial Sequence
  Synthetic
auuuuuuuaauuuuuaauuuuu

SEQ ID NO: 151188 - RNA, 23 nt, Artificial Sequence
  Synthetic
uauuuuuuuaauuuuuaauuuuu

SEQ ID NO: 151189 - RNA, 24 nt, Artificial Sequence
  Synthetic
auauuuuuuuaauuuuuaauuuuu

SEQ ID NO: 151190 - RNA, 18 nt, Artificial Sequence
  Synthetic
uuuuuauuuuuaauuuuu

SEQ ID NO: 151191 - RNA, 19 nt, Artificial Sequence
  Synthetic
uuuuuuauuuuuaauuuuu

SEQ ID NO: 151192 - RNA, 20 nt, Artificial Sequence
  Synthetic
uuuuuuuauuuuuaauuuuu

SEQ ID NO: 151193 - RNA, 21 nt, Artificial Sequence
  Synthetic
uuuuuuuuauuuuuaauuuuu

SEQ ID NO: 151194 - RNA, 22 nt, Artificial Sequence
  Synthetic
uuuuuuuuuauuuuuaauuuuu

SEQ ID NO: 151195 - RNA, 23 nt, Artificial Sequence
  Synthetic
uuuuuuuuuuauuuuuaauuuuu

SEQ ID NO: 151196 - RNA, 24 nt, Artificial Sequence
  Synthetic
auuuuuuuuuuauuuuuaauuuuu

SEQ ID NO: 151197 - RNA, 18 nt, Artificial Sequence
  Synthetic
aaaagaaacaucauuuuu

SEQ ID NO: 151198 - RNA, 19 nt, Artificial Sequence
  Synthetic
aaaaagaaacaucauuuuu

SEQ ID NO: 151199 - RNA, 20 nt, Artificial Sequence
  Synthetic
aaaaaagaaacaucauuuuu

SEQ ID NO: 151200 - RNA, 18 nt, Artificial Sequence
  Synthetic
aaaauauacuauauuuuu

SEQ ID NO: 151201 - RNA, 18 nt, Artificial Sequence
  Synthetic
uauauuuuguguauuuuu

SEQ ID NO: 151202 - RNA, 19 nt, Artificial Sequence
  Synthetic
auauauuuuguguauuuuu

SEQ ID NO: 151203 - RNA, 20 nt, Artificial Sequence
  Synthetic
uauauauuuuguguauuuuu

SEQ ID NO: 151204 - RNA, 18 nt, Artificial Sequence
  Synthetic
acaaaaaguuguauuuuu

SEQ ID NO: 151205 - RNA, 19 nt, Artificial Sequence
  Synthetic
aacaaaaaguuguauuuuu

SEQ ID NO: 151206 - RNA, 20 nt, Artificial Sequence
  Synthetic
aaacaaaaaguuguauuuuu

SEQ ID NO: 151207 - RNA, 18 nt, Artificial Sequence
  Synthetic
cguuuccuuuuuauuuuu

SEQ ID NO: 151208 - RNA, 19 nt, Artificial Sequence
  Synthetic
ucguuuccuuuuuauuuuu

SEQ ID NO: 151209 - RNA, 20 nt, Artificial Sequence
  Synthetic
uucguuuccuuuuuauuuuu

SEQ ID NO: 151210 - RNA, 21 nt, Artificial Sequence
  Synthetic
uuucguuuccuuuuuauuuuu

SEQ ID NO: 151211 - RNA, 22 nt, Artificial Sequence
  Synthetic
auuucguuuccuuuuuauuuuu

SEQ ID NO: 151212 - RNA, 24 nt, Artificial Sequence
  Synthetic
ugauuucguuuccuuuuuauuuuu

SEQ ID NO: 151213 - RNA, 18 nt, Artificial Sequence
  Synthetic
uuuuuucugauucuuuuu

SEQ ID NO: 151214 - RNA, 19 nt, Artificial Sequence
  Synthetic
uuuuuuucugauucuuuuu

SEQ ID NO: 151215 - RNA, 20 nt, Artificial Sequence
  Synthetic
auuuuuuucugauucuuuuu

SEQ ID NO: 151216 - RNA, 18 nt, Artificial Sequence
  Synthetic
uacuaaaucagaguuuuu

SEQ ID NO: 151217 - RNA, 19 nt, Artificial Sequence
  Synthetic
cuacuaaaucagaguuuuu

SEQ ID NO: 151218 - RNA, 20 nt, Artificial Sequence
  Synthetic
ccuacuaaaucagaguuuuu

SEQ ID NO: 151219 - RNA, 19 nt, Artificial Sequence
  Synthetic
aguaagccaauuuguuuuu

SEQ ID NO: 151220 - RNA, 20 nt, Artificial Sequence
  Synthetic
aaguaagccaauuuguuuuu

SEQ ID NO: 151221 - RNA, 18 nt, Artificial Sequence
  Synthetic
auauuauucuaauuuuuu

SEQ ID NO: 151222 - RNA, 19 nt, Artificial Sequence
  Synthetic
aauauuauucuaauuuuuu

SEQ ID NO: 151223 - RNA, 20 nt, Artificial Sequence
  Synthetic
uaauauuauucuaauuuuuu

SEQ ID NO: 151224 - RNA, 18 nt, Artificial Sequence
  Synthetic
aguaaauaacacuuuuuu

SEQ ID NO: 151225 - RNA, 19 nt, Artificial Sequence
  Synthetic
aaguaaauaacacuuuuuu

SEQ ID NO: 151226 - RNA, 20 nt, Artificial Sequence
  Synthetic
caaguaaauaacacuuuuuu

SEQ ID NO: 151227 - RNA, 18 nt, Artificial Sequence
  Synthetic
auucuacuuuccuuuuuu

SEQ ID NO: 151228 - RNA, 19 nt, Artificial Sequence
  Synthetic
uauucuacuuuccuuuuuu

SEQ ID NO: 151229 - RNA, 20 nt, Artificial Sequence
  Synthetic
uuauucuacuuuccuuuuuu

SEQ ID NO: 151230 - RNA, 18 nt, Artificial Sequence
  Synthetic
aacuuaaauuuguuuuuu

SEQ ID NO: 151231 - RNA, 19 nt, Artificial Sequence
  Synthetic
caacuuaaauuuguuuuuu

SEQ ID NO: 151232 - RNA, 20 nt, Artificial Sequence
  Synthetic
acaacuuaaauuuguuuuuu

SEQ ID NO: 151233 - RNA, 18 nt, Artificial Sequence
  Synthetic
uuaagaaaagauuuuuuu

SEQ ID NO: 151234 - RNA, 19 nt, Artificial Sequence
  Synthetic
uuuaagaaaagauuuuuuu

SEQ ID NO: 151235 - RNA, 20 nt, Artificial Sequence
  Synthetic
auuuaagaaaagauuuuuuu

SEQ ID NO: 151236 - RNA, 18 nt, Artificial Sequence
  Synthetic
uuacuuauuuauuuuuuu

SEQ ID NO: 151237 - RNA, 19 nt, Artificial Sequence
  Synthetic
uuuacuuauuuauuuuuuu

SEQ ID NO: 151238 - RNA, 20 nt, Artificial Sequence
  Synthetic
uuuuacuuauuuauuuuuuu

SEQ ID NO: 151239 - RNA, 21 nt, Artificial Sequence
  Synthetic
cuuuuacuuauuuauuuuuuu

SEQ ID NO: 151240 - RNA, 22 nt, Artificial Sequence
  Synthetic
ucuuuuacuuauuuauuuuuuu

SEQ ID NO: 151241 - RNA, 23 nt, Artificial Sequence
  Synthetic
uucuuuuacuuauuuauuuuuuu

SEQ ID NO: 151242 - RNA, 24 nt, Artificial Sequence
  Synthetic
uuucuuuuacuuauuuauuuuuuu

SEQ ID NO: 151243 - RNA, 18 nt, Artificial Sequence
  Synthetic
uuuauuuuaucuuuuuuu

SEQ ID NO: 151244 - RNA, 20 nt, Artificial Sequence
  Synthetic
aguuuauuuuaucuuuuuuu

SEQ ID NO: 151245 - RNA, 21 nt, Artificial Sequence
  Synthetic
uaguuuauuuuaucuuuuuuu

SEQ ID NO: 151246 - RNA, 22 nt, Artificial Sequence
  Synthetic
auaguuuauuuuaucuuuuuuu

SEQ ID NO: 151247 - RNA, 23 nt, Artificial Sequence
  Synthetic
cauaguuuauuuuaucuuuuuuu

SEQ ID NO: 151248 - RNA, 24 nt, Artificial Sequence
  Synthetic
acauaguuuauuuuaucuuuuuuu

SEQ ID NO: 151249 - RNA, 18 nt, Artificial Sequence
  Synthetic
auuguuaccauuuuuuuu

SEQ ID NO: 151250 - RNA, 20 nt, Artificial Sequence
  Synthetic
ugauuguuaccauuuuuuuu

SEQ ID NO: 151251 - RNA, 21 nt, Artificial Sequence
  Synthetic
augauuguuaccauuuuuuuu

SEQ ID NO: 151252 - RNA, 23 nt, Artificial Sequence
  Synthetic
agaugauuguuaccauuuuuuuu

SEQ ID NO: 151253 - RNA, 24 nt, Artificial Sequence
  Synthetic
cagaugauuguuaccauuuuuuuu

SEQ ID NO: 151254 - RNA, 18 nt, Artificial Sequence
  Synthetic
uuucuuuguuuuuuuuuu

SEQ ID NO: 151255 - RNA, 20 nt, Artificial Sequence
  Synthetic
uguuucuuuguuuuuuuuuu

SEQ ID NO: 151256 - RNA, 21 nt, Artificial Sequence
  Synthetic
uuguuucuuuguuuuuuuuuu

SEQ ID NO: 151257 - RNA, 22 nt, Artificial Sequence
  Synthetic
uuuguuucuuuguuuuuuuuuu

SEQ ID NO: 151258 - RNA, 23 nt, Artificial Sequence
  Synthetic
cuuuguuucuuuguuuuuuuuuu

SEQ ID NO: 151259 - RNA, 24 nt, Artificial Sequence
  Synthetic
acuuuguuucuuuguuuuuuuuuu

SEQ ID NO: 151260 - RNA, 18 nt, Artificial Sequence
  Synthetic
uaauccauuuuuuuuuuu

SEQ ID NO: 151261 - RNA, 20 nt, Artificial Sequence
  Synthetic
aguaauccauuuuuuuuuuu

SEQ ID NO: 151262 - RNA, 18 nt, Artificial Sequence
  Synthetic
cuaauuuuuuuuuuuuuu

SEQ ID NO: 151263 - RNA, 21 nt, Artificial Sequence
  Synthetic
uggcuaauuuuuuuuuuuuuu

SEQ ID NO: 151264 - RNA, 22 nt, Artificial Sequence
  Synthetic
cuggcuaauuuuuuuuuuuuuu

SEQ ID NO: 151265 - RNA, 23 nt, Artificial Sequence
  Synthetic
ccuggcuaauuuuuuuuuuuuuu

SEQ ID NO: 151266 - RNA, 21 nt, Artificial Sequence
  Synthetic
aaaaaaaaaaaaaaaaaaaaa

SEQ ID NO: 151267 - RNA, 22 nt, Artificial Sequence
  Synthetic
caaaaaaaaaaaaaaaaaaaaa

SEQ ID NO: 151268 - RNA, 23 nt, Artificial Sequence
  Synthetic
ucaaaaaaaaaaaaaaaaaaaaa

SEQ ID NO: 151269 - RNA, 24 nt, Artificial Sequence
  Synthetic
cucaaaaaaaaaaaaaaaaaaaaa

SEQ ID NO: 151270 - RNA, 21 nt, Artificial Sequence
  Synthetic
caaaaaaaaaaaaaaaaaaaa

SEQ ID NO: 151271 - RNA, 22 nt, Artificial Sequence
  Synthetic
ucaaaaaaaaaaaaaaaaaaaa

SEQ ID NO: 151272 - RNA, 23 nt, Artificial Sequence
  Synthetic
cucaaaaaaaaaaaaaaaaaaaa

SEQ ID NO: 151273 - RNA, 24 nt, Artificial Sequence
  Synthetic
ucucaaaaaaaaaaaaaaaaaaaa

SEQ ID NO: 151274 - RNA, 18 nt, Artificial Sequence
  Synthetic
ucaaaaaaaaaaaaaaaa

SEQ ID NO: 151275 - RNA, 19 nt, Artificial Sequence
  Synthetic
aucaaaaaaaaaaaaaaaa

SEQ ID NO: 151276 - RNA, 20 nt, Artificial Sequence
  Synthetic
aaucaaaaaaaaaaaaaaaa

SEQ ID NO: 151277 - RNA, 21 nt, Artificial Sequence
  Synthetic
aaaucaaaaaaaaaaaaaaaa

SEQ ID NO: 151278 - RNA, 22 nt, Artificial Sequence
  Synthetic
caaaucaaaaaaaaaaaaaaaa

SEQ ID NO: 151279 - RNA, 24 nt, Artificial Sequence
  Synthetic
ugcaaaucaaaaaaaaaaaaaaaa

SEQ ID NO: 151280 - RNA, 22 nt, Artificial Sequence
  Synthetic
cgucucaaaaaaaaaaaaaaaa

SEQ ID NO: 151281 - RNA, 23 nt, Artificial Sequence
  Synthetic
ccgucucaaaaaaaaaaaaaaaa

SEQ ID NO: 151282 - RNA, 24 nt, Artificial Sequence
  Synthetic
uccgucucaaaaaaaaaaaaaaaa

SEQ ID NO: 151283 - RNA, 18 nt, Artificial Sequence
  Synthetic
ucuuuaaaaaaaaaaaaa

SEQ ID NO: 151284 - RNA, 19 nt, Artificial Sequence
  Synthetic
uucuuuaaaaaaaaaaaaa

SEQ ID NO: 151285 - RNA, 20 nt, Artificial Sequence
  Synthetic
uuucuuuaaaaaaaaaaaaa

SEQ ID NO: 151286 - RNA, 21 nt, Artificial Sequence
  Synthetic
auuucuuuaaaaaaaaaaaaa

SEQ ID NO: 151287 - RNA, 23 nt, Artificial Sequence
  Synthetic
agauuucuuuaaaaaaaaaaaaa

SEQ ID NO: 151288 - RNA, 24 nt, Artificial Sequence
  Synthetic
aagauuucuuuaaaaaaaaaaaaa

SEQ ID NO: 151289 - RNA, 18 nt, Artificial Sequence
  Synthetic
auugacaaaaaaaaaaaa

SEQ ID NO: 151290 - RNA, 19 nt, Artificial Sequence
  Synthetic
aauugacaaaaaaaaaaaa

SEQ ID NO: 151291 - RNA, 20 nt, Artificial Sequence
  Synthetic
uaauugacaaaaaaaaaaaa

SEQ ID NO: 151292 - RNA, 21 nt, Artificial Sequence
  Synthetic
auaauugacaaaaaaaaaaaa

SEQ ID NO: 151293 - RNA, 22 nt, Artificial Sequence
  Synthetic
aauaauugacaaaaaaaaaaaa

SEQ ID NO: 151294 - RNA, 23 nt, Artificial Sequence
  Synthetic
aaauaauugacaaaaaaaaaaaa

SEQ ID NO: 151295 - RNA, 24 nt, Artificial Sequence
  Synthetic
caaauaauugacaaaaaaaaaaaa

SEQ ID NO: 151296 - RNA, 19 nt, Artificial Sequence
  Synthetic
cguacuuuaaaaaaaaaaa

SEQ ID NO: 151297 - RNA, 20 nt, Artificial Sequence
  Synthetic
acguacuuuaaaaaaaaaaa

SEQ ID NO: 151298 - RNA, 21 nt, Artificial Sequence
  Synthetic
aacguacuuuaaaaaaaaaaa

SEQ ID NO: 151299 - RNA, 22 nt, Artificial Sequence
  Synthetic
aaacguacuuuaaaaaaaaaaa

SEQ ID NO: 151300 - RNA, 24 nt, Artificial Sequence
  Synthetic
ugaaacguacuuuaaaaaaaaaaa

SEQ ID NO: 151301 - RNA, 18 nt, Artificial Sequence
  Synthetic
cuacccugaaaaaaaaaa

SEQ ID NO: 151302 - RNA, 19 nt, Artificial Sequence
  Synthetic
acuacccugaaaaaaaaaa

SEQ ID NO: 151303 - RNA, 20 nt, Artificial Sequence
  Synthetic
aacuacccugaaaaaaaaaa

SEQ ID NO: 151304 - RNA, 18 nt, Artificial Sequence
  Synthetic
auaguacugaaaaaaaaa

SEQ ID NO: 151305 - RNA, 19 nt, Artificial Sequence
  Synthetic
cauaguacugaaaaaaaaa

SEQ ID NO: 151306 - RNA, 18 nt, Artificial Sequence
  Synthetic
aguauaauuaaaaaaaaa

SEQ ID NO: 151307 - RNA, 19 nt, Artificial Sequence
  Synthetic
aaguauaauuaaaaaaaaa

SEQ ID NO: 151308 - RNA, 20 nt, Artificial Sequence
  Synthetic
aaaguauaauuaaaaaaaaa

SEQ ID NO: 151309 - RNA, 21 nt, Artificial Sequence
  Synthetic
uaaaguauaauuaaaaaaaaa

SEQ ID NO: 151310 - RNA, 22 nt, Artificial Sequence
  Synthetic
uuaaaguauaauuaaaaaaaaa

SEQ ID NO: 151311 - RNA, 23 nt, Artificial Sequence
  Synthetic
cuuaaaguauaauuaaaaaaaaa

SEQ ID NO: 151312 - RNA, 24 nt, Artificial Sequence
  Synthetic
acuuaaaguauaauuaaaaaaaaa

SEQ ID NO: 151313 - RNA, 18 nt, Artificial Sequence
  Synthetic
aauaguauagaaaaaaaa

SEQ ID NO: 151314 - RNA, 19 nt, Artificial Sequence
  Synthetic
aaauaguauagaaaaaaaa

SEQ ID NO: 151315 - RNA, 20 nt, Artificial Sequence
  Synthetic
aaaauaguauagaaaaaaaa

SEQ ID NO: 151316 - RNA, 18 nt, Artificial Sequence
  Synthetic
agagacacaacaaaaaaa

SEQ ID NO: 151317 - RNA, 19 nt, Artificial Sequence
  Synthetic
cagagacacaacaaaaaaa

SEQ ID NO: 151318 - RNA, 22 nt, Artificial Sequence
  Synthetic
uggcagagacacaacaaaaaaa

SEQ ID NO: 151319 - RNA, 23 nt, Artificial Sequence
  Synthetic
cuggcagagacacaacaaaaaaa

SEQ ID NO: 151320 - RNA, 24 nt, Artificial Sequence
  Synthetic
ccuggcagagacacaacaaaaaaa

SEQ ID NO: 151321 - RNA, 18 nt, Artificial Sequence
  Synthetic
agagagcaaagaaaaaaa

SEQ ID NO: 151322 - RNA, 19 nt, Artificial Sequence
  Synthetic
aagagagcaaagaaaaaaa

SEQ ID NO: 151323 - RNA, 21 nt, Artificial Sequence
  Synthetic
agaagagagcaaagaaaaaaa

SEQ ID NO: 151324 - RNA, 23 nt, Artificial Sequence
  Synthetic
agagaagagagcaaagaaaaaaa

SEQ ID NO: 151325 - RNA, 24 nt, Artificial Sequence
  Synthetic
aagagaagagagcaaagaaaaaaa

SEQ ID NO: 151326 - RNA, 18 nt, Artificial Sequence
  Synthetic
ucaaagucaagaaaaaaa

SEQ ID NO: 151327 - RNA, 19 nt, Artificial Sequence
  Synthetic
uucaaagucaagaaaaaaa

SEQ ID NO: 151328 - RNA, 20 nt, Artificial Sequence
  Synthetic
uuucaaagucaagaaaaaaa

SEQ ID NO: 151329 - RNA, 21 nt, Artificial Sequence
  Synthetic
auuucaaagucaagaaaaaaa

SEQ ID NO: 151330 - RNA, 22 nt, Artificial Sequence
  Synthetic
aauuucaaagucaagaaaaaaa

SEQ ID NO: 151331 - RNA, 23 nt, Artificial Sequence
  Synthetic
caauuucaaagucaagaaaaaaa

SEQ ID NO: 151332 - RNA, 24 nt, Artificial Sequence
  Synthetic
acaauuucaaagucaagaaaaaaa

SEQ ID NO: 151333 - RNA, 18 nt, Artificial Sequence
  Synthetic
uuuucucagguaaaaaaa

SEQ ID NO: 151334 - RNA, 19 nt, Artificial Sequence
  Synthetic
uuuuucucagguaaaaaaa

SEQ ID NO: 151335 - RNA, 20 nt, Artificial Sequence
  Synthetic
auuuuucucagguaaaaaaa

SEQ ID NO: 151336 - RNA, 18 nt, Artificial Sequence
  Synthetic
aacuuuuauuuaaaaaaa

SEQ ID NO: 151337 - RNA, 19 nt, Artificial Sequence
  Synthetic
aaacuuuuauuuaaaaaaa

SEQ ID NO: 151338 - RNA, 20 nt, Artificial Sequence
  Synthetic
aaaacuuuuauuuaaaaaaa

SEQ ID NO: 151339 - RNA, 18 nt, Artificial Sequence
  Synthetic
uuaaacaaaaacaaaaaa

SEQ ID NO: 151340 - RNA, 19 nt, Artificial Sequence
  Synthetic
auuaaacaaaaacaaaaaa

SEQ ID NO: 151341 - RNA, 20 nt, Artificial Sequence
  Synthetic
cauuaaacaaaaacaaaaaa

SEQ ID NO: 151342 - RNA, 21 nt, Artificial Sequence
  Synthetic
ccauuaaacaaaaacaaaaaa

SEQ ID NO: 151343 - RNA, 22 nt, Artificial Sequence
  Synthetic
uccauuaaacaaaaacaaaaaa

SEQ ID NO: 151344 - RNA, 23 nt, Artificial Sequence
  Synthetic
uuccauuaaacaaaaacaaaaaa

SEQ ID NO: 151345 - RNA, 24 nt, Artificial Sequence
  Synthetic
uuuccauuaaacaaaaacaaaaaa

SEQ ID NO: 151346 - RNA, 23 nt, Artificial Sequence
  Synthetic
cgggcagagacacaaccaaaaaa

SEQ ID NO: 151347 - RNA, 24 nt, Artificial Sequence
  Synthetic
ccgggcagagacacaaccaaaaaa

SEQ ID NO: 151348 - RNA, 18 nt, Artificial Sequence
  Synthetic
aacugaaaaagcaaaaaa

SEQ ID NO: 151349 - RNA, 19 nt, Artificial Sequence
  Synthetic
aaacugaaaaagcaaaaaa

SEQ ID NO: 151350 - RNA, 18 nt, Artificial Sequence
  Synthetic
aggaaaaaaaagaaaaaa

SEQ ID NO: 151351 - RNA, 19 nt, Artificial Sequence
  Synthetic
caggaaaaaaaagaaaaaa

SEQ ID NO: 151352 - RNA, 20 nt, Artificial Sequence
  Synthetic
ccaggaaaaaaaagaaaaaa

SEQ ID NO: 151353 - RNA, 21 nt, Artificial Sequence
  Synthetic
uccaggaaaaaaaagaaaaaa

SEQ ID NO: 151354 - RNA, 22 nt, Artificial Sequence
  Synthetic
uuccaggaaaaaaaagaaaaaa

SEQ ID NO: 151355 - RNA, 23 nt, Artificial Sequence
  Synthetic
uuuccaggaaaaaaaagaaaaaa

SEQ ID NO: 151356 - RNA, 24 nt, Artificial Sequence
  Synthetic
uuuuccaggaaaaaaaagaaaaaa

SEQ ID NO: 151357 - RNA, 18 nt, Artificial Sequence
  Synthetic
uauuucugguagaaaaaa

SEQ ID NO: 151358 - RNA, 19 nt, Artificial Sequence
  Synthetic
auauuucugguagaaaaaa

SEQ ID NO: 151359 - RNA, 20 nt, Artificial Sequence
  Synthetic
aauauuucugguagaaaaaa

SEQ ID NO: 151360 - RNA, 18 nt, Artificial Sequence
  Synthetic
aaguuuucauggaaaaaa

SEQ ID NO: 151361 - RNA, 19 nt, Artificial Sequence
  Synthetic
aaaguuuucauggaaaaaa

SEQ ID NO: 151362 - RNA, 20 nt, Artificial Sequence
  Synthetic
uaaaguuuucauggaaaaaa

SEQ ID NO: 151363 - RNA, 22 nt, Artificial Sequence
  Synthetic
uggguaagcuuagaugaaaaaa

SEQ ID NO: 151364 - RNA, 23 nt, Artificial Sequence
  Synthetic
uuggguaagcuuagaugaaaaaa

SEQ ID NO: 151365 - RNA, 24 nt, Artificial Sequence
  Synthetic
uuuggguaagcuuagaugaaaaaa

SEQ ID NO: 151366 - RNA, 18 nt, Artificial Sequence
  Synthetic
cagaguuccuugaaaaaa

SEQ ID NO: 151367 - RNA, 19 nt, Artificial Sequence
  Synthetic
ccagaguuccuugaaaaaa

SEQ ID NO: 151368 - RNA, 20 nt, Artificial Sequence
  Synthetic
accagaguuccuugaaaaaa

SEQ ID NO: 151369 - RNA, 21 nt, Artificial Sequence
  Synthetic
aaccagaguuccuugaaaaaa

SEQ ID NO: 151370 - RNA, 22 nt, Artificial Sequence
  Synthetic
uaaccagaguuccuugaaaaaa

SEQ ID NO: 151371 - RNA, 24 nt, Artificial Sequence
  Synthetic
aguaaccagaguuccuugaaaaaa

SEQ ID NO: 151372 - RNA, 18 nt, Artificial Sequence
  Synthetic
cuuucaaguaauaaaaaa

SEQ ID NO: 151373 - RNA, 19 nt, Artificial Sequence
  Synthetic
acuuucaaguaauaaaaaa

SEQ ID NO: 151374 - RNA, 20 nt, Artificial Sequence
  Synthetic
aacuuucaaguaauaaaaaa

SEQ ID NO: 151375 - RNA, 18 nt, Artificial Sequence
  Synthetic
uuuuaaaacaguaaaaaa

SEQ ID NO: 151376 - RNA, 19 nt, Artificial Sequence
  Synthetic
auuuuaaaacaguaaaaaa

SEQ ID NO: 151377 - RNA, 20 nt, Artificial Sequence
  Synthetic
aauuuuaaaacaguaaaaaa

SEQ ID NO: 151378 - RNA, 21 nt, Artificial Sequence
  Synthetic
aaauuuuaaaacaguaaaaaa

SEQ ID NO: 151379 - RNA, 22 nt, Artificial Sequence
  Synthetic
aaaauuuuaaaacaguaaaaaa

SEQ ID NO: 151380 - RNA, 23 nt, Artificial Sequence
  Synthetic
aaaaauuuuaaaacaguaaaaaa

SEQ ID NO: 151381 - RNA, 24 nt, Artificial Sequence
  Synthetic
uaaaaauuuuaaaacaguaaaaaa

SEQ ID NO: 151382 - RNA, 18 nt, Artificial Sequence
  Synthetic
accauuuucuuuaaaaaa

SEQ ID NO: 151383 - RNA, 19 nt, Artificial Sequence
  Synthetic
uaccauuuucuuuaaaaaa

SEQ ID NO: 151384 - RNA, 20 nt, Artificial Sequence
  Synthetic
auaccauuuucuuuaaaaaa

SEQ ID NO: 151385 - RNA, 19 nt, Artificial Sequence
  Synthetic
uguaauuugaaaacaaaaa

SEQ ID NO: 151386 - RNA, 20 nt, Artificial Sequence
  Synthetic
auguaauuugaaaacaaaaa

SEQ ID NO: 151387 - RNA, 18 nt, Artificial Sequence
  Synthetic
auagaauacaaacaaaaa

SEQ ID NO: 151388 - RNA, 19 nt, Artificial Sequence
  Synthetic
aauagaauacaaacaaaaa

SEQ ID NO: 151389 - RNA, 20 nt, Artificial Sequence
  Synthetic
caauagaauacaaacaaaaa

SEQ ID NO: 151390 - RNA, 21 nt, Artificial Sequence
  Synthetic
acaauagaauacaaacaaaaa

SEQ ID NO: 151391 - RNA, 24 nt, Artificial Sequence
  Synthetic
aggacaauagaauacaaacaaaaa

SEQ ID NO: 151392 - RNA, 18 nt, Artificial Sequence
  Synthetic
uguaacgugcaacaaaaa

SEQ ID NO: 151393 - RNA, 19 nt, Artificial Sequence
  Synthetic
uuguaacgugcaacaaaaa

SEQ ID NO: 151394 - RNA, 20 nt, Artificial Sequence
  Synthetic
auuguaacgugcaacaaaaa

SEQ ID NO: 151395 - RNA, 23 nt, Artificial Sequence
  Synthetic
cggauuguaacgugcaacaaaaa

SEQ ID NO: 151396 - RNA, 24 nt, Artificial Sequence
  Synthetic
ucggauuguaacgugcaacaaaaa

SEQ ID NO: 151397 - RNA, 18 nt, Artificial Sequence
  Synthetic
cucucagcaaaccaaaaa

SEQ ID NO: 151398 - RNA, 20 nt, Artificial Sequence
  Synthetic
ugcucucagcaaaccaaaaa

SEQ ID NO: 151399 - RNA, 18 nt, Artificial Sequence
  Synthetic
aaaucugaaauccaaaaa

SEQ ID NO: 151400 - RNA, 19 nt, Artificial Sequence
  Synthetic
aaaaucugaaauccaaaaa

SEQ ID NO: 151401 - RNA, 20 nt, Artificial Sequence
  Synthetic
aaaaaucugaaauccaaaaa

SEQ ID NO: 151402 - RNA, 21 nt, Artificial Sequence
  Synthetic
aacaaacaaccccaucaaaaa

SEQ ID NO: 151403 - RNA, 22 nt, Artificial Sequence
  Synthetic
aaacaaacaaccccaucaaaaa

SEQ ID NO: 151404 - RNA, 23 nt, Artificial Sequence
  Synthetic
aaaacaaacaaccccaucaaaaa

SEQ ID NO: 151405 - RNA, 24 nt, Artificial Sequence
  Synthetic
aaaaacaaacaaccccaucaaaaa

SEQ ID NO: 151406 - RNA, 19 nt, Artificial Sequence
  Synthetic
ugcccucuggacucaaaaa

SEQ ID NO: 151407 - RNA, 20 nt, Artificial Sequence
  Synthetic
cugcccucuggacucaaaaa

SEQ ID NO: 151408 - RNA, 22 nt, Artificial Sequence
  Synthetic
ugcugcccucuggacucaaaaa

SEQ ID NO: 151409 - RNA, 23 nt, Artificial Sequence
  Synthetic
uugcugcccucuggacucaaaaa

SEQ ID NO: 151410 - RNA, 24 nt, Artificial Sequence
  Synthetic
cuugcugcccucuggacucaaaaa

SEQ ID NO: 151411 - RNA, 18 nt, Artificial Sequence
  Synthetic
uauaauuucuuucaaaaa

SEQ ID NO: 151412 - RNA, 19 nt, Artificial Sequence
  Synthetic
cuauaauuucuuucaaaaa

SEQ ID NO: 151413 - RNA, 20 nt, Artificial Sequence
  Synthetic
acuauaauuucuuucaaaaa

SEQ ID NO: 151414 - RNA, 18 nt, Artificial Sequence
  Synthetic
uauacuucuaaagaaaaa

SEQ ID NO: 151415 - RNA, 19 nt, Artificial Sequence
  Synthetic
uuauacuucuaaagaaaaa

SEQ ID NO: 151416 - RNA, 20 nt, Artificial Sequence
  Synthetic
auuauacuucuaaagaaaaa

SEQ ID NO: 151417 - RNA, 18 nt, Artificial Sequence
  Synthetic
aaaaaaggauaagaaaaa

SEQ ID NO: 151418 - RNA, 19 nt, Artificial Sequence
  Synthetic
aaaaaaaggauaagaaaaa

SEQ ID NO: 151419 - RNA, 20 nt, Artificial Sequence
  Synthetic
aaaaaaaaggauaagaaaaa

SEQ ID NO: 151420 - RNA, 21 nt, Artificial Sequence
  Synthetic
aaaaaaaaaggauaagaaaaa

SEQ ID NO: 151421 - RNA, 22 nt, Artificial Sequence
  Synthetic
aaaaaaaaaaggauaagaaaaa

SEQ ID NO: 151422 - RNA, 23 nt, Artificial Sequence
  Synthetic
aaaaaaaaaaaggauaagaaaaa

SEQ ID NO: 151423 - RNA, 24 nt, Artificial Sequence
  Synthetic
aaaaaaaaaaaaggauaagaaaaa

SEQ ID NO: 151424 - RNA, 18 nt, Artificial Sequence
  Synthetic
aaaaaagaugcagaaaaa

SEQ ID NO: 151425 - RNA, 19 nt, Artificial Sequence
  Synthetic
caaaaaagaugcagaaaaa

SEQ ID NO: 151426 - RNA, 19 nt, Artificial Sequence
  Synthetic
agaauuuuuaagagaaaaa

SEQ ID NO: 151427 - RNA, 20 nt, Artificial Sequence
  Synthetic
aagaauuuuuaagagaaaaa

SEQ ID NO: 151428 - RNA, 21 nt, Artificial Sequence
  Synthetic
aaagaauuuuuaagagaaaaa

SEQ ID NO: 151429 - RNA, 22 nt, Artificial Sequence
  Synthetic
uaaagaauuuuuaagagaaaaa

SEQ ID NO: 151430 - RNA, 23 nt, Artificial Sequence
  Synthetic
cuaaagaauuuuuaagagaaaaa

SEQ ID NO: 151431 - RNA, 24 nt, Artificial Sequence
  Synthetic
ucuaaagaauuuuuaagagaaaaa

SEQ ID NO: 151432 - RNA, 18 nt, Artificial Sequence
  Synthetic
cuagaaaaucuagaaaaa

SEQ ID NO: 151433 - RNA, 19 nt, Artificial Sequence
  Synthetic
acuagaaaaucuagaaaaa

SEQ ID NO: 151434 - RNA, 20 nt, Artificial Sequence
  Synthetic
aacuagaaaaucuagaaaaa

SEQ ID NO: 151435 - RNA, 21 nt, Artificial Sequence
  Synthetic
aaacuagaaaaucuagaaaaa

SEQ ID NO: 151436 - RNA, 22 nt, Artificial Sequence
  Synthetic
uaaacuagaaaaucuagaaaaa

SEQ ID NO: 151437 - RNA, 23 nt, Artificial Sequence
  Synthetic
auaaacuagaaaaucuagaaaaa

SEQ ID NO: 151438 - RNA, 24 nt, Artificial Sequence
  Synthetic
aauaaacuagaaaaucuagaaaaa

SEQ ID NO: 151439 - RNA, 19 nt, Artificial Sequence
  Synthetic
uguuuuuguuaaggaaaaa

SEQ ID NO: 151440 - RNA, 21 nt, Artificial Sequence
  Synthetic
uguguuuuuguuaaggaaaaa

SEQ ID NO: 151441 - RNA, 22 nt, Artificial Sequence
  Synthetic
auguguuuuuguuaaggaaaaa

SEQ ID NO: 151442 - RNA, 18 nt, Artificial Sequence
  Synthetic
acaaauggugcggaaaaa

SEQ ID NO: 151443 - RNA, 19 nt, Artificial Sequence
  Synthetic
aacaaauggugcggaaaaa

SEQ ID NO: 151444 - RNA, 20 nt, Artificial Sequence
  Synthetic
caacaaauggugcggaaaaa

SEQ ID NO: 151445 - RNA, 21 nt, Artificial Sequence
  Synthetic
ucaacaaauggugcggaaaaa

SEQ ID NO: 151446 - RNA, 22 nt, Artificial Sequence
  Synthetic
uucaacaaauggugcggaaaaa

SEQ ID NO: 151447 - RNA, 23 nt, Artificial Sequence
  Synthetic
cuucaacaaauggugcggaaaaa

SEQ ID NO: 151448 - RNA, 24 nt, Artificial Sequence
  Synthetic
ucuucaacaaauggugcggaaaaa

SEQ ID NO: 151449 - RNA, 18 nt, Artificial Sequence
  Synthetic
aacacaauagaugaaaaa

SEQ ID NO: 151450 - RNA, 19 nt, Artificial Sequence
  Synthetic
aaacacaauagaugaaaaa

SEQ ID NO: 151451 - RNA, 20 nt, Artificial Sequence
  Synthetic
aaaacacaauagaugaaaaa

SEQ ID NO: 151452 - RNA, 18 nt, Artificial Sequence
  Synthetic
aagaaaacuugugaaaaa

SEQ ID NO: 151453 - RNA, 19 nt, Artificial Sequence
  Synthetic
aaagaaaacuugugaaaaa

SEQ ID NO: 151454 - RNA, 18 nt, Artificial Sequence
  Synthetic
uacaaaacuuuugaaaaa

SEQ ID NO: 151455 - RNA, 19 nt, Artificial Sequence
  Synthetic
auacaaaacuuuugaaaaa

SEQ ID NO: 151456 - RNA, 20 nt, Artificial Sequence
  Synthetic
uauacaaaacuuuugaaaaa

SEQ ID NO: 151457 - RNA, 21 nt, Artificial Sequence
  Synthetic
uuauacaaaacuuuugaaaaa

SEQ ID NO: 151458 - RNA, 22 nt, Artificial Sequence
  Synthetic
auuauacaaaacuuuugaaaaa

SEQ ID NO: 151459 - RNA, 23 nt, Artificial Sequence
  Synthetic
aauuauacaaaacuuuugaaaaa

SEQ ID NO: 151460 - RNA, 24 nt, Artificial Sequence
  Synthetic
uaauuauacaaaacuuuugaaaaa

SEQ ID NO: 151461 - RNA, 19 nt, Artificial Sequence
  Synthetic
aguccucaaaaaauaaaaa

SEQ ID NO: 151462 - RNA, 20 nt, Artificial Sequence
  Synthetic
caguccucaaaaaauaaaaa

SEQ ID NO: 151463 - RNA, 21 nt, Artificial Sequence
  Synthetic
ccaguccucaaaaaauaaaaa

SEQ ID NO: 151464 - RNA, 22 nt, Artificial Sequence
  Synthetic
uccaguccucaaaaaauaaaaa

SEQ ID NO: 151465 - RNA, 23 nt, Artificial Sequence
  Synthetic
auccaguccucaaaaaauaaaaa

SEQ ID NO: 151466 - RNA, 24 nt, Artificial Sequence
  Synthetic
aauccaguccucaaaaaauaaaaa

SEQ ID NO: 151467 - RNA, 20 nt, Artificial Sequence
  Synthetic
agggauuuuuaaaauaaaaa

SEQ ID NO: 151468 - RNA, 18 nt, Artificial Sequence
  Synthetic
uucucaaaauaauaaaaa

SEQ ID NO: 151469 - RNA, 19 nt, Artificial Sequence
  Synthetic
uuucucaaaauaauaaaaa

SEQ ID NO: 151470 - RNA, 21 nt, Artificial Sequence
  Synthetic
uguuucucaaaauaauaaaaa

SEQ ID NO: 151471 - RNA, 22 nt, Artificial Sequence
  Synthetic
auguuucucaaaauaauaaaaa

SEQ ID NO: 151472 - RNA, 23 nt, Artificial Sequence
  Synthetic
aauguuucucaaaauaauaaaaa

SEQ ID NO: 151473 - RNA, 18 nt, Artificial Sequence
  Synthetic
uuccucaaaacauaaaaa

SEQ ID NO: 151474 - RNA, 20 nt, Artificial Sequence
  Synthetic
aguuccucaaaacauaaaaa

SEQ ID NO: 151475 - RNA, 21 nt, Artificial Sequence
  Synthetic
aaguuccucaaaacauaaaaa

SEQ ID NO: 151476 - RNA, 24 nt, Artificial Sequence
  Synthetic
uggaaguuccucaaaacauaaaaa

SEQ ID NO: 151477 - RNA, 18 nt, Artificial Sequence
  Synthetic
acuacguagccauaaaaa

SEQ ID NO: 151478 - RNA, 19 nt, Artificial Sequence
  Synthetic
uacuacguagccauaaaaa

SEQ ID NO: 151479 - RNA, 20 nt, Artificial Sequence
  Synthetic
auacuacguagccauaaaaa

SEQ ID NO: 151480 - RNA, 21 nt, Artificial Sequence
  Synthetic
aauacuacguagccauaaaaa

SEQ ID NO: 151481 - RNA, 24 nt, Artificial Sequence
  Synthetic
uggaauacuacguagccauaaaaa

SEQ ID NO: 151482 - RNA, 19 nt, Artificial Sequence
  Synthetic
ugaauuuagaauauaaaaa

SEQ ID NO: 151483 - RNA, 20 nt, Artificial Sequence
  Synthetic
augaauuuagaauauaaaaa

SEQ ID NO: 151484 - RNA, 18 nt, Artificial Sequence
  Synthetic
auccaaaagaauuaaaaa

SEQ ID NO: 151485 - RNA, 19 nt, Artificial Sequence
  Synthetic
uauccaaaagaauuaaaaa

SEQ ID NO: 151486 - RNA, 20 nt, Artificial Sequence
  Synthetic
auauccaaaagaauuaaaaa

SEQ ID NO: 151487 - RNA, 21 nt, Artificial Sequence
  Synthetic
uauauccaaaagaauuaaaaa

SEQ ID NO: 151488 - RNA, 23 nt, Artificial Sequence
  Synthetic
uguauauccaaaagaauuaaaaa

SEQ ID NO: 151489 - RNA, 24 nt, Artificial Sequence
  Synthetic
cuguauauccaaaagaauuaaaaa

SEQ ID NO: 151490 - RNA, 19 nt, Artificial Sequence
  Synthetic
aggaaugauuucuuaaaaa

SEQ ID NO: 151491 - RNA, 20 nt, Artificial Sequence
  Synthetic
aaggaaugauuucuuaaaaa

SEQ ID NO: 151492 - RNA, 18 nt, Artificial Sequence
  Synthetic
ucuuuuuuauuuuaaaaa

SEQ ID NO: 151493 - RNA, 19 nt, Artificial Sequence
  Synthetic
aucuuuuuuauuuuaaaaa

SEQ ID NO: 151494 - RNA, 20 nt, Artificial Sequence
  Synthetic
uaucuuuuuuauuuuaaaaa

SEQ ID NO: 151495 - RNA, 21 nt, Artificial Sequence
  Synthetic
uuaucuuuuuuauuuuaaaaa

SEQ ID NO: 151496 - RNA, 22 nt, Artificial Sequence
  Synthetic
uuuaucuuuuuuauuuuaaaaa

SEQ ID NO: 151497 - RNA, 23 nt, Artificial Sequence
  Synthetic
uuuuaucuuuuuuauuuuaaaaa

SEQ ID NO: 151498 - RNA, 24 nt, Artificial Sequence
  Synthetic
auuuuaucuuuuuuauuuuaaaaa

SEQ ID NO: 151499 - RNA, 19 nt, Artificial Sequence
  Synthetic
aggaaauuguuuuuaaaaa

SEQ ID NO: 151500 - RNA, 20 nt, Artificial Sequence
  Synthetic
caggaaauuguuuuuaaaaa

SEQ ID NO: 151501 - RNA, 18 nt, Artificial Sequence
  Synthetic
uaccucaauaaaacaaaa

SEQ ID NO: 151502 - RNA, 19 nt, Artificial Sequence
  Synthetic
auaccucaauaaaacaaaa

SEQ ID NO: 151503 - RNA, 20 nt, Artificial Sequence
  Synthetic
uauaccucaauaaaacaaaa

SEQ ID NO: 151504 - RNA, 21 nt, Artificial Sequence
  Synthetic
uuauaccucaauaaaacaaaa

SEQ ID NO: 151505 - RNA, 22 nt, Artificial Sequence
  Synthetic
auuauaccucaauaaaacaaaa

SEQ ID NO: 151506 - RNA, 23 nt, Artificial Sequence
  Synthetic
aauuauaccucaauaaaacaaaa

SEQ ID NO: 151507 - RNA, 24 nt, Artificial Sequence
  Synthetic
aaauuauaccucaauaaaacaaaa

SEQ ID NO: 151508 - RNA, 18 nt, Artificial Sequence
  Synthetic
auaauuaguaaaacaaaa

SEQ ID NO: 151509 - RNA, 19 nt, Artificial Sequence
  Synthetic
uauaauuaguaaaacaaaa

SEQ ID NO: 151510 - RNA, 20 nt, Artificial Sequence
  Synthetic
auauaauuaguaaaacaaaa

SEQ ID NO: 151511 - RNA, 18 nt, Artificial Sequence
  Synthetic
uacuacucagccacaaaa

SEQ ID NO: 151512 - RNA, 19 nt, Artificial Sequence
  Synthetic
auacuacucagccacaaaa

SEQ ID NO: 151513 - RNA, 20 nt, Artificial Sequence
  Synthetic
aauacuacucagccacaaaa

SEQ ID NO: 151514 - RNA, 23 nt, Artificial Sequence
  Synthetic
uggaauacuacucagccacaaaa

SEQ ID NO: 151515 - RNA, 24 nt, Artificial Sequence
  Synthetic
auggaauacuacucagccacaaaa

SEQ ID NO: 151516 - RNA, 18 nt, Artificial Sequence
  Synthetic
auacauaaucuaccaaaa

SEQ ID NO: 151517 - RNA, 19 nt, Artificial Sequence
  Synthetic
aauacauaaucuaccaaaa

SEQ ID NO: 151518 - RNA, 20 nt, Artificial Sequence
  Synthetic
aaauacauaaucuaccaaaa

SEQ ID NO: 151519 - RNA, 22 nt, Artificial Sequence
  Synthetic
agaaauacauaaucuaccaaaa

SEQ ID NO: 151520 - RNA, 23 nt, Artificial Sequence
  Synthetic
uagaaauacauaaucuaccaaaa

SEQ ID NO: 151521 - RNA, 24 nt, Artificial Sequence
  Synthetic
uuagaaauacauaaucuaccaaaa

SEQ ID NO: 151522 - RNA, 18 nt, Artificial Sequence
  Synthetic
agacuagagaacccaaaa

SEQ ID NO: 151523 - RNA, 19 nt, Artificial Sequence
  Synthetic
aagacuagagaacccaaaa

SEQ ID NO: 151524 - RNA, 20 nt, Artificial Sequence
  Synthetic
aaagacuagagaacccaaaa

SEQ ID NO: 151525 - RNA, 21 nt, Artificial Sequence
  Synthetic
aaaagacuagagaacccaaaa

SEQ ID NO: 151526 - RNA, 24 nt, Artificial Sequence
  Synthetic
uggaaaagacuagagaacccaaaa

SEQ ID NO: 151527 - RNA, 18 nt, Artificial Sequence
  Synthetic
acacacccugggccaaaa

SEQ ID NO: 151528 - RNA, 20 nt, Artificial Sequence
  Synthetic
agacacacccugggccaaaa

SEQ ID NO: 151529 - RNA, 21 nt, Artificial Sequence
  Synthetic
uagacacacccugggccaaaa

SEQ ID NO: 151530 - RNA, 22 nt, Artificial Sequence
  Synthetic
cuagacacacccugggccaaaa

SEQ ID NO: 151531 - RNA, 23 nt, Artificial Sequence
  Synthetic
ucuagacacacccugggccaaaa

SEQ ID NO: 151532 - RNA, 24 nt, Artificial Sequence
  Synthetic
uucuagacacacccugggccaaaa

SEQ ID NO: 151533 - RNA, 18 nt, Artificial Sequence
  Synthetic
uuuaaaaaaucuccaaaa

SEQ ID NO: 151534 - RNA, 19 nt, Artificial Sequence
  Synthetic
uuuuaaaaaaucuccaaaa

SEQ ID NO: 151535 - RNA, 20 nt, Artificial Sequence
  Synthetic
uuuuuaaaaaaucuccaaaa

SEQ ID NO: 151536 - RNA, 21 nt, Artificial Sequence
  Synthetic
auuuuuaaaaaaucuccaaaa

SEQ ID NO: 151537 - RNA, 22 nt, Artificial Sequence
  Synthetic
aauuuuuaaaaaaucuccaaaa

SEQ ID NO: 151538 - RNA, 23 nt, Artificial Sequence
  Synthetic
aaauuuuuaaaaaaucuccaaaa

SEQ ID NO: 151539 - RNA, 24 nt, Artificial Sequence
  Synthetic
aaaauuuuuaaaaaaucuccaaaa

SEQ ID NO: 151540 - RNA, 19 nt, Artificial Sequence
  Synthetic
ugguugaauaagagcaaaa

SEQ ID NO: 151541 - RNA, 20 nt, Artificial Sequence
  Synthetic
uugguugaauaagagcaaaa

SEQ ID NO: 151542 - RNA, 18 nt, Artificial Sequence
  Synthetic
caaauaaacucugcaaaa

SEQ ID NO: 151543 - RNA, 19 nt, Artificial Sequence
  Synthetic
ucaaauaaacucugcaaaa

SEQ ID NO: 151544 - RNA, 20 nt, Artificial Sequence
  Synthetic
cucaaauaaacucugcaaaa

SEQ ID NO: 151545 - RNA, 22 nt, Artificial Sequence
  Synthetic
ugcucaaauaaacucugcaaaa

SEQ ID NO: 151546 - RNA, 23 nt, Artificial Sequence
  Synthetic
uugcucaaauaaacucugcaaaa

SEQ ID NO: 151547 - RNA, 24 nt, Artificial Sequence
  Synthetic
uuugcucaaauaaacucugcaaaa

SEQ ID NO: 151548 - RNA, 18 nt, Artificial Sequence
  Synthetic
caaggaaaaaaaucaaaa

SEQ ID NO: 151549 - RNA, 19 nt, Artificial Sequence
  Synthetic
ucaaggaaaaaaaucaaaa

SEQ ID NO: 151550 - RNA, 20 nt, Artificial Sequence
  Synthetic
uucaaggaaaaaaaucaaaa

SEQ ID NO: 151551 - RNA, 18 nt, Artificial Sequence
  Synthetic
caaggcuuuaucucaaaa

SEQ ID NO: 151552 - RNA, 20 nt, Artificial Sequence
  Synthetic
agcaaggcuuuaucucaaaa

SEQ ID NO: 151553 - RNA, 18 nt, Artificial Sequence
  Synthetic
aauaaaaagaaaagaaaa

SEQ ID NO: 151554 - RNA, 19 nt, Artificial Sequence
  Synthetic
aaauaaaaagaaaagaaaa

SEQ ID NO: 151555 - RNA, 20 nt, Artificial Sequence
  Synthetic
uaaauaaaaagaaaagaaaa

SEQ ID NO: 151556 - RNA, 21 nt, Artificial Sequence
  Synthetic
auaaauaaaaagaaaagaaaa

SEQ ID NO: 151557 - RNA, 22 nt, Artificial Sequence
  Synthetic
aauaaauaaaaagaaaagaaaa

SEQ ID NO: 151558 - RNA, 23 nt, Artificial Sequence
  Synthetic
aaauaaauaaaaagaaaagaaaa

SEQ ID NO: 151559 - RNA, 24 nt, Artificial Sequence
  Synthetic
aaaauaaauaaaaagaaaagaaaa

SEQ ID NO: 151560 - RNA, 18 nt, Artificial Sequence
  Synthetic
cuuucauuucuaagaaaa

SEQ ID NO: 151561 - RNA, 19 nt, Artificial Sequence
  Synthetic
acuuucauuucuaagaaaa

SEQ ID NO: 151562 - RNA, 20 nt, Artificial Sequence
  Synthetic
aacuuucauuucuaagaaaa

SEQ ID NO: 151563 - RNA, 19 nt, Artificial Sequence
  Synthetic
ugauggcauuuacagaaaa

SEQ ID NO: 151564 - RNA, 20 nt, Artificial Sequence
  Synthetic
augauggcauuuacagaaaa

SEQ ID NO: 151565 - RNA, 18 nt, Artificial Sequence
  Synthetic
uacugugcagccagaaaa

SEQ ID NO: 151566 - RNA, 19 nt, Artificial Sequence
  Synthetic
auacugugcagccagaaaa

SEQ ID NO: 151567 - RNA, 20 nt, Artificial Sequence
  Synthetic
aauacugugcagccagaaaa

SEQ ID NO: 151568 - RNA, 24 nt, Artificial Sequence
  Synthetic
agggaauacugugcagccagaaaa

SEQ ID NO: 151569 - RNA, 19 nt, Artificial Sequence
  Synthetic
aggcaaaauguucagaaaa

SEQ ID NO: 151570 - RNA, 20 nt, Artificial Sequence
  Synthetic
aaggcaaaauguucagaaaa

SEQ ID NO: 151571 - RNA, 18 nt, Artificial Sequence
  Synthetic
cuucagcaaaagagaaaa

SEQ ID NO: 151572 - RNA, 19 nt, Artificial Sequence
  Synthetic
ucuucagcaaaagagaaaa

SEQ ID NO: 151573 - RNA, 20 nt, Artificial Sequence
  Synthetic
uucuucagcaaaagagaaaa

SEQ ID NO: 151574 - RNA, 18 nt, Artificial Sequence
  Synthetic
auaacaacucagagaaaa

SEQ ID NO: 151575 - RNA, 19 nt, Artificial Sequence
  Synthetic
aauaacaacucagagaaaa

SEQ ID NO: 151576 - RNA, 20 nt, Artificial Sequence
  Synthetic
aaauaacaacucagagaaaa

SEQ ID NO: 151577 - RNA, 22 nt, Artificial Sequence
  Synthetic
agaaauaacaacucagagaaaa

SEQ ID NO: 151578 - RNA, 23 nt, Artificial Sequence
  Synthetic
cagaaauaacaacucagagaaaa

SEQ ID NO: 151579 - RNA, 24 nt, Artificial Sequence
  Synthetic
acagaaauaacaacucagagaaaa

SEQ ID NO: 151580 - RNA, 18 nt, Artificial Sequence
  Synthetic
agggaaguuuagagaaaa

SEQ ID NO: 151581 - RNA, 19 nt, Artificial Sequence
  Synthetic
aagggaaguuuagagaaaa

SEQ ID NO: 151582 - RNA, 21 nt, Artificial Sequence
  Synthetic
agaagggaaguuuagagaaaa

SEQ ID NO: 151583 - RNA, 23 nt, Artificial Sequence
  Synthetic
cgagaagggaaguuuagagaaaa

SEQ ID NO: 151584 - RNA, 18 nt, Artificial Sequence
  Synthetic
auuucacauuugagaaaa

SEQ ID NO: 151585 - RNA, 19 nt, Artificial Sequence
  Synthetic
cauuucacauuugagaaaa

SEQ ID NO: 151586 - RNA, 20 nt, Artificial Sequence
  Synthetic
acauuucacauuugagaaaa

SEQ ID NO: 151587 - RNA, 18 nt, Artificial Sequence
  Synthetic
aaaaaauacuuaggaaaa

SEQ ID NO: 151588 - RNA, 19 nt, Artificial Sequence
  Synthetic
caaaaaauacuuaggaaaa

SEQ ID NO: 151589 - RNA, 20 nt, Artificial Sequence
  Synthetic
acaaaaaauacuuaggaaaa

SEQ ID NO: 151590 - RNA, 21 nt, Artificial Sequence
  Synthetic
uacaaaaaauacuuaggaaaa

SEQ ID NO: 151591 - RNA, 18 nt, Artificial Sequence
  Synthetic
ccaauggugcugggaaaa

SEQ ID NO: 151592 - RNA, 19 nt, Artificial Sequence
  Synthetic
accaauggugcugggaaaa

SEQ ID NO: 151593 - RNA, 20 nt, Artificial Sequence
  Synthetic
aaccaauggugcugggaaaa

SEQ ID NO: 151594 - RNA, 21 nt, Artificial Sequence
  Synthetic
caaccaauggugcugggaaaa

SEQ ID NO: 151595 - RNA, 22 nt, Artificial Sequence
  Synthetic
ucaaccaauggugcugggaaaa

SEQ ID NO: 151596 - RNA, 23 nt, Artificial Sequence
  Synthetic
uucaaccaauggugcugggaaaa

SEQ ID NO: 151597 - RNA, 24 nt, Artificial Sequence
  Synthetic
cuucaaccaauggugcugggaaaa

SEQ ID NO: 151598 - RNA, 18 nt, Artificial Sequence
  Synthetic
uaaaugguauugggaaaa

SEQ ID NO: 151599 - RNA, 19 nt, Artificial Sequence
  Synthetic
auaaaugguauugggaaaa

SEQ ID NO: 151600 - RNA, 20 nt, Artificial Sequence
  Synthetic
aauaaaugguauugggaaaa

SEQ ID NO: 151601 - RNA, 21 nt, Artificial Sequence
  Synthetic
caauaaaugguauugggaaaa

SEQ ID NO: 151602 - RNA, 22 nt, Artificial Sequence
  Synthetic
ucaauaaaugguauugggaaaa

SEQ ID NO: 151603 - RNA, 23 nt, Artificial Sequence
  Synthetic
uucaauaaaugguauugggaaaa

SEQ ID NO: 151604 - RNA, 24 nt, Artificial Sequence
  Synthetic
cuucaauaaaugguauugggaaaa

SEQ ID NO: 151605 - RNA, 20 nt, Artificial Sequence
  Synthetic
aggaaaaaucuacuggaaaa

SEQ ID NO: 151606 - RNA, 21 nt, Artificial Sequence
  Synthetic
aaggaaaaaucuacuggaaaa

SEQ ID NO: 151607 - RNA, 22 nt, Artificial Sequence
  Synthetic
aaaggaaaaaucuacuggaaaa

SEQ ID NO: 151608 - RNA, 23 nt, Artificial Sequence
  Synthetic
aaaaggaaaaaucuacuggaaaa

SEQ ID NO: 151609 - RNA, 24 nt, Artificial Sequence
  Synthetic
aaaaaggaaaaaucuacuggaaaa

SEQ ID NO: 151610 - RNA, 18 nt, Artificial Sequence
  Synthetic
ugagcugagaccugaaaa

SEQ ID NO: 151611 - RNA, 19 nt, Artificial Sequence
  Synthetic
uugagcugagaccugaaaa

SEQ ID NO: 151612 - RNA, 20 nt, Artificial Sequence
  Synthetic
uuugagcugagaccugaaaa

SEQ ID NO: 151613 - RNA, 21 nt, Artificial Sequence
  Synthetic
auuugagcugagaccugaaaa

SEQ ID NO: 151614 - RNA, 22 nt, Artificial Sequence
  Synthetic
cauuugagcugagaccugaaaa

SEQ ID NO: 151615 - RNA, 23 nt, Artificial Sequence
  Synthetic
acauuugagcugagaccugaaaa

SEQ ID NO: 151616 - RNA, 24 nt, Artificial Sequence
  Synthetic
aacauuugagcugagaccugaaaa

SEQ ID NO: 151617 - RNA, 19 nt, Artificial Sequence
  Synthetic
ugggaaggggagcugaaaa

SEQ ID NO: 151618 - RNA, 21 nt, Artificial Sequence
  Synthetic
agugggaaggggagcugaaaa

SEQ ID NO: 151619 - RNA, 22 nt, Artificial Sequence
  Synthetic
cagugggaaggggagcugaaaa

SEQ ID NO: 151620 - RNA, 23 nt, Artificial Sequence
  Synthetic
ucagugggaaggggagcugaaaa

SEQ ID NO: 151621 - RNA, 24 nt, Artificial Sequence
  Synthetic
cucagugggaaggggagcugaaaa

SEQ ID NO: 151622 - RNA, 18 nt, Artificial Sequence
  Synthetic
auaaaaacuaaaauaaaa

SEQ ID NO: 151623 - RNA, 19 nt, Artificial Sequence
  Synthetic
aauaaaaacuaaaauaaaa

SEQ ID NO: 151624 - RNA, 20 nt, Artificial Sequence
  Synthetic
uaauaaaaacuaaaauaaaa

SEQ ID NO: 151625 - RNA, 21 nt, Artificial Sequence
  Synthetic
auaauaaaaacuaaaauaaaa

SEQ ID NO: 151626 - RNA, 22 nt, Artificial Sequence
  Synthetic
aauaauaaaaacuaaaauaaaa

SEQ ID NO: 151627 - RNA, 23 nt, Artificial Sequence
  Synthetic
aaauaauaaaaacuaaaauaaaa

SEQ ID NO: 151628 - RNA, 24 nt, Artificial Sequence
  Synthetic
aaaauaauaaaaacuaaaauaaaa

SEQ ID NO: 151629 - RNA, 21 nt, Artificial Sequence
  Synthetic
ccacugcucaaggaaauaaaa

SEQ ID NO: 151630 - RNA, 22 nt, Artificial Sequence
  Synthetic
accacugcucaaggaaauaaaa

SEQ ID NO: 151631 - RNA, 23 nt, Artificial Sequence
  Synthetic
aaccacugcucaaggaaauaaaa

SEQ ID NO: 151632 - RNA, 24 nt, Artificial Sequence
  Synthetic
aaaccacugcucaaggaaauaaaa

SEQ ID NO: 151633 - RNA, 18 nt, Artificial Sequence
  Synthetic
aauaugauuuaaauaaaa

SEQ ID NO: 151634 - RNA, 19 nt, Artificial Sequence
  Synthetic
aaauaugauuuaaauaaaa

SEQ ID NO: 151635 - RNA, 20 nt, Artificial Sequence
  Synthetic
aaaauaugauuuaaauaaaa

SEQ ID NO: 151636 - RNA, 18 nt, Artificial Sequence
  Synthetic
uacuauuuagcaauaaaa

SEQ ID NO: 151637 - RNA, 21 nt, Artificial Sequence
  Synthetic
cgguacuauuuagcaauaaaa

SEQ ID NO: 151638 - RNA, 23 nt, Artificial Sequence
  Synthetic
ugcgguacuauuuagcaauaaaa

SEQ ID NO: 151639 - RNA, 24 nt, Artificial Sequence
  Synthetic
augcgguacuauuuagcaauaaaa

SEQ ID NO: 151640 - RNA, 18 nt, Artificial Sequence
  Synthetic
uugguuaaaauaauaaaa

SEQ ID NO: 151641 - RNA, 20 nt, Artificial Sequence
  Synthetic
aguugguuaaaauaauaaaa

SEQ ID NO: 151642 - RNA, 18 nt, Artificial Sequence
  Synthetic
uacuacgcaaccauaaaa

SEQ ID NO: 151643 - RNA, 19 nt, Artificial Sequence
  Synthetic
auacuacgcaaccauaaaa

SEQ ID NO: 151644 - RNA, 20 nt, Artificial Sequence
  Synthetic
aauacuacgcaaccauaaaa

SEQ ID NO: 151645 - RNA, 23 nt, Artificial Sequence
  Synthetic
uggaauacuacgcaaccauaaaa

SEQ ID NO: 151646 - RNA, 24 nt, Artificial Sequence
  Synthetic
auggaauacuacgcaaccauaaaa

SEQ ID NO: 151647 - RNA, 18 nt, Artificial Sequence
  Synthetic
uacuaugcaaccauaaaa

SEQ ID NO: 151648 - RNA, 19 nt, Artificial Sequence
  Synthetic
auacuaugcaaccauaaaa

SEQ ID NO: 151649 - RNA, 20 nt, Artificial Sequence
  Synthetic
aauacuaugcaaccauaaaa

SEQ ID NO: 151650 - RNA, 23 nt, Artificial Sequence
  Synthetic
uggaauacuaugcaaccauaaaa

SEQ ID NO: 151651 - RNA, 24 nt, Artificial Sequence
  Synthetic
auggaauacuaugcaaccauaaaa

SEQ ID NO: 151652 - RNA, 18 nt, Artificial Sequence
  Synthetic
uacugugaagccauaaaa

SEQ ID NO: 151653 - RNA, 19 nt, Artificial Sequence
  Synthetic
auacugugaagccauaaaa

SEQ ID NO: 151654 - RNA, 20 nt, Artificial Sequence
  Synthetic
aauacugugaagccauaaaa

SEQ ID NO: 151655 - RNA, 23 nt, Artificial Sequence
  Synthetic
uggaauacugugaagccauaaaa

SEQ ID NO: 151656 - RNA, 24 nt, Artificial Sequence
  Synthetic
auggaauacugugaagccauaaaa

SEQ ID NO: 151657 - RNA, 18 nt, Artificial Sequence
  Synthetic
cacuaugcagccauaaaa

SEQ ID NO: 151658 - RNA, 19 nt, Artificial Sequence
  Synthetic
acacuaugcagccauaaaa

SEQ ID NO: 151659 - RNA, 23 nt, Artificial Sequence
  Synthetic
ugggacacuaugcagccauaaaa

SEQ ID NO: 151660 - RNA, 24 nt, Artificial Sequence
  Synthetic
augggacacuaugcagccauaaaa

SEQ ID NO: 151661 - RNA, 24 nt, Artificial Sequence
  Synthetic
auggaauacuaugcagccauaaaa

SEQ ID NO: 151662 - RNA, 18 nt, Artificial Sequence
  Synthetic
uacucugcagccauaaaa

SEQ ID NO: 151663 - RNA, 19 nt, Artificial Sequence
  Synthetic
auacucugcagccauaaaa

SEQ ID NO: 151664 - RNA, 20 nt, Artificial Sequence
  Synthetic
aauacucugcagccauaaaa

SEQ ID NO: 151665 - RNA, 23 nt, Artificial Sequence
  Synthetic
uggaauacucugcagccauaaaa

SEQ ID NO: 151666 - RNA, 18 nt, Artificial Sequence
  Synthetic
uacuacucagccauaaaa

SEQ ID NO: 151667 - RNA, 19 nt, Artificial Sequence
  Synthetic
auacuacucagccauaaaa

SEQ ID NO: 151668 - RNA, 20 nt, Artificial Sequence
  Synthetic
aauacuacucagccauaaaa

SEQ ID NO: 151669 - RNA, 22 nt, Artificial Sequence
  Synthetic
ugaauacuacucagccauaaaa

SEQ ID NO: 151670 - RNA, 23 nt, Artificial Sequence
  Synthetic
augaauacuacucagccauaaaa

SEQ ID NO: 151671 - RNA, 24 nt, Artificial Sequence
  Synthetic
uaugaauacuacucagccauaaaa

SEQ ID NO: 151672 - RNA, 18 nt, Artificial Sequence
  Synthetic
uauuacucagccauaaaa

SEQ ID NO: 151673 - RNA, 19 nt, Artificial Sequence
  Synthetic
auauuacucagccauaaaa

SEQ ID NO: 151674 - RNA, 20 nt, Artificial Sequence
  Synthetic
aauauuacucagccauaaaa

SEQ ID NO: 151675 - RNA, 23 nt, Artificial Sequence
  Synthetic
uggaauauuacucagccauaaaa

SEQ ID NO: 151676 - RNA, 24 nt, Artificial Sequence
  Synthetic
auggaauauuacucagccauaaaa

SEQ ID NO: 151677 - RNA, 18 nt, Artificial Sequence
  Synthetic
uauuauucagucauaaaa

SEQ ID NO: 151678 - RNA, 19 nt, Artificial Sequence
  Synthetic
auauuauucagucauaaaa

SEQ ID NO: 151679 - RNA, 20 nt, Artificial Sequence
  Synthetic
aauauuauucagucauaaaa

SEQ ID NO: 151680 - RNA, 23 nt, Artificial Sequence
  Synthetic
uggaauauuauucagucauaaaa

SEQ ID NO: 151681 - RNA, 24 nt, Artificial Sequence
  Synthetic
auggaauauuauucagucauaaaa

SEQ ID NO: 151682 - RNA, 18 nt, Artificial Sequence
  Synthetic
aauaguggaaugauaaaa

SEQ ID NO: 151683 - RNA, 19 nt, Artificial Sequence
  Synthetic
aaauaguggaaugauaaaa

SEQ ID NO: 151684 - RNA, 20 nt, Artificial Sequence
  Synthetic
aaaauaguggaaugauaaaa

SEQ ID NO: 151685 - RNA, 18 nt, Artificial Sequence
  Synthetic
uuuauuauuaugauaaaa

SEQ ID NO: 151686 - RNA, 19 nt, Artificial Sequence
  Synthetic
auuuauuauuaugauaaaa

SEQ ID NO: 151687 - RNA, 18 nt, Artificial Sequence
  Synthetic
auuuuagaagauauaaaa

SEQ ID NO: 151688 - RNA, 19 nt, Artificial Sequence
  Synthetic
aauuuuagaagauauaaaa

SEQ ID NO: 151689 - RNA, 20 nt, Artificial Sequence
  Synthetic
caauuuuagaagauauaaaa

SEQ ID NO: 151690 - RNA, 18 nt, Artificial Sequence
  Synthetic
cacaacauguuuauaaaa

SEQ ID NO: 151691 - RNA, 19 nt, Artificial Sequence
  Synthetic
ucacaacauguuuauaaaa

SEQ ID NO: 151692 - RNA, 20 nt, Artificial Sequence
  Synthetic
uucacaacauguuuauaaaa

SEQ ID NO: 151693 - RNA, 18 nt, Artificial Sequence
  Synthetic
agaaauaaggauguaaaa

SEQ ID NO: 151694 - RNA, 19 nt, Artificial Sequence
  Synthetic
uagaaauaaggauguaaaa

SEQ ID NO: 151695 - RNA, 20 nt, Artificial Sequence
  Synthetic
auagaaauaaggauguaaaa

SEQ ID NO: 151696 - RNA, 18 nt, Artificial Sequence
  Synthetic
uucuaugacaaauuaaaa

SEQ ID NO: 151697 - RNA, 19 nt, Artificial Sequence
  Synthetic
uuucuaugacaaauuaaaa

SEQ ID NO: 151698 - RNA, 20 nt, Artificial Sequence
  Synthetic
auuucuaugacaaauuaaaa

SEQ ID NO: 151699 - RNA, 18 nt, Artificial Sequence
  Synthetic
aaaaacagcuaauuaaaa

SEQ ID NO: 151700 - RNA, 19 nt, Artificial Sequence
  Synthetic
uaaaaacagcuaauuaaaa

SEQ ID NO: 151701 - RNA, 20 nt, Artificial Sequence
  Synthetic
uuaaaaacagcuaauuaaaa

SEQ ID NO: 151702 - RNA, 18 nt, Artificial Sequence
  Synthetic
uuauuguauucauuaaaa

SEQ ID NO: 151703 - RNA, 19 nt, Artificial Sequence
  Synthetic
uuuauuguauucauuaaaa

SEQ ID NO: 151704 - RNA, 20 nt, Artificial Sequence
  Synthetic
uuuuauuguauucauuaaaa

SEQ ID NO: 151705 - RNA, 18 nt, Artificial Sequence
  Synthetic
aaucaauaaaacuuaaaa

SEQ ID NO: 151706 - RNA, 19 nt, Artificial Sequence
  Synthetic
aaaucaauaaaacuuaaaa

SEQ ID NO: 151707 - RNA, 20 nt, Artificial Sequence
  Synthetic
uaaaucaauaaaacuuaaaa

SEQ ID NO: 151708 - RNA, 21 nt, Artificial Sequence
  Synthetic
auaaaucaauaaaacuuaaaa

SEQ ID NO: 151709 - RNA, 22 nt, Artificial Sequence
  Synthetic
uauaaaucaauaaaacuuaaaa

SEQ ID NO: 151710 - RNA, 18 nt, Artificial Sequence
  Synthetic
aaaacuuaauucuuaaaa

SEQ ID NO: 151711 - RNA, 19 nt, Artificial Sequence
  Synthetic
uaaaacuuaauucuuaaaa

SEQ ID NO: 151712 - RNA, 20 nt, Artificial Sequence
  Synthetic
auaaaacuuaauucuuaaaa

SEQ ID NO: 151713 - RNA, 21 nt, Artificial Sequence
  Synthetic
aauaaaacuuaauucuuaaaa

SEQ ID NO: 151714 - RNA, 22 nt, Artificial Sequence
  Synthetic
aaauaaaacuuaauucuuaaaa

SEQ ID NO: 151715 - RNA, 23 nt, Artificial Sequence
  Synthetic
aaaauaaaacuuaauucuuaaaa

SEQ ID NO: 151716 - RNA, 24 nt, Artificial Sequence
  Synthetic
uaaaauaaaacuuaauucuuaaaa

SEQ ID NO: 151717 - RNA, 18 nt, Artificial Sequence
  Synthetic
uucauuauuuucuuaaaa

SEQ ID NO: 151718 - RNA, 19 nt, Artificial Sequence
  Synthetic
auucauuauuuucuuaaaa

SEQ ID NO: 151719 - RNA, 20 nt, Artificial Sequence
  Synthetic
uauucauuauuuucuuaaaa

SEQ ID NO: 151720 - RNA, 18 nt, Artificial Sequence
  Synthetic
uuccaacuuaaguuaaaa

SEQ ID NO: 151721 - RNA, 19 nt, Artificial Sequence
  Synthetic
uuuccaacuuaaguuaaaa

SEQ ID NO: 151722 - RNA, 20 nt, Artificial Sequence
  Synthetic
uuuuccaacuuaaguuaaaa

SEQ ID NO: 151723 - RNA, 18 nt, Artificial Sequence
  Synthetic
uccagaacuauguuaaaa

SEQ ID NO: 151724 - RNA, 19 nt, Artificial Sequence
  Synthetic
uuccagaacuauguuaaaa

SEQ ID NO: 151725 - RNA, 20 nt, Artificial Sequence
  Synthetic
cuuccagaacuauguuaaaa

SEQ ID NO: 151726 - RNA, 21 nt, Artificial Sequence
  Synthetic
acuuccagaacuauguuaaaa

SEQ ID NO: 151727 - RNA, 22 nt, Artificial Sequence
  Synthetic
aacuuccagaacuauguuaaaa

SEQ ID NO: 151728 - RNA, 18 nt, Artificial Sequence
  Synthetic
auagcucuuaauuuaaaa

SEQ ID NO: 151729 - RNA, 19 nt, Artificial Sequence
  Synthetic
aauagcucuuaauuuaaaa

SEQ ID NO: 151730 - RNA, 20 nt, Artificial Sequence
  Synthetic
aaauagcucuuaauuuaaaa

SEQ ID NO: 151731 - RNA, 21 nt, Artificial Sequence
  Synthetic
uaaauagcucuuaauuuaaaa

SEQ ID NO: 151732 - RNA, 22 nt, Artificial Sequence
  Synthetic
uuaaauagcucuuaauuuaaaa

SEQ ID NO: 151733 - RNA, 23 nt, Artificial Sequence
  Synthetic
auuaaauagcucuuaauuuaaaa

SEQ ID NO: 151734 - RNA, 24 nt, Artificial Sequence
  Synthetic
aauuaaauagcucuuaauuuaaaa

SEQ ID NO: 151735 - RNA, 18 nt, Artificial Sequence
  Synthetic
uuauaaaauuauuuaaaa

SEQ ID NO: 151736 - RNA, 19 nt, Artificial Sequence
  Synthetic
uuuauaaaauuauuuaaaa

SEQ ID NO: 151737 - RNA, 20 nt, Artificial Sequence
  Synthetic
uuuuauaaaauuauuuaaaa

SEQ ID NO: 151738 - RNA, 18 nt, Artificial Sequence
  Synthetic
ucuuauuucucuuuaaaa

SEQ ID NO: 151739 - RNA, 19 nt, Artificial Sequence
  Synthetic
cucuuauuucucuuuaaaa

SEQ ID NO: 151740 - RNA, 20 nt, Artificial Sequence
  Synthetic
acucuuauuucucuuuaaaa

SEQ ID NO: 151741 - RNA, 22 nt, Artificial Sequence
  Synthetic
ugacucuuauuucucuuuaaaa

SEQ ID NO: 151742 - RNA, 23 nt, Artificial Sequence
  Synthetic
augacucuuauuucucuuuaaaa

SEQ ID NO: 151743 - RNA, 24 nt, Artificial Sequence
  Synthetic
aaugacucuuauuucucuuuaaaa

SEQ ID NO: 151744 - RNA, 18 nt, Artificial Sequence
  Synthetic
auuugaaaaauuuuaaaa

SEQ ID NO: 151745 - RNA, 19 nt, Artificial Sequence
  Synthetic
uauuugaaaaauuuuaaaa

SEQ ID NO: 151746 - RNA, 18 nt, Artificial Sequence
  Synthetic
auuucacagauuuuaaaa

SEQ ID NO: 151747 - RNA, 19 nt, Artificial Sequence
  Synthetic
uauuucacagauuuuaaaa

SEQ ID NO: 151748 - RNA, 20 nt, Artificial Sequence
  Synthetic
uuauuucacagauuuuaaaa

SEQ ID NO: 151749 - RNA, 18 nt, Artificial Sequence
  Synthetic
ccacauuuuauuuuaaaa

SEQ ID NO: 151750 - RNA, 19 nt, Artificial Sequence
  Synthetic
accacauuuuauuuuaaaa

SEQ ID NO: 151751 - RNA, 20 nt, Artificial Sequence
  Synthetic
aaccacauuuuauuuuaaaa

SEQ ID NO: 151752 - RNA, 18 nt, Artificial Sequence
  Synthetic
uuauucaauuuuuuaaaa

SEQ ID NO: 151753 - RNA, 19 nt, Artificial Sequence
  Synthetic
uuuauucaauuuuuuaaaa

SEQ ID NO: 151754 - RNA, 18 nt, Artificial Sequence
  Synthetic
ucagccucccaaaacaaa

SEQ ID NO: 151755 - RNA, 19 nt, Artificial Sequence
  Synthetic
cucagccucccaaaacaaa

SEQ ID NO: 151756 - RNA, 20 nt, Artificial Sequence
  Synthetic
ccucagccucccaaaacaaa

SEQ ID NO: 151757 - RNA, 22 nt, Artificial Sequence
  Synthetic
cgccucagccucccaaaacaaa

SEQ ID NO: 151758 - RNA, 23 nt, Artificial Sequence
  Synthetic
ccgccucagccucccaaaacaaa

SEQ ID NO: 151759 - RNA, 24 nt, Artificial Sequence
  Synthetic
cccgccucagccucccaaaacaaa

SEQ ID NO: 151760 - RNA, 18 nt, Artificial Sequence
  Synthetic
aacaaacaaacaaacaaa

SEQ ID NO: 151761 - RNA, 19 nt, Artificial Sequence
  Synthetic
aaacaaacaaacaaacaaa

SEQ ID NO: 151762 - RNA, 21 nt, Artificial Sequence
  Synthetic
agaaacaaacaaacaaacaaa

SEQ ID NO: 151763 - RNA, 22 nt, Artificial Sequence
  Synthetic
aagaaacaaacaaacaaacaaa

SEQ ID NO: 151764 - RNA, 24 nt, Artificial Sequence
  Synthetic
agaagaaacaaacaaacaaacaaa

SEQ ID NO: 151765 - RNA, 18 nt, Artificial Sequence
  Synthetic
uuaacaaauaucaacaaa

SEQ ID NO: 151766 - RNA, 19 nt, Artificial Sequence
  Synthetic
uuuaacaaauaucaacaaa

SEQ ID NO: 151767 - RNA, 20 nt, Artificial Sequence
  Synthetic
uuuuaacaaauaucaacaaa

SEQ ID NO: 151768 - RNA, 18 nt, Artificial Sequence
  Synthetic
uugaaauuacagaacaaa

SEQ ID NO: 151769 - RNA, 19 nt, Artificial Sequence
  Synthetic
uuugaaauuacagaacaaa

SEQ ID NO: 151770 - RNA, 20 nt, Artificial Sequence
  Synthetic
uuuugaaauuacagaacaaa

SEQ ID NO: 151771 - RNA, 21 nt, Artificial Sequence
  Synthetic
auuuugaaauuacagaacaaa

SEQ ID NO: 151772 - RNA, 22 nt, Artificial Sequence
  Synthetic
cauuuugaaauuacagaacaaa

SEQ ID NO: 151773 - RNA, 23 nt, Artificial Sequence
  Synthetic
ucauuuugaaauuacagaacaaa

SEQ ID NO: 151774 - RNA, 24 nt, Artificial Sequence
  Synthetic
aucauuuugaaauuacagaacaaa

SEQ ID NO: 151775 - RNA, 18 nt, Artificial Sequence
  Synthetic
agccacaaaaaacacaaa

SEQ ID NO: 151776 - RNA, 19 nt, Artificial Sequence
  Synthetic
aagccacaaaaaacacaaa

SEQ ID NO: 151777 - RNA, 20 nt, Artificial Sequence
  Synthetic
aaagccacaaaaaacacaaa

SEQ ID NO: 151778 - RNA, 19 nt, Artificial Sequence
  Synthetic
cgugguacauauacacaaa

SEQ ID NO: 151779 - RNA, 20 nt, Artificial Sequence
  Synthetic
acgugguacauauacacaaa

SEQ ID NO: 151780 - RNA, 21 nt, Artificial Sequence
  Synthetic
aacgugguacauauacacaaa

SEQ ID NO: 151781 - RNA, 22 nt, Artificial Sequence
  Synthetic
aaacgugguacauauacacaaa

SEQ ID NO: 151782 - RNA, 23 nt, Artificial Sequence
  Synthetic
aaaacgugguacauauacacaaa

SEQ ID NO: 151783 - RNA, 18 nt, Artificial Sequence
  Synthetic
aaagccaaaacggacaaa

SEQ ID NO: 151784 - RNA, 19 nt, Artificial Sequence
  Synthetic
aaaagccaaaacggacaaa

SEQ ID NO: 151785 - RNA, 20 nt, Artificial Sequence
  Synthetic
caaaagccaaaacggacaaa

SEQ ID NO: 151786 - RNA, 21 nt, Artificial Sequence
  Synthetic
acaaaagccaaaacggacaaa

SEQ ID NO: 151787 - RNA, 22 nt, Artificial Sequence
  Synthetic
aacaaaagccaaaacggacaaa

SEQ ID NO: 151788 - RNA, 23 nt, Artificial Sequence
  Synthetic
caacaaaagccaaaacggacaaa

SEQ ID NO: 151789 - RNA, 21 nt, Artificial Sequence
  Synthetic
acaaaagccaaaauugacaaa

SEQ ID NO: 151790 - RNA, 22 nt, Artificial Sequence
  Synthetic
aacaaaagccaaaauugacaaa

SEQ ID NO: 151791 - RNA, 23 nt, Artificial Sequence
  Synthetic
caacaaaagccaaaauugacaaa

SEQ ID NO: 151792 - RNA, 19 nt, Artificial Sequence
  Synthetic
agaagccaaaauugacaaa

SEQ ID NO: 151793 - RNA, 20 nt, Artificial Sequence
  Synthetic
cagaagccaaaauugacaaa

SEQ ID NO: 151794 - RNA, 21 nt, Artificial Sequence
  Synthetic
acagaagccaaaauugacaaa

SEQ ID NO: 151795 - RNA, 22 nt, Artificial Sequence
  Synthetic
aacagaagccaaaauugacaaa

SEQ ID NO: 151796 - RNA, 23 nt, Artificial Sequence
  Synthetic
caacagaagccaaaauugacaaa

SEQ ID NO: 151797 - RNA, 18 nt, Artificial Sequence
  Synthetic
aaauucuucaaauacaaa

SEQ ID NO: 151798 - RNA, 19 nt, Artificial Sequence
  Synthetic
aaaauucuucaaauacaaa

SEQ ID NO: 151799 - RNA, 20 nt, Artificial Sequence
  Synthetic
aaaaauucuucaaauacaaa

SEQ ID NO: 151800 - RNA, 18 nt, Artificial Sequence
  Synthetic
auuaaaaauugcuacaaa

SEQ ID NO: 151801 - RNA, 19 nt, Artificial Sequence
  Synthetic
cauuaaaaauugcuacaaa

SEQ ID NO: 151802 - RNA, 20 nt, Artificial Sequence
  Synthetic
ccauuaaaaauugcuacaaa

SEQ ID NO: 151803 - RNA, 21 nt, Artificial Sequence
  Synthetic
cccauuaaaaauugcuacaaa

SEQ ID NO: 151804 - RNA, 22 nt, Artificial Sequence
  Synthetic
ucccauuaaaaauugcuacaaa

SEQ ID NO: 151805 - RNA, 23 nt, Artificial Sequence
  Synthetic
cucccauuaaaaauugcuacaaa

SEQ ID NO: 151806 - RNA, 24 nt, Artificial Sequence
  Synthetic
acucccauuaaaaauugcuacaaa

SEQ ID NO: 151807 - RNA, 18 nt, Artificial Sequence
  Synthetic
auucacaauugcuacaaa

SEQ ID NO: 151808 - RNA, 19 nt, Artificial Sequence
  Synthetic
uauucacaauugcuacaaa

SEQ ID NO: 151809 - RNA, 20 nt, Artificial Sequence
  Synthetic
cuauucacaauugcuacaaa

SEQ ID NO: 151810 - RNA, 21 nt, Artificial Sequence
  Synthetic
ccuauucacaauugcuacaaa

SEQ ID NO: 151811 - RNA, 22 nt, Artificial Sequence
  Synthetic
uccuauucacaauugcuacaaa

SEQ ID NO: 151812 - RNA, 23 nt, Artificial Sequence
  Synthetic
cuccuauucacaauugcuacaaa

SEQ ID NO: 151813 - RNA, 24 nt, Artificial Sequence
  Synthetic
acuccuauucacaauugcuacaaa

SEQ ID NO: 151814 - RNA, 18 nt, Artificial Sequence
  Synthetic
auaacauguaauuacaaa

SEQ ID NO: 151815 - RNA, 19 nt, Artificial Sequence
  Synthetic
aauaacauguaauuacaaa

SEQ ID NO: 151816 - RNA, 20 nt, Artificial Sequence
  Synthetic
aaauaacauguaauuacaaa

SEQ ID NO: 151817 - RNA, 21 nt, Artificial Sequence
  Synthetic
caaauaacauguaauuacaaa

SEQ ID NO: 151818 - RNA, 22 nt, Artificial Sequence
  Synthetic
acaaauaacauguaauuacaaa

SEQ ID NO: 151819 - RNA, 23 nt, Artificial Sequence
  Synthetic
cacaaauaacauguaauuacaaa

SEQ ID NO: 151820 - RNA, 24 nt, Artificial Sequence
  Synthetic
acacaaauaacauguaauuacaaa

SEQ ID NO: 151821 - RNA, 18 nt, Artificial Sequence
  Synthetic
aauauuuuaccaaccaaa

SEQ ID NO: 151822 - RNA, 19 nt, Artificial Sequence
  Synthetic
caauauuuuaccaaccaaa

SEQ ID NO: 151823 - RNA, 20 nt, Artificial Sequence
  Synthetic
ucaauauuuuaccaaccaaa

SEQ ID NO: 151824 - RNA, 21 nt, Artificial Sequence
  Synthetic
aucaauauuuuaccaaccaaa

SEQ ID NO: 151825 - RNA, 22 nt, Artificial Sequence
  Synthetic
aaucaauauuuuaccaaccaaa

SEQ ID NO: 151826 - RNA, 23 nt, Artificial Sequence
  Synthetic
uaaucaauauuuuaccaaccaaa

SEQ ID NO: 151827 - RNA, 24 nt, Artificial Sequence
  Synthetic
auaaucaauauuuuaccaaccaaa

SEQ ID NO: 151828 - RNA, 19 nt, Artificial Sequence
  Synthetic
aggucucugggaggccaaa

SEQ ID NO: 151829 - RNA, 20 nt, Artificial Sequence
  Synthetic
caggucucugggaggccaaa

SEQ ID NO: 151830 - RNA, 21 nt, Artificial Sequence
  Synthetic
ccaggucucugggaggccaaa

SEQ ID NO: 151831 - RNA, 22 nt, Artificial Sequence
  Synthetic
cccaggucucugggaggccaaa

SEQ ID NO: 151832 - RNA, 23 nt, Artificial Sequence
  Synthetic
ucccaggucucugggaggccaaa

SEQ ID NO: 151833 - RNA, 24 nt, Artificial Sequence
  Synthetic
aucccaggucucugggaggccaaa

SEQ ID NO: 151834 - RNA, 18 nt, Artificial Sequence
  Synthetic
auagccaacauauccaaa

SEQ ID NO: 151835 - RNA, 19 nt, Artificial Sequence
  Synthetic
aauagccaacauauccaaa

SEQ ID NO: 151836 - RNA, 20 nt, Artificial Sequence
  Synthetic
aaauagccaacauauccaaa

SEQ ID NO: 151837 - RNA, 18 nt, Artificial Sequence
  Synthetic
aaugauccaaauuccaaa

SEQ ID NO: 151838 - RNA, 19 nt, Artificial Sequence
  Synthetic
aaaugauccaaauuccaaa

SEQ ID NO: 151839 - RNA, 20 nt, Artificial Sequence
  Synthetic
aaaaugauccaaauuccaaa

SEQ ID NO: 151840 - RNA, 18 nt, Artificial Sequence
  Synthetic
aaaggccagaauuccaaa

SEQ ID NO: 151841 - RNA, 20 nt, Artificial Sequence
  Synthetic
agaaaggccagaauuccaaa

SEQ ID NO: 151842 - RNA, 18 nt, Artificial Sequence
  Synthetic
aggaaucuauacagcaaa

SEQ ID NO: 151843 - RNA, 20 nt, Artificial Sequence
  Synthetic
agaggaaucuauacagcaaa

SEQ ID NO: 151844 - RNA, 19 nt, Artificial Sequence
  Synthetic
agauggggaaaagagcaaa

SEQ ID NO: 151845 - RNA, 21 nt, Artificial Sequence
  Synthetic
ccucaauaaaauacuggcaaa

SEQ ID NO: 151846 - RNA, 22 nt, Artificial Sequence
  Synthetic
uccucaauaaaauacuggcaaa

SEQ ID NO: 151847 - RNA, 23 nt, Artificial Sequence
  Synthetic
cuccucaauaaaauacuggcaaa

SEQ ID NO: 151848 - RNA, 24 nt, Artificial Sequence
  Synthetic
acuccucaauaaaauacuggcaaa

SEQ ID NO: 151849 - RNA, 18 nt, Artificial Sequence
  Synthetic
agagaacugcaaaucaaa

SEQ ID NO: 151850 - RNA, 19 nt, Artificial Sequence
  Synthetic
cagagaacugcaaaucaaa

SEQ ID NO: 151851 - RNA, 20 nt, Artificial Sequence
  Synthetic
ucagagaacugcaaaucaaa

SEQ ID NO: 151852 - RNA, 20 nt, Artificial Sequence
  Synthetic
uggcaguuugccuuaucaaa

SEQ ID NO: 151853 - RNA, 18 nt, Artificial Sequence
  Synthetic
uacaagaaucaacucaaa

SEQ ID NO: 151854 - RNA, 19 nt, Artificial Sequence
  Synthetic
auacaagaaucaacucaaa

SEQ ID NO: 151855 - RNA, 20 nt, Artificial Sequence
  Synthetic
uauacaagaaucaacucaaa

SEQ ID NO: 151856 - RNA, 21 nt, Artificial Sequence
  Synthetic
uuauacaagaaucaacucaaa

SEQ ID NO: 151857 - RNA, 22 nt, Artificial Sequence
  Synthetic
cuuauacaagaaucaacucaaa

SEQ ID NO: 151858 - RNA, 23 nt, Artificial Sequence
  Synthetic
ccuuauacaagaaucaacucaaa

SEQ ID NO: 151859 - RNA, 24 nt, Artificial Sequence
  Synthetic
cccuuauacaagaaucaacucaaa

SEQ ID NO: 151860 - RNA, 18 nt, Artificial Sequence
  Synthetic
uucucucucucucucaaa

SEQ ID NO: 151861 - RNA, 19 nt, Artificial Sequence
  Synthetic
uuucucucucucucucaaa

SEQ ID NO: 151862 - RNA, 20 nt, Artificial Sequence
  Synthetic
uuuucucucucucucucaaa

SEQ ID NO: 151863 - RNA, 21 nt, Artificial Sequence
  Synthetic
uuuuucucucucucucucaaa

SEQ ID NO: 151864 - RNA, 22 nt, Artificial Sequence
  Synthetic
uuuuuucucucucucucucaaa

SEQ ID NO: 151865 - RNA, 23 nt, Artificial Sequence
  Synthetic
uuuuuuucucucucucucucaaa

SEQ ID NO: 151866 - RNA, 24 nt, Artificial Sequence
  Synthetic
uuuuuuuucucucucucucucaaa

SEQ ID NO: 151867 - RNA, 18 nt, Artificial Sequence
  Synthetic
uuaaaccaucaagucaaa

SEQ ID NO: 151868 - RNA, 19 nt, Artificial Sequence
  Synthetic
auuaaaccaucaagucaaa

SEQ ID NO: 151869 - RNA, 20 nt, Artificial Sequence
  Synthetic
uauuaaaccaucaagucaaa

SEQ ID NO: 151870 - RNA, 21 nt, Artificial Sequence
  Synthetic
uuauuaaaccaucaagucaaa

SEQ ID NO: 151871 - RNA, 22 nt, Artificial Sequence
  Synthetic
uuuauuaaaccaucaagucaaa

SEQ ID NO: 151872 - RNA, 23 nt, Artificial Sequence
  Synthetic
uuuuauuaaaccaucaagucaaa

SEQ ID NO: 151873 - RNA, 24 nt, Artificial Sequence
  Synthetic
cuuuuauuaaaccaucaagucaaa

SEQ ID NO: 151874 - RNA, 21 nt, Artificial Sequence
  Synthetic
uuugaaaauuuuacauucaaa

SEQ ID NO: 151875 - RNA, 22 nt, Artificial Sequence
  Synthetic
uuuugaaaauuuuacauucaaa

SEQ ID NO: 151876 - RNA, 23 nt, Artificial Sequence
  Synthetic
uuuuugaaaauuuuacauucaaa

SEQ ID NO: 151877 - RNA, 24 nt, Artificial Sequence
  Synthetic
cuuuuugaaaauuuuacauucaaa

SEQ ID NO: 151878 - RNA, 23 nt, Artificial Sequence
  Synthetic
cucccauucacaauugcuucaaa

SEQ ID NO: 151879 - RNA, 24 nt, Artificial Sequence
  Synthetic
acucccauucacaauugcuucaaa

SEQ ID NO: 151880 - RNA, 20 nt, Artificial Sequence
  Synthetic
ucauucacaauugcuucaaa

SEQ ID NO: 151881 - RNA, 21 nt, Artificial Sequence
  Synthetic
cucauucacaauugcuucaaa

SEQ ID NO: 151882 - RNA, 22 nt, Artificial Sequence
  Synthetic
ucucauucacaauugcuucaaa

SEQ ID NO: 151883 - RNA, 23 nt, Artificial Sequence
  Synthetic
cucucauucacaauugcuucaaa

SEQ ID NO: 151884 - RNA, 24 nt, Artificial Sequence
  Synthetic
acucucauucacaauugcuucaaa

SEQ ID NO: 151885 - RNA, 18 nt, Artificial Sequence
  Synthetic
uucuuauucgaguucaaa

SEQ ID NO: 151886 - RNA, 19 nt, Artificial Sequence
  Synthetic
uuucuuauucgaguucaaa

SEQ ID NO: 151887 - RNA, 20 nt, Artificial Sequence
  Synthetic
uuuucuuauucgaguucaaa

SEQ ID NO: 151888 - RNA, 21 nt, Artificial Sequence
  Synthetic
uuuuucuuauucgaguucaaa

SEQ ID NO: 151889 - RNA, 23 nt, Artificial Sequence
  Synthetic
cguuuuucuuauucgaguucaaa

SEQ ID NO: 151890 - RNA, 18 nt, Artificial Sequence
  Synthetic
uuuuucugaauuuucaaa

SEQ ID NO: 151891 - RNA, 19 nt, Artificial Sequence
  Synthetic
uuuuuucugaauuuucaaa

SEQ ID NO: 151892 - RNA, 20 nt, Artificial Sequence
  Synthetic
uuuuuuucugaauuuucaaa

SEQ ID NO: 151893 - RNA, 21 nt, Artificial Sequence
  Synthetic
uuuuuuuucugaauuuucaaa

SEQ ID NO: 151894 - RNA, 22 nt, Artificial Sequence
  Synthetic
auuuuuuuucugaauuuucaaa

SEQ ID NO: 151895 - RNA, 23 nt, Artificial Sequence
  Synthetic
aauuuuuuuucugaauuuucaaa

SEQ ID NO: 151896 - RNA, 24 nt, Artificial Sequence
  Synthetic
caauuuuuuuucugaauuuucaaa

SEQ ID NO: 151897 - RNA, 19 nt, Artificial Sequence
  Synthetic
ugggugcuuuaaaaagaaa

SEQ ID NO: 151898 - RNA, 20 nt, Artificial Sequence
  Synthetic
cugggugcuuuaaaaagaaa

SEQ ID NO: 151899 - RNA, 21 nt, Artificial Sequence
  Synthetic
acugggugcuuuaaaaagaaa

SEQ ID NO: 151900 - RNA, 22 nt, Artificial Sequence
  Synthetic
aacugggugcuuuaaaaagaaa

SEQ ID NO: 151901 - RNA, 23 nt, Artificial Sequence
  Synthetic
aaacugggugcuuuaaaaagaaa

SEQ ID NO: 151902 - RNA, 18 nt, Artificial Sequence
  Synthetic
ugaaauuaagaaaagaaa

SEQ ID NO: 151903 - RNA, 19 nt, Artificial Sequence
  Synthetic
cugaaauuaagaaaagaaa

SEQ ID NO: 151904 - RNA, 20 nt, Artificial Sequence
  Synthetic
ccugaaauuaagaaaagaaa

SEQ ID NO: 151905 - RNA, 18 nt, Artificial Sequence
  Synthetic
uauaaugaugaaaagaaa

SEQ ID NO: 151906 - RNA, 19 nt, Artificial Sequence
  Synthetic
auauaaugaugaaaagaaa

SEQ ID NO: 151907 - RNA, 20 nt, Artificial Sequence
  Synthetic
cauauaaugaugaaaagaaa

SEQ ID NO: 151908 - RNA, 20 nt, Artificial Sequence
  Synthetic
uggauguguaaugaaagaaa

SEQ ID NO: 151909 - RNA, 21 nt, Artificial Sequence
  Synthetic
cuggauguguaaugaaagaaa

SEQ ID NO: 151910 - RNA, 22 nt, Artificial Sequence
  Synthetic
ucuggauguguaaugaaagaaa

SEQ ID NO: 151911 - RNA, 23 nt, Artificial Sequence
  Synthetic
cucuggauguguaaugaaagaaa

SEQ ID NO: 151912 - RNA, 24 nt, Artificial Sequence
  Synthetic
ucucuggauguguaaugaaagaaa

SEQ ID NO: 151913 - RNA, 18 nt, Artificial Sequence
  Synthetic
auuuuacuaguaaagaaa

SEQ ID NO: 151914 - RNA, 19 nt, Artificial Sequence
  Synthetic
uauuuuacuaguaaagaaa

SEQ ID NO: 151915 - RNA, 20 nt, Artificial Sequence
  Synthetic
cuauuuuacuaguaaagaaa

SEQ ID NO: 151916 - RNA, 18 nt, Artificial Sequence
  Synthetic
agaauaucuaccaagaaa

SEQ ID NO: 151917 - RNA, 19 nt, Artificial Sequence
  Synthetic
uagaauaucuaccaagaaa

SEQ ID NO: 151918 - RNA, 20 nt, Artificial Sequence
  Synthetic
auagaauaucuaccaagaaa

SEQ ID NO: 151919 - RNA, 19 nt, Artificial Sequence
  Synthetic
agcaaaaagaaagaagaaa

SEQ ID NO: 151920 - RNA, 22 nt, Artificial Sequence
  Synthetic
aggagcaaaaagaaagaagaaa

SEQ ID NO: 151921 - RNA, 18 nt, Artificial Sequence
  Synthetic
augugacaaaugaagaaa

SEQ ID NO: 151922 - RNA, 19 nt, Artificial Sequence
  Synthetic
aaugugacaaaugaagaaa

SEQ ID NO: 151923 - RNA, 18 nt, Artificial Sequence
  Synthetic
aaacaaguaaaacagaaa

SEQ ID NO: 151924 - RNA, 19 nt, Artificial Sequence
  Synthetic
caaacaaguaaaacagaaa

SEQ ID NO: 151925 - RNA, 20 nt, Artificial Sequence
  Synthetic
ccaaacaaguaaaacagaaa

SEQ ID NO: 151926 - RNA, 18 nt, Artificial Sequence
  Synthetic
auuugagaagaacagaaa

SEQ ID NO: 151927 - RNA, 19 nt, Artificial Sequence
  Synthetic
uauuugagaagaacagaaa

SEQ ID NO: 151928 - RNA, 18 nt, Artificial Sequence
  Synthetic
aaacgaaaggaacagaaa

SEQ ID NO: 151929 - RNA, 19 nt, Artificial Sequence
  Synthetic
caaacgaaaggaacagaaa

SEQ ID NO: 151930 - RNA, 20 nt, Artificial Sequence
  Synthetic
ucaaacgaaaggaacagaaa

SEQ ID NO: 151931 - RNA, 18 nt, Artificial Sequence
  Synthetic
auaugagagauacagaaa

SEQ ID NO: 151932 - RNA, 19 nt, Artificial Sequence
  Synthetic
uauaugagagauacagaaa

SEQ ID NO: 151933 - RNA, 20 nt, Artificial Sequence
  Synthetic
auauaugagagauacagaaa

SEQ ID NO: 151934 - RNA, 21 nt, Artificial Sequence
  Synthetic
uauauaugagagauacagaaa

SEQ ID NO: 151935 - RNA, 22 nt, Artificial Sequence
  Synthetic
cuauauaugagagauacagaaa

SEQ ID NO: 151936 - RNA, 23 nt, Artificial Sequence
  Synthetic
ccuauauaugagagauacagaaa

SEQ ID NO: 151937 - RNA, 24 nt, Artificial Sequence
  Synthetic
cccuauauaugagagauacagaaa

SEQ ID NO: 151938 - RNA, 20 nt, Artificial Sequence
  Synthetic
agguggagcucaggcagaaa

SEQ ID NO: 151939 - RNA, 23 nt, Artificial Sequence
  Synthetic
aggagguggagcucaggcagaaa

SEQ ID NO: 151940 - RNA, 24 nt, Artificial Sequence
  Synthetic
caggagguggagcucaggcagaaa

SEQ ID NO: 151941 - RNA, 19 nt, Artificial Sequence
  Synthetic
agcuuguauuucucagaaa

SEQ ID NO: 151942 - RNA, 20 nt, Artificial Sequence
  Synthetic
cagcuuguauuucucagaaa

SEQ ID NO: 151943 - RNA, 21 nt, Artificial Sequence
  Synthetic
ccagcuuguauuucucagaaa

SEQ ID NO: 151944 - RNA, 23 nt, Artificial Sequence
  Synthetic
agccagcuuguauuucucagaaa

SEQ ID NO: 151945 - RNA, 24 nt, Artificial Sequence
  Synthetic
cagccagcuuguauuucucagaaa

SEQ ID NO: 151946 - RNA, 18 nt, Artificial Sequence
  Synthetic
cugguguugaaagagaaa

SEQ ID NO: 151947 - RNA, 19 nt, Artificial Sequence
  Synthetic
ucugguguugaaagagaaa

SEQ ID NO: 151948 - RNA, 20 nt, Artificial Sequence
  Synthetic
uucugguguugaaagagaaa

SEQ ID NO: 151949 - RNA, 18 nt, Artificial Sequence
  Synthetic
caggguuuuucagagaaa

SEQ ID NO: 151950 - RNA, 20 nt, Artificial Sequence
  Synthetic
ugcaggguuuuucagagaaa

SEQ ID NO: 151951 - RNA, 19 nt, Artificial Sequence
  Synthetic
agagacagagagagagaaa

SEQ ID NO: 151952 - RNA, 21 nt, Artificial Sequence
  Synthetic
agagagacagagagagagaaa

SEQ ID NO: 151953 - RNA, 23 nt, Artificial Sequence
  Synthetic
agagagagacagagagagagaaa

SEQ ID NO: 151954 - RNA, 18 nt, Artificial Sequence
  Synthetic
aauauucuaauagagaaa

SEQ ID NO: 151955 - RNA, 20 nt, Artificial Sequence
  Synthetic
ugaauauucuaauagagaaa

SEQ ID NO: 151956 - RNA, 18 nt, Artificial Sequence
  Synthetic
uuaccuggaugugagaaa

SEQ ID NO: 151957 - RNA, 20 nt, Artificial Sequence
  Synthetic
uguuaccuggaugugagaaa

SEQ ID NO: 151958 - RNA, 22 nt, Artificial Sequence
  Synthetic
aguguuaccuggaugugagaaa

SEQ ID NO: 151959 - RNA, 23 nt, Artificial Sequence
  Synthetic
caguguuaccuggaugugagaaa

SEQ ID NO: 151960 - RNA, 24 nt, Artificial Sequence
  Synthetic
ucaguguuaccuggaugugagaaa

SEQ ID NO: 151961 - RNA, 18 nt, Artificial Sequence
  Synthetic
uuguauuuuuaguagaaa

SEQ ID NO: 151962 - RNA, 19 nt, Artificial Sequence
  Synthetic
uuuguauuuuuaguagaaa

SEQ ID NO: 151963 - RNA, 20 nt, Artificial Sequence
  Synthetic
uuuuguauuuuuaguagaaa

SEQ ID NO: 151964 - RNA, 21 nt, Artificial Sequence
  Synthetic
uuuuuguauuuuuaguagaaa

SEQ ID NO: 151965 - RNA, 22 nt, Artificial Sequence
  Synthetic
uuuuuuguauuuuuaguagaaa

SEQ ID NO: 151966 - RNA, 23 nt, Artificial Sequence
  Synthetic
uuuuuuuguauuuuuaguagaaa

SEQ ID NO: 151967 - RNA, 24 nt, Artificial Sequence
  Synthetic
uuuuuuuuguauuuuuaguagaaa

SEQ ID NO: 151968 - RNA, 21 nt, Artificial Sequence
  Synthetic
uggagacuugggggguagaaa

SEQ ID NO: 151969 - RNA, 22 nt, Artificial Sequence
  Synthetic
uuggagacuugggggguagaaa

SEQ ID NO: 151970 - RNA, 23 nt, Artificial Sequence
  Synthetic
uuuggagacuugggggguagaaa

SEQ ID NO: 151971 - RNA, 24 nt, Artificial Sequence
  Synthetic
cuuuggagacuugggggguagaaa

SEQ ID NO: 151972 - RNA, 18 nt, Artificial Sequence
  Synthetic
aauaaauccuuuuagaaa

SEQ ID NO: 151973 - RNA, 19 nt, Artificial Sequence
  Synthetic
aaauaaauccuuuuagaaa

SEQ ID NO: 151974 - RNA, 20 nt, Artificial Sequence
  Synthetic
aaaauaaauccuuuuagaaa

SEQ ID NO: 151975 - RNA, 18 nt, Artificial Sequence
  Synthetic
uuuauucuuuuuuagaaa

SEQ ID NO: 151976 - RNA, 19 nt, Artificial Sequence
  Synthetic
uuuuauucuuuuuuagaaa

SEQ ID NO: 151977 - RNA, 20 nt, Artificial Sequence
  Synthetic
auuuuauucuuuuuuagaaa

SEQ ID NO: 151978 - RNA, 21 nt, Artificial Sequence
  Synthetic
uauuuuauucuuuuuuagaaa

SEQ ID NO: 151979 - RNA, 22 nt, Artificial Sequence
  Synthetic
auauuuuauucuuuuuuagaaa

SEQ ID NO: 151980 - RNA, 23 nt, Artificial Sequence
  Synthetic
uauauuuuauucuuuuuuagaaa

SEQ ID NO: 151981 - RNA, 24 nt, Artificial Sequence
  Synthetic
uuauauuuuauucuuuuuuagaaa

SEQ ID NO: 151982 - RNA, 18 nt, Artificial Sequence
  Synthetic
caaaaucagcaaaggaaa

SEQ ID NO: 151983 - RNA, 19 nt, Artificial Sequence
  Synthetic
ucaaaaucagcaaaggaaa

SEQ ID NO: 151984 - RNA, 21 nt, Artificial Sequence
  Synthetic
ugucaaaaucagcaaaggaaa

SEQ ID NO: 151985 - RNA, 22 nt, Artificial Sequence
  Synthetic
cugucaaaaucagcaaaggaaa

SEQ ID NO: 151986 - RNA, 23 nt, Artificial Sequence
  Synthetic
ucugucaaaaucagcaaaggaaa

SEQ ID NO: 151987 - RNA, 24 nt, Artificial Sequence
  Synthetic
uucugucaaaaucagcaaaggaaa

SEQ ID NO: 151988 - RNA, 18 nt, Artificial Sequence
  Synthetic
acagaaagaggaaggaaa

SEQ ID NO: 151989 - RNA, 19 nt, Artificial Sequence
  Synthetic
cacagaaagaggaaggaaa

SEQ ID NO: 151990 - RNA, 18 nt, Artificial Sequence
  Synthetic
agauuuauagacaggaaa

SEQ ID NO: 151991 - RNA, 19 nt, Artificial Sequence
  Synthetic
cagauuuauagacaggaaa

SEQ ID NO: 151992 - RNA, 20 nt, Artificial Sequence
  Synthetic
ucagauuuauagacaggaaa

SEQ ID NO: 151993 - RNA, 21 nt, Artificial Sequence
  Synthetic
uucagauuuauagacaggaaa

SEQ ID NO: 151994 - RNA, 22 nt, Artificial Sequence
  Synthetic
auucagauuuauagacaggaaa

SEQ ID NO: 151995 - RNA, 23 nt, Artificial Sequence
  Synthetic
uauucagauuuauagacaggaaa

SEQ ID NO: 151996 - RNA, 18 nt, Artificial Sequence
  Synthetic
uuggagaauaagaggaaa

SEQ ID NO: 151997 - RNA, 19 nt, Artificial Sequence
  Synthetic
uuuggagaauaagaggaaa

SEQ ID NO: 151998 - RNA, 20 nt, Artificial Sequence
  Synthetic
auuuggagaauaagaggaaa

SEQ ID NO: 151999 - RNA, 19 nt, Artificial Sequence
  Synthetic
agaaccacaguuuaggaaa

SEQ ID NO: 152000 - RNA, 18 nt, Artificial Sequence
  Synthetic
aauagaacagaagggaaa

SEQ ID NO: 152001 - RNA, 20 nt, Artificial Sequence
  Synthetic
agaauagaacagaagggaaa

SEQ ID NO: 152002 - RNA, 18 nt, Artificial Sequence
  Synthetic
aaaaaaaauaaggggaaa

SEQ ID NO: 152003 - RNA, 19 nt, Artificial Sequence
  Synthetic
aguauuauugaaauggaaa

SEQ ID NO: 152004 - RNA, 20 nt, Artificial Sequence
  Synthetic
aaguauuauugaaauggaaa

SEQ ID NO: 152005 - RNA, 18 nt, Artificial Sequence
  Synthetic
aaaaaugaagcauggaaa

SEQ ID NO: 152006 - RNA, 19 nt, Artificial Sequence
  Synthetic
aaaaaaugaagcauggaaa

SEQ ID NO: 152007 - RNA, 20 nt, Artificial Sequence
  Synthetic
aaaaaaaugaagcauggaaa

SEQ ID NO: 152008 - RNA, 18 nt, Artificial Sequence
  Synthetic
ccagggcaacauuggaaa

SEQ ID NO: 152009 - RNA, 19 nt, Artificial Sequence
  Synthetic
cccagggcaacauuggaaa

SEQ ID NO: 152010 - RNA, 20 nt, Artificial Sequence
  Synthetic
ucccagggcaacauuggaaa

SEQ ID NO: 152011 - RNA, 21 nt, Artificial Sequence
  Synthetic
uucccagggcaacauuggaaa

SEQ ID NO: 152012 - RNA, 22 nt, Artificial Sequence
  Synthetic
uuucccagggcaacauuggaaa

SEQ ID NO: 152013 - RNA, 18 nt, Artificial Sequence
  Synthetic
ugucaccagauuuggaaa

SEQ ID NO: 152014 - RNA, 19 nt, Artificial Sequence
  Synthetic
augucaccagauuuggaaa

SEQ ID NO: 152015 - RNA, 20 nt, Artificial Sequence
  Synthetic
aaugucaccagauuuggaaa

SEQ ID NO: 152016 - RNA, 18 nt, Artificial Sequence
  Synthetic
aaucaacucaaaaugaaa

SEQ ID NO: 152017 - RNA, 19 nt, Artificial Sequence
  Synthetic
aaaucaacucaaaaugaaa

SEQ ID NO: 152018 - RNA, 20 nt, Artificial Sequence
  Synthetic
aaaaucaacucaaaaugaaa

SEQ ID NO: 152019 - RNA, 21 nt, Artificial Sequence
  Synthetic
aaaaaucaacucaaaaugaaa

SEQ ID NO: 152020 - RNA, 22 nt, Artificial Sequence
  Synthetic
uaaaaaucaacucaaaaugaaa

SEQ ID NO: 152021 - RNA, 23 nt, Artificial Sequence
  Synthetic
auaaaaaucaacucaaaaugaaa

SEQ ID NO: 152022 - RNA, 24 nt, Artificial Sequence
  Synthetic
cauaaaaaucaacucaaaaugaaa

SEQ ID NO: 152023 - RNA, 19 nt, Artificial Sequence
  Synthetic
ugguacuguccucaugaaa

SEQ ID NO: 152024 - RNA, 20 nt, Artificial Sequence
  Synthetic
uugguacuguccucaugaaa

SEQ ID NO: 152025 - RNA, 21 nt, Artificial Sequence
  Synthetic
cuugguacuguccucaugaaa

SEQ ID NO: 152026 - RNA, 22 nt, Artificial Sequence
  Synthetic
ucuugguacuguccucaugaaa

SEQ ID NO: 152027 - RNA, 23 nt, Artificial Sequence
  Synthetic
cucuugguacuguccucaugaaa

SEQ ID NO: 152028 - RNA, 24 nt, Artificial Sequence
  Synthetic
ccucuugguacuguccucaugaaa

SEQ ID NO: 152029 - RNA, 18 nt, Artificial Sequence
  Synthetic
aagaaacaaaauaugaaa

SEQ ID NO: 152030 - RNA, 19 nt, Artificial Sequence
  Synthetic
caagaaacaaaauaugaaa

SEQ ID NO: 152031 - RNA, 18 nt, Artificial Sequence
  Synthetic
uauuuuaaaagacugaaa

SEQ ID NO: 152032 - RNA, 19 nt, Artificial Sequence
  Synthetic
auauuuuaaaagacugaaa

SEQ ID NO: 152033 - RNA, 20 nt, Artificial Sequence
  Synthetic
aauauuuuaaaagacugaaa

SEQ ID NO: 152034 - RNA, 18 nt, Artificial Sequence
  Synthetic
auaaagaaauaccugaaa

SEQ ID NO: 152035 - RNA, 19 nt, Artificial Sequence
  Synthetic
uauaaagaaauaccugaaa

SEQ ID NO: 152036 - RNA, 20 nt, Artificial Sequence
  Synthetic
cuauaaagaaauaccugaaa

SEQ ID NO: 152037 - RNA, 22 nt, Artificial Sequence
  Synthetic
ugcuauaaagaaauaccugaaa

SEQ ID NO: 152038 - RNA, 23 nt, Artificial Sequence
  Synthetic
uugcuauaaagaaauaccugaaa

SEQ ID NO: 152039 - RNA, 24 nt, Artificial Sequence
  Synthetic
auugcuauaaagaaauaccugaaa

SEQ ID NO: 152040 - RNA, 18 nt, Artificial Sequence
  Synthetic
auacguagaaagcugaaa

SEQ ID NO: 152041 - RNA, 19 nt, Artificial Sequence
  Synthetic
cauacguagaaagcugaaa

SEQ ID NO: 152042 - RNA, 20 nt, Artificial Sequence
  Synthetic
ccauacguagaaagcugaaa

SEQ ID NO: 152043 - RNA, 22 nt, Artificial Sequence
  Synthetic
agccauacguagaaagcugaaa

SEQ ID NO: 152044 - RNA, 23 nt, Artificial Sequence
  Synthetic
uagccauacguagaaagcugaaa

SEQ ID NO: 152045 - RNA, 24 nt, Artificial Sequence
  Synthetic
cuagccauacguagaaagcugaaa

SEQ ID NO: 152046 - RNA, 18 nt, Artificial Sequence
  Synthetic
auauguagagagcugaaa

SEQ ID NO: 152047 - RNA, 19 nt, Artificial Sequence
  Synthetic
cauauguagagagcugaaa

SEQ ID NO: 152048 - RNA, 20 nt, Artificial Sequence
  Synthetic
ccauauguagagagcugaaa

SEQ ID NO: 152049 - RNA, 22 nt, Artificial Sequence
  Synthetic
agccauauguagagagcugaaa

SEQ ID NO: 152050 - RNA, 23 nt, Artificial Sequence
  Synthetic
uagccauauguagagagcugaaa

SEQ ID NO: 152051 - RNA, 24 nt, Artificial Sequence
  Synthetic
cuagccauauguagagagcugaaa

SEQ ID NO: 152052 - RNA, 18 nt, Artificial Sequence
  Synthetic
uaaauucagaaucugaaa

SEQ ID NO: 152053 - RNA, 19 nt, Artificial Sequence
  Synthetic
auaaauucagaaucugaaa

SEQ ID NO: 152054 - RNA, 20 nt, Artificial Sequence
  Synthetic
aauaaauucagaaucugaaa

SEQ ID NO: 152055 - RNA, 18 nt, Artificial Sequence
  Synthetic
uauuucaaaauagugaaa

SEQ ID NO: 152056 - RNA, 19 nt, Artificial Sequence
  Synthetic
auauuucaaaauagugaaa

SEQ ID NO: 152057 - RNA, 20 nt, Artificial Sequence
  Synthetic
uauauuucaaaauagugaaa

SEQ ID NO: 152058 - RNA, 22 nt, Artificial Sequence
  Synthetic
uguauauuucaaaauagugaaa

SEQ ID NO: 152059 - RNA, 23 nt, Artificial Sequence
  Synthetic
cuguauauuucaaaauagugaaa

SEQ ID NO: 152060 - RNA, 18 nt, Artificial Sequence
  Synthetic
auaaaacuucuugugaaa

SEQ ID NO: 152061 - RNA, 19 nt, Artificial Sequence
  Synthetic
aauaaaacuucuugugaaa

SEQ ID NO: 152062 - RNA, 20 nt, Artificial Sequence
  Synthetic
aaauaaaacuucuugugaaa

SEQ ID NO: 152063 - RNA, 18 nt, Artificial Sequence
  Synthetic
uuuguauauaguuugaaa

SEQ ID NO: 152064 - RNA, 19 nt, Artificial Sequence
  Synthetic
uuuuguauauaguuugaaa

SEQ ID NO: 152065 - RNA, 20 nt, Artificial Sequence
  Synthetic
uuuuuguauauaguuugaaa

SEQ ID NO: 152066 - RNA, 21 nt, Artificial Sequence
  Synthetic
auuuuuguauauaguuugaaa

SEQ ID NO: 152067 - RNA, 22 nt, Artificial Sequence
  Synthetic
uauuuuuguauauaguuugaaa

SEQ ID NO: 152068 - RNA, 23 nt, Artificial Sequence
  Synthetic
uuauuuuuguauauaguuugaaa

SEQ ID NO: 152069 - RNA, 24 nt, Artificial Sequence
  Synthetic
uuuauuuuuguauauaguuugaaa

SEQ ID NO: 152070 - RNA, 18 nt, Artificial Sequence
  Synthetic
aguaaacauauuuugaaa

SEQ ID NO: 152071 - RNA, 19 nt, Artificial Sequence
  Synthetic
aaguaaacauauuuugaaa

SEQ ID NO: 152072 - RNA, 20 nt, Artificial Sequence
  Synthetic
caaguaaacauauuuugaaa

SEQ ID NO: 152073 - RNA, 18 nt, Artificial Sequence
  Synthetic
uauaauugauaaaauaaa

SEQ ID NO: 152074 - RNA, 19 nt, Artificial Sequence
  Synthetic
uuauaauugauaaaauaaa

SEQ ID NO: 152075 - RNA, 20 nt, Artificial Sequence
  Synthetic
auuauaauugauaaaauaaa

SEQ ID NO: 152076 - RNA, 21 nt, Artificial Sequence
  Synthetic
aauuauaauugauaaaauaaa

SEQ ID NO: 152077 - RNA, 22 nt, Artificial Sequence
  Synthetic
aaauuauaauugauaaaauaaa

SEQ ID NO: 152078 - RNA, 23 nt, Artificial Sequence
  Synthetic
caaauuauaauugauaaaauaaa

SEQ ID NO: 152079 - RNA, 18 nt, Artificial Sequence
  Synthetic
aaaaauguagcaaauaaa

SEQ ID NO: 152080 - RNA, 19 nt, Artificial Sequence
  Synthetic
aaaaaauguagcaaauaaa

SEQ ID NO: 152081 - RNA, 20 nt, Artificial Sequence
  Synthetic
caaaaaauguagcaaauaaa

SEQ ID NO: 152082 - RNA, 18 nt, Artificial Sequence
  Synthetic
uauuguuugugaaauaaa

SEQ ID NO: 152083 - RNA, 19 nt, Artificial Sequence
  Synthetic
auauuguuugugaaauaaa

SEQ ID NO: 152084 - RNA, 20 nt, Artificial Sequence
  Synthetic
aauauuguuugugaaauaaa

SEQ ID NO: 152085 - RNA, 18 nt, Artificial Sequence
  Synthetic
agauaaauauacaauaaa

SEQ ID NO: 152086 - RNA, 19 nt, Artificial Sequence
  Synthetic
aagauaaauauacaauaaa

SEQ ID NO: 152087 - RNA, 20 nt, Artificial Sequence
  Synthetic
caagauaaauauacaauaaa

SEQ ID NO: 152088 - RNA, 18 nt, Artificial Sequence
  Synthetic
auuuacaauagcaauaaa

SEQ ID NO: 152089 - RNA, 19 nt, Artificial Sequence
  Synthetic
cauuuacaauagcaauaaa

SEQ ID NO: 152090 - RNA, 20 nt, Artificial Sequence
  Synthetic
ucauuuacaauagcaauaaa

SEQ ID NO: 152091 - RNA, 21 nt, Artificial Sequence
  Synthetic
cucauuuacaauagcaauaaa

SEQ ID NO: 152092 - RNA, 22 nt, Artificial Sequence
  Synthetic
ucucauuuacaauagcaauaaa

SEQ ID NO: 152093 - RNA, 23 nt, Artificial Sequence
  Synthetic
aucucauuuacaauagcaauaaa

SEQ ID NO: 152094 - RNA, 24 nt, Artificial Sequence
  Synthetic
aaucucauuuacaauagcaauaaa

SEQ ID NO: 152095 - RNA, 18 nt, Artificial Sequence
  Synthetic
uuacuuuccaugaauaaa

SEQ ID NO: 152096 - RNA, 19 nt, Artificial Sequence
  Synthetic
uuuacuuuccaugaauaaa

SEQ ID NO: 152097 - RNA, 20 nt, Artificial Sequence
  Synthetic
uuuuacuuuccaugaauaaa

SEQ ID NO: 152098 - RNA, 18 nt, Artificial Sequence
  Synthetic
auugagaaaaauaauaaa

SEQ ID NO: 152099 - RNA, 19 nt, Artificial Sequence
  Synthetic
aauugagaaaaauaauaaa

SEQ ID NO: 152100 - RNA, 20 nt, Artificial Sequence
  Synthetic
uaauugagaaaaauaauaaa

SEQ ID NO: 152101 - RNA, 18 nt, Artificial Sequence
  Synthetic
auuaauaaugauaauaaa

SEQ ID NO: 152102 - RNA, 19 nt, Artificial Sequence
  Synthetic
uauuaauaaugauaauaaa

SEQ ID NO: 152103 - RNA, 20 nt, Artificial Sequence
  Synthetic
uuauuaauaaugauaauaaa

SEQ ID NO: 152104 - RNA, 21 nt, Artificial Sequence
  Synthetic
auuauuaauaaugauaauaaa

SEQ ID NO: 152105 - RNA, 22 nt, Artificial Sequence
  Synthetic
uauuauuaauaaugauaauaaa

SEQ ID NO: 152106 - RNA, 24 nt, Artificial Sequence
  Synthetic
aguauuauuaauaaugauaauaaa

SEQ ID NO: 152107 - RNA, 19 nt, Artificial Sequence
  Synthetic
aguacuauucagccauaaa

SEQ ID NO: 152108 - RNA, 21 nt, Artificial Sequence
  Synthetic
agaguacuauucagccauaaa

SEQ ID NO: 152109 - RNA, 22 nt, Artificial Sequence
  Synthetic
uagaguacuauucagccauaaa

SEQ ID NO: 152110 - RNA, 23 nt, Artificial Sequence
  Synthetic
auagaguacuauucagccauaaa

SEQ ID NO: 152111 - RNA, 24 nt, Artificial Sequence
  Synthetic
aauagaguacuauucagccauaaa

SEQ ID NO: 152112 - RNA, 22 nt, Artificial Sequence
  Synthetic
agaaugaugcuggccucauaaa

SEQ ID NO: 152113 - RNA, 23 nt, Artificial Sequence
  Synthetic
cagaaugaugcuggccucauaaa

SEQ ID NO: 152114 - RNA, 24 nt, Artificial Sequence
  Synthetic
ucagaaugaugcuggccucauaaa

SEQ ID NO: 152115 - RNA, 22 nt, Artificial Sequence
  Synthetic
aggaugaugcuggccucauaaa

SEQ ID NO: 152116 - RNA, 23 nt, Artificial Sequence
  Synthetic
caggaugaugcuggccucauaaa

SEQ ID NO: 152117 - RNA, 24 nt, Artificial Sequence
  Synthetic
ucaggaugaugcuggccucauaaa

SEQ ID NO: 152118 - RNA, 18 nt, Artificial Sequence
  Synthetic
auacuacauagucauaaa

SEQ ID NO: 152119 - RNA, 19 nt, Artificial Sequence
  Synthetic
aauacuacauagucauaaa

SEQ ID NO: 152120 - RNA, 20 nt, Artificial Sequence
  Synthetic
aaauacuacauagucauaaa

SEQ ID NO: 152121 - RNA, 22 nt, Artificial Sequence
  Synthetic
ugaaauacuacauagucauaaa

SEQ ID NO: 152122 - RNA, 23 nt, Artificial Sequence
  Synthetic
augaaauacuacauagucauaaa

SEQ ID NO: 152123 - RNA, 24 nt, Artificial Sequence
  Synthetic
caugaaauacuacauagucauaaa

SEQ ID NO: 152124 - RNA, 18 nt, Artificial Sequence
  Synthetic
acaauaaaaaaugauaaa

SEQ ID NO: 152125 - RNA, 19 nt, Artificial Sequence
  Synthetic
cacaauaaaaaaugauaaa

SEQ ID NO: 152126 - RNA, 20 nt, Artificial Sequence
  Synthetic
acacaauaaaaaaugauaaa

SEQ ID NO: 152127 - RNA, 22 nt, Artificial Sequence
  Synthetic
agacacaauaaaaaaugauaaa

SEQ ID NO: 152128 - RNA, 23 nt, Artificial Sequence
  Synthetic
uagacacaauaaaaaaugauaaa

SEQ ID NO: 152129 - RNA, 24 nt, Artificial Sequence
  Synthetic
auagacacaauaaaaaaugauaaa

SEQ ID NO: 152130 - RNA, 22 nt, Artificial Sequence
  Synthetic
aggcacaauaaaaaaugauaaa

SEQ ID NO: 152131 - RNA, 24 nt, Artificial Sequence
  Synthetic
agaggcacaauaaaaaaugauaaa

SEQ ID NO: 152132 - RNA, 19 nt, Artificial Sequence
  Synthetic
ugcaauaaaaaaugauaaa

SEQ ID NO: 152133 - RNA, 20 nt, Artificial Sequence
  Synthetic
augcaauaaaaaaugauaaa

SEQ ID NO: 152134 - RNA, 22 nt, Artificial Sequence
  Synthetic
agaugcaauaaaaaaugauaaa

SEQ ID NO: 152135 - RNA, 23 nt, Artificial Sequence
  Synthetic
uagaugcaauaaaaaaugauaaa

SEQ ID NO: 152136 - RNA, 24 nt, Artificial Sequence
  Synthetic
auagaugcaauaaaaaaugauaaa

SEQ ID NO: 152137 - RNA, 18 nt, Artificial Sequence
  Synthetic
uuuugcaaaugauauaaa

SEQ ID NO: 152138 - RNA, 19 nt, Artificial Sequence
  Synthetic
uuuuugcaaaugauauaaa

SEQ ID NO: 152139 - RNA, 20 nt, Artificial Sequence
  Synthetic
auuuuugcaaaugauauaaa

SEQ ID NO: 152140 - RNA, 18 nt, Artificial Sequence
  Synthetic
aagaucacaauauauaaa

SEQ ID NO: 152141 - RNA, 19 nt, Artificial Sequence
  Synthetic
uaagaucacaauauauaaa

SEQ ID NO: 152142 - RNA, 20 nt, Artificial Sequence
  Synthetic
uuaagaucacaauauauaaa

SEQ ID NO: 152143 - RNA, 18 nt, Artificial Sequence
  Synthetic
ugcaugaaaaauuauaaa

SEQ ID NO: 152144 - RNA, 19 nt, Artificial Sequence
  Synthetic
augcaugaaaaauuauaaa

SEQ ID NO: 152145 - RNA, 20 nt, Artificial Sequence
  Synthetic
aaugcaugaaaaauuauaaa

SEQ ID NO: 152146 - RNA, 18 nt, Artificial Sequence
  Synthetic
caaaguuauuuuuauaaa

SEQ ID NO: 152147 - RNA, 19 nt, Artificial Sequence
  Synthetic
ucaaaguuauuuuuauaaa

SEQ ID NO: 152148 - RNA, 20 nt, Artificial Sequence
  Synthetic
uucaaaguuauuuuuauaaa

SEQ ID NO: 152149 - RNA, 18 nt, Artificial Sequence
  Synthetic
aguauaguauucacuaaa

SEQ ID NO: 152150 - RNA, 19 nt, Artificial Sequence
  Synthetic
caguauaguauucacuaaa

SEQ ID NO: 152151 - RNA, 20 nt, Artificial Sequence
  Synthetic
ucaguauaguauucacuaaa

SEQ ID NO: 152152 - RNA, 22 nt, Artificial Sequence
  Synthetic
agccaaagcugucuuuacuaaa

SEQ ID NO: 152153 - RNA, 23 nt, Artificial Sequence
  Synthetic
uagccaaagcugucuuuacuaaa

SEQ ID NO: 152154 - RNA, 24 nt, Artificial Sequence
  Synthetic
auagccaaagcugucuuuacuaaa

SEQ ID NO: 152155 - RNA, 18 nt, Artificial Sequence
  Synthetic
ucuuucaaaaaugcuaaa

SEQ ID NO: 152156 - RNA, 19 nt, Artificial Sequence
  Synthetic
uucuuucaaaaaugcuaaa

SEQ ID NO: 152157 - RNA, 20 nt, Artificial Sequence
  Synthetic
uuucuuucaaaaaugcuaaa

SEQ ID NO: 152158 - RNA, 19 nt, Artificial Sequence
  Synthetic
agagagagagaauucuaaa

SEQ ID NO: 152159 - RNA, 18 nt, Artificial Sequence
  Synthetic
ugaauuauccauucuaaa

SEQ ID NO: 152160 - RNA, 19 nt, Artificial Sequence
  Synthetic
uugaauuauccauucuaaa

SEQ ID NO: 152161 - RNA, 20 nt, Artificial Sequence
  Synthetic
uuugaauuauccauucuaaa

SEQ ID NO: 152162 - RNA, 21 nt, Artificial Sequence
  Synthetic
auuugaauuauccauucuaaa

SEQ ID NO: 152163 - RNA, 22 nt, Artificial Sequence
  Synthetic
aauuugaauuauccauucuaaa

SEQ ID NO: 152164 - RNA, 24 nt, Artificial Sequence
  Synthetic
ugaauuugaauuauccauucuaaa

SEQ ID NO: 152165 - RNA, 18 nt, Artificial Sequence
  Synthetic
aggagagugaaaaguaaa

SEQ ID NO: 152166 - RNA, 20 nt, Artificial Sequence
  Synthetic
agaggagagugaaaaguaaa

SEQ ID NO: 152167 - RNA, 23 nt, Artificial Sequence
  Synthetic
aggagaggagagugaaaaguaaa

SEQ ID NO: 152168 - RNA, 24 nt, Artificial Sequence
  Synthetic
aaggagaggagagugaaaaguaaa

SEQ ID NO: 152169 - RNA, 18 nt, Artificial Sequence
  Synthetic
caaaacaauuacaguaaa

SEQ ID NO: 152170 - RNA, 19 nt, Artificial Sequence
  Synthetic
ccaaaacaauuacaguaaa

SEQ ID NO: 152171 - RNA, 20 nt, Artificial Sequence
  Synthetic
accaaaacaauuacaguaaa

SEQ ID NO: 152172 - RNA, 21 nt, Artificial Sequence
  Synthetic
aagucauuuugauugaguaaa

SEQ ID NO: 152173 - RNA, 22 nt, Artificial Sequence
  Synthetic
aaagucauuuugauugaguaaa

SEQ ID NO: 152174 - RNA, 23 nt, Artificial Sequence
  Synthetic
aaaagucauuuugauugaguaaa

SEQ ID NO: 152175 - RNA, 24 nt, Artificial Sequence
  Synthetic
caaaagucauuuugauugaguaaa

SEQ ID NO: 152176 - RNA, 19 nt, Artificial Sequence
  Synthetic
agaaaauauuccagguaaa

SEQ ID NO: 152177 - RNA, 20 nt, Artificial Sequence
  Synthetic
aagaaaauauuccagguaaa

SEQ ID NO: 152178 - RNA, 18 nt, Artificial Sequence
  Synthetic
acuuucuucaaauguaaa

SEQ ID NO: 152179 - RNA, 19 nt, Artificial Sequence
  Synthetic
cacuuucuucaaauguaaa

SEQ ID NO: 152180 - RNA, 20 nt, Artificial Sequence
  Synthetic
ucacuuucuucaaauguaaa

SEQ ID NO: 152181 - RNA, 21 nt, Artificial Sequence
  Synthetic
cucacuuucuucaaauguaaa

SEQ ID NO: 152182 - RNA, 22 nt, Artificial Sequence
  Synthetic
ccucacuuucuucaaauguaaa

SEQ ID NO: 152183 - RNA, 24 nt, Artificial Sequence
  Synthetic
ugccucacuuucuucaaauguaaa

SEQ ID NO: 152184 - RNA, 18 nt, Artificial Sequence
  Synthetic
uuuccuuuccuauguaaa

SEQ ID NO: 152185 - RNA, 19 nt, Artificial Sequence
  Synthetic
auuuccuuuccuauguaaa

SEQ ID NO: 152186 - RNA, 20 nt, Artificial Sequence
  Synthetic
uauuuccuuuccuauguaaa

SEQ ID NO: 152187 - RNA, 18 nt, Artificial Sequence
  Synthetic
agaaaggaaauuuguaaa

SEQ ID NO: 152188 - RNA, 19 nt, Artificial Sequence
  Synthetic
aagaaaggaaauuuguaaa

SEQ ID NO: 152189 - RNA, 20 nt, Artificial Sequence
  Synthetic
caagaaaggaaauuuguaaa

SEQ ID NO: 152190 - RNA, 18 nt, Artificial Sequence
  Synthetic
agaguaugcuuuuguaaa

SEQ ID NO: 152191 - RNA, 19 nt, Artificial Sequence
  Synthetic
uagaguaugcuuuuguaaa

SEQ ID NO: 152192 - RNA, 20 nt, Artificial Sequence
  Synthetic
uuagaguaugcuuuuguaaa

SEQ ID NO: 152193 - RNA, 18 nt, Artificial Sequence
  Synthetic
auacauacauacauuaaa

SEQ ID NO: 152194 - RNA, 19 nt, Artificial Sequence
  Synthetic
cauacauacauacauuaaa

SEQ ID NO: 152195 - RNA, 20 nt, Artificial Sequence
  Synthetic
acauacauacauacauuaaa

SEQ ID NO: 152196 - RNA, 21 nt, Artificial Sequence
  Synthetic
uacauacauacauacauuaaa

SEQ ID NO: 152197 - RNA, 22 nt, Artificial Sequence
  Synthetic
auacauacauacauacauuaaa

SEQ ID NO: 152198 - RNA, 23 nt, Artificial Sequence
  Synthetic
cauacauacauacauacauuaaa

SEQ ID NO: 152199 - RNA, 24 nt, Artificial Sequence
  Synthetic
acauacauacauacauacauuaaa

SEQ ID NO: 152200 - RNA, 18 nt, Artificial Sequence
  Synthetic
cuaugaagaaagauuaaa

SEQ ID NO: 152201 - RNA, 20 nt, Artificial Sequence
  Synthetic
ugcuaugaagaaagauuaaa

SEQ ID NO: 152202 - RNA, 18 nt, Artificial Sequence
  Synthetic
ugaauuauaagccuuaaa

SEQ ID NO: 152203 - RNA, 20 nt, Artificial Sequence
  Synthetic
ugugaauuauaagccuuaaa

SEQ ID NO: 152204 - RNA, 18 nt, Artificial Sequence
  Synthetic
uaacauuuauagcuuaaa

SEQ ID NO: 152205 - RNA, 20 nt, Artificial Sequence
  Synthetic
uguaacauuuauagcuuaaa

SEQ ID NO: 152206 - RNA, 18 nt, Artificial Sequence
  Synthetic
agaucuagaaaucuuaaa

SEQ ID NO: 152207 - RNA, 19 nt, Artificial Sequence
  Synthetic
aagaucuagaaaucuuaaa

SEQ ID NO: 152208 - RNA, 20 nt, Artificial Sequence
  Synthetic
aaagaucuagaaaucuuaaa

SEQ ID NO: 152209 - RNA, 18 nt, Artificial Sequence
  Synthetic
uuguauauauguguuaaa

SEQ ID NO: 152210 - RNA, 19 nt, Artificial Sequence
  Synthetic
uuuguauauauguguuaaa

SEQ ID NO: 152211 - RNA, 20 nt, Artificial Sequence
  Synthetic
auuuguauauauguguuaaa

SEQ ID NO: 152212 - RNA, 18 nt, Artificial Sequence
  Synthetic
uuccuuuuaaaauuuaaa

SEQ ID NO: 152213 - RNA, 19 nt, Artificial Sequence
  Synthetic
uuuccuuuuaaaauuuaaa

SEQ ID NO: 152214 - RNA, 20 nt, Artificial Sequence
  Synthetic
cuuuccuuuuaaaauuuaaa

SEQ ID NO: 152215 - RNA, 20 nt, Artificial Sequence
  Synthetic
agguacuggagcauuuuaaa

SEQ ID NO: 152216 - RNA, 18 nt, Artificial Sequence
  Synthetic
aagccauuuuauuuuaaa

SEQ ID NO: 152217 - RNA, 19 nt, Artificial Sequence
  Synthetic
aaagccauuuuauuuuaaa

SEQ ID NO: 152218 - RNA, 20 nt, Artificial Sequence
  Synthetic
aaaagccauuuuauuuuaaa

SEQ ID NO: 152219 - RNA, 18 nt, Artificial Sequence
  Synthetic
cgaaauaaaauuuuuaaa

SEQ ID NO: 152220 - RNA, 19 nt, Artificial Sequence
  Synthetic
acgaaauaaaauuuuuaaa

SEQ ID NO: 152221 - RNA, 20 nt, Artificial Sequence
  Synthetic
aacgaaauaaaauuuuuaaa

SEQ ID NO: 152222 - RNA, 21 nt, Artificial Sequence
  Synthetic
aaacgaaauaaaauuuuuaaa

SEQ ID NO: 152223 - RNA, 22 nt, Artificial Sequence
  Synthetic
aaaacgaaauaaaauuuuuaaa

SEQ ID NO: 152224 - RNA, 23 nt, Artificial Sequence
  Synthetic
aaaaacgaaauaaaauuuuuaaa

SEQ ID NO: 152225 - RNA, 24 nt, Artificial Sequence
  Synthetic
uaaaaacgaaauaaaauuuuuaaa

SEQ ID NO: 152226 - RNA, 18 nt, Artificial Sequence
  Synthetic
uuuaaauaucuuuuuaaa

SEQ ID NO: 152227 - RNA, 20 nt, Artificial Sequence
  Synthetic
uguuuaaauaucuuuuuaaa

SEQ ID NO: 152228 - RNA, 18 nt, Artificial Sequence
  Synthetic
cuugugccgguuuuuaaa

SEQ ID NO: 152229 - RNA, 19 nt, Artificial Sequence
  Synthetic
ucuugugccgguuuuuaaa

SEQ ID NO: 152230 - RNA, 21 nt, Artificial Sequence
  Synthetic
ugucuugugccgguuuuuaaa

SEQ ID NO: 152231 - RNA, 22 nt, Artificial Sequence
  Synthetic
uugucuugugccgguuuuuaaa

SEQ ID NO: 152232 - RNA, 23 nt, Artificial Sequence
  Synthetic
cuugucuugugccgguuuuuaaa

SEQ ID NO: 152233 - RNA, 24 nt, Artificial Sequence
  Synthetic
ccuugucuugugccgguuuuuaaa

SEQ ID NO: 152234 - RNA, 18 nt, Artificial Sequence
  Synthetic
uucucaaagagaaaacaa

SEQ ID NO: 152235 - RNA, 20 nt, Artificial Sequence
  Synthetic
uguucucaaagagaaaacaa

SEQ ID NO: 152236 - RNA, 21 nt, Artificial Sequence
  Synthetic
cauccacgcugucauaaacaa

SEQ ID NO: 152237 - RNA, 22 nt, Artificial Sequence
  Synthetic
ucauccacgcugucauaaacaa

SEQ ID NO: 152238 - RNA, 23 nt, Artificial Sequence
  Synthetic
uucauccacgcugucauaaacaa

SEQ ID NO: 152239 - RNA, 18 nt, Artificial Sequence
  Synthetic
uggguaauuuauaaacaa

SEQ ID NO: 152240 - RNA, 19 nt, Artificial Sequence
  Synthetic
cuggguaauuuauaaacaa

SEQ ID NO: 152241 - RNA, 20 nt, Artificial Sequence
  Synthetic
acuggguaauuuauaaacaa

SEQ ID NO: 152242 - RNA, 22 nt, Artificial Sequence
  Synthetic
agacuggguaauuuauaaacaa

SEQ ID NO: 152243 - RNA, 23 nt, Artificial Sequence
  Synthetic
uagacuggguaauuuauaaacaa

SEQ ID NO: 152244 - RNA, 24 nt, Artificial Sequence
  Synthetic
uuagacuggguaauuuauaaacaa

SEQ ID NO: 152245 - RNA, 18 nt, Artificial Sequence
  Synthetic
uuaaguguccaucaacaa

SEQ ID NO: 152246 - RNA, 19 nt, Artificial Sequence
  Synthetic
uuuaaguguccaucaacaa

SEQ ID NO: 152247 - RNA, 20 nt, Artificial Sequence
  Synthetic
auuuaaguguccaucaacaa

SEQ ID NO: 152248 - RNA, 21 nt, Artificial Sequence
  Synthetic
aauuuaaguguccaucaacaa

SEQ ID NO: 152249 - RNA, 22 nt, Artificial Sequence
  Synthetic
aaauuuaaguguccaucaacaa

SEQ ID NO: 152250 - RNA, 23 nt, Artificial Sequence
  Synthetic
aaaauuuaaguguccaucaacaa

SEQ ID NO: 152251 - RNA, 24 nt, Artificial Sequence
  Synthetic
aaaaauuuaaguguccaucaacaa

SEQ ID NO: 152252 - RNA, 19 nt, Artificial Sequence
  Synthetic
aguucuguucauucaacaa

SEQ ID NO: 152253 - RNA, 20 nt, Artificial Sequence
  Synthetic
caguucuguucauucaacaa

SEQ ID NO: 152254 - RNA, 21 nt, Artificial Sequence
  Synthetic
acaguucuguucauucaacaa

SEQ ID NO: 152255 - RNA, 22 nt, Artificial Sequence
  Synthetic
aacaguucuguucauucaacaa

SEQ ID NO: 152256 - RNA, 23 nt, Artificial Sequence
  Synthetic
caacaguucuguucauucaacaa

SEQ ID NO: 152257 - RNA, 24 nt, Artificial Sequence
  Synthetic
ccaacaguucuguucauucaacaa

SEQ ID NO: 152258 - RNA, 18 nt, Artificial Sequence
  Synthetic
agcacauucagagaacaa

SEQ ID NO: 152259 - RNA, 20 nt, Artificial Sequence
  Synthetic
agagcacauucagagaacaa

SEQ ID NO: 152260 - RNA, 18 nt, Artificial Sequence
  Synthetic
uguggcauauucacacaa

SEQ ID NO: 152261 - RNA, 19 nt, Artificial Sequence
  Synthetic
cuguggcauauucacacaa

SEQ ID NO: 152262 - RNA, 20 nt, Artificial Sequence
  Synthetic
acuguggcauauucacacaa

SEQ ID NO: 152263 - RNA, 21 nt, Artificial Sequence
  Synthetic
aacuguggcauauucacacaa

SEQ ID NO: 152264 - RNA, 22 nt, Artificial Sequence
  Synthetic
aaacuguggcauauucacacaa

SEQ ID NO: 152265 - RNA, 23 nt, Artificial Sequence
  Synthetic
uaaacuguggcauauucacacaa

SEQ ID NO: 152266 - RNA, 24 nt, Artificial Sequence
  Synthetic
auaaacuguggcauauucacacaa

SEQ ID NO: 152267 - RNA, 18 nt, Artificial Sequence
  Synthetic
augugguauaggacacaa

SEQ ID NO: 152268 - RNA, 19 nt, Artificial Sequence
  Synthetic
aaugugguauaggacacaa

SEQ ID NO: 152269 - RNA, 20 nt, Artificial Sequence
  Synthetic
aaaugugguauaggacacaa

SEQ ID NO: 152270 - RNA, 18 nt, Artificial Sequence
  Synthetic
ugugguauauauacacaa

SEQ ID NO: 152271 - RNA, 19 nt, Artificial Sequence
  Synthetic
augugguauauauacacaa

SEQ ID NO: 152272 - RNA, 20 nt, Artificial Sequence
  Synthetic
aaugugguauauauacacaa

SEQ ID NO: 152273 - RNA, 21 nt, Artificial Sequence
  Synthetic
aaaugugguauauauacacaa

SEQ ID NO: 152274 - RNA, 22 nt, Artificial Sequence
  Synthetic
uaaaugugguauauauacacaa

SEQ ID NO: 152275 - RNA, 23 nt, Artificial Sequence
  Synthetic
auaaaugugguauauauacacaa

SEQ ID NO: 152276 - RNA, 18 nt, Artificial Sequence
  Synthetic
aaauuacuacuuacacaa

SEQ ID NO: 152277 - RNA, 19 nt, Artificial Sequence
  Synthetic
uaaauuacuacuuacacaa

SEQ ID NO: 152278 - RNA, 20 nt, Artificial Sequence
  Synthetic
auaaauuacuacuuacacaa

SEQ ID NO: 152279 - RNA, 21 nt, Artificial Sequence
  Synthetic
uuuuaugguuucuuuacacaa

SEQ ID NO: 152280 - RNA, 22 nt, Artificial Sequence
  Synthetic
cuuuuaugguuucuuuacacaa

SEQ ID NO: 152281 - RNA, 23 nt, Artificial Sequence
  Synthetic
acuuuuaugguuucuuuacacaa

SEQ ID NO: 152282 - RNA, 24 nt, Artificial Sequence
  Synthetic
aacuuuuaugguuucuuuacacaa

SEQ ID NO: 152283 - RNA, 18 nt, Artificial Sequence
  Synthetic
caucuucucugaccacaa

SEQ ID NO: 152284 - RNA, 20 nt, Artificial Sequence
  Synthetic
agcaucuucucugaccacaa

SEQ ID NO: 152285 - RNA, 21 nt, Artificial Sequence
  Synthetic
aagcaucuucucugaccacaa

SEQ ID NO: 152286 - RNA, 22 nt, Artificial Sequence
  Synthetic
caagcaucuucucugaccacaa

SEQ ID NO: 152287 - RNA, 23 nt, Artificial Sequence
  Synthetic
ucaagcaucuucucugaccacaa

SEQ ID NO: 152288 - RNA, 24 nt, Artificial Sequence
  Synthetic
aucaagcaucuucucugaccacaa

SEQ ID NO: 152289 - RNA, 18 nt, Artificial Sequence
  Synthetic
acauacacacagccacaa

SEQ ID NO: 152290 - RNA, 19 nt, Artificial Sequence
  Synthetic
cacauacacacagccacaa

SEQ ID NO: 152291 - RNA, 20 nt, Artificial Sequence
  Synthetic
acacauacacacagccacaa

SEQ ID NO: 152292 - RNA, 21 nt, Artificial Sequence
  Synthetic
cacacauacacacagccacaa

SEQ ID NO: 152293 - RNA, 22 nt, Artificial Sequence
  Synthetic
ucacacauacacacagccacaa

SEQ ID NO: 152294 - RNA, 23 nt, Artificial Sequence
  Synthetic
cucacacauacacacagccacaa

SEQ ID NO: 152295 - RNA, 24 nt, Artificial Sequence
  Synthetic
acucacacauacacacagccacaa

SEQ ID NO: 152296 - RNA, 19 nt, Artificial Sequence
  Synthetic
agugcuagcuuagccacaa

SEQ ID NO: 152297 - RNA, 21 nt, Artificial Sequence
  Synthetic
ugagugcuagcuuagccacaa

SEQ ID NO: 152298 - RNA, 23 nt, Artificial Sequence
  Synthetic
ugugagugcuagcuuagccacaa

SEQ ID NO: 152299 - RNA, 18 nt, Artificial Sequence
  Synthetic
uacuguuucauagcacaa

SEQ ID NO: 152300 - RNA, 19 nt, Artificial Sequence
  Synthetic
cuacuguuucauagcacaa

SEQ ID NO: 152301 - RNA, 20 nt, Artificial Sequence
  Synthetic
ucuacuguuucauagcacaa

SEQ ID NO: 152302 - RNA, 21 nt, Artificial Sequence
  Synthetic
aucuacuguuucauagcacaa

SEQ ID NO: 152303 - RNA, 23 nt, Artificial Sequence
  Synthetic
agaucuacuguuucauagcacaa

SEQ ID NO: 152304 - RNA, 24 nt, Artificial Sequence
  Synthetic
aagaucuacuguuucauagcacaa

SEQ ID NO: 152305 - RNA, 18 nt, Artificial Sequence
  Synthetic
caguauucgauagcacaa

SEQ ID NO: 152306 - RNA, 19 nt, Artificial Sequence
  Synthetic
ccaguauucgauagcacaa

SEQ ID NO: 152307 - RNA, 20 nt, Artificial Sequence
  Synthetic
cccaguauucgauagcacaa

SEQ ID NO: 152308 - RNA, 21 nt, Artificial Sequence
  Synthetic
acccaguauucgauagcacaa

SEQ ID NO: 152309 - RNA, 22 nt, Artificial Sequence
  Synthetic
uacccaguauucgauagcacaa

SEQ ID NO: 152310 - RNA, 23 nt, Artificial Sequence
  Synthetic
auacccaguauucgauagcacaa

SEQ ID NO: 152311 - RNA, 24 nt, Artificial Sequence
  Synthetic
aauacccaguauucgauagcacaa

SEQ ID NO: 152312 - RNA, 18 nt, Artificial Sequence
  Synthetic
uaguauuugauagcacaa

SEQ ID NO: 152313 - RNA, 19 nt, Artificial Sequence
  Synthetic
cuaguauuugauagcacaa

SEQ ID NO: 152314 - RNA, 20 nt, Artificial Sequence
  Synthetic
ucuaguauuugauagcacaa

SEQ ID NO: 152315 - RNA, 21 nt, Artificial Sequence
  Synthetic
aucuaguauuugauagcacaa

SEQ ID NO: 152316 - RNA, 23 nt, Artificial Sequence
  Synthetic
agaucuaguauuugauagcacaa

SEQ ID NO: 152317 - RNA, 24 nt, Artificial Sequence
  Synthetic
aagaucuaguauuugauagcacaa

SEQ ID NO: 152318 - RNA, 18 nt, Artificial Sequence
  Synthetic
uacuauuugcuagcacaa

SEQ ID NO: 152319 - RNA, 19 nt, Artificial Sequence
  Synthetic
cuacuauuugcuagcacaa

SEQ ID NO: 152320 - RNA, 20 nt, Artificial Sequence
  Synthetic
ccuacuauuugcuagcacaa

SEQ ID NO: 152321 - RNA, 21 nt, Artificial Sequence
  Synthetic
accuacuauuugcuagcacaa

SEQ ID NO: 152322 - RNA, 22 nt, Artificial Sequence
  Synthetic
caccuacuauuugcuagcacaa

SEQ ID NO: 152323 - RNA, 23 nt, Artificial Sequence
  Synthetic
ccaccuacuauuugcuagcacaa

SEQ ID NO: 152324 - RNA, 24 nt, Artificial Sequence
  Synthetic
accaccuacuauuugcuagcacaa

SEQ ID NO: 152325 - RNA, 18 nt, Artificial Sequence
  Synthetic
ugugguaccuaugcacaa

SEQ ID NO: 152326 - RNA, 19 nt, Artificial Sequence
  Synthetic
augugguaccuaugcacaa

SEQ ID NO: 152327 - RNA, 20 nt, Artificial Sequence
  Synthetic
caugugguaccuaugcacaa

SEQ ID NO: 152328 - RNA, 21 nt, Artificial Sequence
  Synthetic
acaugugguaccuaugcacaa

SEQ ID NO: 152329 - RNA, 22 nt, Artificial Sequence
  Synthetic
aacaugugguaccuaugcacaa

SEQ ID NO: 152330 - RNA, 24 nt, Artificial Sequence
  Synthetic
agaacaugugguaccuaugcacaa

SEQ ID NO: 152331 - RNA, 18 nt, Artificial Sequence
  Synthetic
uccucaagaagcucacaa

SEQ ID NO: 152332 - RNA, 20 nt, Artificial Sequence
  Synthetic
uguccucaagaagcucacaa

SEQ ID NO: 152333 - RNA, 19 nt, Artificial Sequence
  Synthetic
ugaauuaagucauucacaa

SEQ ID NO: 152334 - RNA, 21 nt, Artificial Sequence
  Synthetic
ugugaauuaagucauucacaa

SEQ ID NO: 152335 - RNA, 22 nt, Artificial Sequence
  Synthetic
augugaauuaagucauucacaa

SEQ ID NO: 152336 - RNA, 23 nt, Artificial Sequence
  Synthetic
aaugugaauuaagucauucacaa

SEQ ID NO: 152337 - RNA, 24 nt, Artificial Sequence
  Synthetic
caaugugaauuaagucauucacaa

SEQ ID NO: 152338 - RNA, 18 nt, Artificial Sequence
  Synthetic
cguguggacaguucacaa

SEQ ID NO: 152339 - RNA, 19 nt, Artificial Sequence
  Synthetic
ucguguggacaguucacaa

SEQ ID NO: 152340 - RNA, 20 nt, Artificial Sequence
  Synthetic
cucguguggacaguucacaa

SEQ ID NO: 152341 - RNA, 21 nt, Artificial Sequence
  Synthetic
ccucguguggacaguucacaa

SEQ ID NO: 152342 - RNA, 22 nt, Artificial Sequence
  Synthetic
cccucguguggacaguucacaa

SEQ ID NO: 152343 - RNA, 23 nt, Artificial Sequence
  Synthetic
ucccucguguggacaguucacaa

SEQ ID NO: 152344 - RNA, 24 nt, Artificial Sequence
  Synthetic
aucccucguguggacaguucacaa

SEQ ID NO: 152345 - RNA, 18 nt, Artificial Sequence
  Synthetic
ugcaugaguaguucacaa

SEQ ID NO: 152346 - RNA, 19 nt, Artificial Sequence
  Synthetic
uugcaugaguaguucacaa

SEQ ID NO: 152347 - RNA, 20 nt, Artificial Sequence
  Synthetic
cuugcaugaguaguucacaa

SEQ ID NO: 152348 - RNA, 21 nt, Artificial Sequence
  Synthetic
ccuugcaugaguaguucacaa

SEQ ID NO: 152349 - RNA, 22 nt, Artificial Sequence
  Synthetic
cccuugcaugaguaguucacaa

SEQ ID NO: 152350 - RNA, 23 nt, Artificial Sequence
  Synthetic
ucccuugcaugaguaguucacaa

SEQ ID NO: 152351 - RNA, 24 nt, Artificial Sequence
  Synthetic
aucccuugcaugaguaguucacaa

SEQ ID NO: 152352 - RNA, 18 nt, Artificial Sequence
  Synthetic
caaccaaacaaaagacaa

SEQ ID NO: 152353 - RNA, 19 nt, Artificial Sequence
  Synthetic
ccaaccaaacaaaagacaa

SEQ ID NO: 152354 - RNA, 20 nt, Artificial Sequence
  Synthetic
accaaccaaacaaaagacaa

SEQ ID NO: 152355 - RNA, 21 nt, Artificial Sequence
  Synthetic
aaccaaccaaacaaaagacaa

SEQ ID NO: 152356 - RNA, 22 nt, Artificial Sequence
  Synthetic
aaaccaaccaaacaaaagacaa

SEQ ID NO: 152357 - RNA, 23 nt, Artificial Sequence
  Synthetic
aaaaccaaccaaacaaaagacaa

SEQ ID NO: 152358 - RNA, 24 nt, Artificial Sequence
  Synthetic
caaaaccaaccaaacaaaagacaa

SEQ ID NO: 152359 - RNA, 19 nt, Artificial Sequence
  Synthetic
uggaaggaaacugagacaa

SEQ ID NO: 152360 - RNA, 20 nt, Artificial Sequence
  Synthetic
auggaaggaaacugagacaa

SEQ ID NO: 152361 - RNA, 21 nt, Artificial Sequence
  Synthetic
uauggaaggaaacugagacaa

SEQ ID NO: 152362 - RNA, 22 nt, Artificial Sequence
  Synthetic
auauggaaggaaacugagacaa

SEQ ID NO: 152363 - RNA, 23 nt, Artificial Sequence
  Synthetic
uauauggaaggaaacugagacaa

SEQ ID NO: 152364 - RNA, 24 nt, Artificial Sequence
  Synthetic
uuauauggaaggaaacugagacaa

SEQ ID NO: 152365 - RNA, 18 nt, Artificial Sequence
  Synthetic
aaaagcaaaaauagacaa

SEQ ID NO: 152366 - RNA, 19 nt, Artificial Sequence
  Synthetic
caaaagcaaaaauagacaa

SEQ ID NO: 152367 - RNA, 20 nt, Artificial Sequence
  Synthetic
acaaaagcaaaaauagacaa

SEQ ID NO: 152368 - RNA, 21 nt, Artificial Sequence
  Synthetic
aacaaaagcaaaaauagacaa

SEQ ID NO: 152369 - RNA, 22 nt, Artificial Sequence
  Synthetic
caacaaaagcaaaaauagacaa

SEQ ID NO: 152370 - RNA, 18 nt, Artificial Sequence
  Synthetic
uaucaacgaauaggacaa

SEQ ID NO: 152371 - RNA, 19 nt, Artificial Sequence
  Synthetic
cuaucaacgaauaggacaa

SEQ ID NO: 152372 - RNA, 20 nt, Artificial Sequence
  Synthetic
acuaucaacgaauaggacaa

SEQ ID NO: 152373 - RNA, 21 nt, Artificial Sequence
  Synthetic
cacuaucaacgaauaggacaa

SEQ ID NO: 152374 - RNA, 22 nt, Artificial Sequence
  Synthetic
acacuaucaacgaauaggacaa

SEQ ID NO: 152375 - RNA, 23 nt, Artificial Sequence
  Synthetic
aacacuaucaacgaauaggacaa

SEQ ID NO: 152376 - RNA, 24 nt, Artificial Sequence
  Synthetic
uaacacuaucaacgaauaggacaa

SEQ ID NO: 152377 - RNA, 21 nt, Artificial Sequence
  Synthetic
cauucugcaguccuuggacaa

SEQ ID NO: 152378 - RNA, 22 nt, Artificial Sequence
  Synthetic
ccauucugcaguccuuggacaa

SEQ ID NO: 152379 - RNA, 23 nt, Artificial Sequence
  Synthetic
uccauucugcaguccuuggacaa

SEQ ID NO: 152380 - RNA, 24 nt, Artificial Sequence
  Synthetic
auccauucugcaguccuuggacaa

SEQ ID NO: 152381 - RNA, 20 nt, Artificial Sequence
  Synthetic
aggucauuauauaaugacaa

SEQ ID NO: 152382 - RNA, 21 nt, Artificial Sequence
  Synthetic
aaggucauuauauaaugacaa

SEQ ID NO: 152383 - RNA, 23 nt, Artificial Sequence
  Synthetic
agaaggucauuauauaaugacaa

SEQ ID NO: 152384 - RNA, 24 nt, Artificial Sequence
  Synthetic
aagaaggucauuauauaaugacaa

SEQ ID NO: 152385 - RNA, 18 nt, Artificial Sequence
  Synthetic
uauguuauauacauacaa

SEQ ID NO: 152386 - RNA, 19 nt, Artificial Sequence
  Synthetic
cuauguuauauacauacaa

SEQ ID NO: 152387 - RNA, 18 nt, Artificial Sequence
  Synthetic
ugugguauaucuauacaa

SEQ ID NO: 152388 - RNA, 19 nt, Artificial Sequence
  Synthetic
uugugguauaucuauacaa

SEQ ID NO: 152389 - RNA, 20 nt, Artificial Sequence
  Synthetic
auugugguauaucuauacaa

SEQ ID NO: 152390 - RNA, 21 nt, Artificial Sequence
  Synthetic
aauugugguauaucuauacaa

SEQ ID NO: 152391 - RNA, 22 nt, Artificial Sequence
  Synthetic
aaauugugguauaucuauacaa

SEQ ID NO: 152392 - RNA, 23 nt, Artificial Sequence
  Synthetic
uaaauugugguauaucuauacaa

SEQ ID NO: 152393 - RNA, 24 nt, Artificial Sequence
  Synthetic
auaaauugugguauaucuauacaa

SEQ ID NO: 152394 - RNA, 18 nt, Artificial Sequence
  Synthetic
uuuucuucucuuauacaa

SEQ ID NO: 152395 - RNA, 19 nt, Artificial Sequence
  Synthetic
cuuuucuucucuuauacaa

SEQ ID NO: 152396 - RNA, 18 nt, Artificial Sequence
  Synthetic
uacaaagcaaaacuacaa

SEQ ID NO: 152397 - RNA, 19 nt, Artificial Sequence
  Synthetic
auacaaagcaaaacuacaa

SEQ ID NO: 152398 - RNA, 20 nt, Artificial Sequence
  Synthetic
aauacaaagcaaaacuacaa

SEQ ID NO: 152399 - RNA, 21 nt, Artificial Sequence
  Synthetic
aaauacaaagcaaaacuacaa

SEQ ID NO: 152400 - RNA, 23 nt, Artificial Sequence
  Synthetic
agaaauacaaagcaaaacuacaa

SEQ ID NO: 152401 - RNA, 24 nt, Artificial Sequence
  Synthetic
cagaaauacaaagcaaaacuacaa

SEQ ID NO: 152402 - RNA, 18 nt, Artificial Sequence
  Synthetic
caaacaaaaggucuacaa

SEQ ID NO: 152403 - RNA, 19 nt, Artificial Sequence
  Synthetic
acaaacaaaaggucuacaa

SEQ ID NO: 152404 - RNA, 20 nt, Artificial Sequence
  Synthetic
aggugcuccucaacguacaa

SEQ ID NO: 152405 - RNA, 21 nt, Artificial Sequence
  Synthetic
caggugcuccucaacguacaa

SEQ ID NO: 152406 - RNA, 22 nt, Artificial Sequence
  Synthetic
acaggugcuccucaacguacaa

SEQ ID NO: 152407 - RNA, 23 nt, Artificial Sequence
  Synthetic
uacaggugcuccucaacguacaa

SEQ ID NO: 152408 - RNA, 24 nt, Artificial Sequence
  Synthetic
auacaggugcuccucaacguacaa

SEQ ID NO: 152409 - RNA, 18 nt, Artificial Sequence
  Synthetic
aaccuucccgucuuacaa

SEQ ID NO: 152410 - RNA, 21 nt, Artificial Sequence
  Synthetic
aggaaccuucccgucuuacaa

SEQ ID NO: 152411 - RNA, 22 nt, Artificial Sequence
  Synthetic
caggaaccuucccgucuuacaa

SEQ ID NO: 152412 - RNA, 23 nt, Artificial Sequence
  Synthetic
ucaggaaccuucccgucuuacaa

SEQ ID NO: 152413 - RNA, 24 nt, Artificial Sequence
  Synthetic
aucaggaaccuucccgucuuacaa

SEQ ID NO: 152414 - RNA, 18 nt, Artificial Sequence
  Synthetic
aacuuuucugucuuacaa

SEQ ID NO: 152415 - RNA, 23 nt, Artificial Sequence
  Synthetic
uggggaacuuuucugucuuacaa

SEQ ID NO: 152416 - RNA, 24 nt, Artificial Sequence
  Synthetic
uuggggaacuuuucugucuuacaa

SEQ ID NO: 152417 - RNA, 19 nt, Artificial Sequence
  Synthetic
agcaagaaugaaaaaccaa

SEQ ID NO: 152418 - RNA, 20 nt, Artificial Sequence
  Synthetic
aagcaagaaugaaaaaccaa

SEQ ID NO: 152419 - RNA, 19 nt, Artificial Sequence
  Synthetic
ugaacuaacuugucaccaa

SEQ ID NO: 152420 - RNA, 20 nt, Artificial Sequence
  Synthetic
augaacuaacuugucaccaa

SEQ ID NO: 152421 - RNA, 19 nt, Artificial Sequence
  Synthetic
agaggaagagggugaccaa

SEQ ID NO: 152422 - RNA, 18 nt, Artificial Sequence
  Synthetic
auuagcagaguugaccaa

SEQ ID NO: 152423 - RNA, 20 nt, Artificial Sequence
  Synthetic
ugauuagcagaguugaccaa

SEQ ID NO: 152424 - RNA, 21 nt, Artificial Sequence
  Synthetic
uugauuagcagaguugaccaa

SEQ ID NO: 152425 - RNA, 22 nt, Artificial Sequence
  Synthetic
uuugauuagcagaguugaccaa

SEQ ID NO: 152426 - RNA, 23 nt, Artificial Sequence
  Synthetic
uuuugauuagcagaguugaccaa

SEQ ID NO: 152427 - RNA, 18 nt, Artificial Sequence
  Synthetic
uacuggguauauacccaa

SEQ ID NO: 152428 - RNA, 19 nt, Artificial Sequence
  Synthetic
uuacuggguauauacccaa

SEQ ID NO: 152429 - RNA, 20 nt, Artificial Sequence
  Synthetic
auuacuggguauauacccaa

SEQ ID NO: 152430 - RNA, 21 nt, Artificial Sequence
  Synthetic
cauuacuggguauauacccaa

SEQ ID NO: 152431 - RNA, 22 nt, Artificial Sequence
  Synthetic
ccauuacuggguauauacccaa

SEQ ID NO: 152432 - RNA, 24 nt, Artificial Sequence
  Synthetic
ugccauuacuggguauauacccaa

SEQ ID NO: 152433 - RNA, 18 nt, Artificial Sequence
  Synthetic
uauugguuauauacccaa

SEQ ID NO: 152434 - RNA, 19 nt, Artificial Sequence
  Synthetic
uuauugguuauauacccaa

SEQ ID NO: 152435 - RNA, 20 nt, Artificial Sequence
  Synthetic
auuauugguuauauacccaa

SEQ ID NO: 152436 - RNA, 21 nt, Artificial Sequence
  Synthetic
cauuauugguuauauacccaa

SEQ ID NO: 152437 - RNA, 22 nt, Artificial Sequence
  Synthetic
ccauuauugguuauauacccaa

SEQ ID NO: 152438 - RNA, 23 nt, Artificial Sequence
  Synthetic
cccauuauugguuauauacccaa

SEQ ID NO: 152439 - RNA, 24 nt, Artificial Sequence
  Synthetic
ucccauuauugguuauauacccaa

SEQ ID NO: 152440 - RNA, 18 nt, Artificial Sequence
  Synthetic
aucugaaauccuccccaa

SEQ ID NO: 152441 - RNA, 19 nt, Artificial Sequence
  Synthetic
caucugaaauccuccccaa

SEQ ID NO: 152442 - RNA, 20 nt, Artificial Sequence
  Synthetic
ucaucugaaauccuccccaa

SEQ ID NO: 152443 - RNA, 21 nt, Artificial Sequence
  Synthetic
aucaucugaaauccuccccaa

SEQ ID NO: 152444 - RNA, 22 nt, Artificial Sequence
  Synthetic
aaucaucugaaauccuccccaa

SEQ ID NO: 152445 - RNA, 24 nt, Artificial Sequence
  Synthetic
ugaaucaucugaaauccuccccaa

SEQ ID NO: 152446 - RNA, 18 nt, Artificial Sequence
  Synthetic
ugagucagaacugcccaa

SEQ ID NO: 152447 - RNA, 19 nt, Artificial Sequence
  Synthetic
cugagucagaacugcccaa

SEQ ID NO: 152448 - RNA, 20 nt, Artificial Sequence
  Synthetic
acugagucagaacugcccaa

SEQ ID NO: 152449 - RNA, 21 nt, Artificial Sequence
  Synthetic
uacugagucagaacugcccaa

SEQ ID NO: 152450 - RNA, 22 nt, Artificial Sequence
  Synthetic
uuacugagucagaacugcccaa

SEQ ID NO: 152451 - RNA, 24 nt, Artificial Sequence
  Synthetic
aguuacugagucagaacugcccaa

SEQ ID NO: 152452 - RNA, 18 nt, Artificial Sequence
  Synthetic
aaaaaaaaaaaaagccaa

SEQ ID NO: 152453 - RNA, 19 nt, Artificial Sequence
  Synthetic
aaaaaaaaaaaaaagccaa

SEQ ID NO: 152454 - RNA, 20 nt, Artificial Sequence
  Synthetic
aaaaaaaaaaaaaaagccaa

SEQ ID NO: 152455 - RNA, 21 nt, Artificial Sequence
  Synthetic
aaaaaaaaaaaaaaaagccaa

SEQ ID NO: 152456 - RNA, 22 nt, Artificial Sequence
  Synthetic
aaaaaaaaaaaaaaaaagccaa

SEQ ID NO: 152457 - RNA, 23 nt, Artificial Sequence
  Synthetic
aaaaaaaaaaaaaaaaaagccaa

SEQ ID NO: 152458 - RNA, 24 nt, Artificial Sequence
  Synthetic
uaaaaaaaaaaaaaaaaaagccaa

SEQ ID NO: 152459 - RNA, 18 nt, Artificial Sequence
  Synthetic
ugacugaguucgagccaa

SEQ ID NO: 152460 - RNA, 19 nt, Artificial Sequence
  Synthetic
augacugaguucgagccaa

SEQ ID NO: 152461 - RNA, 20 nt, Artificial Sequence
  Synthetic
caugacugaguucgagccaa

SEQ ID NO: 152462 - RNA, 21 nt, Artificial Sequence
  Synthetic
acaugacugaguucgagccaa

SEQ ID NO: 152463 - RNA, 22 nt, Artificial Sequence
  Synthetic
uacaugacugaguucgagccaa

SEQ ID NO: 152464 - RNA, 23 nt, Artificial Sequence
  Synthetic
cuacaugacugaguucgagccaa

SEQ ID NO: 152465 - RNA, 18 nt, Artificial Sequence
  Synthetic
aaaacuugcuuuagccaa

SEQ ID NO: 152466 - RNA, 19 nt, Artificial Sequence
  Synthetic
uaaaacuugcuuuagccaa

SEQ ID NO: 152467 - RNA, 20 nt, Artificial Sequence
  Synthetic
auaaaacuugcuuuagccaa

SEQ ID NO: 152468 - RNA, 18 nt, Artificial Sequence
  Synthetic
uguacccugcaacgccaa

SEQ ID NO: 152469 - RNA, 19 nt, Artificial Sequence
  Synthetic
cuguacccugcaacgccaa

SEQ ID NO: 152470 - RNA, 18 nt, Artificial Sequence
  Synthetic
augccuggcuuuggccaa

SEQ ID NO: 152471 - RNA, 19 nt, Artificial Sequence
  Synthetic
uaugccuggcuuuggccaa

SEQ ID NO: 152472 - RNA, 20 nt, Artificial Sequence
  Synthetic
auaugccuggcuuuggccaa

SEQ ID NO: 152473 - RNA, 21 nt, Artificial Sequence
  Synthetic
cauaugccuggcuuuggccaa

SEQ ID NO: 152474 - RNA, 22 nt, Artificial Sequence
  Synthetic
ccauaugccuggcuuuggccaa

SEQ ID NO: 152475 - RNA, 22 nt, Artificial Sequence
  Synthetic
agaaaauaaaggaguucuccaa

SEQ ID NO: 152476 - RNA, 24 nt, Artificial Sequence
  Synthetic
agagaaaauaaaggaguucuccaa

SEQ ID NO: 152477 - RNA, 18 nt, Artificial Sequence
  Synthetic
uaauuauuucaaaagcaa

SEQ ID NO: 152478 - RNA, 19 nt, Artificial Sequence
  Synthetic
uuaauuauuucaaaagcaa

SEQ ID NO: 152479 - RNA, 20 nt, Artificial Sequence
  Synthetic
cuuaauuauuucaaaagcaa

SEQ ID NO: 152480 - RNA, 18 nt, Artificial Sequence
  Synthetic
cugugaaagcagcagcaa

SEQ ID NO: 152481 - RNA, 19 nt, Artificial Sequence
  Synthetic
ucugugaaagcagcagcaa

SEQ ID NO: 152482 - RNA, 20 nt, Artificial Sequence
  Synthetic
aucugugaaagcagcagcaa

SEQ ID NO: 152483 - RNA, 18 nt, Artificial Sequence
  Synthetic
aaagggucaauucagcaa

SEQ ID NO: 152484 - RNA, 19 nt, Artificial Sequence
  Synthetic
aaaagggucaauucagcaa

SEQ ID NO: 152485 - RNA, 20 nt, Artificial Sequence
  Synthetic
caaaagggucaauucagcaa

SEQ ID NO: 152486 - RNA, 21 nt, Artificial Sequence
  Synthetic
acaaaagggucaauucagcaa

SEQ ID NO: 152487 - RNA, 23 nt, Artificial Sequence
  Synthetic
ugacaaaagggucaauucagcaa

SEQ ID NO: 152488 - RNA, 24 nt, Artificial Sequence
  Synthetic
augacaaaagggucaauucagcaa

SEQ ID NO: 152489 - RNA, 18 nt, Artificial Sequence
  Synthetic
uaaaagcuuauucagcaa

SEQ ID NO: 152490 - RNA, 19 nt, Artificial Sequence
  Synthetic
auaaaagcuuauucagcaa

SEQ ID NO: 152491 - RNA, 20 nt, Artificial Sequence
  Synthetic
aauaaaagcuuauucagcaa

SEQ ID NO: 152492 - RNA, 18 nt, Artificial Sequence
  Synthetic
cagcaagauaaugagcaa

SEQ ID NO: 152493 - RNA, 19 nt, Artificial Sequence
  Synthetic
acagcaagauaaugagcaa

SEQ ID NO: 152494 - RNA, 20 nt, Artificial Sequence
  Synthetic
cacagcaagauaaugagcaa

SEQ ID NO: 152495 - RNA, 18 nt, Artificial Sequence
  Synthetic
cuaaagaggcugaggcaa

SEQ ID NO: 152496 - RNA, 19 nt, Artificial Sequence
  Synthetic
acuaaagaggcugaggcaa

SEQ ID NO: 152497 - RNA, 20 nt, Artificial Sequence
  Synthetic
cacuaaagaggcugaggcaa

SEQ ID NO: 152498 - RNA, 21 nt, Artificial Sequence
  Synthetic
ccacuaaagaggcugaggcaa

SEQ ID NO: 152499 - RNA, 23 nt, Artificial Sequence
  Synthetic
agccacuaaagaggcugaggcaa

SEQ ID NO: 152500 - RNA, 24 nt, Artificial Sequence
  Synthetic
cagccacuaaagaggcugaggcaa

SEQ ID NO: 152501 - RNA, 18 nt, Artificial Sequence
  Synthetic
cucgguaggcugaggcaa

SEQ ID NO: 152502 - RNA, 19 nt, Artificial Sequence
  Synthetic
acucgguaggcugaggcaa

SEQ ID NO: 152503 - RNA, 20 nt, Artificial Sequence
  Synthetic
uacucgguaggcugaggcaa

SEQ ID NO: 152504 - RNA, 21 nt, Artificial Sequence
  Synthetic
cuacucgguaggcugaggcaa

SEQ ID NO: 152505 - RNA, 23 nt, Artificial Sequence
  Synthetic
agcuacucgguaggcugaggcaa

SEQ ID NO: 152506 - RNA, 24 nt, Artificial Sequence
  Synthetic
cagcuacucgguaggcugaggcaa

SEQ ID NO: 152507 - RNA, 19 nt, Artificial Sequence
  Synthetic
ugcacuccagccuaggcaa

SEQ ID NO: 152508 - RNA, 20 nt, Artificial Sequence
  Synthetic
uugcacuccagccuaggcaa

SEQ ID NO: 152509 - RNA, 21 nt, Artificial Sequence
  Synthetic
auugcacuccagccuaggcaa

SEQ ID NO: 152510 - RNA, 22 nt, Artificial Sequence
  Synthetic
cauugcacuccagccuaggcaa

SEQ ID NO: 152511 - RNA, 23 nt, Artificial Sequence
  Synthetic
ccauugcacuccagccuaggcaa

SEQ ID NO: 152512 - RNA, 24 nt, Artificial Sequence
  Synthetic
accauugcacuccagccuaggcaa

SEQ ID NO: 152513 - RNA, 19 nt, Artificial Sequence
  Synthetic
ugcacaccagcuuaggcaa

SEQ ID NO: 152514 - RNA, 20 nt, Artificial Sequence
  Synthetic
cugcacaccagcuuaggcaa

SEQ ID NO: 152515 - RNA, 21 nt, Artificial Sequence
  Synthetic
acugcacaccagcuuaggcaa

SEQ ID NO: 152516 - RNA, 22 nt, Artificial Sequence
  Synthetic
cacugcacaccagcuuaggcaa

SEQ ID NO: 152517 - RNA, 23 nt, Artificial Sequence
  Synthetic
ucacugcacaccagcuuaggcaa

SEQ ID NO: 152518 - RNA, 19 nt, Artificial Sequence
  Synthetic
agcacuccagccugggcaa

SEQ ID NO: 152519 - RNA, 20 nt, Artificial Sequence
  Synthetic
cagcacuccagccugggcaa

SEQ ID NO: 152520 - RNA, 21 nt, Artificial Sequence
  Synthetic
acagcacuccagccugggcaa

SEQ ID NO: 152521 - RNA, 22 nt, Artificial Sequence
  Synthetic
cacagcacuccagccugggcaa

SEQ ID NO: 152522 - RNA, 23 nt, Artificial Sequence
  Synthetic
ucacagcacuccagccugggcaa

SEQ ID NO: 152523 - RNA, 21 nt, Artificial Sequence
  Synthetic
acugcacuccagccugggcaa

SEQ ID NO: 152524 - RNA, 22 nt, Artificial Sequence
  Synthetic
cacugcacuccagccugggcaa

SEQ ID NO: 152525 - RNA, 23 nt, Artificial Sequence
  Synthetic
ccacugcacuccagccugggcaa

SEQ ID NO: 152526 - RNA, 23 nt, Artificial Sequence
  Synthetic
ucacugcacuccagccugggcaa

SEQ ID NO: 152527 - RNA, 18 nt, Artificial Sequence
  Synthetic
uauugcauauauaugcaa

SEQ ID NO: 152528 - RNA, 19 nt, Artificial Sequence
  Synthetic
auauugcauauauaugcaa

SEQ ID NO: 152529 - RNA, 20 nt, Artificial Sequence
  Synthetic
aauauugcauauauaugcaa

SEQ ID NO: 152530 - RNA, 21 nt, Artificial Sequence
  Synthetic
aaauauugcauauauaugcaa

SEQ ID NO: 152531 - RNA, 22 nt, Artificial Sequence
  Synthetic
aaaauauugcauauauaugcaa

SEQ ID NO: 152532 - RNA, 24 nt, Artificial Sequence
  Synthetic
agaaaauauugcauauauaugcaa

SEQ ID NO: 152533 - RNA, 18 nt, Artificial Sequence
  Synthetic
augaaaacucuucugcaa

SEQ ID NO: 152534 - RNA, 19 nt, Artificial Sequence
  Synthetic
aaugaaaacucuucugcaa

SEQ ID NO: 152535 - RNA, 20 nt, Artificial Sequence
  Synthetic
aaaugaaaacucuucugcaa

SEQ ID NO: 152536 - RNA, 18 nt, Artificial Sequence
  Synthetic
agaguugaauaguugcaa

SEQ ID NO: 152537 - RNA, 19 nt, Artificial Sequence
  Synthetic
cagaguugaauaguugcaa

SEQ ID NO: 152538 - RNA, 21 nt, Artificial Sequence
  Synthetic
agcagaguugaauaguugcaa

SEQ ID NO: 152539 - RNA, 22 nt, Artificial Sequence
  Synthetic
cagcagaguugaauaguugcaa

SEQ ID NO: 152540 - RNA, 23 nt, Artificial Sequence
  Synthetic
acagcagaguugaauaguugcaa

SEQ ID NO: 152541 - RNA, 24 nt, Artificial Sequence
  Synthetic
aacagcagaguugaauaguugcaa

SEQ ID NO: 152542 - RNA, 18 nt, Artificial Sequence
  Synthetic
agcacagaaaaaaaucaa

SEQ ID NO: 152543 - RNA, 20 nt, Artificial Sequence
  Synthetic
agagcacagaaaaaaaucaa

SEQ ID NO: 152544 - RNA, 18 nt, Artificial Sequence
  Synthetic
cucuccaccccaaaucaa

SEQ ID NO: 152545 - RNA, 19 nt, Artificial Sequence
  Synthetic
acucuccaccccaaaucaa

SEQ ID NO: 152546 - RNA, 20 nt, Artificial Sequence
  Synthetic
aacucuccaccccaaaucaa

SEQ ID NO: 152547 - RNA, 22 nt, Artificial Sequence
  Synthetic
agaacucuccaccccaaaucaa

SEQ ID NO: 152548 - RNA, 23 nt, Artificial Sequence
  Synthetic
cagaacucuccaccccaaaucaa

SEQ ID NO: 152549 - RNA, 24 nt, Artificial Sequence
  Synthetic
acagaacucuccaccccaaaucaa

SEQ ID NO: 152550 - RNA, 18 nt, Artificial Sequence
  Synthetic
ugguuggggagaaaucaa

SEQ ID NO: 152551 - RNA, 19 nt, Artificial Sequence
  Synthetic
augguuggggagaaaucaa

SEQ ID NO: 152552 - RNA, 20 nt, Artificial Sequence
  Synthetic
aaugguuggggagaaaucaa

SEQ ID NO: 152553 - RNA, 21 nt, Artificial Sequence
  Synthetic
aaaugguuggggagaaaucaa

SEQ ID NO: 152554 - RNA, 22 nt, Artificial Sequence
  Synthetic
uaaaugguuggggagaaaucaa

SEQ ID NO: 152555 - RNA, 23 nt, Artificial Sequence
  Synthetic
uuaaaugguuggggagaaaucaa

SEQ ID NO: 152556 - RNA, 24 nt, Artificial Sequence
  Synthetic
auuaaaugguuggggagaaaucaa

SEQ ID NO: 152557 - RNA, 18 nt, Artificial Sequence
  Synthetic
agcaagggaaacaaucaa

SEQ ID NO: 152558 - RNA, 19 nt, Artificial Sequence
  Synthetic
aagcaagggaaacaaucaa

SEQ ID NO: 152559 - RNA, 20 nt, Artificial Sequence
  Synthetic
aaagcaagggaaacaaucaa

SEQ ID NO: 152560 - RNA, 21 nt, Artificial Sequence
  Synthetic
caaagcaagggaaacaaucaa

SEQ ID NO: 152561 - RNA, 22 nt, Artificial Sequence
  Synthetic
acaaagcaagggaaacaaucaa

SEQ ID NO: 152562 - RNA, 23 nt, Artificial Sequence
  Synthetic
uacaaagcaagggaaacaaucaa

SEQ ID NO: 152563 - RNA, 24 nt, Artificial Sequence
  Synthetic
cuacaaagcaagggaaacaaucaa

SEQ ID NO: 152564 - RNA, 18 nt, Artificial Sequence
  Synthetic
aaucaaucaaucaaucaa

SEQ ID NO: 152565 - RNA, 19 nt, Artificial Sequence
  Synthetic
caaucaaucaaucaaucaa

SEQ ID NO: 152566 - RNA, 20 nt, Artificial Sequence
  Synthetic
ucaaucaaucaaucaaucaa

SEQ ID NO: 152567 - RNA, 21 nt, Artificial Sequence
  Synthetic
aucaaucaaucaaucaaucaa

SEQ ID NO: 152568 - RNA, 22 nt, Artificial Sequence
  Synthetic
aaucaaucaaucaaucaaucaa

SEQ ID NO: 152569 - RNA, 23 nt, Artificial Sequence
  Synthetic
caaucaaucaaucaaucaaucaa

SEQ ID NO: 152570 - RNA, 24 nt, Artificial Sequence
  Synthetic
ucaaucaaucaaucaaucaaucaa

SEQ ID NO: 152571 - RNA, 19 nt, Artificial Sequence
  Synthetic
uguuuuguuguuuaaucaa

SEQ ID NO: 152572 - RNA, 20 nt, Artificial Sequence
  Synthetic
uuguuuuguuguuuaaucaa

SEQ ID NO: 152573 - RNA, 21 nt, Artificial Sequence
  Synthetic
cucuucaacaaaaaacaucaa

SEQ ID NO: 152574 - RNA, 22 nt, Artificial Sequence
  Synthetic
acucuucaacaaaaaacaucaa

SEQ ID NO: 152575 - RNA, 23 nt, Artificial Sequence
  Synthetic
aacucuucaacaaaaaacaucaa

SEQ ID NO: 152576 - RNA, 24 nt, Artificial Sequence
  Synthetic
caacucuucaacaaaaaacaucaa

SEQ ID NO: 152577 - RNA, 19 nt, Artificial Sequence
  Synthetic
aguuuuuugaaaagaucaa

SEQ ID NO: 152578 - RNA, 20 nt, Artificial Sequence
  Synthetic
caguuuuuugaaaagaucaa

SEQ ID NO: 152579 - RNA, 21 nt, Artificial Sequence
  Synthetic
ccaguuuuuugaaaagaucaa

SEQ ID NO: 152580 - RNA, 23 nt, Artificial Sequence
  Synthetic
agccaguuuuuugaaaagaucaa

SEQ ID NO: 152581 - RNA, 18 nt, Artificial Sequence
  Synthetic
cucauacuuuaggaucaa

SEQ ID NO: 152582 - RNA, 19 nt, Artificial Sequence
  Synthetic
ucucauacuuuaggaucaa

SEQ ID NO: 152583 - RNA, 20 nt, Artificial Sequence
  Synthetic
uucucauacuuuaggaucaa

SEQ ID NO: 152584 - RNA, 22 nt, Artificial Sequence
  Synthetic
uguucucauacuuuaggaucaa

SEQ ID NO: 152585 - RNA, 23 nt, Artificial Sequence
  Synthetic
uuguucucauacuuuaggaucaa

SEQ ID NO: 152586 - RNA, 18 nt, Artificial Sequence
  Synthetic
agugaaagaauuuaucaa

SEQ ID NO: 152587 - RNA, 19 nt, Artificial Sequence
  Synthetic
cagugaaagaauuuaucaa

SEQ ID NO: 152588 - RNA, 20 nt, Artificial Sequence
  Synthetic
acagugaaagaauuuaucaa

SEQ ID NO: 152589 - RNA, 21 nt, Artificial Sequence
  Synthetic
cacagugaaagaauuuaucaa

SEQ ID NO: 152590 - RNA, 22 nt, Artificial Sequence
  Synthetic
ucacagugaaagaauuuaucaa

SEQ ID NO: 152591 - RNA, 23 nt, Artificial Sequence
  Synthetic
uucacagugaaagaauuuaucaa

SEQ ID NO: 152592 - RNA, 24 nt, Artificial Sequence
  Synthetic
cuucacagugaaagaauuuaucaa

SEQ ID NO: 152593 - RNA, 19 nt, Artificial Sequence
  Synthetic
uguggcccagagaggucaa

SEQ ID NO: 152594 - RNA, 20 nt, Artificial Sequence
  Synthetic
cuguggcccagagaggucaa

SEQ ID NO: 152595 - RNA, 18 nt, Artificial Sequence
  Synthetic
ucaauaaaugucugucaa

SEQ ID NO: 152596 - RNA, 19 nt, Artificial Sequence
  Synthetic
uucaauaaaugucugucaa

SEQ ID NO: 152597 - RNA, 20 nt, Artificial Sequence
  Synthetic
cuucaauaaaugucugucaa

SEQ ID NO: 152598 - RNA, 18 nt, Artificial Sequence
  Synthetic
agaaacugaagaauucaa

SEQ ID NO: 152599 - RNA, 19 nt, Artificial Sequence
  Synthetic
aagaaacugaagaauucaa

SEQ ID NO: 152600 - RNA, 20 nt, Artificial Sequence
  Synthetic
aaagaaacugaagaauucaa

SEQ ID NO: 152601 - RNA, 18 nt, Artificial Sequence
  Synthetic
uguauuucuucuauucaa

SEQ ID NO: 152602 - RNA, 19 nt, Artificial Sequence
  Synthetic
auguauuucuucuauucaa

SEQ ID NO: 152603 - RNA, 20 nt, Artificial Sequence
  Synthetic
aauguauuucuucuauucaa

SEQ ID NO: 152604 - RNA, 18 nt, Artificial Sequence
  Synthetic
auguuugaauauguucaa

SEQ ID NO: 152605 - RNA, 19 nt, Artificial Sequence
  Synthetic
aauguuugaauauguucaa

SEQ ID NO: 152606 - RNA, 20 nt, Artificial Sequence
  Synthetic
aaauguuugaauauguucaa

SEQ ID NO: 152607 - RNA, 18 nt, Artificial Sequence
  Synthetic
ucuuauuccuguguucaa

SEQ ID NO: 152608 - RNA, 19 nt, Artificial Sequence
  Synthetic
uucuuauuccuguguucaa

SEQ ID NO: 152609 - RNA, 20 nt, Artificial Sequence
  Synthetic
uuucuuauuccuguguucaa

SEQ ID NO: 152610 - RNA, 21 nt, Artificial Sequence
  Synthetic
cuuucuuauuccuguguucaa

SEQ ID NO: 152611 - RNA, 22 nt, Artificial Sequence
  Synthetic
acuuucuuauuccuguguucaa

SEQ ID NO: 152612 - RNA, 23 nt, Artificial Sequence
  Synthetic
cacuuucuuauuccuguguucaa

SEQ ID NO: 152613 - RNA, 24 nt, Artificial Sequence
  Synthetic
ccacuuucuuauuccuguguucaa

SEQ ID NO: 152614 - RNA, 18 nt, Artificial Sequence
  Synthetic
augcugagaauuguucaa

SEQ ID NO: 152615 - RNA, 19 nt, Artificial Sequence
  Synthetic
aaugcugagaauuguucaa

SEQ ID NO: 152616 - RNA, 20 nt, Artificial Sequence
  Synthetic
aaaugcugagaauuguucaa

SEQ ID NO: 152617 - RNA, 18 nt, Artificial Sequence
  Synthetic
uuuccagaccaauuucaa

SEQ ID NO: 152618 - RNA, 19 nt, Artificial Sequence
  Synthetic
auuuccagaccaauuucaa

SEQ ID NO: 152619 - RNA, 20 nt, Artificial Sequence
  Synthetic
uauuuccagaccaauuucaa

SEQ ID NO: 152620 - RNA, 18 nt, Artificial Sequence
  Synthetic
augaaauuuauauuucaa

SEQ ID NO: 152621 - RNA, 19 nt, Artificial Sequence
  Synthetic
caugaaauuuauauuucaa

SEQ ID NO: 152622 - RNA, 20 nt, Artificial Sequence
  Synthetic
ucaugaaauuuauauuucaa

SEQ ID NO: 152623 - RNA, 18 nt, Artificial Sequence
  Synthetic
aggaaaagacaaaaagaa

SEQ ID NO: 152624 - RNA, 20 nt, Artificial Sequence
  Synthetic
agaggaaaagacaaaaagaa

SEQ ID NO: 152625 - RNA, 18 nt, Artificial Sequence
  Synthetic
agaaagacacacaaagaa

SEQ ID NO: 152626 - RNA, 19 nt, Artificial Sequence
  Synthetic
cagaaagacacacaaagaa

SEQ ID NO: 152627 - RNA, 20 nt, Artificial Sequence
  Synthetic
acagaaagacacacaaagaa

SEQ ID NO: 152628 - RNA, 18 nt, Artificial Sequence
  Synthetic
ugcugauaaaugaaagaa

SEQ ID NO: 152629 - RNA, 19 nt, Artificial Sequence
  Synthetic
augcugauaaaugaaagaa

SEQ ID NO: 152630 - RNA, 20 nt, Artificial Sequence
  Synthetic
aaugcugauaaaugaaagaa

SEQ ID NO: 152631 - RNA, 18 nt, Artificial Sequence
  Synthetic
uaaauauucaugaaagaa

SEQ ID NO: 152632 - RNA, 19 nt, Artificial Sequence
  Synthetic
auaaauauucaugaaagaa

SEQ ID NO: 152633 - RNA, 20 nt, Artificial Sequence
  Synthetic
aauaaauauucaugaaagaa

SEQ ID NO: 152634 - RNA, 20 nt, Artificial Sequence
  Synthetic
uggguauguaugugaaagaa

SEQ ID NO: 152635 - RNA, 18 nt, Artificial Sequence
  Synthetic
aauaauaauaauaaagaa

SEQ ID NO: 152636 - RNA, 19 nt, Artificial Sequence
  Synthetic
uaauaauaauaauaaagaa

SEQ ID NO: 152637 - RNA, 20 nt, Artificial Sequence
  Synthetic
auaauaauaauaauaaagaa

SEQ ID NO: 152638 - RNA, 21 nt, Artificial Sequence
  Synthetic
aauaauaauaauaauaaagaa

SEQ ID NO: 152639 - RNA, 22 nt, Artificial Sequence
  Synthetic
uaauaauaauaauaauaaagaa

SEQ ID NO: 152640 - RNA, 23 nt, Artificial Sequence
  Synthetic
auaauaauaauaauaauaaagaa

SEQ ID NO: 152641 - RNA, 24 nt, Artificial Sequence
  Synthetic
aauaauaauaauaauaauaaagaa

SEQ ID NO: 152642 - RNA, 18 nt, Artificial Sequence
  Synthetic
uuuguaagcuauaaagaa

SEQ ID NO: 152643 - RNA, 19 nt, Artificial Sequence
  Synthetic
uuuuguaagcuauaaagaa

SEQ ID NO: 152644 - RNA, 20 nt, Artificial Sequence
  Synthetic
auuuuguaagcuauaaagaa

SEQ ID NO: 152645 - RNA, 21 nt, Artificial Sequence
  Synthetic
aaacuagaaaaucuagaagaa

SEQ ID NO: 152646 - RNA, 22 nt, Artificial Sequence
  Synthetic
uaaacuagaaaaucuagaagaa

SEQ ID NO: 152647 - RNA, 23 nt, Artificial Sequence
  Synthetic
auaaacuagaaaaucuagaagaa

SEQ ID NO: 152648 - RNA, 24 nt, Artificial Sequence
  Synthetic
aauaaacuagaaaaucuagaagaa

SEQ ID NO: 152649 - RNA, 20 nt, Artificial Sequence
  Synthetic
uggaugagaagaaggaagaa

SEQ ID NO: 152650 - RNA, 18 nt, Artificial Sequence
  Synthetic
auggaaugaagugaagaa

SEQ ID NO: 152651 - RNA, 19 nt, Artificial Sequence
  Synthetic
aauggaaugaagugaagaa

SEQ ID NO: 152652 - RNA, 20 nt, Artificial Sequence
  Synthetic
aaauggaaugaagugaagaa

SEQ ID NO: 152653 - RNA, 23 nt, Artificial Sequence
  Synthetic
aggaaauggaaugaagugaagaa

SEQ ID NO: 152654 - RNA, 24 nt, Artificial Sequence
  Synthetic
caggaaauggaaugaagugaagaa

SEQ ID NO: 152655 - RNA, 19 nt, Artificial Sequence
  Synthetic
ugggaagugaagugaagaa

SEQ ID NO: 152656 - RNA, 20 nt, Artificial Sequence
  Synthetic
augggaagugaagugaagaa

SEQ ID NO: 152657 - RNA, 18 nt, Artificial Sequence
  Synthetic
uggcacacaagcuaagaa

SEQ ID NO: 152658 - RNA, 19 nt, Artificial Sequence
  Synthetic
auggcacacaagcuaagaa

SEQ ID NO: 152659 - RNA, 20 nt, Artificial Sequence
  Synthetic
uauggcacacaagcuaagaa

SEQ ID NO: 152660 - RNA, 18 nt, Artificial Sequence
  Synthetic
auuuauauucuaacagaa

SEQ ID NO: 152661 - RNA, 19 nt, Artificial Sequence
  Synthetic
aauuuauauucuaacagaa

SEQ ID NO: 152662 - RNA, 21 nt, Artificial Sequence
  Synthetic
agaauuuauauucuaacagaa

SEQ ID NO: 152663 - RNA, 22 nt, Artificial Sequence
  Synthetic
cagaauuuauauucuaacagaa

SEQ ID NO: 152664 - RNA, 23 nt, Artificial Sequence
  Synthetic
ucagaauuuauauucuaacagaa

SEQ ID NO: 152665 - RNA, 24 nt, Artificial Sequence
  Synthetic
uucagaauuuauauucuaacagaa

SEQ ID NO: 152666 - RNA, 24 nt, Artificial Sequence
  Synthetic
cggcagaaacccuacaagccagaa

SEQ ID NO: 152667 - RNA, 18 nt, Artificial Sequence
  Synthetic
ccuuuuauuucagcagaa

SEQ ID NO: 152668 - RNA, 20 nt, Artificial Sequence
  Synthetic
ugccuuuuauuucagcagaa

SEQ ID NO: 152669 - RNA, 21 nt, Artificial Sequence
  Synthetic
cugccuuuuauuucagcagaa

SEQ ID NO: 152670 - RNA, 22 nt, Artificial Sequence
  Synthetic
ccugccuuuuauuucagcagaa

SEQ ID NO: 152671 - RNA, 23 nt, Artificial Sequence
  Synthetic
uccugccuuuuauuucagcagaa

SEQ ID NO: 152672 - RNA, 24 nt, Artificial Sequence
  Synthetic
cuccugccuuuuauuucagcagaa

SEQ ID NO: 152673 - RNA, 18 nt, Artificial Sequence
  Synthetic
cagggaaggagagcagaa

SEQ ID NO: 152674 - RNA, 19 nt, Artificial Sequence
  Synthetic
ucagggaaggagagcagaa

SEQ ID NO: 152675 - RNA, 18 nt, Artificial Sequence
  Synthetic
uaguaugguauagcagaa

SEQ ID NO: 152676 - RNA, 19 nt, Artificial Sequence
  Synthetic
agcacuuugggaggcagaa

SEQ ID NO: 152677 - RNA, 20 nt, Artificial Sequence
  Synthetic
cagcacuuugggaggcagaa

SEQ ID NO: 152678 - RNA, 21 nt, Artificial Sequence
  Synthetic
ccagcacuuugggaggcagaa

SEQ ID NO: 152679 - RNA, 22 nt, Artificial Sequence
  Synthetic
cccagcacuuugggaggcagaa

SEQ ID NO: 152680 - RNA, 23 nt, Artificial Sequence
  Synthetic
ucccagcacuuugggaggcagaa

SEQ ID NO: 152681 - RNA, 24 nt, Artificial Sequence
  Synthetic
aucccagcacuuugggaggcagaa

SEQ ID NO: 152682 - RNA, 18 nt, Artificial Sequence
  Synthetic
uuuuucuuuugugcagaa

SEQ ID NO: 152683 - RNA, 19 nt, Artificial Sequence
  Synthetic
cuuuuucuuuugugcagaa

SEQ ID NO: 152684 - RNA, 20 nt, Artificial Sequence
  Synthetic
ucuuuuucuuuugugcagaa

SEQ ID NO: 152685 - RNA, 21 nt, Artificial Sequence
  Synthetic
uucuuuuucuuuugugcagaa

SEQ ID NO: 152686 - RNA, 22 nt, Artificial Sequence
  Synthetic
uuucuuuuucuuuugugcagaa

SEQ ID NO: 152687 - RNA, 23 nt, Artificial Sequence
  Synthetic
cuuucuuuuucuuuugugcagaa

SEQ ID NO: 152688 - RNA, 24 nt, Artificial Sequence
  Synthetic
ucuuucuuuuucuuuugugcagaa

SEQ ID NO: 152689 - RNA, 18 nt, Artificial Sequence
  Synthetic
auaaagaagaaaagagaa

SEQ ID NO: 152690 - RNA, 19 nt, Artificial Sequence
  Synthetic
aauaaagaagaaaagagaa

SEQ ID NO: 152691 - RNA, 20 nt, Artificial Sequence
  Synthetic
uaauaaagaagaaaagagaa

SEQ ID NO: 152692 - RNA, 21 nt, Artificial Sequence
  Synthetic
cuaauaaagaagaaaagagaa

SEQ ID NO: 152693 - RNA, 22 nt, Artificial Sequence
  Synthetic
acuaauaaagaagaaaagagaa

SEQ ID NO: 152694 - RNA, 24 nt, Artificial Sequence
  Synthetic
agacuaauaaagaagaaaagagaa

SEQ ID NO: 152695 - RNA, 18 nt, Artificial Sequence
  Synthetic
agcuagagccaaagagaa

SEQ ID NO: 152696 - RNA, 19 nt, Artificial Sequence
  Synthetic
uagcuagagccaaagagaa

SEQ ID NO: 152697 - RNA, 20 nt, Artificial Sequence
  Synthetic
auagcuagagccaaagagaa

SEQ ID NO: 152698 - RNA, 18 nt, Artificial Sequence
  Synthetic
uauuuuuaauaaagagaa

SEQ ID NO: 152699 - RNA, 19 nt, Artificial Sequence
  Synthetic
auauuuuuaauaaagagaa

SEQ ID NO: 152700 - RNA, 20 nt, Artificial Sequence
  Synthetic
aauauuuuuaauaaagagaa

SEQ ID NO: 152701 - RNA, 21 nt, Artificial Sequence
  Synthetic
uaauaaucacaucauggagaa

SEQ ID NO: 152702 - RNA, 18 nt, Artificial Sequence
  Synthetic
ucaugagaaggaugagaa

SEQ ID NO: 152703 - RNA, 19 nt, Artificial Sequence
  Synthetic
cucaugagaaggaugagaa

SEQ ID NO: 152704 - RNA, 20 nt, Artificial Sequence
  Synthetic
ccucaugagaaggaugagaa

SEQ ID NO: 152705 - RNA, 18 nt, Artificial Sequence
  Synthetic
uuugaagcaucaauagaa

SEQ ID NO: 152706 - RNA, 19 nt, Artificial Sequence
  Synthetic
uuuugaagcaucaauagaa

SEQ ID NO: 152707 - RNA, 20 nt, Artificial Sequence
  Synthetic
auuuugaagcaucaauagaa

SEQ ID NO: 152708 - RNA, 18 nt, Artificial Sequence
  Synthetic
uccaaagaagauauagaa

SEQ ID NO: 152709 - RNA, 19 nt, Artificial Sequence
  Synthetic
cuccaaagaagauauagaa

SEQ ID NO: 152710 - RNA, 20 nt, Artificial Sequence
  Synthetic
ucuccaaagaagauauagaa

SEQ ID NO: 152711 - RNA, 21 nt, Artificial Sequence
  Synthetic
uucuccaaagaagauauagaa

SEQ ID NO: 152712 - RNA, 22 nt, Artificial Sequence
  Synthetic
uuucuccaaagaagauauagaa

SEQ ID NO: 152713 - RNA, 23 nt, Artificial Sequence
  Synthetic
auuucuccaaagaagauauagaa

SEQ ID NO: 152714 - RNA, 24 nt, Artificial Sequence
  Synthetic
cauuucuccaaagaagauauagaa

SEQ ID NO: 152715 - RNA, 18 nt, Artificial Sequence
  Synthetic
uucugucuucaaguagaa

SEQ ID NO: 152716 - RNA, 19 nt, Artificial Sequence
  Synthetic
uuucugucuucaaguagaa

SEQ ID NO: 152717 - RNA, 20 nt, Artificial Sequence
  Synthetic
uuuucugucuucaaguagaa

SEQ ID NO: 152718 - RNA, 18 nt, Artificial Sequence
  Synthetic
uacauaauuaugguagaa

SEQ ID NO: 152719 - RNA, 19 nt, Artificial Sequence
  Synthetic
auacauaauuaugguagaa

SEQ ID NO: 152720 - RNA, 20 nt, Artificial Sequence
  Synthetic
uauacauaauuaugguagaa

SEQ ID NO: 152721 - RNA, 18 nt, Artificial Sequence
  Synthetic
uaugguauauccuuagaa

SEQ ID NO: 152722 - RNA, 19 nt, Artificial Sequence
  Synthetic
uuaugguauauccuuagaa

SEQ ID NO: 152723 - RNA, 20 nt, Artificial Sequence
  Synthetic
auuaugguauauccuuagaa

SEQ ID NO: 152724 - RNA, 18 nt, Artificial Sequence
  Synthetic
uaaaaaaauguguuagaa

SEQ ID NO: 152725 - RNA, 19 nt, Artificial Sequence
  Synthetic
uuaaaaaaauguguuagaa

SEQ ID NO: 152726 - RNA, 22 nt, Artificial Sequence
  Synthetic
ugguuaaaaaaauguguuagaa

SEQ ID NO: 152727 - RNA, 23 nt, Artificial Sequence
  Synthetic
uugguuaaaaaaauguguuagaa

SEQ ID NO: 152728 - RNA, 24 nt, Artificial Sequence
  Synthetic
uuugguuaaaaaaauguguuagaa

SEQ ID NO: 152729 - RNA, 19 nt, Artificial Sequence
  Synthetic
uguggaagcaacuuuagaa

SEQ ID NO: 152730 - RNA, 20 nt, Artificial Sequence
  Synthetic
auguggaagcaacuuuagaa

SEQ ID NO: 152731 - RNA, 21 nt, Artificial Sequence
  Synthetic
aauguggaagcaacuuuagaa

SEQ ID NO: 152732 - RNA, 22 nt, Artificial Sequence
  Synthetic
aaauguggaagcaacuuuagaa

SEQ ID NO: 152733 - RNA, 23 nt, Artificial Sequence
  Synthetic
aaaauguggaagcaacuuuagaa

SEQ ID NO: 152734 - RNA, 18 nt, Artificial Sequence
  Synthetic
uucuaauaauuuuuagaa

SEQ ID NO: 152735 - RNA, 19 nt, Artificial Sequence
  Synthetic
auucuaauaauuuuuagaa

SEQ ID NO: 152736 - RNA, 20 nt, Artificial Sequence
  Synthetic
cauucuaauaauuuuuagaa

SEQ ID NO: 152737 - RNA, 18 nt, Artificial Sequence
  Synthetic
aaaaaaaaaaaacccgaa

SEQ ID NO: 152738 - RNA, 19 nt, Artificial Sequence
  Synthetic
aaaaaaaaaaaaacccgaa

SEQ ID NO: 152739 - RNA, 20 nt, Artificial Sequence
  Synthetic
aaaaaaaaaaaaaacccgaa

SEQ ID NO: 152740 - RNA, 21 nt, Artificial Sequence
  Synthetic
aaaaaaaaaaaaaaacccgaa

SEQ ID NO: 152741 - RNA, 22 nt, Artificial Sequence
  Synthetic
aaaaaaaaaaaaaaaacccgaa

SEQ ID NO: 152742 - RNA, 23 nt, Artificial Sequence
  Synthetic
aaaaaaaaaaaaaaaaacccgaa

SEQ ID NO: 152743 - RNA, 24 nt, Artificial Sequence
  Synthetic
aaaaaaaaaaaaaaaaaacccgaa

SEQ ID NO: 152744 - RNA, 18 nt, Artificial Sequence
  Synthetic
uuaaagugaacaaaggaa

SEQ ID NO: 152745 - RNA, 19 nt, Artificial Sequence
  Synthetic
uuuaaagugaacaaaggaa

SEQ ID NO: 152746 - RNA, 20 nt, Artificial Sequence
  Synthetic
uuuuaaagugaacaaaggaa

SEQ ID NO: 152747 - RNA, 21 nt, Artificial Sequence
  Synthetic
uuuuuaaagugaacaaaggaa

SEQ ID NO: 152748 - RNA, 22 nt, Artificial Sequence
  Synthetic
auuuuuaaagugaacaaaggaa

SEQ ID NO: 152749 - RNA, 23 nt, Artificial Sequence
  Synthetic
aauuuuuaaagugaacaaaggaa

SEQ ID NO: 152750 - RNA, 24 nt, Artificial Sequence
  Synthetic
caauuuuuaaagugaacaaaggaa

SEQ ID NO: 152751 - RNA, 18 nt, Artificial Sequence
  Synthetic
acagaaaacagaaaggaa

SEQ ID NO: 152752 - RNA, 19 nt, Artificial Sequence
  Synthetic
uacagaaaacagaaaggaa

SEQ ID NO: 152753 - RNA, 20 nt, Artificial Sequence
  Synthetic
cuacagaaaacagaaaggaa

SEQ ID NO: 152754 - RNA, 19 nt, Artificial Sequence
  Synthetic
uggguaauuuauaaaggaa

SEQ ID NO: 152755 - RNA, 20 nt, Artificial Sequence
  Synthetic
cuggguaauuuauaaaggaa

SEQ ID NO: 152756 - RNA, 21 nt, Artificial Sequence
  Synthetic
acuggguaauuuauaaaggaa

SEQ ID NO: 152757 - RNA, 23 nt, Artificial Sequence
  Synthetic
agacuggguaauuuauaaaggaa

SEQ ID NO: 152758 - RNA, 18 nt, Artificial Sequence
  Synthetic
uuuauaauguuaaaggaa

SEQ ID NO: 152759 - RNA, 19 nt, Artificial Sequence
  Synthetic
auuuauaauguuaaaggaa

SEQ ID NO: 152760 - RNA, 20 nt, Artificial Sequence
  Synthetic
uauuuauaauguuaaaggaa

SEQ ID NO: 152761 - RNA, 21 nt, Artificial Sequence
  Synthetic
uuauuuauaauguuaaaggaa

SEQ ID NO: 152762 - RNA, 22 nt, Artificial Sequence
  Synthetic
uuuauuuauaauguuaaaggaa

SEQ ID NO: 152763 - RNA, 23 nt, Artificial Sequence
  Synthetic
uuuuauuuauaauguuaaaggaa

SEQ ID NO: 152764 - RNA, 24 nt, Artificial Sequence
  Synthetic
auuuuauuuauaauguuaaaggaa

SEQ ID NO: 152765 - RNA, 19 nt, Artificial Sequence
  Synthetic
agugagaaacacagaggaa

SEQ ID NO: 152766 - RNA, 20 nt, Artificial Sequence
  Synthetic
aagugagaaacacagaggaa

SEQ ID NO: 152767 - RNA, 21 nt, Artificial Sequence
  Synthetic
aaagugagaaacacagaggaa

SEQ ID NO: 152768 - RNA, 22 nt, Artificial Sequence
  Synthetic
aaaagugagaaacacagaggaa

SEQ ID NO: 152769 - RNA, 23 nt, Artificial Sequence
  Synthetic
uaaaagugagaaacacagaggaa

SEQ ID NO: 152770 - RNA, 24 nt, Artificial Sequence
  Synthetic
cuaaaagugagaaacacagaggaa

SEQ ID NO: 152771 - RNA, 18 nt, Artificial Sequence
  Synthetic
ugagaauuuugagaggaa

SEQ ID NO: 152772 - RNA, 20 nt, Artificial Sequence
  Synthetic
agugagaauuuugagaggaa

SEQ ID NO: 152773 - RNA, 18 nt, Artificial Sequence
  Synthetic
cuagaaaaucuagaggaa

SEQ ID NO: 152774 - RNA, 19 nt, Artificial Sequence
  Synthetic
acuagaaaaucuagaggaa

SEQ ID NO: 152775 - RNA, 20 nt, Artificial Sequence
  Synthetic
aacuagaaaaucuagaggaa

SEQ ID NO: 152776 - RNA, 21 nt, Artificial Sequence
  Synthetic
aaacuagaaaaucuagaggaa

SEQ ID NO: 152777 - RNA, 22 nt, Artificial Sequence
  Synthetic
caaacuagaaaaucuagaggaa

SEQ ID NO: 152778 - RNA, 23 nt, Artificial Sequence
  Synthetic
acaaacuagaaaaucuagaggaa

SEQ ID NO: 152779 - RNA, 24 nt, Artificial Sequence
  Synthetic
cacaaacuagaaaaucuagaggaa

SEQ ID NO: 152780 - RNA, 18 nt, Artificial Sequence
  Synthetic
aaacucuuuaaauaggaa

SEQ ID NO: 152781 - RNA, 19 nt, Artificial Sequence
  Synthetic
caaacucuuuaaauaggaa

SEQ ID NO: 152782 - RNA, 20 nt, Artificial Sequence
  Synthetic
acaaacucuuuaaauaggaa

SEQ ID NO: 152783 - RNA, 18 nt, Artificial Sequence
  Synthetic
caccacgcccggccggaa

SEQ ID NO: 152784 - RNA, 19 nt, Artificial Sequence
  Synthetic
ccaccacgcccggccggaa

SEQ ID NO: 152785 - RNA, 21 nt, Artificial Sequence
  Synthetic
agccaccacgcccggccggaa

SEQ ID NO: 152786 - RNA, 23 nt, Artificial Sequence
  Synthetic
ugagccaccacgcccggccggaa

SEQ ID NO: 152787 - RNA, 18 nt, Artificial Sequence
  Synthetic
agggagagggaaagggaa

SEQ ID NO: 152788 - RNA, 20 nt, Artificial Sequence
  Synthetic
agagggagagggaaagggaa

SEQ ID NO: 152789 - RNA, 24 nt, Artificial Sequence
  Synthetic
agggagagggagagggaaagggaa

SEQ ID NO: 152790 - RNA, 18 nt, Artificial Sequence
  Synthetic
agucacagccuccgggaa

SEQ ID NO: 152791 - RNA, 19 nt, Artificial Sequence
  Synthetic
cagucacagccuccgggaa

SEQ ID NO: 152792 - RNA, 20 nt, Artificial Sequence
  Synthetic
ucagucacagccuccgggaa

SEQ ID NO: 152793 - RNA, 18 nt, Artificial Sequence
  Synthetic
uuucuggcagguggggaa

SEQ ID NO: 152794 - RNA, 19 nt, Artificial Sequence
  Synthetic
auuucuggcagguggggaa

SEQ ID NO: 152795 - RNA, 20 nt, Artificial Sequence
  Synthetic
aauuucuggcagguggggaa

SEQ ID NO: 152796 - RNA, 18 nt, Artificial Sequence
  Synthetic
acauauagaccaauggaa

SEQ ID NO: 152797 - RNA, 20 nt, Artificial Sequence
  Synthetic
agacauauagaccaauggaa

SEQ ID NO: 152798 - RNA, 21 nt, Artificial Sequence
  Synthetic
cagacauauagaccaauggaa

SEQ ID NO: 152799 - RNA, 24 nt, Artificial Sequence
  Synthetic
aggcagacauauagaccaauggaa

SEQ ID NO: 152800 - RNA, 18 nt, Artificial Sequence
  Synthetic
aacaaacagauaauggaa

SEQ ID NO: 152801 - RNA, 20 nt, Artificial Sequence
  Synthetic
ugaacaaacagauaauggaa

SEQ ID NO: 152802 - RNA, 18 nt, Artificial Sequence
  Synthetic
aaaacaguggccauggaa

SEQ ID NO: 152803 - RNA, 19 nt, Artificial Sequence
  Synthetic
uaaaacaguggccauggaa

SEQ ID NO: 152804 - RNA, 19 nt, Artificial Sequence
  Synthetic
ugcaggcucagagauggaa

SEQ ID NO: 152805 - RNA, 20 nt, Artificial Sequence
  Synthetic
uugcaggcucagagauggaa

SEQ ID NO: 152806 - RNA, 21 nt, Artificial Sequence
  Synthetic
uuugcaggcucagagauggaa

SEQ ID NO: 152807 - RNA, 22 nt, Artificial Sequence
  Synthetic
uuuugcaggcucagagauggaa

SEQ ID NO: 152808 - RNA, 23 nt, Artificial Sequence
  Synthetic
auuuugcaggcucagagauggaa

SEQ ID NO: 152809 - RNA, 19 nt, Artificial Sequence
  Synthetic
ugagggagguucucuggaa

SEQ ID NO: 152810 - RNA, 20 nt, Artificial Sequence
  Synthetic
cugagggagguucucuggaa

SEQ ID NO: 152811 - RNA, 18 nt, Artificial Sequence
  Synthetic
aaguucauguuauuggaa

SEQ ID NO: 152812 - RNA, 19 nt, Artificial Sequence
  Synthetic
aaaguucauguuauuggaa

SEQ ID NO: 152813 - RNA, 22 nt, Artificial Sequence
  Synthetic
aggaaaguucauguuauuggaa

SEQ ID NO: 152814 - RNA, 23 nt, Artificial Sequence
  Synthetic
aaggaaaguucauguuauuggaa

SEQ ID NO: 152815 - RNA, 24 nt, Artificial Sequence
  Synthetic
uaaggaaaguucauguuauuggaa

SEQ ID NO: 152816 - RNA, 19 nt, Artificial Sequence
  Synthetic
ugagugagcccucuuggaa

SEQ ID NO: 152817 - RNA, 21 nt, Artificial Sequence
  Synthetic
ugugagugagcccucuuggaa

SEQ ID NO: 152818 - RNA, 22 nt, Artificial Sequence
  Synthetic
augugagugagcccucuuggaa

SEQ ID NO: 152819 - RNA, 23 nt, Artificial Sequence
  Synthetic
caugugagugagcccucuuggaa

SEQ ID NO: 152820 - RNA, 20 nt, Artificial Sequence
  Synthetic
uggugucacuuaaguuggaa

SEQ ID NO: 152821 - RNA, 19 nt, Artificial Sequence
  Synthetic
uguggaagcaacuuuggaa

SEQ ID NO: 152822 - RNA, 20 nt, Artificial Sequence
  Synthetic
auguggaagcaacuuuggaa

SEQ ID NO: 152823 - RNA, 21 nt, Artificial Sequence
  Synthetic
aauguggaagcaacuuuggaa

SEQ ID NO: 152824 - RNA, 22 nt, Artificial Sequence
  Synthetic
aaauguggaagcaacuuuggaa

SEQ ID NO: 152825 - RNA, 23 nt, Artificial Sequence
  Synthetic
aaaauguggaagcaacuuuggaa

SEQ ID NO: 152826 - RNA, 24 nt, Artificial Sequence
  Synthetic
aaaaauguggaagcaacuuuggaa

SEQ ID NO: 152827 - RNA, 18 nt, Artificial Sequence
  Synthetic
aaaaguuaaaaaaaugaa

SEQ ID NO: 152828 - RNA, 19 nt, Artificial Sequence
  Synthetic
uaaaaguuaaaaaaaugaa

SEQ ID NO: 152829 - RNA, 20 nt, Artificial Sequence
  Synthetic
auaaaaguuaaaaaaaugaa

SEQ ID NO: 152830 - RNA, 21 nt, Artificial Sequence
  Synthetic
aauaaaaguuaaaaaaaugaa

SEQ ID NO: 152831 - RNA, 22 nt, Artificial Sequence
  Synthetic
aaauaaaaguuaaaaaaaugaa

SEQ ID NO: 152832 - RNA, 23 nt, Artificial Sequence
  Synthetic
aaaauaaaaguuaaaaaaaugaa

SEQ ID NO: 152833 - RNA, 24 nt, Artificial Sequence
  Synthetic
uaaaauaaaaguuaaaaaaaugaa

SEQ ID NO: 152834 - RNA, 18 nt, Artificial Sequence
  Synthetic
aggcauuagacaaaugaa

SEQ ID NO: 152835 - RNA, 18 nt, Artificial Sequence
  Synthetic
uuaccacccugaaaugaa

SEQ ID NO: 152836 - RNA, 19 nt, Artificial Sequence
  Synthetic
uuuaccacccugaaaugaa

SEQ ID NO: 152837 - RNA, 20 nt, Artificial Sequence
  Synthetic
auuuaccacccugaaaugaa

SEQ ID NO: 152838 - RNA, 18 nt, Artificial Sequence
  Synthetic
caaaauaguugaaaugaa

SEQ ID NO: 152839 - RNA, 19 nt, Artificial Sequence
  Synthetic
ucaaaauaguugaaaugaa

SEQ ID NO: 152840 - RNA, 20 nt, Artificial Sequence
  Synthetic
cucaaaauaguugaaaugaa

SEQ ID NO: 152841 - RNA, 18 nt, Artificial Sequence
  Synthetic
agaaaucagagacaugaa

SEQ ID NO: 152842 - RNA, 20 nt, Artificial Sequence
  Synthetic
agagaaaucagagacaugaa

SEQ ID NO: 152843 - RNA, 18 nt, Artificial Sequence
  Synthetic
ucagcaauggaagaugaa

SEQ ID NO: 152844 - RNA, 19 nt, Artificial Sequence
  Synthetic
aucagcaauggaagaugaa

SEQ ID NO: 152845 - RNA, 20 nt, Artificial Sequence
  Synthetic
uaucagcaauggaagaugaa

SEQ ID NO: 152846 - RNA, 24 nt, Artificial Sequence
  Synthetic
aggguaucagcaauggaagaugaa

SEQ ID NO: 152847 - RNA, 18 nt, Artificial Sequence
  Synthetic
aauguuuuggaggaugaa

SEQ ID NO: 152848 - RNA, 19 nt, Artificial Sequence
  Synthetic
caauguuuuggaggaugaa

SEQ ID NO: 152849 - RNA, 20 nt, Artificial Sequence
  Synthetic
ucaauguuuuggaggaugaa

SEQ ID NO: 152850 - RNA, 21 nt, Artificial Sequence
  Synthetic
uucaauguuuuggaggaugaa

SEQ ID NO: 152851 - RNA, 22 nt, Artificial Sequence
  Synthetic
cuucaauguuuuggaggaugaa

SEQ ID NO: 152852 - RNA, 24 nt, Artificial Sequence
  Synthetic
ugcuucaauguuuuggaggaugaa

SEQ ID NO: 152853 - RNA, 18 nt, Artificial Sequence
  Synthetic
uggggcuuuggggaugaa

SEQ ID NO: 152854 - RNA, 19 nt, Artificial Sequence
  Synthetic
uuggggcuuuggggaugaa

SEQ ID NO: 152855 - RNA, 20 nt, Artificial Sequence
  Synthetic
uuuggggcuuuggggaugaa

SEQ ID NO: 152856 - RNA, 21 nt, Artificial Sequence
  Synthetic
uuuuggggcuuuggggaugaa

SEQ ID NO: 152857 - RNA, 22 nt, Artificial Sequence
  Synthetic
uuuuuggggcuuuggggaugaa

SEQ ID NO: 152858 - RNA, 23 nt, Artificial Sequence
  Synthetic
auuuuuggggcuuuggggaugaa

SEQ ID NO: 152859 - RNA, 22 nt, Artificial Sequence
  Synthetic
ugugugaagaugcucugaugaa

SEQ ID NO: 152860 - RNA, 23 nt, Artificial Sequence
  Synthetic
augugugaagaugcucugaugaa

SEQ ID NO: 152861 - RNA, 18 nt, Artificial Sequence
  Synthetic
auuuuaaauauauaugaa

SEQ ID NO: 152862 - RNA, 19 nt, Artificial Sequence
  Synthetic
aauuuuaaauauauaugaa

SEQ ID NO: 152863 - RNA, 20 nt, Artificial Sequence
  Synthetic
caauuuuaaauauauaugaa

SEQ ID NO: 152864 - RNA, 21 nt, Artificial Sequence
  Synthetic
ucaauuuuaaauauauaugaa

SEQ ID NO: 152865 - RNA, 22 nt, Artificial Sequence
  Synthetic
aucaauuuuaaauauauaugaa

SEQ ID NO: 152866 - RNA, 23 nt, Artificial Sequence
  Synthetic
aaucaauuuuaaauauauaugaa

SEQ ID NO: 152867 - RNA, 18 nt, Artificial Sequence
  Synthetic
aaaggcaaccaaacugaa

SEQ ID NO: 152868 - RNA, 19 nt, Artificial Sequence
  Synthetic
aaaaggcaaccaaacugaa

SEQ ID NO: 152869 - RNA, 20 nt, Artificial Sequence
  Synthetic
uaaaaggcaaccaaacugaa

SEQ ID NO: 152870 - RNA, 21 nt, Artificial Sequence
  Synthetic
auaaaaggcaaccaaacugaa

SEQ ID NO: 152871 - RNA, 22 nt, Artificial Sequence
  Synthetic
aauaaaaggcaaccaaacugaa

SEQ ID NO: 152872 - RNA, 23 nt, Artificial Sequence
  Synthetic
aaauaaaaggcaaccaaacugaa

SEQ ID NO: 152873 - RNA, 21 nt, Artificial Sequence
  Synthetic
uuaagcaacauaaguacugaa

SEQ ID NO: 152874 - RNA, 22 nt, Artificial Sequence
  Synthetic
uuuaagcaacauaaguacugaa

SEQ ID NO: 152875 - RNA, 24 nt, Artificial Sequence
  Synthetic
uguuuaagcaacauaaguacugaa

SEQ ID NO: 152876 - RNA, 18 nt, Artificial Sequence
  Synthetic
uuuuggguuaaugcugaa

SEQ ID NO: 152877 - RNA, 19 nt, Artificial Sequence
  Synthetic
cuuuuggguuaaugcugaa

SEQ ID NO: 152878 - RNA, 20 nt, Artificial Sequence
  Synthetic
acuuuuggguuaaugcugaa

SEQ ID NO: 152879 - RNA, 23 nt, Artificial Sequence
  Synthetic
uggacuuuuggguuaaugcugaa

SEQ ID NO: 152880 - RNA, 24 nt, Artificial Sequence
  Synthetic
uuggacuuuuggguuaaugcugaa

SEQ ID NO: 152881 - RNA, 18 nt, Artificial Sequence
  Synthetic
aaauguggcugaucugaa

SEQ ID NO: 152882 - RNA, 20 nt, Artificial Sequence
  Synthetic
ugaaauguggcugaucugaa

SEQ ID NO: 152883 - RNA, 21 nt, Artificial Sequence
  Synthetic
uugaaauguggcugaucugaa

SEQ ID NO: 152884 - RNA, 22 nt, Artificial Sequence
  Synthetic
cuugaaauguggcugaucugaa

SEQ ID NO: 152885 - RNA, 23 nt, Artificial Sequence
  Synthetic
acuugaaauguggcugaucugaa

SEQ ID NO: 152886 - RNA, 24 nt, Artificial Sequence
  Synthetic
cacuugaaauguggcugaucugaa

SEQ ID NO: 152887 - RNA, 18 nt, Artificial Sequence
  Synthetic
ucaguaaauauuucugaa

SEQ ID NO: 152888 - RNA, 19 nt, Artificial Sequence
  Synthetic
uucaguaaauauuucugaa

SEQ ID NO: 152889 - RNA, 21 nt, Artificial Sequence
  Synthetic
aguucaguaaauauuucugaa

SEQ ID NO: 152890 - RNA, 24 nt, Artificial Sequence
  Synthetic
aggaguucaguaaauauuucugaa

SEQ ID NO: 152891 - RNA, 18 nt, Artificial Sequence
  Synthetic
cagaaauuguguggugaa

SEQ ID NO: 152892 - RNA, 19 nt, Artificial Sequence
  Synthetic
acagaaauuguguggugaa

SEQ ID NO: 152893 - RNA, 20 nt, Artificial Sequence
  Synthetic
aacagaaauuguguggugaa

SEQ ID NO: 152894 - RNA, 18 nt, Artificial Sequence
  Synthetic
uaaaacagauacauugaa

SEQ ID NO: 152895 - RNA, 19 nt, Artificial Sequence
  Synthetic
uuaaaacagauacauugaa

SEQ ID NO: 152896 - RNA, 20 nt, Artificial Sequence
  Synthetic
auuaaaacagauacauugaa

SEQ ID NO: 152897 - RNA, 18 nt, Artificial Sequence
  Synthetic
uuuucuuuaauuauugaa

SEQ ID NO: 152898 - RNA, 20 nt, Artificial Sequence
  Synthetic
uguuuucuuuaauuauugaa

SEQ ID NO: 152899 - RNA, 18 nt, Artificial Sequence
  Synthetic
aaaaaaaaaaaucuugaa

SEQ ID NO: 152900 - RNA, 19 nt, Artificial Sequence
  Synthetic
aaaaaaaaaaaaucuugaa

SEQ ID NO: 152901 - RNA, 20 nt, Artificial Sequence
  Synthetic
aaaaaaaaaaaaaucuugaa

SEQ ID NO: 152902 - RNA, 21 nt, Artificial Sequence
  Synthetic
aaaaaaaaaaaaaaucuugaa

SEQ ID NO: 152903 - RNA, 22 nt, Artificial Sequence
  Synthetic
aaaaaaaaaaaaaaaucuugaa

SEQ ID NO: 152904 - RNA, 23 nt, Artificial Sequence
  Synthetic
aaaaaaaaaaaaaaaaucuugaa

SEQ ID NO: 152905 - RNA, 24 nt, Artificial Sequence
  Synthetic
aaaaaaaaaaaaaaaaaucuugaa

SEQ ID NO: 152906 - RNA, 18 nt, Artificial Sequence
  Synthetic
uuuguuuucuuucuugaa

SEQ ID NO: 152907 - RNA, 19 nt, Artificial Sequence
  Synthetic
uuuuguuuucuuucuugaa

SEQ ID NO: 152908 - RNA, 21 nt, Artificial Sequence
  Synthetic
aauauuucguguacaguugaa

SEQ ID NO: 152909 - RNA, 23 nt, Artificial Sequence
  Synthetic
agaauauuucguguacaguugaa

SEQ ID NO: 152910 - RNA, 18 nt, Artificial Sequence
  Synthetic
ugggaggcagagguugaa

SEQ ID NO: 152911 - RNA, 19 nt, Artificial Sequence
  Synthetic
cugggaggcagagguugaa

SEQ ID NO: 152912 - RNA, 20 nt, Artificial Sequence
  Synthetic
ucugggaggcagagguugaa

SEQ ID NO: 152913 - RNA, 21 nt, Artificial Sequence
  Synthetic
aucugggaggcagagguugaa

SEQ ID NO: 152914 - RNA, 22 nt, Artificial Sequence
  Synthetic
aaucugggaggcagagguugaa

SEQ ID NO: 152915 - RNA, 24 nt, Artificial Sequence
  Synthetic
ugaaucugggaggcagagguugaa

SEQ ID NO: 152916 - RNA, 18 nt, Artificial Sequence
  Synthetic
aagacuuuaaaauuugaa

SEQ ID NO: 152917 - RNA, 19 nt, Artificial Sequence
  Synthetic
uaagacuuuaaaauuugaa

SEQ ID NO: 152918 - RNA, 20 nt, Artificial Sequence
  Synthetic
uuaagacuuuaaaauuugaa

SEQ ID NO: 152919 - RNA, 18 nt, Artificial Sequence
  Synthetic
cacuauugacacuuugaa

SEQ ID NO: 152920 - RNA, 19 nt, Artificial Sequence
  Synthetic
acacuauugacacuuugaa

SEQ ID NO: 152921 - RNA, 20 nt, Artificial Sequence
  Synthetic
aacacuauugacacuuugaa

SEQ ID NO: 152922 - RNA, 19 nt, Artificial Sequence
  Synthetic
uggaagucagaaguuugaa

SEQ ID NO: 152923 - RNA, 20 nt, Artificial Sequence
  Synthetic
uuggaagucagaaguuugaa

SEQ ID NO: 152924 - RNA, 21 nt, Artificial Sequence
  Synthetic
uuuggaagucagaaguuugaa

SEQ ID NO: 152925 - RNA, 22 nt, Artificial Sequence
  Synthetic
uuuuggaagucagaaguuugaa

SEQ ID NO: 152926 - RNA, 24 nt, Artificial Sequence
  Synthetic
aguuuuggaagucagaaguuugaa

SEQ ID NO: 152927 - RNA, 18 nt, Artificial Sequence
  Synthetic
agaaauuggccaaaauaa

SEQ ID NO: 152928 - RNA, 22 nt, Artificial Sequence
  Synthetic
ugggagaaauuggccaaaauaa

SEQ ID NO: 152929 - RNA, 23 nt, Artificial Sequence
  Synthetic
augggagaaauuggccaaaauaa

SEQ ID NO: 152930 - RNA, 24 nt, Artificial Sequence
  Synthetic
aaugggagaaauuggccaaaauaa

SEQ ID NO: 152931 - RNA, 18 nt, Artificial Sequence
  Synthetic
uguugaaugaacaaauaa

SEQ ID NO: 152932 - RNA, 19 nt, Artificial Sequence
  Synthetic
uuguugaaugaacaaauaa

SEQ ID NO: 152933 - RNA, 20 nt, Artificial Sequence
  Synthetic
uuuguugaaugaacaaauaa

SEQ ID NO: 152934 - RNA, 21 nt, Artificial Sequence
  Synthetic
auuuguugaaugaacaaauaa

SEQ ID NO: 152935 - RNA, 22 nt, Artificial Sequence
  Synthetic
uauuuguugaaugaacaaauaa

SEQ ID NO: 152936 - RNA, 23 nt, Artificial Sequence
  Synthetic
auauuuguugaaugaacaaauaa

SEQ ID NO: 152937 - RNA, 24 nt, Artificial Sequence
  Synthetic
aauauuuguugaaugaacaaauaa

SEQ ID NO: 152938 - RNA, 18 nt, Artificial Sequence
  Synthetic
cacacagacuggaaauaa

SEQ ID NO: 152939 - RNA, 19 nt, Artificial Sequence
  Synthetic
acacacagacuggaaauaa

SEQ ID NO: 152940 - RNA, 20 nt, Artificial Sequence
  Synthetic
uacacacagacuggaaauaa

SEQ ID NO: 152941 - RNA, 21 nt, Artificial Sequence
  Synthetic
cuacacacagacuggaaauaa

SEQ ID NO: 152942 - RNA, 23 nt, Artificial Sequence
  Synthetic
agcuacacacagacuggaaauaa

SEQ ID NO: 152943 - RNA, 24 nt, Artificial Sequence
  Synthetic
aagcuacacacagacuggaaauaa

SEQ ID NO: 152944 - RNA, 18 nt, Artificial Sequence
  Synthetic
aguguguugaauaaauaa

SEQ ID NO: 152945 - RNA, 19 nt, Artificial Sequence
  Synthetic
uaguguguugaauaaauaa

SEQ ID NO: 152946 - RNA, 20 nt, Artificial Sequence
  Synthetic
auaguguguugaauaaauaa

SEQ ID NO: 152947 - RNA, 18 nt, Artificial Sequence
  Synthetic
agaagcagagauaaauaa

SEQ ID NO: 152948 - RNA, 18 nt, Artificial Sequence
  Synthetic
cuauacaguuuuaaauaa

SEQ ID NO: 152949 - RNA, 19 nt, Artificial Sequence
  Synthetic
ucuauacaguuuuaaauaa

SEQ ID NO: 152950 - RNA, 20 nt, Artificial Sequence
  Synthetic
uucuauacaguuuuaaauaa

SEQ ID NO: 152951 - RNA, 18 nt, Artificial Sequence
  Synthetic
uauuuugguuuuaaauaa

SEQ ID NO: 152952 - RNA, 19 nt, Artificial Sequence
  Synthetic
auauuuugguuuuaaauaa

SEQ ID NO: 152953 - RNA, 20 nt, Artificial Sequence
  Synthetic
cauauuuugguuuuaaauaa

SEQ ID NO: 152954 - RNA, 18 nt, Artificial Sequence
  Synthetic
uggguauaugcccaauaa

SEQ ID NO: 152955 - RNA, 19 nt, Artificial Sequence
  Synthetic
cuggguauaugcccaauaa

SEQ ID NO: 152956 - RNA, 20 nt, Artificial Sequence
  Synthetic
ucuggguauaugcccaauaa

SEQ ID NO: 152957 - RNA, 21 nt, Artificial Sequence
  Synthetic
cucuggguauaugcccaauaa

SEQ ID NO: 152958 - RNA, 22 nt, Artificial Sequence
  Synthetic
ccucuggguauaugcccaauaa

SEQ ID NO: 152959 - RNA, 23 nt, Artificial Sequence
  Synthetic
uccucuggguauaugcccaauaa

SEQ ID NO: 152960 - RNA, 24 nt, Artificial Sequence
  Synthetic
uuccucuggguauaugcccaauaa

SEQ ID NO: 152961 - RNA, 18 nt, Artificial Sequence
  Synthetic
aauauuaaucaucaauaa

SEQ ID NO: 152962 - RNA, 20 nt, Artificial Sequence
  Synthetic
agaauauuaaucaucaauaa

SEQ ID NO: 152963 - RNA, 21 nt, Artificial Sequence
  Synthetic
uagaauauuaaucaucaauaa

SEQ ID NO: 152964 - RNA, 22 nt, Artificial Sequence
  Synthetic
auagaauauuaaucaucaauaa

SEQ ID NO: 152965 - RNA, 23 nt, Artificial Sequence
  Synthetic
aauagaauauuaaucaucaauaa

SEQ ID NO: 152966 - RNA, 24 nt, Artificial Sequence
  Synthetic
caauagaauauuaaucaucaauaa

SEQ ID NO: 152967 - RNA, 18 nt, Artificial Sequence
  Synthetic
cucauggagacagaauaa

SEQ ID NO: 152968 - RNA, 19 nt, Artificial Sequence
  Synthetic
acucauggagacagaauaa

SEQ ID NO: 152969 - RNA, 20 nt, Artificial Sequence
  Synthetic
aacucauggagacagaauaa

SEQ ID NO: 152970 - RNA, 22 nt, Artificial Sequence
  Synthetic
ugaacucauggagacagaauaa

SEQ ID NO: 152971 - RNA, 23 nt, Artificial Sequence
  Synthetic
uugaacucauggagacagaauaa

SEQ ID NO: 152972 - RNA, 24 nt, Artificial Sequence
  Synthetic
auugaacucauggagacagaauaa

SEQ ID NO: 152973 - RNA, 18 nt, Artificial Sequence
  Synthetic
agacagucuacagaauaa

SEQ ID NO: 152974 - RNA, 19 nt, Artificial Sequence
  Synthetic
cagacagucuacagaauaa

SEQ ID NO: 152975 - RNA, 20 nt, Artificial Sequence
  Synthetic
acagacagucuacagaauaa

SEQ ID NO: 152976 - RNA, 21 nt, Artificial Sequence
  Synthetic
aacagacagucuacagaauaa

SEQ ID NO: 152977 - RNA, 22 nt, Artificial Sequence
  Synthetic
aaacagacagucuacagaauaa

SEQ ID NO: 152978 - RNA, 23 nt, Artificial Sequence
  Synthetic
uaaacagacagucuacagaauaa

SEQ ID NO: 152979 - RNA, 18 nt, Artificial Sequence
  Synthetic
aucugcacuauagaauaa

SEQ ID NO: 152980 - RNA, 19 nt, Artificial Sequence
  Synthetic
aaucugcacuauagaauaa

SEQ ID NO: 152981 - RNA, 20 nt, Artificial Sequence
  Synthetic
uaaucugcacuauagaauaa

SEQ ID NO: 152982 - RNA, 21 nt, Artificial Sequence
  Synthetic
uuaaucugcacuauagaauaa

SEQ ID NO: 152983 - RNA, 22 nt, Artificial Sequence
  Synthetic
cuuaaucugcacuauagaauaa

SEQ ID NO: 152984 - RNA, 23 nt, Artificial Sequence
  Synthetic
acuuaaucugcacuauagaauaa

SEQ ID NO: 152985 - RNA, 19 nt, Artificial Sequence
  Synthetic
agagaaacaaaaggaauaa

SEQ ID NO: 152986 - RNA, 20 nt, Artificial Sequence
  Synthetic
uagagaaacaaaaggaauaa

SEQ ID NO: 152987 - RNA, 18 nt, Artificial Sequence
  Synthetic
aaagauagacaugaauaa

SEQ ID NO: 152988 - RNA, 20 nt, Artificial Sequence
  Synthetic
agaaagauagacaugaauaa

SEQ ID NO: 152989 - RNA, 19 nt, Artificial Sequence
  Synthetic
uggauggguagaugaauaa

SEQ ID NO: 152990 - RNA, 20 nt, Artificial Sequence
  Synthetic
auggauggguagaugaauaa

SEQ ID NO: 152991 - RNA, 23 nt, Artificial Sequence
  Synthetic
uggauggauggguagaugaauaa

SEQ ID NO: 152992 - RNA, 18 nt, Artificial Sequence
  Synthetic
uuacuauauguugaauaa

SEQ ID NO: 152993 - RNA, 19 nt, Artificial Sequence
  Synthetic
auuacuauauguugaauaa

SEQ ID NO: 152994 - RNA, 20 nt, Artificial Sequence
  Synthetic
aauuacuauauguugaauaa

SEQ ID NO: 152995 - RNA, 18 nt, Artificial Sequence
  Synthetic
aaaagaaaaaaauaauaa

SEQ ID NO: 152996 - RNA, 19 nt, Artificial Sequence
  Synthetic
aaaaagaaaaaaauaauaa

SEQ ID NO: 152997 - RNA, 20 nt, Artificial Sequence
  Synthetic
aaaaaagaaaaaaauaauaa

SEQ ID NO: 152998 - RNA, 22 nt, Artificial Sequence
  Synthetic
agaaaaaagaaaaaaauaauaa

SEQ ID NO: 152999 - RNA, 23 nt, Artificial Sequence
  Synthetic
aagaaaaaagaaaaaaauaauaa

SEQ ID NO: 153000 - RNA, 24 nt, Artificial Sequence
  Synthetic
aaagaaaaaagaaaaaaauaauaa

SEQ ID NO: 153001 - RNA, 18 nt, Artificial Sequence
  Synthetic
aucuagaaaaaauaauaa

SEQ ID NO: 153002 - RNA, 19 nt, Artificial Sequence
  Synthetic
aaucuagaaaaaauaauaa

SEQ ID NO: 153003 - RNA, 20 nt, Artificial Sequence
  Synthetic
uaaucuagaaaaaauaauaa

SEQ ID NO: 153004 - RNA, 21 nt, Artificial Sequence
  Synthetic
uuaaucuagaaaaaauaauaa

SEQ ID NO: 153005 - RNA, 22 nt, Artificial Sequence
  Synthetic
uuuaaucuagaaaaaauaauaa

SEQ ID NO: 153006 - RNA, 23 nt, Artificial Sequence
  Synthetic
auuuaaucuagaaaaaauaauaa

SEQ ID NO: 153007 - RNA, 24 nt, Artificial Sequence
  Synthetic
aauuuaaucuagaaaaaauaauaa

SEQ ID NO: 153008 - RNA, 18 nt, Artificial Sequence
  Synthetic
aauagugaaauauaauaa

SEQ ID NO: 153009 - RNA, 19 nt, Artificial Sequence
  Synthetic
uaauagugaaauauaauaa

SEQ ID NO: 153010 - RNA, 20 nt, Artificial Sequence
  Synthetic
auaauagugaaauauaauaa

SEQ ID NO: 153011 - RNA, 18 nt, Artificial Sequence
  Synthetic
ucagaauaaaauuaauaa

SEQ ID NO: 153012 - RNA, 19 nt, Artificial Sequence
  Synthetic
uucagaauaaaauuaauaa

SEQ ID NO: 153013 - RNA, 20 nt, Artificial Sequence
  Synthetic
cuucagaauaaaauuaauaa

SEQ ID NO: 153014 - RNA, 18 nt, Artificial Sequence
  Synthetic
uauuugaugaauuaauaa

SEQ ID NO: 153015 - RNA, 19 nt, Artificial Sequence
  Synthetic
auauuugaugaauuaauaa

SEQ ID NO: 153016 - RNA, 20 nt, Artificial Sequence
  Synthetic
aauauuugaugaauuaauaa

SEQ ID NO: 153017 - RNA, 21 nt, Artificial Sequence
  Synthetic
aaauauuugaugaauuaauaa

SEQ ID NO: 153018 - RNA, 22 nt, Artificial Sequence
  Synthetic
caaauauuugaugaauuaauaa

SEQ ID NO: 153019 - RNA, 23 nt, Artificial Sequence
  Synthetic
acaaauauuugaugaauuaauaa

SEQ ID NO: 153020 - RNA, 24 nt, Artificial Sequence
  Synthetic
uacaaauauuugaugaauuaauaa

SEQ ID NO: 153021 - RNA, 18 nt, Artificial Sequence
  Synthetic
acugaaaauaauuaauaa

SEQ ID NO: 153022 - RNA, 19 nt, Artificial Sequence
  Synthetic
aacugaaaauaauuaauaa

SEQ ID NO: 153023 - RNA, 20 nt, Artificial Sequence
  Synthetic
aaacugaaaauaauuaauaa

SEQ ID NO: 153024 - RNA, 18 nt, Artificial Sequence
  Synthetic
uugaauacauuuuaauaa

SEQ ID NO: 153025 - RNA, 20 nt, Artificial Sequence
  Synthetic
uguugaauacauuuuaauaa

SEQ ID NO: 153026 - RNA, 21 nt, Artificial Sequence
  Synthetic
auguugaauacauuuuaauaa

SEQ ID NO: 153027 - RNA, 22 nt, Artificial Sequence
  Synthetic
aauguugaauacauuuuaauaa

SEQ ID NO: 153028 - RNA, 23 nt, Artificial Sequence
  Synthetic
aaauguugaauacauuuuaauaa

SEQ ID NO: 153029 - RNA, 24 nt, Artificial Sequence
  Synthetic
uaaauguugaauacauuuuaauaa

SEQ ID NO: 153030 - RNA, 18 nt, Artificial Sequence
  Synthetic
aaaaucuuccaaacauaa

SEQ ID NO: 153031 - RNA, 19 nt, Artificial Sequence
  Synthetic
caaaaucuuccaaacauaa

SEQ ID NO: 153032 - RNA, 18 nt, Artificial Sequence
  Synthetic
acacacacaaagacauaa

SEQ ID NO: 153033 - RNA, 19 nt, Artificial Sequence
  Synthetic
cacacacacaaagacauaa

SEQ ID NO: 153034 - RNA, 20 nt, Artificial Sequence
  Synthetic
acacacacacaaagacauaa

SEQ ID NO: 153035 - RNA, 21 nt, Artificial Sequence
  Synthetic
cacacacacacaaagacauaa

SEQ ID NO: 153036 - RNA, 22 nt, Artificial Sequence
  Synthetic
acacacacacacaaagacauaa

SEQ ID NO: 153037 - RNA, 23 nt, Artificial Sequence
  Synthetic
cacacacacacacaaagacauaa

SEQ ID NO: 153038 - RNA, 24 nt, Artificial Sequence
  Synthetic
acacacacacacacaaagacauaa

SEQ ID NO: 153039 - RNA, 21 nt, Artificial Sequence
  Synthetic
uuaagaagggaagugacauaa

SEQ ID NO: 153040 - RNA, 22 nt, Artificial Sequence
  Synthetic
uuuaagaagggaagugacauaa

SEQ ID NO: 153041 - RNA, 23 nt, Artificial Sequence
  Synthetic
uuuuaagaagggaagugacauaa

SEQ ID NO: 153042 - RNA, 24 nt, Artificial Sequence
  Synthetic
auuuuaagaagggaagugacauaa

SEQ ID NO: 153043 - RNA, 19 nt, Artificial Sequence
  Synthetic
ugauacaaaugaaucauaa

SEQ ID NO: 153044 - RNA, 20 nt, Artificial Sequence
  Synthetic
uugauacaaaugaaucauaa

SEQ ID NO: 153045 - RNA, 18 nt, Artificial Sequence
  Synthetic
uuuagcuccaacucauaa

SEQ ID NO: 153046 - RNA, 19 nt, Artificial Sequence
  Synthetic
auuuagcuccaacucauaa

SEQ ID NO: 153047 - RNA, 20 nt, Artificial Sequence
  Synthetic
cauuuagcuccaacucauaa

SEQ ID NO: 153048 - RNA, 21 nt, Artificial Sequence
  Synthetic
acauuuagcuccaacucauaa

SEQ ID NO: 153049 - RNA, 22 nt, Artificial Sequence
  Synthetic
aacauuuagcuccaacucauaa

SEQ ID NO: 153050 - RNA, 23 nt, Artificial Sequence
  Synthetic
uaacauuuagcuccaacucauaa

SEQ ID NO: 153051 - RNA, 24 nt, Artificial Sequence
  Synthetic
cuaacauuuagcuccaacucauaa

SEQ ID NO: 153052 - RNA, 19 nt, Artificial Sequence
  Synthetic
agggaucagguggagauaa

SEQ ID NO: 153053 - RNA, 23 nt, Artificial Sequence
  Synthetic
ugggagggaucagguggagauaa

SEQ ID NO: 153054 - RNA, 24 nt, Artificial Sequence
  Synthetic
cugggagggaucagguggagauaa

SEQ ID NO: 153055 - RNA, 19 nt, Artificial Sequence
  Synthetic
aggcgaaaaaacucgauaa

SEQ ID NO: 153056 - RNA, 20 nt, Artificial Sequence
  Synthetic
aaggcgaaaaaacucgauaa

SEQ ID NO: 153057 - RNA, 21 nt, Artificial Sequence
  Synthetic
aaaggcgaaaaaacucgauaa

SEQ ID NO: 153058 - RNA, 24 nt, Artificial Sequence
  Synthetic
uggaaaggcgaaaaaacucgauaa

SEQ ID NO: 153059 - RNA, 18 nt, Artificial Sequence
  Synthetic
auaaucacaucaggauaa

SEQ ID NO: 153060 - RNA, 19 nt, Artificial Sequence
  Synthetic
aauaaucacaucaggauaa

SEQ ID NO: 153061 - RNA, 20 nt, Artificial Sequence
  Synthetic
uaauaaucacaucaggauaa

SEQ ID NO: 153062 - RNA, 22 nt, Artificial Sequence
  Synthetic
uguaauaaucacaucaggauaa

SEQ ID NO: 153063 - RNA, 24 nt, Artificial Sequence
  Synthetic
uguguaauaaucacaucaggauaa

SEQ ID NO: 153064 - RNA, 19 nt, Artificial Sequence
  Synthetic
agacauuguauaaugauaa

SEQ ID NO: 153065 - RNA, 20 nt, Artificial Sequence
  Synthetic
aagacauuguauaaugauaa

SEQ ID NO: 153066 - RNA, 21 nt, Artificial Sequence
  Synthetic
aaagacauuguauaaugauaa

SEQ ID NO: 153067 - RNA, 23 nt, Artificial Sequence
  Synthetic
agaaagacauuguauaaugauaa

SEQ ID NO: 153068 - RNA, 24 nt, Artificial Sequence
  Synthetic
aagaaagacauuguauaaugauaa

SEQ ID NO: 153069 - RNA, 18 nt, Artificial Sequence
  Synthetic
uuuuuucucaucugauaa

SEQ ID NO: 153070 - RNA, 19 nt, Artificial Sequence
  Synthetic
uuuuuuucucaucugauaa

SEQ ID NO: 153071 - RNA, 20 nt, Artificial Sequence
  Synthetic
uuuuuuuucucaucugauaa

SEQ ID NO: 153072 - RNA, 18 nt, Artificial Sequence
  Synthetic
auguccauugauugauaa

SEQ ID NO: 153073 - RNA, 19 nt, Artificial Sequence
  Synthetic
aauguccauugauugauaa

SEQ ID NO: 153074 - RNA, 20 nt, Artificial Sequence
  Synthetic
aaauguccauugauugauaa

SEQ ID NO: 153075 - RNA, 21 nt, Artificial Sequence
  Synthetic
aaaauguccauugauugauaa

SEQ ID NO: 153076 - RNA, 22 nt, Artificial Sequence
  Synthetic
uaaaauguccauugauugauaa

SEQ ID NO: 153077 - RNA, 23 nt, Artificial Sequence
  Synthetic
cuaaaauguccauugauugauaa

SEQ ID NO: 153078 - RNA, 24 nt, Artificial Sequence
  Synthetic
acuaaaauguccauugauugauaa

SEQ ID NO: 153079 - RNA, 18 nt, Artificial Sequence
  Synthetic
aaaauaauucaaauauaa

SEQ ID NO: 153080 - RNA, 19 nt, Artificial Sequence
  Synthetic
uaaaauaauucaaauauaa

SEQ ID NO: 153081 - RNA, 20 nt, Artificial Sequence
  Synthetic
uuaaaauaauucaaauauaa

SEQ ID NO: 153082 - RNA, 21 nt, Artificial Sequence
  Synthetic
auuaaaauaauucaaauauaa

SEQ ID NO: 153083 - RNA, 22 nt, Artificial Sequence
  Synthetic
aauuaaaauaauucaaauauaa

SEQ ID NO: 153084 - RNA, 24 nt, Artificial Sequence
  Synthetic
agaauuaaaauaauucaaauauaa

SEQ ID NO: 153085 - RNA, 18 nt, Artificial Sequence
  Synthetic
uuauauaaauuaauauaa

SEQ ID NO: 153086 - RNA, 20 nt, Artificial Sequence
  Synthetic
aguuauauaaauuaauauaa

SEQ ID NO: 153087 - RNA, 18 nt, Artificial Sequence
  Synthetic
augugauucaacauauaa

SEQ ID NO: 153088 - RNA, 19 nt, Artificial Sequence
  Synthetic
aaugugauucaacauauaa

SEQ ID NO: 153089 - RNA, 20 nt, Artificial Sequence
  Synthetic
aaaugugauucaacauauaa

SEQ ID NO: 153090 - RNA, 21 nt, Artificial Sequence
  Synthetic
uaaaugugauucaacauauaa

SEQ ID NO: 153091 - RNA, 22 nt, Artificial Sequence
  Synthetic
auaaaugugauucaacauauaa

SEQ ID NO: 153092 - RNA, 23 nt, Artificial Sequence
  Synthetic
aauaaaugugauucaacauauaa

SEQ ID NO: 153093 - RNA, 24 nt, Artificial Sequence
  Synthetic
uaauaaaugugauucaacauauaa

SEQ ID NO: 153094 - RNA, 18 nt, Artificial Sequence
  Synthetic
uauuauugagucauauaa

SEQ ID NO: 153095 - RNA, 19 nt, Artificial Sequence
  Synthetic
auauuauugagucauauaa

SEQ ID NO: 153096 - RNA, 23 nt, Artificial Sequence
  Synthetic
ugggauauuauugagucauauaa

SEQ ID NO: 153097 - RNA, 24 nt, Artificial Sequence
  Synthetic
augggauauuauugagucauauaa

SEQ ID NO: 153098 - RNA, 18 nt, Artificial Sequence
  Synthetic
uuaauuaaaagaguauaa

SEQ ID NO: 153099 - RNA, 19 nt, Artificial Sequence
  Synthetic
auuaauuaaaagaguauaa

SEQ ID NO: 153100 - RNA, 20 nt, Artificial Sequence
  Synthetic
cauuaauuaaaagaguauaa

SEQ ID NO: 153101 - RNA, 21 nt, Artificial Sequence
  Synthetic
acauuaauuaaaagaguauaa

SEQ ID NO: 153102 - RNA, 22 nt, Artificial Sequence
  Synthetic
uacauuaauuaaaagaguauaa

SEQ ID NO: 153103 - RNA, 23 nt, Artificial Sequence
  Synthetic
uuacauuaauuaaaagaguauaa

SEQ ID NO: 153104 - RNA, 24 nt, Artificial Sequence
  Synthetic
uuuacauuaauuaaaagaguauaa

SEQ ID NO: 153105 - RNA, 18 nt, Artificial Sequence
  Synthetic
aaauaaauaagaguauaa

SEQ ID NO: 153106 - RNA, 19 nt, Artificial Sequence
  Synthetic
aaaauaaauaagaguauaa

SEQ ID NO: 153107 - RNA, 20 nt, Artificial Sequence
  Synthetic
aaaaauaaauaagaguauaa

SEQ ID NO: 153108 - RNA, 21 nt, Artificial Sequence
  Synthetic
uaaaaauaaauaagaguauaa

SEQ ID NO: 153109 - RNA, 22 nt, Artificial Sequence
  Synthetic
uuaaaaauaaauaagaguauaa

SEQ ID NO: 153110 - RNA, 23 nt, Artificial Sequence
  Synthetic
uuuaaaaauaaauaagaguauaa

SEQ ID NO: 153111 - RNA, 24 nt, Artificial Sequence
  Synthetic
auuuaaaaauaaauaagaguauaa

SEQ ID NO: 153112 - RNA, 18 nt, Artificial Sequence
  Synthetic
acauuuuaaaauaacuaa

SEQ ID NO: 153113 - RNA, 19 nt, Artificial Sequence
  Synthetic
uacauuuuaaaauaacuaa

SEQ ID NO: 153114 - RNA, 22 nt, Artificial Sequence
  Synthetic
ugguacauuuuaaaauaacuaa

SEQ ID NO: 153115 - RNA, 23 nt, Artificial Sequence
  Synthetic
augguacauuuuaaaauaacuaa

SEQ ID NO: 153116 - RNA, 24 nt, Artificial Sequence
  Synthetic
aaugguacauuuuaaaauaacuaa

SEQ ID NO: 153117 - RNA, 18 nt, Artificial Sequence
  Synthetic
accuagaaaaucagcuaa

SEQ ID NO: 153118 - RNA, 19 nt, Artificial Sequence
  Synthetic
caccuagaaaaucagcuaa

SEQ ID NO: 153119 - RNA, 20 nt, Artificial Sequence
  Synthetic
acaccuagaaaaucagcuaa

SEQ ID NO: 153120 - RNA, 18 nt, Artificial Sequence
  Synthetic
accagcuggcauggcuaa

SEQ ID NO: 153121 - RNA, 19 nt, Artificial Sequence
  Synthetic
caccagcuggcauggcuaa

SEQ ID NO: 153122 - RNA, 20 nt, Artificial Sequence
  Synthetic
acaccagcuggcauggcuaa

SEQ ID NO: 153123 - RNA, 22 nt, Artificial Sequence
  Synthetic
agacaccagcuggcauggcuaa

SEQ ID NO: 153124 - RNA, 18 nt, Artificial Sequence
  Synthetic
aguuuaaguagauucuaa

SEQ ID NO: 153125 - RNA, 19 nt, Artificial Sequence
  Synthetic
uaguuuaaguagauucuaa

SEQ ID NO: 153126 - RNA, 20 nt, Artificial Sequence
  Synthetic
uuaguuuaaguagauucuaa

SEQ ID NO: 153127 - RNA, 18 nt, Artificial Sequence
  Synthetic
uggaggccauuauucuaa

SEQ ID NO: 153128 - RNA, 19 nt, Artificial Sequence
  Synthetic
cuggaggccauuauucuaa

SEQ ID NO: 153129 - RNA, 21 nt, Artificial Sequence
  Synthetic
agcuggaggccauuauucuaa

SEQ ID NO: 153130 - RNA, 22 nt, Artificial Sequence
  Synthetic
cagcuggaggccauuauucuaa

SEQ ID NO: 153131 - RNA, 24 nt, Artificial Sequence
  Synthetic
ugcagcuggaggccauuauucuaa

SEQ ID NO: 153132 - RNA, 18 nt, Artificial Sequence
  Synthetic
cuuuuucucuuuuucuaa

SEQ ID NO: 153133 - RNA, 19 nt, Artificial Sequence
  Synthetic
ucuuuuucucuuuuucuaa

SEQ ID NO: 153134 - RNA, 20 nt, Artificial Sequence
  Synthetic
uucuuuuucucuuuuucuaa

SEQ ID NO: 153135 - RNA, 22 nt, Artificial Sequence
  Synthetic
uguucuuuuucucuuuuucuaa

SEQ ID NO: 153136 - RNA, 23 nt, Artificial Sequence
  Synthetic
cuguucuuuuucucuuuuucuaa

SEQ ID NO: 153137 - RNA, 24 nt, Artificial Sequence
  Synthetic
ucuguucuuuuucucuuuuucuaa

SEQ ID NO: 153138 - RNA, 19 nt, Artificial Sequence
  Synthetic
agaaaaggaaaaaaaguaa

SEQ ID NO: 153139 - RNA, 20 nt, Artificial Sequence
  Synthetic
aagaaaaggaaaaaaaguaa

SEQ ID NO: 153140 - RNA, 18 nt, Artificial Sequence
  Synthetic
auauuacuuuaaaaguaa

SEQ ID NO: 153141 - RNA, 19 nt, Artificial Sequence
  Synthetic
aauauuacuuuaaaaguaa

SEQ ID NO: 153142 - RNA, 18 nt, Artificial Sequence
  Synthetic
ugcauagacugaaaguaa

SEQ ID NO: 153143 - RNA, 19 nt, Artificial Sequence
  Synthetic
augcauagacugaaaguaa

SEQ ID NO: 153144 - RNA, 20 nt, Artificial Sequence
  Synthetic
caugcauagacugaaaguaa

SEQ ID NO: 153145 - RNA, 21 nt, Artificial Sequence
  Synthetic
acaugcauagacugaaaguaa

SEQ ID NO: 153146 - RNA, 24 nt, Artificial Sequence
  Synthetic
aggacaugcauagacugaaaguaa

SEQ ID NO: 153147 - RNA, 18 nt, Artificial Sequence
  Synthetic
ugggagagagagaaguaa

SEQ ID NO: 153148 - RNA, 18 nt, Artificial Sequence
  Synthetic
caugggaggggacaguaa

SEQ ID NO: 153149 - RNA, 19 nt, Artificial Sequence
  Synthetic
acaugggaggggacaguaa

SEQ ID NO: 153150 - RNA, 20 nt, Artificial Sequence
  Synthetic
aacaugggaggggacaguaa

SEQ ID NO: 153151 - RNA, 23 nt, Artificial Sequence
  Synthetic
uggaacaugggaggggacaguaa

SEQ ID NO: 153152 - RNA, 24 nt, Artificial Sequence
  Synthetic
auggaacaugggaggggacaguaa

SEQ ID NO: 153153 - RNA, 18 nt, Artificial Sequence
  Synthetic
uggguauauaaccaguaa

SEQ ID NO: 153154 - RNA, 19 nt, Artificial Sequence
  Synthetic
uuggguauauaaccaguaa

SEQ ID NO: 153155 - RNA, 20 nt, Artificial Sequence
  Synthetic
uuuggguauauaaccaguaa

SEQ ID NO: 153156 - RNA, 21 nt, Artificial Sequence
  Synthetic
cuuuggguauauaaccaguaa

SEQ ID NO: 153157 - RNA, 22 nt, Artificial Sequence
  Synthetic
ccuuuggguauauaaccaguaa

SEQ ID NO: 153158 - RNA, 23 nt, Artificial Sequence
  Synthetic
uccuuuggguauauaaccaguaa

SEQ ID NO: 153159 - RNA, 24 nt, Artificial Sequence
  Synthetic
auccuuuggguauauaaccaguaa

SEQ ID NO: 153160 - RNA, 21 nt, Artificial Sequence
  Synthetic
cuuuggguauauacccaguaa

SEQ ID NO: 153161 - RNA, 22 nt, Artificial Sequence
  Synthetic
ccuuuggguauauacccaguaa

SEQ ID NO: 153162 - RNA, 23 nt, Artificial Sequence
  Synthetic
uccuuuggguauauacccaguaa

SEQ ID NO: 153163 - RNA, 24 nt, Artificial Sequence
  Synthetic
auccuuuggguauauacccaguaa

SEQ ID NO: 153164 - RNA, 21 nt, Artificial Sequence
  Synthetic
acuuuuagcuggaugcaguaa

SEQ ID NO: 153165 - RNA, 24 nt, Artificial Sequence
  Synthetic
uggacuuuuagcuggaugcaguaa

SEQ ID NO: 153166 - RNA, 18 nt, Artificial Sequence
  Synthetic
uggauauauacucaguaa

SEQ ID NO: 153167 - RNA, 19 nt, Artificial Sequence
  Synthetic
uuggauauauacucaguaa

SEQ ID NO: 153168 - RNA, 20 nt, Artificial Sequence
  Synthetic
uuuggauauauacucaguaa

SEQ ID NO: 153169 - RNA, 21 nt, Artificial Sequence
  Synthetic
uuuuggauauauacucaguaa

SEQ ID NO: 153170 - RNA, 22 nt, Artificial Sequence
  Synthetic
cuuuuggauauauacucaguaa

SEQ ID NO: 153171 - RNA, 23 nt, Artificial Sequence
  Synthetic
acuuuuggauauauacucaguaa

SEQ ID NO: 153172 - RNA, 24 nt, Artificial Sequence
  Synthetic
uacuuuuggauauauacucaguaa

SEQ ID NO: 153173 - RNA, 18 nt, Artificial Sequence
  Synthetic
uggauaucuacucaguaa

SEQ ID NO: 153174 - RNA, 19 nt, Artificial Sequence
  Synthetic
uuggauaucuacucaguaa

SEQ ID NO: 153175 - RNA, 20 nt, Artificial Sequence
  Synthetic
uuuggauaucuacucaguaa

SEQ ID NO: 153176 - RNA, 21 nt, Artificial Sequence
  Synthetic
uuuuggauaucuacucaguaa

SEQ ID NO: 153177 - RNA, 22 nt, Artificial Sequence
  Synthetic
cuuuuggauaucuacucaguaa

SEQ ID NO: 153178 - RNA, 23 nt, Artificial Sequence
  Synthetic
ucuuuuggauaucuacucaguaa

SEQ ID NO: 153179 - RNA, 24 nt, Artificial Sequence
  Synthetic
uucuuuuggauaucuacucaguaa

SEQ ID NO: 153180 - RNA, 18 nt, Artificial Sequence
  Synthetic
ugugauacauauacguaa

SEQ ID NO: 153181 - RNA, 19 nt, Artificial Sequence
  Synthetic
augugauacauauacguaa

SEQ ID NO: 153182 - RNA, 20 nt, Artificial Sequence
  Synthetic
aaugugauacauauacguaa

SEQ ID NO: 153183 - RNA, 21 nt, Artificial Sequence
  Synthetic
aaaugugauacauauacguaa

SEQ ID NO: 153184 - RNA, 22 nt, Artificial Sequence
  Synthetic
aaaaugugauacauauacguaa

SEQ ID NO: 153185 - RNA, 24 nt, Artificial Sequence
  Synthetic
agaaaaugugauacauauacguaa

SEQ ID NO: 153186 - RNA, 18 nt, Artificial Sequence
  Synthetic
aaagaauucagaagguaa

SEQ ID NO: 153187 - RNA, 19 nt, Artificial Sequence
  Synthetic
uaaagaauucagaagguaa

SEQ ID NO: 153188 - RNA, 20 nt, Artificial Sequence
  Synthetic
auaaagaauucagaagguaa

SEQ ID NO: 153189 - RNA, 20 nt, Artificial Sequence
  Synthetic
agggauccagugggagguaa

SEQ ID NO: 153190 - RNA, 24 nt, Artificial Sequence
  Synthetic
ugggagggauccagugggagguaa

SEQ ID NO: 153191 - RNA, 19 nt, Artificial Sequence
  Synthetic
aggaccucgugggagguaa

SEQ ID NO: 153192 - RNA, 20 nt, Artificial Sequence
  Synthetic
aaggaccucgugggagguaa

SEQ ID NO: 153193 - RNA, 24 nt, Artificial Sequence
  Synthetic
ugggaaggaccucgugggagguaa

SEQ ID NO: 153194 - RNA, 18 nt, Artificial Sequence
  Synthetic
ugaccuggugggagguaa

SEQ ID NO: 153195 - RNA, 20 nt, Artificial Sequence
  Synthetic
agugaccuggugggagguaa

SEQ ID NO: 153196 - RNA, 24 nt, Artificial Sequence
  Synthetic
ugggagugaccuggugggagguaa

SEQ ID NO: 153197 - RNA, 20 nt, Artificial Sequence
  Synthetic
agggaccaugugggagguaa

SEQ ID NO: 153198 - RNA, 24 nt, Artificial Sequence
  Synthetic
ugggagggaccaugugggagguaa

SEQ ID NO: 153199 - RNA, 23 nt, Artificial Sequence
  Synthetic
agggagagaccagguggagguaa

SEQ ID NO: 153200 - RNA, 24 nt, Artificial Sequence
  Synthetic
aagggagagaccagguggagguaa

SEQ ID NO: 153201 - RNA, 19 nt, Artificial Sequence
  Synthetic
agaggcuauguggagguaa

SEQ ID NO: 153202 - RNA, 22 nt, Artificial Sequence
  Synthetic
aggagaggcuauguggagguaa

SEQ ID NO: 153203 - RNA, 23 nt, Artificial Sequence
  Synthetic
aaggagaggcuauguggagguaa

SEQ ID NO: 153204 - RNA, 24 nt, Artificial Sequence
  Synthetic
aaaggagaggcuauguggagguaa

SEQ ID NO: 153205 - RNA, 20 nt, Artificial Sequence
  Synthetic
agggacccaguuggagguaa

SEQ ID NO: 153206 - RNA, 22 nt, Artificial Sequence
  Synthetic
ugagggacccaguuggagguaa

SEQ ID NO: 153207 - RNA, 24 nt, Artificial Sequence
  Synthetic
ugugagggacccaguuggagguaa

SEQ ID NO: 153208 - RNA, 19 nt, Artificial Sequence
  Synthetic
ugcacucuagccuggguaa

SEQ ID NO: 153209 - RNA, 20 nt, Artificial Sequence
  Synthetic
cugcacucuagccuggguaa

SEQ ID NO: 153210 - RNA, 21 nt, Artificial Sequence
  Synthetic
acugcacucuagccuggguaa

SEQ ID NO: 153211 - RNA, 22 nt, Artificial Sequence
  Synthetic
cacugcacucuagccuggguaa

SEQ ID NO: 153212 - RNA, 23 nt, Artificial Sequence
  Synthetic
ccacugcacucuagccuggguaa

SEQ ID NO: 153213 - RNA, 24 nt, Artificial Sequence
  Synthetic
accacugcacucuagccuggguaa

SEQ ID NO: 153214 - RNA, 20 nt, Artificial Sequence
  Synthetic
aggccauuacauaaugguaa

SEQ ID NO: 153215 - RNA, 21 nt, Artificial Sequence
  Synthetic
aaggccauuacauaaugguaa

SEQ ID NO: 153216 - RNA, 23 nt, Artificial Sequence
  Synthetic
agaaggccauuacauaaugguaa

SEQ ID NO: 153217 - RNA, 24 nt, Artificial Sequence
  Synthetic
aagaaggccauuacauaaugguaa

SEQ ID NO: 153218 - RNA, 18 nt, Artificial Sequence
  Synthetic
uaauuauuuuaaauguaa

SEQ ID NO: 153219 - RNA, 19 nt, Artificial Sequence
  Synthetic
uuaauuauuuuaaauguaa

SEQ ID NO: 153220 - RNA, 20 nt, Artificial Sequence
  Synthetic
auuaauuauuuuaaauguaa

SEQ ID NO: 153221 - RNA, 18 nt, Artificial Sequence
  Synthetic
cuguuggugggaauguaa

SEQ ID NO: 153222 - RNA, 19 nt, Artificial Sequence
  Synthetic
acuguuggugggaauguaa

SEQ ID NO: 153223 - RNA, 20 nt, Artificial Sequence
  Synthetic
cacuguuggugggaauguaa

SEQ ID NO: 153224 - RNA, 22 nt, Artificial Sequence
  Synthetic
ugcacuguuggugggaauguaa

SEQ ID NO: 153225 - RNA, 23 nt, Artificial Sequence
  Synthetic
augcacuguuggugggaauguaa

SEQ ID NO: 153226 - RNA, 24 nt, Artificial Sequence
  Synthetic
uaugcacuguuggugggaauguaa

SEQ ID NO: 153227 - RNA, 21 nt, Artificial Sequence
  Synthetic
uguaauagagagugaguguaa

SEQ ID NO: 153228 - RNA, 22 nt, Artificial Sequence
  Synthetic
uuguaauagagagugaguguaa

SEQ ID NO: 153229 - RNA, 23 nt, Artificial Sequence
  Synthetic
uuuguaauagagagugaguguaa

SEQ ID NO: 153230 - RNA, 24 nt, Artificial Sequence
  Synthetic
uuuuguaauagagagugaguguaa

SEQ ID NO: 153231 - RNA, 18 nt, Artificial Sequence
  Synthetic
uggagccugaagguguaa

SEQ ID NO: 153232 - RNA, 20 nt, Artificial Sequence
  Synthetic
aguggagccugaagguguaa

SEQ ID NO: 153233 - RNA, 18 nt, Artificial Sequence
  Synthetic
uauuauacugaaaauuaa

SEQ ID NO: 153234 - RNA, 19 nt, Artificial Sequence
  Synthetic
uuauuauacugaaaauuaa

SEQ ID NO: 153235 - RNA, 20 nt, Artificial Sequence
  Synthetic
uuuauuauacugaaaauuaa

SEQ ID NO: 153236 - RNA, 22 nt, Artificial Sequence
  Synthetic
aguuuauuauacugaaaauuaa

SEQ ID NO: 153237 - RNA, 23 nt, Artificial Sequence
  Synthetic
aaguuuauuauacugaaaauuaa

SEQ ID NO: 153238 - RNA, 24 nt, Artificial Sequence
  Synthetic
aaaguuuauuauacugaaaauuaa

SEQ ID NO: 153239 - RNA, 18 nt, Artificial Sequence
  Synthetic
agauagagaagaaauuaa

SEQ ID NO: 153240 - RNA, 19 nt, Artificial Sequence
  Synthetic
uagauagagaagaaauuaa

SEQ ID NO: 153241 - RNA, 18 nt, Artificial Sequence
  Synthetic
uaacaaauuugaaauuaa

SEQ ID NO: 153242 - RNA, 19 nt, Artificial Sequence
  Synthetic
uuaacaaauuugaaauuaa

SEQ ID NO: 153243 - RNA, 20 nt, Artificial Sequence
  Synthetic
auuaacaaauuugaaauuaa

SEQ ID NO: 153244 - RNA, 21 nt, Artificial Sequence
  Synthetic
aauuaacaaauuugaaauuaa

SEQ ID NO: 153245 - RNA, 23 nt, Artificial Sequence
  Synthetic
agaauuaacaaauuugaaauuaa

SEQ ID NO: 153246 - RNA, 24 nt, Artificial Sequence
  Synthetic
aagaauuaacaaauuugaaauuaa

SEQ ID NO: 153247 - RNA, 18 nt, Artificial Sequence
  Synthetic
agcaaaggaaacaauuaa

SEQ ID NO: 153248 - RNA, 19 nt, Artificial Sequence
  Synthetic
cagcaaaggaaacaauuaa

SEQ ID NO: 153249 - RNA, 20 nt, Artificial Sequence
  Synthetic
acagcaaaggaaacaauuaa

SEQ ID NO: 153250 - RNA, 21 nt, Artificial Sequence
  Synthetic
cacagcaaaggaaacaauuaa

SEQ ID NO: 153251 - RNA, 23 nt, Artificial Sequence
  Synthetic
ugcacagcaaaggaaacaauuaa

SEQ ID NO: 153252 - RNA, 24 nt, Artificial Sequence
  Synthetic
uugcacagcaaaggaaacaauuaa

SEQ ID NO: 153253 - RNA, 18 nt, Artificial Sequence
  Synthetic
ugagcaugucucaauuaa

SEQ ID NO: 153254 - RNA, 19 nt, Artificial Sequence
  Synthetic
uugagcaugucucaauuaa

SEQ ID NO: 153255 - RNA, 18 nt, Artificial Sequence
  Synthetic
auucauuaugagaauuaa

SEQ ID NO: 153256 - RNA, 20 nt, Artificial Sequence
  Synthetic
agauucauuaugagaauuaa

SEQ ID NO: 153257 - RNA, 21 nt, Artificial Sequence
  Synthetic
cagauucauuaugagaauuaa

SEQ ID NO: 153258 - RNA, 22 nt, Artificial Sequence
  Synthetic
ucagauucauuaugagaauuaa

SEQ ID NO: 153259 - RNA, 23 nt, Artificial Sequence
  Synthetic
cucagauucauuaugagaauuaa

SEQ ID NO: 153260 - RNA, 24 nt, Artificial Sequence
  Synthetic
ucucagauucauuaugagaauuaa

SEQ ID NO: 153261 - RNA, 18 nt, Artificial Sequence
  Synthetic
uauggaaugcugaauuaa

SEQ ID NO: 153262 - RNA, 19 nt, Artificial Sequence
  Synthetic
auauggaaugcugaauuaa

SEQ ID NO: 153263 - RNA, 20 nt, Artificial Sequence
  Synthetic
uauauggaaugcugaauuaa

SEQ ID NO: 153264 - RNA, 18 nt, Artificial Sequence
  Synthetic
acauuuuacauuaauuaa

SEQ ID NO: 153265 - RNA, 19 nt, Artificial Sequence
  Synthetic
uacauuuuacauuaauuaa

SEQ ID NO: 153266 - RNA, 21 nt, Artificial Sequence
  Synthetic
uguacauuuuacauuaauuaa

SEQ ID NO: 153267 - RNA, 22 nt, Artificial Sequence
  Synthetic
uuguacauuuuacauuaauuaa

SEQ ID NO: 153268 - RNA, 23 nt, Artificial Sequence
  Synthetic
auuguacauuuuacauuaauuaa

SEQ ID NO: 153269 - RNA, 24 nt, Artificial Sequence
  Synthetic
aauuguacauuuuacauuaauuaa

SEQ ID NO: 153270 - RNA, 18 nt, Artificial Sequence
  Synthetic
uuuuauuuuacccauuaa

SEQ ID NO: 153271 - RNA, 19 nt, Artificial Sequence
  Synthetic
auuuuauuuuacccauuaa

SEQ ID NO: 153272 - RNA, 20 nt, Artificial Sequence
  Synthetic
uauuuuauuuuacccauuaa

SEQ ID NO: 153273 - RNA, 18 nt, Artificial Sequence
  Synthetic
ucguugaacaaauauuaa

SEQ ID NO: 153274 - RNA, 19 nt, Artificial Sequence
  Synthetic
uucguugaacaaauauuaa

SEQ ID NO: 153275 - RNA, 19 nt, Artificial Sequence
  Synthetic
ugcacuuaaaauuuauuaa

SEQ ID NO: 153276 - RNA, 21 nt, Artificial Sequence
  Synthetic
ugugcacuuaaaauuuauuaa

SEQ ID NO: 153277 - RNA, 22 nt, Artificial Sequence
  Synthetic
uugugcacuuaaaauuuauuaa

SEQ ID NO: 153278 - RNA, 23 nt, Artificial Sequence
  Synthetic
auugugcacuuaaaauuuauuaa

SEQ ID NO: 153279 - RNA, 24 nt, Artificial Sequence
  Synthetic
uauugugcacuuaaaauuuauuaa

SEQ ID NO: 153280 - RNA, 20 nt, Artificial Sequence
  Synthetic
aggcaaugaauauuuauuaa

SEQ ID NO: 153281 - RNA, 18 nt, Artificial Sequence
  Synthetic
cauaggaaugcaucuuaa

SEQ ID NO: 153282 - RNA, 19 nt, Artificial Sequence
  Synthetic
acauaggaaugcaucuuaa

SEQ ID NO: 153283 - RNA, 20 nt, Artificial Sequence
  Synthetic
uacauaggaaugcaucuuaa

SEQ ID NO: 153284 - RNA, 18 nt, Artificial Sequence
  Synthetic
auuauuccuuuuucuuaa

SEQ ID NO: 153285 - RNA, 19 nt, Artificial Sequence
  Synthetic
uauuauuccuuuuucuuaa

SEQ ID NO: 153286 - RNA, 20 nt, Artificial Sequence
  Synthetic
uuauuauuccuuuuucuuaa

SEQ ID NO: 153287 - RNA, 18 nt, Artificial Sequence
  Synthetic
aaauaaaaaaacaguuaa

SEQ ID NO: 153288 - RNA, 19 nt, Artificial Sequence
  Synthetic
aaaauaaaaaaacaguuaa

SEQ ID NO: 153289 - RNA, 20 nt, Artificial Sequence
  Synthetic
aaaaauaaaaaaacaguuaa

SEQ ID NO: 153290 - RNA, 21 nt, Artificial Sequence
  Synthetic
uaaaaauaaaaaaacaguuaa

SEQ ID NO: 153291 - RNA, 22 nt, Artificial Sequence
  Synthetic
auaaaaauaaaaaaacaguuaa

SEQ ID NO: 153292 - RNA, 23 nt, Artificial Sequence
  Synthetic
aauaaaaauaaaaaaacaguuaa

SEQ ID NO: 153293 - RNA, 24 nt, Artificial Sequence
  Synthetic
aaauaaaaauaaaaaaacaguuaa

SEQ ID NO: 153294 - RNA, 21 nt, Artificial Sequence
  Synthetic
uugaaguaauaugggaguuaa

SEQ ID NO: 153295 - RNA, 22 nt, Artificial Sequence
  Synthetic
cuugaaguaauaugggaguuaa

SEQ ID NO: 153296 - RNA, 24 nt, Artificial Sequence
  Synthetic
ugcuugaaguaauaugggaguuaa

SEQ ID NO: 153297 - RNA, 18 nt, Artificial Sequence
  Synthetic
uuugaaaaguugaguuaa

SEQ ID NO: 153298 - RNA, 19 nt, Artificial Sequence
  Synthetic
uuuugaaaaguugaguuaa

SEQ ID NO: 153299 - RNA, 20 nt, Artificial Sequence
  Synthetic
uuuuugaaaaguugaguuaa

SEQ ID NO: 153300 - RNA, 18 nt, Artificial Sequence
  Synthetic
agggguaauuaagguuaa

SEQ ID NO: 153301 - RNA, 19 nt, Artificial Sequence
  Synthetic
aagggguaauuaagguuaa

SEQ ID NO: 153302 - RNA, 20 nt, Artificial Sequence
  Synthetic
aaagggguaauuaagguuaa

SEQ ID NO: 153303 - RNA, 21 nt, Artificial Sequence
  Synthetic
uaaagggguaauuaagguuaa

SEQ ID NO: 153304 - RNA, 22 nt, Artificial Sequence
  Synthetic
uuaaagggguaauuaagguuaa

SEQ ID NO: 153305 - RNA, 23 nt, Artificial Sequence
  Synthetic
uuuaaagggguaauuaagguuaa

SEQ ID NO: 153306 - RNA, 24 nt, Artificial Sequence
  Synthetic
cuuuaaagggguaauuaagguuaa

SEQ ID NO: 153307 - RNA, 21 nt, Artificial Sequence
  Synthetic
uauuauaaaaacagugguuaa

SEQ ID NO: 153308 - RNA, 22 nt, Artificial Sequence
  Synthetic
auauuauaaaaacagugguuaa

SEQ ID NO: 153309 - RNA, 24 nt, Artificial Sequence
  Synthetic
agauauuauaaaaacagugguuaa

SEQ ID NO: 153310 - RNA, 18 nt, Artificial Sequence
  Synthetic
uuuguguuuauauguuaa

SEQ ID NO: 153311 - RNA, 19 nt, Artificial Sequence
  Synthetic
cuuuguguuuauauguuaa

SEQ ID NO: 153312 - RNA, 21 nt, Artificial Sequence
  Synthetic
cgcuuuguguuuauauguuaa

SEQ ID NO: 153313 - RNA, 22 nt, Artificial Sequence
  Synthetic
acgcuuuguguuuauauguuaa

SEQ ID NO: 153314 - RNA, 23 nt, Artificial Sequence
  Synthetic
cacgcuuuguguuuauauguuaa

SEQ ID NO: 153315 - RNA, 24 nt, Artificial Sequence
  Synthetic
acacgcuuuguguuuauauguuaa

SEQ ID NO: 153316 - RNA, 18 nt, Artificial Sequence
  Synthetic
ucaaaacauguuuguuaa

SEQ ID NO: 153317 - RNA, 19 nt, Artificial Sequence
  Synthetic
cucaaaacauguuuguuaa

SEQ ID NO: 153318 - RNA, 21 nt, Artificial Sequence
  Synthetic
ugcucaaaacauguuuguuaa

SEQ ID NO: 153319 - RNA, 23 nt, Artificial Sequence
  Synthetic
agugcucaaaacauguuuguuaa

SEQ ID NO: 153320 - RNA, 24 nt, Artificial Sequence
  Synthetic
cagugcucaaaacauguuuguuaa

SEQ ID NO: 153321 - RNA, 18 nt, Artificial Sequence
  Synthetic
cugcugaaacaaauuuaa

SEQ ID NO: 153322 - RNA, 20 nt, Artificial Sequence
  Synthetic
agcugcugaaacaaauuuaa

SEQ ID NO: 153323 - RNA, 20 nt, Artificial Sequence
  Synthetic
agguuuauauugcaauuuaa

SEQ ID NO: 153324 - RNA, 18 nt, Artificial Sequence
  Synthetic
uuucucauuuacauuuaa

SEQ ID NO: 153325 - RNA, 19 nt, Artificial Sequence
  Synthetic
auuucucauuuacauuuaa

SEQ ID NO: 153326 - RNA, 20 nt, Artificial Sequence
  Synthetic
uauuucucauuuacauuuaa

SEQ ID NO: 153327 - RNA, 18 nt, Artificial Sequence
  Synthetic
aaaaagucacauauuuaa

SEQ ID NO: 153328 - RNA, 19 nt, Artificial Sequence
  Synthetic
uaaaaagucacauauuuaa

SEQ ID NO: 153329 - RNA, 20 nt, Artificial Sequence
  Synthetic
uuaaaaagucacauauuuaa

SEQ ID NO: 153330 - RNA, 21 nt, Artificial Sequence
  Synthetic
uuuaaaaagucacauauuuaa

SEQ ID NO: 153331 - RNA, 22 nt, Artificial Sequence
  Synthetic
auuuaaaaagucacauauuuaa

SEQ ID NO: 153332 - RNA, 23 nt, Artificial Sequence
  Synthetic
uauuuaaaaagucacauauuuaa

SEQ ID NO: 153333 - RNA, 24 nt, Artificial Sequence
  Synthetic
uuauuuaaaaagucacauauuuaa

SEQ ID NO: 153334 - RNA, 18 nt, Artificial Sequence
  Synthetic
uugaauuguucacuuuaa

SEQ ID NO: 153335 - RNA, 19 nt, Artificial Sequence
  Synthetic
auugaauuguucacuuuaa

SEQ ID NO: 153336 - RNA, 21 nt, Artificial Sequence
  Synthetic
cgauugaauuguucacuuuaa

SEQ ID NO: 153337 - RNA, 22 nt, Artificial Sequence
  Synthetic
acgauugaauuguucacuuuaa

SEQ ID NO: 153338 - RNA, 23 nt, Artificial Sequence
  Synthetic
uacgauugaauuguucacuuuaa

SEQ ID NO: 153339 - RNA, 24 nt, Artificial Sequence
  Synthetic
auacgauugaauuguucacuuuaa

SEQ ID NO: 153340 - RNA, 19 nt, Artificial Sequence
  Synthetic
uguaaucccaccauuuuaa

SEQ ID NO: 153341 - RNA, 20 nt, Artificial Sequence
  Synthetic
cuguaaucccaccauuuuaa

SEQ ID NO: 153342 - RNA, 21 nt, Artificial Sequence
  Synthetic
ucuguaaucccaccauuuuaa

SEQ ID NO: 153343 - RNA, 22 nt, Artificial Sequence
  Synthetic
aucuguaaucccaccauuuuaa

SEQ ID NO: 153344 - RNA, 23 nt, Artificial Sequence
  Synthetic
uaucuguaaucccaccauuuuaa

SEQ ID NO: 153345 - RNA, 24 nt, Artificial Sequence
  Synthetic
auaucuguaaucccaccauuuuaa

SEQ ID NO: 153346 - RNA, 18 nt, Artificial Sequence
  Synthetic
auaaauaauauauuuuaa

SEQ ID NO: 153347 - RNA, 19 nt, Artificial Sequence
  Synthetic
uauaaauaauauauuuuaa

SEQ ID NO: 153348 - RNA, 20 nt, Artificial Sequence
  Synthetic
uuauaaauaauauauuuuaa

SEQ ID NO: 153349 - RNA, 18 nt, Artificial Sequence
  Synthetic
aauaauaguuuauuuuaa

SEQ ID NO: 153350 - RNA, 19 nt, Artificial Sequence
  Synthetic
aaauaauaguuuauuuuaa

SEQ ID NO: 153351 - RNA, 20 nt, Artificial Sequence
  Synthetic
uaaauaauaguuuauuuuaa

SEQ ID NO: 153352 - RNA, 18 nt, Artificial Sequence
  Synthetic
aacauuuaauauuuuuaa

SEQ ID NO: 153353 - RNA, 19 nt, Artificial Sequence
  Synthetic
uaacauuuaauauuuuuaa

SEQ ID NO: 153354 - RNA, 18 nt, Artificial Sequence
  Synthetic
uuuacuguuuguaaaaca

SEQ ID NO: 153355 - RNA, 19 nt, Artificial Sequence
  Synthetic
uuuuacuguuuguaaaaca

SEQ ID NO: 153356 - RNA, 20 nt, Artificial Sequence
  Synthetic
auuuuacuguuuguaaaaca

SEQ ID NO: 153357 - RNA, 19 nt, Artificial Sequence
  Synthetic
uggauauccaaaacaaaca

SEQ ID NO: 153358 - RNA, 20 nt, Artificial Sequence
  Synthetic
cuggauauccaaaacaaaca

SEQ ID NO: 153359 - RNA, 18 nt, Artificial Sequence
  Synthetic
aaaaguaugaaacaaaca

SEQ ID NO: 153360 - RNA, 19 nt, Artificial Sequence
  Synthetic
aaaaaguaugaaacaaaca

SEQ ID NO: 153361 - RNA, 20 nt, Artificial Sequence
  Synthetic
aaaaaaguaugaaacaaaca

SEQ ID NO: 153362 - RNA, 21 nt, Artificial Sequence
  Synthetic
aaaaaaaguaugaaacaaaca

SEQ ID NO: 153363 - RNA, 22 nt, Artificial Sequence
  Synthetic
aaaaaaaaguaugaaacaaaca

SEQ ID NO: 153364 - RNA, 23 nt, Artificial Sequence
  Synthetic
aaaaaaaaaguaugaaacaaaca

SEQ ID NO: 153365 - RNA, 24 nt, Artificial Sequence
  Synthetic
aaaaaaaaaaguaugaaacaaaca

SEQ ID NO: 153366 - RNA, 21 nt, Artificial Sequence
  Synthetic
acuauauuauuaagacaaaca

SEQ ID NO: 153367 - RNA, 22 nt, Artificial Sequence
  Synthetic
uacuauauuauuaagacaaaca

SEQ ID NO: 153368 - RNA, 23 nt, Artificial Sequence
  Synthetic
auacuauauuauuaagacaaaca

SEQ ID NO: 153369 - RNA, 24 nt, Artificial Sequence
  Synthetic
cauacuauauuauuaagacaaaca

SEQ ID NO: 153370 - RNA, 18 nt, Artificial Sequence
  Synthetic
aaaagugggagcuaaaca

SEQ ID NO: 153371 - RNA, 19 nt, Artificial Sequence
  Synthetic
uaaaagugggagcuaaaca

SEQ ID NO: 153372 - RNA, 20 nt, Artificial Sequence
  Synthetic
uuaaaagugggagcuaaaca

SEQ ID NO: 153373 - RNA, 21 nt, Artificial Sequence
  Synthetic
cuuaaaagugggagcuaaaca

SEQ ID NO: 153374 - RNA, 23 nt, Artificial Sequence
  Synthetic
cgcuuaaaagugggagcuaaaca

SEQ ID NO: 153375 - RNA, 24 nt, Artificial Sequence
  Synthetic
ucgcuuaaaagugggagcuaaaca

SEQ ID NO: 153376 - RNA, 18 nt, Artificial Sequence
  Synthetic
uauaaguggagcuaaaca

SEQ ID NO: 153377 - RNA, 19 nt, Artificial Sequence
  Synthetic
uuauaaguggagcuaaaca

SEQ ID NO: 153378 - RNA, 20 nt, Artificial Sequence
  Synthetic
cuuauaaguggagcuaaaca

SEQ ID NO: 153379 - RNA, 21 nt, Artificial Sequence
  Synthetic
acuuauaaguggagcuaaaca

SEQ ID NO: 153380 - RNA, 22 nt, Artificial Sequence
  Synthetic
cacuuauaaguggagcuaaaca

SEQ ID NO: 153381 - RNA, 23 nt, Artificial Sequence
  Synthetic
ucacuuauaaguggagcuaaaca

SEQ ID NO: 153382 - RNA, 24 nt, Artificial Sequence
  Synthetic
cucacuuauaaguggagcuaaaca

SEQ ID NO: 153383 - RNA, 18 nt, Artificial Sequence
  Synthetic
caggcacugugcuaaaca

SEQ ID NO: 153384 - RNA, 19 nt, Artificial Sequence
  Synthetic
ucaggcacugugcuaaaca

SEQ ID NO: 153385 - RNA, 20 nt, Artificial Sequence
  Synthetic
aucaggcacugugcuaaaca

SEQ ID NO: 153386 - RNA, 18 nt, Artificial Sequence
  Synthetic
aaaaaauguauuuaaaca

SEQ ID NO: 153387 - RNA, 19 nt, Artificial Sequence
  Synthetic
aaaaaaauguauuuaaaca

SEQ ID NO: 153388 - RNA, 20 nt, Artificial Sequence
  Synthetic
aaaaaaaauguauuuaaaca

SEQ ID NO: 153389 - RNA, 20 nt, Artificial Sequence
  Synthetic
uggagggcauuuuaacaaca

SEQ ID NO: 153390 - RNA, 18 nt, Artificial Sequence
  Synthetic
aauguugaaaugacaaca

SEQ ID NO: 153391 - RNA, 19 nt, Artificial Sequence
  Synthetic
caauguugaaaugacaaca

SEQ ID NO: 153392 - RNA, 20 nt, Artificial Sequence
  Synthetic
acaauguugaaaugacaaca

SEQ ID NO: 153393 - RNA, 21 nt, Artificial Sequence
  Synthetic
aacaauguugaaaugacaaca

SEQ ID NO: 153394 - RNA, 22 nt, Artificial Sequence
  Synthetic
aaacaauguugaaaugacaaca

SEQ ID NO: 153395 - RNA, 23 nt, Artificial Sequence
  Synthetic
uaaacaauguugaaaugacaaca

SEQ ID NO: 153396 - RNA, 19 nt, Artificial Sequence
  Synthetic
ugggguuggagccccaaca

SEQ ID NO: 153397 - RNA, 21 nt, Artificial Sequence
  Synthetic
ugugggguuggagccccaaca

SEQ ID NO: 153398 - RNA, 22 nt, Artificial Sequence
  Synthetic
augugggguuggagccccaaca

SEQ ID NO: 153399 - RNA, 23 nt, Artificial Sequence
  Synthetic
aaugugggguuggagccccaaca

SEQ ID NO: 153400 - RNA, 24 nt, Artificial Sequence
  Synthetic
aaaugugggguuggagccccaaca

SEQ ID NO: 153401 - RNA, 21 nt, Artificial Sequence
  Synthetic
aaauuccucagucuggcaaca

SEQ ID NO: 153402 - RNA, 22 nt, Artificial Sequence
  Synthetic
aaaauuccucagucuggcaaca

SEQ ID NO: 153403 - RNA, 23 nt, Artificial Sequence
  Synthetic
caaaauuccucagucuggcaaca

SEQ ID NO: 153404 - RNA, 24 nt, Artificial Sequence
  Synthetic
ucaaaauuccucagucuggcaaca

SEQ ID NO: 153405 - RNA, 18 nt, Artificial Sequence
  Synthetic
cucucccuucucucaaca

SEQ ID NO: 153406 - RNA, 19 nt, Artificial Sequence
  Synthetic
ccucucccuucucucaaca

SEQ ID NO: 153407 - RNA, 20 nt, Artificial Sequence
  Synthetic
cccucucccuucucucaaca

SEQ ID NO: 153408 - RNA, 19 nt, Artificial Sequence
  Synthetic
agaacaaauggaaagaaca

SEQ ID NO: 153409 - RNA, 20 nt, Artificial Sequence
  Synthetic
cagaacaaauggaaagaaca

SEQ ID NO: 153410 - RNA, 21 nt, Artificial Sequence
  Synthetic
acagaacaaauggaaagaaca

SEQ ID NO: 153411 - RNA, 22 nt, Artificial Sequence
  Synthetic
aacagaacaaauggaaagaaca

SEQ ID NO: 153412 - RNA, 23 nt, Artificial Sequence
  Synthetic
aaacagaacaaauggaaagaaca

SEQ ID NO: 153413 - RNA, 24 nt, Artificial Sequence
  Synthetic
aaaacagaacaaauggaaagaaca

SEQ ID NO: 153414 - RNA, 18 nt, Artificial Sequence
  Synthetic
acaguauuauaaagaaca

SEQ ID NO: 153415 - RNA, 19 nt, Artificial Sequence
  Synthetic
aacaguauuauaaagaaca

SEQ ID NO: 153416 - RNA, 20 nt, Artificial Sequence
  Synthetic
aaacaguauuauaaagaaca

SEQ ID NO: 153417 - RNA, 18 nt, Artificial Sequence
  Synthetic
cacuuauaagugagaaca

SEQ ID NO: 153418 - RNA, 19 nt, Artificial Sequence
  Synthetic
ucacuuauaagugagaaca

SEQ ID NO: 153419 - RNA, 20 nt, Artificial Sequence
  Synthetic
uucacuuauaagugagaaca

SEQ ID NO: 153420 - RNA, 21 nt, Artificial Sequence
  Synthetic
uuucacuuauaagugagaaca

SEQ ID NO: 153421 - RNA, 22 nt, Artificial Sequence
  Synthetic
cuuucacuuauaagugagaaca

SEQ ID NO: 153422 - RNA, 23 nt, Artificial Sequence
  Synthetic
ucuuucacuuauaagugagaaca

SEQ ID NO: 153423 - RNA, 18 nt, Artificial Sequence
  Synthetic
uagaggaagaaaggaaca

SEQ ID NO: 153424 - RNA, 19 nt, Artificial Sequence
  Synthetic
auagaggaagaaaggaaca

SEQ ID NO: 153425 - RNA, 20 nt, Artificial Sequence
  Synthetic
aauagaggaagaaaggaaca

SEQ ID NO: 153426 - RNA, 21 nt, Artificial Sequence
  Synthetic
caauagaggaagaaaggaaca

SEQ ID NO: 153427 - RNA, 23 nt, Artificial Sequence
  Synthetic
agcaauagaggaagaaaggaaca

SEQ ID NO: 153428 - RNA, 24 nt, Artificial Sequence
  Synthetic
cagcaauagaggaagaaaggaaca

SEQ ID NO: 153429 - RNA, 18 nt, Artificial Sequence
  Synthetic
uaaaugaaguaaugaaca

SEQ ID NO: 153430 - RNA, 19 nt, Artificial Sequence
  Synthetic
uuaaaugaaguaaugaaca

SEQ ID NO: 153431 - RNA, 20 nt, Artificial Sequence
  Synthetic
auuaaaugaaguaaugaaca

SEQ ID NO: 153432 - RNA, 18 nt, Artificial Sequence
  Synthetic
ucuuccaauucaugaaca

SEQ ID NO: 153433 - RNA, 20 nt, Artificial Sequence
  Synthetic
agucuuccaauucaugaaca

SEQ ID NO: 153434 - RNA, 22 nt, Artificial Sequence
  Synthetic
ugagucuuccaauucaugaaca

SEQ ID NO: 153435 - RNA, 23 nt, Artificial Sequence
  Synthetic
uugagucuuccaauucaugaaca

SEQ ID NO: 153436 - RNA, 24 nt, Artificial Sequence
  Synthetic
auugagucuuccaauucaugaaca

SEQ ID NO: 153437 - RNA, 22 nt, Artificial Sequence
  Synthetic
aggaaagcccaucagacuaaca

SEQ ID NO: 153438 - RNA, 23 nt, Artificial Sequence
  Synthetic
aaggaaagcccaucagacuaaca

SEQ ID NO: 153439 - RNA, 24 nt, Artificial Sequence
  Synthetic
aaaggaaagcccaucagacuaaca

SEQ ID NO: 153440 - RNA, 18 nt, Artificial Sequence
  Synthetic
ucuuccuuuccauuaaca

SEQ ID NO: 153441 - RNA, 19 nt, Artificial Sequence
  Synthetic
uucuuccuuuccauuaaca

SEQ ID NO: 153442 - RNA, 20 nt, Artificial Sequence
  Synthetic
auucuuccuuuccauuaaca

SEQ ID NO: 153443 - RNA, 22 nt, Artificial Sequence
  Synthetic
ugauucuuccuuuccauuaaca

SEQ ID NO: 153444 - RNA, 23 nt, Artificial Sequence
  Synthetic
uugauucuuccuuuccauuaaca

SEQ ID NO: 153445 - RNA, 24 nt, Artificial Sequence
  Synthetic
auugauucuuccuuuccauuaaca

SEQ ID NO: 153446 - RNA, 18 nt, Artificial Sequence
  Synthetic
aacugaaauaaaaacaca

SEQ ID NO: 153447 - RNA, 19 nt, Artificial Sequence
  Synthetic
uaacugaaauaaaaacaca

SEQ ID NO: 153448 - RNA, 20 nt, Artificial Sequence
  Synthetic
uuaacugaaauaaaaacaca

SEQ ID NO: 153449 - RNA, 21 nt, Artificial Sequence
  Synthetic
aucaaaaagguugauaacaca

SEQ ID NO: 153450 - RNA, 23 nt, Artificial Sequence
  Synthetic
agaucaaaaagguugauaacaca

SEQ ID NO: 153451 - RNA, 24 nt, Artificial Sequence
  Synthetic
aagaucaaaaagguugauaacaca

SEQ ID NO: 153452 - RNA, 21 nt, Artificial Sequence
  Synthetic
uuuuuucucccuuagcacaca

SEQ ID NO: 153453 - RNA, 22 nt, Artificial Sequence
  Synthetic
uuuuuuucucccuuagcacaca

SEQ ID NO: 153454 - RNA, 23 nt, Artificial Sequence
  Synthetic
auuuuuuucucccuuagcacaca

SEQ ID NO: 153455 - RNA, 24 nt, Artificial Sequence
  Synthetic
cauuuuuuucucccuuagcacaca

SEQ ID NO: 153456 - RNA, 18 nt, Artificial Sequence
  Synthetic
auggagauaacagacaca

SEQ ID NO: 153457 - RNA, 20 nt, Artificial Sequence
  Synthetic
agauggagauaacagacaca

SEQ ID NO: 153458 - RNA, 18 nt, Artificial Sequence
  Synthetic
aaaaccaagaaauacaca

SEQ ID NO: 153459 - RNA, 19 nt, Artificial Sequence
  Synthetic
caaaaccaagaaauacaca

SEQ ID NO: 153460 - RNA, 20 nt, Artificial Sequence
  Synthetic
acaaaaccaagaaauacaca

SEQ ID NO: 153461 - RNA, 18 nt, Artificial Sequence
  Synthetic
aaacaguauguauacaca

SEQ ID NO: 153462 - RNA, 19 nt, Artificial Sequence
  Synthetic
uaaacaguauguauacaca

SEQ ID NO: 153463 - RNA, 20 nt, Artificial Sequence
  Synthetic
uuaaacaguauguauacaca

SEQ ID NO: 153464 - RNA, 21 nt, Artificial Sequence
  Synthetic
cuuaaacaguauguauacaca

SEQ ID NO: 153465 - RNA, 22 nt, Artificial Sequence
  Synthetic
ucuuaaacaguauguauacaca

SEQ ID NO: 153466 - RNA, 23 nt, Artificial Sequence
  Synthetic
uucuuaaacaguauguauacaca

SEQ ID NO: 153467 - RNA, 24 nt, Artificial Sequence
  Synthetic
uuucuuaaacaguauguauacaca

SEQ ID NO: 153468 - RNA, 21 nt, Artificial Sequence
  Synthetic
cuguauauucucaccaccaca

SEQ ID NO: 153469 - RNA, 23 nt, Artificial Sequence
  Synthetic
ugcuguauauucucaccaccaca

SEQ ID NO: 153470 - RNA, 24 nt, Artificial Sequence
  Synthetic
uugcuguauauucucaccaccaca

SEQ ID NO: 153471 - RNA, 18 nt, Artificial Sequence
  Synthetic
caguaaauugguaccaca

SEQ ID NO: 153472 - RNA, 19 nt, Artificial Sequence
  Synthetic
acaguaaauugguaccaca

SEQ ID NO: 153473 - RNA, 20 nt, Artificial Sequence
  Synthetic
uacaguaaauugguaccaca

SEQ ID NO: 153474 - RNA, 21 nt, Artificial Sequence
  Synthetic
auacaguaaauugguaccaca

SEQ ID NO: 153475 - RNA, 22 nt, Artificial Sequence
  Synthetic
aauacaguaaauugguaccaca

SEQ ID NO: 153476 - RNA, 23 nt, Artificial Sequence
  Synthetic
uaauacaguaaauugguaccaca

SEQ ID NO: 153477 - RNA, 24 nt, Artificial Sequence
  Synthetic
cuaauacaguaaauugguaccaca

SEQ ID NO: 153478 - RNA, 19 nt, Artificial Sequence
  Synthetic
cguauaugaaaaacccaca

SEQ ID NO: 153479 - RNA, 20 nt, Artificial Sequence
  Synthetic
ccguauaugaaaaacccaca

SEQ ID NO: 153480 - RNA, 21 nt, Artificial Sequence
  Synthetic
accguauaugaaaaacccaca

SEQ ID NO: 153481 - RNA, 22 nt, Artificial Sequence
  Synthetic
aaccguauaugaaaaacccaca

SEQ ID NO: 153482 - RNA, 23 nt, Artificial Sequence
  Synthetic
aaaccguauaugaaaaacccaca

SEQ ID NO: 153483 - RNA, 24 nt, Artificial Sequence
  Synthetic
aaaaccguauaugaaaaacccaca

SEQ ID NO: 153484 - RNA, 19 nt, Artificial Sequence
  Synthetic
ugggguuggagcccccaca

SEQ ID NO: 153485 - RNA, 21 nt, Artificial Sequence
  Synthetic
ugugggguuggagcccccaca

SEQ ID NO: 153486 - RNA, 22 nt, Artificial Sequence
  Synthetic
augugggguuggagcccccaca

SEQ ID NO: 153487 - RNA, 23 nt, Artificial Sequence
  Synthetic
aaugugggguuggagcccccaca

SEQ ID NO: 153488 - RNA, 24 nt, Artificial Sequence
  Synthetic
aaaugugggguuggagcccccaca

SEQ ID NO: 153489 - RNA, 21 nt, Artificial Sequence
  Synthetic
uauccauuggcuuuggccaca

SEQ ID NO: 153490 - RNA, 23 nt, Artificial Sequence
  Synthetic
aguauccauuggcuuuggccaca

SEQ ID NO: 153491 - RNA, 24 nt, Artificial Sequence
  Synthetic
aaguauccauuggcuuuggccaca

SEQ ID NO: 153492 - RNA, 19 nt, Artificial Sequence
  Synthetic
uguggaauggaauuccaca

SEQ ID NO: 153493 - RNA, 20 nt, Artificial Sequence
  Synthetic
auguggaauggaauuccaca

SEQ ID NO: 153494 - RNA, 18 nt, Artificial Sequence
  Synthetic
cccaaacugcuuuccaca

SEQ ID NO: 153495 - RNA, 19 nt, Artificial Sequence
  Synthetic
ccccaaacugcuuuccaca

SEQ ID NO: 153496 - RNA, 20 nt, Artificial Sequence
  Synthetic
uccccaaacugcuuuccaca

SEQ ID NO: 153497 - RNA, 21 nt, Artificial Sequence
  Synthetic
auccccaaacugcuuuccaca

SEQ ID NO: 153498 - RNA, 22 nt, Artificial Sequence
  Synthetic
aauccccaaacugcuuuccaca

SEQ ID NO: 153499 - RNA, 23 nt, Artificial Sequence
  Synthetic
aaauccccaaacugcuuuccaca

SEQ ID NO: 153500 - RNA, 18 nt, Artificial Sequence
  Synthetic
uuuuuuuuuuuuuccaca

SEQ ID NO: 153501 - RNA, 19 nt, Artificial Sequence
  Synthetic
cuuuuuuuuuuuuuccaca

SEQ ID NO: 153502 - RNA, 20 nt, Artificial Sequence
  Synthetic
ucuuuuuuuuuuuuuccaca

SEQ ID NO: 153503 - RNA, 22 nt, Artificial Sequence
  Synthetic
ugucuuuuuuuuuuuuuccaca

SEQ ID NO: 153504 - RNA, 23 nt, Artificial Sequence
  Synthetic
uugucuuuuuuuuuuuuuccaca

SEQ ID NO: 153505 - RNA, 24 nt, Artificial Sequence
  Synthetic
uuugucuuuuuuuuuuuuuccaca

SEQ ID NO: 153506 - RNA, 18 nt, Artificial Sequence
  Synthetic
uacauuguuuguagcaca

SEQ ID NO: 153507 - RNA, 19 nt, Artificial Sequence
  Synthetic
uuacauuguuuguagcaca

SEQ ID NO: 153508 - RNA, 20 nt, Artificial Sequence
  Synthetic
auuacauuguuuguagcaca

SEQ ID NO: 153509 - RNA, 21 nt, Artificial Sequence
  Synthetic
aauuacauuguuuguagcaca

SEQ ID NO: 153510 - RNA, 22 nt, Artificial Sequence
  Synthetic
caauuacauuguuuguagcaca

SEQ ID NO: 153511 - RNA, 23 nt, Artificial Sequence
  Synthetic
acaauuacauuguuuguagcaca

SEQ ID NO: 153512 - RNA, 24 nt, Artificial Sequence
  Synthetic
uacaauuacauuguuuguagcaca

SEQ ID NO: 153513 - RNA, 18 nt, Artificial Sequence
  Synthetic
ugugcuagauauugcaca

SEQ ID NO: 153514 - RNA, 19 nt, Artificial Sequence
  Synthetic
augugcuagauauugcaca

SEQ ID NO: 153515 - RNA, 20 nt, Artificial Sequence
  Synthetic
uaugugcuagauauugcaca

SEQ ID NO: 153516 - RNA, 18 nt, Artificial Sequence
  Synthetic
caccauuauaguaucaca

SEQ ID NO: 153517 - RNA, 19 nt, Artificial Sequence
  Synthetic
ccaccauuauaguaucaca

SEQ ID NO: 153518 - RNA, 20 nt, Artificial Sequence
  Synthetic
uccaccauuauaguaucaca

SEQ ID NO: 153519 - RNA, 21 nt, Artificial Sequence
  Synthetic
auccaccauuauaguaucaca

SEQ ID NO: 153520 - RNA, 22 nt, Artificial Sequence
  Synthetic
uauccaccauuauaguaucaca

SEQ ID NO: 153521 - RNA, 18 nt, Artificial Sequence
  Synthetic
caaauuacccaucucaca

SEQ ID NO: 153522 - RNA, 20 nt, Artificial Sequence
  Synthetic
ugcaaauuacccaucucaca

SEQ ID NO: 153523 - RNA, 21 nt, Artificial Sequence
  Synthetic
uugcaaauuacccaucucaca

SEQ ID NO: 153524 - RNA, 22 nt, Artificial Sequence
  Synthetic
uuugcaaauuacccaucucaca

SEQ ID NO: 153525 - RNA, 23 nt, Artificial Sequence
  Synthetic
auuugcaaauuacccaucucaca

SEQ ID NO: 153526 - RNA, 24 nt, Artificial Sequence
  Synthetic
uauuugcaaauuacccaucucaca

SEQ ID NO: 153527 - RNA, 18 nt, Artificial Sequence
  Synthetic
uuaaaaaagaaaaagaca

SEQ ID NO: 153528 - RNA, 20 nt, Artificial Sequence
  Synthetic
uguuaaaaaagaaaaagaca

SEQ ID NO: 153529 - RNA, 18 nt, Artificial Sequence
  Synthetic
uucccaauaccaaagaca

SEQ ID NO: 153530 - RNA, 19 nt, Artificial Sequence
  Synthetic
auucccaauaccaaagaca

SEQ ID NO: 153531 - RNA, 20 nt, Artificial Sequence
  Synthetic
uauucccaauaccaaagaca

SEQ ID NO: 153532 - RNA, 21 nt, Artificial Sequence
  Synthetic
cuauucccaauaccaaagaca

SEQ ID NO: 153533 - RNA, 22 nt, Artificial Sequence
  Synthetic
acuauucccaauaccaaagaca

SEQ ID NO: 153534 - RNA, 23 nt, Artificial Sequence
  Synthetic
cacuauucccaauaccaaagaca

SEQ ID NO: 153535 - RNA, 18 nt, Artificial Sequence
  Synthetic
uucacaauagcaaagaca

SEQ ID NO: 153536 - RNA, 19 nt, Artificial Sequence
  Synthetic
auucacaauagcaaagaca

SEQ ID NO: 153537 - RNA, 20 nt, Artificial Sequence
  Synthetic
uauucacaauagcaaagaca

SEQ ID NO: 153538 - RNA, 21 nt, Artificial Sequence
  Synthetic
cuauucacaauagcaaagaca

SEQ ID NO: 153539 - RNA, 22 nt, Artificial Sequence
  Synthetic
acuauucacaauagcaaagaca

SEQ ID NO: 153540 - RNA, 23 nt, Artificial Sequence
  Synthetic
cacuauucacaauagcaaagaca

SEQ ID NO: 153541 - RNA, 23 nt, Artificial Sequence
  Synthetic
ugcuauucacaauagcaaagaca

SEQ ID NO: 153542 - RNA, 18 nt, Artificial Sequence
  Synthetic
aggaaaaggaggaagaca

SEQ ID NO: 153543 - RNA, 20 nt, Artificial Sequence
  Synthetic
ugaggaaaaggaggaagaca

SEQ ID NO: 153544 - RNA, 18 nt, Artificial Sequence
  Synthetic
ugcagcauauaucagaca

SEQ ID NO: 153545 - RNA, 19 nt, Artificial Sequence
  Synthetic
uugcagcauauaucagaca

SEQ ID NO: 153546 - RNA, 20 nt, Artificial Sequence
  Synthetic
uuugcagcauauaucagaca

SEQ ID NO: 153547 - RNA, 21 nt, Artificial Sequence
  Synthetic
auuugcagcauauaucagaca

SEQ ID NO: 153548 - RNA, 22 nt, Artificial Sequence
  Synthetic
uauuugcagcauauaucagaca

SEQ ID NO: 153549 - RNA, 23 nt, Artificial Sequence
  Synthetic
auauuugcagcauauaucagaca

SEQ ID NO: 153550 - RNA, 24 nt, Artificial Sequence
  Synthetic
aauauuugcagcauauaucagaca

SEQ ID NO: 153551 - RNA, 18 nt, Artificial Sequence
  Synthetic
uggaaaggagaagagaca

SEQ ID NO: 153552 - RNA, 20 nt, Artificial Sequence
  Synthetic
uguggaaaggagaagagaca

SEQ ID NO: 153553 - RNA, 18 nt, Artificial Sequence
  Synthetic
acuugaaccugggagaca

SEQ ID NO: 153554 - RNA, 19 nt, Artificial Sequence
  Synthetic
cacuugaaccugggagaca

SEQ ID NO: 153555 - RNA, 20 nt, Artificial Sequence
  Synthetic
ucacuugaaccugggagaca

SEQ ID NO: 153556 - RNA, 21 nt, Artificial Sequence
  Synthetic
aucacuugaaccugggagaca

SEQ ID NO: 153557 - RNA, 22 nt, Artificial Sequence
  Synthetic
aaucacuugaaccugggagaca

SEQ ID NO: 153558 - RNA, 24 nt, Artificial Sequence
  Synthetic
agaaucacuugaaccugggagaca

SEQ ID NO: 153559 - RNA, 18 nt, Artificial Sequence
  Synthetic
uuaaaaaaaaaugagaca

SEQ ID NO: 153560 - RNA, 19 nt, Artificial Sequence
  Synthetic
auuaaaaaaaaaugagaca

SEQ ID NO: 153561 - RNA, 20 nt, Artificial Sequence
  Synthetic
uauuaaaaaaaaaugagaca

SEQ ID NO: 153562 - RNA, 18 nt, Artificial Sequence
  Synthetic
aacaaugauacugagaca

SEQ ID NO: 153563 - RNA, 19 nt, Artificial Sequence
  Synthetic
aaacaaugauacugagaca

SEQ ID NO: 153564 - RNA, 20 nt, Artificial Sequence
  Synthetic
aaaacaaugauacugagaca

SEQ ID NO: 153565 - RNA, 18 nt, Artificial Sequence
  Synthetic
acucgggaggcugagaca

SEQ ID NO: 153566 - RNA, 19 nt, Artificial Sequence
  Synthetic
cacucgggaggcugagaca

SEQ ID NO: 153567 - RNA, 20 nt, Artificial Sequence
  Synthetic
ccacucgggaggcugagaca

SEQ ID NO: 153568 - RNA, 22 nt, Artificial Sequence
  Synthetic
agccacucgggaggcugagaca

SEQ ID NO: 153569 - RNA, 23 nt, Artificial Sequence
  Synthetic
cagccacucgggaggcugagaca

SEQ ID NO: 153570 - RNA, 24 nt, Artificial Sequence
  Synthetic
ccagccacucgggaggcugagaca

SEQ ID NO: 153571 - RNA, 18 nt, Artificial Sequence
  Synthetic
ugaccuggaugugagaca

SEQ ID NO: 153572 - RNA, 20 nt, Artificial Sequence
  Synthetic
cgugaccuggaugugagaca

SEQ ID NO: 153573 - RNA, 22 nt, Artificial Sequence
  Synthetic
agcgugaccuggaugugagaca

SEQ ID NO: 153574 - RNA, 23 nt, Artificial Sequence
  Synthetic
cagcgugaccuggaugugagaca

SEQ ID NO: 153575 - RNA, 24 nt, Artificial Sequence
  Synthetic
ucagcgugaccuggaugugagaca

SEQ ID NO: 153576 - RNA, 18 nt, Artificial Sequence
  Synthetic
auuauaaaauuauagaca

SEQ ID NO: 153577 - RNA, 19 nt, Artificial Sequence
  Synthetic
aauuauaaaauuauagaca

SEQ ID NO: 153578 - RNA, 21 nt, Artificial Sequence
  Synthetic
ugaauuauaaaauuauagaca

SEQ ID NO: 153579 - RNA, 22 nt, Artificial Sequence
  Synthetic
augaauuauaaaauuauagaca

SEQ ID NO: 153580 - RNA, 24 nt, Artificial Sequence
  Synthetic
ugaugaauuauaaaauuauagaca

SEQ ID NO: 153581 - RNA, 18 nt, Artificial Sequence
  Synthetic
ugacaaugcuucuggaca

SEQ ID NO: 153582 - RNA, 19 nt, Artificial Sequence
  Synthetic
cugacaaugcuucuggaca

SEQ ID NO: 153583 - RNA, 20 nt, Artificial Sequence
  Synthetic
acugacaaugcuucuggaca

SEQ ID NO: 153584 - RNA, 18 nt, Artificial Sequence
  Synthetic
ucucacagaaaccugaca

SEQ ID NO: 153585 - RNA, 19 nt, Artificial Sequence
  Synthetic
uucucacagaaaccugaca

SEQ ID NO: 153586 - RNA, 20 nt, Artificial Sequence
  Synthetic
uuucucacagaaaccugaca

SEQ ID NO: 153587 - RNA, 18 nt, Artificial Sequence
  Synthetic
ucuugccaucaugugaca

SEQ ID NO: 153588 - RNA, 19 nt, Artificial Sequence
  Synthetic
uucuugccaucaugugaca

SEQ ID NO: 153589 - RNA, 20 nt, Artificial Sequence
  Synthetic
cuucuugccaucaugugaca

SEQ ID NO: 153590 - RNA, 21 nt, Artificial Sequence
  Synthetic
ccuucuugccaucaugugaca

SEQ ID NO: 153591 - RNA, 22 nt, Artificial Sequence
  Synthetic
uccuucuugccaucaugugaca

SEQ ID NO: 153592 - RNA, 23 nt, Artificial Sequence
  Synthetic
cuccuucuugccaucaugugaca

SEQ ID NO: 153593 - RNA, 24 nt, Artificial Sequence
  Synthetic
ucuccuucuugccaucaugugaca

SEQ ID NO: 153594 - RNA, 18 nt, Artificial Sequence
  Synthetic
caugcuguucuugugaca

SEQ ID NO: 153595 - RNA, 19 nt, Artificial Sequence
  Synthetic
ucaugcuguucuugugaca

SEQ ID NO: 153596 - RNA, 20 nt, Artificial Sequence
  Synthetic
cucaugcuguucuugugaca

SEQ ID NO: 153597 - RNA, 21 nt, Artificial Sequence
  Synthetic
ccucaugcuguucuugugaca

SEQ ID NO: 153598 - RNA, 22 nt, Artificial Sequence
  Synthetic
cccucaugcuguucuugugaca

SEQ ID NO: 153599 - RNA, 23 nt, Artificial Sequence
  Synthetic
acccucaugcuguucuugugaca

SEQ ID NO: 153600 - RNA, 24 nt, Artificial Sequence
  Synthetic
uacccucaugcuguucuugugaca

SEQ ID NO: 153601 - RNA, 18 nt, Artificial Sequence
  Synthetic
uauuauuuucuauugaca

SEQ ID NO: 153602 - RNA, 19 nt, Artificial Sequence
  Synthetic
uuauuauuuucuauugaca

SEQ ID NO: 153603 - RNA, 20 nt, Artificial Sequence
  Synthetic
uuuauuauuuucuauugaca

SEQ ID NO: 153604 - RNA, 19 nt, Artificial Sequence
  Synthetic
ugacagaaaacaaaauaca

SEQ ID NO: 153605 - RNA, 20 nt, Artificial Sequence
  Synthetic
uugacagaaaacaaaauaca

SEQ ID NO: 153606 - RNA, 18 nt, Artificial Sequence
  Synthetic
ucauuuauucaaaauaca

SEQ ID NO: 153607 - RNA, 19 nt, Artificial Sequence
  Synthetic
uucauuuauucaaaauaca

SEQ ID NO: 153608 - RNA, 20 nt, Artificial Sequence
  Synthetic
auucauuuauucaaaauaca

SEQ ID NO: 153609 - RNA, 18 nt, Artificial Sequence
  Synthetic
cacagaaaagaaaauaca

SEQ ID NO: 153610 - RNA, 19 nt, Artificial Sequence
  Synthetic
ucacagaaaagaaaauaca

SEQ ID NO: 153611 - RNA, 20 nt, Artificial Sequence
  Synthetic
uucacagaaaagaaaauaca

SEQ ID NO: 153612 - RNA, 22 nt, Artificial Sequence
  Synthetic
aguucacagaaaagaaaauaca

SEQ ID NO: 153613 - RNA, 23 nt, Artificial Sequence
  Synthetic
caguucacagaaaagaaaauaca

SEQ ID NO: 153614 - RNA, 24 nt, Artificial Sequence
  Synthetic
acaguucacagaaaagaaaauaca

SEQ ID NO: 153615 - RNA, 18 nt, Artificial Sequence
  Synthetic
ugauaacacagaaauaca

SEQ ID NO: 153616 - RNA, 19 nt, Artificial Sequence
  Synthetic
cugauaacacagaaauaca

SEQ ID NO: 153617 - RNA, 20 nt, Artificial Sequence
  Synthetic
acugauaacacagaaauaca

SEQ ID NO: 153618 - RNA, 22 nt, Artificial Sequence
  Synthetic
ugacugauaacacagaaauaca

SEQ ID NO: 153619 - RNA, 23 nt, Artificial Sequence
  Synthetic
augacugauaacacagaaauaca

SEQ ID NO: 153620 - RNA, 24 nt, Artificial Sequence
  Synthetic
uaugacugauaacacagaaauaca

SEQ ID NO: 153621 - RNA, 18 nt, Artificial Sequence
  Synthetic
uauauuuaaaauaauaca

SEQ ID NO: 153622 - RNA, 19 nt, Artificial Sequence
  Synthetic
uuauauuuaaaauaauaca

SEQ ID NO: 153623 - RNA, 19 nt, Artificial Sequence
  Synthetic
aggaaaaugaacuaauaca

SEQ ID NO: 153624 - RNA, 20 nt, Artificial Sequence
  Synthetic
uaggaaaaugaacuaauaca

SEQ ID NO: 153625 - RNA, 22 nt, Artificial Sequence
  Synthetic
aguaggaaaaugaacuaauaca

SEQ ID NO: 153626 - RNA, 23 nt, Artificial Sequence
  Synthetic
caguaggaaaaugaacuaauaca

SEQ ID NO: 153627 - RNA, 18 nt, Artificial Sequence
  Synthetic
uuguguuauauacauaca

SEQ ID NO: 153628 - RNA, 19 nt, Artificial Sequence
  Synthetic
auuguguuauauacauaca

SEQ ID NO: 153629 - RNA, 20 nt, Artificial Sequence
  Synthetic
cauuguguuauauacauaca

SEQ ID NO: 153630 - RNA, 21 nt, Artificial Sequence
  Synthetic
acauuguguuauauacauaca

SEQ ID NO: 153631 - RNA, 22 nt, Artificial Sequence
  Synthetic
uacauuguguuauauacauaca

SEQ ID NO: 153632 - RNA, 23 nt, Artificial Sequence
  Synthetic
auacauuguguuauauacauaca

SEQ ID NO: 153633 - RNA, 24 nt, Artificial Sequence
  Synthetic
uauacauuguguuauauacauaca

SEQ ID NO: 153634 - RNA, 18 nt, Artificial Sequence
  Synthetic
auauuauucagccauaca

SEQ ID NO: 153635 - RNA, 22 nt, Artificial Sequence
  Synthetic
ugggauauuauucagccauaca

SEQ ID NO: 153636 - RNA, 23 nt, Artificial Sequence
  Synthetic
augggauauuauucagccauaca

SEQ ID NO: 153637 - RNA, 24 nt, Artificial Sequence
  Synthetic
caugggauauuauucagccauaca

SEQ ID NO: 153638 - RNA, 18 nt, Artificial Sequence
  Synthetic
uauaauaaaagagauaca

SEQ ID NO: 153639 - RNA, 19 nt, Artificial Sequence
  Synthetic
uuauaauaaaagagauaca

SEQ ID NO: 153640 - RNA, 20 nt, Artificial Sequence
  Synthetic
auuauaauaaaagagauaca

SEQ ID NO: 153641 - RNA, 21 nt, Artificial Sequence
  Synthetic
aauuauaauaaaagagauaca

SEQ ID NO: 153642 - RNA, 22 nt, Artificial Sequence
  Synthetic
aaauuauaauaaaagagauaca

SEQ ID NO: 153643 - RNA, 24 nt, Artificial Sequence
  Synthetic
ugaaauuauaauaaaagagauaca

SEQ ID NO: 153644 - RNA, 19 nt, Artificial Sequence
  Synthetic
ugauacaauuuuagauaca

SEQ ID NO: 153645 - RNA, 20 nt, Artificial Sequence
  Synthetic
augauacaauuuuagauaca

SEQ ID NO: 153646 - RNA, 21 nt, Artificial Sequence
  Synthetic
aaugauacaauuuuagauaca

SEQ ID NO: 153647 - RNA, 22 nt, Artificial Sequence
  Synthetic
aaaugauacaauuuuagauaca

SEQ ID NO: 153648 - RNA, 23 nt, Artificial Sequence
  Synthetic
aaaaugauacaauuuuagauaca

SEQ ID NO: 153649 - RNA, 24 nt, Artificial Sequence
  Synthetic
caaaaugauacaauuuuagauaca

SEQ ID NO: 153650 - RNA, 18 nt, Artificial Sequence
  Synthetic
aguguucaugaggauaca

SEQ ID NO: 153651 - RNA, 19 nt, Artificial Sequence
  Synthetic
aaguguucaugaggauaca

SEQ ID NO: 153652 - RNA, 20 nt, Artificial Sequence
  Synthetic
caaguguucaugaggauaca

SEQ ID NO: 153653 - RNA, 21 nt, Artificial Sequence
  Synthetic
acaaguguucaugaggauaca

SEQ ID NO: 153654 - RNA, 22 nt, Artificial Sequence
  Synthetic
aacaaguguucaugaggauaca

SEQ ID NO: 153655 - RNA, 23 nt, Artificial Sequence
  Synthetic
uaacaaguguucaugaggauaca

SEQ ID NO: 153656 - RNA, 24 nt, Artificial Sequence
  Synthetic
auaacaaguguucaugaggauaca

SEQ ID NO: 153657 - RNA, 19 nt, Artificial Sequence
  Synthetic
uguugagucuguggauaca

SEQ ID NO: 153658 - RNA, 22 nt, Artificial Sequence
  Synthetic
ugguguugagucuguggauaca

SEQ ID NO: 153659 - RNA, 24 nt, Artificial Sequence
  Synthetic
cgugguguugagucuguggauaca

SEQ ID NO: 153660 - RNA, 18 nt, Artificial Sequence
  Synthetic
ccuccuuccugcacuaca

SEQ ID NO: 153661 - RNA, 19 nt, Artificial Sequence
  Synthetic
uccuccuuccugcacuaca

SEQ ID NO: 153662 - RNA, 20 nt, Artificial Sequence
  Synthetic
uuccuccuuccugcacuaca

SEQ ID NO: 153663 - RNA, 18 nt, Artificial Sequence
  Synthetic
ugguuaccagaggcuaca

SEQ ID NO: 153664 - RNA, 19 nt, Artificial Sequence
  Synthetic
augguuaccagaggcuaca

SEQ ID NO: 153665 - RNA, 22 nt, Artificial Sequence
  Synthetic
aggaugguuaccagaggcuaca

SEQ ID NO: 153666 - RNA, 23 nt, Artificial Sequence
  Synthetic
aaggaugguuaccagaggcuaca

SEQ ID NO: 153667 - RNA, 24 nt, Artificial Sequence
  Synthetic
aaaggaugguuaccagaggcuaca

SEQ ID NO: 153668 - RNA, 19 nt, Artificial Sequence
  Synthetic
agcucagcccauggcuaca

SEQ ID NO: 153669 - RNA, 21 nt, Artificial Sequence
  Synthetic
agagcucagcccauggcuaca

SEQ ID NO: 153670 - RNA, 22 nt, Artificial Sequence
  Synthetic
uagagcucagcccauggcuaca

SEQ ID NO: 153671 - RNA, 23 nt, Artificial Sequence
  Synthetic
auagagcucagcccauggcuaca

SEQ ID NO: 153672 - RNA, 18 nt, Artificial Sequence
  Synthetic
aauuuuuugaauauuaca

SEQ ID NO: 153673 - RNA, 20 nt, Artificial Sequence
  Synthetic
ugaauuuuuugaauauuaca

SEQ ID NO: 153674 - RNA, 18 nt, Artificial Sequence
  Synthetic
cuacaaauacaacuuaca

SEQ ID NO: 153675 - RNA, 19 nt, Artificial Sequence
  Synthetic
ccuacaaauacaacuuaca

SEQ ID NO: 153676 - RNA, 20 nt, Artificial Sequence
  Synthetic
accuacaaauacaacuuaca

SEQ ID NO: 153677 - RNA, 21 nt, Artificial Sequence
  Synthetic
uaccuacaaauacaacuuaca

SEQ ID NO: 153678 - RNA, 22 nt, Artificial Sequence
  Synthetic
auaccuacaaauacaacuuaca

SEQ ID NO: 153679 - RNA, 23 nt, Artificial Sequence
  Synthetic
aauaccuacaaauacaacuuaca

SEQ ID NO: 153680 - RNA, 24 nt, Artificial Sequence
  Synthetic
aaauaccuacaaauacaacuuaca

SEQ ID NO: 153681 - RNA, 18 nt, Artificial Sequence
  Synthetic
cuaggaauacaacuuaca

SEQ ID NO: 153682 - RNA, 19 nt, Artificial Sequence
  Synthetic
ccuaggaauacaacuuaca

SEQ ID NO: 153683 - RNA, 21 nt, Artificial Sequence
  Synthetic
ugccuaggaauacaacuuaca

SEQ ID NO: 153684 - RNA, 23 nt, Artificial Sequence
  Synthetic
agugccuaggaauacaacuuaca

SEQ ID NO: 153685 - RNA, 24 nt, Artificial Sequence
  Synthetic
aagugccuaggaauacaacuuaca

SEQ ID NO: 153686 - RNA, 21 nt, Artificial Sequence
  Synthetic
uaccuaggaauccaacuuaca

SEQ ID NO: 153687 - RNA, 22 nt, Artificial Sequence
  Synthetic
auaccuaggaauccaacuuaca

SEQ ID NO: 153688 - RNA, 23 nt, Artificial Sequence
  Synthetic
aauaccuaggaauccaacuuaca

SEQ ID NO: 153689 - RNA, 24 nt, Artificial Sequence
  Synthetic
aaauaccuaggaauccaacuuaca

SEQ ID NO: 153690 - RNA, 21 nt, Artificial Sequence
  Synthetic
ugccuaggaauccaacuuaca

SEQ ID NO: 153691 - RNA, 22 nt, Artificial Sequence
  Synthetic
augccuaggaauccaacuuaca

SEQ ID NO: 153692 - RNA, 23 nt, Artificial Sequence
  Synthetic
aaugccuaggaauccaacuuaca

SEQ ID NO: 153693 - RNA, 24 nt, Artificial Sequence
  Synthetic
aaaugccuaggaauccaacuuaca

SEQ ID NO: 153694 - RNA, 18 nt, Artificial Sequence
  Synthetic
caaaauucucaacuuaca

SEQ ID NO: 153695 - RNA, 19 nt, Artificial Sequence
  Synthetic
acaaaauucucaacuuaca

SEQ ID NO: 153696 - RNA, 20 nt, Artificial Sequence
  Synthetic
uacaaaauucucaacuuaca

SEQ ID NO: 153697 - RNA, 19 nt, Artificial Sequence
  Synthetic
ugauuucucucucuuuaca

SEQ ID NO: 153698 - RNA, 20 nt, Artificial Sequence
  Synthetic
uugauuucucucucuuuaca

SEQ ID NO: 153699 - RNA, 18 nt, Artificial Sequence
  Synthetic
uuuugcccacuuuuuaca

SEQ ID NO: 153700 - RNA, 19 nt, Artificial Sequence
  Synthetic
cuuuugcccacuuuuuaca

SEQ ID NO: 153701 - RNA, 20 nt, Artificial Sequence
  Synthetic
ucuuuugcccacuuuuuaca

SEQ ID NO: 153702 - RNA, 22 nt, Artificial Sequence
  Synthetic
ugucuuuugcccacuuuuuaca

SEQ ID NO: 153703 - RNA, 23 nt, Artificial Sequence
  Synthetic
augucuuuugcccacuuuuuaca

SEQ ID NO: 153704 - RNA, 24 nt, Artificial Sequence
  Synthetic
caugucuuuugcccacuuuuuaca

SEQ ID NO: 153705 - RNA, 18 nt, Artificial Sequence
  Synthetic
aaaaaccaaaccaaacca

SEQ ID NO: 153706 - RNA, 20 nt, Artificial Sequence
  Synthetic
ugaaaaaccaaaccaaacca

SEQ ID NO: 153707 - RNA, 21 nt, Artificial Sequence
  Synthetic
uggggacacaaagccaaacca

SEQ ID NO: 153708 - RNA, 18 nt, Artificial Sequence
  Synthetic
ccccagccaugcaaacca

SEQ ID NO: 153709 - RNA, 19 nt, Artificial Sequence
  Synthetic
uccccagccaugcaaacca

SEQ ID NO: 153710 - RNA, 20 nt, Artificial Sequence
  Synthetic
cuccccagccaugcaaacca

SEQ ID NO: 153711 - RNA, 21 nt, Artificial Sequence
  Synthetic
ccuccccagccaugcaaacca

SEQ ID NO: 153712 - RNA, 24 nt, Artificial Sequence
  Synthetic
aggccuccccagccaugcaaacca

SEQ ID NO: 153713 - RNA, 18 nt, Artificial Sequence
  Synthetic
aaaaaaauuaaagaacca

SEQ ID NO: 153714 - RNA, 19 nt, Artificial Sequence
  Synthetic
aaaaaaaauuaaagaacca

SEQ ID NO: 153715 - RNA, 20 nt, Artificial Sequence
  Synthetic
caaaaaaaauuaaagaacca

SEQ ID NO: 153716 - RNA, 19 nt, Artificial Sequence
  Synthetic
aggagaaucccuugaacca

SEQ ID NO: 153717 - RNA, 20 nt, Artificial Sequence
  Synthetic
caggagaaucccuugaacca

SEQ ID NO: 153718 - RNA, 23 nt, Artificial Sequence
  Synthetic
aggcaggagaaucccuugaacca

SEQ ID NO: 153719 - RNA, 18 nt, Artificial Sequence
  Synthetic
ugaauauacuaaacacca

SEQ ID NO: 153720 - RNA, 20 nt, Artificial Sequence
  Synthetic
ugugaauauacuaaacacca

SEQ ID NO: 153721 - RNA, 21 nt, Artificial Sequence
  Synthetic
uugugaauauacuaaacacca

SEQ ID NO: 153722 - RNA, 22 nt, Artificial Sequence
  Synthetic
cuugugaauauacuaaacacca

SEQ ID NO: 153723 - RNA, 23 nt, Artificial Sequence
  Synthetic
ucuugugaauauacuaaacacca

SEQ ID NO: 153724 - RNA, 24 nt, Artificial Sequence
  Synthetic
aucuugugaauauacuaaacacca

SEQ ID NO: 153725 - RNA, 18 nt, Artificial Sequence
  Synthetic
uguggcacauacacacca

SEQ ID NO: 153726 - RNA, 19 nt, Artificial Sequence
  Synthetic
auguggcacauacacacca

SEQ ID NO: 153727 - RNA, 20 nt, Artificial Sequence
  Synthetic
aauguggcacauacacacca

SEQ ID NO: 153728 - RNA, 21 nt, Artificial Sequence
  Synthetic
aaauguggcacauacacacca

SEQ ID NO: 153729 - RNA, 22 nt, Artificial Sequence
  Synthetic
aaaauguggcacauacacacca

SEQ ID NO: 153730 - RNA, 24 nt, Artificial Sequence
  Synthetic
agaaaauguggcacauacacacca

SEQ ID NO: 153731 - RNA, 18 nt, Artificial Sequence
  Synthetic
acacacacacgcacacca

SEQ ID NO: 153732 - RNA, 19 nt, Artificial Sequence
  Synthetic
cacacacacacgcacacca

SEQ ID NO: 153733 - RNA, 20 nt, Artificial Sequence
  Synthetic
acacacacacacgcacacca

SEQ ID NO: 153734 - RNA, 21 nt, Artificial Sequence
  Synthetic
cacacacacacacgcacacca

SEQ ID NO: 153735 - RNA, 22 nt, Artificial Sequence
  Synthetic
acacacacacacacgcacacca

SEQ ID NO: 153736 - RNA, 23 nt, Artificial Sequence
  Synthetic
cacacacacacacacgcacacca

SEQ ID NO: 153737 - RNA, 24 nt, Artificial Sequence
  Synthetic
acacacacacacacacgcacacca

SEQ ID NO: 153738 - RNA, 21 nt, Artificial Sequence
  Synthetic
aaauguggcacauauacacca

SEQ ID NO: 153739 - RNA, 22 nt, Artificial Sequence
  Synthetic
aaaauguggcacauauacacca

SEQ ID NO: 153740 - RNA, 24 nt, Artificial Sequence
  Synthetic
agaaaauguggcacauauacacca

SEQ ID NO: 153741 - RNA, 18 nt, Artificial Sequence
  Synthetic
auuggcacauauacacca

SEQ ID NO: 153742 - RNA, 19 nt, Artificial Sequence
  Synthetic
aauuggcacauauacacca

SEQ ID NO: 153743 - RNA, 20 nt, Artificial Sequence
  Synthetic
aaauuggcacauauacacca

SEQ ID NO: 153744 - RNA, 21 nt, Artificial Sequence
  Synthetic
aaaauuggcacauauacacca

SEQ ID NO: 153745 - RNA, 23 nt, Artificial Sequence
  Synthetic
agaaaauuggcacauauacacca

SEQ ID NO: 153746 - RNA, 24 nt, Artificial Sequence
  Synthetic
aagaaaauuggcacauauacacca

SEQ ID NO: 153747 - RNA, 21 nt, Artificial Sequence
  Synthetic
aaaugugguacauauacacca

SEQ ID NO: 153748 - RNA, 22 nt, Artificial Sequence
  Synthetic
aaaaugugguacauauacacca

SEQ ID NO: 153749 - RNA, 24 nt, Artificial Sequence
  Synthetic
agaaaaugugguacauauacacca

SEQ ID NO: 153750 - RNA, 18 nt, Artificial Sequence
  Synthetic
uacggugcauauacacca

SEQ ID NO: 153751 - RNA, 19 nt, Artificial Sequence
  Synthetic
auacggugcauauacacca

SEQ ID NO: 153752 - RNA, 20 nt, Artificial Sequence
  Synthetic
aauacggugcauauacacca

SEQ ID NO: 153753 - RNA, 21 nt, Artificial Sequence
  Synthetic
aaauacggugcauauacacca

SEQ ID NO: 153754 - RNA, 22 nt, Artificial Sequence
  Synthetic
aaaauacggugcauauacacca

SEQ ID NO: 153755 - RNA, 24 nt, Artificial Sequence
  Synthetic
agaaaauacggugcauauacacca

SEQ ID NO: 153756 - RNA, 18 nt, Artificial Sequence
  Synthetic
uguggcgcguauacacca

SEQ ID NO: 153757 - RNA, 19 nt, Artificial Sequence
  Synthetic
auguggcgcguauacacca

SEQ ID NO: 153758 - RNA, 20 nt, Artificial Sequence
  Synthetic
aauguggcgcguauacacca

SEQ ID NO: 153759 - RNA, 22 nt, Artificial Sequence
  Synthetic
agaauguggcgcguauacacca

SEQ ID NO: 153760 - RNA, 23 nt, Artificial Sequence
  Synthetic
aagaauguggcgcguauacacca

SEQ ID NO: 153761 - RNA, 24 nt, Artificial Sequence
  Synthetic
aaagaauguggcgcguauacacca

SEQ ID NO: 153762 - RNA, 18 nt, Artificial Sequence
  Synthetic
uguggcacauguacacca

SEQ ID NO: 153763 - RNA, 19 nt, Artificial Sequence
  Synthetic
auguggcacauguacacca

SEQ ID NO: 153764 - RNA, 20 nt, Artificial Sequence
  Synthetic
aauguggcacauguacacca

SEQ ID NO: 153765 - RNA, 21 nt, Artificial Sequence
  Synthetic
aaauguggcacauguacacca

SEQ ID NO: 153766 - RNA, 22 nt, Artificial Sequence
  Synthetic
aaaauguggcacauguacacca

SEQ ID NO: 153767 - RNA, 24 nt, Artificial Sequence
  Synthetic
agaaaauguggcacauguacacca

SEQ ID NO: 153768 - RNA, 18 nt, Artificial Sequence
  Synthetic
auauauauauaugcacca

SEQ ID NO: 153769 - RNA, 20 nt, Artificial Sequence
  Synthetic
ugauauauauauaugcacca

SEQ ID NO: 153770 - RNA, 22 nt, Artificial Sequence
  Synthetic
ugugauauauauauaugcacca

SEQ ID NO: 153771 - RNA, 23 nt, Artificial Sequence
  Synthetic
augugauauauauauaugcacca

SEQ ID NO: 153772 - RNA, 24 nt, Artificial Sequence
  Synthetic
aaugugauauauauauaugcacca

SEQ ID NO: 153773 - RNA, 18 nt, Artificial Sequence
  Synthetic
cuauuuugaagaucacca

SEQ ID NO: 153774 - RNA, 19 nt, Artificial Sequence
  Synthetic
ucuauuuugaagaucacca

SEQ ID NO: 153775 - RNA, 20 nt, Artificial Sequence
  Synthetic
cucuauuuugaagaucacca

SEQ ID NO: 153776 - RNA, 18 nt, Artificial Sequence
  Synthetic
aaaaacugaugaucacca

SEQ ID NO: 153777 - RNA, 19 nt, Artificial Sequence
  Synthetic
caaaaacugaugaucacca

SEQ ID NO: 153778 - RNA, 20 nt, Artificial Sequence
  Synthetic
ucaaaaacugaugaucacca

SEQ ID NO: 153779 - RNA, 18 nt, Artificial Sequence
  Synthetic
ccaaguguccaucgacca

SEQ ID NO: 153780 - RNA, 19 nt, Artificial Sequence
  Synthetic
cccaaguguccaucgacca

SEQ ID NO: 153781 - RNA, 20 nt, Artificial Sequence
  Synthetic
acccaaguguccaucgacca

SEQ ID NO: 153782 - RNA, 21 nt, Artificial Sequence
  Synthetic
aacccaaguguccaucgacca

SEQ ID NO: 153783 - RNA, 22 nt, Artificial Sequence
  Synthetic
caacccaaguguccaucgacca

SEQ ID NO: 153784 - RNA, 23 nt, Artificial Sequence
  Synthetic
ccaacccaaguguccaucgacca

SEQ ID NO: 153785 - RNA, 24 nt, Artificial Sequence
  Synthetic
accaacccaaguguccaucgacca

SEQ ID NO: 153786 - RNA, 18 nt, Artificial Sequence
  Synthetic
uaugcuacuaaaugacca

SEQ ID NO: 153787 - RNA, 19 nt, Artificial Sequence
  Synthetic
auaugcuacuaaaugacca

SEQ ID NO: 153788 - RNA, 20 nt, Artificial Sequence
  Synthetic
aauaugcuacuaaaugacca

SEQ ID NO: 153789 - RNA, 21 nt, Artificial Sequence
  Synthetic
caauaugcuacuaaaugacca

SEQ ID NO: 153790 - RNA, 22 nt, Artificial Sequence
  Synthetic
acaauaugcuacuaaaugacca

SEQ ID NO: 153791 - RNA, 23 nt, Artificial Sequence
  Synthetic
aacaauaugcuacuaaaugacca

SEQ ID NO: 153792 - RNA, 24 nt, Artificial Sequence
  Synthetic
aaacaauaugcuacuaaaugacca

SEQ ID NO: 153793 - RNA, 18 nt, Artificial Sequence
  Synthetic
uuauuuuuguuaugacca

SEQ ID NO: 153794 - RNA, 19 nt, Artificial Sequence
  Synthetic
uuuauuuuuguuaugacca

SEQ ID NO: 153795 - RNA, 18 nt, Artificial Sequence
  Synthetic
ugugguaucuauauacca

SEQ ID NO: 153796 - RNA, 19 nt, Artificial Sequence
  Synthetic
augugguaucuauauacca

SEQ ID NO: 153797 - RNA, 20 nt, Artificial Sequence
  Synthetic
aaugugguaucuauauacca

SEQ ID NO: 153798 - RNA, 21 nt, Artificial Sequence
  Synthetic
aaaugugguaucuauauacca

SEQ ID NO: 153799 - RNA, 22 nt, Artificial Sequence
  Synthetic
aaaaugugguaucuauauacca

SEQ ID NO: 153800 - RNA, 24 nt, Artificial Sequence
  Synthetic
agaaaaugugguaucuauauacca

SEQ ID NO: 153801 - RNA, 18 nt, Artificial Sequence
  Synthetic
uuuuuucacauuauacca

SEQ ID NO: 153802 - RNA, 19 nt, Artificial Sequence
  Synthetic
auuuuuucacauuauacca

SEQ ID NO: 153803 - RNA, 20 nt, Artificial Sequence
  Synthetic
uauuuuuucacauuauacca

SEQ ID NO: 153804 - RNA, 18 nt, Artificial Sequence
  Synthetic
uguugcuuaagccaccca

SEQ ID NO: 153805 - RNA, 19 nt, Artificial Sequence
  Synthetic
cuguugcuuaagccaccca

SEQ ID NO: 153806 - RNA, 20 nt, Artificial Sequence
  Synthetic
ucuguugcuuaagccaccca

SEQ ID NO: 153807 - RNA, 21 nt, Artificial Sequence
  Synthetic
uucuguugcuuaagccaccca

SEQ ID NO: 153808 - RNA, 22 nt, Artificial Sequence
  Synthetic
uuucuguugcuuaagccaccca

SEQ ID NO: 153809 - RNA, 23 nt, Artificial Sequence
  Synthetic
auuucuguugcuuaagccaccca

SEQ ID NO: 153810 - RNA, 24 nt, Artificial Sequence
  Synthetic
cauuucuguugcuuaagccaccca

SEQ ID NO: 153811 - RNA, 18 nt, Artificial Sequence
  Synthetic
uuacuggauauauaccca

SEQ ID NO: 153812 - RNA, 19 nt, Artificial Sequence
  Synthetic
auuacuggauauauaccca

SEQ ID NO: 153813 - RNA, 20 nt, Artificial Sequence
  Synthetic
cauuacuggauauauaccca

SEQ ID NO: 153814 - RNA, 21 nt, Artificial Sequence
  Synthetic
ccauuacuggauauauaccca

SEQ ID NO: 153815 - RNA, 22 nt, Artificial Sequence
  Synthetic
cccauuacuggauauauaccca

SEQ ID NO: 153816 - RNA, 23 nt, Artificial Sequence
  Synthetic
ucccauuacuggauauauaccca

SEQ ID NO: 153817 - RNA, 24 nt, Artificial Sequence
  Synthetic
aucccauuacuggauauauaccca

SEQ ID NO: 153818 - RNA, 21 nt, Artificial Sequence
  Synthetic
ccauuacuggguauauaccca

SEQ ID NO: 153819 - RNA, 22 nt, Artificial Sequence
  Synthetic
cccauuacuggguauauaccca

SEQ ID NO: 153820 - RNA, 23 nt, Artificial Sequence
  Synthetic
ucccauuacuggguauauaccca

SEQ ID NO: 153821 - RNA, 24 nt, Artificial Sequence
  Synthetic
aucccauuacuggguauauaccca

SEQ ID NO: 153822 - RNA, 18 nt, Artificial Sequence
  Synthetic
uugaagugcuaaccccca

SEQ ID NO: 153823 - RNA, 20 nt, Artificial Sequence
  Synthetic
uguugaagugcuaaccccca

SEQ ID NO: 153824 - RNA, 21 nt, Artificial Sequence
  Synthetic
auguugaagugcuaaccccca

SEQ ID NO: 153825 - RNA, 22 nt, Artificial Sequence
  Synthetic
uauguugaagugcuaaccccca

SEQ ID NO: 153826 - RNA, 24 nt, Artificial Sequence
  Synthetic
uguauguugaagugcuaaccccca

SEQ ID NO: 153827 - RNA, 19 nt, Artificial Sequence
  Synthetic
ugcgaccccugaagcccca

SEQ ID NO: 153828 - RNA, 20 nt, Artificial Sequence
  Synthetic
cugcgaccccugaagcccca

SEQ ID NO: 153829 - RNA, 21 nt, Artificial Sequence
  Synthetic
ucugcgaccccugaagcccca

SEQ ID NO: 153830 - RNA, 23 nt, Artificial Sequence
  Synthetic
cgucugcgaccccugaagcccca

SEQ ID NO: 153831 - RNA, 21 nt, Artificial Sequence
  Synthetic
ugggaggauugcuugagccca

SEQ ID NO: 153832 - RNA, 22 nt, Artificial Sequence
  Synthetic
augggaggauugcuugagccca

SEQ ID NO: 153833 - RNA, 23 nt, Artificial Sequence
  Synthetic
uaugggaggauugcuugagccca

SEQ ID NO: 153834 - RNA, 24 nt, Artificial Sequence
  Synthetic
auaugggaggauugcuugagccca

SEQ ID NO: 153835 - RNA, 21 nt, Artificial Sequence
  Synthetic
cuguuacuacaucuaggccca

SEQ ID NO: 153836 - RNA, 23 nt, Artificial Sequence
  Synthetic
agcuguuacuacaucuaggccca

SEQ ID NO: 153837 - RNA, 18 nt, Artificial Sequence
  Synthetic
uacauuccaagacuccca

SEQ ID NO: 153838 - RNA, 19 nt, Artificial Sequence
  Synthetic
auacauuccaagacuccca

SEQ ID NO: 153839 - RNA, 24 nt, Artificial Sequence
  Synthetic
aggggauacauuccaagacuccca

SEQ ID NO: 153840 - RNA, 19 nt, Artificial Sequence
  Synthetic
ugauucaaaugaccuccca

SEQ ID NO: 153841 - RNA, 20 nt, Artificial Sequence
  Synthetic
augauucaaaugaccuccca

SEQ ID NO: 153842 - RNA, 21 nt, Artificial Sequence
  Synthetic
caugauucaaaugaccuccca

SEQ ID NO: 153843 - RNA, 22 nt, Artificial Sequence
  Synthetic
ccaugauucaaaugaccuccca

SEQ ID NO: 153844 - RNA, 23 nt, Artificial Sequence
  Synthetic
cccaugauucaaaugaccuccca

SEQ ID NO: 153845 - RNA, 24 nt, Artificial Sequence
  Synthetic
ccccaugauucaaaugaccuccca

SEQ ID NO: 153846 - RNA, 20 nt, Artificial Sequence
  Synthetic
aggauuauuaugucuuccca

SEQ ID NO: 153847 - RNA, 21 nt, Artificial Sequence
  Synthetic
uaggauuauuaugucuuccca

SEQ ID NO: 153848 - RNA, 22 nt, Artificial Sequence
  Synthetic
uuaggauuauuaugucuuccca

SEQ ID NO: 153849 - RNA, 23 nt, Artificial Sequence
  Synthetic
uuuaggauuauuaugucuuccca

SEQ ID NO: 153850 - RNA, 24 nt, Artificial Sequence
  Synthetic
auuuaggauuauuaugucuuccca

SEQ ID NO: 153851 - RNA, 18 nt, Artificial Sequence
  Synthetic
agcgagaauuucaagcca

SEQ ID NO: 153852 - RNA, 19 nt, Artificial Sequence
  Synthetic
cagcgagaauuucaagcca

SEQ ID NO: 153853 - RNA, 22 nt, Artificial Sequence
  Synthetic
uggcagcgagaauuucaagcca

SEQ ID NO: 153854 - RNA, 23 nt, Artificial Sequence
  Synthetic
cuggcagcgagaauuucaagcca

SEQ ID NO: 153855 - RNA, 18 nt, Artificial Sequence
  Synthetic
agaggugaaaggcagcca

SEQ ID NO: 153856 - RNA, 19 nt, Artificial Sequence
  Synthetic
aagaggugaaaggcagcca

SEQ ID NO: 153857 - RNA, 18 nt, Artificial Sequence
  Synthetic
ucaguaaaacaguggcca

SEQ ID NO: 153858 - RNA, 20 nt, Artificial Sequence
  Synthetic
agucaguaaaacaguggcca

SEQ ID NO: 153859 - RNA, 18 nt, Artificial Sequence
  Synthetic
ucucagagacuguugcca

SEQ ID NO: 153860 - RNA, 20 nt, Artificial Sequence
  Synthetic
ugucucagagacuguugcca

SEQ ID NO: 153861 - RNA, 20 nt, Artificial Sequence
  Synthetic
uggaguucagaaauuugcca

SEQ ID NO: 153862 - RNA, 18 nt, Artificial Sequence
  Synthetic
uaaaaaugagauuugcca

SEQ ID NO: 153863 - RNA, 19 nt, Artificial Sequence
  Synthetic
auaaaaaugagauuugcca

SEQ ID NO: 153864 - RNA, 20 nt, Artificial Sequence
  Synthetic
aauaaaaaugagauuugcca

SEQ ID NO: 153865 - RNA, 20 nt, Artificial Sequence
  Synthetic
ugggaggauuacuucaucca

SEQ ID NO: 153866 - RNA, 23 nt, Artificial Sequence
  Synthetic
aggugggaggauuacuucaucca

SEQ ID NO: 153867 - RNA, 21 nt, Artificial Sequence
  Synthetic
uuuuucaacuuuuaagaucca

SEQ ID NO: 153868 - RNA, 22 nt, Artificial Sequence
  Synthetic
uuuuuucaacuuuuaagaucca

SEQ ID NO: 153869 - RNA, 23 nt, Artificial Sequence
  Synthetic
uuuuuuucaacuuuuaagaucca

SEQ ID NO: 153870 - RNA, 24 nt, Artificial Sequence
  Synthetic
uuuuuuuucaacuuuuaagaucca

SEQ ID NO: 153871 - RNA, 18 nt, Artificial Sequence
  Synthetic
auuuucaauaacuaucca

SEQ ID NO: 153872 - RNA, 19 nt, Artificial Sequence
  Synthetic
cauuuucaauaacuaucca

SEQ ID NO: 153873 - RNA, 20 nt, Artificial Sequence
  Synthetic
ucauuuucaauaacuaucca

SEQ ID NO: 153874 - RNA, 19 nt, Artificial Sequence
  Synthetic
uguaaucuuccuuuaucca

SEQ ID NO: 153875 - RNA, 20 nt, Artificial Sequence
  Synthetic
cuguaaucuuccuuuaucca

SEQ ID NO: 153876 - RNA, 18 nt, Artificial Sequence
  Synthetic
auuuugauaaugauucca

SEQ ID NO: 153877 - RNA, 20 nt, Artificial Sequence
  Synthetic
ugauuuugauaaugauucca

SEQ ID NO: 153878 - RNA, 22 nt, Artificial Sequence
  Synthetic
ugugauuuugauaaugauucca

SEQ ID NO: 153879 - RNA, 23 nt, Artificial Sequence
  Synthetic
uugugauuuugauaaugauucca

SEQ ID NO: 153880 - RNA, 18 nt, Artificial Sequence
  Synthetic
aggcugaaaaauauucca

SEQ ID NO: 153881 - RNA, 19 nt, Artificial Sequence
  Synthetic
aaggcugaaaaauauucca

SEQ ID NO: 153882 - RNA, 20 nt, Artificial Sequence
  Synthetic
uaaggcugaaaaauauucca

SEQ ID NO: 153883 - RNA, 21 nt, Artificial Sequence
  Synthetic
uuaaggcugaaaaauauucca

SEQ ID NO: 153884 - RNA, 22 nt, Artificial Sequence
  Synthetic
uuuaaggcugaaaaauauucca

SEQ ID NO: 153885 - RNA, 23 nt, Artificial Sequence
  Synthetic
uuuuaaggcugaaaaauauucca

SEQ ID NO: 153886 - RNA, 24 nt, Artificial Sequence
  Synthetic
uuuuuaaggcugaaaaauauucca

SEQ ID NO: 153887 - RNA, 18 nt, Artificial Sequence
  Synthetic
aauuuuuuuaaaguucca

SEQ ID NO: 153888 - RNA, 19 nt, Artificial Sequence
  Synthetic
uaauuuuuuuaaaguucca

SEQ ID NO: 153889 - RNA, 20 nt, Artificial Sequence
  Synthetic
auaauuuuuuuaaaguucca

SEQ ID NO: 153890 - RNA, 18 nt, Artificial Sequence
  Synthetic
aaaauuauuuucuuucca

SEQ ID NO: 153891 - RNA, 19 nt, Artificial Sequence
  Synthetic
caaaauuauuuucuuucca

SEQ ID NO: 153892 - RNA, 20 nt, Artificial Sequence
  Synthetic
ucaaaauuauuuucuuucca

SEQ ID NO: 153893 - RNA, 18 nt, Artificial Sequence
  Synthetic
caagaaauaauuuuucca

SEQ ID NO: 153894 - RNA, 19 nt, Artificial Sequence
  Synthetic
ucaagaaauaauuuuucca

SEQ ID NO: 153895 - RNA, 20 nt, Artificial Sequence
  Synthetic
aucaagaaauaauuuuucca

SEQ ID NO: 153896 - RNA, 18 nt, Artificial Sequence
  Synthetic
aagacuauucuuuuucca

SEQ ID NO: 153897 - RNA, 19 nt, Artificial Sequence
  Synthetic
aaagacuauucuuuuucca

SEQ ID NO: 153898 - RNA, 21 nt, Artificial Sequence
  Synthetic
ugaaagacuauucuuuuucca

SEQ ID NO: 153899 - RNA, 23 nt, Artificial Sequence
  Synthetic
ugugaaagacuauucuuuuucca

SEQ ID NO: 153900 - RNA, 24 nt, Artificial Sequence
  Synthetic
uugugaaagacuauucuuuuucca

SEQ ID NO: 153901 - RNA, 18 nt, Artificial Sequence
  Synthetic
agaacaaaauguaaagca

SEQ ID NO: 153902 - RNA, 19 nt, Artificial Sequence
  Synthetic
aagaacaaaauguaaagca

SEQ ID NO: 153903 - RNA, 20 nt, Artificial Sequence
  Synthetic
aaagaacaaaauguaaagca

SEQ ID NO: 153904 - RNA, 18 nt, Artificial Sequence
  Synthetic
agaaaauaaacacaagca

SEQ ID NO: 153905 - RNA, 20 nt, Artificial Sequence
  Synthetic
agagaaaauaaacacaagca

SEQ ID NO: 153906 - RNA, 18 nt, Artificial Sequence
  Synthetic
caaaaagauaaagaagca

SEQ ID NO: 153907 - RNA, 19 nt, Artificial Sequence
  Synthetic
acaaaaagauaaagaagca

SEQ ID NO: 153908 - RNA, 20 nt, Artificial Sequence
  Synthetic
aacaaaaagauaaagaagca

SEQ ID NO: 153909 - RNA, 21 nt, Artificial Sequence
  Synthetic
aaaaggguaaaauaagaagca

SEQ ID NO: 153910 - RNA, 22 nt, Artificial Sequence
  Synthetic
caaaaggguaaaauaagaagca

SEQ ID NO: 153911 - RNA, 23 nt, Artificial Sequence
  Synthetic
acaaaaggguaaaauaagaagca

SEQ ID NO: 153912 - RNA, 19 nt, Artificial Sequence
  Synthetic
ugugagagaccccgaagca

SEQ ID NO: 153913 - RNA, 20 nt, Artificial Sequence
  Synthetic
uugugagagaccccgaagca

SEQ ID NO: 153914 - RNA, 21 nt, Artificial Sequence
  Synthetic
uuugugagagaccccgaagca

SEQ ID NO: 153915 - RNA, 22 nt, Artificial Sequence
  Synthetic
cuuugugagagaccccgaagca

SEQ ID NO: 153916 - RNA, 23 nt, Artificial Sequence
  Synthetic
ccuuugugagagaccccgaagca

SEQ ID NO: 153917 - RNA, 19 nt, Artificial Sequence
  Synthetic
agacaaggaaaaugaagca

SEQ ID NO: 153918 - RNA, 20 nt, Artificial Sequence
  Synthetic
uagacaaggaaaaugaagca

SEQ ID NO: 153919 - RNA, 21 nt, Artificial Sequence
  Synthetic
auagacaaggaaaaugaagca

SEQ ID NO: 153920 - RNA, 22 nt, Artificial Sequence
  Synthetic
uauagacaaggaaaaugaagca

SEQ ID NO: 153921 - RNA, 23 nt, Artificial Sequence
  Synthetic
uuauagacaaggaaaaugaagca

SEQ ID NO: 153922 - RNA, 24 nt, Artificial Sequence
  Synthetic
uuuauagacaaggaaaaugaagca

SEQ ID NO: 153923 - RNA, 18 nt, Artificial Sequence
  Synthetic
uggagagugagaacagca

SEQ ID NO: 153924 - RNA, 20 nt, Artificial Sequence
  Synthetic
aguggagagugagaacagca

SEQ ID NO: 153925 - RNA, 21 nt, Artificial Sequence
  Synthetic
accaucuugguuuguccagca

SEQ ID NO: 153926 - RNA, 22 nt, Artificial Sequence
  Synthetic
aaccaucuugguuuguccagca

SEQ ID NO: 153927 - RNA, 23 nt, Artificial Sequence
  Synthetic
caaccaucuugguuuguccagca

SEQ ID NO: 153928 - RNA, 24 nt, Artificial Sequence
  Synthetic
ccaaccaucuugguuuguccagca

SEQ ID NO: 153929 - RNA, 22 nt, Artificial Sequence
  Synthetic
ugauucuuccuacccaugagca

SEQ ID NO: 153930 - RNA, 23 nt, Artificial Sequence
  Synthetic
uugauucuuccuacccaugagca

SEQ ID NO: 153931 - RNA, 24 nt, Artificial Sequence
  Synthetic
auugauucuuccuacccaugagca

SEQ ID NO: 153932 - RNA, 19 nt, Artificial Sequence
  Synthetic
agcacuguucacaauagca

SEQ ID NO: 153933 - RNA, 20 nt, Artificial Sequence
  Synthetic
cagcacuguucacaauagca

SEQ ID NO: 153934 - RNA, 22 nt, Artificial Sequence
  Synthetic
ugcagcacuguucacaauagca

SEQ ID NO: 153935 - RNA, 23 nt, Artificial Sequence
  Synthetic
uugcagcacuguucacaauagca

SEQ ID NO: 153936 - RNA, 24 nt, Artificial Sequence
  Synthetic
auugcagcacuguucacaauagca

SEQ ID NO: 153937 - RNA, 18 nt, Artificial Sequence
  Synthetic
aguuugauaggaauagca

SEQ ID NO: 153938 - RNA, 19 nt, Artificial Sequence
  Synthetic
uaguuugauaggaauagca

SEQ ID NO: 153939 - RNA, 20 nt, Artificial Sequence
  Synthetic
cuaguuugauaggaauagca

SEQ ID NO: 153940 - RNA, 22 nt, Artificial Sequence
  Synthetic
ugcuaguuugauaggaauagca

SEQ ID NO: 153941 - RNA, 23 nt, Artificial Sequence
  Synthetic
uugcuaguuugauaggaauagca

SEQ ID NO: 153942 - RNA, 24 nt, Artificial Sequence
  Synthetic
auugcuaguuugauaggaauagca

SEQ ID NO: 153943 - RNA, 18 nt, Artificial Sequence
  Synthetic
uuguuuuuugaccuagca

SEQ ID NO: 153944 - RNA, 19 nt, Artificial Sequence
  Synthetic
uuuguuuuuugaccuagca

SEQ ID NO: 153945 - RNA, 20 nt, Artificial Sequence
  Synthetic
auuuguuuuuugaccuagca

SEQ ID NO: 153946 - RNA, 18 nt, Artificial Sequence
  Synthetic
cugcuaucauggcuagca

SEQ ID NO: 153947 - RNA, 20 nt, Artificial Sequence
  Synthetic
agcugcuaucauggcuagca

SEQ ID NO: 153948 - RNA, 21 nt, Artificial Sequence
  Synthetic
cagcugcuaucauggcuagca

SEQ ID NO: 153949 - RNA, 22 nt, Artificial Sequence
  Synthetic
ccagcugcuaucauggcuagca

SEQ ID NO: 153950 - RNA, 23 nt, Artificial Sequence
  Synthetic
cccagcugcuaucauggcuagca

SEQ ID NO: 153951 - RNA, 24 nt, Artificial Sequence
  Synthetic
ucccagcugcuaucauggcuagca

SEQ ID NO: 153952 - RNA, 18 nt, Artificial Sequence
  Synthetic
cuaacuugucaucuagca

SEQ ID NO: 153953 - RNA, 19 nt, Artificial Sequence
  Synthetic
acuaacuugucaucuagca

SEQ ID NO: 153954 - RNA, 20 nt, Artificial Sequence
  Synthetic
cacuaacuugucaucuagca

SEQ ID NO: 153955 - RNA, 21 nt, Artificial Sequence
  Synthetic
ccacuaacuugucaucuagca

SEQ ID NO: 153956 - RNA, 22 nt, Artificial Sequence
  Synthetic
cccacuaacuugucaucuagca

SEQ ID NO: 153957 - RNA, 23 nt, Artificial Sequence
  Synthetic
acccacuaacuugucaucuagca

SEQ ID NO: 153958 - RNA, 24 nt, Artificial Sequence
  Synthetic
cacccacuaacuugucaucuagca

SEQ ID NO: 153959 - RNA, 18 nt, Artificial Sequence
  Synthetic
uauuauucccauguagca

SEQ ID NO: 153960 - RNA, 19 nt, Artificial Sequence
  Synthetic
uuauuauucccauguagca

SEQ ID NO: 153961 - RNA, 20 nt, Artificial Sequence
  Synthetic
auuauuauucccauguagca

SEQ ID NO: 153962 - RNA, 18 nt, Artificial Sequence
  Synthetic
aauguguacacaugcgca

SEQ ID NO: 153963 - RNA, 19 nt, Artificial Sequence
  Synthetic
uaauguguacacaugcgca

SEQ ID NO: 153964 - RNA, 20 nt, Artificial Sequence
  Synthetic
auaauguguacacaugcgca

SEQ ID NO: 153965 - RNA, 21 nt, Artificial Sequence
  Synthetic
aauaauguguacacaugcgca

SEQ ID NO: 153966 - RNA, 22 nt, Artificial Sequence
  Synthetic
aaauaauguguacacaugcgca

SEQ ID NO: 153967 - RNA, 23 nt, Artificial Sequence
  Synthetic
uaaauaauguguacacaugcgca

SEQ ID NO: 153968 - RNA, 24 nt, Artificial Sequence
  Synthetic
cuaaauaauguguacacaugcgca

SEQ ID NO: 153969 - RNA, 18 nt, Artificial Sequence
  Synthetic
cucuccaaucaaaaggca

SEQ ID NO: 153970 - RNA, 19 nt, Artificial Sequence
  Synthetic
acucuccaaucaaaaggca

SEQ ID NO: 153971 - RNA, 20 nt, Artificial Sequence
  Synthetic
aacucuccaaucaaaaggca

SEQ ID NO: 153972 - RNA, 21 nt, Artificial Sequence
  Synthetic
aaacucuccaaucaaaaggca

SEQ ID NO: 153973 - RNA, 22 nt, Artificial Sequence
  Synthetic
uaaacucuccaaucaaaaggca

SEQ ID NO: 153974 - RNA, 23 nt, Artificial Sequence
  Synthetic
uuaaacucuccaaucaaaaggca

SEQ ID NO: 153975 - RNA, 24 nt, Artificial Sequence
  Synthetic
auuaaacucuccaaucaaaaggca

SEQ ID NO: 153976 - RNA, 18 nt, Artificial Sequence
  Synthetic
caaugggggguacaggca

SEQ ID NO: 153977 - RNA, 19 nt, Artificial Sequence
  Synthetic
acaaugggggguacaggca

SEQ ID NO: 153978 - RNA, 20 nt, Artificial Sequence
  Synthetic
uacaaugggggguacaggca

SEQ ID NO: 153979 - RNA, 21 nt, Artificial Sequence
  Synthetic
auacaaugggggguacaggca

SEQ ID NO: 153980 - RNA, 24 nt, Artificial Sequence
  Synthetic
aggauacaaugggggguacaggca

SEQ ID NO: 153981 - RNA, 18 nt, Artificial Sequence
  Synthetic
uuuugacacaggcaggca

SEQ ID NO: 153982 - RNA, 20 nt, Artificial Sequence
  Synthetic
uguuuugacacaggcaggca

SEQ ID NO: 153983 - RNA, 21 nt, Artificial Sequence
  Synthetic
auguuuugacacaggcaggca

SEQ ID NO: 153984 - RNA, 23 nt, Artificial Sequence
  Synthetic
agauguuuugacacaggcaggca

SEQ ID NO: 153985 - RNA, 18 nt, Artificial Sequence
  Synthetic
auuguugaagcagaggca

SEQ ID NO: 153986 - RNA, 19 nt, Artificial Sequence
  Synthetic
cauuguugaagcagaggca

SEQ ID NO: 153987 - RNA, 20 nt, Artificial Sequence
  Synthetic
acauuguugaagcagaggca

SEQ ID NO: 153988 - RNA, 21 nt, Artificial Sequence
  Synthetic
cacauuguugaagcagaggca

SEQ ID NO: 153989 - RNA, 23 nt, Artificial Sequence
  Synthetic
ugcacauuguugaagcagaggca

SEQ ID NO: 153990 - RNA, 24 nt, Artificial Sequence
  Synthetic
uugcacauuguugaagcagaggca

SEQ ID NO: 153991 - RNA, 18 nt, Artificial Sequence
  Synthetic
acucaggaggcugaggca

SEQ ID NO: 153992 - RNA, 19 nt, Artificial Sequence
  Synthetic
uacucaggaggcugaggca

SEQ ID NO: 153993 - RNA, 20 nt, Artificial Sequence
  Synthetic
cuacucaggaggcugaggca

SEQ ID NO: 153994 - RNA, 22 nt, Artificial Sequence
  Synthetic
agcuacucaggaggcugaggca

SEQ ID NO: 153995 - RNA, 23 nt, Artificial Sequence
  Synthetic
cagcuacucaggaggcugaggca

SEQ ID NO: 153996 - RNA, 24 nt, Artificial Sequence
  Synthetic
ccagcuacucaggaggcugaggca

SEQ ID NO: 153997 - RNA, 18 nt, Artificial Sequence
  Synthetic
acucgggaggcugaggca

SEQ ID NO: 153998 - RNA, 19 nt, Artificial Sequence
  Synthetic
uacucgggaggcugaggca

SEQ ID NO: 153999 - RNA, 20 nt, Artificial Sequence
  Synthetic
cuacucgggaggcugaggca

SEQ ID NO: 154000 - RNA, 22 nt, Artificial Sequence
  Synthetic
agcuacucgggaggcugaggca

SEQ ID NO: 154001 - RNA, 23 nt, Artificial Sequence
  Synthetic
cagcuacucgggaggcugaggca

SEQ ID NO: 154002 - RNA, 24 nt, Artificial Sequence
  Synthetic
ccagcuacucgggaggcugaggca

SEQ ID NO: 154003 - RNA, 18 nt, Artificial Sequence
  Synthetic
cugggguuuuuauaggca

SEQ ID NO: 154004 - RNA, 19 nt, Artificial Sequence
  Synthetic
ucugggguuuuuauaggca

SEQ ID NO: 154005 - RNA, 21 nt, Artificial Sequence
  Synthetic
agucugggguuuuuauaggca

SEQ ID NO: 154006 - RNA, 23 nt, Artificial Sequence
  Synthetic
ugagucugggguuuuuauaggca

SEQ ID NO: 154007 - RNA, 24 nt, Artificial Sequence
  Synthetic
cugagucugggguuuuuauaggca

SEQ ID NO: 154008 - RNA, 18 nt, Artificial Sequence
  Synthetic
aaagaaaacaauagggca

SEQ ID NO: 154009 - RNA, 20 nt, Artificial Sequence
  Synthetic
agaaagaaaacaauagggca

SEQ ID NO: 154010 - RNA, 18 nt, Artificial Sequence
  Synthetic
aaagcaaaaacuggggca

SEQ ID NO: 154011 - RNA, 19 nt, Artificial Sequence
  Synthetic
aaaagcaaaaacuggggca

SEQ ID NO: 154012 - RNA, 20 nt, Artificial Sequence
  Synthetic
aaaaagcaaaaacuggggca

SEQ ID NO: 154013 - RNA, 18 nt, Artificial Sequence
  Synthetic
aguuuaggggcuggggca

SEQ ID NO: 154014 - RNA, 19 nt, Artificial Sequence
  Synthetic
caguuuaggggcuggggca

SEQ ID NO: 154015 - RNA, 20 nt, Artificial Sequence
  Synthetic
ucaguuuaggggcuggggca

SEQ ID NO: 154016 - RNA, 23 nt, Artificial Sequence
  Synthetic
cggucaguuuaggggcuggggca

SEQ ID NO: 154017 - RNA, 24 nt, Artificial Sequence
  Synthetic
acggucaguuuaggggcuggggca

SEQ ID NO: 154018 - RNA, 18 nt, Artificial Sequence
  Synthetic
cccaucagaaagugggca

SEQ ID NO: 154019 - RNA, 19 nt, Artificial Sequence
  Synthetic
ccccaucagaaagugggca

SEQ ID NO: 154020 - RNA, 20 nt, Artificial Sequence
  Synthetic
accccaucagaaagugggca

SEQ ID NO: 154021 - RNA, 22 nt, Artificial Sequence
  Synthetic
agaccccaucagaaagugggca

SEQ ID NO: 154022 - RNA, 23 nt, Artificial Sequence
  Synthetic
aagaccccaucagaaagugggca

SEQ ID NO: 154023 - RNA, 24 nt, Artificial Sequence
  Synthetic
aaagaccccaucagaaagugggca

SEQ ID NO: 154024 - RNA, 20 nt, Artificial Sequence
  Synthetic
uggcugugcaaucuugggca

SEQ ID NO: 154025 - RNA, 22 nt, Artificial Sequence
  Synthetic
ugguagcuugauggggauggca

SEQ ID NO: 154026 - RNA, 23 nt, Artificial Sequence
  Synthetic
uugguagcuugauggggauggca

SEQ ID NO: 154027 - RNA, 24 nt, Artificial Sequence
  Synthetic
auugguagcuugauggggauggca

SEQ ID NO: 154028 - RNA, 18 nt, Artificial Sequence
  Synthetic
aagaaaagagggguggca

SEQ ID NO: 154029 - RNA, 19 nt, Artificial Sequence
  Synthetic
aaagaaaagagggguggca

SEQ ID NO: 154030 - RNA, 20 nt, Artificial Sequence
  Synthetic
aaaagaaaagagggguggca

SEQ ID NO: 154031 - RNA, 18 nt, Artificial Sequence
  Synthetic
auaugaaaaaaaaaugca

SEQ ID NO: 154032 - RNA, 19 nt, Artificial Sequence
  Synthetic
aauaugaaaaaaaaaugca

SEQ ID NO: 154033 - RNA, 20 nt, Artificial Sequence
  Synthetic
caauaugaaaaaaaaaugca

SEQ ID NO: 154034 - RNA, 18 nt, Artificial Sequence
  Synthetic
aaugacaaaaaguaugca

SEQ ID NO: 154035 - RNA, 19 nt, Artificial Sequence
  Synthetic
aaaugacaaaaaguaugca

SEQ ID NO: 154036 - RNA, 20 nt, Artificial Sequence
  Synthetic
aaaaugacaaaaaguaugca

SEQ ID NO: 154037 - RNA, 18 nt, Artificial Sequence
  Synthetic
agcuugauggagacugca

SEQ ID NO: 154038 - RNA, 19 nt, Artificial Sequence
  Synthetic
uagcuugauggagacugca

SEQ ID NO: 154039 - RNA, 22 nt, Artificial Sequence
  Synthetic
ugguagcuugauggagacugca

SEQ ID NO: 154040 - RNA, 23 nt, Artificial Sequence
  Synthetic
augguagcuugauggagacugca

SEQ ID NO: 154041 - RNA, 24 nt, Artificial Sequence
  Synthetic
aaugguagcuugauggagacugca

SEQ ID NO: 154042 - RNA, 18 nt, Artificial Sequence
  Synthetic
caaucaucugagccugca

SEQ ID NO: 154043 - RNA, 19 nt, Artificial Sequence
  Synthetic
acaaucaucugagccugca

SEQ ID NO: 154044 - RNA, 20 nt, Artificial Sequence
  Synthetic
aacaaucaucugagccugca

SEQ ID NO: 154045 - RNA, 21 nt, Artificial Sequence
  Synthetic
uaacaaucaucugagccugca

SEQ ID NO: 154046 - RNA, 24 nt, Artificial Sequence
  Synthetic
ugguaacaaucaucugagccugca

SEQ ID NO: 154047 - RNA, 19 nt, Artificial Sequence
  Synthetic
ugaaaugcugcuuccugca

SEQ ID NO: 154048 - RNA, 20 nt, Artificial Sequence
  Synthetic
cugaaaugcugcuuccugca

SEQ ID NO: 154049 - RNA, 18 nt, Artificial Sequence
  Synthetic
ccacugugcccggcugca

SEQ ID NO: 154050 - RNA, 20 nt, Artificial Sequence
  Synthetic
agccacugugcccggcugca

SEQ ID NO: 154051 - RNA, 22 nt, Artificial Sequence
  Synthetic
ugagccacugugcccggcugca

SEQ ID NO: 154052 - RNA, 24 nt, Artificial Sequence
  Synthetic
ugugagccacugugcccggcugca

SEQ ID NO: 154053 - RNA, 18 nt, Artificial Sequence
  Synthetic
ugcaucuauguugcugca

SEQ ID NO: 154054 - RNA, 19 nt, Artificial Sequence
  Synthetic
cugcaucuauguugcugca

SEQ ID NO: 154055 - RNA, 21 nt, Artificial Sequence
  Synthetic
agcugcaucuauguugcugca

SEQ ID NO: 154056 - RNA, 22 nt, Artificial Sequence
  Synthetic
uagcugcaucuauguugcugca

SEQ ID NO: 154057 - RNA, 23 nt, Artificial Sequence
  Synthetic
cuagcugcaucuauguugcugca

SEQ ID NO: 154058 - RNA, 24 nt, Artificial Sequence
  Synthetic
ucuagcugcaucuauguugcugca

SEQ ID NO: 154059 - RNA, 18 nt, Artificial Sequence
  Synthetic
auuugagaauuaagugca

SEQ ID NO: 154060 - RNA, 19 nt, Artificial Sequence
  Synthetic
uauuugagaauuaagugca

SEQ ID NO: 154061 - RNA, 20 nt, Artificial Sequence
  Synthetic
auauuugagaauuaagugca

SEQ ID NO: 154062 - RNA, 21 nt, Artificial Sequence
  Synthetic
cauauuugagaauuaagugca

SEQ ID NO: 154063 - RNA, 22 nt, Artificial Sequence
  Synthetic
ucauauuugagaauuaagugca

SEQ ID NO: 154064 - RNA, 24 nt, Artificial Sequence
  Synthetic
ugucauauuugagaauuaagugca

SEQ ID NO: 154065 - RNA, 18 nt, Artificial Sequence
  Synthetic
uagugaugucacagugca

SEQ ID NO: 154066 - RNA, 19 nt, Artificial Sequence
  Synthetic
cuagugaugucacagugca

SEQ ID NO: 154067 - RNA, 20 nt, Artificial Sequence
  Synthetic
ccuagugaugucacagugca

SEQ ID NO: 154068 - RNA, 21 nt, Artificial Sequence
  Synthetic
accuagugaugucacagugca

SEQ ID NO: 154069 - RNA, 22 nt, Artificial Sequence
  Synthetic
uaccuagugaugucacagugca

SEQ ID NO: 154070 - RNA, 23 nt, Artificial Sequence
  Synthetic
uuaccuagugaugucacagugca

SEQ ID NO: 154071 - RNA, 24 nt, Artificial Sequence
  Synthetic
auuaccuagugaugucacagugca

SEQ ID NO: 154072 - RNA, 18 nt, Artificial Sequence
  Synthetic
uagggaccuccuagugca

SEQ ID NO: 154073 - RNA, 19 nt, Artificial Sequence
  Synthetic
cuagggaccuccuagugca

SEQ ID NO: 154074 - RNA, 20 nt, Artificial Sequence
  Synthetic
acuagggaccuccuagugca

SEQ ID NO: 154075 - RNA, 18 nt, Artificial Sequence
  Synthetic
cucaaaugucagugugca

SEQ ID NO: 154076 - RNA, 19 nt, Artificial Sequence
  Synthetic
ucucaaaugucagugugca

SEQ ID NO: 154077 - RNA, 20 nt, Artificial Sequence
  Synthetic
uucucaaaugucagugugca

SEQ ID NO: 154078 - RNA, 18 nt, Artificial Sequence
  Synthetic
acaugguauaaaauugca

SEQ ID NO: 154079 - RNA, 19 nt, Artificial Sequence
  Synthetic
aacaugguauaaaauugca

SEQ ID NO: 154080 - RNA, 20 nt, Artificial Sequence
  Synthetic
aaacaugguauaaaauugca

SEQ ID NO: 154081 - RNA, 19 nt, Artificial Sequence
  Synthetic
cggcauucacagaauugca

SEQ ID NO: 154082 - RNA, 20 nt, Artificial Sequence
  Synthetic
ucggcauucacagaauugca

SEQ ID NO: 154083 - RNA, 21 nt, Artificial Sequence
  Synthetic
cucggcauucacagaauugca

SEQ ID NO: 154084 - RNA, 22 nt, Artificial Sequence
  Synthetic
ucucggcauucacagaauugca

SEQ ID NO: 154085 - RNA, 23 nt, Artificial Sequence
  Synthetic
cucucggcauucacagaauugca

SEQ ID NO: 154086 - RNA, 24 nt, Artificial Sequence
  Synthetic
ucucucggcauucacagaauugca

SEQ ID NO: 154087 - RNA, 18 nt, Artificial Sequence
  Synthetic
cuggauauacacauugca

SEQ ID NO: 154088 - RNA, 19 nt, Artificial Sequence
  Synthetic
acuggauauacacauugca

SEQ ID NO: 154089 - RNA, 20 nt, Artificial Sequence
  Synthetic
aacuggauauacacauugca

SEQ ID NO: 154090 - RNA, 21 nt, Artificial Sequence
  Synthetic
aaacuggauauacacauugca

SEQ ID NO: 154091 - RNA, 22 nt, Artificial Sequence
  Synthetic
aaaacuggauauacacauugca

SEQ ID NO: 154092 - RNA, 18 nt, Artificial Sequence
  Synthetic
cuaggaauacaacuugca

SEQ ID NO: 154093 - RNA, 19 nt, Artificial Sequence
  Synthetic
ccuaggaauacaacuugca

SEQ ID NO: 154094 - RNA, 20 nt, Artificial Sequence
  Synthetic
accuaggaauacaacuugca

SEQ ID NO: 154095 - RNA, 21 nt, Artificial Sequence
  Synthetic
uaccuaggaauacaacuugca

SEQ ID NO: 154096 - RNA, 22 nt, Artificial Sequence
  Synthetic
auaccuaggaauacaacuugca

SEQ ID NO: 154097 - RNA, 23 nt, Artificial Sequence
  Synthetic
aauaccuaggaauacaacuugca

SEQ ID NO: 154098 - RNA, 24 nt, Artificial Sequence
  Synthetic
aaauaccuaggaauacaacuugca

SEQ ID NO: 154099 - RNA, 20 nt, Artificial Sequence
  Synthetic
agguucuuagcuuccuugca

SEQ ID NO: 154100 - RNA, 21 nt, Artificial Sequence
  Synthetic
aagguucuuagcuuccuugca

SEQ ID NO: 154101 - RNA, 22 nt, Artificial Sequence
  Synthetic
uaagguucuuagcuuccuugca

SEQ ID NO: 154102 - RNA, 23 nt, Artificial Sequence
  Synthetic
uuaagguucuuagcuuccuugca

SEQ ID NO: 154103 - RNA, 24 nt, Artificial Sequence
  Synthetic
uuuaagguucuuagcuuccuugca

SEQ ID NO: 154104 - RNA, 21 nt, Artificial Sequence
  Synthetic
acccgggaggcggagcuugca

SEQ ID NO: 154105 - RNA, 22 nt, Artificial Sequence
  Synthetic
aacccgggaggcggagcuugca

SEQ ID NO: 154106 - RNA, 24 nt, Artificial Sequence
  Synthetic
ugaacccgggaggcggagcuugca

SEQ ID NO: 154107 - RNA, 18 nt, Artificial Sequence
  Synthetic
caggagacagagguugca

SEQ ID NO: 154108 - RNA, 19 nt, Artificial Sequence
  Synthetic
ccaggagacagagguugca

SEQ ID NO: 154109 - RNA, 20 nt, Artificial Sequence
  Synthetic
cccaggagacagagguugca

SEQ ID NO: 154110 - RNA, 21 nt, Artificial Sequence
  Synthetic
acccaggagacagagguugca

SEQ ID NO: 154111 - RNA, 22 nt, Artificial Sequence
  Synthetic
aacccaggagacagagguugca

SEQ ID NO: 154112 - RNA, 24 nt, Artificial Sequence
  Synthetic
ugaacccaggagacagagguugca

SEQ ID NO: 154113 - RNA, 18 nt, Artificial Sequence
  Synthetic
agggagucagagguugca

SEQ ID NO: 154114 - RNA, 19 nt, Artificial Sequence
  Synthetic
cagggagucagagguugca

SEQ ID NO: 154115 - RNA, 20 nt, Artificial Sequence
  Synthetic
ccagggagucagagguugca

SEQ ID NO: 154116 - RNA, 21 nt, Artificial Sequence
  Synthetic
accagggagucagagguugca

SEQ ID NO: 154117 - RNA, 22 nt, Artificial Sequence
  Synthetic
aaccagggagucagagguugca

SEQ ID NO: 154118 - RNA, 24 nt, Artificial Sequence
  Synthetic
ugaaccagggagucagagguugca

SEQ ID NO: 154119 - RNA, 18 nt, Artificial Sequence
  Synthetic
caagaggugguauuugca

SEQ ID NO: 154120 - RNA, 19 nt, Artificial Sequence
  Synthetic
ccaagaggugguauuugca

SEQ ID NO: 154121 - RNA, 20 nt, Artificial Sequence
  Synthetic
uccaagaggugguauuugca

SEQ ID NO: 154122 - RNA, 18 nt, Artificial Sequence
  Synthetic
uaccuuuuguucuuugca

SEQ ID NO: 154123 - RNA, 19 nt, Artificial Sequence
  Synthetic
auaccuuuuguucuuugca

SEQ ID NO: 154124 - RNA, 20 nt, Artificial Sequence
  Synthetic
aauaccuuuuguucuuugca

SEQ ID NO: 154125 - RNA, 18 nt, Artificial Sequence
  Synthetic
aacccuucaaaaaaauca

SEQ ID NO: 154126 - RNA, 19 nt, Artificial Sequence
  Synthetic
aaacccuucaaaaaaauca

SEQ ID NO: 154127 - RNA, 20 nt, Artificial Sequence
  Synthetic
aaaacccuucaaaaaaauca

SEQ ID NO: 154128 - RNA, 21 nt, Artificial Sequence
  Synthetic
aaaaacccuucaaaaaaauca

SEQ ID NO: 154129 - RNA, 22 nt, Artificial Sequence
  Synthetic
aaaaaacccuucaaaaaaauca

SEQ ID NO: 154130 - RNA, 23 nt, Artificial Sequence
  Synthetic
caaaaaacccuucaaaaaaauca

SEQ ID NO: 154131 - RNA, 24 nt, Artificial Sequence
  Synthetic
acaaaaaacccuucaaaaaaauca

SEQ ID NO: 154132 - RNA, 18 nt, Artificial Sequence
  Synthetic
aaacccuucaaaaaauca

SEQ ID NO: 154133 - RNA, 19 nt, Artificial Sequence
  Synthetic
aaaacccuucaaaaaauca

SEQ ID NO: 154134 - RNA, 20 nt, Artificial Sequence
  Synthetic
aaaaacccuucaaaaaauca

SEQ ID NO: 154135 - RNA, 21 nt, Artificial Sequence
  Synthetic
aaaaaacccuucaaaaaauca

SEQ ID NO: 154136 - RNA, 22 nt, Artificial Sequence
  Synthetic
caaaaaacccuucaaaaaauca

SEQ ID NO: 154137 - RNA, 23 nt, Artificial Sequence
  Synthetic
acaaaaaacccuucaaaaaauca

SEQ ID NO: 154138 - RNA, 24 nt, Artificial Sequence
  Synthetic
cacaaaaaacccuucaaaaaauca

SEQ ID NO: 154139 - RNA, 18 nt, Artificial Sequence
  Synthetic
uauauauauauaaaauca

SEQ ID NO: 154140 - RNA, 19 nt, Artificial Sequence
  Synthetic
auauauauauauaaaauca

SEQ ID NO: 154141 - RNA, 20 nt, Artificial Sequence
  Synthetic
uauauauauauauaaaauca

SEQ ID NO: 154142 - RNA, 21 nt, Artificial Sequence
  Synthetic
auauauauauauauaaaauca

SEQ ID NO: 154143 - RNA, 22 nt, Artificial Sequence
  Synthetic
uauauauauauauauaaaauca

SEQ ID NO: 154144 - RNA, 23 nt, Artificial Sequence
  Synthetic
auauauauauauauauaaaauca

SEQ ID NO: 154145 - RNA, 24 nt, Artificial Sequence
  Synthetic
uauauauauauauauauaaaauca

SEQ ID NO: 154146 - RNA, 18 nt, Artificial Sequence
  Synthetic
cuaucucaucacaaauca

SEQ ID NO: 154147 - RNA, 19 nt, Artificial Sequence
  Synthetic
ucuaucucaucacaaauca

SEQ ID NO: 154148 - RNA, 20 nt, Artificial Sequence
  Synthetic
aucuaucucaucacaaauca

SEQ ID NO: 154149 - RNA, 18 nt, Artificial Sequence
  Synthetic
auaaaaauguucaaauca

SEQ ID NO: 154150 - RNA, 19 nt, Artificial Sequence
  Synthetic
aauaaaaauguucaaauca

SEQ ID NO: 154151 - RNA, 18 nt, Artificial Sequence
  Synthetic
ccaguuuuuggugaauca

SEQ ID NO: 154152 - RNA, 19 nt, Artificial Sequence
  Synthetic
cccaguuuuuggugaauca

SEQ ID NO: 154153 - RNA, 20 nt, Artificial Sequence
  Synthetic
acccaguuuuuggugaauca

SEQ ID NO: 154154 - RNA, 21 nt, Artificial Sequence
  Synthetic
uacccaguuuuuggugaauca

SEQ ID NO: 154155 - RNA, 22 nt, Artificial Sequence
  Synthetic
uuacccaguuuuuggugaauca

SEQ ID NO: 154156 - RNA, 23 nt, Artificial Sequence
  Synthetic
uuuacccaguuuuuggugaauca

SEQ ID NO: 154157 - RNA, 24 nt, Artificial Sequence
  Synthetic
auuuacccaguuuuuggugaauca

SEQ ID NO: 154158 - RNA, 19 nt, Artificial Sequence
  Synthetic
uguggagguaauugaauca

SEQ ID NO: 154159 - RNA, 20 nt, Artificial Sequence
  Synthetic
auguggagguaauugaauca

SEQ ID NO: 154160 - RNA, 21 nt, Artificial Sequence
  Synthetic
uauguggagguaauugaauca

SEQ ID NO: 154161 - RNA, 22 nt, Artificial Sequence
  Synthetic
cuauguggagguaauugaauca

SEQ ID NO: 154162 - RNA, 18 nt, Artificial Sequence
  Synthetic
aaaaggugcucaacauca

SEQ ID NO: 154163 - RNA, 20 nt, Artificial Sequence
  Synthetic
ugaaaaggugcucaacauca

SEQ ID NO: 154164 - RNA, 21 nt, Artificial Sequence
  Synthetic
augaaaaggugcucaacauca

SEQ ID NO: 154165 - RNA, 22 nt, Artificial Sequence
  Synthetic
uaugaaaaggugcucaacauca

SEQ ID NO: 154166 - RNA, 23 nt, Artificial Sequence
  Synthetic
auaugaaaaggugcucaacauca

SEQ ID NO: 154167 - RNA, 24 nt, Artificial Sequence
  Synthetic
cauaugaaaaggugcucaacauca

SEQ ID NO: 154168 - RNA, 21 nt, Artificial Sequence
  Synthetic
cagaaauacaaacuaccauca

SEQ ID NO: 154169 - RNA, 22 nt, Artificial Sequence
  Synthetic
acagaaauacaaacuaccauca

SEQ ID NO: 154170 - RNA, 23 nt, Artificial Sequence
  Synthetic
cacagaaauacaaacuaccauca

SEQ ID NO: 154171 - RNA, 24 nt, Artificial Sequence
  Synthetic
ccacagaaauacaaacuaccauca

SEQ ID NO: 154172 - RNA, 18 nt, Artificial Sequence
  Synthetic
caacaaaacagcccauca

SEQ ID NO: 154173 - RNA, 19 nt, Artificial Sequence
  Synthetic
acaacaaaacagcccauca

SEQ ID NO: 154174 - RNA, 20 nt, Artificial Sequence
  Synthetic
uacaacaaaacagcccauca

SEQ ID NO: 154175 - RNA, 20 nt, Artificial Sequence
  Synthetic
uggucuuccaccuuccauca

SEQ ID NO: 154176 - RNA, 21 nt, Artificial Sequence
  Synthetic
uuggucuuccaccuuccauca

SEQ ID NO: 154177 - RNA, 22 nt, Artificial Sequence
  Synthetic
uuuggucuuccaccuuccauca

SEQ ID NO: 154178 - RNA, 23 nt, Artificial Sequence
  Synthetic
uuuuggucuuccaccuuccauca

SEQ ID NO: 154179 - RNA, 24 nt, Artificial Sequence
  Synthetic
cuuuuggucuuccaccuuccauca

SEQ ID NO: 154180 - RNA, 18 nt, Artificial Sequence
  Synthetic
ccuuugaguuacucauca

SEQ ID NO: 154181 - RNA, 19 nt, Artificial Sequence
  Synthetic
cccuuugaguuacucauca

SEQ ID NO: 154182 - RNA, 20 nt, Artificial Sequence
  Synthetic
ccccuuugaguuacucauca

SEQ ID NO: 154183 - RNA, 21 nt, Artificial Sequence
  Synthetic
accccuuugaguuacucauca

SEQ ID NO: 154184 - RNA, 22 nt, Artificial Sequence
  Synthetic
caccccuuugaguuacucauca

SEQ ID NO: 154185 - RNA, 23 nt, Artificial Sequence
  Synthetic
ccaccccuuugaguuacucauca

SEQ ID NO: 154186 - RNA, 24 nt, Artificial Sequence
  Synthetic
accaccccuuugaguuacucauca

SEQ ID NO: 154187 - RNA, 18 nt, Artificial Sequence
  Synthetic
uguuuuauuuuuucauca

SEQ ID NO: 154188 - RNA, 19 nt, Artificial Sequence
  Synthetic
uuguuuuauuuuuucauca

SEQ ID NO: 154189 - RNA, 20 nt, Artificial Sequence
  Synthetic
auuguuuuauuuuuucauca

SEQ ID NO: 154190 - RNA, 21 nt, Artificial Sequence
  Synthetic
uauuguuuuauuuuuucauca

SEQ ID NO: 154191 - RNA, 22 nt, Artificial Sequence
  Synthetic
uuauuguuuuauuuuuucauca

SEQ ID NO: 154192 - RNA, 23 nt, Artificial Sequence
  Synthetic
auuauuguuuuauuuuuucauca

SEQ ID NO: 154193 - RNA, 24 nt, Artificial Sequence
  Synthetic
aauuauuguuuuauuuuuucauca

SEQ ID NO: 154194 - RNA, 18 nt, Artificial Sequence
  Synthetic
uaauaaaaaaaaagauca

SEQ ID NO: 154195 - RNA, 19 nt, Artificial Sequence
  Synthetic
auaauaaaaaaaaagauca

SEQ ID NO: 154196 - RNA, 20 nt, Artificial Sequence
  Synthetic
aauaauaaaaaaaaagauca

SEQ ID NO: 154197 - RNA, 18 nt, Artificial Sequence
  Synthetic
aagugugggugaagauca

SEQ ID NO: 154198 - RNA, 20 nt, Artificial Sequence
  Synthetic
agaagugugggugaagauca

SEQ ID NO: 154199 - RNA, 18 nt, Artificial Sequence
  Synthetic
ugagguaauugaggauca

SEQ ID NO: 154200 - RNA, 21 nt, Artificial Sequence
  Synthetic
aggugagguaauugaggauca

SEQ ID NO: 154201 - RNA, 22 nt, Artificial Sequence
  Synthetic
caggugagguaauugaggauca

SEQ ID NO: 154202 - RNA, 23 nt, Artificial Sequence
  Synthetic
acaggugagguaauugaggauca

SEQ ID NO: 154203 - RNA, 24 nt, Artificial Sequence
  Synthetic
uacaggugagguaauugaggauca

SEQ ID NO: 154204 - RNA, 18 nt, Artificial Sequence
  Synthetic
uaaauauacauuauauca

SEQ ID NO: 154205 - RNA, 19 nt, Artificial Sequence
  Synthetic
auaaauauacauuauauca

SEQ ID NO: 154206 - RNA, 21 nt, Artificial Sequence
  Synthetic
ugauaaauauacauuauauca

SEQ ID NO: 154207 - RNA, 22 nt, Artificial Sequence
  Synthetic
augauaaauauacauuauauca

SEQ ID NO: 154208 - RNA, 24 nt, Artificial Sequence
  Synthetic
ugaugauaaauauacauuauauca

SEQ ID NO: 154209 - RNA, 18 nt, Artificial Sequence
  Synthetic
ccugaacacagagccuca

SEQ ID NO: 154210 - RNA, 19 nt, Artificial Sequence
  Synthetic
cccugaacacagagccuca

SEQ ID NO: 154211 - RNA, 20 nt, Artificial Sequence
  Synthetic
ccccugaacacagagccuca

SEQ ID NO: 154212 - RNA, 18 nt, Artificial Sequence
  Synthetic
cuugaacuucuggccuca

SEQ ID NO: 154213 - RNA, 19 nt, Artificial Sequence
  Synthetic
ucuugaacuucuggccuca

SEQ ID NO: 154214 - RNA, 20 nt, Artificial Sequence
  Synthetic
cucuugaacuucuggccuca

SEQ ID NO: 154215 - RNA, 22 nt, Artificial Sequence
  Synthetic
ugcucuugaacuucuggccuca

SEQ ID NO: 154216 - RNA, 23 nt, Artificial Sequence
  Synthetic
uugcucuugaacuucuggccuca

SEQ ID NO: 154217 - RNA, 19 nt, Artificial Sequence
  Synthetic
agauuuaauuacugccuca

SEQ ID NO: 154218 - RNA, 20 nt, Artificial Sequence
  Synthetic
aagauuuaauuacugccuca

SEQ ID NO: 154219 - RNA, 21 nt, Artificial Sequence
  Synthetic
uaagauuuaauuacugccuca

SEQ ID NO: 154220 - RNA, 22 nt, Artificial Sequence
  Synthetic
uuaagauuuaauuacugccuca

SEQ ID NO: 154221 - RNA, 23 nt, Artificial Sequence
  Synthetic
uuuaagauuuaauuacugccuca

SEQ ID NO: 154222 - RNA, 24 nt, Artificial Sequence
  Synthetic
cuuuaagauuuaauuacugccuca

SEQ ID NO: 154223 - RNA, 18 nt, Artificial Sequence
  Synthetic
auauauauauauaucuca

SEQ ID NO: 154224 - RNA, 19 nt, Artificial Sequence
  Synthetic
uauauauauauauaucuca

SEQ ID NO: 154225 - RNA, 20 nt, Artificial Sequence
  Synthetic
auauauauauauauaucuca

SEQ ID NO: 154226 - RNA, 21 nt, Artificial Sequence
  Synthetic
cauauauauauauauaucuca

SEQ ID NO: 154227 - RNA, 22 nt, Artificial Sequence
  Synthetic
acauauauauauauauaucuca

SEQ ID NO: 154228 - RNA, 23 nt, Artificial Sequence
  Synthetic
uacauauauauauauauaucuca

SEQ ID NO: 154229 - RNA, 24 nt, Artificial Sequence
  Synthetic
uuacauauauauauauauaucuca

SEQ ID NO: 154230 - RNA, 18 nt, Artificial Sequence
  Synthetic
ugauucaauuaccucuca

SEQ ID NO: 154231 - RNA, 19 nt, Artificial Sequence
  Synthetic
augauucaauuaccucuca

SEQ ID NO: 154232 - RNA, 20 nt, Artificial Sequence
  Synthetic
caugauucaauuaccucuca

SEQ ID NO: 154233 - RNA, 21 nt, Artificial Sequence
  Synthetic
ccaugauucaauuaccucuca

SEQ ID NO: 154234 - RNA, 22 nt, Artificial Sequence
  Synthetic
uccaugauucaauuaccucuca

SEQ ID NO: 154235 - RNA, 23 nt, Artificial Sequence
  Synthetic
cuccaugauucaauuaccucuca

SEQ ID NO: 154236 - RNA, 24 nt, Artificial Sequence
  Synthetic
ccuccaugauucaauuaccucuca

SEQ ID NO: 154237 - RNA, 18 nt, Artificial Sequence
  Synthetic
acacaccggggccucuca

SEQ ID NO: 154238 - RNA, 19 nt, Artificial Sequence
  Synthetic
cacacaccggggccucuca

SEQ ID NO: 154239 - RNA, 20 nt, Artificial Sequence
  Synthetic
ucacacaccggggccucuca

SEQ ID NO: 154240 - RNA, 21 nt, Artificial Sequence
  Synthetic
aucacacaccggggccucuca

SEQ ID NO: 154241 - RNA, 22 nt, Artificial Sequence
  Synthetic
caucacacaccggggccucuca

SEQ ID NO: 154242 - RNA, 23 nt, Artificial Sequence
  Synthetic
acaucacacaccggggccucuca

SEQ ID NO: 154243 - RNA, 24 nt, Artificial Sequence
  Synthetic
aacaucacacaccggggccucuca

SEQ ID NO: 154244 - RNA, 19 nt, Artificial Sequence
  Synthetic
agagugaaacaccgucuca

SEQ ID NO: 154245 - RNA, 20 nt, Artificial Sequence
  Synthetic
aagagugaaacaccgucuca

SEQ ID NO: 154246 - RNA, 21 nt, Artificial Sequence
  Synthetic
caagagugaaacaccgucuca

SEQ ID NO: 154247 - RNA, 22 nt, Artificial Sequence
  Synthetic
acaagagugaaacaccgucuca

SEQ ID NO: 154248 - RNA, 23 nt, Artificial Sequence
  Synthetic
aacaagagugaaacaccgucuca

SEQ ID NO: 154249 - RNA, 24 nt, Artificial Sequence
  Synthetic
caacaagagugaaacaccgucuca

SEQ ID NO: 154250 - RNA, 18 nt, Artificial Sequence
  Synthetic
cagaaacuuugggucuca

SEQ ID NO: 154251 - RNA, 19 nt, Artificial Sequence
  Synthetic
ucagaaacuuugggucuca

SEQ ID NO: 154252 - RNA, 21 nt, Artificial Sequence
  Synthetic
agucagaaacuuugggucuca

SEQ ID NO: 154253 - RNA, 22 nt, Artificial Sequence
  Synthetic
aagucagaaacuuugggucuca

SEQ ID NO: 154254 - RNA, 23 nt, Artificial Sequence
  Synthetic
aaagucagaaacuuugggucuca

SEQ ID NO: 154255 - RNA, 24 nt, Artificial Sequence
  Synthetic
uaaagucagaaacuuugggucuca

SEQ ID NO: 154256 - RNA, 18 nt, Artificial Sequence
  Synthetic
caauauuguugugucuca

SEQ ID NO: 154257 - RNA, 19 nt, Artificial Sequence
  Synthetic
ucaauauuguugugucuca

SEQ ID NO: 154258 - RNA, 20 nt, Artificial Sequence
  Synthetic
uucaauauuguugugucuca

SEQ ID NO: 154259 - RNA, 21 nt, Artificial Sequence
  Synthetic
uuucaauauuguugugucuca

SEQ ID NO: 154260 - RNA, 22 nt, Artificial Sequence
  Synthetic
auuucaauauuguugugucuca

SEQ ID NO: 154261 - RNA, 23 nt, Artificial Sequence
  Synthetic
aauuucaauauuguugugucuca

SEQ ID NO: 154262 - RNA, 24 nt, Artificial Sequence
  Synthetic
uaauuucaauauuguugugucuca

SEQ ID NO: 154263 - RNA, 18 nt, Artificial Sequence
  Synthetic
cuuggguugcucuucuca

SEQ ID NO: 154264 - RNA, 19 nt, Artificial Sequence
  Synthetic
ucuuggguugcucuucuca

SEQ ID NO: 154265 - RNA, 21 nt, Artificial Sequence
  Synthetic
ugucuuggguugcucuucuca

SEQ ID NO: 154266 - RNA, 23 nt, Artificial Sequence
  Synthetic
ugugucuuggguugcucuucuca

SEQ ID NO: 154267 - RNA, 24 nt, Artificial Sequence
  Synthetic
augugucuuggguugcucuucuca

SEQ ID NO: 154268 - RNA, 20 nt, Artificial Sequence
  Synthetic
aggaauacauuuauuucuca

SEQ ID NO: 154269 - RNA, 18 nt, Artificial Sequence
  Synthetic
cuuuaguaggggaaguca

SEQ ID NO: 154270 - RNA, 19 nt, Artificial Sequence
  Synthetic
acuuuaguaggggaaguca

SEQ ID NO: 154271 - RNA, 18 nt, Artificial Sequence
  Synthetic
uuuuuuuuuagugaguca

SEQ ID NO: 154272 - RNA, 19 nt, Artificial Sequence
  Synthetic
uuuuuuuuuuagugaguca

SEQ ID NO: 154273 - RNA, 20 nt, Artificial Sequence
  Synthetic
auuuuuuuuuuagugaguca

SEQ ID NO: 154274 - RNA, 18 nt, Artificial Sequence
  Synthetic
uuaauuuuaaaauaguca

SEQ ID NO: 154275 - RNA, 19 nt, Artificial Sequence
  Synthetic
auuaauuuuaaaauaguca

SEQ ID NO: 154276 - RNA, 20 nt, Artificial Sequence
  Synthetic
aauuaauuuuaaaauaguca

SEQ ID NO: 154277 - RNA, 20 nt, Artificial Sequence
  Synthetic
agguugggcauucuuaguca

SEQ ID NO: 154278 - RNA, 23 nt, Artificial Sequence
  Synthetic
aggagguugggcauucuuaguca

SEQ ID NO: 154279 - RNA, 24 nt, Artificial Sequence
  Synthetic
caggagguugggcauucuuaguca

SEQ ID NO: 154280 - RNA, 18 nt, Artificial Sequence
  Synthetic
aaaauaauuuuuuaguca

SEQ ID NO: 154281 - RNA, 19 nt, Artificial Sequence
  Synthetic
uaaaauaauuuuuuaguca

SEQ ID NO: 154282 - RNA, 20 nt, Artificial Sequence
  Synthetic
auaaaauaauuuuuuaguca

SEQ ID NO: 154283 - RNA, 19 nt, Artificial Sequence
  Synthetic
agcaagggagagaagguca

SEQ ID NO: 154284 - RNA, 19 nt, Artificial Sequence
  Synthetic
agcaacuaacuugauguca

SEQ ID NO: 154285 - RNA, 20 nt, Artificial Sequence
  Synthetic
aagcaacuaacuugauguca

SEQ ID NO: 154286 - RNA, 21 nt, Artificial Sequence
  Synthetic
caagcaacuaacuugauguca

SEQ ID NO: 154287 - RNA, 22 nt, Artificial Sequence
  Synthetic
ucaagcaacuaacuugauguca

SEQ ID NO: 154288 - RNA, 23 nt, Artificial Sequence
  Synthetic
uucaagcaacuaacuugauguca

SEQ ID NO: 154289 - RNA, 24 nt, Artificial Sequence
  Synthetic
uuucaagcaacuaacuugauguca

SEQ ID NO: 154290 - RNA, 18 nt, Artificial Sequence
  Synthetic
acacaccggggccuguca

SEQ ID NO: 154291 - RNA, 19 nt, Artificial Sequence
  Synthetic
cacacaccggggccuguca

SEQ ID NO: 154292 - RNA, 20 nt, Artificial Sequence
  Synthetic
ucacacaccggggccuguca

SEQ ID NO: 154293 - RNA, 21 nt, Artificial Sequence
  Synthetic
aucacacaccggggccuguca

SEQ ID NO: 154294 - RNA, 22 nt, Artificial Sequence
  Synthetic
caucacacaccggggccuguca

SEQ ID NO: 154295 - RNA, 23 nt, Artificial Sequence
  Synthetic
acaucacacaccggggccuguca

SEQ ID NO: 154296 - RNA, 24 nt, Artificial Sequence
  Synthetic
aacaucacacaccggggccuguca

SEQ ID NO: 154297 - RNA, 18 nt, Artificial Sequence
  Synthetic
acacacuggggccuguca

SEQ ID NO: 154298 - RNA, 19 nt, Artificial Sequence
  Synthetic
cacacacuggggccuguca

SEQ ID NO: 154299 - RNA, 20 nt, Artificial Sequence
  Synthetic
ucacacacuggggccuguca

SEQ ID NO: 154300 - RNA, 21 nt, Artificial Sequence
  Synthetic
aucacacacuggggccuguca

SEQ ID NO: 154301 - RNA, 22 nt, Artificial Sequence
  Synthetic
caucacacacuggggccuguca

SEQ ID NO: 154302 - RNA, 23 nt, Artificial Sequence
  Synthetic
acaucacacacuggggccuguca

SEQ ID NO: 154303 - RNA, 24 nt, Artificial Sequence
  Synthetic
aacaucacacacuggggccuguca

SEQ ID NO: 154304 - RNA, 18 nt, Artificial Sequence
  Synthetic
auguauuucauuuuguca

SEQ ID NO: 154305 - RNA, 19 nt, Artificial Sequence
  Synthetic
aauguauuucauuuuguca

SEQ ID NO: 154306 - RNA, 20 nt, Artificial Sequence
  Synthetic
aaauguauuucauuuuguca

SEQ ID NO: 154307 - RNA, 21 nt, Artificial Sequence
  Synthetic
uaaauguauuucauuuuguca

SEQ ID NO: 154308 - RNA, 22 nt, Artificial Sequence
  Synthetic
uuaaauguauuucauuuuguca

SEQ ID NO: 154309 - RNA, 23 nt, Artificial Sequence
  Synthetic
uuuaaauguauuucauuuuguca

SEQ ID NO: 154310 - RNA, 24 nt, Artificial Sequence
  Synthetic
uuuuaaauguauuucauuuuguca

SEQ ID NO: 154311 - RNA, 18 nt, Artificial Sequence
  Synthetic
uuucuaaaauagaauuca

SEQ ID NO: 154312 - RNA, 20 nt, Artificial Sequence
  Synthetic
uguuucuaaaauagaauuca

SEQ ID NO: 154313 - RNA, 18 nt, Artificial Sequence
  Synthetic
uuuuugaaguagaauuca

SEQ ID NO: 154314 - RNA, 19 nt, Artificial Sequence
  Synthetic
auuuuugaaguagaauuca

SEQ ID NO: 154315 - RNA, 20 nt, Artificial Sequence
  Synthetic
aauuuuugaaguagaauuca

SEQ ID NO: 154316 - RNA, 18 nt, Artificial Sequence
  Synthetic
caccucucucggcauuca

SEQ ID NO: 154317 - RNA, 19 nt, Artificial Sequence
  Synthetic
ucaccucucucggcauuca

SEQ ID NO: 154318 - RNA, 20 nt, Artificial Sequence
  Synthetic
cucaccucucucggcauuca

SEQ ID NO: 154319 - RNA, 21 nt, Artificial Sequence
  Synthetic
ccucaccucucucggcauuca

SEQ ID NO: 154320 - RNA, 22 nt, Artificial Sequence
  Synthetic
uccucaccucucucggcauuca

SEQ ID NO: 154321 - RNA, 23 nt, Artificial Sequence
  Synthetic
uuccucaccucucucggcauuca

SEQ ID NO: 154322 - RNA, 24 nt, Artificial Sequence
  Synthetic
cuuccucaccucucucggcauuca

SEQ ID NO: 154323 - RNA, 18 nt, Artificial Sequence
  Synthetic
auuucauuuauucauuca

SEQ ID NO: 154324 - RNA, 19 nt, Artificial Sequence
  Synthetic
cauuucauuuauucauuca

SEQ ID NO: 154325 - RNA, 18 nt, Artificial Sequence
  Synthetic
aaugcagauugugauuca

SEQ ID NO: 154326 - RNA, 19 nt, Artificial Sequence
  Synthetic
aaaugcagauugugauuca

SEQ ID NO: 154327 - RNA, 20 nt, Artificial Sequence
  Synthetic
aaaaugcagauugugauuca

SEQ ID NO: 154328 - RNA, 21 nt, Artificial Sequence
  Synthetic
uaaaaugcagauugugauuca

SEQ ID NO: 154329 - RNA, 22 nt, Artificial Sequence
  Synthetic
uuaaaaugcagauugugauuca

SEQ ID NO: 154330 - RNA, 23 nt, Artificial Sequence
  Synthetic
auuaaaaugcagauugugauuca

SEQ ID NO: 154331 - RNA, 24 nt, Artificial Sequence
  Synthetic
uauuaaaaugcagauugugauuca

SEQ ID NO: 154332 - RNA, 18 nt, Artificial Sequence
  Synthetic
uuuuuuguucuuuauuca

SEQ ID NO: 154333 - RNA, 19 nt, Artificial Sequence
  Synthetic
cuuuuuuguucuuuauuca

SEQ ID NO: 154334 - RNA, 20 nt, Artificial Sequence
  Synthetic
ccuuuuuuguucuuuauuca

SEQ ID NO: 154335 - RNA, 18 nt, Artificial Sequence
  Synthetic
ucucauaaugaaacuuca

SEQ ID NO: 154336 - RNA, 19 nt, Artificial Sequence
  Synthetic
aucucauaaugaaacuuca

SEQ ID NO: 154337 - RNA, 20 nt, Artificial Sequence
  Synthetic
caucucauaaugaaacuuca

SEQ ID NO: 154338 - RNA, 18 nt, Artificial Sequence
  Synthetic
auucuacucucuacuuca

SEQ ID NO: 154339 - RNA, 19 nt, Artificial Sequence
  Synthetic
cauucuacucucuacuuca

SEQ ID NO: 154340 - RNA, 20 nt, Artificial Sequence
  Synthetic
ccauucuacucucuacuuca

SEQ ID NO: 154341 - RNA, 21 nt, Artificial Sequence
  Synthetic
accauucuacucucuacuuca

SEQ ID NO: 154342 - RNA, 22 nt, Artificial Sequence
  Synthetic
caccauucuacucucuacuuca

SEQ ID NO: 154343 - RNA, 23 nt, Artificial Sequence
  Synthetic
ccaccauucuacucucuacuuca

SEQ ID NO: 154344 - RNA, 24 nt, Artificial Sequence
  Synthetic
accaccauucuacucucuacuuca

SEQ ID NO: 154345 - RNA, 18 nt, Artificial Sequence
  Synthetic
augauagcaccugcuuca

SEQ ID NO: 154346 - RNA, 19 nt, Artificial Sequence
  Synthetic
aaugauagcaccugcuuca

SEQ ID NO: 154347 - RNA, 20 nt, Artificial Sequence
  Synthetic
caaugauagcaccugcuuca

SEQ ID NO: 154348 - RNA, 21 nt, Artificial Sequence
  Synthetic
acaaugauagcaccugcuuca

SEQ ID NO: 154349 - RNA, 20 nt, Artificial Sequence
  Synthetic
uggcagaaggcaccucuuca

SEQ ID NO: 154350 - RNA, 21 nt, Artificial Sequence
  Synthetic
auggcagaaggcaccucuuca

SEQ ID NO: 154351 - RNA, 22 nt, Artificial Sequence
  Synthetic
cauggcagaaggcaccucuuca

SEQ ID NO: 154352 - RNA, 23 nt, Artificial Sequence
  Synthetic
ucauggcagaaggcaccucuuca

SEQ ID NO: 154353 - RNA, 24 nt, Artificial Sequence
  Synthetic
aucauggcagaaggcaccucuuca

SEQ ID NO: 154354 - RNA, 18 nt, Artificial Sequence
  Synthetic
uaccaaugacuuucuuca

SEQ ID NO: 154355 - RNA, 19 nt, Artificial Sequence
  Synthetic
cuaccaaugacuuucuuca

SEQ ID NO: 154356 - RNA, 21 nt, Artificial Sequence
  Synthetic
agcuaccaaugacuuucuuca

SEQ ID NO: 154357 - RNA, 22 nt, Artificial Sequence
  Synthetic
aagcuaccaaugacuuucuuca

SEQ ID NO: 154358 - RNA, 23 nt, Artificial Sequence
  Synthetic
caagcuaccaaugacuuucuuca

SEQ ID NO: 154359 - RNA, 24 nt, Artificial Sequence
  Synthetic
ucaagcuaccaaugacuuucuuca

SEQ ID NO: 154360 - RNA, 18 nt, Artificial Sequence
  Synthetic
uaccauugacuuucuuca

SEQ ID NO: 154361 - RNA, 19 nt, Artificial Sequence
  Synthetic
cuaccauugacuuucuuca

SEQ ID NO: 154362 - RNA, 21 nt, Artificial Sequence
  Synthetic
agcuaccauugacuuucuuca

SEQ ID NO: 154363 - RNA, 22 nt, Artificial Sequence
  Synthetic
aagcuaccauugacuuucuuca

SEQ ID NO: 154364 - RNA, 23 nt, Artificial Sequence
  Synthetic
caagcuaccauugacuuucuuca

SEQ ID NO: 154365 - RNA, 24 nt, Artificial Sequence
  Synthetic
ucaagcuaccauugacuuucuuca

SEQ ID NO: 154366 - RNA, 19 nt, Artificial Sequence
  Synthetic
aguugaggcaguuucuuca

SEQ ID NO: 154367 - RNA, 20 nt, Artificial Sequence
  Synthetic
uaguugaggcaguuucuuca

SEQ ID NO: 154368 - RNA, 21 nt, Artificial Sequence
  Synthetic
uuaguugaggcaguuucuuca

SEQ ID NO: 154369 - RNA, 23 nt, Artificial Sequence
  Synthetic
uguuaguugaggcaguuucuuca

SEQ ID NO: 154370 - RNA, 24 nt, Artificial Sequence
  Synthetic
cuguuaguugaggcaguuucuuca

SEQ ID NO: 154371 - RNA, 18 nt, Artificial Sequence
  Synthetic
augcuuuccaagaguuca

SEQ ID NO: 154372 - RNA, 19 nt, Artificial Sequence
  Synthetic
aaugcuuuccaagaguuca

SEQ ID NO: 154373 - RNA, 20 nt, Artificial Sequence
  Synthetic
aaaugcuuuccaagaguuca

SEQ ID NO: 154374 - RNA, 21 nt, Artificial Sequence
  Synthetic
aaaaugcuuuccaagaguuca

SEQ ID NO: 154375 - RNA, 23 nt, Artificial Sequence
  Synthetic
agaaaaugcuuuccaagaguuca

SEQ ID NO: 154376 - RNA, 24 nt, Artificial Sequence
  Synthetic
aagaaaaugcuuuccaagaguuca

SEQ ID NO: 154377 - RNA, 18 nt, Artificial Sequence
  Synthetic
ccuccgccuccagguuca

SEQ ID NO: 154378 - RNA, 19 nt, Artificial Sequence
  Synthetic
accuccgccuccagguuca

SEQ ID NO: 154379 - RNA, 20 nt, Artificial Sequence
  Synthetic
aaccuccgccuccagguuca

SEQ ID NO: 154380 - RNA, 21 nt, Artificial Sequence
  Synthetic
caaccuccgccuccagguuca

SEQ ID NO: 154381 - RNA, 23 nt, Artificial Sequence
  Synthetic
ugcaaccuccgccuccagguuca

SEQ ID NO: 154382 - RNA, 24 nt, Artificial Sequence
  Synthetic
cugcaaccuccgccuccagguuca

SEQ ID NO: 154383 - RNA, 18 nt, Artificial Sequence
  Synthetic
cucugccuccuggguuca

SEQ ID NO: 154384 - RNA, 19 nt, Artificial Sequence
  Synthetic
ccucugccuccuggguuca

SEQ ID NO: 154385 - RNA, 21 nt, Artificial Sequence
  Synthetic
agccucugccuccuggguuca

SEQ ID NO: 154386 - RNA, 22 nt, Artificial Sequence
  Synthetic
cagccucugccuccuggguuca

SEQ ID NO: 154387 - RNA, 24 nt, Artificial Sequence
  Synthetic
ugcagccucugccuccuggguuca

SEQ ID NO: 154388 - RNA, 18 nt, Artificial Sequence
  Synthetic
cuccaguuccuggguuca

SEQ ID NO: 154389 - RNA, 19 nt, Artificial Sequence
  Synthetic
ccuccaguuccuggguuca

SEQ ID NO: 154390 - RNA, 20 nt, Artificial Sequence
  Synthetic
uccuccaguuccuggguuca

SEQ ID NO: 154391 - RNA, 21 nt, Artificial Sequence
  Synthetic
uuccuccaguuccuggguuca

SEQ ID NO: 154392 - RNA, 22 nt, Artificial Sequence
  Synthetic
cuuccuccaguuccuggguuca

SEQ ID NO: 154393 - RNA, 24 nt, Artificial Sequence
  Synthetic
ugcuuccuccaguuccuggguuca

SEQ ID NO: 154394 - RNA, 19 nt, Artificial Sequence
  Synthetic
aguuggagguggaauuuca

SEQ ID NO: 154395 - RNA, 20 nt, Artificial Sequence
  Synthetic
uaguuggagguggaauuuca

SEQ ID NO: 154396 - RNA, 18 nt, Artificial Sequence
  Synthetic
acuucuaccuagauuuca

SEQ ID NO: 154397 - RNA, 19 nt, Artificial Sequence
  Synthetic
aacuucuaccuagauuuca

SEQ ID NO: 154398 - RNA, 23 nt, Artificial Sequence
  Synthetic
ugggaacuucuaccuagauuuca

SEQ ID NO: 154399 - RNA, 24 nt, Artificial Sequence
  Synthetic
uugggaacuucuaccuagauuuca

SEQ ID NO: 154400 - RNA, 18 nt, Artificial Sequence
  Synthetic
accucugccuagauuuca

SEQ ID NO: 154401 - RNA, 19 nt, Artificial Sequence
  Synthetic
aaccucugccuagauuuca

SEQ ID NO: 154402 - RNA, 23 nt, Artificial Sequence
  Synthetic
ugggaaccucugccuagauuuca

SEQ ID NO: 154403 - RNA, 24 nt, Artificial Sequence
  Synthetic
uugggaaccucugccuagauuuca

SEQ ID NO: 154404 - RNA, 19 nt, Artificial Sequence
  Synthetic
aggcauaauauauauuuca

SEQ ID NO: 154405 - RNA, 20 nt, Artificial Sequence
  Synthetic
uaggcauaauauauauuuca

SEQ ID NO: 154406 - RNA, 21 nt, Artificial Sequence
  Synthetic
auaggcauaauauauauuuca

SEQ ID NO: 154407 - RNA, 22 nt, Artificial Sequence
  Synthetic
aauaggcauaauauauauuuca

SEQ ID NO: 154408 - RNA, 23 nt, Artificial Sequence
  Synthetic
aaauaggcauaauauauauuuca

SEQ ID NO: 154409 - RNA, 18 nt, Artificial Sequence
  Synthetic
uuuuuauacagauuuuca

SEQ ID NO: 154410 - RNA, 19 nt, Artificial Sequence
  Synthetic
auuuuuauacagauuuuca

SEQ ID NO: 154411 - RNA, 20 nt, Artificial Sequence
  Synthetic
cauuuuuauacagauuuuca

SEQ ID NO: 154412 - RNA, 18 nt, Artificial Sequence
  Synthetic
uuuucaugaauauuuuca

SEQ ID NO: 154413 - RNA, 19 nt, Artificial Sequence
  Synthetic
auuuucaugaauauuuuca

SEQ ID NO: 154414 - RNA, 20 nt, Artificial Sequence
  Synthetic
aauuuucaugaauauuuuca

SEQ ID NO: 154415 - RNA, 18 nt, Artificial Sequence
  Synthetic
uaauaagaguacuuuuca

SEQ ID NO: 154416 - RNA, 19 nt, Artificial Sequence
  Synthetic
auaauaagaguacuuuuca

SEQ ID NO: 154417 - RNA, 20 nt, Artificial Sequence
  Synthetic
aauaauaagaguacuuuuca

SEQ ID NO: 154418 - RNA, 20 nt, Artificial Sequence
  Synthetic
uggaggaaggcaccuuuuca

SEQ ID NO: 154419 - RNA, 21 nt, Artificial Sequence
  Synthetic
auggaggaaggcaccuuuuca

SEQ ID NO: 154420 - RNA, 22 nt, Artificial Sequence
  Synthetic
cauggaggaaggcaccuuuuca

SEQ ID NO: 154421 - RNA, 23 nt, Artificial Sequence
  Synthetic
ucauggaggaaggcaccuuuuca

SEQ ID NO: 154422 - RNA, 24 nt, Artificial Sequence
  Synthetic
aucauggaggaaggcaccuuuuca

SEQ ID NO: 154423 - RNA, 18 nt, Artificial Sequence
  Synthetic
aaaagaaaagaaaaaaga

SEQ ID NO: 154424 - RNA, 19 nt, Artificial Sequence
  Synthetic
aaaaagaaaagaaaaaaga

SEQ ID NO: 154425 - RNA, 20 nt, Artificial Sequence
  Synthetic
uaaaaagaaaagaaaaaaga

SEQ ID NO: 154426 - RNA, 21 nt, Artificial Sequence
  Synthetic
auaaaaagaaaagaaaaaaga

SEQ ID NO: 154427 - RNA, 22 nt, Artificial Sequence
  Synthetic
aauaaaaagaaaagaaaaaaga

SEQ ID NO: 154428 - RNA, 23 nt, Artificial Sequence
  Synthetic
aaauaaaaagaaaagaaaaaaga

SEQ ID NO: 154429 - RNA, 24 nt, Artificial Sequence
  Synthetic
uaaauaaaaagaaaagaaaaaaga

SEQ ID NO: 154430 - RNA, 18 nt, Artificial Sequence
  Synthetic
augcagccauaaaaaaga

SEQ ID NO: 154431 - RNA, 19 nt, Artificial Sequence
  Synthetic
uaugcagccauaaaaaaga

SEQ ID NO: 154432 - RNA, 20 nt, Artificial Sequence
  Synthetic
cuaugcagccauaaaaaaga

SEQ ID NO: 154433 - RNA, 21 nt, Artificial Sequence
  Synthetic
acuaugcagccauaaaaaaga

SEQ ID NO: 154434 - RNA, 22 nt, Artificial Sequence
  Synthetic
cacuaugcagccauaaaaaaga

SEQ ID NO: 154435 - RNA, 23 nt, Artificial Sequence
  Synthetic
acacuaugcagccauaaaaaaga

SEQ ID NO: 154436 - RNA, 22 nt, Artificial Sequence
  Synthetic
uacuaugcagccauaaaaaaga

SEQ ID NO: 154437 - RNA, 23 nt, Artificial Sequence
  Synthetic
auacuaugcagccauaaaaaaga

SEQ ID NO: 154438 - RNA, 24 nt, Artificial Sequence
  Synthetic
aauacuaugcagccauaaaaaaga

SEQ ID NO: 154439 - RNA, 18 nt, Artificial Sequence
  Synthetic
cucaauaauuaaaaaaga

SEQ ID NO: 154440 - RNA, 19 nt, Artificial Sequence
  Synthetic
ucucaauaauuaaaaaaga

SEQ ID NO: 154441 - RNA, 20 nt, Artificial Sequence
  Synthetic
uucucaauaauuaaaaaaga

SEQ ID NO: 154442 - RNA, 18 nt, Artificial Sequence
  Synthetic
uaaaaaauuuaaaaaaga

SEQ ID NO: 154443 - RNA, 19 nt, Artificial Sequence
  Synthetic
uuaaaaaauuuaaaaaaga

SEQ ID NO: 154444 - RNA, 20 nt, Artificial Sequence
  Synthetic
uuuaaaaaauuuaaaaaaga

SEQ ID NO: 154445 - RNA, 21 nt, Artificial Sequence
  Synthetic
auuuaaaaaauuuaaaaaaga

SEQ ID NO: 154446 - RNA, 23 nt, Artificial Sequence
  Synthetic
ugauuuaaaaaauuuaaaaaaga

SEQ ID NO: 154447 - RNA, 24 nt, Artificial Sequence
  Synthetic
uugauuuaaaaaauuuaaaaaaga

SEQ ID NO: 154448 - RNA, 21 nt, Artificial Sequence
  Synthetic
auuccaaucaauagaaaaaga

SEQ ID NO: 154449 - RNA, 22 nt, Artificial Sequence
  Synthetic
uauuccaaucaauagaaaaaga

SEQ ID NO: 154450 - RNA, 23 nt, Artificial Sequence
  Synthetic
cuauuccaaucaauagaaaaaga

SEQ ID NO: 154451 - RNA, 24 nt, Artificial Sequence
  Synthetic
acuauuccaaucaauagaaaaaga

SEQ ID NO: 154452 - RNA, 18 nt, Artificial Sequence
  Synthetic
aaaaagaauauaaaaaga

SEQ ID NO: 154453 - RNA, 19 nt, Artificial Sequence
  Synthetic
aaaaaagaauauaaaaaga

SEQ ID NO: 154454 - RNA, 20 nt, Artificial Sequence
  Synthetic
aaaaaaagaauauaaaaaga

SEQ ID NO: 154455 - RNA, 21 nt, Artificial Sequence
  Synthetic
caaaaaaagaauauaaaaaga

SEQ ID NO: 154456 - RNA, 23 nt, Artificial Sequence
  Synthetic
agcaaaaaaagaauauaaaaaga

SEQ ID NO: 154457 - RNA, 24 nt, Artificial Sequence
  Synthetic
aagcaaaaaaagaauauaaaaaga

SEQ ID NO: 154458 - RNA, 18 nt, Artificial Sequence
  Synthetic
aaaaaaauuuuaaaaaga

SEQ ID NO: 154459 - RNA, 19 nt, Artificial Sequence
  Synthetic
uaaaaaaauuuuaaaaaga

SEQ ID NO: 154460 - RNA, 20 nt, Artificial Sequence
  Synthetic
uuaaaaaaauuuuaaaaaga

SEQ ID NO: 154461 - RNA, 21 nt, Artificial Sequence
  Synthetic
uuuaaaaaaauuuuaaaaaga

SEQ ID NO: 154462 - RNA, 22 nt, Artificial Sequence
  Synthetic
auuuaaaaaaauuuuaaaaaga

SEQ ID NO: 154463 - RNA, 23 nt, Artificial Sequence
  Synthetic
aauuuaaaaaaauuuuaaaaaga

SEQ ID NO: 154464 - RNA, 24 nt, Artificial Sequence
  Synthetic
aaauuuaaaaaaauuuuaaaaaga

SEQ ID NO: 154465 - RNA, 19 nt, Artificial Sequence
  Synthetic
agaacacagcuggaaaaga

SEQ ID NO: 154466 - RNA, 18 nt, Artificial Sequence
  Synthetic
aucuaaaaauguaaaaga

SEQ ID NO: 154467 - RNA, 19 nt, Artificial Sequence
  Synthetic
aaucuaaaaauguaaaaga

SEQ ID NO: 154468 - RNA, 20 nt, Artificial Sequence
  Synthetic
uaaucuaaaaauguaaaaga

SEQ ID NO: 154469 - RNA, 18 nt, Artificial Sequence
  Synthetic
ucuguaacccuacaaaga

SEQ ID NO: 154470 - RNA, 19 nt, Artificial Sequence
  Synthetic
uucuguaacccuacaaaga

SEQ ID NO: 154471 - RNA, 20 nt, Artificial Sequence
  Synthetic
uuucuguaacccuacaaaga

SEQ ID NO: 154472 - RNA, 19 nt, Artificial Sequence
  Synthetic
aguuaguugaacccaaaga

SEQ ID NO: 154473 - RNA, 20 nt, Artificial Sequence
  Synthetic
aaguuaguugaacccaaaga

SEQ ID NO: 154474 - RNA, 21 nt, Artificial Sequence
  Synthetic
caaguuaguugaacccaaaga

SEQ ID NO: 154475 - RNA, 23 nt, Artificial Sequence
  Synthetic
agcaaguuaguugaacccaaaga

SEQ ID NO: 154476 - RNA, 24 nt, Artificial Sequence
  Synthetic
cagcaaguuaguugaacccaaaga

SEQ ID NO: 154477 - RNA, 22 nt, Artificial Sequence
  Synthetic
aguugaguaguugcagcaaaga

SEQ ID NO: 154478 - RNA, 24 nt, Artificial Sequence
  Synthetic
agaguugaguaguugcagcaaaga

SEQ ID NO: 154479 - RNA, 21 nt, Artificial Sequence
  Synthetic
uacaaaaaauaguuagaaaga

SEQ ID NO: 154480 - RNA, 22 nt, Artificial Sequence
  Synthetic
cuacaaaaaauaguuagaaaga

SEQ ID NO: 154481 - RNA, 18 nt, Artificial Sequence
  Synthetic
aaaaauuaguuagaaaga

SEQ ID NO: 154482 - RNA, 19 nt, Artificial Sequence
  Synthetic
aaaaaauuaguuagaaaga

SEQ ID NO: 154483 - RNA, 20 nt, Artificial Sequence
  Synthetic
caaaaaauuaguuagaaaga

SEQ ID NO: 154484 - RNA, 21 nt, Artificial Sequence
  Synthetic
acaaaaaauuaguuagaaaga

SEQ ID NO: 154485 - RNA, 22 nt, Artificial Sequence
  Synthetic
uacaaaaaauuaguuagaaaga

SEQ ID NO: 154486 - RNA, 18 nt, Artificial Sequence
  Synthetic
auuguacacuuugaaaga

SEQ ID NO: 154487 - RNA, 19 nt, Artificial Sequence
  Synthetic
aauuguacacuuugaaaga

SEQ ID NO: 154488 - RNA, 21 nt, Artificial Sequence
  Synthetic
ugaauuguacacuuugaaaga

SEQ ID NO: 154489 - RNA, 22 nt, Artificial Sequence
  Synthetic
cugaauuguacacuuugaaaga

SEQ ID NO: 154490 - RNA, 23 nt, Artificial Sequence
  Synthetic
acugaauuguacacuuugaaaga

SEQ ID NO: 154491 - RNA, 24 nt, Artificial Sequence
  Synthetic
cacugaauuguacacuuugaaaga

SEQ ID NO: 154492 - RNA, 18 nt, Artificial Sequence
  Synthetic
uauuucaaaagauaaaga

SEQ ID NO: 154493 - RNA, 19 nt, Artificial Sequence
  Synthetic
cuauuucaaaagauaaaga

SEQ ID NO: 154494 - RNA, 20 nt, Artificial Sequence
  Synthetic
acuauuucaaaagauaaaga

SEQ ID NO: 154495 - RNA, 21 nt, Artificial Sequence
  Synthetic
aacuauuucaaaagauaaaga

SEQ ID NO: 154496 - RNA, 22 nt, Artificial Sequence
  Synthetic
aaacuauuucaaaagauaaaga

SEQ ID NO: 154497 - RNA, 24 nt, Artificial Sequence
  Synthetic
ugaaacuauuucaaaagauaaaga

SEQ ID NO: 154498 - RNA, 18 nt, Artificial Sequence
  Synthetic
uacuauuuuuaguaaaga

SEQ ID NO: 154499 - RNA, 19 nt, Artificial Sequence
  Synthetic
uuacuauuuuuaguaaaga

SEQ ID NO: 154500 - RNA, 20 nt, Artificial Sequence
  Synthetic
uuuacuauuuuuaguaaaga

SEQ ID NO: 154501 - RNA, 21 nt, Artificial Sequence
  Synthetic
uuuuacuauuuuuaguaaaga

SEQ ID NO: 154502 - RNA, 22 nt, Artificial Sequence
  Synthetic
auuuuacuauuuuuaguaaaga

SEQ ID NO: 154503 - RNA, 23 nt, Artificial Sequence
  Synthetic
aauuuuacuauuuuuaguaaaga

SEQ ID NO: 154504 - RNA, 24 nt, Artificial Sequence
  Synthetic
uaauuuuacuauuuuuaguaaaga

SEQ ID NO: 154505 - RNA, 18 nt, Artificial Sequence
  Synthetic
uauuauuauuauuaaaga

SEQ ID NO: 154506 - RNA, 19 nt, Artificial Sequence
  Synthetic
uuauuauuauuauuaaaga

SEQ ID NO: 154507 - RNA, 20 nt, Artificial Sequence
  Synthetic
auuauuauuauuauuaaaga

SEQ ID NO: 154508 - RNA, 21 nt, Artificial Sequence
  Synthetic
uauuauuauuauuauuaaaga

SEQ ID NO: 154509 - RNA, 22 nt, Artificial Sequence
  Synthetic
uuauuauuauuauuauuaaaga

SEQ ID NO: 154510 - RNA, 23 nt, Artificial Sequence
  Synthetic
auuauuauuauuauuauuaaaga

SEQ ID NO: 154511 - RNA, 24 nt, Artificial Sequence
  Synthetic
aauuauuauuauuauuauuaaaga

SEQ ID NO: 154512 - RNA, 18 nt, Artificial Sequence
  Synthetic
acauauauauuuuaaaga

SEQ ID NO: 154513 - RNA, 19 nt, Artificial Sequence
  Synthetic
uacauauauauuuuaaaga

SEQ ID NO: 154514 - RNA, 20 nt, Artificial Sequence
  Synthetic
cuacauauauauuuuaaaga

SEQ ID NO: 154515 - RNA, 21 nt, Artificial Sequence
  Synthetic
ucuacauauauauuuuaaaga

SEQ ID NO: 154516 - RNA, 22 nt, Artificial Sequence
  Synthetic
uucuacauauauauuuuaaaga

SEQ ID NO: 154517 - RNA, 23 nt, Artificial Sequence
  Synthetic
uuucuacauauauauuuuaaaga

SEQ ID NO: 154518 - RNA, 24 nt, Artificial Sequence
  Synthetic
uuuucuacauauauauuuuaaaga

SEQ ID NO: 154519 - RNA, 18 nt, Artificial Sequence
  Synthetic
ugagguuauuuuuaaaga

SEQ ID NO: 154520 - RNA, 19 nt, Artificial Sequence
  Synthetic
uugagguuauuuuuaaaga

SEQ ID NO: 154521 - RNA, 20 nt, Artificial Sequence
  Synthetic
uuugagguuauuuuuaaaga

SEQ ID NO: 154522 - RNA, 18 nt, Artificial Sequence
  Synthetic
aacaaaggcaaaacaaga

SEQ ID NO: 154523 - RNA, 19 nt, Artificial Sequence
  Synthetic
aaacaaaggcaaaacaaga

SEQ ID NO: 154524 - RNA, 20 nt, Artificial Sequence
  Synthetic
aaaacaaaggcaaaacaaga

SEQ ID NO: 154525 - RNA, 22 nt, Artificial Sequence
  Synthetic
ugcuaugaagaaauacccaaga

SEQ ID NO: 154526 - RNA, 23 nt, Artificial Sequence
  Synthetic
cugcuaugaagaaauacccaaga

SEQ ID NO: 154527 - RNA, 18 nt, Artificial Sequence
  Synthetic
cagacccuggcagcaaga

SEQ ID NO: 154528 - RNA, 19 nt, Artificial Sequence
  Synthetic
ccagacccuggcagcaaga

SEQ ID NO: 154529 - RNA, 20 nt, Artificial Sequence
  Synthetic
uccagacccuggcagcaaga

SEQ ID NO: 154530 - RNA, 18 nt, Artificial Sequence
  Synthetic
acaaaaauuaacucaaga

SEQ ID NO: 154531 - RNA, 19 nt, Artificial Sequence
  Synthetic
uacaaaaauuaacucaaga

SEQ ID NO: 154532 - RNA, 20 nt, Artificial Sequence
  Synthetic
auacaaaaauuaacucaaga

SEQ ID NO: 154533 - RNA, 21 nt, Artificial Sequence
  Synthetic
uauacaaaaauuaacucaaga

SEQ ID NO: 154534 - RNA, 22 nt, Artificial Sequence
  Synthetic
auauacaaaaauuaacucaaga

SEQ ID NO: 154535 - RNA, 23 nt, Artificial Sequence
  Synthetic
cauauacaaaaauuaacucaaga

SEQ ID NO: 154536 - RNA, 24 nt, Artificial Sequence
  Synthetic
ccauauacaaaaauuaacucaaga

SEQ ID NO: 154537 - RNA, 20 nt, Artificial Sequence
  Synthetic
aggaaacuacaaaaagaaga

SEQ ID NO: 154538 - RNA, 21 nt, Artificial Sequence
  Synthetic
caggaaacuacaaaaagaaga

SEQ ID NO: 154539 - RNA, 22 nt, Artificial Sequence
  Synthetic
ucaggaaacuacaaaaagaaga

SEQ ID NO: 154540 - RNA, 23 nt, Artificial Sequence
  Synthetic
cucaggaaacuacaaaaagaaga

SEQ ID NO: 154541 - RNA, 24 nt, Artificial Sequence
  Synthetic
ccucaggaaacuacaaaaagaaga

SEQ ID NO: 154542 - RNA, 19 nt, Artificial Sequence
  Synthetic
ugggaguggaagaagaaga

SEQ ID NO: 154543 - RNA, 20 nt, Artificial Sequence
  Synthetic
augggaguggaagaagaaga

SEQ ID NO: 154544 - RNA, 18 nt, Artificial Sequence
  Synthetic
aguagacaagagagaaga

SEQ ID NO: 154545 - RNA, 20 nt, Artificial Sequence
  Synthetic
agaguagacaagagagaaga

SEQ ID NO: 154546 - RNA, 21 nt, Artificial Sequence
  Synthetic
aagaguagacaagagagaaga

SEQ ID NO: 154547 - RNA, 22 nt, Artificial Sequence
  Synthetic
aaagaguagacaagagagaaga

SEQ ID NO: 154548 - RNA, 24 nt, Artificial Sequence
  Synthetic
agaaagaguagacaagagagaaga

SEQ ID NO: 154549 - RNA, 18 nt, Artificial Sequence
  Synthetic
aaggguauuccaggaaga

SEQ ID NO: 154550 - RNA, 20 nt, Artificial Sequence
  Synthetic
cgaaggguauuccaggaaga

SEQ ID NO: 154551 - RNA, 21 nt, Artificial Sequence
  Synthetic
acgaaggguauuccaggaaga

SEQ ID NO: 154552 - RNA, 23 nt, Artificial Sequence
  Synthetic
agacgaaggguauuccaggaaga

SEQ ID NO: 154553 - RNA, 24 nt, Artificial Sequence
  Synthetic
aagacgaaggguauuccaggaaga

SEQ ID NO: 154554 - RNA, 20 nt, Artificial Sequence
  Synthetic
agggagagaggaagggaaga

SEQ ID NO: 154555 - RNA, 21 nt, Artificial Sequence
  Synthetic
uagggagagaggaagggaaga

SEQ ID NO: 154556 - RNA, 23 nt, Artificial Sequence
  Synthetic
aguagggagagaggaagggaaga

SEQ ID NO: 154557 - RNA, 19 nt, Artificial Sequence
  Synthetic
cggaaaagaaaggggaaga

SEQ ID NO: 154558 - RNA, 20 nt, Artificial Sequence
  Synthetic
acggaaaagaaaggggaaga

SEQ ID NO: 154559 - RNA, 21 nt, Artificial Sequence
  Synthetic
aacggaaaagaaaggggaaga

SEQ ID NO: 154560 - RNA, 22 nt, Artificial Sequence
  Synthetic
aaacggaaaagaaaggggaaga

SEQ ID NO: 154561 - RNA, 23 nt, Artificial Sequence
  Synthetic
aaaacggaaaagaaaggggaaga

SEQ ID NO: 154562 - RNA, 24 nt, Artificial Sequence
  Synthetic
caaaacggaaaagaaaggggaaga

SEQ ID NO: 154563 - RNA, 21 nt, Artificial Sequence
  Synthetic
cuccuguucucugugggaaga

SEQ ID NO: 154564 - RNA, 22 nt, Artificial Sequence
  Synthetic
ucuccuguucucugugggaaga

SEQ ID NO: 154565 - RNA, 24 nt, Artificial Sequence
  Synthetic
ugucuccuguucucugugggaaga

SEQ ID NO: 154566 - RNA, 18 nt, Artificial Sequence
  Synthetic
aagaaaguggauggaaga

SEQ ID NO: 154567 - RNA, 19 nt, Artificial Sequence
  Synthetic
aaagaaaguggauggaaga

SEQ ID NO: 154568 - RNA, 20 nt, Artificial Sequence
  Synthetic
aaaagaaaguggauggaaga

SEQ ID NO: 154569 - RNA, 22 nt, Artificial Sequence
  Synthetic
agaaaagaaaguggauggaaga

SEQ ID NO: 154570 - RNA, 23 nt, Artificial Sequence
  Synthetic
aagaaaagaaaguggauggaaga

SEQ ID NO: 154571 - RNA, 24 nt, Artificial Sequence
  Synthetic
uaagaaaagaaaguggauggaaga

SEQ ID NO: 154572 - RNA, 18 nt, Artificial Sequence
  Synthetic
augcgaucaacuggaaga

SEQ ID NO: 154573 - RNA, 20 nt, Artificial Sequence
  Synthetic
cgaugcgaucaacuggaaga

SEQ ID NO: 154574 - RNA, 21 nt, Artificial Sequence
  Synthetic
ccgaugcgaucaacuggaaga

SEQ ID NO: 154575 - RNA, 23 nt, Artificial Sequence
  Synthetic
agccgaugcgaucaacuggaaga

SEQ ID NO: 154576 - RNA, 18 nt, Artificial Sequence
  Synthetic
ugaaugaaggaaugaaga

SEQ ID NO: 154577 - RNA, 19 nt, Artificial Sequence
  Synthetic
augaaugaaggaaugaaga

SEQ ID NO: 154578 - RNA, 20 nt, Artificial Sequence
  Synthetic
aaugaaugaaggaaugaaga

SEQ ID NO: 154579 - RNA, 22 nt, Artificial Sequence
  Synthetic
ugaaugaaugaaggaaugaaga

SEQ ID NO: 154580 - RNA, 24 nt, Artificial Sequence
  Synthetic
cgugaaugaaugaaggaaugaaga

SEQ ID NO: 154581 - RNA, 18 nt, Artificial Sequence
  Synthetic
aaaaauugcaggugaaga

SEQ ID NO: 154582 - RNA, 19 nt, Artificial Sequence
  Synthetic
aaaaaauugcaggugaaga

SEQ ID NO: 154583 - RNA, 20 nt, Artificial Sequence
  Synthetic
aaaaaaauugcaggugaaga

SEQ ID NO: 154584 - RNA, 18 nt, Artificial Sequence
  Synthetic
uucuucuuuuauugaaga

SEQ ID NO: 154585 - RNA, 19 nt, Artificial Sequence
  Synthetic
uuucuucuuuuauugaaga

SEQ ID NO: 154586 - RNA, 20 nt, Artificial Sequence
  Synthetic
cuuucuucuuuuauugaaga

SEQ ID NO: 154587 - RNA, 18 nt, Artificial Sequence
  Synthetic
uuuuugcuuuuuugaaga

SEQ ID NO: 154588 - RNA, 19 nt, Artificial Sequence
  Synthetic
uuuuuugcuuuuuugaaga

SEQ ID NO: 154589 - RNA, 21 nt, Artificial Sequence
  Synthetic
uguuuuuugcuuuuuugaaga

SEQ ID NO: 154590 - RNA, 22 nt, Artificial Sequence
  Synthetic
uuguuuuuugcuuuuuugaaga

SEQ ID NO: 154591 - RNA, 23 nt, Artificial Sequence
  Synthetic
uuuguuuuuugcuuuuuugaaga

SEQ ID NO: 154592 - RNA, 19 nt, Artificial Sequence
  Synthetic
aggguauaauaaauuaaga

SEQ ID NO: 154593 - RNA, 20 nt, Artificial Sequence
  Synthetic
uaggguauaauaaauuaaga

SEQ ID NO: 154594 - RNA, 18 nt, Artificial Sequence
  Synthetic
auaauauucagaaacaga

SEQ ID NO: 154595 - RNA, 19 nt, Artificial Sequence
  Synthetic
aauaauauucagaaacaga

SEQ ID NO: 154596 - RNA, 20 nt, Artificial Sequence
  Synthetic
aaauaauauucagaaacaga

SEQ ID NO: 154597 - RNA, 21 nt, Artificial Sequence
  Synthetic
uaaauaauauucagaaacaga

SEQ ID NO: 154598 - RNA, 22 nt, Artificial Sequence
  Synthetic
auaaauaauauucagaaacaga

SEQ ID NO: 154599 - RNA, 23 nt, Artificial Sequence
  Synthetic
aauaaauaauauucagaaacaga

SEQ ID NO: 154600 - RNA, 24 nt, Artificial Sequence
  Synthetic
aaauaaauaauauucagaaacaga

SEQ ID NO: 154601 - RNA, 19 nt, Artificial Sequence
  Synthetic
uggcuuugucuuacacaga

SEQ ID NO: 154602 - RNA, 20 nt, Artificial Sequence
  Synthetic
auggcuuugucuuacacaga

SEQ ID NO: 154603 - RNA, 19 nt, Artificial Sequence
  Synthetic
agauuuguugggagacaga

SEQ ID NO: 154604 - RNA, 18 nt, Artificial Sequence
  Synthetic
uuguguuuuuaguacaga

SEQ ID NO: 154605 - RNA, 19 nt, Artificial Sequence
  Synthetic
uuuguguuuuuaguacaga

SEQ ID NO: 154606 - RNA, 20 nt, Artificial Sequence
  Synthetic
uuuuguguuuuuaguacaga

SEQ ID NO: 154607 - RNA, 21 nt, Artificial Sequence
  Synthetic
uuuuuguguuuuuaguacaga

SEQ ID NO: 154608 - RNA, 22 nt, Artificial Sequence
  Synthetic
auuuuuguguuuuuaguacaga

SEQ ID NO: 154609 - RNA, 23 nt, Artificial Sequence
  Synthetic
aauuuuuguguuuuuaguacaga

SEQ ID NO: 154610 - RNA, 24 nt, Artificial Sequence
  Synthetic
uaauuuuuguguuuuuaguacaga

SEQ ID NO: 154611 - RNA, 18 nt, Artificial Sequence
  Synthetic
uggauauccauaugcaga

SEQ ID NO: 154612 - RNA, 19 nt, Artificial Sequence
  Synthetic
cuggauauccauaugcaga

SEQ ID NO: 154613 - RNA, 20 nt, Artificial Sequence
  Synthetic
acuggauauccauaugcaga

SEQ ID NO: 154614 - RNA, 21 nt, Artificial Sequence
  Synthetic
aacuggauauccauaugcaga

SEQ ID NO: 154615 - RNA, 22 nt, Artificial Sequence
  Synthetic
aaacuggauauccauaugcaga

SEQ ID NO: 154616 - RNA, 23 nt, Artificial Sequence
  Synthetic
aaaacuggauauccauaugcaga

SEQ ID NO: 154617 - RNA, 24 nt, Artificial Sequence
  Synthetic
aaaaacuggauauccauaugcaga

SEQ ID NO: 154618 - RNA, 18 nt, Artificial Sequence
  Synthetic
ugauccaaggacugcaga

SEQ ID NO: 154619 - RNA, 19 nt, Artificial Sequence
  Synthetic
uugauccaaggacugcaga

SEQ ID NO: 154620 - RNA, 20 nt, Artificial Sequence
  Synthetic
cuugauccaaggacugcaga

SEQ ID NO: 154621 - RNA, 21 nt, Artificial Sequence
  Synthetic
ucuugauccaaggacugcaga

SEQ ID NO: 154622 - RNA, 22 nt, Artificial Sequence
  Synthetic
uucuugauccaaggacugcaga

SEQ ID NO: 154623 - RNA, 23 nt, Artificial Sequence
  Synthetic
cuucuugauccaaggacugcaga

SEQ ID NO: 154624 - RNA, 24 nt, Artificial Sequence
  Synthetic
acuucuugauccaaggacugcaga

SEQ ID NO: 154625 - RNA, 18 nt, Artificial Sequence
  Synthetic
uuauauuuuauuugcaga

SEQ ID NO: 154626 - RNA, 19 nt, Artificial Sequence
  Synthetic
auuauauuuuauuugcaga

SEQ ID NO: 154627 - RNA, 20 nt, Artificial Sequence
  Synthetic
aauuauauuuuauuugcaga

SEQ ID NO: 154628 - RNA, 21 nt, Artificial Sequence
  Synthetic
uaucauucacaggacaucaga

SEQ ID NO: 154629 - RNA, 22 nt, Artificial Sequence
  Synthetic
uuaucauucacaggacaucaga

SEQ ID NO: 154630 - RNA, 23 nt, Artificial Sequence
  Synthetic
uuuaucauucacaggacaucaga

SEQ ID NO: 154631 - RNA, 24 nt, Artificial Sequence
  Synthetic
uuuuaucauucacaggacaucaga

SEQ ID NO: 154632 - RNA, 18 nt, Artificial Sequence
  Synthetic
auguuggugaccuucaga

SEQ ID NO: 154633 - RNA, 20 nt, Artificial Sequence
  Synthetic
ugauguuggugaccuucaga

SEQ ID NO: 154634 - RNA, 21 nt, Artificial Sequence
  Synthetic
uugauguuggugaccuucaga

SEQ ID NO: 154635 - RNA, 22 nt, Artificial Sequence
  Synthetic
uuugauguuggugaccuucaga

SEQ ID NO: 154636 - RNA, 23 nt, Artificial Sequence
  Synthetic
cuuugauguuggugaccuucaga

SEQ ID NO: 154637 - RNA, 24 nt, Artificial Sequence
  Synthetic
ucuuugauguuggugaccuucaga

SEQ ID NO: 154638 - RNA, 19 nt, Artificial Sequence
  Synthetic
uguuuagaauaguuucaga

SEQ ID NO: 154639 - RNA, 20 nt, Artificial Sequence
  Synthetic
uuguuuagaauaguuucaga

SEQ ID NO: 154640 - RNA, 21 nt, Artificial Sequence
  Synthetic
auuguuuagaauaguuucaga

SEQ ID NO: 154641 - RNA, 22 nt, Artificial Sequence
  Synthetic
uauuguuuagaauaguuucaga

SEQ ID NO: 154642 - RNA, 23 nt, Artificial Sequence
  Synthetic
cuauuguuuagaauaguuucaga

SEQ ID NO: 154643 - RNA, 24 nt, Artificial Sequence
  Synthetic
ccuauuguuuagaauaguuucaga

SEQ ID NO: 154644 - RNA, 18 nt, Artificial Sequence
  Synthetic
auuuuuaugagaaagaga

SEQ ID NO: 154645 - RNA, 20 nt, Artificial Sequence
  Synthetic
agauuuuuaugagaaagaga

SEQ ID NO: 154646 - RNA, 18 nt, Artificial Sequence
  Synthetic
caaaggaggggaaagaga

SEQ ID NO: 154647 - RNA, 19 nt, Artificial Sequence
  Synthetic
ccaaaggaggggaaagaga

SEQ ID NO: 154648 - RNA, 23 nt, Artificial Sequence
  Synthetic
aggugacaauagggauaaagaga

SEQ ID NO: 154649 - RNA, 18 nt, Artificial Sequence
  Synthetic
uuguauuuuuagaagaga

SEQ ID NO: 154650 - RNA, 19 nt, Artificial Sequence
  Synthetic
uuuguauuuuuagaagaga

SEQ ID NO: 154651 - RNA, 20 nt, Artificial Sequence
  Synthetic
uuuuguauuuuuagaagaga

SEQ ID NO: 154652 - RNA, 21 nt, Artificial Sequence
  Synthetic
auuuuguauuuuuagaagaga

SEQ ID NO: 154653 - RNA, 22 nt, Artificial Sequence
  Synthetic
aauuuuguauuuuuagaagaga

SEQ ID NO: 154654 - RNA, 23 nt, Artificial Sequence
  Synthetic
uaauuuuguauuuuuagaagaga

SEQ ID NO: 154655 - RNA, 24 nt, Artificial Sequence
  Synthetic
cuaauuuuguauuuuuagaagaga

SEQ ID NO: 154656 - RNA, 18 nt, Artificial Sequence
  Synthetic
aaagagaggaggaagaga

SEQ ID NO: 154657 - RNA, 19 nt, Artificial Sequence
  Synthetic
aaaagagaggaggaagaga

SEQ ID NO: 154658 - RNA, 21 nt, Artificial Sequence
  Synthetic
agaaaagagaggaggaagaga

SEQ ID NO: 154659 - RNA, 22 nt, Artificial Sequence
  Synthetic
uagaaaagagaggaggaagaga

SEQ ID NO: 154660 - RNA, 18 nt, Artificial Sequence
  Synthetic
uaauuuaauuuuaagaga

SEQ ID NO: 154661 - RNA, 19 nt, Artificial Sequence
  Synthetic
uuaauuuaauuuuaagaga

SEQ ID NO: 154662 - RNA, 20 nt, Artificial Sequence
  Synthetic
uuuaauuuaauuuuaagaga

SEQ ID NO: 154663 - RNA, 21 nt, Artificial Sequence
  Synthetic
auuuaauuuaauuuuaagaga

SEQ ID NO: 154664 - RNA, 22 nt, Artificial Sequence
  Synthetic
aauuuaauuuaauuuuaagaga

SEQ ID NO: 154665 - RNA, 23 nt, Artificial Sequence
  Synthetic
aaauuuaauuuaauuuuaagaga

SEQ ID NO: 154666 - RNA, 24 nt, Artificial Sequence
  Synthetic
uaaauuuaauuuaauuuuaagaga

SEQ ID NO: 154667 - RNA, 18 nt, Artificial Sequence
  Synthetic
uuguauuuuuaacagaga

SEQ ID NO: 154668 - RNA, 19 nt, Artificial Sequence
  Synthetic
uuuguauuuuuaacagaga

SEQ ID NO: 154669 - RNA, 20 nt, Artificial Sequence
  Synthetic
uuuuguauuuuuaacagaga

SEQ ID NO: 154670 - RNA, 21 nt, Artificial Sequence
  Synthetic
uuuuuguauuuuuaacagaga

SEQ ID NO: 154671 - RNA, 22 nt, Artificial Sequence
  Synthetic
uuuuuuguauuuuuaacagaga

SEQ ID NO: 154672 - RNA, 23 nt, Artificial Sequence
  Synthetic
uuuuuuuguauuuuuaacagaga

SEQ ID NO: 154673 - RNA, 24 nt, Artificial Sequence
  Synthetic
uuuuuuuuguauuuuuaacagaga

SEQ ID NO: 154674 - RNA, 18 nt, Artificial Sequence
  Synthetic
aacugaggcucacagaga

SEQ ID NO: 154675 - RNA, 19 nt, Artificial Sequence
  Synthetic
aaacugaggcucacagaga

SEQ ID NO: 154676 - RNA, 20 nt, Artificial Sequence
  Synthetic
aaaacugaggcucacagaga

SEQ ID NO: 154677 - RNA, 20 nt, Artificial Sequence
  Synthetic
aggugaaaggcagccagaga

SEQ ID NO: 154678 - RNA, 21 nt, Artificial Sequence
  Synthetic
uuuuuguauuuuuagcagaga

SEQ ID NO: 154679 - RNA, 22 nt, Artificial Sequence
  Synthetic
auuuuuguauuuuuagcagaga

SEQ ID NO: 154680 - RNA, 23 nt, Artificial Sequence
  Synthetic
aauuuuuguauuuuuagcagaga

SEQ ID NO: 154681 - RNA, 24 nt, Artificial Sequence
  Synthetic
caauuuuuguauuuuuagcagaga

SEQ ID NO: 154682 - RNA, 22 nt, Artificial Sequence
  Synthetic
uuuuuuguauuuuuagcagaga

SEQ ID NO: 154683 - RNA, 23 nt, Artificial Sequence
  Synthetic
auuuuuuguauuuuuagcagaga

SEQ ID NO: 154684 - RNA, 24 nt, Artificial Sequence
  Synthetic
aauuuuuuguauuuuuagcagaga

SEQ ID NO: 154685 - RNA, 18 nt, Artificial Sequence
  Synthetic
augcccugcccagagaga

SEQ ID NO: 154686 - RNA, 20 nt, Artificial Sequence
  Synthetic
agaugcccugcccagagaga

SEQ ID NO: 154687 - RNA, 22 nt, Artificial Sequence
  Synthetic
agagaugcccugcccagagaga

SEQ ID NO: 154688 - RNA, 23 nt, Artificial Sequence
  Synthetic
cagagaugcccugcccagagaga

SEQ ID NO: 154689 - RNA, 24 nt, Artificial Sequence
  Synthetic
ucagagaugcccugcccagagaga

SEQ ID NO: 154690 - RNA, 18 nt, Artificial Sequence
  Synthetic
agggugauaggagagaga

SEQ ID NO: 154691 - RNA, 19 nt, Artificial Sequence
  Synthetic
cagggugauaggagagaga

SEQ ID NO: 154692 - RNA, 20 nt, Artificial Sequence
  Synthetic
acagggugauaggagagaga

SEQ ID NO: 154693 - RNA, 21 nt, Artificial Sequence
  Synthetic
cacagggugauaggagagaga

SEQ ID NO: 154694 - RNA, 22 nt, Artificial Sequence
  Synthetic
ucacagggugauaggagagaga

SEQ ID NO: 154695 - RNA, 23 nt, Artificial Sequence
  Synthetic
uucacagggugauaggagagaga

SEQ ID NO: 154696 - RNA, 24 nt, Artificial Sequence
  Synthetic
uuucacagggugauaggagagaga

SEQ ID NO: 154697 - RNA, 18 nt, Artificial Sequence
  Synthetic
aaaagaaaaugagagaga

SEQ ID NO: 154698 - RNA, 19 nt, Artificial Sequence
  Synthetic
aaaaagaaaaugagagaga

SEQ ID NO: 154699 - RNA, 21 nt, Artificial Sequence
  Synthetic
agaaaaagaaaaugagagaga

SEQ ID NO: 154700 - RNA, 22 nt, Artificial Sequence
  Synthetic
aagaaaaagaaaaugagagaga

SEQ ID NO: 154701 - RNA, 24 nt, Artificial Sequence
  Synthetic
agaagaaaaagaaaaugagagaga

SEQ ID NO: 154702 - RNA, 18 nt, Artificial Sequence
  Synthetic
uuuuuuaauugagagaga

SEQ ID NO: 154703 - RNA, 19 nt, Artificial Sequence
  Synthetic
uuuuuuuaauugagagaga

SEQ ID NO: 154704 - RNA, 20 nt, Artificial Sequence
  Synthetic
uuuuuuuuaauugagagaga

SEQ ID NO: 154705 - RNA, 21 nt, Artificial Sequence
  Synthetic
uuuuuuuuuaauugagagaga

SEQ ID NO: 154706 - RNA, 22 nt, Artificial Sequence
  Synthetic
uuuuuuuuuuaauugagagaga

SEQ ID NO: 154707 - RNA, 23 nt, Artificial Sequence
  Synthetic
uuuuuuuuuuuaauugagagaga

SEQ ID NO: 154708 - RNA, 24 nt, Artificial Sequence
  Synthetic
uuuuuuuuuuuuaauugagagaga

SEQ ID NO: 154709 - RNA, 18 nt, Artificial Sequence
  Synthetic
aauacugaagaugagaga

SEQ ID NO: 154710 - RNA, 19 nt, Artificial Sequence
  Synthetic
aaauacugaagaugagaga

SEQ ID NO: 154711 - RNA, 20 nt, Artificial Sequence
  Synthetic
aaaauacugaagaugagaga

SEQ ID NO: 154712 - RNA, 18 nt, Artificial Sequence
  Synthetic
agaccucauccugagaga

SEQ ID NO: 154713 - RNA, 19 nt, Artificial Sequence
  Synthetic
cagaccucauccugagaga

SEQ ID NO: 154714 - RNA, 20 nt, Artificial Sequence
  Synthetic
acagaccucauccugagaga

SEQ ID NO: 154715 - RNA, 18 nt, Artificial Sequence
  Synthetic
ucuuuuuuguaauagaga

SEQ ID NO: 154716 - RNA, 19 nt, Artificial Sequence
  Synthetic
cucuuuuuuguaauagaga

SEQ ID NO: 154717 - RNA, 20 nt, Artificial Sequence
  Synthetic
acucuuuuuuguaauagaga

SEQ ID NO: 154718 - RNA, 21 nt, Artificial Sequence
  Synthetic
uuuuuguauuuuuaauagaga

SEQ ID NO: 154719 - RNA, 22 nt, Artificial Sequence
  Synthetic
auuuuuguauuuuuaauagaga

SEQ ID NO: 154720 - RNA, 23 nt, Artificial Sequence
  Synthetic
aauuuuuguauuuuuaauagaga

SEQ ID NO: 154721 - RNA, 24 nt, Artificial Sequence
  Synthetic
uaauuuuuguauuuuuaauagaga

SEQ ID NO: 154722 - RNA, 22 nt, Artificial Sequence
  Synthetic
uuuuuuguauuuuuaauagaga

SEQ ID NO: 154723 - RNA, 23 nt, Artificial Sequence
  Synthetic
uuuuuuuguauuuuuaauagaga

SEQ ID NO: 154724 - RNA, 24 nt, Artificial Sequence
  Synthetic
uuuuuuuuguauuuuuaauagaga

SEQ ID NO: 154725 - RNA, 18 nt, Artificial Sequence
  Synthetic
caaagaaagucauagaga

SEQ ID NO: 154726 - RNA, 19 nt, Artificial Sequence
  Synthetic
acaaagaaagucauagaga

SEQ ID NO: 154727 - RNA, 18 nt, Artificial Sequence
  Synthetic
aaaccaaaucuauagaga

SEQ ID NO: 154728 - RNA, 19 nt, Artificial Sequence
  Synthetic
aaaaccaaaucuauagaga

SEQ ID NO: 154729 - RNA, 20 nt, Artificial Sequence
  Synthetic
caaaaccaaaucuauagaga

SEQ ID NO: 154730 - RNA, 18 nt, Artificial Sequence
  Synthetic
uucuauuuuuacuagaga

SEQ ID NO: 154731 - RNA, 19 nt, Artificial Sequence
  Synthetic
uuucuauuuuuacuagaga

SEQ ID NO: 154732 - RNA, 20 nt, Artificial Sequence
  Synthetic
uuuucuauuuuuacuagaga

SEQ ID NO: 154733 - RNA, 21 nt, Artificial Sequence
  Synthetic
uuuuucuauuuuuacuagaga

SEQ ID NO: 154734 - RNA, 22 nt, Artificial Sequence
  Synthetic
auuuuucuauuuuuacuagaga

SEQ ID NO: 154735 - RNA, 23 nt, Artificial Sequence
  Synthetic
aauuuuucuauuuuuacuagaga

SEQ ID NO: 154736 - RNA, 24 nt, Artificial Sequence
  Synthetic
uaauuuuucuauuuuuacuagaga

SEQ ID NO: 154737 - RNA, 18 nt, Artificial Sequence
  Synthetic
uuguauuuucaguagaga

SEQ ID NO: 154738 - RNA, 19 nt, Artificial Sequence
  Synthetic
uuuguauuuucaguagaga

SEQ ID NO: 154739 - RNA, 20 nt, Artificial Sequence
  Synthetic
uuuuguauuuucaguagaga

SEQ ID NO: 154740 - RNA, 21 nt, Artificial Sequence
  Synthetic
uuuuuguauuuucaguagaga

SEQ ID NO: 154741 - RNA, 22 nt, Artificial Sequence
  Synthetic
uuuuuuguauuuucaguagaga

SEQ ID NO: 154742 - RNA, 23 nt, Artificial Sequence
  Synthetic
auuuuuuguauuuucaguagaga

SEQ ID NO: 154743 - RNA, 18 nt, Artificial Sequence
  Synthetic
uuuuauuuucaguagaga

SEQ ID NO: 154744 - RNA, 19 nt, Artificial Sequence
  Synthetic
uuuuuauuuucaguagaga

SEQ ID NO: 154745 - RNA, 20 nt, Artificial Sequence
  Synthetic
uuuuuuauuuucaguagaga

SEQ ID NO: 154746 - RNA, 21 nt, Artificial Sequence
  Synthetic
uuuuuuuauuuucaguagaga

SEQ ID NO: 154747 - RNA, 22 nt, Artificial Sequence
  Synthetic
auuuuuuuauuuucaguagaga

SEQ ID NO: 154748 - RNA, 23 nt, Artificial Sequence
  Synthetic
aauuuuuuuauuuucaguagaga

SEQ ID NO: 154749 - RNA, 24 nt, Artificial Sequence
  Synthetic
uaauuuuuuuauuuucaguagaga

SEQ ID NO: 154750 - RNA, 18 nt, Artificial Sequence
  Synthetic
uuguauauuuaguagaga

SEQ ID NO: 154751 - RNA, 19 nt, Artificial Sequence
  Synthetic
uuuguauauuuaguagaga

SEQ ID NO: 154752 - RNA, 20 nt, Artificial Sequence
  Synthetic
uuuuguauauuuaguagaga

SEQ ID NO: 154753 - RNA, 21 nt, Artificial Sequence
  Synthetic
uuuuuguauauuuaguagaga

SEQ ID NO: 154754 - RNA, 22 nt, Artificial Sequence
  Synthetic
auuuuuguauauuuaguagaga

SEQ ID NO: 154755 - RNA, 23 nt, Artificial Sequence
  Synthetic
aauuuuuguauauuuaguagaga

SEQ ID NO: 154756 - RNA, 24 nt, Artificial Sequence
  Synthetic
uaauuuuuguauauuuaguagaga

SEQ ID NO: 154757 - RNA, 22 nt, Artificial Sequence
  Synthetic
uuuuuuguaucuuuaguagaga

SEQ ID NO: 154758 - RNA, 23 nt, Artificial Sequence
  Synthetic
auuuuuuguaucuuuaguagaga

SEQ ID NO: 154759 - RNA, 24 nt, Artificial Sequence
  Synthetic
aauuuuuuguaucuuuaguagaga

SEQ ID NO: 154760 - RNA, 21 nt, Artificial Sequence
  Synthetic
uuuucauauuuuuaguagaga

SEQ ID NO: 154761 - RNA, 22 nt, Artificial Sequence
  Synthetic
auuuucauauuuuuaguagaga

SEQ ID NO: 154762 - RNA, 23 nt, Artificial Sequence
  Synthetic
aauuuucauauuuuuaguagaga

SEQ ID NO: 154763 - RNA, 24 nt, Artificial Sequence
  Synthetic
uaauuuucauauuuuuaguagaga

SEQ ID NO: 154764 - RNA, 23 nt, Artificial Sequence
  Synthetic
cauuuucauauuuuuaguagaga

SEQ ID NO: 154765 - RNA, 24 nt, Artificial Sequence
  Synthetic
ucauuuucauauuuuuaguagaga

SEQ ID NO: 154766 - RNA, 18 nt, Artificial Sequence
  Synthetic
uucuauuuuuaguagaga

SEQ ID NO: 154767 - RNA, 19 nt, Artificial Sequence
  Synthetic
uuucuauuuuuaguagaga

SEQ ID NO: 154768 - RNA, 20 nt, Artificial Sequence
  Synthetic
uuuucuauuuuuaguagaga

SEQ ID NO: 154769 - RNA, 21 nt, Artificial Sequence
  Synthetic
uuuuucuauuuuuaguagaga

SEQ ID NO: 154770 - RNA, 22 nt, Artificial Sequence
  Synthetic
uuuuuucuauuuuuaguagaga

SEQ ID NO: 154771 - RNA, 23 nt, Artificial Sequence
  Synthetic
auuuuuucuauuuuuaguagaga

SEQ ID NO: 154772 - RNA, 24 nt, Artificial Sequence
  Synthetic
aauuuuuucuauuuuuaguagaga

SEQ ID NO: 154773 - RNA, 18 nt, Artificial Sequence
  Synthetic
ugguauuuuuaguagaga

SEQ ID NO: 154774 - RNA, 19 nt, Artificial Sequence
  Synthetic
uugguauuuuuaguagaga

SEQ ID NO: 154775 - RNA, 20 nt, Artificial Sequence
  Synthetic
uuugguauuuuuaguagaga

SEQ ID NO: 154776 - RNA, 21 nt, Artificial Sequence
  Synthetic
uuuugguauuuuuaguagaga

SEQ ID NO: 154777 - RNA, 22 nt, Artificial Sequence
  Synthetic
uuuuugguauuuuuaguagaga

SEQ ID NO: 154778 - RNA, 23 nt, Artificial Sequence
  Synthetic
auuuuugguauuuuuaguagaga

SEQ ID NO: 154779 - RNA, 24 nt, Artificial Sequence
  Synthetic
aauuuuugguauuuuuaguagaga

SEQ ID NO: 154780 - RNA, 21 nt, Artificial Sequence
  Synthetic
uuuuuguauuuuuaguagaga

SEQ ID NO: 154781 - RNA, 23 nt, Artificial Sequence
  Synthetic
aguuuuuguauuuuuaguagaga

SEQ ID NO: 154782 - RNA, 24 nt, Artificial Sequence
  Synthetic
uaguuuuuguauuuuuaguagaga

SEQ ID NO: 154783 - RNA, 23 nt, Artificial Sequence
  Synthetic
uguuuuuguauuuuuaguagaga

SEQ ID NO: 154784 - RNA, 24 nt, Artificial Sequence
  Synthetic
uuguuuuuguauuuuuaguagaga

SEQ ID NO: 154785 - RNA, 22 nt, Artificial Sequence
  Synthetic
uuuuuuguauuuuuaguagaga

SEQ ID NO: 154786 - RNA, 23 nt, Artificial Sequence
  Synthetic
auuuuuuguauuuuuaguagaga

SEQ ID NO: 154787 - RNA, 24 nt, Artificial Sequence
  Synthetic
uauuuuuuguauuuuuaguagaga

SEQ ID NO: 154788 - RNA, 23 nt, Artificial Sequence
  Synthetic
uuuuuuuguauuuuuaguagaga

SEQ ID NO: 154789 - RNA, 24 nt, Artificial Sequence
  Synthetic
cuuuuuuuguauuuuuaguagaga

SEQ ID NO: 154790 - RNA, 21 nt, Artificial Sequence
  Synthetic
uuuuuuuauuuuuaguagaga

SEQ ID NO: 154791 - RNA, 23 nt, Artificial Sequence
  Synthetic
aguuuuuuuauuuuuaguagaga

SEQ ID NO: 154792 - RNA, 24 nt, Artificial Sequence
  Synthetic
caguuuuuuuauuuuuaguagaga

SEQ ID NO: 154793 - RNA, 22 nt, Artificial Sequence
  Synthetic
uuuuuuguguuuuuaguagaga

SEQ ID NO: 154794 - RNA, 23 nt, Artificial Sequence
  Synthetic
auuuuuuguguuuuuaguagaga

SEQ ID NO: 154795 - RNA, 24 nt, Artificial Sequence
  Synthetic
aauuuuuuguguuuuuaguagaga

SEQ ID NO: 154796 - RNA, 21 nt, Artificial Sequence
  Synthetic
uuuuguauuuuuuaguagaga

SEQ ID NO: 154797 - RNA, 22 nt, Artificial Sequence
  Synthetic
uuuuuguauuuuuuaguagaga

SEQ ID NO: 154798 - RNA, 23 nt, Artificial Sequence
  Synthetic
uuuuuuguauuuuuuaguagaga

SEQ ID NO: 154799 - RNA, 24 nt, Artificial Sequence
  Synthetic
auuuuuuguauuuuuuaguagaga

SEQ ID NO: 154800 - RNA, 18 nt, Artificial Sequence
  Synthetic
uuguauuuuugguagaga

SEQ ID NO: 154801 - RNA, 19 nt, Artificial Sequence
  Synthetic
uuuguauuuuugguagaga

SEQ ID NO: 154802 - RNA, 20 nt, Artificial Sequence
  Synthetic
uuuuguauuuuugguagaga

SEQ ID NO: 154803 - RNA, 21 nt, Artificial Sequence
  Synthetic
uuuuuguauuuuugguagaga

SEQ ID NO: 154804 - RNA, 22 nt, Artificial Sequence
  Synthetic
auuuuuguauuuuugguagaga

SEQ ID NO: 154805 - RNA, 23 nt, Artificial Sequence
  Synthetic
aauuuuuguauuuuugguagaga

SEQ ID NO: 154806 - RNA, 24 nt, Artificial Sequence
  Synthetic
uaauuuuuguauuuuugguagaga

SEQ ID NO: 154807 - RNA, 18 nt, Artificial Sequence
  Synthetic
aaauuuuuuugguagaga

SEQ ID NO: 154808 - RNA, 19 nt, Artificial Sequence
  Synthetic
aaaauuuuuuugguagaga

SEQ ID NO: 154809 - RNA, 20 nt, Artificial Sequence
  Synthetic
aaaaauuuuuuugguagaga

SEQ ID NO: 154810 - RNA, 21 nt, Artificial Sequence
  Synthetic
aaaaaauuuuuuugguagaga

SEQ ID NO: 154811 - RNA, 22 nt, Artificial Sequence
  Synthetic
uaaaaaauuuuuuugguagaga

SEQ ID NO: 154812 - RNA, 23 nt, Artificial Sequence
  Synthetic
uuaaaaaauuuuuuugguagaga

SEQ ID NO: 154813 - RNA, 24 nt, Artificial Sequence
  Synthetic
uuuaaaaaauuuuuuugguagaga

SEQ ID NO: 154814 - RNA, 18 nt, Artificial Sequence
  Synthetic
uuuaauuuuauguagaga

SEQ ID NO: 154815 - RNA, 19 nt, Artificial Sequence
  Synthetic
uuuuaauuuuauguagaga

SEQ ID NO: 154816 - RNA, 20 nt, Artificial Sequence
  Synthetic
uuuuuaauuuuauguagaga

SEQ ID NO: 154817 - RNA, 21 nt, Artificial Sequence
  Synthetic
auuuuuaauuuuauguagaga

SEQ ID NO: 154818 - RNA, 22 nt, Artificial Sequence
  Synthetic
cauuuuuaauuuuauguagaga

SEQ ID NO: 154819 - RNA, 23 nt, Artificial Sequence
  Synthetic
acauuuuuaauuuuauguagaga

SEQ ID NO: 154820 - RNA, 24 nt, Artificial Sequence
  Synthetic
uacauuuuuaauuuuauguagaga

SEQ ID NO: 154821 - RNA, 18 nt, Artificial Sequence
  Synthetic
uacauuuuuauguagaga

SEQ ID NO: 154822 - RNA, 19 nt, Artificial Sequence
  Synthetic
auacauuuuuauguagaga

SEQ ID NO: 154823 - RNA, 20 nt, Artificial Sequence
  Synthetic
cauacauuuuuauguagaga

SEQ ID NO: 154824 - RNA, 18 nt, Artificial Sequence
  Synthetic
uugcauuuuuuguagaga

SEQ ID NO: 154825 - RNA, 19 nt, Artificial Sequence
  Synthetic
uuugcauuuuuuguagaga

SEQ ID NO: 154826 - RNA, 20 nt, Artificial Sequence
  Synthetic
uuuugcauuuuuuguagaga

SEQ ID NO: 154827 - RNA, 21 nt, Artificial Sequence
  Synthetic
uuuuugcauuuuuuguagaga

SEQ ID NO: 154828 - RNA, 22 nt, Artificial Sequence
  Synthetic
cuuuuugcauuuuuuguagaga

SEQ ID NO: 154829 - RNA, 23 nt, Artificial Sequence
  Synthetic
ucuuuuugcauuuuuuguagaga

SEQ ID NO: 154830 - RNA, 24 nt, Artificial Sequence
  Synthetic
cucuuuuugcauuuuuuguagaga

SEQ ID NO: 154831 - RNA, 18 nt, Artificial Sequence
  Synthetic
uuuuuuuuuuuugcgaga

SEQ ID NO: 154832 - RNA, 19 nt, Artificial Sequence
  Synthetic
uuuuuuuuuuuuugcgaga

SEQ ID NO: 154833 - RNA, 20 nt, Artificial Sequence
  Synthetic
uuuuuuuuuuuuuugcgaga

SEQ ID NO: 154834 - RNA, 21 nt, Artificial Sequence
  Synthetic
uuuuuuuuuuuuuuugcgaga

SEQ ID NO: 154835 - RNA, 22 nt, Artificial Sequence
  Synthetic
uuuuuuuuuuuuuuuugcgaga

SEQ ID NO: 154836 - RNA, 23 nt, Artificial Sequence
  Synthetic
uuuuuuuuuuuuuuuuugcgaga

SEQ ID NO: 154837 - RNA, 24 nt, Artificial Sequence
  Synthetic
uuuuuuuuuuuuuuuuuugcgaga

SEQ ID NO: 154838 - RNA, 18 nt, Artificial Sequence
  Synthetic
ugccuuuuguuuucgaga

SEQ ID NO: 154839 - RNA, 19 nt, Artificial Sequence
  Synthetic
augccuuuuguuuucgaga

SEQ ID NO: 154840 - RNA, 20 nt, Artificial Sequence
  Synthetic
uaugccuuuuguuuucgaga

SEQ ID NO: 154841 - RNA, 18 nt, Artificial Sequence
  Synthetic
aagguggcaagaaggaga

SEQ ID NO: 154842 - RNA, 19 nt, Artificial Sequence
  Synthetic
caagguggcaagaaggaga

SEQ ID NO: 154843 - RNA, 20 nt, Artificial Sequence
  Synthetic
acaagguggcaagaaggaga

SEQ ID NO: 154844 - RNA, 21 nt, Artificial Sequence
  Synthetic
uacaagguggcaagaaggaga

SEQ ID NO: 154845 - RNA, 22 nt, Artificial Sequence
  Synthetic
uuacaagguggcaagaaggaga

SEQ ID NO: 154846 - RNA, 23 nt, Artificial Sequence
  Synthetic
uuuacaagguggcaagaaggaga

SEQ ID NO: 154847 - RNA, 24 nt, Artificial Sequence
  Synthetic
cuuuacaagguggcaagaaggaga

SEQ ID NO: 154848 - RNA, 19 nt, Artificial Sequence
  Synthetic
ugccaguaacaggaggaga

SEQ ID NO: 154849 - RNA, 20 nt, Artificial Sequence
  Synthetic
cugccaguaacaggaggaga

SEQ ID NO: 154850 - RNA, 21 nt, Artificial Sequence
  Synthetic
acugccaguaacaggaggaga

SEQ ID NO: 154851 - RNA, 22 nt, Artificial Sequence
  Synthetic
cacugccaguaacaggaggaga

SEQ ID NO: 154852 - RNA, 23 nt, Artificial Sequence
  Synthetic
ucacugccaguaacaggaggaga

SEQ ID NO: 154853 - RNA, 24 nt, Artificial Sequence
  Synthetic
uucacugccaguaacaggaggaga

SEQ ID NO: 154854 - RNA, 18 nt, Artificial Sequence
  Synthetic
ucacagggugauaggaga

SEQ ID NO: 154855 - RNA, 19 nt, Artificial Sequence
  Synthetic
uucacagggugauaggaga

SEQ ID NO: 154856 - RNA, 20 nt, Artificial Sequence
  Synthetic
uuucacagggugauaggaga

SEQ ID NO: 154857 - RNA, 21 nt, Artificial Sequence
  Synthetic
uuuucacagggugauaggaga

SEQ ID NO: 154858 - RNA, 22 nt, Artificial Sequence
  Synthetic
cuuuucacagggugauaggaga

SEQ ID NO: 154859 - RNA, 23 nt, Artificial Sequence
  Synthetic
ccuuuucacagggugauaggaga

SEQ ID NO: 154860 - RNA, 24 nt, Artificial Sequence
  Synthetic
accuuuucacagggugauaggaga

SEQ ID NO: 154861 - RNA, 18 nt, Artificial Sequence
  Synthetic
aggguggcaggagggaga

SEQ ID NO: 154862 - RNA, 19 nt, Artificial Sequence
  Synthetic
caggguggcaggagggaga

SEQ ID NO: 154863 - RNA, 20 nt, Artificial Sequence
  Synthetic
acaggguggcaggagggaga

SEQ ID NO: 154864 - RNA, 21 nt, Artificial Sequence
  Synthetic
cacaggguggcaggagggaga

SEQ ID NO: 154865 - RNA, 22 nt, Artificial Sequence
  Synthetic
ucacaggguggcaggagggaga

SEQ ID NO: 154866 - RNA, 23 nt, Artificial Sequence
  Synthetic
uucacaggguggcaggagggaga

SEQ ID NO: 154867 - RNA, 24 nt, Artificial Sequence
  Synthetic
cuucacaggguggcaggagggaga

SEQ ID NO: 154868 - RNA, 18 nt, Artificial Sequence
  Synthetic
cuauugaacucauggaga

SEQ ID NO: 154869 - RNA, 19 nt, Artificial Sequence
  Synthetic
acuauugaacucauggaga

SEQ ID NO: 154870 - RNA, 20 nt, Artificial Sequence
  Synthetic
aacuauugaacucauggaga

SEQ ID NO: 154871 - RNA, 21 nt, Artificial Sequence
  Synthetic
aaacuauugaacucauggaga

SEQ ID NO: 154872 - RNA, 22 nt, Artificial Sequence
  Synthetic
aaaacuauugaacucauggaga

SEQ ID NO: 154873 - RNA, 23 nt, Artificial Sequence
  Synthetic
uaaaacuauugaacucauggaga

SEQ ID NO: 154874 - RNA, 24 nt, Artificial Sequence
  Synthetic
uuaaaacuauugaacucauggaga

SEQ ID NO: 154875 - RNA, 18 nt, Artificial Sequence
  Synthetic
auggugagaaacuggaga

SEQ ID NO: 154876 - RNA, 19 nt, Artificial Sequence
  Synthetic
cauggugagaaacuggaga

SEQ ID NO: 154877 - RNA, 20 nt, Artificial Sequence
  Synthetic
acauggugagaaacuggaga

SEQ ID NO: 154878 - RNA, 18 nt, Artificial Sequence
  Synthetic
uuuuuguuuuucuggaga

SEQ ID NO: 154879 - RNA, 19 nt, Artificial Sequence
  Synthetic
cuuuuuguuuuucuggaga

SEQ ID NO: 154880 - RNA, 21 nt, Artificial Sequence
  Synthetic
ugcuuuuuguuuuucuggaga

SEQ ID NO: 154881 - RNA, 22 nt, Artificial Sequence
  Synthetic
cugcuuuuuguuuuucuggaga

SEQ ID NO: 154882 - RNA, 24 nt, Artificial Sequence
  Synthetic
ugcugcuuuuuguuuuucuggaga

SEQ ID NO: 154883 - RNA, 18 nt, Artificial Sequence
  Synthetic
uuuguacuuuaguggaga

SEQ ID NO: 154884 - RNA, 19 nt, Artificial Sequence
  Synthetic
uuuuguacuuuaguggaga

SEQ ID NO: 154885 - RNA, 20 nt, Artificial Sequence
  Synthetic
uuuuuguacuuuaguggaga

SEQ ID NO: 154886 - RNA, 21 nt, Artificial Sequence
  Synthetic
uuuuuuguacuuuaguggaga

SEQ ID NO: 154887 - RNA, 22 nt, Artificial Sequence
  Synthetic
auuuuuuguacuuuaguggaga

SEQ ID NO: 154888 - RNA, 23 nt, Artificial Sequence
  Synthetic
aauuuuuuguacuuuaguggaga

SEQ ID NO: 154889 - RNA, 24 nt, Artificial Sequence
  Synthetic
uaauuuuuuguacuuuaguggaga

SEQ ID NO: 154890 - RNA, 18 nt, Artificial Sequence
  Synthetic
uuguauuuuuaguggaga

SEQ ID NO: 154891 - RNA, 19 nt, Artificial Sequence
  Synthetic
uuuguauuuuuaguggaga

SEQ ID NO: 154892 - RNA, 20 nt, Artificial Sequence
  Synthetic
uuuuguauuuuuaguggaga

SEQ ID NO: 154893 - RNA, 21 nt, Artificial Sequence
  Synthetic
uuuuuguauuuuuaguggaga

SEQ ID NO: 154894 - RNA, 22 nt, Artificial Sequence
  Synthetic
auuuuuguauuuuuaguggaga

SEQ ID NO: 154895 - RNA, 23 nt, Artificial Sequence
  Synthetic
aauuuuuguauuuuuaguggaga

SEQ ID NO: 154896 - RNA, 24 nt, Artificial Sequence
  Synthetic
uaauuuuuguauuuuuaguggaga

SEQ ID NO: 154897 - RNA, 18 nt, Artificial Sequence
  Synthetic
aaaauuuuuuuguggaga

SEQ ID NO: 154898 - RNA, 19 nt, Artificial Sequence
  Synthetic
uaaaauuuuuuuguggaga

SEQ ID NO: 154899 - RNA, 20 nt, Artificial Sequence
  Synthetic
uuaaaauuuuuuuguggaga

SEQ ID NO: 154900 - RNA, 21 nt, Artificial Sequence
  Synthetic
uuuaaaauuuuuuuguggaga

SEQ ID NO: 154901 - RNA, 22 nt, Artificial Sequence
  Synthetic
uuuuaaaauuuuuuuguggaga

SEQ ID NO: 154902 - RNA, 23 nt, Artificial Sequence
  Synthetic
uuuuuaaaauuuuuuuguggaga

SEQ ID NO: 154903 - RNA, 24 nt, Artificial Sequence
  Synthetic
auuuuuaaaauuuuuuuguggaga

SEQ ID NO: 154904 - RNA, 18 nt, Artificial Sequence
  Synthetic
ugugacccuauuuggaga

SEQ ID NO: 154905 - RNA, 19 nt, Artificial Sequence
  Synthetic
augugacccuauuuggaga

SEQ ID NO: 154906 - RNA, 20 nt, Artificial Sequence
  Synthetic
aaugugacccuauuuggaga

SEQ ID NO: 154907 - RNA, 22 nt, Artificial Sequence
  Synthetic
agaaugugacccuauuuggaga

SEQ ID NO: 154908 - RNA, 23 nt, Artificial Sequence
  Synthetic
cagaaugugacccuauuuggaga

SEQ ID NO: 154909 - RNA, 24 nt, Artificial Sequence
  Synthetic
ucagaaugugacccuauuuggaga

SEQ ID NO: 154910 - RNA, 18 nt, Artificial Sequence
  Synthetic
auuuauuuauuuuggaga

SEQ ID NO: 154911 - RNA, 19 nt, Artificial Sequence
  Synthetic
uauuuauuuauuuuggaga

SEQ ID NO: 154912 - RNA, 20 nt, Artificial Sequence
  Synthetic
uuauuuauuuauuuuggaga

SEQ ID NO: 154913 - RNA, 21 nt, Artificial Sequence
  Synthetic
uuuauuuauuuauuuuggaga

SEQ ID NO: 154914 - RNA, 22 nt, Artificial Sequence
  Synthetic
auuuauuuauuuauuuuggaga

SEQ ID NO: 154915 - RNA, 23 nt, Artificial Sequence
  Synthetic
uauuuauuuauuuauuuuggaga

SEQ ID NO: 154916 - RNA, 24 nt, Artificial Sequence
  Synthetic
uuauuuauuuauuuauuuuggaga

SEQ ID NO: 154917 - RNA, 18 nt, Artificial Sequence
  Synthetic
auuaauuuauaaaugaga

SEQ ID NO: 154918 - RNA, 19 nt, Artificial Sequence
  Synthetic
uauuaauuuauaaaugaga

SEQ ID NO: 154919 - RNA, 20 nt, Artificial Sequence
  Synthetic
auauuaauuuauaaaugaga

SEQ ID NO: 154920 - RNA, 18 nt, Artificial Sequence
  Synthetic
cugcuuuuccccaugaga

SEQ ID NO: 154921 - RNA, 19 nt, Artificial Sequence
  Synthetic
acugcuuuuccccaugaga

SEQ ID NO: 154922 - RNA, 18 nt, Artificial Sequence
  Synthetic
agacagaagagcaugaga

SEQ ID NO: 154923 - RNA, 18 nt, Artificial Sequence
  Synthetic
caaaguguuuucaugaga

SEQ ID NO: 154924 - RNA, 19 nt, Artificial Sequence
  Synthetic
acaaaguguuuucaugaga

SEQ ID NO: 154925 - RNA, 20 nt, Artificial Sequence
  Synthetic
aacaaaguguuuucaugaga

SEQ ID NO: 154926 - RNA, 18 nt, Artificial Sequence
  Synthetic
acaaagcaggagaugaga

SEQ ID NO: 154927 - RNA, 19 nt, Artificial Sequence
  Synthetic
aacaaagcaggagaugaga

SEQ ID NO: 154928 - RNA, 20 nt, Artificial Sequence
  Synthetic
aaacaaagcaggagaugaga

SEQ ID NO: 154929 - RNA, 18 nt, Artificial Sequence
  Synthetic
auuuauuuauuuaugaga

SEQ ID NO: 154930 - RNA, 19 nt, Artificial Sequence
  Synthetic
uauuuauuuauuuaugaga

SEQ ID NO: 154931 - RNA, 20 nt, Artificial Sequence
  Synthetic
uuauuuauuuauuuaugaga

SEQ ID NO: 154932 - RNA, 21 nt, Artificial Sequence
  Synthetic
uuuauuuauuuauuuaugaga

SEQ ID NO: 154933 - RNA, 22 nt, Artificial Sequence
  Synthetic
auuuauuuauuuauuuaugaga

SEQ ID NO: 154934 - RNA, 23 nt, Artificial Sequence
  Synthetic
uauuuauuuauuuauuuaugaga

SEQ ID NO: 154935 - RNA, 18 nt, Artificial Sequence
  Synthetic
auaacaaaaugccugaga

SEQ ID NO: 154936 - RNA, 19 nt, Artificial Sequence
  Synthetic
uauaacaaaaugccugaga

SEQ ID NO: 154937 - RNA, 20 nt, Artificial Sequence
  Synthetic
uuauaacaaaaugccugaga

SEQ ID NO: 154938 - RNA, 22 nt, Artificial Sequence
  Synthetic
uguuauaacaaaaugccugaga

SEQ ID NO: 154939 - RNA, 23 nt, Artificial Sequence
  Synthetic
cuguuauaacaaaaugccugaga

SEQ ID NO: 154940 - RNA, 18 nt, Artificial Sequence
  Synthetic
auaaagaacugccugaga

SEQ ID NO: 154941 - RNA, 19 nt, Artificial Sequence
  Synthetic
aauaaagaacugccugaga

SEQ ID NO: 154942 - RNA, 20 nt, Artificial Sequence
  Synthetic
caauaaagaacugccugaga

SEQ ID NO: 154943 - RNA, 22 nt, Artificial Sequence
  Synthetic
ugcaauaaagaacugccugaga

SEQ ID NO: 154944 - RNA, 24 nt, Artificial Sequence
  Synthetic
ugugcaauaaagaacugccugaga

SEQ ID NO: 154945 - RNA, 19 nt, Artificial Sequence
  Synthetic
uauaaagaacugccugaga

SEQ ID NO: 154946 - RNA, 20 nt, Artificial Sequence
  Synthetic
cuauaaagaacugccugaga

SEQ ID NO: 154947 - RNA, 22 nt, Artificial Sequence
  Synthetic
ugcuauaaagaacugccugaga

SEQ ID NO: 154948 - RNA, 23 nt, Artificial Sequence
  Synthetic
cugcuauaaagaacugccugaga

SEQ ID NO: 154949 - RNA, 24 nt, Artificial Sequence
  Synthetic
acugcuauaaagaacugccugaga

SEQ ID NO: 154950 - RNA, 18 nt, Artificial Sequence
  Synthetic
acaaagacauaucugaga

SEQ ID NO: 154951 - RNA, 19 nt, Artificial Sequence
  Synthetic
aacaaagacauaucugaga

SEQ ID NO: 154952 - RNA, 20 nt, Artificial Sequence
  Synthetic
uaacaaagacauaucugaga

SEQ ID NO: 154953 - RNA, 21 nt, Artificial Sequence
  Synthetic
uuaacaaagacauaucugaga

SEQ ID NO: 154954 - RNA, 23 nt, Artificial Sequence
  Synthetic
uguuaacaaagacauaucugaga

SEQ ID NO: 154955 - RNA, 24 nt, Artificial Sequence
  Synthetic
cuguuaacaaagacauaucugaga

SEQ ID NO: 154956 - RNA, 18 nt, Artificial Sequence
  Synthetic
uuuuuuuuucuucugaga

SEQ ID NO: 154957 - RNA, 19 nt, Artificial Sequence
  Synthetic
uuuuuuuuuucuucugaga

SEQ ID NO: 154958 - RNA, 20 nt, Artificial Sequence
  Synthetic
uuuuuuuuuuucuucugaga

SEQ ID NO: 154959 - RNA, 21 nt, Artificial Sequence
  Synthetic
uuuuuuuuuuuucuucugaga

SEQ ID NO: 154960 - RNA, 22 nt, Artificial Sequence
  Synthetic
uuuuuuuuuuuuucuucugaga

SEQ ID NO: 154961 - RNA, 23 nt, Artificial Sequence
  Synthetic
uuuuuuuuuuuuuucuucugaga

SEQ ID NO: 154962 - RNA, 24 nt, Artificial Sequence
  Synthetic
uuuuuuuuuuuuuuucuucugaga

SEQ ID NO: 154963 - RNA, 18 nt, Artificial Sequence
  Synthetic
uuuguuuuuuuucugaga

SEQ ID NO: 154964 - RNA, 19 nt, Artificial Sequence
  Synthetic
uuuuguuuuuuuucugaga

SEQ ID NO: 154965 - RNA, 21 nt, Artificial Sequence
  Synthetic
uguuuuguuuuuuuucugaga

SEQ ID NO: 154966 - RNA, 22 nt, Artificial Sequence
  Synthetic
uuguuuuguuuuuuuucugaga

SEQ ID NO: 154967 - RNA, 23 nt, Artificial Sequence
  Synthetic
uuuguuuuguuuuuuuucugaga

SEQ ID NO: 154968 - RNA, 18 nt, Artificial Sequence
  Synthetic
auuuuuuuuuuucugaga

SEQ ID NO: 154969 - RNA, 19 nt, Artificial Sequence
  Synthetic
aauuuuuuuuuuucugaga

SEQ ID NO: 154970 - RNA, 20 nt, Artificial Sequence
  Synthetic
aaauuuuuuuuuuucugaga

SEQ ID NO: 154971 - RNA, 21 nt, Artificial Sequence
  Synthetic
uaaauuuuuuuuuuucugaga

SEQ ID NO: 154972 - RNA, 22 nt, Artificial Sequence
  Synthetic
cuaaauuuuuuuuuuucugaga

SEQ ID NO: 154973 - RNA, 23 nt, Artificial Sequence
  Synthetic
ccuaaauuuuuuuuuuucugaga

SEQ ID NO: 154974 - RNA, 24 nt, Artificial Sequence
  Synthetic
cccuaaauuuuuuuuuuucugaga

SEQ ID NO: 154975 - RNA, 18 nt, Artificial Sequence
  Synthetic
caauucaaaaaagugaga

SEQ ID NO: 154976 - RNA, 19 nt, Artificial Sequence
  Synthetic
acaauucaaaaaagugaga

SEQ ID NO: 154977 - RNA, 20 nt, Artificial Sequence
  Synthetic
aacaauucaaaaaagugaga

SEQ ID NO: 154978 - RNA, 18 nt, Artificial Sequence
  Synthetic
uuuuuuuuuuuggugaga

SEQ ID NO: 154979 - RNA, 19 nt, Artificial Sequence
  Synthetic
uuuuuuuuuuuuggugaga

SEQ ID NO: 154980 - RNA, 20 nt, Artificial Sequence
  Synthetic
uuuuuuuuuuuuuggugaga

SEQ ID NO: 154981 - RNA, 21 nt, Artificial Sequence
  Synthetic
uuuuuuuuuuuuuuggugaga

SEQ ID NO: 154982 - RNA, 22 nt, Artificial Sequence
  Synthetic
uuuuuuuuuuuuuuuggugaga

SEQ ID NO: 154983 - RNA, 23 nt, Artificial Sequence
  Synthetic
uuuuuuuuuuuuuuuuggugaga

SEQ ID NO: 154984 - RNA, 24 nt, Artificial Sequence
  Synthetic
uuuuuuuuuuuuuuuuuggugaga

SEQ ID NO: 154985 - RNA, 18 nt, Artificial Sequence
  Synthetic
uuaugauuauuauugaga

SEQ ID NO: 154986 - RNA, 19 nt, Artificial Sequence
  Synthetic
auuaugauuauuauugaga

SEQ ID NO: 154987 - RNA, 21 nt, Artificial Sequence
  Synthetic
ugauuaugauuauuauugaga

SEQ ID NO: 154988 - RNA, 22 nt, Artificial Sequence
  Synthetic
augauuaugauuauuauugaga

SEQ ID NO: 154989 - RNA, 23 nt, Artificial Sequence
  Synthetic
uaugauuaugauuauuauugaga

SEQ ID NO: 154990 - RNA, 24 nt, Artificial Sequence
  Synthetic
uuaugauuaugauuauuauugaga

SEQ ID NO: 154991 - RNA, 18 nt, Artificial Sequence
  Synthetic
aaaauagaaauguugaga

SEQ ID NO: 154992 - RNA, 19 nt, Artificial Sequence
  Synthetic
caaaauagaaauguugaga

SEQ ID NO: 154993 - RNA, 20 nt, Artificial Sequence
  Synthetic
acaaaauagaaauguugaga

SEQ ID NO: 154994 - RNA, 18 nt, Artificial Sequence
  Synthetic
uuauuuauuuauuugaga

SEQ ID NO: 154995 - RNA, 19 nt, Artificial Sequence
  Synthetic
auuauuuauuuauuugaga

SEQ ID NO: 154996 - RNA, 20 nt, Artificial Sequence
  Synthetic
aauuauuuauuuauuugaga

SEQ ID NO: 154997 - RNA, 21 nt, Artificial Sequence
  Synthetic
uaauuauuuauuuauuugaga

SEQ ID NO: 154998 - RNA, 22 nt, Artificial Sequence
  Synthetic
cuaauuauuuauuuauuugaga

SEQ ID NO: 154999 - RNA, 23 nt, Artificial Sequence
  Synthetic
ucuaauuauuuauuuauuugaga

SEQ ID NO: 155000 - RNA, 24 nt, Artificial Sequence
  Synthetic
cucuaauuauuuauuuauuugaga

SEQ ID NO: 155001 - RNA, 18 nt, Artificial Sequence
  Synthetic
uuuuuuguuuguuugaga

SEQ ID NO: 155002 - RNA, 19 nt, Artificial Sequence
  Synthetic
uuuuuuuguuuguuugaga

SEQ ID NO: 155003 - RNA, 20 nt, Artificial Sequence
  Synthetic
uuuuuuuuguuuguuugaga

SEQ ID NO: 155004 - RNA, 21 nt, Artificial Sequence
  Synthetic
uuuuuuuuuguuuguuugaga

SEQ ID NO: 155005 - RNA, 22 nt, Artificial Sequence
  Synthetic
uuuuuuuuuuguuuguuugaga

SEQ ID NO: 155006 - RNA, 23 nt, Artificial Sequence
  Synthetic
uuuuuuuuuuuguuuguuugaga

SEQ ID NO: 155007 - RNA, 24 nt, Artificial Sequence
  Synthetic
cuuuuuuuuuuuguuuguuugaga

SEQ ID NO: 155008 - RNA, 18 nt, Artificial Sequence
  Synthetic
uauauauauauuuugaga

SEQ ID NO: 155009 - RNA, 19 nt, Artificial Sequence
  Synthetic
auauauauauauuuugaga

SEQ ID NO: 155010 - RNA, 21 nt, Artificial Sequence
  Synthetic
ugauauauauauauuuugaga

SEQ ID NO: 155011 - RNA, 22 nt, Artificial Sequence
  Synthetic
uugauauauauauauuuugaga

SEQ ID NO: 155012 - RNA, 23 nt, Artificial Sequence
  Synthetic
cuugauauauauauauuuugaga

SEQ ID NO: 155013 - RNA, 24 nt, Artificial Sequence
  Synthetic
acuugauauauauauauuuugaga

SEQ ID NO: 155014 - RNA, 18 nt, Artificial Sequence
  Synthetic
uauuuauuuauuuugaga

SEQ ID NO: 155015 - RNA, 19 nt, Artificial Sequence
  Synthetic
cuauuuauuuauuuugaga

SEQ ID NO: 155016 - RNA, 20 nt, Artificial Sequence
  Synthetic
ucuauuuauuuauuuugaga

SEQ ID NO: 155017 - RNA, 21 nt, Artificial Sequence
  Synthetic
uucuauuuauuuauuuugaga

SEQ ID NO: 155018 - RNA, 22 nt, Artificial Sequence
  Synthetic
cuucuauuuauuuauuuugaga

SEQ ID NO: 155019 - RNA, 24 nt, Artificial Sequence
  Synthetic
agcuucuauuuauuuauuuugaga

SEQ ID NO: 155020 - RNA, 19 nt, Artificial Sequence
  Synthetic
uuauuuauuuauuuugaga

SEQ ID NO: 155021 - RNA, 20 nt, Artificial Sequence
  Synthetic
uuuauuuauuuauuuugaga

SEQ ID NO: 155022 - RNA, 21 nt, Artificial Sequence
  Synthetic
auuuauuuauuuauuuugaga

SEQ ID NO: 155023 - RNA, 22 nt, Artificial Sequence
  Synthetic
uauuuauuuauuuauuuugaga

SEQ ID NO: 155024 - RNA, 23 nt, Artificial Sequence
  Synthetic
uuauuuauuuauuuauuuugaga

SEQ ID NO: 155025 - RNA, 24 nt, Artificial Sequence
  Synthetic
auuauuuauuuauuuauuuugaga

SEQ ID NO: 155026 - RNA, 18 nt, Artificial Sequence
  Synthetic
uuuuuguuccuuuugaga

SEQ ID NO: 155027 - RNA, 19 nt, Artificial Sequence
  Synthetic
uuuuuuguuccuuuugaga

SEQ ID NO: 155028 - RNA, 20 nt, Artificial Sequence
  Synthetic
cuuuuuuguuccuuuugaga

SEQ ID NO: 155029 - RNA, 21 nt, Artificial Sequence
  Synthetic
ucuuuuuuguuccuuuugaga

SEQ ID NO: 155030 - RNA, 22 nt, Artificial Sequence
  Synthetic
uucuuuuuuguuccuuuugaga

SEQ ID NO: 155031 - RNA, 23 nt, Artificial Sequence
  Synthetic
uuucuuuuuuguuccuuuugaga

SEQ ID NO: 155032 - RNA, 24 nt, Artificial Sequence
  Synthetic
uuuucuuuuuuguuccuuuugaga

SEQ ID NO: 155033 - RNA, 18 nt, Artificial Sequence
  Synthetic
uuuuuauuucuuuugaga

SEQ ID NO: 155034 - RNA, 19 nt, Artificial Sequence
  Synthetic
uuuuuuauuucuuuugaga

SEQ ID NO: 155035 - RNA, 20 nt, Artificial Sequence
  Synthetic
cuuuuuuauuucuuuugaga

SEQ ID NO: 155036 - RNA, 21 nt, Artificial Sequence
  Synthetic
ucuuuuuuauuucuuuugaga

SEQ ID NO: 155037 - RNA, 22 nt, Artificial Sequence
  Synthetic
uucuuuuuuauuucuuuugaga

SEQ ID NO: 155038 - RNA, 23 nt, Artificial Sequence
  Synthetic
uuucuuuuuuauuucuuuugaga

SEQ ID NO: 155039 - RNA, 24 nt, Artificial Sequence
  Synthetic
uuuucuuuuuuauuucuuuugaga

SEQ ID NO: 155040 - RNA, 18 nt, Artificial Sequence
  Synthetic
uuauuuuuucuuuugaga

SEQ ID NO: 155041 - RNA, 19 nt, Artificial Sequence
  Synthetic
cuuauuuuuucuuuugaga

SEQ ID NO: 155042 - RNA, 22 nt, Artificial Sequence
  Synthetic
aggcuuauuuuuucuuuugaga

SEQ ID NO: 155043 - RNA, 23 nt, Artificial Sequence
  Synthetic
uaggcuuauuuuuucuuuugaga

SEQ ID NO: 155044 - RNA, 24 nt, Artificial Sequence
  Synthetic
uuaggcuuauuuuuucuuuugaga

SEQ ID NO: 155045 - RNA, 18 nt, Artificial Sequence
  Synthetic
uucuuuuuucuuuugaga

SEQ ID NO: 155046 - RNA, 19 nt, Artificial Sequence
  Synthetic
uuucuuuuuucuuuugaga

SEQ ID NO: 155047 - RNA, 20 nt, Artificial Sequence
  Synthetic
uuuucuuuuuucuuuugaga

SEQ ID NO: 155048 - RNA, 21 nt, Artificial Sequence
  Synthetic
uuuuucuuuuuucuuuugaga

SEQ ID NO: 155049 - RNA, 22 nt, Artificial Sequence
  Synthetic
uuuuuucuuuuuucuuuugaga

SEQ ID NO: 155050 - RNA, 23 nt, Artificial Sequence
  Synthetic
cuuuuuucuuuuuucuuuugaga

SEQ ID NO: 155051 - RNA, 24 nt, Artificial Sequence
  Synthetic
acuuuuuucuuuuuucuuuugaga

SEQ ID NO: 155052 - RNA, 18 nt, Artificial Sequence
  Synthetic
auuuauguauuuuugaga

SEQ ID NO: 155053 - RNA, 19 nt, Artificial Sequence
  Synthetic
uauuuauguauuuuugaga

SEQ ID NO: 155054 - RNA, 20 nt, Artificial Sequence
  Synthetic
uuauuuauguauuuuugaga

SEQ ID NO: 155055 - RNA, 21 nt, Artificial Sequence
  Synthetic
cuuauuuauguauuuuugaga

SEQ ID NO: 155056 - RNA, 22 nt, Artificial Sequence
  Synthetic
ccuuauuuauguauuuuugaga

SEQ ID NO: 155057 - RNA, 23 nt, Artificial Sequence
  Synthetic
uccuuauuuauguauuuuugaga

SEQ ID NO: 155058 - RNA, 24 nt, Artificial Sequence
  Synthetic
cuccuuauuuauguauuuuugaga

SEQ ID NO: 155059 - RNA, 19 nt, Artificial Sequence
  Synthetic
uguuuuguuauuuuugaga

SEQ ID NO: 155060 - RNA, 20 nt, Artificial Sequence
  Synthetic
uuguuuuguuauuuuugaga

SEQ ID NO: 155061 - RNA, 21 nt, Artificial Sequence
  Synthetic
uuuguuuuguuauuuuugaga

SEQ ID NO: 155062 - RNA, 22 nt, Artificial Sequence
  Synthetic
uuuuguuuuguuauuuuugaga

SEQ ID NO: 155063 - RNA, 24 nt, Artificial Sequence
  Synthetic
uguuuuguuuuguuauuuuugaga

SEQ ID NO: 155064 - RNA, 18 nt, Artificial Sequence
  Synthetic
auuuauuuauuuuugaga

SEQ ID NO: 155065 - RNA, 19 nt, Artificial Sequence
  Synthetic
uauuuauuuauuuuugaga

SEQ ID NO: 155066 - RNA, 20 nt, Artificial Sequence
  Synthetic
uuauuuauuuauuuuugaga

SEQ ID NO: 155067 - RNA, 21 nt, Artificial Sequence
  Synthetic
uuuauuuauuuauuuuugaga

SEQ ID NO: 155068 - RNA, 22 nt, Artificial Sequence
  Synthetic
auuuauuuauuuauuuuugaga

SEQ ID NO: 155069 - RNA, 23 nt, Artificial Sequence
  Synthetic
uauuuauuuauuuauuuuugaga

SEQ ID NO: 155070 - RNA, 24 nt, Artificial Sequence
  Synthetic
uuauuuauuuauuuauuuuugaga

SEQ ID NO: 155071 - RNA, 18 nt, Artificial Sequence
  Synthetic
uuuuuuuucuuuuugaga

SEQ ID NO: 155072 - RNA, 19 nt, Artificial Sequence
  Synthetic
uuuuuuuuucuuuuugaga

SEQ ID NO: 155073 - RNA, 20 nt, Artificial Sequence
  Synthetic
uuuuuuuuuucuuuuugaga

SEQ ID NO: 155074 - RNA, 21 nt, Artificial Sequence
  Synthetic
uuuuuuuuuuucuuuuugaga

SEQ ID NO: 155075 - RNA, 22 nt, Artificial Sequence
  Synthetic
uuuuuuuuuuuucuuuuugaga

SEQ ID NO: 155076 - RNA, 23 nt, Artificial Sequence
  Synthetic
uuuuuuuuuuuuucuuuuugaga

SEQ ID NO: 155077 - RNA, 24 nt, Artificial Sequence
  Synthetic
uuuuuuuuuuuuuucuuuuugaga

SEQ ID NO: 155078 - RNA, 18 nt, Artificial Sequence
  Synthetic
cuuuguuuguuuuugaga

SEQ ID NO: 155079 - RNA, 19 nt, Artificial Sequence
  Synthetic
ucuuuguuuguuuuugaga

SEQ ID NO: 155080 - RNA, 20 nt, Artificial Sequence
  Synthetic
uucuuuguuuguuuuugaga

SEQ ID NO: 155081 - RNA, 21 nt, Artificial Sequence
  Synthetic
auucuuuguuuguuuuugaga

SEQ ID NO: 155082 - RNA, 22 nt, Artificial Sequence
  Synthetic
uauucuuuguuuguuuuugaga

SEQ ID NO: 155083 - RNA, 23 nt, Artificial Sequence
  Synthetic
uuauucuuuguuuguuuuugaga

SEQ ID NO: 155084 - RNA, 24 nt, Artificial Sequence
  Synthetic
uuuauucuuuguuuguuuuugaga

SEQ ID NO: 155085 - RNA, 19 nt, Artificial Sequence
  Synthetic
auuuauuuauuuuuugaga

SEQ ID NO: 155086 - RNA, 20 nt, Artificial Sequence
  Synthetic
uauuuauuuauuuuuugaga

SEQ ID NO: 155087 - RNA, 21 nt, Artificial Sequence
  Synthetic
uuauuuauuuauuuuuugaga

SEQ ID NO: 155088 - RNA, 22 nt, Artificial Sequence
  Synthetic
uuuauuuauuuauuuuuugaga

SEQ ID NO: 155089 - RNA, 23 nt, Artificial Sequence
  Synthetic
auuuauuuauuuauuuuuugaga

SEQ ID NO: 155090 - RNA, 24 nt, Artificial Sequence
  Synthetic
uauuuauuuauuuauuuuuugaga

SEQ ID NO: 155091 - RNA, 18 nt, Artificial Sequence
  Synthetic
ucuuuuuauuuuuugaga

SEQ ID NO: 155092 - RNA, 19 nt, Artificial Sequence
  Synthetic
uucuuuuuauuuuuugaga

SEQ ID NO: 155093 - RNA, 20 nt, Artificial Sequence
  Synthetic
uuucuuuuuauuuuuugaga

SEQ ID NO: 155094 - RNA, 21 nt, Artificial Sequence
  Synthetic
cuuucuuuuuauuuuuugaga

SEQ ID NO: 155095 - RNA, 22 nt, Artificial Sequence
  Synthetic
ucuuucuuuuuauuuuuugaga

SEQ ID NO: 155096 - RNA, 23 nt, Artificial Sequence
  Synthetic
cucuuucuuuuuauuuuuugaga

SEQ ID NO: 155097 - RNA, 24 nt, Artificial Sequence
  Synthetic
ucucuuucuuuuuauuuuuugaga

SEQ ID NO: 155098 - RNA, 18 nt, Artificial Sequence
  Synthetic
uguuuuuauuuuuugaga

SEQ ID NO: 155099 - RNA, 19 nt, Artificial Sequence
  Synthetic
uuguuuuuauuuuuugaga

SEQ ID NO: 155100 - RNA, 20 nt, Artificial Sequence
  Synthetic
auuguuuuuauuuuuugaga

SEQ ID NO: 155101 - RNA, 21 nt, Artificial Sequence
  Synthetic
uauuguuuuuauuuuuugaga

SEQ ID NO: 155102 - RNA, 22 nt, Artificial Sequence
  Synthetic
uuauuguuuuuauuuuuugaga

SEQ ID NO: 155103 - RNA, 23 nt, Artificial Sequence
  Synthetic
uuuauuguuuuuauuuuuugaga

SEQ ID NO: 155104 - RNA, 24 nt, Artificial Sequence
  Synthetic
uuuuauuguuuuuauuuuuugaga

SEQ ID NO: 155105 - RNA, 18 nt, Artificial Sequence
  Synthetic
uaauuuauuuuuuugaga

SEQ ID NO: 155106 - RNA, 19 nt, Artificial Sequence
  Synthetic
uuaauuuauuuuuuugaga

SEQ ID NO: 155107 - RNA, 20 nt, Artificial Sequence
  Synthetic
uuuaauuuauuuuuuugaga

SEQ ID NO: 155108 - RNA, 21 nt, Artificial Sequence
  Synthetic
uuuuaauuuauuuuuuugaga

SEQ ID NO: 155109 - RNA, 22 nt, Artificial Sequence
  Synthetic
auuuuaauuuauuuuuuugaga

SEQ ID NO: 155110 - RNA, 23 nt, Artificial Sequence
  Synthetic
uauuuuaauuuauuuuuuugaga

SEQ ID NO: 155111 - RNA, 24 nt, Artificial Sequence
  Synthetic
uuauuuuaauuuauuuuuuugaga

SEQ ID NO: 155112 - RNA, 18 nt, Artificial Sequence
  Synthetic
uuuuuucuuuuuuugaga

SEQ ID NO: 155113 - RNA, 19 nt, Artificial Sequence
  Synthetic
uuuuuuucuuuuuuugaga

SEQ ID NO: 155114 - RNA, 20 nt, Artificial Sequence
  Synthetic
uuuuuuuucuuuuuuugaga

SEQ ID NO: 155115 - RNA, 21 nt, Artificial Sequence
  Synthetic
uuuuuuuuucuuuuuuugaga

SEQ ID NO: 155116 - RNA, 22 nt, Artificial Sequence
  Synthetic
uuuuuuuuuucuuuuuuugaga

SEQ ID NO: 155117 - RNA, 23 nt, Artificial Sequence
  Synthetic
uuuuuuuuuuucuuuuuuugaga

SEQ ID NO: 155118 - RNA, 24 nt, Artificial Sequence
  Synthetic
uuuuuuuuuuuucuuuuuuugaga

SEQ ID NO: 155119 - RNA, 18 nt, Artificial Sequence
  Synthetic
uuguuuguuuuuuugaga

SEQ ID NO: 155120 - RNA, 19 nt, Artificial Sequence
  Synthetic
uuuguuuguuuuuuugaga

SEQ ID NO: 155121 - RNA, 21 nt, Artificial Sequence
  Synthetic
uguuuguuuguuuuuuugaga

SEQ ID NO: 155122 - RNA, 22 nt, Artificial Sequence
  Synthetic
uuguuuguuuguuuuuuugaga

SEQ ID NO: 155123 - RNA, 23 nt, Artificial Sequence
  Synthetic
uuuguuuguuuguuuuuuugaga

SEQ ID NO: 155124 - RNA, 24 nt, Artificial Sequence
  Synthetic
uuuuguuuguuuguuuuuuugaga

SEQ ID NO: 155125 - RNA, 18 nt, Artificial Sequence
  Synthetic
uuuacuuuuuuuuugaga

SEQ ID NO: 155126 - RNA, 19 nt, Artificial Sequence
  Synthetic
uuuuacuuuuuuuuugaga

SEQ ID NO: 155127 - RNA, 21 nt, Artificial Sequence
  Synthetic
aguuuuacuuuuuuuuugaga

SEQ ID NO: 155128 - RNA, 22 nt, Artificial Sequence
  Synthetic
aaguuuuacuuuuuuuuugaga

SEQ ID NO: 155129 - RNA, 24 nt, Artificial Sequence
  Synthetic
ugaaguuuuacuuuuuuuuugaga

SEQ ID NO: 155130 - RNA, 18 nt, Artificial Sequence
  Synthetic
ucuucuuuuuuuuugaga

SEQ ID NO: 155131 - RNA, 19 nt, Artificial Sequence
  Synthetic
uucuucuuuuuuuuugaga

SEQ ID NO: 155132 - RNA, 20 nt, Artificial Sequence
  Synthetic
cuucuucuuuuuuuuugaga

SEQ ID NO: 155133 - RNA, 21 nt, Artificial Sequence
  Synthetic
ucuucuucuuuuuuuuugaga

SEQ ID NO: 155134 - RNA, 22 nt, Artificial Sequence
  Synthetic
uucuucuucuuuuuuuuugaga

SEQ ID NO: 155135 - RNA, 23 nt, Artificial Sequence
  Synthetic
uuucuucuucuuuuuuuuugaga

SEQ ID NO: 155136 - RNA, 24 nt, Artificial Sequence
  Synthetic
uuuucuucuucuuuuuuuuugaga

SEQ ID NO: 155137 - RNA, 18 nt, Artificial Sequence
  Synthetic
cuuuuuuuuuuuuugaga

SEQ ID NO: 155138 - RNA, 19 nt, Artificial Sequence
  Synthetic
ccuuuuuuuuuuuuugaga

SEQ ID NO: 155139 - RNA, 20 nt, Artificial Sequence
  Synthetic
uccuuuuuuuuuuuuugaga

SEQ ID NO: 155140 - RNA, 21 nt, Artificial Sequence
  Synthetic
uuccuuuuuuuuuuuuugaga

SEQ ID NO: 155141 - RNA, 22 nt, Artificial Sequence
  Synthetic
uuuccuuuuuuuuuuuuugaga

SEQ ID NO: 155142 - RNA, 23 nt, Artificial Sequence
  Synthetic
cuuuccuuuuuuuuuuuuugaga

SEQ ID NO: 155143 - RNA, 24 nt, Artificial Sequence
  Synthetic
ucuuuccuuuuuuuuuuuuugaga

SEQ ID NO: 155144 - RNA, 18 nt, Artificial Sequence
  Synthetic
uuuuuuuuuuuuuugaga

SEQ ID NO: 155145 - RNA, 19 nt, Artificial Sequence
  Synthetic
cuuuuuuuuuuuuuugaga

SEQ ID NO: 155146 - RNA, 20 nt, Artificial Sequence
  Synthetic
acuuuuuuuuuuuuuugaga

SEQ ID NO: 155147 - RNA, 22 nt, Artificial Sequence
  Synthetic
ugacuuuuuuuuuuuuuugaga

SEQ ID NO: 155148 - RNA, 23 nt, Artificial Sequence
  Synthetic
augacuuuuuuuuuuuuuugaga

SEQ ID NO: 155149 - RNA, 24 nt, Artificial Sequence
  Synthetic
aaugacuuuuuuuuuuuuuugaga

SEQ ID NO: 155150 - RNA, 20 nt, Artificial Sequence
  Synthetic
ucuuuuuuuuuuuuuugaga

SEQ ID NO: 155151 - RNA, 21 nt, Artificial Sequence
  Synthetic
uucuuuuuuuuuuuuuugaga

SEQ ID NO: 155152 - RNA, 22 nt, Artificial Sequence
  Synthetic
uuucuuuuuuuuuuuuuugaga

SEQ ID NO: 155153 - RNA, 23 nt, Artificial Sequence
  Synthetic
cuuucuuuuuuuuuuuuuugaga

SEQ ID NO: 155154 - RNA, 24 nt, Artificial Sequence
  Synthetic
ucuuucuuuuuuuuuuuuuugaga

SEQ ID NO: 155155 - RNA, 21 nt, Artificial Sequence
  Synthetic
cauuuuuuuuuuuuuuugaga

SEQ ID NO: 155156 - RNA, 22 nt, Artificial Sequence
  Synthetic
acauuuuuuuuuuuuuuugaga

SEQ ID NO: 155157 - RNA, 23 nt, Artificial Sequence
  Synthetic
cacauuuuuuuuuuuuuuugaga

SEQ ID NO: 155158 - RNA, 24 nt, Artificial Sequence
  Synthetic
acacauuuuuuuuuuuuuuugaga

SEQ ID NO: 155159 - RNA, 21 nt, Artificial Sequence
  Synthetic
cuuuuuuuuuuuuuuuugaga

SEQ ID NO: 155160 - RNA, 22 nt, Artificial Sequence
  Synthetic
acuuuuuuuuuuuuuuuugaga

SEQ ID NO: 155161 - RNA, 23 nt, Artificial Sequence
  Synthetic
cacuuuuuuuuuuuuuuuugaga

SEQ ID NO: 155162 - RNA, 24 nt, Artificial Sequence
  Synthetic
ccacuuuuuuuuuuuuuuuugaga

SEQ ID NO: 155163 - RNA, 22 nt, Artificial Sequence
  Synthetic
ucuuuuuuuuuuuuuuuugaga

SEQ ID NO: 155164 - RNA, 23 nt, Artificial Sequence
  Synthetic
uucuuuuuuuuuuuuuuuugaga

SEQ ID NO: 155165 - RNA, 24 nt, Artificial Sequence
  Synthetic
auucuuuuuuuuuuuuuuuugaga

SEQ ID NO: 155166 - RNA, 24 nt, Artificial Sequence
  Synthetic
uuucuuuuuuuuuuuuuuuugaga

SEQ ID NO: 155167 - RNA, 23 nt, Artificial Sequence
  Synthetic
auuuuuuuuuuuuuuuuuugaga

SEQ ID NO: 155168 - RNA, 24 nt, Artificial Sequence
  Synthetic
aauuuuuuuuuuuuuuuuuugaga

SEQ ID NO: 155169 - RNA, 23 nt, Artificial Sequence
  Synthetic
uuuuuuuuuuuuuuuuuuugaga

SEQ ID NO: 155170 - RNA, 24 nt, Artificial Sequence
  Synthetic
cuuuuuuuuuuuuuuuuuuugaga

SEQ ID NO: 155171 - RNA, 18 nt, Artificial Sequence
  Synthetic
uauguauguauacauaga

SEQ ID NO: 155172 - RNA, 19 nt, Artificial Sequence
  Synthetic
auauguauguauacauaga

SEQ ID NO: 155173 - RNA, 20 nt, Artificial Sequence
  Synthetic
uauauguauguauacauaga

SEQ ID NO: 155174 - RNA, 21 nt, Artificial Sequence
  Synthetic
auauauguauguauacauaga

SEQ ID NO: 155175 - RNA, 22 nt, Artificial Sequence
  Synthetic
uauauauguauguauacauaga

SEQ ID NO: 155176 - RNA, 23 nt, Artificial Sequence
  Synthetic
auauauauguauguauacauaga

SEQ ID NO: 155177 - RNA, 24 nt, Artificial Sequence
  Synthetic
uauauauauguauguauacauaga

SEQ ID NO: 155178 - RNA, 20 nt, Artificial Sequence
  Synthetic
uggauggauagaaagauaga

SEQ ID NO: 155179 - RNA, 18 nt, Artificial Sequence
  Synthetic
aaagcaaaggaggauaga

SEQ ID NO: 155180 - RNA, 19 nt, Artificial Sequence
  Synthetic
uaaagcaaaggaggauaga

SEQ ID NO: 155181 - RNA, 20 nt, Artificial Sequence
  Synthetic
auaaagcaaaggaggauaga

SEQ ID NO: 155182 - RNA, 18 nt, Artificial Sequence
  Synthetic
augcccaucaaugauaga

SEQ ID NO: 155183 - RNA, 19 nt, Artificial Sequence
  Synthetic
aaugcccaucaaugauaga

SEQ ID NO: 155184 - RNA, 20 nt, Artificial Sequence
  Synthetic
aaaugcccaucaaugauaga

SEQ ID NO: 155185 - RNA, 21 nt, Artificial Sequence
  Synthetic
caaaugcccaucaaugauaga

SEQ ID NO: 155186 - RNA, 22 nt, Artificial Sequence
  Synthetic
ccaaaugcccaucaaugauaga

SEQ ID NO: 155187 - RNA, 23 nt, Artificial Sequence
  Synthetic
cccaaaugcccaucaaugauaga

SEQ ID NO: 155188 - RNA, 24 nt, Artificial Sequence
  Synthetic
acccaaaugcccaucaaugauaga

SEQ ID NO: 155189 - RNA, 23 nt, Artificial Sequence
  Synthetic
uccaaauguccaucaaugauaga

SEQ ID NO: 155190 - RNA, 24 nt, Artificial Sequence
  Synthetic
auccaaauguccaucaaugauaga

SEQ ID NO: 155191 - RNA, 18 nt, Artificial Sequence
  Synthetic
augcccaccagugauaga

SEQ ID NO: 155192 - RNA, 19 nt, Artificial Sequence
  Synthetic
aaugcccaccagugauaga

SEQ ID NO: 155193 - RNA, 20 nt, Artificial Sequence
  Synthetic
aaaugcccaccagugauaga

SEQ ID NO: 155194 - RNA, 21 nt, Artificial Sequence
  Synthetic
caaaugcccaccagugauaga

SEQ ID NO: 155195 - RNA, 22 nt, Artificial Sequence
  Synthetic
ccaaaugcccaccagugauaga

SEQ ID NO: 155196 - RNA, 23 nt, Artificial Sequence
  Synthetic
cccaaaugcccaccagugauaga

SEQ ID NO: 155197 - RNA, 24 nt, Artificial Sequence
  Synthetic
acccaaaugcccaccagugauaga

SEQ ID NO: 155198 - RNA, 18 nt, Artificial Sequence
  Synthetic
augcccaucagugauaga

SEQ ID NO: 155199 - RNA, 19 nt, Artificial Sequence
  Synthetic
aaugcccaucagugauaga

SEQ ID NO: 155200 - RNA, 20 nt, Artificial Sequence
  Synthetic
aaaugcccaucagugauaga

SEQ ID NO: 155201 - RNA, 21 nt, Artificial Sequence
  Synthetic
caaaugcccaucagugauaga

SEQ ID NO: 155202 - RNA, 22 nt, Artificial Sequence
  Synthetic
ccaaaugcccaucagugauaga

SEQ ID NO: 155203 - RNA, 23 nt, Artificial Sequence
  Synthetic
cccaaaugcccaucagugauaga

SEQ ID NO: 155204 - RNA, 24 nt, Artificial Sequence
  Synthetic
acccaaaugcccaucagugauaga

SEQ ID NO: 155205 - RNA, 18 nt, Artificial Sequence
  Synthetic
auguccaucagugauaga

SEQ ID NO: 155206 - RNA, 19 nt, Artificial Sequence
  Synthetic
aauguccaucagugauaga

SEQ ID NO: 155207 - RNA, 20 nt, Artificial Sequence
  Synthetic
aaauguccaucagugauaga

SEQ ID NO: 155208 - RNA, 21 nt, Artificial Sequence
  Synthetic
caaauguccaucagugauaga

SEQ ID NO: 155209 - RNA, 22 nt, Artificial Sequence
  Synthetic
ccaaauguccaucagugauaga

SEQ ID NO: 155210 - RNA, 23 nt, Artificial Sequence
  Synthetic
cccaaauguccaucagugauaga

SEQ ID NO: 155211 - RNA, 24 nt, Artificial Sequence
  Synthetic
acccaaauguccaucagugauaga

SEQ ID NO: 155212 - RNA, 18 nt, Artificial Sequence
  Synthetic
aaaauauaguuugauaga

SEQ ID NO: 155213 - RNA, 19 nt, Artificial Sequence
  Synthetic
aaaaauauaguuugauaga

SEQ ID NO: 155214 - RNA, 20 nt, Artificial Sequence
  Synthetic
caaaaauauaguuugauaga

SEQ ID NO: 155215 - RNA, 21 nt, Artificial Sequence
  Synthetic
acaaaaauauaguuugauaga

SEQ ID NO: 155216 - RNA, 22 nt, Artificial Sequence
  Synthetic
uacaaaaauauaguuugauaga

SEQ ID NO: 155217 - RNA, 23 nt, Artificial Sequence
  Synthetic
auacaaaaauauaguuugauaga

SEQ ID NO: 155218 - RNA, 24 nt, Artificial Sequence
  Synthetic
aauacaaaaauauaguuugauaga

SEQ ID NO: 155219 - RNA, 18 nt, Artificial Sequence
  Synthetic
augcuuuuuguguauaga

SEQ ID NO: 155220 - RNA, 19 nt, Artificial Sequence
  Synthetic
aaugcuuuuuguguauaga

SEQ ID NO: 155221 - RNA, 20 nt, Artificial Sequence
  Synthetic
aaaugcuuuuuguguauaga

SEQ ID NO: 155222 - RNA, 18 nt, Artificial Sequence
  Synthetic
uuuuuaauuuccccuaga

SEQ ID NO: 155223 - RNA, 19 nt, Artificial Sequence
  Synthetic
uuuuuuaauuuccccuaga

SEQ ID NO: 155224 - RNA, 20 nt, Artificial Sequence
  Synthetic
uuuuuuuaauuuccccuaga

SEQ ID NO: 155225 - RNA, 21 nt, Artificial Sequence
  Synthetic
uuuuuuuuaauuuccccuaga

SEQ ID NO: 155226 - RNA, 22 nt, Artificial Sequence
  Synthetic
uuuuuuuuuaauuuccccuaga

SEQ ID NO: 155227 - RNA, 23 nt, Artificial Sequence
  Synthetic
uuuuuuuuuuaauuuccccuaga

SEQ ID NO: 155228 - RNA, 24 nt, Artificial Sequence
  Synthetic
uuuuuuuuuuuaauuuccccuaga

SEQ ID NO: 155229 - RNA, 18 nt, Artificial Sequence
  Synthetic
uccuggguuaaugcuaga

SEQ ID NO: 155230 - RNA, 19 nt, Artificial Sequence
  Synthetic
cuccuggguuaaugcuaga

SEQ ID NO: 155231 - RNA, 20 nt, Artificial Sequence
  Synthetic
acuccuggguuaaugcuaga

SEQ ID NO: 155232 - RNA, 23 nt, Artificial Sequence
  Synthetic
uggacuccuggguuaaugcuaga

SEQ ID NO: 155233 - RNA, 24 nt, Artificial Sequence
  Synthetic
uuggacuccuggguuaaugcuaga

SEQ ID NO: 155234 - RNA, 18 nt, Artificial Sequence
  Synthetic
aagaagcauggcucuaga

SEQ ID NO: 155235 - RNA, 19 nt, Artificial Sequence
  Synthetic
uaagaagcauggcucuaga

SEQ ID NO: 155236 - RNA, 20 nt, Artificial Sequence
  Synthetic
uuaagaagcauggcucuaga

SEQ ID NO: 155237 - RNA, 21 nt, Artificial Sequence
  Synthetic
uuuaagaagcauggcucuaga

SEQ ID NO: 155238 - RNA, 22 nt, Artificial Sequence
  Synthetic
uuuuaagaagcauggcucuaga

SEQ ID NO: 155239 - RNA, 23 nt, Artificial Sequence
  Synthetic
auuuuaagaagcauggcucuaga

SEQ ID NO: 155240 - RNA, 24 nt, Artificial Sequence
  Synthetic
aauuuuaagaagcauggcucuaga

SEQ ID NO: 155241 - RNA, 18 nt, Artificial Sequence
  Synthetic
uuuuguauuuuaaguaga

SEQ ID NO: 155242 - RNA, 19 nt, Artificial Sequence
  Synthetic
auuuuguauuuuaaguaga

SEQ ID NO: 155243 - RNA, 20 nt, Artificial Sequence
  Synthetic
aauuuuguauuuuaaguaga

SEQ ID NO: 155244 - RNA, 21 nt, Artificial Sequence
  Synthetic
uaauuuuguauuuuaaguaga

SEQ ID NO: 155245 - RNA, 22 nt, Artificial Sequence
  Synthetic
cuaauuuuguauuuuaaguaga

SEQ ID NO: 155246 - RNA, 21 nt, Artificial Sequence
  Synthetic
uacacaaggaucugcauuaga

SEQ ID NO: 155247 - RNA, 22 nt, Artificial Sequence
  Synthetic
uuacacaaggaucugcauuaga

SEQ ID NO: 155248 - RNA, 24 nt, Artificial Sequence
  Synthetic
aguuacacaaggaucugcauuaga

SEQ ID NO: 155249 - RNA, 18 nt, Artificial Sequence
  Synthetic
auagcuaaauaccuuaga

SEQ ID NO: 155250 - RNA, 19 nt, Artificial Sequence
  Synthetic
uauagcuaaauaccuuaga

SEQ ID NO: 155251 - RNA, 20 nt, Artificial Sequence
  Synthetic
cuauagcuaaauaccuuaga

SEQ ID NO: 155252 - RNA, 22 nt, Artificial Sequence
  Synthetic
cgcuauagcuaaauaccuuaga

SEQ ID NO: 155253 - RNA, 23 nt, Artificial Sequence
  Synthetic
ccgcuauagcuaaauaccuuaga

SEQ ID NO: 155254 - RNA, 18 nt, Artificial Sequence
  Synthetic
cuacaaaaaauaguuaga

SEQ ID NO: 155255 - RNA, 21 nt, Artificial Sequence
  Synthetic
cggcuacaaaaaauaguuaga

SEQ ID NO: 155256 - RNA, 23 nt, Artificial Sequence
  Synthetic
agcggcuacaaaaaauaguuaga

SEQ ID NO: 155257 - RNA, 24 nt, Artificial Sequence
  Synthetic
uagcggcuacaaaaaauaguuaga

SEQ ID NO: 155258 - RNA, 20 nt, Artificial Sequence
  Synthetic
ugguacaaaaaauaguuaga

SEQ ID NO: 155259 - RNA, 21 nt, Artificial Sequence
  Synthetic
uugguacaaaaaauaguuaga

SEQ ID NO: 155260 - RNA, 22 nt, Artificial Sequence
  Synthetic
cuugguacaaaaaauaguuaga

SEQ ID NO: 155261 - RNA, 23 nt, Artificial Sequence
  Synthetic
acuugguacaaaaaauaguuaga

SEQ ID NO: 155262 - RNA, 24 nt, Artificial Sequence
  Synthetic
uacuugguacaaaaaauaguuaga

SEQ ID NO: 155263 - RNA, 18 nt, Artificial Sequence
  Synthetic
uacaaaaaauuaguuaga

SEQ ID NO: 155264 - RNA, 22 nt, Artificial Sequence
  Synthetic
uggguacaaaaaauuaguuaga

SEQ ID NO: 155265 - RNA, 23 nt, Artificial Sequence
  Synthetic
cuggguacaaaaaauuaguuaga

SEQ ID NO: 155266 - RNA, 24 nt, Artificial Sequence
  Synthetic
acuggguacaaaaaauuaguuaga

SEQ ID NO: 155267 - RNA, 21 nt, Artificial Sequence
  Synthetic
uagagaaaaaacacgguuaga

SEQ ID NO: 155268 - RNA, 23 nt, Artificial Sequence
  Synthetic
aguagagaaaaaacacgguuaga

SEQ ID NO: 155269 - RNA, 18 nt, Artificial Sequence
  Synthetic
uuguuaauuuauuuuaga

SEQ ID NO: 155270 - RNA, 19 nt, Artificial Sequence
  Synthetic
uuuguuaauuuauuuuaga

SEQ ID NO: 155271 - RNA, 20 nt, Artificial Sequence
  Synthetic
uuuuguuaauuuauuuuaga

SEQ ID NO: 155272 - RNA, 21 nt, Artificial Sequence
  Synthetic
uuuuuguuaauuuauuuuaga

SEQ ID NO: 155273 - RNA, 22 nt, Artificial Sequence
  Synthetic
auuuuuguuaauuuauuuuaga

SEQ ID NO: 155274 - RNA, 23 nt, Artificial Sequence
  Synthetic
uauuuuuguuaauuuauuuuaga

SEQ ID NO: 155275 - RNA, 24 nt, Artificial Sequence
  Synthetic
auauuuuuguuaauuuauuuuaga

SEQ ID NO: 155276 - RNA, 18 nt, Artificial Sequence
  Synthetic
uauuuuauuuuuuuuaga

SEQ ID NO: 155277 - RNA, 19 nt, Artificial Sequence
  Synthetic
uuauuuuauuuuuuuuaga

SEQ ID NO: 155278 - RNA, 20 nt, Artificial Sequence
  Synthetic
uuuauuuuauuuuuuuuaga

SEQ ID NO: 155279 - RNA, 21 nt, Artificial Sequence
  Synthetic
uuuuauuuuauuuuuuuuaga

SEQ ID NO: 155280 - RNA, 22 nt, Artificial Sequence
  Synthetic
auuuuauuuuauuuuuuuuaga

SEQ ID NO: 155281 - RNA, 23 nt, Artificial Sequence
  Synthetic
uauuuuauuuuauuuuuuuuaga

SEQ ID NO: 155282 - RNA, 24 nt, Artificial Sequence
  Synthetic
uuauuuuauuuuauuuuuuuuaga

SEQ ID NO: 155283 - RNA, 18 nt, Artificial Sequence
  Synthetic
uucuuuuuuuuuuuuaga

SEQ ID NO: 155284 - RNA, 19 nt, Artificial Sequence
  Synthetic
uuucuuuuuuuuuuuuaga

SEQ ID NO: 155285 - RNA, 20 nt, Artificial Sequence
  Synthetic
uuuucuuuuuuuuuuuuaga

SEQ ID NO: 155286 - RNA, 21 nt, Artificial Sequence
  Synthetic
uuuuucuuuuuuuuuuuuaga

SEQ ID NO: 155287 - RNA, 22 nt, Artificial Sequence
  Synthetic
uuuuuucuuuuuuuuuuuuaga

SEQ ID NO: 155288 - RNA, 23 nt, Artificial Sequence
  Synthetic
uuuuuuucuuuuuuuuuuuuaga

SEQ ID NO: 155289 - RNA, 24 nt, Artificial Sequence
  Synthetic
auuuuuuucuuuuuuuuuuuuaga

SEQ ID NO: 155290 - RNA, 18 nt, Artificial Sequence
  Synthetic
uuuuuuuuuuuuuuuaga

SEQ ID NO: 155291 - RNA, 19 nt, Artificial Sequence
  Synthetic
uuuuuuuuuuuuuuuuaga

SEQ ID NO: 155292 - RNA, 20 nt, Artificial Sequence
  Synthetic
uuuuuuuuuuuuuuuuuaga

SEQ ID NO: 155293 - RNA, 21 nt, Artificial Sequence
  Synthetic
cuuuuuuuuuuuuuuuuuaga

SEQ ID NO: 155294 - RNA, 22 nt, Artificial Sequence
  Synthetic
ucuuuuuuuuuuuuuuuuuaga

SEQ ID NO: 155295 - RNA, 23 nt, Artificial Sequence
  Synthetic
uucuuuuuuuuuuuuuuuuuaga

SEQ ID NO: 155296 - RNA, 24 nt, Artificial Sequence
  Synthetic
cuucuuuuuuuuuuuuuuuuuaga

SEQ ID NO: 155297 - RNA, 18 nt, Artificial Sequence
  Synthetic
agggcuccacccucacga

SEQ ID NO: 155298 - RNA, 20 nt, Artificial Sequence
  Synthetic
ugagggcuccacccucacga

SEQ ID NO: 155299 - RNA, 19 nt, Artificial Sequence
  Synthetic
agauuuuggguugagacga

SEQ ID NO: 155300 - RNA, 20 nt, Artificial Sequence
  Synthetic
aagauuuuggguugagacga

SEQ ID NO: 155301 - RNA, 22 nt, Artificial Sequence
  Synthetic
agaagauuuuggguugagacga

SEQ ID NO: 155302 - RNA, 23 nt, Artificial Sequence
  Synthetic
aagaagauuuuggguugagacga

SEQ ID NO: 155303 - RNA, 24 nt, Artificial Sequence
  Synthetic
uaagaagauuuuggguugagacga

SEQ ID NO: 155304 - RNA, 21 nt, Artificial Sequence
  Synthetic
aaguucuagugcucuauacga

SEQ ID NO: 155305 - RNA, 22 nt, Artificial Sequence
  Synthetic
uaaguucuagugcucuauacga

SEQ ID NO: 155306 - RNA, 23 nt, Artificial Sequence
  Synthetic
auaaguucuagugcucuauacga

SEQ ID NO: 155307 - RNA, 24 nt, Artificial Sequence
  Synthetic
aauaaguucuagugcucuauacga

SEQ ID NO: 155308 - RNA, 18 nt, Artificial Sequence
  Synthetic
uuauuuauuuauuuacga

SEQ ID NO: 155309 - RNA, 19 nt, Artificial Sequence
  Synthetic
uuuauuuauuuauuuacga

SEQ ID NO: 155310 - RNA, 20 nt, Artificial Sequence
  Synthetic
auuuauuuauuuauuuacga

SEQ ID NO: 155311 - RNA, 21 nt, Artificial Sequence
  Synthetic
uauuuauuuauuuauuuacga

SEQ ID NO: 155312 - RNA, 22 nt, Artificial Sequence
  Synthetic
uuauuuauuuauuuauuuacga

SEQ ID NO: 155313 - RNA, 23 nt, Artificial Sequence
  Synthetic
uuuauuuauuuauuuauuuacga

SEQ ID NO: 155314 - RNA, 24 nt, Artificial Sequence
  Synthetic
auuuauuuauuuauuuauuuacga

SEQ ID NO: 155315 - RNA, 19 nt, Artificial Sequence
  Synthetic
ugguggcguaggcacccga

SEQ ID NO: 155316 - RNA, 20 nt, Artificial Sequence
  Synthetic
cugguggcguaggcacccga

SEQ ID NO: 155317 - RNA, 21 nt, Artificial Sequence
  Synthetic
ccugguggcguaggcacccga

SEQ ID NO: 155318 - RNA, 22 nt, Artificial Sequence
  Synthetic
cccugguggcguaggcacccga

SEQ ID NO: 155319 - RNA, 19 nt, Artificial Sequence
  Synthetic
uggagggugggaggagcga

SEQ ID NO: 155320 - RNA, 21 nt, Artificial Sequence
  Synthetic
uguggagggugggaggagcga

SEQ ID NO: 155321 - RNA, 23 nt, Artificial Sequence
  Synthetic
aguguggagggugggaggagcga

SEQ ID NO: 155322 - RNA, 19 nt, Artificial Sequence
  Synthetic
uggagacucagaagggcga

SEQ ID NO: 155323 - RNA, 20 nt, Artificial Sequence
  Synthetic
cuggagacucagaagggcga

SEQ ID NO: 155324 - RNA, 21 nt, Artificial Sequence
  Synthetic
acuggagacucagaagggcga

SEQ ID NO: 155325 - RNA, 22 nt, Artificial Sequence
  Synthetic
cacuggagacucagaagggcga

SEQ ID NO: 155326 - RNA, 23 nt, Artificial Sequence
  Synthetic
acacuggagacucagaagggcga

SEQ ID NO: 155327 - RNA, 18 nt, Artificial Sequence
  Synthetic
aaaaaaaaaagaaugcga

SEQ ID NO: 155328 - RNA, 19 nt, Artificial Sequence
  Synthetic
aaaaaaaaaaagaaugcga

SEQ ID NO: 155329 - RNA, 20 nt, Artificial Sequence
  Synthetic
aaaaaaaaaaaagaaugcga

SEQ ID NO: 155330 - RNA, 21 nt, Artificial Sequence
  Synthetic
aaaaaaaaaaaaagaaugcga

SEQ ID NO: 155331 - RNA, 22 nt, Artificial Sequence
  Synthetic
aaaaaaaaaaaaaagaaugcga

SEQ ID NO: 155332 - RNA, 23 nt, Artificial Sequence
  Synthetic
aaaaaaaaaaaaaaagaaugcga

SEQ ID NO: 155333 - RNA, 24 nt, Artificial Sequence
  Synthetic
uaaaaaaaaaaaaaaagaaugcga

SEQ ID NO: 155334 - RNA, 18 nt, Artificial Sequence
  Synthetic
cuguccaucaacaugcga

SEQ ID NO: 155335 - RNA, 19 nt, Artificial Sequence
  Synthetic
acuguccaucaacaugcga

SEQ ID NO: 155336 - RNA, 20 nt, Artificial Sequence
  Synthetic
aacuguccaucaacaugcga

SEQ ID NO: 155337 - RNA, 18 nt, Artificial Sequence
  Synthetic
aaaaaaauuucuugucga

SEQ ID NO: 155338 - RNA, 19 nt, Artificial Sequence
  Synthetic
aaaaaaaauuucuugucga

SEQ ID NO: 155339 - RNA, 20 nt, Artificial Sequence
  Synthetic
aaaaaaaaauuucuugucga

SEQ ID NO: 155340 - RNA, 18 nt, Artificial Sequence
  Synthetic
uagaaaaaccaaaaagga

SEQ ID NO: 155341 - RNA, 18 nt, Artificial Sequence
  Synthetic
agugagagagaaaaagga

SEQ ID NO: 155342 - RNA, 19 nt, Artificial Sequence
  Synthetic
aagugagagagaaaaagga

SEQ ID NO: 155343 - RNA, 20 nt, Artificial Sequence
  Synthetic
aaagugagagagaaaaagga

SEQ ID NO: 155344 - RNA, 21 nt, Artificial Sequence
  Synthetic
aaaagugagagagaaaaagga

SEQ ID NO: 155345 - RNA, 22 nt, Artificial Sequence
  Synthetic
aaaaagugagagagaaaaagga

SEQ ID NO: 155346 - RNA, 23 nt, Artificial Sequence
  Synthetic
caaaaagugagagagaaaaagga

SEQ ID NO: 155347 - RNA, 24 nt, Artificial Sequence
  Synthetic
ucaaaaagugagagagaaaaagga

SEQ ID NO: 155348 - RNA, 18 nt, Artificial Sequence
  Synthetic
acucagccauaaaaagga

SEQ ID NO: 155349 - RNA, 19 nt, Artificial Sequence
  Synthetic
uacucagccauaaaaagga

SEQ ID NO: 155350 - RNA, 20 nt, Artificial Sequence
  Synthetic
cuacucagccauaaaaagga

SEQ ID NO: 155351 - RNA, 21 nt, Artificial Sequence
  Synthetic
acuacucagccauaaaaagga

SEQ ID NO: 155352 - RNA, 22 nt, Artificial Sequence
  Synthetic
uacuacucagccauaaaaagga

SEQ ID NO: 155353 - RNA, 23 nt, Artificial Sequence
  Synthetic
auacuacucagccauaaaaagga

SEQ ID NO: 155354 - RNA, 24 nt, Artificial Sequence
  Synthetic
aauacuacucagccauaaaaagga

SEQ ID NO: 155355 - RNA, 18 nt, Artificial Sequence
  Synthetic
auacucaaaagaaaagga

SEQ ID NO: 155356 - RNA, 19 nt, Artificial Sequence
  Synthetic
cauacucaaaagaaaagga

SEQ ID NO: 155357 - RNA, 20 nt, Artificial Sequence
  Synthetic
acauacucaaaagaaaagga

SEQ ID NO: 155358 - RNA, 19 nt, Artificial Sequence
  Synthetic
agaaauuuaaggaaaagga

SEQ ID NO: 155359 - RNA, 20 nt, Artificial Sequence
  Synthetic
aagaaauuuaaggaaaagga

SEQ ID NO: 155360 - RNA, 21 nt, Artificial Sequence
  Synthetic
aaagaaauuuaaggaaaagga

SEQ ID NO: 155361 - RNA, 22 nt, Artificial Sequence
  Synthetic
uaaagaaauuuaaggaaaagga

SEQ ID NO: 155362 - RNA, 23 nt, Artificial Sequence
  Synthetic
auaaagaaauuuaaggaaaagga

SEQ ID NO: 155363 - RNA, 24 nt, Artificial Sequence
  Synthetic
uauaaagaaauuuaaggaaaagga

SEQ ID NO: 155364 - RNA, 18 nt, Artificial Sequence
  Synthetic
aauuuauauuucaaagga

SEQ ID NO: 155365 - RNA, 19 nt, Artificial Sequence
  Synthetic
aaauuuauauuucaaagga

SEQ ID NO: 155366 - RNA, 19 nt, Artificial Sequence
  Synthetic
aguguagaaauuucaagga

SEQ ID NO: 155367 - RNA, 18 nt, Artificial Sequence
  Synthetic
caaaacacaggagaagga

SEQ ID NO: 155368 - RNA, 19 nt, Artificial Sequence
  Synthetic
acaaaacacaggagaagga

SEQ ID NO: 155369 - RNA, 20 nt, Artificial Sequence
  Synthetic
aacaaaacacaggagaagga

SEQ ID NO: 155370 - RNA, 18 nt, Artificial Sequence
  Synthetic
agaaagaaagaggaagga

SEQ ID NO: 155371 - RNA, 19 nt, Artificial Sequence
  Synthetic
aagaaagaaagaggaagga

SEQ ID NO: 155372 - RNA, 21 nt, Artificial Sequence
  Synthetic
agaagaaagaaagaggaagga

SEQ ID NO: 155373 - RNA, 22 nt, Artificial Sequence
  Synthetic
aagaagaaagaaagaggaagga

SEQ ID NO: 155374 - RNA, 23 nt, Artificial Sequence
  Synthetic
aaagaagaaagaaagaggaagga

SEQ ID NO: 155375 - RNA, 24 nt, Artificial Sequence
  Synthetic
aaaagaagaaagaaagaggaagga

SEQ ID NO: 155376 - RNA, 19 nt, Artificial Sequence
  Synthetic
uggagacagaaaugaagga

SEQ ID NO: 155377 - RNA, 20 nt, Artificial Sequence
  Synthetic
uuggagacagaaaugaagga

SEQ ID NO: 155378 - RNA, 21 nt, Artificial Sequence
  Synthetic
uuuuuguauaagguguaagga

SEQ ID NO: 155379 - RNA, 22 nt, Artificial Sequence
  Synthetic
auuuuuguauaagguguaagga

SEQ ID NO: 155380 - RNA, 23 nt, Artificial Sequence
  Synthetic
aauuuuuguauaagguguaagga

SEQ ID NO: 155381 - RNA, 24 nt, Artificial Sequence
  Synthetic
uaauuuuuguauaagguguaagga

SEQ ID NO: 155382 - RNA, 24 nt, Artificial Sequence
  Synthetic
ugauuuuuguauaagguguaagga

SEQ ID NO: 155383 - RNA, 18 nt, Artificial Sequence
  Synthetic
caaacuaaagcaacagga

SEQ ID NO: 155384 - RNA, 19 nt, Artificial Sequence
  Synthetic
ucaaacuaaagcaacagga

SEQ ID NO: 155385 - RNA, 20 nt, Artificial Sequence
  Synthetic
uucaaacuaaagcaacagga

SEQ ID NO: 155386 - RNA, 22 nt, Artificial Sequence
  Synthetic
ugggguuuuuauaggcacagga

SEQ ID NO: 155387 - RNA, 23 nt, Artificial Sequence
  Synthetic
cugggguuuuuauaggcacagga

SEQ ID NO: 155388 - RNA, 24 nt, Artificial Sequence
  Synthetic
ucugggguuuuuauaggcacagga

SEQ ID NO: 155389 - RNA, 18 nt, Artificial Sequence
  Synthetic
uuggucauaggcucagga

SEQ ID NO: 155390 - RNA, 19 nt, Artificial Sequence
  Synthetic
uuuggucauaggcucagga

SEQ ID NO: 155391 - RNA, 20 nt, Artificial Sequence
  Synthetic
auuuggucauaggcucagga

SEQ ID NO: 155392 - RNA, 19 nt, Artificial Sequence
  Synthetic
uggguggauagugucagga

SEQ ID NO: 155393 - RNA, 20 nt, Artificial Sequence
  Synthetic
cuggguggauagugucagga

SEQ ID NO: 155394 - RNA, 21 nt, Artificial Sequence
  Synthetic
ucuggguggauagugucagga

SEQ ID NO: 155395 - RNA, 22 nt, Artificial Sequence
  Synthetic
cucuggguggauagugucagga

SEQ ID NO: 155396 - RNA, 23 nt, Artificial Sequence
  Synthetic
ucucuggguggauagugucagga

SEQ ID NO: 155397 - RNA, 24 nt, Artificial Sequence
  Synthetic
aucucuggguggauagugucagga

SEQ ID NO: 155398 - RNA, 18 nt, Artificial Sequence
  Synthetic
cauaaaaaacaaagagga

SEQ ID NO: 155399 - RNA, 19 nt, Artificial Sequence
  Synthetic
ccauaaaaaacaaagagga

SEQ ID NO: 155400 - RNA, 20 nt, Artificial Sequence
  Synthetic
uccauaaaaaacaaagagga

SEQ ID NO: 155401 - RNA, 21 nt, Artificial Sequence
  Synthetic
uuccauaaaaaacaaagagga

SEQ ID NO: 155402 - RNA, 22 nt, Artificial Sequence
  Synthetic
cuuccauaaaaaacaaagagga

SEQ ID NO: 155403 - RNA, 24 nt, Artificial Sequence
  Synthetic
agcuuccauaaaaaacaaagagga

SEQ ID NO: 155404 - RNA, 18 nt, Artificial Sequence
  Synthetic
aagaagaaagaaagagga

SEQ ID NO: 155405 - RNA, 19 nt, Artificial Sequence
  Synthetic
aaagaagaaagaaagagga

SEQ ID NO: 155406 - RNA, 20 nt, Artificial Sequence
  Synthetic
aaaagaagaaagaaagagga

SEQ ID NO: 155407 - RNA, 21 nt, Artificial Sequence
  Synthetic
aaaaagaagaaagaaagagga

SEQ ID NO: 155408 - RNA, 22 nt, Artificial Sequence
  Synthetic
aaaaaagaagaaagaaagagga

SEQ ID NO: 155409 - RNA, 23 nt, Artificial Sequence
  Synthetic
aaaaaaagaagaaagaaagagga

SEQ ID NO: 155410 - RNA, 24 nt, Artificial Sequence
  Synthetic
aaaaaaaagaagaaagaaagagga

SEQ ID NO: 155411 - RNA, 18 nt, Artificial Sequence
  Synthetic
uuggaaaacuaaagagga

SEQ ID NO: 155412 - RNA, 19 nt, Artificial Sequence
  Synthetic
uuuggaaaacuaaagagga

SEQ ID NO: 155413 - RNA, 20 nt, Artificial Sequence
  Synthetic
uuuuggaaaacuaaagagga

SEQ ID NO: 155414 - RNA, 21 nt, Artificial Sequence
  Synthetic
cuuuuggaaaacuaaagagga

SEQ ID NO: 155415 - RNA, 22 nt, Artificial Sequence
  Synthetic
ucuuuuggaaaacuaaagagga

SEQ ID NO: 155416 - RNA, 23 nt, Artificial Sequence
  Synthetic
cucuuuuggaaaacuaaagagga

SEQ ID NO: 155417 - RNA, 24 nt, Artificial Sequence
  Synthetic
acucuuuuggaaaacuaaagagga

SEQ ID NO: 155418 - RNA, 19 nt, Artificial Sequence
  Synthetic
cggagggaggaagagagga

SEQ ID NO: 155419 - RNA, 21 nt, Artificial Sequence
  Synthetic
agcggagggaggaagagagga

SEQ ID NO: 155420 - RNA, 22 nt, Artificial Sequence
  Synthetic
aagcggagggaggaagagagga

SEQ ID NO: 155421 - RNA, 24 nt, Artificial Sequence
  Synthetic
agaagcggagggaggaagagagga

SEQ ID NO: 155422 - RNA, 18 nt, Artificial Sequence
  Synthetic
uaagggaaggaaggagga

SEQ ID NO: 155423 - RNA, 20 nt, Artificial Sequence
  Synthetic
aguaagggaaggaaggagga

SEQ ID NO: 155424 - RNA, 21 nt, Artificial Sequence
  Synthetic
caguaagggaaggaaggagga

SEQ ID NO: 155425 - RNA, 24 nt, Artificial Sequence
  Synthetic
aggcaguaagggaaggaaggagga

SEQ ID NO: 155426 - RNA, 20 nt, Artificial Sequence
  Synthetic
agguagugagggaaggagga

SEQ ID NO: 155427 - RNA, 22 nt, Artificial Sequence
  Synthetic
ugagguagugagggaaggagga

SEQ ID NO: 155428 - RNA, 24 nt, Artificial Sequence
  Synthetic
ugugagguagugagggaaggagga

SEQ ID NO: 155429 - RNA, 18 nt, Artificial Sequence
  Synthetic
aaaguaugaaaaauagga

SEQ ID NO: 155430 - RNA, 19 nt, Artificial Sequence
  Synthetic
aaaaguaugaaaaauagga

SEQ ID NO: 155431 - RNA, 20 nt, Artificial Sequence
  Synthetic
uaaaaguaugaaaaauagga

SEQ ID NO: 155432 - RNA, 19 nt, Artificial Sequence
  Synthetic
ugucaucuguaaacuagga

SEQ ID NO: 155433 - RNA, 20 nt, Artificial Sequence
  Synthetic
uugucaucuguaaacuagga

SEQ ID NO: 155434 - RNA, 21 nt, Artificial Sequence
  Synthetic
uuugucaucuguaaacuagga

SEQ ID NO: 155435 - RNA, 22 nt, Artificial Sequence
  Synthetic
uuuugucaucuguaaacuagga

SEQ ID NO: 155436 - RNA, 24 nt, Artificial Sequence
  Synthetic
aguuuugucaucuguaaacuagga

SEQ ID NO: 155437 - RNA, 18 nt, Artificial Sequence
  Synthetic
caguucaggacuguagga

SEQ ID NO: 155438 - RNA, 19 nt, Artificial Sequence
  Synthetic
ccaguucaggacuguagga

SEQ ID NO: 155439 - RNA, 20 nt, Artificial Sequence
  Synthetic
cccaguucaggacuguagga

SEQ ID NO: 155440 - RNA, 22 nt, Artificial Sequence
  Synthetic
agcccaguucaggacuguagga

SEQ ID NO: 155441 - RNA, 23 nt, Artificial Sequence
  Synthetic
cagcccaguucaggacuguagga

SEQ ID NO: 155442 - RNA, 24 nt, Artificial Sequence
  Synthetic
ucagcccaguucaggacuguagga

SEQ ID NO: 155443 - RNA, 21 nt, Artificial Sequence
  Synthetic
cagucagugccugugcacgga

SEQ ID NO: 155444 - RNA, 22 nt, Artificial Sequence
  Synthetic
ucagucagugccugugcacgga

SEQ ID NO: 155445 - RNA, 23 nt, Artificial Sequence
  Synthetic
cucagucagugccugugcacgga

SEQ ID NO: 155446 - RNA, 24 nt, Artificial Sequence
  Synthetic
ccucagucagugccugugcacgga

SEQ ID NO: 155447 - RNA, 18 nt, Artificial Sequence
  Synthetic
aaaagaaaagagaaggga

SEQ ID NO: 155448 - RNA, 19 nt, Artificial Sequence
  Synthetic
aaaaagaaaagagaaggga

SEQ ID NO: 155449 - RNA, 21 nt, Artificial Sequence
  Synthetic
agaaaaagaaaagagaaggga

SEQ ID NO: 155450 - RNA, 22 nt, Artificial Sequence
  Synthetic
cagaaaaagaaaagagaaggga

SEQ ID NO: 155451 - RNA, 20 nt, Artificial Sequence
  Synthetic
agggcuggaggacacaggga

SEQ ID NO: 155452 - RNA, 18 nt, Artificial Sequence
  Synthetic
uggugagggccacaggga

SEQ ID NO: 155453 - RNA, 19 nt, Artificial Sequence
  Synthetic
agagaaccagaaggaggga

SEQ ID NO: 155454 - RNA, 20 nt, Artificial Sequence
  Synthetic
aagagaaccagaaggaggga

SEQ ID NO: 155455 - RNA, 21 nt, Artificial Sequence
  Synthetic
uggggagggugggaggaggga

SEQ ID NO: 155456 - RNA, 23 nt, Artificial Sequence
  Synthetic
aguggggagggugggaggaggga

SEQ ID NO: 155457 - RNA, 20 nt, Artificial Sequence
  Synthetic
aggagggagggagggaggga

SEQ ID NO: 155458 - RNA, 21 nt, Artificial Sequence
  Synthetic
aaggagggagggagggaggga

SEQ ID NO: 155459 - RNA, 24 nt, Artificial Sequence
  Synthetic
aggaaggagggagggagggaggga

SEQ ID NO: 155460 - RNA, 18 nt, Artificial Sequence
  Synthetic
auuguauuuauuuaggga

SEQ ID NO: 155461 - RNA, 19 nt, Artificial Sequence
  Synthetic
uauuguauuuauuuaggga

SEQ ID NO: 155462 - RNA, 18 nt, Artificial Sequence
  Synthetic
aguccccuuuccagggga

SEQ ID NO: 155463 - RNA, 19 nt, Artificial Sequence
  Synthetic
caguccccuuuccagggga

SEQ ID NO: 155464 - RNA, 20 nt, Artificial Sequence
  Synthetic
ucaguccccuuuccagggga

SEQ ID NO: 155465 - RNA, 21 nt, Artificial Sequence
  Synthetic
uucaguccccuuuccagggga

SEQ ID NO: 155466 - RNA, 22 nt, Artificial Sequence
  Synthetic
cuucaguccccuuuccagggga

SEQ ID NO: 155467 - RNA, 23 nt, Artificial Sequence
  Synthetic
acuucaguccccuuuccagggga

SEQ ID NO: 155468 - RNA, 19 nt, Artificial Sequence
  Synthetic
agagggaggagggagggga

SEQ ID NO: 155469 - RNA, 20 nt, Artificial Sequence
  Synthetic
uagagggaggagggagggga

SEQ ID NO: 155470 - RNA, 21 nt, Artificial Sequence
  Synthetic
cuagagggaggagggagggga

SEQ ID NO: 155471 - RNA, 22 nt, Artificial Sequence
  Synthetic
acuagagggaggagggagggga

SEQ ID NO: 155472 - RNA, 23 nt, Artificial Sequence
  Synthetic
uacuagagggaggagggagggga

SEQ ID NO: 155473 - RNA, 24 nt, Artificial Sequence
  Synthetic
cuacuagagggaggagggagggga

SEQ ID NO: 155474 - RNA, 18 nt, Artificial Sequence
  Synthetic
aggugaguggugagggga

SEQ ID NO: 155475 - RNA, 20 nt, Artificial Sequence
  Synthetic
agaggugaguggugagggga

SEQ ID NO: 155476 - RNA, 18 nt, Artificial Sequence
  Synthetic
cuucuguuggcuagggga

SEQ ID NO: 155477 - RNA, 21 nt, Artificial Sequence
  Synthetic
cggcuucuguuggcuagggga

SEQ ID NO: 155478 - RNA, 22 nt, Artificial Sequence
  Synthetic
acggcuucuguuggcuagggga

SEQ ID NO: 155479 - RNA, 23 nt, Artificial Sequence
  Synthetic
cacggcuucuguuggcuagggga

SEQ ID NO: 155480 - RNA, 24 nt, Artificial Sequence
  Synthetic
ucacggcuucuguuggcuagggga

SEQ ID NO: 155481 - RNA, 18 nt, Artificial Sequence
  Synthetic
aaaaacaagcaacgggga

SEQ ID NO: 155482 - RNA, 19 nt, Artificial Sequence
  Synthetic
caaaaacaagcaacgggga

SEQ ID NO: 155483 - RNA, 20 nt, Artificial Sequence
  Synthetic
acaaaaacaagcaacgggga

SEQ ID NO: 155484 - RNA, 22 nt, Artificial Sequence
  Synthetic
ugacaaaaacaagcaacgggga

SEQ ID NO: 155485 - RNA, 23 nt, Artificial Sequence
  Synthetic
cugacaaaaacaagcaacgggga

SEQ ID NO: 155486 - RNA, 24 nt, Artificial Sequence
  Synthetic
ccugacaaaaacaagcaacgggga

SEQ ID NO: 155487 - RNA, 18 nt, Artificial Sequence
  Synthetic
aaaauaaagguaggggga

SEQ ID NO: 155488 - RNA, 19 nt, Artificial Sequence
  Synthetic
aaaaauaaagguaggggga

SEQ ID NO: 155489 - RNA, 20 nt, Artificial Sequence
  Synthetic
caaaaauaaagguaggggga

SEQ ID NO: 155490 - RNA, 18 nt, Artificial Sequence
  Synthetic
aaaaacaagaaaugggga

SEQ ID NO: 155491 - RNA, 19 nt, Artificial Sequence
  Synthetic
aaaaaacaagaaaugggga

SEQ ID NO: 155492 - RNA, 20 nt, Artificial Sequence
  Synthetic
caaaaaacaagaaaugggga

SEQ ID NO: 155493 - RNA, 21 nt, Artificial Sequence
  Synthetic
acaaaaaacaagaaaugggga

SEQ ID NO: 155494 - RNA, 23 nt, Artificial Sequence
  Synthetic
ugacaaaaaacaagaaaugggga

SEQ ID NO: 155495 - RNA, 24 nt, Artificial Sequence
  Synthetic
cugacaaaaaacaagaaaugggga

SEQ ID NO: 155496 - RNA, 19 nt, Artificial Sequence
  Synthetic
caaaaacaagaaaugggga

SEQ ID NO: 155497 - RNA, 20 nt, Artificial Sequence
  Synthetic
acaaaaacaagaaaugggga

SEQ ID NO: 155498 - RNA, 22 nt, Artificial Sequence
  Synthetic
ugacaaaaacaagaaaugggga

SEQ ID NO: 155499 - RNA, 23 nt, Artificial Sequence
  Synthetic
cugacaaaaacaagaaaugggga

SEQ ID NO: 155500 - RNA, 24 nt, Artificial Sequence
  Synthetic
ccugacaaaaacaagaaaugggga

SEQ ID NO: 155501 - RNA, 18 nt, Artificial Sequence
  Synthetic
aaucaggaacucugggga

SEQ ID NO: 155502 - RNA, 20 nt, Artificial Sequence
  Synthetic
ugaaucaggaacucugggga

SEQ ID NO: 155503 - RNA, 18 nt, Artificial Sequence
  Synthetic
accauauacccuugggga

SEQ ID NO: 155504 - RNA, 19 nt, Artificial Sequence
  Synthetic
caccauauacccuugggga

SEQ ID NO: 155505 - RNA, 20 nt, Artificial Sequence
  Synthetic
ccaccauauacccuugggga

SEQ ID NO: 155506 - RNA, 21 nt, Artificial Sequence
  Synthetic
cccaccauauacccuugggga

SEQ ID NO: 155507 - RNA, 22 nt, Artificial Sequence
  Synthetic
ucccaccauauacccuugggga

SEQ ID NO: 155508 - RNA, 18 nt, Artificial Sequence
  Synthetic
aagaauacacaacuggga

SEQ ID NO: 155509 - RNA, 19 nt, Artificial Sequence
  Synthetic
caagaauacacaacuggga

SEQ ID NO: 155510 - RNA, 20 nt, Artificial Sequence
  Synthetic
ccaagaauacacaacuggga

SEQ ID NO: 155511 - RNA, 22 nt, Artificial Sequence
  Synthetic
ugccaagaauacacaacuggga

SEQ ID NO: 155512 - RNA, 18 nt, Artificial Sequence
  Synthetic
cagaguacuucuguggga

SEQ ID NO: 155513 - RNA, 19 nt, Artificial Sequence
  Synthetic
acagaguacuucuguggga

SEQ ID NO: 155514 - RNA, 20 nt, Artificial Sequence
  Synthetic
aacagaguacuucuguggga

SEQ ID NO: 155515 - RNA, 18 nt, Artificial Sequence
  Synthetic
uggacaucagacuuggga

SEQ ID NO: 155516 - RNA, 19 nt, Artificial Sequence
  Synthetic
cuggacaucagacuuggga

SEQ ID NO: 155517 - RNA, 20 nt, Artificial Sequence
  Synthetic
ucuggacaucagacuuggga

SEQ ID NO: 155518 - RNA, 21 nt, Artificial Sequence
  Synthetic
cucuggacaucagacuuggga

SEQ ID NO: 155519 - RNA, 22 nt, Artificial Sequence
  Synthetic
acucuggacaucagacuuggga

SEQ ID NO: 155520 - RNA, 23 nt, Artificial Sequence
  Synthetic
cacucuggacaucagacuuggga

SEQ ID NO: 155521 - RNA, 24 nt, Artificial Sequence
  Synthetic
ccacucuggacaucagacuuggga

SEQ ID NO: 155522 - RNA, 18 nt, Artificial Sequence
  Synthetic
cccuauugccauuuggga

SEQ ID NO: 155523 - RNA, 20 nt, Artificial Sequence
  Synthetic
agcccuauugccauuuggga

SEQ ID NO: 155524 - RNA, 21 nt, Artificial Sequence
  Synthetic
cagcccuauugccauuuggga

SEQ ID NO: 155525 - RNA, 22 nt, Artificial Sequence
  Synthetic
ucagcccuauugccauuuggga

SEQ ID NO: 155526 - RNA, 23 nt, Artificial Sequence
  Synthetic
uucagcccuauugccauuuggga

SEQ ID NO: 155527 - RNA, 24 nt, Artificial Sequence
  Synthetic
cuucagcccuauugccauuuggga

SEQ ID NO: 155528 - RNA, 19 nt, Artificial Sequence
  Synthetic
agagugcuuaucuuuggga

SEQ ID NO: 155529 - RNA, 20 nt, Artificial Sequence
  Synthetic
aagagugcuuaucuuuggga

SEQ ID NO: 155530 - RNA, 21 nt, Artificial Sequence
  Synthetic
aaagagugcuuaucuuuggga

SEQ ID NO: 155531 - RNA, 22 nt, Artificial Sequence
  Synthetic
aaaagagugcuuaucuuuggga

SEQ ID NO: 155532 - RNA, 23 nt, Artificial Sequence
  Synthetic
caaaagagugcuuaucuuuggga

SEQ ID NO: 155533 - RNA, 24 nt, Artificial Sequence
  Synthetic
ucaaaagagugcuuaucuuuggga

SEQ ID NO: 155534 - RNA, 18 nt, Artificial Sequence
  Synthetic
uuuuaaaauaaaaaugga

SEQ ID NO: 155535 - RNA, 19 nt, Artificial Sequence
  Synthetic
uuuuuaaaauaaaaaugga

SEQ ID NO: 155536 - RNA, 20 nt, Artificial Sequence
  Synthetic
auuuuuaaaauaaaaaugga

SEQ ID NO: 155537 - RNA, 18 nt, Artificial Sequence
  Synthetic
auggaugaugaaaaugga

SEQ ID NO: 155538 - RNA, 19 nt, Artificial Sequence
  Synthetic
aauggaugaugaaaaugga

SEQ ID NO: 155539 - RNA, 20 nt, Artificial Sequence
  Synthetic
aaauggaugaugaaaaugga

SEQ ID NO: 155540 - RNA, 18 nt, Artificial Sequence
  Synthetic
cuaagaaaagggaaugga

SEQ ID NO: 155541 - RNA, 20 nt, Artificial Sequence
  Synthetic
ugcuaagaaaagggaaugga

SEQ ID NO: 155542 - RNA, 18 nt, Artificial Sequence
  Synthetic
auauagcucugacaugga

SEQ ID NO: 155543 - RNA, 19 nt, Artificial Sequence
  Synthetic
uauauagcucugacaugga

SEQ ID NO: 155544 - RNA, 20 nt, Artificial Sequence
  Synthetic
auauauagcucugacaugga

SEQ ID NO: 155545 - RNA, 18 nt, Artificial Sequence
  Synthetic
aggaaauaugaauaugga

SEQ ID NO: 155546 - RNA, 19 nt, Artificial Sequence
  Synthetic
aaggaaauaugaauaugga

SEQ ID NO: 155547 - RNA, 20 nt, Artificial Sequence
  Synthetic
uaaggaaauaugaauaugga

SEQ ID NO: 155548 - RNA, 18 nt, Artificial Sequence
  Synthetic
uggaaauuugaauaugga

SEQ ID NO: 155549 - RNA, 19 nt, Artificial Sequence
  Synthetic
auggaaauuugaauaugga

SEQ ID NO: 155550 - RNA, 20 nt, Artificial Sequence
  Synthetic
aauggaaauuugaauaugga

SEQ ID NO: 155551 - RNA, 18 nt, Artificial Sequence
  Synthetic
ucucaacuccucacugga

SEQ ID NO: 155552 - RNA, 19 nt, Artificial Sequence
  Synthetic
cucucaacuccucacugga

SEQ ID NO: 155553 - RNA, 21 nt, Artificial Sequence
  Synthetic
ugcucucaacuccucacugga

SEQ ID NO: 155554 - RNA, 22 nt, Artificial Sequence
  Synthetic
cugcucucaacuccucacugga

SEQ ID NO: 155555 - RNA, 23 nt, Artificial Sequence
  Synthetic
acugcucucaacuccucacugga

SEQ ID NO: 155556 - RNA, 24 nt, Artificial Sequence
  Synthetic
cacugcucucaacuccucacugga

SEQ ID NO: 155557 - RNA, 20 nt, Artificial Sequence
  Synthetic
aggcaauuacaaaugcugga

SEQ ID NO: 155558 - RNA, 21 nt, Artificial Sequence
  Synthetic
caggcaauuacaaaugcugga

SEQ ID NO: 155559 - RNA, 22 nt, Artificial Sequence
  Synthetic
acaggcaauuacaaaugcugga

SEQ ID NO: 155560 - RNA, 24 nt, Artificial Sequence
  Synthetic
agacaggcaauuacaaaugcugga

SEQ ID NO: 155561 - RNA, 18 nt, Artificial Sequence
  Synthetic
caaaagauuaaugcugga

SEQ ID NO: 155562 - RNA, 19 nt, Artificial Sequence
  Synthetic
acaaaagauuaaugcugga

SEQ ID NO: 155563 - RNA, 20 nt, Artificial Sequence
  Synthetic
cacaaaagauuaaugcugga

SEQ ID NO: 155564 - RNA, 21 nt, Artificial Sequence
  Synthetic
acacaaaagauuaaugcugga

SEQ ID NO: 155565 - RNA, 22 nt, Artificial Sequence
  Synthetic
aacacaaaagauuaaugcugga

SEQ ID NO: 155566 - RNA, 23 nt, Artificial Sequence
  Synthetic
uaacacaaaagauuaaugcugga

SEQ ID NO: 155567 - RNA, 21 nt, Artificial Sequence
  Synthetic
caggaaacaacagaugcugga

SEQ ID NO: 155568 - RNA, 22 nt, Artificial Sequence
  Synthetic
ucaggaaacaacagaugcugga

SEQ ID NO: 155569 - RNA, 24 nt, Artificial Sequence
  Synthetic
agucaggaaacaacagaugcugga

SEQ ID NO: 155570 - RNA, 20 nt, Artificial Sequence
  Synthetic
aggcaacaacagaugcugga

SEQ ID NO: 155571 - RNA, 21 nt, Artificial Sequence
  Synthetic
caggcaacaacagaugcugga

SEQ ID NO: 155572 - RNA, 22 nt, Artificial Sequence
  Synthetic
ucaggcaacaacagaugcugga

SEQ ID NO: 155573 - RNA, 24 nt, Artificial Sequence
  Synthetic
agucaggcaacaacagaugcugga

SEQ ID NO: 155574 - RNA, 21 nt, Artificial Sequence
  Synthetic
caggaaacaacaggugcugga

SEQ ID NO: 155575 - RNA, 22 nt, Artificial Sequence
  Synthetic
ucaggaaacaacaggugcugga

SEQ ID NO: 155576 - RNA, 24 nt, Artificial Sequence
  Synthetic
agucaggaaacaacaggugcugga

SEQ ID NO: 155577 - RNA, 18 nt, Artificial Sequence
  Synthetic
caauuucucccaucugga

SEQ ID NO: 155578 - RNA, 19 nt, Artificial Sequence
  Synthetic
ccaauuucucccaucugga

SEQ ID NO: 155579 - RNA, 23 nt, Artificial Sequence
  Synthetic
ugggccaauuucucccaucugga

SEQ ID NO: 155580 - RNA, 24 nt, Artificial Sequence
  Synthetic
uugggccaauuucucccaucugga

SEQ ID NO: 155581 - RNA, 18 nt, Artificial Sequence
  Synthetic
agacaauuuuuccgugga

SEQ ID NO: 155582 - RNA, 19 nt, Artificial Sequence
  Synthetic
aagacaauuuuuccgugga

SEQ ID NO: 155583 - RNA, 22 nt, Artificial Sequence
  Synthetic
uggaagacaauuuuuccgugga

SEQ ID NO: 155584 - RNA, 24 nt, Artificial Sequence
  Synthetic
uguggaagacaauuuuuccgugga

SEQ ID NO: 155585 - RNA, 20 nt, Artificial Sequence
  Synthetic
aggugcccauuaauggugga

SEQ ID NO: 155586 - RNA, 21 nt, Artificial Sequence
  Synthetic
uaggugcccauuaauggugga

SEQ ID NO: 155587 - RNA, 22 nt, Artificial Sequence
  Synthetic
cuaggugcccauuaauggugga

SEQ ID NO: 155588 - RNA, 23 nt, Artificial Sequence
  Synthetic
ccuaggugcccauuaauggugga

SEQ ID NO: 155589 - RNA, 24 nt, Artificial Sequence
  Synthetic
accuaggugcccauuaauggugga

SEQ ID NO: 155590 - RNA, 18 nt, Artificial Sequence
  Synthetic
uuuagggcaucuggugga

SEQ ID NO: 155591 - RNA, 19 nt, Artificial Sequence
  Synthetic
auuuagggcaucuggugga

SEQ ID NO: 155592 - RNA, 21 nt, Artificial Sequence
  Synthetic
ugauuuagggcaucuggugga

SEQ ID NO: 155593 - RNA, 22 nt, Artificial Sequence
  Synthetic
augauuuagggcaucuggugga

SEQ ID NO: 155594 - RNA, 24 nt, Artificial Sequence
  Synthetic
agaugauuuagggcaucuggugga

SEQ ID NO: 155595 - RNA, 19 nt, Artificial Sequence
  Synthetic
agauucugauuuaguugga

SEQ ID NO: 155596 - RNA, 21 nt, Artificial Sequence
  Synthetic
agagauucugauuuaguugga

SEQ ID NO: 155597 - RNA, 22 nt, Artificial Sequence
  Synthetic
cagagauucugauuuaguugga

SEQ ID NO: 155598 - RNA, 23 nt, Artificial Sequence
  Synthetic
ccagagauucugauuuaguugga

SEQ ID NO: 155599 - RNA, 24 nt, Artificial Sequence
  Synthetic
cccagagauucugauuuaguugga

SEQ ID NO: 155600 - RNA, 18 nt, Artificial Sequence
  Synthetic
uucuuucuuuucuuugga

SEQ ID NO: 155601 - RNA, 19 nt, Artificial Sequence
  Synthetic
uuucuuucuuuucuuugga

SEQ ID NO: 155602 - RNA, 20 nt, Artificial Sequence
  Synthetic
uuuucuuucuuuucuuugga

SEQ ID NO: 155603 - RNA, 21 nt, Artificial Sequence
  Synthetic
uuuuucuuucuuuucuuugga

SEQ ID NO: 155604 - RNA, 22 nt, Artificial Sequence
  Synthetic
uuuuuucuuucuuuucuuugga

SEQ ID NO: 155605 - RNA, 23 nt, Artificial Sequence
  Synthetic
auuuuuucuuucuuuucuuugga

SEQ ID NO: 155606 - RNA, 24 nt, Artificial Sequence
  Synthetic
uauuuuuucuuucuuuucuuugga

SEQ ID NO: 155607 - RNA, 18 nt, Artificial Sequence
  Synthetic
cacaacugacauuuugga

SEQ ID NO: 155608 - RNA, 19 nt, Artificial Sequence
  Synthetic
ccacaacugacauuuugga

SEQ ID NO: 155609 - RNA, 20 nt, Artificial Sequence
  Synthetic
accacaacugacauuuugga

SEQ ID NO: 155610 - RNA, 21 nt, Artificial Sequence
  Synthetic
caccacaacugacauuuugga

SEQ ID NO: 155611 - RNA, 22 nt, Artificial Sequence
  Synthetic
ucaccacaacugacauuuugga

SEQ ID NO: 155612 - RNA, 23 nt, Artificial Sequence
  Synthetic
cucaccacaacugacauuuugga

SEQ ID NO: 155613 - RNA, 24 nt, Artificial Sequence
  Synthetic
ccucaccacaacugacauuuugga

SEQ ID NO: 155614 - RNA, 19 nt, Artificial Sequence
  Synthetic
aggacaaaaugauuuugga

SEQ ID NO: 155615 - RNA, 20 nt, Artificial Sequence
  Synthetic
aaggacaaaaugauuuugga

SEQ ID NO: 155616 - RNA, 18 nt, Artificial Sequence
  Synthetic
ccuucgcccacuuuugga

SEQ ID NO: 155617 - RNA, 19 nt, Artificial Sequence
  Synthetic
uccuucgcccacuuuugga

SEQ ID NO: 155618 - RNA, 21 nt, Artificial Sequence
  Synthetic
uguccuucgcccacuuuugga

SEQ ID NO: 155619 - RNA, 22 nt, Artificial Sequence
  Synthetic
auguccuucgcccacuuuugga

SEQ ID NO: 155620 - RNA, 23 nt, Artificial Sequence
  Synthetic
cauguccuucgcccacuuuugga

SEQ ID NO: 155621 - RNA, 24 nt, Artificial Sequence
  Synthetic
ucauguccuucgcccacuuuugga

SEQ ID NO: 155622 - RNA, 18 nt, Artificial Sequence
  Synthetic
aauaaaggguaaaaauga

SEQ ID NO: 155623 - RNA, 19 nt, Artificial Sequence
  Synthetic
aaauaaaggguaaaaauga

SEQ ID NO: 155624 - RNA, 20 nt, Artificial Sequence
  Synthetic
uaaauaaaggguaaaaauga

SEQ ID NO: 155625 - RNA, 21 nt, Artificial Sequence
  Synthetic
uuaaauaaaggguaaaaauga

SEQ ID NO: 155626 - RNA, 22 nt, Artificial Sequence
  Synthetic
auuaaauaaaggguaaaaauga

SEQ ID NO: 155627 - RNA, 24 nt, Artificial Sequence
  Synthetic
agauuaaauaaaggguaaaaauga

SEQ ID NO: 155628 - RNA, 18 nt, Artificial Sequence
  Synthetic
cuguccucaugaaaauga

SEQ ID NO: 155629 - RNA, 19 nt, Artificial Sequence
  Synthetic
acuguccucaugaaaauga

SEQ ID NO: 155630 - RNA, 20 nt, Artificial Sequence
  Synthetic
uacuguccucaugaaaauga

SEQ ID NO: 155631 - RNA, 23 nt, Artificial Sequence
  Synthetic
ugguacuguccucaugaaaauga

SEQ ID NO: 155632 - RNA, 24 nt, Artificial Sequence
  Synthetic
uugguacuguccucaugaaaauga

SEQ ID NO: 155633 - RNA, 19 nt, Artificial Sequence
  Synthetic
aguguccaucaacaaauga

SEQ ID NO: 155634 - RNA, 20 nt, Artificial Sequence
  Synthetic
aaguguccaucaacaaauga

SEQ ID NO: 155635 - RNA, 21 nt, Artificial Sequence
  Synthetic
uaaguguccaucaacaaauga

SEQ ID NO: 155636 - RNA, 22 nt, Artificial Sequence
  Synthetic
uuaaguguccaucaacaaauga

SEQ ID NO: 155637 - RNA, 23 nt, Artificial Sequence
  Synthetic
uuuaaguguccaucaacaaauga

SEQ ID NO: 155638 - RNA, 24 nt, Artificial Sequence
  Synthetic
auuuaaguguccaucaacaaauga

SEQ ID NO: 155639 - RNA, 18 nt, Artificial Sequence
  Synthetic
acaugaaggaacaaauga

SEQ ID NO: 155640 - RNA, 19 nt, Artificial Sequence
  Synthetic
uacaugaaggaacaaauga

SEQ ID NO: 155641 - RNA, 20 nt, Artificial Sequence
  Synthetic
auacaugaaggaacaaauga

SEQ ID NO: 155642 - RNA, 21 nt, Artificial Sequence
  Synthetic
aauacaugaaggaacaaauga

SEQ ID NO: 155643 - RNA, 23 nt, Artificial Sequence
  Synthetic
ugaauacaugaaggaacaaauga

SEQ ID NO: 155644 - RNA, 24 nt, Artificial Sequence
  Synthetic
uugaauacaugaaggaacaaauga

SEQ ID NO: 155645 - RNA, 18 nt, Artificial Sequence
  Synthetic
aaaaugggagauaaauga

SEQ ID NO: 155646 - RNA, 19 nt, Artificial Sequence
  Synthetic
uaaaaugggagauaaauga

SEQ ID NO: 155647 - RNA, 20 nt, Artificial Sequence
  Synthetic
auaaaaugggagauaaauga

SEQ ID NO: 155648 - RNA, 19 nt, Artificial Sequence
  Synthetic
aguguccaucgaccaauga

SEQ ID NO: 155649 - RNA, 20 nt, Artificial Sequence
  Synthetic
aaguguccaucgaccaauga

SEQ ID NO: 155650 - RNA, 21 nt, Artificial Sequence
  Synthetic
caaguguccaucgaccaauga

SEQ ID NO: 155651 - RNA, 22 nt, Artificial Sequence
  Synthetic
ccaaguguccaucgaccaauga

SEQ ID NO: 155652 - RNA, 23 nt, Artificial Sequence
  Synthetic
cccaaguguccaucgaccaauga

SEQ ID NO: 155653 - RNA, 24 nt, Artificial Sequence
  Synthetic
acccaaguguccaucgaccaauga

SEQ ID NO: 155654 - RNA, 22 nt, Artificial Sequence
  Synthetic
uggagaagggugguggcaauga

SEQ ID NO: 155655 - RNA, 23 nt, Artificial Sequence
  Synthetic
cuggagaagggugguggcaauga

SEQ ID NO: 155656 - RNA, 24 nt, Artificial Sequence
  Synthetic
acuggagaagggugguggcaauga

SEQ ID NO: 155657 - RNA, 18 nt, Artificial Sequence
  Synthetic
uaauacgugaaugaauga

SEQ ID NO: 155658 - RNA, 19 nt, Artificial Sequence
  Synthetic
uuaauacgugaaugaauga

SEQ ID NO: 155659 - RNA, 20 nt, Artificial Sequence
  Synthetic
cuuaauacgugaaugaauga

SEQ ID NO: 155660 - RNA, 18 nt, Artificial Sequence
  Synthetic
auuuuaauaacugaauga

SEQ ID NO: 155661 - RNA, 19 nt, Artificial Sequence
  Synthetic
cauuuuaauaacugaauga

SEQ ID NO: 155662 - RNA, 20 nt, Artificial Sequence
  Synthetic
acauuuuaauaacugaauga

SEQ ID NO: 155663 - RNA, 22 nt, Artificial Sequence
  Synthetic
uguuaaauuaacacgugaauga

SEQ ID NO: 155664 - RNA, 23 nt, Artificial Sequence
  Synthetic
uuguuaaauuaacacgugaauga

SEQ ID NO: 155665 - RNA, 24 nt, Artificial Sequence
  Synthetic
uuuguuaaauuaacacgugaauga

SEQ ID NO: 155666 - RNA, 18 nt, Artificial Sequence
  Synthetic
cagcuaacaucauaauga

SEQ ID NO: 155667 - RNA, 19 nt, Artificial Sequence
  Synthetic
ccagcuaacaucauaauga

SEQ ID NO: 155668 - RNA, 20 nt, Artificial Sequence
  Synthetic
accagcuaacaucauaauga

SEQ ID NO: 155669 - RNA, 21 nt, Artificial Sequence
  Synthetic
caccagcuaacaucauaauga

SEQ ID NO: 155670 - RNA, 22 nt, Artificial Sequence
  Synthetic
ucaccagcuaacaucauaauga

SEQ ID NO: 155671 - RNA, 23 nt, Artificial Sequence
  Synthetic
aucaccagcuaacaucauaauga

SEQ ID NO: 155672 - RNA, 24 nt, Artificial Sequence
  Synthetic
aaucaccagcuaacaucauaauga

SEQ ID NO: 155673 - RNA, 18 nt, Artificial Sequence
  Synthetic
ugaucugcagacacauga

SEQ ID NO: 155674 - RNA, 19 nt, Artificial Sequence
  Synthetic
cugaucugcagacacauga

SEQ ID NO: 155675 - RNA, 18 nt, Artificial Sequence
  Synthetic
ugauuuuugguuacauga

SEQ ID NO: 155676 - RNA, 20 nt, Artificial Sequence
  Synthetic
agugauuuuugguuacauga

SEQ ID NO: 155677 - RNA, 21 nt, Artificial Sequence
  Synthetic
aagugauuuuugguuacauga

SEQ ID NO: 155678 - RNA, 22 nt, Artificial Sequence
  Synthetic
caagugauuuuugguuacauga

SEQ ID NO: 155679 - RNA, 23 nt, Artificial Sequence
  Synthetic
acaagugauuuuugguuacauga

SEQ ID NO: 155680 - RNA, 24 nt, Artificial Sequence
  Synthetic
uacaagugauuuuugguuacauga

SEQ ID NO: 155681 - RNA, 18 nt, Artificial Sequence
  Synthetic
ugagaguuuuuagcauga

SEQ ID NO: 155682 - RNA, 19 nt, Artificial Sequence
  Synthetic
uugagaguuuuuagcauga

SEQ ID NO: 155683 - RNA, 20 nt, Artificial Sequence
  Synthetic
auugagaguuuuuagcauga

SEQ ID NO: 155684 - RNA, 21 nt, Artificial Sequence
  Synthetic
uauugagaguuuuuagcauga

SEQ ID NO: 155685 - RNA, 22 nt, Artificial Sequence
  Synthetic
uuauugagaguuuuuagcauga

SEQ ID NO: 155686 - RNA, 23 nt, Artificial Sequence
  Synthetic
uuuauugagaguuuuuagcauga

SEQ ID NO: 155687 - RNA, 24 nt, Artificial Sequence
  Synthetic
auuuauugagaguuuuuagcauga

SEQ ID NO: 155688 - RNA, 18 nt, Artificial Sequence
  Synthetic
uugcaucuuugugcauga

SEQ ID NO: 155689 - RNA, 19 nt, Artificial Sequence
  Synthetic
uuugcaucuuugugcauga

SEQ ID NO: 155690 - RNA, 20 nt, Artificial Sequence
  Synthetic
uuuugcaucuuugugcauga

SEQ ID NO: 155691 - RNA, 18 nt, Artificial Sequence
  Synthetic
ucauaguuuuuaucauga

SEQ ID NO: 155692 - RNA, 19 nt, Artificial Sequence
  Synthetic
cucauaguuuuuaucauga

SEQ ID NO: 155693 - RNA, 20 nt, Artificial Sequence
  Synthetic
ucucauaguuuuuaucauga

SEQ ID NO: 155694 - RNA, 21 nt, Artificial Sequence
  Synthetic
uucucauaguuuuuaucauga

SEQ ID NO: 155695 - RNA, 22 nt, Artificial Sequence
  Synthetic
uuucucauaguuuuuaucauga

SEQ ID NO: 155696 - RNA, 23 nt, Artificial Sequence
  Synthetic
uuuucucauaguuuuuaucauga

SEQ ID NO: 155697 - RNA, 19 nt, Artificial Sequence
  Synthetic
ugaauucugcaacucauga

SEQ ID NO: 155698 - RNA, 20 nt, Artificial Sequence
  Synthetic
uugaauucugcaacucauga

SEQ ID NO: 155699 - RNA, 18 nt, Artificial Sequence
  Synthetic
aaggcucugccuucauga

SEQ ID NO: 155700 - RNA, 20 nt, Artificial Sequence
  Synthetic
ugaaggcucugccuucauga

SEQ ID NO: 155701 - RNA, 21 nt, Artificial Sequence
  Synthetic
augaaggcucugccuucauga

SEQ ID NO: 155702 - RNA, 22 nt, Artificial Sequence
  Synthetic
caugaaggcucugccuucauga

SEQ ID NO: 155703 - RNA, 23 nt, Artificial Sequence
  Synthetic
acaugaaggcucugccuucauga

SEQ ID NO: 155704 - RNA, 18 nt, Artificial Sequence
  Synthetic
ugugggaggcuaagauga

SEQ ID NO: 155705 - RNA, 19 nt, Artificial Sequence
  Synthetic
cugugggaggcuaagauga

SEQ ID NO: 155706 - RNA, 20 nt, Artificial Sequence
  Synthetic
acugugggaggcuaagauga

SEQ ID NO: 155707 - RNA, 21 nt, Artificial Sequence
  Synthetic
cacugugggaggcuaagauga

SEQ ID NO: 155708 - RNA, 23 nt, Artificial Sequence
  Synthetic
agcacugugggaggcuaagauga

SEQ ID NO: 155709 - RNA, 24 nt, Artificial Sequence
  Synthetic
cagcacugugggaggcuaagauga

SEQ ID NO: 155710 - RNA, 19 nt, Artificial Sequence
  Synthetic
aggagaggaagagagauga

SEQ ID NO: 155711 - RNA, 20 nt, Artificial Sequence
  Synthetic
aaggagaggaagagagauga

SEQ ID NO: 155712 - RNA, 21 nt, Artificial Sequence
  Synthetic
caaggagaggaagagagauga

SEQ ID NO: 155713 - RNA, 22 nt, Artificial Sequence
  Synthetic
ccaaggagaggaagagagauga

SEQ ID NO: 155714 - RNA, 23 nt, Artificial Sequence
  Synthetic
cccaaggagaggaagagagauga

SEQ ID NO: 155715 - RNA, 18 nt, Artificial Sequence
  Synthetic
uucucugcuggaggauga

SEQ ID NO: 155716 - RNA, 19 nt, Artificial Sequence
  Synthetic
auucucugcuggaggauga

SEQ ID NO: 155717 - RNA, 20 nt, Artificial Sequence
  Synthetic
cauucucugcuggaggauga

SEQ ID NO: 155718 - RNA, 18 nt, Artificial Sequence
  Synthetic
ccauccucaugaugauga

SEQ ID NO: 155719 - RNA, 20 nt, Artificial Sequence
  Synthetic
ugccauccucaugaugauga

SEQ ID NO: 155720 - RNA, 23 nt, Artificial Sequence
  Synthetic
uggugccauccucaugaugauga

SEQ ID NO: 155721 - RNA, 24 nt, Artificial Sequence
  Synthetic
uuggugccauccucaugaugauga

SEQ ID NO: 155722 - RNA, 18 nt, Artificial Sequence
  Synthetic
ucuuaauccuuuugauga

SEQ ID NO: 155723 - RNA, 20 nt, Artificial Sequence
  Synthetic
ugucuuaauccuuuugauga

SEQ ID NO: 155724 - RNA, 18 nt, Artificial Sequence
  Synthetic
cuuaaauauucaauauga

SEQ ID NO: 155725 - RNA, 19 nt, Artificial Sequence
  Synthetic
acuuaaauauucaauauga

SEQ ID NO: 155726 - RNA, 20 nt, Artificial Sequence
  Synthetic
aacuuaaauauucaauauga

SEQ ID NO: 155727 - RNA, 21 nt, Artificial Sequence
  Synthetic
uuuguggguuugcuuguauga

SEQ ID NO: 155728 - RNA, 22 nt, Artificial Sequence
  Synthetic
uuuuguggguuugcuuguauga

SEQ ID NO: 155729 - RNA, 23 nt, Artificial Sequence
  Synthetic
cuuuuguggguuugcuuguauga

SEQ ID NO: 155730 - RNA, 24 nt, Artificial Sequence
  Synthetic
ccuuuuguggguuugcuuguauga

SEQ ID NO: 155731 - RNA, 18 nt, Artificial Sequence
  Synthetic
agcuauuaaaaauuauga

SEQ ID NO: 155732 - RNA, 18 nt, Artificial Sequence
  Synthetic
uuuuauaaagaauuauga

SEQ ID NO: 155733 - RNA, 19 nt, Artificial Sequence
  Synthetic
auuuuauaaagaauuauga

SEQ ID NO: 155734 - RNA, 20 nt, Artificial Sequence
  Synthetic
aauuuuauaaagaauuauga

SEQ ID NO: 155735 - RNA, 18 nt, Artificial Sequence
  Synthetic
agggcucugcccuuauga

SEQ ID NO: 155736 - RNA, 20 nt, Artificial Sequence
  Synthetic
ugagggcucugcccuuauga

SEQ ID NO: 155737 - RNA, 21 nt, Artificial Sequence
  Synthetic
augagggcucugcccuuauga

SEQ ID NO: 155738 - RNA, 22 nt, Artificial Sequence
  Synthetic
caugagggcucugcccuuauga

SEQ ID NO: 155739 - RNA, 23 nt, Artificial Sequence
  Synthetic
ucaugagggcucugcccuuauga

SEQ ID NO: 155740 - RNA, 24 nt, Artificial Sequence
  Synthetic
aucaugagggcucugcccuuauga

SEQ ID NO: 155741 - RNA, 18 nt, Artificial Sequence
  Synthetic
aauuuuuuaaaaaacuga

SEQ ID NO: 155742 - RNA, 19 nt, Artificial Sequence
  Synthetic
caauuuuuuaaaaaacuga

SEQ ID NO: 155743 - RNA, 20 nt, Artificial Sequence
  Synthetic
acaauuuuuuaaaaaacuga

SEQ ID NO: 155744 - RNA, 18 nt, Artificial Sequence
  Synthetic
auacauuuuaauaacuga

SEQ ID NO: 155745 - RNA, 19 nt, Artificial Sequence
  Synthetic
aauacauuuuaauaacuga

SEQ ID NO: 155746 - RNA, 21 nt, Artificial Sequence
  Synthetic
ugaauacauuuuaauaacuga

SEQ ID NO: 155747 - RNA, 22 nt, Artificial Sequence
  Synthetic
uugaauacauuuuaauaacuga

SEQ ID NO: 155748 - RNA, 24 nt, Artificial Sequence
  Synthetic
uguugaauacauuuuaauaacuga

SEQ ID NO: 155749 - RNA, 18 nt, Artificial Sequence
  Synthetic
agagagagaaguaacuga

SEQ ID NO: 155750 - RNA, 18 nt, Artificial Sequence
  Synthetic
uuuguaaaauauaccuga

SEQ ID NO: 155751 - RNA, 19 nt, Artificial Sequence
  Synthetic
auuuguaaaauauaccuga

SEQ ID NO: 155752 - RNA, 20 nt, Artificial Sequence
  Synthetic
aauuuguaaaauauaccuga

SEQ ID NO: 155753 - RNA, 18 nt, Artificial Sequence
  Synthetic
aauauauauaugugcuga

SEQ ID NO: 155754 - RNA, 19 nt, Artificial Sequence
  Synthetic
uaauauauauaugugcuga

SEQ ID NO: 155755 - RNA, 20 nt, Artificial Sequence
  Synthetic
uuaauauauauaugugcuga

SEQ ID NO: 155756 - RNA, 18 nt, Artificial Sequence
  Synthetic
aauuaugauuauugcuga

SEQ ID NO: 155757 - RNA, 20 nt, Artificial Sequence
  Synthetic
ugaauuaugauuauugcuga

SEQ ID NO: 155758 - RNA, 18 nt, Artificial Sequence
  Synthetic
uuucagaauaaaaucuga

SEQ ID NO: 155759 - RNA, 19 nt, Artificial Sequence
  Synthetic
uuuucagaauaaaaucuga

SEQ ID NO: 155760 - RNA, 20 nt, Artificial Sequence
  Synthetic
uuuuucagaauaaaaucuga

SEQ ID NO: 155761 - RNA, 18 nt, Artificial Sequence
  Synthetic
uauuagccaugaaaguga

SEQ ID NO: 155762 - RNA, 19 nt, Artificial Sequence
  Synthetic
auauuagccaugaaaguga

SEQ ID NO: 155763 - RNA, 20 nt, Artificial Sequence
  Synthetic
uauauuagccaugaaaguga

SEQ ID NO: 155764 - RNA, 18 nt, Artificial Sequence
  Synthetic
aagagcucuucacaguga

SEQ ID NO: 155765 - RNA, 19 nt, Artificial Sequence
  Synthetic
aaagagcucuucacaguga

SEQ ID NO: 155766 - RNA, 20 nt, Artificial Sequence
  Synthetic
uaaagagcucuucacaguga

SEQ ID NO: 155767 - RNA, 21 nt, Artificial Sequence
  Synthetic
cuaaagagcucuucacaguga

SEQ ID NO: 155768 - RNA, 22 nt, Artificial Sequence
  Synthetic
acuaaagagcucuucacaguga

SEQ ID NO: 155769 - RNA, 23 nt, Artificial Sequence
  Synthetic
aacuaaagagcucuucacaguga

SEQ ID NO: 155770 - RNA, 24 nt, Artificial Sequence
  Synthetic
aaacuaaagagcucuucacaguga

SEQ ID NO: 155771 - RNA, 19 nt, Artificial Sequence
  Synthetic
ugacauagcuagucaguga

SEQ ID NO: 155772 - RNA, 22 nt, Artificial Sequence
  Synthetic
aggugacauagcuagucaguga

SEQ ID NO: 155773 - RNA, 23 nt, Artificial Sequence
  Synthetic
aaggugacauagcuagucaguga

SEQ ID NO: 155774 - RNA, 24 nt, Artificial Sequence
  Synthetic
caaggugacauagcuagucaguga

SEQ ID NO: 155775 - RNA, 18 nt, Artificial Sequence
  Synthetic
aaaaaaguaagagaguga

SEQ ID NO: 155776 - RNA, 18 nt, Artificial Sequence
  Synthetic
aaauggcuaaaugaguga

SEQ ID NO: 155777 - RNA, 19 nt, Artificial Sequence
  Synthetic
uaaauggcuaaaugaguga

SEQ ID NO: 155778 - RNA, 20 nt, Artificial Sequence
  Synthetic
cuaaauggcuaaaugaguga

SEQ ID NO: 155779 - RNA, 18 nt, Artificial Sequence
  Synthetic
cuguucucaugauaguga

SEQ ID NO: 155780 - RNA, 20 nt, Artificial Sequence
  Synthetic
ugcuguucucaugauaguga

SEQ ID NO: 155781 - RNA, 21 nt, Artificial Sequence
  Synthetic
augcuguucucaugauaguga

SEQ ID NO: 155782 - RNA, 22 nt, Artificial Sequence
  Synthetic
caugcuguucucaugauaguga

SEQ ID NO: 155783 - RNA, 23 nt, Artificial Sequence
  Synthetic
ccaugcuguucucaugauaguga

SEQ ID NO: 155784 - RNA, 24 nt, Artificial Sequence
  Synthetic
cccaugcuguucucaugauaguga

SEQ ID NO: 155785 - RNA, 21 nt, Artificial Sequence
  Synthetic
cacuuugggaggccaagguga

SEQ ID NO: 155786 - RNA, 22 nt, Artificial Sequence
  Synthetic
ccacuuugggaggccaagguga

SEQ ID NO: 155787 - RNA, 23 nt, Artificial Sequence
  Synthetic
uccacuuugggaggccaagguga

SEQ ID NO: 155788 - RNA, 24 nt, Artificial Sequence
  Synthetic
auccacuuugggaggccaagguga

SEQ ID NO: 155789 - RNA, 23 nt, Artificial Sequence
  Synthetic
agcacuuugggaggccaagguga

SEQ ID NO: 155790 - RNA, 24 nt, Artificial Sequence
  Synthetic
cagcacuuugggaggccaagguga

SEQ ID NO: 155791 - RNA, 20 nt, Artificial Sequence
  Synthetic
uggggccuggugagagguga

SEQ ID NO: 155792 - RNA, 23 nt, Artificial Sequence
  Synthetic
agguggggccuggugagagguga

SEQ ID NO: 155793 - RNA, 18 nt, Artificial Sequence
  Synthetic
uuugggaggccgagguga

SEQ ID NO: 155794 - RNA, 19 nt, Artificial Sequence
  Synthetic
cuuugggaggccgagguga

SEQ ID NO: 155795 - RNA, 20 nt, Artificial Sequence
  Synthetic
acuuugggaggccgagguga

SEQ ID NO: 155796 - RNA, 21 nt, Artificial Sequence
  Synthetic
cacuuugggaggccgagguga

SEQ ID NO: 155797 - RNA, 23 nt, Artificial Sequence
  Synthetic
agcacuuugggaggccgagguga

SEQ ID NO: 155798 - RNA, 24 nt, Artificial Sequence
  Synthetic
cagcacuuugggaggccgagguga

SEQ ID NO: 155799 - RNA, 23 nt, Artificial Sequence
  Synthetic
cgggggaaccuggugggagguga

SEQ ID NO: 155800 - RNA, 24 nt, Artificial Sequence
  Synthetic
ccgggggaaccuggugggagguga

SEQ ID NO: 155801 - RNA, 20 nt, Artificial Sequence
  Synthetic
uggggccuggugggagguga

SEQ ID NO: 155802 - RNA, 23 nt, Artificial Sequence
  Synthetic
agguggggccuggugggagguga

SEQ ID NO: 155803 - RNA, 19 nt, Artificial Sequence
  Synthetic
ugcuaaauaugugagguga

SEQ ID NO: 155804 - RNA, 20 nt, Artificial Sequence
  Synthetic
augcuaaauaugugagguga

SEQ ID NO: 155805 - RNA, 19 nt, Artificial Sequence
  Synthetic
ugggaaggguaggggguga

SEQ ID NO: 155806 - RNA, 20 nt, Artificial Sequence
  Synthetic
cugggaaggguaggggguga

SEQ ID NO: 155807 - RNA, 24 nt, Artificial Sequence
  Synthetic
accacugcacuccagccuggguga

SEQ ID NO: 155808 - RNA, 18 nt, Artificial Sequence
  Synthetic
acacucuagccuggguga

SEQ ID NO: 155809 - RNA, 19 nt, Artificial Sequence
  Synthetic
uacacucuagccuggguga

SEQ ID NO: 155810 - RNA, 20 nt, Artificial Sequence
  Synthetic
cuacacucuagccuggguga

SEQ ID NO: 155811 - RNA, 21 nt, Artificial Sequence
  Synthetic
acuacacucuagccuggguga

SEQ ID NO: 155812 - RNA, 22 nt, Artificial Sequence
  Synthetic
cacuacacucuagccuggguga

SEQ ID NO: 155813 - RNA, 23 nt, Artificial Sequence
  Synthetic
ccacuacacucuagccuggguga

SEQ ID NO: 155814 - RNA, 18 nt, Artificial Sequence
  Synthetic
ugcucacugccuggguga

SEQ ID NO: 155815 - RNA, 19 nt, Artificial Sequence
  Synthetic
augcucacugccuggguga

SEQ ID NO: 155816 - RNA, 20 nt, Artificial Sequence
  Synthetic
uaugcucacugccuggguga

SEQ ID NO: 155817 - RNA, 21 nt, Artificial Sequence
  Synthetic
cuaugcucacugccuggguga

SEQ ID NO: 155818 - RNA, 22 nt, Artificial Sequence
  Synthetic
acuaugcucacugccuggguga

SEQ ID NO: 155819 - RNA, 23 nt, Artificial Sequence
  Synthetic
uacuaugcucacugccuggguga

SEQ ID NO: 155820 - RNA, 24 nt, Artificial Sequence
  Synthetic
auacuaugcucacugccuggguga

SEQ ID NO: 155821 - RNA, 21 nt, Artificial Sequence
  Synthetic
cacugcacuccagccugguga

SEQ ID NO: 155822 - RNA, 22 nt, Artificial Sequence
  Synthetic
ccacugcacuccagccugguga

SEQ ID NO: 155823 - RNA, 23 nt, Artificial Sequence
  Synthetic
accacugcacuccagccugguga

SEQ ID NO: 155824 - RNA, 24 nt, Artificial Sequence
  Synthetic
caccacugcacuccagccugguga

SEQ ID NO: 155825 - RNA, 20 nt, Artificial Sequence
  Synthetic
uggauuacuuuagaauguga

SEQ ID NO: 155826 - RNA, 21 nt, Artificial Sequence
  Synthetic
auggauuacuuuagaauguga

SEQ ID NO: 155827 - RNA, 22 nt, Artificial Sequence
  Synthetic
aauggauuacuuuagaauguga

SEQ ID NO: 155828 - RNA, 23 nt, Artificial Sequence
  Synthetic
aaauggauuacuuuagaauguga

SEQ ID NO: 155829 - RNA, 24 nt, Artificial Sequence
  Synthetic
aaaauggauuacuuuagaauguga

SEQ ID NO: 155830 - RNA, 21 nt, Artificial Sequence
  Synthetic
caucccuauuuuaggauguga

SEQ ID NO: 155831 - RNA, 22 nt, Artificial Sequence
  Synthetic
ucaucccuauuuuaggauguga

SEQ ID NO: 155832 - RNA, 23 nt, Artificial Sequence
  Synthetic
uucaucccuauuuuaggauguga

SEQ ID NO: 155833 - RNA, 18 nt, Artificial Sequence
  Synthetic
ugagucccuccccuguga

SEQ ID NO: 155834 - RNA, 19 nt, Artificial Sequence
  Synthetic
augagucccuccccuguga

SEQ ID NO: 155835 - RNA, 20 nt, Artificial Sequence
  Synthetic
aaugagucccuccccuguga

SEQ ID NO: 155836 - RNA, 19 nt, Artificial Sequence
  Synthetic
uguuuucugucuccuguga

SEQ ID NO: 155837 - RNA, 20 nt, Artificial Sequence
  Synthetic
uuguuuucugucuccuguga

SEQ ID NO: 155838 - RNA, 21 nt, Artificial Sequence
  Synthetic
uuuguuuucugucuccuguga

SEQ ID NO: 155839 - RNA, 22 nt, Artificial Sequence
  Synthetic
uuuuguuuucugucuccuguga

SEQ ID NO: 155840 - RNA, 23 nt, Artificial Sequence
  Synthetic
auuuuguuuucugucuccuguga

SEQ ID NO: 155841 - RNA, 24 nt, Artificial Sequence
  Synthetic
uauuuuguuuucugucuccuguga

SEQ ID NO: 155842 - RNA, 18 nt, Artificial Sequence
  Synthetic
acauacacauauguguga

SEQ ID NO: 155843 - RNA, 19 nt, Artificial Sequence
  Synthetic
cacauacacauauguguga

SEQ ID NO: 155844 - RNA, 20 nt, Artificial Sequence
  Synthetic
acacauacacauauguguga

SEQ ID NO: 155845 - RNA, 18 nt, Artificial Sequence
  Synthetic
uuauuuauauguguguga

SEQ ID NO: 155846 - RNA, 19 nt, Artificial Sequence
  Synthetic
uuuauuuauauguguguga

SEQ ID NO: 155847 - RNA, 20 nt, Artificial Sequence
  Synthetic
uuuuauuuauauguguguga

SEQ ID NO: 155848 - RNA, 18 nt, Artificial Sequence
  Synthetic
uuuccuaauauuuuguga

SEQ ID NO: 155849 - RNA, 19 nt, Artificial Sequence
  Synthetic
uuuuccuaauauuuuguga

SEQ ID NO: 155850 - RNA, 18 nt, Artificial Sequence
  Synthetic
aaagaggaaggaaauuga

SEQ ID NO: 155851 - RNA, 20 nt, Artificial Sequence
  Synthetic
agaaagaggaaggaaauuga

SEQ ID NO: 155852 - RNA, 20 nt, Artificial Sequence
  Synthetic
ugguuuucaucuuuaauuga

SEQ ID NO: 155853 - RNA, 18 nt, Artificial Sequence
  Synthetic
auuccagaaacauauuga

SEQ ID NO: 155854 - RNA, 19 nt, Artificial Sequence
  Synthetic
aauuccagaaacauauuga

SEQ ID NO: 155855 - RNA, 20 nt, Artificial Sequence
  Synthetic
caauuccagaaacauauuga

SEQ ID NO: 155856 - RNA, 18 nt, Artificial Sequence
  Synthetic
aacucaacaguauauuga

SEQ ID NO: 155857 - RNA, 20 nt, Artificial Sequence
  Synthetic
ugaacucaacaguauauuga

SEQ ID NO: 155858 - RNA, 21 nt, Artificial Sequence
  Synthetic
cugaacucaacaguauauuga

SEQ ID NO: 155859 - RNA, 22 nt, Artificial Sequence
  Synthetic
acugaacucaacaguauauuga

SEQ ID NO: 155860 - RNA, 23 nt, Artificial Sequence
  Synthetic
aacugaacucaacaguauauuga

SEQ ID NO: 155861 - RNA, 24 nt, Artificial Sequence
  Synthetic
aaacugaacucaacaguauauuga

SEQ ID NO: 155862 - RNA, 18 nt, Artificial Sequence
  Synthetic
agaagaggaagaacuuga

SEQ ID NO: 155863 - RNA, 19 nt, Artificial Sequence
  Synthetic
aagaagaggaagaacuuga

SEQ ID NO: 155864 - RNA, 18 nt, Artificial Sequence
  Synthetic
uaaaaaauaaagacuuga

SEQ ID NO: 155865 - RNA, 19 nt, Artificial Sequence
  Synthetic
uuaaaaaauaaagacuuga

SEQ ID NO: 155866 - RNA, 20 nt, Artificial Sequence
  Synthetic
cuuaaaaaauaaagacuuga

SEQ ID NO: 155867 - RNA, 18 nt, Artificial Sequence
  Synthetic
aaagaaaaugauacuuga

SEQ ID NO: 155868 - RNA, 19 nt, Artificial Sequence
  Synthetic
caaagaaaaugauacuuga

SEQ ID NO: 155869 - RNA, 20 nt, Artificial Sequence
  Synthetic
acaaagaaaaugauacuuga

SEQ ID NO: 155870 - RNA, 18 nt, Artificial Sequence
  Synthetic
caaagcacaaaugcuuga

SEQ ID NO: 155871 - RNA, 19 nt, Artificial Sequence
  Synthetic
acaaagcacaaaugcuuga

SEQ ID NO: 155872 - RNA, 20 nt, Artificial Sequence
  Synthetic
uacaaagcacaaaugcuuga

SEQ ID NO: 155873 - RNA, 21 nt, Artificial Sequence
  Synthetic
auacaaagcacaaaugcuuga

SEQ ID NO: 155874 - RNA, 22 nt, Artificial Sequence
  Synthetic
aauacaaagcacaaaugcuuga

SEQ ID NO: 155875 - RNA, 23 nt, Artificial Sequence
  Synthetic
uaauacaaagcacaaaugcuuga

SEQ ID NO: 155876 - RNA, 18 nt, Artificial Sequence
  Synthetic
caaaggauaaaugcuuga

SEQ ID NO: 155877 - RNA, 19 nt, Artificial Sequence
  Synthetic
acaaaggauaaaugcuuga

SEQ ID NO: 155878 - RNA, 20 nt, Artificial Sequence
  Synthetic
cacaaaggauaaaugcuuga

SEQ ID NO: 155879 - RNA, 22 nt, Artificial Sequence
  Synthetic
agcacaaaggauaaaugcuuga

SEQ ID NO: 155880 - RNA, 23 nt, Artificial Sequence
  Synthetic
uagcacaaaggauaaaugcuuga

SEQ ID NO: 155881 - RNA, 18 nt, Artificial Sequence
  Synthetic
caaagaauaauugcuuga

SEQ ID NO: 155882 - RNA, 19 nt, Artificial Sequence
  Synthetic
acaaagaauaauugcuuga

SEQ ID NO: 155883 - RNA, 20 nt, Artificial Sequence
  Synthetic
aacaaagaauaauugcuuga

SEQ ID NO: 155884 - RNA, 21 nt, Artificial Sequence
  Synthetic
aaacaaagaauaauugcuuga

SEQ ID NO: 155885 - RNA, 22 nt, Artificial Sequence
  Synthetic
aaaacaaagaauaauugcuuga

SEQ ID NO: 155886 - RNA, 23 nt, Artificial Sequence
  Synthetic
uaaaacaaagaauaauugcuuga

SEQ ID NO: 155887 - RNA, 18 nt, Artificial Sequence
  Synthetic
caacaaaccauuucuuga

SEQ ID NO: 155888 - RNA, 19 nt, Artificial Sequence
  Synthetic
acaacaaaccauuucuuga

SEQ ID NO: 155889 - RNA, 20 nt, Artificial Sequence
  Synthetic
aacaacaaaccauuucuuga

SEQ ID NO: 155890 - RNA, 21 nt, Artificial Sequence
  Synthetic
caacaacaaaccauuucuuga

SEQ ID NO: 155891 - RNA, 22 nt, Artificial Sequence
  Synthetic
acaacaacaaaccauuucuuga

SEQ ID NO: 155892 - RNA, 23 nt, Artificial Sequence
  Synthetic
aacaacaacaaaccauuucuuga

SEQ ID NO: 155893 - RNA, 24 nt, Artificial Sequence
  Synthetic
caacaacaacaaaccauuucuuga

SEQ ID NO: 155894 - RNA, 18 nt, Artificial Sequence
  Synthetic
caacgcuucacaaguuga

SEQ ID NO: 155895 - RNA, 19 nt, Artificial Sequence
  Synthetic
ccaacgcuucacaaguuga

SEQ ID NO: 155896 - RNA, 20 nt, Artificial Sequence
  Synthetic
accaacgcuucacaaguuga

SEQ ID NO: 155897 - RNA, 21 nt, Artificial Sequence
  Synthetic
aaccaacgcuucacaaguuga

SEQ ID NO: 155898 - RNA, 22 nt, Artificial Sequence
  Synthetic
caaccaacgcuucacaaguuga

SEQ ID NO: 155899 - RNA, 23 nt, Artificial Sequence
  Synthetic
acaaccaacgcuucacaaguuga

SEQ ID NO: 155900 - RNA, 24 nt, Artificial Sequence
  Synthetic
cacaaccaacgcuucacaaguuga

SEQ ID NO: 155901 - RNA, 18 nt, Artificial Sequence
  Synthetic
aaggcauagagugguuga

SEQ ID NO: 155902 - RNA, 19 nt, Artificial Sequence
  Synthetic
aaaggcauagagugguuga

SEQ ID NO: 155903 - RNA, 20 nt, Artificial Sequence
  Synthetic
aaaaggcauagagugguuga

SEQ ID NO: 155904 - RNA, 21 nt, Artificial Sequence
  Synthetic
caaaaggcauagagugguuga

SEQ ID NO: 155905 - RNA, 22 nt, Artificial Sequence
  Synthetic
ucaaaaggcauagagugguuga

SEQ ID NO: 155906 - RNA, 23 nt, Artificial Sequence
  Synthetic
aucaaaaggcauagagugguuga

SEQ ID NO: 155907 - RNA, 24 nt, Artificial Sequence
  Synthetic
aaucaaaaggcauagagugguuga

SEQ ID NO: 155908 - RNA, 18 nt, Artificial Sequence
  Synthetic
aaauagcugagaauuuga

SEQ ID NO: 155909 - RNA, 19 nt, Artificial Sequence
  Synthetic
aaaauagcugagaauuuga

SEQ ID NO: 155910 - RNA, 20 nt, Artificial Sequence
  Synthetic
aaaaauagcugagaauuuga

SEQ ID NO: 155911 - RNA, 18 nt, Artificial Sequence
  Synthetic
aacaaaaaaaagauuuga

SEQ ID NO: 155912 - RNA, 19 nt, Artificial Sequence
  Synthetic
aaacaaaaaaaagauuuga

SEQ ID NO: 155913 - RNA, 20 nt, Artificial Sequence
  Synthetic
caaacaaaaaaaagauuuga

SEQ ID NO: 155914 - RNA, 21 nt, Artificial Sequence
  Synthetic
acaaacaaaaaaaagauuuga

SEQ ID NO: 155915 - RNA, 22 nt, Artificial Sequence
  Synthetic
aacaaacaaaaaaaagauuuga

SEQ ID NO: 155916 - RNA, 23 nt, Artificial Sequence
  Synthetic
aaacaaacaaaaaaaagauuuga

SEQ ID NO: 155917 - RNA, 24 nt, Artificial Sequence
  Synthetic
caaacaaacaaaaaaaagauuuga

SEQ ID NO: 155918 - RNA, 21 nt, Artificial Sequence
  Synthetic
aagaugguaauuaagauuuga

SEQ ID NO: 155919 - RNA, 22 nt, Artificial Sequence
  Synthetic
aaagaugguaauuaagauuuga

SEQ ID NO: 155920 - RNA, 23 nt, Artificial Sequence
  Synthetic
aaaagaugguaauuaagauuuga

SEQ ID NO: 155921 - RNA, 18 nt, Artificial Sequence
  Synthetic
uguucacaaaggauuuga

SEQ ID NO: 155922 - RNA, 19 nt, Artificial Sequence
  Synthetic
cuguucacaaaggauuuga

SEQ ID NO: 155923 - RNA, 20 nt, Artificial Sequence
  Synthetic
acuguucacaaaggauuuga

SEQ ID NO: 155924 - RNA, 18 nt, Artificial Sequence
  Synthetic
uucuuuuugaauauuuga

SEQ ID NO: 155925 - RNA, 19 nt, Artificial Sequence
  Synthetic
uuucuuuuugaauauuuga

SEQ ID NO: 155926 - RNA, 20 nt, Artificial Sequence
  Synthetic
uuuucuuuuugaauauuuga

SEQ ID NO: 155927 - RNA, 21 nt, Artificial Sequence
  Synthetic
auuuucuuuuugaauauuuga

SEQ ID NO: 155928 - RNA, 22 nt, Artificial Sequence
  Synthetic
uauuuucuuuuugaauauuuga

SEQ ID NO: 155929 - RNA, 23 nt, Artificial Sequence
  Synthetic
auauuuucuuuuugaauauuuga

SEQ ID NO: 155930 - RNA, 24 nt, Artificial Sequence
  Synthetic
aauauuuucuuuuugaauauuuga

SEQ ID NO: 155931 - RNA, 18 nt, Artificial Sequence
  Synthetic
cugaauuguacacuuuga

SEQ ID NO: 155932 - RNA, 19 nt, Artificial Sequence
  Synthetic
acugaauuguacacuuuga

SEQ ID NO: 155933 - RNA, 20 nt, Artificial Sequence
  Synthetic
cacugaauuguacacuuuga

SEQ ID NO: 155934 - RNA, 21 nt, Artificial Sequence
  Synthetic
ccacugaauuguacacuuuga

SEQ ID NO: 155935 - RNA, 22 nt, Artificial Sequence
  Synthetic
accacugaauuguacacuuuga

SEQ ID NO: 155936 - RNA, 23 nt, Artificial Sequence
  Synthetic
caccacugaauuguacacuuuga

SEQ ID NO: 155937 - RNA, 24 nt, Artificial Sequence
  Synthetic
acaccacugaauuguacacuuuga

SEQ ID NO: 155938 - RNA, 21 nt, Artificial Sequence
  Synthetic
ccagcucccuugccccuuuga

SEQ ID NO: 155939 - RNA, 22 nt, Artificial Sequence
  Synthetic
cccagcucccuugccccuuuga

SEQ ID NO: 155940 - RNA, 23 nt, Artificial Sequence
  Synthetic
ccccagcucccuugccccuuuga

SEQ ID NO: 155941 - RNA, 24 nt, Artificial Sequence
  Synthetic
accccagcucccuugccccuuuga

SEQ ID NO: 155942 - RNA, 18 nt, Artificial Sequence
  Synthetic
uacaaaaauauaguuuga

SEQ ID NO: 155943 - RNA, 19 nt, Artificial Sequence
  Synthetic
auacaaaaauauaguuuga

SEQ ID NO: 155944 - RNA, 20 nt, Artificial Sequence
  Synthetic
aauacaaaaauauaguuuga

SEQ ID NO: 155945 - RNA, 20 nt, Artificial Sequence
  Synthetic
ugggacaaaagucauuuuga

SEQ ID NO: 155946 - RNA, 19 nt, Artificial Sequence
  Synthetic
uguaguugugugguuuuga

SEQ ID NO: 155947 - RNA, 20 nt, Artificial Sequence
  Synthetic
auguaguugugugguuuuga

SEQ ID NO: 155948 - RNA, 21 nt, Artificial Sequence
  Synthetic
cauguaguugugugguuuuga

SEQ ID NO: 155949 - RNA, 22 nt, Artificial Sequence
  Synthetic
ccauguaguugugugguuuuga

SEQ ID NO: 155950 - RNA, 23 nt, Artificial Sequence
  Synthetic
uccauguaguugugugguuuuga

SEQ ID NO: 155951 - RNA, 24 nt, Artificial Sequence
  Synthetic
uuccauguaguugugugguuuuga

SEQ ID NO: 155952 - RNA, 18 nt, Artificial Sequence
  Synthetic
cucaauaaauauuuuuga

SEQ ID NO: 155953 - RNA, 20 nt, Artificial Sequence
  Synthetic
ugcucaauaaauauuuuuga

SEQ ID NO: 155954 - RNA, 21 nt, Artificial Sequence
  Synthetic
augcucaauaaauauuuuuga

SEQ ID NO: 155955 - RNA, 23 nt, Artificial Sequence
  Synthetic
agaugcucaauaaauauuuuuga

SEQ ID NO: 155956 - RNA, 24 nt, Artificial Sequence
  Synthetic
uagaugcucaauaaauauuuuuga

SEQ ID NO: 155957 - RNA, 21 nt, Artificial Sequence
  Synthetic
uguccuucacccacuuuuuga

SEQ ID NO: 155958 - RNA, 22 nt, Artificial Sequence
  Synthetic
auguccuucacccacuuuuuga

SEQ ID NO: 155959 - RNA, 23 nt, Artificial Sequence
  Synthetic
cauguccuucacccacuuuuuga

SEQ ID NO: 155960 - RNA, 24 nt, Artificial Sequence
  Synthetic
ucauguccuucacccacuuuuuga

SEQ ID NO: 155961 - RNA, 18 nt, Artificial Sequence
  Synthetic
ccuucccccacuuuuuga

SEQ ID NO: 155962 - RNA, 19 nt, Artificial Sequence
  Synthetic
uccuucccccacuuuuuga

SEQ ID NO: 155963 - RNA, 20 nt, Artificial Sequence
  Synthetic
auccuucccccacuuuuuga

SEQ ID NO: 155964 - RNA, 21 nt, Artificial Sequence
  Synthetic
uauccuucccccacuuuuuga

SEQ ID NO: 155965 - RNA, 22 nt, Artificial Sequence
  Synthetic
auauccuucccccacuuuuuga

SEQ ID NO: 155966 - RNA, 23 nt, Artificial Sequence
  Synthetic
uauauccuucccccacuuuuuga

SEQ ID NO: 155967 - RNA, 24 nt, Artificial Sequence
  Synthetic
uuauauccuucccccacuuuuuga

SEQ ID NO: 155968 - RNA, 21 nt, Artificial Sequence
  Synthetic
uguccuucgcccacuuuuuga

SEQ ID NO: 155969 - RNA, 22 nt, Artificial Sequence
  Synthetic
auguccuucgcccacuuuuuga

SEQ ID NO: 155970 - RNA, 23 nt, Artificial Sequence
  Synthetic
cauguccuucgcccacuuuuuga

SEQ ID NO: 155971 - RNA, 24 nt, Artificial Sequence
  Synthetic
ucauguccuucgcccacuuuuuga

SEQ ID NO: 155972 - RNA, 18 nt, Artificial Sequence
  Synthetic
ccuucgcucacuuuuuga

SEQ ID NO: 155973 - RNA, 19 nt, Artificial Sequence
  Synthetic
uccuucgcucacuuuuuga

SEQ ID NO: 155974 - RNA, 21 nt, Artificial Sequence
  Synthetic
uguccuucgcucacuuuuuga

SEQ ID NO: 155975 - RNA, 22 nt, Artificial Sequence
  Synthetic
auguccuucgcucacuuuuuga

SEQ ID NO: 155976 - RNA, 23 nt, Artificial Sequence
  Synthetic
cauguccuucgcucacuuuuuga

SEQ ID NO: 155977 - RNA, 24 nt, Artificial Sequence
  Synthetic
ucauguccuucgcucacuuuuuga

SEQ ID NO: 155978 - RNA, 18 nt, Artificial Sequence
  Synthetic
uucaaagaguguuuuuga

SEQ ID NO: 155979 - RNA, 19 nt, Artificial Sequence
  Synthetic
uuucaaagaguguuuuuga

SEQ ID NO: 155980 - RNA, 20 nt, Artificial Sequence
  Synthetic
uuuucaaagaguguuuuuga

SEQ ID NO: 155981 - RNA, 18 nt, Artificial Sequence
  Synthetic
caggagcugguuuuuuga

SEQ ID NO: 155982 - RNA, 19 nt, Artificial Sequence
  Synthetic
ccaggagcugguuuuuuga

SEQ ID NO: 155983 - RNA, 20 nt, Artificial Sequence
  Synthetic
uccaggagcugguuuuuuga

SEQ ID NO: 155984 - RNA, 21 nt, Artificial Sequence
  Synthetic
auccaggagcugguuuuuuga

SEQ ID NO: 155985 - RNA, 22 nt, Artificial Sequence
  Synthetic
aauccaggagcugguuuuuuga

SEQ ID NO: 155986 - RNA, 24 nt, Artificial Sequence
  Synthetic
ugaauccaggagcugguuuuuuga

SEQ ID NO: 155987 - RNA, 18 nt, Artificial Sequence
  Synthetic
uuucuuauuuuuuuuuga

SEQ ID NO: 155988 - RNA, 19 nt, Artificial Sequence
  Synthetic
auuucuuauuuuuuuuuga

SEQ ID NO: 155989 - RNA, 20 nt, Artificial Sequence
  Synthetic
uauuucuuauuuuuuuuuga

SEQ ID NO: 155990 - RNA, 21 nt, Artificial Sequence
  Synthetic
uuauuucuuauuuuuuuuuga

SEQ ID NO: 155991 - RNA, 22 nt, Artificial Sequence
  Synthetic
uuuauuucuuauuuuuuuuuga

SEQ ID NO: 155992 - RNA, 23 nt, Artificial Sequence
  Synthetic
auuuauuucuuauuuuuuuuuga

SEQ ID NO: 155993 - RNA, 24 nt, Artificial Sequence
  Synthetic
aauuuauuucuuauuuuuuuuuga

SEQ ID NO: 155994 - RNA, 19 nt, Artificial Sequence
  Synthetic
ugagguuguuuuuuuuuga

SEQ ID NO: 155995 - RNA, 20 nt, Artificial Sequence
  Synthetic
augagguuguuuuuuuuuga

SEQ ID NO: 155996 - RNA, 18 nt, Artificial Sequence
  Synthetic
uuucuuuuuuuuuuuuga

SEQ ID NO: 155997 - RNA, 19 nt, Artificial Sequence
  Synthetic
cuuucuuuuuuuuuuuuga

SEQ ID NO: 155998 - RNA, 20 nt, Artificial Sequence
  Synthetic
ucuuucuuuuuuuuuuuuga

SEQ ID NO: 155999 - RNA, 21 nt, Artificial Sequence
  Synthetic
uucuuucuuuuuuuuuuuuga

SEQ ID NO: 156000 - RNA, 22 nt, Artificial Sequence
  Synthetic
uuucuuucuuuuuuuuuuuuga

SEQ ID NO: 156001 - RNA, 23 nt, Artificial Sequence
  Synthetic
uuuucuuucuuuuuuuuuuuuga

SEQ ID NO: 156002 - RNA, 24 nt, Artificial Sequence
  Synthetic
uuuuucuuucuuuuuuuuuuuuga

SEQ ID NO: 156003 - RNA, 19 nt, Artificial Sequence
  Synthetic
agcaacauuuuaaaaaaua

SEQ ID NO: 156004 - RNA, 20 nt, Artificial Sequence
  Synthetic
aagcaacauuuuaaaaaaua

SEQ ID NO: 156005 - RNA, 22 nt, Artificial Sequence
  Synthetic
agaagcaacauuuuaaaaaaua

SEQ ID NO: 156006 - RNA, 23 nt, Artificial Sequence
  Synthetic
cagaagcaacauuuuaaaaaaua

SEQ ID NO: 156007 - RNA, 19 nt, Artificial Sequence
  Synthetic
agcauaagaaagaaaaaua

SEQ ID NO: 156008 - RNA, 20 nt, Artificial Sequence
  Synthetic
aagcauaagaaagaaaaaua

SEQ ID NO: 156009 - RNA, 21 nt, Artificial Sequence
  Synthetic
aaagcauaagaaagaaaaaua

SEQ ID NO: 156010 - RNA, 22 nt, Artificial Sequence
  Synthetic
uaaagcauaagaaagaaaaaua

SEQ ID NO: 156011 - RNA, 23 nt, Artificial Sequence
  Synthetic
auaaagcauaagaaagaaaaaua

SEQ ID NO: 156012 - RNA, 18 nt, Artificial Sequence
  Synthetic
aaauccaaaaccaaaaua

SEQ ID NO: 156013 - RNA, 19 nt, Artificial Sequence
  Synthetic
uaaauccaaaaccaaaaua

SEQ ID NO: 156014 - RNA, 20 nt, Artificial Sequence
  Synthetic
auaaauccaaaaccaaaaua

SEQ ID NO: 156015 - RNA, 19 nt, Artificial Sequence
  Synthetic
uguuuucucuuugaaaaua

SEQ ID NO: 156016 - RNA, 20 nt, Artificial Sequence
  Synthetic
uuguuuucucuuugaaaaua

SEQ ID NO: 156017 - RNA, 18 nt, Artificial Sequence
  Synthetic
aaaaaauaaaauaaaaua

SEQ ID NO: 156018 - RNA, 19 nt, Artificial Sequence
  Synthetic
aaaaaaauaaaauaaaaua

SEQ ID NO: 156019 - RNA, 20 nt, Artificial Sequence
  Synthetic
caaaaaaauaaaauaaaaua

SEQ ID NO: 156020 - RNA, 21 nt, Artificial Sequence
  Synthetic
ucaaaaaaauaaaauaaaaua

SEQ ID NO: 156021 - RNA, 22 nt, Artificial Sequence
  Synthetic
cucaaaaaaauaaaauaaaaua

SEQ ID NO: 156022 - RNA, 23 nt, Artificial Sequence
  Synthetic
ucucaaaaaaauaaaauaaaaua

SEQ ID NO: 156023 - RNA, 24 nt, Artificial Sequence
  Synthetic
aucucaaaaaaauaaaauaaaaua

SEQ ID NO: 156024 - RNA, 19 nt, Artificial Sequence
  Synthetic
aggguugccuuauaaaaua

SEQ ID NO: 156025 - RNA, 20 nt, Artificial Sequence
  Synthetic
uaggguugccuuauaaaaua

SEQ ID NO: 156026 - RNA, 18 nt, Artificial Sequence
  Synthetic
aaagaaaacauccaaaua

SEQ ID NO: 156027 - RNA, 19 nt, Artificial Sequence
  Synthetic
uaaagaaaacauccaaaua

SEQ ID NO: 156028 - RNA, 20 nt, Artificial Sequence
  Synthetic
auaaagaaaacauccaaaua

SEQ ID NO: 156029 - RNA, 18 nt, Artificial Sequence
  Synthetic
aggcaggaaaaagaaaua

SEQ ID NO: 156030 - RNA, 19 nt, Artificial Sequence
  Synthetic
caggcaggaaaaagaaaua

SEQ ID NO: 156031 - RNA, 20 nt, Artificial Sequence
  Synthetic
ucaggcaggaaaaagaaaua

SEQ ID NO: 156032 - RNA, 21 nt, Artificial Sequence
  Synthetic
aucaggcaggaaaaagaaaua

SEQ ID NO: 156033 - RNA, 23 nt, Artificial Sequence
  Synthetic
cgaucaggcaggaaaaagaaaua

SEQ ID NO: 156034 - RNA, 18 nt, Artificial Sequence
  Synthetic
uuauaucacauagaaaua

SEQ ID NO: 156035 - RNA, 19 nt, Artificial Sequence
  Synthetic
uuuauaucacauagaaaua

SEQ ID NO: 156036 - RNA, 20 nt, Artificial Sequence
  Synthetic
cuuuauaucacauagaaaua

SEQ ID NO: 156037 - RNA, 18 nt, Artificial Sequence
  Synthetic
uugagaggauuagaaaua

SEQ ID NO: 156038 - RNA, 19 nt, Artificial Sequence
  Synthetic
uuugagaggauuagaaaua

SEQ ID NO: 156039 - RNA, 20 nt, Artificial Sequence
  Synthetic
uuuugagaggauuagaaaua

SEQ ID NO: 156040 - RNA, 21 nt, Artificial Sequence
  Synthetic
aucaggcaggagaaggaaaua

SEQ ID NO: 156041 - RNA, 22 nt, Artificial Sequence
  Synthetic
aaucaggcaggagaaggaaaua

SEQ ID NO: 156042 - RNA, 23 nt, Artificial Sequence
  Synthetic
caaucaggcaggagaaggaaaua

SEQ ID NO: 156043 - RNA, 20 nt, Artificial Sequence
  Synthetic
uggugccaucuucugaaaua

SEQ ID NO: 156044 - RNA, 23 nt, Artificial Sequence
  Synthetic
ugguggugccaucuucugaaaua

SEQ ID NO: 156045 - RNA, 24 nt, Artificial Sequence
  Synthetic
augguggugccaucuucugaaaua

SEQ ID NO: 156046 - RNA, 19 nt, Artificial Sequence
  Synthetic
ugaaauaaccauauaaaua

SEQ ID NO: 156047 - RNA, 20 nt, Artificial Sequence
  Synthetic
augaaauaaccauauaaaua

SEQ ID NO: 156048 - RNA, 18 nt, Artificial Sequence
  Synthetic
uacucaaaagauuaaaua

SEQ ID NO: 156049 - RNA, 19 nt, Artificial Sequence
  Synthetic
auacucaaaagauuaaaua

SEQ ID NO: 156050 - RNA, 20 nt, Artificial Sequence
  Synthetic
uauacucaaaagauuaaaua

SEQ ID NO: 156051 - RNA, 23 nt, Artificial Sequence
  Synthetic
cucccagcaccauuuauuaaaua

SEQ ID NO: 156052 - RNA, 24 nt, Artificial Sequence
  Synthetic
ucucccagcaccauuuauuaaaua

SEQ ID NO: 156053 - RNA, 24 nt, Artificial Sequence
  Synthetic
cuucccagcaccauuuauuaaaua

SEQ ID NO: 156054 - RNA, 18 nt, Artificial Sequence
  Synthetic
cuuuuguggaaaacaaua

SEQ ID NO: 156055 - RNA, 20 nt, Artificial Sequence
  Synthetic
agcuuuuguggaaaacaaua

SEQ ID NO: 156056 - RNA, 21 nt, Artificial Sequence
  Synthetic
cagcuuuuguggaaaacaaua

SEQ ID NO: 156057 - RNA, 23 nt, Artificial Sequence
  Synthetic
ugcagcuuuuguggaaaacaaua

SEQ ID NO: 156058 - RNA, 18 nt, Artificial Sequence
  Synthetic
uccuuggaaaccacaaua

SEQ ID NO: 156059 - RNA, 19 nt, Artificial Sequence
  Synthetic
uuccuuggaaaccacaaua

SEQ ID NO: 156060 - RNA, 20 nt, Artificial Sequence
  Synthetic
uuuccuuggaaaccacaaua

SEQ ID NO: 156061 - RNA, 21 nt, Artificial Sequence
  Synthetic
uuuuccuuggaaaccacaaua

SEQ ID NO: 156062 - RNA, 22 nt, Artificial Sequence
  Synthetic
cuuuuccuuggaaaccacaaua

SEQ ID NO: 156063 - RNA, 23 nt, Artificial Sequence
  Synthetic
ucuuuuccuuggaaaccacaaua

SEQ ID NO: 156064 - RNA, 24 nt, Artificial Sequence
  Synthetic
uucuuuuccuuggaaaccacaaua

SEQ ID NO: 156065 - RNA, 18 nt, Artificial Sequence
  Synthetic
ugaacuuccaguacaaua

SEQ ID NO: 156066 - RNA, 19 nt, Artificial Sequence
  Synthetic
cugaacuuccaguacaaua

SEQ ID NO: 156067 - RNA, 20 nt, Artificial Sequence
  Synthetic
ccugaacuuccaguacaaua

SEQ ID NO: 156068 - RNA, 23 nt, Artificial Sequence
  Synthetic
uggccugaacuuccaguacaaua

SEQ ID NO: 156069 - RNA, 24 nt, Artificial Sequence
  Synthetic
cuggccugaacuuccaguacaaua

SEQ ID NO: 156070 - RNA, 18 nt, Artificial Sequence
  Synthetic
acaugcaaucuaccaaua

SEQ ID NO: 156071 - RNA, 19 nt, Artificial Sequence
  Synthetic
aacaugcaaucuaccaaua

SEQ ID NO: 156072 - RNA, 20 nt, Artificial Sequence
  Synthetic
aaacaugcaaucuaccaaua

SEQ ID NO: 156073 - RNA, 22 nt, Artificial Sequence
  Synthetic
ugaaacaugcaaucuaccaaua

SEQ ID NO: 156074 - RNA, 23 nt, Artificial Sequence
  Synthetic
uugaaacaugcaaucuaccaaua

SEQ ID NO: 156075 - RNA, 24 nt, Artificial Sequence
  Synthetic
cuugaaacaugcaaucuaccaaua

SEQ ID NO: 156076 - RNA, 18 nt, Artificial Sequence
  Synthetic
ugaagauaaaauucaaua

SEQ ID NO: 156077 - RNA, 20 nt, Artificial Sequence
  Synthetic
ugugaagauaaaauucaaua

SEQ ID NO: 156078 - RNA, 19 nt, Artificial Sequence
  Synthetic
aggcugauacagaagaaua

SEQ ID NO: 156079 - RNA, 18 nt, Artificial Sequence
  Synthetic
aaauaaaacaauagaaua

SEQ ID NO: 156080 - RNA, 19 nt, Artificial Sequence
  Synthetic
caaauaaaacaauagaaua

SEQ ID NO: 156081 - RNA, 20 nt, Artificial Sequence
  Synthetic
ccaaauaaaacaauagaaua

SEQ ID NO: 156082 - RNA, 21 nt, Artificial Sequence
  Synthetic
uccaaauaaaacaauagaaua

SEQ ID NO: 156083 - RNA, 22 nt, Artificial Sequence
  Synthetic
auccaaauaaaacaauagaaua

SEQ ID NO: 156084 - RNA, 23 nt, Artificial Sequence
  Synthetic
aauccaaauaaaacaauagaaua

SEQ ID NO: 156085 - RNA, 24 nt, Artificial Sequence
  Synthetic
aaauccaaauaaaacaauagaaua

SEQ ID NO: 156086 - RNA, 19 nt, Artificial Sequence
  Synthetic
agaauguauaacuagaaua

SEQ ID NO: 156087 - RNA, 20 nt, Artificial Sequence
  Synthetic
aagaauguauaacuagaaua

SEQ ID NO: 156088 - RNA, 22 nt, Artificial Sequence
  Synthetic
agaagaauguauaacuagaaua

SEQ ID NO: 156089 - RNA, 23 nt, Artificial Sequence
  Synthetic
uagaagaauguauaacuagaaua

SEQ ID NO: 156090 - RNA, 24 nt, Artificial Sequence
  Synthetic
uuagaagaauguauaacuagaaua

SEQ ID NO: 156091 - RNA, 18 nt, Artificial Sequence
  Synthetic
aucuuuguugaaugaaua

SEQ ID NO: 156092 - RNA, 19 nt, Artificial Sequence
  Synthetic
aaucuuuguugaaugaaua

SEQ ID NO: 156093 - RNA, 20 nt, Artificial Sequence
  Synthetic
uaaucuuuguugaaugaaua

SEQ ID NO: 156094 - RNA, 18 nt, Artificial Sequence
  Synthetic
agcaccauuuacugaaua

SEQ ID NO: 156095 - RNA, 19 nt, Artificial Sequence
  Synthetic
cagcaccauuuacugaaua

SEQ ID NO: 156096 - RNA, 20 nt, Artificial Sequence
  Synthetic
ccagcaccauuuacugaaua

SEQ ID NO: 156097 - RNA, 21 nt, Artificial Sequence
  Synthetic
cccagcaccauuuacugaaua

SEQ ID NO: 156098 - RNA, 22 nt, Artificial Sequence
  Synthetic
acccagcaccauuuacugaaua

SEQ ID NO: 156099 - RNA, 23 nt, Artificial Sequence
  Synthetic
uacccagcaccauuuacugaaua

SEQ ID NO: 156100 - RNA, 24 nt, Artificial Sequence
  Synthetic
uuacccagcaccauuuacugaaua

SEQ ID NO: 156101 - RNA, 18 nt, Artificial Sequence
  Synthetic
agauuaaaaauaauaaua

SEQ ID NO: 156102 - RNA, 19 nt, Artificial Sequence
  Synthetic
aagauuaaaaauaauaaua

SEQ ID NO: 156103 - RNA, 20 nt, Artificial Sequence
  Synthetic
aaagauuaaaaauaauaaua

SEQ ID NO: 156104 - RNA, 21 nt, Artificial Sequence
  Synthetic
uaaagauuaaaaauaauaaua

SEQ ID NO: 156105 - RNA, 22 nt, Artificial Sequence
  Synthetic
auaaagauuaaaaauaauaaua

SEQ ID NO: 156106 - RNA, 23 nt, Artificial Sequence
  Synthetic
uauaaagauuaaaaauaauaaua

SEQ ID NO: 156107 - RNA, 24 nt, Artificial Sequence
  Synthetic
uuauaaagauuaaaaauaauaaua

SEQ ID NO: 156108 - RNA, 18 nt, Artificial Sequence
  Synthetic
auaauacaaauaauaaua

SEQ ID NO: 156109 - RNA, 19 nt, Artificial Sequence
  Synthetic
aauaauacaaauaauaaua

SEQ ID NO: 156110 - RNA, 20 nt, Artificial Sequence
  Synthetic
aaauaauacaaauaauaaua

SEQ ID NO: 156111 - RNA, 21 nt, Artificial Sequence
  Synthetic
aaucaacuuaaguguuuaaua

SEQ ID NO: 156112 - RNA, 23 nt, Artificial Sequence
  Synthetic
agaaucaacuuaaguguuuaaua

SEQ ID NO: 156113 - RNA, 24 nt, Artificial Sequence
  Synthetic
uagaaucaacuuaaguguuuaaua

SEQ ID NO: 156114 - RNA, 18 nt, Artificial Sequence
  Synthetic
acuuugcauauuuuaaua

SEQ ID NO: 156115 - RNA, 19 nt, Artificial Sequence
  Synthetic
cacuuugcauauuuuaaua

SEQ ID NO: 156116 - RNA, 20 nt, Artificial Sequence
  Synthetic
acacuuugcauauuuuaaua

SEQ ID NO: 156117 - RNA, 18 nt, Artificial Sequence
  Synthetic
uuuuuuuuuuuuuuaaua

SEQ ID NO: 156118 - RNA, 19 nt, Artificial Sequence
  Synthetic
uuuuuuuuuuuuuuuaaua

SEQ ID NO: 156119 - RNA, 20 nt, Artificial Sequence
  Synthetic
uuuuuuuuuuuuuuuuaaua

SEQ ID NO: 156120 - RNA, 21 nt, Artificial Sequence
  Synthetic
uuuuuuuuuuuuuuuuuaaua

SEQ ID NO: 156121 - RNA, 22 nt, Artificial Sequence
  Synthetic
uuuuuuuuuuuuuuuuuuaaua

SEQ ID NO: 156122 - RNA, 23 nt, Artificial Sequence
  Synthetic
cuuuuuuuuuuuuuuuuuuaaua

SEQ ID NO: 156123 - RNA, 24 nt, Artificial Sequence
  Synthetic
ucuuuuuuuuuuuuuuuuuuaaua

SEQ ID NO: 156124 - RNA, 18 nt, Artificial Sequence
  Synthetic
uggauuguuuggaacaua

SEQ ID NO: 156125 - RNA, 19 nt, Artificial Sequence
  Synthetic
uuggauuguuuggaacaua

SEQ ID NO: 156126 - RNA, 20 nt, Artificial Sequence
  Synthetic
auuggauuguuuggaacaua

SEQ ID NO: 156127 - RNA, 21 nt, Artificial Sequence
  Synthetic
aauuggauuguuuggaacaua

SEQ ID NO: 156128 - RNA, 22 nt, Artificial Sequence
  Synthetic
uaauuggauuguuuggaacaua

SEQ ID NO: 156129 - RNA, 23 nt, Artificial Sequence
  Synthetic
auaauuggauuguuuggaacaua

SEQ ID NO: 156130 - RNA, 24 nt, Artificial Sequence
  Synthetic
uauaauuggauuguuuggaacaua

SEQ ID NO: 156131 - RNA, 18 nt, Artificial Sequence
  Synthetic
aaacugaauguucacaua

SEQ ID NO: 156132 - RNA, 19 nt, Artificial Sequence
  Synthetic
aaaacugaauguucacaua

SEQ ID NO: 156133 - RNA, 23 nt, Artificial Sequence
  Synthetic
ugggaaaacugaauguucacaua

SEQ ID NO: 156134 - RNA, 24 nt, Artificial Sequence
  Synthetic
uugggaaaacugaauguucacaua

SEQ ID NO: 156135 - RNA, 18 nt, Artificial Sequence
  Synthetic
ugaggauacaaagacaua

SEQ ID NO: 156136 - RNA, 19 nt, Artificial Sequence
  Synthetic
augaggauacaaagacaua

SEQ ID NO: 156137 - RNA, 20 nt, Artificial Sequence
  Synthetic
uaugaggauacaaagacaua

SEQ ID NO: 156138 - RNA, 21 nt, Artificial Sequence
  Synthetic
cuaugaggauacaaagacaua

SEQ ID NO: 156139 - RNA, 23 nt, Artificial Sequence
  Synthetic
agcuaugaggauacaaagacaua

SEQ ID NO: 156140 - RNA, 24 nt, Artificial Sequence
  Synthetic
aagcuaugaggauacaaagacaua

SEQ ID NO: 156141 - RNA, 18 nt, Artificial Sequence
  Synthetic
auggaacucauggacaua

SEQ ID NO: 156142 - RNA, 19 nt, Artificial Sequence
  Synthetic
aauggaacucauggacaua

SEQ ID NO: 156143 - RNA, 20 nt, Artificial Sequence
  Synthetic
caauggaacucauggacaua

SEQ ID NO: 156144 - RNA, 21 nt, Artificial Sequence
  Synthetic
acaauggaacucauggacaua

SEQ ID NO: 156145 - RNA, 22 nt, Artificial Sequence
  Synthetic
aacaauggaacucauggacaua

SEQ ID NO: 156146 - RNA, 23 nt, Artificial Sequence
  Synthetic
aaacaauggaacucauggacaua

SEQ ID NO: 156147 - RNA, 24 nt, Artificial Sequence
  Synthetic
aaaacaauggaacucauggacaua

SEQ ID NO: 156148 - RNA, 18 nt, Artificial Sequence
  Synthetic
auugaacucauggacaua

SEQ ID NO: 156149 - RNA, 19 nt, Artificial Sequence
  Synthetic
aauugaacucauggacaua

SEQ ID NO: 156150 - RNA, 20 nt, Artificial Sequence
  Synthetic
caauugaacucauggacaua

SEQ ID NO: 156151 - RNA, 21 nt, Artificial Sequence
  Synthetic
acaauugaacucauggacaua

SEQ ID NO: 156152 - RNA, 22 nt, Artificial Sequence
  Synthetic
aacaauugaacucauggacaua

SEQ ID NO: 156153 - RNA, 23 nt, Artificial Sequence
  Synthetic
aaacaauugaacucauggacaua

SEQ ID NO: 156154 - RNA, 24 nt, Artificial Sequence
  Synthetic
aaaacaauugaacucauggacaua

SEQ ID NO: 156155 - RNA, 21 nt, Artificial Sequence
  Synthetic
aaacccacagccaauaucaua

SEQ ID NO: 156156 - RNA, 22 nt, Artificial Sequence
  Synthetic
caaacccacagccaauaucaua

SEQ ID NO: 156157 - RNA, 23 nt, Artificial Sequence
  Synthetic
acaaacccacagccaauaucaua

SEQ ID NO: 156158 - RNA, 18 nt, Artificial Sequence
  Synthetic
uaaaauaauaauaucaua

SEQ ID NO: 156159 - RNA, 20 nt, Artificial Sequence
  Synthetic
aguaaaauaauaauaucaua

SEQ ID NO: 156160 - RNA, 18 nt, Artificial Sequence
  Synthetic
cccacagccaguaucaua

SEQ ID NO: 156161 - RNA, 19 nt, Artificial Sequence
  Synthetic
acccacagccaguaucaua

SEQ ID NO: 156162 - RNA, 20 nt, Artificial Sequence
  Synthetic
aacccacagccaguaucaua

SEQ ID NO: 156163 - RNA, 21 nt, Artificial Sequence
  Synthetic
aaacccacagccaguaucaua

SEQ ID NO: 156164 - RNA, 22 nt, Artificial Sequence
  Synthetic
caaacccacagccaguaucaua

SEQ ID NO: 156165 - RNA, 23 nt, Artificial Sequence
  Synthetic
acaaacccacagccaguaucaua

SEQ ID NO: 156166 - RNA, 18 nt, Artificial Sequence
  Synthetic
ugggaauucagucucaua

SEQ ID NO: 156167 - RNA, 19 nt, Artificial Sequence
  Synthetic
augggaauucagucucaua

SEQ ID NO: 156168 - RNA, 20 nt, Artificial Sequence
  Synthetic
aaugggaauucagucucaua

SEQ ID NO: 156169 - RNA, 18 nt, Artificial Sequence
  Synthetic
ugaugugacuauuucaua

SEQ ID NO: 156170 - RNA, 19 nt, Artificial Sequence
  Synthetic
augaugugacuauuucaua

SEQ ID NO: 156171 - RNA, 20 nt, Artificial Sequence
  Synthetic
caugaugugacuauuucaua

SEQ ID NO: 156172 - RNA, 21 nt, Artificial Sequence
  Synthetic
ccaugaugugacuauuucaua

SEQ ID NO: 156173 - RNA, 22 nt, Artificial Sequence
  Synthetic
uccaugaugugacuauuucaua

SEQ ID NO: 156174 - RNA, 23 nt, Artificial Sequence
  Synthetic
cuccaugaugugacuauuucaua

SEQ ID NO: 156175 - RNA, 24 nt, Artificial Sequence
  Synthetic
ucuccaugaugugacuauuucaua

SEQ ID NO: 156176 - RNA, 18 nt, Artificial Sequence
  Synthetic
uucacaauagccaagaua

SEQ ID NO: 156177 - RNA, 19 nt, Artificial Sequence
  Synthetic
auucacaauagccaagaua

SEQ ID NO: 156178 - RNA, 20 nt, Artificial Sequence
  Synthetic
uauucacaauagccaagaua

SEQ ID NO: 156179 - RNA, 21 nt, Artificial Sequence
  Synthetic
uuauucacaauagccaagaua

SEQ ID NO: 156180 - RNA, 22 nt, Artificial Sequence
  Synthetic
auuauucacaauagccaagaua

SEQ ID NO: 156181 - RNA, 23 nt, Artificial Sequence
  Synthetic
cauuauucacaauagccaagaua

SEQ ID NO: 156182 - RNA, 18 nt, Artificial Sequence
  Synthetic
uuugcaauagccaagaua

SEQ ID NO: 156183 - RNA, 19 nt, Artificial Sequence
  Synthetic
auuugcaauagccaagaua

SEQ ID NO: 156184 - RNA, 20 nt, Artificial Sequence
  Synthetic
uauuugcaauagccaagaua

SEQ ID NO: 156185 - RNA, 21 nt, Artificial Sequence
  Synthetic
cuauuugcaauagccaagaua

SEQ ID NO: 156186 - RNA, 22 nt, Artificial Sequence
  Synthetic
acuauuugcaauagccaagaua

SEQ ID NO: 156187 - RNA, 23 nt, Artificial Sequence
  Synthetic
cacuauuugcaauagccaagaua

SEQ ID NO: 156188 - RNA, 18 nt, Artificial Sequence
  Synthetic
uagcuggggaggaagaua

SEQ ID NO: 156189 - RNA, 20 nt, Artificial Sequence
  Synthetic
aguagcuggggaggaagaua

SEQ ID NO: 156190 - RNA, 21 nt, Artificial Sequence
  Synthetic
uaguagcuggggaggaagaua

SEQ ID NO: 156191 - RNA, 22 nt, Artificial Sequence
  Synthetic
uuaguagcuggggaggaagaua

SEQ ID NO: 156192 - RNA, 23 nt, Artificial Sequence
  Synthetic
uuuaguagcuggggaggaagaua

SEQ ID NO: 156193 - RNA, 24 nt, Artificial Sequence
  Synthetic
auuuaguagcuggggaggaagaua

SEQ ID NO: 156194 - RNA, 18 nt, Artificial Sequence
  Synthetic
uuucuuuaaaauaagaua

SEQ ID NO: 156195 - RNA, 19 nt, Artificial Sequence
  Synthetic
uuuucuuuaaaauaagaua

SEQ ID NO: 156196 - RNA, 20 nt, Artificial Sequence
  Synthetic
auuuucuuuaaaauaagaua

SEQ ID NO: 156197 - RNA, 18 nt, Artificial Sequence
  Synthetic
acugaacacuuggagaua

SEQ ID NO: 156198 - RNA, 19 nt, Artificial Sequence
  Synthetic
aacugaacacuuggagaua

SEQ ID NO: 156199 - RNA, 20 nt, Artificial Sequence
  Synthetic
caacugaacacuuggagaua

SEQ ID NO: 156200 - RNA, 21 nt, Artificial Sequence
  Synthetic
acaacugaacacuuggagaua

SEQ ID NO: 156201 - RNA, 22 nt, Artificial Sequence
  Synthetic
aacaacugaacacuuggagaua

SEQ ID NO: 156202 - RNA, 23 nt, Artificial Sequence
  Synthetic
aaacaacugaacacuuggagaua

SEQ ID NO: 156203 - RNA, 24 nt, Artificial Sequence
  Synthetic
aaaacaacugaacacuuggagaua

SEQ ID NO: 156204 - RNA, 18 nt, Artificial Sequence
  Synthetic
ugaccaauguuugagaua

SEQ ID NO: 156205 - RNA, 19 nt, Artificial Sequence
  Synthetic
augaccaauguuugagaua

SEQ ID NO: 156206 - RNA, 20 nt, Artificial Sequence
  Synthetic
aaugaccaauguuugagaua

SEQ ID NO: 156207 - RNA, 21 nt, Artificial Sequence
  Synthetic
aaaugaccaauguuugagaua

SEQ ID NO: 156208 - RNA, 22 nt, Artificial Sequence
  Synthetic
uaaaugaccaauguuugagaua

SEQ ID NO: 156209 - RNA, 23 nt, Artificial Sequence
  Synthetic
auaaaugaccaauguuugagaua

SEQ ID NO: 156210 - RNA, 24 nt, Artificial Sequence
  Synthetic
aauaaaugaccaauguuugagaua

SEQ ID NO: 156211 - RNA, 18 nt, Artificial Sequence
  Synthetic
uuguauuuuaaguagaua

SEQ ID NO: 156212 - RNA, 19 nt, Artificial Sequence
  Synthetic
uuuguauuuuaaguagaua

SEQ ID NO: 156213 - RNA, 20 nt, Artificial Sequence
  Synthetic
uuuuguauuuuaaguagaua

SEQ ID NO: 156214 - RNA, 21 nt, Artificial Sequence
  Synthetic
uuuuuguauuuuaaguagaua

SEQ ID NO: 156215 - RNA, 22 nt, Artificial Sequence
  Synthetic
uuuuuuguauuuuaaguagaua

SEQ ID NO: 156216 - RNA, 23 nt, Artificial Sequence
  Synthetic
auuuuuuguauuuuaaguagaua

SEQ ID NO: 156217 - RNA, 24 nt, Artificial Sequence
  Synthetic
aauuuuuuguauuuuaaguagaua

SEQ ID NO: 156218 - RNA, 18 nt, Artificial Sequence
  Synthetic
uuaaugguggacaggaua

SEQ ID NO: 156219 - RNA, 19 nt, Artificial Sequence
  Synthetic
auuaaugguggacaggaua

SEQ ID NO: 156220 - RNA, 20 nt, Artificial Sequence
  Synthetic
cauuaaugguggacaggaua

SEQ ID NO: 156221 - RNA, 21 nt, Artificial Sequence
  Synthetic
ccauuaaugguggacaggaua

SEQ ID NO: 156222 - RNA, 22 nt, Artificial Sequence
  Synthetic
cccauuaaugguggacaggaua

SEQ ID NO: 156223 - RNA, 24 nt, Artificial Sequence
  Synthetic
ugcccauuaaugguggacaggaua

SEQ ID NO: 156224 - RNA, 18 nt, Artificial Sequence
  Synthetic
aaaacagaugauuggaua

SEQ ID NO: 156225 - RNA, 19 nt, Artificial Sequence
  Synthetic
aaaaacagaugauuggaua

SEQ ID NO: 156226 - RNA, 20 nt, Artificial Sequence
  Synthetic
uaaaaacagaugauuggaua

SEQ ID NO: 156227 - RNA, 18 nt, Artificial Sequence
  Synthetic
agacuggcaaguuggaua

SEQ ID NO: 156228 - RNA, 19 nt, Artificial Sequence
  Synthetic
cagacuggcaaguuggaua

SEQ ID NO: 156229 - RNA, 20 nt, Artificial Sequence
  Synthetic
acagacuggcaaguuggaua

SEQ ID NO: 156230 - RNA, 21 nt, Artificial Sequence
  Synthetic
cacagacuggcaaguuggaua

SEQ ID NO: 156231 - RNA, 22 nt, Artificial Sequence
  Synthetic
acacagacuggcaaguuggaua

SEQ ID NO: 156232 - RNA, 24 nt, Artificial Sequence
  Synthetic
agacacagacuggcaaguuggaua

SEQ ID NO: 156233 - RNA, 18 nt, Artificial Sequence
  Synthetic
ucccaaguguuuuggaua

SEQ ID NO: 156234 - RNA, 21 nt, Artificial Sequence
  Synthetic
uggucccaaguguuuuggaua

SEQ ID NO: 156235 - RNA, 23 nt, Artificial Sequence
  Synthetic
uguggucccaaguguuuuggaua

SEQ ID NO: 156236 - RNA, 24 nt, Artificial Sequence
  Synthetic
uuguggucccaaguguuuuggaua

SEQ ID NO: 156237 - RNA, 21 nt, Artificial Sequence
  Synthetic
ccccaugcuguucucaugaua

SEQ ID NO: 156238 - RNA, 22 nt, Artificial Sequence
  Synthetic
cccccaugcuguucucaugaua

SEQ ID NO: 156239 - RNA, 23 nt, Artificial Sequence
  Synthetic
ucccccaugcuguucucaugaua

SEQ ID NO: 156240 - RNA, 24 nt, Artificial Sequence
  Synthetic
uucccccaugcuguucucaugaua

SEQ ID NO: 156241 - RNA, 18 nt, Artificial Sequence
  Synthetic
ugugcuguucuccugaua

SEQ ID NO: 156242 - RNA, 19 nt, Artificial Sequence
  Synthetic
cugugcuguucuccugaua

SEQ ID NO: 156243 - RNA, 20 nt, Artificial Sequence
  Synthetic
ccugugcuguucuccugaua

SEQ ID NO: 156244 - RNA, 21 nt, Artificial Sequence
  Synthetic
uccugugcuguucuccugaua

SEQ ID NO: 156245 - RNA, 22 nt, Artificial Sequence
  Synthetic
uuccugugcuguucuccugaua

SEQ ID NO: 156246 - RNA, 23 nt, Artificial Sequence
  Synthetic
uuuccugugcuguucuccugaua

SEQ ID NO: 156247 - RNA, 24 nt, Artificial Sequence
  Synthetic
uuuuccugugcuguucuccugaua

SEQ ID NO: 156248 - RNA, 18 nt, Artificial Sequence
  Synthetic
acaggcaaaugugugaua

SEQ ID NO: 156249 - RNA, 19 nt, Artificial Sequence
  Synthetic
uacaggcaaaugugugaua

SEQ ID NO: 156250 - RNA, 20 nt, Artificial Sequence
  Synthetic
auacaggcaaaugugugaua

SEQ ID NO: 156251 - RNA, 19 nt, Artificial Sequence
  Synthetic
uggugcuguucuugugaua

SEQ ID NO: 156252 - RNA, 20 nt, Artificial Sequence
  Synthetic
auggugcuguucuugugaua

SEQ ID NO: 156253 - RNA, 21 nt, Artificial Sequence
  Synthetic
cauggugcuguucuugugaua

SEQ ID NO: 156254 - RNA, 22 nt, Artificial Sequence
  Synthetic
ccauggugcuguucuugugaua

SEQ ID NO: 156255 - RNA, 23 nt, Artificial Sequence
  Synthetic
cccauggugcuguucuugugaua

SEQ ID NO: 156256 - RNA, 24 nt, Artificial Sequence
  Synthetic
ccccauggugcuguucuugugaua

SEQ ID NO: 156257 - RNA, 19 nt, Artificial Sequence
  Synthetic
uguauuuucauuuuugaua

SEQ ID NO: 156258 - RNA, 20 nt, Artificial Sequence
  Synthetic
auguauuuucauuuuugaua

SEQ ID NO: 156259 - RNA, 22 nt, Artificial Sequence
  Synthetic
agauguauuuucauuuuugaua

SEQ ID NO: 156260 - RNA, 23 nt, Artificial Sequence
  Synthetic
aagauguauuuucauuuuugaua

SEQ ID NO: 156261 - RNA, 24 nt, Artificial Sequence
  Synthetic
uaagauguauuuucauuuuugaua

SEQ ID NO: 156262 - RNA, 18 nt, Artificial Sequence
  Synthetic
auauuuuucuuuuugaua

SEQ ID NO: 156263 - RNA, 19 nt, Artificial Sequence
  Synthetic
uauauuuuucuuuuugaua

SEQ ID NO: 156264 - RNA, 20 nt, Artificial Sequence
  Synthetic
uuauauuuuucuuuuugaua

SEQ ID NO: 156265 - RNA, 18 nt, Artificial Sequence
  Synthetic
cuucaaaaaauuaauaua

SEQ ID NO: 156266 - RNA, 19 nt, Artificial Sequence
  Synthetic
acuucaaaaaauuaauaua

SEQ ID NO: 156267 - RNA, 20 nt, Artificial Sequence
  Synthetic
aacuucaaaaaauuaauaua

SEQ ID NO: 156268 - RNA, 18 nt, Artificial Sequence
  Synthetic
uacauuaacauacauaua

SEQ ID NO: 156269 - RNA, 19 nt, Artificial Sequence
  Synthetic
cuacauuaacauacauaua

SEQ ID NO: 156270 - RNA, 20 nt, Artificial Sequence
  Synthetic
acuacauuaacauacauaua

SEQ ID NO: 156271 - RNA, 18 nt, Artificial Sequence
  Synthetic
augcccaucaaugauaua

SEQ ID NO: 156272 - RNA, 19 nt, Artificial Sequence
  Synthetic
aaugcccaucaaugauaua

SEQ ID NO: 156273 - RNA, 20 nt, Artificial Sequence
  Synthetic
aaaugcccaucaaugauaua

SEQ ID NO: 156274 - RNA, 21 nt, Artificial Sequence
  Synthetic
caaaugcccaucaaugauaua

SEQ ID NO: 156275 - RNA, 22 nt, Artificial Sequence
  Synthetic
ccaaaugcccaucaaugauaua

SEQ ID NO: 156276 - RNA, 23 nt, Artificial Sequence
  Synthetic
cccaaaugcccaucaaugauaua

SEQ ID NO: 156277 - RNA, 24 nt, Artificial Sequence
  Synthetic
acccaaaugcccaucaaugauaua

SEQ ID NO: 156278 - RNA, 18 nt, Artificial Sequence
  Synthetic
aagugucuuuuugauaua

SEQ ID NO: 156279 - RNA, 19 nt, Artificial Sequence
  Synthetic
caagugucuuuuugauaua

SEQ ID NO: 156280 - RNA, 21 nt, Artificial Sequence
  Synthetic
ugcaagugucuuuuugauaua

SEQ ID NO: 156281 - RNA, 23 nt, Artificial Sequence
  Synthetic
cgugcaagugucuuuuugauaua

SEQ ID NO: 156282 - RNA, 18 nt, Artificial Sequence
  Synthetic
ugauauaugaaauauaua

SEQ ID NO: 156283 - RNA, 19 nt, Artificial Sequence
  Synthetic
augauauaugaaauauaua

SEQ ID NO: 156284 - RNA, 20 nt, Artificial Sequence
  Synthetic
uaugauauaugaaauauaua

SEQ ID NO: 156285 - RNA, 21 nt, Artificial Sequence
  Synthetic
auaugauauaugaaauauaua

SEQ ID NO: 156286 - RNA, 22 nt, Artificial Sequence
  Synthetic
uauaugauauaugaaauauaua

SEQ ID NO: 156287 - RNA, 23 nt, Artificial Sequence
  Synthetic
auauaugauauaugaaauauaua

SEQ ID NO: 156288 - RNA, 24 nt, Artificial Sequence
  Synthetic
uauauaugauauaugaaauauaua

SEQ ID NO: 156289 - RNA, 18 nt, Artificial Sequence
  Synthetic
uaauaaccagaauauaua

SEQ ID NO: 156290 - RNA, 19 nt, Artificial Sequence
  Synthetic
uuaauaaccagaauauaua

SEQ ID NO: 156291 - RNA, 20 nt, Artificial Sequence
  Synthetic
auuaauaaccagaauauaua

SEQ ID NO: 156292 - RNA, 24 nt, Artificial Sequence
  Synthetic
agggauuaauaaccagaauauaua

SEQ ID NO: 156293 - RNA, 18 nt, Artificial Sequence
  Synthetic
aagacaaaaacauauaua

SEQ ID NO: 156294 - RNA, 20 nt, Artificial Sequence
  Synthetic
ugaagacaaaaacauauaua

SEQ ID NO: 156295 - RNA, 18 nt, Artificial Sequence
  Synthetic
aauccgggugcuccuaua

SEQ ID NO: 156296 - RNA, 20 nt, Artificial Sequence
  Synthetic
ugaauccgggugcuccuaua

SEQ ID NO: 156297 - RNA, 21 nt, Artificial Sequence
  Synthetic
augaauccgggugcuccuaua

SEQ ID NO: 156298 - RNA, 22 nt, Artificial Sequence
  Synthetic
uaugaauccgggugcuccuaua

SEQ ID NO: 156299 - RNA, 23 nt, Artificial Sequence
  Synthetic
uuaugaauccgggugcuccuaua

SEQ ID NO: 156300 - RNA, 24 nt, Artificial Sequence
  Synthetic
uuuaugaauccgggugcuccuaua

SEQ ID NO: 156301 - RNA, 18 nt, Artificial Sequence
  Synthetic
uuccaguuuuuggcuaua

SEQ ID NO: 156302 - RNA, 19 nt, Artificial Sequence
  Synthetic
uuuccaguuuuuggcuaua

SEQ ID NO: 156303 - RNA, 20 nt, Artificial Sequence
  Synthetic
cuuuccaguuuuuggcuaua

SEQ ID NO: 156304 - RNA, 21 nt, Artificial Sequence
  Synthetic
ucuuuccaguuuuuggcuaua

SEQ ID NO: 156305 - RNA, 22 nt, Artificial Sequence
  Synthetic
uucuuuccaguuuuuggcuaua

SEQ ID NO: 156306 - RNA, 18 nt, Artificial Sequence
  Synthetic
ucagauaaaauaucuaua

SEQ ID NO: 156307 - RNA, 20 nt, Artificial Sequence
  Synthetic
ugucagauaaaauaucuaua

SEQ ID NO: 156308 - RNA, 19 nt, Artificial Sequence
  Synthetic
ugacaauguuuuggguaua

SEQ ID NO: 156309 - RNA, 20 nt, Artificial Sequence
  Synthetic
augacaauguuuuggguaua

SEQ ID NO: 156310 - RNA, 21 nt, Artificial Sequence
  Synthetic
aaugacaauguuuuggguaua

SEQ ID NO: 156311 - RNA, 22 nt, Artificial Sequence
  Synthetic
aaaugacaauguuuuggguaua

SEQ ID NO: 156312 - RNA, 23 nt, Artificial Sequence
  Synthetic
aaaaugacaauguuuuggguaua

SEQ ID NO: 156313 - RNA, 24 nt, Artificial Sequence
  Synthetic
uaaaaugacaauguuuuggguaua

SEQ ID NO: 156314 - RNA, 19 nt, Artificial Sequence
  Synthetic
agacauuaauauuuguaua

SEQ ID NO: 156315 - RNA, 20 nt, Artificial Sequence
  Synthetic
aagacauuaauauuuguaua

SEQ ID NO: 156316 - RNA, 21 nt, Artificial Sequence
  Synthetic
uaagacauuaauauuuguaua

SEQ ID NO: 156317 - RNA, 22 nt, Artificial Sequence
  Synthetic
cuaagacauuaauauuuguaua

SEQ ID NO: 156318 - RNA, 23 nt, Artificial Sequence
  Synthetic
acuaagacauuaauauuuguaua

SEQ ID NO: 156319 - RNA, 24 nt, Artificial Sequence
  Synthetic
uacuaagacauuaauauuuguaua

SEQ ID NO: 156320 - RNA, 18 nt, Artificial Sequence
  Synthetic
cuuucauuuuuuauuaua

SEQ ID NO: 156321 - RNA, 20 nt, Artificial Sequence
  Synthetic
ugcuuucauuuuuuauuaua

SEQ ID NO: 156322 - RNA, 21 nt, Artificial Sequence
  Synthetic
uugcuuucauuuuuuauuaua

SEQ ID NO: 156323 - RNA, 22 nt, Artificial Sequence
  Synthetic
uuugcuuucauuuuuuauuaua

SEQ ID NO: 156324 - RNA, 24 nt, Artificial Sequence
  Synthetic
uguuugcuuucauuuuuuauuaua

SEQ ID NO: 156325 - RNA, 18 nt, Artificial Sequence
  Synthetic
uuuuauguuuuucuuaua

SEQ ID NO: 156326 - RNA, 19 nt, Artificial Sequence
  Synthetic
cuuuuauguuuuucuuaua

SEQ ID NO: 156327 - RNA, 20 nt, Artificial Sequence
  Synthetic
ucuuuuauguuuuucuuaua

SEQ ID NO: 156328 - RNA, 21 nt, Artificial Sequence
  Synthetic
aaugacaauucuauauuuaua

SEQ ID NO: 156329 - RNA, 22 nt, Artificial Sequence
  Synthetic
uaaugacaauucuauauuuaua

SEQ ID NO: 156330 - RNA, 23 nt, Artificial Sequence
  Synthetic
auaaugacaauucuauauuuaua

SEQ ID NO: 156331 - RNA, 24 nt, Artificial Sequence
  Synthetic
aauaaugacaauucuauauuuaua

SEQ ID NO: 156332 - RNA, 18 nt, Artificial Sequence
  Synthetic
uaauaauuuauauuuaua

SEQ ID NO: 156333 - RNA, 19 nt, Artificial Sequence
  Synthetic
auaauaauuuauauuuaua

SEQ ID NO: 156334 - RNA, 20 nt, Artificial Sequence
  Synthetic
aauaauaauuuauauuuaua

SEQ ID NO: 156335 - RNA, 18 nt, Artificial Sequence
  Synthetic
uuaaaauaaaauuuuaua

SEQ ID NO: 156336 - RNA, 19 nt, Artificial Sequence
  Synthetic
uuuaaaauaaaauuuuaua

SEQ ID NO: 156337 - RNA, 20 nt, Artificial Sequence
  Synthetic
auuuaaaauaaaauuuuaua

SEQ ID NO: 156338 - RNA, 21 nt, Artificial Sequence
  Synthetic
aauuuaaaauaaaauuuuaua

SEQ ID NO: 156339 - RNA, 22 nt, Artificial Sequence
  Synthetic
caauuuaaaauaaaauuuuaua

SEQ ID NO: 156340 - RNA, 23 nt, Artificial Sequence
  Synthetic
acaauuuaaaauaaaauuuuaua

SEQ ID NO: 156341 - RNA, 24 nt, Artificial Sequence
  Synthetic
aacaauuuaaaauaaaauuuuaua

SEQ ID NO: 156342 - RNA, 20 nt, Artificial Sequence
  Synthetic
aggaucaggaaagucaacua

SEQ ID NO: 156343 - RNA, 22 nt, Artificial Sequence
  Synthetic
agaggaucaggaaagucaacua

SEQ ID NO: 156344 - RNA, 24 nt, Artificial Sequence
  Synthetic
cgagaggaucaggaaagucaacua

SEQ ID NO: 156345 - RNA, 18 nt, Artificial Sequence
  Synthetic
ucacaccugaaggaacua

SEQ ID NO: 156346 - RNA, 19 nt, Artificial Sequence
  Synthetic
aucacaccugaaggaacua

SEQ ID NO: 156347 - RNA, 20 nt, Artificial Sequence
  Synthetic
caucacaccugaaggaacua

SEQ ID NO: 156348 - RNA, 21 nt, Artificial Sequence
  Synthetic
acaucacaccugaaggaacua

SEQ ID NO: 156349 - RNA, 22 nt, Artificial Sequence
  Synthetic
aacaucacaccugaaggaacua

SEQ ID NO: 156350 - RNA, 23 nt, Artificial Sequence
  Synthetic
uaacaucacaccugaaggaacua

SEQ ID NO: 156351 - RNA, 24 nt, Artificial Sequence
  Synthetic
cuaacaucacaccugaaggaacua

SEQ ID NO: 156352 - RNA, 20 nt, Artificial Sequence
  Synthetic
aggagcagaaaagauaacua

SEQ ID NO: 156353 - RNA, 22 nt, Artificial Sequence
  Synthetic
agaggagcagaaaagauaacua

SEQ ID NO: 156354 - RNA, 24 nt, Artificial Sequence
  Synthetic
agagaggagcagaaaagauaacua

SEQ ID NO: 156355 - RNA, 18 nt, Artificial Sequence
  Synthetic
uggacuuaaucugcacua

SEQ ID NO: 156356 - RNA, 19 nt, Artificial Sequence
  Synthetic
uuggacuuaaucugcacua

SEQ ID NO: 156357 - RNA, 20 nt, Artificial Sequence
  Synthetic
auuggacuuaaucugcacua

SEQ ID NO: 156358 - RNA, 21 nt, Artificial Sequence
  Synthetic
cauuggacuuaaucugcacua

SEQ ID NO: 156359 - RNA, 22 nt, Artificial Sequence
  Synthetic
acauuggacuuaaucugcacua

SEQ ID NO: 156360 - RNA, 23 nt, Artificial Sequence
  Synthetic
aacauuggacuuaaucugcacua

SEQ ID NO: 156361 - RNA, 24 nt, Artificial Sequence
  Synthetic
uaacauuggacuuaaucugcacua

SEQ ID NO: 156362 - RNA, 19 nt, Artificial Sequence
  Synthetic
agcuagaaaauuaagacua

SEQ ID NO: 156363 - RNA, 20 nt, Artificial Sequence
  Synthetic
uagcuagaaaauuaagacua

SEQ ID NO: 156364 - RNA, 18 nt, Artificial Sequence
  Synthetic
aacuuuaauuuuggacua

SEQ ID NO: 156365 - RNA, 19 nt, Artificial Sequence
  Synthetic
caacuuuaauuuuggacua

SEQ ID NO: 156366 - RNA, 20 nt, Artificial Sequence
  Synthetic
ucaacuuuaauuuuggacua

SEQ ID NO: 156367 - RNA, 21 nt, Artificial Sequence
  Synthetic
uucaacuuuaauuuuggacua

SEQ ID NO: 156368 - RNA, 22 nt, Artificial Sequence
  Synthetic
uuucaacuuuaauuuuggacua

SEQ ID NO: 156369 - RNA, 23 nt, Artificial Sequence
  Synthetic
uuuucaacuuuaauuuuggacua

SEQ ID NO: 156370 - RNA, 24 nt, Artificial Sequence
  Synthetic
uuuuucaacuuuaauuuuggacua

SEQ ID NO: 156371 - RNA, 18 nt, Artificial Sequence
  Synthetic
ccugcuccugaaugacua

SEQ ID NO: 156372 - RNA, 19 nt, Artificial Sequence
  Synthetic
accugcuccugaaugacua

SEQ ID NO: 156373 - RNA, 20 nt, Artificial Sequence
  Synthetic
aaccugcuccugaaugacua

SEQ ID NO: 156374 - RNA, 21 nt, Artificial Sequence
  Synthetic
caaccugcuccugaaugacua

SEQ ID NO: 156375 - RNA, 22 nt, Artificial Sequence
  Synthetic
acaaccugcuccugaaugacua

SEQ ID NO: 156376 - RNA, 23 nt, Artificial Sequence
  Synthetic
aacaaccugcuccugaaugacua

SEQ ID NO: 156377 - RNA, 18 nt, Artificial Sequence
  Synthetic
ugacuucaaacuauacua

SEQ ID NO: 156378 - RNA, 19 nt, Artificial Sequence
  Synthetic
cugacuucaaacuauacua

SEQ ID NO: 156379 - RNA, 20 nt, Artificial Sequence
  Synthetic
ccugacuucaaacuauacua

SEQ ID NO: 156380 - RNA, 21 nt, Artificial Sequence
  Synthetic
accugacuucaaacuauacua

SEQ ID NO: 156381 - RNA, 22 nt, Artificial Sequence
  Synthetic
uaccugacuucaaacuauacua

SEQ ID NO: 156382 - RNA, 23 nt, Artificial Sequence
  Synthetic
cuaccugacuucaaacuauacua

SEQ ID NO: 156383 - RNA, 18 nt, Artificial Sequence
  Synthetic
accacauaccaaaaccua

SEQ ID NO: 156384 - RNA, 19 nt, Artificial Sequence
  Synthetic
aaccacauaccaaaaccua

SEQ ID NO: 156385 - RNA, 20 nt, Artificial Sequence
  Synthetic
aaaccacauaccaaaaccua

SEQ ID NO: 156386 - RNA, 21 nt, Artificial Sequence
  Synthetic
aaaaccacauaccaaaaccua

SEQ ID NO: 156387 - RNA, 22 nt, Artificial Sequence
  Synthetic
aaaaaccacauaccaaaaccua

SEQ ID NO: 156388 - RNA, 24 nt, Artificial Sequence
  Synthetic
agaaaaaccacauaccaaaaccua

SEQ ID NO: 156389 - RNA, 18 nt, Artificial Sequence
  Synthetic
agaauuaaaagcaaccua

SEQ ID NO: 156390 - RNA, 19 nt, Artificial Sequence
  Synthetic
cagaauuaaaagcaaccua

SEQ ID NO: 156391 - RNA, 20 nt, Artificial Sequence
  Synthetic
acagaauuaaaagcaaccua

SEQ ID NO: 156392 - RNA, 21 nt, Artificial Sequence
  Synthetic
aacagaauuaaaagcaaccua

SEQ ID NO: 156393 - RNA, 22 nt, Artificial Sequence
  Synthetic
caacagaauuaaaagcaaccua

SEQ ID NO: 156394 - RNA, 23 nt, Artificial Sequence
  Synthetic
ucaacagaauuaaaagcaaccua

SEQ ID NO: 156395 - RNA, 24 nt, Artificial Sequence
  Synthetic
aucaacagaauuaaaagcaaccua

SEQ ID NO: 156396 - RNA, 19 nt, Artificial Sequence
  Synthetic
agagucaacaggcaaccua

SEQ ID NO: 156397 - RNA, 21 nt, Artificial Sequence
  Synthetic
ugagagucaacaggcaaccua

SEQ ID NO: 156398 - RNA, 22 nt, Artificial Sequence
  Synthetic
augagagucaacaggcaaccua

SEQ ID NO: 156399 - RNA, 23 nt, Artificial Sequence
  Synthetic
caugagagucaacaggcaaccua

SEQ ID NO: 156400 - RNA, 24 nt, Artificial Sequence
  Synthetic
ucaugagagucaacaggcaaccua

SEQ ID NO: 156401 - RNA, 18 nt, Artificial Sequence
  Synthetic
caaaauaacugagaccua

SEQ ID NO: 156402 - RNA, 20 nt, Artificial Sequence
  Synthetic
agcaaaauaacugagaccua

SEQ ID NO: 156403 - RNA, 18 nt, Artificial Sequence
  Synthetic
agcaucaccugggaccua

SEQ ID NO: 156404 - RNA, 19 nt, Artificial Sequence
  Synthetic
cagcaucaccugggaccua

SEQ ID NO: 156405 - RNA, 21 nt, Artificial Sequence
  Synthetic
agcagcaucaccugggaccua

SEQ ID NO: 156406 - RNA, 22 nt, Artificial Sequence
  Synthetic
cagcagcaucaccugggaccua

SEQ ID NO: 156407 - RNA, 24 nt, Artificial Sequence
  Synthetic
agcagcagcaucaccugggaccua

SEQ ID NO: 156408 - RNA, 18 nt, Artificial Sequence
  Synthetic
agcauauggccuacccua

SEQ ID NO: 156409 - RNA, 19 nt, Artificial Sequence
  Synthetic
uagcauauggccuacccua

SEQ ID NO: 156410 - RNA, 20 nt, Artificial Sequence
  Synthetic
cuagcauauggccuacccua

SEQ ID NO: 156411 - RNA, 19 nt, Artificial Sequence
  Synthetic
agagugaacaggcagccua

SEQ ID NO: 156412 - RNA, 20 nt, Artificial Sequence
  Synthetic
cagagugaacaggcagccua

SEQ ID NO: 156413 - RNA, 21 nt, Artificial Sequence
  Synthetic
ucagagugaacaggcagccua

SEQ ID NO: 156414 - RNA, 22 nt, Artificial Sequence
  Synthetic
aucagagugaacaggcagccua

SEQ ID NO: 156415 - RNA, 23 nt, Artificial Sequence
  Synthetic
caucagagugaacaggcagccua

SEQ ID NO: 156416 - RNA, 24 nt, Artificial Sequence
  Synthetic
ccaucagagugaacaggcagccua

SEQ ID NO: 156417 - RNA, 18 nt, Artificial Sequence
  Synthetic
augccacugcacugccua

SEQ ID NO: 156418 - RNA, 19 nt, Artificial Sequence
  Synthetic
caugccacugcacugccua

SEQ ID NO: 156419 - RNA, 20 nt, Artificial Sequence
  Synthetic
ccaugccacugcacugccua

SEQ ID NO: 156420 - RNA, 21 nt, Artificial Sequence
  Synthetic
cccaugccacugcacugccua

SEQ ID NO: 156421 - RNA, 23 nt, Artificial Sequence
  Synthetic
agcccaugccacugcacugccua

SEQ ID NO: 156422 - RNA, 24 nt, Artificial Sequence
  Synthetic
cagcccaugccacugcacugccua

SEQ ID NO: 156423 - RNA, 18 nt, Artificial Sequence
  Synthetic
aguuuuuuuuuuugccua

SEQ ID NO: 156424 - RNA, 19 nt, Artificial Sequence
  Synthetic
aaguuuuuuuuuuugccua

SEQ ID NO: 156425 - RNA, 20 nt, Artificial Sequence
  Synthetic
caaguuuuuuuuuuugccua

SEQ ID NO: 156426 - RNA, 18 nt, Artificial Sequence
  Synthetic
uuuguauuagccauccua

SEQ ID NO: 156427 - RNA, 19 nt, Artificial Sequence
  Synthetic
uuuuguauuagccauccua

SEQ ID NO: 156428 - RNA, 20 nt, Artificial Sequence
  Synthetic
uuuuuguauuagccauccua

SEQ ID NO: 156429 - RNA, 21 nt, Artificial Sequence
  Synthetic
uuuuuuguauuagccauccua

SEQ ID NO: 156430 - RNA, 22 nt, Artificial Sequence
  Synthetic
auuuuuuguauuagccauccua

SEQ ID NO: 156431 - RNA, 23 nt, Artificial Sequence
  Synthetic
uauuuuuuguauuagccauccua

SEQ ID NO: 156432 - RNA, 18 nt, Artificial Sequence
  Synthetic
acaaccaagacuauccua

SEQ ID NO: 156433 - RNA, 19 nt, Artificial Sequence
  Synthetic
cacaaccaagacuauccua

SEQ ID NO: 156434 - RNA, 20 nt, Artificial Sequence
  Synthetic
ucacaaccaagacuauccua

SEQ ID NO: 156435 - RNA, 21 nt, Artificial Sequence
  Synthetic
cugaacagguggggauuccua

SEQ ID NO: 156436 - RNA, 23 nt, Artificial Sequence
  Synthetic
agcugaacagguggggauuccua

SEQ ID NO: 156437 - RNA, 24 nt, Artificial Sequence
  Synthetic
uagcugaacagguggggauuccua

SEQ ID NO: 156438 - RNA, 18 nt, Artificial Sequence
  Synthetic
aaacucuggaacuuccua

SEQ ID NO: 156439 - RNA, 22 nt, Artificial Sequence
  Synthetic
ugggaaacucuggaacuuccua

SEQ ID NO: 156440 - RNA, 23 nt, Artificial Sequence
  Synthetic
augggaaacucuggaacuuccua

SEQ ID NO: 156441 - RNA, 24 nt, Artificial Sequence
  Synthetic
uaugggaaacucuggaacuuccua

SEQ ID NO: 156442 - RNA, 18 nt, Artificial Sequence
  Synthetic
auacaaaauaaaaagcua

SEQ ID NO: 156443 - RNA, 19 nt, Artificial Sequence
  Synthetic
uauacaaaauaaaaagcua

SEQ ID NO: 156444 - RNA, 20 nt, Artificial Sequence
  Synthetic
auauacaaaauaaaaagcua

SEQ ID NO: 156445 - RNA, 18 nt, Artificial Sequence
  Synthetic
aggaaaaaugaucagcua

SEQ ID NO: 156446 - RNA, 19 nt, Artificial Sequence
  Synthetic
aaggaaaaaugaucagcua

SEQ ID NO: 156447 - RNA, 20 nt, Artificial Sequence
  Synthetic
caaggaaaaaugaucagcua

SEQ ID NO: 156448 - RNA, 19 nt, Artificial Sequence
  Synthetic
aggcuccacucuagagcua

SEQ ID NO: 156449 - RNA, 20 nt, Artificial Sequence
  Synthetic
caggcuccacucuagagcua

SEQ ID NO: 156450 - RNA, 21 nt, Artificial Sequence
  Synthetic
ucaggcuccacucuagagcua

SEQ ID NO: 156451 - RNA, 22 nt, Artificial Sequence
  Synthetic
cucaggcuccacucuagagcua

SEQ ID NO: 156452 - RNA, 23 nt, Artificial Sequence
  Synthetic
ucucaggcuccacucuagagcua

SEQ ID NO: 156453 - RNA, 24 nt, Artificial Sequence
  Synthetic
aucucaggcuccacucuagagcua

SEQ ID NO: 156454 - RNA, 18 nt, Artificial Sequence
  Synthetic
augcuaaaugaugagcua

SEQ ID NO: 156455 - RNA, 19 nt, Artificial Sequence
  Synthetic
aaugcuaaaugaugagcua

SEQ ID NO: 156456 - RNA, 20 nt, Artificial Sequence
  Synthetic
uaaugcuaaaugaugagcua

SEQ ID NO: 156457 - RNA, 21 nt, Artificial Sequence
  Synthetic
cuaaugcuaaaugaugagcua

SEQ ID NO: 156458 - RNA, 22 nt, Artificial Sequence
  Synthetic
ccuaaugcuaaaugaugagcua

SEQ ID NO: 156459 - RNA, 23 nt, Artificial Sequence
  Synthetic
accuaaugcuaaaugaugagcua

SEQ ID NO: 156460 - RNA, 24 nt, Artificial Sequence
  Synthetic
uaccuaaugcuaaaugaugagcua

SEQ ID NO: 156461 - RNA, 18 nt, Artificial Sequence
  Synthetic
ucaugcagcuuaaggcua

SEQ ID NO: 156462 - RNA, 19 nt, Artificial Sequence
  Synthetic
aucaugcagcuuaaggcua

SEQ ID NO: 156463 - RNA, 20 nt, Artificial Sequence
  Synthetic
aaucaugcagcuuaaggcua

SEQ ID NO: 156464 - RNA, 22 nt, Artificial Sequence
  Synthetic
agcuacuggcaacaucuggcua

SEQ ID NO: 156465 - RNA, 23 nt, Artificial Sequence
  Synthetic
uagcuacuggcaacaucuggcua

SEQ ID NO: 156466 - RNA, 18 nt, Artificial Sequence
  Synthetic
uacugagcccucaaucua

SEQ ID NO: 156467 - RNA, 19 nt, Artificial Sequence
  Synthetic
aggccccaucccagaucua

SEQ ID NO: 156468 - RNA, 20 nt, Artificial Sequence
  Synthetic
uaggccccaucccagaucua

SEQ ID NO: 156469 - RNA, 21 nt, Artificial Sequence
  Synthetic
uuaggccccaucccagaucua

SEQ ID NO: 156470 - RNA, 22 nt, Artificial Sequence
  Synthetic
uuuaggccccaucccagaucua

SEQ ID NO: 156471 - RNA, 23 nt, Artificial Sequence
  Synthetic
auuuaggccccaucccagaucua

SEQ ID NO: 156472 - RNA, 24 nt, Artificial Sequence
  Synthetic
uauuuaggccccaucccagaucua

SEQ ID NO: 156473 - RNA, 18 nt, Artificial Sequence
  Synthetic
uucuuuucugucacucua

SEQ ID NO: 156474 - RNA, 19 nt, Artificial Sequence
  Synthetic
uuucuuuucugucacucua

SEQ ID NO: 156475 - RNA, 20 nt, Artificial Sequence
  Synthetic
cuuucuuuucugucacucua

SEQ ID NO: 156476 - RNA, 19 nt, Artificial Sequence
  Synthetic
agaguaaacagacagucua

SEQ ID NO: 156477 - RNA, 20 nt, Artificial Sequence
  Synthetic
cagaguaaacagacagucua

SEQ ID NO: 156478 - RNA, 21 nt, Artificial Sequence
  Synthetic
acagaguaaacagacagucua

SEQ ID NO: 156479 - RNA, 22 nt, Artificial Sequence
  Synthetic
aacagaguaaacagacagucua

SEQ ID NO: 156480 - RNA, 23 nt, Artificial Sequence
  Synthetic
caacagaguaaacagacagucua

SEQ ID NO: 156481 - RNA, 24 nt, Artificial Sequence
  Synthetic
ucaacagaguaaacagacagucua

SEQ ID NO: 156482 - RNA, 18 nt, Artificial Sequence
  Synthetic
ccagccauuccacuucua

SEQ ID NO: 156483 - RNA, 19 nt, Artificial Sequence
  Synthetic
cccagccauuccacuucua

SEQ ID NO: 156484 - RNA, 20 nt, Artificial Sequence
  Synthetic
acccagccauuccacuucua

SEQ ID NO: 156485 - RNA, 19 nt, Artificial Sequence
  Synthetic
uggaaccuuuuaauuucua

SEQ ID NO: 156486 - RNA, 20 nt, Artificial Sequence
  Synthetic
uuggaaccuuuuaauuucua

SEQ ID NO: 156487 - RNA, 18 nt, Artificial Sequence
  Synthetic
cuugaaguaugauuucua

SEQ ID NO: 156488 - RNA, 19 nt, Artificial Sequence
  Synthetic
acuugaaguaugauuucua

SEQ ID NO: 156489 - RNA, 20 nt, Artificial Sequence
  Synthetic
uacuugaaguaugauuucua

SEQ ID NO: 156490 - RNA, 22 nt, Artificial Sequence
  Synthetic
aguacuugaaguaugauuucua

SEQ ID NO: 156491 - RNA, 24 nt, Artificial Sequence
  Synthetic
ugaguacuugaaguaugauuucua

SEQ ID NO: 156492 - RNA, 18 nt, Artificial Sequence
  Synthetic
acuuuucccauuuuucua

SEQ ID NO: 156493 - RNA, 19 nt, Artificial Sequence
  Synthetic
aacuuuucccauuuuucua

SEQ ID NO: 156494 - RNA, 18 nt, Artificial Sequence
  Synthetic
ucuucccauuuuuuucua

SEQ ID NO: 156495 - RNA, 19 nt, Artificial Sequence
  Synthetic
uucuucccauuuuuuucua

SEQ ID NO: 156496 - RNA, 18 nt, Artificial Sequence
  Synthetic
aauauguauuuuuuucua

SEQ ID NO: 156497 - RNA, 19 nt, Artificial Sequence
  Synthetic
aaauauguauuuuuuucua

SEQ ID NO: 156498 - RNA, 20 nt, Artificial Sequence
  Synthetic
uaaauauguauuuuuuucua

SEQ ID NO: 156499 - RNA, 18 nt, Artificial Sequence
  Synthetic
uggagagggagagaagua

SEQ ID NO: 156500 - RNA, 20 nt, Artificial Sequence
  Synthetic
uguggagagggagagaagua

SEQ ID NO: 156501 - RNA, 18 nt, Artificial Sequence
  Synthetic
aaaaauugacaauaagua

SEQ ID NO: 156502 - RNA, 19 nt, Artificial Sequence
  Synthetic
aaaaaauugacaauaagua

SEQ ID NO: 156503 - RNA, 20 nt, Artificial Sequence
  Synthetic
aaaaaaauugacaauaagua

SEQ ID NO: 156504 - RNA, 18 nt, Artificial Sequence
  Synthetic
uucuaaauauuuuaagua

SEQ ID NO: 156505 - RNA, 19 nt, Artificial Sequence
  Synthetic
cuucuaaauauuuuaagua

SEQ ID NO: 156506 - RNA, 18 nt, Artificial Sequence
  Synthetic
aaccugaacggaccagua

SEQ ID NO: 156507 - RNA, 19 nt, Artificial Sequence
  Synthetic
aaaccugaacggaccagua

SEQ ID NO: 156508 - RNA, 20 nt, Artificial Sequence
  Synthetic
aaaaccugaacggaccagua

SEQ ID NO: 156509 - RNA, 21 nt, Artificial Sequence
  Synthetic
caaaaccugaacggaccagua

SEQ ID NO: 156510 - RNA, 22 nt, Artificial Sequence
  Synthetic
ccaaaaccugaacggaccagua

SEQ ID NO: 156511 - RNA, 23 nt, Artificial Sequence
  Synthetic
uccaaaaccugaacggaccagua

SEQ ID NO: 156512 - RNA, 24 nt, Artificial Sequence
  Synthetic
auccaaaaccugaacggaccagua

SEQ ID NO: 156513 - RNA, 18 nt, Artificial Sequence
  Synthetic
agcaccguuuauugagua

SEQ ID NO: 156514 - RNA, 19 nt, Artificial Sequence
  Synthetic
cagcaccguuuauugagua

SEQ ID NO: 156515 - RNA, 20 nt, Artificial Sequence
  Synthetic
ccagcaccguuuauugagua

SEQ ID NO: 156516 - RNA, 21 nt, Artificial Sequence
  Synthetic
cccagcaccguuuauugagua

SEQ ID NO: 156517 - RNA, 22 nt, Artificial Sequence
  Synthetic
ucccagcaccguuuauugagua

SEQ ID NO: 156518 - RNA, 23 nt, Artificial Sequence
  Synthetic
aucccagcaccguuuauugagua

SEQ ID NO: 156519 - RNA, 24 nt, Artificial Sequence
  Synthetic
uaucccagcaccguuuauugagua

SEQ ID NO: 156520 - RNA, 18 nt, Artificial Sequence
  Synthetic
uacuacaaagccauagua

SEQ ID NO: 156521 - RNA, 19 nt, Artificial Sequence
  Synthetic
auacuacaaagccauagua

SEQ ID NO: 156522 - RNA, 20 nt, Artificial Sequence
  Synthetic
aauacuacaaagccauagua

SEQ ID NO: 156523 - RNA, 18 nt, Artificial Sequence
  Synthetic
acacacacaaauugcgua

SEQ ID NO: 156524 - RNA, 19 nt, Artificial Sequence
  Synthetic
cacacacacaaauugcgua

SEQ ID NO: 156525 - RNA, 20 nt, Artificial Sequence
  Synthetic
acacacacacaaauugcgua

SEQ ID NO: 156526 - RNA, 18 nt, Artificial Sequence
  Synthetic
uaauaaguauguaaggua

SEQ ID NO: 156527 - RNA, 19 nt, Artificial Sequence
  Synthetic
auaauaaguauguaaggua

SEQ ID NO: 156528 - RNA, 20 nt, Artificial Sequence
  Synthetic
aauaauaaguauguaaggua

SEQ ID NO: 156529 - RNA, 21 nt, Artificial Sequence
  Synthetic
aaauaauaaguauguaaggua

SEQ ID NO: 156530 - RNA, 22 nt, Artificial Sequence
  Synthetic
aaaauaauaaguauguaaggua

SEQ ID NO: 156531 - RNA, 23 nt, Artificial Sequence
  Synthetic
aaaaauaauaaguauguaaggua

SEQ ID NO: 156532 - RNA, 24 nt, Artificial Sequence
  Synthetic
aaaaaauaauaaguauguaaggua

SEQ ID NO: 156533 - RNA, 18 nt, Artificial Sequence
  Synthetic
uacuugggaauuaaggua

SEQ ID NO: 156534 - RNA, 20 nt, Artificial Sequence
  Synthetic
aguacuugggaauuaaggua

SEQ ID NO: 156535 - RNA, 18 nt, Artificial Sequence
  Synthetic
uugaaaaaucuagaggua

SEQ ID NO: 156536 - RNA, 19 nt, Artificial Sequence
  Synthetic
auugaaaaaucuagaggua

SEQ ID NO: 156537 - RNA, 20 nt, Artificial Sequence
  Synthetic
aauugaaaaaucuagaggua

SEQ ID NO: 156538 - RNA, 21 nt, Artificial Sequence
  Synthetic
aaauugaaaaaucuagaggua

SEQ ID NO: 156539 - RNA, 22 nt, Artificial Sequence
  Synthetic
caaauugaaaaaucuagaggua

SEQ ID NO: 156540 - RNA, 23 nt, Artificial Sequence
  Synthetic
acaaauugaaaaaucuagaggua

SEQ ID NO: 156541 - RNA, 24 nt, Artificial Sequence
  Synthetic
aacaaauugaaaaaucuagaggua

SEQ ID NO: 156542 - RNA, 18 nt, Artificial Sequence
  Synthetic
caaaccauacacccggua

SEQ ID NO: 156543 - RNA, 20 nt, Artificial Sequence
  Synthetic
ugcaaaccauacacccggua

SEQ ID NO: 156544 - RNA, 18 nt, Artificial Sequence
  Synthetic
cugaugcugggaagggua

SEQ ID NO: 156545 - RNA, 19 nt, Artificial Sequence
  Synthetic
ccugaugcugggaagggua

SEQ ID NO: 156546 - RNA, 20 nt, Artificial Sequence
  Synthetic
accugaugcugggaagggua

SEQ ID NO: 156547 - RNA, 21 nt, Artificial Sequence
  Synthetic
uaccugaugcugggaagggua

SEQ ID NO: 156548 - RNA, 22 nt, Artificial Sequence
  Synthetic
uuaccugaugcugggaagggua

SEQ ID NO: 156549 - RNA, 18 nt, Artificial Sequence
  Synthetic
uuuauuccauuguuggua

SEQ ID NO: 156550 - RNA, 19 nt, Artificial Sequence
  Synthetic
uuuuauuccauuguuggua

SEQ ID NO: 156551 - RNA, 18 nt, Artificial Sequence
  Synthetic
auuugggaaagaaaugua

SEQ ID NO: 156552 - RNA, 19 nt, Artificial Sequence
  Synthetic
uauuugggaaagaaaugua

SEQ ID NO: 156553 - RNA, 20 nt, Artificial Sequence
  Synthetic
uuauuugggaaagaaaugua

SEQ ID NO: 156554 - RNA, 18 nt, Artificial Sequence
  Synthetic
aaaauaucauuaaaugua

SEQ ID NO: 156555 - RNA, 19 nt, Artificial Sequence
  Synthetic
uaaaauaucauuaaaugua

SEQ ID NO: 156556 - RNA, 20 nt, Artificial Sequence
  Synthetic
uuaaaauaucauuaaaugua

SEQ ID NO: 156557 - RNA, 18 nt, Artificial Sequence
  Synthetic
uuuauuuguaugaaugua

SEQ ID NO: 156558 - RNA, 19 nt, Artificial Sequence
  Synthetic
uuuuauuuguaugaaugua

SEQ ID NO: 156559 - RNA, 20 nt, Artificial Sequence
  Synthetic
uuuuuauuuguaugaaugua

SEQ ID NO: 156560 - RNA, 21 nt, Artificial Sequence
  Synthetic
uuuuuuauuuguaugaaugua

SEQ ID NO: 156561 - RNA, 22 nt, Artificial Sequence
  Synthetic
auuuuuuauuuguaugaaugua

SEQ ID NO: 156562 - RNA, 23 nt, Artificial Sequence
  Synthetic
aauuuuuuauuuguaugaaugua

SEQ ID NO: 156563 - RNA, 24 nt, Artificial Sequence
  Synthetic
uaauuuuuuauuuguaugaaugua

SEQ ID NO: 156564 - RNA, 18 nt, Artificial Sequence
  Synthetic
auguuguuuguacaugua

SEQ ID NO: 156565 - RNA, 19 nt, Artificial Sequence
  Synthetic
uauguuguuuguacaugua

SEQ ID NO: 156566 - RNA, 21 nt, Artificial Sequence
  Synthetic
uguauguuguuuguacaugua

SEQ ID NO: 156567 - RNA, 23 nt, Artificial Sequence
  Synthetic
uguguauguuguuuguacaugua

SEQ ID NO: 156568 - RNA, 18 nt, Artificial Sequence
  Synthetic
cuugguuuuaaggaugua

SEQ ID NO: 156569 - RNA, 20 nt, Artificial Sequence
  Synthetic
ugcuugguuuuaaggaugua

SEQ ID NO: 156570 - RNA, 21 nt, Artificial Sequence
  Synthetic
uugcuugguuuuaaggaugua

SEQ ID NO: 156571 - RNA, 22 nt, Artificial Sequence
  Synthetic
uuugcuugguuuuaaggaugua

SEQ ID NO: 156572 - RNA, 23 nt, Artificial Sequence
  Synthetic
cuuugcuugguuuuaaggaugua

SEQ ID NO: 156573 - RNA, 24 nt, Artificial Sequence
  Synthetic
ccuuugcuugguuuuaaggaugua

SEQ ID NO: 156574 - RNA, 19 nt, Artificial Sequence
  Synthetic
ugugcagcacgugacugua

SEQ ID NO: 156575 - RNA, 20 nt, Artificial Sequence
  Synthetic
uugugcagcacgugacugua

SEQ ID NO: 156576 - RNA, 21 nt, Artificial Sequence
  Synthetic
uuugugcagcacgugacugua

SEQ ID NO: 156577 - RNA, 22 nt, Artificial Sequence
  Synthetic
auuugugcagcacgugacugua

SEQ ID NO: 156578 - RNA, 23 nt, Artificial Sequence
  Synthetic
aauuugugcagcacgugacugua

SEQ ID NO: 156579 - RNA, 24 nt, Artificial Sequence
  Synthetic
aaauuugugcagcacgugacugua

SEQ ID NO: 156580 - RNA, 20 nt, Artificial Sequence
  Synthetic
cgaaucugggugcuccugua

SEQ ID NO: 156581 - RNA, 21 nt, Artificial Sequence
  Synthetic
acgaaucugggugcuccugua

SEQ ID NO: 156582 - RNA, 22 nt, Artificial Sequence
  Synthetic
uacgaaucugggugcuccugua

SEQ ID NO: 156583 - RNA, 23 nt, Artificial Sequence
  Synthetic
uuacgaaucugggugcuccugua

SEQ ID NO: 156584 - RNA, 24 nt, Artificial Sequence
  Synthetic
uuuacgaaucugggugcuccugua

SEQ ID NO: 156585 - RNA, 21 nt, Artificial Sequence
  Synthetic
uguuacauaauugaagcugua

SEQ ID NO: 156586 - RNA, 22 nt, Artificial Sequence
  Synthetic
cuguuacauaauugaagcugua

SEQ ID NO: 156587 - RNA, 23 nt, Artificial Sequence
  Synthetic
ucuguuacauaauugaagcugua

SEQ ID NO: 156588 - RNA, 24 nt, Artificial Sequence
  Synthetic
uucuguuacauaauugaagcugua

SEQ ID NO: 156589 - RNA, 21 nt, Artificial Sequence
  Synthetic
ugcaccaaccuaacagcugua

SEQ ID NO: 156590 - RNA, 22 nt, Artificial Sequence
  Synthetic
uugcaccaaccuaacagcugua

SEQ ID NO: 156591 - RNA, 23 nt, Artificial Sequence
  Synthetic
uuugcaccaaccuaacagcugua

SEQ ID NO: 156592 - RNA, 24 nt, Artificial Sequence
  Synthetic
uuuugcaccaaccuaacagcugua

SEQ ID NO: 156593 - RNA, 18 nt, Artificial Sequence
  Synthetic
agcauuugcuugucugua

SEQ ID NO: 156594 - RNA, 19 nt, Artificial Sequence
  Synthetic
cagcauuugcuugucugua

SEQ ID NO: 156595 - RNA, 20 nt, Artificial Sequence
  Synthetic
ucagcauuugcuugucugua

SEQ ID NO: 156596 - RNA, 21 nt, Artificial Sequence
  Synthetic
cucagcauuugcuugucugua

SEQ ID NO: 156597 - RNA, 22 nt, Artificial Sequence
  Synthetic
acucagcauuugcuugucugua

SEQ ID NO: 156598 - RNA, 23 nt, Artificial Sequence
  Synthetic
cacucagcauuugcuugucugua

SEQ ID NO: 156599 - RNA, 24 nt, Artificial Sequence
  Synthetic
ucacucagcauuugcuugucugua

SEQ ID NO: 156600 - RNA, 22 nt, Artificial Sequence
  Synthetic
ucucagcauuugcuugucugua

SEQ ID NO: 156601 - RNA, 23 nt, Artificial Sequence
  Synthetic
cucucagcauuugcuugucugua

SEQ ID NO: 156602 - RNA, 24 nt, Artificial Sequence
  Synthetic
ucucucagcauuugcuugucugua

SEQ ID NO: 156603 - RNA, 20 nt, Artificial Sequence
  Synthetic
uggaggaaccuggaugugua

SEQ ID NO: 156604 - RNA, 18 nt, Artificial Sequence
  Synthetic
cauagcauuuacauugua

SEQ ID NO: 156605 - RNA, 19 nt, Artificial Sequence
  Synthetic
acauagcauuuacauugua

SEQ ID NO: 156606 - RNA, 20 nt, Artificial Sequence
  Synthetic
uacauagcauuuacauugua

SEQ ID NO: 156607 - RNA, 21 nt, Artificial Sequence
  Synthetic
uuacauagcauuuacauugua

SEQ ID NO: 156608 - RNA, 22 nt, Artificial Sequence
  Synthetic
uuuacauagcauuuacauugua

SEQ ID NO: 156609 - RNA, 23 nt, Artificial Sequence
  Synthetic
auuuacauagcauuuacauugua

SEQ ID NO: 156610 - RNA, 24 nt, Artificial Sequence
  Synthetic
uauuuacauagcauuuacauugua

SEQ ID NO: 156611 - RNA, 18 nt, Artificial Sequence
  Synthetic
uaauuucucccauuugua

SEQ ID NO: 156612 - RNA, 19 nt, Artificial Sequence
  Synthetic
cuaauuucucccauuugua

SEQ ID NO: 156613 - RNA, 22 nt, Artificial Sequence
  Synthetic
uggcuaauuucucccauuugua

SEQ ID NO: 156614 - RNA, 23 nt, Artificial Sequence
  Synthetic
uuggcuaauuucucccauuugua

SEQ ID NO: 156615 - RNA, 24 nt, Artificial Sequence
  Synthetic
uuuggcuaauuucucccauuugua

SEQ ID NO: 156616 - RNA, 18 nt, Artificial Sequence
  Synthetic
caauuauccuaaaaauua

SEQ ID NO: 156617 - RNA, 19 nt, Artificial Sequence
  Synthetic
acaauuauccuaaaaauua

SEQ ID NO: 156618 - RNA, 18 nt, Artificial Sequence
  Synthetic
aagacauuuuaaaaauua

SEQ ID NO: 156619 - RNA, 20 nt, Artificial Sequence
  Synthetic
ugaagacauuuuaaaaauua

SEQ ID NO: 156620 - RNA, 18 nt, Artificial Sequence
  Synthetic
uggggauuaaggaaauua

SEQ ID NO: 156621 - RNA, 19 nt, Artificial Sequence
  Synthetic
auggggauuaaggaaauua

SEQ ID NO: 156622 - RNA, 20 nt, Artificial Sequence
  Synthetic
aauggggauuaaggaaauua

SEQ ID NO: 156623 - RNA, 18 nt, Artificial Sequence
  Synthetic
cuuuauucuaauaaauua

SEQ ID NO: 156624 - RNA, 19 nt, Artificial Sequence
  Synthetic
ucuuuauucuaauaaauua

SEQ ID NO: 156625 - RNA, 20 nt, Artificial Sequence
  Synthetic
cucuuuauucuaauaaauua

SEQ ID NO: 156626 - RNA, 18 nt, Artificial Sequence
  Synthetic
uaugcuccuaaacaauua

SEQ ID NO: 156627 - RNA, 19 nt, Artificial Sequence
  Synthetic
auaugcuccuaaacaauua

SEQ ID NO: 156628 - RNA, 20 nt, Artificial Sequence
  Synthetic
aauaugcuccuaaacaauua

SEQ ID NO: 156629 - RNA, 21 nt, Artificial Sequence
  Synthetic
caauaugcuccuaaacaauua

SEQ ID NO: 156630 - RNA, 22 nt, Artificial Sequence
  Synthetic
acaauaugcuccuaaacaauua

SEQ ID NO: 156631 - RNA, 23 nt, Artificial Sequence
  Synthetic
aacaauaugcuccuaaacaauua

SEQ ID NO: 156632 - RNA, 24 nt, Artificial Sequence
  Synthetic
aaacaauaugcuccuaaacaauua

SEQ ID NO: 156633 - RNA, 18 nt, Artificial Sequence
  Synthetic
cauucuuccuaacaauua

SEQ ID NO: 156634 - RNA, 19 nt, Artificial Sequence
  Synthetic
acauucuuccuaacaauua

SEQ ID NO: 156635 - RNA, 20 nt, Artificial Sequence
  Synthetic
aacauucuuccuaacaauua

SEQ ID NO: 156636 - RNA, 22 nt, Artificial Sequence
  Synthetic
agaacauucuuccuaacaauua

SEQ ID NO: 156637 - RNA, 23 nt, Artificial Sequence
  Synthetic
cagaacauucuuccuaacaauua

SEQ ID NO: 156638 - RNA, 24 nt, Artificial Sequence
  Synthetic
acagaacauucuuccuaacaauua

SEQ ID NO: 156639 - RNA, 18 nt, Artificial Sequence
  Synthetic
uacccagaaguggaauua

SEQ ID NO: 156640 - RNA, 19 nt, Artificial Sequence
  Synthetic
auacccagaaguggaauua

SEQ ID NO: 156641 - RNA, 20 nt, Artificial Sequence
  Synthetic
uauacccagaaguggaauua

SEQ ID NO: 156642 - RNA, 21 nt, Artificial Sequence
  Synthetic
auauacccagaaguggaauua

SEQ ID NO: 156643 - RNA, 22 nt, Artificial Sequence
  Synthetic
uauauacccagaaguggaauua

SEQ ID NO: 156644 - RNA, 18 nt, Artificial Sequence
  Synthetic
uauauaaagcaaacauua

SEQ ID NO: 156645 - RNA, 19 nt, Artificial Sequence
  Synthetic
auauauaaagcaaacauua

SEQ ID NO: 156646 - RNA, 20 nt, Artificial Sequence
  Synthetic
aauauauaaagcaaacauua

SEQ ID NO: 156647 - RNA, 21 nt, Artificial Sequence
  Synthetic
aaauauauaaagcaaacauua

SEQ ID NO: 156648 - RNA, 22 nt, Artificial Sequence
  Synthetic
uaaauauauaaagcaaacauua

SEQ ID NO: 156649 - RNA, 23 nt, Artificial Sequence
  Synthetic
cuaaauauauaaagcaaacauua

SEQ ID NO: 156650 - RNA, 24 nt, Artificial Sequence
  Synthetic
ccuaaauauauaaagcaaacauua

SEQ ID NO: 156651 - RNA, 21 nt, Artificial Sequence
  Synthetic
uuugacccagcaaucccauua

SEQ ID NO: 156652 - RNA, 22 nt, Artificial Sequence
  Synthetic
auuugacccagcaaucccauua

SEQ ID NO: 156653 - RNA, 23 nt, Artificial Sequence
  Synthetic
cauuugacccagcaaucccauua

SEQ ID NO: 156654 - RNA, 24 nt, Artificial Sequence
  Synthetic
ccauuugacccagcaaucccauua

SEQ ID NO: 156655 - RNA, 19 nt, Artificial Sequence
  Synthetic
ugacccggccaucccauua

SEQ ID NO: 156656 - RNA, 20 nt, Artificial Sequence
  Synthetic
uugacccggccaucccauua

SEQ ID NO: 156657 - RNA, 21 nt, Artificial Sequence
  Synthetic
uuugacccggccaucccauua

SEQ ID NO: 156658 - RNA, 22 nt, Artificial Sequence
  Synthetic
auuugacccggccaucccauua

SEQ ID NO: 156659 - RNA, 23 nt, Artificial Sequence
  Synthetic
cauuugacccggccaucccauua

SEQ ID NO: 156660 - RNA, 24 nt, Artificial Sequence
  Synthetic
ccauuugacccggccaucccauua

SEQ ID NO: 156661 - RNA, 19 nt, Artificial Sequence
  Synthetic
ugacccagcuaucccauua

SEQ ID NO: 156662 - RNA, 20 nt, Artificial Sequence
  Synthetic
uugacccagcuaucccauua

SEQ ID NO: 156663 - RNA, 21 nt, Artificial Sequence
  Synthetic
uuugacccagcuaucccauua

SEQ ID NO: 156664 - RNA, 22 nt, Artificial Sequence
  Synthetic
auuugacccagcuaucccauua

SEQ ID NO: 156665 - RNA, 23 nt, Artificial Sequence
  Synthetic
cauuugacccagcuaucccauua

SEQ ID NO: 156666 - RNA, 24 nt, Artificial Sequence
  Synthetic
ccauuugacccagcuaucccauua

SEQ ID NO: 156667 - RNA, 18 nt, Artificial Sequence
  Synthetic
aacccagcaaugccauua

SEQ ID NO: 156668 - RNA, 19 nt, Artificial Sequence
  Synthetic
caacccagcaaugccauua

SEQ ID NO: 156669 - RNA, 20 nt, Artificial Sequence
  Synthetic
ucaacccagcaaugccauua

SEQ ID NO: 156670 - RNA, 21 nt, Artificial Sequence
  Synthetic
uucaacccagcaaugccauua

SEQ ID NO: 156671 - RNA, 23 nt, Artificial Sequence
  Synthetic
cguucaacccagcaaugccauua

SEQ ID NO: 156672 - RNA, 24 nt, Artificial Sequence
  Synthetic
ccguucaacccagcaaugccauua

SEQ ID NO: 156673 - RNA, 21 nt, Artificial Sequence
  Synthetic
acaguaauguuguaagcauua

SEQ ID NO: 156674 - RNA, 22 nt, Artificial Sequence
  Synthetic
cacaguaauguuguaagcauua

SEQ ID NO: 156675 - RNA, 23 nt, Artificial Sequence
  Synthetic
ucacaguaauguuguaagcauua

SEQ ID NO: 156676 - RNA, 24 nt, Artificial Sequence
  Synthetic
cucacaguaauguuguaagcauua

SEQ ID NO: 156677 - RNA, 18 nt, Artificial Sequence
  Synthetic
auuuuaggagaaagauua

SEQ ID NO: 156678 - RNA, 19 nt, Artificial Sequence
  Synthetic
uauuuuaggagaaagauua

SEQ ID NO: 156679 - RNA, 20 nt, Artificial Sequence
  Synthetic
auauuuuaggagaaagauua

SEQ ID NO: 156680 - RNA, 18 nt, Artificial Sequence
  Synthetic
aguacaaagacaagauua

SEQ ID NO: 156681 - RNA, 19 nt, Artificial Sequence
  Synthetic
aaguacaaagacaagauua

SEQ ID NO: 156682 - RNA, 20 nt, Artificial Sequence
  Synthetic
aaaguacaaagacaagauua

SEQ ID NO: 156683 - RNA, 18 nt, Artificial Sequence
  Synthetic
uuauaugaauuaggauua

SEQ ID NO: 156684 - RNA, 19 nt, Artificial Sequence
  Synthetic
auuauaugaauuaggauua

SEQ ID NO: 156685 - RNA, 20 nt, Artificial Sequence
  Synthetic
uauuauaugaauuaggauua

SEQ ID NO: 156686 - RNA, 18 nt, Artificial Sequence
  Synthetic
augauauuuuggugauua

SEQ ID NO: 156687 - RNA, 19 nt, Artificial Sequence
  Synthetic
aaugauauuuuggugauua

SEQ ID NO: 156688 - RNA, 20 nt, Artificial Sequence
  Synthetic
aaaugauauuuuggugauua

SEQ ID NO: 156689 - RNA, 18 nt, Artificial Sequence
  Synthetic
aaauuaauuaugugauua

SEQ ID NO: 156690 - RNA, 19 nt, Artificial Sequence
  Synthetic
aaaauuaauuaugugauua

SEQ ID NO: 156691 - RNA, 20 nt, Artificial Sequence
  Synthetic
uaaaauuaauuaugugauua

SEQ ID NO: 156692 - RNA, 18 nt, Artificial Sequence
  Synthetic
auuuaucaugaaauauua

SEQ ID NO: 156693 - RNA, 19 nt, Artificial Sequence
  Synthetic
uauuuaucaugaaauauua

SEQ ID NO: 156694 - RNA, 20 nt, Artificial Sequence
  Synthetic
uuauuuaucaugaaauauua

SEQ ID NO: 156695 - RNA, 18 nt, Artificial Sequence
  Synthetic
auaugcaaugggauauua

SEQ ID NO: 156696 - RNA, 19 nt, Artificial Sequence
  Synthetic
uauaugcaaugggauauua

SEQ ID NO: 156697 - RNA, 20 nt, Artificial Sequence
  Synthetic
auauaugcaaugggauauua

SEQ ID NO: 156698 - RNA, 18 nt, Artificial Sequence
  Synthetic
uuauuccaaaaacuauua

SEQ ID NO: 156699 - RNA, 19 nt, Artificial Sequence
  Synthetic
uuuauuccaaaaacuauua

SEQ ID NO: 156700 - RNA, 20 nt, Artificial Sequence
  Synthetic
auuuauuccaaaaacuauua

SEQ ID NO: 156701 - RNA, 18 nt, Artificial Sequence
  Synthetic
aauaaaugguagcuauua

SEQ ID NO: 156702 - RNA, 19 nt, Artificial Sequence
  Synthetic
aaauaaaugguagcuauua

SEQ ID NO: 156703 - RNA, 20 nt, Artificial Sequence
  Synthetic
uaaauaaaugguagcuauua

SEQ ID NO: 156704 - RNA, 18 nt, Artificial Sequence
  Synthetic
augaguauucugcuauua

SEQ ID NO: 156705 - RNA, 19 nt, Artificial Sequence
  Synthetic
aaugaguauucugcuauua

SEQ ID NO: 156706 - RNA, 21 nt, Artificial Sequence
  Synthetic
agaaugaguauucugcuauua

SEQ ID NO: 156707 - RNA, 22 nt, Artificial Sequence
  Synthetic
aagaaugaguauucugcuauua

SEQ ID NO: 156708 - RNA, 23 nt, Artificial Sequence
  Synthetic
aaagaaugaguauucugcuauua

SEQ ID NO: 156709 - RNA, 24 nt, Artificial Sequence
  Synthetic
aaaagaaugaguauucugcuauua

SEQ ID NO: 156710 - RNA, 19 nt, Artificial Sequence
  Synthetic
ugccauugugacaguauua

SEQ ID NO: 156711 - RNA, 20 nt, Artificial Sequence
  Synthetic
uugccauugugacaguauua

SEQ ID NO: 156712 - RNA, 21 nt, Artificial Sequence
  Synthetic
auugccauugugacaguauua

SEQ ID NO: 156713 - RNA, 22 nt, Artificial Sequence
  Synthetic
aauugccauugugacaguauua

SEQ ID NO: 156714 - RNA, 23 nt, Artificial Sequence
  Synthetic
uaauugccauugugacaguauua

SEQ ID NO: 156715 - RNA, 24 nt, Artificial Sequence
  Synthetic
uuaauugccauugugacaguauua

SEQ ID NO: 156716 - RNA, 18 nt, Artificial Sequence
  Synthetic
uuaagcuaaguguuauua

SEQ ID NO: 156717 - RNA, 19 nt, Artificial Sequence
  Synthetic
uuuaagcuaaguguuauua

SEQ ID NO: 156718 - RNA, 20 nt, Artificial Sequence
  Synthetic
uuuuaagcuaaguguuauua

SEQ ID NO: 156719 - RNA, 22 nt, Artificial Sequence
  Synthetic
uguuuuaagcuaaguguuauua

SEQ ID NO: 156720 - RNA, 23 nt, Artificial Sequence
  Synthetic
auguuuuaagcuaaguguuauua

SEQ ID NO: 156721 - RNA, 24 nt, Artificial Sequence
  Synthetic
cauguuuuaagcuaaguguuauua

SEQ ID NO: 156722 - RNA, 18 nt, Artificial Sequence
  Synthetic
aauauuaaagaauacuua

SEQ ID NO: 156723 - RNA, 19 nt, Artificial Sequence
  Synthetic
aaauauuaaagaauacuua

SEQ ID NO: 156724 - RNA, 20 nt, Artificial Sequence
  Synthetic
aaaauauuaaagaauacuua

SEQ ID NO: 156725 - RNA, 18 nt, Artificial Sequence
  Synthetic
agagugagaaauuacuua

SEQ ID NO: 156726 - RNA, 20 nt, Artificial Sequence
  Synthetic
ugagagugagaaauuacuua

SEQ ID NO: 156727 - RNA, 18 nt, Artificial Sequence
  Synthetic
uacagcaugguuuacuua

SEQ ID NO: 156728 - RNA, 19 nt, Artificial Sequence
  Synthetic
uuacagcaugguuuacuua

SEQ ID NO: 156729 - RNA, 20 nt, Artificial Sequence
  Synthetic
uuuacagcaugguuuacuua

SEQ ID NO: 156730 - RNA, 21 nt, Artificial Sequence
  Synthetic
cuuuacagcaugguuuacuua

SEQ ID NO: 156731 - RNA, 22 nt, Artificial Sequence
  Synthetic
ucuuuacagcaugguuuacuua

SEQ ID NO: 156732 - RNA, 23 nt, Artificial Sequence
  Synthetic
cucuuuacagcaugguuuacuua

SEQ ID NO: 156733 - RNA, 24 nt, Artificial Sequence
  Synthetic
ucucuuuacagcaugguuuacuua

SEQ ID NO: 156734 - RNA, 21 nt, Artificial Sequence
  Synthetic
aggaaaaucuaguuuuacuua

SEQ ID NO: 156735 - RNA, 22 nt, Artificial Sequence
  Synthetic
aaggaaaaucuaguuuuacuua

SEQ ID NO: 156736 - RNA, 23 nt, Artificial Sequence
  Synthetic
uaaggaaaaucuaguuuuacuua

SEQ ID NO: 156737 - RNA, 24 nt, Artificial Sequence
  Synthetic
auaaggaaaaucuaguuuuacuua

SEQ ID NO: 156738 - RNA, 18 nt, Artificial Sequence
  Synthetic
uuacuaucuuguuccuua

SEQ ID NO: 156739 - RNA, 19 nt, Artificial Sequence
  Synthetic
uuuacuaucuuguuccuua

SEQ ID NO: 156740 - RNA, 20 nt, Artificial Sequence
  Synthetic
auuuacuaucuuguuccuua

SEQ ID NO: 156741 - RNA, 21 nt, Artificial Sequence
  Synthetic
uauuuacuaucuuguuccuua

SEQ ID NO: 156742 - RNA, 22 nt, Artificial Sequence
  Synthetic
auauuuacuaucuuguuccuua

SEQ ID NO: 156743 - RNA, 23 nt, Artificial Sequence
  Synthetic
aauauuuacuaucuuguuccuua

SEQ ID NO: 156744 - RNA, 24 nt, Artificial Sequence
  Synthetic
uaauauuuacuaucuuguuccuua

SEQ ID NO: 156745 - RNA, 19 nt, Artificial Sequence
  Synthetic
ugucccgguaccuggcuua

SEQ ID NO: 156746 - RNA, 20 nt, Artificial Sequence
  Synthetic
cugucccgguaccuggcuua

SEQ ID NO: 156747 - RNA, 21 nt, Artificial Sequence
  Synthetic
acugucccgguaccuggcuua

SEQ ID NO: 156748 - RNA, 22 nt, Artificial Sequence
  Synthetic
aacugucccgguaccuggcuua

SEQ ID NO: 156749 - RNA, 23 nt, Artificial Sequence
  Synthetic
aaacugucccgguaccuggcuua

SEQ ID NO: 156750 - RNA, 24 nt, Artificial Sequence
  Synthetic
aaaacugucccgguaccuggcuua

SEQ ID NO: 156751 - RNA, 19 nt, Artificial Sequence
  Synthetic
agugcucaauuaaugcuua

SEQ ID NO: 156752 - RNA, 20 nt, Artificial Sequence
  Synthetic
aagugcucaauuaaugcuua

SEQ ID NO: 156753 - RNA, 21 nt, Artificial Sequence
  Synthetic
caagugcucaauuaaugcuua

SEQ ID NO: 156754 - RNA, 23 nt, Artificial Sequence
  Synthetic
agcaagugcucaauuaaugcuua

SEQ ID NO: 156755 - RNA, 24 nt, Artificial Sequence
  Synthetic
uagcaagugcucaauuaaugcuua

SEQ ID NO: 156756 - RNA, 18 nt, Artificial Sequence
  Synthetic
acaagaguaccuaucuua

SEQ ID NO: 156757 - RNA, 19 nt, Artificial Sequence
  Synthetic
aacaagaguaccuaucuua

SEQ ID NO: 156758 - RNA, 20 nt, Artificial Sequence
  Synthetic
uaacaagaguaccuaucuua

SEQ ID NO: 156759 - RNA, 21 nt, Artificial Sequence
  Synthetic
auaacaagaguaccuaucuua

SEQ ID NO: 156760 - RNA, 24 nt, Artificial Sequence
  Synthetic
aggauaacaagaguaccuaucuua

SEQ ID NO: 156761 - RNA, 18 nt, Artificial Sequence
  Synthetic
auuuaccacuuuaucuua

SEQ ID NO: 156762 - RNA, 19 nt, Artificial Sequence
  Synthetic
aauuuaccacuuuaucuua

SEQ ID NO: 156763 - RNA, 20 nt, Artificial Sequence
  Synthetic
aaauuuaccacuuuaucuua

SEQ ID NO: 156764 - RNA, 22 nt, Artificial Sequence
  Synthetic
ugccuuauauauauuucucuua

SEQ ID NO: 156765 - RNA, 23 nt, Artificial Sequence
  Synthetic
augccuuauauauauuucucuua

SEQ ID NO: 156766 - RNA, 24 nt, Artificial Sequence
  Synthetic
uaugccuuauauauauuucucuua

SEQ ID NO: 156767 - RNA, 18 nt, Artificial Sequence
  Synthetic
aauguaaaugacaaguua

SEQ ID NO: 156768 - RNA, 19 nt, Artificial Sequence
  Synthetic
uaauguaaaugacaaguua

SEQ ID NO: 156769 - RNA, 20 nt, Artificial Sequence
  Synthetic
cuaauguaaaugacaaguua

SEQ ID NO: 156770 - RNA, 21 nt, Artificial Sequence
  Synthetic
ccuaauguaaaugacaaguua

SEQ ID NO: 156771 - RNA, 22 nt, Artificial Sequence
  Synthetic
accuaauguaaaugacaaguua

SEQ ID NO: 156772 - RNA, 23 nt, Artificial Sequence
  Synthetic
uaccuaauguaaaugacaaguua

SEQ ID NO: 156773 - RNA, 24 nt, Artificial Sequence
  Synthetic
auaccuaauguaaaugacaaguua

SEQ ID NO: 156774 - RNA, 21 nt, Artificial Sequence
  Synthetic
ucaucaauuuuauuucaguua

SEQ ID NO: 156775 - RNA, 22 nt, Artificial Sequence
  Synthetic
uucaucaauuuuauuucaguua

SEQ ID NO: 156776 - RNA, 23 nt, Artificial Sequence
  Synthetic
uuucaucaauuuuauuucaguua

SEQ ID NO: 156777 - RNA, 24 nt, Artificial Sequence
  Synthetic
uuuucaucaauuuuauuucaguua

SEQ ID NO: 156778 - RNA, 18 nt, Artificial Sequence
  Synthetic
auguuaaaugaagaguua

SEQ ID NO: 156779 - RNA, 19 nt, Artificial Sequence
  Synthetic
aauguuaaaugaagaguua

SEQ ID NO: 156780 - RNA, 20 nt, Artificial Sequence
  Synthetic
uaauguuaaaugaagaguua

SEQ ID NO: 156781 - RNA, 21 nt, Artificial Sequence
  Synthetic
cuaauguuaaaugaagaguua

SEQ ID NO: 156782 - RNA, 22 nt, Artificial Sequence
  Synthetic
ccuaauguuaaaugaagaguua

SEQ ID NO: 156783 - RNA, 23 nt, Artificial Sequence
  Synthetic
accuaauguuaaaugaagaguua

SEQ ID NO: 156784 - RNA, 24 nt, Artificial Sequence
  Synthetic
uaccuaauguuaaaugaagaguua

SEQ ID NO: 156785 - RNA, 18 nt, Artificial Sequence
  Synthetic
augcuaaaugacgaguua

SEQ ID NO: 156786 - RNA, 19 nt, Artificial Sequence
  Synthetic
aaugcuaaaugacgaguua

SEQ ID NO: 156787 - RNA, 20 nt, Artificial Sequence
  Synthetic
uaaugcuaaaugacgaguua

SEQ ID NO: 156788 - RNA, 21 nt, Artificial Sequence
  Synthetic
cuaaugcuaaaugacgaguua

SEQ ID NO: 156789 - RNA, 22 nt, Artificial Sequence
  Synthetic
ccuaaugcuaaaugacgaguua

SEQ ID NO: 156790 - RNA, 23 nt, Artificial Sequence
  Synthetic
accuaaugcuaaaugacgaguua

SEQ ID NO: 156791 - RNA, 24 nt, Artificial Sequence
  Synthetic
uaccuaaugcuaaaugacgaguua

SEQ ID NO: 156792 - RNA, 22 nt, Artificial Sequence
  Synthetic
agcuaauguaaaugacgaguua

SEQ ID NO: 156793 - RNA, 23 nt, Artificial Sequence
  Synthetic
uagcuaauguaaaugacgaguua

SEQ ID NO: 156794 - RNA, 24 nt, Artificial Sequence
  Synthetic
auagcuaauguaaaugacgaguua

SEQ ID NO: 156795 - RNA, 18 nt, Artificial Sequence
  Synthetic
auguucaaugacgaguua

SEQ ID NO: 156796 - RNA, 19 nt, Artificial Sequence
  Synthetic
aauguucaaugacgaguua

SEQ ID NO: 156797 - RNA, 20 nt, Artificial Sequence
  Synthetic
uaauguucaaugacgaguua

SEQ ID NO: 156798 - RNA, 21 nt, Artificial Sequence
  Synthetic
cuaauguucaaugacgaguua

SEQ ID NO: 156799 - RNA, 22 nt, Artificial Sequence
  Synthetic
ccuaauguucaaugacgaguua

SEQ ID NO: 156800 - RNA, 23 nt, Artificial Sequence
  Synthetic
accuaauguucaaugacgaguua

SEQ ID NO: 156801 - RNA, 24 nt, Artificial Sequence
  Synthetic
uaccuaauguucaaugacgaguua

SEQ ID NO: 156802 - RNA, 18 nt, Artificial Sequence
  Synthetic
aagcuagaugacgaguua

SEQ ID NO: 156803 - RNA, 19 nt, Artificial Sequence
  Synthetic
uaagcuagaugacgaguua

SEQ ID NO: 156804 - RNA, 20 nt, Artificial Sequence
  Synthetic
uuaagcuagaugacgaguua

SEQ ID NO: 156805 - RNA, 21 nt, Artificial Sequence
  Synthetic
cuuaagcuagaugacgaguua

SEQ ID NO: 156806 - RNA, 22 nt, Artificial Sequence
  Synthetic
ccuuaagcuagaugacgaguua

SEQ ID NO: 156807 - RNA, 23 nt, Artificial Sequence
  Synthetic
accuuaagcuagaugacgaguua

SEQ ID NO: 156808 - RNA, 24 nt, Artificial Sequence
  Synthetic
uaccuuaagcuagaugacgaguua

SEQ ID NO: 156809 - RNA, 18 nt, Artificial Sequence
  Synthetic
ucauaaauuaauagguua

SEQ ID NO: 156810 - RNA, 19 nt, Artificial Sequence
  Synthetic
uucauaaauuaauagguua

SEQ ID NO: 156811 - RNA, 20 nt, Artificial Sequence
  Synthetic
auucauaaauuaauagguua

SEQ ID NO: 156812 - RNA, 21 nt, Artificial Sequence
  Synthetic
cauucauaaauuaauagguua

SEQ ID NO: 156813 - RNA, 22 nt, Artificial Sequence
  Synthetic
ccauucauaaauuaauagguua

SEQ ID NO: 156814 - RNA, 23 nt, Artificial Sequence
  Synthetic
uccauucauaaauuaauagguua

SEQ ID NO: 156815 - RNA, 24 nt, Artificial Sequence
  Synthetic
auccauucauaaauuaauagguua

SEQ ID NO: 156816 - RNA, 19 nt, Artificial Sequence
  Synthetic
ugcacuccagccuggguua

SEQ ID NO: 156817 - RNA, 20 nt, Artificial Sequence
  Synthetic
uugcacuccagccuggguua

SEQ ID NO: 156818 - RNA, 21 nt, Artificial Sequence
  Synthetic
auugcacuccagccuggguua

SEQ ID NO: 156819 - RNA, 22 nt, Artificial Sequence
  Synthetic
cauugcacuccagccuggguua

SEQ ID NO: 156820 - RNA, 23 nt, Artificial Sequence
  Synthetic
ccauugcacuccagccuggguua

SEQ ID NO: 156821 - RNA, 21 nt, Artificial Sequence
  Synthetic
ugggugaagagagauugguua

SEQ ID NO: 156822 - RNA, 22 nt, Artificial Sequence
  Synthetic
augggugaagagagauugguua

SEQ ID NO: 156823 - RNA, 23 nt, Artificial Sequence
  Synthetic
aaugggugaagagagauugguua

SEQ ID NO: 156824 - RNA, 18 nt, Artificial Sequence
  Synthetic
aaaaaaucugucuuguua

SEQ ID NO: 156825 - RNA, 19 nt, Artificial Sequence
  Synthetic
aaaaaaaucugucuuguua

SEQ ID NO: 156826 - RNA, 18 nt, Artificial Sequence
  Synthetic
aaauaaaucauguuguua

SEQ ID NO: 156827 - RNA, 21 nt, Artificial Sequence
  Synthetic
uggaaauaaaucauguuguua

SEQ ID NO: 156828 - RNA, 22 nt, Artificial Sequence
  Synthetic
uuggaaauaaaucauguuguua

SEQ ID NO: 156829 - RNA, 23 nt, Artificial Sequence
  Synthetic
cuuggaaauaaaucauguuguua

SEQ ID NO: 156830 - RNA, 24 nt, Artificial Sequence
  Synthetic
ucuuggaaauaaaucauguuguua

SEQ ID NO: 156831 - RNA, 18 nt, Artificial Sequence
  Synthetic
aaaagaaaagauuuguua

SEQ ID NO: 156832 - RNA, 20 nt, Artificial Sequence
  Synthetic
agaaaagaaaagauuuguua

SEQ ID NO: 156833 - RNA, 18 nt, Artificial Sequence
  Synthetic
aacaucucauguaauuua

SEQ ID NO: 156834 - RNA, 20 nt, Artificial Sequence
  Synthetic
ugaacaucucauguaauuua

SEQ ID NO: 156835 - RNA, 21 nt, Artificial Sequence
  Synthetic
uugaacaucucauguaauuua

SEQ ID NO: 156836 - RNA, 23 nt, Artificial Sequence
  Synthetic
uguugaacaucucauguaauuua

SEQ ID NO: 156837 - RNA, 18 nt, Artificial Sequence
  Synthetic
aauaauuauauacauuua

SEQ ID NO: 156838 - RNA, 19 nt, Artificial Sequence
  Synthetic
aaauaauuauauacauuua

SEQ ID NO: 156839 - RNA, 20 nt, Artificial Sequence
  Synthetic
caaauaauuauauacauuua

SEQ ID NO: 156840 - RNA, 21 nt, Artificial Sequence
  Synthetic
acaaauaauuauauacauuua

SEQ ID NO: 156841 - RNA, 23 nt, Artificial Sequence
  Synthetic
ugacaaauaauuauauacauuua

SEQ ID NO: 156842 - RNA, 24 nt, Artificial Sequence
  Synthetic
uugacaaauaauuauauacauuua

SEQ ID NO: 156843 - RNA, 18 nt, Artificial Sequence
  Synthetic
aagcauaaauuacauuua

SEQ ID NO: 156844 - RNA, 19 nt, Artificial Sequence
  Synthetic
caagcauaaauuacauuua

SEQ ID NO: 156845 - RNA, 20 nt, Artificial Sequence
  Synthetic
ucaagcauaaauuacauuua

SEQ ID NO: 156846 - RNA, 18 nt, Artificial Sequence
  Synthetic
aauaggggcuuacauuua

SEQ ID NO: 156847 - RNA, 19 nt, Artificial Sequence
  Synthetic
uaauaggggcuuacauuua

SEQ ID NO: 156848 - RNA, 20 nt, Artificial Sequence
  Synthetic
auaauaggggcuuacauuua

SEQ ID NO: 156849 - RNA, 18 nt, Artificial Sequence
  Synthetic
uuuacccagcaccauuua

SEQ ID NO: 156850 - RNA, 21 nt, Artificial Sequence
  Synthetic
cgguuuacccagcaccauuua

SEQ ID NO: 156851 - RNA, 22 nt, Artificial Sequence
  Synthetic
ccgguuuacccagcaccauuua

SEQ ID NO: 156852 - RNA, 24 nt, Artificial Sequence
  Synthetic
agccgguuuacccagcaccauuua

SEQ ID NO: 156853 - RNA, 18 nt, Artificial Sequence
  Synthetic
uguuaugaaaaucauuua

SEQ ID NO: 156854 - RNA, 19 nt, Artificial Sequence
  Synthetic
auguuaugaaaaucauuua

SEQ ID NO: 156855 - RNA, 20 nt, Artificial Sequence
  Synthetic
aauguuaugaaaaucauuua

SEQ ID NO: 156856 - RNA, 18 nt, Artificial Sequence
  Synthetic
aucaauaacuaucauuua

SEQ ID NO: 156857 - RNA, 19 nt, Artificial Sequence
  Synthetic
aaucaauaacuaucauuua

SEQ ID NO: 156858 - RNA, 20 nt, Artificial Sequence
  Synthetic
uaaucaauaacuaucauuua

SEQ ID NO: 156859 - RNA, 18 nt, Artificial Sequence
  Synthetic
acuauuguuuuagauuua

SEQ ID NO: 156860 - RNA, 19 nt, Artificial Sequence
  Synthetic
aacuauuguuuuagauuua

SEQ ID NO: 156861 - RNA, 20 nt, Artificial Sequence
  Synthetic
caacuauuguuuuagauuua

SEQ ID NO: 156862 - RNA, 21 nt, Artificial Sequence
  Synthetic
ucaacuauuguuuuagauuua

SEQ ID NO: 156863 - RNA, 22 nt, Artificial Sequence
  Synthetic
uucaacuauuguuuuagauuua

SEQ ID NO: 156864 - RNA, 23 nt, Artificial Sequence
  Synthetic
uuucaacuauuguuuuagauuua

SEQ ID NO: 156865 - RNA, 24 nt, Artificial Sequence
  Synthetic
auuucaacuauuguuuuagauuua

SEQ ID NO: 156866 - RNA, 18 nt, Artificial Sequence
  Synthetic
aaaacuaaaaaggauuua

SEQ ID NO: 156867 - RNA, 19 nt, Artificial Sequence
  Synthetic
aaaaacuaaaaaggauuua

SEQ ID NO: 156868 - RNA, 20 nt, Artificial Sequence
  Synthetic
caaaaacuaaaaaggauuua

SEQ ID NO: 156869 - RNA, 19 nt, Artificial Sequence
  Synthetic
ugauauuuuaucauauuua

SEQ ID NO: 156870 - RNA, 20 nt, Artificial Sequence
  Synthetic
cugauauuuuaucauauuua

SEQ ID NO: 156871 - RNA, 21 nt, Artificial Sequence
  Synthetic
ucugauauuuuaucauauuua

SEQ ID NO: 156872 - RNA, 22 nt, Artificial Sequence
  Synthetic
aucugauauuuuaucauauuua

SEQ ID NO: 156873 - RNA, 23 nt, Artificial Sequence
  Synthetic
aaucugauauuuuaucauauuua

SEQ ID NO: 156874 - RNA, 24 nt, Artificial Sequence
  Synthetic
uaaucugauauuuuaucauauuua

SEQ ID NO: 156875 - RNA, 18 nt, Artificial Sequence
  Synthetic
aguaggugcauauauuua

SEQ ID NO: 156876 - RNA, 19 nt, Artificial Sequence
  Synthetic
uaguaggugcauauauuua

SEQ ID NO: 156877 - RNA, 20 nt, Artificial Sequence
  Synthetic
auaguaggugcauauauuua

SEQ ID NO: 156878 - RNA, 21 nt, Artificial Sequence
  Synthetic
cauaguaggugcauauauuua

SEQ ID NO: 156879 - RNA, 22 nt, Artificial Sequence
  Synthetic
acauaguaggugcauauauuua

SEQ ID NO: 156880 - RNA, 23 nt, Artificial Sequence
  Synthetic
uacauaguaggugcauauauuua

SEQ ID NO: 156881 - RNA, 18 nt, Artificial Sequence
  Synthetic
uuuuauuguauauauuua

SEQ ID NO: 156882 - RNA, 19 nt, Artificial Sequence
  Synthetic
auuuuauuguauauauuua

SEQ ID NO: 156883 - RNA, 20 nt, Artificial Sequence
  Synthetic
aauuuuauuguauauauuua

SEQ ID NO: 156884 - RNA, 21 nt, Artificial Sequence
  Synthetic
aaauuuuauuguauauauuua

SEQ ID NO: 156885 - RNA, 22 nt, Artificial Sequence
  Synthetic
uaaauuuuauuguauauauuua

SEQ ID NO: 156886 - RNA, 23 nt, Artificial Sequence
  Synthetic
auaaauuuuauuguauauauuua

SEQ ID NO: 156887 - RNA, 24 nt, Artificial Sequence
  Synthetic
aauaaauuuuauuguauauauuua

SEQ ID NO: 156888 - RNA, 19 nt, Artificial Sequence
  Synthetic
uguuacauuuauauauuua

SEQ ID NO: 156889 - RNA, 20 nt, Artificial Sequence
  Synthetic
uuguuacauuuauauauuua

SEQ ID NO: 156890 - RNA, 19 nt, Artificial Sequence
  Synthetic
agggauaaaagacuauuua

SEQ ID NO: 156891 - RNA, 20 nt, Artificial Sequence
  Synthetic
aagggauaaaagacuauuua

SEQ ID NO: 156892 - RNA, 21 nt, Artificial Sequence
  Synthetic
uaagggauaaaagacuauuua

SEQ ID NO: 156893 - RNA, 24 nt, Artificial Sequence
  Synthetic
agguaagggauaaaagacuauuua

SEQ ID NO: 156894 - RNA, 18 nt, Artificial Sequence
  Synthetic
uuauucuacagcuauuua

SEQ ID NO: 156895 - RNA, 19 nt, Artificial Sequence
  Synthetic
uuuauucuacagcuauuua

SEQ ID NO: 156896 - RNA, 18 nt, Artificial Sequence
  Synthetic
aaaaaaaagagguauuua

SEQ ID NO: 156897 - RNA, 19 nt, Artificial Sequence
  Synthetic
aaaaaaaaagagguauuua

SEQ ID NO: 156898 - RNA, 20 nt, Artificial Sequence
  Synthetic
aaaaaaaaaagagguauuua

SEQ ID NO: 156899 - RNA, 21 nt, Artificial Sequence
  Synthetic
aaaaaaaaaaagagguauuua

SEQ ID NO: 156900 - RNA, 22 nt, Artificial Sequence
  Synthetic
aaaaaaaaaaaagagguauuua

SEQ ID NO: 156901 - RNA, 23 nt, Artificial Sequence
  Synthetic
aaaaaaaaaaaaagagguauuua

SEQ ID NO: 156902 - RNA, 24 nt, Artificial Sequence
  Synthetic
aaaaaaaaaaaaaagagguauuua

SEQ ID NO: 156903 - RNA, 18 nt, Artificial Sequence
  Synthetic
augaaagaaaauuauuua

SEQ ID NO: 156904 - RNA, 19 nt, Artificial Sequence
  Synthetic
caugaaagaaaauuauuua

SEQ ID NO: 156905 - RNA, 20 nt, Artificial Sequence
  Synthetic
acaugaaagaaaauuauuua

SEQ ID NO: 156906 - RNA, 18 nt, Artificial Sequence
  Synthetic
uaaauguucaauuauuua

SEQ ID NO: 156907 - RNA, 19 nt, Artificial Sequence
  Synthetic
auaaauguucaauuauuua

SEQ ID NO: 156908 - RNA, 20 nt, Artificial Sequence
  Synthetic
aauaaauguucaauuauuua

SEQ ID NO: 156909 - RNA, 18 nt, Artificial Sequence
  Synthetic
uuaaauuguuguuauuua

SEQ ID NO: 156910 - RNA, 19 nt, Artificial Sequence
  Synthetic
uuuaaauuguuguuauuua

SEQ ID NO: 156911 - RNA, 20 nt, Artificial Sequence
  Synthetic
uuuuaaauuguuguuauuua

SEQ ID NO: 156912 - RNA, 18 nt, Artificial Sequence
  Synthetic
uccuuuuguccugcuuua

SEQ ID NO: 156913 - RNA, 19 nt, Artificial Sequence
  Synthetic
cuccuuuuguccugcuuua

SEQ ID NO: 156914 - RNA, 20 nt, Artificial Sequence
  Synthetic
acuccuuuuguccugcuuua

SEQ ID NO: 156915 - RNA, 18 nt, Artificial Sequence
  Synthetic
uaccacugacuuucuuua

SEQ ID NO: 156916 - RNA, 19 nt, Artificial Sequence
  Synthetic
cuaccacugacuuucuuua

SEQ ID NO: 156917 - RNA, 22 nt, Artificial Sequence
  Synthetic
aggcuaccacugacuuucuuua

SEQ ID NO: 156918 - RNA, 23 nt, Artificial Sequence
  Synthetic
caggcuaccacugacuuucuuua

SEQ ID NO: 156919 - RNA, 24 nt, Artificial Sequence
  Synthetic
acaggcuaccacugacuuucuuua

SEQ ID NO: 156920 - RNA, 18 nt, Artificial Sequence
  Synthetic
auuuaucaacuaaguuua

SEQ ID NO: 156921 - RNA, 19 nt, Artificial Sequence
  Synthetic
aauuuaucaacuaaguuua

SEQ ID NO: 156922 - RNA, 20 nt, Artificial Sequence
  Synthetic
uaauuuaucaacuaaguuua

SEQ ID NO: 156923 - RNA, 21 nt, Artificial Sequence
  Synthetic
cuaauuuaucaacuaaguuua

SEQ ID NO: 156924 - RNA, 23 nt, Artificial Sequence
  Synthetic
ugcuaauuuaucaacuaaguuua

SEQ ID NO: 156925 - RNA, 24 nt, Artificial Sequence
  Synthetic
augcuaauuuaucaacuaaguuua

SEQ ID NO: 156926 - RNA, 18 nt, Artificial Sequence
  Synthetic
cuuuuugaccuuaguuua

SEQ ID NO: 156927 - RNA, 19 nt, Artificial Sequence
  Synthetic
ucuuuuugaccuuaguuua

SEQ ID NO: 156928 - RNA, 20 nt, Artificial Sequence
  Synthetic
aucuuuuugaccuuaguuua

SEQ ID NO: 156929 - RNA, 18 nt, Artificial Sequence
  Synthetic
cuaucccagcaccguuua

SEQ ID NO: 156930 - RNA, 20 nt, Artificial Sequence
  Synthetic
agcuaucccagcaccguuua

SEQ ID NO: 156931 - RNA, 21 nt, Artificial Sequence
  Synthetic
cagcuaucccagcaccguuua

SEQ ID NO: 156932 - RNA, 22 nt, Artificial Sequence
  Synthetic
ccagcuaucccagcaccguuua

SEQ ID NO: 156933 - RNA, 24 nt, Artificial Sequence
  Synthetic
agccagcuaucccagcaccguuua

SEQ ID NO: 156934 - RNA, 19 nt, Artificial Sequence
  Synthetic
ugaagggaaaaaauguuua

SEQ ID NO: 156935 - RNA, 20 nt, Artificial Sequence
  Synthetic
uugaagggaaaaaauguuua

SEQ ID NO: 156936 - RNA, 18 nt, Artificial Sequence
  Synthetic
auuacauuguacuguuua

SEQ ID NO: 156937 - RNA, 19 nt, Artificial Sequence
  Synthetic
uauuacauuguacuguuua

SEQ ID NO: 156938 - RNA, 20 nt, Artificial Sequence
  Synthetic
uuauuacauuguacuguuua

SEQ ID NO: 156939 - RNA, 18 nt, Artificial Sequence
  Synthetic
uaauuuccuuucuguuua

SEQ ID NO: 156940 - RNA, 19 nt, Artificial Sequence
  Synthetic
auaauuuccuuucuguuua

SEQ ID NO: 156941 - RNA, 20 nt, Artificial Sequence
  Synthetic
uauaauuuccuuucuguuua

SEQ ID NO: 156942 - RNA, 21 nt, Artificial Sequence
  Synthetic
uuauaauuuccuuucuguuua

SEQ ID NO: 156943 - RNA, 23 nt, Artificial Sequence
  Synthetic
cguuauaauuuccuuucuguuua

SEQ ID NO: 156944 - RNA, 24 nt, Artificial Sequence
  Synthetic
ucguuauaauuuccuuucuguuua

SEQ ID NO: 156945 - RNA, 19 nt, Artificial Sequence
  Synthetic
agugcuccauauuuguuua

SEQ ID NO: 156946 - RNA, 20 nt, Artificial Sequence
  Synthetic
cagugcuccauauuuguuua

SEQ ID NO: 156947 - RNA, 18 nt, Artificial Sequence
  Synthetic
uuauaacauaacauuuua

SEQ ID NO: 156948 - RNA, 20 nt, Artificial Sequence
  Synthetic
aguuauaacauaacauuuua

SEQ ID NO: 156949 - RNA, 18 nt, Artificial Sequence
  Synthetic
cagguauaccucauuuua

SEQ ID NO: 156950 - RNA, 19 nt, Artificial Sequence
  Synthetic
acagguauaccucauuuua

SEQ ID NO: 156951 - RNA, 20 nt, Artificial Sequence
  Synthetic
uacagguauaccucauuuua

SEQ ID NO: 156952 - RNA, 18 nt, Artificial Sequence
  Synthetic
aauaaaguuucuauuuua

SEQ ID NO: 156953 - RNA, 19 nt, Artificial Sequence
  Synthetic
caauaaaguuucuauuuua

SEQ ID NO: 156954 - RNA, 20 nt, Artificial Sequence
  Synthetic
ucaauaaaguuucuauuuua

SEQ ID NO: 156955 - RNA, 21 nt, Artificial Sequence
  Synthetic
aucaauaaaguuucuauuuua

SEQ ID NO: 156956 - RNA, 22 nt, Artificial Sequence
  Synthetic
uaucaauaaaguuucuauuuua

SEQ ID NO: 156957 - RNA, 23 nt, Artificial Sequence
  Synthetic
uuaucaauaaaguuucuauuuua

SEQ ID NO: 156958 - RNA, 24 nt, Artificial Sequence
  Synthetic
uuuaucaauaaaguuucuauuuua

SEQ ID NO: 156959 - RNA, 21 nt, Artificial Sequence
  Synthetic
auuuuuguaaauaaaguuuua

SEQ ID NO: 156960 - RNA, 22 nt, Artificial Sequence
  Synthetic
cauuuuuguaaauaaaguuuua

SEQ ID NO: 156961 - RNA, 23 nt, Artificial Sequence
  Synthetic
ccauuuuuguaaauaaaguuuua

SEQ ID NO: 156962 - RNA, 18 nt, Artificial Sequence
  Synthetic
cuaaacauuuuauuuuua

SEQ ID NO: 156963 - RNA, 19 nt, Artificial Sequence
  Synthetic
acuaaacauuuuauuuuua

SEQ ID NO: 156964 - RNA, 20 nt, Artificial Sequence
  Synthetic
aacuaaacauuuuauuuuua

SEQ ID NO: 156965 - RNA, 18 nt, Artificial Sequence
  Synthetic
auaaauuauuucuuuuua

SEQ ID NO: 156966 - RNA, 19 nt, Artificial Sequence
  Synthetic
uauaaauuauuucuuuuua

SEQ ID NO: 156967 - RNA, 20 nt, Artificial Sequence
  Synthetic
uuauaaauuauuucuuuuua

SEQ ID NO: 156968 - RNA, 18 nt, Artificial Sequence
  Synthetic
auuuucauuuucuuuuua

SEQ ID NO: 156969 - RNA, 20 nt, Artificial Sequence
  Synthetic
agauuuucauuuucuuuuua

SEQ ID NO: 156970 - RNA, 18 nt, Artificial Sequence
  Synthetic
aaaccucacaauuuuuua

SEQ ID NO: 156971 - RNA, 19 nt, Artificial Sequence
  Synthetic
aaaaccucacaauuuuuua

SEQ ID NO: 156972 - RNA, 20 nt, Artificial Sequence
  Synthetic
aaaaaccucacaauuuuuua

SEQ ID NO: 156973 - RNA, 18 nt, Artificial Sequence
  Synthetic
ugauguuuuaguuuuuua

SEQ ID NO: 156974 - RNA, 19 nt, Artificial Sequence
  Synthetic
cugauguuuuaguuuuuua

SEQ ID NO: 156975 - RNA, 20 nt, Artificial Sequence
  Synthetic
ucugauguuuuaguuuuuua

SEQ ID NO: 156976 - RNA, 19 nt, Artificial Sequence
  Synthetic
aguuaucauuuuuuuuuua

SEQ ID NO: 156977 - RNA, 20 nt, Artificial Sequence
  Synthetic
uaguuaucauuuuuuuuuua

SEQ ID NO: 156978 - RNA, 18 nt, Artificial Sequence
  Synthetic
aaaauacaaauaaaaaac

SEQ ID NO: 156979 - RNA, 19 nt, Artificial Sequence
  Synthetic
aaaaauacaaauaaaaaac

SEQ ID NO: 156980 - RNA, 20 nt, Artificial Sequence
  Synthetic
aaaaaauacaaauaaaaaac

SEQ ID NO: 156981 - RNA, 21 nt, Artificial Sequence
  Synthetic
caaaaaauacaaauaaaaaac

SEQ ID NO: 156982 - RNA, 22 nt, Artificial Sequence
  Synthetic
acaaaaaauacaaauaaaaaac

SEQ ID NO: 156983 - RNA, 24 nt, Artificial Sequence
  Synthetic
agacaaaaaauacaaauaaaaaac

SEQ ID NO: 156984 - RNA, 18 nt, Artificial Sequence
  Synthetic
uuuuucagauuaaaaaac

SEQ ID NO: 156985 - RNA, 19 nt, Artificial Sequence
  Synthetic
uuuuuucagauuaaaaaac

SEQ ID NO: 156986 - RNA, 20 nt, Artificial Sequence
  Synthetic
auuuuuucagauuaaaaaac

SEQ ID NO: 156987 - RNA, 21 nt, Artificial Sequence
  Synthetic
cauuuuuucagauuaaaaaac

SEQ ID NO: 156988 - RNA, 22 nt, Artificial Sequence
  Synthetic
ccauuuuuucagauuaaaaaac

SEQ ID NO: 156989 - RNA, 23 nt, Artificial Sequence
  Synthetic
accauuuuuucagauuaaaaaac

SEQ ID NO: 156990 - RNA, 24 nt, Artificial Sequence
  Synthetic
uaccauuuuuucagauuaaaaaac

SEQ ID NO: 156991 - RNA, 18 nt, Artificial Sequence
  Synthetic
aaugauuuaaacaaaaac

SEQ ID NO: 156992 - RNA, 19 nt, Artificial Sequence
  Synthetic
uaaugauuuaaacaaaaac

SEQ ID NO: 156993 - RNA, 20 nt, Artificial Sequence
  Synthetic
uuaaugauuuaaacaaaaac

SEQ ID NO: 156994 - RNA, 20 nt, Artificial Sequence
  Synthetic
aggauggguaauauaaaaac

SEQ ID NO: 156995 - RNA, 21 nt, Artificial Sequence
  Synthetic
aaggauggguaauauaaaaac

SEQ ID NO: 156996 - RNA, 23 nt, Artificial Sequence
  Synthetic
agaaggauggguaauauaaaaac

SEQ ID NO: 156997 - RNA, 24 nt, Artificial Sequence
  Synthetic
aagaaggauggguaauauaaaaac

SEQ ID NO: 156998 - RNA, 18 nt, Artificial Sequence
  Synthetic
caugugggagcuaaaaac

SEQ ID NO: 156999 - RNA, 19 nt, Artificial Sequence
  Synthetic
acaugugggagcuaaaaac

SEQ ID NO: 157000 - RNA, 20 nt, Artificial Sequence
  Synthetic
cacaugugggagcuaaaaac

SEQ ID NO: 157001 - RNA, 21 nt, Artificial Sequence
  Synthetic
ucacaugugggagcuaaaaac

SEQ ID NO: 157002 - RNA, 22 nt, Artificial Sequence
  Synthetic
cucacaugugggagcuaaaaac

SEQ ID NO: 157003 - RNA, 23 nt, Artificial Sequence
  Synthetic
acucacaugugggagcuaaaaac

SEQ ID NO: 157004 - RNA, 24 nt, Artificial Sequence
  Synthetic
cacucacaugugggagcuaaaaac

SEQ ID NO: 157005 - RNA, 20 nt, Artificial Sequence
  Synthetic
aggaaaaacaaaaacaaaac

SEQ ID NO: 157006 - RNA, 21 nt, Artificial Sequence
  Synthetic
aaggaaaaacaaaaacaaaac

SEQ ID NO: 157007 - RNA, 22 nt, Artificial Sequence
  Synthetic
aaaggaaaaacaaaaacaaaac

SEQ ID NO: 157008 - RNA, 23 nt, Artificial Sequence
  Synthetic
aaaaggaaaaacaaaaacaaaac

SEQ ID NO: 157009 - RNA, 24 nt, Artificial Sequence
  Synthetic
aaaaaggaaaaacaaaaacaaaac

SEQ ID NO: 157010 - RNA, 18 nt, Artificial Sequence
  Synthetic
aagaagcugaaagaaaac

SEQ ID NO: 157011 - RNA, 19 nt, Artificial Sequence
  Synthetic
aaagaagcugaaagaaaac

SEQ ID NO: 157012 - RNA, 20 nt, Artificial Sequence
  Synthetic
uaaagaagcugaaagaaaac

SEQ ID NO: 157013 - RNA, 18 nt, Artificial Sequence
  Synthetic
acauucgagcaggaaaac

SEQ ID NO: 157014 - RNA, 19 nt, Artificial Sequence
  Synthetic
aacauucgagcaggaaaac

SEQ ID NO: 157015 - RNA, 20 nt, Artificial Sequence
  Synthetic
caacauucgagcaggaaaac

SEQ ID NO: 157016 - RNA, 23 nt, Artificial Sequence
  Synthetic
aggcaacauucgagcaggaaaac

SEQ ID NO: 157017 - RNA, 24 nt, Artificial Sequence
  Synthetic
aaggcaacauucgagcaggaaaac

SEQ ID NO: 157018 - RNA, 18 nt, Artificial Sequence
  Synthetic
aaauguucaagggaaaac

SEQ ID NO: 157019 - RNA, 19 nt, Artificial Sequence
  Synthetic
uaaauguucaagggaaaac

SEQ ID NO: 157020 - RNA, 20 nt, Artificial Sequence
  Synthetic
cuaaauguucaagggaaaac

SEQ ID NO: 157021 - RNA, 21 nt, Artificial Sequence
  Synthetic
ucuaaauguucaagggaaaac

SEQ ID NO: 157022 - RNA, 22 nt, Artificial Sequence
  Synthetic
cucuaaauguucaagggaaaac

SEQ ID NO: 157023 - RNA, 23 nt, Artificial Sequence
  Synthetic
ccucuaaauguucaagggaaaac

SEQ ID NO: 157024 - RNA, 18 nt, Artificial Sequence
  Synthetic
uagucacugaaugaaaac

SEQ ID NO: 157025 - RNA, 19 nt, Artificial Sequence
  Synthetic
auagucacugaaugaaaac

SEQ ID NO: 157026 - RNA, 20 nt, Artificial Sequence
  Synthetic
aauagucacugaaugaaaac

SEQ ID NO: 157027 - RNA, 22 nt, Artificial Sequence
  Synthetic
ugaauagucacugaaugaaaac

SEQ ID NO: 157028 - RNA, 23 nt, Artificial Sequence
  Synthetic
augaauagucacugaaugaaaac

SEQ ID NO: 157029 - RNA, 24 nt, Artificial Sequence
  Synthetic
aaugaauagucacugaaugaaaac

SEQ ID NO: 157030 - RNA, 19 nt, Artificial Sequence
  Synthetic
aguguauucaaaauaaaac

SEQ ID NO: 157031 - RNA, 20 nt, Artificial Sequence
  Synthetic
caguguauucaaaauaaaac

SEQ ID NO: 157032 - RNA, 18 nt, Artificial Sequence
  Synthetic
uuaauguuaaaauaaaac

SEQ ID NO: 157033 - RNA, 19 nt, Artificial Sequence
  Synthetic
uuuaauguuaaaauaaaac

SEQ ID NO: 157034 - RNA, 20 nt, Artificial Sequence
  Synthetic
auuuaauguuaaaauaaaac

SEQ ID NO: 157035 - RNA, 18 nt, Artificial Sequence
  Synthetic
cuaguauuuaucuaaaac

SEQ ID NO: 157036 - RNA, 19 nt, Artificial Sequence
  Synthetic
acuaguauuuaucuaaaac

SEQ ID NO: 157037 - RNA, 19 nt, Artificial Sequence
  Synthetic
ugcauugggggcuuaaaac

SEQ ID NO: 157038 - RNA, 20 nt, Artificial Sequence
  Synthetic
augcauugggggcuuaaaac

SEQ ID NO: 157039 - RNA, 21 nt, Artificial Sequence
  Synthetic
aaugcauugggggcuuaaaac

SEQ ID NO: 157040 - RNA, 22 nt, Artificial Sequence
  Synthetic
uaaugcauugggggcuuaaaac

SEQ ID NO: 157041 - RNA, 23 nt, Artificial Sequence
  Synthetic
cuaaugcauugggggcuuaaaac

SEQ ID NO: 157042 - RNA, 24 nt, Artificial Sequence
  Synthetic
ccuaaugcauugggggcuuaaaac

SEQ ID NO: 157043 - RNA, 19 nt, Artificial Sequence
  Synthetic
agacuuucgauguuaaaac

SEQ ID NO: 157044 - RNA, 18 nt, Artificial Sequence
  Synthetic
uuuuaaaaaaagacaaac

SEQ ID NO: 157045 - RNA, 19 nt, Artificial Sequence
  Synthetic
uuuuuaaaaaaagacaaac

SEQ ID NO: 157046 - RNA, 20 nt, Artificial Sequence
  Synthetic
uuuuuuaaaaaaagacaaac

SEQ ID NO: 157047 - RNA, 21 nt, Artificial Sequence
  Synthetic
uuuuuuuaaaaaaagacaaac

SEQ ID NO: 157048 - RNA, 22 nt, Artificial Sequence
  Synthetic
uuuuuuuuaaaaaaagacaaac

SEQ ID NO: 157049 - RNA, 23 nt, Artificial Sequence
  Synthetic
cuuuuuuuuaaaaaaagacaaac

SEQ ID NO: 157050 - RNA, 24 nt, Artificial Sequence
  Synthetic
acuuuuuuuuaaaaaaagacaaac

SEQ ID NO: 157051 - RNA, 18 nt, Artificial Sequence
  Synthetic
aacuuaaaaaaaucaaac

SEQ ID NO: 157052 - RNA, 19 nt, Artificial Sequence
  Synthetic
uaacuuaaaaaaaucaaac

SEQ ID NO: 157053 - RNA, 20 nt, Artificial Sequence
  Synthetic
auaacuuaaaaaaaucaaac

SEQ ID NO: 157054 - RNA, 19 nt, Artificial Sequence
  Synthetic
aguacagugguucucaaac

SEQ ID NO: 157055 - RNA, 20 nt, Artificial Sequence
  Synthetic
uaguacagugguucucaaac

SEQ ID NO: 157056 - RNA, 21 nt, Artificial Sequence
  Synthetic
uuaguacagugguucucaaac

SEQ ID NO: 157057 - RNA, 22 nt, Artificial Sequence
  Synthetic
cuuaguacagugguucucaaac

SEQ ID NO: 157058 - RNA, 23 nt, Artificial Sequence
  Synthetic
ccuuaguacagugguucucaaac

SEQ ID NO: 157059 - RNA, 24 nt, Artificial Sequence
  Synthetic
cccuuaguacagugguucucaaac

SEQ ID NO: 157060 - RNA, 19 nt, Artificial Sequence
  Synthetic
agaagagagaaaaagaaac

SEQ ID NO: 157061 - RNA, 18 nt, Artificial Sequence
  Synthetic
auaaagcaggaaagaaac

SEQ ID NO: 157062 - RNA, 19 nt, Artificial Sequence
  Synthetic
agaagggaacaacagaaac

SEQ ID NO: 157063 - RNA, 20 nt, Artificial Sequence
  Synthetic
aagaagggaacaacagaaac

SEQ ID NO: 157064 - RNA, 21 nt, Artificial Sequence
  Synthetic
aaagaagggaacaacagaaac

SEQ ID NO: 157065 - RNA, 22 nt, Artificial Sequence
  Synthetic
caaagaagggaacaacagaaac

SEQ ID NO: 157066 - RNA, 23 nt, Artificial Sequence
  Synthetic
acaaagaagggaacaacagaaac

SEQ ID NO: 157067 - RNA, 24 nt, Artificial Sequence
  Synthetic
cacaaagaagggaacaacagaaac

SEQ ID NO: 157068 - RNA, 18 nt, Artificial Sequence
  Synthetic
ucagguuuuuggagaaac

SEQ ID NO: 157069 - RNA, 19 nt, Artificial Sequence
  Synthetic
uucagguuuuuggagaaac

SEQ ID NO: 157070 - RNA, 20 nt, Artificial Sequence
  Synthetic
uuucagguuuuuggagaaac

SEQ ID NO: 157071 - RNA, 18 nt, Artificial Sequence
  Synthetic
ugggacaugugaggaaac

SEQ ID NO: 157072 - RNA, 19 nt, Artificial Sequence
  Synthetic
uugggacaugugaggaaac

SEQ ID NO: 157073 - RNA, 20 nt, Artificial Sequence
  Synthetic
uuugggacaugugaggaaac

SEQ ID NO: 157074 - RNA, 22 nt, Artificial Sequence
  Synthetic
aguuugggacaugugaggaaac

SEQ ID NO: 157075 - RNA, 23 nt, Artificial Sequence
  Synthetic
caguuugggacaugugaggaaac

SEQ ID NO: 157076 - RNA, 24 nt, Artificial Sequence
  Synthetic
acaguuugggacaugugaggaaac

SEQ ID NO: 157077 - RNA, 19 nt, Artificial Sequence
  Synthetic
aguggggagggagggaaac

SEQ ID NO: 157078 - RNA, 21 nt, Artificial Sequence
  Synthetic
agaguggggagggagggaaac

SEQ ID NO: 157079 - RNA, 22 nt, Artificial Sequence
  Synthetic
uagaguggggagggagggaaac

SEQ ID NO: 157080 - RNA, 23 nt, Artificial Sequence
  Synthetic
cuagaguggggagggagggaaac

SEQ ID NO: 157081 - RNA, 24 nt, Artificial Sequence
  Synthetic
acuagaguggggagggagggaaac

SEQ ID NO: 157082 - RNA, 21 nt, Artificial Sequence
  Synthetic
aagacaugaaagagaugaaac

SEQ ID NO: 157083 - RNA, 22 nt, Artificial Sequence
  Synthetic
aaagacaugaaagagaugaaac

SEQ ID NO: 157084 - RNA, 23 nt, Artificial Sequence
  Synthetic
aaaagacaugaaagagaugaaac

SEQ ID NO: 157085 - RNA, 24 nt, Artificial Sequence
  Synthetic
aaaaagacaugaaagagaugaaac

SEQ ID NO: 157086 - RNA, 21 nt, Artificial Sequence
  Synthetic
uuguagggacauggaugaaac

SEQ ID NO: 157087 - RNA, 22 nt, Artificial Sequence
  Synthetic
uuuguagggacauggaugaaac

SEQ ID NO: 157088 - RNA, 23 nt, Artificial Sequence
  Synthetic
cuuuguagggacauggaugaaac

SEQ ID NO: 157089 - RNA, 24 nt, Artificial Sequence
  Synthetic
ccuuuguagggacauggaugaaac

SEQ ID NO: 157090 - RNA, 18 nt, Artificial Sequence
  Synthetic
auaggcuaauugauaaac

SEQ ID NO: 157091 - RNA, 19 nt, Artificial Sequence
  Synthetic
cauaggcuaauugauaaac

SEQ ID NO: 157092 - RNA, 20 nt, Artificial Sequence
  Synthetic
ccauaggcuaauugauaaac

SEQ ID NO: 157093 - RNA, 21 nt, Artificial Sequence
  Synthetic
accauaggcuaauugauaaac

SEQ ID NO: 157094 - RNA, 22 nt, Artificial Sequence
  Synthetic
uaccauaggcuaauugauaaac

SEQ ID NO: 157095 - RNA, 23 nt, Artificial Sequence
  Synthetic
uuaccauaggcuaauugauaaac

SEQ ID NO: 157096 - RNA, 24 nt, Artificial Sequence
  Synthetic
cuuaccauaggcuaauugauaaac

SEQ ID NO: 157097 - RNA, 18 nt, Artificial Sequence
  Synthetic
uuguuuaaaaaaguaaac

SEQ ID NO: 157098 - RNA, 19 nt, Artificial Sequence
  Synthetic
uuuguuuaaaaaaguaaac

SEQ ID NO: 157099 - RNA, 20 nt, Artificial Sequence
  Synthetic
auuuguuuaaaaaaguaaac

SEQ ID NO: 157100 - RNA, 19 nt, Artificial Sequence
  Synthetic
aguuuugucaucuguaaac

SEQ ID NO: 157101 - RNA, 20 nt, Artificial Sequence
  Synthetic
caguuuugucaucuguaaac

SEQ ID NO: 157102 - RNA, 21 nt, Artificial Sequence
  Synthetic
ccaguuuugucaucuguaaac

SEQ ID NO: 157103 - RNA, 22 nt, Artificial Sequence
  Synthetic
cccaguuuugucaucuguaaac

SEQ ID NO: 157104 - RNA, 23 nt, Artificial Sequence
  Synthetic
ucccaguuuugucaucuguaaac

SEQ ID NO: 157105 - RNA, 18 nt, Artificial Sequence
  Synthetic
uuauuuuucugauuaaac

SEQ ID NO: 157106 - RNA, 19 nt, Artificial Sequence
  Synthetic
uuuauuuuucugauuaaac

SEQ ID NO: 157107 - RNA, 20 nt, Artificial Sequence
  Synthetic
uuuuauuuuucugauuaaac

SEQ ID NO: 157108 - RNA, 18 nt, Artificial Sequence
  Synthetic
cauggccugugcaacaac

SEQ ID NO: 157109 - RNA, 19 nt, Artificial Sequence
  Synthetic
ucauggccugugcaacaac

SEQ ID NO: 157110 - RNA, 20 nt, Artificial Sequence
  Synthetic
aucauggccugugcaacaac

SEQ ID NO: 157111 - RNA, 21 nt, Artificial Sequence
  Synthetic
aaucauggccugugcaacaac

SEQ ID NO: 157112 - RNA, 22 nt, Artificial Sequence
  Synthetic
aaaucauggccugugcaacaac

SEQ ID NO: 157113 - RNA, 23 nt, Artificial Sequence
  Synthetic
aaaaucauggccugugcaacaac

SEQ ID NO: 157114 - RNA, 24 nt, Artificial Sequence
  Synthetic
caaaaucauggccugugcaacaac

SEQ ID NO: 157115 - RNA, 21 nt, Artificial Sequence
  Synthetic
aauccugucauuugcaacaac

SEQ ID NO: 157116 - RNA, 22 nt, Artificial Sequence
  Synthetic
aaauccugucauuugcaacaac

SEQ ID NO: 157117 - RNA, 24 nt, Artificial Sequence
  Synthetic
agaaauccugucauuugcaacaac

SEQ ID NO: 157118 - RNA, 22 nt, Artificial Sequence
  Synthetic
agauccugucauuugcaacaac

SEQ ID NO: 157119 - RNA, 24 nt, Artificial Sequence
  Synthetic
ugagauccugucauuugcaacaac

SEQ ID NO: 157120 - RNA, 18 nt, Artificial Sequence
  Synthetic
ccugucauuuaugacaac

SEQ ID NO: 157121 - RNA, 19 nt, Artificial Sequence
  Synthetic
uccugucauuuaugacaac

SEQ ID NO: 157122 - RNA, 20 nt, Artificial Sequence
  Synthetic
auccugucauuuaugacaac

SEQ ID NO: 157123 - RNA, 21 nt, Artificial Sequence
  Synthetic
aauccugucauuuaugacaac

SEQ ID NO: 157124 - RNA, 22 nt, Artificial Sequence
  Synthetic
aaauccugucauuuaugacaac

SEQ ID NO: 157125 - RNA, 23 nt, Artificial Sequence
  Synthetic
aaaauccugucauuuaugacaac

SEQ ID NO: 157126 - RNA, 24 nt, Artificial Sequence
  Synthetic
uaaaauccugucauuuaugacaac

SEQ ID NO: 157127 - RNA, 18 nt, Artificial Sequence
  Synthetic
ccuuuccuaugcuacaac

SEQ ID NO: 157128 - RNA, 19 nt, Artificial Sequence
  Synthetic
uccuuuccuaugcuacaac

SEQ ID NO: 157129 - RNA, 20 nt, Artificial Sequence
  Synthetic
auccuuuccuaugcuacaac

SEQ ID NO: 157130 - RNA, 21 nt, Artificial Sequence
  Synthetic
aauccuuuccuaugcuacaac

SEQ ID NO: 157131 - RNA, 22 nt, Artificial Sequence
  Synthetic
aaauccuuuccuaugcuacaac

SEQ ID NO: 157132 - RNA, 18 nt, Artificial Sequence
  Synthetic
agagaccuauuguacaac

SEQ ID NO: 157133 - RNA, 19 nt, Artificial Sequence
  Synthetic
aagagaccuauuguacaac

SEQ ID NO: 157134 - RNA, 20 nt, Artificial Sequence
  Synthetic
caagagaccuauuguacaac

SEQ ID NO: 157135 - RNA, 21 nt, Artificial Sequence
  Synthetic
ucaagagaccuauuguacaac

SEQ ID NO: 157136 - RNA, 22 nt, Artificial Sequence
  Synthetic
uucaagagaccuauuguacaac

SEQ ID NO: 157137 - RNA, 24 nt, Artificial Sequence
  Synthetic
uguucaagagaccuauuguacaac

SEQ ID NO: 157138 - RNA, 18 nt, Artificial Sequence
  Synthetic
acuaaccaaucaaccaac

SEQ ID NO: 157139 - RNA, 19 nt, Artificial Sequence
  Synthetic
aacuaaccaaucaaccaac

SEQ ID NO: 157140 - RNA, 20 nt, Artificial Sequence
  Synthetic
caacuaaccaaucaaccaac

SEQ ID NO: 157141 - RNA, 18 nt, Artificial Sequence
  Synthetic
aucaaauguuuagccaac

SEQ ID NO: 157142 - RNA, 19 nt, Artificial Sequence
  Synthetic
aaucaaauguuuagccaac

SEQ ID NO: 157143 - RNA, 20 nt, Artificial Sequence
  Synthetic
aaaucaaauguuuagccaac

SEQ ID NO: 157144 - RNA, 21 nt, Artificial Sequence
  Synthetic
aaaaucaaauguuuagccaac

SEQ ID NO: 157145 - RNA, 22 nt, Artificial Sequence
  Synthetic
aaaaaucaaauguuuagccaac

SEQ ID NO: 157146 - RNA, 23 nt, Artificial Sequence
  Synthetic
aaaaaaucaaauguuuagccaac

SEQ ID NO: 157147 - RNA, 24 nt, Artificial Sequence
  Synthetic
aaaaaaaucaaauguuuagccaac

SEQ ID NO: 157148 - RNA, 18 nt, Artificial Sequence
  Synthetic
ccugucauuugcagcaac

SEQ ID NO: 157149 - RNA, 19 nt, Artificial Sequence
  Synthetic
uccugucauuugcagcaac

SEQ ID NO: 157150 - RNA, 20 nt, Artificial Sequence
  Synthetic
auccugucauuugcagcaac

SEQ ID NO: 157151 - RNA, 21 nt, Artificial Sequence
  Synthetic
aauccugucauuugcagcaac

SEQ ID NO: 157152 - RNA, 22 nt, Artificial Sequence
  Synthetic
aaauccugucauuugcagcaac

SEQ ID NO: 157153 - RNA, 24 nt, Artificial Sequence
  Synthetic
ugaaauccugucauuugcagcaac

SEQ ID NO: 157154 - RNA, 18 nt, Artificial Sequence
  Synthetic
cauguccuuugcagcaac

SEQ ID NO: 157155 - RNA, 19 nt, Artificial Sequence
  Synthetic
ucauguccuuugcagcaac

SEQ ID NO: 157156 - RNA, 20 nt, Artificial Sequence
  Synthetic
aucauguccuuugcagcaac

SEQ ID NO: 157157 - RNA, 21 nt, Artificial Sequence
  Synthetic
aaucauguccuuugcagcaac

SEQ ID NO: 157158 - RNA, 22 nt, Artificial Sequence
  Synthetic
aaaucauguccuuugcagcaac

SEQ ID NO: 157159 - RNA, 23 nt, Artificial Sequence
  Synthetic
aaaaucauguccuuugcagcaac

SEQ ID NO: 157160 - RNA, 24 nt, Artificial Sequence
  Synthetic
caaaaucauguccuuugcagcaac

SEQ ID NO: 157161 - RNA, 18 nt, Artificial Sequence
  Synthetic
uauguucuuugcagcaac

SEQ ID NO: 157162 - RNA, 19 nt, Artificial Sequence
  Synthetic
uuauguucuuugcagcaac

SEQ ID NO: 157163 - RNA, 20 nt, Artificial Sequence
  Synthetic
auuauguucuuugcagcaac

SEQ ID NO: 157164 - RNA, 22 nt, Artificial Sequence
  Synthetic
agauuauguucuuugcagcaac

SEQ ID NO: 157165 - RNA, 24 nt, Artificial Sequence
  Synthetic
ugagauuauguucuuugcagcaac

SEQ ID NO: 157166 - RNA, 18 nt, Artificial Sequence
  Synthetic
aaucucuuuugcagcaac

SEQ ID NO: 157167 - RNA, 20 nt, Artificial Sequence
  Synthetic
agaaucucuuuugcagcaac

SEQ ID NO: 157168 - RNA, 21 nt, Artificial Sequence
  Synthetic
aagaaucucuuuugcagcaac

SEQ ID NO: 157169 - RNA, 22 nt, Artificial Sequence
  Synthetic
aaagaaucucuuuugcagcaac

SEQ ID NO: 157170 - RNA, 23 nt, Artificial Sequence
  Synthetic
aaaagaaucucuuuugcagcaac

SEQ ID NO: 157171 - RNA, 24 nt, Artificial Sequence
  Synthetic
aaaaagaaucucuuuugcagcaac

SEQ ID NO: 157172 - RNA, 18 nt, Artificial Sequence
  Synthetic
caugucuuuugcagcaac

SEQ ID NO: 157173 - RNA, 19 nt, Artificial Sequence
  Synthetic
ucaugucuuuugcagcaac

SEQ ID NO: 157174 - RNA, 20 nt, Artificial Sequence
  Synthetic
aucaugucuuuugcagcaac

SEQ ID NO: 157175 - RNA, 21 nt, Artificial Sequence
  Synthetic
aaucaugucuuuugcagcaac

SEQ ID NO: 157176 - RNA, 22 nt, Artificial Sequence
  Synthetic
aaaucaugucuuuugcagcaac

SEQ ID NO: 157177 - RNA, 24 nt, Artificial Sequence
  Synthetic
ugaaaucaugucuuuugcagcaac

SEQ ID NO: 157178 - RNA, 18 nt, Artificial Sequence
  Synthetic
cuuuguggaacucgcaac

SEQ ID NO: 157179 - RNA, 19 nt, Artificial Sequence
  Synthetic
ccuuuguggaacucgcaac

SEQ ID NO: 157180 - RNA, 20 nt, Artificial Sequence
  Synthetic
cccuuuguggaacucgcaac

SEQ ID NO: 157181 - RNA, 21 nt, Artificial Sequence
  Synthetic
ccccuuuguggaacucgcaac

SEQ ID NO: 157182 - RNA, 22 nt, Artificial Sequence
  Synthetic
accccuuuguggaacucgcaac

SEQ ID NO: 157183 - RNA, 24 nt, Artificial Sequence
  Synthetic
ugaccccuuuguggaacucgcaac

SEQ ID NO: 157184 - RNA, 18 nt, Artificial Sequence
  Synthetic
caccccagccugggcaac

SEQ ID NO: 157185 - RNA, 20 nt, Artificial Sequence
  Synthetic
ugcaccccagccugggcaac

SEQ ID NO: 157186 - RNA, 21 nt, Artificial Sequence
  Synthetic
uugcaccccagccugggcaac

SEQ ID NO: 157187 - RNA, 22 nt, Artificial Sequence
  Synthetic
auugcaccccagccugggcaac

SEQ ID NO: 157188 - RNA, 23 nt, Artificial Sequence
  Synthetic
cauugcaccccagccugggcaac

SEQ ID NO: 157189 - RNA, 24 nt, Artificial Sequence
  Synthetic
ccauugcaccccagccugggcaac

SEQ ID NO: 157190 - RNA, 18 nt, Artificial Sequence
  Synthetic
cacuccagccugggcaac

SEQ ID NO: 157191 - RNA, 20 nt, Artificial Sequence
  Synthetic
cgcacuccagccugggcaac

SEQ ID NO: 157192 - RNA, 21 nt, Artificial Sequence
  Synthetic
ccgcacuccagccugggcaac

SEQ ID NO: 157193 - RNA, 22 nt, Artificial Sequence
  Synthetic
accgcacuccagccugggcaac

SEQ ID NO: 157194 - RNA, 23 nt, Artificial Sequence
  Synthetic
caccgcacuccagccugggcaac

SEQ ID NO: 157195 - RNA, 24 nt, Artificial Sequence
  Synthetic
ccaccgcacuccagccugggcaac

SEQ ID NO: 157196 - RNA, 18 nt, Artificial Sequence
  Synthetic
caggagacugacugcaac

SEQ ID NO: 157197 - RNA, 18 nt, Artificial Sequence
  Synthetic
acgagacagaaagucaac

SEQ ID NO: 157198 - RNA, 19 nt, Artificial Sequence
  Synthetic
aacgagacagaaagucaac

SEQ ID NO: 157199 - RNA, 20 nt, Artificial Sequence
  Synthetic
caacgagacagaaagucaac

SEQ ID NO: 157200 - RNA, 21 nt, Artificial Sequence
  Synthetic
ucaacgagacagaaagucaac

SEQ ID NO: 157201 - RNA, 22 nt, Artificial Sequence
  Synthetic
aucaacgagacagaaagucaac

SEQ ID NO: 157202 - RNA, 24 nt, Artificial Sequence
  Synthetic
agaucaacgagacagaaagucaac

SEQ ID NO: 157203 - RNA, 18 nt, Artificial Sequence
  Synthetic
acuauuagaaaauucaac

SEQ ID NO: 157204 - RNA, 19 nt, Artificial Sequence
  Synthetic
aacuauuagaaaauucaac

SEQ ID NO: 157205 - RNA, 20 nt, Artificial Sequence
  Synthetic
aaacuauuagaaaauucaac

SEQ ID NO: 157206 - RNA, 18 nt, Artificial Sequence
  Synthetic
aaauauaggaagaagaac

SEQ ID NO: 157207 - RNA, 19 nt, Artificial Sequence
  Synthetic
aaaauauaggaagaagaac

SEQ ID NO: 157208 - RNA, 20 nt, Artificial Sequence
  Synthetic
aaaaauauaggaagaagaac

SEQ ID NO: 157209 - RNA, 18 nt, Artificial Sequence
  Synthetic
aaaaauaguaagaagaac

SEQ ID NO: 157210 - RNA, 19 nt, Artificial Sequence
  Synthetic
uaaaaauaguaagaagaac

SEQ ID NO: 157211 - RNA, 20 nt, Artificial Sequence
  Synthetic
auaaaaauaguaagaagaac

SEQ ID NO: 157212 - RNA, 18 nt, Artificial Sequence
  Synthetic
uuugucuuugagaagaac

SEQ ID NO: 157213 - RNA, 19 nt, Artificial Sequence
  Synthetic
uuuugucuuugagaagaac

SEQ ID NO: 157214 - RNA, 20 nt, Artificial Sequence
  Synthetic
auuuugucuuugagaagaac

SEQ ID NO: 157215 - RNA, 21 nt, Artificial Sequence
  Synthetic
uauuuugucuuugagaagaac

SEQ ID NO: 157216 - RNA, 23 nt, Artificial Sequence
  Synthetic
uguauuuugucuuugagaagaac

SEQ ID NO: 157217 - RNA, 24 nt, Artificial Sequence
  Synthetic
auguauuuugucuuugagaagaac

SEQ ID NO: 157218 - RNA, 18 nt, Artificial Sequence
  Synthetic
agaaaauugcaagagaac

SEQ ID NO: 157219 - RNA, 21 nt, Artificial Sequence
  Synthetic
uggagaaaauugcaagagaac

SEQ ID NO: 157220 - RNA, 23 nt, Artificial Sequence
  Synthetic
uguggagaaaauugcaagagaac

SEQ ID NO: 157221 - RNA, 24 nt, Artificial Sequence
  Synthetic
auguggagaaaauugcaagagaac

SEQ ID NO: 157222 - RNA, 18 nt, Artificial Sequence
  Synthetic
cguguccuuugcaggaac

SEQ ID NO: 157223 - RNA, 19 nt, Artificial Sequence
  Synthetic
ucguguccuuugcaggaac

SEQ ID NO: 157224 - RNA, 20 nt, Artificial Sequence
  Synthetic
uucguguccuuugcaggaac

SEQ ID NO: 157225 - RNA, 22 nt, Artificial Sequence
  Synthetic
aguucguguccuuugcaggaac

SEQ ID NO: 157226 - RNA, 24 nt, Artificial Sequence
  Synthetic
ugaguucguguccuuugcaggaac

SEQ ID NO: 157227 - RNA, 18 nt, Artificial Sequence
  Synthetic
uuugaugaaugaaugaac

SEQ ID NO: 157228 - RNA, 19 nt, Artificial Sequence
  Synthetic
uuuugaugaaugaaugaac

SEQ ID NO: 157229 - RNA, 20 nt, Artificial Sequence
  Synthetic
cuuuugaugaaugaaugaac

SEQ ID NO: 157230 - RNA, 18 nt, Artificial Sequence
  Synthetic
aaauaugcugcuaugaac

SEQ ID NO: 157231 - RNA, 19 nt, Artificial Sequence
  Synthetic
aaaauaugcugcuaugaac

SEQ ID NO: 157232 - RNA, 20 nt, Artificial Sequence
  Synthetic
uaaaauaugcugcuaugaac

SEQ ID NO: 157233 - RNA, 19 nt, Artificial Sequence
  Synthetic
uggaaaaaaagaaaauaac

SEQ ID NO: 157234 - RNA, 20 nt, Artificial Sequence
  Synthetic
uuggaaaaaaagaaaauaac

SEQ ID NO: 157235 - RNA, 18 nt, Artificial Sequence
  Synthetic
ucacaagggauuaauaac

SEQ ID NO: 157236 - RNA, 19 nt, Artificial Sequence
  Synthetic
cucacaagggauuaauaac

SEQ ID NO: 157237 - RNA, 20 nt, Artificial Sequence
  Synthetic
ucucacaagggauuaauaac

SEQ ID NO: 157238 - RNA, 21 nt, Artificial Sequence
  Synthetic
aucucacaagggauuaauaac

SEQ ID NO: 157239 - RNA, 22 nt, Artificial Sequence
  Synthetic
caucucacaagggauuaauaac

SEQ ID NO: 157240 - RNA, 23 nt, Artificial Sequence
  Synthetic
ccaucucacaagggauuaauaac

SEQ ID NO: 157241 - RNA, 24 nt, Artificial Sequence
  Synthetic
cccaucucacaagggauuaauaac

SEQ ID NO: 157242 - RNA, 18 nt, Artificial Sequence
  Synthetic
auaguacaauaucauaac

SEQ ID NO: 157243 - RNA, 19 nt, Artificial Sequence
  Synthetic
uauaguacaauaucauaac

SEQ ID NO: 157244 - RNA, 20 nt, Artificial Sequence
  Synthetic
auauaguacaauaucauaac

SEQ ID NO: 157245 - RNA, 21 nt, Artificial Sequence
  Synthetic
aauauaguacaauaucauaac

SEQ ID NO: 157246 - RNA, 22 nt, Artificial Sequence
  Synthetic
aaauauaguacaauaucauaac

SEQ ID NO: 157247 - RNA, 23 nt, Artificial Sequence
  Synthetic
aaaauauaguacaauaucauaac

SEQ ID NO: 157248 - RNA, 24 nt, Artificial Sequence
  Synthetic
aaaaauauaguacaauaucauaac

SEQ ID NO: 157249 - RNA, 18 nt, Artificial Sequence
  Synthetic
uuuagaagaauguauaac

SEQ ID NO: 157250 - RNA, 19 nt, Artificial Sequence
  Synthetic
auuuagaagaauguauaac

SEQ ID NO: 157251 - RNA, 20 nt, Artificial Sequence
  Synthetic
aauuuagaagaauguauaac

SEQ ID NO: 157252 - RNA, 21 nt, Artificial Sequence
  Synthetic
aaauuuagaagaauguauaac

SEQ ID NO: 157253 - RNA, 22 nt, Artificial Sequence
  Synthetic
aaaauuuagaagaauguauaac

SEQ ID NO: 157254 - RNA, 23 nt, Artificial Sequence
  Synthetic
aaaaauuuagaagaauguauaac

SEQ ID NO: 157255 - RNA, 24 nt, Artificial Sequence
  Synthetic
aaaaaauuuagaagaauguauaac

SEQ ID NO: 157256 - RNA, 18 nt, Artificial Sequence
  Synthetic
uauaguagccauccuaac

SEQ ID NO: 157257 - RNA, 19 nt, Artificial Sequence
  Synthetic
uuauaguagccauccuaac

SEQ ID NO: 157258 - RNA, 20 nt, Artificial Sequence
  Synthetic
uuuauaguagccauccuaac

SEQ ID NO: 157259 - RNA, 21 nt, Artificial Sequence
  Synthetic
uuuuauaguagccauccuaac

SEQ ID NO: 157260 - RNA, 22 nt, Artificial Sequence
  Synthetic
uuuuuauaguagccauccuaac

SEQ ID NO: 157261 - RNA, 24 nt, Artificial Sequence
  Synthetic
uguuuuuauaguagccauccuaac

SEQ ID NO: 157262 - RNA, 18 nt, Artificial Sequence
  Synthetic
aaaaaaugagcaaguaac

SEQ ID NO: 157263 - RNA, 19 nt, Artificial Sequence
  Synthetic
uaaaaaaugagcaaguaac

SEQ ID NO: 157264 - RNA, 20 nt, Artificial Sequence
  Synthetic
cuaaaaaaugagcaaguaac

SEQ ID NO: 157265 - RNA, 21 nt, Artificial Sequence
  Synthetic
acuaaaaaaugagcaaguaac

SEQ ID NO: 157266 - RNA, 23 nt, Artificial Sequence
  Synthetic
ugacuaaaaaaugagcaaguaac

SEQ ID NO: 157267 - RNA, 24 nt, Artificial Sequence
  Synthetic
cugacuaaaaaaugagcaaguaac

SEQ ID NO: 157268 - RNA, 19 nt, Artificial Sequence
  Synthetic
ugaagaacuuauugguaac

SEQ ID NO: 157269 - RNA, 20 nt, Artificial Sequence
  Synthetic
augaagaacuuauugguaac

SEQ ID NO: 157270 - RNA, 22 nt, Artificial Sequence
  Synthetic
agaugaagaacuuauugguaac

SEQ ID NO: 157271 - RNA, 18 nt, Artificial Sequence
  Synthetic
uauguagcaaaaguuaac

SEQ ID NO: 157272 - RNA, 19 nt, Artificial Sequence
  Synthetic
uuauguagcaaaaguuaac

SEQ ID NO: 157273 - RNA, 21 nt, Artificial Sequence
  Synthetic
uguuauguagcaaaaguuaac

SEQ ID NO: 157274 - RNA, 22 nt, Artificial Sequence
  Synthetic
uuguuauguagcaaaaguuaac

SEQ ID NO: 157275 - RNA, 23 nt, Artificial Sequence
  Synthetic
cuuguuauguagcaaaaguuaac

SEQ ID NO: 157276 - RNA, 18 nt, Artificial Sequence
  Synthetic
uaaugcugcaauaaacac

SEQ ID NO: 157277 - RNA, 19 nt, Artificial Sequence
  Synthetic
cuaaugcugcaauaaacac

SEQ ID NO: 157278 - RNA, 20 nt, Artificial Sequence
  Synthetic
acuaaugcugcaauaaacac

SEQ ID NO: 157279 - RNA, 22 nt, Artificial Sequence
  Synthetic
ugacuaaugcugcaauaaacac

SEQ ID NO: 157280 - RNA, 24 nt, Artificial Sequence
  Synthetic
ugugacuaaugcugcaauaaacac

SEQ ID NO: 157281 - RNA, 18 nt, Artificial Sequence
  Synthetic
uauauaugcacucaacac

SEQ ID NO: 157282 - RNA, 19 nt, Artificial Sequence
  Synthetic
uuauauaugcacucaacac

SEQ ID NO: 157283 - RNA, 20 nt, Artificial Sequence
  Synthetic
auuauauaugcacucaacac

SEQ ID NO: 157284 - RNA, 21 nt, Artificial Sequence
  Synthetic
aauuauauaugcacucaacac

SEQ ID NO: 157285 - RNA, 22 nt, Artificial Sequence
  Synthetic
caauuauauaugcacucaacac

SEQ ID NO: 157286 - RNA, 23 nt, Artificial Sequence
  Synthetic
acaauuauauaugcacucaacac

SEQ ID NO: 157287 - RNA, 24 nt, Artificial Sequence
  Synthetic
aacaauuauauaugcacucaacac

SEQ ID NO: 157288 - RNA, 18 nt, Artificial Sequence
  Synthetic
auuccaauaauggaacac

SEQ ID NO: 157289 - RNA, 19 nt, Artificial Sequence
  Synthetic
uauuccaauaauggaacac

SEQ ID NO: 157290 - RNA, 21 nt, Artificial Sequence
  Synthetic
aguauuccaauaauggaacac

SEQ ID NO: 157291 - RNA, 22 nt, Artificial Sequence
  Synthetic
uaguauuccaauaauggaacac

SEQ ID NO: 157292 - RNA, 23 nt, Artificial Sequence
  Synthetic
uuaguauuccaauaauggaacac

SEQ ID NO: 157293 - RNA, 24 nt, Artificial Sequence
  Synthetic
cuuaguauuccaauaauggaacac

SEQ ID NO: 157294 - RNA, 18 nt, Artificial Sequence
  Synthetic
uuuuaaaaaauugaacac

SEQ ID NO: 157295 - RNA, 19 nt, Artificial Sequence
  Synthetic
auuuuaaaaaauugaacac

SEQ ID NO: 157296 - RNA, 22 nt, Artificial Sequence
  Synthetic
uggauuuuaaaaaauugaacac

SEQ ID NO: 157297 - RNA, 23 nt, Artificial Sequence
  Synthetic
auggauuuuaaaaaauugaacac

SEQ ID NO: 157298 - RNA, 24 nt, Artificial Sequence
  Synthetic
aauggauuuuaaaaaauugaacac

SEQ ID NO: 157299 - RNA, 18 nt, Artificial Sequence
  Synthetic
uguuuguuaaauuaacac

SEQ ID NO: 157300 - RNA, 19 nt, Artificial Sequence
  Synthetic
auguuuguuaaauuaacac

SEQ ID NO: 157301 - RNA, 20 nt, Artificial Sequence
  Synthetic
aauguuuguuaaauuaacac

SEQ ID NO: 157302 - RNA, 20 nt, Artificial Sequence
  Synthetic
uggucucucccuugacacac

SEQ ID NO: 157303 - RNA, 21 nt, Artificial Sequence
  Synthetic
cuggucucucccuugacacac

SEQ ID NO: 157304 - RNA, 22 nt, Artificial Sequence
  Synthetic
ccuggucucucccuugacacac

SEQ ID NO: 157305 - RNA, 23 nt, Artificial Sequence
  Synthetic
accuggucucucccuugacacac

SEQ ID NO: 157306 - RNA, 24 nt, Artificial Sequence
  Synthetic
caccuggucucucccuugacacac

SEQ ID NO: 157307 - RNA, 18 nt, Artificial Sequence
  Synthetic
aggcucgcaccaccacac

SEQ ID NO: 157308 - RNA, 19 nt, Artificial Sequence
  Synthetic
caggcucgcaccaccacac

SEQ ID NO: 157309 - RNA, 20 nt, Artificial Sequence
  Synthetic
acaggcucgcaccaccacac

SEQ ID NO: 157310 - RNA, 21 nt, Artificial Sequence
  Synthetic
uacaggcucgcaccaccacac

SEQ ID NO: 157311 - RNA, 22 nt, Artificial Sequence
  Synthetic
uuacaggcucgcaccaccacac

SEQ ID NO: 157312 - RNA, 23 nt, Artificial Sequence
  Synthetic
auuacaggcucgcaccaccacac

SEQ ID NO: 157313 - RNA, 19 nt, Artificial Sequence
  Synthetic
cgcuaucaacaucccacac

SEQ ID NO: 157314 - RNA, 20 nt, Artificial Sequence
  Synthetic
ccgcuaucaacaucccacac

SEQ ID NO: 157315 - RNA, 21 nt, Artificial Sequence
  Synthetic
cccgcuaucaacaucccacac

SEQ ID NO: 157316 - RNA, 22 nt, Artificial Sequence
  Synthetic
ccccgcuaucaacaucccacac

SEQ ID NO: 157317 - RNA, 23 nt, Artificial Sequence
  Synthetic
accccgcuaucaacaucccacac

SEQ ID NO: 157318 - RNA, 24 nt, Artificial Sequence
  Synthetic
uaccccgcuaucaacaucccacac

SEQ ID NO: 157319 - RNA, 21 nt, Artificial Sequence
  Synthetic
cugcagcugaucugcagacac

SEQ ID NO: 157320 - RNA, 23 nt, Artificial Sequence
  Synthetic
agcugcagcugaucugcagacac

SEQ ID NO: 157321 - RNA, 24 nt, Artificial Sequence
  Synthetic
aagcugcagcugaucugcagacac

SEQ ID NO: 157322 - RNA, 18 nt, Artificial Sequence
  Synthetic
uuaaaaaaaaaaggacac

SEQ ID NO: 157323 - RNA, 19 nt, Artificial Sequence
  Synthetic
auuaaaaaaaaaaggacac

SEQ ID NO: 157324 - RNA, 20 nt, Artificial Sequence
  Synthetic
aauuaaaaaaaaaaggacac

SEQ ID NO: 157325 - RNA, 18 nt, Artificial Sequence
  Synthetic
ccccaccuucucuuacac

SEQ ID NO: 157326 - RNA, 19 nt, Artificial Sequence
  Synthetic
uccccaccuucucuuacac

SEQ ID NO: 157327 - RNA, 20 nt, Artificial Sequence
  Synthetic
uuccccaccuucucuuacac

SEQ ID NO: 157328 - RNA, 18 nt, Artificial Sequence
  Synthetic
ccaaaaacugaaaaccac

SEQ ID NO: 157329 - RNA, 20 nt, Artificial Sequence
  Synthetic
agccaaaaacugaaaaccac

SEQ ID NO: 157330 - RNA, 21 nt, Artificial Sequence
  Synthetic
cagccaaaaacugaaaaccac

SEQ ID NO: 157331 - RNA, 22 nt, Artificial Sequence
  Synthetic
acagccaaaaacugaaaaccac

SEQ ID NO: 157332 - RNA, 23 nt, Artificial Sequence
  Synthetic
aacagccaaaaacugaaaaccac

SEQ ID NO: 157333 - RNA, 24 nt, Artificial Sequence
  Synthetic
uaacagccaaaaacugaaaaccac

SEQ ID NO: 157334 - RNA, 18 nt, Artificial Sequence
  Synthetic
ucuacccugcaaacccac

SEQ ID NO: 157335 - RNA, 19 nt, Artificial Sequence
  Synthetic
cucuacccugcaaacccac

SEQ ID NO: 157336 - RNA, 24 nt, Artificial Sequence
  Synthetic
aggggcucuacccugcaaacccac

SEQ ID NO: 157337 - RNA, 18 nt, Artificial Sequence
  Synthetic
ucuuuccagcauuuccac

SEQ ID NO: 157338 - RNA, 19 nt, Artificial Sequence
  Synthetic
uucuuuccagcauuuccac

SEQ ID NO: 157339 - RNA, 20 nt, Artificial Sequence
  Synthetic
uuucuuuccagcauuuccac

SEQ ID NO: 157340 - RNA, 21 nt, Artificial Sequence
  Synthetic
cgccucagccucccaaagcac

SEQ ID NO: 157341 - RNA, 22 nt, Artificial Sequence
  Synthetic
ccgccucagccucccaaagcac

SEQ ID NO: 157342 - RNA, 23 nt, Artificial Sequence
  Synthetic
cccgccucagccucccaaagcac

SEQ ID NO: 157343 - RNA, 24 nt, Artificial Sequence
  Synthetic
ucccgccucagccucccaaagcac

SEQ ID NO: 157344 - RNA, 21 nt, Artificial Sequence
  Synthetic
ugccucagccucccaaagcac

SEQ ID NO: 157345 - RNA, 22 nt, Artificial Sequence
  Synthetic
cugccucagccucccaaagcac

SEQ ID NO: 157346 - RNA, 23 nt, Artificial Sequence
  Synthetic
ccugccucagccucccaaagcac

SEQ ID NO: 157347 - RNA, 24 nt, Artificial Sequence
  Synthetic
uccugccucagccucccaaagcac

SEQ ID NO: 157348 - RNA, 18 nt, Artificial Sequence
  Synthetic
ugauuacauugggcgcac

SEQ ID NO: 157349 - RNA, 20 nt, Artificial Sequence
  Synthetic
ugugauuacauugggcgcac

SEQ ID NO: 157350 - RNA, 21 nt, Artificial Sequence
  Synthetic
uugugauuacauugggcgcac

SEQ ID NO: 157351 - RNA, 22 nt, Artificial Sequence
  Synthetic
cuugugauuacauugggcgcac

SEQ ID NO: 157352 - RNA, 23 nt, Artificial Sequence
  Synthetic
ucuugugauuacauugggcgcac

SEQ ID NO: 157353 - RNA, 24 nt, Artificial Sequence
  Synthetic
cucuugugauuacauugggcgcac

SEQ ID NO: 157354 - RNA, 18 nt, Artificial Sequence
  Synthetic
cuuggggggcuaaggcac

SEQ ID NO: 157355 - RNA, 19 nt, Artificial Sequence
  Synthetic
ucuuggggggcuaaggcac

SEQ ID NO: 157356 - RNA, 20 nt, Artificial Sequence
  Synthetic
cucuuggggggcuaaggcac

SEQ ID NO: 157357 - RNA, 21 nt, Artificial Sequence
  Synthetic
ccucuuggggggcuaaggcac

SEQ ID NO: 157358 - RNA, 23 nt, Artificial Sequence
  Synthetic
agccucuuggggggcuaaggcac

SEQ ID NO: 157359 - RNA, 24 nt, Artificial Sequence
  Synthetic
cagccucuuggggggcuaaggcac

SEQ ID NO: 157360 - RNA, 18 nt, Artificial Sequence
  Synthetic
cuugggaggccgaggcac

SEQ ID NO: 157361 - RNA, 20 nt, Artificial Sequence
  Synthetic
ugcuugggaggccgaggcac

SEQ ID NO: 157362 - RNA, 21 nt, Artificial Sequence
  Synthetic
cugcuugggaggccgaggcac

SEQ ID NO: 157363 - RNA, 23 nt, Artificial Sequence
  Synthetic
agcugcuugggaggccgaggcac

SEQ ID NO: 157364 - RNA, 24 nt, Artificial Sequence
  Synthetic
cagcugcuugggaggccgaggcac

SEQ ID NO: 157365 - RNA, 18 nt, Artificial Sequence
  Synthetic
cucccagucaggaggcac

SEQ ID NO: 157366 - RNA, 19 nt, Artificial Sequence
  Synthetic
ucucccagucaggaggcac

SEQ ID NO: 157367 - RNA, 21 nt, Artificial Sequence
  Synthetic
ugucucccagucaggaggcac

SEQ ID NO: 157368 - RNA, 24 nt, Artificial Sequence
  Synthetic
aggugucucccagucaggaggcac

SEQ ID NO: 157369 - RNA, 18 nt, Artificial Sequence
  Synthetic
cacaauaaaaugaggcac

SEQ ID NO: 157370 - RNA, 19 nt, Artificial Sequence
  Synthetic
ucacaauaaaaugaggcac

SEQ ID NO: 157371 - RNA, 20 nt, Artificial Sequence
  Synthetic
aucacaauaaaaugaggcac

SEQ ID NO: 157372 - RNA, 21 nt, Artificial Sequence
  Synthetic
uaucacaauaaaaugaggcac

SEQ ID NO: 157373 - RNA, 22 nt, Artificial Sequence
  Synthetic
auaucacaauaaaaugaggcac

SEQ ID NO: 157374 - RNA, 23 nt, Artificial Sequence
  Synthetic
aauaucacaauaaaaugaggcac

SEQ ID NO: 157375 - RNA, 24 nt, Artificial Sequence
  Synthetic
aaauaucacaauaaaaugaggcac

SEQ ID NO: 157376 - RNA, 21 nt, Artificial Sequence
  Synthetic
uacccaauauucaugaggcac

SEQ ID NO: 157377 - RNA, 22 nt, Artificial Sequence
  Synthetic
auacccaauauucaugaggcac

SEQ ID NO: 157378 - RNA, 24 nt, Artificial Sequence
  Synthetic
agauacccaauauucaugaggcac

SEQ ID NO: 157379 - RNA, 22 nt, Artificial Sequence
  Synthetic
ugucauucuggcuggagggcac

SEQ ID NO: 157380 - RNA, 23 nt, Artificial Sequence
  Synthetic
cugucauucuggcuggagggcac

SEQ ID NO: 157381 - RNA, 24 nt, Artificial Sequence
  Synthetic
ucugucauucuggcuggagggcac

SEQ ID NO: 157382 - RNA, 18 nt, Artificial Sequence
  Synthetic
cucgugugaugggugcac

SEQ ID NO: 157383 - RNA, 19 nt, Artificial Sequence
  Synthetic
acucgugugaugggugcac

SEQ ID NO: 157384 - RNA, 20 nt, Artificial Sequence
  Synthetic
uacucgugugaugggugcac

SEQ ID NO: 157385 - RNA, 21 nt, Artificial Sequence
  Synthetic
cuacucgugugaugggugcac

SEQ ID NO: 157386 - RNA, 22 nt, Artificial Sequence
  Synthetic
acuacucgugugaugggugcac

SEQ ID NO: 157387 - RNA, 23 nt, Artificial Sequence
  Synthetic
uacuacucgugugaugggugcac

SEQ ID NO: 157388 - RNA, 24 nt, Artificial Sequence
  Synthetic
auacuacucgugugaugggugcac

SEQ ID NO: 157389 - RNA, 19 nt, Artificial Sequence
  Synthetic
agacgaugguagcuugcac

SEQ ID NO: 157390 - RNA, 21 nt, Artificial Sequence
  Synthetic
agagacgaugguagcuugcac

SEQ ID NO: 157391 - RNA, 23 nt, Artificial Sequence
  Synthetic
ugagagacgaugguagcuugcac

SEQ ID NO: 157392 - RNA, 24 nt, Artificial Sequence
  Synthetic
augagagacgaugguagcuugcac

SEQ ID NO: 157393 - RNA, 18 nt, Artificial Sequence
  Synthetic
acucuuccaaaaaaucac

SEQ ID NO: 157394 - RNA, 19 nt, Artificial Sequence
  Synthetic
aacucuuccaaaaaaucac

SEQ ID NO: 157395 - RNA, 20 nt, Artificial Sequence
  Synthetic
aaacucuuccaaaaaaucac

SEQ ID NO: 157396 - RNA, 19 nt, Artificial Sequence
  Synthetic
ugggagguaauugaaucac

SEQ ID NO: 157397 - RNA, 22 nt, Artificial Sequence
  Synthetic
uggugggagguaauugaaucac

SEQ ID NO: 157398 - RNA, 23 nt, Artificial Sequence
  Synthetic
cuggugggagguaauugaaucac

SEQ ID NO: 157399 - RNA, 24 nt, Artificial Sequence
  Synthetic
ccuggugggagguaauugaaucac

SEQ ID NO: 157400 - RNA, 19 nt, Artificial Sequence
  Synthetic
agaauauuuucaucaucac

SEQ ID NO: 157401 - RNA, 20 nt, Artificial Sequence
  Synthetic
cagaauauuuucaucaucac

SEQ ID NO: 157402 - RNA, 22 nt, Artificial Sequence
  Synthetic
ugcagaauauuuucaucaucac

SEQ ID NO: 157403 - RNA, 23 nt, Artificial Sequence
  Synthetic
augcagaauauuuucaucaucac

SEQ ID NO: 157404 - RNA, 18 nt, Artificial Sequence
  Synthetic
acaaggcagacagaucac

SEQ ID NO: 157405 - RNA, 19 nt, Artificial Sequence
  Synthetic
aacaaggcagacagaucac

SEQ ID NO: 157406 - RNA, 18 nt, Artificial Sequence
  Synthetic
cuuguaucaaaauaucac

SEQ ID NO: 157407 - RNA, 20 nt, Artificial Sequence
  Synthetic
cgcuuguaucaaaauaucac

SEQ ID NO: 157408 - RNA, 21 nt, Artificial Sequence
  Synthetic
acgcuuguaucaaaauaucac

SEQ ID NO: 157409 - RNA, 22 nt, Artificial Sequence
  Synthetic
uacgcuuguaucaaaauaucac

SEQ ID NO: 157410 - RNA, 23 nt, Artificial Sequence
  Synthetic
auacgcuuguaucaaaauaucac

SEQ ID NO: 157411 - RNA, 24 nt, Artificial Sequence
  Synthetic
uauacgcuuguaucaaaauaucac

SEQ ID NO: 157412 - RNA, 18 nt, Artificial Sequence
  Synthetic
acucauauggauucucac

SEQ ID NO: 157413 - RNA, 19 nt, Artificial Sequence
  Synthetic
cacucauauggauucucac

SEQ ID NO: 157414 - RNA, 20 nt, Artificial Sequence
  Synthetic
ccacucauauggauucucac

SEQ ID NO: 157415 - RNA, 21 nt, Artificial Sequence
  Synthetic
aguggcauuagauacauucac

SEQ ID NO: 157416 - RNA, 22 nt, Artificial Sequence
  Synthetic
caguggcauuagauacauucac

SEQ ID NO: 157417 - RNA, 23 nt, Artificial Sequence
  Synthetic
ucaguggcauuagauacauucac

SEQ ID NO: 157418 - RNA, 24 nt, Artificial Sequence
  Synthetic
uucaguggcauuagauacauucac

SEQ ID NO: 157419 - RNA, 19 nt, Artificial Sequence
  Synthetic
aggguuucaccauguucac

SEQ ID NO: 157420 - RNA, 20 nt, Artificial Sequence
  Synthetic
caggguuucaccauguucac

SEQ ID NO: 157421 - RNA, 21 nt, Artificial Sequence
  Synthetic
acaggguuucaccauguucac

SEQ ID NO: 157422 - RNA, 23 nt, Artificial Sequence
  Synthetic
agacaggguuucaccauguucac

SEQ ID NO: 157423 - RNA, 18 nt, Artificial Sequence
  Synthetic
uuccauuaaauauuucac

SEQ ID NO: 157424 - RNA, 19 nt, Artificial Sequence
  Synthetic
uuuccauuaaauauuucac

SEQ ID NO: 157425 - RNA, 20 nt, Artificial Sequence
  Synthetic
auuuccauuaaauauuucac

SEQ ID NO: 157426 - RNA, 18 nt, Artificial Sequence
  Synthetic
uaagaucagaaacaagac

SEQ ID NO: 157427 - RNA, 19 nt, Artificial Sequence
  Synthetic
uuaagaucagaaacaagac

SEQ ID NO: 157428 - RNA, 20 nt, Artificial Sequence
  Synthetic
cuuaagaucagaaacaagac

SEQ ID NO: 157429 - RNA, 21 nt, Artificial Sequence
  Synthetic
ccuuaagaucagaaacaagac

SEQ ID NO: 157430 - RNA, 22 nt, Artificial Sequence
  Synthetic
cccuuaagaucagaaacaagac

SEQ ID NO: 157431 - RNA, 23 nt, Artificial Sequence
  Synthetic
ucccuuaagaucagaaacaagac

SEQ ID NO: 157432 - RNA, 24 nt, Artificial Sequence
  Synthetic
uucccuuaagaucagaaacaagac

SEQ ID NO: 157433 - RNA, 18 nt, Artificial Sequence
  Synthetic
uaaaaacuggcacaagac

SEQ ID NO: 157434 - RNA, 19 nt, Artificial Sequence
  Synthetic
uuaaaaacuggcacaagac

SEQ ID NO: 157435 - RNA, 20 nt, Artificial Sequence
  Synthetic
uuuaaaaacuggcacaagac

SEQ ID NO: 157436 - RNA, 21 nt, Artificial Sequence
  Synthetic
cuuuaaaaacuggcacaagac

SEQ ID NO: 157437 - RNA, 22 nt, Artificial Sequence
  Synthetic
ccuuuaaaaacuggcacaagac

SEQ ID NO: 157438 - RNA, 23 nt, Artificial Sequence
  Synthetic
cccuuuaaaaacuggcacaagac

SEQ ID NO: 157439 - RNA, 24 nt, Artificial Sequence
  Synthetic
ucccuuuaaaaacuggcacaagac

SEQ ID NO: 157440 - RNA, 21 nt, Artificial Sequence
  Synthetic
uaacucaagaucaagcaagac

SEQ ID NO: 157441 - RNA, 22 nt, Artificial Sequence
  Synthetic
cuaacucaagaucaagcaagac

SEQ ID NO: 157442 - RNA, 23 nt, Artificial Sequence
  Synthetic
acuaacucaagaucaagcaagac

SEQ ID NO: 157443 - RNA, 24 nt, Artificial Sequence
  Synthetic
uacuaacucaagaucaagcaagac

SEQ ID NO: 157444 - RNA, 20 nt, Artificial Sequence
  Synthetic
uggaggacauaggagaagac

SEQ ID NO: 157445 - RNA, 19 nt, Artificial Sequence
  Synthetic
ugacaucugaugggaagac

SEQ ID NO: 157446 - RNA, 20 nt, Artificial Sequence
  Synthetic
uugacaucugaugggaagac

SEQ ID NO: 157447 - RNA, 18 nt, Artificial Sequence
  Synthetic
cuuuaaagucaaacagac

SEQ ID NO: 157448 - RNA, 21 nt, Artificial Sequence
  Synthetic
aaagucuguuuuaucagagac

SEQ ID NO: 157449 - RNA, 22 nt, Artificial Sequence
  Synthetic
uaaagucuguuuuaucagagac

SEQ ID NO: 157450 - RNA, 23 nt, Artificial Sequence
  Synthetic
uuaaagucuguuuuaucagagac

SEQ ID NO: 157451 - RNA, 24 nt, Artificial Sequence
  Synthetic
uuuaaagucuguuuuaucagagac

SEQ ID NO: 157452 - RNA, 18 nt, Artificial Sequence
  Synthetic
aagagcaagaagagagac

SEQ ID NO: 157453 - RNA, 20 nt, Artificial Sequence
  Synthetic
agaagagcaagaagagagac

SEQ ID NO: 157454 - RNA, 21 nt, Artificial Sequence
  Synthetic
uuuuguauuuuuaguagagac

SEQ ID NO: 157455 - RNA, 22 nt, Artificial Sequence
  Synthetic
uuuuuguauuuuuaguagagac

SEQ ID NO: 157456 - RNA, 23 nt, Artificial Sequence
  Synthetic
auuuuuguauuuuuaguagagac

SEQ ID NO: 157457 - RNA, 24 nt, Artificial Sequence
  Synthetic
aauuuuuguauuuuuaguagagac

SEQ ID NO: 157458 - RNA, 18 nt, Artificial Sequence
  Synthetic
cauguucuuuguagagac

SEQ ID NO: 157459 - RNA, 19 nt, Artificial Sequence
  Synthetic
ucauguucuuuguagagac

SEQ ID NO: 157460 - RNA, 20 nt, Artificial Sequence
  Synthetic
uucauguucuuuguagagac

SEQ ID NO: 157461 - RNA, 22 nt, Artificial Sequence
  Synthetic
aguucauguucuuuguagagac

SEQ ID NO: 157462 - RNA, 24 nt, Artificial Sequence
  Synthetic
ugaguucauguucuuuguagagac

SEQ ID NO: 157463 - RNA, 18 nt, Artificial Sequence
  Synthetic
agaugagagcacugagac

SEQ ID NO: 157464 - RNA, 19 nt, Artificial Sequence
  Synthetic
cagaugagagcacugagac

SEQ ID NO: 157465 - RNA, 21 nt, Artificial Sequence
  Synthetic
ugcagaugagagcacugagac

SEQ ID NO: 157466 - RNA, 22 nt, Artificial Sequence
  Synthetic
uugcagaugagagcacugagac

SEQ ID NO: 157467 - RNA, 23 nt, Artificial Sequence
  Synthetic
uuugcagaugagagcacugagac

SEQ ID NO: 157468 - RNA, 24 nt, Artificial Sequence
  Synthetic
uuuugcagaugagagcacugagac

SEQ ID NO: 157469 - RNA, 18 nt, Artificial Sequence
  Synthetic
agaaguagacccugagac

SEQ ID NO: 157470 - RNA, 19 nt, Artificial Sequence
  Synthetic
cagaaguagacccugagac

SEQ ID NO: 157471 - RNA, 20 nt, Artificial Sequence
  Synthetic
ucagaaguagacccugagac

SEQ ID NO: 157472 - RNA, 21 nt, Artificial Sequence
  Synthetic
cucagaaguagacccugagac

SEQ ID NO: 157473 - RNA, 23 nt, Artificial Sequence
  Synthetic
ugcucagaaguagacccugagac

SEQ ID NO: 157474 - RNA, 24 nt, Artificial Sequence
  Synthetic
uugcucagaaguagacccugagac

SEQ ID NO: 157475 - RNA, 19 nt, Artificial Sequence
  Synthetic
agucuguuuugucugagac

SEQ ID NO: 157476 - RNA, 20 nt, Artificial Sequence
  Synthetic
aagucuguuuugucugagac

SEQ ID NO: 157477 - RNA, 21 nt, Artificial Sequence
  Synthetic
aaagucuguuuugucugagac

SEQ ID NO: 157478 - RNA, 22 nt, Artificial Sequence
  Synthetic
uaaagucuguuuugucugagac

SEQ ID NO: 157479 - RNA, 23 nt, Artificial Sequence
  Synthetic
uuaaagucuguuuugucugagac

SEQ ID NO: 157480 - RNA, 24 nt, Artificial Sequence
  Synthetic
uuuaaagucuguuuugucugagac

SEQ ID NO: 157481 - RNA, 18 nt, Artificial Sequence
  Synthetic
ucauucugucaccuagac

SEQ ID NO: 157482 - RNA, 19 nt, Artificial Sequence
  Synthetic
cucauucugucaccuagac

SEQ ID NO: 157483 - RNA, 20 nt, Artificial Sequence
  Synthetic
ucucauucugucaccuagac

SEQ ID NO: 157484 - RNA, 24 nt, Artificial Sequence
  Synthetic
agggucucauucugucaccuagac

SEQ ID NO: 157485 - RNA, 18 nt, Artificial Sequence
  Synthetic
caccaagaucaaaaggac

SEQ ID NO: 157486 - RNA, 19 nt, Artificial Sequence
  Synthetic
acaccaagaucaaaaggac

SEQ ID NO: 157487 - RNA, 20 nt, Artificial Sequence
  Synthetic
aacaccaagaucaaaaggac

SEQ ID NO: 157488 - RNA, 21 nt, Artificial Sequence
  Synthetic
caacaccaagaucaaaaggac

SEQ ID NO: 157489 - RNA, 22 nt, Artificial Sequence
  Synthetic
ucaacaccaagaucaaaaggac

SEQ ID NO: 157490 - RNA, 24 nt, Artificial Sequence
  Synthetic
cgucaacaccaagaucaaaaggac

SEQ ID NO: 157491 - RNA, 19 nt, Artificial Sequence
  Synthetic
agcucagaaugagaaggac

SEQ ID NO: 157492 - RNA, 20 nt, Artificial Sequence
  Synthetic
ugggcuaagagcuagaggac

SEQ ID NO: 157493 - RNA, 18 nt, Artificial Sequence
  Synthetic
cuguguuuuggggaggac

SEQ ID NO: 157494 - RNA, 19 nt, Artificial Sequence
  Synthetic
ucuguguuuuggggaggac

SEQ ID NO: 157495 - RNA, 20 nt, Artificial Sequence
  Synthetic
uucuguguuuuggggaggac

SEQ ID NO: 157496 - RNA, 19 nt, Artificial Sequence
  Synthetic
agguggaucacuuuaggac

SEQ ID NO: 157497 - RNA, 20 nt, Artificial Sequence
  Synthetic
uagguggaucacuuuaggac

SEQ ID NO: 157498 - RNA, 23 nt, Artificial Sequence
  Synthetic
agguagguggaucacuuuaggac

SEQ ID NO: 157499 - RNA, 18 nt, Artificial Sequence
  Synthetic
caauuuuauuuuuaggac

SEQ ID NO: 157500 - RNA, 19 nt, Artificial Sequence
  Synthetic
ucaauuuuauuuuuaggac

SEQ ID NO: 157501 - RNA, 20 nt, Artificial Sequence
  Synthetic
uucaauuuuauuuuuaggac

SEQ ID NO: 157502 - RNA, 18 nt, Artificial Sequence
  Synthetic
cauguccuuugcacggac

SEQ ID NO: 157503 - RNA, 19 nt, Artificial Sequence
  Synthetic
ucauguccuuugcacggac

SEQ ID NO: 157504 - RNA, 20 nt, Artificial Sequence
  Synthetic
uucauguccuuugcacggac

SEQ ID NO: 157505 - RNA, 22 nt, Artificial Sequence
  Synthetic
aguucauguccuuugcacggac

SEQ ID NO: 157506 - RNA, 24 nt, Artificial Sequence
  Synthetic
ugaguucauguccuuugcacggac

SEQ ID NO: 157507 - RNA, 18 nt, Artificial Sequence
  Synthetic
uauguccuuugaagggac

SEQ ID NO: 157508 - RNA, 19 nt, Artificial Sequence
  Synthetic
uuauguccuuugaagggac

SEQ ID NO: 157509 - RNA, 20 nt, Artificial Sequence
  Synthetic
uuuauguccuuugaagggac

SEQ ID NO: 157510 - RNA, 22 nt, Artificial Sequence
  Synthetic
uguuuauguccuuugaagggac

SEQ ID NO: 157511 - RNA, 23 nt, Artificial Sequence
  Synthetic
uuguuuauguccuuugaagggac

SEQ ID NO: 157512 - RNA, 18 nt, Artificial Sequence
  Synthetic
cauguccuuugcagggac

SEQ ID NO: 157513 - RNA, 19 nt, Artificial Sequence
  Synthetic
ucauguccuuugcagggac

SEQ ID NO: 157514 - RNA, 20 nt, Artificial Sequence
  Synthetic
aucauguccuuugcagggac

SEQ ID NO: 157515 - RNA, 22 nt, Artificial Sequence
  Synthetic
agaucauguccuuugcagggac

SEQ ID NO: 157516 - RNA, 24 nt, Artificial Sequence
  Synthetic
ugagaucauguccuuugcagggac

SEQ ID NO: 157517 - RNA, 20 nt, Artificial Sequence
  Synthetic
uucauguccuuugcagggac

SEQ ID NO: 157518 - RNA, 21 nt, Artificial Sequence
  Synthetic
cuucauguccuuugcagggac

SEQ ID NO: 157519 - RNA, 22 nt, Artificial Sequence
  Synthetic
acuucauguccuuugcagggac

SEQ ID NO: 157520 - RNA, 24 nt, Artificial Sequence
  Synthetic
ugacuucauguccuuugcagggac

SEQ ID NO: 157521 - RNA, 22 nt, Artificial Sequence
  Synthetic
aguucacauccuuuguagggac

SEQ ID NO: 157522 - RNA, 24 nt, Artificial Sequence
  Synthetic
ugaguucacauccuuuguagggac

SEQ ID NO: 157523 - RNA, 18 nt, Artificial Sequence
  Synthetic
uuuaaaauauaucuggac

SEQ ID NO: 157524 - RNA, 19 nt, Artificial Sequence
  Synthetic
uuuuaaaauauaucuggac

SEQ ID NO: 157525 - RNA, 20 nt, Artificial Sequence
  Synthetic
uuuuuaaaauauaucuggac

SEQ ID NO: 157526 - RNA, 18 nt, Artificial Sequence
  Synthetic
cauaagaaaacauuggac

SEQ ID NO: 157527 - RNA, 19 nt, Artificial Sequence
  Synthetic
ucauaagaaaacauuggac

SEQ ID NO: 157528 - RNA, 20 nt, Artificial Sequence
  Synthetic
uucauaagaaaacauuggac

SEQ ID NO: 157529 - RNA, 21 nt, Artificial Sequence
  Synthetic
auucauaagaaaacauuggac

SEQ ID NO: 157530 - RNA, 22 nt, Artificial Sequence
  Synthetic
aauucauaagaaaacauuggac

SEQ ID NO: 157531 - RNA, 23 nt, Artificial Sequence
  Synthetic
aaauucauaagaaaacauuggac

SEQ ID NO: 157532 - RNA, 24 nt, Artificial Sequence
  Synthetic
aaaauucauaagaaaacauuggac

SEQ ID NO: 157533 - RNA, 18 nt, Artificial Sequence
  Synthetic
aacagcauuugcaaugac

SEQ ID NO: 157534 - RNA, 19 nt, Artificial Sequence
  Synthetic
uaacagcauuugcaaugac

SEQ ID NO: 157535 - RNA, 20 nt, Artificial Sequence
  Synthetic
uuaacagcauuugcaaugac

SEQ ID NO: 157536 - RNA, 21 nt, Artificial Sequence
  Synthetic
auuaacagcauuugcaaugac

SEQ ID NO: 157537 - RNA, 22 nt, Artificial Sequence
  Synthetic
aauuaacagcauuugcaaugac

SEQ ID NO: 157538 - RNA, 24 nt, Artificial Sequence
  Synthetic
ugaauuaacagcauuugcaaugac

SEQ ID NO: 157539 - RNA, 18 nt, Artificial Sequence
  Synthetic
caugcaucacuuaaugac

SEQ ID NO: 157540 - RNA, 19 nt, Artificial Sequence
  Synthetic
ccaugcaucacuuaaugac

SEQ ID NO: 157541 - RNA, 20 nt, Artificial Sequence
  Synthetic
uccaugcaucacuuaaugac

SEQ ID NO: 157542 - RNA, 21 nt, Artificial Sequence
  Synthetic
auccaugcaucacuuaaugac

SEQ ID NO: 157543 - RNA, 22 nt, Artificial Sequence
  Synthetic
cauccaugcaucacuuaaugac

SEQ ID NO: 157544 - RNA, 23 nt, Artificial Sequence
  Synthetic
ucauccaugcaucacuuaaugac

SEQ ID NO: 157545 - RNA, 24 nt, Artificial Sequence
  Synthetic
uucauccaugcaucacuuaaugac

SEQ ID NO: 157546 - RNA, 18 nt, Artificial Sequence
  Synthetic
acaacaaacccccaugac

SEQ ID NO: 157547 - RNA, 19 nt, Artificial Sequence
  Synthetic
uacaacaaacccccaugac

SEQ ID NO: 157548 - RNA, 22 nt, Artificial Sequence
  Synthetic
cgguacaacaaacccccaugac

SEQ ID NO: 157549 - RNA, 23 nt, Artificial Sequence
  Synthetic
ucgguacaacaaacccccaugac

SEQ ID NO: 157550 - RNA, 24 nt, Artificial Sequence
  Synthetic
aucgguacaacaaacccccaugac

SEQ ID NO: 157551 - RNA, 18 nt, Artificial Sequence
  Synthetic
ccuccagcugauucugac

SEQ ID NO: 157552 - RNA, 19 nt, Artificial Sequence
  Synthetic
cccuccagcugauucugac

SEQ ID NO: 157553 - RNA, 20 nt, Artificial Sequence
  Synthetic
acccuccagcugauucugac

SEQ ID NO: 157554 - RNA, 21 nt, Artificial Sequence
  Synthetic
aacccuccagcugauucugac

SEQ ID NO: 157555 - RNA, 22 nt, Artificial Sequence
  Synthetic
aaacccuccagcugauucugac

SEQ ID NO: 157556 - RNA, 23 nt, Artificial Sequence
  Synthetic
caaacccuccagcugauucugac

SEQ ID NO: 157557 - RNA, 18 nt, Artificial Sequence
  Synthetic
accuugcaucagcgugac

SEQ ID NO: 157558 - RNA, 19 nt, Artificial Sequence
  Synthetic
caccuugcaucagcgugac

SEQ ID NO: 157559 - RNA, 20 nt, Artificial Sequence
  Synthetic
ccaccuugcaucagcgugac

SEQ ID NO: 157560 - RNA, 18 nt, Artificial Sequence
  Synthetic
caaguccuugaaggugac

SEQ ID NO: 157561 - RNA, 19 nt, Artificial Sequence
  Synthetic
ccaaguccuugaaggugac

SEQ ID NO: 157562 - RNA, 18 nt, Artificial Sequence
  Synthetic
aaguguucaagauuugac

SEQ ID NO: 157563 - RNA, 19 nt, Artificial Sequence
  Synthetic
aaaguguucaagauuugac

SEQ ID NO: 157564 - RNA, 20 nt, Artificial Sequence
  Synthetic
caaaguguucaagauuugac

SEQ ID NO: 157565 - RNA, 22 nt, Artificial Sequence
  Synthetic
agcaaaguguucaagauuugac

SEQ ID NO: 157566 - RNA, 23 nt, Artificial Sequence
  Synthetic
cagcaaaguguucaagauuugac

SEQ ID NO: 157567 - RNA, 24 nt, Artificial Sequence
  Synthetic
acagcaaaguguucaagauuugac

SEQ ID NO: 157568 - RNA, 18 nt, Artificial Sequence
  Synthetic
uauaaccaaggcuuugac

SEQ ID NO: 157569 - RNA, 19 nt, Artificial Sequence
  Synthetic
auauaaccaaggcuuugac

SEQ ID NO: 157570 - RNA, 20 nt, Artificial Sequence
  Synthetic
uauauaaccaaggcuuugac

SEQ ID NO: 157571 - RNA, 18 nt, Artificial Sequence
  Synthetic
aaauaaaauaaaaaauac

SEQ ID NO: 157572 - RNA, 19 nt, Artificial Sequence
  Synthetic
aaaauaaaauaaaaaauac

SEQ ID NO: 157573 - RNA, 20 nt, Artificial Sequence
  Synthetic
uaaaauaaaauaaaaaauac

SEQ ID NO: 157574 - RNA, 21 nt, Artificial Sequence
  Synthetic
uuaaaauaaaauaaaaaauac

SEQ ID NO: 157575 - RNA, 22 nt, Artificial Sequence
  Synthetic
auuaaaauaaaauaaaaaauac

SEQ ID NO: 157576 - RNA, 23 nt, Artificial Sequence
  Synthetic
aauuaaaauaaaauaaaaaauac

SEQ ID NO: 157577 - RNA, 24 nt, Artificial Sequence
  Synthetic
caauuaaaauaaaauaaaaaauac

SEQ ID NO: 157578 - RNA, 18 nt, Artificial Sequence
  Synthetic
ccagugagaagggaauac

SEQ ID NO: 157579 - RNA, 19 nt, Artificial Sequence
  Synthetic
cccagugagaagggaauac

SEQ ID NO: 157580 - RNA, 20 nt, Artificial Sequence
  Synthetic
acccagugagaagggaauac

SEQ ID NO: 157581 - RNA, 18 nt, Artificial Sequence
  Synthetic
aucuaauucuccuaauac

SEQ ID NO: 157582 - RNA, 19 nt, Artificial Sequence
  Synthetic
uaucuaauucuccuaauac

SEQ ID NO: 157583 - RNA, 20 nt, Artificial Sequence
  Synthetic
uuaucuaauucuccuaauac

SEQ ID NO: 157584 - RNA, 19 nt, Artificial Sequence
  Synthetic
uguguacuacgcuuaauac

SEQ ID NO: 157585 - RNA, 20 nt, Artificial Sequence
  Synthetic
auguguacuacgcuuaauac

SEQ ID NO: 157586 - RNA, 21 nt, Artificial Sequence
  Synthetic
aauguguacuacgcuuaauac

SEQ ID NO: 157587 - RNA, 22 nt, Artificial Sequence
  Synthetic
uaauguguacuacgcuuaauac

SEQ ID NO: 157588 - RNA, 23 nt, Artificial Sequence
  Synthetic
cuaauguguacuacgcuuaauac

SEQ ID NO: 157589 - RNA, 24 nt, Artificial Sequence
  Synthetic
ucuaauguguacuacgcuuaauac

SEQ ID NO: 157590 - RNA, 18 nt, Artificial Sequence
  Synthetic
aacaaagacaccacauac

SEQ ID NO: 157591 - RNA, 20 nt, Artificial Sequence
  Synthetic
agaacaaagacaccacauac

SEQ ID NO: 157592 - RNA, 22 nt, Artificial Sequence
  Synthetic
cgagaacaaagacaccacauac

SEQ ID NO: 157593 - RNA, 23 nt, Artificial Sequence
  Synthetic
acgagaacaaagacaccacauac

SEQ ID NO: 157594 - RNA, 24 nt, Artificial Sequence
  Synthetic
aacgagaacaaagacaccacauac

SEQ ID NO: 157595 - RNA, 18 nt, Artificial Sequence
  Synthetic
uauccauuuaaaauauac

SEQ ID NO: 157596 - RNA, 19 nt, Artificial Sequence
  Synthetic
auauccauuuaaaauauac

SEQ ID NO: 157597 - RNA, 20 nt, Artificial Sequence
  Synthetic
aauauccauuuaaaauauac

SEQ ID NO: 157598 - RNA, 19 nt, Artificial Sequence
  Synthetic
agaauacuuaauaauauac

SEQ ID NO: 157599 - RNA, 20 nt, Artificial Sequence
  Synthetic
aagaauacuuaauaauauac

SEQ ID NO: 157600 - RNA, 19 nt, Artificial Sequence
  Synthetic
aguacugcagauaauauac

SEQ ID NO: 157601 - RNA, 20 nt, Artificial Sequence
  Synthetic
caguacugcagauaauauac

SEQ ID NO: 157602 - RNA, 18 nt, Artificial Sequence
  Synthetic
uuaucucaccccuuauac

SEQ ID NO: 157603 - RNA, 19 nt, Artificial Sequence
  Synthetic
cuuaucucaccccuuauac

SEQ ID NO: 157604 - RNA, 20 nt, Artificial Sequence
  Synthetic
ccuuaucucaccccuuauac

SEQ ID NO: 157605 - RNA, 21 nt, Artificial Sequence
  Synthetic
cccuuaucucaccccuuauac

SEQ ID NO: 157606 - RNA, 22 nt, Artificial Sequence
  Synthetic
acccuuaucucaccccuuauac

SEQ ID NO: 157607 - RNA, 21 nt, Artificial Sequence
  Synthetic
aaagaacaguuccaacacuac

SEQ ID NO: 157608 - RNA, 22 nt, Artificial Sequence
  Synthetic
uaaagaacaguuccaacacuac

SEQ ID NO: 157609 - RNA, 18 nt, Artificial Sequence
  Synthetic
auagaaacggaggacuac

SEQ ID NO: 157610 - RNA, 19 nt, Artificial Sequence
  Synthetic
aauagaaacggaggacuac

SEQ ID NO: 157611 - RNA, 20 nt, Artificial Sequence
  Synthetic
caauagaaacggaggacuac

SEQ ID NO: 157612 - RNA, 21 nt, Artificial Sequence
  Synthetic
acaauagaaacggaggacuac

SEQ ID NO: 157613 - RNA, 22 nt, Artificial Sequence
  Synthetic
aacaauagaaacggaggacuac

SEQ ID NO: 157614 - RNA, 23 nt, Artificial Sequence
  Synthetic
caacaauagaaacggaggacuac

SEQ ID NO: 157615 - RNA, 21 nt, Artificial Sequence
  Synthetic
acaacagacguggaagccuac

SEQ ID NO: 157616 - RNA, 22 nt, Artificial Sequence
  Synthetic
aacaacagacguggaagccuac

SEQ ID NO: 157617 - RNA, 19 nt, Artificial Sequence
  Synthetic
ugguuaccaugcucgcuac

SEQ ID NO: 157618 - RNA, 21 nt, Artificial Sequence
  Synthetic
agugguuaccaugcucgcuac

SEQ ID NO: 157619 - RNA, 22 nt, Artificial Sequence
  Synthetic
uagugguuaccaugcucgcuac

SEQ ID NO: 157620 - RNA, 23 nt, Artificial Sequence
  Synthetic
cuagugguuaccaugcucgcuac

SEQ ID NO: 157621 - RNA, 24 nt, Artificial Sequence
  Synthetic
acuagugguuaccaugcucgcuac

SEQ ID NO: 157622 - RNA, 18 nt, Artificial Sequence
  Synthetic
caugaauuuuuaugcuac

SEQ ID NO: 157623 - RNA, 20 nt, Artificial Sequence
  Synthetic
agcaugaauuuuuaugcuac

SEQ ID NO: 157624 - RNA, 21 nt, Artificial Sequence
  Synthetic
aagcaugaauuuuuaugcuac

SEQ ID NO: 157625 - RNA, 22 nt, Artificial Sequence
  Synthetic
aaagcaugaauuuuuaugcuac

SEQ ID NO: 157626 - RNA, 23 nt, Artificial Sequence
  Synthetic
caaagcaugaauuuuuaugcuac

SEQ ID NO: 157627 - RNA, 24 nt, Artificial Sequence
  Synthetic
ccaaagcaugaauuuuuaugcuac

SEQ ID NO: 157628 - RNA, 18 nt, Artificial Sequence
  Synthetic
cucagccucccaaaguac

SEQ ID NO: 157629 - RNA, 19 nt, Artificial Sequence
  Synthetic
ccucagccucccaaaguac

SEQ ID NO: 157630 - RNA, 20 nt, Artificial Sequence
  Synthetic
uccucagccucccaaaguac

SEQ ID NO: 157631 - RNA, 21 nt, Artificial Sequence
  Synthetic
cuccucagccucccaaaguac

SEQ ID NO: 157632 - RNA, 22 nt, Artificial Sequence
  Synthetic
ccuccucagccucccaaaguac

SEQ ID NO: 157633 - RNA, 23 nt, Artificial Sequence
  Synthetic
cccuccucagccucccaaaguac

SEQ ID NO: 157634 - RNA, 18 nt, Artificial Sequence
  Synthetic
cucggccucccaaaguac

SEQ ID NO: 157635 - RNA, 19 nt, Artificial Sequence
  Synthetic
ccucggccucccaaaguac

SEQ ID NO: 157636 - RNA, 21 nt, Artificial Sequence
  Synthetic
cgccucggccucccaaaguac

SEQ ID NO: 157637 - RNA, 22 nt, Artificial Sequence
  Synthetic
ccgccucggccucccaaaguac

SEQ ID NO: 157638 - RNA, 23 nt, Artificial Sequence
  Synthetic
cccgccucggccucccaaaguac

SEQ ID NO: 157639 - RNA, 19 nt, Artificial Sequence
  Synthetic
cgguuacuaugcucaguac

SEQ ID NO: 157640 - RNA, 20 nt, Artificial Sequence
  Synthetic
ucgguuacuaugcucaguac

SEQ ID NO: 157641 - RNA, 21 nt, Artificial Sequence
  Synthetic
aucgguuacuaugcucaguac

SEQ ID NO: 157642 - RNA, 22 nt, Artificial Sequence
  Synthetic
uaucgguuacuaugcucaguac

SEQ ID NO: 157643 - RNA, 23 nt, Artificial Sequence
  Synthetic
cuaucgguuacuaugcucaguac

SEQ ID NO: 157644 - RNA, 24 nt, Artificial Sequence
  Synthetic
acuaucgguuacuaugcucaguac

SEQ ID NO: 157645 - RNA, 18 nt, Artificial Sequence
  Synthetic
ucuauaacuuugucguac

SEQ ID NO: 157646 - RNA, 19 nt, Artificial Sequence
  Synthetic
uucuauaacuuugucguac

SEQ ID NO: 157647 - RNA, 21 nt, Artificial Sequence
  Synthetic
uguucuauaacuuugucguac

SEQ ID NO: 157648 - RNA, 24 nt, Artificial Sequence
  Synthetic
ugguguucuauaacuuugucguac

SEQ ID NO: 157649 - RNA, 18 nt, Artificial Sequence
  Synthetic
aaaauaaaauaaagguac

SEQ ID NO: 157650 - RNA, 19 nt, Artificial Sequence
  Synthetic
aaaaauaaaauaaagguac

SEQ ID NO: 157651 - RNA, 20 nt, Artificial Sequence
  Synthetic
aaaaaauaaaauaaagguac

SEQ ID NO: 157652 - RNA, 21 nt, Artificial Sequence
  Synthetic
aaaaaaauaaaauaaagguac

SEQ ID NO: 157653 - RNA, 22 nt, Artificial Sequence
  Synthetic
aaaaaaaauaaaauaaagguac

SEQ ID NO: 157654 - RNA, 23 nt, Artificial Sequence
  Synthetic
aaaaaaaaauaaaauaaagguac

SEQ ID NO: 157655 - RNA, 24 nt, Artificial Sequence
  Synthetic
aaaaaaaaaauaaaauaaagguac

SEQ ID NO: 157656 - RNA, 18 nt, Artificial Sequence
  Synthetic
aaaaaggaagagcuguac

SEQ ID NO: 157657 - RNA, 19 nt, Artificial Sequence
  Synthetic
aaaaaaggaagagcuguac

SEQ ID NO: 157658 - RNA, 18 nt, Artificial Sequence
  Synthetic
uccuuuuacucucuguac

SEQ ID NO: 157659 - RNA, 19 nt, Artificial Sequence
  Synthetic
auccuuuuacucucuguac

SEQ ID NO: 157660 - RNA, 20 nt, Artificial Sequence
  Synthetic
cauccuuuuacucucuguac

SEQ ID NO: 157661 - RNA, 21 nt, Artificial Sequence
  Synthetic
ucauccuuuuacucucuguac

SEQ ID NO: 157662 - RNA, 22 nt, Artificial Sequence
  Synthetic
aucauccuuuuacucucuguac

SEQ ID NO: 157663 - RNA, 23 nt, Artificial Sequence
  Synthetic
aaucauccuuuuacucucuguac

SEQ ID NO: 157664 - RNA, 24 nt, Artificial Sequence
  Synthetic
uaaucauccuuuuacucucuguac

SEQ ID NO: 157665 - RNA, 18 nt, Artificial Sequence
  Synthetic
acaacacaugggaauuac

SEQ ID NO: 157666 - RNA, 19 nt, Artificial Sequence
  Synthetic
cacaacacaugggaauuac

SEQ ID NO: 157667 - RNA, 20 nt, Artificial Sequence
  Synthetic
ccacaacacaugggaauuac

SEQ ID NO: 157668 - RNA, 21 nt, Artificial Sequence
  Synthetic
cccacaacacaugggaauuac

SEQ ID NO: 157669 - RNA, 22 nt, Artificial Sequence
  Synthetic
ucccacaacacaugggaauuac

SEQ ID NO: 157670 - RNA, 23 nt, Artificial Sequence
  Synthetic
cucccacaacacaugggaauuac

SEQ ID NO: 157671 - RNA, 24 nt, Artificial Sequence
  Synthetic
ccucccacaacacaugggaauuac

SEQ ID NO: 157672 - RNA, 18 nt, Artificial Sequence
  Synthetic
ccaaagugcuggaauuac

SEQ ID NO: 157673 - RNA, 19 nt, Artificial Sequence
  Synthetic
cccaaagugcuggaauuac

SEQ ID NO: 157674 - RNA, 20 nt, Artificial Sequence
  Synthetic
ucccaaagugcuggaauuac

SEQ ID NO: 157675 - RNA, 21 nt, Artificial Sequence
  Synthetic
cucccaaagugcuggaauuac

SEQ ID NO: 157676 - RNA, 22 nt, Artificial Sequence
  Synthetic
ccucccaaagugcuggaauuac

SEQ ID NO: 157677 - RNA, 24 nt, Artificial Sequence
  Synthetic
agccucccaaagugcuggaauuac

SEQ ID NO: 157678 - RNA, 18 nt, Artificial Sequence
  Synthetic
ccaaguagcugggauuac

SEQ ID NO: 157679 - RNA, 19 nt, Artificial Sequence
  Synthetic
cccaaguagcugggauuac

SEQ ID NO: 157680 - RNA, 20 nt, Artificial Sequence
  Synthetic
ucccaaguagcugggauuac

SEQ ID NO: 157681 - RNA, 21 nt, Artificial Sequence
  Synthetic
cucccaaguagcugggauuac

SEQ ID NO: 157682 - RNA, 22 nt, Artificial Sequence
  Synthetic
ccucccaaguagcugggauuac

SEQ ID NO: 157683 - RNA, 24 nt, Artificial Sequence
  Synthetic
agccucccaaguagcugggauuac

SEQ ID NO: 157684 - RNA, 18 nt, Artificial Sequence
  Synthetic
auauacauacaauauuac

SEQ ID NO: 157685 - RNA, 19 nt, Artificial Sequence
  Synthetic
uauauacauacaauauuac

SEQ ID NO: 157686 - RNA, 20 nt, Artificial Sequence
  Synthetic
auauauacauacaauauuac

SEQ ID NO: 157687 - RNA, 18 nt, Artificial Sequence
  Synthetic
uaauuuuuguauucuuac

SEQ ID NO: 157688 - RNA, 20 nt, Artificial Sequence
  Synthetic
aguaauuuuuguauucuuac

SEQ ID NO: 157689 - RNA, 18 nt, Artificial Sequence
  Synthetic
caagugauuuuugguuac

SEQ ID NO: 157690 - RNA, 19 nt, Artificial Sequence
  Synthetic
acaagugauuuuugguuac

SEQ ID NO: 157691 - RNA, 20 nt, Artificial Sequence
  Synthetic
uacaagugauuuuugguuac

SEQ ID NO: 157692 - RNA, 21 nt, Artificial Sequence
  Synthetic
auacaagugauuuuugguuac

SEQ ID NO: 157693 - RNA, 22 nt, Artificial Sequence
  Synthetic
aauacaagugauuuuugguuac

SEQ ID NO: 157694 - RNA, 18 nt, Artificial Sequence
  Synthetic
cucuugcaucaguguuac

SEQ ID NO: 157695 - RNA, 19 nt, Artificial Sequence
  Synthetic
ccucuugcaucaguguuac

SEQ ID NO: 157696 - RNA, 20 nt, Artificial Sequence
  Synthetic
accucuugcaucaguguuac

SEQ ID NO: 157697 - RNA, 21 nt, Artificial Sequence
  Synthetic
caccucuugcaucaguguuac

SEQ ID NO: 157698 - RNA, 22 nt, Artificial Sequence
  Synthetic
ccaccucuugcaucaguguuac

SEQ ID NO: 157699 - RNA, 23 nt, Artificial Sequence
  Synthetic
cccaccucuugcaucaguguuac

SEQ ID NO: 157700 - RNA, 24 nt, Artificial Sequence
  Synthetic
acccaccucuugcaucaguguuac

SEQ ID NO: 157701 - RNA, 18 nt, Artificial Sequence
  Synthetic
ccuaugcaggauuguuac

SEQ ID NO: 157702 - RNA, 19 nt, Artificial Sequence
  Synthetic
accuaugcaggauuguuac

SEQ ID NO: 157703 - RNA, 20 nt, Artificial Sequence
  Synthetic
uaccuaugcaggauuguuac

SEQ ID NO: 157704 - RNA, 22 nt, Artificial Sequence
  Synthetic
aguaccuaugcaggauuguuac

SEQ ID NO: 157705 - RNA, 18 nt, Artificial Sequence
  Synthetic
uacguacagguuuguuac

SEQ ID NO: 157706 - RNA, 19 nt, Artificial Sequence
  Synthetic
auacguacagguuuguuac

SEQ ID NO: 157707 - RNA, 20 nt, Artificial Sequence
  Synthetic
uauacguacagguuuguuac

SEQ ID NO: 157708 - RNA, 22 nt, Artificial Sequence
  Synthetic
aguauacguacagguuuguuac

SEQ ID NO: 157709 - RNA, 23 nt, Artificial Sequence
  Synthetic
uaguauacguacagguuuguuac

SEQ ID NO: 157710 - RNA, 18 nt, Artificial Sequence
  Synthetic
cauguucagguuuguuac

SEQ ID NO: 157711 - RNA, 19 nt, Artificial Sequence
  Synthetic
acauguucagguuuguuac

SEQ ID NO: 157712 - RNA, 20 nt, Artificial Sequence
  Synthetic
uacauguucagguuuguuac

SEQ ID NO: 157713 - RNA, 24 nt, Artificial Sequence
  Synthetic
aggguacauguucagguuuguuac

SEQ ID NO: 157714 - RNA, 18 nt, Artificial Sequence
  Synthetic
cauguguugguuuguuac

SEQ ID NO: 157715 - RNA, 19 nt, Artificial Sequence
  Synthetic
acauguguugguuuguuac

SEQ ID NO: 157716 - RNA, 20 nt, Artificial Sequence
  Synthetic
uacauguguugguuuguuac

SEQ ID NO: 157717 - RNA, 21 nt, Artificial Sequence
  Synthetic
uaauucauucuaucauuuuac

SEQ ID NO: 157718 - RNA, 22 nt, Artificial Sequence
  Synthetic
auaauucauucuaucauuuuac

SEQ ID NO: 157719 - RNA, 23 nt, Artificial Sequence
  Synthetic
aauaauucauucuaucauuuuac

SEQ ID NO: 157720 - RNA, 24 nt, Artificial Sequence
  Synthetic
aaauaauucauucuaucauuuuac

SEQ ID NO: 157721 - RNA, 18 nt, Artificial Sequence
  Synthetic
uguuuuguuuuguuuuac

SEQ ID NO: 157722 - RNA, 19 nt, Artificial Sequence
  Synthetic
uuguuuuguuuuguuuuac

SEQ ID NO: 157723 - RNA, 20 nt, Artificial Sequence
  Synthetic
uuuguuuuguuuuguuuuac

SEQ ID NO: 157724 - RNA, 21 nt, Artificial Sequence
  Synthetic
uuuuguuuuguuuuguuuuac

SEQ ID NO: 157725 - RNA, 22 nt, Artificial Sequence
  Synthetic
uuuuuguuuuguuuuguuuuac

SEQ ID NO: 157726 - RNA, 24 nt, Artificial Sequence
  Synthetic
uguuuuuguuuuguuuuguuuuac

SEQ ID NO: 157727 - RNA, 18 nt, Artificial Sequence
  Synthetic
uauggagaugcaaaaacc

SEQ ID NO: 157728 - RNA, 19 nt, Artificial Sequence
  Synthetic
uuauggagaugcaaaaacc

SEQ ID NO: 157729 - RNA, 20 nt, Artificial Sequence
  Synthetic
uuuauggagaugcaaaaacc

SEQ ID NO: 157730 - RNA, 21 nt, Artificial Sequence
  Synthetic
aaagucaagaaaauacaaacc

SEQ ID NO: 157731 - RNA, 22 nt, Artificial Sequence
  Synthetic
aaaagucaagaaaauacaaacc

SEQ ID NO: 157732 - RNA, 24 nt, Artificial Sequence
  Synthetic
agaaaagucaagaaaauacaaacc

SEQ ID NO: 157733 - RNA, 18 nt, Artificial Sequence
  Synthetic
auagugaugcaauaaacc

SEQ ID NO: 157734 - RNA, 19 nt, Artificial Sequence
  Synthetic
aauagugaugcaauaaacc

SEQ ID NO: 157735 - RNA, 20 nt, Artificial Sequence
  Synthetic
uaauagugaugcaauaaacc

SEQ ID NO: 157736 - RNA, 18 nt, Artificial Sequence
  Synthetic
acccccgccaccccaacc

SEQ ID NO: 157737 - RNA, 19 nt, Artificial Sequence
  Synthetic
cacccccgccaccccaacc

SEQ ID NO: 157738 - RNA, 20 nt, Artificial Sequence
  Synthetic
ccacccccgccaccccaacc

SEQ ID NO: 157739 - RNA, 21 nt, Artificial Sequence
  Synthetic
cccacccccgccaccccaacc

SEQ ID NO: 157740 - RNA, 22 nt, Artificial Sequence
  Synthetic
ccccacccccgccaccccaacc

SEQ ID NO: 157741 - RNA, 23 nt, Artificial Sequence
  Synthetic
cccccacccccgccaccccaacc

SEQ ID NO: 157742 - RNA, 24 nt, Artificial Sequence
  Synthetic
ccccccacccccgccaccccaacc

SEQ ID NO: 157743 - RNA, 18 nt, Artificial Sequence
  Synthetic
uugaaaacuuguucaacc

SEQ ID NO: 157744 - RNA, 19 nt, Artificial Sequence
  Synthetic
cuugaaaacuuguucaacc

SEQ ID NO: 157745 - RNA, 20 nt, Artificial Sequence
  Synthetic
acuugaaaacuuguucaacc

SEQ ID NO: 157746 - RNA, 18 nt, Artificial Sequence
  Synthetic
auaggaaugauuugaacc

SEQ ID NO: 157747 - RNA, 19 nt, Artificial Sequence
  Synthetic
cauaggaaugauuugaacc

SEQ ID NO: 157748 - RNA, 18 nt, Artificial Sequence
  Synthetic
caaccaaaacuaauaacc

SEQ ID NO: 157749 - RNA, 20 nt, Artificial Sequence
  Synthetic
agcaaccaaaacuaauaacc

SEQ ID NO: 157750 - RNA, 21 nt, Artificial Sequence
  Synthetic
aagcaaccaaaacuaauaacc

SEQ ID NO: 157751 - RNA, 22 nt, Artificial Sequence
  Synthetic
caagcaaccaaaacuaauaacc

SEQ ID NO: 157752 - RNA, 23 nt, Artificial Sequence
  Synthetic
acaagcaaccaaaacuaauaacc

SEQ ID NO: 157753 - RNA, 24 nt, Artificial Sequence
  Synthetic
aacaagcaaccaaaacuaauaacc

SEQ ID NO: 157754 - RNA, 18 nt, Artificial Sequence
  Synthetic
cagccucauaaacacacc

SEQ ID NO: 157755 - RNA, 19 nt, Artificial Sequence
  Synthetic
acagccucauaaacacacc

SEQ ID NO: 157756 - RNA, 20 nt, Artificial Sequence
  Synthetic
aacagccucauaaacacacc

SEQ ID NO: 157757 - RNA, 21 nt, Artificial Sequence
  Synthetic
aaacagccucauaaacacacc

SEQ ID NO: 157758 - RNA, 23 nt, Artificial Sequence
  Synthetic
agaaacagccucauaaacacacc

SEQ ID NO: 157759 - RNA, 24 nt, Artificial Sequence
  Synthetic
cagaaacagccucauaaacacacc

SEQ ID NO: 157760 - RNA, 18 nt, Artificial Sequence
  Synthetic
caagcauuccuauacacc

SEQ ID NO: 157761 - RNA, 19 nt, Artificial Sequence
  Synthetic
acaagcauuccuauacacc

SEQ ID NO: 157762 - RNA, 20 nt, Artificial Sequence
  Synthetic
cacaagcauuccuauacacc

SEQ ID NO: 157763 - RNA, 21 nt, Artificial Sequence
  Synthetic
ucacaagcauuccuauacacc

SEQ ID NO: 157764 - RNA, 22 nt, Artificial Sequence
  Synthetic
aucacaagcauuccuauacacc

SEQ ID NO: 157765 - RNA, 24 nt, Artificial Sequence
  Synthetic
agaucacaagcauuccuauacacc

SEQ ID NO: 157766 - RNA, 18 nt, Artificial Sequence
  Synthetic
aacaucauguuguacacc

SEQ ID NO: 157767 - RNA, 19 nt, Artificial Sequence
  Synthetic
aaacaucauguuguacacc

SEQ ID NO: 157768 - RNA, 20 nt, Artificial Sequence
  Synthetic
aaaacaucauguuguacacc

SEQ ID NO: 157769 - RNA, 21 nt, Artificial Sequence
  Synthetic
caaaacaucauguuguacacc

SEQ ID NO: 157770 - RNA, 22 nt, Artificial Sequence
  Synthetic
ucaaaacaucauguuguacacc

SEQ ID NO: 157771 - RNA, 23 nt, Artificial Sequence
  Synthetic
aucaaaacaucauguuguacacc

SEQ ID NO: 157772 - RNA, 24 nt, Artificial Sequence
  Synthetic
uaucaaaacaucauguuguacacc

SEQ ID NO: 157773 - RNA, 18 nt, Artificial Sequence
  Synthetic
ccugcucugccuuccacc

SEQ ID NO: 157774 - RNA, 19 nt, Artificial Sequence
  Synthetic
accugcucugccuuccacc

SEQ ID NO: 157775 - RNA, 20 nt, Artificial Sequence
  Synthetic
caccugcucugccuuccacc

SEQ ID NO: 157776 - RNA, 21 nt, Artificial Sequence
  Synthetic
acaccugcucugccuuccacc

SEQ ID NO: 157777 - RNA, 22 nt, Artificial Sequence
  Synthetic
uacaccugcucugccuuccacc

SEQ ID NO: 157778 - RNA, 23 nt, Artificial Sequence
  Synthetic
cuacaccugcucugccuuccacc

SEQ ID NO: 157779 - RNA, 24 nt, Artificial Sequence
  Synthetic
ccuacaccugcucugccuuccacc

SEQ ID NO: 157780 - RNA, 18 nt, Artificial Sequence
  Synthetic
cacuugcacagaaucacc

SEQ ID NO: 157781 - RNA, 19 nt, Artificial Sequence
  Synthetic
acacuugcacagaaucacc

SEQ ID NO: 157782 - RNA, 20 nt, Artificial Sequence
  Synthetic
aacacuugcacagaaucacc

SEQ ID NO: 157783 - RNA, 18 nt, Artificial Sequence
  Synthetic
ccuucuaauaccaucacc

SEQ ID NO: 157784 - RNA, 19 nt, Artificial Sequence
  Synthetic
accuucuaauaccaucacc

SEQ ID NO: 157785 - RNA, 20 nt, Artificial Sequence
  Synthetic
caccuucuaauaccaucacc

SEQ ID NO: 157786 - RNA, 21 nt, Artificial Sequence
  Synthetic
ccaccuucuaauaccaucacc

SEQ ID NO: 157787 - RNA, 22 nt, Artificial Sequence
  Synthetic
cccaccuucuaauaccaucacc

SEQ ID NO: 157788 - RNA, 23 nt, Artificial Sequence
  Synthetic
ccccaccuucuaauaccaucacc

SEQ ID NO: 157789 - RNA, 24 nt, Artificial Sequence
  Synthetic
cccccaccuucuaauaccaucacc

SEQ ID NO: 157790 - RNA, 19 nt, Artificial Sequence
  Synthetic
uguucacagcaucaucacc

SEQ ID NO: 157791 - RNA, 20 nt, Artificial Sequence
  Synthetic
auguucacagcaucaucacc

SEQ ID NO: 157792 - RNA, 21 nt, Artificial Sequence
  Synthetic
aauguucacagcaucaucacc

SEQ ID NO: 157793 - RNA, 22 nt, Artificial Sequence
  Synthetic
caauguucacagcaucaucacc

SEQ ID NO: 157794 - RNA, 23 nt, Artificial Sequence
  Synthetic
acaauguucacagcaucaucacc

SEQ ID NO: 157795 - RNA, 24 nt, Artificial Sequence
  Synthetic
aacaauguucacagcaucaucacc

SEQ ID NO: 157796 - RNA, 18 nt, Artificial Sequence
  Synthetic
uccccuuugcccuucacc

SEQ ID NO: 157797 - RNA, 19 nt, Artificial Sequence
  Synthetic
cuccccuuugcccuucacc

SEQ ID NO: 157798 - RNA, 21 nt, Artificial Sequence
  Synthetic
agcuccccuuugcccuucacc

SEQ ID NO: 157799 - RNA, 22 nt, Artificial Sequence
  Synthetic
cagcuccccuuugcccuucacc

SEQ ID NO: 157800 - RNA, 23 nt, Artificial Sequence
  Synthetic
ccagcuccccuuugcccuucacc

SEQ ID NO: 157801 - RNA, 24 nt, Artificial Sequence
  Synthetic
accagcuccccuuugcccuucacc

SEQ ID NO: 157802 - RNA, 18 nt, Artificial Sequence
  Synthetic
auggaaccacaaaagacc

SEQ ID NO: 157803 - RNA, 19 nt, Artificial Sequence
  Synthetic
cauggaaccacaaaagacc

SEQ ID NO: 157804 - RNA, 21 nt, Artificial Sequence
  Synthetic
ugcauggaaccacaaaagacc

SEQ ID NO: 157805 - RNA, 22 nt, Artificial Sequence
  Synthetic
uugcauggaaccacaaaagacc

SEQ ID NO: 157806 - RNA, 23 nt, Artificial Sequence
  Synthetic
uuugcauggaaccacaaaagacc

SEQ ID NO: 157807 - RNA, 24 nt, Artificial Sequence
  Synthetic
auuugcauggaaccacaaaagacc

SEQ ID NO: 157808 - RNA, 18 nt, Artificial Sequence
  Synthetic
agagguagaaagaagacc

SEQ ID NO: 157809 - RNA, 19 nt, Artificial Sequence
  Synthetic
uagagguagaaagaagacc

SEQ ID NO: 157810 - RNA, 20 nt, Artificial Sequence
  Synthetic
agggcagacugcuugagacc

SEQ ID NO: 157811 - RNA, 21 nt, Artificial Sequence
  Synthetic
uagggcagacugcuugagacc

SEQ ID NO: 157812 - RNA, 23 nt, Artificial Sequence
  Synthetic
aguagggcagacugcuugagacc

SEQ ID NO: 157813 - RNA, 18 nt, Artificial Sequence
  Synthetic
uucagacagcaguugacc

SEQ ID NO: 157814 - RNA, 19 nt, Artificial Sequence
  Synthetic
uuucagacagcaguugacc

SEQ ID NO: 157815 - RNA, 20 nt, Artificial Sequence
  Synthetic
uuuucagacagcaguugacc

SEQ ID NO: 157816 - RNA, 21 nt, Artificial Sequence
  Synthetic
auuuucagacagcaguugacc

SEQ ID NO: 157817 - RNA, 22 nt, Artificial Sequence
  Synthetic
uauuuucagacagcaguugacc

SEQ ID NO: 157818 - RNA, 23 nt, Artificial Sequence
  Synthetic
cuauuuucagacagcaguugacc

SEQ ID NO: 157819 - RNA, 24 nt, Artificial Sequence
  Synthetic
ccuauuuucagacagcaguugacc

SEQ ID NO: 157820 - RNA, 18 nt, Artificial Sequence
  Synthetic
cuaccuuccaaaaauacc

SEQ ID NO: 157821 - RNA, 20 nt, Artificial Sequence
  Synthetic
ugcuaccuuccaaaaauacc

SEQ ID NO: 157822 - RNA, 18 nt, Artificial Sequence
  Synthetic
ugacaaagggcuaauacc

SEQ ID NO: 157823 - RNA, 19 nt, Artificial Sequence
  Synthetic
cugacaaagggcuaauacc

SEQ ID NO: 157824 - RNA, 20 nt, Artificial Sequence
  Synthetic
ucugacaaagggcuaauacc

SEQ ID NO: 157825 - RNA, 21 nt, Artificial Sequence
  Synthetic
aucugacaaagggcuaauacc

SEQ ID NO: 157826 - RNA, 22 nt, Artificial Sequence
  Synthetic
caucugacaaagggcuaauacc

SEQ ID NO: 157827 - RNA, 23 nt, Artificial Sequence
  Synthetic
acaucugacaaagggcuaauacc

SEQ ID NO: 157828 - RNA, 24 nt, Artificial Sequence
  Synthetic
uacaucugacaaagggcuaauacc

SEQ ID NO: 157829 - RNA, 18 nt, Artificial Sequence
  Synthetic
aucaucauguuguauacc

SEQ ID NO: 157830 - RNA, 19 nt, Artificial Sequence
  Synthetic
aaucaucauguuguauacc

SEQ ID NO: 157831 - RNA, 20 nt, Artificial Sequence
  Synthetic
aaaucaucauguuguauacc

SEQ ID NO: 157832 - RNA, 21 nt, Artificial Sequence
  Synthetic
aaaaucaucauguuguauacc

SEQ ID NO: 157833 - RNA, 22 nt, Artificial Sequence
  Synthetic
uaaaaucaucauguuguauacc

SEQ ID NO: 157834 - RNA, 23 nt, Artificial Sequence
  Synthetic
auaaaaucaucauguuguauacc

SEQ ID NO: 157835 - RNA, 24 nt, Artificial Sequence
  Synthetic
uauaaaaucaucauguuguauacc

SEQ ID NO: 157836 - RNA, 18 nt, Artificial Sequence
  Synthetic
acugagcuccucucuacc

SEQ ID NO: 157837 - RNA, 20 nt, Artificial Sequence
  Synthetic
ugacugagcuccucucuacc

SEQ ID NO: 157838 - RNA, 21 nt, Artificial Sequence
  Synthetic
cugacugagcuccucucuacc

SEQ ID NO: 157839 - RNA, 23 nt, Artificial Sequence
  Synthetic
ugcugacugagcuccucucuacc

SEQ ID NO: 157840 - RNA, 24 nt, Artificial Sequence
  Synthetic
uugcugacugagcuccucucuacc

SEQ ID NO: 157841 - RNA, 21 nt, Artificial Sequence
  Synthetic
ucugcuguccaacauucuacc

SEQ ID NO: 157842 - RNA, 22 nt, Artificial Sequence
  Synthetic
aucugcuguccaacauucuacc

SEQ ID NO: 157843 - RNA, 24 nt, Artificial Sequence
  Synthetic
agaucugcuguccaacauucuacc

SEQ ID NO: 157844 - RNA, 18 nt, Artificial Sequence
  Synthetic
cucagccucccaaguacc

SEQ ID NO: 157845 - RNA, 19 nt, Artificial Sequence
  Synthetic
ccucagccucccaaguacc

SEQ ID NO: 157846 - RNA, 21 nt, Artificial Sequence
  Synthetic
ugccucagccucccaaguacc

SEQ ID NO: 157847 - RNA, 22 nt, Artificial Sequence
  Synthetic
cugccucagccucccaaguacc

SEQ ID NO: 157848 - RNA, 23 nt, Artificial Sequence
  Synthetic
ccugccucagccucccaaguacc

SEQ ID NO: 157849 - RNA, 24 nt, Artificial Sequence
  Synthetic
uccugccucagccucccaaguacc

SEQ ID NO: 157850 - RNA, 21 nt, Artificial Sequence
  Synthetic
uuccauuuucaguuaguuacc

SEQ ID NO: 157851 - RNA, 22 nt, Artificial Sequence
  Synthetic
uuuccauuuucaguuaguuacc

SEQ ID NO: 157852 - RNA, 23 nt, Artificial Sequence
  Synthetic
cuuuccauuuucaguuaguuacc

SEQ ID NO: 157853 - RNA, 24 nt, Artificial Sequence
  Synthetic
ucuuuccauuuucaguuaguuacc

SEQ ID NO: 157854 - RNA, 18 nt, Artificial Sequence
  Synthetic
aaaacaauuauauuuacc

SEQ ID NO: 157855 - RNA, 19 nt, Artificial Sequence
  Synthetic
aaaaacaauuauauuuacc

SEQ ID NO: 157856 - RNA, 20 nt, Artificial Sequence
  Synthetic
aaaaaacaauuauauuuacc

SEQ ID NO: 157857 - RNA, 18 nt, Artificial Sequence
  Synthetic
aagucaacaaggauaccc

SEQ ID NO: 157858 - RNA, 19 nt, Artificial Sequence
  Synthetic
aaagucaacaaggauaccc

SEQ ID NO: 157859 - RNA, 21 nt, Artificial Sequence
  Synthetic
agaaagucaacaaggauaccc

SEQ ID NO: 157860 - RNA, 22 nt, Artificial Sequence
  Synthetic
cagaaagucaacaaggauaccc

SEQ ID NO: 157861 - RNA, 23 nt, Artificial Sequence
  Synthetic
acagaaagucaacaaggauaccc

SEQ ID NO: 157862 - RNA, 18 nt, Artificial Sequence
  Synthetic
ucuuugggauauauaccc

SEQ ID NO: 157863 - RNA, 19 nt, Artificial Sequence
  Synthetic
uucuuugggauauauaccc

SEQ ID NO: 157864 - RNA, 20 nt, Artificial Sequence
  Synthetic
auucuuugggauauauaccc

SEQ ID NO: 157865 - RNA, 21 nt, Artificial Sequence
  Synthetic
aauucuuugggauauauaccc

SEQ ID NO: 157866 - RNA, 22 nt, Artificial Sequence
  Synthetic
uaauucuuugggauauauaccc

SEQ ID NO: 157867 - RNA, 23 nt, Artificial Sequence
  Synthetic
uuaauucuuugggauauauaccc

SEQ ID NO: 157868 - RNA, 24 nt, Artificial Sequence
  Synthetic
uuuaauucuuugggauauauaccc

SEQ ID NO: 157869 - RNA, 18 nt, Artificial Sequence
  Synthetic
auugguuccaggaucccc

SEQ ID NO: 157870 - RNA, 24 nt, Artificial Sequence
  Synthetic
ugggggauugguuccaggaucccc

SEQ ID NO: 157871 - RNA, 21 nt, Artificial Sequence
  Synthetic
ccagcaauugccaaauucccc

SEQ ID NO: 157872 - RNA, 22 nt, Artificial Sequence
  Synthetic
uccagcaauugccaaauucccc

SEQ ID NO: 157873 - RNA, 23 nt, Artificial Sequence
  Synthetic
cuccagcaauugccaaauucccc

SEQ ID NO: 157874 - RNA, 24 nt, Artificial Sequence
  Synthetic
ucuccagcaauugccaaauucccc

SEQ ID NO: 157875 - RNA, 18 nt, Artificial Sequence
  Synthetic
ugauucaauuacuucccc

SEQ ID NO: 157876 - RNA, 19 nt, Artificial Sequence
  Synthetic
augauucaauuacuucccc

SEQ ID NO: 157877 - RNA, 20 nt, Artificial Sequence
  Synthetic
caugauucaauuacuucccc

SEQ ID NO: 157878 - RNA, 21 nt, Artificial Sequence
  Synthetic
ccaugauucaauuacuucccc

SEQ ID NO: 157879 - RNA, 22 nt, Artificial Sequence
  Synthetic
cccaugauucaauuacuucccc

SEQ ID NO: 157880 - RNA, 23 nt, Artificial Sequence
  Synthetic
acccaugauucaauuacuucccc

SEQ ID NO: 157881 - RNA, 24 nt, Artificial Sequence
  Synthetic
aacccaugauucaauuacuucccc

SEQ ID NO: 157882 - RNA, 18 nt, Artificial Sequence
  Synthetic
uuuuuuuuuaauuucccc

SEQ ID NO: 157883 - RNA, 19 nt, Artificial Sequence
  Synthetic
uuuuuuuuuuaauuucccc

SEQ ID NO: 157884 - RNA, 20 nt, Artificial Sequence
  Synthetic
uuuuuuuuuuuaauuucccc

SEQ ID NO: 157885 - RNA, 21 nt, Artificial Sequence
  Synthetic
uuuuuuuuuuuuaauuucccc

SEQ ID NO: 157886 - RNA, 22 nt, Artificial Sequence
  Synthetic
uuuuuuuuuuuuuaauuucccc

SEQ ID NO: 157887 - RNA, 23 nt, Artificial Sequence
  Synthetic
uuuuuuuuuuuuuuaauuucccc

SEQ ID NO: 157888 - RNA, 24 nt, Artificial Sequence
  Synthetic
uuuuuuuuuuuuuuuaauuucccc

SEQ ID NO: 157889 - RNA, 18 nt, Artificial Sequence
  Synthetic
aaccccaacuugaagccc

SEQ ID NO: 157890 - RNA, 22 nt, Artificial Sequence
  Synthetic
ugggaaccccaacuugaagccc

SEQ ID NO: 157891 - RNA, 23 nt, Artificial Sequence
  Synthetic
augggaaccccaacuugaagccc

SEQ ID NO: 157892 - RNA, 24 nt, Artificial Sequence
  Synthetic
caugggaaccccaacuugaagccc

SEQ ID NO: 157893 - RNA, 20 nt, Artificial Sequence
  Synthetic
uggguggaucacuucagccc

SEQ ID NO: 157894 - RNA, 23 nt, Artificial Sequence
  Synthetic
agguggguggaucacuucagccc

SEQ ID NO: 157895 - RNA, 24 nt, Artificial Sequence
  Synthetic
aagguggguggaucacuucagccc

SEQ ID NO: 157896 - RNA, 20 nt, Artificial Sequence
  Synthetic
agggaggaucaccugagccc

SEQ ID NO: 157897 - RNA, 24 nt, Artificial Sequence
  Synthetic
ugggagggaggaucaccugagccc

SEQ ID NO: 157898 - RNA, 19 nt, Artificial Sequence
  Synthetic
aggaggacugcuugagccc

SEQ ID NO: 157899 - RNA, 20 nt, Artificial Sequence
  Synthetic
aaggaggacugcuugagccc

SEQ ID NO: 157900 - RNA, 23 nt, Artificial Sequence
  Synthetic
aggaaggaggacugcuugagccc

SEQ ID NO: 157901 - RNA, 20 nt, Artificial Sequence
  Synthetic
caggaggacugcuugagccc

SEQ ID NO: 157902 - RNA, 23 nt, Artificial Sequence
  Synthetic
aggcaggaggacugcuugagccc

SEQ ID NO: 157903 - RNA, 20 nt, Artificial Sequence
  Synthetic
uggguggacugcuugagccc

SEQ ID NO: 157904 - RNA, 22 nt, Artificial Sequence
  Synthetic
uguggguggacugcuugagccc

SEQ ID NO: 157905 - RNA, 23 nt, Artificial Sequence
  Synthetic
auguggguggacugcuugagccc

SEQ ID NO: 157906 - RNA, 19 nt, Artificial Sequence
  Synthetic
aggaggauugcuugagccc

SEQ ID NO: 157907 - RNA, 20 nt, Artificial Sequence
  Synthetic
caggaggauugcuugagccc

SEQ ID NO: 157908 - RNA, 23 nt, Artificial Sequence
  Synthetic
aggcaggaggauugcuugagccc

SEQ ID NO: 157909 - RNA, 19 nt, Artificial Sequence
  Synthetic
agcauaaccugaagggccc

SEQ ID NO: 157910 - RNA, 20 nt, Artificial Sequence
  Synthetic
uagcauaaccugaagggccc

SEQ ID NO: 157911 - RNA, 21 nt, Artificial Sequence
  Synthetic
cuagcauaaccugaagggccc

SEQ ID NO: 157912 - RNA, 22 nt, Artificial Sequence
  Synthetic
ucuagcauaaccugaagggccc

SEQ ID NO: 157913 - RNA, 23 nt, Artificial Sequence
  Synthetic
aucuagcauaaccugaagggccc

SEQ ID NO: 157914 - RNA, 18 nt, Artificial Sequence
  Synthetic
ucaaacuuuaaugugccc

SEQ ID NO: 157915 - RNA, 19 nt, Artificial Sequence
  Synthetic
cucaaacuuuaaugugccc

SEQ ID NO: 157916 - RNA, 20 nt, Artificial Sequence
  Synthetic
ucucaaacuuuaaugugccc

SEQ ID NO: 157917 - RNA, 21 nt, Artificial Sequence
  Synthetic
uucucaaacuuuaaugugccc

SEQ ID NO: 157918 - RNA, 22 nt, Artificial Sequence
  Synthetic
cuucucaaacuuuaaugugccc

SEQ ID NO: 157919 - RNA, 24 nt, Artificial Sequence
  Synthetic
ugcuucucaaacuuuaaugugccc

SEQ ID NO: 157920 - RNA, 19 nt, Artificial Sequence
  Synthetic
ugaaccagccuggcauccc

SEQ ID NO: 157921 - RNA, 20 nt, Artificial Sequence
  Synthetic
uugaaccagccuggcauccc

SEQ ID NO: 157922 - RNA, 22 nt, Artificial Sequence
  Synthetic
uguugaaccagccuggcauccc

SEQ ID NO: 157923 - RNA, 23 nt, Artificial Sequence
  Synthetic
auguugaaccagccuggcauccc

SEQ ID NO: 157924 - RNA, 24 nt, Artificial Sequence
  Synthetic
uauguugaaccagccuggcauccc

SEQ ID NO: 157925 - RNA, 21 nt, Artificial Sequence
  Synthetic
auugaaccagccuugcauccc

SEQ ID NO: 157926 - RNA, 22 nt, Artificial Sequence
  Synthetic
uauugaaccagccuugcauccc

SEQ ID NO: 157927 - RNA, 23 nt, Artificial Sequence
  Synthetic
auauugaaccagccuugcauccc

SEQ ID NO: 157928 - RNA, 24 nt, Artificial Sequence
  Synthetic
uauauugaaccagccuugcauccc

SEQ ID NO: 157929 - RNA, 18 nt, Artificial Sequence
  Synthetic
ucaaguaggcuucauccc

SEQ ID NO: 157930 - RNA, 19 nt, Artificial Sequence
  Synthetic
aucaaguaggcuucauccc

SEQ ID NO: 157931 - RNA, 20 nt, Artificial Sequence
  Synthetic
aaucaaguaggcuucauccc

SEQ ID NO: 157932 - RNA, 21 nt, Artificial Sequence
  Synthetic
caaucaaguaggcuucauccc

SEQ ID NO: 157933 - RNA, 22 nt, Artificial Sequence
  Synthetic
acaaucaaguaggcuucauccc

SEQ ID NO: 157934 - RNA, 23 nt, Artificial Sequence
  Synthetic
cacaaucaaguaggcuucauccc

SEQ ID NO: 157935 - RNA, 24 nt, Artificial Sequence
  Synthetic
ucacaaucaaguaggcuucauccc

SEQ ID NO: 157936 - RNA, 18 nt, Artificial Sequence
  Synthetic
ucaagugggcuucauccc

SEQ ID NO: 157937 - RNA, 19 nt, Artificial Sequence
  Synthetic
aucaagugggcuucauccc

SEQ ID NO: 157938 - RNA, 21 nt, Artificial Sequence
  Synthetic
ugaucaagugggcuucauccc

SEQ ID NO: 157939 - RNA, 22 nt, Artificial Sequence
  Synthetic
augaucaagugggcuucauccc

SEQ ID NO: 157940 - RNA, 23 nt, Artificial Sequence
  Synthetic
caugaucaagugggcuucauccc

SEQ ID NO: 157941 - RNA, 24 nt, Artificial Sequence
  Synthetic
ccaugaucaagugggcuucauccc

SEQ ID NO: 157942 - RNA, 21 nt, Artificial Sequence
  Synthetic
ucuugauccauauuguauccc

SEQ ID NO: 157943 - RNA, 22 nt, Artificial Sequence
  Synthetic
aucuugauccauauuguauccc

SEQ ID NO: 157944 - RNA, 23 nt, Artificial Sequence
  Synthetic
uaucuugauccauauuguauccc

SEQ ID NO: 157945 - RNA, 24 nt, Artificial Sequence
  Synthetic
uuaucuugauccauauuguauccc

SEQ ID NO: 157946 - RNA, 18 nt, Artificial Sequence
  Synthetic
ccaagagggauuuauccc

SEQ ID NO: 157947 - RNA, 19 nt, Artificial Sequence
  Synthetic
accaagagggauuuauccc

SEQ ID NO: 157948 - RNA, 21 nt, Artificial Sequence
  Synthetic
ugaccaagagggauuuauccc

SEQ ID NO: 157949 - RNA, 22 nt, Artificial Sequence
  Synthetic
augaccaagagggauuuauccc

SEQ ID NO: 157950 - RNA, 23 nt, Artificial Sequence
  Synthetic
caugaccaagagggauuuauccc

SEQ ID NO: 157951 - RNA, 24 nt, Artificial Sequence
  Synthetic
ccaugaccaagagggauuuauccc

SEQ ID NO: 157952 - RNA, 21 nt, Artificial Sequence
  Synthetic
cccccaccccacaacaguccc

SEQ ID NO: 157953 - RNA, 22 nt, Artificial Sequence
  Synthetic
ccccccaccccacaacaguccc

SEQ ID NO: 157954 - RNA, 23 nt, Artificial Sequence
  Synthetic
uccccccaccccacaacaguccc

SEQ ID NO: 157955 - RNA, 24 nt, Artificial Sequence
  Synthetic
cuccccccaccccacaacaguccc

SEQ ID NO: 157956 - RNA, 22 nt, Artificial Sequence
  Synthetic
ucccccaccccacaacaguccc

SEQ ID NO: 157957 - RNA, 23 nt, Artificial Sequence
  Synthetic
uucccccaccccacaacaguccc

SEQ ID NO: 157958 - RNA, 24 nt, Artificial Sequence
  Synthetic
cuucccccaccccacaacaguccc

SEQ ID NO: 157959 - RNA, 18 nt, Artificial Sequence
  Synthetic
ccaccccaccacaguccc

SEQ ID NO: 157960 - RNA, 19 nt, Artificial Sequence
  Synthetic
cccaccccaccacaguccc

SEQ ID NO: 157961 - RNA, 20 nt, Artificial Sequence
  Synthetic
ccccaccccaccacaguccc

SEQ ID NO: 157962 - RNA, 21 nt, Artificial Sequence
  Synthetic
cccccaccccaccacaguccc

SEQ ID NO: 157963 - RNA, 22 nt, Artificial Sequence
  Synthetic
ccccccaccccaccacaguccc

SEQ ID NO: 157964 - RNA, 23 nt, Artificial Sequence
  Synthetic
uccccccaccccaccacaguccc

SEQ ID NO: 157965 - RNA, 24 nt, Artificial Sequence
  Synthetic
cuccccccaccccaccacaguccc

SEQ ID NO: 157966 - RNA, 18 nt, Artificial Sequence
  Synthetic
cgaccccaccacaguccc

SEQ ID NO: 157967 - RNA, 19 nt, Artificial Sequence
  Synthetic
ccgaccccaccacaguccc

SEQ ID NO: 157968 - RNA, 20 nt, Artificial Sequence
  Synthetic
cccgaccccaccacaguccc

SEQ ID NO: 157969 - RNA, 21 nt, Artificial Sequence
  Synthetic
ccccgaccccaccacaguccc

SEQ ID NO: 157970 - RNA, 22 nt, Artificial Sequence
  Synthetic
cccccgaccccaccacaguccc

SEQ ID NO: 157971 - RNA, 23 nt, Artificial Sequence
  Synthetic
ucccccgaccccaccacaguccc

SEQ ID NO: 157972 - RNA, 24 nt, Artificial Sequence
  Synthetic
cucccccgaccccaccacaguccc

SEQ ID NO: 157973 - RNA, 18 nt, Artificial Sequence
  Synthetic
cccagaaggccauguccc

SEQ ID NO: 157974 - RNA, 19 nt, Artificial Sequence
  Synthetic
ccccagaaggccauguccc

SEQ ID NO: 157975 - RNA, 18 nt, Artificial Sequence
  Synthetic
uuauaaaugugcauuccc

SEQ ID NO: 157976 - RNA, 19 nt, Artificial Sequence
  Synthetic
uuuauaaaugugcauuccc

SEQ ID NO: 157977 - RNA, 20 nt, Artificial Sequence
  Synthetic
auuuauaaaugugcauuccc

SEQ ID NO: 157978 - RNA, 19 nt, Artificial Sequence
  Synthetic
uguagaaaaauauguuccc

SEQ ID NO: 157979 - RNA, 20 nt, Artificial Sequence
  Synthetic
auguagaaaaauauguuccc

SEQ ID NO: 157980 - RNA, 19 nt, Artificial Sequence
  Synthetic
aggaguauugcuugaagcc

SEQ ID NO: 157981 - RNA, 20 nt, Artificial Sequence
  Synthetic
uaggaguauugcuugaagcc

SEQ ID NO: 157982 - RNA, 23 nt, Artificial Sequence
  Synthetic
agguaggaguauugcuugaagcc

SEQ ID NO: 157983 - RNA, 18 nt, Artificial Sequence
  Synthetic
aagcuaccacacccagcc

SEQ ID NO: 157984 - RNA, 19 nt, Artificial Sequence
  Synthetic
uaagcuaccacacccagcc

SEQ ID NO: 157985 - RNA, 21 nt, Artificial Sequence
  Synthetic
cguaagcuaccacacccagcc

SEQ ID NO: 157986 - RNA, 24 nt, Artificial Sequence
  Synthetic
aggcguaagcuaccacacccagcc

SEQ ID NO: 157987 - RNA, 19 nt, Artificial Sequence
  Synthetic
ugucccagccacuccagcc

SEQ ID NO: 157988 - RNA, 21 nt, Artificial Sequence
  Synthetic
ugugucccagccacuccagcc

SEQ ID NO: 157989 - RNA, 22 nt, Artificial Sequence
  Synthetic
uugugucccagccacuccagcc

SEQ ID NO: 157990 - RNA, 23 nt, Artificial Sequence
  Synthetic
cuugugucccagccacuccagcc

SEQ ID NO: 157991 - RNA, 24 nt, Artificial Sequence
  Synthetic
ccuugugucccagccacuccagcc

SEQ ID NO: 157992 - RNA, 18 nt, Artificial Sequence
  Synthetic
cgccacuguacuccagcc

SEQ ID NO: 157993 - RNA, 20 nt, Artificial Sequence
  Synthetic
cgcgccacuguacuccagcc

SEQ ID NO: 157994 - RNA, 21 nt, Artificial Sequence
  Synthetic
ucgcgccacuguacuccagcc

SEQ ID NO: 157995 - RNA, 22 nt, Artificial Sequence
  Synthetic
aucgcgccacuguacuccagcc

SEQ ID NO: 157996 - RNA, 24 nt, Artificial Sequence
  Synthetic
agaucgcgccacuguacuccagcc

SEQ ID NO: 157997 - RNA, 18 nt, Artificial Sequence
  Synthetic
ucauggcucguggcagcc

SEQ ID NO: 157998 - RNA, 19 nt, Artificial Sequence
  Synthetic
aucauggcucguggcagcc

SEQ ID NO: 157999 - RNA, 20 nt, Artificial Sequence
  Synthetic
aaucauggcucguggcagcc

SEQ ID NO: 158000 - RNA, 21 nt, Artificial Sequence
  Synthetic
caaucauggcucguggcagcc

SEQ ID NO: 158001 - RNA, 22 nt, Artificial Sequence
  Synthetic
acaaucauggcucguggcagcc

SEQ ID NO: 158002 - RNA, 23 nt, Artificial Sequence
  Synthetic
cacaaucauggcucguggcagcc

SEQ ID NO: 158003 - RNA, 18 nt, Artificial Sequence
  Synthetic
ugauucuaacgugcagcc

SEQ ID NO: 158004 - RNA, 20 nt, Artificial Sequence
  Synthetic
agugauucuaacgugcagcc

SEQ ID NO: 158005 - RNA, 21 nt, Artificial Sequence
  Synthetic
uagugauucuaacgugcagcc

SEQ ID NO: 158006 - RNA, 22 nt, Artificial Sequence
  Synthetic
cuagugauucuaacgugcagcc

SEQ ID NO: 158007 - RNA, 23 nt, Artificial Sequence
  Synthetic
ccuagugauucuaacgugcagcc

SEQ ID NO: 158008 - RNA, 24 nt, Artificial Sequence
  Synthetic
cccuagugauucuaacgugcagcc

SEQ ID NO: 158009 - RNA, 18 nt, Artificial Sequence
  Synthetic
uugcuuugucacucagcc

SEQ ID NO: 158010 - RNA, 19 nt, Artificial Sequence
  Synthetic
cuugcuuugucacucagcc

SEQ ID NO: 158011 - RNA, 20 nt, Artificial Sequence
  Synthetic
ucuugcuuugucacucagcc

SEQ ID NO: 158012 - RNA, 23 nt, Artificial Sequence
  Synthetic
aggucuugcuuugucacucagcc

SEQ ID NO: 158013 - RNA, 24 nt, Artificial Sequence
  Synthetic
aaggucuugcuuugucacucagcc

SEQ ID NO: 158014 - RNA, 19 nt, Artificial Sequence
  Synthetic
agaggugaagaaacaggcc

SEQ ID NO: 158015 - RNA, 20 nt, Artificial Sequence
  Synthetic
cagaggugaagaaacaggcc

SEQ ID NO: 158016 - RNA, 19 nt, Artificial Sequence
  Synthetic
cgcauguggcucacaggcc

SEQ ID NO: 158017 - RNA, 20 nt, Artificial Sequence
  Synthetic
acgcauguggcucacaggcc

SEQ ID NO: 158018 - RNA, 24 nt, Artificial Sequence
  Synthetic
ugggacgcauguggcucacaggcc

SEQ ID NO: 158019 - RNA, 19 nt, Artificial Sequence
  Synthetic
aggagaauugcuugaggcc

SEQ ID NO: 158020 - RNA, 20 nt, Artificial Sequence
  Synthetic
aaggagaauugcuugaggcc

SEQ ID NO: 158021 - RNA, 23 nt, Artificial Sequence
  Synthetic
aggaaggagaauugcuugaggcc

SEQ ID NO: 158022 - RNA, 24 nt, Artificial Sequence
  Synthetic
aaggaaggagaauugcuugaggcc

SEQ ID NO: 158023 - RNA, 19 nt, Artificial Sequence
  Synthetic
ugagccacugcgcccggcc

SEQ ID NO: 158024 - RNA, 20 nt, Artificial Sequence
  Synthetic
augagccacugcgcccggcc

SEQ ID NO: 158025 - RNA, 21 nt, Artificial Sequence
  Synthetic
caugagccacugcgcccggcc

SEQ ID NO: 158026 - RNA, 24 nt, Artificial Sequence
  Synthetic
aggcaugagccacugcgcccggcc

SEQ ID NO: 158027 - RNA, 19 nt, Artificial Sequence
  Synthetic
ugagcuaccaugcccggcc

SEQ ID NO: 158028 - RNA, 21 nt, Artificial Sequence
  Synthetic
cgugagcuaccaugcccggcc

SEQ ID NO: 158029 - RNA, 24 nt, Artificial Sequence
  Synthetic
aggcgugagcuaccaugcccggcc

SEQ ID NO: 158030 - RNA, 18 nt, Artificial Sequence
  Synthetic
cucaucgaaaagucggcc

SEQ ID NO: 158031 - RNA, 19 nt, Artificial Sequence
  Synthetic
ccucaucgaaaagucggcc

SEQ ID NO: 158032 - RNA, 20 nt, Artificial Sequence
  Synthetic
accucaucgaaaagucggcc

SEQ ID NO: 158033 - RNA, 18 nt, Artificial Sequence
  Synthetic
ugccauuugggaggggcc

SEQ ID NO: 158034 - RNA, 20 nt, Artificial Sequence
  Synthetic
cgugccauuugggaggggcc

SEQ ID NO: 158035 - RNA, 21 nt, Artificial Sequence
  Synthetic
acgugccauuugggaggggcc

SEQ ID NO: 158036 - RNA, 23 nt, Artificial Sequence
  Synthetic
agacgugccauuugggaggggcc

SEQ ID NO: 158037 - RNA, 24 nt, Artificial Sequence
  Synthetic
aagacgugccauuugggaggggcc

SEQ ID NO: 158038 - RNA, 18 nt, Artificial Sequence
  Synthetic
caguucugaaguggggcc

SEQ ID NO: 158039 - RNA, 19 nt, Artificial Sequence
  Synthetic
acaguucugaaguggggcc

SEQ ID NO: 158040 - RNA, 20 nt, Artificial Sequence
  Synthetic
aacaguucugaaguggggcc

SEQ ID NO: 158041 - RNA, 21 nt, Artificial Sequence
  Synthetic
caacaguucugaaguggggcc

SEQ ID NO: 158042 - RNA, 22 nt, Artificial Sequence
  Synthetic
ucaacaguucugaaguggggcc

SEQ ID NO: 158043 - RNA, 23 nt, Artificial Sequence
  Synthetic
uucaacaguucugaaguggggcc

SEQ ID NO: 158044 - RNA, 24 nt, Artificial Sequence
  Synthetic
auucaacaguucugaaguggggcc

SEQ ID NO: 158045 - RNA, 18 nt, Artificial Sequence
  Synthetic
caguuuugaaguggggcc

SEQ ID NO: 158046 - RNA, 19 nt, Artificial Sequence
  Synthetic
acaguuuugaaguggggcc

SEQ ID NO: 158047 - RNA, 20 nt, Artificial Sequence
  Synthetic
aacaguuuugaaguggggcc

SEQ ID NO: 158048 - RNA, 21 nt, Artificial Sequence
  Synthetic
caacaguuuugaaguggggcc

SEQ ID NO: 158049 - RNA, 22 nt, Artificial Sequence
  Synthetic
ucaacaguuuugaaguggggcc

SEQ ID NO: 158050 - RNA, 23 nt, Artificial Sequence
  Synthetic
uucaacaguuuugaaguggggcc

SEQ ID NO: 158051 - RNA, 24 nt, Artificial Sequence
  Synthetic
auucaacaguuuugaaguggggcc

SEQ ID NO: 158052 - RNA, 18 nt, Artificial Sequence
  Synthetic
auggggugggguggggcc

SEQ ID NO: 158053 - RNA, 21 nt, Artificial Sequence
  Synthetic
aggauggggugggguggggcc

SEQ ID NO: 158054 - RNA, 22 nt, Artificial Sequence
  Synthetic
caggauggggugggguggggcc

SEQ ID NO: 158055 - RNA, 23 nt, Artificial Sequence
  Synthetic
acaggauggggugggguggggcc

SEQ ID NO: 158056 - RNA, 24 nt, Artificial Sequence
  Synthetic
cacaggauggggugggguggggcc

SEQ ID NO: 158057 - RNA, 21 nt, Artificial Sequence
  Synthetic
cugacgugaguacuacuggcc

SEQ ID NO: 158058 - RNA, 22 nt, Artificial Sequence
  Synthetic
ucugacgugaguacuacuggcc

SEQ ID NO: 158059 - RNA, 23 nt, Artificial Sequence
  Synthetic
uucugacgugaguacuacuggcc

SEQ ID NO: 158060 - RNA, 24 nt, Artificial Sequence
  Synthetic
auucugacgugaguacuacuggcc

SEQ ID NO: 158061 - RNA, 21 nt, Artificial Sequence
  Synthetic
cugaugugaguauuacuggcc

SEQ ID NO: 158062 - RNA, 22 nt, Artificial Sequence
  Synthetic
ucugaugugaguauuacuggcc

SEQ ID NO: 158063 - RNA, 23 nt, Artificial Sequence
  Synthetic
uucugaugugaguauuacuggcc

SEQ ID NO: 158064 - RNA, 24 nt, Artificial Sequence
  Synthetic
auucugaugugaguauuacuggcc

SEQ ID NO: 158065 - RNA, 19 nt, Artificial Sequence
  Synthetic
ugagccaccaugccuggcc

SEQ ID NO: 158066 - RNA, 21 nt, Artificial Sequence
  Synthetic
cgugagccaccaugccuggcc

SEQ ID NO: 158067 - RNA, 24 nt, Artificial Sequence
  Synthetic
aggcgugagccaccaugccuggcc

SEQ ID NO: 158068 - RNA, 20 nt, Artificial Sequence
  Synthetic
aggggaugguguggguggcc

SEQ ID NO: 158069 - RNA, 21 nt, Artificial Sequence
  Synthetic
auauuuuauguaacaaaugcc

SEQ ID NO: 158070 - RNA, 22 nt, Artificial Sequence
  Synthetic
aauauuuuauguaacaaaugcc

SEQ ID NO: 158071 - RNA, 23 nt, Artificial Sequence
  Synthetic
aaauauuuuauguaacaaaugcc

SEQ ID NO: 158072 - RNA, 18 nt, Artificial Sequence
  Synthetic
ccugacugcucugaugcc

SEQ ID NO: 158073 - RNA, 19 nt, Artificial Sequence
  Synthetic
cccugacugcucugaugcc

SEQ ID NO: 158074 - RNA, 20 nt, Artificial Sequence
  Synthetic
ucccugacugcucugaugcc

SEQ ID NO: 158075 - RNA, 20 nt, Artificial Sequence
  Synthetic
aggaauugucuuuuccugcc

SEQ ID NO: 158076 - RNA, 18 nt, Artificial Sequence
  Synthetic
caaguucuucccucugcc

SEQ ID NO: 158077 - RNA, 19 nt, Artificial Sequence
  Synthetic
ccaaguucuucccucugcc

SEQ ID NO: 158078 - RNA, 20 nt, Artificial Sequence
  Synthetic
cccaaguucuucccucugcc

SEQ ID NO: 158079 - RNA, 22 nt, Artificial Sequence
  Synthetic
ugcccaaguucuucccucugcc

SEQ ID NO: 158080 - RNA, 23 nt, Artificial Sequence
  Synthetic
uugcccaaguucuucccucugcc

SEQ ID NO: 158081 - RNA, 24 nt, Artificial Sequence
  Synthetic
uuugcccaaguucuucccucugcc

SEQ ID NO: 158082 - RNA, 18 nt, Artificial Sequence
  Synthetic
uacaauguucccucugcc

SEQ ID NO: 158083 - RNA, 19 nt, Artificial Sequence
  Synthetic
auacaauguucccucugcc

SEQ ID NO: 158084 - RNA, 20 nt, Artificial Sequence
  Synthetic
cauacaauguucccucugcc

SEQ ID NO: 158085 - RNA, 19 nt, Artificial Sequence
  Synthetic
ugcccuuguuuccucugcc

SEQ ID NO: 158086 - RNA, 20 nt, Artificial Sequence
  Synthetic
uugcccuuguuuccucugcc

SEQ ID NO: 158087 - RNA, 21 nt, Artificial Sequence
  Synthetic
cuugcccuuguuuccucugcc

SEQ ID NO: 158088 - RNA, 22 nt, Artificial Sequence
  Synthetic
ccuugcccuuguuuccucugcc

SEQ ID NO: 158089 - RNA, 23 nt, Artificial Sequence
  Synthetic
cccuugcccuuguuuccucugcc

SEQ ID NO: 158090 - RNA, 18 nt, Artificial Sequence
  Synthetic
cucacgaugaauugugcc

SEQ ID NO: 158091 - RNA, 19 nt, Artificial Sequence
  Synthetic
ccucacgaugaauugugcc

SEQ ID NO: 158092 - RNA, 21 nt, Artificial Sequence
  Synthetic
ugccucacgaugaauugugcc

SEQ ID NO: 158093 - RNA, 22 nt, Artificial Sequence
  Synthetic
uugccucacgaugaauugugcc

SEQ ID NO: 158094 - RNA, 23 nt, Artificial Sequence
  Synthetic
uuugccucacgaugaauugugcc

SEQ ID NO: 158095 - RNA, 24 nt, Artificial Sequence
  Synthetic
auuugccucacgaugaauugugcc

SEQ ID NO: 158096 - RNA, 18 nt, Artificial Sequence
  Synthetic
uguccagauuccauugcc

SEQ ID NO: 158097 - RNA, 19 nt, Artificial Sequence
  Synthetic
uuguccagauuccauugcc

SEQ ID NO: 158098 - RNA, 21 nt, Artificial Sequence
  Synthetic
uguuguccagauuccauugcc

SEQ ID NO: 158099 - RNA, 22 nt, Artificial Sequence
  Synthetic
auguuguccagauuccauugcc

SEQ ID NO: 158100 - RNA, 23 nt, Artificial Sequence
  Synthetic
aauguuguccagauuccauugcc

SEQ ID NO: 158101 - RNA, 24 nt, Artificial Sequence
  Synthetic
aaauguuguccagauuccauugcc

SEQ ID NO: 158102 - RNA, 19 nt, Artificial Sequence
  Synthetic
agagauuaaauaauuugcc

SEQ ID NO: 158103 - RNA, 18 nt, Artificial Sequence
  Synthetic
uuuaaaguagaaaaaucc

SEQ ID NO: 158104 - RNA, 19 nt, Artificial Sequence
  Synthetic
uuuuaaaguagaaaaaucc

SEQ ID NO: 158105 - RNA, 20 nt, Artificial Sequence
  Synthetic
uuuuuaaaguagaaaaaucc

SEQ ID NO: 158106 - RNA, 18 nt, Artificial Sequence
  Synthetic
aguuuuuuuuaaaaaucc

SEQ ID NO: 158107 - RNA, 19 nt, Artificial Sequence
  Synthetic
aaguuuuuuuuaaaaaucc

SEQ ID NO: 158108 - RNA, 20 nt, Artificial Sequence
  Synthetic
uaaguuuuuuuuaaaaaucc

SEQ ID NO: 158109 - RNA, 18 nt, Artificial Sequence
  Synthetic
caggaagaaguugaaucc

SEQ ID NO: 158110 - RNA, 19 nt, Artificial Sequence
  Synthetic
ccaggaagaaguugaaucc

SEQ ID NO: 158111 - RNA, 20 nt, Artificial Sequence
  Synthetic
accaggaagaaguugaaucc

SEQ ID NO: 158112 - RNA, 21 nt, Artificial Sequence
  Synthetic
aaccaggaagaaguugaaucc

SEQ ID NO: 158113 - RNA, 22 nt, Artificial Sequence
  Synthetic
aaaccaggaagaaguugaaucc

SEQ ID NO: 158114 - RNA, 23 nt, Artificial Sequence
  Synthetic
uaaaccaggaagaaguugaaucc

SEQ ID NO: 158115 - RNA, 24 nt, Artificial Sequence
  Synthetic
cuaaaccaggaagaaguugaaucc

SEQ ID NO: 158116 - RNA, 18 nt, Artificial Sequence
  Synthetic
uuuuuuuugcaaagaucc

SEQ ID NO: 158117 - RNA, 19 nt, Artificial Sequence
  Synthetic
uuuuuuuuugcaaagaucc

SEQ ID NO: 158118 - RNA, 20 nt, Artificial Sequence
  Synthetic
uuuuuuuuuugcaaagaucc

SEQ ID NO: 158119 - RNA, 21 nt, Artificial Sequence
  Synthetic
uuuuuuuuuuugcaaagaucc

SEQ ID NO: 158120 - RNA, 22 nt, Artificial Sequence
  Synthetic
uuuuuuuuuuuugcaaagaucc

SEQ ID NO: 158121 - RNA, 23 nt, Artificial Sequence
  Synthetic
uuuuuuuuuuuuugcaaagaucc

SEQ ID NO: 158122 - RNA, 24 nt, Artificial Sequence
  Synthetic
uuuuuuuuuuuuuugcaaagaucc

SEQ ID NO: 158123 - RNA, 18 nt, Artificial Sequence
  Synthetic
cuuucugcacauguaucc

SEQ ID NO: 158124 - RNA, 19 nt, Artificial Sequence
  Synthetic
acuuucugcacauguaucc

SEQ ID NO: 158125 - RNA, 20 nt, Artificial Sequence
  Synthetic
cacuuucugcacauguaucc

SEQ ID NO: 158126 - RNA, 22 nt, Artificial Sequence
  Synthetic
ugcacuuucugcacauguaucc

SEQ ID NO: 158127 - RNA, 23 nt, Artificial Sequence
  Synthetic
cugcacuuucugcacauguaucc

SEQ ID NO: 158128 - RNA, 24 nt, Artificial Sequence
  Synthetic
ccugcacuuucugcacauguaucc

SEQ ID NO: 158129 - RNA, 18 nt, Artificial Sequence
  Synthetic
aguuggcccucuguaucc

SEQ ID NO: 158130 - RNA, 19 nt, Artificial Sequence
  Synthetic
caguuggcccucuguaucc

SEQ ID NO: 158131 - RNA, 20 nt, Artificial Sequence
  Synthetic
acaguuggcccucuguaucc

SEQ ID NO: 158132 - RNA, 21 nt, Artificial Sequence
  Synthetic
uacaguuggcccucuguaucc

SEQ ID NO: 158133 - RNA, 23 nt, Artificial Sequence
  Synthetic
aguacaguuggcccucuguaucc

SEQ ID NO: 158134 - RNA, 24 nt, Artificial Sequence
  Synthetic
aaguacaguuggcccucuguaucc

SEQ ID NO: 158135 - RNA, 18 nt, Artificial Sequence
  Synthetic
aaccuacacauguacucc

SEQ ID NO: 158136 - RNA, 19 nt, Artificial Sequence
  Synthetic
aaaccuacacauguacucc

SEQ ID NO: 158137 - RNA, 20 nt, Artificial Sequence
  Synthetic
uaaaccuacacauguacucc

SEQ ID NO: 158138 - RNA, 21 nt, Artificial Sequence
  Synthetic
auaaaccuacacauguacucc

SEQ ID NO: 158139 - RNA, 22 nt, Artificial Sequence
  Synthetic
aauaaaccuacacauguacucc

SEQ ID NO: 158140 - RNA, 23 nt, Artificial Sequence
  Synthetic
uaauaaaccuacacauguacucc

SEQ ID NO: 158141 - RNA, 18 nt, Artificial Sequence
  Synthetic
uguguguuguuccccucc

SEQ ID NO: 158142 - RNA, 20 nt, Artificial Sequence
  Synthetic
aguguguguuguuccccucc

SEQ ID NO: 158143 - RNA, 21 nt, Artificial Sequence
  Synthetic
caguguguguuguuccccucc

SEQ ID NO: 158144 - RNA, 22 nt, Artificial Sequence
  Synthetic
ucaguguguguuguuccccucc

SEQ ID NO: 158145 - RNA, 23 nt, Artificial Sequence
  Synthetic
cucaguguguguuguuccccucc

SEQ ID NO: 158146 - RNA, 24 nt, Artificial Sequence
  Synthetic
ccucaguguguguuguuccccucc

SEQ ID NO: 158147 - RNA, 18 nt, Artificial Sequence
  Synthetic
ccgcccgccucggccucc

SEQ ID NO: 158148 - RNA, 19 nt, Artificial Sequence
  Synthetic
uccgcccgccucggccucc

SEQ ID NO: 158149 - RNA, 20 nt, Artificial Sequence
  Synthetic
auccgcccgccucggccucc

SEQ ID NO: 158150 - RNA, 22 nt, Artificial Sequence
  Synthetic
ugauccgcccgccucggccucc

SEQ ID NO: 158151 - RNA, 24 nt, Artificial Sequence
  Synthetic
cgugauccgcccgccucggccucc

SEQ ID NO: 158152 - RNA, 21 nt, Artificial Sequence
  Synthetic
cucacaaaaucugugggcucc

SEQ ID NO: 158153 - RNA, 23 nt, Artificial Sequence
  Synthetic
agcucacaaaaucugugggcucc

SEQ ID NO: 158154 - RNA, 24 nt, Artificial Sequence
  Synthetic
aagcucacaaaaucugugggcucc

SEQ ID NO: 158155 - RNA, 18 nt, Artificial Sequence
  Synthetic
uuuugagacagggucucc

SEQ ID NO: 158156 - RNA, 19 nt, Artificial Sequence
  Synthetic
auuuugagacagggucucc

SEQ ID NO: 158157 - RNA, 20 nt, Artificial Sequence
  Synthetic
uauuuugagacagggucucc

SEQ ID NO: 158158 - RNA, 21 nt, Artificial Sequence
  Synthetic
uuauuuugagacagggucucc

SEQ ID NO: 158159 - RNA, 22 nt, Artificial Sequence
  Synthetic
uuuauuuugagacagggucucc

SEQ ID NO: 158160 - RNA, 23 nt, Artificial Sequence
  Synthetic
auuuauuuugagacagggucucc

SEQ ID NO: 158161 - RNA, 24 nt, Artificial Sequence
  Synthetic
uauuuauuuugagacagggucucc

SEQ ID NO: 158162 - RNA, 18 nt, Artificial Sequence
  Synthetic
aacaucacuagguucucc

SEQ ID NO: 158163 - RNA, 19 nt, Artificial Sequence
  Synthetic
aaacaucacuagguucucc

SEQ ID NO: 158164 - RNA, 20 nt, Artificial Sequence
  Synthetic
aaaacaucacuagguucucc

SEQ ID NO: 158165 - RNA, 21 nt, Artificial Sequence
  Synthetic
aaaaacaucacuagguucucc

SEQ ID NO: 158166 - RNA, 22 nt, Artificial Sequence
  Synthetic
uaaaaacaucacuagguucucc

SEQ ID NO: 158167 - RNA, 23 nt, Artificial Sequence
  Synthetic
auaaaaacaucacuagguucucc

SEQ ID NO: 158168 - RNA, 24 nt, Artificial Sequence
  Synthetic
uauaaaaacaucacuagguucucc

SEQ ID NO: 158169 - RNA, 19 nt, Artificial Sequence
  Synthetic
ugaaugaauaaaaaagucc

SEQ ID NO: 158170 - RNA, 20 nt, Artificial Sequence
  Synthetic
augaaugaauaaaaaagucc

SEQ ID NO: 158171 - RNA, 21 nt, Artificial Sequence
  Synthetic
aaugaaugaauaaaaaagucc

SEQ ID NO: 158172 - RNA, 23 nt, Artificial Sequence
  Synthetic
ugaaugaaugaauaaaaaagucc

SEQ ID NO: 158173 - RNA, 24 nt, Artificial Sequence
  Synthetic
cugaaugaaugaauaaaaaagucc

SEQ ID NO: 158174 - RNA, 18 nt, Artificial Sequence
  Synthetic
uuuggccucccaaagucc

SEQ ID NO: 158175 - RNA, 19 nt, Artificial Sequence
  Synthetic
cuuuggccucccaaagucc

SEQ ID NO: 158176 - RNA, 21 nt, Artificial Sequence
  Synthetic
ugcuuuggccucccaaagucc

SEQ ID NO: 158177 - RNA, 22 nt, Artificial Sequence
  Synthetic
cugcuuuggccucccaaagucc

SEQ ID NO: 158178 - RNA, 23 nt, Artificial Sequence
  Synthetic
ccugcuuuggccucccaaagucc

SEQ ID NO: 158179 - RNA, 24 nt, Artificial Sequence
  Synthetic
accugcuuuggccucccaaagucc

SEQ ID NO: 158180 - RNA, 18 nt, Artificial Sequence
  Synthetic
aguggaucgcuugagucc

SEQ ID NO: 158181 - RNA, 20 nt, Artificial Sequence
  Synthetic
ugaguggaucgcuugagucc

SEQ ID NO: 158182 - RNA, 21 nt, Artificial Sequence
  Synthetic
augaguggaucgcuugagucc

SEQ ID NO: 158183 - RNA, 23 nt, Artificial Sequence
  Synthetic
agaugaguggaucgcuugagucc

SEQ ID NO: 158184 - RNA, 24 nt, Artificial Sequence
  Synthetic
aagaugaguggaucgcuugagucc

SEQ ID NO: 158185 - RNA, 21 nt, Artificial Sequence
  Synthetic
cagcucugcugcugcuagucc

SEQ ID NO: 158186 - RNA, 22 nt, Artificial Sequence
  Synthetic
acagcucugcugcugcuagucc

SEQ ID NO: 158187 - RNA, 24 nt, Artificial Sequence
  Synthetic
ugacagcucugcugcugcuagucc

SEQ ID NO: 158188 - RNA, 21 nt, Artificial Sequence
  Synthetic
agaugaaagcaauuuaggucc

SEQ ID NO: 158189 - RNA, 22 nt, Artificial Sequence
  Synthetic
aagaugaaagcaauuuaggucc

SEQ ID NO: 158190 - RNA, 23 nt, Artificial Sequence
  Synthetic
caagaugaaagcaauuuaggucc

SEQ ID NO: 158191 - RNA, 24 nt, Artificial Sequence
  Synthetic
acaagaugaaagcaauuuaggucc

SEQ ID NO: 158192 - RNA, 21 nt, Artificial Sequence
  Synthetic
agauaccaucagccauggucc

SEQ ID NO: 158193 - RNA, 24 nt, Artificial Sequence
  Synthetic
uggagauaccaucagccauggucc

SEQ ID NO: 158194 - RNA, 18 nt, Artificial Sequence
  Synthetic
ugccaauacugcuggucc

SEQ ID NO: 158195 - RNA, 19 nt, Artificial Sequence
  Synthetic
augccaauacugcuggucc

SEQ ID NO: 158196 - RNA, 20 nt, Artificial Sequence
  Synthetic
aaugccaauacugcuggucc

SEQ ID NO: 158197 - RNA, 19 nt, Artificial Sequence
  Synthetic
uguugccaucuuuaugucc

SEQ ID NO: 158198 - RNA, 20 nt, Artificial Sequence
  Synthetic
cuguugccaucuuuaugucc

SEQ ID NO: 158199 - RNA, 21 nt, Artificial Sequence
  Synthetic
acuguugccaucuuuaugucc

SEQ ID NO: 158200 - RNA, 22 nt, Artificial Sequence
  Synthetic
uacuguugccaucuuuaugucc

SEQ ID NO: 158201 - RNA, 24 nt, Artificial Sequence
  Synthetic
uguacuguugccaucuuuaugucc

SEQ ID NO: 158202 - RNA, 18 nt, Artificial Sequence
  Synthetic
agaaauaaacuuuugucc

SEQ ID NO: 158203 - RNA, 19 nt, Artificial Sequence
  Synthetic
aagaaauaaacuuuugucc

SEQ ID NO: 158204 - RNA, 20 nt, Artificial Sequence
  Synthetic
aaagaaauaaacuuuugucc

SEQ ID NO: 158205 - RNA, 18 nt, Artificial Sequence
  Synthetic
cagccuuugguuaauucc

SEQ ID NO: 158206 - RNA, 19 nt, Artificial Sequence
  Synthetic
ccagccuuugguuaauucc

SEQ ID NO: 158207 - RNA, 21 nt, Artificial Sequence
  Synthetic
ugccagccuuugguuaauucc

SEQ ID NO: 158208 - RNA, 22 nt, Artificial Sequence
  Synthetic
uugccagccuuugguuaauucc

SEQ ID NO: 158209 - RNA, 24 nt, Artificial Sequence
  Synthetic
uguugccagccuuugguuaauucc

SEQ ID NO: 158210 - RNA, 18 nt, Artificial Sequence
  Synthetic
uaaauuucaaaugauucc

SEQ ID NO: 158211 - RNA, 19 nt, Artificial Sequence
  Synthetic
uuaaauuucaaaugauucc

SEQ ID NO: 158212 - RNA, 20 nt, Artificial Sequence
  Synthetic
uuuaaauuucaaaugauucc

SEQ ID NO: 158213 - RNA, 18 nt, Artificial Sequence
  Synthetic
agaagauuacuugauucc

SEQ ID NO: 158214 - RNA, 20 nt, Artificial Sequence
  Synthetic
ugagaagauuacuugauucc

SEQ ID NO: 158215 - RNA, 23 nt, Artificial Sequence
  Synthetic
aggugagaagauuacuugauucc

SEQ ID NO: 158216 - RNA, 18 nt, Artificial Sequence
  Synthetic
ucuccuacugguacuucc

SEQ ID NO: 158217 - RNA, 19 nt, Artificial Sequence
  Synthetic
cucuccuacugguacuucc

SEQ ID NO: 158218 - RNA, 20 nt, Artificial Sequence
  Synthetic
acucuccuacugguacuucc

SEQ ID NO: 158219 - RNA, 21 nt, Artificial Sequence
  Synthetic
cacucuccuacugguacuucc

SEQ ID NO: 158220 - RNA, 22 nt, Artificial Sequence
  Synthetic
ccacucuccuacugguacuucc

SEQ ID NO: 158221 - RNA, 23 nt, Artificial Sequence
  Synthetic
cccacucuccuacugguacuucc

SEQ ID NO: 158222 - RNA, 24 nt, Artificial Sequence
  Synthetic
ucccacucuccuacugguacuucc

SEQ ID NO: 158223 - RNA, 18 nt, Artificial Sequence
  Synthetic
uucucuauuauuucuucc

SEQ ID NO: 158224 - RNA, 19 nt, Artificial Sequence
  Synthetic
auucucuauuauuucuucc

SEQ ID NO: 158225 - RNA, 20 nt, Artificial Sequence
  Synthetic
uauucucuauuauuucuucc

SEQ ID NO: 158226 - RNA, 18 nt, Artificial Sequence
  Synthetic
augucuuuauaaaguucc

SEQ ID NO: 158227 - RNA, 19 nt, Artificial Sequence
  Synthetic
caugucuuuauaaaguucc

SEQ ID NO: 158228 - RNA, 20 nt, Artificial Sequence
  Synthetic
ucaugucuuuauaaaguucc

SEQ ID NO: 158229 - RNA, 18 nt, Artificial Sequence
  Synthetic
aacauauucacagguucc

SEQ ID NO: 158230 - RNA, 19 nt, Artificial Sequence
  Synthetic
uaacauauucacagguucc

SEQ ID NO: 158231 - RNA, 22 nt, Artificial Sequence
  Synthetic
agguaacauauucacagguucc

SEQ ID NO: 158232 - RNA, 23 nt, Artificial Sequence
  Synthetic
aagguaacauauucacagguucc

SEQ ID NO: 158233 - RNA, 24 nt, Artificial Sequence
  Synthetic
uaagguaacauauucacagguucc

SEQ ID NO: 158234 - RNA, 18 nt, Artificial Sequence
  Synthetic
augaagaaaaugcuuucc

SEQ ID NO: 158235 - RNA, 21 nt, Artificial Sequence
  Synthetic
aggaugaagaaaaugcuuucc

SEQ ID NO: 158236 - RNA, 22 nt, Artificial Sequence
  Synthetic
caggaugaagaaaaugcuuucc

SEQ ID NO: 158237 - RNA, 24 nt, Artificial Sequence
  Synthetic
agcaggaugaagaaaaugcuuucc

SEQ ID NO: 158238 - RNA, 19 nt, Artificial Sequence
  Synthetic
agaggaagacaauuuuucc

SEQ ID NO: 158239 - RNA, 20 nt, Artificial Sequence
  Synthetic
uagaggaagacaauuuuucc

SEQ ID NO: 158240 - RNA, 21 nt, Artificial Sequence
  Synthetic
uuagaggaagacaauuuuucc

SEQ ID NO: 158241 - RNA, 22 nt, Artificial Sequence
  Synthetic
uuuagaggaagacaauuuuucc

SEQ ID NO: 158242 - RNA, 18 nt, Artificial Sequence
  Synthetic
cccuucaucucuuuuucc

SEQ ID NO: 158243 - RNA, 19 nt, Artificial Sequence
  Synthetic
ucccuucaucucuuuuucc

SEQ ID NO: 158244 - RNA, 20 nt, Artificial Sequence
  Synthetic
uucccuucaucucuuuuucc

SEQ ID NO: 158245 - RNA, 18 nt, Artificial Sequence
  Synthetic
uaaagggaacaacaaagc

SEQ ID NO: 158246 - RNA, 19 nt, Artificial Sequence
  Synthetic
auaaagggaacaacaaagc

SEQ ID NO: 158247 - RNA, 20 nt, Artificial Sequence
  Synthetic
uauaaagggaacaacaaagc

SEQ ID NO: 158248 - RNA, 21 nt, Artificial Sequence
  Synthetic
cuauaaagggaacaacaaagc

SEQ ID NO: 158249 - RNA, 22 nt, Artificial Sequence
  Synthetic
ucuauaaagggaacaacaaagc

SEQ ID NO: 158250 - RNA, 23 nt, Artificial Sequence
  Synthetic
cucuauaaagggaacaacaaagc

SEQ ID NO: 158251 - RNA, 18 nt, Artificial Sequence
  Synthetic
cagccugggagacaaagc

SEQ ID NO: 158252 - RNA, 19 nt, Artificial Sequence
  Synthetic
ccagccugggagacaaagc

SEQ ID NO: 158253 - RNA, 20 nt, Artificial Sequence
  Synthetic
uccagccugggagacaaagc

SEQ ID NO: 158254 - RNA, 21 nt, Artificial Sequence
  Synthetic
cuccagccugggagacaaagc

SEQ ID NO: 158255 - RNA, 22 nt, Artificial Sequence
  Synthetic
acuccagccugggagacaaagc

SEQ ID NO: 158256 - RNA, 23 nt, Artificial Sequence
  Synthetic
cacuccagccugggagacaaagc

SEQ ID NO: 158257 - RNA, 18 nt, Artificial Sequence
  Synthetic
uucauugaaucccaaagc

SEQ ID NO: 158258 - RNA, 20 nt, Artificial Sequence
  Synthetic
aguucauugaaucccaaagc

SEQ ID NO: 158259 - RNA, 22 nt, Artificial Sequence
  Synthetic
agaguucauugaaucccaaagc

SEQ ID NO: 158260 - RNA, 23 nt, Artificial Sequence
  Synthetic
aagaguucauugaaucccaaagc

SEQ ID NO: 158261 - RNA, 24 nt, Artificial Sequence
  Synthetic
caagaguucauugaaucccaaagc

SEQ ID NO: 158262 - RNA, 18 nt, Artificial Sequence
  Synthetic
aaaauaaaugaggaaagc

SEQ ID NO: 158263 - RNA, 19 nt, Artificial Sequence
  Synthetic
aaaaauaaaugaggaaagc

SEQ ID NO: 158264 - RNA, 18 nt, Artificial Sequence
  Synthetic
aaaaaagaaugcacaagc

SEQ ID NO: 158265 - RNA, 19 nt, Artificial Sequence
  Synthetic
aaaaaaagaaugcacaagc

SEQ ID NO: 158266 - RNA, 20 nt, Artificial Sequence
  Synthetic
aaaaaaaagaaugcacaagc

SEQ ID NO: 158267 - RNA, 21 nt, Artificial Sequence
  Synthetic
aaaaaaaaagaaugcacaagc

SEQ ID NO: 158268 - RNA, 22 nt, Artificial Sequence
  Synthetic
aaaaaaaaaagaaugcacaagc

SEQ ID NO: 158269 - RNA, 23 nt, Artificial Sequence
  Synthetic
aaaaaaaaaaagaaugcacaagc

SEQ ID NO: 158270 - RNA, 24 nt, Artificial Sequence
  Synthetic
aaaaaaaaaaaagaaugcacaagc

SEQ ID NO: 158271 - RNA, 18 nt, Artificial Sequence
  Synthetic
ucacccugcugcccaagc

SEQ ID NO: 158272 - RNA, 19 nt, Artificial Sequence
  Synthetic
cucacccugcugcccaagc

SEQ ID NO: 158273 - RNA, 20 nt, Artificial Sequence
  Synthetic
ucucacccugcugcccaagc

SEQ ID NO: 158274 - RNA, 24 nt, Artificial Sequence
  Synthetic
agggucucacccugcugcccaagc

SEQ ID NO: 158275 - RNA, 18 nt, Artificial Sequence
  Synthetic
ugggaaccaaaagcaagc

SEQ ID NO: 158276 - RNA, 19 nt, Artificial Sequence
  Synthetic
augggaaccaaaagcaagc

SEQ ID NO: 158277 - RNA, 20 nt, Artificial Sequence
  Synthetic
aaugggaaccaaaagcaagc

SEQ ID NO: 158278 - RNA, 21 nt, Artificial Sequence
  Synthetic
aaaugggaaccaaaagcaagc

SEQ ID NO: 158279 - RNA, 22 nt, Artificial Sequence
  Synthetic
caaaugggaaccaaaagcaagc

SEQ ID NO: 158280 - RNA, 24 nt, Artificial Sequence
  Synthetic
ugcaaaugggaaccaaaagcaagc

SEQ ID NO: 158281 - RNA, 18 nt, Artificial Sequence
  Synthetic
ccucagccucugagaagc

SEQ ID NO: 158282 - RNA, 20 nt, Artificial Sequence
  Synthetic
ugccucagccucugagaagc

SEQ ID NO: 158283 - RNA, 21 nt, Artificial Sequence
  Synthetic
augccucagccucugagaagc

SEQ ID NO: 158284 - RNA, 22 nt, Artificial Sequence
  Synthetic
caugccucagccucugagaagc

SEQ ID NO: 158285 - RNA, 23 nt, Artificial Sequence
  Synthetic
ucaugccucagccucugagaagc

SEQ ID NO: 158286 - RNA, 24 nt, Artificial Sequence
  Synthetic
cucaugccucagccucugagaagc

SEQ ID NO: 158287 - RNA, 18 nt, Artificial Sequence
  Synthetic
cauguccuuugcggaagc

SEQ ID NO: 158288 - RNA, 19 nt, Artificial Sequence
  Synthetic
ucauguccuuugcggaagc

SEQ ID NO: 158289 - RNA, 20 nt, Artificial Sequence
  Synthetic
aucauguccuuugcggaagc

SEQ ID NO: 158290 - RNA, 21 nt, Artificial Sequence
  Synthetic
aaucauguccuuugcggaagc

SEQ ID NO: 158291 - RNA, 22 nt, Artificial Sequence
  Synthetic
aaaucauguccuuugcggaagc

SEQ ID NO: 158292 - RNA, 24 nt, Artificial Sequence
  Synthetic
ugaaaucauguccuuugcggaagc

SEQ ID NO: 158293 - RNA, 18 nt, Artificial Sequence
  Synthetic
cagauaagaaaaugaagc

SEQ ID NO: 158294 - RNA, 19 nt, Artificial Sequence
  Synthetic
acagauaagaaaaugaagc

SEQ ID NO: 158295 - RNA, 20 nt, Artificial Sequence
  Synthetic
uacagauaagaaaaugaagc

SEQ ID NO: 158296 - RNA, 21 nt, Artificial Sequence
  Synthetic
uuacagauaagaaaaugaagc

SEQ ID NO: 158297 - RNA, 22 nt, Artificial Sequence
  Synthetic
uuuacagauaagaaaaugaagc

SEQ ID NO: 158298 - RNA, 23 nt, Artificial Sequence
  Synthetic
cuuuacagauaagaaaaugaagc

SEQ ID NO: 158299 - RNA, 24 nt, Artificial Sequence
  Synthetic
acuuuacagauaagaaaaugaagc

SEQ ID NO: 158300 - RNA, 18 nt, Artificial Sequence
  Synthetic
aagauggcaagaugaagc

SEQ ID NO: 158301 - RNA, 19 nt, Artificial Sequence
  Synthetic
caagauggcaagaugaagc

SEQ ID NO: 158302 - RNA, 20 nt, Artificial Sequence
  Synthetic
ccaagauggcaagaugaagc

SEQ ID NO: 158303 - RNA, 18 nt, Artificial Sequence
  Synthetic
ccccuccccacacuaagc

SEQ ID NO: 158304 - RNA, 20 nt, Artificial Sequence
  Synthetic
ugccccuccccacacuaagc

SEQ ID NO: 158305 - RNA, 23 nt, Artificial Sequence
  Synthetic
aggugccccuccccacacuaagc

SEQ ID NO: 158306 - RNA, 24 nt, Artificial Sequence
  Synthetic
caggugccccuccccacacuaagc

SEQ ID NO: 158307 - RNA, 19 nt, Artificial Sequence
  Synthetic
agccaagaaaauccuaagc

SEQ ID NO: 158308 - RNA, 20 nt, Artificial Sequence
  Synthetic
uagccaagaaaauccuaagc

SEQ ID NO: 158309 - RNA, 21 nt, Artificial Sequence
  Synthetic
auagccaagaaaauccuaagc

SEQ ID NO: 158310 - RNA, 22 nt, Artificial Sequence
  Synthetic
uauagccaagaaaauccuaagc

SEQ ID NO: 158311 - RNA, 23 nt, Artificial Sequence
  Synthetic
auauagccaagaaaauccuaagc

SEQ ID NO: 158312 - RNA, 24 nt, Artificial Sequence
  Synthetic
cauauagccaagaaaauccuaagc

SEQ ID NO: 158313 - RNA, 18 nt, Artificial Sequence
  Synthetic
acuccucucucuguaagc

SEQ ID NO: 158314 - RNA, 20 nt, Artificial Sequence
  Synthetic
agacuccucucucuguaagc

SEQ ID NO: 158315 - RNA, 18 nt, Artificial Sequence
  Synthetic
cgcucuuguugccccagc

SEQ ID NO: 158316 - RNA, 19 nt, Artificial Sequence
  Synthetic
ucgcucuuguugccccagc

SEQ ID NO: 158317 - RNA, 20 nt, Artificial Sequence
  Synthetic
uucgcucuuguugccccagc

SEQ ID NO: 158318 - RNA, 21 nt, Artificial Sequence
  Synthetic
cuucgcucuuguugccccagc

SEQ ID NO: 158319 - RNA, 23 nt, Artificial Sequence
  Synthetic
agcuucgcucuuguugccccagc

SEQ ID NO: 158320 - RNA, 18 nt, Artificial Sequence
  Synthetic
agaucaugccacuccagc

SEQ ID NO: 158321 - RNA, 20 nt, Artificial Sequence
  Synthetic
ugagaucaugccacuccagc

SEQ ID NO: 158322 - RNA, 21 nt, Artificial Sequence
  Synthetic
cugagaucaugccacuccagc

SEQ ID NO: 158323 - RNA, 23 nt, Artificial Sequence
  Synthetic
agcugagaucaugccacuccagc

SEQ ID NO: 158324 - RNA, 18 nt, Artificial Sequence
  Synthetic
augccacuccacuccagc

SEQ ID NO: 158325 - RNA, 19 nt, Artificial Sequence
  Synthetic
caugccacuccacuccagc

SEQ ID NO: 158326 - RNA, 20 nt, Artificial Sequence
  Synthetic
ucaugccacuccacuccagc

SEQ ID NO: 158327 - RNA, 21 nt, Artificial Sequence
  Synthetic
aucaugccacuccacuccagc

SEQ ID NO: 158328 - RNA, 23 nt, Artificial Sequence
  Synthetic
ugaucaugccacuccacuccagc

SEQ ID NO: 158329 - RNA, 24 nt, Artificial Sequence
  Synthetic
augaucaugccacuccacuccagc

SEQ ID NO: 158330 - RNA, 19 nt, Artificial Sequence
  Synthetic
agcaccacugcacuccagc

SEQ ID NO: 158331 - RNA, 20 nt, Artificial Sequence
  Synthetic
cagcaccacugcacuccagc

SEQ ID NO: 158332 - RNA, 21 nt, Artificial Sequence
  Synthetic
acagcaccacugcacuccagc

SEQ ID NO: 158333 - RNA, 23 nt, Artificial Sequence
  Synthetic
agacagcaccacugcacuccagc

SEQ ID NO: 158334 - RNA, 20 nt, Artificial Sequence
  Synthetic
uagcaccacugcacuccagc

SEQ ID NO: 158335 - RNA, 21 nt, Artificial Sequence
  Synthetic
auagcaccacugcacuccagc

SEQ ID NO: 158336 - RNA, 23 nt, Artificial Sequence
  Synthetic
agauagcaccacugcacuccagc

SEQ ID NO: 158337 - RNA, 21 nt, Artificial Sequence
  Synthetic
auugcaccacugcacuccagc

SEQ ID NO: 158338 - RNA, 23 nt, Artificial Sequence
  Synthetic
agauugcaccacugcacuccagc

SEQ ID NO: 158339 - RNA, 21 nt, Artificial Sequence
  Synthetic
aucaugccacugcacuccagc

SEQ ID NO: 158340 - RNA, 23 nt, Artificial Sequence
  Synthetic
agaucaugccacugcacuccagc

SEQ ID NO: 158341 - RNA, 24 nt, Artificial Sequence
  Synthetic
aagaucaugccacugcacuccagc

SEQ ID NO: 158342 - RNA, 19 nt, Artificial Sequence
  Synthetic
ugugccacugcacuccagc

SEQ ID NO: 158343 - RNA, 20 nt, Artificial Sequence
  Synthetic
cugugccacugcacuccagc

SEQ ID NO: 158344 - RNA, 21 nt, Artificial Sequence
  Synthetic
acugugccacugcacuccagc

SEQ ID NO: 158345 - RNA, 23 nt, Artificial Sequence
  Synthetic
agacugugccacugcacuccagc

SEQ ID NO: 158346 - RNA, 21 nt, Artificial Sequence
  Synthetic
auugugccacugcacuccagc

SEQ ID NO: 158347 - RNA, 23 nt, Artificial Sequence
  Synthetic
agauugugccacugcacuccagc

SEQ ID NO: 158348 - RNA, 23 nt, Artificial Sequence
  Synthetic
ugauugugccacugcacuccagc

SEQ ID NO: 158349 - RNA, 24 nt, Artificial Sequence
  Synthetic
augauugugccacugcacuccagc

SEQ ID NO: 158350 - RNA, 19 nt, Artificial Sequence
  Synthetic
cgcagcacugcacuccagc

SEQ ID NO: 158351 - RNA, 20 nt, Artificial Sequence
  Synthetic
ucgcagcacugcacuccagc

SEQ ID NO: 158352 - RNA, 21 nt, Artificial Sequence
  Synthetic
aucgcagcacugcacuccagc

SEQ ID NO: 158353 - RNA, 23 nt, Artificial Sequence
  Synthetic
agaucgcagcacugcacuccagc

SEQ ID NO: 158354 - RNA, 18 nt, Artificial Sequence
  Synthetic
auugcacugcacuccagc

SEQ ID NO: 158355 - RNA, 19 nt, Artificial Sequence
  Synthetic
cauugcacugcacuccagc

SEQ ID NO: 158356 - RNA, 20 nt, Artificial Sequence
  Synthetic
ccauugcacugcacuccagc

SEQ ID NO: 158357 - RNA, 22 nt, Artificial Sequence
  Synthetic
ugccauugcacugcacuccagc

SEQ ID NO: 158358 - RNA, 23 nt, Artificial Sequence
  Synthetic
augccauugcacugcacuccagc

SEQ ID NO: 158359 - RNA, 24 nt, Artificial Sequence
  Synthetic
caugccauugcacugcacuccagc

SEQ ID NO: 158360 - RNA, 18 nt, Artificial Sequence
  Synthetic
augccgcugcacuccagc

SEQ ID NO: 158361 - RNA, 19 nt, Artificial Sequence
  Synthetic
caugccgcugcacuccagc

SEQ ID NO: 158362 - RNA, 20 nt, Artificial Sequence
  Synthetic
ucaugccgcugcacuccagc

SEQ ID NO: 158363 - RNA, 21 nt, Artificial Sequence
  Synthetic
aucaugccgcugcacuccagc

SEQ ID NO: 158364 - RNA, 23 nt, Artificial Sequence
  Synthetic
agaucaugccgcugcacuccagc

SEQ ID NO: 158365 - RNA, 19 nt, Artificial Sequence
  Synthetic
ugugccauugcacuccagc

SEQ ID NO: 158366 - RNA, 20 nt, Artificial Sequence
  Synthetic
uugugccauugcacuccagc

SEQ ID NO: 158367 - RNA, 21 nt, Artificial Sequence
  Synthetic
auugugccauugcacuccagc

SEQ ID NO: 158368 - RNA, 23 nt, Artificial Sequence
  Synthetic
agauugugccauugcacuccagc

SEQ ID NO: 158369 - RNA, 18 nt, Artificial Sequence
  Synthetic
cacugcacucacuccagc

SEQ ID NO: 158370 - RNA, 19 nt, Artificial Sequence
  Synthetic
ccacugcacucacuccagc

SEQ ID NO: 158371 - RNA, 20 nt, Artificial Sequence
  Synthetic
accacugcacucacuccagc

SEQ ID NO: 158372 - RNA, 21 nt, Artificial Sequence
  Synthetic
caccacugcacucacuccagc

SEQ ID NO: 158373 - RNA, 24 nt, Artificial Sequence
  Synthetic
uggcaccacugcacucacuccagc

SEQ ID NO: 158374 - RNA, 18 nt, Artificial Sequence
  Synthetic
augccacugcauuccagc

SEQ ID NO: 158375 - RNA, 19 nt, Artificial Sequence
  Synthetic
caugccacugcauuccagc

SEQ ID NO: 158376 - RNA, 20 nt, Artificial Sequence
  Synthetic
ucaugccacugcauuccagc

SEQ ID NO: 158377 - RNA, 21 nt, Artificial Sequence
  Synthetic
aucaugccacugcauuccagc

SEQ ID NO: 158378 - RNA, 23 nt, Artificial Sequence
  Synthetic
ugaucaugccacugcauuccagc

SEQ ID NO: 158379 - RNA, 19 nt, Artificial Sequence
  Synthetic
agacugcugugcuggcagc

SEQ ID NO: 158380 - RNA, 20 nt, Artificial Sequence
  Synthetic
cagacugcugugcuggcagc

SEQ ID NO: 158381 - RNA, 21 nt, Artificial Sequence
  Synthetic
ucagacugcugugcuggcagc

SEQ ID NO: 158382 - RNA, 22 nt, Artificial Sequence
  Synthetic
uucagacugcugugcuggcagc

SEQ ID NO: 158383 - RNA, 23 nt, Artificial Sequence
  Synthetic
cuucagacugcugugcuggcagc

SEQ ID NO: 158384 - RNA, 24 nt, Artificial Sequence
  Synthetic
acuucagacugcugugcuggcagc

SEQ ID NO: 158385 - RNA, 19 nt, Artificial Sequence
  Synthetic
cgcaccacugcacugcagc

SEQ ID NO: 158386 - RNA, 20 nt, Artificial Sequence
  Synthetic
ucgcaccacugcacugcagc

SEQ ID NO: 158387 - RNA, 21 nt, Artificial Sequence
  Synthetic
aucgcaccacugcacugcagc

SEQ ID NO: 158388 - RNA, 23 nt, Artificial Sequence
  Synthetic
agaucgcaccacugcacugcagc

SEQ ID NO: 158389 - RNA, 19 nt, Artificial Sequence
  Synthetic
cgugccacugcacugcagc

SEQ ID NO: 158390 - RNA, 20 nt, Artificial Sequence
  Synthetic
ucgugccacugcacugcagc

SEQ ID NO: 158391 - RNA, 21 nt, Artificial Sequence
  Synthetic
aucgugccacugcacugcagc

SEQ ID NO: 158392 - RNA, 23 nt, Artificial Sequence
  Synthetic
agaucgugccacugcacugcagc

SEQ ID NO: 158393 - RNA, 19 nt, Artificial Sequence
  Synthetic
ugauucuuucuuuugcagc

SEQ ID NO: 158394 - RNA, 20 nt, Artificial Sequence
  Synthetic
cugauucuuucuuuugcagc

SEQ ID NO: 158395 - RNA, 22 nt, Artificial Sequence
  Synthetic
ugcugauucuuucuuuugcagc

SEQ ID NO: 158396 - RNA, 23 nt, Artificial Sequence
  Synthetic
uugcugauucuuucuuuugcagc

SEQ ID NO: 158397 - RNA, 24 nt, Artificial Sequence
  Synthetic
uuugcugauucuuucuuuugcagc

SEQ ID NO: 158398 - RNA, 18 nt, Artificial Sequence
  Synthetic
auaccacugcacuucagc

SEQ ID NO: 158399 - RNA, 19 nt, Artificial Sequence
  Synthetic
cauaccacugcacuucagc

SEQ ID NO: 158400 - RNA, 20 nt, Artificial Sequence
  Synthetic
ucauaccacugcacuucagc

SEQ ID NO: 158401 - RNA, 21 nt, Artificial Sequence
  Synthetic
aucauaccacugcacuucagc

SEQ ID NO: 158402 - RNA, 23 nt, Artificial Sequence
  Synthetic
agaucauaccacugcacuucagc

SEQ ID NO: 158403 - RNA, 18 nt, Artificial Sequence
  Synthetic
cccuggccuaucuucagc

SEQ ID NO: 158404 - RNA, 19 nt, Artificial Sequence
  Synthetic
acccuggccuaucuucagc

SEQ ID NO: 158405 - RNA, 20 nt, Artificial Sequence
  Synthetic
aacccuggccuaucuucagc

SEQ ID NO: 158406 - RNA, 21 nt, Artificial Sequence
  Synthetic
uaacccuggccuaucuucagc

SEQ ID NO: 158407 - RNA, 22 nt, Artificial Sequence
  Synthetic
auaacccuggccuaucuucagc

SEQ ID NO: 158408 - RNA, 24 nt, Artificial Sequence
  Synthetic
agauaacccuggccuaucuucagc

SEQ ID NO: 158409 - RNA, 18 nt, Artificial Sequence
  Synthetic
cucggccucacaaagagc

SEQ ID NO: 158410 - RNA, 19 nt, Artificial Sequence
  Synthetic
ccucggccucacaaagagc

SEQ ID NO: 158411 - RNA, 20 nt, Artificial Sequence
  Synthetic
accucggccucacaaagagc

SEQ ID NO: 158412 - RNA, 21 nt, Artificial Sequence
  Synthetic
caccucggccucacaaagagc

SEQ ID NO: 158413 - RNA, 22 nt, Artificial Sequence
  Synthetic
ccaccucggccucacaaagagc

SEQ ID NO: 158414 - RNA, 23 nt, Artificial Sequence
  Synthetic
cccaccucggccucacaaagagc

SEQ ID NO: 158415 - RNA, 18 nt, Artificial Sequence
  Synthetic
aaaacaaaaaaacagagc

SEQ ID NO: 158416 - RNA, 19 nt, Artificial Sequence
  Synthetic
caaaacaaaaaaacagagc

SEQ ID NO: 158417 - RNA, 20 nt, Artificial Sequence
  Synthetic
acaaaacaaaaaaacagagc

SEQ ID NO: 158418 - RNA, 21 nt, Artificial Sequence
  Synthetic
aacaaaacaaaaaaacagagc

SEQ ID NO: 158419 - RNA, 22 nt, Artificial Sequence
  Synthetic
aaacaaaacaaaaaaacagagc

SEQ ID NO: 158420 - RNA, 23 nt, Artificial Sequence
  Synthetic
aaaacaaaacaaaaaaacagagc

SEQ ID NO: 158421 - RNA, 24 nt, Artificial Sequence
  Synthetic
caaaacaaaacaaaaaaacagagc

SEQ ID NO: 158422 - RNA, 18 nt, Artificial Sequence
  Synthetic
ucugucccuuagcagagc

SEQ ID NO: 158423 - RNA, 20 nt, Artificial Sequence
  Synthetic
agucugucccuuagcagagc

SEQ ID NO: 158424 - RNA, 21 nt, Artificial Sequence
  Synthetic
cagucugucccuuagcagagc

SEQ ID NO: 158425 - RNA, 24 nt, Artificial Sequence
  Synthetic
aggcagucugucccuuagcagagc

SEQ ID NO: 158426 - RNA, 19 nt, Artificial Sequence
  Synthetic
aguaaaaaagcuuuagagc

SEQ ID NO: 158427 - RNA, 20 nt, Artificial Sequence
  Synthetic
aaguaaaaaagcuuuagagc

SEQ ID NO: 158428 - RNA, 18 nt, Artificial Sequence
  Synthetic
agcuaauauuuaaugagc

SEQ ID NO: 158429 - RNA, 19 nt, Artificial Sequence
  Synthetic
cagcuaauauuuaaugagc

SEQ ID NO: 158430 - RNA, 20 nt, Artificial Sequence
  Synthetic
acagcuaauauuuaaugagc

SEQ ID NO: 158431 - RNA, 18 nt, Artificial Sequence
  Synthetic
agaggaaagaaacugagc

SEQ ID NO: 158432 - RNA, 19 nt, Artificial Sequence
  Synthetic
aagaggaaagaaacugagc

SEQ ID NO: 158433 - RNA, 20 nt, Artificial Sequence
  Synthetic
aaagaggaaagaaacugagc

SEQ ID NO: 158434 - RNA, 18 nt, Artificial Sequence
  Synthetic
ugggaggaucaccugagc

SEQ ID NO: 158435 - RNA, 21 nt, Artificial Sequence
  Synthetic
aggugggaggaucaccugagc

SEQ ID NO: 158436 - RNA, 23 nt, Artificial Sequence
  Synthetic
ugaggugggaggaucaccugagc

SEQ ID NO: 158437 - RNA, 24 nt, Artificial Sequence
  Synthetic
cugaggugggaggaucaccugagc

SEQ ID NO: 158438 - RNA, 18 nt, Artificial Sequence
  Synthetic
ugucucaaacuuuugagc

SEQ ID NO: 158439 - RNA, 19 nt, Artificial Sequence
  Synthetic
uugucucaaacuuuugagc

SEQ ID NO: 158440 - RNA, 20 nt, Artificial Sequence
  Synthetic
cuugucucaaacuuuugagc

SEQ ID NO: 158441 - RNA, 21 nt, Artificial Sequence
  Synthetic
ugccucagccucccaaauagc

SEQ ID NO: 158442 - RNA, 22 nt, Artificial Sequence
  Synthetic
cugccucagccucccaaauagc

SEQ ID NO: 158443 - RNA, 23 nt, Artificial Sequence
  Synthetic
ccugccucagccucccaaauagc

SEQ ID NO: 158444 - RNA, 24 nt, Artificial Sequence
  Synthetic
uccugccucagccucccaaauagc

SEQ ID NO: 158445 - RNA, 18 nt, Artificial Sequence
  Synthetic
agauaaauuugaaauagc

SEQ ID NO: 158446 - RNA, 19 nt, Artificial Sequence
  Synthetic
aagauaaauuugaaauagc

SEQ ID NO: 158447 - RNA, 20 nt, Artificial Sequence
  Synthetic
aaagauaaauuugaaauagc

SEQ ID NO: 158448 - RNA, 18 nt, Artificial Sequence
  Synthetic
cugaggcaagagaauagc

SEQ ID NO: 158449 - RNA, 21 nt, Artificial Sequence
  Synthetic
aggcugaggcaagagaauagc

SEQ ID NO: 158450 - RNA, 22 nt, Artificial Sequence
  Synthetic
uaggcugaggcaagagaauagc

SEQ ID NO: 158451 - RNA, 18 nt, Artificial Sequence
  Synthetic
uaugcuguaccauauagc

SEQ ID NO: 158452 - RNA, 19 nt, Artificial Sequence
  Synthetic
auaugcuguaccauauagc

SEQ ID NO: 158453 - RNA, 20 nt, Artificial Sequence
  Synthetic
aauaugcuguaccauauagc

SEQ ID NO: 158454 - RNA, 21 nt, Artificial Sequence
  Synthetic
caauaugcuguaccauauagc

SEQ ID NO: 158455 - RNA, 23 nt, Artificial Sequence
  Synthetic
agcaauaugcuguaccauauagc

SEQ ID NO: 158456 - RNA, 19 nt, Artificial Sequence
  Synthetic
ugagccacuacacucuagc

SEQ ID NO: 158457 - RNA, 20 nt, Artificial Sequence
  Synthetic
uugagccacuacacucuagc

SEQ ID NO: 158458 - RNA, 21 nt, Artificial Sequence
  Synthetic
auugagccacuacacucuagc

SEQ ID NO: 158459 - RNA, 23 nt, Artificial Sequence
  Synthetic
agauugagccacuacacucuagc

SEQ ID NO: 158460 - RNA, 18 nt, Artificial Sequence
  Synthetic
acaccacugcacucuagc

SEQ ID NO: 158461 - RNA, 19 nt, Artificial Sequence
  Synthetic
cacaccacugcacucuagc

SEQ ID NO: 158462 - RNA, 20 nt, Artificial Sequence
  Synthetic
ucacaccacugcacucuagc

SEQ ID NO: 158463 - RNA, 21 nt, Artificial Sequence
  Synthetic
aucacaccacugcacucuagc

SEQ ID NO: 158464 - RNA, 23 nt, Artificial Sequence
  Synthetic
agaucacaccacugcacucuagc

SEQ ID NO: 158465 - RNA, 18 nt, Artificial Sequence
  Synthetic
uucaaccucccaaguagc

SEQ ID NO: 158466 - RNA, 19 nt, Artificial Sequence
  Synthetic
cuucaaccucccaaguagc

SEQ ID NO: 158467 - RNA, 21 nt, Artificial Sequence
  Synthetic
ugcuucaaccucccaaguagc

SEQ ID NO: 158468 - RNA, 22 nt, Artificial Sequence
  Synthetic
cugcuucaaccucccaaguagc

SEQ ID NO: 158469 - RNA, 23 nt, Artificial Sequence
  Synthetic
ccugcuucaaccucccaaguagc

SEQ ID NO: 158470 - RNA, 24 nt, Artificial Sequence
  Synthetic
uccugcuucaaccucccaaguagc

SEQ ID NO: 158471 - RNA, 20 nt, Artificial Sequence
  Synthetic
accucagccucccaaguagc

SEQ ID NO: 158472 - RNA, 21 nt, Artificial Sequence
  Synthetic
caccucagccucccaaguagc

SEQ ID NO: 158473 - RNA, 22 nt, Artificial Sequence
  Synthetic
ccaccucagccucccaaguagc

SEQ ID NO: 158474 - RNA, 23 nt, Artificial Sequence
  Synthetic
cccaccucagccucccaaguagc

SEQ ID NO: 158475 - RNA, 24 nt, Artificial Sequence
  Synthetic
ucccaccucagccucccaaguagc

SEQ ID NO: 158476 - RNA, 21 nt, Artificial Sequence
  Synthetic
ugccucagccucccaaguagc

SEQ ID NO: 158477 - RNA, 22 nt, Artificial Sequence
  Synthetic
cugccucagccucccaaguagc

SEQ ID NO: 158478 - RNA, 23 nt, Artificial Sequence
  Synthetic
ccugccucagccucccaaguagc

SEQ ID NO: 158479 - RNA, 24 nt, Artificial Sequence
  Synthetic
uccugccucagccucccaaguagc

SEQ ID NO: 158480 - RNA, 24 nt, Artificial Sequence
  Synthetic
ugcugccucagccucccaaguagc

SEQ ID NO: 158481 - RNA, 18 nt, Artificial Sequence
  Synthetic
uucagccucccaaguagc

SEQ ID NO: 158482 - RNA, 19 nt, Artificial Sequence
  Synthetic
cuucagccucccaaguagc

SEQ ID NO: 158483 - RNA, 21 nt, Artificial Sequence
  Synthetic
ugcuucagccucccaaguagc

SEQ ID NO: 158484 - RNA, 22 nt, Artificial Sequence
  Synthetic
cugcuucagccucccaaguagc

SEQ ID NO: 158485 - RNA, 23 nt, Artificial Sequence
  Synthetic
ccugcuucagccucccaaguagc

SEQ ID NO: 158486 - RNA, 24 nt, Artificial Sequence
  Synthetic
uccugcuucagccucccaaguagc

SEQ ID NO: 158487 - RNA, 18 nt, Artificial Sequence
  Synthetic
cucagccugcuaaguagc

SEQ ID NO: 158488 - RNA, 19 nt, Artificial Sequence
  Synthetic
ccucagccugcuaaguagc

SEQ ID NO: 158489 - RNA, 21 nt, Artificial Sequence
  Synthetic
ugccucagccugcuaaguagc

SEQ ID NO: 158490 - RNA, 22 nt, Artificial Sequence
  Synthetic
cugccucagccugcuaaguagc

SEQ ID NO: 158491 - RNA, 23 nt, Artificial Sequence
  Synthetic
ccugccucagccugcuaaguagc

SEQ ID NO: 158492 - RNA, 24 nt, Artificial Sequence
  Synthetic
uccugccucagccugcuaaguagc

SEQ ID NO: 158493 - RNA, 23 nt, Artificial Sequence
  Synthetic
ccugccucagccucccgaguagc

SEQ ID NO: 158494 - RNA, 24 nt, Artificial Sequence
  Synthetic
uccugccucagccucccgaguagc

SEQ ID NO: 158495 - RNA, 18 nt, Artificial Sequence
  Synthetic
ccucagccuccgaguagc

SEQ ID NO: 158496 - RNA, 20 nt, Artificial Sequence
  Synthetic
ugccucagccuccgaguagc

SEQ ID NO: 158497 - RNA, 21 nt, Artificial Sequence
  Synthetic
cugccucagccuccgaguagc

SEQ ID NO: 158498 - RNA, 22 nt, Artificial Sequence
  Synthetic
ccugccucagccuccgaguagc

SEQ ID NO: 158499 - RNA, 23 nt, Artificial Sequence
  Synthetic
uccugccucagccuccgaguagc

SEQ ID NO: 158500 - RNA, 24 nt, Artificial Sequence
  Synthetic
cuccugccucagccuccgaguagc

SEQ ID NO: 158501 - RNA, 21 nt, Artificial Sequence
  Synthetic
ugccucagccuccugaguagc

SEQ ID NO: 158502 - RNA, 22 nt, Artificial Sequence
  Synthetic
cugccucagccuccugaguagc

SEQ ID NO: 158503 - RNA, 23 nt, Artificial Sequence
  Synthetic
ccugccucagccuccugaguagc

SEQ ID NO: 158504 - RNA, 24 nt, Artificial Sequence
  Synthetic
uccugccucagccuccugaguagc

SEQ ID NO: 158505 - RNA, 18 nt, Artificial Sequence
  Synthetic
cuuagccuccugaguagc

SEQ ID NO: 158506 - RNA, 19 nt, Artificial Sequence
  Synthetic
ccuuagccuccugaguagc

SEQ ID NO: 158507 - RNA, 21 nt, Artificial Sequence
  Synthetic
ugccuuagccuccugaguagc

SEQ ID NO: 158508 - RNA, 22 nt, Artificial Sequence
  Synthetic
uugccuuagccuccugaguagc

SEQ ID NO: 158509 - RNA, 23 nt, Artificial Sequence
  Synthetic
cuugccuuagccuccugaguagc

SEQ ID NO: 158510 - RNA, 24 nt, Artificial Sequence
  Synthetic
ucuugccuuagccuccugaguagc

SEQ ID NO: 158511 - RNA, 18 nt, Artificial Sequence
  Synthetic
cucaggcuccugaguagc

SEQ ID NO: 158512 - RNA, 19 nt, Artificial Sequence
  Synthetic
ccucaggcuccugaguagc

SEQ ID NO: 158513 - RNA, 21 nt, Artificial Sequence
  Synthetic
ugccucaggcuccugaguagc

SEQ ID NO: 158514 - RNA, 23 nt, Artificial Sequence
  Synthetic
cgugccucaggcuccugaguagc

SEQ ID NO: 158515 - RNA, 24 nt, Artificial Sequence
  Synthetic
ucgugccucaggcuccugaguagc

SEQ ID NO: 158516 - RNA, 18 nt, Artificial Sequence
  Synthetic
cucagcguccugaguagc

SEQ ID NO: 158517 - RNA, 19 nt, Artificial Sequence
  Synthetic
ccucagcguccugaguagc

SEQ ID NO: 158518 - RNA, 21 nt, Artificial Sequence
  Synthetic
ugccucagcguccugaguagc

SEQ ID NO: 158519 - RNA, 22 nt, Artificial Sequence
  Synthetic
cugccucagcguccugaguagc

SEQ ID NO: 158520 - RNA, 23 nt, Artificial Sequence
  Synthetic
ccugccucagcguccugaguagc

SEQ ID NO: 158521 - RNA, 24 nt, Artificial Sequence
  Synthetic
uccugccucagcguccugaguagc

SEQ ID NO: 158522 - RNA, 18 nt, Artificial Sequence
  Synthetic
ccucagccucccgguagc

SEQ ID NO: 158523 - RNA, 20 nt, Artificial Sequence
  Synthetic
ugccucagccucccgguagc

SEQ ID NO: 158524 - RNA, 21 nt, Artificial Sequence
  Synthetic
cugccucagccucccgguagc

SEQ ID NO: 158525 - RNA, 22 nt, Artificial Sequence
  Synthetic
ccugccucagccucccgguagc

SEQ ID NO: 158526 - RNA, 23 nt, Artificial Sequence
  Synthetic
uccugccucagccucccgguagc

SEQ ID NO: 158527 - RNA, 24 nt, Artificial Sequence
  Synthetic
cuccugccucagccucccgguagc

SEQ ID NO: 158528 - RNA, 20 nt, Artificial Sequence
  Synthetic
cggggugucaccauguuagc

SEQ ID NO: 158529 - RNA, 21 nt, Artificial Sequence
  Synthetic
acggggugucaccauguuagc

SEQ ID NO: 158530 - RNA, 22 nt, Artificial Sequence
  Synthetic
uacggggugucaccauguuagc

SEQ ID NO: 158531 - RNA, 23 nt, Artificial Sequence
  Synthetic
auacggggugucaccauguuagc

SEQ ID NO: 158532 - RNA, 19 nt, Artificial Sequence
  Synthetic
aggguuucaccauguuagc

SEQ ID NO: 158533 - RNA, 20 nt, Artificial Sequence
  Synthetic
caggguuucaccauguuagc

SEQ ID NO: 158534 - RNA, 21 nt, Artificial Sequence
  Synthetic
acaggguuucaccauguuagc

SEQ ID NO: 158535 - RNA, 22 nt, Artificial Sequence
  Synthetic
aacaggguuucaccauguuagc

SEQ ID NO: 158536 - RNA, 23 nt, Artificial Sequence
  Synthetic
aaacaggguuucaccauguuagc

SEQ ID NO: 158537 - RNA, 20 nt, Artificial Sequence
  Synthetic
ugggguuucaccauguuagc

SEQ ID NO: 158538 - RNA, 21 nt, Artificial Sequence
  Synthetic
augggguuucaccauguuagc

SEQ ID NO: 158539 - RNA, 23 nt, Artificial Sequence
  Synthetic
agaugggguuucaccauguuagc

SEQ ID NO: 158540 - RNA, 20 nt, Artificial Sequence
  Synthetic
cggaguuucaccguguuagc

SEQ ID NO: 158541 - RNA, 21 nt, Artificial Sequence
  Synthetic
acggaguuucaccguguuagc

SEQ ID NO: 158542 - RNA, 23 nt, Artificial Sequence
  Synthetic
agacggaguuucaccguguuagc

SEQ ID NO: 158543 - RNA, 18 nt, Artificial Sequence
  Synthetic
agguuucaccguguuagc

SEQ ID NO: 158544 - RNA, 20 nt, Artificial Sequence
  Synthetic
cgagguuucaccguguuagc

SEQ ID NO: 158545 - RNA, 21 nt, Artificial Sequence
  Synthetic
acgagguuucaccguguuagc

SEQ ID NO: 158546 - RNA, 23 nt, Artificial Sequence
  Synthetic
agacgagguuucaccguguuagc

SEQ ID NO: 158547 - RNA, 19 nt, Artificial Sequence
  Synthetic
aggguuucaccguguuagc

SEQ ID NO: 158548 - RNA, 20 nt, Artificial Sequence
  Synthetic
caggguuucaccguguuagc

SEQ ID NO: 158549 - RNA, 21 nt, Artificial Sequence
  Synthetic
acaggguuucaccguguuagc

SEQ ID NO: 158550 - RNA, 23 nt, Artificial Sequence
  Synthetic
agacaggguuucaccguguuagc

SEQ ID NO: 158551 - RNA, 21 nt, Artificial Sequence
  Synthetic
acgggguuucaccguguuagc

SEQ ID NO: 158552 - RNA, 23 nt, Artificial Sequence
  Synthetic
agacgggguuucaccguguuagc

SEQ ID NO: 158553 - RNA, 18 nt, Artificial Sequence
  Synthetic
ugguuucaccguguuagc

SEQ ID NO: 158554 - RNA, 20 nt, Artificial Sequence
  Synthetic
cgugguuucaccguguuagc

SEQ ID NO: 158555 - RNA, 21 nt, Artificial Sequence
  Synthetic
acgugguuucaccguguuagc

SEQ ID NO: 158556 - RNA, 23 nt, Artificial Sequence
  Synthetic
agacgugguuucaccguguuagc

SEQ ID NO: 158557 - RNA, 20 nt, Artificial Sequence
  Synthetic
uggguuuucaccguguuagc

SEQ ID NO: 158558 - RNA, 23 nt, Artificial Sequence
  Synthetic
agguggguuuucaccguguuagc

SEQ ID NO: 158559 - RNA, 20 nt, Artificial Sequence
  Synthetic
cgggguuuuaccguguuagc

SEQ ID NO: 158560 - RNA, 21 nt, Artificial Sequence
  Synthetic
acgggguuuuaccguguuagc

SEQ ID NO: 158561 - RNA, 23 nt, Artificial Sequence
  Synthetic
agacgggguuuuaccguguuagc

SEQ ID NO: 158562 - RNA, 21 nt, Artificial Sequence
  Synthetic
acgggguuucacuguguuagc

SEQ ID NO: 158563 - RNA, 23 nt, Artificial Sequence
  Synthetic
agacgggguuucacuguguuagc

SEQ ID NO: 158564 - RNA, 19 nt, Artificial Sequence
  Synthetic
ugugccacugcacuuuagc

SEQ ID NO: 158565 - RNA, 20 nt, Artificial Sequence
  Synthetic
uugugccacugcacuuuagc

SEQ ID NO: 158566 - RNA, 21 nt, Artificial Sequence
  Synthetic
auugugccacugcacuuuagc

SEQ ID NO: 158567 - RNA, 23 nt, Artificial Sequence
  Synthetic
ugauugugccacugcacuuuagc

SEQ ID NO: 158568 - RNA, 24 nt, Artificial Sequence
  Synthetic
augauugugccacugcacuuuagc

SEQ ID NO: 158569 - RNA, 18 nt, Artificial Sequence
  Synthetic
cugugagguugguuuagc

SEQ ID NO: 158570 - RNA, 19 nt, Artificial Sequence
  Synthetic
ccugugagguugguuuagc

SEQ ID NO: 158571 - RNA, 20 nt, Artificial Sequence
  Synthetic
uccugugagguugguuuagc

SEQ ID NO: 158572 - RNA, 21 nt, Artificial Sequence
  Synthetic
auccugugagguugguuuagc

SEQ ID NO: 158573 - RNA, 22 nt, Artificial Sequence
  Synthetic
aauccugugagguugguuuagc

SEQ ID NO: 158574 - RNA, 24 nt, Artificial Sequence
  Synthetic
agaauccugugagguugguuuagc

SEQ ID NO: 158575 - RNA, 18 nt, Artificial Sequence
  Synthetic
ugguguuccaggugacgc

SEQ ID NO: 158576 - RNA, 19 nt, Artificial Sequence
  Synthetic
cugguguuccaggugacgc

SEQ ID NO: 158577 - RNA, 21 nt, Artificial Sequence
  Synthetic
cgcugguguuccaggugacgc

SEQ ID NO: 158578 - RNA, 22 nt, Artificial Sequence
  Synthetic
ucgcugguguuccaggugacgc

SEQ ID NO: 158579 - RNA, 23 nt, Artificial Sequence
  Synthetic
cucgcugguguuccaggugacgc

SEQ ID NO: 158580 - RNA, 24 nt, Artificial Sequence
  Synthetic
ucucgcugguguuccaggugacgc

SEQ ID NO: 158581 - RNA, 18 nt, Artificial Sequence
  Synthetic
cccagccucccaaagcgc

SEQ ID NO: 158582 - RNA, 19 nt, Artificial Sequence
  Synthetic
ucccagccucccaaagcgc

SEQ ID NO: 158583 - RNA, 20 nt, Artificial Sequence
  Synthetic
aucccagccucccaaagcgc

SEQ ID NO: 158584 - RNA, 21 nt, Artificial Sequence
  Synthetic
caucccagccucccaaagcgc

SEQ ID NO: 158585 - RNA, 22 nt, Artificial Sequence
  Synthetic
ccaucccagccucccaaagcgc

SEQ ID NO: 158586 - RNA, 23 nt, Artificial Sequence
  Synthetic
cccaucccagccucccaaagcgc

SEQ ID NO: 158587 - RNA, 18 nt, Artificial Sequence
  Synthetic
agcagaucgcuugagcgc

SEQ ID NO: 158588 - RNA, 19 nt, Artificial Sequence
  Synthetic
aagcagaucgcuugagcgc

SEQ ID NO: 158589 - RNA, 20 nt, Artificial Sequence
  Synthetic
caagcagaucgcuugagcgc

SEQ ID NO: 158590 - RNA, 23 nt, Artificial Sequence
  Synthetic
aggcaagcagaucgcuugagcgc

SEQ ID NO: 158591 - RNA, 21 nt, Artificial Sequence
  Synthetic
aggcugaggcaggagaaucgc

SEQ ID NO: 158592 - RNA, 24 nt, Artificial Sequence
  Synthetic
aggaggcugaggcaggagaaucgc

SEQ ID NO: 158593 - RNA, 19 nt, Artificial Sequence
  Synthetic
agcuucccgauaagaucgc

SEQ ID NO: 158594 - RNA, 20 nt, Artificial Sequence
  Synthetic
cagcuucccgauaagaucgc

SEQ ID NO: 158595 - RNA, 22 nt, Artificial Sequence
  Synthetic
agcagcuucccgauaagaucgc

SEQ ID NO: 158596 - RNA, 23 nt, Artificial Sequence
  Synthetic
cagcagcuucccgauaagaucgc

SEQ ID NO: 158597 - RNA, 24 nt, Artificial Sequence
  Synthetic
ucagcagcuucccgauaagaucgc

SEQ ID NO: 158598 - RNA, 18 nt, Artificial Sequence
  Synthetic
cuaagaugaguggaucgc

SEQ ID NO: 158599 - RNA, 21 nt, Artificial Sequence
  Synthetic
aggcuaagaugaguggaucgc

SEQ ID NO: 158600 - RNA, 20 nt, Artificial Sequence
  Synthetic
cgggguuucaccguguucgc

SEQ ID NO: 158601 - RNA, 21 nt, Artificial Sequence
  Synthetic
acgggguuucaccguguucgc

SEQ ID NO: 158602 - RNA, 23 nt, Artificial Sequence
  Synthetic
agacgggguuucaccguguucgc

SEQ ID NO: 158603 - RNA, 18 nt, Artificial Sequence
  Synthetic
uggaaaacaaaaaaaggc

SEQ ID NO: 158604 - RNA, 19 nt, Artificial Sequence
  Synthetic
auggaaaacaaaaaaaggc

SEQ ID NO: 158605 - RNA, 20 nt, Artificial Sequence
  Synthetic
aauggaaaacaaaaaaaggc

SEQ ID NO: 158606 - RNA, 21 nt, Artificial Sequence
  Synthetic
aaauggaaaacaaaaaaaggc

SEQ ID NO: 158607 - RNA, 22 nt, Artificial Sequence
  Synthetic
caaauggaaaacaaaaaaaggc

SEQ ID NO: 158608 - RNA, 24 nt, Artificial Sequence
  Synthetic
agcaaauggaaaacaaaaaaaggc

SEQ ID NO: 158609 - RNA, 18 nt, Artificial Sequence
  Synthetic
agaggaaaucaggaaggc

SEQ ID NO: 158610 - RNA, 20 nt, Artificial Sequence
  Synthetic
agagaggaaaucaggaaggc

SEQ ID NO: 158611 - RNA, 23 nt, Artificial Sequence
  Synthetic
aggaaaguauuaagagauaaggc

SEQ ID NO: 158612 - RNA, 19 nt, Artificial Sequence
  Synthetic
agggaggaagggaacaggc

SEQ ID NO: 158613 - RNA, 22 nt, Artificial Sequence
  Synthetic
aggagggaggaagggaacaggc

SEQ ID NO: 158614 - RNA, 23 nt, Artificial Sequence
  Synthetic
aaggagggaggaagggaacaggc

SEQ ID NO: 158615 - RNA, 18 nt, Artificial Sequence
  Synthetic
agugauagugcuacaggc

SEQ ID NO: 158616 - RNA, 19 nt, Artificial Sequence
  Synthetic
aagugauagugcuacaggc

SEQ ID NO: 158617 - RNA, 21 nt, Artificial Sequence
  Synthetic
caaagugcugggauuacaggc

SEQ ID NO: 158618 - RNA, 22 nt, Artificial Sequence
  Synthetic
ucaaagugcugggauuacaggc

SEQ ID NO: 158619 - RNA, 23 nt, Artificial Sequence
  Synthetic
cucaaagugcugggauuacaggc

SEQ ID NO: 158620 - RNA, 24 nt, Artificial Sequence
  Synthetic
ucucaaagugcugggauuacaggc

SEQ ID NO: 158621 - RNA, 18 nt, Artificial Sequence
  Synthetic
ucgcucugucaaccaggc

SEQ ID NO: 158622 - RNA, 19 nt, Artificial Sequence
  Synthetic
cucgcucugucaaccaggc

SEQ ID NO: 158623 - RNA, 20 nt, Artificial Sequence
  Synthetic
ucucgcucugucaaccaggc

SEQ ID NO: 158624 - RNA, 22 nt, Artificial Sequence
  Synthetic
agucucgcucugucaaccaggc

SEQ ID NO: 158625 - RNA, 18 nt, Artificial Sequence
  Synthetic
cuagcucugucaccaggc

SEQ ID NO: 158626 - RNA, 19 nt, Artificial Sequence
  Synthetic
ucuagcucugucaccaggc

SEQ ID NO: 158627 - RNA, 21 nt, Artificial Sequence
  Synthetic
agucuagcucugucaccaggc

SEQ ID NO: 158628 - RNA, 24 nt, Artificial Sequence
  Synthetic
cggagucuagcucugucaccaggc

SEQ ID NO: 158629 - RNA, 18 nt, Artificial Sequence
  Synthetic
cucgcucugucaccaggc

SEQ ID NO: 158630 - RNA, 19 nt, Artificial Sequence
  Synthetic
ucucgcucugucaccaggc

SEQ ID NO: 158631 - RNA, 21 nt, Artificial Sequence
  Synthetic
agucucgcucugucaccaggc

SEQ ID NO: 158632 - RNA, 23 nt, Artificial Sequence
  Synthetic
agagucucgcucugucaccaggc

SEQ ID NO: 158633 - RNA, 24 nt, Artificial Sequence
  Synthetic
cagagucucgcucugucaccaggc

SEQ ID NO: 158634 - RNA, 18 nt, Artificial Sequence
  Synthetic
ucugcucuuucaccaggc

SEQ ID NO: 158635 - RNA, 20 nt, Artificial Sequence
  Synthetic
agucugcucuuucaccaggc

SEQ ID NO: 158636 - RNA, 22 nt, Artificial Sequence
  Synthetic
agagucugcucuuucaccaggc

SEQ ID NO: 158637 - RNA, 23 nt, Artificial Sequence
  Synthetic
cagagucugcucuuucaccaggc

SEQ ID NO: 158638 - RNA, 24 nt, Artificial Sequence
  Synthetic
acagagucugcucuuucaccaggc

SEQ ID NO: 158639 - RNA, 18 nt, Artificial Sequence
  Synthetic
ugcucuuguaacccaggc

SEQ ID NO: 158640 - RNA, 19 nt, Artificial Sequence
  Synthetic
uugcucuuguaacccaggc

SEQ ID NO: 158641 - RNA, 20 nt, Artificial Sequence
  Synthetic
uuugcucuuguaacccaggc

SEQ ID NO: 158642 - RNA, 21 nt, Artificial Sequence
  Synthetic
uuuugcucuuguaacccaggc

SEQ ID NO: 158643 - RNA, 23 nt, Artificial Sequence
  Synthetic
aguuuugcucuuguaacccaggc

SEQ ID NO: 158644 - RNA, 18 nt, Artificial Sequence
  Synthetic
ucacucugccacccaggc

SEQ ID NO: 158645 - RNA, 19 nt, Artificial Sequence
  Synthetic
cucacucugccacccaggc

SEQ ID NO: 158646 - RNA, 20 nt, Artificial Sequence
  Synthetic
ucucacucugccacccaggc

SEQ ID NO: 158647 - RNA, 24 nt, Artificial Sequence
  Synthetic
agggucucacucugccacccaggc

SEQ ID NO: 158648 - RNA, 18 nt, Artificial Sequence
  Synthetic
uugaucuaucacccaggc

SEQ ID NO: 158649 - RNA, 19 nt, Artificial Sequence
  Synthetic
cuugaucuaucacccaggc

SEQ ID NO: 158650 - RNA, 20 nt, Artificial Sequence
  Synthetic
ucuugaucuaucacccaggc

SEQ ID NO: 158651 - RNA, 22 nt, Artificial Sequence
  Synthetic
agucuugaucuaucacccaggc

SEQ ID NO: 158652 - RNA, 24 nt, Artificial Sequence
  Synthetic
agagucuugaucuaucacccaggc

SEQ ID NO: 158653 - RNA, 18 nt, Artificial Sequence
  Synthetic
ucacuacgucacccaggc

SEQ ID NO: 158654 - RNA, 19 nt, Artificial Sequence
  Synthetic
cucacuacgucacccaggc

SEQ ID NO: 158655 - RNA, 20 nt, Artificial Sequence
  Synthetic
ucucacuacgucacccaggc

SEQ ID NO: 158656 - RNA, 22 nt, Artificial Sequence
  Synthetic
agucucacuacgucacccaggc

SEQ ID NO: 158657 - RNA, 18 nt, Artificial Sequence
  Synthetic
ucacucugucacccaggc

SEQ ID NO: 158658 - RNA, 19 nt, Artificial Sequence
  Synthetic
cucacucugucacccaggc

SEQ ID NO: 158659 - RNA, 20 nt, Artificial Sequence
  Synthetic
ccucacucugucacccaggc

SEQ ID NO: 158660 - RNA, 21 nt, Artificial Sequence
  Synthetic
uccucacucugucacccaggc

SEQ ID NO: 158661 - RNA, 22 nt, Artificial Sequence
  Synthetic
uuccucacucugucacccaggc

SEQ ID NO: 158662 - RNA, 23 nt, Artificial Sequence
  Synthetic
uuuccucacucugucacccaggc

SEQ ID NO: 158663 - RNA, 24 nt, Artificial Sequence
  Synthetic
uuuuccucacucugucacccaggc

SEQ ID NO: 158664 - RNA, 21 nt, Artificial Sequence
  Synthetic
aucucacucugucacccaggc

SEQ ID NO: 158665 - RNA, 24 nt, Artificial Sequence
  Synthetic
aggaucucacucugucacccaggc

SEQ ID NO: 158666 - RNA, 18 nt, Artificial Sequence
  Synthetic
uagcucugucacccaggc

SEQ ID NO: 158667 - RNA, 19 nt, Artificial Sequence
  Synthetic
cuagcucugucacccaggc

SEQ ID NO: 158668 - RNA, 20 nt, Artificial Sequence
  Synthetic
ucuagcucugucacccaggc

SEQ ID NO: 158669 - RNA, 22 nt, Artificial Sequence
  Synthetic
agucuagcucugucacccaggc

SEQ ID NO: 158670 - RNA, 22 nt, Artificial Sequence
  Synthetic
agucucgcucugucacccaggc

SEQ ID NO: 158671 - RNA, 24 nt, Artificial Sequence
  Synthetic
agagucucgcucugucacccaggc

SEQ ID NO: 158672 - RNA, 23 nt, Artificial Sequence
  Synthetic
uagucucgcucugucacccaggc

SEQ ID NO: 158673 - RNA, 20 nt, Artificial Sequence
  Synthetic
ccuugcucugucacccaggc

SEQ ID NO: 158674 - RNA, 22 nt, Artificial Sequence
  Synthetic
agccuugcucugucacccaggc

SEQ ID NO: 158675 - RNA, 22 nt, Artificial Sequence
  Synthetic
agucuugcucugucacccaggc

SEQ ID NO: 158676 - RNA, 24 nt, Artificial Sequence
  Synthetic
agagucuugcucugucacccaggc

SEQ ID NO: 158677 - RNA, 18 nt, Artificial Sequence
  Synthetic
ucacugugucacccaggc

SEQ ID NO: 158678 - RNA, 19 nt, Artificial Sequence
  Synthetic
cucacugugucacccaggc

SEQ ID NO: 158679 - RNA, 20 nt, Artificial Sequence
  Synthetic
ucucacugugucacccaggc

SEQ ID NO: 158680 - RNA, 22 nt, Artificial Sequence
  Synthetic
agucucacugugucacccaggc

SEQ ID NO: 158681 - RNA, 18 nt, Artificial Sequence
  Synthetic
ucacuuugucacccaggc

SEQ ID NO: 158682 - RNA, 19 nt, Artificial Sequence
  Synthetic
cucacuuugucacccaggc

SEQ ID NO: 158683 - RNA, 20 nt, Artificial Sequence
  Synthetic
ucucacuuugucacccaggc

SEQ ID NO: 158684 - RNA, 22 nt, Artificial Sequence
  Synthetic
agucucacuuugucacccaggc

SEQ ID NO: 158685 - RNA, 23 nt, Artificial Sequence
  Synthetic
aagucucacuuugucacccaggc

SEQ ID NO: 158686 - RNA, 18 nt, Artificial Sequence
  Synthetic
ucccucugucgcccaggc

SEQ ID NO: 158687 - RNA, 19 nt, Artificial Sequence
  Synthetic
cucccucugucgcccaggc

SEQ ID NO: 158688 - RNA, 20 nt, Artificial Sequence
  Synthetic
ucucccucugucgcccaggc

SEQ ID NO: 158689 - RNA, 22 nt, Artificial Sequence
  Synthetic
agucucccucugucgcccaggc

SEQ ID NO: 158690 - RNA, 22 nt, Artificial Sequence
  Synthetic
agucucgcucugucgcccaggc

SEQ ID NO: 158691 - RNA, 23 nt, Artificial Sequence
  Synthetic
cagucucgcucugucgcccaggc

SEQ ID NO: 158692 - RNA, 24 nt, Artificial Sequence
  Synthetic
acagucucgcucugucgcccaggc

SEQ ID NO: 158693 - RNA, 18 nt, Artificial Sequence
  Synthetic
uggcucugucgcccaggc

SEQ ID NO: 158694 - RNA, 19 nt, Artificial Sequence
  Synthetic
cuggcucugucgcccaggc

SEQ ID NO: 158695 - RNA, 20 nt, Artificial Sequence
  Synthetic
ucuggcucugucgcccaggc

SEQ ID NO: 158696 - RNA, 22 nt, Artificial Sequence
  Synthetic
agucuggcucugucgcccaggc

SEQ ID NO: 158697 - RNA, 18 nt, Artificial Sequence
  Synthetic
uugcucugucgcccaggc

SEQ ID NO: 158698 - RNA, 19 nt, Artificial Sequence
  Synthetic
cuugcucugucgcccaggc

SEQ ID NO: 158699 - RNA, 20 nt, Artificial Sequence
  Synthetic
ucuugcucugucgcccaggc

SEQ ID NO: 158700 - RNA, 22 nt, Artificial Sequence
  Synthetic
agucuugcucugucgcccaggc

SEQ ID NO: 158701 - RNA, 18 nt, Artificial Sequence
  Synthetic
ucuuucugucgcccaggc

SEQ ID NO: 158702 - RNA, 19 nt, Artificial Sequence
  Synthetic
cucuuucugucgcccaggc

SEQ ID NO: 158703 - RNA, 20 nt, Artificial Sequence
  Synthetic
ccucuuucugucgcccaggc

SEQ ID NO: 158704 - RNA, 24 nt, Artificial Sequence
  Synthetic
agggccucuuucugucgcccaggc

SEQ ID NO: 158705 - RNA, 18 nt, Artificial Sequence
  Synthetic
cgcucgugucgcccaggc

SEQ ID NO: 158706 - RNA, 19 nt, Artificial Sequence
  Synthetic
ucgcucgugucgcccaggc

SEQ ID NO: 158707 - RNA, 20 nt, Artificial Sequence
  Synthetic
uucgcucgugucgcccaggc

SEQ ID NO: 158708 - RNA, 21 nt, Artificial Sequence
  Synthetic
uuucgcucgugucgcccaggc

SEQ ID NO: 158709 - RNA, 23 nt, Artificial Sequence
  Synthetic
aguuucgcucgugucgcccaggc

SEQ ID NO: 158710 - RNA, 18 nt, Artificial Sequence
  Synthetic
ugcucuugucgcccaggc

SEQ ID NO: 158711 - RNA, 19 nt, Artificial Sequence
  Synthetic
uugcucuugucgcccaggc

SEQ ID NO: 158712 - RNA, 20 nt, Artificial Sequence
  Synthetic
uuugcucuugucgcccaggc

SEQ ID NO: 158713 - RNA, 21 nt, Artificial Sequence
  Synthetic
uuuugcucuugucgcccaggc

SEQ ID NO: 158714 - RNA, 23 nt, Artificial Sequence
  Synthetic
aguuuugcucuugucgcccaggc

SEQ ID NO: 158715 - RNA, 18 nt, Artificial Sequence
  Synthetic
cacucuugcugcccaggc

SEQ ID NO: 158716 - RNA, 19 nt, Artificial Sequence
  Synthetic
ucacucuugcugcccaggc

SEQ ID NO: 158717 - RNA, 20 nt, Artificial Sequence
  Synthetic
uucacucuugcugcccaggc

SEQ ID NO: 158718 - RNA, 21 nt, Artificial Sequence
  Synthetic
uuucacucuugcugcccaggc

SEQ ID NO: 158719 - RNA, 23 nt, Artificial Sequence
  Synthetic
aguuucacucuugcugcccaggc

SEQ ID NO: 158720 - RNA, 18 nt, Artificial Sequence
  Synthetic
ucacucgguugcccaggc

SEQ ID NO: 158721 - RNA, 19 nt, Artificial Sequence
  Synthetic
cucacucgguugcccaggc

SEQ ID NO: 158722 - RNA, 20 nt, Artificial Sequence
  Synthetic
ucucacucgguugcccaggc

SEQ ID NO: 158723 - RNA, 22 nt, Artificial Sequence
  Synthetic
agucucacucgguugcccaggc

SEQ ID NO: 158724 - RNA, 24 nt, Artificial Sequence
  Synthetic
agagucucacucgguugcccaggc

SEQ ID NO: 158725 - RNA, 18 nt, Artificial Sequence
  Synthetic
ucuugcuguugcccaggc

SEQ ID NO: 158726 - RNA, 19 nt, Artificial Sequence
  Synthetic
aucuugcuguugcccaggc

SEQ ID NO: 158727 - RNA, 20 nt, Artificial Sequence
  Synthetic
aaucuugcuguugcccaggc

SEQ ID NO: 158728 - RNA, 23 nt, Artificial Sequence
  Synthetic
uggaaucuugcuguugcccaggc

SEQ ID NO: 158729 - RNA, 24 nt, Artificial Sequence
  Synthetic
auggaaucuugcuguugcccaggc

SEQ ID NO: 158730 - RNA, 24 nt, Artificial Sequence
  Synthetic
agggucucacucuguugcccaggc

SEQ ID NO: 158731 - RNA, 18 nt, Artificial Sequence
  Synthetic
ucgcucuguugcccaggc

SEQ ID NO: 158732 - RNA, 19 nt, Artificial Sequence
  Synthetic
cucgcucuguugcccaggc

SEQ ID NO: 158733 - RNA, 20 nt, Artificial Sequence
  Synthetic
ucucgcucuguugcccaggc

SEQ ID NO: 158734 - RNA, 22 nt, Artificial Sequence
  Synthetic
agucucgcucuguugcccaggc

SEQ ID NO: 158735 - RNA, 22 nt, Artificial Sequence
  Synthetic
agucuugcucuguugcccaggc

SEQ ID NO: 158736 - RNA, 21 nt, Artificial Sequence
  Synthetic
uuuugcucuuguugcccaggc

SEQ ID NO: 158737 - RNA, 23 nt, Artificial Sequence
  Synthetic
aguuuugcucuuguugcccaggc

SEQ ID NO: 158738 - RNA, 18 nt, Artificial Sequence
  Synthetic
cucacucugucgccaggc

SEQ ID NO: 158739 - RNA, 19 nt, Artificial Sequence
  Synthetic
ucucacucugucgccaggc

SEQ ID NO: 158740 - RNA, 21 nt, Artificial Sequence
  Synthetic
agucucacucugucgccaggc

SEQ ID NO: 158741 - RNA, 23 nt, Artificial Sequence
  Synthetic
agagucucacucugucgccaggc

SEQ ID NO: 158742 - RNA, 24 nt, Artificial Sequence
  Synthetic
cagagucucacucugucgccaggc

SEQ ID NO: 158743 - RNA, 18 nt, Artificial Sequence
  Synthetic
cuugcucugucgccaggc

SEQ ID NO: 158744 - RNA, 19 nt, Artificial Sequence
  Synthetic
ucuugcucugucgccaggc

SEQ ID NO: 158745 - RNA, 21 nt, Artificial Sequence
  Synthetic
agucuugcucugucgccaggc

SEQ ID NO: 158746 - RNA, 23 nt, Artificial Sequence
  Synthetic
agagucuugcucugucgccaggc

SEQ ID NO: 158747 - RNA, 24 nt, Artificial Sequence
  Synthetic
uagagucuugcucugucgccaggc

SEQ ID NO: 158748 - RNA, 19 nt, Artificial Sequence
  Synthetic
uguugcucuguugccaggc

SEQ ID NO: 158749 - RNA, 21 nt, Artificial Sequence
  Synthetic
aguguugcucuguugccaggc

SEQ ID NO: 158750 - RNA, 23 nt, Artificial Sequence
  Synthetic
agaguguugcucuguugccaggc

SEQ ID NO: 158751 - RNA, 24 nt, Artificial Sequence
  Synthetic
cagaguguugcucuguugccaggc

SEQ ID NO: 158752 - RNA, 18 nt, Artificial Sequence
  Synthetic
ucacucugucauccaggc

SEQ ID NO: 158753 - RNA, 19 nt, Artificial Sequence
  Synthetic
cucacucugucauccaggc

SEQ ID NO: 158754 - RNA, 20 nt, Artificial Sequence
  Synthetic
ucucacucugucauccaggc

SEQ ID NO: 158755 - RNA, 24 nt, Artificial Sequence
  Synthetic
agggucucacucugucauccaggc

SEQ ID NO: 158756 - RNA, 18 nt, Artificial Sequence
  Synthetic
ucgcucugucacucaggc

SEQ ID NO: 158757 - RNA, 19 nt, Artificial Sequence
  Synthetic
cucgcucugucacucaggc

SEQ ID NO: 158758 - RNA, 20 nt, Artificial Sequence
  Synthetic
ucucgcucugucacucaggc

SEQ ID NO: 158759 - RNA, 22 nt, Artificial Sequence
  Synthetic
agucucgcucugucacucaggc

SEQ ID NO: 158760 - RNA, 18 nt, Artificial Sequence
  Synthetic
ucuuucuucugaggaggc

SEQ ID NO: 158761 - RNA, 19 nt, Artificial Sequence
  Synthetic
uucuuucuucugaggaggc

SEQ ID NO: 158762 - RNA, 20 nt, Artificial Sequence
  Synthetic
auucuuucuucugaggaggc

SEQ ID NO: 158763 - RNA, 21 nt, Artificial Sequence
  Synthetic
aauucuuucuucugaggaggc

SEQ ID NO: 158764 - RNA, 23 nt, Artificial Sequence
  Synthetic
cgaauucuuucuucugaggaggc

SEQ ID NO: 158765 - RNA, 24 nt, Artificial Sequence
  Synthetic
ucgaauucuuucuucugaggaggc

SEQ ID NO: 158766 - RNA, 21 nt, Artificial Sequence
  Synthetic
cacauuggauaaaacugaggc

SEQ ID NO: 158767 - RNA, 22 nt, Artificial Sequence
  Synthetic
ucacauuggauaaaacugaggc

SEQ ID NO: 158768 - RNA, 23 nt, Artificial Sequence
  Synthetic
uucacauuggauaaaacugaggc

SEQ ID NO: 158769 - RNA, 24 nt, Artificial Sequence
  Synthetic
uuucacauuggauaaaacugaggc

SEQ ID NO: 158770 - RNA, 19 nt, Artificial Sequence
  Synthetic
aguacaaaggccuugaggc

SEQ ID NO: 158771 - RNA, 20 nt, Artificial Sequence
  Synthetic
aaguacaaaggccuugaggc

SEQ ID NO: 158772 - RNA, 21 nt, Artificial Sequence
  Synthetic
caaguacaaaggccuugaggc

SEQ ID NO: 158773 - RNA, 22 nt, Artificial Sequence
  Synthetic
acaaguacaaaggccuugaggc

SEQ ID NO: 158774 - RNA, 23 nt, Artificial Sequence
  Synthetic
aacaaguacaaaggccuugaggc

SEQ ID NO: 158775 - RNA, 24 nt, Artificial Sequence
  Synthetic
aaacaaguacaaaggccuugaggc

SEQ ID NO: 158776 - RNA, 18 nt, Artificial Sequence
  Synthetic
uagaacuggguaauaggc

SEQ ID NO: 158777 - RNA, 19 nt, Artificial Sequence
  Synthetic
uuagaacuggguaauaggc

SEQ ID NO: 158778 - RNA, 20 nt, Artificial Sequence
  Synthetic
uuuagaacuggguaauaggc

SEQ ID NO: 158779 - RNA, 21 nt, Artificial Sequence
  Synthetic
cuuuagaacuggguaauaggc

SEQ ID NO: 158780 - RNA, 22 nt, Artificial Sequence
  Synthetic
acuuuagaacuggguaauaggc

SEQ ID NO: 158781 - RNA, 23 nt, Artificial Sequence
  Synthetic
aacuuuagaacuggguaauaggc

SEQ ID NO: 158782 - RNA, 24 nt, Artificial Sequence
  Synthetic
caacuuuagaacuggguaauaggc

SEQ ID NO: 158783 - RNA, 18 nt, Artificial Sequence
  Synthetic
acacagagagagauaggc

SEQ ID NO: 158784 - RNA, 20 nt, Artificial Sequence
  Synthetic
agacacagagagagauaggc

SEQ ID NO: 158785 - RNA, 22 nt, Artificial Sequence
  Synthetic
agagacacagagagagauaggc

SEQ ID NO: 158786 - RNA, 24 nt, Artificial Sequence
  Synthetic
agagagacacagagagagauaggc

SEQ ID NO: 158787 - RNA, 19 nt, Artificial Sequence
  Synthetic
aggaaugggagagauaggc

SEQ ID NO: 158788 - RNA, 20 nt, Artificial Sequence
  Synthetic
uaggaaugggagagauaggc

SEQ ID NO: 158789 - RNA, 22 nt, Artificial Sequence
  Synthetic
aguaggaaugggagagauaggc

SEQ ID NO: 158790 - RNA, 23 nt, Artificial Sequence
  Synthetic
aaguaggaaugggagagauaggc

SEQ ID NO: 158791 - RNA, 24 nt, Artificial Sequence
  Synthetic
aaaguaggaaugggagagauaggc

SEQ ID NO: 158792 - RNA, 18 nt, Artificial Sequence
  Synthetic
ucacucuguccccuaggc

SEQ ID NO: 158793 - RNA, 19 nt, Artificial Sequence
  Synthetic
cucacucuguccccuaggc

SEQ ID NO: 158794 - RNA, 20 nt, Artificial Sequence
  Synthetic
ucucacucuguccccuaggc

SEQ ID NO: 158795 - RNA, 22 nt, Artificial Sequence
  Synthetic
agucucacucuguccccuaggc

SEQ ID NO: 158796 - RNA, 24 nt, Artificial Sequence
  Synthetic
agagucucacucuguccccuaggc

SEQ ID NO: 158797 - RNA, 18 nt, Artificial Sequence
  Synthetic
ugcucuugucgccccggc

SEQ ID NO: 158798 - RNA, 19 nt, Artificial Sequence
  Synthetic
uugcucuugucgccccggc

SEQ ID NO: 158799 - RNA, 20 nt, Artificial Sequence
  Synthetic
uuugcucuugucgccccggc

SEQ ID NO: 158800 - RNA, 21 nt, Artificial Sequence
  Synthetic
uuuugcucuugucgccccggc

SEQ ID NO: 158801 - RNA, 23 nt, Artificial Sequence
  Synthetic
aguuuugcucuugucgccccggc

SEQ ID NO: 158802 - RNA, 18 nt, Artificial Sequence
  Synthetic
cucacucugucgcccggc

SEQ ID NO: 158803 - RNA, 19 nt, Artificial Sequence
  Synthetic
ucucacucugucgcccggc

SEQ ID NO: 158804 - RNA, 21 nt, Artificial Sequence
  Synthetic
agucucacucugucgcccggc

SEQ ID NO: 158805 - RNA, 24 nt, Artificial Sequence
  Synthetic
cggagucucacucugucgcccggc

SEQ ID NO: 158806 - RNA, 21 nt, Artificial Sequence
  Synthetic
acugcgaauagagggcagggc

SEQ ID NO: 158807 - RNA, 22 nt, Artificial Sequence
  Synthetic
cacugcgaauagagggcagggc

SEQ ID NO: 158808 - RNA, 23 nt, Artificial Sequence
  Synthetic
ccacugcgaauagagggcagggc

SEQ ID NO: 158809 - RNA, 18 nt, Artificial Sequence
  Synthetic
uggcucuguugcccgggc

SEQ ID NO: 158810 - RNA, 19 nt, Artificial Sequence
  Synthetic
cuggcucuguugcccgggc

SEQ ID NO: 158811 - RNA, 20 nt, Artificial Sequence
  Synthetic
ucuggcucuguugcccgggc

SEQ ID NO: 158812 - RNA, 22 nt, Artificial Sequence
  Synthetic
agucuggcucuguugcccgggc

SEQ ID NO: 158813 - RNA, 24 nt, Artificial Sequence
  Synthetic
agagucuggcucuguugcccgggc

SEQ ID NO: 158814 - RNA, 18 nt, Artificial Sequence
  Synthetic
ucagugguuuccaggggc

SEQ ID NO: 158815 - RNA, 19 nt, Artificial Sequence
  Synthetic
aucagugguuuccaggggc

SEQ ID NO: 158816 - RNA, 20 nt, Artificial Sequence
  Synthetic
uaucagugguuuccaggggc

SEQ ID NO: 158817 - RNA, 21 nt, Artificial Sequence
  Synthetic
cuaucagugguuuccaggggc

SEQ ID NO: 158818 - RNA, 22 nt, Artificial Sequence
  Synthetic
ccuaucagugguuuccaggggc

SEQ ID NO: 158819 - RNA, 23 nt, Artificial Sequence
  Synthetic
accuaucagugguuuccaggggc

SEQ ID NO: 158820 - RNA, 24 nt, Artificial Sequence
  Synthetic
uaccuaucagugguuuccaggggc

SEQ ID NO: 158821 - RNA, 18 nt, Artificial Sequence
  Synthetic
cuguuggggguggggggc

SEQ ID NO: 158822 - RNA, 19 nt, Artificial Sequence
  Synthetic
ccuguuggggguggggggc

SEQ ID NO: 158823 - RNA, 21 nt, Artificial Sequence
  Synthetic
ugccuguuggggguggggggc

SEQ ID NO: 158824 - RNA, 24 nt, Artificial Sequence
  Synthetic
uggugccuguuggggguggggggc

SEQ ID NO: 158825 - RNA, 19 nt, Artificial Sequence
  Synthetic
agugcaaaggcccuggggc

SEQ ID NO: 158826 - RNA, 20 nt, Artificial Sequence
  Synthetic
aagugcaaaggcccuggggc

SEQ ID NO: 158827 - RNA, 21 nt, Artificial Sequence
  Synthetic
caagugcaaaggcccuggggc

SEQ ID NO: 158828 - RNA, 23 nt, Artificial Sequence
  Synthetic
agcaagugcaaaggcccuggggc

SEQ ID NO: 158829 - RNA, 24 nt, Artificial Sequence
  Synthetic
cagcaagugcaaaggcccuggggc

SEQ ID NO: 158830 - RNA, 18 nt, Artificial Sequence
  Synthetic
ccugauuuuaaaaugggc

SEQ ID NO: 158831 - RNA, 19 nt, Artificial Sequence
  Synthetic
accugauuuuaaaaugggc

SEQ ID NO: 158832 - RNA, 20 nt, Artificial Sequence
  Synthetic
aaccugauuuuaaaaugggc

SEQ ID NO: 158833 - RNA, 21 nt, Artificial Sequence
  Synthetic
uaaccugauuuuaaaaugggc

SEQ ID NO: 158834 - RNA, 22 nt, Artificial Sequence
  Synthetic
uuaaccugauuuuaaaaugggc

SEQ ID NO: 158835 - RNA, 23 nt, Artificial Sequence
  Synthetic
auuaaccugauuuuaaaaugggc

SEQ ID NO: 158836 - RNA, 24 nt, Artificial Sequence
  Synthetic
aauuaaccugauuuuaaaaugggc

SEQ ID NO: 158837 - RNA, 18 nt, Artificial Sequence
  Synthetic
agaauuaacuacaugggc

SEQ ID NO: 158838 - RNA, 19 nt, Artificial Sequence
  Synthetic
aagaauuaacuacaugggc

SEQ ID NO: 158839 - RNA, 20 nt, Artificial Sequence
  Synthetic
caagaauuaacuacaugggc

SEQ ID NO: 158840 - RNA, 21 nt, Artificial Sequence
  Synthetic
acaagaauuaacuacaugggc

SEQ ID NO: 158841 - RNA, 23 nt, Artificial Sequence
  Synthetic
agacaagaauuaacuacaugggc

SEQ ID NO: 158842 - RNA, 24 nt, Artificial Sequence
  Synthetic
aagacaagaauuaacuacaugggc

SEQ ID NO: 158843 - RNA, 19 nt, Artificial Sequence
  Synthetic
ugagcaggaagcucugggc

SEQ ID NO: 158844 - RNA, 20 nt, Artificial Sequence
  Synthetic
uugagcaggaagcucugggc

SEQ ID NO: 158845 - RNA, 18 nt, Artificial Sequence
  Synthetic
aaagcauagugucugggc

SEQ ID NO: 158846 - RNA, 19 nt, Artificial Sequence
  Synthetic
aaaagcauagugucugggc

SEQ ID NO: 158847 - RNA, 23 nt, Artificial Sequence
  Synthetic
ugggaaaagcauagugucugggc

SEQ ID NO: 158848 - RNA, 18 nt, Artificial Sequence
  Synthetic
aaucauauagacgugggc

SEQ ID NO: 158849 - RNA, 19 nt, Artificial Sequence
  Synthetic
aaaucauauagacgugggc

SEQ ID NO: 158850 - RNA, 20 nt, Artificial Sequence
  Synthetic
aaaaucauauagacgugggc

SEQ ID NO: 158851 - RNA, 18 nt, Artificial Sequence
  Synthetic
ucacucugucaugugggc

SEQ ID NO: 158852 - RNA, 19 nt, Artificial Sequence
  Synthetic
cucacucugucaugugggc

SEQ ID NO: 158853 - RNA, 20 nt, Artificial Sequence
  Synthetic
ucucacucugucaugugggc

SEQ ID NO: 158854 - RNA, 24 nt, Artificial Sequence
  Synthetic
agggucucacucugucaugugggc

SEQ ID NO: 158855 - RNA, 19 nt, Artificial Sequence
  Synthetic
ugaggucauuugguugggc

SEQ ID NO: 158856 - RNA, 20 nt, Artificial Sequence
  Synthetic
augaggucauuugguugggc

SEQ ID NO: 158857 - RNA, 21 nt, Artificial Sequence
  Synthetic
aaugaggucauuugguugggc

SEQ ID NO: 158858 - RNA, 22 nt, Artificial Sequence
  Synthetic
aaaugaggucauuugguugggc

SEQ ID NO: 158859 - RNA, 23 nt, Artificial Sequence
  Synthetic
aaaaugaggucauuugguugggc

SEQ ID NO: 158860 - RNA, 24 nt, Artificial Sequence
  Synthetic
uaaaaugaggucauuugguugggc

SEQ ID NO: 158861 - RNA, 19 nt, Artificial Sequence
  Synthetic
uggaggaagugauuauggc

SEQ ID NO: 158862 - RNA, 20 nt, Artificial Sequence
  Synthetic
auggaggaagugauuauggc

SEQ ID NO: 158863 - RNA, 18 nt, Artificial Sequence
  Synthetic
cacuguuguugcccuggc

SEQ ID NO: 158864 - RNA, 19 nt, Artificial Sequence
  Synthetic
ucacuguuguugcccuggc

SEQ ID NO: 158865 - RNA, 20 nt, Artificial Sequence
  Synthetic
uucacuguuguugcccuggc

SEQ ID NO: 158866 - RNA, 21 nt, Artificial Sequence
  Synthetic
uuucacuguuguugcccuggc

SEQ ID NO: 158867 - RNA, 23 nt, Artificial Sequence
  Synthetic
aguuucacuguuguugcccuggc

SEQ ID NO: 158868 - RNA, 18 nt, Artificial Sequence
  Synthetic
aaaauaacaugugcuggc

SEQ ID NO: 158869 - RNA, 20 nt, Artificial Sequence
  Synthetic
agaaaauaacaugugcuggc

SEQ ID NO: 158870 - RNA, 21 nt, Artificial Sequence
  Synthetic
cagaaaauaacaugugcuggc

SEQ ID NO: 158871 - RNA, 22 nt, Artificial Sequence
  Synthetic
acagaaaauaacaugugcuggc

SEQ ID NO: 158872 - RNA, 23 nt, Artificial Sequence
  Synthetic
aacagaaaauaacaugugcuggc

SEQ ID NO: 158873 - RNA, 24 nt, Artificial Sequence
  Synthetic
aaacagaaaauaacaugugcuggc

SEQ ID NO: 158874 - RNA, 18 nt, Artificial Sequence
  Synthetic
aucagccucccaaguggc

SEQ ID NO: 158875 - RNA, 19 nt, Artificial Sequence
  Synthetic
caucagccucccaaguggc

SEQ ID NO: 158876 - RNA, 21 nt, Artificial Sequence
  Synthetic
ugcaucagccucccaaguggc

SEQ ID NO: 158877 - RNA, 22 nt, Artificial Sequence
  Synthetic
cugcaucagccucccaaguggc

SEQ ID NO: 158878 - RNA, 23 nt, Artificial Sequence
  Synthetic
ccugcaucagccucccaaguggc

SEQ ID NO: 158879 - RNA, 24 nt, Artificial Sequence
  Synthetic
uccugcaucagccucccaaguggc

SEQ ID NO: 158880 - RNA, 21 nt, Artificial Sequence
  Synthetic
acggggguuucaccuuguggc

SEQ ID NO: 158881 - RNA, 23 nt, Artificial Sequence
  Synthetic
agacggggguuucaccuuguggc

SEQ ID NO: 158882 - RNA, 20 nt, Artificial Sequence
  Synthetic
cggggucucaccauguuggc

SEQ ID NO: 158883 - RNA, 21 nt, Artificial Sequence
  Synthetic
acggggucucaccauguuggc

SEQ ID NO: 158884 - RNA, 23 nt, Artificial Sequence
  Synthetic
agacggggucucaccauguuggc

SEQ ID NO: 158885 - RNA, 24 nt, Artificial Sequence
  Synthetic
aagacggggucucaccauguuggc

SEQ ID NO: 158886 - RNA, 19 nt, Artificial Sequence
  Synthetic
cgggauucaccauguuggc

SEQ ID NO: 158887 - RNA, 20 nt, Artificial Sequence
  Synthetic
acgggauucaccauguuggc

SEQ ID NO: 158888 - RNA, 22 nt, Artificial Sequence
  Synthetic
agacgggauucaccauguuggc

SEQ ID NO: 158889 - RNA, 24 nt, Artificial Sequence
  Synthetic
agagacgggauucaccauguuggc

SEQ ID NO: 158890 - RNA, 20 nt, Artificial Sequence
  Synthetic
cgggauuucaccauguuggc

SEQ ID NO: 158891 - RNA, 21 nt, Artificial Sequence
  Synthetic
acgggauuucaccauguuggc

SEQ ID NO: 158892 - RNA, 23 nt, Artificial Sequence
  Synthetic
agacgggauuucaccauguuggc

SEQ ID NO: 158893 - RNA, 19 nt, Artificial Sequence
  Synthetic
agaguuucaccauguuggc

SEQ ID NO: 158894 - RNA, 20 nt, Artificial Sequence
  Synthetic
uagaguuucaccauguuggc

SEQ ID NO: 158895 - RNA, 21 nt, Artificial Sequence
  Synthetic
auagaguuucaccauguuggc

SEQ ID NO: 158896 - RNA, 23 nt, Artificial Sequence
  Synthetic
agauagaguuucaccauguuggc

SEQ ID NO: 158897 - RNA, 21 nt, Artificial Sequence
  Synthetic
acgggguuucaccauguuggc

SEQ ID NO: 158898 - RNA, 23 nt, Artificial Sequence
  Synthetic
agacgggguuucaccauguuggc

SEQ ID NO: 158899 - RNA, 20 nt, Artificial Sequence
  Synthetic
ugggguuucgccauguuggc

SEQ ID NO: 158900 - RNA, 21 nt, Artificial Sequence
  Synthetic
augggguuucgccauguuggc

SEQ ID NO: 158901 - RNA, 23 nt, Artificial Sequence
  Synthetic
agaugggguuucgccauguuggc

SEQ ID NO: 158902 - RNA, 20 nt, Artificial Sequence
  Synthetic
cggaguuuugccauguuggc

SEQ ID NO: 158903 - RNA, 21 nt, Artificial Sequence
  Synthetic
acggaguuuugccauguuggc

SEQ ID NO: 158904 - RNA, 23 nt, Artificial Sequence
  Synthetic
agacggaguuuugccauguuggc

SEQ ID NO: 158905 - RNA, 20 nt, Artificial Sequence
  Synthetic
ugggguuucaucauguuggc

SEQ ID NO: 158906 - RNA, 21 nt, Artificial Sequence
  Synthetic
augggguuucaucauguuggc

SEQ ID NO: 158907 - RNA, 23 nt, Artificial Sequence
  Synthetic
agaugggguuucaucauguuggc

SEQ ID NO: 158908 - RNA, 18 nt, Artificial Sequence
  Synthetic
cuccuguacacuguuggc

SEQ ID NO: 158909 - RNA, 19 nt, Artificial Sequence
  Synthetic
acuccuguacacuguuggc

SEQ ID NO: 158910 - RNA, 24 nt, Artificial Sequence
  Synthetic
aggggacuccuguacacuguuggc

SEQ ID NO: 158911 - RNA, 18 nt, Artificial Sequence
  Synthetic
aagauaaaaaguguuggc

SEQ ID NO: 158912 - RNA, 19 nt, Artificial Sequence
  Synthetic
aaagauaaaaaguguuggc

SEQ ID NO: 158913 - RNA, 20 nt, Artificial Sequence
  Synthetic
aaaagauaaaaaguguuggc

SEQ ID NO: 158914 - RNA, 21 nt, Artificial Sequence
  Synthetic
caaaagauaaaaaguguuggc

SEQ ID NO: 158915 - RNA, 22 nt, Artificial Sequence
  Synthetic
acaaaagauaaaaaguguuggc

SEQ ID NO: 158916 - RNA, 23 nt, Artificial Sequence
  Synthetic
uacaaaagauaaaaaguguuggc

SEQ ID NO: 158917 - RNA, 24 nt, Artificial Sequence
  Synthetic
auacaaaagauaaaaaguguuggc

SEQ ID NO: 158918 - RNA, 18 nt, Artificial Sequence
  Synthetic
caaaagaaaaguguuggc

SEQ ID NO: 158919 - RNA, 19 nt, Artificial Sequence
  Synthetic
acaaaagaaaaguguuggc

SEQ ID NO: 158920 - RNA, 21 nt, Artificial Sequence
  Synthetic
agacaaaagaaaaguguuggc

SEQ ID NO: 158921 - RNA, 22 nt, Artificial Sequence
  Synthetic
aagacaaaagaaaaguguuggc

SEQ ID NO: 158922 - RNA, 23 nt, Artificial Sequence
  Synthetic
aaagacaaaagaaaaguguuggc

SEQ ID NO: 158923 - RNA, 24 nt, Artificial Sequence
  Synthetic
aaaagacaaaagaaaaguguuggc

SEQ ID NO: 158924 - RNA, 18 nt, Artificial Sequence
  Synthetic
cuuggccuccaaaaaugc

SEQ ID NO: 158925 - RNA, 19 nt, Artificial Sequence
  Synthetic
ccuuggccuccaaaaaugc

SEQ ID NO: 158926 - RNA, 20 nt, Artificial Sequence
  Synthetic
accuuggccuccaaaaaugc

SEQ ID NO: 158927 - RNA, 21 nt, Artificial Sequence
  Synthetic
caccuuggccuccaaaaaugc

SEQ ID NO: 158928 - RNA, 22 nt, Artificial Sequence
  Synthetic
ccaccuuggccuccaaaaaugc

SEQ ID NO: 158929 - RNA, 23 nt, Artificial Sequence
  Synthetic
cccaccuuggccuccaaaaaugc

SEQ ID NO: 158930 - RNA, 24 nt, Artificial Sequence
  Synthetic
ucccaccuuggccuccaaaaaugc

SEQ ID NO: 158931 - RNA, 22 nt, Artificial Sequence
  Synthetic
agguauuucuuuauagcaaugc

SEQ ID NO: 158932 - RNA, 23 nt, Artificial Sequence
  Synthetic
cagguauuucuuuauagcaaugc

SEQ ID NO: 158933 - RNA, 24 nt, Artificial Sequence
  Synthetic
ucagguauuucuuuauagcaaugc

SEQ ID NO: 158934 - RNA, 18 nt, Artificial Sequence
  Synthetic
caggauccagaggaaugc

SEQ ID NO: 158935 - RNA, 19 nt, Artificial Sequence
  Synthetic
ucaggauccagaggaaugc

SEQ ID NO: 158936 - RNA, 20 nt, Artificial Sequence
  Synthetic
aucaggauccagaggaaugc

SEQ ID NO: 158937 - RNA, 18 nt, Artificial Sequence
  Synthetic
ccaaugacugauuaaugc

SEQ ID NO: 158938 - RNA, 19 nt, Artificial Sequence
  Synthetic
uccaaugacugauuaaugc

SEQ ID NO: 158939 - RNA, 20 nt, Artificial Sequence
  Synthetic
auccaaugacugauuaaugc

SEQ ID NO: 158940 - RNA, 19 nt, Artificial Sequence
  Synthetic
uggacuccuggguuaaugc

SEQ ID NO: 158941 - RNA, 20 nt, Artificial Sequence
  Synthetic
uuggacuccuggguuaaugc

SEQ ID NO: 158942 - RNA, 21 nt, Artificial Sequence
  Synthetic
cuuggacuccuggguuaaugc

SEQ ID NO: 158943 - RNA, 22 nt, Artificial Sequence
  Synthetic
acuuggacuccuggguuaaugc

SEQ ID NO: 158944 - RNA, 18 nt, Artificial Sequence
  Synthetic
uugcucuauuccccaugc

SEQ ID NO: 158945 - RNA, 19 nt, Artificial Sequence
  Synthetic
cuugcucuauuccccaugc

SEQ ID NO: 158946 - RNA, 20 nt, Artificial Sequence
  Synthetic
ucuugcucuauuccccaugc

SEQ ID NO: 158947 - RNA, 22 nt, Artificial Sequence
  Synthetic
agucuugcucuauuccccaugc

SEQ ID NO: 158948 - RNA, 23 nt, Artificial Sequence
  Synthetic
aagucuugcucuauuccccaugc

SEQ ID NO: 158949 - RNA, 18 nt, Artificial Sequence
  Synthetic
cuggaagaaagaagaugc

SEQ ID NO: 158950 - RNA, 19 nt, Artificial Sequence
  Synthetic
ucuggaagaaagaagaugc

SEQ ID NO: 158951 - RNA, 21 nt, Artificial Sequence
  Synthetic
ucuguauuuaagacaugaugc

SEQ ID NO: 158952 - RNA, 22 nt, Artificial Sequence
  Synthetic
cucuguauuuaagacaugaugc

SEQ ID NO: 158953 - RNA, 23 nt, Artificial Sequence
  Synthetic
acucuguauuuaagacaugaugc

SEQ ID NO: 158954 - RNA, 18 nt, Artificial Sequence
  Synthetic
acucuggaaccaaacugc

SEQ ID NO: 158955 - RNA, 21 nt, Artificial Sequence
  Synthetic
aggacucuggaaccaaacugc

SEQ ID NO: 158956 - RNA, 23 nt, Artificial Sequence
  Synthetic
agaggacucuggaaccaaacugc

SEQ ID NO: 158957 - RNA, 21 nt, Artificial Sequence
  Synthetic
uguuugcaaagcauaaacugc

SEQ ID NO: 158958 - RNA, 22 nt, Artificial Sequence
  Synthetic
auguuugcaaagcauaaacugc

SEQ ID NO: 158959 - RNA, 23 nt, Artificial Sequence
  Synthetic
aauguuugcaaagcauaaacugc

SEQ ID NO: 158960 - RNA, 24 nt, Artificial Sequence
  Synthetic
aaauguuugcaaagcauaaacugc

SEQ ID NO: 158961 - RNA, 19 nt, Artificial Sequence
  Synthetic
uggauacuaugcucacugc

SEQ ID NO: 158962 - RNA, 20 nt, Artificial Sequence
  Synthetic
uuggauacuaugcucacugc

SEQ ID NO: 158963 - RNA, 22 nt, Artificial Sequence
  Synthetic
uguuggauacuaugcucacugc

SEQ ID NO: 158964 - RNA, 23 nt, Artificial Sequence
  Synthetic
cuguuggauacuaugcucacugc

SEQ ID NO: 158965 - RNA, 24 nt, Artificial Sequence
  Synthetic
acuguuggauacuaugcucacugc

SEQ ID NO: 158966 - RNA, 18 nt, Artificial Sequence
  Synthetic
ccagcagcggcaaccugc

SEQ ID NO: 158967 - RNA, 20 nt, Artificial Sequence
  Synthetic
agccagcagcggcaaccugc

SEQ ID NO: 158968 - RNA, 21 nt, Artificial Sequence
  Synthetic
aagccagcagcggcaaccugc

SEQ ID NO: 158969 - RNA, 22 nt, Artificial Sequence
  Synthetic
caagccagcagcggcaaccugc

SEQ ID NO: 158970 - RNA, 23 nt, Artificial Sequence
  Synthetic
ccaagccagcagcggcaaccugc

SEQ ID NO: 158971 - RNA, 24 nt, Artificial Sequence
  Synthetic
cccaagccagcagcggcaaccugc

SEQ ID NO: 158972 - RNA, 19 nt, Artificial Sequence
  Synthetic
ugugaagagaaagagcugc

SEQ ID NO: 158973 - RNA, 18 nt, Artificial Sequence
  Synthetic
caggcagaagucugcugc

SEQ ID NO: 158974 - RNA, 19 nt, Artificial Sequence
  Synthetic
ccaggcagaagucugcugc

SEQ ID NO: 158975 - RNA, 20 nt, Artificial Sequence
  Synthetic
uccaggcagaagucugcugc

SEQ ID NO: 158976 - RNA, 22 nt, Artificial Sequence
  Synthetic
uguccaggcagaagucugcugc

SEQ ID NO: 158977 - RNA, 23 nt, Artificial Sequence
  Synthetic
auguccaggcagaagucugcugc

SEQ ID NO: 158978 - RNA, 18 nt, Artificial Sequence
  Synthetic
uuugaaucauguaucugc

SEQ ID NO: 158979 - RNA, 19 nt, Artificial Sequence
  Synthetic
uuuugaaucauguaucugc

SEQ ID NO: 158980 - RNA, 20 nt, Artificial Sequence
  Synthetic
auuuugaaucauguaucugc

SEQ ID NO: 158981 - RNA, 18 nt, Artificial Sequence
  Synthetic
acagucuguucccucugc

SEQ ID NO: 158982 - RNA, 19 nt, Artificial Sequence
  Synthetic
cacagucuguucccucugc

SEQ ID NO: 158983 - RNA, 18 nt, Artificial Sequence
  Synthetic
ccucugcugcaggucugc

SEQ ID NO: 158984 - RNA, 19 nt, Artificial Sequence
  Synthetic
cccucugcugcaggucugc

SEQ ID NO: 158985 - RNA, 20 nt, Artificial Sequence
  Synthetic
acccucugcugcaggucugc

SEQ ID NO: 158986 - RNA, 21 nt, Artificial Sequence
  Synthetic
aacccucugcugcaggucugc

SEQ ID NO: 158987 - RNA, 24 nt, Artificial Sequence
  Synthetic
aggaacccucugcugcaggucugc

SEQ ID NO: 158988 - RNA, 18 nt, Artificial Sequence
  Synthetic
uucagccacccaaagugc

SEQ ID NO: 158989 - RNA, 19 nt, Artificial Sequence
  Synthetic
uuucagccacccaaagugc

SEQ ID NO: 158990 - RNA, 21 nt, Artificial Sequence
  Synthetic
uguuucagccacccaaagugc

SEQ ID NO: 158991 - RNA, 22 nt, Artificial Sequence
  Synthetic
cuguuucagccacccaaagugc

SEQ ID NO: 158992 - RNA, 23 nt, Artificial Sequence
  Synthetic
ccuguuucagccacccaaagugc

SEQ ID NO: 158993 - RNA, 18 nt, Artificial Sequence
  Synthetic
cucagacucccaaagugc

SEQ ID NO: 158994 - RNA, 19 nt, Artificial Sequence
  Synthetic
ccucagacucccaaagugc

SEQ ID NO: 158995 - RNA, 20 nt, Artificial Sequence
  Synthetic
accucagacucccaaagugc

SEQ ID NO: 158996 - RNA, 21 nt, Artificial Sequence
  Synthetic
caccucagacucccaaagugc

SEQ ID NO: 158997 - RNA, 22 nt, Artificial Sequence
  Synthetic
ccaccucagacucccaaagugc

SEQ ID NO: 158998 - RNA, 23 nt, Artificial Sequence
  Synthetic
cccaccucagacucccaaagugc

SEQ ID NO: 158999 - RNA, 24 nt, Artificial Sequence
  Synthetic
acccaccucagacucccaaagugc

SEQ ID NO: 159000 - RNA, 18 nt, Artificial Sequence
  Synthetic
cuuggacucccaaagugc

SEQ ID NO: 159001 - RNA, 19 nt, Artificial Sequence
  Synthetic
ccuuggacucccaaagugc

SEQ ID NO: 159002 - RNA, 21 nt, Artificial Sequence
  Synthetic
cgccuuggacucccaaagugc

SEQ ID NO: 159003 - RNA, 22 nt, Artificial Sequence
  Synthetic
ccgccuuggacucccaaagugc

SEQ ID NO: 159004 - RNA, 23 nt, Artificial Sequence
  Synthetic
cccgccuuggacucccaaagugc

SEQ ID NO: 159005 - RNA, 21 nt, Artificial Sequence
  Synthetic
cgccucagccucccaaagugc

SEQ ID NO: 159006 - RNA, 22 nt, Artificial Sequence
  Synthetic
ccgccucagccucccaaagugc

SEQ ID NO: 159007 - RNA, 23 nt, Artificial Sequence
  Synthetic
cccgccucagccucccaaagugc

SEQ ID NO: 159008 - RNA, 24 nt, Artificial Sequence
  Synthetic
acccgccucagccucccaaagugc

SEQ ID NO: 159009 - RNA, 21 nt, Artificial Sequence
  Synthetic
cgcuucagccucccaaagugc

SEQ ID NO: 159010 - RNA, 22 nt, Artificial Sequence
  Synthetic
ucgcuucagccucccaaagugc

SEQ ID NO: 159011 - RNA, 23 nt, Artificial Sequence
  Synthetic
aucgcuucagccucccaaagugc

SEQ ID NO: 159012 - RNA, 24 nt, Artificial Sequence
  Synthetic
caucgcuucagccucccaaagugc

SEQ ID NO: 159013 - RNA, 21 nt, Artificial Sequence
  Synthetic
ugcuucagccucccaaagugc

SEQ ID NO: 159014 - RNA, 22 nt, Artificial Sequence
  Synthetic
cugcuucagccucccaaagugc

SEQ ID NO: 159015 - RNA, 23 nt, Artificial Sequence
  Synthetic
ccugcuucagccucccaaagugc

SEQ ID NO: 159016 - RNA, 24 nt, Artificial Sequence
  Synthetic
accugcuucagccucccaaagugc

SEQ ID NO: 159017 - RNA, 19 nt, Artificial Sequence
  Synthetic
cguaggccucccaaagugc

SEQ ID NO: 159018 - RNA, 20 nt, Artificial Sequence
  Synthetic
acguaggccucccaaagugc

SEQ ID NO: 159019 - RNA, 21 nt, Artificial Sequence
  Synthetic
cacguaggccucccaaagugc

SEQ ID NO: 159020 - RNA, 22 nt, Artificial Sequence
  Synthetic
ccacguaggccucccaaagugc

SEQ ID NO: 159021 - RNA, 23 nt, Artificial Sequence
  Synthetic
cccacguaggccucccaaagugc

SEQ ID NO: 159022 - RNA, 24 nt, Artificial Sequence
  Synthetic
acccacguaggccucccaaagugc

SEQ ID NO: 159023 - RNA, 21 nt, Artificial Sequence
  Synthetic
caccucggccucccaaagugc

SEQ ID NO: 159024 - RNA, 22 nt, Artificial Sequence
  Synthetic
ccaccucggccucccaaagugc

SEQ ID NO: 159025 - RNA, 23 nt, Artificial Sequence
  Synthetic
cccaccucggccucccaaagugc

SEQ ID NO: 159026 - RNA, 24 nt, Artificial Sequence
  Synthetic
ccccaccucggccucccaaagugc

SEQ ID NO: 159027 - RNA, 21 nt, Artificial Sequence
  Synthetic
cgccucggccucccaaagugc

SEQ ID NO: 159028 - RNA, 22 nt, Artificial Sequence
  Synthetic
ccgccucggccucccaaagugc

SEQ ID NO: 159029 - RNA, 23 nt, Artificial Sequence
  Synthetic
cccgccucggccucccaaagugc

SEQ ID NO: 159030 - RNA, 21 nt, Artificial Sequence
  Synthetic
ugccucggccucccaaagugc

SEQ ID NO: 159031 - RNA, 22 nt, Artificial Sequence
  Synthetic
cugccucggccucccaaagugc

SEQ ID NO: 159032 - RNA, 23 nt, Artificial Sequence
  Synthetic
acugccucggccucccaaagugc

SEQ ID NO: 159033 - RNA, 24 nt, Artificial Sequence
  Synthetic
aacugccucggccucccaaagugc

SEQ ID NO: 159034 - RNA, 23 nt, Artificial Sequence
  Synthetic
ccugccucggccucccaaagugc

SEQ ID NO: 159035 - RNA, 24 nt, Artificial Sequence
  Synthetic
accugccucggccucccaaagugc

SEQ ID NO: 159036 - RNA, 23 nt, Artificial Sequence
  Synthetic
ucugccucggccucccaaagugc

SEQ ID NO: 159037 - RNA, 24 nt, Artificial Sequence
  Synthetic
uucugccucggccucccaaagugc

SEQ ID NO: 159038 - RNA, 20 nt, Artificial Sequence
  Synthetic
aucucggccucccaaagugc

SEQ ID NO: 159039 - RNA, 21 nt, Artificial Sequence
  Synthetic
caucucggccucccaaagugc

SEQ ID NO: 159040 - RNA, 22 nt, Artificial Sequence
  Synthetic
ccaucucggccucccaaagugc

SEQ ID NO: 159041 - RNA, 23 nt, Artificial Sequence
  Synthetic
cccaucucggccucccaaagugc

SEQ ID NO: 159042 - RNA, 24 nt, Artificial Sequence
  Synthetic
acccaucucggccucccaaagugc

SEQ ID NO: 159043 - RNA, 18 nt, Artificial Sequence
  Synthetic
cugggccucccaaagugc

SEQ ID NO: 159044 - RNA, 19 nt, Artificial Sequence
  Synthetic
ccugggccucccaaagugc

SEQ ID NO: 159045 - RNA, 21 nt, Artificial Sequence
  Synthetic
cgccugggccucccaaagugc

SEQ ID NO: 159046 - RNA, 22 nt, Artificial Sequence
  Synthetic
ccgccugggccucccaaagugc

SEQ ID NO: 159047 - RNA, 23 nt, Artificial Sequence
  Synthetic
cccgccugggccucccaaagugc

SEQ ID NO: 159048 - RNA, 18 nt, Artificial Sequence
  Synthetic
ccuggccucccaaagugc

SEQ ID NO: 159049 - RNA, 19 nt, Artificial Sequence
  Synthetic
uccuggccucccaaagugc

SEQ ID NO: 159050 - RNA, 20 nt, Artificial Sequence
  Synthetic
auccuggccucccaaagugc

SEQ ID NO: 159051 - RNA, 21 nt, Artificial Sequence
  Synthetic
uauccuggccucccaaagugc

SEQ ID NO: 159052 - RNA, 22 nt, Artificial Sequence
  Synthetic
cuauccuggccucccaaagugc

SEQ ID NO: 159053 - RNA, 23 nt, Artificial Sequence
  Synthetic
ccuauccuggccucccaaagugc

SEQ ID NO: 159054 - RNA, 24 nt, Artificial Sequence
  Synthetic
uccuauccuggccucccaaagugc

SEQ ID NO: 159055 - RNA, 21 nt, Artificial Sequence
  Synthetic
cgccuuggccucccaaagugc

SEQ ID NO: 159056 - RNA, 22 nt, Artificial Sequence
  Synthetic
ccgccuuggccucccaaagugc

SEQ ID NO: 159057 - RNA, 23 nt, Artificial Sequence
  Synthetic
cccgccuuggccucccaaagugc

SEQ ID NO: 159058 - RNA, 24 nt, Artificial Sequence
  Synthetic
acccgccuuggccucccaaagugc

SEQ ID NO: 159059 - RNA, 20 nt, Artificial Sequence
  Synthetic
uccuuggccucccaaagugc

SEQ ID NO: 159060 - RNA, 21 nt, Artificial Sequence
  Synthetic
cuccuuggccucccaaagugc

SEQ ID NO: 159061 - RNA, 22 nt, Artificial Sequence
  Synthetic
ccuccuuggccucccaaagugc

SEQ ID NO: 159062 - RNA, 23 nt, Artificial Sequence
  Synthetic
cccuccuuggccucccaaagugc

SEQ ID NO: 159063 - RNA, 18 nt, Artificial Sequence
  Synthetic
cucugccucccaaagugc

SEQ ID NO: 159064 - RNA, 19 nt, Artificial Sequence
  Synthetic
ccucugccucccaaagugc

SEQ ID NO: 159065 - RNA, 21 nt, Artificial Sequence
  Synthetic
cgccucugccucccaaagugc

SEQ ID NO: 159066 - RNA, 22 nt, Artificial Sequence
  Synthetic
ccgccucugccucccaaagugc

SEQ ID NO: 159067 - RNA, 23 nt, Artificial Sequence
  Synthetic
cccgccucugccucccaaagugc

SEQ ID NO: 159068 - RNA, 18 nt, Artificial Sequence
  Synthetic
cucauccucccaaagugc

SEQ ID NO: 159069 - RNA, 19 nt, Artificial Sequence
  Synthetic
ccucauccucccaaagugc

SEQ ID NO: 159070 - RNA, 21 nt, Artificial Sequence
  Synthetic
cgccucauccucccaaagugc

SEQ ID NO: 159071 - RNA, 22 nt, Artificial Sequence
  Synthetic
ccgccucauccucccaaagugc

SEQ ID NO: 159072 - RNA, 23 nt, Artificial Sequence
  Synthetic
cccgccucauccucccaaagugc

SEQ ID NO: 159073 - RNA, 18 nt, Artificial Sequence
  Synthetic
cucaggcucccaaagugc

SEQ ID NO: 159074 - RNA, 19 nt, Artificial Sequence
  Synthetic
ccucaggcucccaaagugc

SEQ ID NO: 159075 - RNA, 21 nt, Artificial Sequence
  Synthetic
cgccucaggcucccaaagugc

SEQ ID NO: 159076 - RNA, 22 nt, Artificial Sequence
  Synthetic
ccgccucaggcucccaaagugc

SEQ ID NO: 159077 - RNA, 23 nt, Artificial Sequence
  Synthetic
cccgccucaggcucccaaagugc

SEQ ID NO: 159078 - RNA, 18 nt, Artificial Sequence
  Synthetic
cccagcuucccaaagugc

SEQ ID NO: 159079 - RNA, 19 nt, Artificial Sequence
  Synthetic
ccccagcuucccaaagugc

SEQ ID NO: 159080 - RNA, 21 nt, Artificial Sequence
  Synthetic
cgccccagcuucccaaagugc

SEQ ID NO: 159081 - RNA, 22 nt, Artificial Sequence
  Synthetic
ucgccccagcuucccaaagugc

SEQ ID NO: 159082 - RNA, 23 nt, Artificial Sequence
  Synthetic
cucgccccagcuucccaaagugc

SEQ ID NO: 159083 - RNA, 24 nt, Artificial Sequence
  Synthetic
ucucgccccagcuucccaaagugc

SEQ ID NO: 159084 - RNA, 18 nt, Artificial Sequence
  Synthetic
cucagcuucccaaagugc

SEQ ID NO: 159085 - RNA, 19 nt, Artificial Sequence
  Synthetic
ccucagcuucccaaagugc

SEQ ID NO: 159086 - RNA, 21 nt, Artificial Sequence
  Synthetic
ugccucagcuucccaaagugc

SEQ ID NO: 159087 - RNA, 22 nt, Artificial Sequence
  Synthetic
cugccucagcuucccaaagugc

SEQ ID NO: 159088 - RNA, 23 nt, Artificial Sequence
  Synthetic
ccugccucagcuucccaaagugc

SEQ ID NO: 159089 - RNA, 24 nt, Artificial Sequence
  Synthetic
accugccucagcuucccaaagugc

SEQ ID NO: 159090 - RNA, 18 nt, Artificial Sequence
  Synthetic
cuuagccuuccaaagugc

SEQ ID NO: 159091 - RNA, 19 nt, Artificial Sequence
  Synthetic
ccuuagccuuccaaagugc

SEQ ID NO: 159092 - RNA, 20 nt, Artificial Sequence
  Synthetic
accuuagccuuccaaagugc

SEQ ID NO: 159093 - RNA, 21 nt, Artificial Sequence
  Synthetic
caccuuagccuuccaaagugc

SEQ ID NO: 159094 - RNA, 22 nt, Artificial Sequence
  Synthetic
ccaccuuagccuuccaaagugc

SEQ ID NO: 159095 - RNA, 23 nt, Artificial Sequence
  Synthetic
cccaccuuagccuuccaaagugc

SEQ ID NO: 159096 - RNA, 24 nt, Artificial Sequence
  Synthetic
ucccaccuuagccuuccaaagugc

SEQ ID NO: 159097 - RNA, 18 nt, Artificial Sequence
  Synthetic
cucggccucgcaaagugc

SEQ ID NO: 159098 - RNA, 19 nt, Artificial Sequence
  Synthetic
ccucggccucgcaaagugc

SEQ ID NO: 159099 - RNA, 21 nt, Artificial Sequence
  Synthetic
ugccucggccucgcaaagugc

SEQ ID NO: 159100 - RNA, 22 nt, Artificial Sequence
  Synthetic
cugccucggccucgcaaagugc

SEQ ID NO: 159101 - RNA, 23 nt, Artificial Sequence
  Synthetic
ccugccucggccucgcaaagugc

SEQ ID NO: 159102 - RNA, 22 nt, Artificial Sequence
  Synthetic
uugccucggccucgcaaagugc

SEQ ID NO: 159103 - RNA, 23 nt, Artificial Sequence
  Synthetic
uuugccucggccucgcaaagugc

SEQ ID NO: 159104 - RNA, 18 nt, Artificial Sequence
  Synthetic
uucggccucucaaagugc

SEQ ID NO: 159105 - RNA, 19 nt, Artificial Sequence
  Synthetic
uuucggccucucaaagugc

SEQ ID NO: 159106 - RNA, 20 nt, Artificial Sequence
  Synthetic
auuucggccucucaaagugc

SEQ ID NO: 159107 - RNA, 21 nt, Artificial Sequence
  Synthetic
cauuucggccucucaaagugc

SEQ ID NO: 159108 - RNA, 22 nt, Artificial Sequence
  Synthetic
ccauuucggccucucaaagugc

SEQ ID NO: 159109 - RNA, 23 nt, Artificial Sequence
  Synthetic
cccauuucggccucucaaagugc

SEQ ID NO: 159110 - RNA, 24 nt, Artificial Sequence
  Synthetic
acccauuucggccucucaaagugc

SEQ ID NO: 159111 - RNA, 18 nt, Artificial Sequence
  Synthetic
cuuggucucucaaagugc

SEQ ID NO: 159112 - RNA, 19 nt, Artificial Sequence
  Synthetic
ccuuggucucucaaagugc

SEQ ID NO: 159113 - RNA, 20 nt, Artificial Sequence
  Synthetic
accuuggucucucaaagugc

SEQ ID NO: 159114 - RNA, 21 nt, Artificial Sequence
  Synthetic
caccuuggucucucaaagugc

SEQ ID NO: 159115 - RNA, 22 nt, Artificial Sequence
  Synthetic
ccaccuuggucucucaaagugc

SEQ ID NO: 159116 - RNA, 23 nt, Artificial Sequence
  Synthetic
cccaccuuggucucucaaagugc

SEQ ID NO: 159117 - RNA, 18 nt, Artificial Sequence
  Synthetic
cucggccuccccaagugc

SEQ ID NO: 159118 - RNA, 19 nt, Artificial Sequence
  Synthetic
ccucggccuccccaagugc

SEQ ID NO: 159119 - RNA, 21 nt, Artificial Sequence
  Synthetic
cgccucggccuccccaagugc

SEQ ID NO: 159120 - RNA, 22 nt, Artificial Sequence
  Synthetic
ccgccucggccuccccaagugc

SEQ ID NO: 159121 - RNA, 23 nt, Artificial Sequence
  Synthetic
cccgccucggccuccccaagugc

SEQ ID NO: 159122 - RNA, 18 nt, Artificial Sequence
  Synthetic
cuuggccucccgaagugc

SEQ ID NO: 159123 - RNA, 19 nt, Artificial Sequence
  Synthetic
ccuuggccucccgaagugc

SEQ ID NO: 159124 - RNA, 20 nt, Artificial Sequence
  Synthetic
accuuggccucccgaagugc

SEQ ID NO: 159125 - RNA, 21 nt, Artificial Sequence
  Synthetic
caccuuggccucccgaagugc

SEQ ID NO: 159126 - RNA, 22 nt, Artificial Sequence
  Synthetic
ccaccuuggccucccgaagugc

SEQ ID NO: 159127 - RNA, 23 nt, Artificial Sequence
  Synthetic
cccaccuuggccucccgaagugc

SEQ ID NO: 159128 - RNA, 24 nt, Artificial Sequence
  Synthetic
acccaccuuggccucccgaagugc

SEQ ID NO: 159129 - RNA, 18 nt, Artificial Sequence
  Synthetic
cuuggccucccaaugugc

SEQ ID NO: 159130 - RNA, 19 nt, Artificial Sequence
  Synthetic
ucuuggccucccaaugugc

SEQ ID NO: 159131 - RNA, 20 nt, Artificial Sequence
  Synthetic
aucuuggccucccaaugugc

SEQ ID NO: 159132 - RNA, 21 nt, Artificial Sequence
  Synthetic
caucuuggccucccaaugugc

SEQ ID NO: 159133 - RNA, 22 nt, Artificial Sequence
  Synthetic
ccaucuuggccucccaaugugc

SEQ ID NO: 159134 - RNA, 23 nt, Artificial Sequence
  Synthetic
cccaucuuggccucccaaugugc

SEQ ID NO: 159135 - RNA, 18 nt, Artificial Sequence
  Synthetic
auauuauauuuuaugugc

SEQ ID NO: 159136 - RNA, 19 nt, Artificial Sequence
  Synthetic
uauauuauauuuuaugugc

SEQ ID NO: 159137 - RNA, 20 nt, Artificial Sequence
  Synthetic
uuauauuauauuuuaugugc

SEQ ID NO: 159138 - RNA, 21 nt, Artificial Sequence
  Synthetic
uuuauauuauauuuuaugugc

SEQ ID NO: 159139 - RNA, 22 nt, Artificial Sequence
  Synthetic
uuuuauauuauauuuuaugugc

SEQ ID NO: 159140 - RNA, 23 nt, Artificial Sequence
  Synthetic
uuuuuauauuauauuuuaugugc

SEQ ID NO: 159141 - RNA, 24 nt, Artificial Sequence
  Synthetic
uuuuuuauauuauauuuuaugugc

SEQ ID NO: 159142 - RNA, 21 nt, Artificial Sequence
  Synthetic
aucuuuuuaaacugagugugc

SEQ ID NO: 159143 - RNA, 22 nt, Artificial Sequence
  Synthetic
uaucuuuuuaaacugagugugc

SEQ ID NO: 159144 - RNA, 23 nt, Artificial Sequence
  Synthetic
auaucuuuuuaaacugagugugc

SEQ ID NO: 159145 - RNA, 24 nt, Artificial Sequence
  Synthetic
aauaucuuuuuaaacugagugugc

SEQ ID NO: 159146 - RNA, 18 nt, Artificial Sequence
  Synthetic
cuuagccucccaaauugc

SEQ ID NO: 159147 - RNA, 19 nt, Artificial Sequence
  Synthetic
ccuuagccucccaaauugc

SEQ ID NO: 159148 - RNA, 21 nt, Artificial Sequence
  Synthetic
ugccuuagccucccaaauugc

SEQ ID NO: 159149 - RNA, 22 nt, Artificial Sequence
  Synthetic
cugccuuagccucccaaauugc

SEQ ID NO: 159150 - RNA, 23 nt, Artificial Sequence
  Synthetic
ccugccuuagccucccaaauugc

SEQ ID NO: 159151 - RNA, 24 nt, Artificial Sequence
  Synthetic
uccugccuuagccucccaaauugc

SEQ ID NO: 159152 - RNA, 18 nt, Artificial Sequence
  Synthetic
cucggccucucaaauugc

SEQ ID NO: 159153 - RNA, 19 nt, Artificial Sequence
  Synthetic
ccucggccucucaaauugc

SEQ ID NO: 159154 - RNA, 20 nt, Artificial Sequence
  Synthetic
accucggccucucaaauugc

SEQ ID NO: 159155 - RNA, 21 nt, Artificial Sequence
  Synthetic
caccucggccucucaaauugc

SEQ ID NO: 159156 - RNA, 22 nt, Artificial Sequence
  Synthetic
ccaccucggccucucaaauugc

SEQ ID NO: 159157 - RNA, 23 nt, Artificial Sequence
  Synthetic
cccaccucggccucucaaauugc

SEQ ID NO: 159158 - RNA, 19 nt, Artificial Sequence
  Synthetic
ugaagucccacuagauugc

SEQ ID NO: 159159 - RNA, 20 nt, Artificial Sequence
  Synthetic
augaagucccacuagauugc

SEQ ID NO: 159160 - RNA, 22 nt, Artificial Sequence
  Synthetic
agaugaagucccacuagauugc

SEQ ID NO: 159161 - RNA, 24 nt, Artificial Sequence
  Synthetic
agagaugaagucccacuagauugc

SEQ ID NO: 159162 - RNA, 21 nt, Artificial Sequence
  Synthetic
ugggauuguugugaugauugc

SEQ ID NO: 159163 - RNA, 23 nt, Artificial Sequence
  Synthetic
ugugggauuguugugaugauugc

SEQ ID NO: 159164 - RNA, 24 nt, Artificial Sequence
  Synthetic
cugugggauuguugugaugauugc

SEQ ID NO: 159165 - RNA, 18 nt, Artificial Sequence
  Synthetic
ucuaacuuacuuuauugc

SEQ ID NO: 159166 - RNA, 19 nt, Artificial Sequence
  Synthetic
cucuaacuuacuuuauugc

SEQ ID NO: 159167 - RNA, 20 nt, Artificial Sequence
  Synthetic
ucucuaacuuacuuuauugc

SEQ ID NO: 159168 - RNA, 21 nt, Artificial Sequence
  Synthetic
uucucuaacuuacuuuauugc

SEQ ID NO: 159169 - RNA, 22 nt, Artificial Sequence
  Synthetic
uuucucuaacuuacuuuauugc

SEQ ID NO: 159170 - RNA, 23 nt, Artificial Sequence
  Synthetic
uuuucucuaacuuacuuuauugc

SEQ ID NO: 159171 - RNA, 24 nt, Artificial Sequence
  Synthetic
auuuucucuaacuuacuuuauugc

SEQ ID NO: 159172 - RNA, 19 nt, Artificial Sequence
  Synthetic
ugcaaccuagaucccuugc

SEQ ID NO: 159173 - RNA, 20 nt, Artificial Sequence
  Synthetic
augcaaccuagaucccuugc

SEQ ID NO: 159174 - RNA, 21 nt, Artificial Sequence
  Synthetic
caugcaaccuagaucccuugc

SEQ ID NO: 159175 - RNA, 23 nt, Artificial Sequence
  Synthetic
agcaugcaaccuagaucccuugc

SEQ ID NO: 159176 - RNA, 18 nt, Artificial Sequence
  Synthetic
auucauucucccaguugc

SEQ ID NO: 159177 - RNA, 19 nt, Artificial Sequence
  Synthetic
cauucauucucccaguugc

SEQ ID NO: 159178 - RNA, 21 nt, Artificial Sequence
  Synthetic
agcauucauucucccaguugc

SEQ ID NO: 159179 - RNA, 22 nt, Artificial Sequence
  Synthetic
aagcauucauucucccaguugc

SEQ ID NO: 159180 - RNA, 24 nt, Artificial Sequence
  Synthetic
ugaagcauucauucucccaguugc

SEQ ID NO: 159181 - RNA, 18 nt, Artificial Sequence
  Synthetic
ucuguugggcacauuugc

SEQ ID NO: 159182 - RNA, 19 nt, Artificial Sequence
  Synthetic
aucuguugggcacauuugc

SEQ ID NO: 159183 - RNA, 20 nt, Artificial Sequence
  Synthetic
aaucuguugggcacauuugc

SEQ ID NO: 159184 - RNA, 21 nt, Artificial Sequence
  Synthetic
aaaucuguugggcacauuugc

SEQ ID NO: 159185 - RNA, 22 nt, Artificial Sequence
  Synthetic
aaaaucuguugggcacauuugc

SEQ ID NO: 159186 - RNA, 23 nt, Artificial Sequence
  Synthetic
aaaaaucuguugggcacauuugc

SEQ ID NO: 159187 - RNA, 24 nt, Artificial Sequence
  Synthetic
caaaaaucuguugggcacauuugc

SEQ ID NO: 159188 - RNA, 18 nt, Artificial Sequence
  Synthetic
uuuauauaacuucuuugc

SEQ ID NO: 159189 - RNA, 19 nt, Artificial Sequence
  Synthetic
uuuuauauaacuucuuugc

SEQ ID NO: 159190 - RNA, 20 nt, Artificial Sequence
  Synthetic
auuuuauauaacuucuuugc

SEQ ID NO: 159191 - RNA, 18 nt, Artificial Sequence
  Synthetic
acuccagacccuguuugc

SEQ ID NO: 159192 - RNA, 19 nt, Artificial Sequence
  Synthetic
cacuccagacccuguuugc

SEQ ID NO: 159193 - RNA, 20 nt, Artificial Sequence
  Synthetic
ccacuccagacccuguuugc

SEQ ID NO: 159194 - RNA, 21 nt, Artificial Sequence
  Synthetic
uccacuccagacccuguuugc

SEQ ID NO: 159195 - RNA, 24 nt, Artificial Sequence
  Synthetic
agguccacuccagacccuguuugc

SEQ ID NO: 159196 - RNA, 18 nt, Artificial Sequence
  Synthetic
uauuuauaagaaaaaauc

SEQ ID NO: 159197 - RNA, 19 nt, Artificial Sequence
  Synthetic
uuauuuauaagaaaaaauc

SEQ ID NO: 159198 - RNA, 20 nt, Artificial Sequence
  Synthetic
uuuauuuauaagaaaaaauc

SEQ ID NO: 159199 - RNA, 18 nt, Artificial Sequence
  Synthetic
auucauuuaucaaaaauc

SEQ ID NO: 159200 - RNA, 19 nt, Artificial Sequence
  Synthetic
uauucauuuaucaaaaauc

SEQ ID NO: 159201 - RNA, 20 nt, Artificial Sequence
  Synthetic
cuauucauuuaucaaaaauc

SEQ ID NO: 159202 - RNA, 21 nt, Artificial Sequence
  Synthetic
ucuauucauuuaucaaaaauc

SEQ ID NO: 159203 - RNA, 22 nt, Artificial Sequence
  Synthetic
aucuauucauuuaucaaaaauc

SEQ ID NO: 159204 - RNA, 23 nt, Artificial Sequence
  Synthetic
aaucuauucauuuaucaaaaauc

SEQ ID NO: 159205 - RNA, 24 nt, Artificial Sequence
  Synthetic
uaaucuauucauuuaucaaaaauc

SEQ ID NO: 159206 - RNA, 18 nt, Artificial Sequence
  Synthetic
uguaauucuaauaaaauc

SEQ ID NO: 159207 - RNA, 19 nt, Artificial Sequence
  Synthetic
auguaauucuaauaaaauc

SEQ ID NO: 159208 - RNA, 20 nt, Artificial Sequence
  Synthetic
cauguaauucuaauaaaauc

SEQ ID NO: 159209 - RNA, 21 nt, Artificial Sequence
  Synthetic
agacaaacagagagccaaauc

SEQ ID NO: 159210 - RNA, 22 nt, Artificial Sequence
  Synthetic
cagacaaacagagagccaaauc

SEQ ID NO: 159211 - RNA, 23 nt, Artificial Sequence
  Synthetic
acagacaaacagagagccaaauc

SEQ ID NO: 159212 - RNA, 24 nt, Artificial Sequence
  Synthetic
aacagacaaacagagagccaaauc

SEQ ID NO: 159213 - RNA, 22 nt, Artificial Sequence
  Synthetic
uagacaaacagagagccaaauc

SEQ ID NO: 159214 - RNA, 23 nt, Artificial Sequence
  Synthetic
auagacaaacagagagccaaauc

SEQ ID NO: 159215 - RNA, 24 nt, Artificial Sequence
  Synthetic
aauagacaaacagagagccaaauc

SEQ ID NO: 159216 - RNA, 20 nt, Artificial Sequence
  Synthetic
aggaaaaggaagaaacaauc

SEQ ID NO: 159217 - RNA, 18 nt, Artificial Sequence
  Synthetic
cuguuucaggauccaauc

SEQ ID NO: 159218 - RNA, 19 nt, Artificial Sequence
  Synthetic
ucuguuucaggauccaauc

SEQ ID NO: 159219 - RNA, 20 nt, Artificial Sequence
  Synthetic
uucuguuucaggauccaauc

SEQ ID NO: 159220 - RNA, 21 nt, Artificial Sequence
  Synthetic
uuucuguuucaggauccaauc

SEQ ID NO: 159221 - RNA, 22 nt, Artificial Sequence
  Synthetic
uuuucuguuucaggauccaauc

SEQ ID NO: 159222 - RNA, 23 nt, Artificial Sequence
  Synthetic
uuuuucuguuucaggauccaauc

SEQ ID NO: 159223 - RNA, 24 nt, Artificial Sequence
  Synthetic
auuuuucuguuucaggauccaauc

SEQ ID NO: 159224 - RNA, 18 nt, Artificial Sequence
  Synthetic
aaaguagccaaggcaauc

SEQ ID NO: 159225 - RNA, 19 nt, Artificial Sequence
  Synthetic
aaaaguagccaaggcaauc

SEQ ID NO: 159226 - RNA, 20 nt, Artificial Sequence
  Synthetic
caaaaguagccaaggcaauc

SEQ ID NO: 159227 - RNA, 21 nt, Artificial Sequence
  Synthetic
ccaaaaguagccaaggcaauc

SEQ ID NO: 159228 - RNA, 22 nt, Artificial Sequence
  Synthetic
accaaaaguagccaaggcaauc

SEQ ID NO: 159229 - RNA, 23 nt, Artificial Sequence
  Synthetic
aaccaaaaguagccaaggcaauc

SEQ ID NO: 159230 - RNA, 19 nt, Artificial Sequence
  Synthetic
ugaccuccuccccucaauc

SEQ ID NO: 159231 - RNA, 20 nt, Artificial Sequence
  Synthetic
uugaccuccuccccucaauc

SEQ ID NO: 159232 - RNA, 21 nt, Artificial Sequence
  Synthetic
uuugaccuccuccccucaauc

SEQ ID NO: 159233 - RNA, 22 nt, Artificial Sequence
  Synthetic
uuuugaccuccuccccucaauc

SEQ ID NO: 159234 - RNA, 23 nt, Artificial Sequence
  Synthetic
auuuugaccuccuccccucaauc

SEQ ID NO: 159235 - RNA, 24 nt, Artificial Sequence
  Synthetic
uauuuugaccuccuccccucaauc

SEQ ID NO: 159236 - RNA, 21 nt, Artificial Sequence
  Synthetic
aaccaagccccaagcagaauc

SEQ ID NO: 159237 - RNA, 23 nt, Artificial Sequence
  Synthetic
ugaaccaagccccaagcagaauc

SEQ ID NO: 159238 - RNA, 24 nt, Artificial Sequence
  Synthetic
augaaccaagccccaagcagaauc

SEQ ID NO: 159239 - RNA, 18 nt, Artificial Sequence
  Synthetic
uguacaaccugcagaauc

SEQ ID NO: 159240 - RNA, 19 nt, Artificial Sequence
  Synthetic
cuguacaaccugcagaauc

SEQ ID NO: 159241 - RNA, 20 nt, Artificial Sequence
  Synthetic
ccuguacaaccugcagaauc

SEQ ID NO: 159242 - RNA, 21 nt, Artificial Sequence
  Synthetic
uccuguacaaccugcagaauc

SEQ ID NO: 159243 - RNA, 22 nt, Artificial Sequence
  Synthetic
uuccuguacaaccugcagaauc

SEQ ID NO: 159244 - RNA, 23 nt, Artificial Sequence
  Synthetic
cuuccuguacaaccugcagaauc

SEQ ID NO: 159245 - RNA, 18 nt, Artificial Sequence
  Synthetic
aaacaguuuccaggaauc

SEQ ID NO: 159246 - RNA, 19 nt, Artificial Sequence
  Synthetic
aaaacaguuuccaggaauc

SEQ ID NO: 159247 - RNA, 20 nt, Artificial Sequence
  Synthetic
uaaaacaguuuccaggaauc

SEQ ID NO: 159248 - RNA, 21 nt, Artificial Sequence
  Synthetic
uuuaauuccuguaaaauaauc

SEQ ID NO: 159249 - RNA, 22 nt, Artificial Sequence
  Synthetic
uuuuaauuccuguaaaauaauc

SEQ ID NO: 159250 - RNA, 23 nt, Artificial Sequence
  Synthetic
auuuuaauuccuguaaaauaauc

SEQ ID NO: 159251 - RNA, 24 nt, Artificial Sequence
  Synthetic
uauuuuaauuccuguaaaauaauc

SEQ ID NO: 159252 - RNA, 18 nt, Artificial Sequence
  Synthetic
uuuuuaaaaaagauaauc

SEQ ID NO: 159253 - RNA, 19 nt, Artificial Sequence
  Synthetic
cuuuuuaaaaaagauaauc

SEQ ID NO: 159254 - RNA, 20 nt, Artificial Sequence
  Synthetic
acuuuuuaaaaaagauaauc

SEQ ID NO: 159255 - RNA, 18 nt, Artificial Sequence
  Synthetic
ugagugaguuucuuaauc

SEQ ID NO: 159256 - RNA, 19 nt, Artificial Sequence
  Synthetic
uugagugaguuucuuaauc

SEQ ID NO: 159257 - RNA, 20 nt, Artificial Sequence
  Synthetic
uuugagugaguuucuuaauc

SEQ ID NO: 159258 - RNA, 21 nt, Artificial Sequence
  Synthetic
uuuugagugaguuucuuaauc

SEQ ID NO: 159259 - RNA, 24 nt, Artificial Sequence
  Synthetic
ugguuuugagugaguuucuuaauc

SEQ ID NO: 159260 - RNA, 18 nt, Artificial Sequence
  Synthetic
acaucugagugcaacauc

SEQ ID NO: 159261 - RNA, 20 nt, Artificial Sequence
  Synthetic
ugacaucugagugcaacauc

SEQ ID NO: 159262 - RNA, 18 nt, Artificial Sequence
  Synthetic
ccugucauuugcaacauc

SEQ ID NO: 159263 - RNA, 19 nt, Artificial Sequence
  Synthetic
uccugucauuugcaacauc

SEQ ID NO: 159264 - RNA, 20 nt, Artificial Sequence
  Synthetic
auccugucauuugcaacauc

SEQ ID NO: 159265 - RNA, 21 nt, Artificial Sequence
  Synthetic
uauccugucauuugcaacauc

SEQ ID NO: 159266 - RNA, 22 nt, Artificial Sequence
  Synthetic
auauccugucauuugcaacauc

SEQ ID NO: 159267 - RNA, 23 nt, Artificial Sequence
  Synthetic
uauauccugucauuugcaacauc

SEQ ID NO: 159268 - RNA, 24 nt, Artificial Sequence
  Synthetic
uuauauccugucauuugcaacauc

SEQ ID NO: 159269 - RNA, 18 nt, Artificial Sequence
  Synthetic
ccuuucauuugcaacauc

SEQ ID NO: 159270 - RNA, 19 nt, Artificial Sequence
  Synthetic
uccuuucauuugcaacauc

SEQ ID NO: 159271 - RNA, 20 nt, Artificial Sequence
  Synthetic
auccuuucauuugcaacauc

SEQ ID NO: 159272 - RNA, 22 nt, Artificial Sequence
  Synthetic
agauccuuucauuugcaacauc

SEQ ID NO: 159273 - RNA, 24 nt, Artificial Sequence
  Synthetic
ugagauccuuucauuugcaacauc

SEQ ID NO: 159274 - RNA, 19 nt, Artificial Sequence
  Synthetic
ugggccaauuucucccauc

SEQ ID NO: 159275 - RNA, 20 nt, Artificial Sequence
  Synthetic
uugggccaauuucucccauc

SEQ ID NO: 159276 - RNA, 21 nt, Artificial Sequence
  Synthetic
uuugggccaauuucucccauc

SEQ ID NO: 159277 - RNA, 23 nt, Artificial Sequence
  Synthetic
uguuugggccaauuucucccauc

SEQ ID NO: 159278 - RNA, 24 nt, Artificial Sequence
  Synthetic
uuguuugggccaauuucucccauc

SEQ ID NO: 159279 - RNA, 22 nt, Artificial Sequence
  Synthetic
aggucauaaggccaaagccauc

SEQ ID NO: 159280 - RNA, 23 nt, Artificial Sequence
  Synthetic
uaggucauaaggccaaagccauc

SEQ ID NO: 159281 - RNA, 24 nt, Artificial Sequence
  Synthetic
uuaggucauaaggccaaagccauc

SEQ ID NO: 159282 - RNA, 21 nt, Artificial Sequence
  Synthetic
uguuuaaaucuuuaauccauc

SEQ ID NO: 159283 - RNA, 22 nt, Artificial Sequence
  Synthetic
auguuuaaaucuuuaauccauc

SEQ ID NO: 159284 - RNA, 23 nt, Artificial Sequence
  Synthetic
aauguuuaaaucuuuaauccauc

SEQ ID NO: 159285 - RNA, 24 nt, Artificial Sequence
  Synthetic
uaauguuuaaaucuuuaauccauc

SEQ ID NO: 159286 - RNA, 20 nt, Artificial Sequence
  Synthetic
uuuuaaaucuuuaauccauc

SEQ ID NO: 159287 - RNA, 21 nt, Artificial Sequence
  Synthetic
uuuuuaaaucuuuaauccauc

SEQ ID NO: 159288 - RNA, 22 nt, Artificial Sequence
  Synthetic
uuuuuuaaaucuuuaauccauc

SEQ ID NO: 159289 - RNA, 23 nt, Artificial Sequence
  Synthetic
uuuuuuuaaaucuuuaauccauc

SEQ ID NO: 159290 - RNA, 24 nt, Artificial Sequence
  Synthetic
auuuuuuuaaaucuuuaauccauc

SEQ ID NO: 159291 - RNA, 21 nt, Artificial Sequence
  Synthetic
cguuuaagucuuuaauccauc

SEQ ID NO: 159292 - RNA, 22 nt, Artificial Sequence
  Synthetic
acguuuaagucuuuaauccauc

SEQ ID NO: 159293 - RNA, 23 nt, Artificial Sequence
  Synthetic
aacguuuaagucuuuaauccauc

SEQ ID NO: 159294 - RNA, 24 nt, Artificial Sequence
  Synthetic
uaacguuuaagucuuuaauccauc

SEQ ID NO: 159295 - RNA, 18 nt, Artificial Sequence
  Synthetic
aacuagaacaacuccauc

SEQ ID NO: 159296 - RNA, 20 nt, Artificial Sequence
  Synthetic
cgaacuagaacaacuccauc

SEQ ID NO: 159297 - RNA, 21 nt, Artificial Sequence
  Synthetic
ucgaacuagaacaacuccauc

SEQ ID NO: 159298 - RNA, 22 nt, Artificial Sequence
  Synthetic
uucgaacuagaacaacuccauc

SEQ ID NO: 159299 - RNA, 24 nt, Artificial Sequence
  Synthetic
cguucgaacuagaacaacuccauc

SEQ ID NO: 159300 - RNA, 18 nt, Artificial Sequence
  Synthetic
uuaaagacagaaagcauc

SEQ ID NO: 159301 - RNA, 19 nt, Artificial Sequence
  Synthetic
uuuaaagacagaaagcauc

SEQ ID NO: 159302 - RNA, 20 nt, Artificial Sequence
  Synthetic
uuuuaaagacagaaagcauc

SEQ ID NO: 159303 - RNA, 21 nt, Artificial Sequence
  Synthetic
uuuuuaaagacagaaagcauc

SEQ ID NO: 159304 - RNA, 22 nt, Artificial Sequence
  Synthetic
uuuuuuaaagacagaaagcauc

SEQ ID NO: 159305 - RNA, 23 nt, Artificial Sequence
  Synthetic
uuuuuuuaaagacagaaagcauc

SEQ ID NO: 159306 - RNA, 24 nt, Artificial Sequence
  Synthetic
uuuuuuuuaaagacagaaagcauc

SEQ ID NO: 159307 - RNA, 18 nt, Artificial Sequence
  Synthetic
aauuuucuucauggcauc

SEQ ID NO: 159308 - RNA, 20 nt, Artificial Sequence
  Synthetic
ugaauuuucuucauggcauc

SEQ ID NO: 159309 - RNA, 21 nt, Artificial Sequence
  Synthetic
augaauuuucuucauggcauc

SEQ ID NO: 159310 - RNA, 22 nt, Artificial Sequence
  Synthetic
caugaauuuucuucauggcauc

SEQ ID NO: 159311 - RNA, 23 nt, Artificial Sequence
  Synthetic
ucaugaauuuucuucauggcauc

SEQ ID NO: 159312 - RNA, 24 nt, Artificial Sequence
  Synthetic
aucaugaauuuucuucauggcauc

SEQ ID NO: 159313 - RNA, 18 nt, Artificial Sequence
  Synthetic
aggauucugucuugcauc

SEQ ID NO: 159314 - RNA, 20 nt, Artificial Sequence
  Synthetic
agaggauucugucuugcauc

SEQ ID NO: 159315 - RNA, 21 nt, Artificial Sequence
  Synthetic
aagaggauucugucuugcauc

SEQ ID NO: 159316 - RNA, 22 nt, Artificial Sequence
  Synthetic
aaagaggauucugucuugcauc

SEQ ID NO: 159317 - RNA, 23 nt, Artificial Sequence
  Synthetic
uaaagaggauucugucuugcauc

SEQ ID NO: 159318 - RNA, 18 nt, Artificial Sequence
  Synthetic
aagacuuugucuugcauc

SEQ ID NO: 159319 - RNA, 20 nt, Artificial Sequence
  Synthetic
agaagacuuugucuugcauc

SEQ ID NO: 159320 - RNA, 21 nt, Artificial Sequence
  Synthetic
aagaagacuuugucuugcauc

SEQ ID NO: 159321 - RNA, 22 nt, Artificial Sequence
  Synthetic
aaagaagacuuugucuugcauc

SEQ ID NO: 159322 - RNA, 23 nt, Artificial Sequence
  Synthetic
uaaagaagacuuugucuugcauc

SEQ ID NO: 159323 - RNA, 23 nt, Artificial Sequence
  Synthetic
aguguccccacccaaaucucauc

SEQ ID NO: 159324 - RNA, 24 nt, Artificial Sequence
  Synthetic
caguguccccacccaaaucucauc

SEQ ID NO: 159325 - RNA, 24 nt, Artificial Sequence
  Synthetic
uuguguccccacccaaaucucauc

SEQ ID NO: 159326 - RNA, 18 nt, Artificial Sequence
  Synthetic
ucucacccaaaucucauc

SEQ ID NO: 159327 - RNA, 19 nt, Artificial Sequence
  Synthetic
uucucacccaaaucucauc

SEQ ID NO: 159328 - RNA, 21 nt, Artificial Sequence
  Synthetic
uguucucacccaaaucucauc

SEQ ID NO: 159329 - RNA, 23 nt, Artificial Sequence
  Synthetic
uguguucucacccaaaucucauc

SEQ ID NO: 159330 - RNA, 24 nt, Artificial Sequence
  Synthetic
cuguguucucacccaaaucucauc

SEQ ID NO: 159331 - RNA, 18 nt, Artificial Sequence
  Synthetic
ccccauccaaaucucauc

SEQ ID NO: 159332 - RNA, 19 nt, Artificial Sequence
  Synthetic
uccccauccaaaucucauc

SEQ ID NO: 159333 - RNA, 21 nt, Artificial Sequence
  Synthetic
uguccccauccaaaucucauc

SEQ ID NO: 159334 - RNA, 23 nt, Artificial Sequence
  Synthetic
uguguccccauccaaaucucauc

SEQ ID NO: 159335 - RNA, 24 nt, Artificial Sequence
  Synthetic
cuguguccccauccaaaucucauc

SEQ ID NO: 159336 - RNA, 18 nt, Artificial Sequence
  Synthetic
uuugcaucaauguucauc

SEQ ID NO: 159337 - RNA, 19 nt, Artificial Sequence
  Synthetic
uuuugcaucaauguucauc

SEQ ID NO: 159338 - RNA, 20 nt, Artificial Sequence
  Synthetic
uuuuugcaucaauguucauc

SEQ ID NO: 159339 - RNA, 21 nt, Artificial Sequence
  Synthetic
auuuuugcaucaauguucauc

SEQ ID NO: 159340 - RNA, 24 nt, Artificial Sequence
  Synthetic
aggauuuuugcaucaauguucauc

SEQ ID NO: 159341 - RNA, 18 nt, Artificial Sequence
  Synthetic
uucgcauugauguucauc

SEQ ID NO: 159342 - RNA, 19 nt, Artificial Sequence
  Synthetic
uuucgcauugauguucauc

SEQ ID NO: 159343 - RNA, 20 nt, Artificial Sequence
  Synthetic
uuuucgcauugauguucauc

SEQ ID NO: 159344 - RNA, 21 nt, Artificial Sequence
  Synthetic
auuuucgcauugauguucauc

SEQ ID NO: 159345 - RNA, 24 nt, Artificial Sequence
  Synthetic
aggauuuucgcauugauguucauc

SEQ ID NO: 159346 - RNA, 18 nt, Artificial Sequence
  Synthetic
ccaauuauauaaaagauc

SEQ ID NO: 159347 - RNA, 19 nt, Artificial Sequence
  Synthetic
uccaauuauauaaaagauc

SEQ ID NO: 159348 - RNA, 20 nt, Artificial Sequence
  Synthetic
uuccaauuauauaaaagauc

SEQ ID NO: 159349 - RNA, 21 nt, Artificial Sequence
  Synthetic
auuccaauuauauaaaagauc

SEQ ID NO: 159350 - RNA, 22 nt, Artificial Sequence
  Synthetic
aauuccaauuauauaaaagauc

SEQ ID NO: 159351 - RNA, 23 nt, Artificial Sequence
  Synthetic
uaauuccaauuauauaaaagauc

SEQ ID NO: 159352 - RNA, 24 nt, Artificial Sequence
  Synthetic
auaauuccaauuauauaaaagauc

SEQ ID NO: 159353 - RNA, 19 nt, Artificial Sequence
  Synthetic
uggagauucuucagagauc

SEQ ID NO: 159354 - RNA, 21 nt, Artificial Sequence
  Synthetic
uguggagauucuucagagauc

SEQ ID NO: 159355 - RNA, 23 nt, Artificial Sequence
  Synthetic
aguguggagauucuucagagauc

SEQ ID NO: 159356 - RNA, 24 nt, Artificial Sequence
  Synthetic
caguguggagauucuucagagauc

SEQ ID NO: 159357 - RNA, 20 nt, Artificial Sequence
  Synthetic
cgggcggaucacuugagauc

SEQ ID NO: 159358 - RNA, 23 nt, Artificial Sequence
  Synthetic
aggcgggcggaucacuugagauc

SEQ ID NO: 159359 - RNA, 24 nt, Artificial Sequence
  Synthetic
aaggcgggcggaucacuugagauc

SEQ ID NO: 159360 - RNA, 18 nt, Artificial Sequence
  Synthetic
auuucagguuuuuggauc

SEQ ID NO: 159361 - RNA, 21 nt, Artificial Sequence
  Synthetic
uggauuucagguuuuuggauc

SEQ ID NO: 159362 - RNA, 22 nt, Artificial Sequence
  Synthetic
uuggauuucagguuuuuggauc

SEQ ID NO: 159363 - RNA, 23 nt, Artificial Sequence
  Synthetic
uuuggauuucagguuuuuggauc

SEQ ID NO: 159364 - RNA, 24 nt, Artificial Sequence
  Synthetic
auuuggauuucagguuuuuggauc

SEQ ID NO: 159365 - RNA, 18 nt, Artificial Sequence
  Synthetic
aaacuauaggccaauauc

SEQ ID NO: 159366 - RNA, 19 nt, Artificial Sequence
  Synthetic
aaaacuauaggccaauauc

SEQ ID NO: 159367 - RNA, 21 nt, Artificial Sequence
  Synthetic
agaaaacuauaggccaauauc

SEQ ID NO: 159368 - RNA, 22 nt, Artificial Sequence
  Synthetic
aagaaaacuauaggccaauauc

SEQ ID NO: 159369 - RNA, 23 nt, Artificial Sequence
  Synthetic
aaagaaaacuauaggccaauauc

SEQ ID NO: 159370 - RNA, 21 nt, Artificial Sequence
  Synthetic
aucugacaaagggcuaauauc

SEQ ID NO: 159371 - RNA, 22 nt, Artificial Sequence
  Synthetic
caucugacaaagggcuaauauc

SEQ ID NO: 159372 - RNA, 23 nt, Artificial Sequence
  Synthetic
ccaucugacaaagggcuaauauc

SEQ ID NO: 159373 - RNA, 24 nt, Artificial Sequence
  Synthetic
cccaucugacaaagggcuaauauc

SEQ ID NO: 159374 - RNA, 23 nt, Artificial Sequence
  Synthetic
ucaucugacaaagggcuaauauc

SEQ ID NO: 159375 - RNA, 24 nt, Artificial Sequence
  Synthetic
cucaucugacaaagggcuaauauc

SEQ ID NO: 159376 - RNA, 18 nt, Artificial Sequence
  Synthetic
uuugcccaugccuauauc

SEQ ID NO: 159377 - RNA, 19 nt, Artificial Sequence
  Synthetic
cuuugcccaugccuauauc

SEQ ID NO: 159378 - RNA, 20 nt, Artificial Sequence
  Synthetic
ucuuugcccaugccuauauc

SEQ ID NO: 159379 - RNA, 22 nt, Artificial Sequence
  Synthetic
agucuuugcccaugccuauauc

SEQ ID NO: 159380 - RNA, 23 nt, Artificial Sequence
  Synthetic
aagucuuugcccaugccuauauc

SEQ ID NO: 159381 - RNA, 18 nt, Artificial Sequence
  Synthetic
agcauauuuuuuucuauc

SEQ ID NO: 159382 - RNA, 19 nt, Artificial Sequence
  Synthetic
uagcauauuuuuuucuauc

SEQ ID NO: 159383 - RNA, 20 nt, Artificial Sequence
  Synthetic
cuagcauauuuuuuucuauc

SEQ ID NO: 159384 - RNA, 21 nt, Artificial Sequence
  Synthetic
caagaaauaacuacaaguauc

SEQ ID NO: 159385 - RNA, 22 nt, Artificial Sequence
  Synthetic
ucaagaaauaacuacaaguauc

SEQ ID NO: 159386 - RNA, 23 nt, Artificial Sequence
  Synthetic
aucaagaaauaacuacaaguauc

SEQ ID NO: 159387 - RNA, 24 nt, Artificial Sequence
  Synthetic
aaucaagaaauaacuacaaguauc

SEQ ID NO: 159388 - RNA, 18 nt, Artificial Sequence
  Synthetic
aauacuuuggcauguauc

SEQ ID NO: 159389 - RNA, 19 nt, Artificial Sequence
  Synthetic
aaauacuuuggcauguauc

SEQ ID NO: 159390 - RNA, 20 nt, Artificial Sequence
  Synthetic
aaaauacuuuggcauguauc

SEQ ID NO: 159391 - RNA, 18 nt, Artificial Sequence
  Synthetic
acagacuguacuuguauc

SEQ ID NO: 159392 - RNA, 19 nt, Artificial Sequence
  Synthetic
uacagacuguacuuguauc

SEQ ID NO: 159393 - RNA, 20 nt, Artificial Sequence
  Synthetic
uuacagacuguacuuguauc

SEQ ID NO: 159394 - RNA, 18 nt, Artificial Sequence
  Synthetic
ugacaaagggcuauuauc

SEQ ID NO: 159395 - RNA, 19 nt, Artificial Sequence
  Synthetic
cugacaaagggcuauuauc

SEQ ID NO: 159396 - RNA, 20 nt, Artificial Sequence
  Synthetic
ucugacaaagggcuauuauc

SEQ ID NO: 159397 - RNA, 21 nt, Artificial Sequence
  Synthetic
aucugacaaagggcuauuauc

SEQ ID NO: 159398 - RNA, 22 nt, Artificial Sequence
  Synthetic
caucugacaaagggcuauuauc

SEQ ID NO: 159399 - RNA, 23 nt, Artificial Sequence
  Synthetic
ccaucugacaaagggcuauuauc

SEQ ID NO: 159400 - RNA, 24 nt, Artificial Sequence
  Synthetic
uccaucugacaaagggcuauuauc

SEQ ID NO: 159401 - RNA, 18 nt, Artificial Sequence
  Synthetic
uuucucauaguuuuuauc

SEQ ID NO: 159402 - RNA, 19 nt, Artificial Sequence
  Synthetic
uuuucucauaguuuuuauc

SEQ ID NO: 159403 - RNA, 21 nt, Artificial Sequence
  Synthetic
aguuuucucauaguuuuuauc

SEQ ID NO: 159404 - RNA, 22 nt, Artificial Sequence
  Synthetic
caguuuucucauaguuuuuauc

SEQ ID NO: 159405 - RNA, 23 nt, Artificial Sequence
  Synthetic
ccaguuuucucauaguuuuuauc

SEQ ID NO: 159406 - RNA, 24 nt, Artificial Sequence
  Synthetic
cccaguuuucucauaguuuuuauc

SEQ ID NO: 159407 - RNA, 18 nt, Artificial Sequence
  Synthetic
ccuuuucccagaaaacuc

SEQ ID NO: 159408 - RNA, 19 nt, Artificial Sequence
  Synthetic
uccuuuucccagaaaacuc

SEQ ID NO: 159409 - RNA, 20 nt, Artificial Sequence
  Synthetic
cuccuuuucccagaaaacuc

SEQ ID NO: 159410 - RNA, 18 nt, Artificial Sequence
  Synthetic
cuaguaaaucagaaacuc

SEQ ID NO: 159411 - RNA, 20 nt, Artificial Sequence
  Synthetic
agcuaguaaaucagaaacuc

SEQ ID NO: 159412 - RNA, 22 nt, Artificial Sequence
  Synthetic
agagcuaguaaaucagaaacuc

SEQ ID NO: 159413 - RNA, 23 nt, Artificial Sequence
  Synthetic
cagagcuaguaaaucagaaacuc

SEQ ID NO: 159414 - RNA, 24 nt, Artificial Sequence
  Synthetic
ccagagcuaguaaaucagaaacuc

SEQ ID NO: 159415 - RNA, 19 nt, Artificial Sequence
  Synthetic
agaggauguauggaaacuc

SEQ ID NO: 159416 - RNA, 20 nt, Artificial Sequence
  Synthetic
cagaggauguauggaaacuc

SEQ ID NO: 159417 - RNA, 21 nt, Artificial Sequence
  Synthetic
ucagaggauguauggaaacuc

SEQ ID NO: 159418 - RNA, 22 nt, Artificial Sequence
  Synthetic
uucagaggauguauggaaacuc

SEQ ID NO: 159419 - RNA, 23 nt, Artificial Sequence
  Synthetic
uuucagaggauguauggaaacuc

SEQ ID NO: 159420 - RNA, 24 nt, Artificial Sequence
  Synthetic
auuucagaggauguauggaaacuc

SEQ ID NO: 159421 - RNA, 18 nt, Artificial Sequence
  Synthetic
auauuuuaaaaagaacuc

SEQ ID NO: 159422 - RNA, 19 nt, Artificial Sequence
  Synthetic
uauauuuuaaaaagaacuc

SEQ ID NO: 159423 - RNA, 20 nt, Artificial Sequence
  Synthetic
uuauauuuuaaaaagaacuc

SEQ ID NO: 159424 - RNA, 21 nt, Artificial Sequence
  Synthetic
acuaguuaaaagaaugaacuc

SEQ ID NO: 159425 - RNA, 22 nt, Artificial Sequence
  Synthetic
uacuaguuaaaagaaugaacuc

SEQ ID NO: 159426 - RNA, 23 nt, Artificial Sequence
  Synthetic
auacuaguuaaaagaaugaacuc

SEQ ID NO: 159427 - RNA, 24 nt, Artificial Sequence
  Synthetic
cauacuaguuaaaagaaugaacuc

SEQ ID NO: 159428 - RNA, 18 nt, Artificial Sequence
  Synthetic
agacagcagagauaacuc

SEQ ID NO: 159429 - RNA, 20 nt, Artificial Sequence
  Synthetic
agagacagcagagauaacuc

SEQ ID NO: 159430 - RNA, 18 nt, Artificial Sequence
  Synthetic
uuguaagugaaguaacuc

SEQ ID NO: 159431 - RNA, 19 nt, Artificial Sequence
  Synthetic
auuguaagugaaguaacuc

SEQ ID NO: 159432 - RNA, 20 nt, Artificial Sequence
  Synthetic
cauuguaagugaaguaacuc

SEQ ID NO: 159433 - RNA, 21 nt, Artificial Sequence
  Synthetic
ucauuguaagugaaguaacuc

SEQ ID NO: 159434 - RNA, 22 nt, Artificial Sequence
  Synthetic
aucauuguaagugaaguaacuc

SEQ ID NO: 159435 - RNA, 23 nt, Artificial Sequence
  Synthetic
uaucauuguaagugaaguaacuc

SEQ ID NO: 159436 - RNA, 24 nt, Artificial Sequence
  Synthetic
cuaucauuguaagugaaguaacuc

SEQ ID NO: 159437 - RNA, 21 nt, Artificial Sequence
  Synthetic
uucucaaccuuagcuacacuc

SEQ ID NO: 159438 - RNA, 22 nt, Artificial Sequence
  Synthetic
uuucucaaccuuagcuacacuc

SEQ ID NO: 159439 - RNA, 24 nt, Artificial Sequence
  Synthetic
uguuucucaaccuuagcuacacuc

SEQ ID NO: 159440 - RNA, 18 nt, Artificial Sequence
  Synthetic
agacacuuuacuagacuc

SEQ ID NO: 159441 - RNA, 19 nt, Artificial Sequence
  Synthetic
cagacacuuuacuagacuc

SEQ ID NO: 159442 - RNA, 20 nt, Artificial Sequence
  Synthetic
ccagacacuuuacuagacuc

SEQ ID NO: 159443 - RNA, 19 nt, Artificial Sequence
  Synthetic
agacuuuggacuuggacuc

SEQ ID NO: 159444 - RNA, 21 nt, Artificial Sequence
  Synthetic
ugagacuuuggacuuggacuc

SEQ ID NO: 159445 - RNA, 22 nt, Artificial Sequence
  Synthetic
augagacuuuggacuuggacuc

SEQ ID NO: 159446 - RNA, 24 nt, Artificial Sequence
  Synthetic
agaugagacuuuggacuuggacuc

SEQ ID NO: 159447 - RNA, 21 nt, Artificial Sequence
  Synthetic
aacagaaaccaggaucuacuc

SEQ ID NO: 159448 - RNA, 22 nt, Artificial Sequence
  Synthetic
caacagaaaccaggaucuacuc

SEQ ID NO: 159449 - RNA, 23 nt, Artificial Sequence
  Synthetic
acaacagaaaccaggaucuacuc

SEQ ID NO: 159450 - RNA, 24 nt, Artificial Sequence
  Synthetic
aacaacagaaaccaggaucuacuc

SEQ ID NO: 159451 - RNA, 21 nt, Artificial Sequence
  Synthetic
acaaaaucuauucaaaaccuc

SEQ ID NO: 159452 - RNA, 22 nt, Artificial Sequence
  Synthetic
aacaaaaucuauucaaaaccuc

SEQ ID NO: 159453 - RNA, 23 nt, Artificial Sequence
  Synthetic
caacaaaaucuauucaaaaccuc

SEQ ID NO: 159454 - RNA, 24 nt, Artificial Sequence
  Synthetic
acaacaaaaucuauucaaaaccuc

SEQ ID NO: 159455 - RNA, 18 nt, Artificial Sequence
  Synthetic
uucuccugccuuaaccuc

SEQ ID NO: 159456 - RNA, 19 nt, Artificial Sequence
  Synthetic
auucuccugccuuaaccuc

SEQ ID NO: 159457 - RNA, 20 nt, Artificial Sequence
  Synthetic
cauucuccugccuuaaccuc

SEQ ID NO: 159458 - RNA, 21 nt, Artificial Sequence
  Synthetic
ccauucuccugccuuaaccuc

SEQ ID NO: 159459 - RNA, 23 nt, Artificial Sequence
  Synthetic
cgccauucuccugccuuaaccuc

SEQ ID NO: 159460 - RNA, 24 nt, Artificial Sequence
  Synthetic
acgccauucuccugccuuaaccuc

SEQ ID NO: 159461 - RNA, 18 nt, Artificial Sequence
  Synthetic
cacagcaaccuccaccuc

SEQ ID NO: 159462 - RNA, 19 nt, Artificial Sequence
  Synthetic
ucacagcaaccuccaccuc

SEQ ID NO: 159463 - RNA, 20 nt, Artificial Sequence
  Synthetic
cucacagcaaccuccaccuc

SEQ ID NO: 159464 - RNA, 23 nt, Artificial Sequence
  Synthetic
uggcucacagcaaccuccaccuc

SEQ ID NO: 159465 - RNA, 24 nt, Artificial Sequence
  Synthetic
uuggcucacagcaaccuccaccuc

SEQ ID NO: 159466 - RNA, 18 nt, Artificial Sequence
  Synthetic
caccgcaaccuccaccuc

SEQ ID NO: 159467 - RNA, 19 nt, Artificial Sequence
  Synthetic
ucaccgcaaccuccaccuc

SEQ ID NO: 159468 - RNA, 20 nt, Artificial Sequence
  Synthetic
cucaccgcaaccuccaccuc

SEQ ID NO: 159469 - RNA, 23 nt, Artificial Sequence
  Synthetic
uggcucaccgcaaccuccaccuc

SEQ ID NO: 159470 - RNA, 24 nt, Artificial Sequence
  Synthetic
uuggcucaccgcaaccuccaccuc

SEQ ID NO: 159471 - RNA, 18 nt, Artificial Sequence
  Synthetic
ucacugcaccuccaccuc

SEQ ID NO: 159472 - RNA, 19 nt, Artificial Sequence
  Synthetic
cucacugcaccuccaccuc

SEQ ID NO: 159473 - RNA, 22 nt, Artificial Sequence
  Synthetic
uggcucacugcaccuccaccuc

SEQ ID NO: 159474 - RNA, 23 nt, Artificial Sequence
  Synthetic
uuggcucacugcaccuccaccuc

SEQ ID NO: 159475 - RNA, 24 nt, Artificial Sequence
  Synthetic
cuuggcucacugcaccuccaccuc

SEQ ID NO: 159476 - RNA, 24 nt, Artificial Sequence
  Synthetic
ucggcucaccgcaagcuccaccuc

SEQ ID NO: 159477 - RNA, 22 nt, Artificial Sequence
  Synthetic
agcucacugcaagcuccaccuc

SEQ ID NO: 159478 - RNA, 23 nt, Artificial Sequence
  Synthetic
cagcucacugcaagcuccaccuc

SEQ ID NO: 159479 - RNA, 24 nt, Artificial Sequence
  Synthetic
ucagcucacugcaagcuccaccuc

SEQ ID NO: 159480 - RNA, 23 nt, Artificial Sequence
  Synthetic
cggcucacugcaagcuccaccuc

SEQ ID NO: 159481 - RNA, 24 nt, Artificial Sequence
  Synthetic
ucggcucacugcaagcuccaccuc

SEQ ID NO: 159482 - RNA, 20 nt, Artificial Sequence
  Synthetic
uggguggaucacuugaccuc

SEQ ID NO: 159483 - RNA, 23 nt, Artificial Sequence
  Synthetic
agguggguggaucacuugaccuc

SEQ ID NO: 159484 - RNA, 18 nt, Artificial Sequence
  Synthetic
uugccacuuuuauaccuc

SEQ ID NO: 159485 - RNA, 19 nt, Artificial Sequence
  Synthetic
cuugccacuuuuauaccuc

SEQ ID NO: 159486 - RNA, 20 nt, Artificial Sequence
  Synthetic
ucuugccacuuuuauaccuc

SEQ ID NO: 159487 - RNA, 21 nt, Artificial Sequence
  Synthetic
cucuugccacuuuuauaccuc

SEQ ID NO: 159488 - RNA, 22 nt, Artificial Sequence
  Synthetic
ccucuugccacuuuuauaccuc

SEQ ID NO: 159489 - RNA, 24 nt, Artificial Sequence
  Synthetic
agccucuugccacuuuuauaccuc

SEQ ID NO: 159490 - RNA, 18 nt, Artificial Sequence
  Synthetic
cacugcaacuucuaccuc

SEQ ID NO: 159491 - RNA, 19 nt, Artificial Sequence
  Synthetic
ucacugcaacuucuaccuc

SEQ ID NO: 159492 - RNA, 20 nt, Artificial Sequence
  Synthetic
cucacugcaacuucuaccuc

SEQ ID NO: 159493 - RNA, 23 nt, Artificial Sequence
  Synthetic
cggcucacugcaacuucuaccuc

SEQ ID NO: 159494 - RNA, 24 nt, Artificial Sequence
  Synthetic
ucggcucacugcaacuucuaccuc

SEQ ID NO: 159495 - RNA, 21 nt, Artificial Sequence
  Synthetic
uuucuccucucaacaacccuc

SEQ ID NO: 159496 - RNA, 22 nt, Artificial Sequence
  Synthetic
uuuucuccucucaacaacccuc

SEQ ID NO: 159497 - RNA, 23 nt, Artificial Sequence
  Synthetic
auuuucuccucucaacaacccuc

SEQ ID NO: 159498 - RNA, 24 nt, Artificial Sequence
  Synthetic
cauuuucuccucucaacaacccuc

SEQ ID NO: 159499 - RNA, 18 nt, Artificial Sequence
  Synthetic
aaguuuauuccaacccuc

SEQ ID NO: 159500 - RNA, 20 nt, Artificial Sequence
  Synthetic
agaaguuuauuccaacccuc

SEQ ID NO: 159501 - RNA, 21 nt, Artificial Sequence
  Synthetic
aagaaguuuauuccaacccuc

SEQ ID NO: 159502 - RNA, 24 nt, Artificial Sequence
  Synthetic
uggaagaaguuuauuccaacccuc

SEQ ID NO: 159503 - RNA, 18 nt, Artificial Sequence
  Synthetic
auugagggcuccacccuc

SEQ ID NO: 159504 - RNA, 21 nt, Artificial Sequence
  Synthetic
aggauugagggcuccacccuc

SEQ ID NO: 159505 - RNA, 22 nt, Artificial Sequence
  Synthetic
aaggauugagggcuccacccuc

SEQ ID NO: 159506 - RNA, 23 nt, Artificial Sequence
  Synthetic
uaaggauugagggcuccacccuc

SEQ ID NO: 159507 - RNA, 24 nt, Artificial Sequence
  Synthetic
uuaaggauugagggcuccacccuc

SEQ ID NO: 159508 - RNA, 19 nt, Artificial Sequence
  Synthetic
ugcaaccucugucccccuc

SEQ ID NO: 159509 - RNA, 20 nt, Artificial Sequence
  Synthetic
cugcaaccucugucccccuc

SEQ ID NO: 159510 - RNA, 21 nt, Artificial Sequence
  Synthetic
acugcaaccucugucccccuc

SEQ ID NO: 159511 - RNA, 22 nt, Artificial Sequence
  Synthetic
cacugcaaccucugucccccuc

SEQ ID NO: 159512 - RNA, 23 nt, Artificial Sequence
  Synthetic
ucacugcaaccucugucccccuc

SEQ ID NO: 159513 - RNA, 24 nt, Artificial Sequence
  Synthetic
cucacugcaaccucugucccccuc

SEQ ID NO: 159514 - RNA, 18 nt, Artificial Sequence
  Synthetic
uccucccaccucagccuc

SEQ ID NO: 159515 - RNA, 19 nt, Artificial Sequence
  Synthetic
auccucccaccucagccuc

SEQ ID NO: 159516 - RNA, 20 nt, Artificial Sequence
  Synthetic
aauccucccaccucagccuc

SEQ ID NO: 159517 - RNA, 21 nt, Artificial Sequence
  Synthetic
caauccucccaccucagccuc

SEQ ID NO: 159518 - RNA, 23 nt, Artificial Sequence
  Synthetic
agcaauccucccaccucagccuc

SEQ ID NO: 159519 - RNA, 24 nt, Artificial Sequence
  Synthetic
aagcaauccucccaccucagccuc

SEQ ID NO: 159520 - RNA, 24 nt, Artificial Sequence
  Synthetic
aggcaauccucccaccucagccuc

SEQ ID NO: 159521 - RNA, 18 nt, Artificial Sequence
  Synthetic
auccuccaccucagccuc

SEQ ID NO: 159522 - RNA, 20 nt, Artificial Sequence
  Synthetic
ugauccuccaccucagccuc

SEQ ID NO: 159523 - RNA, 23 nt, Artificial Sequence
  Synthetic
uggugauccuccaccucagccuc

SEQ ID NO: 159524 - RNA, 24 nt, Artificial Sequence
  Synthetic
cuggugauccuccaccucagccuc

SEQ ID NO: 159525 - RNA, 18 nt, Artificial Sequence
  Synthetic
ucaugucaccucagccuc

SEQ ID NO: 159526 - RNA, 19 nt, Artificial Sequence
  Synthetic
aucaugucaccucagccuc

SEQ ID NO: 159527 - RNA, 21 nt, Artificial Sequence
  Synthetic
agaucaugucaccucagccuc

SEQ ID NO: 159528 - RNA, 23 nt, Artificial Sequence
  Synthetic
agagaucaugucaccucagccuc

SEQ ID NO: 159529 - RNA, 24 nt, Artificial Sequence
  Synthetic
aagagaucaugucaccucagccuc

SEQ ID NO: 159530 - RNA, 21 nt, Artificial Sequence
  Synthetic
ugauucuccuaccucagccuc

SEQ ID NO: 159531 - RNA, 23 nt, Artificial Sequence
  Synthetic
agugauucuccuaccucagccuc

SEQ ID NO: 159532 - RNA, 24 nt, Artificial Sequence
  Synthetic
aagugauucuccuaccucagccuc

SEQ ID NO: 159533 - RNA, 18 nt, Artificial Sequence
  Synthetic
uucugguaccucagccuc

SEQ ID NO: 159534 - RNA, 19 nt, Artificial Sequence
  Synthetic
auucugguaccucagccuc

SEQ ID NO: 159535 - RNA, 21 nt, Artificial Sequence
  Synthetic
cgauucugguaccucagccuc

SEQ ID NO: 159536 - RNA, 23 nt, Artificial Sequence
  Synthetic
agcgauucugguaccucagccuc

SEQ ID NO: 159537 - RNA, 24 nt, Artificial Sequence
  Synthetic
aagcgauucugguaccucagccuc

SEQ ID NO: 159538 - RNA, 18 nt, Artificial Sequence
  Synthetic
ucuucccgccucagccuc

SEQ ID NO: 159539 - RNA, 19 nt, Artificial Sequence
  Synthetic
aucuucccgccucagccuc

SEQ ID NO: 159540 - RNA, 20 nt, Artificial Sequence
  Synthetic
aaucuucccgccucagccuc

SEQ ID NO: 159541 - RNA, 21 nt, Artificial Sequence
  Synthetic
caaucuucccgccucagccuc

SEQ ID NO: 159542 - RNA, 23 nt, Artificial Sequence
  Synthetic
agcaaucuucccgccucagccuc

SEQ ID NO: 159543 - RNA, 24 nt, Artificial Sequence
  Synthetic
aagcaaucuucccgccucagccuc

SEQ ID NO: 159544 - RNA, 18 nt, Artificial Sequence
  Synthetic
uuccccugccucagccuc

SEQ ID NO: 159545 - RNA, 19 nt, Artificial Sequence
  Synthetic
auuccccugccucagccuc

SEQ ID NO: 159546 - RNA, 21 nt, Artificial Sequence
  Synthetic
cgauuccccugccucagccuc

SEQ ID NO: 159547 - RNA, 23 nt, Artificial Sequence
  Synthetic
agcgauuccccugccucagccuc

SEQ ID NO: 159548 - RNA, 24 nt, Artificial Sequence
  Synthetic
aagcgauuccccugccucagccuc

SEQ ID NO: 159549 - RNA, 18 nt, Artificial Sequence
  Synthetic
uccuccugccucagccuc

SEQ ID NO: 159550 - RNA, 19 nt, Artificial Sequence
  Synthetic
auccuccugccucagccuc

SEQ ID NO: 159551 - RNA, 20 nt, Artificial Sequence
  Synthetic
cauccuccugccucagccuc

SEQ ID NO: 159552 - RNA, 21 nt, Artificial Sequence
  Synthetic
ccauccuccugccucagccuc

SEQ ID NO: 159553 - RNA, 23 nt, Artificial Sequence
  Synthetic
ugccauccuccugccucagccuc

SEQ ID NO: 159554 - RNA, 24 nt, Artificial Sequence
  Synthetic
augccauccuccugccucagccuc

SEQ ID NO: 159555 - RNA, 19 nt, Artificial Sequence
  Synthetic
auucuccugccucagccuc

SEQ ID NO: 159556 - RNA, 21 nt, Artificial Sequence
  Synthetic
ccauucuccugccucagccuc

SEQ ID NO: 159557 - RNA, 23 nt, Artificial Sequence
  Synthetic
cgccauucuccugccucagccuc

SEQ ID NO: 159558 - RNA, 24 nt, Artificial Sequence
  Synthetic
acgccauucuccugccucagccuc

SEQ ID NO: 159559 - RNA, 23 nt, Artificial Sequence
  Synthetic
ugccauucuccugccucagccuc

SEQ ID NO: 159560 - RNA, 24 nt, Artificial Sequence
  Synthetic
augccauucuccugccucagccuc

SEQ ID NO: 159561 - RNA, 23 nt, Artificial Sequence
  Synthetic
agggauucuccugccucagccuc

SEQ ID NO: 159562 - RNA, 24 nt, Artificial Sequence
  Synthetic
aagggauucuccugccucagccuc

SEQ ID NO: 159563 - RNA, 20 nt, Artificial Sequence
  Synthetic
uauucuccugccucagccuc

SEQ ID NO: 159564 - RNA, 21 nt, Artificial Sequence
  Synthetic
cuauucuccugccucagccuc

SEQ ID NO: 159565 - RNA, 23 nt, Artificial Sequence
  Synthetic
agcuauucuccugccucagccuc

SEQ ID NO: 159566 - RNA, 24 nt, Artificial Sequence
  Synthetic
aagcuauucuccugccucagccuc

SEQ ID NO: 159567 - RNA, 18 nt, Artificial Sequence
  Synthetic
uuuuccugccucagccuc

SEQ ID NO: 159568 - RNA, 19 nt, Artificial Sequence
  Synthetic
auuuuccugccucagccuc

SEQ ID NO: 159569 - RNA, 20 nt, Artificial Sequence
  Synthetic
cauuuuccugccucagccuc

SEQ ID NO: 159570 - RNA, 21 nt, Artificial Sequence
  Synthetic
ccauuuuccugccucagccuc

SEQ ID NO: 159571 - RNA, 22 nt, Artificial Sequence
  Synthetic
accauuuuccugccucagccuc

SEQ ID NO: 159572 - RNA, 23 nt, Artificial Sequence
  Synthetic
caccauuuuccugccucagccuc

SEQ ID NO: 159573 - RNA, 24 nt, Artificial Sequence
  Synthetic
acaccauuuuccugccucagccuc

SEQ ID NO: 159574 - RNA, 18 nt, Artificial Sequence
  Synthetic
uucuugugccucagccuc

SEQ ID NO: 159575 - RNA, 21 nt, Artificial Sequence
  Synthetic
cgguucuugugccucagccuc

SEQ ID NO: 159576 - RNA, 23 nt, Artificial Sequence
  Synthetic
agcgguucuugugccucagccuc

SEQ ID NO: 159577 - RNA, 24 nt, Artificial Sequence
  Synthetic
aagcgguucuugugccucagccuc

SEQ ID NO: 159578 - RNA, 18 nt, Artificial Sequence
  Synthetic
uucucccaucucagccuc

SEQ ID NO: 159579 - RNA, 19 nt, Artificial Sequence
  Synthetic
auucucccaucucagccuc

SEQ ID NO: 159580 - RNA, 21 nt, Artificial Sequence
  Synthetic
cgauucucccaucucagccuc

SEQ ID NO: 159581 - RNA, 22 nt, Artificial Sequence
  Synthetic
acgauucucccaucucagccuc

SEQ ID NO: 159582 - RNA, 23 nt, Artificial Sequence
  Synthetic
aacgauucucccaucucagccuc

SEQ ID NO: 159583 - RNA, 24 nt, Artificial Sequence
  Synthetic
aaacgauucucccaucucagccuc

SEQ ID NO: 159584 - RNA, 18 nt, Artificial Sequence
  Synthetic
uccuccugucucagccuc

SEQ ID NO: 159585 - RNA, 19 nt, Artificial Sequence
  Synthetic
auccuccugucucagccuc

SEQ ID NO: 159586 - RNA, 20 nt, Artificial Sequence
  Synthetic
uauccuccugucucagccuc

SEQ ID NO: 159587 - RNA, 21 nt, Artificial Sequence
  Synthetic
cuauccuccugucucagccuc

SEQ ID NO: 159588 - RNA, 23 nt, Artificial Sequence
  Synthetic
agcuauccuccugucucagccuc

SEQ ID NO: 159589 - RNA, 24 nt, Artificial Sequence
  Synthetic
aagcuauccuccugucucagccuc

SEQ ID NO: 159590 - RNA, 18 nt, Artificial Sequence
  Synthetic
uucuucugcuucagccuc

SEQ ID NO: 159591 - RNA, 19 nt, Artificial Sequence
  Synthetic
auucuucugcuucagccuc

SEQ ID NO: 159592 - RNA, 20 nt, Artificial Sequence
  Synthetic
aauucuucugcuucagccuc

SEQ ID NO: 159593 - RNA, 21 nt, Artificial Sequence
  Synthetic
caauucuucugcuucagccuc

SEQ ID NO: 159594 - RNA, 23 nt, Artificial Sequence
  Synthetic
agcaauucuucugcuucagccuc

SEQ ID NO: 159595 - RNA, 18 nt, Artificial Sequence
  Synthetic
cuggagugcaguagccuc

SEQ ID NO: 159596 - RNA, 21 nt, Artificial Sequence
  Synthetic
aggcuggagugcaguagccuc

SEQ ID NO: 159597 - RNA, 22 nt, Artificial Sequence
  Synthetic
caggcuggagugcaguagccuc

SEQ ID NO: 159598 - RNA, 23 nt, Artificial Sequence
  Synthetic
ccaggcuggagugcaguagccuc

SEQ ID NO: 159599 - RNA, 24 nt, Artificial Sequence
  Synthetic
cccaggcuggagugcaguagccuc

SEQ ID NO: 159600 - RNA, 18 nt, Artificial Sequence
  Synthetic
uucucuugccuuagccuc

SEQ ID NO: 159601 - RNA, 19 nt, Artificial Sequence
  Synthetic
auucucuugccuuagccuc

SEQ ID NO: 159602 - RNA, 21 nt, Artificial Sequence
  Synthetic
agauucucuugccuuagccuc

SEQ ID NO: 159603 - RNA, 23 nt, Artificial Sequence
  Synthetic
agagauucucuugccuuagccuc

SEQ ID NO: 159604 - RNA, 24 nt, Artificial Sequence
  Synthetic
aagagauucucuugccuuagccuc

SEQ ID NO: 159605 - RNA, 18 nt, Artificial Sequence
  Synthetic
cacugcaaacuccgccuc

SEQ ID NO: 159606 - RNA, 19 nt, Artificial Sequence
  Synthetic
ucacugcaaacuccgccuc

SEQ ID NO: 159607 - RNA, 20 nt, Artificial Sequence
  Synthetic
cucacugcaaacuccgccuc

SEQ ID NO: 159608 - RNA, 23 nt, Artificial Sequence
  Synthetic
cggcucacugcaaacuccgccuc

SEQ ID NO: 159609 - RNA, 24 nt, Artificial Sequence
  Synthetic
ucggcucacugcaaacuccgccuc

SEQ ID NO: 159610 - RNA, 22 nt, Artificial Sequence
  Synthetic
agcucacugcaaccuccgccuc

SEQ ID NO: 159611 - RNA, 23 nt, Artificial Sequence
  Synthetic
uagcucacugcaaccuccgccuc

SEQ ID NO: 159612 - RNA, 24 nt, Artificial Sequence
  Synthetic
uuagcucacugcaaccuccgccuc

SEQ ID NO: 159613 - RNA, 22 nt, Artificial Sequence
  Synthetic
cgcucacugcaaccuccgccuc

SEQ ID NO: 159614 - RNA, 23 nt, Artificial Sequence
  Synthetic
ccgcucacugcaaccuccgccuc

SEQ ID NO: 159615 - RNA, 24 nt, Artificial Sequence
  Synthetic
uccgcucacugcaaccuccgccuc

SEQ ID NO: 159616 - RNA, 24 nt, Artificial Sequence
  Synthetic
ugggcucacugcaaccuccgccuc

SEQ ID NO: 159617 - RNA, 21 nt, Artificial Sequence
  Synthetic
ucucacugcaaccuccgccuc

SEQ ID NO: 159618 - RNA, 23 nt, Artificial Sequence
  Synthetic
ugucucacugcaaccuccgccuc

SEQ ID NO: 159619 - RNA, 24 nt, Artificial Sequence
  Synthetic
uugucucacugcaaccuccgccuc

SEQ ID NO: 159620 - RNA, 20 nt, Artificial Sequence
  Synthetic
uucacugcaaccuccgccuc

SEQ ID NO: 159621 - RNA, 21 nt, Artificial Sequence
  Synthetic
uuucacugcaaccuccgccuc

SEQ ID NO: 159622 - RNA, 22 nt, Artificial Sequence
  Synthetic
cuuucacugcaaccuccgccuc

SEQ ID NO: 159623 - RNA, 23 nt, Artificial Sequence
  Synthetic
ccuuucacugcaaccuccgccuc

SEQ ID NO: 159624 - RNA, 24 nt, Artificial Sequence
  Synthetic
uccuuucacugcaaccuccgccuc

SEQ ID NO: 159625 - RNA, 18 nt, Artificial Sequence
  Synthetic
cagugcaaccuccgccuc

SEQ ID NO: 159626 - RNA, 19 nt, Artificial Sequence
  Synthetic
ucagugcaaccuccgccuc

SEQ ID NO: 159627 - RNA, 20 nt, Artificial Sequence
  Synthetic
cucagugcaaccuccgccuc

SEQ ID NO: 159628 - RNA, 23 nt, Artificial Sequence
  Synthetic
cggcucagugcaaccuccgccuc

SEQ ID NO: 159629 - RNA, 24 nt, Artificial Sequence
  Synthetic
ucggcucagugcaaccuccgccuc

SEQ ID NO: 159630 - RNA, 18 nt, Artificial Sequence
  Synthetic
cacugcgaccuccgccuc

SEQ ID NO: 159631 - RNA, 19 nt, Artificial Sequence
  Synthetic
ucacugcgaccuccgccuc

SEQ ID NO: 159632 - RNA, 20 nt, Artificial Sequence
  Synthetic
cucacugcgaccuccgccuc

SEQ ID NO: 159633 - RNA, 23 nt, Artificial Sequence
  Synthetic
uggcucacugcgaccuccgccuc

SEQ ID NO: 159634 - RNA, 24 nt, Artificial Sequence
  Synthetic
uuggcucacugcgaccuccgccuc

SEQ ID NO: 159635 - RNA, 23 nt, Artificial Sequence
  Synthetic
aggcucacugcaagcuccgccuc

SEQ ID NO: 159636 - RNA, 24 nt, Artificial Sequence
  Synthetic
uaggcucacugcaagcuccgccuc

SEQ ID NO: 159637 - RNA, 23 nt, Artificial Sequence
  Synthetic
cggcucacugcaagcuccgccuc

SEQ ID NO: 159638 - RNA, 24 nt, Artificial Sequence
  Synthetic
ucggcucacugcaagcuccgccuc

SEQ ID NO: 159639 - RNA, 22 nt, Artificial Sequence
  Synthetic
ugcucacugcaagcuccgccuc

SEQ ID NO: 159640 - RNA, 23 nt, Artificial Sequence
  Synthetic
cugcucacugcaagcuccgccuc

SEQ ID NO: 159641 - RNA, 24 nt, Artificial Sequence
  Synthetic
ucugcucacugcaagcuccgccuc

SEQ ID NO: 159642 - RNA, 18 nt, Artificial Sequence
  Synthetic
uccuucagccucggccuc

SEQ ID NO: 159643 - RNA, 19 nt, Artificial Sequence
  Synthetic
auccuucagccucggccuc

SEQ ID NO: 159644 - RNA, 21 nt, Artificial Sequence
  Synthetic
ugauccuucagccucggccuc

SEQ ID NO: 159645 - RNA, 23 nt, Artificial Sequence
  Synthetic
agugauccuucagccucggccuc

SEQ ID NO: 159646 - RNA, 24 nt, Artificial Sequence
  Synthetic
aagugauccuucagccucggccuc

SEQ ID NO: 159647 - RNA, 18 nt, Artificial Sequence
  Synthetic
caccacaaccuaugccuc

SEQ ID NO: 159648 - RNA, 19 nt, Artificial Sequence
  Synthetic
ucaccacaaccuaugccuc

SEQ ID NO: 159649 - RNA, 20 nt, Artificial Sequence
  Synthetic
cucaccacaaccuaugccuc

SEQ ID NO: 159650 - RNA, 21 nt, Artificial Sequence
  Synthetic
ucucaccacaaccuaugccuc

SEQ ID NO: 159651 - RNA, 22 nt, Artificial Sequence
  Synthetic
cucucaccacaaccuaugccuc

SEQ ID NO: 159652 - RNA, 23 nt, Artificial Sequence
  Synthetic
ucucucaccacaaccuaugccuc

SEQ ID NO: 159653 - RNA, 24 nt, Artificial Sequence
  Synthetic
uucucucaccacaaccuaugccuc

SEQ ID NO: 159654 - RNA, 18 nt, Artificial Sequence
  Synthetic
cacugcaacaucugccuc

SEQ ID NO: 159655 - RNA, 19 nt, Artificial Sequence
  Synthetic
ucacugcaacaucugccuc

SEQ ID NO: 159656 - RNA, 20 nt, Artificial Sequence
  Synthetic
cucacugcaacaucugccuc

SEQ ID NO: 159657 - RNA, 23 nt, Artificial Sequence
  Synthetic
cggcucacugcaacaucugccuc

SEQ ID NO: 159658 - RNA, 24 nt, Artificial Sequence
  Synthetic
ucggcucacugcaacaucugccuc

SEQ ID NO: 159659 - RNA, 18 nt, Artificial Sequence
  Synthetic
cacugcaaacucugccuc

SEQ ID NO: 159660 - RNA, 19 nt, Artificial Sequence
  Synthetic
ucacugcaaacucugccuc

SEQ ID NO: 159661 - RNA, 20 nt, Artificial Sequence
  Synthetic
cucacugcaaacucugccuc

SEQ ID NO: 159662 - RNA, 23 nt, Artificial Sequence
  Synthetic
cggcucacugcaaacucugccuc

SEQ ID NO: 159663 - RNA, 24 nt, Artificial Sequence
  Synthetic
ucggcucacugcaaacucugccuc

SEQ ID NO: 159664 - RNA, 18 nt, Artificial Sequence
  Synthetic
uacugcaaccucugccuc

SEQ ID NO: 159665 - RNA, 19 nt, Artificial Sequence
  Synthetic
uuacugcaaccucugccuc

SEQ ID NO: 159666 - RNA, 20 nt, Artificial Sequence
  Synthetic
cuuacugcaaccucugccuc

SEQ ID NO: 159667 - RNA, 23 nt, Artificial Sequence
  Synthetic
cggcuuacugcaaccucugccuc

SEQ ID NO: 159668 - RNA, 24 nt, Artificial Sequence
  Synthetic
ucggcuuacugcaaccucugccuc

SEQ ID NO: 159669 - RNA, 18 nt, Artificial Sequence
  Synthetic
cacugccaccucugccuc

SEQ ID NO: 159670 - RNA, 19 nt, Artificial Sequence
  Synthetic
ucacugccaccucugccuc

SEQ ID NO: 159671 - RNA, 20 nt, Artificial Sequence
  Synthetic
cucacugccaccucugccuc

SEQ ID NO: 159672 - RNA, 23 nt, Artificial Sequence
  Synthetic
uggcucacugccaccucugccuc

SEQ ID NO: 159673 - RNA, 24 nt, Artificial Sequence
  Synthetic
uuggcucacugccaccucugccuc

SEQ ID NO: 159674 - RNA, 18 nt, Artificial Sequence
  Synthetic
cacugcagccucugccuc

SEQ ID NO: 159675 - RNA, 19 nt, Artificial Sequence
  Synthetic
ucacugcagccucugccuc

SEQ ID NO: 159676 - RNA, 20 nt, Artificial Sequence
  Synthetic
cucacugcagccucugccuc

SEQ ID NO: 159677 - RNA, 24 nt, Artificial Sequence
  Synthetic
ugggcucacugcagccucugccuc

SEQ ID NO: 159678 - RNA, 18 nt, Artificial Sequence
  Synthetic
uucuccugccucugccuc

SEQ ID NO: 159679 - RNA, 19 nt, Artificial Sequence
  Synthetic
auucuccugccucugccuc

SEQ ID NO: 159680 - RNA, 21 nt, Artificial Sequence
  Synthetic
cgauucuccugccucugccuc

SEQ ID NO: 159681 - RNA, 23 nt, Artificial Sequence
  Synthetic
agcgauucuccugccucugccuc

SEQ ID NO: 159682 - RNA, 24 nt, Artificial Sequence
  Synthetic
aagcgauucuccugccucugccuc

SEQ ID NO: 159683 - RNA, 22 nt, Artificial Sequence
  Synthetic
agcucacugcaagcucugccuc

SEQ ID NO: 159684 - RNA, 23 nt, Artificial Sequence
  Synthetic
cagcucacugcaagcucugccuc

SEQ ID NO: 159685 - RNA, 24 nt, Artificial Sequence
  Synthetic
ucagcucacugcaagcucugccuc

SEQ ID NO: 159686 - RNA, 24 nt, Artificial Sequence
  Synthetic
uuggcucacugcaagcucugccuc

SEQ ID NO: 159687 - RNA, 18 nt, Artificial Sequence
  Synthetic
cacugcaaucucugccuc

SEQ ID NO: 159688 - RNA, 19 nt, Artificial Sequence
  Synthetic
ucacugcaaucucugccuc

SEQ ID NO: 159689 - RNA, 20 nt, Artificial Sequence
  Synthetic
cucacugcaaucucugccuc

SEQ ID NO: 159690 - RNA, 22 nt, Artificial Sequence
  Synthetic
agcucacugcaaucucugccuc

SEQ ID NO: 159691 - RNA, 23 nt, Artificial Sequence
  Synthetic
cagcucacugcaaucucugccuc

SEQ ID NO: 159692 - RNA, 24 nt, Artificial Sequence
  Synthetic
ucagcucacugcaaucucugccuc

SEQ ID NO: 159693 - RNA, 18 nt, Artificial Sequence
  Synthetic
cacugcaacuucugccuc

SEQ ID NO: 159694 - RNA, 19 nt, Artificial Sequence
  Synthetic
ucacugcaacuucugccuc

SEQ ID NO: 159695 - RNA, 20 nt, Artificial Sequence
  Synthetic
cucacugcaacuucugccuc

SEQ ID NO: 159696 - RNA, 23 nt, Artificial Sequence
  Synthetic
cggcucacugcaacuucugccuc

SEQ ID NO: 159697 - RNA, 24 nt, Artificial Sequence
  Synthetic
ucggcucacugcaacuucugccuc

SEQ ID NO: 159698 - RNA, 18 nt, Artificial Sequence
  Synthetic
cacugcaaccuuugccuc

SEQ ID NO: 159699 - RNA, 19 nt, Artificial Sequence
  Synthetic
ucacugcaaccuuugccuc

SEQ ID NO: 159700 - RNA, 20 nt, Artificial Sequence
  Synthetic
cucacugcaaccuuugccuc

SEQ ID NO: 159701 - RNA, 23 nt, Artificial Sequence
  Synthetic
uggcucacugcaaccuuugccuc

SEQ ID NO: 159702 - RNA, 24 nt, Artificial Sequence
  Synthetic
uuggcucacugcaaccuuugccuc

SEQ ID NO: 159703 - RNA, 18 nt, Artificial Sequence
  Synthetic
uugccauggaaaauccuc

SEQ ID NO: 159704 - RNA, 19 nt, Artificial Sequence
  Synthetic
auugccauggaaaauccuc

SEQ ID NO: 159705 - RNA, 20 nt, Artificial Sequence
  Synthetic
cauugccauggaaaauccuc

SEQ ID NO: 159706 - RNA, 18 nt, Artificial Sequence
  Synthetic
ucuugccucagccuccuc

SEQ ID NO: 159707 - RNA, 19 nt, Artificial Sequence
  Synthetic
cucuugccucagccuccuc

SEQ ID NO: 159708 - RNA, 20 nt, Artificial Sequence
  Synthetic
ucucuugccucagccuccuc

SEQ ID NO: 159709 - RNA, 21 nt, Artificial Sequence
  Synthetic
uucucuugccucagccuccuc

SEQ ID NO: 159710 - RNA, 22 nt, Artificial Sequence
  Synthetic
auucucuugccucagccuccuc

SEQ ID NO: 159711 - RNA, 23 nt, Artificial Sequence
  Synthetic
cauucucuugccucagccuccuc

SEQ ID NO: 159712 - RNA, 24 nt, Artificial Sequence
  Synthetic
ccauucucuugccucagccuccuc

SEQ ID NO: 159713 - RNA, 18 nt, Artificial Sequence
  Synthetic
acagugugcagauuccuc

SEQ ID NO: 159714 - RNA, 20 nt, Artificial Sequence
  Synthetic
agacagugugcagauuccuc

SEQ ID NO: 159715 - RNA, 21 nt, Artificial Sequence
  Synthetic
aagacagugugcagauuccuc

SEQ ID NO: 159716 - RNA, 24 nt, Artificial Sequence
  Synthetic
uggaagacagugugcagauuccuc

SEQ ID NO: 159717 - RNA, 18 nt, Artificial Sequence
  Synthetic
acaguguggcgauuccuc

SEQ ID NO: 159718 - RNA, 20 nt, Artificial Sequence
  Synthetic
agacaguguggcgauuccuc

SEQ ID NO: 159719 - RNA, 21 nt, Artificial Sequence
  Synthetic
aagacaguguggcgauuccuc

SEQ ID NO: 159720 - RNA, 24 nt, Artificial Sequence
  Synthetic
uggaagacaguguggcgauuccuc

SEQ ID NO: 159721 - RNA, 18 nt, Artificial Sequence
  Synthetic
uuuccucuccuaaagcuc

SEQ ID NO: 159722 - RNA, 19 nt, Artificial Sequence
  Synthetic
uuuuccucuccuaaagcuc

SEQ ID NO: 159723 - RNA, 20 nt, Artificial Sequence
  Synthetic
uuuuuccucuccuaaagcuc

SEQ ID NO: 159724 - RNA, 18 nt, Artificial Sequence
  Synthetic
uuugcugugcagaagcuc

SEQ ID NO: 159725 - RNA, 19 nt, Artificial Sequence
  Synthetic
uuuugcugugcagaagcuc

SEQ ID NO: 159726 - RNA, 20 nt, Artificial Sequence
  Synthetic
cuuuugcugugcagaagcuc

SEQ ID NO: 159727 - RNA, 21 nt, Artificial Sequence
  Synthetic
ucuuuugcugugcagaagcuc

SEQ ID NO: 159728 - RNA, 22 nt, Artificial Sequence
  Synthetic
uucuuuugcugugcagaagcuc

SEQ ID NO: 159729 - RNA, 23 nt, Artificial Sequence
  Synthetic
uuucuuuugcugugcagaagcuc

SEQ ID NO: 159730 - RNA, 19 nt, Artificial Sequence
  Synthetic
ugaugagaauuuccagcuc

SEQ ID NO: 159731 - RNA, 20 nt, Artificial Sequence
  Synthetic
augaugagaauuuccagcuc

SEQ ID NO: 159732 - RNA, 20 nt, Artificial Sequence
  Synthetic
ugggcagauugcuugagcuc

SEQ ID NO: 159733 - RNA, 23 nt, Artificial Sequence
  Synthetic
aggugggcagauugcuugagcuc

SEQ ID NO: 159734 - RNA, 24 nt, Artificial Sequence
  Synthetic
aaggugggcagauugcuugagcuc

SEQ ID NO: 159735 - RNA, 19 nt, Artificial Sequence
  Synthetic
aggaggauugcuugagcuc

SEQ ID NO: 159736 - RNA, 22 nt, Artificial Sequence
  Synthetic
aggaggaggauugcuugagcuc

SEQ ID NO: 159737 - RNA, 23 nt, Artificial Sequence
  Synthetic
aaggaggaggauugcuugagcuc

SEQ ID NO: 159738 - RNA, 20 nt, Artificial Sequence
  Synthetic
ugggaggaucauuugagcuc

SEQ ID NO: 159739 - RNA, 23 nt, Artificial Sequence
  Synthetic
aggugggaggaucauuugagcuc

SEQ ID NO: 159740 - RNA, 18 nt, Artificial Sequence
  Synthetic
uccuucuaccucaggcuc

SEQ ID NO: 159741 - RNA, 19 nt, Artificial Sequence
  Synthetic
auccuucuaccucaggcuc

SEQ ID NO: 159742 - RNA, 21 nt, Artificial Sequence
  Synthetic
ugauccuucuaccucaggcuc

SEQ ID NO: 159743 - RNA, 23 nt, Artificial Sequence
  Synthetic
cgugauccuucuaccucaggcuc

SEQ ID NO: 159744 - RNA, 24 nt, Artificial Sequence
  Synthetic
acgugauccuucuaccucaggcuc

SEQ ID NO: 159745 - RNA, 18 nt, Artificial Sequence
  Synthetic
uucucgugccucaggcuc

SEQ ID NO: 159746 - RNA, 19 nt, Artificial Sequence
  Synthetic
auucucgugccucaggcuc

SEQ ID NO: 159747 - RNA, 21 nt, Artificial Sequence
  Synthetic
ugauucucgugccucaggcuc

SEQ ID NO: 159748 - RNA, 23 nt, Artificial Sequence
  Synthetic
agugauucucgugccucaggcuc

SEQ ID NO: 159749 - RNA, 24 nt, Artificial Sequence
  Synthetic
aagugauucucgugccucaggcuc

SEQ ID NO: 159750 - RNA, 21 nt, Artificial Sequence
  Synthetic
aguaggucuguugugaggcuc

SEQ ID NO: 159751 - RNA, 22 nt, Artificial Sequence
  Synthetic
caguaggucuguugugaggcuc

SEQ ID NO: 159752 - RNA, 23 nt, Artificial Sequence
  Synthetic
ucaguaggucuguugugaggcuc

SEQ ID NO: 159753 - RNA, 24 nt, Artificial Sequence
  Synthetic
uucaguaggucuguugugaggcuc

SEQ ID NO: 159754 - RNA, 19 nt, Artificial Sequence
  Synthetic
uggugaagaguaugggcuc

SEQ ID NO: 159755 - RNA, 20 nt, Artificial Sequence
  Synthetic
cuggugaagaguaugggcuc

SEQ ID NO: 159756 - RNA, 18 nt, Artificial Sequence
  Synthetic
ucagauucugcugggcuc

SEQ ID NO: 159757 - RNA, 19 nt, Artificial Sequence
  Synthetic
uucagauucugcugggcuc

SEQ ID NO: 159758 - RNA, 20 nt, Artificial Sequence
  Synthetic
uggaagaauauuccaugcuc

SEQ ID NO: 159759 - RNA, 21 nt, Artificial Sequence
  Synthetic
auggaagaauauuccaugcuc

SEQ ID NO: 159760 - RNA, 22 nt, Artificial Sequence
  Synthetic
aauggaagaauauuccaugcuc

SEQ ID NO: 159761 - RNA, 23 nt, Artificial Sequence
  Synthetic
aaauggaagaauauuccaugcuc

SEQ ID NO: 159762 - RNA, 24 nt, Artificial Sequence
  Synthetic
caaauggaagaauauuccaugcuc

SEQ ID NO: 159763 - RNA, 18 nt, Artificial Sequence
  Synthetic
auauuaucuaauaugcuc

SEQ ID NO: 159764 - RNA, 19 nt, Artificial Sequence
  Synthetic
aauauuaucuaauaugcuc

SEQ ID NO: 159765 - RNA, 20 nt, Artificial Sequence
  Synthetic
caauauuaucuaauaugcuc

SEQ ID NO: 159766 - RNA, 18 nt, Artificial Sequence
  Synthetic
aaacugaacaaccugcuc

SEQ ID NO: 159767 - RNA, 21 nt, Artificial Sequence
  Synthetic
uggaaacugaacaaccugcuc

SEQ ID NO: 159768 - RNA, 22 nt, Artificial Sequence
  Synthetic
auggaaacugaacaaccugcuc

SEQ ID NO: 159769 - RNA, 23 nt, Artificial Sequence
  Synthetic
cauggaaacugaacaaccugcuc

SEQ ID NO: 159770 - RNA, 24 nt, Artificial Sequence
  Synthetic
acauggaaacugaacaaccugcuc

SEQ ID NO: 159771 - RNA, 18 nt, Artificial Sequence
  Synthetic
aaauuaagaaaucugcuc

SEQ ID NO: 159772 - RNA, 21 nt, Artificial Sequence
  Synthetic
uggaaauuaagaaaucugcuc

SEQ ID NO: 159773 - RNA, 22 nt, Artificial Sequence
  Synthetic
auggaaauuaagaaaucugcuc

SEQ ID NO: 159774 - RNA, 23 nt, Artificial Sequence
  Synthetic
cauggaaauuaagaaaucugcuc

SEQ ID NO: 159775 - RNA, 24 nt, Artificial Sequence
  Synthetic
acauggaaauuaagaaaucugcuc

SEQ ID NO: 159776 - RNA, 18 nt, Artificial Sequence
  Synthetic
uugugggccaaagugcuc

SEQ ID NO: 159777 - RNA, 19 nt, Artificial Sequence
  Synthetic
auugugggccaaagugcuc

SEQ ID NO: 159778 - RNA, 20 nt, Artificial Sequence
  Synthetic
cauugugggccaaagugcuc

SEQ ID NO: 159779 - RNA, 21 nt, Artificial Sequence
  Synthetic
ccauugugggccaaagugcuc

SEQ ID NO: 159780 - RNA, 22 nt, Artificial Sequence
  Synthetic
accauugugggccaaagugcuc

SEQ ID NO: 159781 - RNA, 23 nt, Artificial Sequence
  Synthetic
caccauugugggccaaagugcuc

SEQ ID NO: 159782 - RNA, 24 nt, Artificial Sequence
  Synthetic
ucaccauugugggccaaagugcuc

SEQ ID NO: 159783 - RNA, 20 nt, Artificial Sequence
  Synthetic
uggaagaacauuccgugcuc

SEQ ID NO: 159784 - RNA, 21 nt, Artificial Sequence
  Synthetic
auggaagaacauuccgugcuc

SEQ ID NO: 159785 - RNA, 22 nt, Artificial Sequence
  Synthetic
aauggaagaacauuccgugcuc

SEQ ID NO: 159786 - RNA, 23 nt, Artificial Sequence
  Synthetic
aaauggaagaacauuccgugcuc

SEQ ID NO: 159787 - RNA, 24 nt, Artificial Sequence
  Synthetic
caaauggaagaacauuccgugcuc

SEQ ID NO: 159788 - RNA, 18 nt, Artificial Sequence
  Synthetic
aacacugagaaaaaucuc

SEQ ID NO: 159789 - RNA, 20 nt, Artificial Sequence
  Synthetic
agaacacugagaaaaaucuc

SEQ ID NO: 159790 - RNA, 22 nt, Artificial Sequence
  Synthetic
agagaacacugagaaaaaucuc

SEQ ID NO: 159791 - RNA, 23 nt, Artificial Sequence
  Synthetic
aagagaacacugagaaaaaucuc

SEQ ID NO: 159792 - RNA, 24 nt, Artificial Sequence
  Synthetic
caagagaacacugagaaaaaucuc

SEQ ID NO: 159793 - RNA, 18 nt, Artificial Sequence
  Synthetic
aucaccacuauccaucuc

SEQ ID NO: 159794 - RNA, 19 nt, Artificial Sequence
  Synthetic
caucaccacuauccaucuc

SEQ ID NO: 159795 - RNA, 20 nt, Artificial Sequence
  Synthetic
ccaucaccacuauccaucuc

SEQ ID NO: 159796 - RNA, 21 nt, Artificial Sequence
  Synthetic
accaucaccacuauccaucuc

SEQ ID NO: 159797 - RNA, 22 nt, Artificial Sequence
  Synthetic
aaccaucaccacuauccaucuc

SEQ ID NO: 159798 - RNA, 24 nt, Artificial Sequence
  Synthetic
ugaaccaucaccacuauccaucuc

SEQ ID NO: 159799 - RNA, 18 nt, Artificial Sequence
  Synthetic
cuacugaaucagcaucuc

SEQ ID NO: 159800 - RNA, 19 nt, Artificial Sequence
  Synthetic
ccuacugaaucagcaucuc

SEQ ID NO: 159801 - RNA, 20 nt, Artificial Sequence
  Synthetic
accuacugaaucagcaucuc

SEQ ID NO: 159802 - RNA, 24 nt, Artificial Sequence
  Synthetic
ugggaccuacugaaucagcaucuc

SEQ ID NO: 159803 - RNA, 18 nt, Artificial Sequence
  Synthetic
ugcuguauaauagaucuc

SEQ ID NO: 159804 - RNA, 19 nt, Artificial Sequence
  Synthetic
augcuguauaauagaucuc

SEQ ID NO: 159805 - RNA, 20 nt, Artificial Sequence
  Synthetic
uaugcuguauaauagaucuc

SEQ ID NO: 159806 - RNA, 21 nt, Artificial Sequence
  Synthetic
cuaugcuguauaauagaucuc

SEQ ID NO: 159807 - RNA, 22 nt, Artificial Sequence
  Synthetic
acuaugcuguauaauagaucuc

SEQ ID NO: 159808 - RNA, 23 nt, Artificial Sequence
  Synthetic
cacuaugcuguauaauagaucuc

SEQ ID NO: 159809 - RNA, 18 nt, Artificial Sequence
  Synthetic
aacauuggagaaacucuc

SEQ ID NO: 159810 - RNA, 19 nt, Artificial Sequence
  Synthetic
aaacauuggagaaacucuc

SEQ ID NO: 159811 - RNA, 22 nt, Artificial Sequence
  Synthetic
aggaaacauuggagaaacucuc

SEQ ID NO: 159812 - RNA, 23 nt, Artificial Sequence
  Synthetic
aaggaaacauuggagaaacucuc

SEQ ID NO: 159813 - RNA, 24 nt, Artificial Sequence
  Synthetic
caaggaaacauuggagaaacucuc

SEQ ID NO: 159814 - RNA, 19 nt, Artificial Sequence
  Synthetic
ugcaugugagaugggucuc

SEQ ID NO: 159815 - RNA, 20 nt, Artificial Sequence
  Synthetic
uugcaugugagaugggucuc

SEQ ID NO: 159816 - RNA, 21 nt, Artificial Sequence
  Synthetic
uuugcaugugagaugggucuc

SEQ ID NO: 159817 - RNA, 23 nt, Artificial Sequence
  Synthetic
uguuugcaugugagaugggucuc

SEQ ID NO: 159818 - RNA, 18 nt, Artificial Sequence
  Synthetic
auuuaagacaacauucuc

SEQ ID NO: 159819 - RNA, 19 nt, Artificial Sequence
  Synthetic
cauuuaagacaacauucuc

SEQ ID NO: 159820 - RNA, 20 nt, Artificial Sequence
  Synthetic
acauuuaagacaacauucuc

SEQ ID NO: 159821 - RNA, 18 nt, Artificial Sequence
  Synthetic
uacacauguaacauucuc

SEQ ID NO: 159822 - RNA, 20 nt, Artificial Sequence
  Synthetic
aguacacauguaacauucuc

SEQ ID NO: 159823 - RNA, 21 nt, Artificial Sequence
  Synthetic
aaguacacauguaacauucuc

SEQ ID NO: 159824 - RNA, 22 nt, Artificial Sequence
  Synthetic
caaguacacauguaacauucuc

SEQ ID NO: 159825 - RNA, 23 nt, Artificial Sequence
  Synthetic
ucaaguacacauguaacauucuc

SEQ ID NO: 159826 - RNA, 24 nt, Artificial Sequence
  Synthetic
cucaaguacacauguaacauucuc

SEQ ID NO: 159827 - RNA, 18 nt, Artificial Sequence
  Synthetic
uuccuauauccucuucuc

SEQ ID NO: 159828 - RNA, 19 nt, Artificial Sequence
  Synthetic
uuuccuauauccucuucuc

SEQ ID NO: 159829 - RNA, 20 nt, Artificial Sequence
  Synthetic
auuuccuauauccucuucuc

SEQ ID NO: 159830 - RNA, 18 nt, Artificial Sequence
  Synthetic
uagguuggggaaguucuc

SEQ ID NO: 159831 - RNA, 19 nt, Artificial Sequence
  Synthetic
cuagguuggggaaguucuc

SEQ ID NO: 159832 - RNA, 21 nt, Artificial Sequence
  Synthetic
ugcuagguuggggaaguucuc

SEQ ID NO: 159833 - RNA, 22 nt, Artificial Sequence
  Synthetic
uugcuagguuggggaaguucuc

SEQ ID NO: 159834 - RNA, 23 nt, Artificial Sequence
  Synthetic
cuugcuagguuggggaaguucuc

SEQ ID NO: 159835 - RNA, 24 nt, Artificial Sequence
  Synthetic
ucuugcuagguuggggaaguucuc

SEQ ID NO: 159836 - RNA, 18 nt, Artificial Sequence
  Synthetic
cauguguguggauuucuc

SEQ ID NO: 159837 - RNA, 19 nt, Artificial Sequence
  Synthetic
ucauguguguggauuucuc

SEQ ID NO: 159838 - RNA, 20 nt, Artificial Sequence
  Synthetic
aucauguguguggauuucuc

SEQ ID NO: 159839 - RNA, 23 nt, Artificial Sequence
  Synthetic
uggaucauguguguggauuucuc

SEQ ID NO: 159840 - RNA, 24 nt, Artificial Sequence
  Synthetic
cuggaucauguguguggauuucuc

SEQ ID NO: 159841 - RNA, 18 nt, Artificial Sequence
  Synthetic
agauucauaaagcaaguc

SEQ ID NO: 159842 - RNA, 19 nt, Artificial Sequence
  Synthetic
cagauucauaaagcaaguc

SEQ ID NO: 159843 - RNA, 20 nt, Artificial Sequence
  Synthetic
ccagauucauaaagcaaguc

SEQ ID NO: 159844 - RNA, 21 nt, Artificial Sequence
  Synthetic
cccagauucauaaagcaaguc

SEQ ID NO: 159845 - RNA, 22 nt, Artificial Sequence
  Synthetic
acccagauucauaaagcaaguc

SEQ ID NO: 159846 - RNA, 23 nt, Artificial Sequence
  Synthetic
cacccagauucauaaagcaaguc

SEQ ID NO: 159847 - RNA, 20 nt, Artificial Sequence
  Synthetic
cggguggaucaccugaaguc

SEQ ID NO: 159848 - RNA, 23 nt, Artificial Sequence
  Synthetic
aggcggguggaucaccugaaguc

SEQ ID NO: 159849 - RNA, 18 nt, Artificial Sequence
  Synthetic
cagagcugaguuuaaguc

SEQ ID NO: 159850 - RNA, 19 nt, Artificial Sequence
  Synthetic
ccagagcugaguuuaaguc

SEQ ID NO: 159851 - RNA, 20 nt, Artificial Sequence
  Synthetic
uccagagcugaguuuaaguc

SEQ ID NO: 159852 - RNA, 23 nt, Artificial Sequence
  Synthetic
ugguccagagcugaguuuaaguc

SEQ ID NO: 159853 - RNA, 24 nt, Artificial Sequence
  Synthetic
uugguccagagcugaguuuaaguc

SEQ ID NO: 159854 - RNA, 18 nt, Artificial Sequence
  Synthetic
agguuuuauguuuaaguc

SEQ ID NO: 159855 - RNA, 19 nt, Artificial Sequence
  Synthetic
uagguuuuauguuuaaguc

SEQ ID NO: 159856 - RNA, 20 nt, Artificial Sequence
  Synthetic
uuagguuuuauguuuaaguc

SEQ ID NO: 159857 - RNA, 21 nt, Artificial Sequence
  Synthetic
uuuagguuuuauguuuaaguc

SEQ ID NO: 159858 - RNA, 22 nt, Artificial Sequence
  Synthetic
uuuuagguuuuauguuuaaguc

SEQ ID NO: 159859 - RNA, 18 nt, Artificial Sequence
  Synthetic
aaggcaggagacacaguc

SEQ ID NO: 159860 - RNA, 19 nt, Artificial Sequence
  Synthetic
aaaggcaggagacacaguc

SEQ ID NO: 159861 - RNA, 18 nt, Artificial Sequence
  Synthetic
ucgcucugucacccaguc

SEQ ID NO: 159862 - RNA, 19 nt, Artificial Sequence
  Synthetic
cucgcucugucacccaguc

SEQ ID NO: 159863 - RNA, 20 nt, Artificial Sequence
  Synthetic
ucucgcucugucacccaguc

SEQ ID NO: 159864 - RNA, 22 nt, Artificial Sequence
  Synthetic
agucucgcucugucacccaguc

SEQ ID NO: 159865 - RNA, 18 nt, Artificial Sequence
  Synthetic
cuuauaaauuacccaguc

SEQ ID NO: 159866 - RNA, 19 nt, Artificial Sequence
  Synthetic
acuuauaaauuacccaguc

SEQ ID NO: 159867 - RNA, 20 nt, Artificial Sequence
  Synthetic
uacuuauaaauuacccaguc

SEQ ID NO: 159868 - RNA, 21 nt, Artificial Sequence
  Synthetic
uuacuuauaaauuacccaguc

SEQ ID NO: 159869 - RNA, 22 nt, Artificial Sequence
  Synthetic
uuuacuuauaaauuacccaguc

SEQ ID NO: 159870 - RNA, 23 nt, Artificial Sequence
  Synthetic
uuuuacuuauaaauuacccaguc

SEQ ID NO: 159871 - RNA, 24 nt, Artificial Sequence
  Synthetic
uuuuuacuuauaaauuacccaguc

SEQ ID NO: 159872 - RNA, 18 nt, Artificial Sequence
  Synthetic
uuuguaaauugcccaguc

SEQ ID NO: 159873 - RNA, 19 nt, Artificial Sequence
  Synthetic
uuuuguaaauugcccaguc

SEQ ID NO: 159874 - RNA, 20 nt, Artificial Sequence
  Synthetic
cuuuuguaaauugcccaguc

SEQ ID NO: 159875 - RNA, 21 nt, Artificial Sequence
  Synthetic
ucuuuuguaaauugcccaguc

SEQ ID NO: 159876 - RNA, 22 nt, Artificial Sequence
  Synthetic
uucuuuuguaaauugcccaguc

SEQ ID NO: 159877 - RNA, 23 nt, Artificial Sequence
  Synthetic
uuucuuuuguaaauugcccaguc

SEQ ID NO: 159878 - RNA, 24 nt, Artificial Sequence
  Synthetic
cuuucuuuuguaaauugcccaguc

SEQ ID NO: 159879 - RNA, 18 nt, Artificial Sequence
  Synthetic
uguauaaauuauccaguc

SEQ ID NO: 159880 - RNA, 19 nt, Artificial Sequence
  Synthetic
cuguauaaauuauccaguc

SEQ ID NO: 159881 - RNA, 20 nt, Artificial Sequence
  Synthetic
ccuguauaaauuauccaguc

SEQ ID NO: 159882 - RNA, 21 nt, Artificial Sequence
  Synthetic
uccuguauaaauuauccaguc

SEQ ID NO: 159883 - RNA, 22 nt, Artificial Sequence
  Synthetic
uuccuguauaaauuauccaguc

SEQ ID NO: 159884 - RNA, 23 nt, Artificial Sequence
  Synthetic
uuuccuguauaaauuauccaguc

SEQ ID NO: 159885 - RNA, 24 nt, Artificial Sequence
  Synthetic
uuuuccuguauaaauuauccaguc

SEQ ID NO: 159886 - RNA, 18 nt, Artificial Sequence
  Synthetic
ucacucugucacucaguc

SEQ ID NO: 159887 - RNA, 19 nt, Artificial Sequence
  Synthetic
cucacucugucacucaguc

SEQ ID NO: 159888 - RNA, 20 nt, Artificial Sequence
  Synthetic
ucucacucugucacucaguc

SEQ ID NO: 159889 - RNA, 22 nt, Artificial Sequence
  Synthetic
agucucacucugucacucaguc

SEQ ID NO: 159890 - RNA, 19 nt, Artificial Sequence
  Synthetic
uggcuccaagccuggaguc

SEQ ID NO: 159891 - RNA, 20 nt, Artificial Sequence
  Synthetic
auggcuccaagccuggaguc

SEQ ID NO: 159892 - RNA, 18 nt, Artificial Sequence
  Synthetic
cugucuaccagcugaguc

SEQ ID NO: 159893 - RNA, 19 nt, Artificial Sequence
  Synthetic
ccugucuaccagcugaguc

SEQ ID NO: 159894 - RNA, 20 nt, Artificial Sequence
  Synthetic
uccugucuaccagcugaguc

SEQ ID NO: 159895 - RNA, 22 nt, Artificial Sequence
  Synthetic
aguccugucuaccagcugaguc

SEQ ID NO: 159896 - RNA, 23 nt, Artificial Sequence
  Synthetic
uaguccugucuaccagcugaguc

SEQ ID NO: 159897 - RNA, 19 nt, Artificial Sequence
  Synthetic
ugcuuuuaaggacuuaguc

SEQ ID NO: 159898 - RNA, 20 nt, Artificial Sequence
  Synthetic
uugcuuuuaaggacuuaguc

SEQ ID NO: 159899 - RNA, 21 nt, Artificial Sequence
  Synthetic
uuugcuuuuaaggacuuaguc

SEQ ID NO: 159900 - RNA, 22 nt, Artificial Sequence
  Synthetic
auuugcuuuuaaggacuuaguc

SEQ ID NO: 159901 - RNA, 23 nt, Artificial Sequence
  Synthetic
cauuugcuuuuaaggacuuaguc

SEQ ID NO: 159902 - RNA, 24 nt, Artificial Sequence
  Synthetic
acauuugcuuuuaaggacuuaguc

SEQ ID NO: 159903 - RNA, 20 nt, Artificial Sequence
  Synthetic
ugggcgcgguggcucacguc

SEQ ID NO: 159904 - RNA, 21 nt, Artificial Sequence
  Synthetic
cugggcgcgguggcucacguc

SEQ ID NO: 159905 - RNA, 18 nt, Artificial Sequence
  Synthetic
ccccacccaaaucccguc

SEQ ID NO: 159906 - RNA, 19 nt, Artificial Sequence
  Synthetic
uccccacccaaaucccguc

SEQ ID NO: 159907 - RNA, 21 nt, Artificial Sequence
  Synthetic
uguccccacccaaaucccguc

SEQ ID NO: 159908 - RNA, 23 nt, Artificial Sequence
  Synthetic
uguguccccacccaaaucccguc

SEQ ID NO: 159909 - RNA, 24 nt, Artificial Sequence
  Synthetic
cuguguccccacccaaaucccguc

SEQ ID NO: 159910 - RNA, 18 nt, Artificial Sequence
  Synthetic
agcaaccuuaauuccguc

SEQ ID NO: 159911 - RNA, 19 nt, Artificial Sequence
  Synthetic
uagcaaccuuaauuccguc

SEQ ID NO: 159912 - RNA, 20 nt, Artificial Sequence
  Synthetic
uuagcaaccuuaauuccguc

SEQ ID NO: 159913 - RNA, 21 nt, Artificial Sequence
  Synthetic
cuuagcaaccuuaauuccguc

SEQ ID NO: 159914 - RNA, 23 nt, Artificial Sequence
  Synthetic
ugcuuagcaaccuuaauuccguc

SEQ ID NO: 159915 - RNA, 24 nt, Artificial Sequence
  Synthetic
cugcuuagcaaccuuaauuccguc

SEQ ID NO: 159916 - RNA, 18 nt, Artificial Sequence
  Synthetic
uccuccugccucagcguc

SEQ ID NO: 159917 - RNA, 19 nt, Artificial Sequence
  Synthetic
auccuccugccucagcguc

SEQ ID NO: 159918 - RNA, 20 nt, Artificial Sequence
  Synthetic
aauccuccugccucagcguc

SEQ ID NO: 159919 - RNA, 21 nt, Artificial Sequence
  Synthetic
caauccuccugccucagcguc

SEQ ID NO: 159920 - RNA, 23 nt, Artificial Sequence
  Synthetic
agcaauccuccugccucagcguc

SEQ ID NO: 159921 - RNA, 24 nt, Artificial Sequence
  Synthetic
aagcaauccuccugccucagcguc

SEQ ID NO: 159922 - RNA, 18 nt, Artificial Sequence
  Synthetic
aggggcaggacuugcguc

SEQ ID NO: 159923 - RNA, 19 nt, Artificial Sequence
  Synthetic
caggggcaggacuugcguc

SEQ ID NO: 159924 - RNA, 20 nt, Artificial Sequence
  Synthetic
acaggggcaggacuugcguc

SEQ ID NO: 159925 - RNA, 21 nt, Artificial Sequence
  Synthetic
uacaggggcaggacuugcguc

SEQ ID NO: 159926 - RNA, 18 nt, Artificial Sequence
  Synthetic
auagaugcagaaaagguc

SEQ ID NO: 159927 - RNA, 19 nt, Artificial Sequence
  Synthetic
aauagaugcagaaaagguc

SEQ ID NO: 159928 - RNA, 20 nt, Artificial Sequence
  Synthetic
caauagaugcagaaaagguc

SEQ ID NO: 159929 - RNA, 21 nt, Artificial Sequence
  Synthetic
ucaauagaugcagaaaagguc

SEQ ID NO: 159930 - RNA, 22 nt, Artificial Sequence
  Synthetic
cucaauagaugcagaaaagguc

SEQ ID NO: 159931 - RNA, 23 nt, Artificial Sequence
  Synthetic
ucucaauagaugcagaaaagguc

SEQ ID NO: 159932 - RNA, 24 nt, Artificial Sequence
  Synthetic
aucucaauagaugcagaaaagguc

SEQ ID NO: 159933 - RNA, 18 nt, Artificial Sequence
  Synthetic
caaaauuucuuucagguc

SEQ ID NO: 159934 - RNA, 19 nt, Artificial Sequence
  Synthetic
ucaaaauuucuuucagguc

SEQ ID NO: 159935 - RNA, 20 nt, Artificial Sequence
  Synthetic
uucaaaauuucuuucagguc

SEQ ID NO: 159936 - RNA, 18 nt, Artificial Sequence
  Synthetic
ugggcggaccacgagguc

SEQ ID NO: 159937 - RNA, 20 nt, Artificial Sequence
  Synthetic
agugggcggaccacgagguc

SEQ ID NO: 159938 - RNA, 21 nt, Artificial Sequence
  Synthetic
aagugggcggaccacgagguc

SEQ ID NO: 159939 - RNA, 23 nt, Artificial Sequence
  Synthetic
cgaagugggcggaccacgagguc

SEQ ID NO: 159940 - RNA, 24 nt, Artificial Sequence
  Synthetic
ccgaagugggcggaccacgagguc

SEQ ID NO: 159941 - RNA, 21 nt, Artificial Sequence
  Synthetic
aggcggguggaucacgagguc

SEQ ID NO: 159942 - RNA, 22 nt, Artificial Sequence
  Synthetic
aaggcggguggaucacgagguc

SEQ ID NO: 159943 - RNA, 23 nt, Artificial Sequence
  Synthetic
caaggcggguggaucacgagguc

SEQ ID NO: 159944 - RNA, 24 nt, Artificial Sequence
  Synthetic
ccaaggcggguggaucacgagguc

SEQ ID NO: 159945 - RNA, 21 nt, Artificial Sequence
  Synthetic
agguggguggaucacgagguc

SEQ ID NO: 159946 - RNA, 22 nt, Artificial Sequence
  Synthetic
aagguggguggaucacgagguc

SEQ ID NO: 159947 - RNA, 23 nt, Artificial Sequence
  Synthetic
caagguggguggaucacgagguc

SEQ ID NO: 159948 - RNA, 24 nt, Artificial Sequence
  Synthetic
ccaagguggguggaucacgagguc

SEQ ID NO: 159949 - RNA, 20 nt, Artificial Sequence
  Synthetic
ugggcggaacacucgagguc

SEQ ID NO: 159950 - RNA, 22 nt, Artificial Sequence
  Synthetic
agugggcggaacacucgagguc

SEQ ID NO: 159951 - RNA, 23 nt, Artificial Sequence
  Synthetic
aagugggcggaacacucgagguc

SEQ ID NO: 159952 - RNA, 18 nt, Artificial Sequence
  Synthetic
ugagcagaucaugagguc

SEQ ID NO: 159953 - RNA, 21 nt, Artificial Sequence
  Synthetic
aggugagcagaucaugagguc

SEQ ID NO: 159954 - RNA, 23 nt, Artificial Sequence
  Synthetic
ugaggugagcagaucaugagguc

SEQ ID NO: 159955 - RNA, 24 nt, Artificial Sequence
  Synthetic
cugaggugagcagaucaugagguc

SEQ ID NO: 159956 - RNA, 18 nt, Artificial Sequence
  Synthetic
cggguggaucaugagguc

SEQ ID NO: 159957 - RNA, 20 nt, Artificial Sequence
  Synthetic
agcggguggaucaugagguc

SEQ ID NO: 159958 - RNA, 21 nt, Artificial Sequence
  Synthetic
aagcggguggaucaugagguc

SEQ ID NO: 159959 - RNA, 22 nt, Artificial Sequence
  Synthetic
aaagcggguggaucaugagguc

SEQ ID NO: 159960 - RNA, 23 nt, Artificial Sequence
  Synthetic
caaagcggguggaucaugagguc

SEQ ID NO: 159961 - RNA, 24 nt, Artificial Sequence
  Synthetic
ccaaagcggguggaucaugagguc

SEQ ID NO: 159962 - RNA, 19 nt, Artificial Sequence
  Synthetic
ugguagaacaccugagguc

SEQ ID NO: 159963 - RNA, 22 nt, Artificial Sequence
  Synthetic
aggugguagaacaccugagguc

SEQ ID NO: 159964 - RNA, 24 nt, Artificial Sequence
  Synthetic
ugaggugguagaacaccugagguc

SEQ ID NO: 159965 - RNA, 20 nt, Artificial Sequence
  Synthetic
cgggcgcaucaccugagguc

SEQ ID NO: 159966 - RNA, 23 nt, Artificial Sequence
  Synthetic
aggugggcggaucaccugagguc

SEQ ID NO: 159967 - RNA, 24 nt, Artificial Sequence
  Synthetic
aaggugggcggaucaccugagguc

SEQ ID NO: 159968 - RNA, 23 nt, Artificial Sequence
  Synthetic
aggcagguggaucaccugagguc

SEQ ID NO: 159969 - RNA, 20 nt, Artificial Sequence
  Synthetic
aggguggaucaccugagguc

SEQ ID NO: 159970 - RNA, 23 nt, Artificial Sequence
  Synthetic
aggaggguggaucaccugagguc

SEQ ID NO: 159971 - RNA, 19 nt, Artificial Sequence
  Synthetic
agccugaucaccugagguc

SEQ ID NO: 159972 - RNA, 20 nt, Artificial Sequence
  Synthetic
cagccugaucaccugagguc

SEQ ID NO: 159973 - RNA, 23 nt, Artificial Sequence
  Synthetic
aggcagccugaucaccugagguc

SEQ ID NO: 159974 - RNA, 20 nt, Artificial Sequence
  Synthetic
uggauggaucaucugagguc

SEQ ID NO: 159975 - RNA, 23 nt, Artificial Sequence
  Synthetic
agguggauggaucaucugagguc

SEQ ID NO: 159976 - RNA, 19 nt, Artificial Sequence
  Synthetic
ugacggaucacuugagguc

SEQ ID NO: 159977 - RNA, 20 nt, Artificial Sequence
  Synthetic
cugacggaucacuugagguc

SEQ ID NO: 159978 - RNA, 23 nt, Artificial Sequence
  Synthetic
aggcugacggaucacuugagguc

SEQ ID NO: 159979 - RNA, 19 nt, Artificial Sequence
  Synthetic
aggcggaucacuugagguc

SEQ ID NO: 159980 - RNA, 20 nt, Artificial Sequence
  Synthetic
caggcggaucacuugagguc

SEQ ID NO: 159981 - RNA, 23 nt, Artificial Sequence
  Synthetic
aggcaggcggaucacuugagguc

SEQ ID NO: 159982 - RNA, 20 nt, Artificial Sequence
  Synthetic
ugggcggaucacuugagguc

SEQ ID NO: 159983 - RNA, 22 nt, Artificial Sequence
  Synthetic
ugugggcggaucacuugagguc

SEQ ID NO: 159984 - RNA, 23 nt, Artificial Sequence
  Synthetic
augugggcggaucacuugagguc

SEQ ID NO: 159985 - RNA, 20 nt, Artificial Sequence
  Synthetic
uagguggaucacuugagguc

SEQ ID NO: 159986 - RNA, 22 nt, Artificial Sequence
  Synthetic
aguagguggaucacuugagguc

SEQ ID NO: 159987 - RNA, 23 nt, Artificial Sequence
  Synthetic
aaguagguggaucacuugagguc

SEQ ID NO: 159988 - RNA, 19 nt, Artificial Sequence
  Synthetic
aggcagaucauuugagguc

SEQ ID NO: 159989 - RNA, 20 nt, Artificial Sequence
  Synthetic
caggcagaucauuugagguc

SEQ ID NO: 159990 - RNA, 23 nt, Artificial Sequence
  Synthetic
aggcaggcagaucauuugagguc

SEQ ID NO: 159991 - RNA, 18 nt, Artificial Sequence
  Synthetic
cagguggaucacuagguc

SEQ ID NO: 159992 - RNA, 21 nt, Artificial Sequence
  Synthetic
aggcagguggaucacuagguc

SEQ ID NO: 159993 - RNA, 23 nt, Artificial Sequence
  Synthetic
ugaggcagguggaucacuagguc

SEQ ID NO: 159994 - RNA, 24 nt, Artificial Sequence
  Synthetic
cugaggcagguggaucacuagguc

SEQ ID NO: 159995 - RNA, 18 nt, Artificial Sequence
  Synthetic
acagcacacugauggguc

SEQ ID NO: 159996 - RNA, 19 nt, Artificial Sequence
  Synthetic
uacagcacacugauggguc

SEQ ID NO: 159997 - RNA, 20 nt, Artificial Sequence
  Synthetic
auacagcacacugauggguc

SEQ ID NO: 159998 - RNA, 21 nt, Artificial Sequence
  Synthetic
aauacagcacacugauggguc

SEQ ID NO: 159999 - RNA, 23 nt, Artificial Sequence
  Synthetic
ugaauacagcacacugauggguc

SEQ ID NO: 160000 - RNA, 24 nt, Artificial Sequence
  Synthetic
cugaauacagcacacugauggguc

SEQ ID NO: 160001 - RNA, 18 nt, Artificial Sequence
  Synthetic
auugugauucaguggguc

SEQ ID NO: 160002 - RNA, 20 nt, Artificial Sequence
  Synthetic
agauugugauucaguggguc

SEQ ID NO: 160003 - RNA, 21 nt, Artificial Sequence
  Synthetic
cagauugugauucaguggguc

SEQ ID NO: 160004 - RNA, 23 nt, Artificial Sequence
  Synthetic
ugcagauugugauucaguggguc

SEQ ID NO: 160005 - RNA, 24 nt, Artificial Sequence
  Synthetic
augcagauugugauucaguggguc

SEQ ID NO: 160006 - RNA, 18 nt, Artificial Sequence
  Synthetic
cuuucccaagccaauguc

SEQ ID NO: 160007 - RNA, 19 nt, Artificial Sequence
  Synthetic
ucuuucccaagccaauguc

SEQ ID NO: 160008 - RNA, 20 nt, Artificial Sequence
  Synthetic
uucuuucccaagccaauguc

SEQ ID NO: 160009 - RNA, 21 nt, Artificial Sequence
  Synthetic
auucuuucccaagccaauguc

SEQ ID NO: 160010 - RNA, 22 nt, Artificial Sequence
  Synthetic
aauucuuucccaagccaauguc

SEQ ID NO: 160011 - RNA, 23 nt, Artificial Sequence
  Synthetic
aaauucuuucccaagccaauguc

SEQ ID NO: 160012 - RNA, 24 nt, Artificial Sequence
  Synthetic
aaaauucuuucccaagccaauguc

SEQ ID NO: 160013 - RNA, 18 nt, Artificial Sequence
  Synthetic
aauuaauuaauuaauguc

SEQ ID NO: 160014 - RNA, 19 nt, Artificial Sequence
  Synthetic
aaauuaauuaauuaauguc

SEQ ID NO: 160015 - RNA, 20 nt, Artificial Sequence
  Synthetic
uaaauuaauuaauuaauguc

SEQ ID NO: 160016 - RNA, 21 nt, Artificial Sequence
  Synthetic
uuaaauuaauuaauuaauguc

SEQ ID NO: 160017 - RNA, 22 nt, Artificial Sequence
  Synthetic
uuuaaauuaauuaauuaauguc

SEQ ID NO: 160018 - RNA, 23 nt, Artificial Sequence
  Synthetic
uuuuaaauuaauuaauuaauguc

SEQ ID NO: 160019 - RNA, 24 nt, Artificial Sequence
  Synthetic
uuuuuaaauuaauuaauuaauguc

SEQ ID NO: 160020 - RNA, 21 nt, Artificial Sequence
  Synthetic
aaaauaaagaagggagauguc

SEQ ID NO: 160021 - RNA, 22 nt, Artificial Sequence
  Synthetic
aaaaauaaagaagggagauguc

SEQ ID NO: 160022 - RNA, 24 nt, Artificial Sequence
  Synthetic
agaaaaauaaagaagggagauguc

SEQ ID NO: 160023 - RNA, 18 nt, Artificial Sequence
  Synthetic
uuucugaaggcugauguc

SEQ ID NO: 160024 - RNA, 19 nt, Artificial Sequence
  Synthetic
cuuucugaaggcugauguc

SEQ ID NO: 160025 - RNA, 20 nt, Artificial Sequence
  Synthetic
ucuuucugaaggcugauguc

SEQ ID NO: 160026 - RNA, 21 nt, Artificial Sequence
  Synthetic
uucuuucugaaggcugauguc

SEQ ID NO: 160027 - RNA, 22 nt, Artificial Sequence
  Synthetic
auucuuucugaaggcugauguc

SEQ ID NO: 160028 - RNA, 23 nt, Artificial Sequence
  Synthetic
aauucuuucugaaggcugauguc

SEQ ID NO: 160029 - RNA, 18 nt, Artificial Sequence
  Synthetic
cuugcccaugccuauguc

SEQ ID NO: 160030 - RNA, 19 nt, Artificial Sequence
  Synthetic
ccuugcccaugccuauguc

SEQ ID NO: 160031 - RNA, 20 nt, Artificial Sequence
  Synthetic
uccuugcccaugccuauguc

SEQ ID NO: 160032 - RNA, 22 nt, Artificial Sequence
  Synthetic
aguccuugcccaugccuauguc

SEQ ID NO: 160033 - RNA, 23 nt, Artificial Sequence
  Synthetic
aaguccuugcccaugccuauguc

SEQ ID NO: 160034 - RNA, 18 nt, Artificial Sequence
  Synthetic
auccgauuauuauguguc

SEQ ID NO: 160035 - RNA, 19 nt, Artificial Sequence
  Synthetic
aauccgauuauuauguguc

SEQ ID NO: 160036 - RNA, 21 nt, Artificial Sequence
  Synthetic
ugaauccgauuauuauguguc

SEQ ID NO: 160037 - RNA, 24 nt, Artificial Sequence
  Synthetic
uggugaauccgauuauuauguguc

SEQ ID NO: 160038 - RNA, 19 nt, Artificial Sequence
  Synthetic
agaaguuaaacaauuuguc

SEQ ID NO: 160039 - RNA, 20 nt, Artificial Sequence
  Synthetic
aagaaguuaaacaauuuguc

SEQ ID NO: 160040 - RNA, 21 nt, Artificial Sequence
  Synthetic
ugucccagauaauuuuuuguc

SEQ ID NO: 160041 - RNA, 22 nt, Artificial Sequence
  Synthetic
uugucccagauaauuuuuuguc

SEQ ID NO: 160042 - RNA, 23 nt, Artificial Sequence
  Synthetic
uuugucccagauaauuuuuuguc

SEQ ID NO: 160043 - RNA, 24 nt, Artificial Sequence
  Synthetic
uuuugucccagauaauuuuuuguc

SEQ ID NO: 160044 - RNA, 18 nt, Artificial Sequence
  Synthetic
ugcucaggcuaaaaauuc

SEQ ID NO: 160045 - RNA, 19 nt, Artificial Sequence
  Synthetic
uugcucaggcuaaaaauuc

SEQ ID NO: 160046 - RNA, 18 nt, Artificial Sequence
  Synthetic
auaaaaaaauagaaauuc

SEQ ID NO: 160047 - RNA, 19 nt, Artificial Sequence
  Synthetic
uauaaaaaaauagaaauuc

SEQ ID NO: 160048 - RNA, 20 nt, Artificial Sequence
  Synthetic
uuauaaaaaaauagaaauuc

SEQ ID NO: 160049 - RNA, 19 nt, Artificial Sequence
  Synthetic
aggagcaagacugaaauuc

SEQ ID NO: 160050 - RNA, 21 nt, Artificial Sequence
  Synthetic
agaggagcaagacugaaauuc

SEQ ID NO: 160051 - RNA, 24 nt, Artificial Sequence
  Synthetic
uggagaggagcaagacugaaauuc

SEQ ID NO: 160052 - RNA, 18 nt, Artificial Sequence
  Synthetic
aucugaauauuuaaauuc

SEQ ID NO: 160053 - RNA, 20 nt, Artificial Sequence
  Synthetic
ugaucugaauauuuaaauuc

SEQ ID NO: 160054 - RNA, 18 nt, Artificial Sequence
  Synthetic
uauucuacuuuccaauuc

SEQ ID NO: 160055 - RNA, 19 nt, Artificial Sequence
  Synthetic
uuauucuacuuuccaauuc

SEQ ID NO: 160056 - RNA, 18 nt, Artificial Sequence
  Synthetic
uguggauacacagaauuc

SEQ ID NO: 160057 - RNA, 19 nt, Artificial Sequence
  Synthetic
cuguggauacacagaauuc

SEQ ID NO: 160058 - RNA, 20 nt, Artificial Sequence
  Synthetic
ucuguggauacacagaauuc

SEQ ID NO: 160059 - RNA, 22 nt, Artificial Sequence
  Synthetic
agucuguggauacacagaauuc

SEQ ID NO: 160060 - RNA, 24 nt, Artificial Sequence
  Synthetic
ugagucuguggauacacagaauuc

SEQ ID NO: 160061 - RNA, 19 nt, Artificial Sequence
  Synthetic
agacagaucacuugaauuc

SEQ ID NO: 160062 - RNA, 20 nt, Artificial Sequence
  Synthetic
cagacagaucacuugaauuc

SEQ ID NO: 160063 - RNA, 23 nt, Artificial Sequence
  Synthetic
aggcagacagaucacuugaauuc

SEQ ID NO: 160064 - RNA, 24 nt, Artificial Sequence
  Synthetic
aaggcagacagaucacuugaauuc

SEQ ID NO: 160065 - RNA, 20 nt, Artificial Sequence
  Synthetic
aggcucaaauggagacauuc

SEQ ID NO: 160066 - RNA, 19 nt, Artificial Sequence
  Synthetic
aguauuugguuuuccauuc

SEQ ID NO: 160067 - RNA, 20 nt, Artificial Sequence
  Synthetic
caguauuugguuuuccauuc

SEQ ID NO: 160068 - RNA, 21 nt, Artificial Sequence
  Synthetic
acaguauuugguuuuccauuc

SEQ ID NO: 160069 - RNA, 22 nt, Artificial Sequence
  Synthetic
uacaguauuugguuuuccauuc

SEQ ID NO: 160070 - RNA, 23 nt, Artificial Sequence
  Synthetic
auacaguauuugguuuuccauuc

SEQ ID NO: 160071 - RNA, 24 nt, Artificial Sequence
  Synthetic
cauacaguauuugguuuuccauuc

SEQ ID NO: 160072 - RNA, 19 nt, Artificial Sequence
  Synthetic
agaaaauucuuaaagauuc

SEQ ID NO: 160073 - RNA, 20 nt, Artificial Sequence
  Synthetic
aagaaaauucuuaaagauuc

SEQ ID NO: 160074 - RNA, 18 nt, Artificial Sequence
  Synthetic
uucuccucucccagauuc

SEQ ID NO: 160075 - RNA, 19 nt, Artificial Sequence
  Synthetic
cuucuccucucccagauuc

SEQ ID NO: 160076 - RNA, 20 nt, Artificial Sequence
  Synthetic
ccuucuccucucccagauuc

SEQ ID NO: 160077 - RNA, 18 nt, Artificial Sequence
  Synthetic
ucacugaacaauagauuc

SEQ ID NO: 160078 - RNA, 19 nt, Artificial Sequence
  Synthetic
cucacugaacaauagauuc

SEQ ID NO: 160079 - RNA, 20 nt, Artificial Sequence
  Synthetic
ucucacugaacaauagauuc

SEQ ID NO: 160080 - RNA, 21 nt, Artificial Sequence
  Synthetic
uucucacugaacaauagauuc

SEQ ID NO: 160081 - RNA, 24 nt, Artificial Sequence
  Synthetic
agguucucacugaacaauagauuc

SEQ ID NO: 160082 - RNA, 18 nt, Artificial Sequence
  Synthetic
ucacuggacaauagauuc

SEQ ID NO: 160083 - RNA, 19 nt, Artificial Sequence
  Synthetic
cucacuggacaauagauuc

SEQ ID NO: 160084 - RNA, 20 nt, Artificial Sequence
  Synthetic
ucucacuggacaauagauuc

SEQ ID NO: 160085 - RNA, 21 nt, Artificial Sequence
  Synthetic
uucucacuggacaauagauuc

SEQ ID NO: 160086 - RNA, 24 nt, Artificial Sequence
  Synthetic
agguucucacuggacaauagauuc

SEQ ID NO: 160087 - RNA, 18 nt, Artificial Sequence
  Synthetic
cugaguacugucugauuc

SEQ ID NO: 160088 - RNA, 19 nt, Artificial Sequence
  Synthetic
ucugaguacugucugauuc

SEQ ID NO: 160089 - RNA, 20 nt, Artificial Sequence
  Synthetic
uucugaguacugucugauuc

SEQ ID NO: 160090 - RNA, 21 nt, Artificial Sequence
  Synthetic
auucugaguacugucugauuc

SEQ ID NO: 160091 - RNA, 22 nt, Artificial Sequence
  Synthetic
aauucugaguacugucugauuc

SEQ ID NO: 160092 - RNA, 23 nt, Artificial Sequence
  Synthetic
uaauucugaguacugucugauuc

SEQ ID NO: 160093 - RNA, 24 nt, Artificial Sequence
  Synthetic
cuaauucugaguacugucugauuc

SEQ ID NO: 160094 - RNA, 18 nt, Artificial Sequence
  Synthetic
aaaaaugauaaaauauuc

SEQ ID NO: 160095 - RNA, 19 nt, Artificial Sequence
  Synthetic
aaaaaaugauaaaauauuc

SEQ ID NO: 160096 - RNA, 20 nt, Artificial Sequence
  Synthetic
uaaaaaaugauaaaauauuc

SEQ ID NO: 160097 - RNA, 18 nt, Artificial Sequence
  Synthetic
aauacagaaauuauauuc

SEQ ID NO: 160098 - RNA, 20 nt, Artificial Sequence
  Synthetic
agaauacagaaauuauauuc

SEQ ID NO: 160099 - RNA, 18 nt, Artificial Sequence
  Synthetic
cagcauuucugacuauuc

SEQ ID NO: 160100 - RNA, 19 nt, Artificial Sequence
  Synthetic
ucagcauuucugacuauuc

SEQ ID NO: 160101 - RNA, 20 nt, Artificial Sequence
  Synthetic
aucagcauuucugacuauuc

SEQ ID NO: 160102 - RNA, 18 nt, Artificial Sequence
  Synthetic
cucguuauuggucuauuc

SEQ ID NO: 160103 - RNA, 19 nt, Artificial Sequence
  Synthetic
acucguuauuggucuauuc

SEQ ID NO: 160104 - RNA, 20 nt, Artificial Sequence
  Synthetic
aacucguuauuggucuauuc

SEQ ID NO: 160105 - RNA, 22 nt, Artificial Sequence
  Synthetic
agaacucguuauuggucuauuc

SEQ ID NO: 160106 - RNA, 23 nt, Artificial Sequence
  Synthetic
cagaacucguuauuggucuauuc

SEQ ID NO: 160107 - RNA, 24 nt, Artificial Sequence
  Synthetic
ucagaacucguuauuggucuauuc

SEQ ID NO: 160108 - RNA, 18 nt, Artificial Sequence
  Synthetic
aaaccugcacauguauuc

SEQ ID NO: 160109 - RNA, 19 nt, Artificial Sequence
  Synthetic
caaaccugcacauguauuc

SEQ ID NO: 160110 - RNA, 20 nt, Artificial Sequence
  Synthetic
acaaaccugcacauguauuc

SEQ ID NO: 160111 - RNA, 21 nt, Artificial Sequence
  Synthetic
aacaaaccugcacauguauuc

SEQ ID NO: 160112 - RNA, 22 nt, Artificial Sequence
  Synthetic
uaacaaaccugcacauguauuc

SEQ ID NO: 160113 - RNA, 24 nt, Artificial Sequence
  Synthetic
uguaacaaaccugcacauguauuc

SEQ ID NO: 160114 - RNA, 18 nt, Artificial Sequence
  Synthetic
auuucccagauuuuauuc

SEQ ID NO: 160115 - RNA, 19 nt, Artificial Sequence
  Synthetic
uauuucccagauuuuauuc

SEQ ID NO: 160116 - RNA, 22 nt, Artificial Sequence
  Synthetic
ugguauuucccagauuuuauuc

SEQ ID NO: 160117 - RNA, 23 nt, Artificial Sequence
  Synthetic
augguauuucccagauuuuauuc

SEQ ID NO: 160118 - RNA, 24 nt, Artificial Sequence
  Synthetic
aaugguauuucccagauuuuauuc

SEQ ID NO: 160119 - RNA, 18 nt, Artificial Sequence
  Synthetic
uucuggauuuuuuuauuc

SEQ ID NO: 160120 - RNA, 19 nt, Artificial Sequence
  Synthetic
uuucuggauuuuuuuauuc

SEQ ID NO: 160121 - RNA, 20 nt, Artificial Sequence
  Synthetic
uuuucuggauuuuuuuauuc

SEQ ID NO: 160122 - RNA, 18 nt, Artificial Sequence
  Synthetic
cacugcagccucgacuuc

SEQ ID NO: 160123 - RNA, 19 nt, Artificial Sequence
  Synthetic
ucacugcagccucgacuuc

SEQ ID NO: 160124 - RNA, 20 nt, Artificial Sequence
  Synthetic
cucacugcagccucgacuuc

SEQ ID NO: 160125 - RNA, 23 nt, Artificial Sequence
  Synthetic
uggcucacugcagccucgacuuc

SEQ ID NO: 160126 - RNA, 24 nt, Artificial Sequence
  Synthetic
auggcucacugcagccucgacuuc

SEQ ID NO: 160127 - RNA, 18 nt, Artificial Sequence
  Synthetic
aaacaaguuaguuacuuc

SEQ ID NO: 160128 - RNA, 19 nt, Artificial Sequence
  Synthetic
aaaacaaguuaguuacuuc

SEQ ID NO: 160129 - RNA, 20 nt, Artificial Sequence
  Synthetic
caaaacaaguuaguuacuuc

SEQ ID NO: 160130 - RNA, 21 nt, Artificial Sequence
  Synthetic
ccaaaacaaguuaguuacuuc

SEQ ID NO: 160131 - RNA, 22 nt, Artificial Sequence
  Synthetic
uccaaaacaaguuaguuacuuc

SEQ ID NO: 160132 - RNA, 23 nt, Artificial Sequence
  Synthetic
auccaaaacaaguuaguuacuuc

SEQ ID NO: 160133 - RNA, 24 nt, Artificial Sequence
  Synthetic
aauccaaaacaaguuaguuacuuc

SEQ ID NO: 160134 - RNA, 20 nt, Artificial Sequence
  Synthetic
aggcaaguuucucaaccuuc

SEQ ID NO: 160135 - RNA, 21 nt, Artificial Sequence
  Synthetic
uaggcaaguuucucaaccuuc

SEQ ID NO: 160136 - RNA, 22 nt, Artificial Sequence
  Synthetic
uuaggcaaguuucucaaccuuc

SEQ ID NO: 160137 - RNA, 23 nt, Artificial Sequence
  Synthetic
cuuaggcaaguuucucaaccuuc

SEQ ID NO: 160138 - RNA, 24 nt, Artificial Sequence
  Synthetic
ccuuaggcaaguuucucaaccuuc

SEQ ID NO: 160139 - RNA, 18 nt, Artificial Sequence
  Synthetic
cauggggguggauccuuc

SEQ ID NO: 160140 - RNA, 19 nt, Artificial Sequence
  Synthetic
ucauggggguggauccuuc

SEQ ID NO: 160141 - RNA, 24 nt, Artificial Sequence
  Synthetic
uggggucauggggguggauccuuc

SEQ ID NO: 160142 - RNA, 18 nt, Artificial Sequence
  Synthetic
uucucccgccucagcuuc

SEQ ID NO: 160143 - RNA, 19 nt, Artificial Sequence
  Synthetic
uuucucccgccucagcuuc

SEQ ID NO: 160144 - RNA, 20 nt, Artificial Sequence
  Synthetic
cuuucucccgccucagcuuc

SEQ ID NO: 160145 - RNA, 21 nt, Artificial Sequence
  Synthetic
ccuuucucccgccucagcuuc

SEQ ID NO: 160146 - RNA, 23 nt, Artificial Sequence
  Synthetic
cgccuuucucccgccucagcuuc

SEQ ID NO: 160147 - RNA, 24 nt, Artificial Sequence
  Synthetic
acgccuuucucccgccucagcuuc

SEQ ID NO: 160148 - RNA, 18 nt, Artificial Sequence
  Synthetic
uuguuuuuuuagagcuuc

SEQ ID NO: 160149 - RNA, 19 nt, Artificial Sequence
  Synthetic
uuuguuuuuuuagagcuuc

SEQ ID NO: 160150 - RNA, 20 nt, Artificial Sequence
  Synthetic
uuuuguuuuuuuagagcuuc

SEQ ID NO: 160151 - RNA, 20 nt, Artificial Sequence
  Synthetic
ugguacauggcaggugcuuc

SEQ ID NO: 160152 - RNA, 18 nt, Artificial Sequence
  Synthetic
ccugaccccuugugcuuc

SEQ ID NO: 160153 - RNA, 19 nt, Artificial Sequence
  Synthetic
cccugaccccuugugcuuc

SEQ ID NO: 160154 - RNA, 20 nt, Artificial Sequence
  Synthetic
ucccugaccccuugugcuuc

SEQ ID NO: 160155 - RNA, 21 nt, Artificial Sequence
  Synthetic
uucccugaccccuugugcuuc

SEQ ID NO: 160156 - RNA, 22 nt, Artificial Sequence
  Synthetic
auucccugaccccuugugcuuc

SEQ ID NO: 160157 - RNA, 23 nt, Artificial Sequence
  Synthetic
aauucccugaccccuugugcuuc

SEQ ID NO: 160158 - RNA, 18 nt, Artificial Sequence
  Synthetic
ugguuuuuccucaucuuc

SEQ ID NO: 160159 - RNA, 19 nt, Artificial Sequence
  Synthetic
cugguuuuuccucaucuuc

SEQ ID NO: 160160 - RNA, 21 nt, Artificial Sequence
  Synthetic
ugcugguuuuuccucaucuuc

SEQ ID NO: 160161 - RNA, 23 nt, Artificial Sequence
  Synthetic
ugugcugguuuuuccucaucuuc

SEQ ID NO: 160162 - RNA, 24 nt, Artificial Sequence
  Synthetic
uugugcugguuuuuccucaucuuc

SEQ ID NO: 160163 - RNA, 22 nt, Artificial Sequence
  Synthetic
ugguaaugccuagguuuucuuc

SEQ ID NO: 160164 - RNA, 23 nt, Artificial Sequence
  Synthetic
augguaaugccuagguuuucuuc

SEQ ID NO: 160165 - RNA, 24 nt, Artificial Sequence
  Synthetic
aaugguaaugccuagguuuucuuc

SEQ ID NO: 160166 - RNA, 22 nt, Artificial Sequence
  Synthetic
ugguauugccuagguuuucuuc

SEQ ID NO: 160167 - RNA, 23 nt, Artificial Sequence
  Synthetic
augguauugccuagguuuucuuc

SEQ ID NO: 160168 - RNA, 24 nt, Artificial Sequence
  Synthetic
aaugguauugccuagguuuucuuc

SEQ ID NO: 160169 - RNA, 19 nt, Artificial Sequence
  Synthetic
uggggucauuaaaaaguuc

SEQ ID NO: 160170 - RNA, 20 nt, Artificial Sequence
  Synthetic
uuggggucauuaaaaaguuc

SEQ ID NO: 160171 - RNA, 18 nt, Artificial Sequence
  Synthetic
uuuucagucagcaaguuc

SEQ ID NO: 160172 - RNA, 20 nt, Artificial Sequence
  Synthetic
uguuuucagucagcaaguuc

SEQ ID NO: 160173 - RNA, 18 nt, Artificial Sequence
  Synthetic
aaauuauacuuuaaguuc

SEQ ID NO: 160174 - RNA, 19 nt, Artificial Sequence
  Synthetic
uaaauuauacuuuaaguuc

SEQ ID NO: 160175 - RNA, 20 nt, Artificial Sequence
  Synthetic
uuaaauuauacuuuaaguuc

SEQ ID NO: 160176 - RNA, 21 nt, Artificial Sequence
  Synthetic
uuuaaauuauacuuuaaguuc

SEQ ID NO: 160177 - RNA, 22 nt, Artificial Sequence
  Synthetic
uuuuaaauuauacuuuaaguuc

SEQ ID NO: 160178 - RNA, 23 nt, Artificial Sequence
  Synthetic
uuuuuaaauuauacuuuaaguuc

SEQ ID NO: 160179 - RNA, 24 nt, Artificial Sequence
  Synthetic
uuuuuuaaauuauacuuuaaguuc

SEQ ID NO: 160180 - RNA, 21 nt, Artificial Sequence
  Synthetic
uuauuauuauacuuuaaguuc

SEQ ID NO: 160181 - RNA, 22 nt, Artificial Sequence
  Synthetic
auuauuauuauacuuuaaguuc

SEQ ID NO: 160182 - RNA, 23 nt, Artificial Sequence
  Synthetic
uauuauuauuauacuuuaaguuc

SEQ ID NO: 160183 - RNA, 24 nt, Artificial Sequence
  Synthetic
uuauuauuauuauacuuuaaguuc

SEQ ID NO: 160184 - RNA, 19 nt, Artificial Sequence
  Synthetic
uuuauuauacuuuaaguuc

SEQ ID NO: 160185 - RNA, 20 nt, Artificial Sequence
  Synthetic
uuuuauuauacuuuaaguuc

SEQ ID NO: 160186 - RNA, 21 nt, Artificial Sequence
  Synthetic
uuuuuauuauacuuuaaguuc

SEQ ID NO: 160187 - RNA, 22 nt, Artificial Sequence
  Synthetic
uuuuuuauuauacuuuaaguuc

SEQ ID NO: 160188 - RNA, 23 nt, Artificial Sequence
  Synthetic
uuuuuuuauuauacuuuaaguuc

SEQ ID NO: 160189 - RNA, 24 nt, Artificial Sequence
  Synthetic
uuuuuuuuauuauacuuuaaguuc

SEQ ID NO: 160190 - RNA, 18 nt, Artificial Sequence
  Synthetic
uuuagccucccacaguuc

SEQ ID NO: 160191 - RNA, 19 nt, Artificial Sequence
  Synthetic
cuuuagccucccacaguuc

SEQ ID NO: 160192 - RNA, 21 nt, Artificial Sequence
  Synthetic
ugcuuuagccucccacaguuc

SEQ ID NO: 160193 - RNA, 22 nt, Artificial Sequence
  Synthetic
cugcuuuagccucccacaguuc

SEQ ID NO: 160194 - RNA, 23 nt, Artificial Sequence
  Synthetic
ccugcuuuagccucccacaguuc

SEQ ID NO: 160195 - RNA, 24 nt, Artificial Sequence
  Synthetic
uccugcuuuagccucccacaguuc

SEQ ID NO: 160196 - RNA, 18 nt, Artificial Sequence
  Synthetic
cacugcuuccuccaguuc

SEQ ID NO: 160197 - RNA, 19 nt, Artificial Sequence
  Synthetic
ucacugcuuccuccaguuc

SEQ ID NO: 160198 - RNA, 20 nt, Artificial Sequence
  Synthetic
uucacugcuuccuccaguuc

SEQ ID NO: 160199 - RNA, 18 nt, Artificial Sequence
  Synthetic
caaauaaaaagauaguuc

SEQ ID NO: 160200 - RNA, 19 nt, Artificial Sequence
  Synthetic
acaaauaaaaagauaguuc

SEQ ID NO: 160201 - RNA, 20 nt, Artificial Sequence
  Synthetic
aacaaauaaaaagauaguuc

SEQ ID NO: 160202 - RNA, 18 nt, Artificial Sequence
  Synthetic
cauuccaggcccuaguuc

SEQ ID NO: 160203 - RNA, 19 nt, Artificial Sequence
  Synthetic
ccauuccaggcccuaguuc

SEQ ID NO: 160204 - RNA, 20 nt, Artificial Sequence
  Synthetic
cccauuccaggcccuaguuc

SEQ ID NO: 160205 - RNA, 21 nt, Artificial Sequence
  Synthetic
ccccauuccaggcccuaguuc

SEQ ID NO: 160206 - RNA, 22 nt, Artificial Sequence
  Synthetic
cccccauuccaggcccuaguuc

SEQ ID NO: 160207 - RNA, 18 nt, Artificial Sequence
  Synthetic
aacuuuuaaauuagguuc

SEQ ID NO: 160208 - RNA, 19 nt, Artificial Sequence
  Synthetic
uaacuuuuaaauuagguuc

SEQ ID NO: 160209 - RNA, 20 nt, Artificial Sequence
  Synthetic
auaacuuuuaaauuagguuc

SEQ ID NO: 160210 - RNA, 21 nt, Artificial Sequence
  Synthetic
uauaacuuuuaaauuagguuc

SEQ ID NO: 160211 - RNA, 22 nt, Artificial Sequence
  Synthetic
uuauaacuuuuaaauuagguuc

SEQ ID NO: 160212 - RNA, 23 nt, Artificial Sequence
  Synthetic
uuuauaacuuuuaaauuagguuc

SEQ ID NO: 160213 - RNA, 24 nt, Artificial Sequence
  Synthetic
uuuuauaacuuuuaaauuagguuc

SEQ ID NO: 160214 - RNA, 18 nt, Artificial Sequence
  Synthetic
uggaaggagcuuggguuc

SEQ ID NO: 160215 - RNA, 19 nt, Artificial Sequence
  Synthetic
auggaaggagcuuggguuc

SEQ ID NO: 160216 - RNA, 18 nt, Artificial Sequence
  Synthetic
uccaugggggauugguuc

SEQ ID NO: 160217 - RNA, 19 nt, Artificial Sequence
  Synthetic
auccaugggggauugguuc

SEQ ID NO: 160218 - RNA, 20 nt, Artificial Sequence
  Synthetic
uauccaugggggauugguuc

SEQ ID NO: 160219 - RNA, 22 nt, Artificial Sequence
  Synthetic
aguauccaugggggauugguuc

SEQ ID NO: 160220 - RNA, 23 nt, Artificial Sequence
  Synthetic
caguauccaugggggauugguuc

SEQ ID NO: 160221 - RNA, 24 nt, Artificial Sequence
  Synthetic
ucaguauccaugggggauugguuc

SEQ ID NO: 160222 - RNA, 21 nt, Artificial Sequence
  Synthetic
uucuauucuuguccuugguuc

SEQ ID NO: 160223 - RNA, 22 nt, Artificial Sequence
  Synthetic
uuucuauucuuguccuugguuc

SEQ ID NO: 160224 - RNA, 23 nt, Artificial Sequence
  Synthetic
cuuucuauucuuguccuugguuc

SEQ ID NO: 160225 - RNA, 24 nt, Artificial Sequence
  Synthetic
ucuuucuauucuuguccuugguuc

SEQ ID NO: 160226 - RNA, 18 nt, Artificial Sequence
  Synthetic
auuacaaaagaaauguuc

SEQ ID NO: 160227 - RNA, 19 nt, Artificial Sequence
  Synthetic
aauuacaaaagaaauguuc

SEQ ID NO: 160228 - RNA, 20 nt, Artificial Sequence
  Synthetic
caauuacaaaagaaauguuc

SEQ ID NO: 160229 - RNA, 21 nt, Artificial Sequence
  Synthetic
aaucaaguucaccucaauuuc

SEQ ID NO: 160230 - RNA, 22 nt, Artificial Sequence
  Synthetic
aaaucaaguucaccucaauuuc

SEQ ID NO: 160231 - RNA, 23 nt, Artificial Sequence
  Synthetic
aaaaucaaguucaccucaauuuc

SEQ ID NO: 160232 - RNA, 24 nt, Artificial Sequence
  Synthetic
aaaaaucaaguucaccucaauuuc

SEQ ID NO: 160233 - RNA, 19 nt, Artificial Sequence
  Synthetic
agggaucaaggucaauuuc

SEQ ID NO: 160234 - RNA, 20 nt, Artificial Sequence
  Synthetic
aagggaucaaggucaauuuc

SEQ ID NO: 160235 - RNA, 18 nt, Artificial Sequence
  Synthetic
ugugcuugacaugauuuc

SEQ ID NO: 160236 - RNA, 19 nt, Artificial Sequence
  Synthetic
cugugcuugacaugauuuc

SEQ ID NO: 160237 - RNA, 20 nt, Artificial Sequence
  Synthetic
ucugugcuugacaugauuuc

SEQ ID NO: 160238 - RNA, 20 nt, Artificial Sequence
  Synthetic
aggcauuugggacugauuuc

SEQ ID NO: 160239 - RNA, 18 nt, Artificial Sequence
  Synthetic
cuaauuucaaaauauuuc

SEQ ID NO: 160240 - RNA, 19 nt, Artificial Sequence
  Synthetic
ucuaauuucaaaauauuuc

SEQ ID NO: 160241 - RNA, 20 nt, Artificial Sequence
  Synthetic
cucuaauuucaaaauauuuc

SEQ ID NO: 160242 - RNA, 18 nt, Artificial Sequence
  Synthetic
ugguguucuccauauuuc

SEQ ID NO: 160243 - RNA, 20 nt, Artificial Sequence
  Synthetic
ugugguguucuccauauuuc

SEQ ID NO: 160244 - RNA, 21 nt, Artificial Sequence
  Synthetic
uugugguguucuccauauuuc

SEQ ID NO: 160245 - RNA, 22 nt, Artificial Sequence
  Synthetic
uuugugguguucuccauauuuc

SEQ ID NO: 160246 - RNA, 23 nt, Artificial Sequence
  Synthetic
cuuugugguguucuccauauuuc

SEQ ID NO: 160247 - RNA, 24 nt, Artificial Sequence
  Synthetic
ucuuugugguguucuccauauuuc

SEQ ID NO: 160248 - RNA, 18 nt, Artificial Sequence
  Synthetic
auaaauaaaucauauuuc

SEQ ID NO: 160249 - RNA, 19 nt, Artificial Sequence
  Synthetic
aauaaauaaaucauauuuc

SEQ ID NO: 160250 - RNA, 20 nt, Artificial Sequence
  Synthetic
uaauaaauaaaucauauuuc

SEQ ID NO: 160251 - RNA, 18 nt, Artificial Sequence
  Synthetic
uucccacaaaaggcuuuc

SEQ ID NO: 160252 - RNA, 19 nt, Artificial Sequence
  Synthetic
uuucccacaaaaggcuuuc

SEQ ID NO: 160253 - RNA, 20 nt, Artificial Sequence
  Synthetic
auuucccacaaaaggcuuuc

SEQ ID NO: 160254 - RNA, 18 nt, Artificial Sequence
  Synthetic
uuccccagguuuucuuuc

SEQ ID NO: 160255 - RNA, 19 nt, Artificial Sequence
  Synthetic
uuuccccagguuuucuuuc

SEQ ID NO: 160256 - RNA, 20 nt, Artificial Sequence
  Synthetic
uuuuccccagguuuucuuuc

SEQ ID NO: 160257 - RNA, 18 nt, Artificial Sequence
  Synthetic
cacauauuuuuuucuuuc

SEQ ID NO: 160258 - RNA, 19 nt, Artificial Sequence
  Synthetic
acacauauuuuuuucuuuc

SEQ ID NO: 160259 - RNA, 20 nt, Artificial Sequence
  Synthetic
cacacauauuuuuuucuuuc

SEQ ID NO: 160260 - RNA, 21 nt, Artificial Sequence
  Synthetic
acacacauauuuuuuucuuuc

SEQ ID NO: 160261 - RNA, 22 nt, Artificial Sequence
  Synthetic
uacacacauauuuuuuucuuuc

SEQ ID NO: 160262 - RNA, 23 nt, Artificial Sequence
  Synthetic
auacacacauauuuuuuucuuuc

SEQ ID NO: 160263 - RNA, 24 nt, Artificial Sequence
  Synthetic
uauacacacauauuuuuuucuuuc

SEQ ID NO: 160264 - RNA, 18 nt, Artificial Sequence
  Synthetic
auguuuuucaaaaguuuc

SEQ ID NO: 160265 - RNA, 19 nt, Artificial Sequence
  Synthetic
aauguuuuucaaaaguuuc

SEQ ID NO: 160266 - RNA, 20 nt, Artificial Sequence
  Synthetic
uaauguuuuucaaaaguuuc

SEQ ID NO: 160267 - RNA, 18 nt, Artificial Sequence
  Synthetic
aaguuugaaauggguuuc

SEQ ID NO: 160268 - RNA, 20 nt, Artificial Sequence
  Synthetic
agaaguuugaaauggguuuc

SEQ ID NO: 160269 - RNA, 21 nt, Artificial Sequence
  Synthetic
cagaaguuugaaauggguuuc

SEQ ID NO: 160270 - RNA, 22 nt, Artificial Sequence
  Synthetic
ucagaaguuugaaauggguuuc

SEQ ID NO: 160271 - RNA, 24 nt, Artificial Sequence
  Synthetic
agucagaaguuugaaauggguuuc

SEQ ID NO: 160272 - RNA, 18 nt, Artificial Sequence
  Synthetic
auuuuguagauuuguuuc

SEQ ID NO: 160273 - RNA, 19 nt, Artificial Sequence
  Synthetic
uauuuuguagauuuguuuc

SEQ ID NO: 160274 - RNA, 20 nt, Artificial Sequence
  Synthetic
uuauuuuguagauuuguuuc

SEQ ID NO: 160275 - RNA, 18 nt, Artificial Sequence
  Synthetic
aaucucuuggcaauuuuc

SEQ ID NO: 160276 - RNA, 19 nt, Artificial Sequence
  Synthetic
uaaucucuuggcaauuuuc

SEQ ID NO: 160277 - RNA, 21 nt, Artificial Sequence
  Synthetic
uguaaucucuuggcaauuuuc

SEQ ID NO: 160278 - RNA, 22 nt, Artificial Sequence
  Synthetic
auguaaucucuuggcaauuuuc

SEQ ID NO: 160279 - RNA, 23 nt, Artificial Sequence
  Synthetic
aauguaaucucuuggcaauuuuc

SEQ ID NO: 160280 - RNA, 24 nt, Artificial Sequence
  Synthetic
aaauguaaucucuuggcaauuuuc

SEQ ID NO: 160281 - RNA, 18 nt, Artificial Sequence
  Synthetic
caacuuuuucucauuuuc

SEQ ID NO: 160282 - RNA, 19 nt, Artificial Sequence
  Synthetic
ucaacuuuuucucauuuuc

SEQ ID NO: 160283 - RNA, 20 nt, Artificial Sequence
  Synthetic
uucaacuuuuucucauuuuc

SEQ ID NO: 160284 - RNA, 18 nt, Artificial Sequence
  Synthetic
auauuguuuacuuuuuuc

SEQ ID NO: 160285 - RNA, 19 nt, Artificial Sequence
  Synthetic
aauauuguuuacuuuuuuc

SEQ ID NO: 160286 - RNA, 20 nt, Artificial Sequence
  Synthetic
aaauauuguuuacuuuuuuc

SEQ ID NO: 160287 - RNA, 18 nt, Artificial Sequence
  Synthetic
cauaugucuauuuuuuuc

SEQ ID NO: 160288 - RNA, 19 nt, Artificial Sequence
  Synthetic
ucauaugucuauuuuuuuc

SEQ ID NO: 160289 - RNA, 20 nt, Artificial Sequence
  Synthetic
uucauaugucuauuuuuuuc

SEQ ID NO: 160290 - RNA, 18 nt, Artificial Sequence
  Synthetic
uuacagcauuuuuuuuuc

SEQ ID NO: 160291 - RNA, 19 nt, Artificial Sequence
  Synthetic
uuuacagcauuuuuuuuuc

SEQ ID NO: 160292 - RNA, 20 nt, Artificial Sequence
  Synthetic
uuuuacagcauuuuuuuuuc

SEQ ID NO: 160293 - RNA, 18 nt, Artificial Sequence
  Synthetic
cuuuuuuuuuuuuuuuuc

SEQ ID NO: 160294 - RNA, 19 nt, Artificial Sequence
  Synthetic
ccuuuuuuuuuuuuuuuuc

SEQ ID NO: 160295 - RNA, 20 nt, Artificial Sequence
  Synthetic
uccuuuuuuuuuuuuuuuuc

SEQ ID NO: 160296 - RNA, 21 nt, Artificial Sequence
  Synthetic
uuccuuuuuuuuuuuuuuuuc

SEQ ID NO: 160297 - RNA, 22 nt, Artificial Sequence
  Synthetic
uuuccuuuuuuuuuuuuuuuuc

SEQ ID NO: 160298 - RNA, 23 nt, Artificial Sequence
  Synthetic
auuuccuuuuuuuuuuuuuuuuc

SEQ ID NO: 160299 - RNA, 24 nt, Artificial Sequence
  Synthetic
aauuuccuuuuuuuuuuuuuuuuc

SEQ ID NO: 160300 - RNA, 19 nt, Artificial Sequence
  Synthetic
ugcaaacaaaauaaaaaag

SEQ ID NO: 160301 - RNA, 20 nt, Artificial Sequence
  Synthetic
uugcaaacaaaauaaaaaag

SEQ ID NO: 160302 - RNA, 18 nt, Artificial Sequence
  Synthetic
ucaggaaacuacaaaaag

SEQ ID NO: 160303 - RNA, 19 nt, Artificial Sequence
  Synthetic
cucaggaaacuacaaaaag

SEQ ID NO: 160304 - RNA, 20 nt, Artificial Sequence
  Synthetic
ccucaggaaacuacaaaaag

SEQ ID NO: 160305 - RNA, 21 nt, Artificial Sequence
  Synthetic
accucaggaaacuacaaaaag

SEQ ID NO: 160306 - RNA, 22 nt, Artificial Sequence
  Synthetic
uaccucaggaaacuacaaaaag

SEQ ID NO: 160307 - RNA, 23 nt, Artificial Sequence
  Synthetic
auaccucaggaaacuacaaaaag

SEQ ID NO: 160308 - RNA, 24 nt, Artificial Sequence
  Synthetic
uauaccucaggaaacuacaaaaag

SEQ ID NO: 160309 - RNA, 18 nt, Artificial Sequence
  Synthetic
cuccagaaaagcaaaaag

SEQ ID NO: 160310 - RNA, 19 nt, Artificial Sequence
  Synthetic
ucuccagaaaagcaaaaag

SEQ ID NO: 160311 - RNA, 20 nt, Artificial Sequence
  Synthetic
uucuccagaaaagcaaaaag

SEQ ID NO: 160312 - RNA, 18 nt, Artificial Sequence
  Synthetic
uuccaaauagcuaaaaag

SEQ ID NO: 160313 - RNA, 19 nt, Artificial Sequence
  Synthetic
uuuccaaauagcuaaaaag

SEQ ID NO: 160314 - RNA, 20 nt, Artificial Sequence
  Synthetic
auuuccaaauagcuaaaaag

SEQ ID NO: 160315 - RNA, 21 nt, Artificial Sequence
  Synthetic
uauuuccaaauagcuaaaaag

SEQ ID NO: 160316 - RNA, 22 nt, Artificial Sequence
  Synthetic
auauuuccaaauagcuaaaaag

SEQ ID NO: 160317 - RNA, 23 nt, Artificial Sequence
  Synthetic
uauauuuccaaauagcuaaaaag

SEQ ID NO: 160318 - RNA, 18 nt, Artificial Sequence
  Synthetic
cugaauguccaucaaaag

SEQ ID NO: 160319 - RNA, 19 nt, Artificial Sequence
  Synthetic
ccugaauguccaucaaaag

SEQ ID NO: 160320 - RNA, 20 nt, Artificial Sequence
  Synthetic
accugaauguccaucaaaag

SEQ ID NO: 160321 - RNA, 21 nt, Artificial Sequence
  Synthetic
caccugaauguccaucaaaag

SEQ ID NO: 160322 - RNA, 22 nt, Artificial Sequence
  Synthetic
ccaccugaauguccaucaaaag

SEQ ID NO: 160323 - RNA, 23 nt, Artificial Sequence
  Synthetic
accaccugaauguccaucaaaag

SEQ ID NO: 160324 - RNA, 24 nt, Artificial Sequence
  Synthetic
aaccaccugaauguccaucaaaag

SEQ ID NO: 160325 - RNA, 18 nt, Artificial Sequence
  Synthetic
uuauuuaaaaaagaaaag

SEQ ID NO: 160326 - RNA, 20 nt, Artificial Sequence
  Synthetic
uguuauuuaaaaaagaaaag

SEQ ID NO: 160327 - RNA, 19 nt, Artificial Sequence
  Synthetic
agcaaaagccagagaaaag

SEQ ID NO: 160328 - RNA, 20 nt, Artificial Sequence
  Synthetic
aagcaaaagccagagaaaag

SEQ ID NO: 160329 - RNA, 19 nt, Artificial Sequence
  Synthetic
agcucaaaggcaggaaaag

SEQ ID NO: 160330 - RNA, 20 nt, Artificial Sequence
  Synthetic
aagcucaaaggcaggaaaag

SEQ ID NO: 160331 - RNA, 18 nt, Artificial Sequence
  Synthetic
aauagcucaauugaaaag

SEQ ID NO: 160332 - RNA, 19 nt, Artificial Sequence
  Synthetic
aaauagcucaauugaaaag

SEQ ID NO: 160333 - RNA, 20 nt, Artificial Sequence
  Synthetic
aaaauagcucaauugaaaag

SEQ ID NO: 160334 - RNA, 18 nt, Artificial Sequence
  Synthetic
ucugaugguuuugaaaag

SEQ ID NO: 160335 - RNA, 19 nt, Artificial Sequence
  Synthetic
aucugaugguuuugaaaag

SEQ ID NO: 160336 - RNA, 21 nt, Artificial Sequence
  Synthetic
agaucugaugguuuugaaaag

SEQ ID NO: 160337 - RNA, 23 nt, Artificial Sequence
  Synthetic
ugagaucugaugguuuugaaaag

SEQ ID NO: 160338 - RNA, 24 nt, Artificial Sequence
  Synthetic
augagaucugaugguuuugaaaag

SEQ ID NO: 160339 - RNA, 18 nt, Artificial Sequence
  Synthetic
aaagcaaggcaauaaaag

SEQ ID NO: 160340 - RNA, 19 nt, Artificial Sequence
  Synthetic
caaagcaaggcaauaaaag

SEQ ID NO: 160341 - RNA, 20 nt, Artificial Sequence
  Synthetic
acaaagcaaggcaauaaaag

SEQ ID NO: 160342 - RNA, 18 nt, Artificial Sequence
  Synthetic
aaaaacaaacuauaaaag

SEQ ID NO: 160343 - RNA, 19 nt, Artificial Sequence
  Synthetic
uaaaaacaaacuauaaaag

SEQ ID NO: 160344 - RNA, 20 nt, Artificial Sequence
  Synthetic
auaaaaacaaacuauaaaag

SEQ ID NO: 160345 - RNA, 18 nt, Artificial Sequence
  Synthetic
cuucuacaucuauaaaag

SEQ ID NO: 160346 - RNA, 20 nt, Artificial Sequence
  Synthetic
agcuucuacaucuauaaaag

SEQ ID NO: 160347 - RNA, 21 nt, Artificial Sequence
  Synthetic
cagcuucuacaucuauaaaag

SEQ ID NO: 160348 - RNA, 22 nt, Artificial Sequence
  Synthetic
ucagcuucuacaucuauaaaag

SEQ ID NO: 160349 - RNA, 23 nt, Artificial Sequence
  Synthetic
cucagcuucuacaucuauaaaag

SEQ ID NO: 160350 - RNA, 24 nt, Artificial Sequence
  Synthetic
ccucagcuucuacaucuauaaaag

SEQ ID NO: 160351 - RNA, 18 nt, Artificial Sequence
  Synthetic
uaaauagaaaaguaaaag

SEQ ID NO: 160352 - RNA, 20 nt, Artificial Sequence
  Synthetic
uguaaauagaaaaguaaaag

SEQ ID NO: 160353 - RNA, 18 nt, Artificial Sequence
  Synthetic
aauauagcagaaacaaag

SEQ ID NO: 160354 - RNA, 19 nt, Artificial Sequence
  Synthetic
caauauagcagaaacaaag

SEQ ID NO: 160355 - RNA, 19 nt, Artificial Sequence
  Synthetic
ugaaacuggaaauacaaag

SEQ ID NO: 160356 - RNA, 20 nt, Artificial Sequence
  Synthetic
cugaaacuggaaauacaaag

SEQ ID NO: 160357 - RNA, 18 nt, Artificial Sequence
  Synthetic
aagguucucuaagcaaag

SEQ ID NO: 160358 - RNA, 19 nt, Artificial Sequence
  Synthetic
caagguucucuaagcaaag

SEQ ID NO: 160359 - RNA, 20 nt, Artificial Sequence
  Synthetic
ucaagguucucuaagcaaag

SEQ ID NO: 160360 - RNA, 22 nt, Artificial Sequence
  Synthetic
agaaugaaauuuaagagcaaag

SEQ ID NO: 160361 - RNA, 23 nt, Artificial Sequence
  Synthetic
aagaaugaaauuuaagagcaaag

SEQ ID NO: 160362 - RNA, 24 nt, Artificial Sequence
  Synthetic
aaagaaugaaauuuaagagcaaag

SEQ ID NO: 160363 - RNA, 19 nt, Artificial Sequence
  Synthetic
agauuggaagaaggcaaag

SEQ ID NO: 160364 - RNA, 20 nt, Artificial Sequence
  Synthetic
aggagaaaguggggucaaag

SEQ ID NO: 160365 - RNA, 18 nt, Artificial Sequence
  Synthetic
ucuaccagacauucaaag

SEQ ID NO: 160366 - RNA, 19 nt, Artificial Sequence
  Synthetic
uucuaccagacauucaaag

SEQ ID NO: 160367 - RNA, 20 nt, Artificial Sequence
  Synthetic
auucuaccagacauucaaag

SEQ ID NO: 160368 - RNA, 21 nt, Artificial Sequence
  Synthetic
aauucuaccagacauucaaag

SEQ ID NO: 160369 - RNA, 23 nt, Artificial Sequence
  Synthetic
ugaauucuaccagacauucaaag

SEQ ID NO: 160370 - RNA, 24 nt, Artificial Sequence
  Synthetic
cugaauucuaccagacauucaaag

SEQ ID NO: 160371 - RNA, 20 nt, Artificial Sequence
  Synthetic
uggugagguugugaagaaag

SEQ ID NO: 160372 - RNA, 21 nt, Artificial Sequence
  Synthetic
cuggugagguugugaagaaag

SEQ ID NO: 160373 - RNA, 23 nt, Artificial Sequence
  Synthetic
ugcuggugagguugugaagaaag

SEQ ID NO: 160374 - RNA, 24 nt, Artificial Sequence
  Synthetic
augcuggugagguugugaagaaag

SEQ ID NO: 160375 - RNA, 18 nt, Artificial Sequence
  Synthetic
cucuuuagagacagaaag

SEQ ID NO: 160376 - RNA, 19 nt, Artificial Sequence
  Synthetic
acucuuuagagacagaaag

SEQ ID NO: 160377 - RNA, 20 nt, Artificial Sequence
  Synthetic
aacucuuuagagacagaaag

SEQ ID NO: 160378 - RNA, 20 nt, Artificial Sequence
  Synthetic
uggcaggcaaauucagaaag

SEQ ID NO: 160379 - RNA, 18 nt, Artificial Sequence
  Synthetic
aucccaaaaaaaggaaag

SEQ ID NO: 160380 - RNA, 19 nt, Artificial Sequence
  Synthetic
uaucccaaaaaaaggaaag

SEQ ID NO: 160381 - RNA, 20 nt, Artificial Sequence
  Synthetic
auaucccaaaaaaaggaaag

SEQ ID NO: 160382 - RNA, 22 nt, Artificial Sequence
  Synthetic
aggggacauaguuucaggaaag

SEQ ID NO: 160383 - RNA, 23 nt, Artificial Sequence
  Synthetic
aaggggacauaguuucaggaaag

SEQ ID NO: 160384 - RNA, 24 nt, Artificial Sequence
  Synthetic
aaaggggacauaguuucaggaaag

SEQ ID NO: 160385 - RNA, 19 nt, Artificial Sequence
  Synthetic
agaauugggguugggaaag

SEQ ID NO: 160386 - RNA, 20 nt, Artificial Sequence
  Synthetic
aagaauugggguugggaaag

SEQ ID NO: 160387 - RNA, 18 nt, Artificial Sequence
  Synthetic
caaugugaagaaugaaag

SEQ ID NO: 160388 - RNA, 19 nt, Artificial Sequence
  Synthetic
acaaugugaagaaugaaag

SEQ ID NO: 160389 - RNA, 20 nt, Artificial Sequence
  Synthetic
aacaaugugaagaaugaaag

SEQ ID NO: 160390 - RNA, 18 nt, Artificial Sequence
  Synthetic
ucaggucauggaugaaag

SEQ ID NO: 160391 - RNA, 19 nt, Artificial Sequence
  Synthetic
uucaggucauggaugaaag

SEQ ID NO: 160392 - RNA, 20 nt, Artificial Sequence
  Synthetic
uuucaggucauggaugaaag

SEQ ID NO: 160393 - RNA, 18 nt, Artificial Sequence
  Synthetic
agugcuaauguuugaaag

SEQ ID NO: 160394 - RNA, 19 nt, Artificial Sequence
  Synthetic
aagugcuaauguuugaaag

SEQ ID NO: 160395 - RNA, 20 nt, Artificial Sequence
  Synthetic
uaagugcuaauguuugaaag

SEQ ID NO: 160396 - RNA, 18 nt, Artificial Sequence
  Synthetic
auaauaaaauuaauaaag

SEQ ID NO: 160397 - RNA, 19 nt, Artificial Sequence
  Synthetic
aauaauaaaauuaauaaag

SEQ ID NO: 160398 - RNA, 20 nt, Artificial Sequence
  Synthetic
aaauaauaaaauuaauaaag

SEQ ID NO: 160399 - RNA, 18 nt, Artificial Sequence
  Synthetic
auauuuuaucuucuaaag

SEQ ID NO: 160400 - RNA, 19 nt, Artificial Sequence
  Synthetic
uauauuuuaucuucuaaag

SEQ ID NO: 160401 - RNA, 20 nt, Artificial Sequence
  Synthetic
auauauuuuaucuucuaaag

SEQ ID NO: 160402 - RNA, 18 nt, Artificial Sequence
  Synthetic
uauuuggaagaauuaaag

SEQ ID NO: 160403 - RNA, 19 nt, Artificial Sequence
  Synthetic
auauuuggaagaauuaaag

SEQ ID NO: 160404 - RNA, 20 nt, Artificial Sequence
  Synthetic
aauauuuggaagaauuaaag

SEQ ID NO: 160405 - RNA, 19 nt, Artificial Sequence
  Synthetic
uguacccuaaaacuuaaag

SEQ ID NO: 160406 - RNA, 20 nt, Artificial Sequence
  Synthetic
auguacccuaaaacuuaaag

SEQ ID NO: 160407 - RNA, 21 nt, Artificial Sequence
  Synthetic
cauguacccuaaaacuuaaag

SEQ ID NO: 160408 - RNA, 22 nt, Artificial Sequence
  Synthetic
acauguacccuaaaacuuaaag

SEQ ID NO: 160409 - RNA, 23 nt, Artificial Sequence
  Synthetic
cacauguacccuaaaacuuaaag

SEQ ID NO: 160410 - RNA, 18 nt, Artificial Sequence
  Synthetic
uuucauuccuuuuuaaag

SEQ ID NO: 160411 - RNA, 19 nt, Artificial Sequence
  Synthetic
auuucauuccuuuuuaaag

SEQ ID NO: 160412 - RNA, 20 nt, Artificial Sequence
  Synthetic
aauuucauuccuuuuuaaag

SEQ ID NO: 160413 - RNA, 22 nt, Artificial Sequence
  Synthetic
agaauuucauuccuuuuuaaag

SEQ ID NO: 160414 - RNA, 23 nt, Artificial Sequence
  Synthetic
cagaauuucauuccuuuuuaaag

SEQ ID NO: 160415 - RNA, 24 nt, Artificial Sequence
  Synthetic
acagaauuucauuccuuuuuaaag

SEQ ID NO: 160416 - RNA, 18 nt, Artificial Sequence
  Synthetic
caccucagaagaaacaag

SEQ ID NO: 160417 - RNA, 20 nt, Artificial Sequence
  Synthetic
ugcaccucagaagaaacaag

SEQ ID NO: 160418 - RNA, 21 nt, Artificial Sequence
  Synthetic
cugcaccucagaagaaacaag

SEQ ID NO: 160419 - RNA, 22 nt, Artificial Sequence
  Synthetic
acugcaccucagaagaaacaag

SEQ ID NO: 160420 - RNA, 24 nt, Artificial Sequence
  Synthetic
ugacugcaccucagaagaaacaag

SEQ ID NO: 160421 - RNA, 18 nt, Artificial Sequence
  Synthetic
caaccaacgcuucacaag

SEQ ID NO: 160422 - RNA, 19 nt, Artificial Sequence
  Synthetic
acaaccaacgcuucacaag

SEQ ID NO: 160423 - RNA, 20 nt, Artificial Sequence
  Synthetic
cacaaccaacgcuucacaag

SEQ ID NO: 160424 - RNA, 22 nt, Artificial Sequence
  Synthetic
cgcacaaccaacgcuucacaag

SEQ ID NO: 160425 - RNA, 23 nt, Artificial Sequence
  Synthetic
ucgcacaaccaacgcuucacaag

SEQ ID NO: 160426 - RNA, 21 nt, Artificial Sequence
  Synthetic
uuuugacuugcuucugacaag

SEQ ID NO: 160427 - RNA, 22 nt, Artificial Sequence
  Synthetic
cuuuugacuugcuucugacaag

SEQ ID NO: 160428 - RNA, 23 nt, Artificial Sequence
  Synthetic
acuuuugacuugcuucugacaag

SEQ ID NO: 160429 - RNA, 18 nt, Artificial Sequence
  Synthetic
uuauucaccaugaccaag

SEQ ID NO: 160430 - RNA, 19 nt, Artificial Sequence
  Synthetic
auuauucaccaugaccaag

SEQ ID NO: 160431 - RNA, 22 nt, Artificial Sequence
  Synthetic
aggauuauucaccaugaccaag

SEQ ID NO: 160432 - RNA, 23 nt, Artificial Sequence
  Synthetic
aaggauuauucaccaugaccaag

SEQ ID NO: 160433 - RNA, 19 nt, Artificial Sequence
  Synthetic
agcauuaaaaaaagccaag

SEQ ID NO: 160434 - RNA, 20 nt, Artificial Sequence
  Synthetic
cagcauuaaaaaaagccaag

SEQ ID NO: 160435 - RNA, 21 nt, Artificial Sequence
  Synthetic
acagcauuaaaaaaagccaag

SEQ ID NO: 160436 - RNA, 22 nt, Artificial Sequence
  Synthetic
aacagcauuaaaaaaagccaag

SEQ ID NO: 160437 - RNA, 23 nt, Artificial Sequence
  Synthetic
aaacagcauuaaaaaaagccaag

SEQ ID NO: 160438 - RNA, 24 nt, Artificial Sequence
  Synthetic
aaaacagcauuaaaaaaagccaag

SEQ ID NO: 160439 - RNA, 19 nt, Artificial Sequence
  Synthetic
agcacguugucaggccaag

SEQ ID NO: 160440 - RNA, 20 nt, Artificial Sequence
  Synthetic
cagcacguugucaggccaag

SEQ ID NO: 160441 - RNA, 21 nt, Artificial Sequence
  Synthetic
ccagcacguugucaggccaag

SEQ ID NO: 160442 - RNA, 22 nt, Artificial Sequence
  Synthetic
uccagcacguugucaggccaag

SEQ ID NO: 160443 - RNA, 23 nt, Artificial Sequence
  Synthetic
uuccagcacguugucaggccaag

SEQ ID NO: 160444 - RNA, 24 nt, Artificial Sequence
  Synthetic
auuccagcacguugucaggccaag

SEQ ID NO: 160445 - RNA, 19 nt, Artificial Sequence
  Synthetic
agcacuuagggaggccaag

SEQ ID NO: 160446 - RNA, 20 nt, Artificial Sequence
  Synthetic
cagcacuuagggaggccaag

SEQ ID NO: 160447 - RNA, 21 nt, Artificial Sequence
  Synthetic
ccagcacuuagggaggccaag

SEQ ID NO: 160448 - RNA, 22 nt, Artificial Sequence
  Synthetic
cccagcacuuagggaggccaag

SEQ ID NO: 160449 - RNA, 23 nt, Artificial Sequence
  Synthetic
ucccagcacuuagggaggccaag

SEQ ID NO: 160450 - RNA, 24 nt, Artificial Sequence
  Synthetic
aucccagcacuuagggaggccaag

SEQ ID NO: 160451 - RNA, 18 nt, Artificial Sequence
  Synthetic
ccacuuugggaggccaag

SEQ ID NO: 160452 - RNA, 19 nt, Artificial Sequence
  Synthetic
uccacuuugggaggccaag

SEQ ID NO: 160453 - RNA, 20 nt, Artificial Sequence
  Synthetic
auccacuuugggaggccaag

SEQ ID NO: 160454 - RNA, 21 nt, Artificial Sequence
  Synthetic
aauccacuuugggaggccaag

SEQ ID NO: 160455 - RNA, 22 nt, Artificial Sequence
  Synthetic
uaauccacuuugggaggccaag

SEQ ID NO: 160456 - RNA, 24 nt, Artificial Sequence
  Synthetic
uguaauccacuuugggaggccaag

SEQ ID NO: 160457 - RNA, 18 nt, Artificial Sequence
  Synthetic
aagacacagacuggcaag

SEQ ID NO: 160458 - RNA, 19 nt, Artificial Sequence
  Synthetic
aaagacacagacuggcaag

SEQ ID NO: 160459 - RNA, 20 nt, Artificial Sequence
  Synthetic
aaaagacacagacuggcaag

SEQ ID NO: 160460 - RNA, 21 nt, Artificial Sequence
  Synthetic
uaaaagacacagacuggcaag

SEQ ID NO: 160461 - RNA, 22 nt, Artificial Sequence
  Synthetic
uuaaaagacacagacuggcaag

SEQ ID NO: 160462 - RNA, 23 nt, Artificial Sequence
  Synthetic
auuaaaagacacagacuggcaag

SEQ ID NO: 160463 - RNA, 24 nt, Artificial Sequence
  Synthetic
aauuaaaagacacagacuggcaag

SEQ ID NO: 160464 - RNA, 18 nt, Artificial Sequence
  Synthetic
uugauauggagaaucaag

SEQ ID NO: 160465 - RNA, 19 nt, Artificial Sequence
  Synthetic
auugauauggagaaucaag

SEQ ID NO: 160466 - RNA, 21 nt, Artificial Sequence
  Synthetic
agauugauauggagaaucaag

SEQ ID NO: 160467 - RNA, 22 nt, Artificial Sequence
  Synthetic
aagauugauauggagaaucaag

SEQ ID NO: 160468 - RNA, 23 nt, Artificial Sequence
  Synthetic
aaagauugauauggagaaucaag

SEQ ID NO: 160469 - RNA, 24 nt, Artificial Sequence
  Synthetic
aaaagauugauauggagaaucaag

SEQ ID NO: 160470 - RNA, 18 nt, Artificial Sequence
  Synthetic
ucaaaugacaucaucaag

SEQ ID NO: 160471 - RNA, 19 nt, Artificial Sequence
  Synthetic
uucaaaugacaucaucaag

SEQ ID NO: 160472 - RNA, 20 nt, Artificial Sequence
  Synthetic
uuucaaaugacaucaucaag

SEQ ID NO: 160473 - RNA, 21 nt, Artificial Sequence
  Synthetic
uuuucaaaugacaucaucaag

SEQ ID NO: 160474 - RNA, 22 nt, Artificial Sequence
  Synthetic
cuuuucaaaugacaucaucaag

SEQ ID NO: 160475 - RNA, 23 nt, Artificial Sequence
  Synthetic
ucuuuucaaaugacaucaucaag

SEQ ID NO: 160476 - RNA, 24 nt, Artificial Sequence
  Synthetic
uucuuuucaaaugacaucaucaag

SEQ ID NO: 160477 - RNA, 21 nt, Artificial Sequence
  Synthetic
uuauacaaaaaucaauucaag

SEQ ID NO: 160478 - RNA, 22 nt, Artificial Sequence
  Synthetic
cuuauacaaaaaucaauucaag

SEQ ID NO: 160479 - RNA, 23 nt, Artificial Sequence
  Synthetic
ccuuauacaaaaaucaauucaag

SEQ ID NO: 160480 - RNA, 24 nt, Artificial Sequence
  Synthetic
accuuauacaaaaaucaauucaag

SEQ ID NO: 160481 - RNA, 18 nt, Artificial Sequence
  Synthetic
uacaaaaauuaauucaag

SEQ ID NO: 160482 - RNA, 19 nt, Artificial Sequence
  Synthetic
auacaaaaauuaauucaag

SEQ ID NO: 160483 - RNA, 20 nt, Artificial Sequence
  Synthetic
uauacaaaaauuaauucaag

SEQ ID NO: 160484 - RNA, 21 nt, Artificial Sequence
  Synthetic
auauacaaaaauuaauucaag

SEQ ID NO: 160485 - RNA, 22 nt, Artificial Sequence
  Synthetic
cauauacaaaaauuaauucaag

SEQ ID NO: 160486 - RNA, 23 nt, Artificial Sequence
  Synthetic
ccauauacaaaaauuaauucaag

SEQ ID NO: 160487 - RNA, 24 nt, Artificial Sequence
  Synthetic
accauauacaaaaauuaauucaag

SEQ ID NO: 160488 - RNA, 18 nt, Artificial Sequence
  Synthetic
aaaauuaauuaauucaag

SEQ ID NO: 160489 - RNA, 19 nt, Artificial Sequence
  Synthetic
aaaaauuaauuaauucaag

SEQ ID NO: 160490 - RNA, 20 nt, Artificial Sequence
  Synthetic
caaaaauuaauuaauucaag

SEQ ID NO: 160491 - RNA, 21 nt, Artificial Sequence
  Synthetic
acaaaaauuaauuaauucaag

SEQ ID NO: 160492 - RNA, 22 nt, Artificial Sequence
  Synthetic
uacaaaaauuaauuaauucaag

SEQ ID NO: 160493 - RNA, 23 nt, Artificial Sequence
  Synthetic
auacaaaaauuaauuaauucaag

SEQ ID NO: 160494 - RNA, 24 nt, Artificial Sequence
  Synthetic
uauacaaaaauuaauuaauucaag

SEQ ID NO: 160495 - RNA, 18 nt, Artificial Sequence
  Synthetic
uuauguuuaauuuucaag

SEQ ID NO: 160496 - RNA, 19 nt, Artificial Sequence
  Synthetic
auuauguuuaauuuucaag

SEQ ID NO: 160497 - RNA, 20 nt, Artificial Sequence
  Synthetic
uauuauguuuaauuuucaag

SEQ ID NO: 160498 - RNA, 18 nt, Artificial Sequence
  Synthetic
uuacaagguggcaagaag

SEQ ID NO: 160499 - RNA, 19 nt, Artificial Sequence
  Synthetic
uuuacaagguggcaagaag

SEQ ID NO: 160500 - RNA, 20 nt, Artificial Sequence
  Synthetic
cuuuacaagguggcaagaag

SEQ ID NO: 160501 - RNA, 21 nt, Artificial Sequence
  Synthetic
ccuuuacaagguggcaagaag

SEQ ID NO: 160502 - RNA, 22 nt, Artificial Sequence
  Synthetic
uccuuuacaagguggcaagaag

SEQ ID NO: 160503 - RNA, 23 nt, Artificial Sequence
  Synthetic
cuccuuuacaagguggcaagaag

SEQ ID NO: 160504 - RNA, 24 nt, Artificial Sequence
  Synthetic
ccuccuuuacaagguggcaagaag

SEQ ID NO: 160505 - RNA, 21 nt, Artificial Sequence
  Synthetic
caagacuaaaccaggaagaag

SEQ ID NO: 160506 - RNA, 22 nt, Artificial Sequence
  Synthetic
ccaagacuaaaccaggaagaag

SEQ ID NO: 160507 - RNA, 23 nt, Artificial Sequence
  Synthetic
cccaagacuaaaccaggaagaag

SEQ ID NO: 160508 - RNA, 24 nt, Artificial Sequence
  Synthetic
ucccaagacuaaaccaggaagaag

SEQ ID NO: 160509 - RNA, 18 nt, Artificial Sequence
  Synthetic
aguggguucaggaagaag

SEQ ID NO: 160510 - RNA, 19 nt, Artificial Sequence
  Synthetic
caguggguucaggaagaag

SEQ ID NO: 160511 - RNA, 20 nt, Artificial Sequence
  Synthetic
ccaguggguucaggaagaag

SEQ ID NO: 160512 - RNA, 18 nt, Artificial Sequence
  Synthetic
uggguauauacccagaag

SEQ ID NO: 160513 - RNA, 19 nt, Artificial Sequence
  Synthetic
uuggguauauacccagaag

SEQ ID NO: 160514 - RNA, 20 nt, Artificial Sequence
  Synthetic
uuuggguauauacccagaag

SEQ ID NO: 160515 - RNA, 21 nt, Artificial Sequence
  Synthetic
uuuuggguauauacccagaag

SEQ ID NO: 160516 - RNA, 22 nt, Artificial Sequence
  Synthetic
auuuuggguauauacccagaag

SEQ ID NO: 160517 - RNA, 23 nt, Artificial Sequence
  Synthetic
uauuuuggguauauacccagaag

SEQ ID NO: 160518 - RNA, 24 nt, Artificial Sequence
  Synthetic
uuauuuuggguauauacccagaag

SEQ ID NO: 160519 - RNA, 18 nt, Artificial Sequence
  Synthetic
cggaggccuccccagaag

SEQ ID NO: 160520 - RNA, 19 nt, Artificial Sequence
  Synthetic
ccggaggccuccccagaag

SEQ ID NO: 160521 - RNA, 20 nt, Artificial Sequence
  Synthetic
cccggaggccuccccagaag

SEQ ID NO: 160522 - RNA, 21 nt, Artificial Sequence
  Synthetic
ucccggaggccuccccagaag

SEQ ID NO: 160523 - RNA, 22 nt, Artificial Sequence
  Synthetic
cucccggaggccuccccagaag

SEQ ID NO: 160524 - RNA, 24 nt, Artificial Sequence
  Synthetic
agcucccggaggccuccccagaag

SEQ ID NO: 160525 - RNA, 18 nt, Artificial Sequence
  Synthetic
aagcccugcaagcagaag

SEQ ID NO: 160526 - RNA, 20 nt, Artificial Sequence
  Synthetic
agaagcccugcaagcagaag

SEQ ID NO: 160527 - RNA, 21 nt, Artificial Sequence
  Synthetic
aagaagcccugcaagcagaag

SEQ ID NO: 160528 - RNA, 22 nt, Artificial Sequence
  Synthetic
aaagaagcccugcaagcagaag

SEQ ID NO: 160529 - RNA, 23 nt, Artificial Sequence
  Synthetic
uaaagaagcccugcaagcagaag

SEQ ID NO: 160530 - RNA, 24 nt, Artificial Sequence
  Synthetic
cuaaagaagcccugcaagcagaag

SEQ ID NO: 160531 - RNA, 18 nt, Artificial Sequence
  Synthetic
uugagaagacagcagaag

SEQ ID NO: 160532 - RNA, 19 nt, Artificial Sequence
  Synthetic
uuugagaagacagcagaag

SEQ ID NO: 160533 - RNA, 20 nt, Artificial Sequence
  Synthetic
auuugagaagacagcagaag

SEQ ID NO: 160534 - RNA, 21 nt, Artificial Sequence
  Synthetic
uauuugagaagacagcagaag

SEQ ID NO: 160535 - RNA, 24 nt, Artificial Sequence
  Synthetic
ugguauuugagaagacagcagaag

SEQ ID NO: 160536 - RNA, 19 nt, Artificial Sequence
  Synthetic
ugucacaugaggucagaag

SEQ ID NO: 160537 - RNA, 20 nt, Artificial Sequence
  Synthetic
uugucacaugaggucagaag

SEQ ID NO: 160538 - RNA, 21 nt, Artificial Sequence
  Synthetic
cuugucacaugaggucagaag

SEQ ID NO: 160539 - RNA, 22 nt, Artificial Sequence
  Synthetic
acuugucacaugaggucagaag

SEQ ID NO: 160540 - RNA, 24 nt, Artificial Sequence
  Synthetic
ugacuugucacaugaggucagaag

SEQ ID NO: 160541 - RNA, 19 nt, Artificial Sequence
  Synthetic
agaaaauuacaaggagaag

SEQ ID NO: 160542 - RNA, 18 nt, Artificial Sequence
  Synthetic
cagcugaggcaggagaag

SEQ ID NO: 160543 - RNA, 19 nt, Artificial Sequence
  Synthetic
ccagcugaggcaggagaag

SEQ ID NO: 160544 - RNA, 20 nt, Artificial Sequence
  Synthetic
cccagcugaggcaggagaag

SEQ ID NO: 160545 - RNA, 21 nt, Artificial Sequence
  Synthetic
ucccagcugaggcaggagaag

SEQ ID NO: 160546 - RNA, 23 nt, Artificial Sequence
  Synthetic
agucccagcugaggcaggagaag

SEQ ID NO: 160547 - RNA, 24 nt, Artificial Sequence
  Synthetic
uagucccagcugaggcaggagaag

SEQ ID NO: 160548 - RNA, 20 nt, Artificial Sequence
  Synthetic
agggagccagggaggagaag

SEQ ID NO: 160549 - RNA, 18 nt, Artificial Sequence
  Synthetic
aaaaaaaaaaaaaggaag

SEQ ID NO: 160550 - RNA, 19 nt, Artificial Sequence
  Synthetic
aaaaaaaaaaaaaaggaag

SEQ ID NO: 160551 - RNA, 20 nt, Artificial Sequence
  Synthetic
aaaaaaaaaaaaaaaggaag

SEQ ID NO: 160552 - RNA, 21 nt, Artificial Sequence
  Synthetic
uaaaaaaaaaaaaaaaggaag

SEQ ID NO: 160553 - RNA, 22 nt, Artificial Sequence
  Synthetic
uuaaaaaaaaaaaaaaaggaag

SEQ ID NO: 160554 - RNA, 23 nt, Artificial Sequence
  Synthetic
uuuaaaaaaaaaaaaaaaggaag

SEQ ID NO: 160555 - RNA, 24 nt, Artificial Sequence
  Synthetic
cuuuaaaaaaaaaaaaaaaggaag

SEQ ID NO: 160556 - RNA, 18 nt, Artificial Sequence
  Synthetic
aauuuuauuuaaaggaag

SEQ ID NO: 160557 - RNA, 19 nt, Artificial Sequence
  Synthetic
uaauuuuauuuaaaggaag

SEQ ID NO: 160558 - RNA, 20 nt, Artificial Sequence
  Synthetic
auaauuuuauuuaaaggaag

SEQ ID NO: 160559 - RNA, 18 nt, Artificial Sequence
  Synthetic
uuugggaggccaaggaag

SEQ ID NO: 160560 - RNA, 19 nt, Artificial Sequence
  Synthetic
cuuugggaggccaaggaag

SEQ ID NO: 160561 - RNA, 21 nt, Artificial Sequence
  Synthetic
ugcuuugggaggccaaggaag

SEQ ID NO: 160562 - RNA, 23 nt, Artificial Sequence
  Synthetic
agugcuuugggaggccaaggaag

SEQ ID NO: 160563 - RNA, 24 nt, Artificial Sequence
  Synthetic
uagugcuuugggaggccaaggaag

SEQ ID NO: 160564 - RNA, 18 nt, Artificial Sequence
  Synthetic
ccacaugaauacaggaag

SEQ ID NO: 160565 - RNA, 19 nt, Artificial Sequence
  Synthetic
accacaugaauacaggaag

SEQ ID NO: 160566 - RNA, 20 nt, Artificial Sequence
  Synthetic
uaccacaugaauacaggaag

SEQ ID NO: 160567 - RNA, 18 nt, Artificial Sequence
  Synthetic
uucuuaugaaggaggaag

SEQ ID NO: 160568 - RNA, 19 nt, Artificial Sequence
  Synthetic
uuucuuaugaaggaggaag

SEQ ID NO: 160569 - RNA, 20 nt, Artificial Sequence
  Synthetic
cuuucuuaugaaggaggaag

SEQ ID NO: 160570 - RNA, 18 nt, Artificial Sequence
  Synthetic
aaaacagucuugaggaag

SEQ ID NO: 160571 - RNA, 19 nt, Artificial Sequence
  Synthetic
caaaacagucuugaggaag

SEQ ID NO: 160572 - RNA, 20 nt, Artificial Sequence
  Synthetic
ccaaaacagucuugaggaag

SEQ ID NO: 160573 - RNA, 22 nt, Artificial Sequence
  Synthetic
agccaaaacagucuugaggaag

SEQ ID NO: 160574 - RNA, 23 nt, Artificial Sequence
  Synthetic
uagccaaaacagucuugaggaag

SEQ ID NO: 160575 - RNA, 24 nt, Artificial Sequence
  Synthetic
auagccaaaacagucuugaggaag

SEQ ID NO: 160576 - RNA, 18 nt, Artificial Sequence
  Synthetic
uggauauauacccggaag

SEQ ID NO: 160577 - RNA, 19 nt, Artificial Sequence
  Synthetic
uuggauauauacccggaag

SEQ ID NO: 160578 - RNA, 20 nt, Artificial Sequence
  Synthetic
uuuggauauauacccggaag

SEQ ID NO: 160579 - RNA, 21 nt, Artificial Sequence
  Synthetic
uuuuggauauauacccggaag

SEQ ID NO: 160580 - RNA, 22 nt, Artificial Sequence
  Synthetic
cuuuuggauauauacccggaag

SEQ ID NO: 160581 - RNA, 23 nt, Artificial Sequence
  Synthetic
ucuuuuggauauauacccggaag

SEQ ID NO: 160582 - RNA, 24 nt, Artificial Sequence
  Synthetic
uucuuuuggauauauacccggaag

SEQ ID NO: 160583 - RNA, 18 nt, Artificial Sequence
  Synthetic
uccaaaaaaaaggggaag

SEQ ID NO: 160584 - RNA, 19 nt, Artificial Sequence
  Synthetic
cuccaaaaaaaaggggaag

SEQ ID NO: 160585 - RNA, 20 nt, Artificial Sequence
  Synthetic
ucuccaaaaaaaaggggaag

SEQ ID NO: 160586 - RNA, 22 nt, Artificial Sequence
  Synthetic
ugucuccaaaaaaaaggggaag

SEQ ID NO: 160587 - RNA, 23 nt, Artificial Sequence
  Synthetic
cugucuccaaaaaaaaggggaag

SEQ ID NO: 160588 - RNA, 24 nt, Artificial Sequence
  Synthetic
ccugucuccaaaaaaaaggggaag

SEQ ID NO: 160589 - RNA, 18 nt, Artificial Sequence
  Synthetic
ccugggccacacuggaag

SEQ ID NO: 160590 - RNA, 19 nt, Artificial Sequence
  Synthetic
cccugggccacacuggaag

SEQ ID NO: 160591 - RNA, 20 nt, Artificial Sequence
  Synthetic
ucccugggccacacuggaag

SEQ ID NO: 160592 - RNA, 21 nt, Artificial Sequence
  Synthetic
uucccugggccacacuggaag

SEQ ID NO: 160593 - RNA, 22 nt, Artificial Sequence
  Synthetic
cuucccugggccacacuggaag

SEQ ID NO: 160594 - RNA, 19 nt, Artificial Sequence
  Synthetic
uggagccccuugaaugaag

SEQ ID NO: 160595 - RNA, 20 nt, Artificial Sequence
  Synthetic
uuggagccccuugaaugaag

SEQ ID NO: 160596 - RNA, 18 nt, Artificial Sequence
  Synthetic
uaaauauauuuaaugaag

SEQ ID NO: 160597 - RNA, 19 nt, Artificial Sequence
  Synthetic
uuaaauauauuuaaugaag

SEQ ID NO: 160598 - RNA, 20 nt, Artificial Sequence
  Synthetic
uuuaaauauauuuaaugaag

SEQ ID NO: 160599 - RNA, 18 nt, Artificial Sequence
  Synthetic
auacaaagaaauaugaag

SEQ ID NO: 160600 - RNA, 19 nt, Artificial Sequence
  Synthetic
aauacaaagaaauaugaag

SEQ ID NO: 160601 - RNA, 20 nt, Artificial Sequence
  Synthetic
aaauacaaagaaauaugaag

SEQ ID NO: 160602 - RNA, 18 nt, Artificial Sequence
  Synthetic
uucugccaccauaugaag

SEQ ID NO: 160603 - RNA, 19 nt, Artificial Sequence
  Synthetic
uuucugccaccauaugaag

SEQ ID NO: 160604 - RNA, 20 nt, Artificial Sequence
  Synthetic
cuuucugccaccauaugaag

SEQ ID NO: 160605 - RNA, 21 nt, Artificial Sequence
  Synthetic
ccuuucugccaccauaugaag

SEQ ID NO: 160606 - RNA, 22 nt, Artificial Sequence
  Synthetic
uccuuucugccaccauaugaag

SEQ ID NO: 160607 - RNA, 23 nt, Artificial Sequence
  Synthetic
cuccuuucugccaccauaugaag

SEQ ID NO: 160608 - RNA, 24 nt, Artificial Sequence
  Synthetic
ucuccuuucugccaccauaugaag

SEQ ID NO: 160609 - RNA, 18 nt, Artificial Sequence
  Synthetic
uaaaaaauuccugugaag

SEQ ID NO: 160610 - RNA, 19 nt, Artificial Sequence
  Synthetic
auaaaaaauuccugugaag

SEQ ID NO: 160611 - RNA, 20 nt, Artificial Sequence
  Synthetic
aauaaaaaauuccugugaag

SEQ ID NO: 160612 - RNA, 18 nt, Artificial Sequence
  Synthetic
auccuauguggauugaag

SEQ ID NO: 160613 - RNA, 19 nt, Artificial Sequence
  Synthetic
aauccuauguggauugaag

SEQ ID NO: 160614 - RNA, 20 nt, Artificial Sequence
  Synthetic
uaauccuauguggauugaag

SEQ ID NO: 160615 - RNA, 18 nt, Artificial Sequence
  Synthetic
aaagaauuugaaaauaag

SEQ ID NO: 160616 - RNA, 19 nt, Artificial Sequence
  Synthetic
uaaagaauuugaaaauaag

SEQ ID NO: 160617 - RNA, 20 nt, Artificial Sequence
  Synthetic
uuaaagaauuugaaaauaag

SEQ ID NO: 160618 - RNA, 18 nt, Artificial Sequence
  Synthetic
acacaaagagcaaauaag

SEQ ID NO: 160619 - RNA, 19 nt, Artificial Sequence
  Synthetic
aacacaaagagcaaauaag

SEQ ID NO: 160620 - RNA, 20 nt, Artificial Sequence
  Synthetic
aaacacaaagagcaaauaag

SEQ ID NO: 160621 - RNA, 18 nt, Artificial Sequence
  Synthetic
aauacaucucuuaauaag

SEQ ID NO: 160622 - RNA, 19 nt, Artificial Sequence
  Synthetic
aaauacaucucuuaauaag

SEQ ID NO: 160623 - RNA, 20 nt, Artificial Sequence
  Synthetic
aaaauacaucucuuaauaag

SEQ ID NO: 160624 - RNA, 22 nt, Artificial Sequence
  Synthetic
ugaaaauacaucucuuaauaag

SEQ ID NO: 160625 - RNA, 23 nt, Artificial Sequence
  Synthetic
uugaaaauacaucucuuaauaag

SEQ ID NO: 160626 - RNA, 24 nt, Artificial Sequence
  Synthetic
auugaaaauacaucucuuaauaag

SEQ ID NO: 160627 - RNA, 21 nt, Artificial Sequence
  Synthetic
uucaacuuccacauccauaag

SEQ ID NO: 160628 - RNA, 22 nt, Artificial Sequence
  Synthetic
cuucaacuuccacauccauaag

SEQ ID NO: 160629 - RNA, 18 nt, Artificial Sequence
  Synthetic
aaaaucucauaauauaag

SEQ ID NO: 160630 - RNA, 19 nt, Artificial Sequence
  Synthetic
uaaaaucucauaauauaag

SEQ ID NO: 160631 - RNA, 20 nt, Artificial Sequence
  Synthetic
uuaaaaucucauaauauaag

SEQ ID NO: 160632 - RNA, 21 nt, Artificial Sequence
  Synthetic
uuuaaaaucucauaauauaag

SEQ ID NO: 160633 - RNA, 22 nt, Artificial Sequence
  Synthetic
uuuuaaaaucucauaauauaag

SEQ ID NO: 160634 - RNA, 23 nt, Artificial Sequence
  Synthetic
uuuuuaaaaucucauaauauaag

SEQ ID NO: 160635 - RNA, 24 nt, Artificial Sequence
  Synthetic
uuuuuuaaaaucucauaauauaag

SEQ ID NO: 160636 - RNA, 19 nt, Artificial Sequence
  Synthetic
agcacugugggaggcuaag

SEQ ID NO: 160637 - RNA, 20 nt, Artificial Sequence
  Synthetic
cagcacugugggaggcuaag

SEQ ID NO: 160638 - RNA, 21 nt, Artificial Sequence
  Synthetic
ccagcacugugggaggcuaag

SEQ ID NO: 160639 - RNA, 22 nt, Artificial Sequence
  Synthetic
cccagcacugugggaggcuaag

SEQ ID NO: 160640 - RNA, 23 nt, Artificial Sequence
  Synthetic
ucccagcacugugggaggcuaag

SEQ ID NO: 160641 - RNA, 24 nt, Artificial Sequence
  Synthetic
aucccagcacugugggaggcuaag

SEQ ID NO: 160642 - RNA, 18 nt, Artificial Sequence
  Synthetic
cacuuugggaaauguaag

SEQ ID NO: 160643 - RNA, 20 nt, Artificial Sequence
  Synthetic
agcacuuugggaaauguaag

SEQ ID NO: 160644 - RNA, 18 nt, Artificial Sequence
  Synthetic
cauugauaggcauuuaag

SEQ ID NO: 160645 - RNA, 19 nt, Artificial Sequence
  Synthetic
ucauugauaggcauuuaag

SEQ ID NO: 160646 - RNA, 20 nt, Artificial Sequence
  Synthetic
uucauugauaggcauuuaag

SEQ ID NO: 160647 - RNA, 18 nt, Artificial Sequence
  Synthetic
aaagaugaucacuuuaag

SEQ ID NO: 160648 - RNA, 19 nt, Artificial Sequence
  Synthetic
caaagaugaucacuuuaag

SEQ ID NO: 160649 - RNA, 20 nt, Artificial Sequence
  Synthetic
acaaagaugaucacuuuaag

SEQ ID NO: 160650 - RNA, 22 nt, Artificial Sequence
  Synthetic
cgacaaagaugaucacuuuaag

SEQ ID NO: 160651 - RNA, 23 nt, Artificial Sequence
  Synthetic
ccgacaaagaugaucacuuuaag

SEQ ID NO: 160652 - RNA, 18 nt, Artificial Sequence
  Synthetic
uuuuucacccuaaaacag

SEQ ID NO: 160653 - RNA, 19 nt, Artificial Sequence
  Synthetic
uuuuuucacccuaaaacag

SEQ ID NO: 160654 - RNA, 20 nt, Artificial Sequence
  Synthetic
uuuuuuucacccuaaaacag

SEQ ID NO: 160655 - RNA, 19 nt, Artificial Sequence
  Synthetic
uggugaggaccuugaacag

SEQ ID NO: 160656 - RNA, 20 nt, Artificial Sequence
  Synthetic
uuggugaggaccuugaacag

SEQ ID NO: 160657 - RNA, 21 nt, Artificial Sequence
  Synthetic
cuuggugaggaccuugaacag

SEQ ID NO: 160658 - RNA, 22 nt, Artificial Sequence
  Synthetic
ccuuggugaggaccuugaacag

SEQ ID NO: 160659 - RNA, 23 nt, Artificial Sequence
  Synthetic
accuuggugaggaccuugaacag

SEQ ID NO: 160660 - RNA, 19 nt, Artificial Sequence
  Synthetic
aguguucaauaaauaacag

SEQ ID NO: 160661 - RNA, 20 nt, Artificial Sequence
  Synthetic
aaguguucaauaaauaacag

SEQ ID NO: 160662 - RNA, 18 nt, Artificial Sequence
  Synthetic
uuuucuuaaggauaacag

SEQ ID NO: 160663 - RNA, 19 nt, Artificial Sequence
  Synthetic
uuuuucuuaaggauaacag

SEQ ID NO: 160664 - RNA, 20 nt, Artificial Sequence
  Synthetic
uuuuuucuuaaggauaacag

SEQ ID NO: 160665 - RNA, 18 nt, Artificial Sequence
  Synthetic
uaucuucucagaccacag

SEQ ID NO: 160666 - RNA, 20 nt, Artificial Sequence
  Synthetic
aguaucuucucagaccacag

SEQ ID NO: 160667 - RNA, 21 nt, Artificial Sequence
  Synthetic
aaguaucuucucagaccacag

SEQ ID NO: 160668 - RNA, 22 nt, Artificial Sequence
  Synthetic
caaguaucuucucagaccacag

SEQ ID NO: 160669 - RNA, 23 nt, Artificial Sequence
  Synthetic
ucaaguaucuucucagaccacag

SEQ ID NO: 160670 - RNA, 24 nt, Artificial Sequence
  Synthetic
aucaaguaucuucucagaccacag

SEQ ID NO: 160671 - RNA, 18 nt, Artificial Sequence
  Synthetic
auaccagcucagccacag

SEQ ID NO: 160672 - RNA, 21 nt, Artificial Sequence
  Synthetic
uggauaccagcucagccacag

SEQ ID NO: 160673 - RNA, 22 nt, Artificial Sequence
  Synthetic
uuggauaccagcucagccacag

SEQ ID NO: 160674 - RNA, 23 nt, Artificial Sequence
  Synthetic
cuuggauaccagcucagccacag

SEQ ID NO: 160675 - RNA, 24 nt, Artificial Sequence
  Synthetic
ucuuggauaccagcucagccacag

SEQ ID NO: 160676 - RNA, 18 nt, Artificial Sequence
  Synthetic
auaccagcuuagucacag

SEQ ID NO: 160677 - RNA, 21 nt, Artificial Sequence
  Synthetic
uggauaccagcuuagucacag

SEQ ID NO: 160678 - RNA, 22 nt, Artificial Sequence
  Synthetic
uuggauaccagcuuagucacag

SEQ ID NO: 160679 - RNA, 23 nt, Artificial Sequence
  Synthetic
cuuggauaccagcuuagucacag

SEQ ID NO: 160680 - RNA, 24 nt, Artificial Sequence
  Synthetic
ucuuggauaccagcuuagucacag

SEQ ID NO: 160681 - RNA, 21 nt, Artificial Sequence
  Synthetic
caggaccagacggauucacag

SEQ ID NO: 160682 - RNA, 22 nt, Artificial Sequence
  Synthetic
ccaggaccagacggauucacag

SEQ ID NO: 160683 - RNA, 23 nt, Artificial Sequence
  Synthetic
cccaggaccagacggauucacag

SEQ ID NO: 160684 - RNA, 23 nt, Artificial Sequence
  Synthetic
uccaggaccagacggauucacag

SEQ ID NO: 160685 - RNA, 18 nt, Artificial Sequence
  Synthetic
ucauuuaacuguucacag

SEQ ID NO: 160686 - RNA, 19 nt, Artificial Sequence
  Synthetic
aucauuuaacuguucacag

SEQ ID NO: 160687 - RNA, 20 nt, Artificial Sequence
  Synthetic
aaucauuuaacuguucacag

SEQ ID NO: 160688 - RNA, 18 nt, Artificial Sequence
  Synthetic
accuaaaagaaaagacag

SEQ ID NO: 160689 - RNA, 19 nt, Artificial Sequence
  Synthetic
uaccuaaaagaaaagacag

SEQ ID NO: 160690 - RNA, 20 nt, Artificial Sequence
  Synthetic
auaccuaaaagaaaagacag

SEQ ID NO: 160691 - RNA, 18 nt, Artificial Sequence
  Synthetic
uuaaucuaauauugacag

SEQ ID NO: 160692 - RNA, 20 nt, Artificial Sequence
  Synthetic
cguuaaucuaauauugacag

SEQ ID NO: 160693 - RNA, 21 nt, Artificial Sequence
  Synthetic
ucguuaaucuaauauugacag

SEQ ID NO: 160694 - RNA, 22 nt, Artificial Sequence
  Synthetic
cucguuaaucuaauauugacag

SEQ ID NO: 160695 - RNA, 23 nt, Artificial Sequence
  Synthetic
ucucguuaaucuaauauugacag

SEQ ID NO: 160696 - RNA, 18 nt, Artificial Sequence
  Synthetic
uccgucuaauauugacag

SEQ ID NO: 160697 - RNA, 19 nt, Artificial Sequence
  Synthetic
auccgucuaauauugacag

SEQ ID NO: 160698 - RNA, 21 nt, Artificial Sequence
  Synthetic
ugauccgucuaauauugacag

SEQ ID NO: 160699 - RNA, 22 nt, Artificial Sequence
  Synthetic
uugauccgucuaauauugacag

SEQ ID NO: 160700 - RNA, 24 nt, Artificial Sequence
  Synthetic
cguugauccgucuaauauugacag

SEQ ID NO: 160701 - RNA, 18 nt, Artificial Sequence
  Synthetic
cuaaaugucuauugacag

SEQ ID NO: 160702 - RNA, 19 nt, Artificial Sequence
  Synthetic
acuaaaugucuauugacag

SEQ ID NO: 160703 - RNA, 20 nt, Artificial Sequence
  Synthetic
aacuaaaugucuauugacag

SEQ ID NO: 160704 - RNA, 21 nt, Artificial Sequence
  Synthetic
aaacuaaaugucuauugacag

SEQ ID NO: 160705 - RNA, 22 nt, Artificial Sequence
  Synthetic
caaacuaaaugucuauugacag

SEQ ID NO: 160706 - RNA, 23 nt, Artificial Sequence
  Synthetic
acaaacuaaaugucuauugacag

SEQ ID NO: 160707 - RNA, 24 nt, Artificial Sequence
  Synthetic
aacaaacuaaaugucuauugacag

SEQ ID NO: 160708 - RNA, 19 nt, Artificial Sequence
  Synthetic
aggauauguguauauacag

SEQ ID NO: 160709 - RNA, 20 nt, Artificial Sequence
  Synthetic
uaggauauguguauauacag

SEQ ID NO: 160710 - RNA, 18 nt, Artificial Sequence
  Synthetic
ccauuuuuaaguauacag

SEQ ID NO: 160711 - RNA, 19 nt, Artificial Sequence
  Synthetic
accauuuuuaaguauacag

SEQ ID NO: 160712 - RNA, 21 nt, Artificial Sequence
  Synthetic
ugaccauuuuuaaguauacag

SEQ ID NO: 160713 - RNA, 22 nt, Artificial Sequence
  Synthetic
uugaccauuuuuaaguauacag

SEQ ID NO: 160714 - RNA, 23 nt, Artificial Sequence
  Synthetic
cuugaccauuuuuaaguauacag

SEQ ID NO: 160715 - RNA, 24 nt, Artificial Sequence
  Synthetic
ucuugaccauuuuuaaguauacag

SEQ ID NO: 160716 - RNA, 20 nt, Artificial Sequence
  Synthetic
uggaaucucaccuucuacag

SEQ ID NO: 160717 - RNA, 18 nt, Artificial Sequence
  Synthetic
acucagccuggaguacag

SEQ ID NO: 160718 - RNA, 19 nt, Artificial Sequence
  Synthetic
cacucagccuggaguacag

SEQ ID NO: 160719 - RNA, 20 nt, Artificial Sequence
  Synthetic
ucacucagccuggaguacag

SEQ ID NO: 160720 - RNA, 22 nt, Artificial Sequence
  Synthetic
ugucacucagccuggaguacag

SEQ ID NO: 160721 - RNA, 23 nt, Artificial Sequence
  Synthetic
uugucacucagccuggaguacag

SEQ ID NO: 160722 - RNA, 24 nt, Artificial Sequence
  Synthetic
uuugucacucagccuggaguacag

SEQ ID NO: 160723 - RNA, 19 nt, Artificial Sequence
  Synthetic
ugugcaugugucuuuacag

SEQ ID NO: 160724 - RNA, 21 nt, Artificial Sequence
  Synthetic
cgugugcaugugucuuuacag

SEQ ID NO: 160725 - RNA, 22 nt, Artificial Sequence
  Synthetic
acgugugcaugugucuuuacag

SEQ ID NO: 160726 - RNA, 23 nt, Artificial Sequence
  Synthetic
uacgugugcaugugucuuuacag

SEQ ID NO: 160727 - RNA, 18 nt, Artificial Sequence
  Synthetic
aaaaaagcccaggaccag

SEQ ID NO: 160728 - RNA, 19 nt, Artificial Sequence
  Synthetic
aaaaaaagcccaggaccag

SEQ ID NO: 160729 - RNA, 20 nt, Artificial Sequence
  Synthetic
aaaaaaaagcccaggaccag

SEQ ID NO: 160730 - RNA, 21 nt, Artificial Sequence
  Synthetic
aaaaaaaaagcccaggaccag

SEQ ID NO: 160731 - RNA, 22 nt, Artificial Sequence
  Synthetic
aaaaaaaaaagcccaggaccag

SEQ ID NO: 160732 - RNA, 23 nt, Artificial Sequence
  Synthetic
aaaaaaaaaaagcccaggaccag

SEQ ID NO: 160733 - RNA, 24 nt, Artificial Sequence
  Synthetic
aaaaaaaaaaaagcccaggaccag

SEQ ID NO: 160734 - RNA, 18 nt, Artificial Sequence
  Synthetic
aaaaaaguccaggaccag

SEQ ID NO: 160735 - RNA, 19 nt, Artificial Sequence
  Synthetic
aaaaaaaguccaggaccag

SEQ ID NO: 160736 - RNA, 20 nt, Artificial Sequence
  Synthetic
aaaaaaaaguccaggaccag

SEQ ID NO: 160737 - RNA, 21 nt, Artificial Sequence
  Synthetic
caaaaaaaaguccaggaccag

SEQ ID NO: 160738 - RNA, 22 nt, Artificial Sequence
  Synthetic
ccaaaaaaaaguccaggaccag

SEQ ID NO: 160739 - RNA, 24 nt, Artificial Sequence
  Synthetic
ugccaaaaaaaaguccaggaccag

SEQ ID NO: 160740 - RNA, 20 nt, Artificial Sequence
  Synthetic
caaaaaaaguccaggaccag

SEQ ID NO: 160741 - RNA, 21 nt, Artificial Sequence
  Synthetic
ccaaaaaaaguccaggaccag

SEQ ID NO: 160742 - RNA, 22 nt, Artificial Sequence
  Synthetic
accaaaaaaaguccaggaccag

SEQ ID NO: 160743 - RNA, 23 nt, Artificial Sequence
  Synthetic
aaccaaaaaaaguccaggaccag

SEQ ID NO: 160744 - RNA, 24 nt, Artificial Sequence
  Synthetic
aaaccaaaaaaaguccaggaccag

SEQ ID NO: 160745 - RNA, 18 nt, Artificial Sequence
  Synthetic
uguaguccugucuaccag

SEQ ID NO: 160746 - RNA, 19 nt, Artificial Sequence
  Synthetic
cuguaguccugucuaccag

SEQ ID NO: 160747 - RNA, 21 nt, Artificial Sequence
  Synthetic
agcuguaguccugucuaccag

SEQ ID NO: 160748 - RNA, 22 nt, Artificial Sequence
  Synthetic
cagcuguaguccugucuaccag

SEQ ID NO: 160749 - RNA, 23 nt, Artificial Sequence
  Synthetic
ccagcuguaguccugucuaccag

SEQ ID NO: 160750 - RNA, 24 nt, Artificial Sequence
  Synthetic
uccagcuguaguccugucuaccag

SEQ ID NO: 160751 - RNA, 18 nt, Artificial Sequence
  Synthetic
acaguaauuugguaccag

SEQ ID NO: 160752 - RNA, 19 nt, Artificial Sequence
  Synthetic
uacaguaauuugguaccag

SEQ ID NO: 160753 - RNA, 20 nt, Artificial Sequence
  Synthetic
auacaguaauuugguaccag

SEQ ID NO: 160754 - RNA, 21 nt, Artificial Sequence
  Synthetic
aauacaguaauuugguaccag

SEQ ID NO: 160755 - RNA, 22 nt, Artificial Sequence
  Synthetic
uaauacaguaauuugguaccag

SEQ ID NO: 160756 - RNA, 23 nt, Artificial Sequence
  Synthetic
cuaauacaguaauuugguaccag

SEQ ID NO: 160757 - RNA, 24 nt, Artificial Sequence
  Synthetic
acuaauacaguaauuugguaccag

SEQ ID NO: 160758 - RNA, 18 nt, Artificial Sequence
  Synthetic
agacagguagacagccag

SEQ ID NO: 160759 - RNA, 18 nt, Artificial Sequence
  Synthetic
ucuuccccugaaguccag

SEQ ID NO: 160760 - RNA, 19 nt, Artificial Sequence
  Synthetic
aucuuccccugaaguccag

SEQ ID NO: 160761 - RNA, 20 nt, Artificial Sequence
  Synthetic
aaucuuccccugaaguccag

SEQ ID NO: 160762 - RNA, 21 nt, Artificial Sequence
  Synthetic
uaaucuuccccugaaguccag

SEQ ID NO: 160763 - RNA, 23 nt, Artificial Sequence
  Synthetic
aguaaucuuccccugaaguccag

SEQ ID NO: 160764 - RNA, 24 nt, Artificial Sequence
  Synthetic
aaguaaucuuccccugaaguccag

SEQ ID NO: 160765 - RNA, 18 nt, Artificial Sequence
  Synthetic
cuucaguccccuuuccag

SEQ ID NO: 160766 - RNA, 19 nt, Artificial Sequence
  Synthetic
acuucaguccccuuuccag

SEQ ID NO: 160767 - RNA, 21 nt, Artificial Sequence
  Synthetic
ugacuucaguccccuuuccag

SEQ ID NO: 160768 - RNA, 22 nt, Artificial Sequence
  Synthetic
cugacuucaguccccuuuccag

SEQ ID NO: 160769 - RNA, 23 nt, Artificial Sequence
  Synthetic
ccugacuucaguccccuuuccag

SEQ ID NO: 160770 - RNA, 24 nt, Artificial Sequence
  Synthetic
cccugacuucaguccccuuuccag

SEQ ID NO: 160771 - RNA, 18 nt, Artificial Sequence
  Synthetic
acuuugagaauuuuccag

SEQ ID NO: 160772 - RNA, 19 nt, Artificial Sequence
  Synthetic
cacuuugagaauuuuccag

SEQ ID NO: 160773 - RNA, 20 nt, Artificial Sequence
  Synthetic
acacuuugagaauuuuccag

SEQ ID NO: 160774 - RNA, 18 nt, Artificial Sequence
  Synthetic
cuaugaaaguaaaagcag

SEQ ID NO: 160775 - RNA, 19 nt, Artificial Sequence
  Synthetic
ucuaugaaaguaaaagcag

SEQ ID NO: 160776 - RNA, 20 nt, Artificial Sequence
  Synthetic
aucuaugaaaguaaaagcag

SEQ ID NO: 160777 - RNA, 18 nt, Artificial Sequence
  Synthetic
aacaucgaaagaaagcag

SEQ ID NO: 160778 - RNA, 19 nt, Artificial Sequence
  Synthetic
uaacaucgaaagaaagcag

SEQ ID NO: 160779 - RNA, 20 nt, Artificial Sequence
  Synthetic
uuaacaucgaaagaaagcag

SEQ ID NO: 160780 - RNA, 18 nt, Artificial Sequence
  Synthetic
cucaggaggcugaagcag

SEQ ID NO: 160781 - RNA, 19 nt, Artificial Sequence
  Synthetic
acucaggaggcugaagcag

SEQ ID NO: 160782 - RNA, 20 nt, Artificial Sequence
  Synthetic
uacucaggaggcugaagcag

SEQ ID NO: 160783 - RNA, 21 nt, Artificial Sequence
  Synthetic
cuacucaggaggcugaagcag

SEQ ID NO: 160784 - RNA, 23 nt, Artificial Sequence
  Synthetic
agcuacucaggaggcugaagcag

SEQ ID NO: 160785 - RNA, 24 nt, Artificial Sequence
  Synthetic
cagcuacucaggaggcugaagcag

SEQ ID NO: 160786 - RNA, 18 nt, Artificial Sequence
  Synthetic
uaguugguaaagcagcag

SEQ ID NO: 160787 - RNA, 19 nt, Artificial Sequence
  Synthetic
uuaguugguaaagcagcag

SEQ ID NO: 160788 - RNA, 20 nt, Artificial Sequence
  Synthetic
cuuaguugguaaagcagcag

SEQ ID NO: 160789 - RNA, 21 nt, Artificial Sequence
  Synthetic
acuuaguugguaaagcagcag

SEQ ID NO: 160790 - RNA, 22 nt, Artificial Sequence
  Synthetic
aacuuaguugguaaagcagcag

SEQ ID NO: 160791 - RNA, 23 nt, Artificial Sequence
  Synthetic
aaacuuaguugguaaagcagcag

SEQ ID NO: 160792 - RNA, 24 nt, Artificial Sequence
  Synthetic
uaaacuuaguugguaaagcagcag

SEQ ID NO: 160793 - RNA, 18 nt, Artificial Sequence
  Synthetic
uaggagaguuuucagcag

SEQ ID NO: 160794 - RNA, 19 nt, Artificial Sequence
  Synthetic
auaggagaguuuucagcag

SEQ ID NO: 160795 - RNA, 20 nt, Artificial Sequence
  Synthetic
cauaggagaguuuucagcag

SEQ ID NO: 160796 - RNA, 18 nt, Artificial Sequence
  Synthetic
cuguccucaugauagcag

SEQ ID NO: 160797 - RNA, 20 nt, Artificial Sequence
  Synthetic
ugcuguccucaugauagcag

SEQ ID NO: 160798 - RNA, 21 nt, Artificial Sequence
  Synthetic
augcuguccucaugauagcag

SEQ ID NO: 160799 - RNA, 23 nt, Artificial Sequence
  Synthetic
ugaugcuguccucaugauagcag

SEQ ID NO: 160800 - RNA, 24 nt, Artificial Sequence
  Synthetic
uugaugcuguccucaugauagcag

SEQ ID NO: 160801 - RNA, 18 nt, Artificial Sequence
  Synthetic
cucgggaggaugacgcag

SEQ ID NO: 160802 - RNA, 20 nt, Artificial Sequence
  Synthetic
ugcucgggaggaugacgcag

SEQ ID NO: 160803 - RNA, 21 nt, Artificial Sequence
  Synthetic
cugcucgggaggaugacgcag

SEQ ID NO: 160804 - RNA, 23 nt, Artificial Sequence
  Synthetic
agcugcucgggaggaugacgcag

SEQ ID NO: 160805 - RNA, 24 nt, Artificial Sequence
  Synthetic
cagcugcucgggaggaugacgcag

SEQ ID NO: 160806 - RNA, 18 nt, Artificial Sequence
  Synthetic
uucuggaagcaaaggcag

SEQ ID NO: 160807 - RNA, 19 nt, Artificial Sequence
  Synthetic
uuucuggaagcaaaggcag

SEQ ID NO: 160808 - RNA, 20 nt, Artificial Sequence
  Synthetic
auuucuggaagcaaaggcag

SEQ ID NO: 160809 - RNA, 23 nt, Artificial Sequence
  Synthetic
cgcacuuugggaggccaaggcag

SEQ ID NO: 160810 - RNA, 24 nt, Artificial Sequence
  Synthetic
ccgcacuuugggaggccaaggcag

SEQ ID NO: 160811 - RNA, 18 nt, Artificial Sequence
  Synthetic
cucgggaggcuaaggcag

SEQ ID NO: 160812 - RNA, 19 nt, Artificial Sequence
  Synthetic
acucgggaggcuaaggcag

SEQ ID NO: 160813 - RNA, 20 nt, Artificial Sequence
  Synthetic
uacucgggaggcuaaggcag

SEQ ID NO: 160814 - RNA, 21 nt, Artificial Sequence
  Synthetic
cuacucgggaggcuaaggcag

SEQ ID NO: 160815 - RNA, 23 nt, Artificial Sequence
  Synthetic
agcuacucgggaggcuaaggcag

SEQ ID NO: 160816 - RNA, 24 nt, Artificial Sequence
  Synthetic
cagcuacucgggaggcuaaggcag

SEQ ID NO: 160817 - RNA, 18 nt, Artificial Sequence
  Synthetic
acuggaagacagaggcag

SEQ ID NO: 160818 - RNA, 19 nt, Artificial Sequence
  Synthetic
uacuggaagacagaggcag

SEQ ID NO: 160819 - RNA, 20 nt, Artificial Sequence
  Synthetic
cuacuggaagacagaggcag

SEQ ID NO: 160820 - RNA, 22 nt, Artificial Sequence
  Synthetic
agcuacuggaagacagaggcag

SEQ ID NO: 160821 - RNA, 23 nt, Artificial Sequence
  Synthetic
cagcuacuggaagacagaggcag

SEQ ID NO: 160822 - RNA, 24 nt, Artificial Sequence
  Synthetic
ccagcuacuggaagacagaggcag

SEQ ID NO: 160823 - RNA, 18 nt, Artificial Sequence
  Synthetic
aaaaggaaaaggaggcag

SEQ ID NO: 160824 - RNA, 19 nt, Artificial Sequence
  Synthetic
aaaaaggaaaaggaggcag

SEQ ID NO: 160825 - RNA, 20 nt, Artificial Sequence
  Synthetic
uaaaaaggaaaaggaggcag

SEQ ID NO: 160826 - RNA, 18 nt, Artificial Sequence
  Synthetic
cucgggaagcugaggcag

SEQ ID NO: 160827 - RNA, 19 nt, Artificial Sequence
  Synthetic
acucgggaagcugaggcag

SEQ ID NO: 160828 - RNA, 20 nt, Artificial Sequence
  Synthetic
uacucgggaagcugaggcag

SEQ ID NO: 160829 - RNA, 21 nt, Artificial Sequence
  Synthetic
cuacucgggaagcugaggcag

SEQ ID NO: 160830 - RNA, 23 nt, Artificial Sequence
  Synthetic
agcuacucgggaagcugaggcag

SEQ ID NO: 160831 - RNA, 24 nt, Artificial Sequence
  Synthetic
cagcuacucgggaagcugaggcag

SEQ ID NO: 160832 - RNA, 18 nt, Artificial Sequence
  Synthetic
cuuggaaggcugaggcag

SEQ ID NO: 160833 - RNA, 19 nt, Artificial Sequence
  Synthetic
acuuggaaggcugaggcag

SEQ ID NO: 160834 - RNA, 20 nt, Artificial Sequence
  Synthetic
uacuuggaaggcugaggcag

SEQ ID NO: 160835 - RNA, 21 nt, Artificial Sequence
  Synthetic
cuacuuggaaggcugaggcag

SEQ ID NO: 160836 - RNA, 23 nt, Artificial Sequence
  Synthetic
agcuacuuggaaggcugaggcag

SEQ ID NO: 160837 - RNA, 24 nt, Artificial Sequence
  Synthetic
cagcuacuuggaaggcugaggcag

SEQ ID NO: 160838 - RNA, 18 nt, Artificial Sequence
  Synthetic
cucaagaggcugaggcag

SEQ ID NO: 160839 - RNA, 19 nt, Artificial Sequence
  Synthetic
acucaagaggcugaggcag

SEQ ID NO: 160840 - RNA, 20 nt, Artificial Sequence
  Synthetic
uacucaagaggcugaggcag

SEQ ID NO: 160841 - RNA, 21 nt, Artificial Sequence
  Synthetic
cuacucaagaggcugaggcag

SEQ ID NO: 160842 - RNA, 23 nt, Artificial Sequence
  Synthetic
agcuacucaagaggcugaggcag

SEQ ID NO: 160843 - RNA, 24 nt, Artificial Sequence
  Synthetic
cagcuacucaagaggcugaggcag

SEQ ID NO: 160844 - RNA, 18 nt, Artificial Sequence
  Synthetic
cucgagaggcugaggcag

SEQ ID NO: 160845 - RNA, 19 nt, Artificial Sequence
  Synthetic
acucgagaggcugaggcag

SEQ ID NO: 160846 - RNA, 20 nt, Artificial Sequence
  Synthetic
uacucgagaggcugaggcag

SEQ ID NO: 160847 - RNA, 21 nt, Artificial Sequence
  Synthetic
cuacucgagaggcugaggcag

SEQ ID NO: 160848 - RNA, 23 nt, Artificial Sequence
  Synthetic
agcuacucgagaggcugaggcag

SEQ ID NO: 160849 - RNA, 24 nt, Artificial Sequence
  Synthetic
cagcuacucgagaggcugaggcag

SEQ ID NO: 160850 - RNA, 18 nt, Artificial Sequence
  Synthetic
uuugagaggcugaggcag

SEQ ID NO: 160851 - RNA, 19 nt, Artificial Sequence
  Synthetic
cuuugagaggcugaggcag

SEQ ID NO: 160852 - RNA, 20 nt, Artificial Sequence
  Synthetic
acuuugagaggcugaggcag

SEQ ID NO: 160853 - RNA, 21 nt, Artificial Sequence
  Synthetic
cacuuugagaggcugaggcag

SEQ ID NO: 160854 - RNA, 23 nt, Artificial Sequence
  Synthetic
agcacuuugagaggcugaggcag

SEQ ID NO: 160855 - RNA, 24 nt, Artificial Sequence
  Synthetic
cagcacuuugagaggcugaggcag

SEQ ID NO: 160856 - RNA, 23 nt, Artificial Sequence
  Synthetic
agcuacucaggaggcugaggcag

SEQ ID NO: 160857 - RNA, 24 nt, Artificial Sequence
  Synthetic
cagcuacucaggaggcugaggcag

SEQ ID NO: 160858 - RNA, 18 nt, Artificial Sequence
  Synthetic
uucaggaggcugaggcag

SEQ ID NO: 160859 - RNA, 19 nt, Artificial Sequence
  Synthetic
auucaggaggcugaggcag

SEQ ID NO: 160860 - RNA, 20 nt, Artificial Sequence
  Synthetic
uauucaggaggcugaggcag

SEQ ID NO: 160861 - RNA, 21 nt, Artificial Sequence
  Synthetic
cuauucaggaggcugaggcag

SEQ ID NO: 160862 - RNA, 23 nt, Artificial Sequence
  Synthetic
agcuauucaggaggcugaggcag

SEQ ID NO: 160863 - RNA, 24 nt, Artificial Sequence
  Synthetic
cagcuauucaggaggcugaggcag

SEQ ID NO: 160864 - RNA, 18 nt, Artificial Sequence
  Synthetic
cuucggaggcugaggcag

SEQ ID NO: 160865 - RNA, 19 nt, Artificial Sequence
  Synthetic
acuucggaggcugaggcag

SEQ ID NO: 160866 - RNA, 20 nt, Artificial Sequence
  Synthetic
uacuucggaggcugaggcag

SEQ ID NO: 160867 - RNA, 23 nt, Artificial Sequence
  Synthetic
agguacuucggaggcugaggcag

SEQ ID NO: 160868 - RNA, 24 nt, Artificial Sequence
  Synthetic
cagguacuucggaggcugaggcag

SEQ ID NO: 160869 - RNA, 18 nt, Artificial Sequence
  Synthetic
cacgggaggcugaggcag

SEQ ID NO: 160870 - RNA, 19 nt, Artificial Sequence
  Synthetic
acacgggaggcugaggcag

SEQ ID NO: 160871 - RNA, 20 nt, Artificial Sequence
  Synthetic
uacacgggaggcugaggcag

SEQ ID NO: 160872 - RNA, 21 nt, Artificial Sequence
  Synthetic
cuacacgggaggcugaggcag

SEQ ID NO: 160873 - RNA, 23 nt, Artificial Sequence
  Synthetic
agcuacacgggaggcugaggcag

SEQ ID NO: 160874 - RNA, 24 nt, Artificial Sequence
  Synthetic
cagcuacacgggaggcugaggcag

SEQ ID NO: 160875 - RNA, 18 nt, Artificial Sequence
  Synthetic
cucgggaggcugaggcag

SEQ ID NO: 160876 - RNA, 21 nt, Artificial Sequence
  Synthetic
uuacucgggaggcugaggcag

SEQ ID NO: 160877 - RNA, 23 nt, Artificial Sequence
  Synthetic
aguuacucgggaggcugaggcag

SEQ ID NO: 160878 - RNA, 24 nt, Artificial Sequence
  Synthetic
caguuacucgggaggcugaggcag

SEQ ID NO: 160879 - RNA, 20 nt, Artificial Sequence
  Synthetic
ugcucgggaggcugaggcag

SEQ ID NO: 160880 - RNA, 21 nt, Artificial Sequence
  Synthetic
cugcucgggaggcugaggcag

SEQ ID NO: 160881 - RNA, 23 nt, Artificial Sequence
  Synthetic
agcugcucgggaggcugaggcag

SEQ ID NO: 160882 - RNA, 24 nt, Artificial Sequence
  Synthetic
cagcugcucgggaggcugaggcag

SEQ ID NO: 160883 - RNA, 18 nt, Artificial Sequence
  Synthetic
cgggggaggcugaggcag

SEQ ID NO: 160884 - RNA, 19 nt, Artificial Sequence
  Synthetic
acgggggaggcugaggcag

SEQ ID NO: 160885 - RNA, 20 nt, Artificial Sequence
  Synthetic
uacgggggaggcugaggcag

SEQ ID NO: 160886 - RNA, 21 nt, Artificial Sequence
  Synthetic
cuacgggggaggcugaggcag

SEQ ID NO: 160887 - RNA, 23 nt, Artificial Sequence
  Synthetic
agcuacgggggaggcugaggcag

SEQ ID NO: 160888 - RNA, 24 nt, Artificial Sequence
  Synthetic
cagcuacgggggaggcugaggcag

SEQ ID NO: 160889 - RNA, 18 nt, Artificial Sequence
  Synthetic
uaugggaggcugaggcag

SEQ ID NO: 160890 - RNA, 19 nt, Artificial Sequence
  Synthetic
cuaugggaggcugaggcag

SEQ ID NO: 160891 - RNA, 20 nt, Artificial Sequence
  Synthetic
acuaugggaggcugaggcag

SEQ ID NO: 160892 - RNA, 21 nt, Artificial Sequence
  Synthetic
cacuaugggaggcugaggcag

SEQ ID NO: 160893 - RNA, 23 nt, Artificial Sequence
  Synthetic
agcacuaugggaggcugaggcag

SEQ ID NO: 160894 - RNA, 24 nt, Artificial Sequence
  Synthetic
cagcacuaugggaggcugaggcag

SEQ ID NO: 160895 - RNA, 21 nt, Artificial Sequence
  Synthetic
cuacuugggaggcugaggcag

SEQ ID NO: 160896 - RNA, 23 nt, Artificial Sequence
  Synthetic
agcuacuugggaggcugaggcag

SEQ ID NO: 160897 - RNA, 24 nt, Artificial Sequence
  Synthetic
cagcuacuugggaggcugaggcag

SEQ ID NO: 160898 - RNA, 21 nt, Artificial Sequence
  Synthetic
cacuuugggaggcugaggcag

SEQ ID NO: 160899 - RNA, 23 nt, Artificial Sequence
  Synthetic
agcacuuugggaggcugaggcag

SEQ ID NO: 160900 - RNA, 24 nt, Artificial Sequence
  Synthetic
uagcacuuugggaggcugaggcag

SEQ ID NO: 160901 - RNA, 19 nt, Artificial Sequence
  Synthetic
acucuggaggcugaggcag

SEQ ID NO: 160902 - RNA, 20 nt, Artificial Sequence
  Synthetic
cacucuggaggcugaggcag

SEQ ID NO: 160903 - RNA, 21 nt, Artificial Sequence
  Synthetic
ccacucuggaggcugaggcag

SEQ ID NO: 160904 - RNA, 23 nt, Artificial Sequence
  Synthetic
agccacucuggaggcugaggcag

SEQ ID NO: 160905 - RNA, 24 nt, Artificial Sequence
  Synthetic
cagccacucuggaggcugaggcag

SEQ ID NO: 160906 - RNA, 20 nt, Artificial Sequence
  Synthetic
uacucuggaggcugaggcag

SEQ ID NO: 160907 - RNA, 21 nt, Artificial Sequence
  Synthetic
cuacucuggaggcugaggcag

SEQ ID NO: 160908 - RNA, 23 nt, Artificial Sequence
  Synthetic
agcuacucuggaggcugaggcag

SEQ ID NO: 160909 - RNA, 24 nt, Artificial Sequence
  Synthetic
cagcuacucuggaggcugaggcag

SEQ ID NO: 160910 - RNA, 18 nt, Artificial Sequence
  Synthetic
cucgguaggcugaggcag

SEQ ID NO: 160911 - RNA, 19 nt, Artificial Sequence
  Synthetic
acucgguaggcugaggcag

SEQ ID NO: 160912 - RNA, 20 nt, Artificial Sequence
  Synthetic
uacucgguaggcugaggcag

SEQ ID NO: 160913 - RNA, 21 nt, Artificial Sequence
  Synthetic
cuacucgguaggcugaggcag

SEQ ID NO: 160914 - RNA, 23 nt, Artificial Sequence
  Synthetic
agcuacucgguaggcugaggcag

SEQ ID NO: 160915 - RNA, 24 nt, Artificial Sequence
  Synthetic
cagcuacucgguaggcugaggcag

SEQ ID NO: 160916 - RNA, 18 nt, Artificial Sequence
  Synthetic
cucagauggcugaggcag

SEQ ID NO: 160917 - RNA, 19 nt, Artificial Sequence
  Synthetic
acucagauggcugaggcag

SEQ ID NO: 160918 - RNA, 20 nt, Artificial Sequence
  Synthetic
uacucagauggcugaggcag

SEQ ID NO: 160919 - RNA, 21 nt, Artificial Sequence
  Synthetic
cuacucagauggcugaggcag

SEQ ID NO: 160920 - RNA, 23 nt, Artificial Sequence
  Synthetic
agcuacucagauggcugaggcag

SEQ ID NO: 160921 - RNA, 24 nt, Artificial Sequence
  Synthetic
cagcuacucagauggcugaggcag

SEQ ID NO: 160922 - RNA, 18 nt, Artificial Sequence
  Synthetic
cuuggcagucugaggcag

SEQ ID NO: 160923 - RNA, 19 nt, Artificial Sequence
  Synthetic
acuuggcagucugaggcag

SEQ ID NO: 160924 - RNA, 20 nt, Artificial Sequence
  Synthetic
uacuuggcagucugaggcag

SEQ ID NO: 160925 - RNA, 21 nt, Artificial Sequence
  Synthetic
cuacuuggcagucugaggcag

SEQ ID NO: 160926 - RNA, 23 nt, Artificial Sequence
  Synthetic
agcuacuuggcagucugaggcag

SEQ ID NO: 160927 - RNA, 24 nt, Artificial Sequence
  Synthetic
uagcuacuuggcagucugaggcag

SEQ ID NO: 160928 - RNA, 18 nt, Artificial Sequence
  Synthetic
cucuggagguugaggcag

SEQ ID NO: 160929 - RNA, 19 nt, Artificial Sequence
  Synthetic
acucuggagguugaggcag

SEQ ID NO: 160930 - RNA, 20 nt, Artificial Sequence
  Synthetic
aacucuggagguugaggcag

SEQ ID NO: 160931 - RNA, 21 nt, Artificial Sequence
  Synthetic
caacucuggagguugaggcag

SEQ ID NO: 160932 - RNA, 23 nt, Artificial Sequence
  Synthetic
agcaacucuggagguugaggcag

SEQ ID NO: 160933 - RNA, 24 nt, Artificial Sequence
  Synthetic
cagcaacucuggagguugaggcag

SEQ ID NO: 160934 - RNA, 18 nt, Artificial Sequence
  Synthetic
cuugggaguuugaggcag

SEQ ID NO: 160935 - RNA, 19 nt, Artificial Sequence
  Synthetic
acuugggaguuugaggcag

SEQ ID NO: 160936 - RNA, 20 nt, Artificial Sequence
  Synthetic
uacuugggaguuugaggcag

SEQ ID NO: 160937 - RNA, 21 nt, Artificial Sequence
  Synthetic
auacuugggaguuugaggcag

SEQ ID NO: 160938 - RNA, 23 nt, Artificial Sequence
  Synthetic
agauacuugggaguuugaggcag

SEQ ID NO: 160939 - RNA, 24 nt, Artificial Sequence
  Synthetic
cagauacuugggaguuugaggcag

SEQ ID NO: 160940 - RNA, 20 nt, Artificial Sequence
  Synthetic
uggagaugucaauuaggcag

SEQ ID NO: 160941 - RNA, 22 nt, Artificial Sequence
  Synthetic
aguggagaugucaauuaggcag

SEQ ID NO: 160942 - RNA, 23 nt, Artificial Sequence
  Synthetic
aaguggagaugucaauuaggcag

SEQ ID NO: 160943 - RNA, 24 nt, Artificial Sequence
  Synthetic
uaaguggagaugucaauuaggcag

SEQ ID NO: 160944 - RNA, 20 nt, Artificial Sequence
  Synthetic
aggagucggggagggggcag

SEQ ID NO: 160945 - RNA, 18 nt, Artificial Sequence
  Synthetic
cuaaaugcccauuggcag

SEQ ID NO: 160946 - RNA, 19 nt, Artificial Sequence
  Synthetic
ccuaaaugcccauuggcag

SEQ ID NO: 160947 - RNA, 20 nt, Artificial Sequence
  Synthetic
accuaaaugcccauuggcag

SEQ ID NO: 160948 - RNA, 21 nt, Artificial Sequence
  Synthetic
aaccuaaaugcccauuggcag

SEQ ID NO: 160949 - RNA, 22 nt, Artificial Sequence
  Synthetic
caaccuaaaugcccauuggcag

SEQ ID NO: 160950 - RNA, 23 nt, Artificial Sequence
  Synthetic
acaaccuaaaugcccauuggcag

SEQ ID NO: 160951 - RNA, 24 nt, Artificial Sequence
  Synthetic
aacaaccuaaaugcccauuggcag

SEQ ID NO: 160952 - RNA, 18 nt, Artificial Sequence
  Synthetic
ccagaucagaaaaugcag

SEQ ID NO: 160953 - RNA, 19 nt, Artificial Sequence
  Synthetic
accagaucagaaaaugcag

SEQ ID NO: 160954 - RNA, 20 nt, Artificial Sequence
  Synthetic
aaccagaucagaaaaugcag

SEQ ID NO: 160955 - RNA, 18 nt, Artificial Sequence
  Synthetic
cugguuagccauaugcag

SEQ ID NO: 160956 - RNA, 21 nt, Artificial Sequence
  Synthetic
uggcugguuagccauaugcag

SEQ ID NO: 160957 - RNA, 22 nt, Artificial Sequence
  Synthetic
auggcugguuagccauaugcag

SEQ ID NO: 160958 - RNA, 18 nt, Artificial Sequence
  Synthetic
auuuuuaauuaaaaucag

SEQ ID NO: 160959 - RNA, 19 nt, Artificial Sequence
  Synthetic
uauuuuuaauuaaaaucag

SEQ ID NO: 160960 - RNA, 18 nt, Artificial Sequence
  Synthetic
uauggugauauaaaucag

SEQ ID NO: 160961 - RNA, 19 nt, Artificial Sequence
  Synthetic
cuauggugauauaaaucag

SEQ ID NO: 160962 - RNA, 20 nt, Artificial Sequence
  Synthetic
ucuauggugauauaaaucag

SEQ ID NO: 160963 - RNA, 21 nt, Artificial Sequence
  Synthetic
aucuauggugauauaaaucag

SEQ ID NO: 160964 - RNA, 22 nt, Artificial Sequence
  Synthetic
aaucuauggugauauaaaucag

SEQ ID NO: 160965 - RNA, 23 nt, Artificial Sequence
  Synthetic
uaaucuauggugauauaaaucag

SEQ ID NO: 160966 - RNA, 24 nt, Artificial Sequence
  Synthetic
cuaaucuauggugauauaaaucag

SEQ ID NO: 160967 - RNA, 19 nt, Artificial Sequence
  Synthetic
uguaaaaugcaccaaucag

SEQ ID NO: 160968 - RNA, 20 nt, Artificial Sequence
  Synthetic
cuguaaaaugcaccaaucag

SEQ ID NO: 160969 - RNA, 21 nt, Artificial Sequence
  Synthetic
ucuguaaaaugcaccaaucag

SEQ ID NO: 160970 - RNA, 22 nt, Artificial Sequence
  Synthetic
cucuguaaaaugcaccaaucag

SEQ ID NO: 160971 - RNA, 24 nt, Artificial Sequence
  Synthetic
cgcucuguaaaaugcaccaaucag

SEQ ID NO: 160972 - RNA, 19 nt, Artificial Sequence
  Synthetic
ugagggaauggcugaucag

SEQ ID NO: 160973 - RNA, 20 nt, Artificial Sequence
  Synthetic
augagggaauggcugaucag

SEQ ID NO: 160974 - RNA, 22 nt, Artificial Sequence
  Synthetic
agaugagggaauggcugaucag

SEQ ID NO: 160975 - RNA, 24 nt, Artificial Sequence
  Synthetic
agagaugagggaauggcugaucag

SEQ ID NO: 160976 - RNA, 18 nt, Artificial Sequence
  Synthetic
uuauuauuuuuugaucag

SEQ ID NO: 160977 - RNA, 19 nt, Artificial Sequence
  Synthetic
uuuauuauuuuuugaucag

SEQ ID NO: 160978 - RNA, 20 nt, Artificial Sequence
  Synthetic
uuuuauuauuuuuugaucag

SEQ ID NO: 160979 - RNA, 18 nt, Artificial Sequence
  Synthetic
auauuagcccuuuaucag

SEQ ID NO: 160980 - RNA, 21 nt, Artificial Sequence
  Synthetic
uggauauuagcccuuuaucag

SEQ ID NO: 160981 - RNA, 22 nt, Artificial Sequence
  Synthetic
cuggauauuagcccuuuaucag

SEQ ID NO: 160982 - RNA, 23 nt, Artificial Sequence
  Synthetic
ucuggauauuagcccuuuaucag

SEQ ID NO: 160983 - RNA, 24 nt, Artificial Sequence
  Synthetic
uucuggauauuagcccuuuaucag

SEQ ID NO: 160984 - RNA, 18 nt, Artificial Sequence
  Synthetic
aucagagagaguacucag

SEQ ID NO: 160985 - RNA, 19 nt, Artificial Sequence
  Synthetic
caucagagagaguacucag

SEQ ID NO: 160986 - RNA, 20 nt, Artificial Sequence
  Synthetic
acaucagagagaguacucag

SEQ ID NO: 160987 - RNA, 23 nt, Artificial Sequence
  Synthetic
aggacaucagagagaguacucag

SEQ ID NO: 160988 - RNA, 24 nt, Artificial Sequence
  Synthetic
caggacaucagagagaguacucag

SEQ ID NO: 160989 - RNA, 18 nt, Artificial Sequence
  Synthetic
cucaaaauguuuccucag

SEQ ID NO: 160990 - RNA, 19 nt, Artificial Sequence
  Synthetic
ucucaaaauguuuccucag

SEQ ID NO: 160991 - RNA, 20 nt, Artificial Sequence
  Synthetic
uucucaaaauguuuccucag

SEQ ID NO: 160992 - RNA, 18 nt, Artificial Sequence
  Synthetic
auaucagcccuuugucag

SEQ ID NO: 160993 - RNA, 21 nt, Artificial Sequence
  Synthetic
uggauaucagcccuuugucag

SEQ ID NO: 160994 - RNA, 22 nt, Artificial Sequence
  Synthetic
cuggauaucagcccuuugucag

SEQ ID NO: 160995 - RNA, 23 nt, Artificial Sequence
  Synthetic
ucuggauaucagcccuuugucag

SEQ ID NO: 160996 - RNA, 24 nt, Artificial Sequence
  Synthetic
uucuggauaucagcccuuugucag

SEQ ID NO: 160997 - RNA, 18 nt, Artificial Sequence
  Synthetic
cuuccccagagccuucag

SEQ ID NO: 160998 - RNA, 19 nt, Artificial Sequence
  Synthetic
ucuuccccagagccuucag

SEQ ID NO: 160999 - RNA, 20 nt, Artificial Sequence
  Synthetic
uucuuccccagagccuucag

SEQ ID NO: 161000 - RNA, 21 nt, Artificial Sequence
  Synthetic
auucuuccccagagccuucag

SEQ ID NO: 161001 - RNA, 22 nt, Artificial Sequence
  Synthetic
aauucuuccccagagccuucag

SEQ ID NO: 161002 - RNA, 24 nt, Artificial Sequence
  Synthetic
agaauucuuccccagagccuucag

SEQ ID NO: 161003 - RNA, 22 nt, Artificial Sequence
  Synthetic
agagaugauaugaaguguucag

SEQ ID NO: 161004 - RNA, 23 nt, Artificial Sequence
  Synthetic
uagagaugauaugaaguguucag

SEQ ID NO: 161005 - RNA, 24 nt, Artificial Sequence
  Synthetic
cuagagaugauaugaaguguucag

SEQ ID NO: 161006 - RNA, 18 nt, Artificial Sequence
  Synthetic
uccugccuuuuauuucag

SEQ ID NO: 161007 - RNA, 19 nt, Artificial Sequence
  Synthetic
cuccugccuuuuauuucag

SEQ ID NO: 161008 - RNA, 20 nt, Artificial Sequence
  Synthetic
ucuccugccuuuuauuucag

SEQ ID NO: 161009 - RNA, 21 nt, Artificial Sequence
  Synthetic
cucuccugccuuuuauuucag

SEQ ID NO: 161010 - RNA, 24 nt, Artificial Sequence
  Synthetic
aggcucuccugccuuuuauuucag

SEQ ID NO: 161011 - RNA, 18 nt, Artificial Sequence
  Synthetic
cuuucuagaaauaaagag

SEQ ID NO: 161012 - RNA, 19 nt, Artificial Sequence
  Synthetic
ccuuucuagaaauaaagag

SEQ ID NO: 161013 - RNA, 20 nt, Artificial Sequence
  Synthetic
cccuuucuagaaauaaagag

SEQ ID NO: 161014 - RNA, 18 nt, Artificial Sequence
  Synthetic
uauuaaaaaacacaagag

SEQ ID NO: 161015 - RNA, 19 nt, Artificial Sequence
  Synthetic
auauuaaaaaacacaagag

SEQ ID NO: 161016 - RNA, 20 nt, Artificial Sequence
  Synthetic
aauauuaaaaaacacaagag

SEQ ID NO: 161017 - RNA, 18 nt, Artificial Sequence
  Synthetic
cagcaucaucaccaagag

SEQ ID NO: 161018 - RNA, 19 nt, Artificial Sequence
  Synthetic
acagcaucaucaccaagag

SEQ ID NO: 161019 - RNA, 20 nt, Artificial Sequence
  Synthetic
cacagcaucaucaccaagag

SEQ ID NO: 161020 - RNA, 21 nt, Artificial Sequence
  Synthetic
ucacagcaucaucaccaagag

SEQ ID NO: 161021 - RNA, 22 nt, Artificial Sequence
  Synthetic
uucacagcaucaucaccaagag

SEQ ID NO: 161022 - RNA, 24 nt, Artificial Sequence
  Synthetic
uguucacagcaucaucaccaagag

SEQ ID NO: 161023 - RNA, 18 nt, Artificial Sequence
  Synthetic
aggaucaggacccaagag

SEQ ID NO: 161024 - RNA, 19 nt, Artificial Sequence
  Synthetic
aaggaucaggacccaagag

SEQ ID NO: 161025 - RNA, 18 nt, Artificial Sequence
  Synthetic
cugagcguccaucaagag

SEQ ID NO: 161026 - RNA, 19 nt, Artificial Sequence
  Synthetic
ccugagcguccaucaagag

SEQ ID NO: 161027 - RNA, 20 nt, Artificial Sequence
  Synthetic
accugagcguccaucaagag

SEQ ID NO: 161028 - RNA, 21 nt, Artificial Sequence
  Synthetic
aaccugagcguccaucaagag

SEQ ID NO: 161029 - RNA, 22 nt, Artificial Sequence
  Synthetic
caaccugagcguccaucaagag

SEQ ID NO: 161030 - RNA, 24 nt, Artificial Sequence
  Synthetic
agcaaccugagcguccaucaagag

SEQ ID NO: 161031 - RNA, 18 nt, Artificial Sequence
  Synthetic
aggaaagagaaagaagag

SEQ ID NO: 161032 - RNA, 20 nt, Artificial Sequence
  Synthetic
agaggaaagagaaagaagag

SEQ ID NO: 161033 - RNA, 21 nt, Artificial Sequence
  Synthetic
cagaggaaagagaaagaagag

SEQ ID NO: 161034 - RNA, 22 nt, Artificial Sequence
  Synthetic
ucagaggaaagagaaagaagag

SEQ ID NO: 161035 - RNA, 23 nt, Artificial Sequence
  Synthetic
uucagaggaaagagaaagaagag

SEQ ID NO: 161036 - RNA, 24 nt, Artificial Sequence
  Synthetic
uuucagaggaaagagaaagaagag

SEQ ID NO: 161037 - RNA, 18 nt, Artificial Sequence
  Synthetic
uaauguuugaaagaagag

SEQ ID NO: 161038 - RNA, 19 nt, Artificial Sequence
  Synthetic
cuaauguuugaaagaagag

SEQ ID NO: 161039 - RNA, 21 nt, Artificial Sequence
  Synthetic
ugcuaauguuugaaagaagag

SEQ ID NO: 161040 - RNA, 23 nt, Artificial Sequence
  Synthetic
agugcuaauguuugaaagaagag

SEQ ID NO: 161041 - RNA, 24 nt, Artificial Sequence
  Synthetic
aagugcuaauguuugaaagaagag

SEQ ID NO: 161042 - RNA, 18 nt, Artificial Sequence
  Synthetic
agcagagggugagaagag

SEQ ID NO: 161043 - RNA, 20 nt, Artificial Sequence
  Synthetic
agagcagagggugagaagag

SEQ ID NO: 161044 - RNA, 18 nt, Artificial Sequence
  Synthetic
ucaaaauaccuagaagag

SEQ ID NO: 161045 - RNA, 19 nt, Artificial Sequence
  Synthetic
cucaaaauaccuagaagag

SEQ ID NO: 161046 - RNA, 20 nt, Artificial Sequence
  Synthetic
ucucaaaauaccuagaagag

SEQ ID NO: 161047 - RNA, 21 nt, Artificial Sequence
  Synthetic
cucucaaaauaccuagaagag

SEQ ID NO: 161048 - RNA, 22 nt, Artificial Sequence
  Synthetic
ucucucaaaauaccuagaagag

SEQ ID NO: 161049 - RNA, 23 nt, Artificial Sequence
  Synthetic
aucucucaaaauaccuagaagag

SEQ ID NO: 161050 - RNA, 24 nt, Artificial Sequence
  Synthetic
uaucucucaaaauaccuagaagag

SEQ ID NO: 161051 - RNA, 20 nt, Artificial Sequence
  Synthetic
aggagcaugagaaugaagag

SEQ ID NO: 161052 - RNA, 18 nt, Artificial Sequence
  Synthetic
aaggauuuuuacuaagag

SEQ ID NO: 161053 - RNA, 19 nt, Artificial Sequence
  Synthetic
aaaggauuuuuacuaagag

SEQ ID NO: 161054 - RNA, 20 nt, Artificial Sequence
  Synthetic
uaaaggauuuuuacuaagag

SEQ ID NO: 161055 - RNA, 18 nt, Artificial Sequence
  Synthetic
aaaaagcuaaaaacagag

SEQ ID NO: 161056 - RNA, 19 nt, Artificial Sequence
  Synthetic
caaaaagcuaaaaacagag

SEQ ID NO: 161057 - RNA, 20 nt, Artificial Sequence
  Synthetic
ucaaaaagcuaaaaacagag

SEQ ID NO: 161058 - RNA, 18 nt, Artificial Sequence
  Synthetic
aguccacuugguccagag

SEQ ID NO: 161059 - RNA, 19 nt, Artificial Sequence
  Synthetic
aaguccacuugguccagag

SEQ ID NO: 161060 - RNA, 20 nt, Artificial Sequence
  Synthetic
uaaguccacuugguccagag

SEQ ID NO: 161061 - RNA, 21 nt, Artificial Sequence
  Synthetic
uuaaguccacuugguccagag

SEQ ID NO: 161062 - RNA, 22 nt, Artificial Sequence
  Synthetic
auuaaguccacuugguccagag

SEQ ID NO: 161063 - RNA, 23 nt, Artificial Sequence
  Synthetic
uauuaaguccacuugguccagag

SEQ ID NO: 161064 - RNA, 24 nt, Artificial Sequence
  Synthetic
cuauuaaguccacuugguccagag

SEQ ID NO: 161065 - RNA, 18 nt, Artificial Sequence
  Synthetic
cacccuaaaacagcagag

SEQ ID NO: 161066 - RNA, 19 nt, Artificial Sequence
  Synthetic
ucacccuaaaacagcagag

SEQ ID NO: 161067 - RNA, 20 nt, Artificial Sequence
  Synthetic
uucacccuaaaacagcagag

SEQ ID NO: 161068 - RNA, 18 nt, Artificial Sequence
  Synthetic
agaccauauggagcagag

SEQ ID NO: 161069 - RNA, 20 nt, Artificial Sequence
  Synthetic
agagaccauauggagcagag

SEQ ID NO: 161070 - RNA, 22 nt, Artificial Sequence
  Synthetic
ugagagaccauauggagcagag

SEQ ID NO: 161071 - RNA, 23 nt, Artificial Sequence
  Synthetic
augagagaccauauggagcagag

SEQ ID NO: 161072 - RNA, 18 nt, Artificial Sequence
  Synthetic
caugcuacaauagcagag

SEQ ID NO: 161073 - RNA, 19 nt, Artificial Sequence
  Synthetic
ucaugcuacaauagcagag

SEQ ID NO: 161074 - RNA, 20 nt, Artificial Sequence
  Synthetic
uucaugcuacaauagcagag

SEQ ID NO: 161075 - RNA, 21 nt, Artificial Sequence
  Synthetic
uuucaugcuacaauagcagag

SEQ ID NO: 161076 - RNA, 22 nt, Artificial Sequence
  Synthetic
cuuucaugcuacaauagcagag

SEQ ID NO: 161077 - RNA, 23 nt, Artificial Sequence
  Synthetic
acuuucaugcuacaauagcagag

SEQ ID NO: 161078 - RNA, 24 nt, Artificial Sequence
  Synthetic
uacuuucaugcuacaauagcagag

SEQ ID NO: 161079 - RNA, 18 nt, Artificial Sequence
  Synthetic
auaaagaaaaaaagagag

SEQ ID NO: 161080 - RNA, 19 nt, Artificial Sequence
  Synthetic
aauaaagaaaaaaagagag

SEQ ID NO: 161081 - RNA, 20 nt, Artificial Sequence
  Synthetic
uaauaaagaaaaaaagagag

SEQ ID NO: 161082 - RNA, 21 nt, Artificial Sequence
  Synthetic
cuaauaaagaaaaaaagagag

SEQ ID NO: 161083 - RNA, 22 nt, Artificial Sequence
  Synthetic
acuaauaaagaaaaaaagagag

SEQ ID NO: 161084 - RNA, 24 nt, Artificial Sequence
  Synthetic
agacuaauaaagaaaaaaagagag

SEQ ID NO: 161085 - RNA, 18 nt, Artificial Sequence
  Synthetic
augagaacaaaaagagag

SEQ ID NO: 161086 - RNA, 19 nt, Artificial Sequence
  Synthetic
caugagaacaaaaagagag

SEQ ID NO: 161087 - RNA, 20 nt, Artificial Sequence
  Synthetic
acaugagaacaaaaagagag

SEQ ID NO: 161088 - RNA, 21 nt, Artificial Sequence
  Synthetic
cuaauaaagaagaaaagagag

SEQ ID NO: 161089 - RNA, 22 nt, Artificial Sequence
  Synthetic
acuaauaaagaagaaaagagag

SEQ ID NO: 161090 - RNA, 24 nt, Artificial Sequence
  Synthetic
agacuaauaaagaagaaaagagag

SEQ ID NO: 161091 - RNA, 18 nt, Artificial Sequence
  Synthetic
ccgaagaggaaaagagag

SEQ ID NO: 161092 - RNA, 19 nt, Artificial Sequence
  Synthetic
accgaagaggaaaagagag

SEQ ID NO: 161093 - RNA, 20 nt, Artificial Sequence
  Synthetic
aaccgaagaggaaaagagag

SEQ ID NO: 161094 - RNA, 21 nt, Artificial Sequence
  Synthetic
aguucuaucaacugaagagag

SEQ ID NO: 161095 - RNA, 22 nt, Artificial Sequence
  Synthetic
uaguucuaucaacugaagagag

SEQ ID NO: 161096 - RNA, 24 nt, Artificial Sequence
  Synthetic
aguaguucuaucaacugaagagag

SEQ ID NO: 161097 - RNA, 19 nt, Artificial Sequence
  Synthetic
aguaacaaauaacagagag

SEQ ID NO: 161098 - RNA, 20 nt, Artificial Sequence
  Synthetic
aaguaacaaauaacagagag

SEQ ID NO: 161099 - RNA, 18 nt, Artificial Sequence
  Synthetic
aauugguaccacagagag

SEQ ID NO: 161100 - RNA, 19 nt, Artificial Sequence
  Synthetic
aaauugguaccacagagag

SEQ ID NO: 161101 - RNA, 20 nt, Artificial Sequence
  Synthetic
uaaauugguaccacagagag

SEQ ID NO: 161102 - RNA, 22 nt, Artificial Sequence
  Synthetic
aguaaauugguaccacagagag

SEQ ID NO: 161103 - RNA, 23 nt, Artificial Sequence
  Synthetic
caguaaauugguaccacagagag

SEQ ID NO: 161104 - RNA, 24 nt, Artificial Sequence
  Synthetic
acaguaaauugguaccacagagag

SEQ ID NO: 161105 - RNA, 18 nt, Artificial Sequence
  Synthetic
acuuuugcuuaaggagag

SEQ ID NO: 161106 - RNA, 19 nt, Artificial Sequence
  Synthetic
uacuuuugcuuaaggagag

SEQ ID NO: 161107 - RNA, 20 nt, Artificial Sequence
  Synthetic
uuacuuuugcuuaaggagag

SEQ ID NO: 161108 - RNA, 21 nt, Artificial Sequence
  Synthetic
cuuacuuuugcuuaaggagag

SEQ ID NO: 161109 - RNA, 22 nt, Artificial Sequence
  Synthetic
ccuuacuuuugcuuaaggagag

SEQ ID NO: 161110 - RNA, 23 nt, Artificial Sequence
  Synthetic
uccuuacuuuugcuuaaggagag

SEQ ID NO: 161111 - RNA, 24 nt, Artificial Sequence
  Synthetic
cuccuuacuuuugcuuaaggagag

SEQ ID NO: 161112 - RNA, 18 nt, Artificial Sequence
  Synthetic
agacaggaggcaggagag

SEQ ID NO: 161113 - RNA, 20 nt, Artificial Sequence
  Synthetic
agagacaggaggcaggagag

SEQ ID NO: 161114 - RNA, 19 nt, Artificial Sequence
  Synthetic
agggaggagggagggagag

SEQ ID NO: 161115 - RNA, 20 nt, Artificial Sequence
  Synthetic
aagggaggagggagggagag

SEQ ID NO: 161116 - RNA, 21 nt, Artificial Sequence
  Synthetic
aaagggaggagggagggagag

SEQ ID NO: 161117 - RNA, 24 nt, Artificial Sequence
  Synthetic
uggaaagggaggagggagggagag

SEQ ID NO: 161118 - RNA, 22 nt, Artificial Sequence
  Synthetic
agcaggugggaagaugauagag

SEQ ID NO: 161119 - RNA, 23 nt, Artificial Sequence
  Synthetic
aagcaggugggaagaugauagag

SEQ ID NO: 161120 - RNA, 24 nt, Artificial Sequence
  Synthetic
caagcaggugggaagaugauagag

SEQ ID NO: 161121 - RNA, 18 nt, Artificial Sequence
  Synthetic
uuuguauuuguaguagag

SEQ ID NO: 161122 - RNA, 19 nt, Artificial Sequence
  Synthetic
uuuuguauuuguaguagag

SEQ ID NO: 161123 - RNA, 20 nt, Artificial Sequence
  Synthetic
uuuuuguauuuguaguagag

SEQ ID NO: 161124 - RNA, 21 nt, Artificial Sequence
  Synthetic
uuuuuuguauuuguaguagag

SEQ ID NO: 161125 - RNA, 22 nt, Artificial Sequence
  Synthetic
auuuuuuguauuuguaguagag

SEQ ID NO: 161126 - RNA, 24 nt, Artificial Sequence
  Synthetic
ugauuuuuuguauuuguaguagag

SEQ ID NO: 161127 - RNA, 18 nt, Artificial Sequence
  Synthetic
augauaaaauuaguagag

SEQ ID NO: 161128 - RNA, 20 nt, Artificial Sequence
  Synthetic
agaugauaaaauuaguagag

SEQ ID NO: 161129 - RNA, 21 nt, Artificial Sequence
  Synthetic
cagaugauaaaauuaguagag

SEQ ID NO: 161130 - RNA, 22 nt, Artificial Sequence
  Synthetic
acagaugauaaaauuaguagag

SEQ ID NO: 161131 - RNA, 23 nt, Artificial Sequence
  Synthetic
cacagaugauaaaauuaguagag

SEQ ID NO: 161132 - RNA, 24 nt, Artificial Sequence
  Synthetic
acacagaugauaaaauuaguagag

SEQ ID NO: 161133 - RNA, 18 nt, Artificial Sequence
  Synthetic
auaaucucuaauguagag

SEQ ID NO: 161134 - RNA, 19 nt, Artificial Sequence
  Synthetic
uauaaucucuaauguagag

SEQ ID NO: 161135 - RNA, 20 nt, Artificial Sequence
  Synthetic
cuauaaucucuaauguagag

SEQ ID NO: 161136 - RNA, 18 nt, Artificial Sequence
  Synthetic
uuauuuaacuuuguagag

SEQ ID NO: 161137 - RNA, 19 nt, Artificial Sequence
  Synthetic
uuuauuuaacuuuguagag

SEQ ID NO: 161138 - RNA, 20 nt, Artificial Sequence
  Synthetic
cuuuauuuaacuuuguagag

SEQ ID NO: 161139 - RNA, 18 nt, Artificial Sequence
  Synthetic
aaagaaaaggaccacgag

SEQ ID NO: 161140 - RNA, 19 nt, Artificial Sequence
  Synthetic
aaaagaaaaggaccacgag

SEQ ID NO: 161141 - RNA, 20 nt, Artificial Sequence
  Synthetic
uaaaagaaaaggaccacgag

SEQ ID NO: 161142 - RNA, 21 nt, Artificial Sequence
  Synthetic
ugauucaaauaaagcaaggag

SEQ ID NO: 161143 - RNA, 22 nt, Artificial Sequence
  Synthetic
augauucaaauaaagcaaggag

SEQ ID NO: 161144 - RNA, 23 nt, Artificial Sequence
  Synthetic
aaugauucaaauaaagcaaggag

SEQ ID NO: 161145 - RNA, 24 nt, Artificial Sequence
  Synthetic
aaaugauucaaauaaagcaaggag

SEQ ID NO: 161146 - RNA, 18 nt, Artificial Sequence
  Synthetic
caugggcagaggaaggag

SEQ ID NO: 161147 - RNA, 20 nt, Artificial Sequence
  Synthetic
agcaugggcagaggaaggag

SEQ ID NO: 161148 - RNA, 18 nt, Artificial Sequence
  Synthetic
cucaguaggcugaaggag

SEQ ID NO: 161149 - RNA, 19 nt, Artificial Sequence
  Synthetic
acucaguaggcugaaggag

SEQ ID NO: 161150 - RNA, 20 nt, Artificial Sequence
  Synthetic
uacucaguaggcugaaggag

SEQ ID NO: 161151 - RNA, 21 nt, Artificial Sequence
  Synthetic
cuacucaguaggcugaaggag

SEQ ID NO: 161152 - RNA, 24 nt, Artificial Sequence
  Synthetic
uggcuacucaguaggcugaaggag

SEQ ID NO: 161153 - RNA, 21 nt, Artificial Sequence
  Synthetic
cgggccugaaagcuuaaggag

SEQ ID NO: 161154 - RNA, 22 nt, Artificial Sequence
  Synthetic
ccgggccugaaagcuuaaggag

SEQ ID NO: 161155 - RNA, 23 nt, Artificial Sequence
  Synthetic
cccgggccugaaagcuuaaggag

SEQ ID NO: 161156 - RNA, 24 nt, Artificial Sequence
  Synthetic
ucccgggccugaaagcuuaaggag

SEQ ID NO: 161157 - RNA, 18 nt, Artificial Sequence
  Synthetic
aacaaaacaaaacaggag

SEQ ID NO: 161158 - RNA, 19 nt, Artificial Sequence
  Synthetic
aaacaaaacaaaacaggag

SEQ ID NO: 161159 - RNA, 20 nt, Artificial Sequence
  Synthetic
aaaacaaaacaaaacaggag

SEQ ID NO: 161160 - RNA, 21 nt, Artificial Sequence
  Synthetic
caaaacaaaacaaaacaggag

SEQ ID NO: 161161 - RNA, 22 nt, Artificial Sequence
  Synthetic
acaaaacaaaacaaaacaggag

SEQ ID NO: 161162 - RNA, 23 nt, Artificial Sequence
  Synthetic
aacaaaacaaaacaaaacaggag

SEQ ID NO: 161163 - RNA, 24 nt, Artificial Sequence
  Synthetic
aaacaaaacaaaacaaaacaggag

SEQ ID NO: 161164 - RNA, 18 nt, Artificial Sequence
  Synthetic
ucagaagacgaacaggag

SEQ ID NO: 161165 - RNA, 20 nt, Artificial Sequence
  Synthetic
agucagaagacgaacaggag

SEQ ID NO: 161166 - RNA, 22 nt, Artificial Sequence
  Synthetic
agagucagaagacgaacaggag

SEQ ID NO: 161167 - RNA, 23 nt, Artificial Sequence
  Synthetic
cagagucagaagacgaacaggag

SEQ ID NO: 161168 - RNA, 24 nt, Artificial Sequence
  Synthetic
acagagucagaagacgaacaggag

SEQ ID NO: 161169 - RNA, 18 nt, Artificial Sequence
  Synthetic
acugcuugagcccaggag

SEQ ID NO: 161170 - RNA, 21 nt, Artificial Sequence
  Synthetic
aggacugcuugagcccaggag

SEQ ID NO: 161171 - RNA, 24 nt, Artificial Sequence
  Synthetic
aggaggacugcuugagcccaggag

SEQ ID NO: 161172 - RNA, 18 nt, Artificial Sequence
  Synthetic
aguucuggagaucaggag

SEQ ID NO: 161173 - RNA, 19 nt, Artificial Sequence
  Synthetic
caguucuggagaucaggag

SEQ ID NO: 161174 - RNA, 20 nt, Artificial Sequence
  Synthetic
acaguucuggagaucaggag

SEQ ID NO: 161175 - RNA, 18 nt, Artificial Sequence
  Synthetic
uugagacuuugggaggag

SEQ ID NO: 161176 - RNA, 19 nt, Artificial Sequence
  Synthetic
uuugagacuuugggaggag

SEQ ID NO: 161177 - RNA, 20 nt, Artificial Sequence
  Synthetic
uuuugagacuuugggaggag

SEQ ID NO: 161178 - RNA, 18 nt, Artificial Sequence
  Synthetic
cuagguuuuugauaggag

SEQ ID NO: 161179 - RNA, 19 nt, Artificial Sequence
  Synthetic
ucuagguuuuugauaggag

SEQ ID NO: 161180 - RNA, 20 nt, Artificial Sequence
  Synthetic
uucuagguuuuugauaggag

SEQ ID NO: 161181 - RNA, 18 nt, Artificial Sequence
  Synthetic
cagaaaaaaaauuaggag

SEQ ID NO: 161182 - RNA, 19 nt, Artificial Sequence
  Synthetic
acagaaaaaaaauuaggag

SEQ ID NO: 161183 - RNA, 20 nt, Artificial Sequence
  Synthetic
aacagaaaaaaaauuaggag

SEQ ID NO: 161184 - RNA, 19 nt, Artificial Sequence
  Synthetic
agauguuugagucacggag

SEQ ID NO: 161185 - RNA, 19 nt, Artificial Sequence
  Synthetic
ugggguaggaggaagggag

SEQ ID NO: 161186 - RNA, 20 nt, Artificial Sequence
  Synthetic
uugggguaggaggaagggag

SEQ ID NO: 161187 - RNA, 21 nt, Artificial Sequence
  Synthetic
uuugggguaggaggaagggag

SEQ ID NO: 161188 - RNA, 22 nt, Artificial Sequence
  Synthetic
auuugggguaggaggaagggag

SEQ ID NO: 161189 - RNA, 18 nt, Artificial Sequence
  Synthetic
uauuagagacagagggag

SEQ ID NO: 161190 - RNA, 19 nt, Artificial Sequence
  Synthetic
uuauuagagacagagggag

SEQ ID NO: 161191 - RNA, 20 nt, Artificial Sequence
  Synthetic
uuuauuagagacagagggag

SEQ ID NO: 161192 - RNA, 18 nt, Artificial Sequence
  Synthetic
acuagagggaggagggag

SEQ ID NO: 161193 - RNA, 19 nt, Artificial Sequence
  Synthetic
uacuagagggaggagggag

SEQ ID NO: 161194 - RNA, 20 nt, Artificial Sequence
  Synthetic
cuacuagagggaggagggag

SEQ ID NO: 161195 - RNA, 21 nt, Artificial Sequence
  Synthetic
acuacuagagggaggagggag

SEQ ID NO: 161196 - RNA, 20 nt, Artificial Sequence
  Synthetic
agggcuugggagugggggag

SEQ ID NO: 161197 - RNA, 18 nt, Artificial Sequence
  Synthetic
aauggguuaucaugggag

SEQ ID NO: 161198 - RNA, 19 nt, Artificial Sequence
  Synthetic
uaauggguuaucaugggag

SEQ ID NO: 161199 - RNA, 20 nt, Artificial Sequence
  Synthetic
uuaauggguuaucaugggag

SEQ ID NO: 161200 - RNA, 23 nt, Artificial Sequence
  Synthetic
agguuaauggguuaucaugggag

SEQ ID NO: 161201 - RNA, 24 nt, Artificial Sequence
  Synthetic
uagguuaauggguuaucaugggag

SEQ ID NO: 161202 - RNA, 18 nt, Artificial Sequence
  Synthetic
aaguaggaauuaugggag

SEQ ID NO: 161203 - RNA, 19 nt, Artificial Sequence
  Synthetic
caaguaggaauuaugggag

SEQ ID NO: 161204 - RNA, 20 nt, Artificial Sequence
  Synthetic
acaaguaggaauuaugggag

SEQ ID NO: 161205 - RNA, 21 nt, Artificial Sequence
  Synthetic
aacaaguaggaauuaugggag

SEQ ID NO: 161206 - RNA, 22 nt, Artificial Sequence
  Synthetic
caacaaguaggaauuaugggag

SEQ ID NO: 161207 - RNA, 23 nt, Artificial Sequence
  Synthetic
acaacaaguaggaauuaugggag

SEQ ID NO: 161208 - RNA, 24 nt, Artificial Sequence
  Synthetic
cacaacaaguaggaauuaugggag

SEQ ID NO: 161209 - RNA, 22 nt, Artificial Sequence
  Synthetic
cgcucugucacccaggcuggag

SEQ ID NO: 161210 - RNA, 23 nt, Artificial Sequence
  Synthetic
ucgcucugucacccaggcuggag

SEQ ID NO: 161211 - RNA, 24 nt, Artificial Sequence
  Synthetic
cucgcucugucacccaggcuggag

SEQ ID NO: 161212 - RNA, 18 nt, Artificial Sequence
  Synthetic
cugucgcccaggcuggag

SEQ ID NO: 161213 - RNA, 19 nt, Artificial Sequence
  Synthetic
ucugucgcccaggcuggag

SEQ ID NO: 161214 - RNA, 20 nt, Artificial Sequence
  Synthetic
cucugucgcccaggcuggag

SEQ ID NO: 161215 - RNA, 23 nt, Artificial Sequence
  Synthetic
uggcucugucgcccaggcuggag

SEQ ID NO: 161216 - RNA, 24 nt, Artificial Sequence
  Synthetic
cuggcucugucgcccaggcuggag

SEQ ID NO: 161217 - RNA, 18 nt, Artificial Sequence
  Synthetic
uuuguucccuugcuggag

SEQ ID NO: 161218 - RNA, 19 nt, Artificial Sequence
  Synthetic
uuuuguucccuugcuggag

SEQ ID NO: 161219 - RNA, 21 nt, Artificial Sequence
  Synthetic
aguuuuguucccuugcuggag

SEQ ID NO: 161220 - RNA, 22 nt, Artificial Sequence
  Synthetic
caguuuuguucccuugcuggag

SEQ ID NO: 161221 - RNA, 23 nt, Artificial Sequence
  Synthetic
ccaguuuuguucccuugcuggag

SEQ ID NO: 161222 - RNA, 24 nt, Artificial Sequence
  Synthetic
uccaguuuuguucccuugcuggag

SEQ ID NO: 161223 - RNA, 18 nt, Artificial Sequence
  Synthetic
augagaagaguucuggag

SEQ ID NO: 161224 - RNA, 20 nt, Artificial Sequence
  Synthetic
agaugagaagaguucuggag

SEQ ID NO: 161225 - RNA, 21 nt, Artificial Sequence
  Synthetic
aagaugagaagaguucuggag

SEQ ID NO: 161226 - RNA, 22 nt, Artificial Sequence
  Synthetic
caagaugagaagaguucuggag

SEQ ID NO: 161227 - RNA, 24 nt, Artificial Sequence
  Synthetic
ugcaagaugagaagaguucuggag

SEQ ID NO: 161228 - RNA, 18 nt, Artificial Sequence
  Synthetic
ugugucucugcacaugag

SEQ ID NO: 161229 - RNA, 20 nt, Artificial Sequence
  Synthetic
ugugugucucugcacaugag

SEQ ID NO: 161230 - RNA, 21 nt, Artificial Sequence
  Synthetic
augugugucucugcacaugag

SEQ ID NO: 161231 - RNA, 22 nt, Artificial Sequence
  Synthetic
uaugugugucucugcacaugag

SEQ ID NO: 161232 - RNA, 23 nt, Artificial Sequence
  Synthetic
cuaugugugucucugcacaugag

SEQ ID NO: 161233 - RNA, 24 nt, Artificial Sequence
  Synthetic
ccuaugugugucucugcacaugag

SEQ ID NO: 161234 - RNA, 18 nt, Artificial Sequence
  Synthetic
ucaguuuugcaagaugag

SEQ ID NO: 161235 - RNA, 19 nt, Artificial Sequence
  Synthetic
uucaguuuugcaagaugag

SEQ ID NO: 161236 - RNA, 20 nt, Artificial Sequence
  Synthetic
uuucaguuuugcaagaugag

SEQ ID NO: 161237 - RNA, 22 nt, Artificial Sequence
  Synthetic
aguuucaguuuugcaagaugag

SEQ ID NO: 161238 - RNA, 24 nt, Artificial Sequence
  Synthetic
agaguuucaguuuugcaagaugag

SEQ ID NO: 161239 - RNA, 18 nt, Artificial Sequence
  Synthetic
auuagagaagaagaugag

SEQ ID NO: 161240 - RNA, 19 nt, Artificial Sequence
  Synthetic
cauuagagaagaagaugag

SEQ ID NO: 161241 - RNA, 20 nt, Artificial Sequence
  Synthetic
ucauuagagaagaagaugag

SEQ ID NO: 161242 - RNA, 18 nt, Artificial Sequence
  Synthetic
cagucccagugagaugag

SEQ ID NO: 161243 - RNA, 19 nt, Artificial Sequence
  Synthetic
ccagucccagugagaugag

SEQ ID NO: 161244 - RNA, 20 nt, Artificial Sequence
  Synthetic
accagucccagugagaugag

SEQ ID NO: 161245 - RNA, 21 nt, Artificial Sequence
  Synthetic
aaccagucccagugagaugag

SEQ ID NO: 161246 - RNA, 22 nt, Artificial Sequence
  Synthetic
uaaccagucccagugagaugag

SEQ ID NO: 161247 - RNA, 23 nt, Artificial Sequence
  Synthetic
cuaaccagucccagugagaugag

SEQ ID NO: 161248 - RNA, 24 nt, Artificial Sequence
  Synthetic
ucuaaccagucccagugagaugag

SEQ ID NO: 161249 - RNA, 18 nt, Artificial Sequence
  Synthetic
uagcuagucagauaugag

SEQ ID NO: 161250 - RNA, 19 nt, Artificial Sequence
  Synthetic
auagcuagucagauaugag

SEQ ID NO: 161251 - RNA, 21 nt, Artificial Sequence
  Synthetic
agauagcuagucagauaugag

SEQ ID NO: 161252 - RNA, 22 nt, Artificial Sequence
  Synthetic
uagauagcuagucagauaugag

SEQ ID NO: 161253 - RNA, 24 nt, Artificial Sequence
  Synthetic
aguagauagcuagucagauaugag

SEQ ID NO: 161254 - RNA, 19 nt, Artificial Sequence
  Synthetic
agugcuuugggaagcugag

SEQ ID NO: 161255 - RNA, 20 nt, Artificial Sequence
  Synthetic
cagugcuuugggaagcugag

SEQ ID NO: 161256 - RNA, 21 nt, Artificial Sequence
  Synthetic
ccagugcuuugggaagcugag

SEQ ID NO: 161257 - RNA, 22 nt, Artificial Sequence
  Synthetic
uccagugcuuugggaagcugag

SEQ ID NO: 161258 - RNA, 23 nt, Artificial Sequence
  Synthetic
uuccagugcuuugggaagcugag

SEQ ID NO: 161259 - RNA, 24 nt, Artificial Sequence
  Synthetic
auuccagugcuuugggaagcugag

SEQ ID NO: 161260 - RNA, 18 nt, Artificial Sequence
  Synthetic
acacuuugggaggcugag

SEQ ID NO: 161261 - RNA, 19 nt, Artificial Sequence
  Synthetic
aacacuuugggaggcugag

SEQ ID NO: 161262 - RNA, 20 nt, Artificial Sequence
  Synthetic
caacacuuugggaggcugag

SEQ ID NO: 161263 - RNA, 21 nt, Artificial Sequence
  Synthetic
ccaacacuuugggaggcugag

SEQ ID NO: 161264 - RNA, 22 nt, Artificial Sequence
  Synthetic
cccaacacuuugggaggcugag

SEQ ID NO: 161265 - RNA, 23 nt, Artificial Sequence
  Synthetic
ucccaacacuuugggaggcugag

SEQ ID NO: 161266 - RNA, 24 nt, Artificial Sequence
  Synthetic
aucccaacacuuugggaggcugag

SEQ ID NO: 161267 - RNA, 19 nt, Artificial Sequence
  Synthetic
agcacuuugggaggcugag

SEQ ID NO: 161268 - RNA, 20 nt, Artificial Sequence
  Synthetic
uagcacuuugggaggcugag

SEQ ID NO: 161269 - RNA, 21 nt, Artificial Sequence
  Synthetic
cuagcacuuugggaggcugag

SEQ ID NO: 161270 - RNA, 22 nt, Artificial Sequence
  Synthetic
ccuagcacuuugggaggcugag

SEQ ID NO: 161271 - RNA, 23 nt, Artificial Sequence
  Synthetic
uccuagcacuuugggaggcugag

SEQ ID NO: 161272 - RNA, 24 nt, Artificial Sequence
  Synthetic
auccuagcacuuugggaggcugag

SEQ ID NO: 161273 - RNA, 19 nt, Artificial Sequence
  Synthetic
cgcacuuugggaggcugag

SEQ ID NO: 161274 - RNA, 20 nt, Artificial Sequence
  Synthetic
ccgcacuuugggaggcugag

SEQ ID NO: 161275 - RNA, 21 nt, Artificial Sequence
  Synthetic
cccgcacuuugggaggcugag

SEQ ID NO: 161276 - RNA, 22 nt, Artificial Sequence
  Synthetic
ccccgcacuuugggaggcugag

SEQ ID NO: 161277 - RNA, 23 nt, Artificial Sequence
  Synthetic
uccccgcacuuugggaggcugag

SEQ ID NO: 161278 - RNA, 24 nt, Artificial Sequence
  Synthetic
auccccgcacuuugggaggcugag

SEQ ID NO: 161279 - RNA, 21 nt, Artificial Sequence
  Synthetic
auguuuuuuguaccaucugag

SEQ ID NO: 161280 - RNA, 22 nt, Artificial Sequence
  Synthetic
uauguuuuuuguaccaucugag

SEQ ID NO: 161281 - RNA, 23 nt, Artificial Sequence
  Synthetic
uuauguuuuuuguaccaucugag

SEQ ID NO: 161282 - RNA, 24 nt, Artificial Sequence
  Synthetic
auuauguuuuuuguaccaucugag

SEQ ID NO: 161283 - RNA, 21 nt, Artificial Sequence
  Synthetic
aaaaaaggacaccagggugag

SEQ ID NO: 161284 - RNA, 22 nt, Artificial Sequence
  Synthetic
aaaaaaaggacaccagggugag

SEQ ID NO: 161285 - RNA, 23 nt, Artificial Sequence
  Synthetic
aaaaaaaaggacaccagggugag

SEQ ID NO: 161286 - RNA, 24 nt, Artificial Sequence
  Synthetic
aaaaaaaaaggacaccagggugag

SEQ ID NO: 161287 - RNA, 18 nt, Artificial Sequence
  Synthetic
uauuuuuauaaaugugag

SEQ ID NO: 161288 - RNA, 19 nt, Artificial Sequence
  Synthetic
uuauuuuuauaaaugugag

SEQ ID NO: 161289 - RNA, 20 nt, Artificial Sequence
  Synthetic
auuauuuuuauaaaugugag

SEQ ID NO: 161290 - RNA, 18 nt, Artificial Sequence
  Synthetic
uguguguuugcaugugag

SEQ ID NO: 161291 - RNA, 20 nt, Artificial Sequence
  Synthetic
uguguguguuugcaugugag

SEQ ID NO: 161292 - RNA, 21 nt, Artificial Sequence
  Synthetic
auguguguguuugcaugugag

SEQ ID NO: 161293 - RNA, 22 nt, Artificial Sequence
  Synthetic
uauguguguguuugcaugugag

SEQ ID NO: 161294 - RNA, 23 nt, Artificial Sequence
  Synthetic
cuauguguguguuugcaugugag

SEQ ID NO: 161295 - RNA, 24 nt, Artificial Sequence
  Synthetic
ccuauguguguguuugcaugugag

SEQ ID NO: 161296 - RNA, 18 nt, Artificial Sequence
  Synthetic
uaaaugucuucuuuugag

SEQ ID NO: 161297 - RNA, 19 nt, Artificial Sequence
  Synthetic
auaaaugucuucuuuugag

SEQ ID NO: 161298 - RNA, 20 nt, Artificial Sequence
  Synthetic
cauaaaugucuucuuuugag

SEQ ID NO: 161299 - RNA, 21 nt, Artificial Sequence
  Synthetic
acauaaaugucuucuuuugag

SEQ ID NO: 161300 - RNA, 22 nt, Artificial Sequence
  Synthetic
cacauaaaugucuucuuuugag

SEQ ID NO: 161301 - RNA, 23 nt, Artificial Sequence
  Synthetic
ccacauaaaugucuucuuuugag

SEQ ID NO: 161302 - RNA, 18 nt, Artificial Sequence
  Synthetic
uauugcaugagaaaauag

SEQ ID NO: 161303 - RNA, 19 nt, Artificial Sequence
  Synthetic
auauugcaugagaaaauag

SEQ ID NO: 161304 - RNA, 20 nt, Artificial Sequence
  Synthetic
uauauugcaugagaaaauag

SEQ ID NO: 161305 - RNA, 18 nt, Artificial Sequence
  Synthetic
ugaaaugauguaaaauag

SEQ ID NO: 161306 - RNA, 19 nt, Artificial Sequence
  Synthetic
augaaaugauguaaaauag

SEQ ID NO: 161307 - RNA, 20 nt, Artificial Sequence
  Synthetic
aaugaaaugauguaaaauag

SEQ ID NO: 161308 - RNA, 18 nt, Artificial Sequence
  Synthetic
aaaaaaaaaaagaaauag

SEQ ID NO: 161309 - RNA, 19 nt, Artificial Sequence
  Synthetic
aaaaaaaaaaaagaaauag

SEQ ID NO: 161310 - RNA, 20 nt, Artificial Sequence
  Synthetic
aaaaaaaaaaaaagaaauag

SEQ ID NO: 161311 - RNA, 21 nt, Artificial Sequence
  Synthetic
aaaaaaaaaaaaaagaaauag

SEQ ID NO: 161312 - RNA, 22 nt, Artificial Sequence
  Synthetic
aaaaaaaaaaaaaaagaaauag

SEQ ID NO: 161313 - RNA, 23 nt, Artificial Sequence
  Synthetic
aaaaaaaaaaaaaaaagaaauag

SEQ ID NO: 161314 - RNA, 24 nt, Artificial Sequence
  Synthetic
aaaaaaaaaaaaaaaaagaaauag

SEQ ID NO: 161315 - RNA, 18 nt, Artificial Sequence
  Synthetic
agcuggagagagaaauag

SEQ ID NO: 161316 - RNA, 18 nt, Artificial Sequence
  Synthetic
uauaccuuaaauaaauag

SEQ ID NO: 161317 - RNA, 19 nt, Artificial Sequence
  Synthetic
uuauaccuuaaauaaauag

SEQ ID NO: 161318 - RNA, 20 nt, Artificial Sequence
  Synthetic
uuuauaccuuaaauaaauag

SEQ ID NO: 161319 - RNA, 19 nt, Artificial Sequence
  Synthetic
uguuuuauuaauuaaauag

SEQ ID NO: 161320 - RNA, 20 nt, Artificial Sequence
  Synthetic
uuguuuuauuaauuaaauag

SEQ ID NO: 161321 - RNA, 18 nt, Artificial Sequence
  Synthetic
acuuucaugcuacaauag

SEQ ID NO: 161322 - RNA, 19 nt, Artificial Sequence
  Synthetic
uacuuucaugcuacaauag

SEQ ID NO: 161323 - RNA, 20 nt, Artificial Sequence
  Synthetic
uuacuuucaugcuacaauag

SEQ ID NO: 161324 - RNA, 23 nt, Artificial Sequence
  Synthetic
ugguuacuuucaugcuacaauag

SEQ ID NO: 161325 - RNA, 24 nt, Artificial Sequence
  Synthetic
augguuacuuucaugcuacaauag

SEQ ID NO: 161326 - RNA, 18 nt, Artificial Sequence
  Synthetic
ugaggggaaggagaauag

SEQ ID NO: 161327 - RNA, 20 nt, Artificial Sequence
  Synthetic
ugugaggggaaggagaauag

SEQ ID NO: 161328 - RNA, 18 nt, Artificial Sequence
  Synthetic
uccuuugcagggacauag

SEQ ID NO: 161329 - RNA, 20 nt, Artificial Sequence
  Synthetic
uguccuuugcagggacauag

SEQ ID NO: 161330 - RNA, 21 nt, Artificial Sequence
  Synthetic
auguccuuugcagggacauag

SEQ ID NO: 161331 - RNA, 22 nt, Artificial Sequence
  Synthetic
cauguccuuugcagggacauag

SEQ ID NO: 161332 - RNA, 23 nt, Artificial Sequence
  Synthetic
ucauguccuuugcagggacauag

SEQ ID NO: 161333 - RNA, 24 nt, Artificial Sequence
  Synthetic
aucauguccuuugcagggacauag

SEQ ID NO: 161334 - RNA, 18 nt, Artificial Sequence
  Synthetic
agaaagagggauggauag

SEQ ID NO: 161335 - RNA, 19 nt, Artificial Sequence
  Synthetic
cagaaagagggauggauag

SEQ ID NO: 161336 - RNA, 20 nt, Artificial Sequence
  Synthetic
acagaaagagggauggauag

SEQ ID NO: 161337 - RNA, 18 nt, Artificial Sequence
  Synthetic
augcuguucucaugauag

SEQ ID NO: 161338 - RNA, 19 nt, Artificial Sequence
  Synthetic
caugcuguucucaugauag

SEQ ID NO: 161339 - RNA, 20 nt, Artificial Sequence
  Synthetic
ccaugcuguucucaugauag

SEQ ID NO: 161340 - RNA, 21 nt, Artificial Sequence
  Synthetic
cccaugcuguucucaugauag

SEQ ID NO: 161341 - RNA, 22 nt, Artificial Sequence
  Synthetic
ucccaugcuguucucaugauag

SEQ ID NO: 161342 - RNA, 23 nt, Artificial Sequence
  Synthetic
cucccaugcuguucucaugauag

SEQ ID NO: 161343 - RNA, 24 nt, Artificial Sequence
  Synthetic
ucucccaugcuguucucaugauag

SEQ ID NO: 161344 - RNA, 18 nt, Artificial Sequence
  Synthetic
cugcuaaugcugcuauag

SEQ ID NO: 161345 - RNA, 18 nt, Artificial Sequence
  Synthetic
aagaaaaauuuaguauag

SEQ ID NO: 161346 - RNA, 19 nt, Artificial Sequence
  Synthetic
aaagaaaaauuuaguauag

SEQ ID NO: 161347 - RNA, 20 nt, Artificial Sequence
  Synthetic
aaaagaaaaauuuaguauag

SEQ ID NO: 161348 - RNA, 21 nt, Artificial Sequence
  Synthetic
ccauacaaccuagauguauag

SEQ ID NO: 161349 - RNA, 22 nt, Artificial Sequence
  Synthetic
accauacaaccuagauguauag

SEQ ID NO: 161350 - RNA, 23 nt, Artificial Sequence
  Synthetic
uaccauacaaccuagauguauag

SEQ ID NO: 161351 - RNA, 24 nt, Artificial Sequence
  Synthetic
auaccauacaaccuagauguauag

SEQ ID NO: 161352 - RNA, 19 nt, Artificial Sequence
  Synthetic
agaugaaauaaacuuauag

SEQ ID NO: 161353 - RNA, 20 nt, Artificial Sequence
  Synthetic
cagaugaaauaaacuuauag

SEQ ID NO: 161354 - RNA, 19 nt, Artificial Sequence
  Synthetic
ugugcaugugucuuuauag

SEQ ID NO: 161355 - RNA, 20 nt, Artificial Sequence
  Synthetic
augugcaugugucuuuauag

SEQ ID NO: 161356 - RNA, 21 nt, Artificial Sequence
  Synthetic
caugugcaugugucuuuauag

SEQ ID NO: 161357 - RNA, 22 nt, Artificial Sequence
  Synthetic
acaugugcaugugucuuuauag

SEQ ID NO: 161358 - RNA, 23 nt, Artificial Sequence
  Synthetic
uacaugugcaugugucuuuauag

SEQ ID NO: 161359 - RNA, 24 nt, Artificial Sequence
  Synthetic
auacaugugcaugugucuuuauag

SEQ ID NO: 161360 - RNA, 21 nt, Artificial Sequence
  Synthetic
uaaguaguacauuaaaacuag

SEQ ID NO: 161361 - RNA, 22 nt, Artificial Sequence
  Synthetic
auaaguaguacauuaaaacuag

SEQ ID NO: 161362 - RNA, 23 nt, Artificial Sequence
  Synthetic
uauaaguaguacauuaaaacuag

SEQ ID NO: 161363 - RNA, 24 nt, Artificial Sequence
  Synthetic
uuauaaguaguacauuaaaacuag

SEQ ID NO: 161364 - RNA, 18 nt, Artificial Sequence
  Synthetic
caaaccaucagaaacuag

SEQ ID NO: 161365 - RNA, 19 nt, Artificial Sequence
  Synthetic
acaaaccaucagaaacuag

SEQ ID NO: 161366 - RNA, 20 nt, Artificial Sequence
  Synthetic
aacaaaccaucagaaacuag

SEQ ID NO: 161367 - RNA, 21 nt, Artificial Sequence
  Synthetic
caacaaaccaucagaaacuag

SEQ ID NO: 161368 - RNA, 22 nt, Artificial Sequence
  Synthetic
ccaacaaaccaucagaaacuag

SEQ ID NO: 161369 - RNA, 24 nt, Artificial Sequence
  Synthetic
ugccaacaaaccaucagaaacuag

SEQ ID NO: 161370 - RNA, 18 nt, Artificial Sequence
  Synthetic
aaaugcuuccacaacuag

SEQ ID NO: 161371 - RNA, 19 nt, Artificial Sequence
  Synthetic
aaaaugcuuccacaacuag

SEQ ID NO: 161372 - RNA, 23 nt, Artificial Sequence
  Synthetic
agggaaaaugcuuccacaacuag

SEQ ID NO: 161373 - RNA, 24 nt, Artificial Sequence
  Synthetic
cagggaaaaugcuuccacaacuag

SEQ ID NO: 161374 - RNA, 18 nt, Artificial Sequence
  Synthetic
uucuaugaauuuuccuag

SEQ ID NO: 161375 - RNA, 19 nt, Artificial Sequence
  Synthetic
cuucuaugaauuuuccuag

SEQ ID NO: 161376 - RNA, 20 nt, Artificial Sequence
  Synthetic
acuucuaugaauuuuccuag

SEQ ID NO: 161377 - RNA, 18 nt, Artificial Sequence
  Synthetic
ugagaagcacugcucuag

SEQ ID NO: 161378 - RNA, 19 nt, Artificial Sequence
  Synthetic
uugagaagcacugcucuag

SEQ ID NO: 161379 - RNA, 20 nt, Artificial Sequence
  Synthetic
uuugagaagcacugcucuag

SEQ ID NO: 161380 - RNA, 21 nt, Artificial Sequence
  Synthetic
uuuugagaagcacugcucuag

SEQ ID NO: 161381 - RNA, 22 nt, Artificial Sequence
  Synthetic
cuuuugagaagcacugcucuag

SEQ ID NO: 161382 - RNA, 23 nt, Artificial Sequence
  Synthetic
acuuuugagaagcacugcucuag

SEQ ID NO: 161383 - RNA, 24 nt, Artificial Sequence
  Synthetic
aacuuuugagaagcacugcucuag

SEQ ID NO: 161384 - RNA, 18 nt, Artificial Sequence
  Synthetic
agaaaauacaaaaaguag

SEQ ID NO: 161385 - RNA, 19 nt, Artificial Sequence
  Synthetic
cagaaaauacaaaaaguag

SEQ ID NO: 161386 - RNA, 20 nt, Artificial Sequence
  Synthetic
acagaaaauacaaaaaguag

SEQ ID NO: 161387 - RNA, 21 nt, Artificial Sequence
  Synthetic
uacagaaaauacaaaaaguag

SEQ ID NO: 161388 - RNA, 22 nt, Artificial Sequence
  Synthetic
cuacagaaaauacaaaaaguag

SEQ ID NO: 161389 - RNA, 23 nt, Artificial Sequence
  Synthetic
ucuacagaaaauacaaaaaguag

SEQ ID NO: 161390 - RNA, 24 nt, Artificial Sequence
  Synthetic
uucuacagaaaauacaaaaaguag

SEQ ID NO: 161391 - RNA, 18 nt, Artificial Sequence
  Synthetic
uuugggaggccgaaguag

SEQ ID NO: 161392 - RNA, 19 nt, Artificial Sequence
  Synthetic
cuuugggaggccgaaguag

SEQ ID NO: 161393 - RNA, 20 nt, Artificial Sequence
  Synthetic
acuuugggaggccgaaguag

SEQ ID NO: 161394 - RNA, 21 nt, Artificial Sequence
  Synthetic
cacuuugggaggccgaaguag

SEQ ID NO: 161395 - RNA, 23 nt, Artificial Sequence
  Synthetic
agcacuuugggaggccgaaguag

SEQ ID NO: 161396 - RNA, 24 nt, Artificial Sequence
  Synthetic
uagcacuuugggaggccgaaguag

SEQ ID NO: 161397 - RNA, 18 nt, Artificial Sequence
  Synthetic
uggauaaaugcccaguag

SEQ ID NO: 161398 - RNA, 19 nt, Artificial Sequence
  Synthetic
uuggauaaaugcccaguag

SEQ ID NO: 161399 - RNA, 20 nt, Artificial Sequence
  Synthetic
uuuggauaaaugcccaguag

SEQ ID NO: 161400 - RNA, 21 nt, Artificial Sequence
  Synthetic
cuuuggauaaaugcccaguag

SEQ ID NO: 161401 - RNA, 22 nt, Artificial Sequence
  Synthetic
ucuuuggauaaaugcccaguag

SEQ ID NO: 161402 - RNA, 23 nt, Artificial Sequence
  Synthetic
uucuuuggauaaaugcccaguag

SEQ ID NO: 161403 - RNA, 24 nt, Artificial Sequence
  Synthetic
uuucuuuggauaaaugcccaguag

SEQ ID NO: 161404 - RNA, 18 nt, Artificial Sequence
  Synthetic
cuaaguguccaucaguag

SEQ ID NO: 161405 - RNA, 19 nt, Artificial Sequence
  Synthetic
ccuaaguguccaucaguag

SEQ ID NO: 161406 - RNA, 20 nt, Artificial Sequence
  Synthetic
accuaaguguccaucaguag

SEQ ID NO: 161407 - RNA, 21 nt, Artificial Sequence
  Synthetic
aaccuaaguguccaucaguag

SEQ ID NO: 161408 - RNA, 22 nt, Artificial Sequence
  Synthetic
caaccuaaguguccaucaguag

SEQ ID NO: 161409 - RNA, 24 nt, Artificial Sequence
  Synthetic
agcaaccuaaguguccaucaguag

SEQ ID NO: 161410 - RNA, 18 nt, Artificial Sequence
  Synthetic
cauggacauagagaguag

SEQ ID NO: 161411 - RNA, 19 nt, Artificial Sequence
  Synthetic
ucauggacauagagaguag

SEQ ID NO: 161412 - RNA, 20 nt, Artificial Sequence
  Synthetic
cucauggacauagagaguag

SEQ ID NO: 161413 - RNA, 21 nt, Artificial Sequence
  Synthetic
acucauggacauagagaguag

SEQ ID NO: 161414 - RNA, 22 nt, Artificial Sequence
  Synthetic
aacucauggacauagagaguag

SEQ ID NO: 161415 - RNA, 24 nt, Artificial Sequence
  Synthetic
ugaacucauggacauagagaguag

SEQ ID NO: 161416 - RNA, 18 nt, Artificial Sequence
  Synthetic
cauacuacaacagcguag

SEQ ID NO: 161417 - RNA, 19 nt, Artificial Sequence
  Synthetic
ucauacuacaacagcguag

SEQ ID NO: 161418 - RNA, 20 nt, Artificial Sequence
  Synthetic
uucauacuacaacagcguag

SEQ ID NO: 161419 - RNA, 21 nt, Artificial Sequence
  Synthetic
uuucauacuacaacagcguag

SEQ ID NO: 161420 - RNA, 22 nt, Artificial Sequence
  Synthetic
cuuucauacuacaacagcguag

SEQ ID NO: 161421 - RNA, 24 nt, Artificial Sequence
  Synthetic
ugcuuucauacuacaacagcguag

SEQ ID NO: 161422 - RNA, 18 nt, Artificial Sequence
  Synthetic
cuugggaggcuaagguag

SEQ ID NO: 161423 - RNA, 19 nt, Artificial Sequence
  Synthetic
acuugggaggcuaagguag

SEQ ID NO: 161424 - RNA, 20 nt, Artificial Sequence
  Synthetic
uacuugggaggcuaagguag

SEQ ID NO: 161425 - RNA, 21 nt, Artificial Sequence
  Synthetic
cuacuugggaggcuaagguag

SEQ ID NO: 161426 - RNA, 23 nt, Artificial Sequence
  Synthetic
agcuacuugggaggcuaagguag

SEQ ID NO: 161427 - RNA, 24 nt, Artificial Sequence
  Synthetic
cagcuacuugggaggcuaagguag

SEQ ID NO: 161428 - RNA, 18 nt, Artificial Sequence
  Synthetic
uuugggaggccgagguag

SEQ ID NO: 161429 - RNA, 19 nt, Artificial Sequence
  Synthetic
cuuugggaggccgagguag

SEQ ID NO: 161430 - RNA, 20 nt, Artificial Sequence
  Synthetic
acuuugggaggccgagguag

SEQ ID NO: 161431 - RNA, 21 nt, Artificial Sequence
  Synthetic
cacuuugggaggccgagguag

SEQ ID NO: 161432 - RNA, 23 nt, Artificial Sequence
  Synthetic
agcacuuugggaggccgagguag

SEQ ID NO: 161433 - RNA, 24 nt, Artificial Sequence
  Synthetic
cagcacuuugggaggccgagguag

SEQ ID NO: 161434 - RNA, 18 nt, Artificial Sequence
  Synthetic
cccaggaagcugagguag

SEQ ID NO: 161435 - RNA, 19 nt, Artificial Sequence
  Synthetic
acccaggaagcugagguag

SEQ ID NO: 161436 - RNA, 20 nt, Artificial Sequence
  Synthetic
uacccaggaagcugagguag

SEQ ID NO: 161437 - RNA, 21 nt, Artificial Sequence
  Synthetic
cuacccaggaagcugagguag

SEQ ID NO: 161438 - RNA, 23 nt, Artificial Sequence
  Synthetic
agcuacccaggaagcugagguag

SEQ ID NO: 161439 - RNA, 24 nt, Artificial Sequence
  Synthetic
cagcuacccaggaagcugagguag

SEQ ID NO: 161440 - RNA, 21 nt, Artificial Sequence
  Synthetic
cuacucgggaggcugagguag

SEQ ID NO: 161441 - RNA, 23 nt, Artificial Sequence
  Synthetic
agcuacucgggaggcugagguag

SEQ ID NO: 161442 - RNA, 24 nt, Artificial Sequence
  Synthetic
cagcuacucgggaggcugagguag

SEQ ID NO: 161443 - RNA, 19 nt, Artificial Sequence
  Synthetic
agggguggggguaggguag

SEQ ID NO: 161444 - RNA, 19 nt, Artificial Sequence
  Synthetic
ugaguggauggauggguag

SEQ ID NO: 161445 - RNA, 20 nt, Artificial Sequence
  Synthetic
cugaguggauggauggguag

SEQ ID NO: 161446 - RNA, 18 nt, Artificial Sequence
  Synthetic
cuuaugggcagcauguag

SEQ ID NO: 161447 - RNA, 19 nt, Artificial Sequence
  Synthetic
ucuuaugggcagcauguag

SEQ ID NO: 161448 - RNA, 20 nt, Artificial Sequence
  Synthetic
cucuuaugggcagcauguag

SEQ ID NO: 161449 - RNA, 21 nt, Artificial Sequence
  Synthetic
ucucuuaugggcagcauguag

SEQ ID NO: 161450 - RNA, 23 nt, Artificial Sequence
  Synthetic
agucucuuaugggcagcauguag

SEQ ID NO: 161451 - RNA, 18 nt, Artificial Sequence
  Synthetic
aaaaauaaaaaaaauuag

SEQ ID NO: 161452 - RNA, 19 nt, Artificial Sequence
  Synthetic
uaaaaauaaaaaaaauuag

SEQ ID NO: 161453 - RNA, 20 nt, Artificial Sequence
  Synthetic
cuaaaaauaaaaaaaauuag

SEQ ID NO: 161454 - RNA, 21 nt, Artificial Sequence
  Synthetic
acuaaaaauaaaaaaaauuag

SEQ ID NO: 161455 - RNA, 22 nt, Artificial Sequence
  Synthetic
uacuaaaaauaaaaaaaauuag

SEQ ID NO: 161456 - RNA, 23 nt, Artificial Sequence
  Synthetic
cuacuaaaaauaaaaaaaauuag

SEQ ID NO: 161457 - RNA, 24 nt, Artificial Sequence
  Synthetic
ucuacuaaaaauaaaaaaaauuag

SEQ ID NO: 161458 - RNA, 18 nt, Artificial Sequence
  Synthetic
uaaaaauauaaaaauuag

SEQ ID NO: 161459 - RNA, 19 nt, Artificial Sequence
  Synthetic
cuaaaaauauaaaaauuag

SEQ ID NO: 161460 - RNA, 20 nt, Artificial Sequence
  Synthetic
acuaaaaauauaaaaauuag

SEQ ID NO: 161461 - RNA, 21 nt, Artificial Sequence
  Synthetic
uacuaaaaauauaaaaauuag

SEQ ID NO: 161462 - RNA, 22 nt, Artificial Sequence
  Synthetic
cuacuaaaaauauaaaaauuag

SEQ ID NO: 161463 - RNA, 23 nt, Artificial Sequence
  Synthetic
ucuacuaaaaauauaaaaauuag

SEQ ID NO: 161464 - RNA, 24 nt, Artificial Sequence
  Synthetic
cucuacuaaaaauauaaaaauuag

SEQ ID NO: 161465 - RNA, 18 nt, Artificial Sequence
  Synthetic
aaauuuaaaaauaauuag

SEQ ID NO: 161466 - RNA, 19 nt, Artificial Sequence
  Synthetic
aaaauuuaaaaauaauuag

SEQ ID NO: 161467 - RNA, 20 nt, Artificial Sequence
  Synthetic
uaaaauuuaaaaauaauuag

SEQ ID NO: 161468 - RNA, 18 nt, Artificial Sequence
  Synthetic
auuaucacuggucauuag

SEQ ID NO: 161469 - RNA, 19 nt, Artificial Sequence
  Synthetic
cauuaucacuggucauuag

SEQ ID NO: 161470 - RNA, 20 nt, Artificial Sequence
  Synthetic
ucauuaucacuggucauuag

SEQ ID NO: 161471 - RNA, 21 nt, Artificial Sequence
  Synthetic
cucauuaucacuggucauuag

SEQ ID NO: 161472 - RNA, 23 nt, Artificial Sequence
  Synthetic
agcucauuaucacuggucauuag

SEQ ID NO: 161473 - RNA, 24 nt, Artificial Sequence
  Synthetic
aagcucauuaucacuggucauuag

SEQ ID NO: 161474 - RNA, 18 nt, Artificial Sequence
  Synthetic
uuaaaaaguuaugauuag

SEQ ID NO: 161475 - RNA, 19 nt, Artificial Sequence
  Synthetic
uuuaaaaaguuaugauuag

SEQ ID NO: 161476 - RNA, 20 nt, Artificial Sequence
  Synthetic
uuuuaaaaaguuaugauuag

SEQ ID NO: 161477 - RNA, 21 nt, Artificial Sequence
  Synthetic
agcaacagcaaauggacuuag

SEQ ID NO: 161478 - RNA, 22 nt, Artificial Sequence
  Synthetic
aagcaacagcaaauggacuuag

SEQ ID NO: 161479 - RNA, 23 nt, Artificial Sequence
  Synthetic
caagcaacagcaaauggacuuag

SEQ ID NO: 161480 - RNA, 24 nt, Artificial Sequence
  Synthetic
acaagcaacagcaaauggacuuag

SEQ ID NO: 161481 - RNA, 18 nt, Artificial Sequence
  Synthetic
aaucugagaguggcuuag

SEQ ID NO: 161482 - RNA, 20 nt, Artificial Sequence
  Synthetic
agaaucugagaguggcuuag

SEQ ID NO: 161483 - RNA, 21 nt, Artificial Sequence
  Synthetic
aagaaucugagaguggcuuag

SEQ ID NO: 161484 - RNA, 22 nt, Artificial Sequence
  Synthetic
caagaaucugagaguggcuuag

SEQ ID NO: 161485 - RNA, 23 nt, Artificial Sequence
  Synthetic
ucaagaaucugagaguggcuuag

SEQ ID NO: 161486 - RNA, 19 nt, Artificial Sequence
  Synthetic
agaaaagaaaacguguuag

SEQ ID NO: 161487 - RNA, 20 nt, Artificial Sequence
  Synthetic
aagaaaagaaaacguguuag

SEQ ID NO: 161488 - RNA, 18 nt, Artificial Sequence
  Synthetic
aaaaauuaagauuguuag

SEQ ID NO: 161489 - RNA, 19 nt, Artificial Sequence
  Synthetic
aaaaaauuaagauuguuag

SEQ ID NO: 161490 - RNA, 20 nt, Artificial Sequence
  Synthetic
aaaaaaauuaagauuguuag

SEQ ID NO: 161491 - RNA, 18 nt, Artificial Sequence
  Synthetic
acuuugaaaaaaauuuag

SEQ ID NO: 161492 - RNA, 19 nt, Artificial Sequence
  Synthetic
aacuuugaaaaaaauuuag

SEQ ID NO: 161493 - RNA, 20 nt, Artificial Sequence
  Synthetic
aaacuuugaaaaaaauuuag

SEQ ID NO: 161494 - RNA, 21 nt, Artificial Sequence
  Synthetic
aaaacuuugaaaaaaauuuag

SEQ ID NO: 161495 - RNA, 22 nt, Artificial Sequence
  Synthetic
aaaaacuuugaaaaaaauuuag

SEQ ID NO: 161496 - RNA, 24 nt, Artificial Sequence
  Synthetic
ugaaaaacuuugaaaaaaauuuag

SEQ ID NO: 161497 - RNA, 18 nt, Artificial Sequence
  Synthetic
ccagagauucugauuuag

SEQ ID NO: 161498 - RNA, 19 nt, Artificial Sequence
  Synthetic
cccagagauucugauuuag

SEQ ID NO: 161499 - RNA, 20 nt, Artificial Sequence
  Synthetic
ccccagagauucugauuuag

SEQ ID NO: 161500 - RNA, 21 nt, Artificial Sequence
  Synthetic
uccccagagauucugauuuag

SEQ ID NO: 161501 - RNA, 22 nt, Artificial Sequence
  Synthetic
auccccagagauucugauuuag

SEQ ID NO: 161502 - RNA, 23 nt, Artificial Sequence
  Synthetic
cauccccagagauucugauuuag

SEQ ID NO: 161503 - RNA, 24 nt, Artificial Sequence
  Synthetic
ccauccccagagauucugauuuag

SEQ ID NO: 161504 - RNA, 18 nt, Artificial Sequence
  Synthetic
cagacaauggacuuuuag

SEQ ID NO: 161505 - RNA, 19 nt, Artificial Sequence
  Synthetic
acagacaauggacuuuuag

SEQ ID NO: 161506 - RNA, 20 nt, Artificial Sequence
  Synthetic
cacagacaauggacuuuuag

SEQ ID NO: 161507 - RNA, 18 nt, Artificial Sequence
  Synthetic
uucuauuaauuaaaaacg

SEQ ID NO: 161508 - RNA, 19 nt, Artificial Sequence
  Synthetic
uuucuauuaauuaaaaacg

SEQ ID NO: 161509 - RNA, 20 nt, Artificial Sequence
  Synthetic
uuuucuauuaauuaaaaacg

SEQ ID NO: 161510 - RNA, 21 nt, Artificial Sequence
  Synthetic
caaauggcuagaaggagaacg

SEQ ID NO: 161511 - RNA, 22 nt, Artificial Sequence
  Synthetic
ucaaauggcuagaaggagaacg

SEQ ID NO: 161512 - RNA, 23 nt, Artificial Sequence
  Synthetic
uucaaauggcuagaaggagaacg

SEQ ID NO: 161513 - RNA, 24 nt, Artificial Sequence
  Synthetic
uuucaaauggcuagaaggagaacg

SEQ ID NO: 161514 - RNA, 18 nt, Artificial Sequence
  Synthetic
aagggaauuugccucacg

SEQ ID NO: 161515 - RNA, 21 nt, Artificial Sequence
  Synthetic
uggaagggaauuugccucacg

SEQ ID NO: 161516 - RNA, 22 nt, Artificial Sequence
  Synthetic
auggaagggaauuugccucacg

SEQ ID NO: 161517 - RNA, 24 nt, Artificial Sequence
  Synthetic
agauggaagggaauuugccucacg

SEQ ID NO: 161518 - RNA, 18 nt, Artificial Sequence
  Synthetic
accauguacuaugucacg

SEQ ID NO: 161519 - RNA, 19 nt, Artificial Sequence
  Synthetic
uaccauguacuaugucacg

SEQ ID NO: 161520 - RNA, 20 nt, Artificial Sequence
  Synthetic
uuaccauguacuaugucacg

SEQ ID NO: 161521 - RNA, 18 nt, Artificial Sequence
  Synthetic
ugacuaggaaaacauacg

SEQ ID NO: 161522 - RNA, 19 nt, Artificial Sequence
  Synthetic
uugacuaggaaaacauacg

SEQ ID NO: 161523 - RNA, 20 nt, Artificial Sequence
  Synthetic
cuugacuaggaaaacauacg

SEQ ID NO: 161524 - RNA, 18 nt, Artificial Sequence
  Synthetic
aggugccuggcgugcccg

SEQ ID NO: 161525 - RNA, 19 nt, Artificial Sequence
  Synthetic
aaggugccuggcgugcccg

SEQ ID NO: 161526 - RNA, 20 nt, Artificial Sequence
  Synthetic
aaaggugccuggcgugcccg

SEQ ID NO: 161527 - RNA, 18 nt, Artificial Sequence
  Synthetic
agccaccgcgcccggccg

SEQ ID NO: 161528 - RNA, 20 nt, Artificial Sequence
  Synthetic
ugagccaccgcgcccggccg

SEQ ID NO: 161529 - RNA, 22 nt, Artificial Sequence
  Synthetic
cgugagccaccgcgcccggccg

SEQ ID NO: 161530 - RNA, 18 nt, Artificial Sequence
  Synthetic
ucagccaugaaccuagcg

SEQ ID NO: 161531 - RNA, 19 nt, Artificial Sequence
  Synthetic
cucagccaugaaccuagcg

SEQ ID NO: 161532 - RNA, 20 nt, Artificial Sequence
  Synthetic
ccucagccaugaaccuagcg

SEQ ID NO: 161533 - RNA, 22 nt, Artificial Sequence
  Synthetic
ugccucagccaugaaccuagcg

SEQ ID NO: 161534 - RNA, 18 nt, Artificial Sequence
  Synthetic
auggggucucggaaggcg

SEQ ID NO: 161535 - RNA, 19 nt, Artificial Sequence
  Synthetic
aauggggucucggaaggcg

SEQ ID NO: 161536 - RNA, 20 nt, Artificial Sequence
  Synthetic
aaauggggucucggaaggcg

SEQ ID NO: 161537 - RNA, 19 nt, Artificial Sequence
  Synthetic
agagggugggaugggggcg

SEQ ID NO: 161538 - RNA, 21 nt, Artificial Sequence
  Synthetic
aaccccaucaaaaagugggcg

SEQ ID NO: 161539 - RNA, 22 nt, Artificial Sequence
  Synthetic
caaccccaucaaaaagugggcg

SEQ ID NO: 161540 - RNA, 23 nt, Artificial Sequence
  Synthetic
acaaccccaucaaaaagugggcg

SEQ ID NO: 161541 - RNA, 24 nt, Artificial Sequence
  Synthetic
aacaaccccaucaaaaagugggcg

SEQ ID NO: 161542 - RNA, 18 nt, Artificial Sequence
  Synthetic
ccucacaaaagcucugcg

SEQ ID NO: 161543 - RNA, 19 nt, Artificial Sequence
  Synthetic
uccucacaaaagcucugcg

SEQ ID NO: 161544 - RNA, 20 nt, Artificial Sequence
  Synthetic
auccucacaaaagcucugcg

SEQ ID NO: 161545 - RNA, 19 nt, Artificial Sequence
  Synthetic
uguuauaauguugguugcg

SEQ ID NO: 161546 - RNA, 20 nt, Artificial Sequence
  Synthetic
uuguuauaauguugguugcg

SEQ ID NO: 161547 - RNA, 21 nt, Artificial Sequence
  Synthetic
uuuguuauaauguugguugcg

SEQ ID NO: 161548 - RNA, 22 nt, Artificial Sequence
  Synthetic
uuuuguuauaauguugguugcg

SEQ ID NO: 161549 - RNA, 23 nt, Artificial Sequence
  Synthetic
uuuuuguuauaauguugguugcg

SEQ ID NO: 161550 - RNA, 24 nt, Artificial Sequence
  Synthetic
uuuuuuguuauaauguugguugcg

SEQ ID NO: 161551 - RNA, 21 nt, Artificial Sequence
  Synthetic
aucacacaccggggccugucg

SEQ ID NO: 161552 - RNA, 22 nt, Artificial Sequence
  Synthetic
caucacacaccggggccugucg

SEQ ID NO: 161553 - RNA, 23 nt, Artificial Sequence
  Synthetic
acaucacacaccggggccugucg

SEQ ID NO: 161554 - RNA, 24 nt, Artificial Sequence
  Synthetic
aacaucacacaccggggccugucg

SEQ ID NO: 161555 - RNA, 18 nt, Artificial Sequence
  Synthetic
acacacuggggccugucg

SEQ ID NO: 161556 - RNA, 19 nt, Artificial Sequence
  Synthetic
cacacacuggggccugucg

SEQ ID NO: 161557 - RNA, 20 nt, Artificial Sequence
  Synthetic
ucacacacuggggccugucg

SEQ ID NO: 161558 - RNA, 21 nt, Artificial Sequence
  Synthetic
aucacacacuggggccugucg

SEQ ID NO: 161559 - RNA, 22 nt, Artificial Sequence
  Synthetic
caucacacacuggggccugucg

SEQ ID NO: 161560 - RNA, 23 nt, Artificial Sequence
  Synthetic
acaucacacacuggggccugucg

SEQ ID NO: 161561 - RNA, 24 nt, Artificial Sequence
  Synthetic
aacaucacacacuggggccugucg

SEQ ID NO: 161562 - RNA, 18 nt, Artificial Sequence
  Synthetic
acgcaaccauaaaaaagg

SEQ ID NO: 161563 - RNA, 19 nt, Artificial Sequence
  Synthetic
uacgcaaccauaaaaaagg

SEQ ID NO: 161564 - RNA, 20 nt, Artificial Sequence
  Synthetic
cuacgcaaccauaaaaaagg

SEQ ID NO: 161565 - RNA, 21 nt, Artificial Sequence
  Synthetic
acuacgcaaccauaaaaaagg

SEQ ID NO: 161566 - RNA, 22 nt, Artificial Sequence
  Synthetic
uacuacgcaaccauaaaaaagg

SEQ ID NO: 161567 - RNA, 23 nt, Artificial Sequence
  Synthetic
auacuacgcaaccauaaaaaagg

SEQ ID NO: 161568 - RNA, 24 nt, Artificial Sequence
  Synthetic
aauacuacgcaaccauaaaaaagg

SEQ ID NO: 161569 - RNA, 18 nt, Artificial Sequence
  Synthetic
augcaaccauaaaaaagg

SEQ ID NO: 161570 - RNA, 19 nt, Artificial Sequence
  Synthetic
uaugcaaccauaaaaaagg

SEQ ID NO: 161571 - RNA, 20 nt, Artificial Sequence
  Synthetic
cuaugcaaccauaaaaaagg

SEQ ID NO: 161572 - RNA, 21 nt, Artificial Sequence
  Synthetic
acuaugcaaccauaaaaaagg

SEQ ID NO: 161573 - RNA, 22 nt, Artificial Sequence
  Synthetic
uacuaugcaaccauaaaaaagg

SEQ ID NO: 161574 - RNA, 23 nt, Artificial Sequence
  Synthetic
auacuaugcaaccauaaaaaagg

SEQ ID NO: 161575 - RNA, 24 nt, Artificial Sequence
  Synthetic
aauacuaugcaaccauaaaaaagg

SEQ ID NO: 161576 - RNA, 21 nt, Artificial Sequence
  Synthetic
cagaaaaugggcucaaaaagg

SEQ ID NO: 161577 - RNA, 22 nt, Artificial Sequence
  Synthetic
ccagaaaaugggcucaaaaagg

SEQ ID NO: 161578 - RNA, 24 nt, Artificial Sequence
  Synthetic
ugccagaaaaugggcucaaaaagg

SEQ ID NO: 161579 - RNA, 18 nt, Artificial Sequence
  Synthetic
uuuuuucuaaauaaaagg

SEQ ID NO: 161580 - RNA, 19 nt, Artificial Sequence
  Synthetic
uuuuuuucuaaauaaaagg

SEQ ID NO: 161581 - RNA, 20 nt, Artificial Sequence
  Synthetic
cuuuuuuucuaaauaaaagg

SEQ ID NO: 161582 - RNA, 21 nt, Artificial Sequence
  Synthetic
ucuuuuuuucuaaauaaaagg

SEQ ID NO: 161583 - RNA, 22 nt, Artificial Sequence
  Synthetic
uucuuuuuuucuaaauaaaagg

SEQ ID NO: 161584 - RNA, 23 nt, Artificial Sequence
  Synthetic
auucuuuuuuucuaaauaaaagg

SEQ ID NO: 161585 - RNA, 24 nt, Artificial Sequence
  Synthetic
cauucuuuuuuucuaaauaaaagg

SEQ ID NO: 161586 - RNA, 18 nt, Artificial Sequence
  Synthetic
cuugaaagaaaagaaagg

SEQ ID NO: 161587 - RNA, 20 nt, Artificial Sequence
  Synthetic
ugcuugaaagaaaagaaagg

SEQ ID NO: 161588 - RNA, 20 nt, Artificial Sequence
  Synthetic
agggcagccagagagaaagg

SEQ ID NO: 161589 - RNA, 21 nt, Artificial Sequence
  Synthetic
aagggcagccagagagaaagg

SEQ ID NO: 161590 - RNA, 22 nt, Artificial Sequence
  Synthetic
uaagggcagccagagagaaagg

SEQ ID NO: 161591 - RNA, 23 nt, Artificial Sequence
  Synthetic
uuaagggcagccagagagaaagg

SEQ ID NO: 161592 - RNA, 18 nt, Artificial Sequence
  Synthetic
uccaugcuuauggaaagg

SEQ ID NO: 161593 - RNA, 19 nt, Artificial Sequence
  Synthetic
uuccaugcuuauggaaagg

SEQ ID NO: 161594 - RNA, 20 nt, Artificial Sequence
  Synthetic
auuccaugcuuauggaaagg

SEQ ID NO: 161595 - RNA, 21 nt, Artificial Sequence
  Synthetic
cauuccaugcuuauggaaagg

SEQ ID NO: 161596 - RNA, 22 nt, Artificial Sequence
  Synthetic
acauuccaugcuuauggaaagg

SEQ ID NO: 161597 - RNA, 23 nt, Artificial Sequence
  Synthetic
aacauuccaugcuuauggaaagg

SEQ ID NO: 161598 - RNA, 24 nt, Artificial Sequence
  Synthetic
aaacauuccaugcuuauggaaagg

SEQ ID NO: 161599 - RNA, 18 nt, Artificial Sequence
  Synthetic
uuuuuuuuuuuuccaagg

SEQ ID NO: 161600 - RNA, 19 nt, Artificial Sequence
  Synthetic
uuuuuuuuuuuuuccaagg

SEQ ID NO: 161601 - RNA, 20 nt, Artificial Sequence
  Synthetic
uuuuuuuuuuuuuuccaagg

SEQ ID NO: 161602 - RNA, 21 nt, Artificial Sequence
  Synthetic
uuuuuuuuuuuuuuuccaagg

SEQ ID NO: 161603 - RNA, 22 nt, Artificial Sequence
  Synthetic
uuuuuuuuuuuuuuuuccaagg

SEQ ID NO: 161604 - RNA, 23 nt, Artificial Sequence
  Synthetic
uuuuuuuuuuuuuuuuuccaagg

SEQ ID NO: 161605 - RNA, 24 nt, Artificial Sequence
  Synthetic
cuuuuuuuuuuuuuuuuuccaagg

SEQ ID NO: 161606 - RNA, 18 nt, Artificial Sequence
  Synthetic
uaagaaaaugaagcaagg

SEQ ID NO: 161607 - RNA, 19 nt, Artificial Sequence
  Synthetic
auaagaaaaugaagcaagg

SEQ ID NO: 161608 - RNA, 18 nt, Artificial Sequence
  Synthetic
caguaacgagcagcaagg

SEQ ID NO: 161609 - RNA, 19 nt, Artificial Sequence
  Synthetic
ccaguaacgagcagcaagg

SEQ ID NO: 161610 - RNA, 20 nt, Artificial Sequence
  Synthetic
accaguaacgagcagcaagg

SEQ ID NO: 161611 - RNA, 21 nt, Artificial Sequence
  Synthetic
uaccaguaacgagcagcaagg

SEQ ID NO: 161612 - RNA, 22 nt, Artificial Sequence
  Synthetic
auaccaguaacgagcagcaagg

SEQ ID NO: 161613 - RNA, 23 nt, Artificial Sequence
  Synthetic
cauaccaguaacgagcagcaagg

SEQ ID NO: 161614 - RNA, 24 nt, Artificial Sequence
  Synthetic
acauaccaguaacgagcagcaagg

SEQ ID NO: 161615 - RNA, 18 nt, Artificial Sequence
  Synthetic
aagcuggaagaggcaagg

SEQ ID NO: 161616 - RNA, 20 nt, Artificial Sequence
  Synthetic
agaagcuggaagaggcaagg

SEQ ID NO: 161617 - RNA, 21 nt, Artificial Sequence
  Synthetic
cagaagcuggaagaggcaagg

SEQ ID NO: 161618 - RNA, 22 nt, Artificial Sequence
  Synthetic
ccagaagcuggaagaggcaagg

SEQ ID NO: 161619 - RNA, 23 nt, Artificial Sequence
  Synthetic
accagaagcuggaagaggcaagg

SEQ ID NO: 161620 - RNA, 24 nt, Artificial Sequence
  Synthetic
uaccagaagcuggaagaggcaagg

SEQ ID NO: 161621 - RNA, 18 nt, Artificial Sequence
  Synthetic
ucaacagaagaaagaagg

SEQ ID NO: 161622 - RNA, 19 nt, Artificial Sequence
  Synthetic
uucaacagaagaaagaagg

SEQ ID NO: 161623 - RNA, 20 nt, Artificial Sequence
  Synthetic
auucaacagaagaaagaagg

SEQ ID NO: 161624 - RNA, 18 nt, Artificial Sequence
  Synthetic
ucagaagaaacaagaagg

SEQ ID NO: 161625 - RNA, 19 nt, Artificial Sequence
  Synthetic
cucagaagaaacaagaagg

SEQ ID NO: 161626 - RNA, 20 nt, Artificial Sequence
  Synthetic
ccucagaagaaacaagaagg

SEQ ID NO: 161627 - RNA, 21 nt, Artificial Sequence
  Synthetic
accucagaagaaacaagaagg

SEQ ID NO: 161628 - RNA, 22 nt, Artificial Sequence
  Synthetic
caccucagaagaaacaagaagg

SEQ ID NO: 161629 - RNA, 24 nt, Artificial Sequence
  Synthetic
ugcaccucagaagaaacaagaagg

SEQ ID NO: 161630 - RNA, 18 nt, Artificial Sequence
  Synthetic
agauaaaaagaaauaagg

SEQ ID NO: 161631 - RNA, 20 nt, Artificial Sequence
  Synthetic
agagauaaaaagaaauaagg

SEQ ID NO: 161632 - RNA, 20 nt, Artificial Sequence
  Synthetic
aggauauucuuuauuuaagg

SEQ ID NO: 161633 - RNA, 18 nt, Artificial Sequence
  Synthetic
aaaaaaaugagaaacagg

SEQ ID NO: 161634 - RNA, 19 nt, Artificial Sequence
  Synthetic
uaaaaaaaugagaaacagg

SEQ ID NO: 161635 - RNA, 18 nt, Artificial Sequence
  Synthetic
acauuaugaguacacagg

SEQ ID NO: 161636 - RNA, 19 nt, Artificial Sequence
  Synthetic
aacauuaugaguacacagg

SEQ ID NO: 161637 - RNA, 20 nt, Artificial Sequence
  Synthetic
aaacauuaugaguacacagg

SEQ ID NO: 161638 - RNA, 18 nt, Artificial Sequence
  Synthetic
caauuucaauuagacagg

SEQ ID NO: 161639 - RNA, 19 nt, Artificial Sequence
  Synthetic
acaauuucaauuagacagg

SEQ ID NO: 161640 - RNA, 20 nt, Artificial Sequence
  Synthetic
cacaauuucaauuagacagg

SEQ ID NO: 161641 - RNA, 21 nt, Artificial Sequence
  Synthetic
acacaauuucaauuagacagg

SEQ ID NO: 161642 - RNA, 22 nt, Artificial Sequence
  Synthetic
aacacaauuucaauuagacagg

SEQ ID NO: 161643 - RNA, 23 nt, Artificial Sequence
  Synthetic
aaacacaauuucaauuagacagg

SEQ ID NO: 161644 - RNA, 18 nt, Artificial Sequence
  Synthetic
aaguuccaguuagacagg

SEQ ID NO: 161645 - RNA, 19 nt, Artificial Sequence
  Synthetic
aaaguuccaguuagacagg

SEQ ID NO: 161646 - RNA, 20 nt, Artificial Sequence
  Synthetic
caaaguuccaguuagacagg

SEQ ID NO: 161647 - RNA, 21 nt, Artificial Sequence
  Synthetic
acaaaguuccaguuagacagg

SEQ ID NO: 161648 - RNA, 22 nt, Artificial Sequence
  Synthetic
uacaaaguuccaguuagacagg

SEQ ID NO: 161649 - RNA, 19 nt, Artificial Sequence
  Synthetic
aggauaaaugcuugacagg

SEQ ID NO: 161650 - RNA, 20 nt, Artificial Sequence
  Synthetic
aaggauaaaugcuugacagg

SEQ ID NO: 161651 - RNA, 21 nt, Artificial Sequence
  Synthetic
aaaggauaaaugcuugacagg

SEQ ID NO: 161652 - RNA, 22 nt, Artificial Sequence
  Synthetic
caaaggauaaaugcuugacagg

SEQ ID NO: 161653 - RNA, 23 nt, Artificial Sequence
  Synthetic
acaaaggauaaaugcuugacagg

SEQ ID NO: 161654 - RNA, 24 nt, Artificial Sequence
  Synthetic
cacaaaggauaaaugcuugacagg

SEQ ID NO: 161655 - RNA, 18 nt, Artificial Sequence
  Synthetic
caauuucaguuugacagg

SEQ ID NO: 161656 - RNA, 19 nt, Artificial Sequence
  Synthetic
acaauuucaguuugacagg

SEQ ID NO: 161657 - RNA, 20 nt, Artificial Sequence
  Synthetic
cacaauuucaguuugacagg

SEQ ID NO: 161658 - RNA, 21 nt, Artificial Sequence
  Synthetic
acacaauuucaguuugacagg

SEQ ID NO: 161659 - RNA, 22 nt, Artificial Sequence
  Synthetic
uacacaauuucaguuugacagg

SEQ ID NO: 161660 - RNA, 23 nt, Artificial Sequence
  Synthetic
auacacaauuucaguuugacagg

SEQ ID NO: 161661 - RNA, 18 nt, Artificial Sequence
  Synthetic
aaaaaaaaggacaccagg

SEQ ID NO: 161662 - RNA, 19 nt, Artificial Sequence
  Synthetic
aaaaaaaaaggacaccagg

SEQ ID NO: 161663 - RNA, 20 nt, Artificial Sequence
  Synthetic
aaaaaaaaaaggacaccagg

SEQ ID NO: 161664 - RNA, 18 nt, Artificial Sequence
  Synthetic
uauauuuauagagucagg

SEQ ID NO: 161665 - RNA, 19 nt, Artificial Sequence
  Synthetic
auauauuuauagagucagg

SEQ ID NO: 161666 - RNA, 20 nt, Artificial Sequence
  Synthetic
aauauauuuauagagucagg

SEQ ID NO: 161667 - RNA, 18 nt, Artificial Sequence
  Synthetic
uuaaaauuuauuaagagg

SEQ ID NO: 161668 - RNA, 19 nt, Artificial Sequence
  Synthetic
cuuaaaauuuauuaagagg

SEQ ID NO: 161669 - RNA, 20 nt, Artificial Sequence
  Synthetic
acuuaaaauuuauuaagagg

SEQ ID NO: 161670 - RNA, 21 nt, Artificial Sequence
  Synthetic
cacuuaaaauuuauuaagagg

SEQ ID NO: 161671 - RNA, 23 nt, Artificial Sequence
  Synthetic
ugcacuuaaaauuuauuaagagg

SEQ ID NO: 161672 - RNA, 19 nt, Artificial Sequence
  Synthetic
uguguauuuuuaguagagg

SEQ ID NO: 161673 - RNA, 21 nt, Artificial Sequence
  Synthetic
uguguguauuuuuaguagagg

SEQ ID NO: 161674 - RNA, 23 nt, Artificial Sequence
  Synthetic
uguguguguauuuuuaguagagg

SEQ ID NO: 161675 - RNA, 18 nt, Artificial Sequence
  Synthetic
aaagacuagagaaggagg

SEQ ID NO: 161676 - RNA, 20 nt, Artificial Sequence
  Synthetic
ugaaagacuagagaaggagg

SEQ ID NO: 161677 - RNA, 19 nt, Artificial Sequence
  Synthetic
aguagaugugggaaggagg

SEQ ID NO: 161678 - RNA, 20 nt, Artificial Sequence
  Synthetic
uaguagaugugggaaggagg

SEQ ID NO: 161679 - RNA, 21 nt, Artificial Sequence
  Synthetic
cuaguagaugugggaaggagg

SEQ ID NO: 161680 - RNA, 22 nt, Artificial Sequence
  Synthetic
acuaguagaugugggaaggagg

SEQ ID NO: 161681 - RNA, 22 nt, Artificial Sequence
  Synthetic
agggggaggggugugaaggagg

SEQ ID NO: 161682 - RNA, 23 nt, Artificial Sequence
  Synthetic
aagggggaggggugugaaggagg

SEQ ID NO: 161683 - RNA, 18 nt, Artificial Sequence
  Synthetic
ucacaggguggcaggagg

SEQ ID NO: 161684 - RNA, 19 nt, Artificial Sequence
  Synthetic
uucacaggguggcaggagg

SEQ ID NO: 161685 - RNA, 20 nt, Artificial Sequence
  Synthetic
cuucacaggguggcaggagg

SEQ ID NO: 161686 - RNA, 21 nt, Artificial Sequence
  Synthetic
ucuucacaggguggcaggagg

SEQ ID NO: 161687 - RNA, 22 nt, Artificial Sequence
  Synthetic
cucuucacaggguggcaggagg

SEQ ID NO: 161688 - RNA, 23 nt, Artificial Sequence
  Synthetic
ccucuucacaggguggcaggagg

SEQ ID NO: 161689 - RNA, 24 nt, Artificial Sequence
  Synthetic
accucuucacaggguggcaggagg

SEQ ID NO: 161690 - RNA, 18 nt, Artificial Sequence
  Synthetic
auaaaaugugggaggagg

SEQ ID NO: 161691 - RNA, 19 nt, Artificial Sequence
  Synthetic
cauaaaaugugggaggagg

SEQ ID NO: 161692 - RNA, 20 nt, Artificial Sequence
  Synthetic
acauaaaaugugggaggagg

SEQ ID NO: 161693 - RNA, 18 nt, Artificial Sequence
  Synthetic
uuugggaagcugaggagg

SEQ ID NO: 161694 - RNA, 19 nt, Artificial Sequence
  Synthetic
cuuugggaagcugaggagg

SEQ ID NO: 161695 - RNA, 21 nt, Artificial Sequence
  Synthetic
ugcuuugggaagcugaggagg

SEQ ID NO: 161696 - RNA, 23 nt, Artificial Sequence
  Synthetic
agugcuuugggaagcugaggagg

SEQ ID NO: 161697 - RNA, 24 nt, Artificial Sequence
  Synthetic
cagugcuuugggaagcugaggagg

SEQ ID NO: 161698 - RNA, 19 nt, Artificial Sequence
  Synthetic
agaacaagaaaguaggagg

SEQ ID NO: 161699 - RNA, 18 nt, Artificial Sequence
  Synthetic
uggugugaacuuaggagg

SEQ ID NO: 161700 - RNA, 19 nt, Artificial Sequence
  Synthetic
auggugugaacuuaggagg

SEQ ID NO: 161701 - RNA, 20 nt, Artificial Sequence
  Synthetic
aauggugugaacuuaggagg

SEQ ID NO: 161702 - RNA, 22 nt, Artificial Sequence
  Synthetic
agaauggugugaacuuaggagg

SEQ ID NO: 161703 - RNA, 18 nt, Artificial Sequence
  Synthetic
uagcuugaaucugggagg

SEQ ID NO: 161704 - RNA, 19 nt, Artificial Sequence
  Synthetic
auagcuugaaucugggagg

SEQ ID NO: 161705 - RNA, 20 nt, Artificial Sequence
  Synthetic
aauagcuugaaucugggagg

SEQ ID NO: 161706 - RNA, 22 nt, Artificial Sequence
  Synthetic
agaauagcuugaaucugggagg

SEQ ID NO: 161707 - RNA, 24 nt, Artificial Sequence
  Synthetic
agagaauagcuugaaucugggagg

SEQ ID NO: 161708 - RNA, 20 nt, Artificial Sequence
  Synthetic
ugggaggcugaggugggagg

SEQ ID NO: 161709 - RNA, 21 nt, Artificial Sequence
  Synthetic
uugggaggcugaggugggagg

SEQ ID NO: 161710 - RNA, 22 nt, Artificial Sequence
  Synthetic
cuugggaggcugaggugggagg

SEQ ID NO: 161711 - RNA, 23 nt, Artificial Sequence
  Synthetic
acuugggaggcugaggugggagg

SEQ ID NO: 161712 - RNA, 24 nt, Artificial Sequence
  Synthetic
cacuugggaggcugaggugggagg

SEQ ID NO: 161713 - RNA, 21 nt, Artificial Sequence
  Synthetic
uaaucccaacacuuugggagg

SEQ ID NO: 161714 - RNA, 22 nt, Artificial Sequence
  Synthetic
auaaucccaacacuuugggagg

SEQ ID NO: 161715 - RNA, 23 nt, Artificial Sequence
  Synthetic
uauaaucccaacacuuugggagg

SEQ ID NO: 161716 - RNA, 24 nt, Artificial Sequence
  Synthetic
cuauaaucccaacacuuugggagg

SEQ ID NO: 161717 - RNA, 18 nt, Artificial Sequence
  Synthetic
ucucagcacuuugggagg

SEQ ID NO: 161718 - RNA, 19 nt, Artificial Sequence
  Synthetic
aucucagcacuuugggagg

SEQ ID NO: 161719 - RNA, 20 nt, Artificial Sequence
  Synthetic
aaucucagcacuuugggagg

SEQ ID NO: 161720 - RNA, 21 nt, Artificial Sequence
  Synthetic
uaaucucagcacuuugggagg

SEQ ID NO: 161721 - RNA, 23 nt, Artificial Sequence
  Synthetic
uguaaucucagcacuuugggagg

SEQ ID NO: 161722 - RNA, 24 nt, Artificial Sequence
  Synthetic
cuguaaucucagcacuuugggagg

SEQ ID NO: 161723 - RNA, 18 nt, Artificial Sequence
  Synthetic
uggguggaucaccugagg

SEQ ID NO: 161724 - RNA, 20 nt, Artificial Sequence
  Synthetic
aguggguggaucaccugagg

SEQ ID NO: 161725 - RNA, 21 nt, Artificial Sequence
  Synthetic
aaguggguggaucaccugagg

SEQ ID NO: 161726 - RNA, 23 nt, Artificial Sequence
  Synthetic
agaaguggguggaucaccugagg

SEQ ID NO: 161727 - RNA, 24 nt, Artificial Sequence
  Synthetic
cagaaguggguggaucaccugagg

SEQ ID NO: 161728 - RNA, 18 nt, Artificial Sequence
  Synthetic
uacuuuuuuuucuugagg

SEQ ID NO: 161729 - RNA, 19 nt, Artificial Sequence
  Synthetic
cuacuuuuuuuucuugagg

SEQ ID NO: 161730 - RNA, 20 nt, Artificial Sequence
  Synthetic
acuacuuuuuuuucuugagg

SEQ ID NO: 161731 - RNA, 23 nt, Artificial Sequence
  Synthetic
aggacuacuuuuuuuucuugagg

SEQ ID NO: 161732 - RNA, 24 nt, Artificial Sequence
  Synthetic
aaggacuacuuuuuuuucuugagg

SEQ ID NO: 161733 - RNA, 18 nt, Artificial Sequence
  Synthetic
uuuuuuuuuuuuuugagg

SEQ ID NO: 161734 - RNA, 19 nt, Artificial Sequence
  Synthetic
uuuuuuuuuuuuuuugagg

SEQ ID NO: 161735 - RNA, 21 nt, Artificial Sequence
  Synthetic
uguuuuuuuuuuuuuuugagg

SEQ ID NO: 161736 - RNA, 22 nt, Artificial Sequence
  Synthetic
uuguuuuuuuuuuuuuuugagg

SEQ ID NO: 161737 - RNA, 23 nt, Artificial Sequence
  Synthetic
uuuguuuuuuuuuuuuuuugagg

SEQ ID NO: 161738 - RNA, 24 nt, Artificial Sequence
  Synthetic
uuuuguuuuuuuuuuuuuuugagg

SEQ ID NO: 161739 - RNA, 20 nt, Artificial Sequence
  Synthetic
uuuuuuuuuuuuuuuugagg

SEQ ID NO: 161740 - RNA, 21 nt, Artificial Sequence
  Synthetic
uuuuuuuuuuuuuuuuugagg

SEQ ID NO: 161741 - RNA, 22 nt, Artificial Sequence
  Synthetic
uuuuuuuuuuuuuuuuuugagg

SEQ ID NO: 161742 - RNA, 23 nt, Artificial Sequence
  Synthetic
uuuuuuuuuuuuuuuuuuugagg

SEQ ID NO: 161743 - RNA, 24 nt, Artificial Sequence
  Synthetic
uuuuuuuuuuuuuuuuuuuugagg

SEQ ID NO: 161744 - RNA, 18 nt, Artificial Sequence
  Synthetic
aagagaaaaagaaauagg

SEQ ID NO: 161745 - RNA, 21 nt, Artificial Sequence
  Synthetic
aggaagagaaaaagaaauagg

SEQ ID NO: 161746 - RNA, 22 nt, Artificial Sequence
  Synthetic
caggaagagaaaaagaaauagg

SEQ ID NO: 161747 - RNA, 23 nt, Artificial Sequence
  Synthetic
acaggaagagaaaaagaaauagg

SEQ ID NO: 161748 - RNA, 21 nt, Artificial Sequence
  Synthetic
cauuccaugcucauggauagg

SEQ ID NO: 161749 - RNA, 22 nt, Artificial Sequence
  Synthetic
acauuccaugcucauggauagg

SEQ ID NO: 161750 - RNA, 23 nt, Artificial Sequence
  Synthetic
aacauuccaugcucauggauagg

SEQ ID NO: 161751 - RNA, 18 nt, Artificial Sequence
  Synthetic
ccauuuaaaauuuauagg

SEQ ID NO: 161752 - RNA, 19 nt, Artificial Sequence
  Synthetic
accauuuaaaauuuauagg

SEQ ID NO: 161753 - RNA, 20 nt, Artificial Sequence
  Synthetic
caccauuuaaaauuuauagg

SEQ ID NO: 161754 - RNA, 19 nt, Artificial Sequence
  Synthetic
agaauuuaacuacucuagg

SEQ ID NO: 161755 - RNA, 20 nt, Artificial Sequence
  Synthetic
aagaauuuaacuacucuagg

SEQ ID NO: 161756 - RNA, 21 nt, Artificial Sequence
  Synthetic
uauuccaugcucauggguagg

SEQ ID NO: 161757 - RNA, 22 nt, Artificial Sequence
  Synthetic
auauuccaugcucauggguagg

SEQ ID NO: 161758 - RNA, 23 nt, Artificial Sequence
  Synthetic
aauauuccaugcucauggguagg

SEQ ID NO: 161759 - RNA, 18 nt, Artificial Sequence
  Synthetic
uccgugcucauggguagg

SEQ ID NO: 161760 - RNA, 19 nt, Artificial Sequence
  Synthetic
uuccgugcucauggguagg

SEQ ID NO: 161761 - RNA, 20 nt, Artificial Sequence
  Synthetic
auuccgugcucauggguagg

SEQ ID NO: 161762 - RNA, 21 nt, Artificial Sequence
  Synthetic
cauuccgugcucauggguagg

SEQ ID NO: 161763 - RNA, 22 nt, Artificial Sequence
  Synthetic
acauuccgugcucauggguagg

SEQ ID NO: 161764 - RNA, 23 nt, Artificial Sequence
  Synthetic
aacauuccgugcucauggguagg

SEQ ID NO: 161765 - RNA, 19 nt, Artificial Sequence
  Synthetic
agaaguuauaaaaauuagg

SEQ ID NO: 161766 - RNA, 20 nt, Artificial Sequence
  Synthetic
aagaaguuauaaaaauuagg

SEQ ID NO: 161767 - RNA, 22 nt, Artificial Sequence
  Synthetic
uggccucauaaaaugaguuagg

SEQ ID NO: 161768 - RNA, 23 nt, Artificial Sequence
  Synthetic
cuggccucauaaaaugaguuagg

SEQ ID NO: 161769 - RNA, 18 nt, Artificial Sequence
  Synthetic
uucaugcucgugguuagg

SEQ ID NO: 161770 - RNA, 19 nt, Artificial Sequence
  Synthetic
uuucaugcucgugguuagg

SEQ ID NO: 161771 - RNA, 20 nt, Artificial Sequence
  Synthetic
auuucaugcucgugguuagg

SEQ ID NO: 161772 - RNA, 21 nt, Artificial Sequence
  Synthetic
cauuucaugcucgugguuagg

SEQ ID NO: 161773 - RNA, 22 nt, Artificial Sequence
  Synthetic
acauuucaugcucgugguuagg

SEQ ID NO: 161774 - RNA, 23 nt, Artificial Sequence
  Synthetic
aacauuucaugcucgugguuagg

SEQ ID NO: 161775 - RNA, 24 nt, Artificial Sequence
  Synthetic
aaacauuucaugcucgugguuagg

SEQ ID NO: 161776 - RNA, 18 nt, Artificial Sequence
  Synthetic
uuugggaggccgagacgg

SEQ ID NO: 161777 - RNA, 19 nt, Artificial Sequence
  Synthetic
cuuugggaggccgagacgg

SEQ ID NO: 161778 - RNA, 20 nt, Artificial Sequence
  Synthetic
acuuugggaggccgagacgg

SEQ ID NO: 161779 - RNA, 21 nt, Artificial Sequence
  Synthetic
cacuuugggaggccgagacgg

SEQ ID NO: 161780 - RNA, 23 nt, Artificial Sequence
  Synthetic
agcacuuugggaggccgagacgg

SEQ ID NO: 161781 - RNA, 24 nt, Artificial Sequence
  Synthetic
cagcacuuugggaggccgagacgg

SEQ ID NO: 161782 - RNA, 18 nt, Artificial Sequence
  Synthetic
uuucauuauuuucuacgg

SEQ ID NO: 161783 - RNA, 19 nt, Artificial Sequence
  Synthetic
auuucauuauuuucuacgg

SEQ ID NO: 161784 - RNA, 20 nt, Artificial Sequence
  Synthetic
uauuucauuauuuucuacgg

SEQ ID NO: 161785 - RNA, 21 nt, Artificial Sequence
  Synthetic
uuauuucauuauuuucuacgg

SEQ ID NO: 161786 - RNA, 22 nt, Artificial Sequence
  Synthetic
auuauuucauuauuuucuacgg

SEQ ID NO: 161787 - RNA, 23 nt, Artificial Sequence
  Synthetic
cauuauuucauuauuuucuacgg

SEQ ID NO: 161788 - RNA, 24 nt, Artificial Sequence
  Synthetic
acauuauuucauuauuuucuacgg

SEQ ID NO: 161789 - RNA, 22 nt, Artificial Sequence
  Synthetic
aggcgugagccaccgcgcccgg

SEQ ID NO: 161790 - RNA, 23 nt, Artificial Sequence
  Synthetic
caggcgugagccaccgcgcccgg

SEQ ID NO: 161791 - RNA, 24 nt, Artificial Sequence
  Synthetic
acaggcgugagccaccgcgcccgg

SEQ ID NO: 161792 - RNA, 18 nt, Artificial Sequence
  Synthetic
ucugggaggccaaagcgg

SEQ ID NO: 161793 - RNA, 19 nt, Artificial Sequence
  Synthetic
cucugggaggccaaagcgg

SEQ ID NO: 161794 - RNA, 20 nt, Artificial Sequence
  Synthetic
ucucugggaggccaaagcgg

SEQ ID NO: 161795 - RNA, 23 nt, Artificial Sequence
  Synthetic
aggucucugggaggccaaagcgg

SEQ ID NO: 161796 - RNA, 24 nt, Artificial Sequence
  Synthetic
caggucucugggaggccaaagcgg

SEQ ID NO: 161797 - RNA, 18 nt, Artificial Sequence
  Synthetic
uuagggaggccaaggcgg

SEQ ID NO: 161798 - RNA, 19 nt, Artificial Sequence
  Synthetic
cuuagggaggccaaggcgg

SEQ ID NO: 161799 - RNA, 20 nt, Artificial Sequence
  Synthetic
acuuagggaggccaaggcgg

SEQ ID NO: 161800 - RNA, 21 nt, Artificial Sequence
  Synthetic
cacuuagggaggccaaggcgg

SEQ ID NO: 161801 - RNA, 23 nt, Artificial Sequence
  Synthetic
agcacuuagggaggccaaggcgg

SEQ ID NO: 161802 - RNA, 24 nt, Artificial Sequence
  Synthetic
cagcacuuagggaggccaaggcgg

SEQ ID NO: 161803 - RNA, 23 nt, Artificial Sequence
  Synthetic
aggacuuugggaggccaaggcgg

SEQ ID NO: 161804 - RNA, 24 nt, Artificial Sequence
  Synthetic
caggacuuugggaggccaaggcgg

SEQ ID NO: 161805 - RNA, 18 nt, Artificial Sequence
  Synthetic
uuuggaaggccgaggcgg

SEQ ID NO: 161806 - RNA, 19 nt, Artificial Sequence
  Synthetic
cuuuggaaggccgaggcgg

SEQ ID NO: 161807 - RNA, 20 nt, Artificial Sequence
  Synthetic
acuuuggaaggccgaggcgg

SEQ ID NO: 161808 - RNA, 21 nt, Artificial Sequence
  Synthetic
cacuuuggaaggccgaggcgg

SEQ ID NO: 161809 - RNA, 23 nt, Artificial Sequence
  Synthetic
agcacuuuggaaggccgaggcgg

SEQ ID NO: 161810 - RNA, 24 nt, Artificial Sequence
  Synthetic
cagcacuuuggaaggccgaggcgg

SEQ ID NO: 161811 - RNA, 19 nt, Artificial Sequence
  Synthetic
uuuggggaggccgaggcgg

SEQ ID NO: 161812 - RNA, 20 nt, Artificial Sequence
  Synthetic
cuuuggggaggccgaggcgg

SEQ ID NO: 161813 - RNA, 21 nt, Artificial Sequence
  Synthetic
acuuuggggaggccgaggcgg

SEQ ID NO: 161814 - RNA, 22 nt, Artificial Sequence
  Synthetic
cacuuuggggaggccgaggcgg

SEQ ID NO: 161815 - RNA, 24 nt, Artificial Sequence
  Synthetic
agcacuuuggggaggccgaggcgg

SEQ ID NO: 161816 - RNA, 21 nt, Artificial Sequence
  Synthetic
cacuuugggaggccgaggcgg

SEQ ID NO: 161817 - RNA, 23 nt, Artificial Sequence
  Synthetic
agcacuuugggaggccgaggcgg

SEQ ID NO: 161818 - RNA, 24 nt, Artificial Sequence
  Synthetic
cagcacuuugggaggccgaggcgg

SEQ ID NO: 161819 - RNA, 18 nt, Artificial Sequence
  Synthetic
uuuaagaggaugaggcgg

SEQ ID NO: 161820 - RNA, 19 nt, Artificial Sequence
  Synthetic
uuuuaagaggaugaggcgg

SEQ ID NO: 161821 - RNA, 20 nt, Artificial Sequence
  Synthetic
auuuuaagaggaugaggcgg

SEQ ID NO: 161822 - RNA, 21 nt, Artificial Sequence
  Synthetic
cauuuuaagaggaugaggcgg

SEQ ID NO: 161823 - RNA, 22 nt, Artificial Sequence
  Synthetic
ccauuuuaagaggaugaggcgg

SEQ ID NO: 161824 - RNA, 23 nt, Artificial Sequence
  Synthetic
accauuuuaagaggaugaggcgg

SEQ ID NO: 161825 - RNA, 24 nt, Artificial Sequence
  Synthetic
caccauuuuaagaggaugaggcgg

SEQ ID NO: 161826 - RNA, 18 nt, Artificial Sequence
  Synthetic
cucgggaggcugaggcgg

SEQ ID NO: 161827 - RNA, 19 nt, Artificial Sequence
  Synthetic
acucgggaggcugaggcgg

SEQ ID NO: 161828 - RNA, 20 nt, Artificial Sequence
  Synthetic
uacucgggaggcugaggcgg

SEQ ID NO: 161829 - RNA, 21 nt, Artificial Sequence
  Synthetic
cuacucgggaggcugaggcgg

SEQ ID NO: 161830 - RNA, 23 nt, Artificial Sequence
  Synthetic
agcuacucgggaggcugaggcgg

SEQ ID NO: 161831 - RNA, 24 nt, Artificial Sequence
  Synthetic
cagcuacucgggaggcugaggcgg

SEQ ID NO: 161832 - RNA, 18 nt, Artificial Sequence
  Synthetic
uuugggaggcugaggcgg

SEQ ID NO: 161833 - RNA, 19 nt, Artificial Sequence
  Synthetic
cuuugggaggcugaggcgg

SEQ ID NO: 161834 - RNA, 20 nt, Artificial Sequence
  Synthetic
acuuugggaggcugaggcgg

SEQ ID NO: 161835 - RNA, 21 nt, Artificial Sequence
  Synthetic
cacuuugggaggcugaggcgg

SEQ ID NO: 161836 - RNA, 23 nt, Artificial Sequence
  Synthetic
agcacuuugggaggcugaggcgg

SEQ ID NO: 161837 - RNA, 24 nt, Artificial Sequence
  Synthetic
cagcacuuugggaggcugaggcgg

SEQ ID NO: 161838 - RNA, 18 nt, Artificial Sequence
  Synthetic
uaaaacagcauguugcgg

SEQ ID NO: 161839 - RNA, 19 nt, Artificial Sequence
  Synthetic
uuaaaacagcauguugcgg

SEQ ID NO: 161840 - RNA, 20 nt, Artificial Sequence
  Synthetic
auuaaaacagcauguugcgg

SEQ ID NO: 161841 - RNA, 21 nt, Artificial Sequence
  Synthetic
cauuaaaacagcauguugcgg

SEQ ID NO: 161842 - RNA, 22 nt, Artificial Sequence
  Synthetic
ucauuaaaacagcauguugcgg

SEQ ID NO: 161843 - RNA, 23 nt, Artificial Sequence
  Synthetic
cucauuaaaacagcauguugcgg

SEQ ID NO: 161844 - RNA, 19 nt, Artificial Sequence
  Synthetic
uguagucccagcugcucgg

SEQ ID NO: 161845 - RNA, 20 nt, Artificial Sequence
  Synthetic
cuguagucccagcugcucgg

SEQ ID NO: 161846 - RNA, 21 nt, Artificial Sequence
  Synthetic
ccuguagucccagcugcucgg

SEQ ID NO: 161847 - RNA, 23 nt, Artificial Sequence
  Synthetic
cgccuguagucccagcugcucgg

SEQ ID NO: 161848 - RNA, 18 nt, Artificial Sequence
  Synthetic
uuugggaggcugagucgg

SEQ ID NO: 161849 - RNA, 19 nt, Artificial Sequence
  Synthetic
cuuugggaggcugagucgg

SEQ ID NO: 161850 - RNA, 20 nt, Artificial Sequence
  Synthetic
acuuugggaggcugagucgg

SEQ ID NO: 161851 - RNA, 21 nt, Artificial Sequence
  Synthetic
cacuuugggaggcugagucgg

SEQ ID NO: 161852 - RNA, 22 nt, Artificial Sequence
  Synthetic
acacuuugggaggcugagucgg

SEQ ID NO: 161853 - RNA, 23 nt, Artificial Sequence
  Synthetic
aacacuuugggaggcugagucgg

SEQ ID NO: 161854 - RNA, 24 nt, Artificial Sequence
  Synthetic
caacacuuugggaggcugagucgg

SEQ ID NO: 161855 - RNA, 19 nt, Artificial Sequence
  Synthetic
aggaaagaaaaaaaaaggg

SEQ ID NO: 161856 - RNA, 20 nt, Artificial Sequence
  Synthetic
uaggaaagaaaaaaaaaggg

SEQ ID NO: 161857 - RNA, 21 nt, Artificial Sequence
  Synthetic
uuaggaaagaaaaaaaaaggg

SEQ ID NO: 161858 - RNA, 22 nt, Artificial Sequence
  Synthetic
auuaggaaagaaaaaaaaaggg

SEQ ID NO: 161859 - RNA, 23 nt, Artificial Sequence
  Synthetic
aauuaggaaagaaaaaaaaaggg

SEQ ID NO: 161860 - RNA, 24 nt, Artificial Sequence
  Synthetic
aaauuaggaaagaaaaaaaaaggg

SEQ ID NO: 161861 - RNA, 20 nt, Artificial Sequence
  Synthetic
aggaggggaaagagaaaggg

SEQ ID NO: 161862 - RNA, 18 nt, Artificial Sequence
  Synthetic
augaugagaugagaaggg

SEQ ID NO: 161863 - RNA, 19 nt, Artificial Sequence
  Synthetic
aaugaugagaugagaaggg

SEQ ID NO: 161864 - RNA, 20 nt, Artificial Sequence
  Synthetic
aaaugaugagaugagaaggg

SEQ ID NO: 161865 - RNA, 22 nt, Artificial Sequence
  Synthetic
ugaaaugaugagaugagaaggg

SEQ ID NO: 161866 - RNA, 23 nt, Artificial Sequence
  Synthetic
augaaaugaugagaugagaaggg

SEQ ID NO: 161867 - RNA, 24 nt, Artificial Sequence
  Synthetic
aaugaaaugaugagaugagaaggg

SEQ ID NO: 161868 - RNA, 18 nt, Artificial Sequence
  Synthetic
auuauuuuuaaauaaggg

SEQ ID NO: 161869 - RNA, 19 nt, Artificial Sequence
  Synthetic
aauuauuuuuaaauaaggg

SEQ ID NO: 161870 - RNA, 20 nt, Artificial Sequence
  Synthetic
uaauuauuuuuaaauaaggg

SEQ ID NO: 161871 - RNA, 19 nt, Artificial Sequence
  Synthetic
aggccugaaaggcuaaggg

SEQ ID NO: 161872 - RNA, 20 nt, Artificial Sequence
  Synthetic
aaggccugaaaggcuaaggg

SEQ ID NO: 161873 - RNA, 18 nt, Artificial Sequence
  Synthetic
uuuuauuuuuauacaggg

SEQ ID NO: 161874 - RNA, 19 nt, Artificial Sequence
  Synthetic
uuuuuauuuuuauacaggg

SEQ ID NO: 161875 - RNA, 20 nt, Artificial Sequence
  Synthetic
auuuuuauuuuuauacaggg

SEQ ID NO: 161876 - RNA, 18 nt, Artificial Sequence
  Synthetic
aucagaguggaggcaggg

SEQ ID NO: 161877 - RNA, 18 nt, Artificial Sequence
  Synthetic
uuuuuccauggaucaggg

SEQ ID NO: 161878 - RNA, 19 nt, Artificial Sequence
  Synthetic
auuuuuccauggaucaggg

SEQ ID NO: 161879 - RNA, 20 nt, Artificial Sequence
  Synthetic
aauuuuuccauggaucaggg

SEQ ID NO: 161880 - RNA, 21 nt, Artificial Sequence
  Synthetic
caauuuuuccauggaucaggg

SEQ ID NO: 161881 - RNA, 22 nt, Artificial Sequence
  Synthetic
acaauuuuuccauggaucaggg

SEQ ID NO: 161882 - RNA, 24 nt, Artificial Sequence
  Synthetic
agacaauuuuuccauggaucaggg

SEQ ID NO: 161883 - RNA, 18 nt, Artificial Sequence
  Synthetic
uugaucacagaaagaggg

SEQ ID NO: 161884 - RNA, 19 nt, Artificial Sequence
  Synthetic
auugaucacagaaagaggg

SEQ ID NO: 161885 - RNA, 20 nt, Artificial Sequence
  Synthetic
aauugaucacagaaagaggg

SEQ ID NO: 161886 - RNA, 18 nt, Artificial Sequence
  Synthetic
ugccaggcacacagaggg

SEQ ID NO: 161887 - RNA, 19 nt, Artificial Sequence
  Synthetic
augccaggcacacagaggg

SEQ ID NO: 161888 - RNA, 20 nt, Artificial Sequence
  Synthetic
uaugccaggcacacagaggg

SEQ ID NO: 161889 - RNA, 18 nt, Artificial Sequence
  Synthetic
cucagaagggcgagaggg

SEQ ID NO: 161890 - RNA, 19 nt, Artificial Sequence
  Synthetic
acucagaagggcgagaggg

SEQ ID NO: 161891 - RNA, 21 nt, Artificial Sequence
  Synthetic
agacucagaagggcgagaggg

SEQ ID NO: 161892 - RNA, 24 nt, Artificial Sequence
  Synthetic
uggagacucagaagggcgagaggg

SEQ ID NO: 161893 - RNA, 19 nt, Artificial Sequence
  Synthetic
agugaagaagugcugaggg

SEQ ID NO: 161894 - RNA, 20 nt, Artificial Sequence
  Synthetic
aagugaagaagugcugaggg

SEQ ID NO: 161895 - RNA, 19 nt, Artificial Sequence
  Synthetic
aggcuuuuuggcuugaggg

SEQ ID NO: 161896 - RNA, 20 nt, Artificial Sequence
  Synthetic
caggcuuuuuggcuugaggg

SEQ ID NO: 161897 - RNA, 21 nt, Artificial Sequence
  Synthetic
ucaggcuuuuuggcuugaggg

SEQ ID NO: 161898 - RNA, 22 nt, Artificial Sequence
  Synthetic
uucaggcuuuuuggcuugaggg

SEQ ID NO: 161899 - RNA, 23 nt, Artificial Sequence
  Synthetic
uuucaggcuuuuuggcuugaggg

SEQ ID NO: 161900 - RNA, 18 nt, Artificial Sequence
  Synthetic
ugaucagggucuugaggg

SEQ ID NO: 161901 - RNA, 19 nt, Artificial Sequence
  Synthetic
uugaucagggucuugaggg

SEQ ID NO: 161902 - RNA, 20 nt, Artificial Sequence
  Synthetic
uuugaucagggucuugaggg

SEQ ID NO: 161903 - RNA, 21 nt, Artificial Sequence
  Synthetic
auuugaucagggucuugaggg

SEQ ID NO: 161904 - RNA, 22 nt, Artificial Sequence
  Synthetic
uauuugaucagggucuugaggg

SEQ ID NO: 161905 - RNA, 23 nt, Artificial Sequence
  Synthetic
auauuugaucagggucuugaggg

SEQ ID NO: 161906 - RNA, 18 nt, Artificial Sequence
  Synthetic
cugcugaaaccuguaggg

SEQ ID NO: 161907 - RNA, 19 nt, Artificial Sequence
  Synthetic
ccugcugaaaccuguaggg

SEQ ID NO: 161908 - RNA, 20 nt, Artificial Sequence
  Synthetic
uccugcugaaaccuguaggg

SEQ ID NO: 161909 - RNA, 21 nt, Artificial Sequence
  Synthetic
cuccugcugaaaccuguaggg

SEQ ID NO: 161910 - RNA, 22 nt, Artificial Sequence
  Synthetic
acuccugcugaaaccuguaggg

SEQ ID NO: 161911 - RNA, 23 nt, Artificial Sequence
  Synthetic
uacuccugcugaaaccuguaggg

SEQ ID NO: 161912 - RNA, 24 nt, Artificial Sequence
  Synthetic
auacuccugcugaaaccuguaggg

SEQ ID NO: 161913 - RNA, 24 nt, Artificial Sequence
  Synthetic
cuggccucauaaaaagaguuaggg

SEQ ID NO: 161914 - RNA, 21 nt, Artificial Sequence
  Synthetic
uuuccauggaucaggggcggg

SEQ ID NO: 161915 - RNA, 22 nt, Artificial Sequence
  Synthetic
uuuuccauggaucaggggcggg

SEQ ID NO: 161916 - RNA, 23 nt, Artificial Sequence
  Synthetic
uuuuuccauggaucaggggcggg

SEQ ID NO: 161917 - RNA, 24 nt, Artificial Sequence
  Synthetic
auuuuuccauggaucaggggcggg

SEQ ID NO: 161918 - RNA, 18 nt, Artificial Sequence
  Synthetic
cggguggggggcaagggg

SEQ ID NO: 161919 - RNA, 21 nt, Artificial Sequence
  Synthetic
uggcggguggggggcaagggg

SEQ ID NO: 161920 - RNA, 22 nt, Artificial Sequence
  Synthetic
uuggcggguggggggcaagggg

SEQ ID NO: 161921 - RNA, 24 nt, Artificial Sequence
  Synthetic
uguuggcggguggggggcaagggg

SEQ ID NO: 161922 - RNA, 18 nt, Artificial Sequence
  Synthetic
agauuaaugcuggagggg

SEQ ID NO: 161923 - RNA, 19 nt, Artificial Sequence
  Synthetic
aagauuaaugcuggagggg

SEQ ID NO: 161924 - RNA, 20 nt, Artificial Sequence
  Synthetic
aaagauuaaugcuggagggg

SEQ ID NO: 161925 - RNA, 21 nt, Artificial Sequence
  Synthetic
aaaagauuaaugcuggagggg

SEQ ID NO: 161926 - RNA, 22 nt, Artificial Sequence
  Synthetic
caaaagauuaaugcuggagggg

SEQ ID NO: 161927 - RNA, 23 nt, Artificial Sequence
  Synthetic
acaaaagauuaaugcuggagggg

SEQ ID NO: 161928 - RNA, 24 nt, Artificial Sequence
  Synthetic
cacaaaagauuaaugcuggagggg

SEQ ID NO: 161929 - RNA, 19 nt, Artificial Sequence
  Synthetic
agaauaaaugcuugagggg

SEQ ID NO: 161930 - RNA, 20 nt, Artificial Sequence
  Synthetic
aagaauaaaugcuugagggg

SEQ ID NO: 161931 - RNA, 21 nt, Artificial Sequence
  Synthetic
aaagaauaaaugcuugagggg

SEQ ID NO: 161932 - RNA, 22 nt, Artificial Sequence
  Synthetic
uaaagaauaaaugcuugagggg

SEQ ID NO: 161933 - RNA, 23 nt, Artificial Sequence
  Synthetic
auaaagaauaaaugcuugagggg

SEQ ID NO: 161934 - RNA, 24 nt, Artificial Sequence
  Synthetic
cauaaagaauaaaugcuugagggg

SEQ ID NO: 161935 - RNA, 18 nt, Artificial Sequence
  Synthetic
cuccaucuugaauagggg

SEQ ID NO: 161936 - RNA, 19 nt, Artificial Sequence
  Synthetic
acuccaucuugaauagggg

SEQ ID NO: 161937 - RNA, 20 nt, Artificial Sequence
  Synthetic
aacuccaucuugaauagggg

SEQ ID NO: 161938 - RNA, 21 nt, Artificial Sequence
  Synthetic
caacuccaucuugaauagggg

SEQ ID NO: 161939 - RNA, 22 nt, Artificial Sequence
  Synthetic
acaacuccaucuugaauagggg

SEQ ID NO: 161940 - RNA, 23 nt, Artificial Sequence
  Synthetic
aacaacuccaucuugaauagggg

SEQ ID NO: 161941 - RNA, 20 nt, Artificial Sequence
  Synthetic
aggggguggggggcuagggg

SEQ ID NO: 161942 - RNA, 21 nt, Artificial Sequence
  Synthetic
caggggguggggggcuagggg

SEQ ID NO: 161943 - RNA, 22 nt, Artificial Sequence
  Synthetic
ucaggggguggggggcuagggg

SEQ ID NO: 161944 - RNA, 24 nt, Artificial Sequence
  Synthetic
ugucaggggguggggggcuagggg

SEQ ID NO: 161945 - RNA, 20 nt, Artificial Sequence
  Synthetic
aggggaugggggguuagggg

SEQ ID NO: 161946 - RNA, 21 nt, Artificial Sequence
  Synthetic
caggggaugggggguuagggg

SEQ ID NO: 161947 - RNA, 22 nt, Artificial Sequence
  Synthetic
ucaggggaugggggguuagggg

SEQ ID NO: 161948 - RNA, 23 nt, Artificial Sequence
  Synthetic
cucaggggaugggggguuagggg

SEQ ID NO: 161949 - RNA, 24 nt, Artificial Sequence
  Synthetic
ucucaggggaugggggguuagggg

SEQ ID NO: 161950 - RNA, 19 nt, Artificial Sequence
  Synthetic
ugggguggggggaaggggg

SEQ ID NO: 161951 - RNA, 21 nt, Artificial Sequence
  Synthetic
ugugggguggggggaaggggg

SEQ ID NO: 161952 - RNA, 22 nt, Artificial Sequence
  Synthetic
cugugggguggggggaaggggg

SEQ ID NO: 161953 - RNA, 24 nt, Artificial Sequence
  Synthetic
ugcugugggguggggggaaggggg

SEQ ID NO: 161954 - RNA, 22 nt, Artificial Sequence
  Synthetic
agggggaggggugugaaggggg

SEQ ID NO: 161955 - RNA, 23 nt, Artificial Sequence
  Synthetic
aagggggaggggugugaaggggg

SEQ ID NO: 161956 - RNA, 19 nt, Artificial Sequence
  Synthetic
uggggugaggggacggggg

SEQ ID NO: 161957 - RNA, 21 nt, Artificial Sequence
  Synthetic
cguggggugaggggacggggg

SEQ ID NO: 161958 - RNA, 22 nt, Artificial Sequence
  Synthetic
ucguggggugaggggacggggg

SEQ ID NO: 161959 - RNA, 24 nt, Artificial Sequence
  Synthetic
ugucguggggugaggggacggggg

SEQ ID NO: 161960 - RNA, 19 nt, Artificial Sequence
  Synthetic
uggacaucuuuggcggggg

SEQ ID NO: 161961 - RNA, 20 nt, Artificial Sequence
  Synthetic
auggacaucuuuggcggggg

SEQ ID NO: 161962 - RNA, 21 nt, Artificial Sequence
  Synthetic
uauggacaucuuuggcggggg

SEQ ID NO: 161963 - RNA, 22 nt, Artificial Sequence
  Synthetic
auauggacaucuuuggcggggg

SEQ ID NO: 161964 - RNA, 21 nt, Artificial Sequence
  Synthetic
ugugggguggggggagggggg

SEQ ID NO: 161965 - RNA, 22 nt, Artificial Sequence
  Synthetic
cugugggguggggggagggggg

SEQ ID NO: 161966 - RNA, 24 nt, Artificial Sequence
  Synthetic
ugcugugggguggggggagggggg

SEQ ID NO: 161967 - RNA, 20 nt, Artificial Sequence
  Synthetic
ugggguggggggaggggggg

SEQ ID NO: 161968 - RNA, 22 nt, Artificial Sequence
  Synthetic
ugugggguggggggaggggggg

SEQ ID NO: 161969 - RNA, 23 nt, Artificial Sequence
  Synthetic
uugugggguggggggaggggggg

SEQ ID NO: 161970 - RNA, 20 nt, Artificial Sequence
  Synthetic
agguaacugaaucauggggg

SEQ ID NO: 161971 - RNA, 24 nt, Artificial Sequence
  Synthetic
ugggagguaacugaaucauggggg

SEQ ID NO: 161972 - RNA, 18 nt, Artificial Sequence
  Synthetic
caugaugagggguggggg

SEQ ID NO: 161973 - RNA, 19 nt, Artificial Sequence
  Synthetic
ccaugaugagggguggggg

SEQ ID NO: 161974 - RNA, 21 nt, Artificial Sequence
  Synthetic
agccaugaugagggguggggg

SEQ ID NO: 161975 - RNA, 23 nt, Artificial Sequence
  Synthetic
agagccaugaugagggguggggg

SEQ ID NO: 161976 - RNA, 24 nt, Artificial Sequence
  Synthetic
cagagccaugaugagggguggggg

SEQ ID NO: 161977 - RNA, 18 nt, Artificial Sequence
  Synthetic
uuggggguuguguggggg

SEQ ID NO: 161978 - RNA, 21 nt, Artificial Sequence
  Synthetic
cuggcugggcuccguuggggg

SEQ ID NO: 161979 - RNA, 23 nt, Artificial Sequence
  Synthetic
agcuggcugggcuccguuggggg

SEQ ID NO: 161980 - RNA, 24 nt, Artificial Sequence
  Synthetic
uagcuggcugggcuccguuggggg

SEQ ID NO: 161981 - RNA, 18 nt, Artificial Sequence
  Synthetic
aaguguggggucaugggg

SEQ ID NO: 161982 - RNA, 18 nt, Artificial Sequence
  Synthetic
uauaggcacaggaugggg

SEQ ID NO: 161983 - RNA, 19 nt, Artificial Sequence
  Synthetic
uuauaggcacaggaugggg

SEQ ID NO: 161984 - RNA, 20 nt, Artificial Sequence
  Synthetic
uuuauaggcacaggaugggg

SEQ ID NO: 161985 - RNA, 21 nt, Artificial Sequence
  Synthetic
uuuuauaggcacaggaugggg

SEQ ID NO: 161986 - RNA, 22 nt, Artificial Sequence
  Synthetic
uuuuuauaggcacaggaugggg

SEQ ID NO: 161987 - RNA, 19 nt, Artificial Sequence
  Synthetic
aguaauaauacaacugggg

SEQ ID NO: 161988 - RNA, 20 nt, Artificial Sequence
  Synthetic
aaguaauaauacaacugggg

SEQ ID NO: 161989 - RNA, 18 nt, Artificial Sequence
  Synthetic
ugggguggggggcugggg

SEQ ID NO: 161990 - RNA, 20 nt, Artificial Sequence
  Synthetic
cgugggguggggggcugggg

SEQ ID NO: 161991 - RNA, 21 nt, Artificial Sequence
  Synthetic
ucgugggguggggggcugggg

SEQ ID NO: 161992 - RNA, 23 nt, Artificial Sequence
  Synthetic
ugucgugggguggggggcugggg

SEQ ID NO: 161993 - RNA, 24 nt, Artificial Sequence
  Synthetic
cugucgugggguggggggcugggg

SEQ ID NO: 161994 - RNA, 20 nt, Artificial Sequence
  Synthetic
uggcaaaaaaaaaugugggg

SEQ ID NO: 161995 - RNA, 18 nt, Artificial Sequence
  Synthetic
aacucaggagaugugggg

SEQ ID NO: 161996 - RNA, 19 nt, Artificial Sequence
  Synthetic
aaacucaggagaugugggg

SEQ ID NO: 161997 - RNA, 20 nt, Artificial Sequence
  Synthetic
caaacucaggagaugugggg

SEQ ID NO: 161998 - RNA, 21 nt, Artificial Sequence
  Synthetic
ucaaacucaggagaugugggg

SEQ ID NO: 161999 - RNA, 22 nt, Artificial Sequence
  Synthetic
aucaaacucaggagaugugggg

SEQ ID NO: 162000 - RNA, 23 nt, Artificial Sequence
  Synthetic
aaucaaacucaggagaugugggg

SEQ ID NO: 162001 - RNA, 24 nt, Artificial Sequence
  Synthetic
aaaucaaacucaggagaugugggg

SEQ ID NO: 162002 - RNA, 20 nt, Artificial Sequence
  Synthetic
uaaacucaggagaugugggg

SEQ ID NO: 162003 - RNA, 21 nt, Artificial Sequence
  Synthetic
uuaaacucaggagaugugggg

SEQ ID NO: 162004 - RNA, 22 nt, Artificial Sequence
  Synthetic
auuaaacucaggagaugugggg

SEQ ID NO: 162005 - RNA, 23 nt, Artificial Sequence
  Synthetic
aauuaaacucaggagaugugggg

SEQ ID NO: 162006 - RNA, 24 nt, Artificial Sequence
  Synthetic
aaauuaaacucaggagaugugggg

SEQ ID NO: 162007 - RNA, 19 nt, Artificial Sequence
  Synthetic
ugauuuaacugguuugggg

SEQ ID NO: 162008 - RNA, 20 nt, Artificial Sequence
  Synthetic
cugauuuaacugguuugggg

SEQ ID NO: 162009 - RNA, 18 nt, Artificial Sequence
  Synthetic
aaguuacagguuuugggg

SEQ ID NO: 162010 - RNA, 20 nt, Artificial Sequence
  Synthetic
agaaguuacagguuuugggg

SEQ ID NO: 162011 - RNA, 18 nt, Artificial Sequence
  Synthetic
uaauauaccaacaauggg

SEQ ID NO: 162012 - RNA, 20 nt, Artificial Sequence
  Synthetic
uguaauauaccaacaauggg

SEQ ID NO: 162013 - RNA, 18 nt, Artificial Sequence
  Synthetic
auccccagaugucauggg

SEQ ID NO: 162014 - RNA, 19 nt, Artificial Sequence
  Synthetic
aauccccagaugucauggg

SEQ ID NO: 162015 - RNA, 20 nt, Artificial Sequence
  Synthetic
uaauccccagaugucauggg

SEQ ID NO: 162016 - RNA, 21 nt, Artificial Sequence
  Synthetic
auaauccccagaugucauggg

SEQ ID NO: 162017 - RNA, 22 nt, Artificial Sequence
  Synthetic
cauaauccccagaugucauggg

SEQ ID NO: 162018 - RNA, 23 nt, Artificial Sequence
  Synthetic
ccauaauccccagaugucauggg

SEQ ID NO: 162019 - RNA, 24 nt, Artificial Sequence
  Synthetic
cccauaauccccagaugucauggg

SEQ ID NO: 162020 - RNA, 18 nt, Artificial Sequence
  Synthetic
ugguuaccugaggauggg

SEQ ID NO: 162021 - RNA, 19 nt, Artificial Sequence
  Synthetic
augguuaccugaggauggg

SEQ ID NO: 162022 - RNA, 22 nt, Artificial Sequence
  Synthetic
aggaugguuaccugaggauggg

SEQ ID NO: 162023 - RNA, 23 nt, Artificial Sequence
  Synthetic
aaggaugguuaccugaggauggg

SEQ ID NO: 162024 - RNA, 18 nt, Artificial Sequence
  Synthetic
auauauauaucauauggg

SEQ ID NO: 162025 - RNA, 19 nt, Artificial Sequence
  Synthetic
uauauauauaucauauggg

SEQ ID NO: 162026 - RNA, 20 nt, Artificial Sequence
  Synthetic
auauauauauaucauauggg

SEQ ID NO: 162027 - RNA, 18 nt, Artificial Sequence
  Synthetic
uacaaaaaauuaacuggg

SEQ ID NO: 162028 - RNA, 19 nt, Artificial Sequence
  Synthetic
auacaaaaaauuaacuggg

SEQ ID NO: 162029 - RNA, 20 nt, Artificial Sequence
  Synthetic
aauacaaaaaauuaacuggg

SEQ ID NO: 162030 - RNA, 21 nt, Artificial Sequence
  Synthetic
aaauacaaaaaauuaacuggg

SEQ ID NO: 162031 - RNA, 22 nt, Artificial Sequence
  Synthetic
aaaauacaaaaaauuaacuggg

SEQ ID NO: 162032 - RNA, 23 nt, Artificial Sequence
  Synthetic
aaaaauacaaaaaauuaacuggg

SEQ ID NO: 162033 - RNA, 24 nt, Artificial Sequence
  Synthetic
caaaaauacaaaaaauuaacuggg

SEQ ID NO: 162034 - RNA, 18 nt, Artificial Sequence
  Synthetic
acccccacacguccuggg

SEQ ID NO: 162035 - RNA, 19 nt, Artificial Sequence
  Synthetic
aacccccacacguccuggg

SEQ ID NO: 162036 - RNA, 20 nt, Artificial Sequence
  Synthetic
uaacccccacacguccuggg

SEQ ID NO: 162037 - RNA, 21 nt, Artificial Sequence
  Synthetic
auaacccccacacguccuggg

SEQ ID NO: 162038 - RNA, 22 nt, Artificial Sequence
  Synthetic
cauaacccccacacguccuggg

SEQ ID NO: 162039 - RNA, 23 nt, Artificial Sequence
  Synthetic
ccauaacccccacacguccuggg

SEQ ID NO: 162040 - RNA, 24 nt, Artificial Sequence
  Synthetic
cccauaacccccacacguccuggg

SEQ ID NO: 162041 - RNA, 18 nt, Artificial Sequence
  Synthetic
uagauaccagaggcuggg

SEQ ID NO: 162042 - RNA, 19 nt, Artificial Sequence
  Synthetic
auagauaccagaggcuggg

SEQ ID NO: 162043 - RNA, 20 nt, Artificial Sequence
  Synthetic
uauagauaccagaggcuggg

SEQ ID NO: 162044 - RNA, 18 nt, Artificial Sequence
  Synthetic
uaguugccagaggcuggg

SEQ ID NO: 162045 - RNA, 21 nt, Artificial Sequence
  Synthetic
agguaguugccagaggcuggg

SEQ ID NO: 162046 - RNA, 22 nt, Artificial Sequence
  Synthetic
aagguaguugccagaggcuggg

SEQ ID NO: 162047 - RNA, 23 nt, Artificial Sequence
  Synthetic
aaagguaguugccagaggcuggg

SEQ ID NO: 162048 - RNA, 18 nt, Artificial Sequence
  Synthetic
ugguuaccugaugcuggg

SEQ ID NO: 162049 - RNA, 21 nt, Artificial Sequence
  Synthetic
uggugguuaccugaugcuggg

SEQ ID NO: 162050 - RNA, 22 nt, Artificial Sequence
  Synthetic
uuggugguuaccugaugcuggg

SEQ ID NO: 162051 - RNA, 23 nt, Artificial Sequence
  Synthetic
auuggugguuaccugaugcuggg

SEQ ID NO: 162052 - RNA, 18 nt, Artificial Sequence
  Synthetic
aguaaugagauugcuggg

SEQ ID NO: 162053 - RNA, 19 nt, Artificial Sequence
  Synthetic
aaguaaugagauugcuggg

SEQ ID NO: 162054 - RNA, 20 nt, Artificial Sequence
  Synthetic
caaguaaugagauugcuggg

SEQ ID NO: 162055 - RNA, 21 nt, Artificial Sequence
  Synthetic
ccaaguaaugagauugcuggg

SEQ ID NO: 162056 - RNA, 22 nt, Artificial Sequence
  Synthetic
accaaguaaugagauugcuggg

SEQ ID NO: 162057 - RNA, 23 nt, Artificial Sequence
  Synthetic
uaccaaguaaugagauugcuggg

SEQ ID NO: 162058 - RNA, 24 nt, Artificial Sequence
  Synthetic
auaccaaguaaugagauugcuggg

SEQ ID NO: 162059 - RNA, 18 nt, Artificial Sequence
  Synthetic
aguaaugggauugcuggg

SEQ ID NO: 162060 - RNA, 19 nt, Artificial Sequence
  Synthetic
caguaaugggauugcuggg

SEQ ID NO: 162061 - RNA, 20 nt, Artificial Sequence
  Synthetic
ucaguaaugggauugcuggg

SEQ ID NO: 162062 - RNA, 21 nt, Artificial Sequence
  Synthetic
cucaguaaugggauugcuggg

SEQ ID NO: 162063 - RNA, 22 nt, Artificial Sequence
  Synthetic
acucaguaaugggauugcuggg

SEQ ID NO: 162064 - RNA, 23 nt, Artificial Sequence
  Synthetic
uacucaguaaugggauugcuggg

SEQ ID NO: 162065 - RNA, 24 nt, Artificial Sequence
  Synthetic
auacucaguaaugggauugcuggg

SEQ ID NO: 162066 - RNA, 18 nt, Artificial Sequence
  Synthetic
ccagcuggacuuucuggg

SEQ ID NO: 162067 - RNA, 21 nt, Artificial Sequence
  Synthetic
aggccagcuggacuuucuggg

SEQ ID NO: 162068 - RNA, 23 nt, Artificial Sequence
  Synthetic
ugaggccagcuggacuuucuggg

SEQ ID NO: 162069 - RNA, 18 nt, Artificial Sequence
  Synthetic
aaaguagccaaucguggg

SEQ ID NO: 162070 - RNA, 19 nt, Artificial Sequence
  Synthetic
aaaaguagccaaucguggg

SEQ ID NO: 162071 - RNA, 20 nt, Artificial Sequence
  Synthetic
uaaaaguagccaaucguggg

SEQ ID NO: 162072 - RNA, 21 nt, Artificial Sequence
  Synthetic
cuaaaaguagccaaucguggg

SEQ ID NO: 162073 - RNA, 22 nt, Artificial Sequence
  Synthetic
ucuaaaaguagccaaucguggg

SEQ ID NO: 162074 - RNA, 23 nt, Artificial Sequence
  Synthetic
uucuaaaaguagccaaucguggg

SEQ ID NO: 162075 - RNA, 24 nt, Artificial Sequence
  Synthetic
auucuaaaaguagccaaucguggg

SEQ ID NO: 162076 - RNA, 23 nt, Artificial Sequence
  Synthetic
aggcugggaagaguguagguggg

SEQ ID NO: 162077 - RNA, 20 nt, Artificial Sequence
  Synthetic
aggaacuucuuagggguggg

SEQ ID NO: 162078 - RNA, 18 nt, Artificial Sequence
  Synthetic
uguguguguguguguggg

SEQ ID NO: 162079 - RNA, 20 nt, Artificial Sequence
  Synthetic
uguguguguguguguguggg

SEQ ID NO: 162080 - RNA, 23 nt, Artificial Sequence
  Synthetic
ugguguguguguguguguguggg

SEQ ID NO: 162081 - RNA, 24 nt, Artificial Sequence
  Synthetic
augguguguguguguguguguggg

SEQ ID NO: 162082 - RNA, 18 nt, Artificial Sequence
  Synthetic
ucuauagaacaaguuggg

SEQ ID NO: 162083 - RNA, 19 nt, Artificial Sequence
  Synthetic
aucuauagaacaaguuggg

SEQ ID NO: 162084 - RNA, 20 nt, Artificial Sequence
  Synthetic
aaucuauagaacaaguuggg

SEQ ID NO: 162085 - RNA, 21 nt, Artificial Sequence
  Synthetic
aaaucuauagaacaaguuggg

SEQ ID NO: 162086 - RNA, 22 nt, Artificial Sequence
  Synthetic
uaaaucuauagaacaaguuggg

SEQ ID NO: 162087 - RNA, 23 nt, Artificial Sequence
  Synthetic
uuaaaucuauagaacaaguuggg

SEQ ID NO: 162088 - RNA, 24 nt, Artificial Sequence
  Synthetic
auuaaaucuauagaacaaguuggg

SEQ ID NO: 162089 - RNA, 18 nt, Artificial Sequence
  Synthetic
uauucugcuacuguuggg

SEQ ID NO: 162090 - RNA, 20 nt, Artificial Sequence
  Synthetic
uguauucugcuacuguuggg

SEQ ID NO: 162091 - RNA, 22 nt, Artificial Sequence
  Synthetic
uguguauucugcuacuguuggg

SEQ ID NO: 162092 - RNA, 23 nt, Artificial Sequence
  Synthetic
auguguauucugcuacuguuggg

SEQ ID NO: 162093 - RNA, 24 nt, Artificial Sequence
  Synthetic
aauguguauucugcuacuguuggg

SEQ ID NO: 162094 - RNA, 18 nt, Artificial Sequence
  Synthetic
aaaaaaaaaaaaaaaugg

SEQ ID NO: 162095 - RNA, 19 nt, Artificial Sequence
  Synthetic
caaaaaaaaaaaaaaaugg

SEQ ID NO: 162096 - RNA, 21 nt, Artificial Sequence
  Synthetic
ugcaaaaaaaaaaaaaaaugg

SEQ ID NO: 162097 - RNA, 22 nt, Artificial Sequence
  Synthetic
uugcaaaaaaaaaaaaaaaugg

SEQ ID NO: 162098 - RNA, 23 nt, Artificial Sequence
  Synthetic
uuugcaaaaaaaaaaaaaaaugg

SEQ ID NO: 162099 - RNA, 24 nt, Artificial Sequence
  Synthetic
uuuugcaaaaaaaaaaaaaaaugg

SEQ ID NO: 162100 - RNA, 18 nt, Artificial Sequence
  Synthetic
acagcuaauuaaaaaugg

SEQ ID NO: 162101 - RNA, 19 nt, Artificial Sequence
  Synthetic
aacagcuaauuaaaaaugg

SEQ ID NO: 162102 - RNA, 20 nt, Artificial Sequence
  Synthetic
aaacagcuaauuaaaaaugg

SEQ ID NO: 162103 - RNA, 21 nt, Artificial Sequence
  Synthetic
aaagaggacacaaacaaaugg

SEQ ID NO: 162104 - RNA, 22 nt, Artificial Sequence
  Synthetic
aaaagaggacacaaacaaaugg

SEQ ID NO: 162105 - RNA, 23 nt, Artificial Sequence
  Synthetic
uaaaagaggacacaaacaaaugg

SEQ ID NO: 162106 - RNA, 24 nt, Artificial Sequence
  Synthetic
auaaaagaggacacaaacaaaugg

SEQ ID NO: 162107 - RNA, 21 nt, Artificial Sequence
  Synthetic
aacuuaaguguuuaauaaugg

SEQ ID NO: 162108 - RNA, 22 nt, Artificial Sequence
  Synthetic
caacuuaaguguuuaauaaugg

SEQ ID NO: 162109 - RNA, 23 nt, Artificial Sequence
  Synthetic
ucaacuuaaguguuuaauaaugg

SEQ ID NO: 162110 - RNA, 24 nt, Artificial Sequence
  Synthetic
aucaacuuaaguguuuaauaaugg

SEQ ID NO: 162111 - RNA, 21 nt, Artificial Sequence
  Synthetic
agaagacaauuuuuauaaugg

SEQ ID NO: 162112 - RNA, 22 nt, Artificial Sequence
  Synthetic
cagaagacaauuuuuauaaugg

SEQ ID NO: 162113 - RNA, 23 nt, Artificial Sequence
  Synthetic
ucagaagacaauuuuuauaaugg

SEQ ID NO: 162114 - RNA, 24 nt, Artificial Sequence
  Synthetic
aucagaagacaauuuuuauaaugg

SEQ ID NO: 162115 - RNA, 19 nt, Artificial Sequence
  Synthetic
agcugauacacuuacaugg

SEQ ID NO: 162116 - RNA, 20 nt, Artificial Sequence
  Synthetic
cagcugauacacuuacaugg

SEQ ID NO: 162117 - RNA, 18 nt, Artificial Sequence
  Synthetic
cacugcgcccggccaugg

SEQ ID NO: 162118 - RNA, 19 nt, Artificial Sequence
  Synthetic
ccacugcgcccggccaugg

SEQ ID NO: 162119 - RNA, 21 nt, Artificial Sequence
  Synthetic
agccacugcgcccggccaugg

SEQ ID NO: 162120 - RNA, 23 nt, Artificial Sequence
  Synthetic
ugagccacugcgcccggccaugg

SEQ ID NO: 162121 - RNA, 24 nt, Artificial Sequence
  Synthetic
augagccacugcgcccggccaugg

SEQ ID NO: 162122 - RNA, 19 nt, Artificial Sequence
  Synthetic
aguggacagugaagcaugg

SEQ ID NO: 162123 - RNA, 20 nt, Artificial Sequence
  Synthetic
caguggacagugaagcaugg

SEQ ID NO: 162124 - RNA, 19 nt, Artificial Sequence
  Synthetic
agaccagauggcuucaugg

SEQ ID NO: 162125 - RNA, 20 nt, Artificial Sequence
  Synthetic
aagaccagauggcuucaugg

SEQ ID NO: 162126 - RNA, 21 nt, Artificial Sequence
  Synthetic
caagaccagauggcuucaugg

SEQ ID NO: 162127 - RNA, 22 nt, Artificial Sequence
  Synthetic
ucaagaccagauggcuucaugg

SEQ ID NO: 162128 - RNA, 23 nt, Artificial Sequence
  Synthetic
cucaagaccagauggcuucaugg

SEQ ID NO: 162129 - RNA, 18 nt, Artificial Sequence
  Synthetic
caucucuuaauaagaugg

SEQ ID NO: 162130 - RNA, 19 nt, Artificial Sequence
  Synthetic
acaucucuuaauaagaugg

SEQ ID NO: 162131 - RNA, 20 nt, Artificial Sequence
  Synthetic
uacaucucuuaauaagaugg

SEQ ID NO: 162132 - RNA, 21 nt, Artificial Sequence
  Synthetic
auacaucucuuaauaagaugg

SEQ ID NO: 162133 - RNA, 22 nt, Artificial Sequence
  Synthetic
aauacaucucuuaauaagaugg

SEQ ID NO: 162134 - RNA, 23 nt, Artificial Sequence
  Synthetic
aaauacaucucuuaauaagaugg

SEQ ID NO: 162135 - RNA, 24 nt, Artificial Sequence
  Synthetic
aaaauacaucucuuaauaagaugg

SEQ ID NO: 162136 - RNA, 19 nt, Artificial Sequence
  Synthetic
uggaaaauauauuagaugg

SEQ ID NO: 162137 - RNA, 21 nt, Artificial Sequence
  Synthetic
cguggaaaauauauuagaugg

SEQ ID NO: 162138 - RNA, 23 nt, Artificial Sequence
  Synthetic
agcguggaaaauauauuagaugg

SEQ ID NO: 162139 - RNA, 24 nt, Artificial Sequence
  Synthetic
aagcguggaaaauauauuagaugg

SEQ ID NO: 162140 - RNA, 18 nt, Artificial Sequence
  Synthetic
agaugaauaaguggaugg

SEQ ID NO: 162141 - RNA, 19 nt, Artificial Sequence
  Synthetic
uagaugaauaaguggaugg

SEQ ID NO: 162142 - RNA, 23 nt, Artificial Sequence
  Synthetic
uggguagaugaauaaguggaugg

SEQ ID NO: 162143 - RNA, 24 nt, Artificial Sequence
  Synthetic
auggguagaugaauaaguggaugg

SEQ ID NO: 162144 - RNA, 20 nt, Artificial Sequence
  Synthetic
aggcugagguggguggaugg

SEQ ID NO: 162145 - RNA, 24 nt, Artificial Sequence
  Synthetic
ugggaggcugagguggguggaugg

SEQ ID NO: 162146 - RNA, 21 nt, Artificial Sequence
  Synthetic
cucccuaggagauucugaugg

SEQ ID NO: 162147 - RNA, 23 nt, Artificial Sequence
  Synthetic
agcucccuaggagauucugaugg

SEQ ID NO: 162148 - RNA, 24 nt, Artificial Sequence
  Synthetic
aagcucccuaggagauucugaugg

SEQ ID NO: 162149 - RNA, 18 nt, Artificial Sequence
  Synthetic
cuacauacaauaauaugg

SEQ ID NO: 162150 - RNA, 19 nt, Artificial Sequence
  Synthetic
acuacauacaauaauaugg

SEQ ID NO: 162151 - RNA, 20 nt, Artificial Sequence
  Synthetic
aacuacauacaauaauaugg

SEQ ID NO: 162152 - RNA, 21 nt, Artificial Sequence
  Synthetic
caacuacauacaauaauaugg

SEQ ID NO: 162153 - RNA, 22 nt, Artificial Sequence
  Synthetic
acaacuacauacaauaauaugg

SEQ ID NO: 162154 - RNA, 23 nt, Artificial Sequence
  Synthetic
cacaacuacauacaauaauaugg

SEQ ID NO: 162155 - RNA, 24 nt, Artificial Sequence
  Synthetic
ccacaacuacauacaauaauaugg

SEQ ID NO: 162156 - RNA, 18 nt, Artificial Sequence
  Synthetic
auuuaacuacuuauaugg

SEQ ID NO: 162157 - RNA, 19 nt, Artificial Sequence
  Synthetic
aauuuaacuacuuauaugg

SEQ ID NO: 162158 - RNA, 19 nt, Artificial Sequence
  Synthetic
cgugcauaugucuuuaugg

SEQ ID NO: 162159 - RNA, 20 nt, Artificial Sequence
  Synthetic
acgugcauaugucuuuaugg

SEQ ID NO: 162160 - RNA, 21 nt, Artificial Sequence
  Synthetic
aacgugcauaugucuuuaugg

SEQ ID NO: 162161 - RNA, 22 nt, Artificial Sequence
  Synthetic
caacgugcauaugucuuuaugg

SEQ ID NO: 162162 - RNA, 23 nt, Artificial Sequence
  Synthetic
acaacgugcauaugucuuuaugg

SEQ ID NO: 162163 - RNA, 24 nt, Artificial Sequence
  Synthetic
cacaacgugcauaugucuuuaugg

SEQ ID NO: 162164 - RNA, 18 nt, Artificial Sequence
  Synthetic
cagaaagggcauuccugg

SEQ ID NO: 162165 - RNA, 19 nt, Artificial Sequence
  Synthetic
ucagaaagggcauuccugg

SEQ ID NO: 162166 - RNA, 20 nt, Artificial Sequence
  Synthetic
uucagaaagggcauuccugg

SEQ ID NO: 162167 - RNA, 18 nt, Artificial Sequence
  Synthetic
aacuuucagggaagcugg

SEQ ID NO: 162168 - RNA, 19 nt, Artificial Sequence
  Synthetic
uaacuuucagggaagcugg

SEQ ID NO: 162169 - RNA, 20 nt, Artificial Sequence
  Synthetic
uuaacuuucagggaagcugg

SEQ ID NO: 162170 - RNA, 18 nt, Artificial Sequence
  Synthetic
uccucuuuguaccucugg

SEQ ID NO: 162171 - RNA, 19 nt, Artificial Sequence
  Synthetic
cuccucuuuguaccucugg

SEQ ID NO: 162172 - RNA, 21 nt, Artificial Sequence
  Synthetic
agcuccucuuuguaccucugg

SEQ ID NO: 162173 - RNA, 22 nt, Artificial Sequence
  Synthetic
cagcuccucuuuguaccucugg

SEQ ID NO: 162174 - RNA, 23 nt, Artificial Sequence
  Synthetic
ccagcuccucuuuguaccucugg

SEQ ID NO: 162175 - RNA, 24 nt, Artificial Sequence
  Synthetic
accagcuccucuuuguaccucugg

SEQ ID NO: 162176 - RNA, 18 nt, Artificial Sequence
  Synthetic
uuugggaggcagaagugg

SEQ ID NO: 162177 - RNA, 19 nt, Artificial Sequence
  Synthetic
cuuugggaggcagaagugg

SEQ ID NO: 162178 - RNA, 20 nt, Artificial Sequence
  Synthetic
acuuugggaggcagaagugg

SEQ ID NO: 162179 - RNA, 21 nt, Artificial Sequence
  Synthetic
cacuuugggaggcagaagugg

SEQ ID NO: 162180 - RNA, 23 nt, Artificial Sequence
  Synthetic
agcacuuugggaggcagaagugg

SEQ ID NO: 162181 - RNA, 24 nt, Artificial Sequence
  Synthetic
cagcacuuugggaggcagaagugg

SEQ ID NO: 162182 - RNA, 19 nt, Artificial Sequence
  Synthetic
uggguagaugaauaagugg

SEQ ID NO: 162183 - RNA, 20 nt, Artificial Sequence
  Synthetic
auggguagaugaauaagugg

SEQ ID NO: 162184 - RNA, 23 nt, Artificial Sequence
  Synthetic
uggauggguagaugaauaagugg

SEQ ID NO: 162185 - RNA, 24 nt, Artificial Sequence
  Synthetic
auggauggguagaugaauaagugg

SEQ ID NO: 162186 - RNA, 18 nt, Artificial Sequence
  Synthetic
ucaaaaggcauagagugg

SEQ ID NO: 162187 - RNA, 19 nt, Artificial Sequence
  Synthetic
aucaaaaggcauagagugg

SEQ ID NO: 162188 - RNA, 20 nt, Artificial Sequence
  Synthetic
aaucaaaaggcauagagugg

SEQ ID NO: 162189 - RNA, 21 nt, Artificial Sequence
  Synthetic
caaucaaaaggcauagagugg

SEQ ID NO: 162190 - RNA, 22 nt, Artificial Sequence
  Synthetic
ccaaucaaaaggcauagagugg

SEQ ID NO: 162191 - RNA, 23 nt, Artificial Sequence
  Synthetic
uccaaucaaaaggcauagagugg

SEQ ID NO: 162192 - RNA, 24 nt, Artificial Sequence
  Synthetic
cuccaaucaaaaggcauagagugg

SEQ ID NO: 162193 - RNA, 18 nt, Artificial Sequence
  Synthetic
caggcuggaguggagugg

SEQ ID NO: 162194 - RNA, 19 nt, Artificial Sequence
  Synthetic
ccaggcuggaguggagugg

SEQ ID NO: 162195 - RNA, 20 nt, Artificial Sequence
  Synthetic
cccaggcuggaguggagugg

SEQ ID NO: 162196 - RNA, 22 nt, Artificial Sequence
  Synthetic
cgcccaggcuggaguggagugg

SEQ ID NO: 162197 - RNA, 23 nt, Artificial Sequence
  Synthetic
ucgcccaggcuggaguggagugg

SEQ ID NO: 162198 - RNA, 19 nt, Artificial Sequence
  Synthetic
aggcugggaaggauagugg

SEQ ID NO: 162199 - RNA, 21 nt, Artificial Sequence
  Synthetic
agaggcugggaaggauagugg

SEQ ID NO: 162200 - RNA, 22 nt, Artificial Sequence
  Synthetic
cagaggcugggaaggauagugg

SEQ ID NO: 162201 - RNA, 23 nt, Artificial Sequence
  Synthetic
ccagaggcugggaaggauagugg

SEQ ID NO: 162202 - RNA, 19 nt, Artificial Sequence
  Synthetic
aggcugugaaggguagugg

SEQ ID NO: 162203 - RNA, 21 nt, Artificial Sequence
  Synthetic
agaggcugugaaggguagugg

SEQ ID NO: 162204 - RNA, 22 nt, Artificial Sequence
  Synthetic
cagaggcugugaaggguagugg

SEQ ID NO: 162205 - RNA, 23 nt, Artificial Sequence
  Synthetic
ccagaggcugugaaggguagugg

SEQ ID NO: 162206 - RNA, 24 nt, Artificial Sequence
  Synthetic
accagaggcugugaaggguagugg

SEQ ID NO: 162207 - RNA, 19 nt, Artificial Sequence
  Synthetic
cguugucaggccaaggugg

SEQ ID NO: 162208 - RNA, 20 nt, Artificial Sequence
  Synthetic
acguugucaggccaaggugg

SEQ ID NO: 162209 - RNA, 21 nt, Artificial Sequence
  Synthetic
cacguugucaggccaaggugg

SEQ ID NO: 162210 - RNA, 23 nt, Artificial Sequence
  Synthetic
agcacguugucaggccaaggugg

SEQ ID NO: 162211 - RNA, 24 nt, Artificial Sequence
  Synthetic
cagcacguugucaggccaaggugg

SEQ ID NO: 162212 - RNA, 18 nt, Artificial Sequence
  Synthetic
uuugggaguccaaggugg

SEQ ID NO: 162213 - RNA, 19 nt, Artificial Sequence
  Synthetic
cuuugggaguccaaggugg

SEQ ID NO: 162214 - RNA, 20 nt, Artificial Sequence
  Synthetic
acuuugggaguccaaggugg

SEQ ID NO: 162215 - RNA, 23 nt, Artificial Sequence
  Synthetic
aggacuuugggaguccaaggugg

SEQ ID NO: 162216 - RNA, 24 nt, Artificial Sequence
  Synthetic
caggacuuugggaguccaaggugg

SEQ ID NO: 162217 - RNA, 21 nt, Artificial Sequence
  Synthetic
cacuuugggaggccgaggugg

SEQ ID NO: 162218 - RNA, 23 nt, Artificial Sequence
  Synthetic
agcacuuugggaggccgaggugg

SEQ ID NO: 162219 - RNA, 24 nt, Artificial Sequence
  Synthetic
cagcacuuugggaggccgaggugg

SEQ ID NO: 162220 - RNA, 18 nt, Artificial Sequence
  Synthetic
cucagaaggcugaggugg

SEQ ID NO: 162221 - RNA, 19 nt, Artificial Sequence
  Synthetic
ucucagaaggcugaggugg

SEQ ID NO: 162222 - RNA, 20 nt, Artificial Sequence
  Synthetic
uucucagaaggcugaggugg

SEQ ID NO: 162223 - RNA, 21 nt, Artificial Sequence
  Synthetic
cuucucagaaggcugaggugg

SEQ ID NO: 162224 - RNA, 22 nt, Artificial Sequence
  Synthetic
ucuucucagaaggcugaggugg

SEQ ID NO: 162225 - RNA, 23 nt, Artificial Sequence
  Synthetic
aucuucucagaaggcugaggugg

SEQ ID NO: 162226 - RNA, 24 nt, Artificial Sequence
  Synthetic
caucuucucagaaggcugaggugg

SEQ ID NO: 162227 - RNA, 18 nt, Artificial Sequence
  Synthetic
cuuaggaggcugaggugg

SEQ ID NO: 162228 - RNA, 19 nt, Artificial Sequence
  Synthetic
acuuaggaggcugaggugg

SEQ ID NO: 162229 - RNA, 20 nt, Artificial Sequence
  Synthetic
uacuuaggaggcugaggugg

SEQ ID NO: 162230 - RNA, 21 nt, Artificial Sequence
  Synthetic
cuacuuaggaggcugaggugg

SEQ ID NO: 162231 - RNA, 23 nt, Artificial Sequence
  Synthetic
agcuacuuaggaggcugaggugg

SEQ ID NO: 162232 - RNA, 24 nt, Artificial Sequence
  Synthetic
cagcuacuuaggaggcugaggugg

SEQ ID NO: 162233 - RNA, 18 nt, Artificial Sequence
  Synthetic
cccgggaggcugaggugg

SEQ ID NO: 162234 - RNA, 19 nt, Artificial Sequence
  Synthetic
acccgggaggcugaggugg

SEQ ID NO: 162235 - RNA, 20 nt, Artificial Sequence
  Synthetic
uacccgggaggcugaggugg

SEQ ID NO: 162236 - RNA, 21 nt, Artificial Sequence
  Synthetic
cuacccgggaggcugaggugg

SEQ ID NO: 162237 - RNA, 23 nt, Artificial Sequence
  Synthetic
agcuacccgggaggcugaggugg

SEQ ID NO: 162238 - RNA, 24 nt, Artificial Sequence
  Synthetic
cagcuacccgggaggcugaggugg

SEQ ID NO: 162239 - RNA, 21 nt, Artificial Sequence
  Synthetic
cacuuugggaggcugaggugg

SEQ ID NO: 162240 - RNA, 23 nt, Artificial Sequence
  Synthetic
agcacuuugggaggcugaggugg

SEQ ID NO: 162241 - RNA, 24 nt, Artificial Sequence
  Synthetic
uagcacuuugggaggcugaggugg

SEQ ID NO: 162242 - RNA, 23 nt, Artificial Sequence
  Synthetic
cgcacuuugggaggcugaggugg

SEQ ID NO: 162243 - RNA, 24 nt, Artificial Sequence
  Synthetic
ccgcacuuugggaggcugaggugg

SEQ ID NO: 162244 - RNA, 19 nt, Artificial Sequence
  Synthetic
agucauuuuugcacggugg

SEQ ID NO: 162245 - RNA, 20 nt, Artificial Sequence
  Synthetic
uagucauuuuugcacggugg

SEQ ID NO: 162246 - RNA, 18 nt, Artificial Sequence
  Synthetic
cuuggagauagagggugg

SEQ ID NO: 162247 - RNA, 19 nt, Artificial Sequence
  Synthetic
acuuggagauagagggugg

SEQ ID NO: 162248 - RNA, 20 nt, Artificial Sequence
  Synthetic
cacuuggagauagagggugg

SEQ ID NO: 162249 - RNA, 21 nt, Artificial Sequence
  Synthetic
acacuuggagauagagggugg

SEQ ID NO: 162250 - RNA, 22 nt, Artificial Sequence
  Synthetic
aacacuuggagauagagggugg

SEQ ID NO: 162251 - RNA, 24 nt, Artificial Sequence
  Synthetic
ugaacacuuggagauagagggugg

SEQ ID NO: 162252 - RNA, 18 nt, Artificial Sequence
  Synthetic
cucuaggguggagggugg

SEQ ID NO: 162253 - RNA, 19 nt, Artificial Sequence
  Synthetic
acucuaggguggagggugg

SEQ ID NO: 162254 - RNA, 20 nt, Artificial Sequence
  Synthetic
uacucuaggguggagggugg

SEQ ID NO: 162255 - RNA, 21 nt, Artificial Sequence
  Synthetic
cuacucuaggguggagggugg

SEQ ID NO: 162256 - RNA, 22 nt, Artificial Sequence
  Synthetic
ucuacucuaggguggagggugg

SEQ ID NO: 162257 - RNA, 23 nt, Artificial Sequence
  Synthetic
aucuacucuaggguggagggugg

SEQ ID NO: 162258 - RNA, 18 nt, Artificial Sequence
  Synthetic
aagcaaaaaacggggugg

SEQ ID NO: 162259 - RNA, 19 nt, Artificial Sequence
  Synthetic
aaagcaaaaaacggggugg

SEQ ID NO: 162260 - RNA, 20 nt, Artificial Sequence
  Synthetic
aaaagcaaaaaacggggugg

SEQ ID NO: 162261 - RNA, 18 nt, Artificial Sequence
  Synthetic
ugcucgcuaccugggugg

SEQ ID NO: 162262 - RNA, 19 nt, Artificial Sequence
  Synthetic
augcucgcuaccugggugg

SEQ ID NO: 162263 - RNA, 20 nt, Artificial Sequence
  Synthetic
caugcucgcuaccugggugg

SEQ ID NO: 162264 - RNA, 21 nt, Artificial Sequence
  Synthetic
ccaugcucgcuaccugggugg

SEQ ID NO: 162265 - RNA, 22 nt, Artificial Sequence
  Synthetic
accaugcucgcuaccugggugg

SEQ ID NO: 162266 - RNA, 23 nt, Artificial Sequence
  Synthetic
uaccaugcucgcuaccugggugg

SEQ ID NO: 162267 - RNA, 24 nt, Artificial Sequence
  Synthetic
uuaccaugcucgcuaccugggugg

SEQ ID NO: 162268 - RNA, 20 nt, Artificial Sequence
  Synthetic
ugggaggcugaggugggugg

SEQ ID NO: 162269 - RNA, 21 nt, Artificial Sequence
  Synthetic
uugggaggcugaggugggugg

SEQ ID NO: 162270 - RNA, 22 nt, Artificial Sequence
  Synthetic
uuugggaggcugaggugggugg

SEQ ID NO: 162271 - RNA, 23 nt, Artificial Sequence
  Synthetic
cuuugggaggcugaggugggugg

SEQ ID NO: 162272 - RNA, 24 nt, Artificial Sequence
  Synthetic
acuuugggaggcugaggugggugg

SEQ ID NO: 162273 - RNA, 18 nt, Artificial Sequence
  Synthetic
ccauaugcuacaaugugg

SEQ ID NO: 162274 - RNA, 19 nt, Artificial Sequence
  Synthetic
accauaugcuacaaugugg

SEQ ID NO: 162275 - RNA, 20 nt, Artificial Sequence
  Synthetic
uaccauaugcuacaaugugg

SEQ ID NO: 162276 - RNA, 18 nt, Artificial Sequence
  Synthetic
uuagggaggccgaugugg

SEQ ID NO: 162277 - RNA, 19 nt, Artificial Sequence
  Synthetic
cuuagggaggccgaugugg

SEQ ID NO: 162278 - RNA, 21 nt, Artificial Sequence
  Synthetic
cgcuuagggaggccgaugugg

SEQ ID NO: 162279 - RNA, 23 nt, Artificial Sequence
  Synthetic
agcgcuuagggaggccgaugugg

SEQ ID NO: 162280 - RNA, 24 nt, Artificial Sequence
  Synthetic
uagcgcuuagggaggccgaugugg

SEQ ID NO: 162281 - RNA, 18 nt, Artificial Sequence
  Synthetic
uuuucaagggggaugugg

SEQ ID NO: 162282 - RNA, 19 nt, Artificial Sequence
  Synthetic
auuuucaagggggaugugg

SEQ ID NO: 162283 - RNA, 20 nt, Artificial Sequence
  Synthetic
aauuuucaagggggaugugg

SEQ ID NO: 162284 - RNA, 18 nt, Artificial Sequence
  Synthetic
cuugggaggcugaugugg

SEQ ID NO: 162285 - RNA, 19 nt, Artificial Sequence
  Synthetic
acuugggaggcugaugugg

SEQ ID NO: 162286 - RNA, 20 nt, Artificial Sequence
  Synthetic
uacuugggaggcugaugugg

SEQ ID NO: 162287 - RNA, 21 nt, Artificial Sequence
  Synthetic
cuacuugggaggcugaugugg

SEQ ID NO: 162288 - RNA, 24 nt, Artificial Sequence
  Synthetic
uggcuacuugggaggcugaugugg

SEQ ID NO: 162289 - RNA, 18 nt, Artificial Sequence
  Synthetic
aaaucagaaucucugugg

SEQ ID NO: 162290 - RNA, 19 nt, Artificial Sequence
  Synthetic
uaaaucagaaucucugugg

SEQ ID NO: 162291 - RNA, 20 nt, Artificial Sequence
  Synthetic
cuaaaucagaaucucugugg

SEQ ID NO: 162292 - RNA, 22 nt, Artificial Sequence
  Synthetic
ugcuaaaucagaaucucugugg

SEQ ID NO: 162293 - RNA, 23 nt, Artificial Sequence
  Synthetic
cugcuaaaucagaaucucugugg

SEQ ID NO: 162294 - RNA, 24 nt, Artificial Sequence
  Synthetic
ccugcuaaaucagaaucucugugg

SEQ ID NO: 162295 - RNA, 18 nt, Artificial Sequence
  Synthetic
agucuguagaucaauugg

SEQ ID NO: 162296 - RNA, 20 nt, Artificial Sequence
  Synthetic
agagucuguagaucaauugg

SEQ ID NO: 162297 - RNA, 18 nt, Artificial Sequence
  Synthetic
aacuuccuagagaauugg

SEQ ID NO: 162298 - RNA, 21 nt, Artificial Sequence
  Synthetic
uggaacuuccuagagaauugg

SEQ ID NO: 162299 - RNA, 22 nt, Artificial Sequence
  Synthetic
cuggaacuuccuagagaauugg

SEQ ID NO: 162300 - RNA, 23 nt, Artificial Sequence
  Synthetic
ucuggaacuuccuagagaauugg

SEQ ID NO: 162301 - RNA, 24 nt, Artificial Sequence
  Synthetic
cucuggaacuuccuagagaauugg

SEQ ID NO: 162302 - RNA, 18 nt, Artificial Sequence
  Synthetic
uaugugaaagaaacuugg

SEQ ID NO: 162303 - RNA, 19 nt, Artificial Sequence
  Synthetic
auaugugaaagaaacuugg

SEQ ID NO: 162304 - RNA, 20 nt, Artificial Sequence
  Synthetic
cauaugugaaagaaacuugg

SEQ ID NO: 162305 - RNA, 21 nt, Artificial Sequence
  Synthetic
ucauaugugaaagaaacuugg

SEQ ID NO: 162306 - RNA, 22 nt, Artificial Sequence
  Synthetic
uucauaugugaaagaaacuugg

SEQ ID NO: 162307 - RNA, 24 nt, Artificial Sequence
  Synthetic
aguucauaugugaaagaaacuugg

SEQ ID NO: 162308 - RNA, 18 nt, Artificial Sequence
  Synthetic
ugccuuaugccuccuugg

SEQ ID NO: 162309 - RNA, 19 nt, Artificial Sequence
  Synthetic
cugccuuaugccuccuugg

SEQ ID NO: 162310 - RNA, 20 nt, Artificial Sequence
  Synthetic
ucugccuuaugccuccuugg

SEQ ID NO: 162311 - RNA, 21 nt, Artificial Sequence
  Synthetic
uucugccuuaugccuccuugg

SEQ ID NO: 162312 - RNA, 22 nt, Artificial Sequence
  Synthetic
cuucugccuuaugccuccuugg

SEQ ID NO: 162313 - RNA, 23 nt, Artificial Sequence
  Synthetic
ucuucugccuuaugccuccuugg

SEQ ID NO: 162314 - RNA, 24 nt, Artificial Sequence
  Synthetic
uucuucugccuuaugccuccuugg

SEQ ID NO: 162315 - RNA, 21 nt, Artificial Sequence
  Synthetic
uucuuccugguuuagucuugg

SEQ ID NO: 162316 - RNA, 22 nt, Artificial Sequence
  Synthetic
cuucuuccugguuuagucuugg

SEQ ID NO: 162317 - RNA, 23 nt, Artificial Sequence
  Synthetic
acuucuuccugguuuagucuugg

SEQ ID NO: 162318 - RNA, 24 nt, Artificial Sequence
  Synthetic
aacuucuuccugguuuagucuugg

SEQ ID NO: 162319 - RNA, 22 nt, Artificial Sequence
  Synthetic
uuucuuccugguuuagucuugg

SEQ ID NO: 162320 - RNA, 23 nt, Artificial Sequence
  Synthetic
auuucuuccugguuuagucuugg

SEQ ID NO: 162321 - RNA, 18 nt, Artificial Sequence
  Synthetic
uugggaggcugagguugg

SEQ ID NO: 162322 - RNA, 19 nt, Artificial Sequence
  Synthetic
cuugggaggcugagguugg

SEQ ID NO: 162323 - RNA, 20 nt, Artificial Sequence
  Synthetic
acuugggaggcugagguugg

SEQ ID NO: 162324 - RNA, 21 nt, Artificial Sequence
  Synthetic
uacuugggaggcugagguugg

SEQ ID NO: 162325 - RNA, 22 nt, Artificial Sequence
  Synthetic
cuacuugggaggcugagguugg

SEQ ID NO: 162326 - RNA, 24 nt, Artificial Sequence
  Synthetic
ugcuacuugggaggcugagguugg

SEQ ID NO: 162327 - RNA, 18 nt, Artificial Sequence
  Synthetic
uaaauacuuauuuguugg

SEQ ID NO: 162328 - RNA, 19 nt, Artificial Sequence
  Synthetic
cuaaauacuuauuuguugg

SEQ ID NO: 162329 - RNA, 21 nt, Artificial Sequence
  Synthetic
agcuaaauacuuauuuguugg

SEQ ID NO: 162330 - RNA, 18 nt, Artificial Sequence
  Synthetic
uaauaaaaugaaauuugg

SEQ ID NO: 162331 - RNA, 20 nt, Artificial Sequence
  Synthetic
uguaauaaaaugaaauuugg

SEQ ID NO: 162332 - RNA, 18 nt, Artificial Sequence
  Synthetic
uuaugaaacuuaguuugg

SEQ ID NO: 162333 - RNA, 19 nt, Artificial Sequence
  Synthetic
cuuaugaaacuuaguuugg

SEQ ID NO: 162334 - RNA, 21 nt, Artificial Sequence
  Synthetic
ugcuuaugaaacuuaguuugg

SEQ ID NO: 162335 - RNA, 22 nt, Artificial Sequence
  Synthetic
uugcuuaugaaacuuaguuugg

SEQ ID NO: 162336 - RNA, 23 nt, Artificial Sequence
  Synthetic
uuugcuuaugaaacuuaguuugg

SEQ ID NO: 162337 - RNA, 24 nt, Artificial Sequence
  Synthetic
cuuugcuuaugaaacuuaguuugg

SEQ ID NO: 162338 - RNA, 21 nt, Artificial Sequence
  Synthetic
ugcuuaugaagcuuaguuugg

SEQ ID NO: 162339 - RNA, 22 nt, Artificial Sequence
  Synthetic
uugcuuaugaagcuuaguuugg

SEQ ID NO: 162340 - RNA, 23 nt, Artificial Sequence
  Synthetic
uuugcuuaugaagcuuaguuugg

SEQ ID NO: 162341 - RNA, 24 nt, Artificial Sequence
  Synthetic
cuuugcuuaugaagcuuaguuugg

SEQ ID NO: 162342 - RNA, 18 nt, Artificial Sequence
  Synthetic
uuaguaguuacguuuugg

SEQ ID NO: 162343 - RNA, 19 nt, Artificial Sequence
  Synthetic
auuaguaguuacguuuugg

SEQ ID NO: 162344 - RNA, 20 nt, Artificial Sequence
  Synthetic
uauuaguaguuacguuuugg

SEQ ID NO: 162345 - RNA, 21 nt, Artificial Sequence
  Synthetic
cuauuaguaguuacguuuugg

SEQ ID NO: 162346 - RNA, 22 nt, Artificial Sequence
  Synthetic
ccuauuaguaguuacguuuugg

SEQ ID NO: 162347 - RNA, 24 nt, Artificial Sequence
  Synthetic
agccuauuaguaguuacguuuugg

SEQ ID NO: 162348 - RNA, 19 nt, Artificial Sequence
  Synthetic
agugcaugugucuuuuugg

SEQ ID NO: 162349 - RNA, 20 nt, Artificial Sequence
  Synthetic
aagugcaugugucuuuuugg

SEQ ID NO: 162350 - RNA, 21 nt, Artificial Sequence
  Synthetic
caagugcaugugucuuuuugg

SEQ ID NO: 162351 - RNA, 22 nt, Artificial Sequence
  Synthetic
acaagugcaugugucuuuuugg

SEQ ID NO: 162352 - RNA, 23 nt, Artificial Sequence
  Synthetic
uacaagugcaugugucuuuuugg

SEQ ID NO: 162353 - RNA, 24 nt, Artificial Sequence
  Synthetic
auacaagugcaugugucuuuuugg

SEQ ID NO: 162354 - RNA, 18 nt, Artificial Sequence
  Synthetic
uucucuucuauuuuuugg

SEQ ID NO: 162355 - RNA, 19 nt, Artificial Sequence
  Synthetic
uuucucuucuauuuuuugg

SEQ ID NO: 162356 - RNA, 20 nt, Artificial Sequence
  Synthetic
cuuucucuucuauuuuuugg

SEQ ID NO: 162357 - RNA, 21 nt, Artificial Sequence
  Synthetic
ccuuucucuucuauuuuuugg

SEQ ID NO: 162358 - RNA, 22 nt, Artificial Sequence
  Synthetic
uccuuucucuucuauuuuuugg

SEQ ID NO: 162359 - RNA, 23 nt, Artificial Sequence
  Synthetic
uuccuuucucuucuauuuuuugg

SEQ ID NO: 162360 - RNA, 18 nt, Artificial Sequence
  Synthetic
ugcagccauaaaaaaaug

SEQ ID NO: 162361 - RNA, 19 nt, Artificial Sequence
  Synthetic
augcagccauaaaaaaaug

SEQ ID NO: 162362 - RNA, 20 nt, Artificial Sequence
  Synthetic
uaugcagccauaaaaaaaug

SEQ ID NO: 162363 - RNA, 21 nt, Artificial Sequence
  Synthetic
cuaugcagccauaaaaaaaug

SEQ ID NO: 162364 - RNA, 22 nt, Artificial Sequence
  Synthetic
acuaugcagccauaaaaaaaug

SEQ ID NO: 162365 - RNA, 23 nt, Artificial Sequence
  Synthetic
uacuaugcagccauaaaaaaaug

SEQ ID NO: 162366 - RNA, 24 nt, Artificial Sequence
  Synthetic
auacuaugcagccauaaaaaaaug

SEQ ID NO: 162367 - RNA, 21 nt, Artificial Sequence
  Synthetic
acuaugcagccagaaaaaaug

SEQ ID NO: 162368 - RNA, 22 nt, Artificial Sequence
  Synthetic
uacuaugcagccagaaaaaaug

SEQ ID NO: 162369 - RNA, 23 nt, Artificial Sequence
  Synthetic
auacuaugcagccagaaaaaaug

SEQ ID NO: 162370 - RNA, 24 nt, Artificial Sequence
  Synthetic
aauacuaugcagccagaaaaaaug

SEQ ID NO: 162371 - RNA, 21 nt, Artificial Sequence
  Synthetic
acuaugcagccauaaaaaaug

SEQ ID NO: 162372 - RNA, 22 nt, Artificial Sequence
  Synthetic
uacuaugcagccauaaaaaaug

SEQ ID NO: 162373 - RNA, 23 nt, Artificial Sequence
  Synthetic
auacuaugcagccauaaaaaaug

SEQ ID NO: 162374 - RNA, 24 nt, Artificial Sequence
  Synthetic
aauacuaugcagccauaaaaaaug

SEQ ID NO: 162375 - RNA, 18 nt, Artificial Sequence
  Synthetic
aguuuagagagaaaaaug

SEQ ID NO: 162376 - RNA, 19 nt, Artificial Sequence
  Synthetic
aaguuuagagagaaaaaug

SEQ ID NO: 162377 - RNA, 20 nt, Artificial Sequence
  Synthetic
aaaguuuagagagaaaaaug

SEQ ID NO: 162378 - RNA, 18 nt, Artificial Sequence
  Synthetic
auuaguacaaccaaaaug

SEQ ID NO: 162379 - RNA, 19 nt, Artificial Sequence
  Synthetic
aauuaguacaaccaaaaug

SEQ ID NO: 162380 - RNA, 20 nt, Artificial Sequence
  Synthetic
aaauuaguacaaccaaaaug

SEQ ID NO: 162381 - RNA, 21 nt, Artificial Sequence
  Synthetic
uaaauuaguacaaccaaaaug

SEQ ID NO: 162382 - RNA, 23 nt, Artificial Sequence
  Synthetic
uguaaauuaguacaaccaaaaug

SEQ ID NO: 162383 - RNA, 24 nt, Artificial Sequence
  Synthetic
auguaaauuaguacaaccaaaaug

SEQ ID NO: 162384 - RNA, 18 nt, Artificial Sequence
  Synthetic
auaagaaguuagaaaaug

SEQ ID NO: 162385 - RNA, 19 nt, Artificial Sequence
  Synthetic
aauaagaaguuagaaaaug

SEQ ID NO: 162386 - RNA, 20 nt, Artificial Sequence
  Synthetic
uaauaagaaguuagaaaaug

SEQ ID NO: 162387 - RNA, 18 nt, Artificial Sequence
  Synthetic
uauaugaucaaagaaaug

SEQ ID NO: 162388 - RNA, 19 nt, Artificial Sequence
  Synthetic
auauaugaucaaagaaaug

SEQ ID NO: 162389 - RNA, 20 nt, Artificial Sequence
  Synthetic
aauauaugaucaaagaaaug

SEQ ID NO: 162390 - RNA, 19 nt, Artificial Sequence
  Synthetic
agcagggaaggaagaaaug

SEQ ID NO: 162391 - RNA, 20 nt, Artificial Sequence
  Synthetic
aagcagggaaggaagaaaug

SEQ ID NO: 162392 - RNA, 21 nt, Artificial Sequence
  Synthetic
aaagcagggaaggaagaaaug

SEQ ID NO: 162393 - RNA, 22 nt, Artificial Sequence
  Synthetic
uaaagcagggaaggaagaaaug

SEQ ID NO: 162394 - RNA, 23 nt, Artificial Sequence
  Synthetic
cuaaagcagggaaggaagaaaug

SEQ ID NO: 162395 - RNA, 24 nt, Artificial Sequence
  Synthetic
acuaaagcagggaaggaagaaaug

SEQ ID NO: 162396 - RNA, 18 nt, Artificial Sequence
  Synthetic
cagcagaaugaagaaaug

SEQ ID NO: 162397 - RNA, 19 nt, Artificial Sequence
  Synthetic
ucagcagaaugaagaaaug

SEQ ID NO: 162398 - RNA, 20 nt, Artificial Sequence
  Synthetic
aucagcagaaugaagaaaug

SEQ ID NO: 162399 - RNA, 18 nt, Artificial Sequence
  Synthetic
cagugcagaagagaaaug

SEQ ID NO: 162400 - RNA, 19 nt, Artificial Sequence
  Synthetic
ucagugcagaagagaaaug

SEQ ID NO: 162401 - RNA, 22 nt, Artificial Sequence
  Synthetic
aggucagugcagaagagaaaug

SEQ ID NO: 162402 - RNA, 23 nt, Artificial Sequence
  Synthetic
uaggucagugcagaagagaaaug

SEQ ID NO: 162403 - RNA, 24 nt, Artificial Sequence
  Synthetic
cuaggucagugcagaagagaaaug

SEQ ID NO: 162404 - RNA, 19 nt, Artificial Sequence
  Synthetic
aguugaacucauagaaaug

SEQ ID NO: 162405 - RNA, 20 nt, Artificial Sequence
  Synthetic
aaguugaacucauagaaaug

SEQ ID NO: 162406 - RNA, 21 nt, Artificial Sequence
  Synthetic
aaaguugaacucauagaaaug

SEQ ID NO: 162407 - RNA, 22 nt, Artificial Sequence
  Synthetic
aaaaguugaacucauagaaaug

SEQ ID NO: 162408 - RNA, 23 nt, Artificial Sequence
  Synthetic
aaaaaguugaacucauagaaaug

SEQ ID NO: 162409 - RNA, 24 nt, Artificial Sequence
  Synthetic
aaaaaaguugaacucauagaaaug

SEQ ID NO: 162410 - RNA, 19 nt, Artificial Sequence
  Synthetic
ugagcacuugcuagaaaug

SEQ ID NO: 162411 - RNA, 20 nt, Artificial Sequence
  Synthetic
cugagcacuugcuagaaaug

SEQ ID NO: 162412 - RNA, 19 nt, Artificial Sequence
  Synthetic
ugauaacuuguuagaaaug

SEQ ID NO: 162413 - RNA, 20 nt, Artificial Sequence
  Synthetic
cugauaacuuguuagaaaug

SEQ ID NO: 162414 - RNA, 21 nt, Artificial Sequence
  Synthetic
ccugauaacuuguuagaaaug

SEQ ID NO: 162415 - RNA, 22 nt, Artificial Sequence
  Synthetic
accugauaacuuguuagaaaug

SEQ ID NO: 162416 - RNA, 23 nt, Artificial Sequence
  Synthetic
caccugauaacuuguuagaaaug

SEQ ID NO: 162417 - RNA, 24 nt, Artificial Sequence
  Synthetic
ucaccugauaacuuguuagaaaug

SEQ ID NO: 162418 - RNA, 18 nt, Artificial Sequence
  Synthetic
uaaaaauauuuagaaaug

SEQ ID NO: 162419 - RNA, 19 nt, Artificial Sequence
  Synthetic
auaaaaauauuuagaaaug

SEQ ID NO: 162420 - RNA, 20 nt, Artificial Sequence
  Synthetic
aauaaaaauauuuagaaaug

SEQ ID NO: 162421 - RNA, 18 nt, Artificial Sequence
  Synthetic
caguguggaagggaaaug

SEQ ID NO: 162422 - RNA, 19 nt, Artificial Sequence
  Synthetic
acaguguggaagggaaaug

SEQ ID NO: 162423 - RNA, 22 nt, Artificial Sequence
  Synthetic
aggacaguguggaagggaaaug

SEQ ID NO: 162424 - RNA, 23 nt, Artificial Sequence
  Synthetic
uaggacaguguggaagggaaaug

SEQ ID NO: 162425 - RNA, 24 nt, Artificial Sequence
  Synthetic
cuaggacaguguggaagggaaaug

SEQ ID NO: 162426 - RNA, 20 nt, Artificial Sequence
  Synthetic
uggagagauuaggggaaaug

SEQ ID NO: 162427 - RNA, 18 nt, Artificial Sequence
  Synthetic
uggucagacauggaaaug

SEQ ID NO: 162428 - RNA, 20 nt, Artificial Sequence
  Synthetic
aguggucagacauggaaaug

SEQ ID NO: 162429 - RNA, 21 nt, Artificial Sequence
  Synthetic
caguggucagacauggaaaug

SEQ ID NO: 162430 - RNA, 23 nt, Artificial Sequence
  Synthetic
agcaguggucagacauggaaaug

SEQ ID NO: 162431 - RNA, 24 nt, Artificial Sequence
  Synthetic
uagcaguggucagacauggaaaug

SEQ ID NO: 162432 - RNA, 18 nt, Artificial Sequence
  Synthetic
caacaaggaaaauaaaug

SEQ ID NO: 162433 - RNA, 20 nt, Artificial Sequence
  Synthetic
agcaacaaggaaaauaaaug

SEQ ID NO: 162434 - RNA, 18 nt, Artificial Sequence
  Synthetic
aaauagcuaauguaaaug

SEQ ID NO: 162435 - RNA, 20 nt, Artificial Sequence
  Synthetic
agaaauagcuaauguaaaug

SEQ ID NO: 162436 - RNA, 23 nt, Artificial Sequence
  Synthetic
aggagaaauagcuaauguaaaug

SEQ ID NO: 162437 - RNA, 24 nt, Artificial Sequence
  Synthetic
uaggagaaauagcuaauguaaaug

SEQ ID NO: 162438 - RNA, 18 nt, Artificial Sequence
  Synthetic
aaaaauuuaauguaaaug

SEQ ID NO: 162439 - RNA, 19 nt, Artificial Sequence
  Synthetic
aaaaaauuuaauguaaaug

SEQ ID NO: 162440 - RNA, 20 nt, Artificial Sequence
  Synthetic
caaaaaauuuaauguaaaug

SEQ ID NO: 162441 - RNA, 21 nt, Artificial Sequence
  Synthetic
ucaaaaaauuuaauguaaaug

SEQ ID NO: 162442 - RNA, 22 nt, Artificial Sequence
  Synthetic
uucaaaaaauuuaauguaaaug

SEQ ID NO: 162443 - RNA, 23 nt, Artificial Sequence
  Synthetic
uuucaaaaaauuuaauguaaaug

SEQ ID NO: 162444 - RNA, 24 nt, Artificial Sequence
  Synthetic
uuuucaaaaaauuuaauguaaaug

SEQ ID NO: 162445 - RNA, 18 nt, Artificial Sequence
  Synthetic
uauaccuaauguuaaaug

SEQ ID NO: 162446 - RNA, 19 nt, Artificial Sequence
  Synthetic
auauaccuaauguuaaaug

SEQ ID NO: 162447 - RNA, 21 nt, Artificial Sequence
  Synthetic
agauauaccuaauguuaaaug

SEQ ID NO: 162448 - RNA, 24 nt, Artificial Sequence
  Synthetic
aggagauauaccuaauguuaaaug

SEQ ID NO: 162449 - RNA, 19 nt, Artificial Sequence
  Synthetic
agacuagaaaucaacaaug

SEQ ID NO: 162450 - RNA, 21 nt, Artificial Sequence
  Synthetic
ugagacuagaaaucaacaaug

SEQ ID NO: 162451 - RNA, 22 nt, Artificial Sequence
  Synthetic
augagacuagaaaucaacaaug

SEQ ID NO: 162452 - RNA, 23 nt, Artificial Sequence
  Synthetic
aaugagacuagaaaucaacaaug

SEQ ID NO: 162453 - RNA, 18 nt, Artificial Sequence
  Synthetic
uacuggauaaugacaaug

SEQ ID NO: 162454 - RNA, 19 nt, Artificial Sequence
  Synthetic
cuacuggauaaugacaaug

SEQ ID NO: 162455 - RNA, 20 nt, Artificial Sequence
  Synthetic
acuacuggauaaugacaaug

SEQ ID NO: 162456 - RNA, 18 nt, Artificial Sequence
  Synthetic
uacuuccaggauacaaug

SEQ ID NO: 162457 - RNA, 19 nt, Artificial Sequence
  Synthetic
uuacuuccaggauacaaug

SEQ ID NO: 162458 - RNA, 21 nt, Artificial Sequence
  Synthetic
aguuacuuccaggauacaaug

SEQ ID NO: 162459 - RNA, 22 nt, Artificial Sequence
  Synthetic
uaguuacuuccaggauacaaug

SEQ ID NO: 162460 - RNA, 23 nt, Artificial Sequence
  Synthetic
uuaguuacuuccaggauacaaug

SEQ ID NO: 162461 - RNA, 18 nt, Artificial Sequence
  Synthetic
uauuuagguacuccaaug

SEQ ID NO: 162462 - RNA, 19 nt, Artificial Sequence
  Synthetic
auauuuagguacuccaaug

SEQ ID NO: 162463 - RNA, 20 nt, Artificial Sequence
  Synthetic
uauauuuagguacuccaaug

SEQ ID NO: 162464 - RNA, 21 nt, Artificial Sequence
  Synthetic
auauauuuagguacuccaaug

SEQ ID NO: 162465 - RNA, 22 nt, Artificial Sequence
  Synthetic
uauauauuuagguacuccaaug

SEQ ID NO: 162466 - RNA, 23 nt, Artificial Sequence
  Synthetic
uuauauauuuagguacuccaaug

SEQ ID NO: 162467 - RNA, 24 nt, Artificial Sequence
  Synthetic
uuuauauauuuagguacuccaaug

SEQ ID NO: 162468 - RNA, 18 nt, Artificial Sequence
  Synthetic
aguaaaaaaaaagcaaug

SEQ ID NO: 162469 - RNA, 19 nt, Artificial Sequence
  Synthetic
uaguaaaaaaaaagcaaug

SEQ ID NO: 162470 - RNA, 18 nt, Artificial Sequence
  Synthetic
ugggggcaggaagcaaug

SEQ ID NO: 162471 - RNA, 19 nt, Artificial Sequence
  Synthetic
cugggggcaggaagcaaug

SEQ ID NO: 162472 - RNA, 24 nt, Artificial Sequence
  Synthetic
aggggcugggggcaggaagcaaug

SEQ ID NO: 162473 - RNA, 18 nt, Artificial Sequence
  Synthetic
cauauacaaagagcaaug

SEQ ID NO: 162474 - RNA, 19 nt, Artificial Sequence
  Synthetic
acauauacaaagagcaaug

SEQ ID NO: 162475 - RNA, 20 nt, Artificial Sequence
  Synthetic
aacauauacaaagagcaaug

SEQ ID NO: 162476 - RNA, 19 nt, Artificial Sequence
  Synthetic
ugggagcugguuagcaaug

SEQ ID NO: 162477 - RNA, 20 nt, Artificial Sequence
  Synthetic
cugggagcugguuagcaaug

SEQ ID NO: 162478 - RNA, 21 nt, Artificial Sequence
  Synthetic
ccugggagcugguuagcaaug

SEQ ID NO: 162479 - RNA, 22 nt, Artificial Sequence
  Synthetic
accugggagcugguuagcaaug

SEQ ID NO: 162480 - RNA, 23 nt, Artificial Sequence
  Synthetic
caccugggagcugguuagcaaug

SEQ ID NO: 162481 - RNA, 24 nt, Artificial Sequence
  Synthetic
ucaccugggagcugguuagcaaug

SEQ ID NO: 162482 - RNA, 18 nt, Artificial Sequence
  Synthetic
ugaaacuccagugcaaug

SEQ ID NO: 162483 - RNA, 19 nt, Artificial Sequence
  Synthetic
uugaaacuccagugcaaug

SEQ ID NO: 162484 - RNA, 20 nt, Artificial Sequence
  Synthetic
uuugaaacuccagugcaaug

SEQ ID NO: 162485 - RNA, 18 nt, Artificial Sequence
  Synthetic
aaugucaccuucucaaug

SEQ ID NO: 162486 - RNA, 19 nt, Artificial Sequence
  Synthetic
aaaugucaccuucucaaug

SEQ ID NO: 162487 - RNA, 20 nt, Artificial Sequence
  Synthetic
caaaugucaccuucucaaug

SEQ ID NO: 162488 - RNA, 21 nt, Artificial Sequence
  Synthetic
ucaaaugucaccuucucaaug

SEQ ID NO: 162489 - RNA, 22 nt, Artificial Sequence
  Synthetic
cucaaaugucaccuucucaaug

SEQ ID NO: 162490 - RNA, 24 nt, Artificial Sequence
  Synthetic
ugcucaaaugucaccuucucaaug

SEQ ID NO: 162491 - RNA, 18 nt, Artificial Sequence
  Synthetic
uauaccuaauguucaaug

SEQ ID NO: 162492 - RNA, 19 nt, Artificial Sequence
  Synthetic
auauaccuaauguucaaug

SEQ ID NO: 162493 - RNA, 21 nt, Artificial Sequence
  Synthetic
agauauaccuaauguucaaug

SEQ ID NO: 162494 - RNA, 24 nt, Artificial Sequence
  Synthetic
aggagauauaccuaauguucaaug

SEQ ID NO: 162495 - RNA, 21 nt, Artificial Sequence
  Synthetic
aaauucuuuucuuuaagaaug

SEQ ID NO: 162496 - RNA, 22 nt, Artificial Sequence
  Synthetic
aaaauucuuuucuuuaagaaug

SEQ ID NO: 162497 - RNA, 24 nt, Artificial Sequence
  Synthetic
ugaaaauucuuuucuuuaagaaug

SEQ ID NO: 162498 - RNA, 18 nt, Artificial Sequence
  Synthetic
ugaaugaaugaaggaaug

SEQ ID NO: 162499 - RNA, 20 nt, Artificial Sequence
  Synthetic
cgugaaugaaugaaggaaug

SEQ ID NO: 162500 - RNA, 21 nt, Artificial Sequence
  Synthetic
acgugaaugaaugaaggaaug

SEQ ID NO: 162501 - RNA, 22 nt, Artificial Sequence
  Synthetic
uacgugaaugaaugaaggaaug

SEQ ID NO: 162502 - RNA, 23 nt, Artificial Sequence
  Synthetic
auacgugaaugaaugaaggaaug

SEQ ID NO: 162503 - RNA, 24 nt, Artificial Sequence
  Synthetic
aauacgugaaugaaugaaggaaug

SEQ ID NO: 162504 - RNA, 21 nt, Artificial Sequence
  Synthetic
uuuacuuuuuguauaggaaug

SEQ ID NO: 162505 - RNA, 22 nt, Artificial Sequence
  Synthetic
uuuuacuuuuuguauaggaaug

SEQ ID NO: 162506 - RNA, 24 nt, Artificial Sequence
  Synthetic
uguuuuacuuuuuguauaggaaug

SEQ ID NO: 162507 - RNA, 18 nt, Artificial Sequence
  Synthetic
aaauuuaauaaaauaaug

SEQ ID NO: 162508 - RNA, 20 nt, Artificial Sequence
  Synthetic
uggcugucguuuugauaaug

SEQ ID NO: 162509 - RNA, 21 nt, Artificial Sequence
  Synthetic
cuggcugucguuuugauaaug

SEQ ID NO: 162510 - RNA, 22 nt, Artificial Sequence
  Synthetic
ucuggcugucguuuugauaaug

SEQ ID NO: 162511 - RNA, 23 nt, Artificial Sequence
  Synthetic
aucuggcugucguuuugauaaug

SEQ ID NO: 162512 - RNA, 24 nt, Artificial Sequence
  Synthetic
uaucuggcugucguuuugauaaug

SEQ ID NO: 162513 - RNA, 18 nt, Artificial Sequence
  Synthetic
auuugcauuucucuaaug

SEQ ID NO: 162514 - RNA, 20 nt, Artificial Sequence
  Synthetic
ugauuugcauuucucuaaug

SEQ ID NO: 162515 - RNA, 21 nt, Artificial Sequence
  Synthetic
uugauuugcauuucucuaaug

SEQ ID NO: 162516 - RNA, 22 nt, Artificial Sequence
  Synthetic
uuugauuugcauuucucuaaug

SEQ ID NO: 162517 - RNA, 23 nt, Artificial Sequence
  Synthetic
uuuugauuugcauuucucuaaug

SEQ ID NO: 162518 - RNA, 18 nt, Artificial Sequence
  Synthetic
aaguaaagacugaacaug

SEQ ID NO: 162519 - RNA, 19 nt, Artificial Sequence
  Synthetic
aaaguaaagacugaacaug

SEQ ID NO: 162520 - RNA, 21 nt, Artificial Sequence
  Synthetic
agaaaguaaagacugaacaug

SEQ ID NO: 162521 - RNA, 22 nt, Artificial Sequence
  Synthetic
aagaaaguaaagacugaacaug

SEQ ID NO: 162522 - RNA, 23 nt, Artificial Sequence
  Synthetic
caagaaaguaaagacugaacaug

SEQ ID NO: 162523 - RNA, 24 nt, Artificial Sequence
  Synthetic
ucaagaaaguaaagacugaacaug

SEQ ID NO: 162524 - RNA, 18 nt, Artificial Sequence
  Synthetic
uaauugaaaaguaacaug

SEQ ID NO: 162525 - RNA, 19 nt, Artificial Sequence
  Synthetic
auaauugaaaaguaacaug

SEQ ID NO: 162526 - RNA, 20 nt, Artificial Sequence
  Synthetic
uauaauugaaaaguaacaug

SEQ ID NO: 162527 - RNA, 18 nt, Artificial Sequence
  Synthetic
uuggaagugcguaacaug

SEQ ID NO: 162528 - RNA, 19 nt, Artificial Sequence
  Synthetic
uuuggaagugcguaacaug

SEQ ID NO: 162529 - RNA, 20 nt, Artificial Sequence
  Synthetic
cuuuggaagugcguaacaug

SEQ ID NO: 162530 - RNA, 21 nt, Artificial Sequence
  Synthetic
acuuuggaagugcguaacaug

SEQ ID NO: 162531 - RNA, 23 nt, Artificial Sequence
  Synthetic
cgacuuuggaagugcguaacaug

SEQ ID NO: 162532 - RNA, 18 nt, Artificial Sequence
  Synthetic
aaaacaauaaaaaccaug

SEQ ID NO: 162533 - RNA, 19 nt, Artificial Sequence
  Synthetic
caaaacaauaaaaaccaug

SEQ ID NO: 162534 - RNA, 20 nt, Artificial Sequence
  Synthetic
ccaaaacaauaaaaaccaug

SEQ ID NO: 162535 - RNA, 18 nt, Artificial Sequence
  Synthetic
ugucccucaguauccaug

SEQ ID NO: 162536 - RNA, 19 nt, Artificial Sequence
  Synthetic
uugucccucaguauccaug

SEQ ID NO: 162537 - RNA, 20 nt, Artificial Sequence
  Synthetic
auugucccucaguauccaug

SEQ ID NO: 162538 - RNA, 21 nt, Artificial Sequence
  Synthetic
aauugucccucaguauccaug

SEQ ID NO: 162539 - RNA, 22 nt, Artificial Sequence
  Synthetic
caauugucccucaguauccaug

SEQ ID NO: 162540 - RNA, 23 nt, Artificial Sequence
  Synthetic
acaauugucccucaguauccaug

SEQ ID NO: 162541 - RNA, 24 nt, Artificial Sequence
  Synthetic
uacaauugucccucaguauccaug

SEQ ID NO: 162542 - RNA, 20 nt, Artificial Sequence
  Synthetic
uggcugcauaguauuccaug

SEQ ID NO: 162543 - RNA, 21 nt, Artificial Sequence
  Synthetic
auggcugcauaguauuccaug

SEQ ID NO: 162544 - RNA, 22 nt, Artificial Sequence
  Synthetic
uauggcugcauaguauuccaug

SEQ ID NO: 162545 - RNA, 23 nt, Artificial Sequence
  Synthetic
uuauggcugcauaguauuccaug

SEQ ID NO: 162546 - RNA, 24 nt, Artificial Sequence
  Synthetic
uuuauggcugcauaguauuccaug

SEQ ID NO: 162547 - RNA, 18 nt, Artificial Sequence
  Synthetic
cuuuucauccacagcaug

SEQ ID NO: 162548 - RNA, 20 nt, Artificial Sequence
  Synthetic
ugcuuuucauccacagcaug

SEQ ID NO: 162549 - RNA, 21 nt, Artificial Sequence
  Synthetic
uuauugagaguuuuuagcaug

SEQ ID NO: 162550 - RNA, 22 nt, Artificial Sequence
  Synthetic
uuuauugagaguuuuuagcaug

SEQ ID NO: 162551 - RNA, 23 nt, Artificial Sequence
  Synthetic
auuuauugagaguuuuuagcaug

SEQ ID NO: 162552 - RNA, 24 nt, Artificial Sequence
  Synthetic
aauuuauugagaguuuuuagcaug

SEQ ID NO: 162553 - RNA, 18 nt, Artificial Sequence
  Synthetic
aauauuuuuaaaaucaug

SEQ ID NO: 162554 - RNA, 19 nt, Artificial Sequence
  Synthetic
aaauauuuuuaaaaucaug

SEQ ID NO: 162555 - RNA, 20 nt, Artificial Sequence
  Synthetic
uaaauauuuuuaaaaucaug

SEQ ID NO: 162556 - RNA, 20 nt, Artificial Sequence
  Synthetic
ugggagguaacugaaucaug

SEQ ID NO: 162557 - RNA, 22 nt, Artificial Sequence
  Synthetic
agugggagguaacugaaucaug

SEQ ID NO: 162558 - RNA, 23 nt, Artificial Sequence
  Synthetic
cagugggagguaacugaaucaug

SEQ ID NO: 162559 - RNA, 24 nt, Artificial Sequence
  Synthetic
ccagugggagguaacugaaucaug

SEQ ID NO: 162560 - RNA, 19 nt, Artificial Sequence
  Synthetic
ugaagccaacuugaucaug

SEQ ID NO: 162561 - RNA, 20 nt, Artificial Sequence
  Synthetic
augaagccaacuugaucaug

SEQ ID NO: 162562 - RNA, 24 nt, Artificial Sequence
  Synthetic
agggaugaagccaacuugaucaug

SEQ ID NO: 162563 - RNA, 23 nt, Artificial Sequence
  Synthetic
aggaugaagcccacuugaucaug

SEQ ID NO: 162564 - RNA, 24 nt, Artificial Sequence
  Synthetic
aaggaugaagcccacuugaucaug

SEQ ID NO: 162565 - RNA, 18 nt, Artificial Sequence
  Synthetic
uacaaaaauuaacucaug

SEQ ID NO: 162566 - RNA, 19 nt, Artificial Sequence
  Synthetic
auacaaaaauuaacucaug

SEQ ID NO: 162567 - RNA, 20 nt, Artificial Sequence
  Synthetic
uauacaaaaauuaacucaug

SEQ ID NO: 162568 - RNA, 21 nt, Artificial Sequence
  Synthetic
uuauacaaaaauuaacucaug

SEQ ID NO: 162569 - RNA, 22 nt, Artificial Sequence
  Synthetic
cuuauacaaaaauuaacucaug

SEQ ID NO: 162570 - RNA, 23 nt, Artificial Sequence
  Synthetic
ccuuauacaaaaauuaacucaug

SEQ ID NO: 162571 - RNA, 24 nt, Artificial Sequence
  Synthetic
accuuauacaaaaauuaacucaug

SEQ ID NO: 162572 - RNA, 18 nt, Artificial Sequence
  Synthetic
cuccacccaaaucucaug

SEQ ID NO: 162573 - RNA, 19 nt, Artificial Sequence
  Synthetic
ucuccacccaaaucucaug

SEQ ID NO: 162574 - RNA, 21 nt, Artificial Sequence
  Synthetic
ugucuccacccaaaucucaug

SEQ ID NO: 162575 - RNA, 23 nt, Artificial Sequence
  Synthetic
ugugucuccacccaaaucucaug

SEQ ID NO: 162576 - RNA, 24 nt, Artificial Sequence
  Synthetic
cugugucuccacccaaaucucaug

SEQ ID NO: 162577 - RNA, 18 nt, Artificial Sequence
  Synthetic
auuaaauuuauauucaug

SEQ ID NO: 162578 - RNA, 19 nt, Artificial Sequence
  Synthetic
uauuaaauuuauauucaug

SEQ ID NO: 162579 - RNA, 20 nt, Artificial Sequence
  Synthetic
auauuaaauuuauauucaug

SEQ ID NO: 162580 - RNA, 18 nt, Artificial Sequence
  Synthetic
caaauauugacaaagaug

SEQ ID NO: 162581 - RNA, 19 nt, Artificial Sequence
  Synthetic
ccaaauauugacaaagaug

SEQ ID NO: 162582 - RNA, 20 nt, Artificial Sequence
  Synthetic
accaaauauugacaaagaug

SEQ ID NO: 162583 - RNA, 22 nt, Artificial Sequence
  Synthetic
agaccaaauauugacaaagaug

SEQ ID NO: 162584 - RNA, 23 nt, Artificial Sequence
  Synthetic
aagaccaaauauugacaaagaug

SEQ ID NO: 162585 - RNA, 24 nt, Artificial Sequence
  Synthetic
caagaccaaauauugacaaagaug

SEQ ID NO: 162586 - RNA, 18 nt, Artificial Sequence
  Synthetic
auugauuuuuuaaagaug

SEQ ID NO: 162587 - RNA, 19 nt, Artificial Sequence
  Synthetic
aauugauuuuuuaaagaug

SEQ ID NO: 162588 - RNA, 20 nt, Artificial Sequence
  Synthetic
aaauugauuuuuuaaagaug

SEQ ID NO: 162589 - RNA, 21 nt, Artificial Sequence
  Synthetic
uaugauuuacaagacaagaug

SEQ ID NO: 162590 - RNA, 22 nt, Artificial Sequence
  Synthetic
auaugauuuacaagacaagaug

SEQ ID NO: 162591 - RNA, 24 nt, Artificial Sequence
  Synthetic
agauaugauuuacaagacaagaug

SEQ ID NO: 162592 - RNA, 18 nt, Artificial Sequence
  Synthetic
agugcagugaagaagaug

SEQ ID NO: 162593 - RNA, 20 nt, Artificial Sequence
  Synthetic
agagugcagugaagaagaug

SEQ ID NO: 162594 - RNA, 21 nt, Artificial Sequence
  Synthetic
uacuuaauggaagggcagaug

SEQ ID NO: 162595 - RNA, 22 nt, Artificial Sequence
  Synthetic
auacuuaauggaagggcagaug

SEQ ID NO: 162596 - RNA, 23 nt, Artificial Sequence
  Synthetic
aauacuuaauggaagggcagaug

SEQ ID NO: 162597 - RNA, 24 nt, Artificial Sequence
  Synthetic
caauacuuaauggaagggcagaug

SEQ ID NO: 162598 - RNA, 18 nt, Artificial Sequence
  Synthetic
ugauaaguguuucagaug

SEQ ID NO: 162599 - RNA, 19 nt, Artificial Sequence
  Synthetic
augauaaguguuucagaug

SEQ ID NO: 162600 - RNA, 20 nt, Artificial Sequence
  Synthetic
aaugauaaguguuucagaug

SEQ ID NO: 162601 - RNA, 21 nt, Artificial Sequence
  Synthetic
aaaugauaaguguuucagaug

SEQ ID NO: 162602 - RNA, 23 nt, Artificial Sequence
  Synthetic
agaaaugauaaguguuucagaug

SEQ ID NO: 162603 - RNA, 24 nt, Artificial Sequence
  Synthetic
aagaaaugauaaguguuucagaug

SEQ ID NO: 162604 - RNA, 18 nt, Artificial Sequence
  Synthetic
aaucaaacucaggagaug

SEQ ID NO: 162605 - RNA, 19 nt, Artificial Sequence
  Synthetic
aaaucaaacucaggagaug

SEQ ID NO: 162606 - RNA, 21 nt, Artificial Sequence
  Synthetic
ugaaaucaaacucaggagaug

SEQ ID NO: 162607 - RNA, 22 nt, Artificial Sequence
  Synthetic
cugaaaucaaacucaggagaug

SEQ ID NO: 162608 - RNA, 23 nt, Artificial Sequence
  Synthetic
acugaaaucaaacucaggagaug

SEQ ID NO: 162609 - RNA, 18 nt, Artificial Sequence
  Synthetic
aauuaaacucaggagaug

SEQ ID NO: 162610 - RNA, 19 nt, Artificial Sequence
  Synthetic
aaauuaaacucaggagaug

SEQ ID NO: 162611 - RNA, 21 nt, Artificial Sequence
  Synthetic
ugaaauuaaacucaggagaug

SEQ ID NO: 162612 - RNA, 22 nt, Artificial Sequence
  Synthetic
cugaaauuaaacucaggagaug

SEQ ID NO: 162613 - RNA, 23 nt, Artificial Sequence
  Synthetic
acugaaauuaaacucaggagaug

SEQ ID NO: 162614 - RNA, 24 nt, Artificial Sequence
  Synthetic
cacugaaauuaaacucaggagaug

SEQ ID NO: 162615 - RNA, 18 nt, Artificial Sequence
  Synthetic
ugauaaauacuugagaug

SEQ ID NO: 162616 - RNA, 19 nt, Artificial Sequence
  Synthetic
augauaaauacuugagaug

SEQ ID NO: 162617 - RNA, 20 nt, Artificial Sequence
  Synthetic
aaugauaaauacuugagaug

SEQ ID NO: 162618 - RNA, 21 nt, Artificial Sequence
  Synthetic
aaaugauaaauacuugagaug

SEQ ID NO: 162619 - RNA, 22 nt, Artificial Sequence
  Synthetic
uaaaugauaaauacuugagaug

SEQ ID NO: 162620 - RNA, 23 nt, Artificial Sequence
  Synthetic
auaaaugauaaauacuugagaug

SEQ ID NO: 162621 - RNA, 24 nt, Artificial Sequence
  Synthetic
uauaaaugauaaauacuugagaug

SEQ ID NO: 162622 - RNA, 20 nt, Artificial Sequence
  Synthetic
uggggcuuaaaaccuagaug

SEQ ID NO: 162623 - RNA, 22 nt, Artificial Sequence
  Synthetic
uguggggcuuaaaaccuagaug

SEQ ID NO: 162624 - RNA, 23 nt, Artificial Sequence
  Synthetic
auguggggcuuaaaaccuagaug

SEQ ID NO: 162625 - RNA, 24 nt, Artificial Sequence
  Synthetic
cauguggggcuuaaaaccuagaug

SEQ ID NO: 162626 - RNA, 18 nt, Artificial Sequence
  Synthetic
uuuaccuuaagcuagaug

SEQ ID NO: 162627 - RNA, 19 nt, Artificial Sequence
  Synthetic
auuuaccuuaagcuagaug

SEQ ID NO: 162628 - RNA, 21 nt, Artificial Sequence
  Synthetic
agauuuaccuuaagcuagaug

SEQ ID NO: 162629 - RNA, 18 nt, Artificial Sequence
  Synthetic
ucaaaauuucaagcgaug

SEQ ID NO: 162630 - RNA, 19 nt, Artificial Sequence
  Synthetic
uucaaaauuucaagcgaug

SEQ ID NO: 162631 - RNA, 20 nt, Artificial Sequence
  Synthetic
auucaaaauuucaagcgaug

SEQ ID NO: 162632 - RNA, 19 nt, Artificial Sequence
  Synthetic
aggaaaaagagccaggaug

SEQ ID NO: 162633 - RNA, 20 nt, Artificial Sequence
  Synthetic
uaggaaaaagagccaggaug

SEQ ID NO: 162634 - RNA, 19 nt, Artificial Sequence
  Synthetic
cggggccucucaggggaug

SEQ ID NO: 162635 - RNA, 20 nt, Artificial Sequence
  Synthetic
ccggggccucucaggggaug

SEQ ID NO: 162636 - RNA, 21 nt, Artificial Sequence
  Synthetic
accggggccucucaggggaug

SEQ ID NO: 162637 - RNA, 22 nt, Artificial Sequence
  Synthetic
caccggggccucucaggggaug

SEQ ID NO: 162638 - RNA, 23 nt, Artificial Sequence
  Synthetic
acaccggggccucucaggggaug

SEQ ID NO: 162639 - RNA, 24 nt, Artificial Sequence
  Synthetic
cacaccggggccucucaggggaug

SEQ ID NO: 162640 - RNA, 18 nt, Artificial Sequence
  Synthetic
uuucuucccuuggggaug

SEQ ID NO: 162641 - RNA, 19 nt, Artificial Sequence
  Synthetic
cuuucuucccuuggggaug

SEQ ID NO: 162642 - RNA, 20 nt, Artificial Sequence
  Synthetic
ucuuucuucccuuggggaug

SEQ ID NO: 162643 - RNA, 21 nt, Artificial Sequence
  Synthetic
aucuuucuucccuuggggaug

SEQ ID NO: 162644 - RNA, 24 nt, Artificial Sequence
  Synthetic
aggaucuuucuucccuuggggaug

SEQ ID NO: 162645 - RNA, 18 nt, Artificial Sequence
  Synthetic
uucaauagguuugggaug

SEQ ID NO: 162646 - RNA, 19 nt, Artificial Sequence
  Synthetic
auucaauagguuugggaug

SEQ ID NO: 162647 - RNA, 21 nt, Artificial Sequence
  Synthetic
ugauucaauagguuugggaug

SEQ ID NO: 162648 - RNA, 22 nt, Artificial Sequence
  Synthetic
cugauucaauagguuugggaug

SEQ ID NO: 162649 - RNA, 23 nt, Artificial Sequence
  Synthetic
acugauucaauagguuugggaug

SEQ ID NO: 162650 - RNA, 24 nt, Artificial Sequence
  Synthetic
cacugauucaauagguuugggaug

SEQ ID NO: 162651 - RNA, 18 nt, Artificial Sequence
  Synthetic
augaaacuucaauggaug

SEQ ID NO: 162652 - RNA, 19 nt, Artificial Sequence
  Synthetic
aaugaaacuucaauggaug

SEQ ID NO: 162653 - RNA, 20 nt, Artificial Sequence
  Synthetic
uaaugaaacuucaauggaug

SEQ ID NO: 162654 - RNA, 21 nt, Artificial Sequence
  Synthetic
auaaugaaacuucaauggaug

SEQ ID NO: 162655 - RNA, 22 nt, Artificial Sequence
  Synthetic
cauaaugaaacuucaauggaug

SEQ ID NO: 162656 - RNA, 23 nt, Artificial Sequence
  Synthetic
ucauaaugaaacuucaauggaug

SEQ ID NO: 162657 - RNA, 24 nt, Artificial Sequence
  Synthetic
cucauaaugaaacuucaauggaug

SEQ ID NO: 162658 - RNA, 18 nt, Artificial Sequence
  Synthetic
uuuuaucaugaauggaug

SEQ ID NO: 162659 - RNA, 19 nt, Artificial Sequence
  Synthetic
uuuuuaucaugaauggaug

SEQ ID NO: 162660 - RNA, 21 nt, Artificial Sequence
  Synthetic
aguuuuuaucaugaauggaug

SEQ ID NO: 162661 - RNA, 22 nt, Artificial Sequence
  Synthetic
uaguuuuuaucaugaauggaug

SEQ ID NO: 162662 - RNA, 23 nt, Artificial Sequence
  Synthetic
auaguuuuuaucaugaauggaug

SEQ ID NO: 162663 - RNA, 24 nt, Artificial Sequence
  Synthetic
cauaguuuuuaucaugaauggaug

SEQ ID NO: 162664 - RNA, 21 nt, Artificial Sequence
  Synthetic
ugggggcuuaaaaccuggaug

SEQ ID NO: 162665 - RNA, 22 nt, Artificial Sequence
  Synthetic
uugggggcuuaaaaccuggaug

SEQ ID NO: 162666 - RNA, 23 nt, Artificial Sequence
  Synthetic
auugggggcuuaaaaccuggaug

SEQ ID NO: 162667 - RNA, 24 nt, Artificial Sequence
  Synthetic
cauugggggcuuaaaaccuggaug

SEQ ID NO: 162668 - RNA, 19 nt, Artificial Sequence
  Synthetic
uggugccauccucaugaug

SEQ ID NO: 162669 - RNA, 20 nt, Artificial Sequence
  Synthetic
uuggugccauccucaugaug

SEQ ID NO: 162670 - RNA, 21 nt, Artificial Sequence
  Synthetic
cuuggugccauccucaugaug

SEQ ID NO: 162671 - RNA, 22 nt, Artificial Sequence
  Synthetic
ucuuggugccauccucaugaug

SEQ ID NO: 162672 - RNA, 23 nt, Artificial Sequence
  Synthetic
cucuuggugccauccucaugaug

SEQ ID NO: 162673 - RNA, 24 nt, Artificial Sequence
  Synthetic
ccucuuggugccauccucaugaug

SEQ ID NO: 162674 - RNA, 18 nt, Artificial Sequence
  Synthetic
uccaggcacagccugaug

SEQ ID NO: 162675 - RNA, 20 nt, Artificial Sequence
  Synthetic
aguccaggcacagccugaug

SEQ ID NO: 162676 - RNA, 21 nt, Artificial Sequence
  Synthetic
uugauuugcauuucucugaug

SEQ ID NO: 162677 - RNA, 22 nt, Artificial Sequence
  Synthetic
uuugauuugcauuucucugaug

SEQ ID NO: 162678 - RNA, 23 nt, Artificial Sequence
  Synthetic
uuuugauuugcauuucucugaug

SEQ ID NO: 162679 - RNA, 21 nt, Artificial Sequence
  Synthetic
agaaauagauauuauuugaug

SEQ ID NO: 162680 - RNA, 22 nt, Artificial Sequence
  Synthetic
uagaaauagauauuauuugaug

SEQ ID NO: 162681 - RNA, 23 nt, Artificial Sequence
  Synthetic
cuagaaauagauauuauuugaug

SEQ ID NO: 162682 - RNA, 24 nt, Artificial Sequence
  Synthetic
ucuagaaauagauauuauuugaug

SEQ ID NO: 162683 - RNA, 18 nt, Artificial Sequence
  Synthetic
caccuggaaauuuugaug

SEQ ID NO: 162684 - RNA, 19 nt, Artificial Sequence
  Synthetic
ucaccuggaaauuuugaug

SEQ ID NO: 162685 - RNA, 18 nt, Artificial Sequence
  Synthetic
uauugaaauaauaauaug

SEQ ID NO: 162686 - RNA, 19 nt, Artificial Sequence
  Synthetic
auauugaaauaauaauaug

SEQ ID NO: 162687 - RNA, 20 nt, Artificial Sequence
  Synthetic
cauauugaaauaauaauaug

SEQ ID NO: 162688 - RNA, 21 nt, Artificial Sequence
  Synthetic
acauauugaaauaauaauaug

SEQ ID NO: 162689 - RNA, 22 nt, Artificial Sequence
  Synthetic
uacauauugaaauaauaauaug

SEQ ID NO: 162690 - RNA, 23 nt, Artificial Sequence
  Synthetic
uuacauauugaaauaauaauaug

SEQ ID NO: 162691 - RNA, 24 nt, Artificial Sequence
  Synthetic
auuacauauugaaauaauaauaug

SEQ ID NO: 162692 - RNA, 18 nt, Artificial Sequence
  Synthetic
agccuuauuguuaauaug

SEQ ID NO: 162693 - RNA, 19 nt, Artificial Sequence
  Synthetic
cagccuuauuguuaauaug

SEQ ID NO: 162694 - RNA, 20 nt, Artificial Sequence
  Synthetic
acagccuuauuguuaauaug

SEQ ID NO: 162695 - RNA, 21 nt, Artificial Sequence
  Synthetic
aacagccuuauuguuaauaug

SEQ ID NO: 162696 - RNA, 23 nt, Artificial Sequence
  Synthetic
agaacagccuuauuguuaauaug

SEQ ID NO: 162697 - RNA, 24 nt, Artificial Sequence
  Synthetic
cagaacagccuuauuguuaauaug

SEQ ID NO: 162698 - RNA, 18 nt, Artificial Sequence
  Synthetic
aaacuggauauccauaug

SEQ ID NO: 162699 - RNA, 19 nt, Artificial Sequence
  Synthetic
aaaacuggauauccauaug

SEQ ID NO: 162700 - RNA, 20 nt, Artificial Sequence
  Synthetic
aaaaacuggauauccauaug

SEQ ID NO: 162701 - RNA, 23 nt, Artificial Sequence
  Synthetic
cggaaaaacuggauauccauaug

SEQ ID NO: 162702 - RNA, 18 nt, Artificial Sequence
  Synthetic
aaauaauuuauccauaug

SEQ ID NO: 162703 - RNA, 19 nt, Artificial Sequence
  Synthetic
aaaauaauuuauccauaug

SEQ ID NO: 162704 - RNA, 20 nt, Artificial Sequence
  Synthetic
aaaaauaauuuauccauaug

SEQ ID NO: 162705 - RNA, 18 nt, Artificial Sequence
  Synthetic
aauugggguaaauauaug

SEQ ID NO: 162706 - RNA, 19 nt, Artificial Sequence
  Synthetic
aaauugggguaaauauaug

SEQ ID NO: 162707 - RNA, 20 nt, Artificial Sequence
  Synthetic
aaaauugggguaaauauaug

SEQ ID NO: 162708 - RNA, 18 nt, Artificial Sequence
  Synthetic
cucauauauauguauaug

SEQ ID NO: 162709 - RNA, 19 nt, Artificial Sequence
  Synthetic
acucauauauauguauaug

SEQ ID NO: 162710 - RNA, 22 nt, Artificial Sequence
  Synthetic
ugucuuuggcucuguuuauaug

SEQ ID NO: 162711 - RNA, 23 nt, Artificial Sequence
  Synthetic
uugucuuuggcucuguuuauaug

SEQ ID NO: 162712 - RNA, 24 nt, Artificial Sequence
  Synthetic
uuugucuuuggcucuguuuauaug

SEQ ID NO: 162713 - RNA, 23 nt, Artificial Sequence
  Synthetic
uggccagaacuuccaacacuaug

SEQ ID NO: 162714 - RNA, 24 nt, Artificial Sequence
  Synthetic
cuggccagaacuuccaacacuaug

SEQ ID NO: 162715 - RNA, 19 nt, Artificial Sequence
  Synthetic
uguguguguguuuucuaug

SEQ ID NO: 162716 - RNA, 20 nt, Artificial Sequence
  Synthetic
auguguguguguuuucuaug

SEQ ID NO: 162717 - RNA, 21 nt, Artificial Sequence
  Synthetic
uauguguguguguuuucuaug

SEQ ID NO: 162718 - RNA, 23 nt, Artificial Sequence
  Synthetic
uguauguguguguguuuucuaug

SEQ ID NO: 162719 - RNA, 18 nt, Artificial Sequence
  Synthetic
uaucaggagaacaguaug

SEQ ID NO: 162720 - RNA, 19 nt, Artificial Sequence
  Synthetic
uuaucaggagaacaguaug

SEQ ID NO: 162721 - RNA, 20 nt, Artificial Sequence
  Synthetic
auuaucaggagaacaguaug

SEQ ID NO: 162722 - RNA, 22 nt, Artificial Sequence
  Synthetic
ugauuaucaggagaacaguaug

SEQ ID NO: 162723 - RNA, 23 nt, Artificial Sequence
  Synthetic
cugauuaucaggagaacaguaug

SEQ ID NO: 162724 - RNA, 24 nt, Artificial Sequence
  Synthetic
acugauuaucaggagaacaguaug

SEQ ID NO: 162725 - RNA, 18 nt, Artificial Sequence
  Synthetic
acugagguuuggaguaug

SEQ ID NO: 162726 - RNA, 19 nt, Artificial Sequence
  Synthetic
uacugagguuuggaguaug

SEQ ID NO: 162727 - RNA, 20 nt, Artificial Sequence
  Synthetic
auacugagguuuggaguaug

SEQ ID NO: 162728 - RNA, 22 nt, Artificial Sequence
  Synthetic
ugauacugagguuuggaguaug

SEQ ID NO: 162729 - RNA, 18 nt, Artificial Sequence
  Synthetic
uuuuauuaugugaguaug

SEQ ID NO: 162730 - RNA, 19 nt, Artificial Sequence
  Synthetic
auuuuauuaugugaguaug

SEQ ID NO: 162731 - RNA, 20 nt, Artificial Sequence
  Synthetic
aauuuuauuaugugaguaug

SEQ ID NO: 162732 - RNA, 18 nt, Artificial Sequence
  Synthetic
caaaauauacaagguaug

SEQ ID NO: 162733 - RNA, 20 nt, Artificial Sequence
  Synthetic
ugcaaaauauacaagguaug

SEQ ID NO: 162734 - RNA, 21 nt, Artificial Sequence
  Synthetic
augcaaaauauacaagguaug

SEQ ID NO: 162735 - RNA, 22 nt, Artificial Sequence
  Synthetic
uaugcaaaauauacaagguaug

SEQ ID NO: 162736 - RNA, 24 nt, Artificial Sequence
  Synthetic
uguaugcaaaauauacaagguaug

SEQ ID NO: 162737 - RNA, 18 nt, Artificial Sequence
  Synthetic
aaaacuuccaauauuaug

SEQ ID NO: 162738 - RNA, 19 nt, Artificial Sequence
  Synthetic
caaaacuuccaauauuaug

SEQ ID NO: 162739 - RNA, 20 nt, Artificial Sequence
  Synthetic
ccaaaacuuccaauauuaug

SEQ ID NO: 162740 - RNA, 23 nt, Artificial Sequence
  Synthetic
uggccaaaacuuccaauauuaug

SEQ ID NO: 162741 - RNA, 24 nt, Artificial Sequence
  Synthetic
cuggccaaaacuuccaauauuaug

SEQ ID NO: 162742 - RNA, 21 nt, Artificial Sequence
  Synthetic
aacaauaaauuccuacuuaug

SEQ ID NO: 162743 - RNA, 22 nt, Artificial Sequence
  Synthetic
aaacaauaaauuccuacuuaug

SEQ ID NO: 162744 - RNA, 23 nt, Artificial Sequence
  Synthetic
aaaacaauaaauuccuacuuaug

SEQ ID NO: 162745 - RNA, 18 nt, Artificial Sequence
  Synthetic
uaacauuuucaauuuaug

SEQ ID NO: 162746 - RNA, 19 nt, Artificial Sequence
  Synthetic
auaacauuuucaauuuaug

SEQ ID NO: 162747 - RNA, 20 nt, Artificial Sequence
  Synthetic
cauaacauuuucaauuuaug

SEQ ID NO: 162748 - RNA, 21 nt, Artificial Sequence
  Synthetic
ucauaacauuuucaauuuaug

SEQ ID NO: 162749 - RNA, 22 nt, Artificial Sequence
  Synthetic
cucauaacauuuucaauuuaug

SEQ ID NO: 162750 - RNA, 23 nt, Artificial Sequence
  Synthetic
acucauaacauuuucaauuuaug

SEQ ID NO: 162751 - RNA, 18 nt, Artificial Sequence
  Synthetic
ugauuuuuugacuuuaug

SEQ ID NO: 162752 - RNA, 19 nt, Artificial Sequence
  Synthetic
augauuuuuugacuuuaug

SEQ ID NO: 162753 - RNA, 20 nt, Artificial Sequence
  Synthetic
uaugauuuuuugacuuuaug

SEQ ID NO: 162754 - RNA, 21 nt, Artificial Sequence
  Synthetic
uuaugauuuuuugacuuuaug

SEQ ID NO: 162755 - RNA, 22 nt, Artificial Sequence
  Synthetic
cuuaugauuuuuugacuuuaug

SEQ ID NO: 162756 - RNA, 23 nt, Artificial Sequence
  Synthetic
ccuuaugauuuuuugacuuuaug

SEQ ID NO: 162757 - RNA, 22 nt, Artificial Sequence
  Synthetic
ugaaggauaguuuuguuuuaug

SEQ ID NO: 162758 - RNA, 23 nt, Artificial Sequence
  Synthetic
uugaaggauaguuuuguuuuaug

SEQ ID NO: 162759 - RNA, 24 nt, Artificial Sequence
  Synthetic
uuugaaggauaguuuuguuuuaug

SEQ ID NO: 162760 - RNA, 18 nt, Artificial Sequence
  Synthetic
cuguuacagcaucaacug

SEQ ID NO: 162761 - RNA, 19 nt, Artificial Sequence
  Synthetic
ucuguuacagcaucaacug

SEQ ID NO: 162762 - RNA, 20 nt, Artificial Sequence
  Synthetic
cucuguuacagcaucaacug

SEQ ID NO: 162763 - RNA, 18 nt, Artificial Sequence
  Synthetic
ucugaauacagcacacug

SEQ ID NO: 162764 - RNA, 19 nt, Artificial Sequence
  Synthetic
uucugaauacagcacacug

SEQ ID NO: 162765 - RNA, 20 nt, Artificial Sequence
  Synthetic
cuucugaauacagcacacug

SEQ ID NO: 162766 - RNA, 21 nt, Artificial Sequence
  Synthetic
ucuucugaauacagcacacug

SEQ ID NO: 162767 - RNA, 18 nt, Artificial Sequence
  Synthetic
agugccccacagacacug

SEQ ID NO: 162768 - RNA, 19 nt, Artificial Sequence
  Synthetic
cagugccccacagacacug

SEQ ID NO: 162769 - RNA, 20 nt, Artificial Sequence
  Synthetic
ccagugccccacagacacug

SEQ ID NO: 162770 - RNA, 21 nt, Artificial Sequence
  Synthetic
accagugccccacagacacug

SEQ ID NO: 162771 - RNA, 22 nt, Artificial Sequence
  Synthetic
aaccagugccccacagacacug

SEQ ID NO: 162772 - RNA, 23 nt, Artificial Sequence
  Synthetic
aaaccagugccccacagacacug

SEQ ID NO: 162773 - RNA, 18 nt, Artificial Sequence
  Synthetic
aaugaagagaugacacug

SEQ ID NO: 162774 - RNA, 19 nt, Artificial Sequence
  Synthetic
aaaugaagagaugacacug

SEQ ID NO: 162775 - RNA, 20 nt, Artificial Sequence
  Synthetic
aaaaugaagagaugacacug

SEQ ID NO: 162776 - RNA, 18 nt, Artificial Sequence
  Synthetic
agauggaaguugacacug

SEQ ID NO: 162777 - RNA, 19 nt, Artificial Sequence
  Synthetic
aagauggaaguugacacug

SEQ ID NO: 162778 - RNA, 20 nt, Artificial Sequence
  Synthetic
uaagauggaaguugacacug

SEQ ID NO: 162779 - RNA, 18 nt, Artificial Sequence
  Synthetic
ugaaauaugcauacacug

SEQ ID NO: 162780 - RNA, 19 nt, Artificial Sequence
  Synthetic
uugaaauaugcauacacug

SEQ ID NO: 162781 - RNA, 20 nt, Artificial Sequence
  Synthetic
uuugaaauaugcauacacug

SEQ ID NO: 162782 - RNA, 21 nt, Artificial Sequence
  Synthetic
uuuugaaauaugcauacacug

SEQ ID NO: 162783 - RNA, 23 nt, Artificial Sequence
  Synthetic
uguuuugaaauaugcauacacug

SEQ ID NO: 162784 - RNA, 24 nt, Artificial Sequence
  Synthetic
auguuuugaaauaugcauacacug

SEQ ID NO: 162785 - RNA, 18 nt, Artificial Sequence
  Synthetic
ugugguacauauacacug

SEQ ID NO: 162786 - RNA, 19 nt, Artificial Sequence
  Synthetic
augugguacauauacacug

SEQ ID NO: 162787 - RNA, 20 nt, Artificial Sequence
  Synthetic
aaugugguacauauacacug

SEQ ID NO: 162788 - RNA, 21 nt, Artificial Sequence
  Synthetic
aaaugugguacauauacacug

SEQ ID NO: 162789 - RNA, 22 nt, Artificial Sequence
  Synthetic
aaaaugugguacauauacacug

SEQ ID NO: 162790 - RNA, 24 nt, Artificial Sequence
  Synthetic
agaaaaugugguacauauacacug

SEQ ID NO: 162791 - RNA, 18 nt, Artificial Sequence
  Synthetic
ugauauauguauacacug

SEQ ID NO: 162792 - RNA, 19 nt, Artificial Sequence
  Synthetic
cugauauauguauacacug

SEQ ID NO: 162793 - RNA, 20 nt, Artificial Sequence
  Synthetic
ucugauauauguauacacug

SEQ ID NO: 162794 - RNA, 21 nt, Artificial Sequence
  Synthetic
uucugauauauguauacacug

SEQ ID NO: 162795 - RNA, 23 nt, Artificial Sequence
  Synthetic
uguucugauauauguauacacug

SEQ ID NO: 162796 - RNA, 24 nt, Artificial Sequence
  Synthetic
auguucugauauauguauacacug

SEQ ID NO: 162797 - RNA, 19 nt, Artificial Sequence
  Synthetic
ugauccagcaaucccacug

SEQ ID NO: 162798 - RNA, 20 nt, Artificial Sequence
  Synthetic
augauccagcaaucccacug

SEQ ID NO: 162799 - RNA, 21 nt, Artificial Sequence
  Synthetic
uaugauccagcaaucccacug

SEQ ID NO: 162800 - RNA, 22 nt, Artificial Sequence
  Synthetic
auaugauccagcaaucccacug

SEQ ID NO: 162801 - RNA, 23 nt, Artificial Sequence
  Synthetic
cauaugauccagcaaucccacug

SEQ ID NO: 162802 - RNA, 24 nt, Artificial Sequence
  Synthetic
ccauaugauccagcaaucccacug

SEQ ID NO: 162803 - RNA, 22 nt, Artificial Sequence
  Synthetic
cuaugauccagcaaucccacug

SEQ ID NO: 162804 - RNA, 23 nt, Artificial Sequence
  Synthetic
ccuaugauccagcaaucccacug

SEQ ID NO: 162805 - RNA, 24 nt, Artificial Sequence
  Synthetic
cccuaugauccagcaaucccacug

SEQ ID NO: 162806 - RNA, 18 nt, Artificial Sequence
  Synthetic
uuguuaacacagagacug

SEQ ID NO: 162807 - RNA, 19 nt, Artificial Sequence
  Synthetic
cuuguuaacacagagacug

SEQ ID NO: 162808 - RNA, 22 nt, Artificial Sequence
  Synthetic
aggcuuguuaacacagagacug

SEQ ID NO: 162809 - RNA, 23 nt, Artificial Sequence
  Synthetic
aaggcuuguuaacacagagacug

SEQ ID NO: 162810 - RNA, 18 nt, Artificial Sequence
  Synthetic
uagccuguccauagacug

SEQ ID NO: 162811 - RNA, 19 nt, Artificial Sequence
  Synthetic
uuagccuguccauagacug

SEQ ID NO: 162812 - RNA, 20 nt, Artificial Sequence
  Synthetic
cuuagccuguccauagacug

SEQ ID NO: 162813 - RNA, 20 nt, Artificial Sequence
  Synthetic
agggaagaaacaguagacug

SEQ ID NO: 162814 - RNA, 18 nt, Artificial Sequence
  Synthetic
cacucuaucuuuagacug

SEQ ID NO: 162815 - RNA, 19 nt, Artificial Sequence
  Synthetic
ccacucuaucuuuagacug

SEQ ID NO: 162816 - RNA, 18 nt, Artificial Sequence
  Synthetic
uucuugauccaaggacug

SEQ ID NO: 162817 - RNA, 19 nt, Artificial Sequence
  Synthetic
cuucuugauccaaggacug

SEQ ID NO: 162818 - RNA, 20 nt, Artificial Sequence
  Synthetic
acuucuugauccaaggacug

SEQ ID NO: 162819 - RNA, 22 nt, Artificial Sequence
  Synthetic
ugacuucuugauccaaggacug

SEQ ID NO: 162820 - RNA, 24 nt, Artificial Sequence
  Synthetic
agugacuucuugauccaaggacug

SEQ ID NO: 162821 - RNA, 18 nt, Artificial Sequence
  Synthetic
ugcuuccuguacaaccug

SEQ ID NO: 162822 - RNA, 19 nt, Artificial Sequence
  Synthetic
cugcuuccuguacaaccug

SEQ ID NO: 162823 - RNA, 20 nt, Artificial Sequence
  Synthetic
ccugcuuccuguacaaccug

SEQ ID NO: 162824 - RNA, 21 nt, Artificial Sequence
  Synthetic
uccugcuuccuguacaaccug

SEQ ID NO: 162825 - RNA, 23 nt, Artificial Sequence
  Synthetic
uguccugcuuccuguacaaccug

SEQ ID NO: 162826 - RNA, 18 nt, Artificial Sequence
  Synthetic
cuccuggauaauaaccug

SEQ ID NO: 162827 - RNA, 19 nt, Artificial Sequence
  Synthetic
ucuccuggauaauaaccug

SEQ ID NO: 162828 - RNA, 20 nt, Artificial Sequence
  Synthetic
uucuccuggauaauaaccug

SEQ ID NO: 162829 - RNA, 22 nt, Artificial Sequence
  Synthetic
aguucuccuggauaauaaccug

SEQ ID NO: 162830 - RNA, 23 nt, Artificial Sequence
  Synthetic
aaguucuccuggauaauaaccug

SEQ ID NO: 162831 - RNA, 18 nt, Artificial Sequence
  Synthetic
aauaauaauacauaccug

SEQ ID NO: 162832 - RNA, 19 nt, Artificial Sequence
  Synthetic
aaauaauaauacauaccug

SEQ ID NO: 162833 - RNA, 18 nt, Artificial Sequence
  Synthetic
aacauaugaucuacccug

SEQ ID NO: 162834 - RNA, 19 nt, Artificial Sequence
  Synthetic
uaacauaugaucuacccug

SEQ ID NO: 162835 - RNA, 20 nt, Artificial Sequence
  Synthetic
cuaacauaugaucuacccug

SEQ ID NO: 162836 - RNA, 21 nt, Artificial Sequence
  Synthetic
ccuaacauaugaucuacccug

SEQ ID NO: 162837 - RNA, 24 nt, Artificial Sequence
  Synthetic
uggccuaacauaugaucuacccug

SEQ ID NO: 162838 - RNA, 21 nt, Artificial Sequence
  Synthetic
auuucuaguucuagaucccug

SEQ ID NO: 162839 - RNA, 22 nt, Artificial Sequence
  Synthetic
uauuucuaguucuagaucccug

SEQ ID NO: 162840 - RNA, 18 nt, Artificial Sequence
  Synthetic
ugcuuccuguagagccug

SEQ ID NO: 162841 - RNA, 19 nt, Artificial Sequence
  Synthetic
augcuuccuguagagccug

SEQ ID NO: 162842 - RNA, 20 nt, Artificial Sequence
  Synthetic
uaugcuuccuguagagccug

SEQ ID NO: 162843 - RNA, 21 nt, Artificial Sequence
  Synthetic
cuaugcuuccuguagagccug

SEQ ID NO: 162844 - RNA, 23 nt, Artificial Sequence
  Synthetic
ugcuaugcuuccuguagagccug

SEQ ID NO: 162845 - RNA, 24 nt, Artificial Sequence
  Synthetic
uugcuaugcuuccuguagagccug

SEQ ID NO: 162846 - RNA, 18 nt, Artificial Sequence
  Synthetic
agcaauacaaugagccug

SEQ ID NO: 162847 - RNA, 20 nt, Artificial Sequence
  Synthetic
ugagcaauacaaugagccug

SEQ ID NO: 162848 - RNA, 18 nt, Artificial Sequence
  Synthetic
cacugcaaccuccgccug

SEQ ID NO: 162849 - RNA, 19 nt, Artificial Sequence
  Synthetic
ucacugcaaccuccgccug

SEQ ID NO: 162850 - RNA, 20 nt, Artificial Sequence
  Synthetic
cucacugcaaccuccgccug

SEQ ID NO: 162851 - RNA, 23 nt, Artificial Sequence
  Synthetic
uggcucacugcaaccuccgccug

SEQ ID NO: 162852 - RNA, 24 nt, Artificial Sequence
  Synthetic
uuggcucacugcaaccuccgccug

SEQ ID NO: 162853 - RNA, 18 nt, Artificial Sequence
  Synthetic
ucuaguucuagaugccug

SEQ ID NO: 162854 - RNA, 19 nt, Artificial Sequence
  Synthetic
uucuaguucuagaugccug

SEQ ID NO: 162855 - RNA, 20 nt, Artificial Sequence
  Synthetic
auucuaguucuagaugccug

SEQ ID NO: 162856 - RNA, 21 nt, Artificial Sequence
  Synthetic
aauucuaguucuagaugccug

SEQ ID NO: 162857 - RNA, 22 nt, Artificial Sequence
  Synthetic
uaauucuaguucuagaugccug

SEQ ID NO: 162858 - RNA, 18 nt, Artificial Sequence
  Synthetic
uuuuagcaauguugccug

SEQ ID NO: 162859 - RNA, 19 nt, Artificial Sequence
  Synthetic
cuuuuagcaauguugccug

SEQ ID NO: 162860 - RNA, 20 nt, Artificial Sequence
  Synthetic
ucuuuuagcaauguugccug

SEQ ID NO: 162861 - RNA, 18 nt, Artificial Sequence
  Synthetic
uuauuugccuuuuuccug

SEQ ID NO: 162862 - RNA, 20 nt, Artificial Sequence
  Synthetic
aguuauuugccuuuuuccug

SEQ ID NO: 162863 - RNA, 21 nt, Artificial Sequence
  Synthetic
aaguuauuugccuuuuuccug

SEQ ID NO: 162864 - RNA, 22 nt, Artificial Sequence
  Synthetic
caaguuauuugccuuuuuccug

SEQ ID NO: 162865 - RNA, 23 nt, Artificial Sequence
  Synthetic
ucaaguuauuugccuuuuuccug

SEQ ID NO: 162866 - RNA, 24 nt, Artificial Sequence
  Synthetic
aucaaguuauuugccuuuuuccug

SEQ ID NO: 162867 - RNA, 18 nt, Artificial Sequence
  Synthetic
auuagaauuuuaaagcug

SEQ ID NO: 162868 - RNA, 19 nt, Artificial Sequence
  Synthetic
uauuagaauuuuaaagcug

SEQ ID NO: 162869 - RNA, 20 nt, Artificial Sequence
  Synthetic
uuauuagaauuuuaaagcug

SEQ ID NO: 162870 - RNA, 18 nt, Artificial Sequence
  Synthetic
uaauuuuuuucuaagcug

SEQ ID NO: 162871 - RNA, 19 nt, Artificial Sequence
  Synthetic
uuaauuuuuuucuaagcug

SEQ ID NO: 162872 - RNA, 20 nt, Artificial Sequence
  Synthetic
uuuaauuuuuuucuaagcug

SEQ ID NO: 162873 - RNA, 21 nt, Artificial Sequence
  Synthetic
cuuuaauuuuuuucuaagcug

SEQ ID NO: 162874 - RNA, 22 nt, Artificial Sequence
  Synthetic
ccuuuaauuuuuuucuaagcug

SEQ ID NO: 162875 - RNA, 23 nt, Artificial Sequence
  Synthetic
uccuuuaauuuuuuucuaagcug

SEQ ID NO: 162876 - RNA, 24 nt, Artificial Sequence
  Synthetic
uuccuuuaauuuuuuucuaagcug

SEQ ID NO: 162877 - RNA, 18 nt, Artificial Sequence
  Synthetic
uuucggaugcugaggcug

SEQ ID NO: 162878 - RNA, 19 nt, Artificial Sequence
  Synthetic
cuuucggaugcugaggcug

SEQ ID NO: 162879 - RNA, 20 nt, Artificial Sequence
  Synthetic
acuuucggaugcugaggcug

SEQ ID NO: 162880 - RNA, 21 nt, Artificial Sequence
  Synthetic
cacuuucggaugcugaggcug

SEQ ID NO: 162881 - RNA, 23 nt, Artificial Sequence
  Synthetic
agcacuuucggaugcugaggcug

SEQ ID NO: 162882 - RNA, 24 nt, Artificial Sequence
  Synthetic
cagcacuuucggaugcugaggcug

SEQ ID NO: 162883 - RNA, 18 nt, Artificial Sequence
  Synthetic
acacucuggggacugcug

SEQ ID NO: 162884 - RNA, 19 nt, Artificial Sequence
  Synthetic
cacacucuggggacugcug

SEQ ID NO: 162885 - RNA, 20 nt, Artificial Sequence
  Synthetic
ucacacucuggggacugcug

SEQ ID NO: 162886 - RNA, 21 nt, Artificial Sequence
  Synthetic
aucacacucuggggacugcug

SEQ ID NO: 162887 - RNA, 22 nt, Artificial Sequence
  Synthetic
uaucacacucuggggacugcug

SEQ ID NO: 162888 - RNA, 23 nt, Artificial Sequence
  Synthetic
auaucacacucuggggacugcug

SEQ ID NO: 162889 - RNA, 24 nt, Artificial Sequence
  Synthetic
aauaucacacucuggggacugcug

SEQ ID NO: 162890 - RNA, 18 nt, Artificial Sequence
  Synthetic
acacacuggggccugcug

SEQ ID NO: 162891 - RNA, 19 nt, Artificial Sequence
  Synthetic
cacacacuggggccugcug

SEQ ID NO: 162892 - RNA, 20 nt, Artificial Sequence
  Synthetic
ucacacacuggggccugcug

SEQ ID NO: 162893 - RNA, 21 nt, Artificial Sequence
  Synthetic
aucacacacuggggccugcug

SEQ ID NO: 162894 - RNA, 22 nt, Artificial Sequence
  Synthetic
caucacacacuggggccugcug

SEQ ID NO: 162895 - RNA, 23 nt, Artificial Sequence
  Synthetic
acaucacacacuggggccugcug

SEQ ID NO: 162896 - RNA, 24 nt, Artificial Sequence
  Synthetic
aacaucacacacuggggccugcug

SEQ ID NO: 162897 - RNA, 19 nt, Artificial Sequence
  Synthetic
agucuuggugcagcugcug

SEQ ID NO: 162898 - RNA, 20 nt, Artificial Sequence
  Synthetic
cagucuuggugcagcugcug

SEQ ID NO: 162899 - RNA, 18 nt, Artificial Sequence
  Synthetic
aagcuuuuucaugugcug

SEQ ID NO: 162900 - RNA, 19 nt, Artificial Sequence
  Synthetic
uaagcuuuuucaugugcug

SEQ ID NO: 162901 - RNA, 20 nt, Artificial Sequence
  Synthetic
auaagcuuuuucaugugcug

SEQ ID NO: 162902 - RNA, 23 nt, Artificial Sequence
  Synthetic
uggauaagcuuuuucaugugcug

SEQ ID NO: 162903 - RNA, 24 nt, Artificial Sequence
  Synthetic
cuggauaagcuuuuucaugugcug

SEQ ID NO: 162904 - RNA, 18 nt, Artificial Sequence
  Synthetic
aagaaaaauauauugcug

SEQ ID NO: 162905 - RNA, 19 nt, Artificial Sequence
  Synthetic
caagaaaaauauauugcug

SEQ ID NO: 162906 - RNA, 20 nt, Artificial Sequence
  Synthetic
acaagaaaaauauauugcug

SEQ ID NO: 162907 - RNA, 19 nt, Artificial Sequence
  Synthetic
uguuuuuuugcauuugcug

SEQ ID NO: 162908 - RNA, 20 nt, Artificial Sequence
  Synthetic
cuguuuuuuugcauuugcug

SEQ ID NO: 162909 - RNA, 21 nt, Artificial Sequence
  Synthetic
ucuguuuuuuugcauuugcug

SEQ ID NO: 162910 - RNA, 22 nt, Artificial Sequence
  Synthetic
uucuguuuuuuugcauuugcug

SEQ ID NO: 162911 - RNA, 23 nt, Artificial Sequence
  Synthetic
uuucuguuuuuuugcauuugcug

SEQ ID NO: 162912 - RNA, 24 nt, Artificial Sequence
  Synthetic
auuucuguuuuuuugcauuugcug

SEQ ID NO: 162913 - RNA, 18 nt, Artificial Sequence
  Synthetic
agaaaaaaauaccaucug

SEQ ID NO: 162914 - RNA, 19 nt, Artificial Sequence
  Synthetic
aagaaaaaaauaccaucug

SEQ ID NO: 162915 - RNA, 19 nt, Artificial Sequence
  Synthetic
agcuagauggucccaucug

SEQ ID NO: 162916 - RNA, 20 nt, Artificial Sequence
  Synthetic
cagcuagauggucccaucug

SEQ ID NO: 162917 - RNA, 22 nt, Artificial Sequence
  Synthetic
ugcagcuagauggucccaucug

SEQ ID NO: 162918 - RNA, 23 nt, Artificial Sequence
  Synthetic
cugcagcuagauggucccaucug

SEQ ID NO: 162919 - RNA, 24 nt, Artificial Sequence
  Synthetic
ccugcagcuagauggucccaucug

SEQ ID NO: 162920 - RNA, 18 nt, Artificial Sequence
  Synthetic
cccuguccgagagaucug

SEQ ID NO: 162921 - RNA, 19 nt, Artificial Sequence
  Synthetic
ccccuguccgagagaucug

SEQ ID NO: 162922 - RNA, 21 nt, Artificial Sequence
  Synthetic
ugccccuguccgagagaucug

SEQ ID NO: 162923 - RNA, 22 nt, Artificial Sequence
  Synthetic
uugccccuguccgagagaucug

SEQ ID NO: 162924 - RNA, 23 nt, Artificial Sequence
  Synthetic
uuugccccuguccgagagaucug

SEQ ID NO: 162925 - RNA, 24 nt, Artificial Sequence
  Synthetic
uuuugccccuguccgagagaucug

SEQ ID NO: 162926 - RNA, 18 nt, Artificial Sequence
  Synthetic
aaacauucuagagaucug

SEQ ID NO: 162927 - RNA, 19 nt, Artificial Sequence
  Synthetic
aaaacauucuagagaucug

SEQ ID NO: 162928 - RNA, 21 nt, Artificial Sequence
  Synthetic
ugaaaacauucuagagaucug

SEQ ID NO: 162929 - RNA, 22 nt, Artificial Sequence
  Synthetic
augaaaacauucuagagaucug

SEQ ID NO: 162930 - RNA, 24 nt, Artificial Sequence
  Synthetic
agaugaaaacauucuagagaucug

SEQ ID NO: 162931 - RNA, 18 nt, Artificial Sequence
  Synthetic
aaguuggaaaacacucug

SEQ ID NO: 162932 - RNA, 19 nt, Artificial Sequence
  Synthetic
caaguuggaaaacacucug

SEQ ID NO: 162933 - RNA, 20 nt, Artificial Sequence
  Synthetic
ccaaguuggaaaacacucug

SEQ ID NO: 162934 - RNA, 21 nt, Artificial Sequence
  Synthetic
accaaguuggaaaacacucug

SEQ ID NO: 162935 - RNA, 22 nt, Artificial Sequence
  Synthetic
aaccaaguuggaaaacacucug

SEQ ID NO: 162936 - RNA, 18 nt, Artificial Sequence
  Synthetic
uagguagcgauuccucug

SEQ ID NO: 162937 - RNA, 19 nt, Artificial Sequence
  Synthetic
cuagguagcgauuccucug

SEQ ID NO: 162938 - RNA, 20 nt, Artificial Sequence
  Synthetic
ccuagguagcgauuccucug

SEQ ID NO: 162939 - RNA, 21 nt, Artificial Sequence
  Synthetic
cccuagguagcgauuccucug

SEQ ID NO: 162940 - RNA, 23 nt, Artificial Sequence
  Synthetic
ugcccuagguagcgauuccucug

SEQ ID NO: 162941 - RNA, 24 nt, Artificial Sequence
  Synthetic
cugcccuagguagcgauuccucug

SEQ ID NO: 162942 - RNA, 21 nt, Artificial Sequence
  Synthetic
cuuuuuaacaaagccagucug

SEQ ID NO: 162943 - RNA, 22 nt, Artificial Sequence
  Synthetic
acuuuuuaacaaagccagucug

SEQ ID NO: 162944 - RNA, 24 nt, Artificial Sequence
  Synthetic
ugacuuuuuaacaaagccagucug

SEQ ID NO: 162945 - RNA, 19 nt, Artificial Sequence
  Synthetic
ugguccccaaauaugucug

SEQ ID NO: 162946 - RNA, 20 nt, Artificial Sequence
  Synthetic
augguccccaaauaugucug

SEQ ID NO: 162947 - RNA, 18 nt, Artificial Sequence
  Synthetic
auauuagaucuuugucug

SEQ ID NO: 162948 - RNA, 21 nt, Artificial Sequence
  Synthetic
uggauauuagaucuuugucug

SEQ ID NO: 162949 - RNA, 22 nt, Artificial Sequence
  Synthetic
auggauauuagaucuuugucug

SEQ ID NO: 162950 - RNA, 23 nt, Artificial Sequence
  Synthetic
uauggauauuagaucuuugucug

SEQ ID NO: 162951 - RNA, 24 nt, Artificial Sequence
  Synthetic
uuauggauauuagaucuuugucug

SEQ ID NO: 162952 - RNA, 18 nt, Artificial Sequence
  Synthetic
agcaaauucuuucuucug

SEQ ID NO: 162953 - RNA, 20 nt, Artificial Sequence
  Synthetic
agagcaaauucuuucuucug

SEQ ID NO: 162954 - RNA, 18 nt, Artificial Sequence
  Synthetic
ugaacauaugcauuucug

SEQ ID NO: 162955 - RNA, 19 nt, Artificial Sequence
  Synthetic
augaacauaugcauuucug

SEQ ID NO: 162956 - RNA, 20 nt, Artificial Sequence
  Synthetic
uaugaacauaugcauuucug

SEQ ID NO: 162957 - RNA, 18 nt, Artificial Sequence
  Synthetic
cgguaguuuguauuucug

SEQ ID NO: 162958 - RNA, 19 nt, Artificial Sequence
  Synthetic
acgguaguuuguauuucug

SEQ ID NO: 162959 - RNA, 21 nt, Artificial Sequence
  Synthetic
ugacgguaguuuguauuucug

SEQ ID NO: 162960 - RNA, 22 nt, Artificial Sequence
  Synthetic
cugacgguaguuuguauuucug

SEQ ID NO: 162961 - RNA, 23 nt, Artificial Sequence
  Synthetic
ucugacgguaguuuguauuucug

SEQ ID NO: 162962 - RNA, 24 nt, Artificial Sequence
  Synthetic
cucugacgguaguuuguauuucug

SEQ ID NO: 162963 - RNA, 18 nt, Artificial Sequence
  Synthetic
auuguuccaaacuuucug

SEQ ID NO: 162964 - RNA, 19 nt, Artificial Sequence
  Synthetic
aauuguuccaaacuuucug

SEQ ID NO: 162965 - RNA, 20 nt, Artificial Sequence
  Synthetic
aaauuguuccaaacuuucug

SEQ ID NO: 162966 - RNA, 21 nt, Artificial Sequence
  Synthetic
uaaauuguuccaaacuuucug

SEQ ID NO: 162967 - RNA, 22 nt, Artificial Sequence
  Synthetic
uuaaauuguuccaaacuuucug

SEQ ID NO: 162968 - RNA, 23 nt, Artificial Sequence
  Synthetic
auuaaauuguuccaaacuuucug

SEQ ID NO: 162969 - RNA, 24 nt, Artificial Sequence
  Synthetic
aauuaaauuguuccaaacuuucug

SEQ ID NO: 162970 - RNA, 18 nt, Artificial Sequence
  Synthetic
uagcuuguaggguuucug

SEQ ID NO: 162971 - RNA, 19 nt, Artificial Sequence
  Synthetic
cuagcuuguaggguuucug

SEQ ID NO: 162972 - RNA, 20 nt, Artificial Sequence
  Synthetic
ucuagcuuguaggguuucug

SEQ ID NO: 162973 - RNA, 21 nt, Artificial Sequence
  Synthetic
uucuagcuuguaggguuucug

SEQ ID NO: 162974 - RNA, 22 nt, Artificial Sequence
  Synthetic
cuucuagcuuguaggguuucug

SEQ ID NO: 162975 - RNA, 23 nt, Artificial Sequence
  Synthetic
ucuucuagcuuguaggguuucug

SEQ ID NO: 162976 - RNA, 24 nt, Artificial Sequence
  Synthetic
cucuucuagcuuguaggguuucug

SEQ ID NO: 162977 - RNA, 18 nt, Artificial Sequence
  Synthetic
uaauguauauauuuucug

SEQ ID NO: 162978 - RNA, 19 nt, Artificial Sequence
  Synthetic
cuaauguauauauuuucug

SEQ ID NO: 162979 - RNA, 20 nt, Artificial Sequence
  Synthetic
ccuaauguauauauuuucug

SEQ ID NO: 162980 - RNA, 23 nt, Artificial Sequence
  Synthetic
ugggaggagggagagucaaagug

SEQ ID NO: 162981 - RNA, 19 nt, Artificial Sequence
  Synthetic
ugagaaaacaaggaaagug

SEQ ID NO: 162982 - RNA, 20 nt, Artificial Sequence
  Synthetic
augagaaaacaaggaaagug

SEQ ID NO: 162983 - RNA, 18 nt, Artificial Sequence
  Synthetic
aagaggaaaaugcaagug

SEQ ID NO: 162984 - RNA, 20 nt, Artificial Sequence
  Synthetic
agaagaggaaaaugcaagug

SEQ ID NO: 162985 - RNA, 19 nt, Artificial Sequence
  Synthetic
uggggcuuaacgggaagug

SEQ ID NO: 162986 - RNA, 22 nt, Artificial Sequence
  Synthetic
agguggggcuuaacgggaagug

SEQ ID NO: 162987 - RNA, 18 nt, Artificial Sequence
  Synthetic
aaaagaauuaaauaagug

SEQ ID NO: 162988 - RNA, 19 nt, Artificial Sequence
  Synthetic
aaaaagaauuaaauaagug

SEQ ID NO: 162989 - RNA, 20 nt, Artificial Sequence
  Synthetic
aaaaaagaauuaaauaagug

SEQ ID NO: 162990 - RNA, 18 nt, Artificial Sequence
  Synthetic
auugguucuguuuaagug

SEQ ID NO: 162991 - RNA, 19 nt, Artificial Sequence
  Synthetic
cauugguucuguuuaagug

SEQ ID NO: 162992 - RNA, 20 nt, Artificial Sequence
  Synthetic
ucauugguucuguuuaagug

SEQ ID NO: 162993 - RNA, 22 nt, Artificial Sequence
  Synthetic
ugucauugguucuguuuaagug

SEQ ID NO: 162994 - RNA, 23 nt, Artificial Sequence
  Synthetic
uugucauugguucuguuuaagug

SEQ ID NO: 162995 - RNA, 24 nt, Artificial Sequence
  Synthetic
uuugucauugguucuguuuaagug

SEQ ID NO: 162996 - RNA, 18 nt, Artificial Sequence
  Synthetic
auguauguuauuccagug

SEQ ID NO: 162997 - RNA, 19 nt, Artificial Sequence
  Synthetic
cauguauguuauuccagug

SEQ ID NO: 162998 - RNA, 20 nt, Artificial Sequence
  Synthetic
ccauguauguuauuccagug

SEQ ID NO: 162999 - RNA, 18 nt, Artificial Sequence
  Synthetic
ccaggcuggaaugcagug

SEQ ID NO: 163000 - RNA, 19 nt, Artificial Sequence
  Synthetic
cccaggcuggaaugcagug

SEQ ID NO: 163001 - RNA, 20 nt, Artificial Sequence
  Synthetic
acccaggcuggaaugcagug

SEQ ID NO: 163002 - RNA, 21 nt, Artificial Sequence
  Synthetic
cacccaggcuggaaugcagug

SEQ ID NO: 163003 - RNA, 22 nt, Artificial Sequence
  Synthetic
ucacccaggcuggaaugcagug

SEQ ID NO: 163004 - RNA, 24 nt, Artificial Sequence
  Synthetic
ugucacccaggcuggaaugcagug

SEQ ID NO: 163005 - RNA, 18 nt, Artificial Sequence
  Synthetic
acacaugcgcacagagug

SEQ ID NO: 163006 - RNA, 19 nt, Artificial Sequence
  Synthetic
uacacaugcgcacagagug

SEQ ID NO: 163007 - RNA, 21 nt, Artificial Sequence
  Synthetic
uguacacaugcgcacagagug

SEQ ID NO: 163008 - RNA, 23 nt, Artificial Sequence
  Synthetic
uguguacacaugcgcacagagug

SEQ ID NO: 163009 - RNA, 24 nt, Artificial Sequence
  Synthetic
auguguacacaugcgcacagagug

SEQ ID NO: 163010 - RNA, 18 nt, Artificial Sequence
  Synthetic
aaaacucagaauggagug

SEQ ID NO: 163011 - RNA, 20 nt, Artificial Sequence
  Synthetic
ugaaaacucagaauggagug

SEQ ID NO: 163012 - RNA, 18 nt, Artificial Sequence
  Synthetic
cauuuaauucaaugagug

SEQ ID NO: 163013 - RNA, 19 nt, Artificial Sequence
  Synthetic
acauuuaauucaaugagug

SEQ ID NO: 163014 - RNA, 18 nt, Artificial Sequence
  Synthetic
aggcucgagaacuacgug

SEQ ID NO: 163015 - RNA, 19 nt, Artificial Sequence
  Synthetic
aaggcucgagaacuacgug

SEQ ID NO: 163016 - RNA, 20 nt, Artificial Sequence
  Synthetic
caaggcucgagaacuacgug

SEQ ID NO: 163017 - RNA, 21 nt, Artificial Sequence
  Synthetic
ccaaggcucgagaacuacgug

SEQ ID NO: 163018 - RNA, 22 nt, Artificial Sequence
  Synthetic
accaaggcucgagaacuacgug

SEQ ID NO: 163019 - RNA, 23 nt, Artificial Sequence
  Synthetic
aaccaaggcucgagaacuacgug

SEQ ID NO: 163020 - RNA, 24 nt, Artificial Sequence
  Synthetic
aaaccaaggcucgagaacuacgug

SEQ ID NO: 163021 - RNA, 18 nt, Artificial Sequence
  Synthetic
augcaucuuauuaaggug

SEQ ID NO: 163022 - RNA, 19 nt, Artificial Sequence
  Synthetic
aaugcaucuuauuaaggug

SEQ ID NO: 163023 - RNA, 20 nt, Artificial Sequence
  Synthetic
caaugcaucuuauuaaggug

SEQ ID NO: 163024 - RNA, 21 nt, Artificial Sequence
  Synthetic
acaaugcaucuuauuaaggug

SEQ ID NO: 163025 - RNA, 22 nt, Artificial Sequence
  Synthetic
uacaaugcaucuuauuaaggug

SEQ ID NO: 163026 - RNA, 18 nt, Artificial Sequence
  Synthetic
agauaauugcuugaggug

SEQ ID NO: 163027 - RNA, 19 nt, Artificial Sequence
  Synthetic
aagauaauugcuugaggug

SEQ ID NO: 163028 - RNA, 20 nt, Artificial Sequence
  Synthetic
aaagauaauugcuugaggug

SEQ ID NO: 163029 - RNA, 21 nt, Artificial Sequence
  Synthetic
aaaagauaauugcuugaggug

SEQ ID NO: 163030 - RNA, 23 nt, Artificial Sequence
  Synthetic
agaaaagauaauugcuugaggug

SEQ ID NO: 163031 - RNA, 24 nt, Artificial Sequence
  Synthetic
cagaaaagauaauugcuugaggug

SEQ ID NO: 163032 - RNA, 18 nt, Artificial Sequence
  Synthetic
ugguaaauguuugaggug

SEQ ID NO: 163033 - RNA, 19 nt, Artificial Sequence
  Synthetic
augguaaauguuugaggug

SEQ ID NO: 163034 - RNA, 20 nt, Artificial Sequence
  Synthetic
aaugguaaauguuugaggug

SEQ ID NO: 163035 - RNA, 21 nt, Artificial Sequence
  Synthetic
caaugguaaauguuugaggug

SEQ ID NO: 163036 - RNA, 23 nt, Artificial Sequence
  Synthetic
agcaaugguaaauguuugaggug

SEQ ID NO: 163037 - RNA, 24 nt, Artificial Sequence
  Synthetic
aagcaaugguaaauguuugaggug

SEQ ID NO: 163038 - RNA, 18 nt, Artificial Sequence
  Synthetic
ugcacuccagccagggug

SEQ ID NO: 163039 - RNA, 19 nt, Artificial Sequence
  Synthetic
cugcacuccagccagggug

SEQ ID NO: 163040 - RNA, 20 nt, Artificial Sequence
  Synthetic
acugcacuccagccagggug

SEQ ID NO: 163041 - RNA, 21 nt, Artificial Sequence
  Synthetic
cacugcacuccagccagggug

SEQ ID NO: 163042 - RNA, 22 nt, Artificial Sequence
  Synthetic
ccacugcacuccagccagggug

SEQ ID NO: 163043 - RNA, 24 nt, Artificial Sequence
  Synthetic
ugccacugcacuccagccagggug

SEQ ID NO: 163044 - RNA, 18 nt, Artificial Sequence
  Synthetic
uuuuagcaugaaggggug

SEQ ID NO: 163045 - RNA, 19 nt, Artificial Sequence
  Synthetic
uuuuuagcaugaaggggug

SEQ ID NO: 163046 - RNA, 21 nt, Artificial Sequence
  Synthetic
aguuuuuagcaugaaggggug

SEQ ID NO: 163047 - RNA, 23 nt, Artificial Sequence
  Synthetic
agaguuuuuagcaugaaggggug

SEQ ID NO: 163048 - RNA, 24 nt, Artificial Sequence
  Synthetic
uguauauucuguugauuuggggug

SEQ ID NO: 163049 - RNA, 19 nt, Artificial Sequence
  Synthetic
uggcaacugccacguggug

SEQ ID NO: 163050 - RNA, 20 nt, Artificial Sequence
  Synthetic
uuggcaacugccacguggug

SEQ ID NO: 163051 - RNA, 21 nt, Artificial Sequence
  Synthetic
uuuggcaacugccacguggug

SEQ ID NO: 163052 - RNA, 22 nt, Artificial Sequence
  Synthetic
cuuuggcaacugccacguggug

SEQ ID NO: 163053 - RNA, 24 nt, Artificial Sequence
  Synthetic
agcuuuggcaacugccacguggug

SEQ ID NO: 163054 - RNA, 22 nt, Artificial Sequence
  Synthetic
caaaaauuagccaggcguggug

SEQ ID NO: 163055 - RNA, 23 nt, Artificial Sequence
  Synthetic
acaaaaauuagccaggcguggug

SEQ ID NO: 163056 - RNA, 24 nt, Artificial Sequence
  Synthetic
uacaaaaauuagccaggcguggug

SEQ ID NO: 163057 - RNA, 18 nt, Artificial Sequence
  Synthetic
aauuagcagggcguggug

SEQ ID NO: 163058 - RNA, 19 nt, Artificial Sequence
  Synthetic
aaauuagcagggcguggug

SEQ ID NO: 163059 - RNA, 20 nt, Artificial Sequence
  Synthetic
aaaauuagcagggcguggug

SEQ ID NO: 163060 - RNA, 21 nt, Artificial Sequence
  Synthetic
aaaaauuagcagggcguggug

SEQ ID NO: 163061 - RNA, 22 nt, Artificial Sequence
  Synthetic
aaaaaauuagcagggcguggug

SEQ ID NO: 163062 - RNA, 23 nt, Artificial Sequence
  Synthetic
aaaaaaauuagcagggcguggug

SEQ ID NO: 163063 - RNA, 24 nt, Artificial Sequence
  Synthetic
aaaaaaaauuagcagggcguggug

SEQ ID NO: 163064 - RNA, 18 nt, Artificial Sequence
  Synthetic
cauuagccagguguggug

SEQ ID NO: 163065 - RNA, 19 nt, Artificial Sequence
  Synthetic
acauuagccagguguggug

SEQ ID NO: 163066 - RNA, 20 nt, Artificial Sequence
  Synthetic
aacauuagccagguguggug

SEQ ID NO: 163067 - RNA, 21 nt, Artificial Sequence
  Synthetic
aaacauuagccagguguggug

SEQ ID NO: 163068 - RNA, 22 nt, Artificial Sequence
  Synthetic
aaaacauuagccagguguggug

SEQ ID NO: 163069 - RNA, 23 nt, Artificial Sequence
  Synthetic
caaaacauuagccagguguggug

SEQ ID NO: 163070 - RNA, 24 nt, Artificial Sequence
  Synthetic
acaaaacauuagccagguguggug

SEQ ID NO: 163071 - RNA, 21 nt, Artificial Sequence
  Synthetic
aaaaauuagccggguguggug

SEQ ID NO: 163072 - RNA, 22 nt, Artificial Sequence
  Synthetic
aaaaaauuagccggguguggug

SEQ ID NO: 163073 - RNA, 23 nt, Artificial Sequence
  Synthetic
aaaaaaauuagccggguguggug

SEQ ID NO: 163074 - RNA, 24 nt, Artificial Sequence
  Synthetic
aaaaaaaauuagccggguguggug

SEQ ID NO: 163075 - RNA, 18 nt, Artificial Sequence
  Synthetic
uaugacugaguuguggug

SEQ ID NO: 163076 - RNA, 19 nt, Artificial Sequence
  Synthetic
auaugacugaguuguggug

SEQ ID NO: 163077 - RNA, 20 nt, Artificial Sequence
  Synthetic
aauaugacugaguuguggug

SEQ ID NO: 163078 - RNA, 18 nt, Artificial Sequence
  Synthetic
cuuucucucucuuuggug

SEQ ID NO: 163079 - RNA, 19 nt, Artificial Sequence
  Synthetic
ucuuucucucucuuuggug

SEQ ID NO: 163080 - RNA, 20 nt, Artificial Sequence
  Synthetic
cucuuucucucucuuuggug

SEQ ID NO: 163081 - RNA, 18 nt, Artificial Sequence
  Synthetic
ugaaggauuguaaaugug

SEQ ID NO: 163082 - RNA, 19 nt, Artificial Sequence
  Synthetic
uugaaggauuguaaaugug

SEQ ID NO: 163083 - RNA, 20 nt, Artificial Sequence
  Synthetic
auugaaggauuguaaaugug

SEQ ID NO: 163084 - RNA, 21 nt, Artificial Sequence
  Synthetic
aauugaaggauuguaaaugug

SEQ ID NO: 163085 - RNA, 22 nt, Artificial Sequence
  Synthetic
aaauugaaggauuguaaaugug

SEQ ID NO: 163086 - RNA, 23 nt, Artificial Sequence
  Synthetic
caaauugaaggauuguaaaugug

SEQ ID NO: 163087 - RNA, 24 nt, Artificial Sequence
  Synthetic
acaaauugaaggauuguaaaugug

SEQ ID NO: 163088 - RNA, 18 nt, Artificial Sequence
  Synthetic
aagaaggaaaacaaugug

SEQ ID NO: 163089 - RNA, 19 nt, Artificial Sequence
  Synthetic
aaagaaggaaaacaaugug

SEQ ID NO: 163090 - RNA, 21 nt, Artificial Sequence
  Synthetic
agaaagaaggaaaacaaugug

SEQ ID NO: 163091 - RNA, 22 nt, Artificial Sequence
  Synthetic
aagaaagaaggaaaacaaugug

SEQ ID NO: 163092 - RNA, 23 nt, Artificial Sequence
  Synthetic
aaagaaagaaggaaaacaaugug

SEQ ID NO: 163093 - RNA, 24 nt, Artificial Sequence
  Synthetic
aaaagaaagaaggaaaacaaugug

SEQ ID NO: 163094 - RNA, 21 nt, Artificial Sequence
  Synthetic
uuaaguucugggauacaugug

SEQ ID NO: 163095 - RNA, 22 nt, Artificial Sequence
  Synthetic
uuuaaguucugggauacaugug

SEQ ID NO: 163096 - RNA, 23 nt, Artificial Sequence
  Synthetic
cuuuaaguucugggauacaugug

SEQ ID NO: 163097 - RNA, 24 nt, Artificial Sequence
  Synthetic
acuuuaaguucugggauacaugug

SEQ ID NO: 163098 - RNA, 18 nt, Artificial Sequence
  Synthetic
aguuccgugguacaugug

SEQ ID NO: 163099 - RNA, 19 nt, Artificial Sequence
  Synthetic
aaguuccgugguacaugug

SEQ ID NO: 163100 - RNA, 20 nt, Artificial Sequence
  Synthetic
uaaguuccgugguacaugug

SEQ ID NO: 163101 - RNA, 21 nt, Artificial Sequence
  Synthetic
uuaaguuccgugguacaugug

SEQ ID NO: 163102 - RNA, 22 nt, Artificial Sequence
  Synthetic
uuuaaguuccgugguacaugug

SEQ ID NO: 163103 - RNA, 23 nt, Artificial Sequence
  Synthetic
uuuuaaguuccgugguacaugug

SEQ ID NO: 163104 - RNA, 24 nt, Artificial Sequence
  Synthetic
auuuuaaguuccgugguacaugug

SEQ ID NO: 163105 - RNA, 19 nt, Artificial Sequence
  Synthetic
uguaccugaaagugaugug

SEQ ID NO: 163106 - RNA, 22 nt, Artificial Sequence
  Synthetic
ugguguaccugaaagugaugug

SEQ ID NO: 163107 - RNA, 23 nt, Artificial Sequence
  Synthetic
uugguguaccugaaagugaugug

SEQ ID NO: 163108 - RNA, 24 nt, Artificial Sequence
  Synthetic
auugguguaccugaaagugaugug

SEQ ID NO: 163109 - RNA, 18 nt, Artificial Sequence
  Synthetic
caggaagaagaauaugug

SEQ ID NO: 163110 - RNA, 20 nt, Artificial Sequence
  Synthetic
agcaggaagaagaauaugug

SEQ ID NO: 163111 - RNA, 18 nt, Artificial Sequence
  Synthetic
aagugguguguguaugug

SEQ ID NO: 163112 - RNA, 19 nt, Artificial Sequence
  Synthetic
caagugguguguguaugug

SEQ ID NO: 163113 - RNA, 20 nt, Artificial Sequence
  Synthetic
ucaagugguguguguaugug

SEQ ID NO: 163114 - RNA, 18 nt, Artificial Sequence
  Synthetic
aaguucaugaauuaugug

SEQ ID NO: 163115 - RNA, 19 nt, Artificial Sequence
  Synthetic
caaguucaugaauuaugug

SEQ ID NO: 163116 - RNA, 20 nt, Artificial Sequence
  Synthetic
ccaaguucaugaauuaugug

SEQ ID NO: 163117 - RNA, 22 nt, Artificial Sequence
  Synthetic
agccaaguucaugaauuaugug

SEQ ID NO: 163118 - RNA, 23 nt, Artificial Sequence
  Synthetic
aagccaaguucaugaauuaugug

SEQ ID NO: 163119 - RNA, 18 nt, Artificial Sequence
  Synthetic
ugguuaccagaggcugug

SEQ ID NO: 163120 - RNA, 19 nt, Artificial Sequence
  Synthetic
augguuaccagaggcugug

SEQ ID NO: 163121 - RNA, 22 nt, Artificial Sequence
  Synthetic
aggaugguuaccagaggcugug

SEQ ID NO: 163122 - RNA, 23 nt, Artificial Sequence
  Synthetic
aaggaugguuaccagaggcugug

SEQ ID NO: 163123 - RNA, 18 nt, Artificial Sequence
  Synthetic
agggacuauuagagugug

SEQ ID NO: 163124 - RNA, 19 nt, Artificial Sequence
  Synthetic
uagggacuauuagagugug

SEQ ID NO: 163125 - RNA, 20 nt, Artificial Sequence
  Synthetic
cuagggacuauuagagugug

SEQ ID NO: 163126 - RNA, 19 nt, Artificial Sequence
  Synthetic
aguguauacuacucgugug

SEQ ID NO: 163127 - RNA, 20 nt, Artificial Sequence
  Synthetic
caguguauacuacucgugug

SEQ ID NO: 163128 - RNA, 22 nt, Artificial Sequence
  Synthetic
ugcaguguauacuacucgugug

SEQ ID NO: 163129 - RNA, 18 nt, Artificial Sequence
  Synthetic
ugugugugugcaugugug

SEQ ID NO: 163130 - RNA, 19 nt, Artificial Sequence
  Synthetic
augugugugugcaugugug

SEQ ID NO: 163131 - RNA, 20 nt, Artificial Sequence
  Synthetic
uaugugugugugcaugugug

SEQ ID NO: 163132 - RNA, 21 nt, Artificial Sequence
  Synthetic
cuaugugugugugcaugugug

SEQ ID NO: 163133 - RNA, 22 nt, Artificial Sequence
  Synthetic
ucuaugugugugugcaugugug

SEQ ID NO: 163134 - RNA, 23 nt, Artificial Sequence
  Synthetic
uucuaugugugugugcaugugug

SEQ ID NO: 163135 - RNA, 24 nt, Artificial Sequence
  Synthetic
uuucuaugugugugugcaugugug

SEQ ID NO: 163136 - RNA, 18 nt, Artificial Sequence
  Synthetic
uaaaaggaaaaaaaauug

SEQ ID NO: 163137 - RNA, 20 nt, Artificial Sequence
  Synthetic
aguaaaaggaaaaaaaauug

SEQ ID NO: 163138 - RNA, 18 nt, Artificial Sequence
  Synthetic
auaaaaauuagaaaauug

SEQ ID NO: 163139 - RNA, 19 nt, Artificial Sequence
  Synthetic
cauaaaaauuagaaaauug

SEQ ID NO: 163140 - RNA, 20 nt, Artificial Sequence
  Synthetic
ucauaaaaauuagaaaauug

SEQ ID NO: 163141 - RNA, 19 nt, Artificial Sequence
  Synthetic
aggucacaugaacaaauug

SEQ ID NO: 163142 - RNA, 21 nt, Artificial Sequence
  Synthetic
ugaggucacaugaacaaauug

SEQ ID NO: 163143 - RNA, 22 nt, Artificial Sequence
  Synthetic
augaggucacaugaacaaauug

SEQ ID NO: 163144 - RNA, 23 nt, Artificial Sequence
  Synthetic
aaugaggucacaugaacaaauug

SEQ ID NO: 163145 - RNA, 24 nt, Artificial Sequence
  Synthetic
aaaugaggucacaugaacaaauug

SEQ ID NO: 163146 - RNA, 18 nt, Artificial Sequence
  Synthetic
cauaaaauguauaaauug

SEQ ID NO: 163147 - RNA, 19 nt, Artificial Sequence
  Synthetic
ucauaaaauguauaaauug

SEQ ID NO: 163148 - RNA, 20 nt, Artificial Sequence
  Synthetic
uucauaaaauguauaaauug

SEQ ID NO: 163149 - RNA, 18 nt, Artificial Sequence
  Synthetic
uguccaagagugcaauug

SEQ ID NO: 163150 - RNA, 19 nt, Artificial Sequence
  Synthetic
auguccaagagugcaauug

SEQ ID NO: 163151 - RNA, 20 nt, Artificial Sequence
  Synthetic
aauguccaagagugcaauug

SEQ ID NO: 163152 - RNA, 21 nt, Artificial Sequence
  Synthetic
aaauguccaagagugcaauug

SEQ ID NO: 163153 - RNA, 22 nt, Artificial Sequence
  Synthetic
uaaauguccaagagugcaauug

SEQ ID NO: 163154 - RNA, 23 nt, Artificial Sequence
  Synthetic
auaaauguccaagagugcaauug

SEQ ID NO: 163155 - RNA, 18 nt, Artificial Sequence
  Synthetic
agucuccaauaauaauug

SEQ ID NO: 163156 - RNA, 19 nt, Artificial Sequence
  Synthetic
aagucuccaauaauaauug

SEQ ID NO: 163157 - RNA, 21 nt, Artificial Sequence
  Synthetic
ugaagucuccaauaauaauug

SEQ ID NO: 163158 - RNA, 22 nt, Artificial Sequence
  Synthetic
uugaagucuccaauaauaauug

SEQ ID NO: 163159 - RNA, 23 nt, Artificial Sequence
  Synthetic
uuugaagucuccaauaauaauug

SEQ ID NO: 163160 - RNA, 18 nt, Artificial Sequence
  Synthetic
aacacuuagaggacauug

SEQ ID NO: 163161 - RNA, 20 nt, Artificial Sequence
  Synthetic
ugaacacuuagaggacauug

SEQ ID NO: 163162 - RNA, 21 nt, Artificial Sequence
  Synthetic
augaacacuuagaggacauug

SEQ ID NO: 163163 - RNA, 22 nt, Artificial Sequence
  Synthetic
caugaacacuuagaggacauug

SEQ ID NO: 163164 - RNA, 23 nt, Artificial Sequence
  Synthetic
ccaugaacacuuagaggacauug

SEQ ID NO: 163165 - RNA, 24 nt, Artificial Sequence
  Synthetic
cccaugaacacuuagaggacauug

SEQ ID NO: 163166 - RNA, 21 nt, Artificial Sequence
  Synthetic
uuggccccaugcuggacauug

SEQ ID NO: 163167 - RNA, 22 nt, Artificial Sequence
  Synthetic
uuuggccccaugcuggacauug

SEQ ID NO: 163168 - RNA, 23 nt, Artificial Sequence
  Synthetic
uuuuggccccaugcuggacauug

SEQ ID NO: 163169 - RNA, 19 nt, Artificial Sequence
  Synthetic
agggcuauccuaugcauug

SEQ ID NO: 163170 - RNA, 22 nt, Artificial Sequence
  Synthetic
uggagggcuauccuaugcauug

SEQ ID NO: 163171 - RNA, 24 nt, Artificial Sequence
  Synthetic
uguggagggcuauccuaugcauug

SEQ ID NO: 163172 - RNA, 22 nt, Artificial Sequence
  Synthetic
ugagcagcuauccucugcauug

SEQ ID NO: 163173 - RNA, 24 nt, Artificial Sequence
  Synthetic
ugugagcagcuauccucugcauug

SEQ ID NO: 163174 - RNA, 18 nt, Artificial Sequence
  Synthetic
uggcuguccugugcauug

SEQ ID NO: 163175 - RNA, 20 nt, Artificial Sequence
  Synthetic
aguggcuguccugugcauug

SEQ ID NO: 163176 - RNA, 22 nt, Artificial Sequence
  Synthetic
ugaguggcuguccugugcauug

SEQ ID NO: 163177 - RNA, 24 nt, Artificial Sequence
  Synthetic
cgugaguggcuguccugugcauug

SEQ ID NO: 163178 - RNA, 21 nt, Artificial Sequence
  Synthetic
aaaauagaugggaauucauug

SEQ ID NO: 163179 - RNA, 22 nt, Artificial Sequence
  Synthetic
aaaaauagaugggaauucauug

SEQ ID NO: 163180 - RNA, 23 nt, Artificial Sequence
  Synthetic
uaaaaauagaugggaauucauug

SEQ ID NO: 163181 - RNA, 24 nt, Artificial Sequence
  Synthetic
uuaaaaauagaugggaauucauug

SEQ ID NO: 163182 - RNA, 18 nt, Artificial Sequence
  Synthetic
uaccaaguaaugagauug

SEQ ID NO: 163183 - RNA, 19 nt, Artificial Sequence
  Synthetic
auaccaaguaaugagauug

SEQ ID NO: 163184 - RNA, 20 nt, Artificial Sequence
  Synthetic
uauaccaaguaaugagauug

SEQ ID NO: 163185 - RNA, 21 nt, Artificial Sequence
  Synthetic
auauaccaaguaaugagauug

SEQ ID NO: 163186 - RNA, 22 nt, Artificial Sequence
  Synthetic
uauauaccaaguaaugagauug

SEQ ID NO: 163187 - RNA, 23 nt, Artificial Sequence
  Synthetic
auauauaccaaguaaugagauug

SEQ ID NO: 163188 - RNA, 24 nt, Artificial Sequence
  Synthetic
aauauauaccaaguaaugagauug

SEQ ID NO: 163189 - RNA, 18 nt, Artificial Sequence
  Synthetic
ugcccaauaaugggauug

SEQ ID NO: 163190 - RNA, 19 nt, Artificial Sequence
  Synthetic
augcccaauaaugggauug

SEQ ID NO: 163191 - RNA, 20 nt, Artificial Sequence
  Synthetic
uaugcccaauaaugggauug

SEQ ID NO: 163192 - RNA, 21 nt, Artificial Sequence
  Synthetic
auaugcccaauaaugggauug

SEQ ID NO: 163193 - RNA, 22 nt, Artificial Sequence
  Synthetic
uauaugcccaauaaugggauug

SEQ ID NO: 163194 - RNA, 18 nt, Artificial Sequence
  Synthetic
uaaccaguaaugggauug

SEQ ID NO: 163195 - RNA, 19 nt, Artificial Sequence
  Synthetic
auaaccaguaaugggauug

SEQ ID NO: 163196 - RNA, 20 nt, Artificial Sequence
  Synthetic
uauaaccaguaaugggauug

SEQ ID NO: 163197 - RNA, 21 nt, Artificial Sequence
  Synthetic
auauaaccaguaaugggauug

SEQ ID NO: 163198 - RNA, 22 nt, Artificial Sequence
  Synthetic
uauauaaccaguaaugggauug

SEQ ID NO: 163199 - RNA, 18 nt, Artificial Sequence
  Synthetic
uacucaguaaugggauug

SEQ ID NO: 163200 - RNA, 19 nt, Artificial Sequence
  Synthetic
auacucaguaaugggauug

SEQ ID NO: 163201 - RNA, 20 nt, Artificial Sequence
  Synthetic
uauacucaguaaugggauug

SEQ ID NO: 163202 - RNA, 21 nt, Artificial Sequence
  Synthetic
auauacucaguaaugggauug

SEQ ID NO: 163203 - RNA, 22 nt, Artificial Sequence
  Synthetic
uauauacucaguaaugggauug

SEQ ID NO: 163204 - RNA, 23 nt, Artificial Sequence
  Synthetic
auauauacucaguaaugggauug

SEQ ID NO: 163205 - RNA, 19 nt, Artificial Sequence
  Synthetic
cuacucaguaaugggauug

SEQ ID NO: 163206 - RNA, 20 nt, Artificial Sequence
  Synthetic
ucuacucaguaaugggauug

SEQ ID NO: 163207 - RNA, 21 nt, Artificial Sequence
  Synthetic
aucuacucaguaaugggauug

SEQ ID NO: 163208 - RNA, 22 nt, Artificial Sequence
  Synthetic
uaucuacucaguaaugggauug

SEQ ID NO: 163209 - RNA, 23 nt, Artificial Sequence
  Synthetic
auaucuacucaguaaugggauug

SEQ ID NO: 163210 - RNA, 18 nt, Artificial Sequence
  Synthetic
uacccggaagugggauug

SEQ ID NO: 163211 - RNA, 19 nt, Artificial Sequence
  Synthetic
auacccggaagugggauug

SEQ ID NO: 163212 - RNA, 20 nt, Artificial Sequence
  Synthetic
uauacccggaagugggauug

SEQ ID NO: 163213 - RNA, 21 nt, Artificial Sequence
  Synthetic
auauacccggaagugggauug

SEQ ID NO: 163214 - RNA, 22 nt, Artificial Sequence
  Synthetic
uauauacccggaagugggauug

SEQ ID NO: 163215 - RNA, 23 nt, Artificial Sequence
  Synthetic
auauauacccggaagugggauug

SEQ ID NO: 163216 - RNA, 18 nt, Artificial Sequence
  Synthetic
ugcccaguagugggauug

SEQ ID NO: 163217 - RNA, 19 nt, Artificial Sequence
  Synthetic
augcccaguagugggauug

SEQ ID NO: 163218 - RNA, 20 nt, Artificial Sequence
  Synthetic
aaugcccaguagugggauug

SEQ ID NO: 163219 - RNA, 21 nt, Artificial Sequence
  Synthetic
aaaugcccaguagugggauug

SEQ ID NO: 163220 - RNA, 22 nt, Artificial Sequence
  Synthetic
uaaaugcccaguagugggauug

SEQ ID NO: 163221 - RNA, 23 nt, Artificial Sequence
  Synthetic
auaaaugcccaguagugggauug

SEQ ID NO: 163222 - RNA, 18 nt, Artificial Sequence
  Synthetic
uuuaucuuaaagguauug

SEQ ID NO: 163223 - RNA, 19 nt, Artificial Sequence
  Synthetic
auuuaucuuaaagguauug

SEQ ID NO: 163224 - RNA, 20 nt, Artificial Sequence
  Synthetic
aauuuaucuuaaagguauug

SEQ ID NO: 163225 - RNA, 18 nt, Artificial Sequence
  Synthetic
uugaaaauucccuuauug

SEQ ID NO: 163226 - RNA, 22 nt, Artificial Sequence
  Synthetic
uggguugaaaauucccuuauug

SEQ ID NO: 163227 - RNA, 23 nt, Artificial Sequence
  Synthetic
cuggguugaaaauucccuuauug

SEQ ID NO: 163228 - RNA, 24 nt, Artificial Sequence
  Synthetic
ucuggguugaaaauucccuuauug

SEQ ID NO: 163229 - RNA, 18 nt, Artificial Sequence
  Synthetic
uuaauaaaauuguuauug

SEQ ID NO: 163230 - RNA, 19 nt, Artificial Sequence
  Synthetic
auuaauaaaauuguuauug

SEQ ID NO: 163231 - RNA, 20 nt, Artificial Sequence
  Synthetic
aauuaauaaaauuguuauug

SEQ ID NO: 163232 - RNA, 21 nt, Artificial Sequence
  Synthetic
uaauuaauaaaauuguuauug

SEQ ID NO: 163233 - RNA, 22 nt, Artificial Sequence
  Synthetic
uuaauuaauaaaauuguuauug

SEQ ID NO: 163234 - RNA, 23 nt, Artificial Sequence
  Synthetic
uuuaauuaauaaaauuguuauug

SEQ ID NO: 163235 - RNA, 24 nt, Artificial Sequence
  Synthetic
uuuuaauuaauaaaauuguuauug

SEQ ID NO: 163236 - RNA, 18 nt, Artificial Sequence
  Synthetic
uuucauuccauuuuauug

SEQ ID NO: 163237 - RNA, 19 nt, Artificial Sequence
  Synthetic
auuucauuccauuuuauug

SEQ ID NO: 163238 - RNA, 20 nt, Artificial Sequence
  Synthetic
uauuucauuccauuuuauug

SEQ ID NO: 163239 - RNA, 21 nt, Artificial Sequence
  Synthetic
auauuucauuccauuuuauug

SEQ ID NO: 163240 - RNA, 22 nt, Artificial Sequence
  Synthetic
aauauuucauuccauuuuauug

SEQ ID NO: 163241 - RNA, 23 nt, Artificial Sequence
  Synthetic
aaauauuucauuccauuuuauug

SEQ ID NO: 163242 - RNA, 24 nt, Artificial Sequence
  Synthetic
uaaauauuucauuccauuuuauug

SEQ ID NO: 163243 - RNA, 18 nt, Artificial Sequence
  Synthetic
uuuaaugcauagaacuug

SEQ ID NO: 163244 - RNA, 19 nt, Artificial Sequence
  Synthetic
auuuaaugcauagaacuug

SEQ ID NO: 163245 - RNA, 20 nt, Artificial Sequence
  Synthetic
uauuuaaugcauagaacuug

SEQ ID NO: 163246 - RNA, 21 nt, Artificial Sequence
  Synthetic
auauuuaaugcauagaacuug

SEQ ID NO: 163247 - RNA, 22 nt, Artificial Sequence
  Synthetic
cauauuuaaugcauagaacuug

SEQ ID NO: 163248 - RNA, 23 nt, Artificial Sequence
  Synthetic
acauauuuaaugcauagaacuug

SEQ ID NO: 163249 - RNA, 24 nt, Artificial Sequence
  Synthetic
uacauauuuaaugcauagaacuug

SEQ ID NO: 163250 - RNA, 20 nt, Artificial Sequence
  Synthetic
uggaacuuccuagagacuug

SEQ ID NO: 163251 - RNA, 21 nt, Artificial Sequence
  Synthetic
uuggaacuuccuagagacuug

SEQ ID NO: 163252 - RNA, 22 nt, Artificial Sequence
  Synthetic
uuuggaacuuccuagagacuug

SEQ ID NO: 163253 - RNA, 24 nt, Artificial Sequence
  Synthetic
aguuuggaacuuccuagagacuug

SEQ ID NO: 163254 - RNA, 18 nt, Artificial Sequence
  Synthetic
augggcuuuggagacuug

SEQ ID NO: 163255 - RNA, 19 nt, Artificial Sequence
  Synthetic
aaugggcuuuggagacuug

SEQ ID NO: 163256 - RNA, 20 nt, Artificial Sequence
  Synthetic
caaugggcuuuggagacuug

SEQ ID NO: 163257 - RNA, 21 nt, Artificial Sequence
  Synthetic
acaaugggcuuuggagacuug

SEQ ID NO: 163258 - RNA, 22 nt, Artificial Sequence
  Synthetic
uacaaugggcuuuggagacuug

SEQ ID NO: 163259 - RNA, 23 nt, Artificial Sequence
  Synthetic
auacaaugggcuuuggagacuug

SEQ ID NO: 163260 - RNA, 18 nt, Artificial Sequence
  Synthetic
aguaaguguauguacuug

SEQ ID NO: 163261 - RNA, 19 nt, Artificial Sequence
  Synthetic
uaguaaguguauguacuug

SEQ ID NO: 163262 - RNA, 20 nt, Artificial Sequence
  Synthetic
auaguaaguguauguacuug

SEQ ID NO: 163263 - RNA, 18 nt, Artificial Sequence
  Synthetic
uccuucauuucaaccuug

SEQ ID NO: 163264 - RNA, 19 nt, Artificial Sequence
  Synthetic
uuccuucauuucaaccuug

SEQ ID NO: 163265 - RNA, 20 nt, Artificial Sequence
  Synthetic
uuuccuucauuucaaccuug

SEQ ID NO: 163266 - RNA, 21 nt, Artificial Sequence
  Synthetic
uuuuccuucauuucaaccuug

SEQ ID NO: 163267 - RNA, 22 nt, Artificial Sequence
  Synthetic
uuuuuccuucauuucaaccuug

SEQ ID NO: 163268 - RNA, 23 nt, Artificial Sequence
  Synthetic
uuuuuuccuucauuucaaccuug

SEQ ID NO: 163269 - RNA, 24 nt, Artificial Sequence
  Synthetic
auuuuuuccuucauuucaaccuug

SEQ ID NO: 163270 - RNA, 18 nt, Artificial Sequence
  Synthetic
uacugccugcccaccuug

SEQ ID NO: 163271 - RNA, 19 nt, Artificial Sequence
  Synthetic
auacugccugcccaccuug

SEQ ID NO: 163272 - RNA, 20 nt, Artificial Sequence
  Synthetic
aauacugccugcccaccuug

SEQ ID NO: 163273 - RNA, 21 nt, Artificial Sequence
  Synthetic
aaauacugccugcccaccuug

SEQ ID NO: 163274 - RNA, 22 nt, Artificial Sequence
  Synthetic
uaaauacugccugcccaccuug

SEQ ID NO: 163275 - RNA, 23 nt, Artificial Sequence
  Synthetic
auaaauacugccugcccaccuug

SEQ ID NO: 163276 - RNA, 24 nt, Artificial Sequence
  Synthetic
uauaaauacugccugcccaccuug

SEQ ID NO: 163277 - RNA, 20 nt, Artificial Sequence
  Synthetic
cuucugguucuagauccuug

SEQ ID NO: 163278 - RNA, 21 nt, Artificial Sequence
  Synthetic
acuucugguucuagauccuug

SEQ ID NO: 163279 - RNA, 22 nt, Artificial Sequence
  Synthetic
uacuucugguucuagauccuug

SEQ ID NO: 163280 - RNA, 18 nt, Artificial Sequence
  Synthetic
ucugguuguagauccuug

SEQ ID NO: 163281 - RNA, 19 nt, Artificial Sequence
  Synthetic
uucugguuguagauccuug

SEQ ID NO: 163282 - RNA, 20 nt, Artificial Sequence
  Synthetic
uuucugguuguagauccuug

SEQ ID NO: 163283 - RNA, 21 nt, Artificial Sequence
  Synthetic
auuucugguuguagauccuug

SEQ ID NO: 163284 - RNA, 22 nt, Artificial Sequence
  Synthetic
uauuucugguuguagauccuug

SEQ ID NO: 163285 - RNA, 18 nt, Artificial Sequence
  Synthetic
cucccucucucuuccuug

SEQ ID NO: 163286 - RNA, 19 nt, Artificial Sequence
  Synthetic
ucucccucucucuuccuug

SEQ ID NO: 163287 - RNA, 20 nt, Artificial Sequence
  Synthetic
cucucccucucucuuccuug

SEQ ID NO: 163288 - RNA, 18 nt, Artificial Sequence
  Synthetic
uauauaauuucaagcuug

SEQ ID NO: 163289 - RNA, 19 nt, Artificial Sequence
  Synthetic
uuauauaauuucaagcuug

SEQ ID NO: 163290 - RNA, 20 nt, Artificial Sequence
  Synthetic
uuuauauaauuucaagcuug

SEQ ID NO: 163291 - RNA, 21 nt, Artificial Sequence
  Synthetic
uuuuauauaauuucaagcuug

SEQ ID NO: 163292 - RNA, 22 nt, Artificial Sequence
  Synthetic
uuuuuauauaauuucaagcuug

SEQ ID NO: 163293 - RNA, 23 nt, Artificial Sequence
  Synthetic
auuuuuauauaauuucaagcuug

SEQ ID NO: 163294 - RNA, 24 nt, Artificial Sequence
  Synthetic
uauuuuuauauaauuucaagcuug

SEQ ID NO: 163295 - RNA, 21 nt, Artificial Sequence
  Synthetic
acauuuaaugaacacagcuug

SEQ ID NO: 163296 - RNA, 22 nt, Artificial Sequence
  Synthetic
cacauuuaaugaacacagcuug

SEQ ID NO: 163297 - RNA, 23 nt, Artificial Sequence
  Synthetic
acacauuuaaugaacacagcuug

SEQ ID NO: 163298 - RNA, 24 nt, Artificial Sequence
  Synthetic
uacacauuuaaugaacacagcuug

SEQ ID NO: 163299 - RNA, 18 nt, Artificial Sequence
  Synthetic
ccacucucuucuagcuug

SEQ ID NO: 163300 - RNA, 19 nt, Artificial Sequence
  Synthetic
cccacucucuucuagcuug

SEQ ID NO: 163301 - RNA, 20 nt, Artificial Sequence
  Synthetic
acccacucucuucuagcuug

SEQ ID NO: 163302 - RNA, 21 nt, Artificial Sequence
  Synthetic
cacccacucucuucuagcuug

SEQ ID NO: 163303 - RNA, 24 nt, Artificial Sequence
  Synthetic
uggcacccacucucuucuagcuug

SEQ ID NO: 163304 - RNA, 21 nt, Artificial Sequence
  Synthetic
cccccacucucuucuggcuug

SEQ ID NO: 163305 - RNA, 24 nt, Artificial Sequence
  Synthetic
uggcccccacucucuucuggcuug

SEQ ID NO: 163306 - RNA, 18 nt, Artificial Sequence
  Synthetic
auaaagaauaaaugcuug

SEQ ID NO: 163307 - RNA, 19 nt, Artificial Sequence
  Synthetic
cauaaagaauaaaugcuug

SEQ ID NO: 163308 - RNA, 20 nt, Artificial Sequence
  Synthetic
acauaaagaauaaaugcuug

SEQ ID NO: 163309 - RNA, 21 nt, Artificial Sequence
  Synthetic
aacauaaagaauaaaugcuug

SEQ ID NO: 163310 - RNA, 24 nt, Artificial Sequence
  Synthetic
uggaacauaaagaauaaaugcuug

SEQ ID NO: 163311 - RNA, 18 nt, Artificial Sequence
  Synthetic
uauuugaucagggucuug

SEQ ID NO: 163312 - RNA, 19 nt, Artificial Sequence
  Synthetic
auauuugaucagggucuug

SEQ ID NO: 163313 - RNA, 21 nt, Artificial Sequence
  Synthetic
ugauauuugaucagggucuug

SEQ ID NO: 163314 - RNA, 22 nt, Artificial Sequence
  Synthetic
augauauuugaucagggucuug

SEQ ID NO: 163315 - RNA, 24 nt, Artificial Sequence
  Synthetic
ugaugauauuugaucagggucuug

SEQ ID NO: 163316 - RNA, 18 nt, Artificial Sequence
  Synthetic
cacagagacucugucuug

SEQ ID NO: 163317 - RNA, 20 nt, Artificial Sequence
  Synthetic
agcacagagacucugucuug

SEQ ID NO: 163318 - RNA, 18 nt, Artificial Sequence
  Synthetic
aauuguuauaccuucuug

SEQ ID NO: 163319 - RNA, 19 nt, Artificial Sequence
  Synthetic
caauuguuauaccuucuug

SEQ ID NO: 163320 - RNA, 20 nt, Artificial Sequence
  Synthetic
acaauuguuauaccuucuug

SEQ ID NO: 163321 - RNA, 21 nt, Artificial Sequence
  Synthetic
uacaauuguuauaccuucuug

SEQ ID NO: 163322 - RNA, 22 nt, Artificial Sequence
  Synthetic
uuacaauuguuauaccuucuug

SEQ ID NO: 163323 - RNA, 23 nt, Artificial Sequence
  Synthetic
uuuacaauuguuauaccuucuug

SEQ ID NO: 163324 - RNA, 24 nt, Artificial Sequence
  Synthetic
auuuacaauuguuauaccuucuug

SEQ ID NO: 163325 - RNA, 18 nt, Artificial Sequence
  Synthetic
uucuucuuuggcuucuug

SEQ ID NO: 163326 - RNA, 20 nt, Artificial Sequence
  Synthetic
uguucuucuuuggcuucuug

SEQ ID NO: 163327 - RNA, 21 nt, Artificial Sequence
  Synthetic
uuguucuucuuuggcuucuug

SEQ ID NO: 163328 - RNA, 22 nt, Artificial Sequence
  Synthetic
auuguucuucuuuggcuucuug

SEQ ID NO: 163329 - RNA, 23 nt, Artificial Sequence
  Synthetic
aauuguucuucuuuggcuucuug

SEQ ID NO: 163330 - RNA, 24 nt, Artificial Sequence
  Synthetic
uaauuguucuucuuuggcuucuug

SEQ ID NO: 163331 - RNA, 18 nt, Artificial Sequence
  Synthetic
acaaauucagcaaaguug

SEQ ID NO: 163332 - RNA, 19 nt, Artificial Sequence
  Synthetic
aacaaauucagcaaaguug

SEQ ID NO: 163333 - RNA, 20 nt, Artificial Sequence
  Synthetic
aaacaaauucagcaaaguug

SEQ ID NO: 163334 - RNA, 21 nt, Artificial Sequence
  Synthetic
uaaacaaauucagcaaaguug

SEQ ID NO: 163335 - RNA, 22 nt, Artificial Sequence
  Synthetic
auaaacaaauucagcaaaguug

SEQ ID NO: 163336 - RNA, 23 nt, Artificial Sequence
  Synthetic
aauaaacaaauucagcaaaguug

SEQ ID NO: 163337 - RNA, 24 nt, Artificial Sequence
  Synthetic
caauaaacaaauucagcaaaguug

SEQ ID NO: 163338 - RNA, 18 nt, Artificial Sequence
  Synthetic
acaaguuuaguaaaguug

SEQ ID NO: 163339 - RNA, 19 nt, Artificial Sequence
  Synthetic
cacaaguuuaguaaaguug

SEQ ID NO: 163340 - RNA, 20 nt, Artificial Sequence
  Synthetic
acacaaguuuaguaaaguug

SEQ ID NO: 163341 - RNA, 21 nt, Artificial Sequence
  Synthetic
uacacaaguuuaguaaaguug

SEQ ID NO: 163342 - RNA, 22 nt, Artificial Sequence
  Synthetic
auacacaaguuuaguaaaguug

SEQ ID NO: 163343 - RNA, 23 nt, Artificial Sequence
  Synthetic
cauacacaaguuuaguaaaguug

SEQ ID NO: 163344 - RNA, 24 nt, Artificial Sequence
  Synthetic
ucauacacaaguuuaguaaaguug

SEQ ID NO: 163345 - RNA, 18 nt, Artificial Sequence
  Synthetic
aauuguuucuuccaguug

SEQ ID NO: 163346 - RNA, 19 nt, Artificial Sequence
  Synthetic
aaauuguuucuuccaguug

SEQ ID NO: 163347 - RNA, 20 nt, Artificial Sequence
  Synthetic
caaauuguuucuuccaguug

SEQ ID NO: 163348 - RNA, 18 nt, Artificial Sequence
  Synthetic
cucaggaggcugagguug

SEQ ID NO: 163349 - RNA, 19 nt, Artificial Sequence
  Synthetic
acucaggaggcugagguug

SEQ ID NO: 163350 - RNA, 20 nt, Artificial Sequence
  Synthetic
uacucaggaggcugagguug

SEQ ID NO: 163351 - RNA, 21 nt, Artificial Sequence
  Synthetic
cuacucaggaggcugagguug

SEQ ID NO: 163352 - RNA, 23 nt, Artificial Sequence
  Synthetic
agcuacucaggaggcugagguug

SEQ ID NO: 163353 - RNA, 24 nt, Artificial Sequence
  Synthetic
cagcuacucaggaggcugagguug

SEQ ID NO: 163354 - RNA, 18 nt, Artificial Sequence
  Synthetic
uacccaggagugagguug

SEQ ID NO: 163355 - RNA, 19 nt, Artificial Sequence
  Synthetic
auacccaggagugagguug

SEQ ID NO: 163356 - RNA, 20 nt, Artificial Sequence
  Synthetic
uauacccaggagugagguug

SEQ ID NO: 163357 - RNA, 21 nt, Artificial Sequence
  Synthetic
auauacccaggagugagguug

SEQ ID NO: 163358 - RNA, 22 nt, Artificial Sequence
  Synthetic
uauauacccaggagugagguug

SEQ ID NO: 163359 - RNA, 23 nt, Artificial Sequence
  Synthetic
auauauacccaggagugagguug

SEQ ID NO: 163360 - RNA, 21 nt, Artificial Sequence
  Synthetic
aguuuuuagcaugaaggguug

SEQ ID NO: 163361 - RNA, 23 nt, Artificial Sequence
  Synthetic
agaguuuuuagcaugaaggguug

SEQ ID NO: 163362 - RNA, 18 nt, Artificial Sequence
  Synthetic
aaccuagaugacggguug

SEQ ID NO: 163363 - RNA, 19 nt, Artificial Sequence
  Synthetic
aaaccuagaugacggguug

SEQ ID NO: 163364 - RNA, 20 nt, Artificial Sequence
  Synthetic
aaaaccuagaugacggguug

SEQ ID NO: 163365 - RNA, 21 nt, Artificial Sequence
  Synthetic
uaaaaccuagaugacggguug

SEQ ID NO: 163366 - RNA, 22 nt, Artificial Sequence
  Synthetic
uuaaaaccuagaugacggguug

SEQ ID NO: 163367 - RNA, 23 nt, Artificial Sequence
  Synthetic
cuuaaaaccuagaugacggguug

SEQ ID NO: 163368 - RNA, 18 nt, Artificial Sequence
  Synthetic
aauguagaugacggguug

SEQ ID NO: 163369 - RNA, 19 nt, Artificial Sequence
  Synthetic
uaauguagaugacggguug

SEQ ID NO: 163370 - RNA, 20 nt, Artificial Sequence
  Synthetic
cuaauguagaugacggguug

SEQ ID NO: 163371 - RNA, 21 nt, Artificial Sequence
  Synthetic
ccuaauguagaugacggguug

SEQ ID NO: 163372 - RNA, 22 nt, Artificial Sequence
  Synthetic
accuaauguagaugacggguug

SEQ ID NO: 163373 - RNA, 23 nt, Artificial Sequence
  Synthetic
uaccuaauguagaugacggguug

SEQ ID NO: 163374 - RNA, 24 nt, Artificial Sequence
  Synthetic
auaccuaauguagaugacggguug

SEQ ID NO: 163375 - RNA, 18 nt, Artificial Sequence
  Synthetic
uuuccguggaccggguug

SEQ ID NO: 163376 - RNA, 19 nt, Artificial Sequence
  Synthetic
uuuuccguggaccggguug

SEQ ID NO: 163377 - RNA, 20 nt, Artificial Sequence
  Synthetic
uuuuuccguggaccggguug

SEQ ID NO: 163378 - RNA, 21 nt, Artificial Sequence
  Synthetic
auuuuuccguggaccggguug

SEQ ID NO: 163379 - RNA, 22 nt, Artificial Sequence
  Synthetic
aauuuuuccguggaccggguug

SEQ ID NO: 163380 - RNA, 23 nt, Artificial Sequence
  Synthetic
caauuuuuccguggaccggguug

SEQ ID NO: 163381 - RNA, 24 nt, Artificial Sequence
  Synthetic
acaauuuuuccguggaccggguug

SEQ ID NO: 163382 - RNA, 18 nt, Artificial Sequence
  Synthetic
agaaaauaauagggguug

SEQ ID NO: 163383 - RNA, 19 nt, Artificial Sequence
  Synthetic
cagaaaauaauagggguug

SEQ ID NO: 163384 - RNA, 20 nt, Artificial Sequence
  Synthetic
ucagaaaauaauagggguug

SEQ ID NO: 163385 - RNA, 18 nt, Artificial Sequence
  Synthetic
aaccuggauguuggguug

SEQ ID NO: 163386 - RNA, 19 nt, Artificial Sequence
  Synthetic
aaaccuggauguuggguug

SEQ ID NO: 163387 - RNA, 20 nt, Artificial Sequence
  Synthetic
aaaaccuggauguuggguug

SEQ ID NO: 163388 - RNA, 21 nt, Artificial Sequence
  Synthetic
uaaaaccuggauguuggguug

SEQ ID NO: 163389 - RNA, 22 nt, Artificial Sequence
  Synthetic
uuaaaaccuggauguuggguug

SEQ ID NO: 163390 - RNA, 23 nt, Artificial Sequence
  Synthetic
cuuaaaaccuggauguuggguug

SEQ ID NO: 163391 - RNA, 18 nt, Artificial Sequence
  Synthetic
acacccugggaacuguug

SEQ ID NO: 163392 - RNA, 19 nt, Artificial Sequence
  Synthetic
cacacccugggaacuguug

SEQ ID NO: 163393 - RNA, 20 nt, Artificial Sequence
  Synthetic
ucacacccugggaacuguug

SEQ ID NO: 163394 - RNA, 21 nt, Artificial Sequence
  Synthetic
aucacacccugggaacuguug

SEQ ID NO: 163395 - RNA, 22 nt, Artificial Sequence
  Synthetic
caucacacccugggaacuguug

SEQ ID NO: 163396 - RNA, 23 nt, Artificial Sequence
  Synthetic
acaucacacccugggaacuguug

SEQ ID NO: 163397 - RNA, 24 nt, Artificial Sequence
  Synthetic
aacaucacacccugggaacuguug

SEQ ID NO: 163398 - RNA, 21 nt, Artificial Sequence
  Synthetic
aucacacucuggggacuguug

SEQ ID NO: 163399 - RNA, 22 nt, Artificial Sequence
  Synthetic
caucacacucuggggacuguug

SEQ ID NO: 163400 - RNA, 23 nt, Artificial Sequence
  Synthetic
acaucacacucuggggacuguug

SEQ ID NO: 163401 - RNA, 24 nt, Artificial Sequence
  Synthetic
aacaucacacucuggggacuguug

SEQ ID NO: 163402 - RNA, 18 nt, Artificial Sequence
  Synthetic
uauuguguuuuacuguug

SEQ ID NO: 163403 - RNA, 19 nt, Artificial Sequence
  Synthetic
uuauuguguuuuacuguug

SEQ ID NO: 163404 - RNA, 20 nt, Artificial Sequence
  Synthetic
cuuauuguguuuuacuguug

SEQ ID NO: 163405 - RNA, 21 nt, Artificial Sequence
  Synthetic
acuuauuguguuuuacuguug

SEQ ID NO: 163406 - RNA, 22 nt, Artificial Sequence
  Synthetic
uacuuauuguguuuuacuguug

SEQ ID NO: 163407 - RNA, 23 nt, Artificial Sequence
  Synthetic
uuacuuauuguguuuuacuguug

SEQ ID NO: 163408 - RNA, 24 nt, Artificial Sequence
  Synthetic
uuuacuuauuguguuuuacuguug

SEQ ID NO: 163409 - RNA, 21 nt, Artificial Sequence
  Synthetic
aucacacaccggggccuguug

SEQ ID NO: 163410 - RNA, 22 nt, Artificial Sequence
  Synthetic
caucacacaccggggccuguug

SEQ ID NO: 163411 - RNA, 23 nt, Artificial Sequence
  Synthetic
acaucacacaccggggccuguug

SEQ ID NO: 163412 - RNA, 24 nt, Artificial Sequence
  Synthetic
aacaucacacaccggggccuguug

SEQ ID NO: 163413 - RNA, 18 nt, Artificial Sequence
  Synthetic
uuguuuauucaaguguug

SEQ ID NO: 163414 - RNA, 19 nt, Artificial Sequence
  Synthetic
uuuguuuauucaaguguug

SEQ ID NO: 163415 - RNA, 20 nt, Artificial Sequence
  Synthetic
cuuuguuuauucaaguguug

SEQ ID NO: 163416 - RNA, 18 nt, Artificial Sequence
  Synthetic
agcugguugauaguguug

SEQ ID NO: 163417 - RNA, 19 nt, Artificial Sequence
  Synthetic
aagcugguugauaguguug

SEQ ID NO: 163418 - RNA, 20 nt, Artificial Sequence
  Synthetic
caagcugguugauaguguug

SEQ ID NO: 163419 - RNA, 21 nt, Artificial Sequence
  Synthetic
ucaagcugguugauaguguug

SEQ ID NO: 163420 - RNA, 24 nt, Artificial Sequence
  Synthetic
aggucaagcugguugauaguguug

SEQ ID NO: 163421 - RNA, 19 nt, Artificial Sequence
  Synthetic
ugugccuguguguguguug

SEQ ID NO: 163422 - RNA, 20 nt, Artificial Sequence
  Synthetic
augugccuguguguguguug

SEQ ID NO: 163423 - RNA, 21 nt, Artificial Sequence
  Synthetic
uaugugccuguguguguguug

SEQ ID NO: 163424 - RNA, 23 nt, Artificial Sequence
  Synthetic
uguaugugccuguguguguguug

SEQ ID NO: 163425 - RNA, 18 nt, Artificial Sequence
  Synthetic
agagugaggaaauuguug

SEQ ID NO: 163426 - RNA, 18 nt, Artificial Sequence
  Synthetic
uuguauccuacaaauuug

SEQ ID NO: 163427 - RNA, 19 nt, Artificial Sequence
  Synthetic
cuuguauccuacaaauuug

SEQ ID NO: 163428 - RNA, 20 nt, Artificial Sequence
  Synthetic
ucuuguauccuacaaauuug

SEQ ID NO: 163429 - RNA, 21 nt, Artificial Sequence
  Synthetic
aucuuguauccuacaaauuug

SEQ ID NO: 163430 - RNA, 23 nt, Artificial Sequence
  Synthetic
ugaucuuguauccuacaaauuug

SEQ ID NO: 163431 - RNA, 24 nt, Artificial Sequence
  Synthetic
uugaucuuguauccuacaaauuug

SEQ ID NO: 163432 - RNA, 19 nt, Artificial Sequence
  Synthetic
agucaaaucaugcaauuug

SEQ ID NO: 163433 - RNA, 20 nt, Artificial Sequence
  Synthetic
aagucaaaucaugcaauuug

SEQ ID NO: 163434 - RNA, 19 nt, Artificial Sequence
  Synthetic
agguuucaguaagcauuug

SEQ ID NO: 163435 - RNA, 20 nt, Artificial Sequence
  Synthetic
aagguuucaguaagcauuug

SEQ ID NO: 163436 - RNA, 22 nt, Artificial Sequence
  Synthetic
ugcuuauaugcauauagauuug

SEQ ID NO: 163437 - RNA, 23 nt, Artificial Sequence
  Synthetic
augcuuauaugcauauagauuug

SEQ ID NO: 163438 - RNA, 24 nt, Artificial Sequence
  Synthetic
caugcuuauaugcauauagauuug

SEQ ID NO: 163439 - RNA, 18 nt, Artificial Sequence
  Synthetic
uguuaucaaaaauauuug

SEQ ID NO: 163440 - RNA, 19 nt, Artificial Sequence
  Synthetic
auguuaucaaaaauauuug

SEQ ID NO: 163441 - RNA, 20 nt, Artificial Sequence
  Synthetic
uauguuaucaaaaauauuug

SEQ ID NO: 163442 - RNA, 18 nt, Artificial Sequence
  Synthetic
ucacucuacaaauauuug

SEQ ID NO: 163443 - RNA, 20 nt, Artificial Sequence
  Synthetic
agucacucuacaaauauuug

SEQ ID NO: 163444 - RNA, 20 nt, Artificial Sequence
  Synthetic
aggcauucauuaaauauuug

SEQ ID NO: 163445 - RNA, 21 nt, Artificial Sequence
  Synthetic
uaggcauucauuaaauauuug

SEQ ID NO: 163446 - RNA, 23 nt, Artificial Sequence
  Synthetic
aguaggcauucauuaaauauuug

SEQ ID NO: 163447 - RNA, 24 nt, Artificial Sequence
  Synthetic
uaguaggcauucauuaaauauuug

SEQ ID NO: 163448 - RNA, 21 nt, Artificial Sequence
  Synthetic
uaggcuaaaccaugauauuug

SEQ ID NO: 163449 - RNA, 22 nt, Artificial Sequence
  Synthetic
cuaggcuaaaccaugauauuug

SEQ ID NO: 163450 - RNA, 24 nt, Artificial Sequence
  Synthetic
agcuaggcuaaaccaugauauuug

SEQ ID NO: 163451 - RNA, 18 nt, Artificial Sequence
  Synthetic
cguaggaguauauauuug

SEQ ID NO: 163452 - RNA, 19 nt, Artificial Sequence
  Synthetic
ucguaggaguauauauuug

SEQ ID NO: 163453 - RNA, 20 nt, Artificial Sequence
  Synthetic
aucguaggaguauauauuug

SEQ ID NO: 163454 - RNA, 21 nt, Artificial Sequence
  Synthetic
caucguaggaguauauauuug

SEQ ID NO: 163455 - RNA, 22 nt, Artificial Sequence
  Synthetic
acaucguaggaguauauauuug

SEQ ID NO: 163456 - RNA, 23 nt, Artificial Sequence
  Synthetic
uacaucguaggaguauauauuug

SEQ ID NO: 163457 - RNA, 18 nt, Artificial Sequence
  Synthetic
cauguucucacuuauuug

SEQ ID NO: 163458 - RNA, 20 nt, Artificial Sequence
  Synthetic
ugcauguucucacuuauuug

SEQ ID NO: 163459 - RNA, 21 nt, Artificial Sequence
  Synthetic
cugcauguucucacuuauuug

SEQ ID NO: 163460 - RNA, 22 nt, Artificial Sequence
  Synthetic
acugcauguucucacuuauuug

SEQ ID NO: 163461 - RNA, 23 nt, Artificial Sequence
  Synthetic
cacugcauguucucacuuauuug

SEQ ID NO: 163462 - RNA, 24 nt, Artificial Sequence
  Synthetic
ucacugcauguucucacuuauuug

SEQ ID NO: 163463 - RNA, 21 nt, Artificial Sequence
  Synthetic
uugcauguucucacuuauuug

SEQ ID NO: 163464 - RNA, 22 nt, Artificial Sequence
  Synthetic
auugcauguucucacuuauuug

SEQ ID NO: 163465 - RNA, 23 nt, Artificial Sequence
  Synthetic
cauugcauguucucacuuauuug

SEQ ID NO: 163466 - RNA, 24 nt, Artificial Sequence
  Synthetic
acauugcauguucucacuuauuug

SEQ ID NO: 163467 - RNA, 19 nt, Artificial Sequence
  Synthetic
ucauguucucacuuauuug

SEQ ID NO: 163468 - RNA, 20 nt, Artificial Sequence
  Synthetic
cucauguucucacuuauuug

SEQ ID NO: 163469 - RNA, 21 nt, Artificial Sequence
  Synthetic
ucucauguucucacuuauuug

SEQ ID NO: 163470 - RNA, 22 nt, Artificial Sequence
  Synthetic
aucucauguucucacuuauuug

SEQ ID NO: 163471 - RNA, 23 nt, Artificial Sequence
  Synthetic
caucucauguucucacuuauuug

SEQ ID NO: 163472 - RNA, 24 nt, Artificial Sequence
  Synthetic
acaucucauguucucacuuauuug

SEQ ID NO: 163473 - RNA, 18 nt, Artificial Sequence
  Synthetic
aaauacugucaagcuuug

SEQ ID NO: 163474 - RNA, 19 nt, Artificial Sequence
  Synthetic
uaaauacugucaagcuuug

SEQ ID NO: 163475 - RNA, 20 nt, Artificial Sequence
  Synthetic
auaaauacugucaagcuuug

SEQ ID NO: 163476 - RNA, 18 nt, Artificial Sequence
  Synthetic
ucugcccuuguggcuuug

SEQ ID NO: 163477 - RNA, 19 nt, Artificial Sequence
  Synthetic
cucugcccuuguggcuuug

SEQ ID NO: 163478 - RNA, 21 nt, Artificial Sequence
  Synthetic
agcucugcccuuguggcuuug

SEQ ID NO: 163479 - RNA, 22 nt, Artificial Sequence
  Synthetic
cagcucugcccuuguggcuuug

SEQ ID NO: 163480 - RNA, 18 nt, Artificial Sequence
  Synthetic
cucugaggcuucucuuug

SEQ ID NO: 163481 - RNA, 19 nt, Artificial Sequence
  Synthetic
acucugaggcuucucuuug

SEQ ID NO: 163482 - RNA, 20 nt, Artificial Sequence
  Synthetic
cacucugaggcuucucuuug

SEQ ID NO: 163483 - RNA, 18 nt, Artificial Sequence
  Synthetic
cucacauuccagucuuug

SEQ ID NO: 163484 - RNA, 19 nt, Artificial Sequence
  Synthetic
ccucacauuccagucuuug

SEQ ID NO: 163485 - RNA, 20 nt, Artificial Sequence
  Synthetic
uccucacauuccagucuuug

SEQ ID NO: 163486 - RNA, 18 nt, Artificial Sequence
  Synthetic
aaauaccuuaacuguuug

SEQ ID NO: 163487 - RNA, 20 nt, Artificial Sequence
  Synthetic
agaaauaccuuaacuguuug

SEQ ID NO: 163488 - RNA, 18 nt, Artificial Sequence
  Synthetic
agcacaauauuuuguuug

SEQ ID NO: 163489 - RNA, 19 nt, Artificial Sequence
  Synthetic
uagcacaauauuuuguuug

SEQ ID NO: 163490 - RNA, 20 nt, Artificial Sequence
  Synthetic
uuagcacaauauuuuguuug

SEQ ID NO: 163491 - RNA, 18 nt, Artificial Sequence
  Synthetic
caauuuguugauauuuug

SEQ ID NO: 163492 - RNA, 19 nt, Artificial Sequence
  Synthetic
ucaauuuguugauauuuug

SEQ ID NO: 163493 - RNA, 20 nt, Artificial Sequence
  Synthetic
uucaauuuguugauauuuug

SEQ ID NO: 163494 - RNA, 20 nt, Artificial Sequence
  Synthetic
agguguuugauaaacuuuug

SEQ ID NO: 163495 - RNA, 21 nt, Artificial Sequence
  Synthetic
uagguguuugauaaacuuuug

SEQ ID NO: 163496 - RNA, 22 nt, Artificial Sequence
  Synthetic
auagguguuugauaaacuuuug

SEQ ID NO: 163497 - RNA, 23 nt, Artificial Sequence
  Synthetic
aauagguguuugauaaacuuuug

SEQ ID NO: 163498 - RNA, 24 nt, Artificial Sequence
  Synthetic
uaauagguguuugauaaacuuuug

SEQ ID NO: 163499 - RNA, 18 nt, Artificial Sequence
  Synthetic
auuuuaccuauauuuuug

SEQ ID NO: 163500 - RNA, 19 nt, Artificial Sequence
  Synthetic
uauuuuaccuauauuuuug

SEQ ID NO: 163501 - RNA, 20 nt, Artificial Sequence
  Synthetic
uuauuuuaccuauauuuuug

SEQ ID NO: 163502 - RNA, 21 nt, Artificial Sequence
  Synthetic
uuuauuuuaccuauauuuuug

SEQ ID NO: 163503 - RNA, 22 nt, Artificial Sequence
  Synthetic
auuuauuuuaccuauauuuuug

SEQ ID NO: 163504 - RNA, 23 nt, Artificial Sequence
  Synthetic
uauuuauuuuaccuauauuuuug

SEQ ID NO: 163505 - RNA, 24 nt, Artificial Sequence
  Synthetic
auauuuauuuuaccuauauuuuug

SEQ ID NO: 163506 - RNA, 18 nt, Artificial Sequence
  Synthetic
agucuccaacuauuuuug

SEQ ID NO: 163507 - RNA, 19 nt, Artificial Sequence
  Synthetic
aagucuccaacuauuuuug

SEQ ID NO: 163508 - RNA, 21 nt, Artificial Sequence
  Synthetic
ugaagucuccaacuauuuuug

SEQ ID NO: 163509 - RNA, 22 nt, Artificial Sequence
  Synthetic
uugaagucuccaacuauuuuug

SEQ ID NO: 163510 - RNA, 24 nt, Artificial Sequence
  Synthetic
uguugaagucuccaacuauuuuug

SEQ ID NO: 163511 - RNA, 18 nt, Artificial Sequence
  Synthetic
uuauuuacccaguuuuug

SEQ ID NO: 163512 - RNA, 19 nt, Artificial Sequence
  Synthetic
auuauuuacccaguuuuug

SEQ ID NO: 163513 - RNA, 20 nt, Artificial Sequence
  Synthetic
aauuauuuacccaguuuuug

SEQ ID NO: 163514 - RNA, 21 nt, Artificial Sequence
  Synthetic
aaauuauuuacccaguuuuug

SEQ ID NO: 163515 - RNA, 22 nt, Artificial Sequence
  Synthetic
aaaauuauuuacccaguuuuug

SEQ ID NO: 163516 - RNA, 18 nt, Artificial Sequence
  Synthetic
uuuuugcuuuuguuuuug

SEQ ID NO: 163517 - RNA, 19 nt, Artificial Sequence
  Synthetic
auuuuugcuuuuguuuuug

SEQ ID NO: 163518 - RNA, 20 nt, Artificial Sequence
  Synthetic
uauuuuugcuuuuguuuuug

SEQ ID NO: 163519 - RNA, 21 nt, Artificial Sequence
  Synthetic
uuauuuuugcuuuuguuuuug

SEQ ID NO: 163520 - RNA, 24 nt, Artificial Sequence
  Synthetic
ugguuauuuuugcuuuuguuuuug

SEQ ID NO: 163521 - RNA, 19 nt, Artificial Sequence
  Synthetic
uggcuucauugauuuuuug

SEQ ID NO: 163522 - RNA, 20 nt, Artificial Sequence
  Synthetic
cuggcuucauugauuuuuug

SEQ ID NO: 163523 - RNA, 21 nt, Artificial Sequence
  Synthetic
ccuggcuucauugauuuuuug

SEQ ID NO: 163524 - RNA, 22 nt, Artificial Sequence
  Synthetic
cccuggcuucauugauuuuuug

SEQ ID NO: 163525 - RNA, 23 nt, Artificial Sequence
  Synthetic
ccccuggcuucauugauuuuuug

SEQ ID NO: 163526 - RNA, 18 nt, Artificial Sequence
  Synthetic
uagauuuaagaaaaaaau

SEQ ID NO: 163527 - RNA, 20 nt, Artificial Sequence
  Synthetic
aguagauuuaagaaaaaaau

SEQ ID NO: 163528 - RNA, 18 nt, Artificial Sequence
  Synthetic
aaauauuuagaaaaaaau

SEQ ID NO: 163529 - RNA, 19 nt, Artificial Sequence
  Synthetic
aaaauauuuagaaaaaaau

SEQ ID NO: 163530 - RNA, 19 nt, Artificial Sequence
  Synthetic
ugucauuguauuaaaaaau

SEQ ID NO: 163531 - RNA, 20 nt, Artificial Sequence
  Synthetic
uugucauuguauuaaaaaau

SEQ ID NO: 163532 - RNA, 18 nt, Artificial Sequence
  Synthetic
uuuucucagaauaaaaau

SEQ ID NO: 163533 - RNA, 19 nt, Artificial Sequence
  Synthetic
auuuucucagaauaaaaau

SEQ ID NO: 163534 - RNA, 20 nt, Artificial Sequence
  Synthetic
uauuuucucagaauaaaaau

SEQ ID NO: 163535 - RNA, 18 nt, Artificial Sequence
  Synthetic
uaaguaaaauguaaaaau

SEQ ID NO: 163536 - RNA, 19 nt, Artificial Sequence
  Synthetic
auaaguaaaauguaaaaau

SEQ ID NO: 163537 - RNA, 18 nt, Artificial Sequence
  Synthetic
uaugauaaaauuaaaaau

SEQ ID NO: 163538 - RNA, 19 nt, Artificial Sequence
  Synthetic
auaugauaaaauuaaaaau

SEQ ID NO: 163539 - RNA, 20 nt, Artificial Sequence
  Synthetic
uauaugauaaaauuaaaaau

SEQ ID NO: 163540 - RNA, 18 nt, Artificial Sequence
  Synthetic
cauuucuaucuuaaaaau

SEQ ID NO: 163541 - RNA, 19 nt, Artificial Sequence
  Synthetic
ucauuucuaucuuaaaaau

SEQ ID NO: 163542 - RNA, 20 nt, Artificial Sequence
  Synthetic
uucauuucuaucuuaaaaau

SEQ ID NO: 163543 - RNA, 18 nt, Artificial Sequence
  Synthetic
caauauuuucuuaaaaau

SEQ ID NO: 163544 - RNA, 19 nt, Artificial Sequence
  Synthetic
acaauauuuucuuaaaaau

SEQ ID NO: 163545 - RNA, 20 nt, Artificial Sequence
  Synthetic
uacaauauuuucuuaaaaau

SEQ ID NO: 163546 - RNA, 18 nt, Artificial Sequence
  Synthetic
aaaacuuuuuuuaaaaau

SEQ ID NO: 163547 - RNA, 19 nt, Artificial Sequence
  Synthetic
uaaaacuuuuuuuaaaaau

SEQ ID NO: 163548 - RNA, 20 nt, Artificial Sequence
  Synthetic
auaaaacuuuuuuuaaaaau

SEQ ID NO: 163549 - RNA, 21 nt, Artificial Sequence
  Synthetic
cauaaaacuuuuuuuaaaaau

SEQ ID NO: 163550 - RNA, 22 nt, Artificial Sequence
  Synthetic
acauaaaacuuuuuuuaaaaau

SEQ ID NO: 163551 - RNA, 23 nt, Artificial Sequence
  Synthetic
aacauaaaacuuuuuuuaaaaau

SEQ ID NO: 163552 - RNA, 24 nt, Artificial Sequence
  Synthetic
uaacauaaaacuuuuuuuaaaaau

SEQ ID NO: 163553 - RNA, 22 nt, Artificial Sequence
  Synthetic
agaggaagguauaggacaaaau

SEQ ID NO: 163554 - RNA, 23 nt, Artificial Sequence
  Synthetic
aagaggaagguauaggacaaaau

SEQ ID NO: 163555 - RNA, 18 nt, Artificial Sequence
  Synthetic
uagaacuucuuucaaaau

SEQ ID NO: 163556 - RNA, 20 nt, Artificial Sequence
  Synthetic
aguagaacuucuuucaaaau

SEQ ID NO: 163557 - RNA, 21 nt, Artificial Sequence
  Synthetic
caguagaacuucuuucaaaau

SEQ ID NO: 163558 - RNA, 22 nt, Artificial Sequence
  Synthetic
ucaguagaacuucuuucaaaau

SEQ ID NO: 163559 - RNA, 23 nt, Artificial Sequence
  Synthetic
cucaguagaacuucuuucaaaau

SEQ ID NO: 163560 - RNA, 24 nt, Artificial Sequence
  Synthetic
acucaguagaacuucuuucaaaau

SEQ ID NO: 163561 - RNA, 18 nt, Artificial Sequence
  Synthetic
uuuuuucuuuuucaaaau

SEQ ID NO: 163562 - RNA, 19 nt, Artificial Sequence
  Synthetic
cuuuuuucuuuuucaaaau

SEQ ID NO: 163563 - RNA, 20 nt, Artificial Sequence
  Synthetic
acuuuuuucuuuuucaaaau

SEQ ID NO: 163564 - RNA, 18 nt, Artificial Sequence
  Synthetic
aaauucauuaaagaaaau

SEQ ID NO: 163565 - RNA, 19 nt, Artificial Sequence
  Synthetic
aaaauucauuaaagaaaau

SEQ ID NO: 163566 - RNA, 20 nt, Artificial Sequence
  Synthetic
caaaauucauuaaagaaaau

SEQ ID NO: 163567 - RNA, 18 nt, Artificial Sequence
  Synthetic
uaugaaacaugagaaaau

SEQ ID NO: 163568 - RNA, 19 nt, Artificial Sequence
  Synthetic
auaugaaacaugagaaaau

SEQ ID NO: 163569 - RNA, 20 nt, Artificial Sequence
  Synthetic
uauaugaaacaugagaaaau

SEQ ID NO: 163570 - RNA, 18 nt, Artificial Sequence
  Synthetic
cuugaagaaauagaaaau

SEQ ID NO: 163571 - RNA, 19 nt, Artificial Sequence
  Synthetic
ucuugaagaaauagaaaau

SEQ ID NO: 163572 - RNA, 20 nt, Artificial Sequence
  Synthetic
aucuugaagaaauagaaaau

SEQ ID NO: 163573 - RNA, 21 nt, Artificial Sequence
  Synthetic
aaucuugaagaaauagaaaau

SEQ ID NO: 163574 - RNA, 23 nt, Artificial Sequence
  Synthetic
ugaaucuugaagaaauagaaaau

SEQ ID NO: 163575 - RNA, 24 nt, Artificial Sequence
  Synthetic
uugaaucuugaagaaauagaaaau

SEQ ID NO: 163576 - RNA, 20 nt, Artificial Sequence
  Synthetic
agguacaaaaaagggaaaau

SEQ ID NO: 163577 - RNA, 18 nt, Artificial Sequence
  Synthetic
cauggcuaaaaauaaaau

SEQ ID NO: 163578 - RNA, 19 nt, Artificial Sequence
  Synthetic
ucauggcuaaaaauaaaau

SEQ ID NO: 163579 - RNA, 20 nt, Artificial Sequence
  Synthetic
aucauggcuaaaaauaaaau

SEQ ID NO: 163580 - RNA, 22 nt, Artificial Sequence
  Synthetic
ugaucauggcuaaaaauaaaau

SEQ ID NO: 163581 - RNA, 23 nt, Artificial Sequence
  Synthetic
augaucauggcuaaaaauaaaau

SEQ ID NO: 163582 - RNA, 24 nt, Artificial Sequence
  Synthetic
aaugaucauggcuaaaaauaaaau

SEQ ID NO: 163583 - RNA, 18 nt, Artificial Sequence
  Synthetic
uuaucucaucuauaaaau

SEQ ID NO: 163584 - RNA, 21 nt, Artificial Sequence
  Synthetic
ugguuaucucaucuauaaaau

SEQ ID NO: 163585 - RNA, 22 nt, Artificial Sequence
  Synthetic
uugguuaucucaucuauaaaau

SEQ ID NO: 163586 - RNA, 23 nt, Artificial Sequence
  Synthetic
cuugguuaucucaucuauaaaau

SEQ ID NO: 163587 - RNA, 24 nt, Artificial Sequence
  Synthetic
ccuugguuaucucaucuauaaaau

SEQ ID NO: 163588 - RNA, 18 nt, Artificial Sequence
  Synthetic
uuuucucgucuauaaaau

SEQ ID NO: 163589 - RNA, 20 nt, Artificial Sequence
  Synthetic
uguuuucucgucuauaaaau

SEQ ID NO: 163590 - RNA, 21 nt, Artificial Sequence
  Synthetic
cuguuuucucgucuauaaaau

SEQ ID NO: 163591 - RNA, 22 nt, Artificial Sequence
  Synthetic
ccuguuuucucgucuauaaaau

SEQ ID NO: 163592 - RNA, 23 nt, Artificial Sequence
  Synthetic
accuguuuucucgucuauaaaau

SEQ ID NO: 163593 - RNA, 24 nt, Artificial Sequence
  Synthetic
aaccuguuuucucgucuauaaaau

SEQ ID NO: 163594 - RNA, 18 nt, Artificial Sequence
  Synthetic
uuggaaaguaacuaaaau

SEQ ID NO: 163595 - RNA, 19 nt, Artificial Sequence
  Synthetic
auuggaaaguaacuaaaau

SEQ ID NO: 163596 - RNA, 20 nt, Artificial Sequence
  Synthetic
uauuggaaaguaacuaaaau

SEQ ID NO: 163597 - RNA, 20 nt, Artificial Sequence
  Synthetic
cgguuuucugucucuaaaau

SEQ ID NO: 163598 - RNA, 21 nt, Artificial Sequence
  Synthetic
ucgguuuucugucucuaaaau

SEQ ID NO: 163599 - RNA, 22 nt, Artificial Sequence
  Synthetic
cucgguuuucugucucuaaaau

SEQ ID NO: 163600 - RNA, 23 nt, Artificial Sequence
  Synthetic
ucucgguuuucugucucuaaaau

SEQ ID NO: 163601 - RNA, 19 nt, Artificial Sequence
  Synthetic
agauuuauauuucuaaaau

SEQ ID NO: 163602 - RNA, 20 nt, Artificial Sequence
  Synthetic
aagauuuauauuucuaaaau

SEQ ID NO: 163603 - RNA, 21 nt, Artificial Sequence
  Synthetic
aaagauuuauauuucuaaaau

SEQ ID NO: 163604 - RNA, 22 nt, Artificial Sequence
  Synthetic
aaaagauuuauauuucuaaaau

SEQ ID NO: 163605 - RNA, 23 nt, Artificial Sequence
  Synthetic
aaaaagauuuauauuucuaaaau

SEQ ID NO: 163606 - RNA, 24 nt, Artificial Sequence
  Synthetic
aaaaaagauuuauauuucuaaaau

SEQ ID NO: 163607 - RNA, 18 nt, Artificial Sequence
  Synthetic
aaauaaagacuuuaaaau

SEQ ID NO: 163608 - RNA, 19 nt, Artificial Sequence
  Synthetic
aaaauaaagacuuuaaaau

SEQ ID NO: 163609 - RNA, 18 nt, Artificial Sequence
  Synthetic
ucacugauacauacaaau

SEQ ID NO: 163610 - RNA, 19 nt, Artificial Sequence
  Synthetic
cucacugauacauacaaau

SEQ ID NO: 163611 - RNA, 20 nt, Artificial Sequence
  Synthetic
ccucacugauacauacaaau

SEQ ID NO: 163612 - RNA, 18 nt, Artificial Sequence
  Synthetic
aauauuaaguuuacaaau

SEQ ID NO: 163613 - RNA, 19 nt, Artificial Sequence
  Synthetic
caauauuaaguuuacaaau

SEQ ID NO: 163614 - RNA, 21 nt, Artificial Sequence
  Synthetic
uuuguagaauaucccccaaau

SEQ ID NO: 163615 - RNA, 22 nt, Artificial Sequence
  Synthetic
uuuuguagaauaucccccaaau

SEQ ID NO: 163616 - RNA, 23 nt, Artificial Sequence
  Synthetic
auuuuguagaauaucccccaaau

SEQ ID NO: 163617 - RNA, 24 nt, Artificial Sequence
  Synthetic
uauuuuguagaauaucccccaaau

SEQ ID NO: 163618 - RNA, 18 nt, Artificial Sequence
  Synthetic
uaaagaaaacugccaaau

SEQ ID NO: 163619 - RNA, 19 nt, Artificial Sequence
  Synthetic
uuaaagaaaacugccaaau

SEQ ID NO: 163620 - RNA, 20 nt, Artificial Sequence
  Synthetic
cuuaaagaaaacugccaaau

SEQ ID NO: 163621 - RNA, 21 nt, Artificial Sequence
  Synthetic
acuuaaagaaaacugccaaau

SEQ ID NO: 163622 - RNA, 23 nt, Artificial Sequence
  Synthetic
ugacuuaaagaaaacugccaaau

SEQ ID NO: 163623 - RNA, 24 nt, Artificial Sequence
  Synthetic
uugacuuaaagaaaacugccaaau

SEQ ID NO: 163624 - RNA, 18 nt, Artificial Sequence
  Synthetic
uuuucucaacucucaaau

SEQ ID NO: 163625 - RNA, 19 nt, Artificial Sequence
  Synthetic
uuuuucucaacucucaaau

SEQ ID NO: 163626 - RNA, 20 nt, Artificial Sequence
  Synthetic
auuuuucucaacucucaaau

SEQ ID NO: 163627 - RNA, 18 nt, Artificial Sequence
  Synthetic
aaugcacaaaagucaaau

SEQ ID NO: 163628 - RNA, 19 nt, Artificial Sequence
  Synthetic
aaaugcacaaaagucaaau

SEQ ID NO: 163629 - RNA, 20 nt, Artificial Sequence
  Synthetic
aaaaugcacaaaagucaaau

SEQ ID NO: 163630 - RNA, 21 nt, Artificial Sequence
  Synthetic
aaaaaugcacaaaagucaaau

SEQ ID NO: 163631 - RNA, 22 nt, Artificial Sequence
  Synthetic
caaaaaugcacaaaagucaaau

SEQ ID NO: 163632 - RNA, 23 nt, Artificial Sequence
  Synthetic
ccaaaaaugcacaaaagucaaau

SEQ ID NO: 163633 - RNA, 18 nt, Artificial Sequence
  Synthetic
cccucuacugauucaaau

SEQ ID NO: 163634 - RNA, 19 nt, Artificial Sequence
  Synthetic
ucccucuacugauucaaau

SEQ ID NO: 163635 - RNA, 20 nt, Artificial Sequence
  Synthetic
cucccucuacugauucaaau

SEQ ID NO: 163636 - RNA, 22 nt, Artificial Sequence
  Synthetic
ugcucccucuacugauucaaau

SEQ ID NO: 163637 - RNA, 23 nt, Artificial Sequence
  Synthetic
uugcucccucuacugauucaaau

SEQ ID NO: 163638 - RNA, 24 nt, Artificial Sequence
  Synthetic
uuugcucccucuacugauucaaau

SEQ ID NO: 163639 - RNA, 18 nt, Artificial Sequence
  Synthetic
auauauaaauacagaaau

SEQ ID NO: 163640 - RNA, 19 nt, Artificial Sequence
  Synthetic
uauauauaaauacagaaau

SEQ ID NO: 163641 - RNA, 18 nt, Artificial Sequence
  Synthetic
uuaccagagaucagaaau

SEQ ID NO: 163642 - RNA, 21 nt, Artificial Sequence
  Synthetic
ugguuaccagagaucagaaau

SEQ ID NO: 163643 - RNA, 24 nt, Artificial Sequence
  Synthetic
uggugguuaccagagaucagaaau

SEQ ID NO: 163644 - RNA, 18 nt, Artificial Sequence
  Synthetic
aaaacuugaaagagaaau

SEQ ID NO: 163645 - RNA, 20 nt, Artificial Sequence
  Synthetic
agaaaacuugaaagagaaau

SEQ ID NO: 163646 - RNA, 20 nt, Artificial Sequence
  Synthetic
uggaaaacaaauauagaaau

SEQ ID NO: 163647 - RNA, 18 nt, Artificial Sequence
  Synthetic
uaugagaaaaauggaaau

SEQ ID NO: 163648 - RNA, 20 nt, Artificial Sequence
  Synthetic
uguaugagaaaaauggaaau

SEQ ID NO: 163649 - RNA, 18 nt, Artificial Sequence
  Synthetic
cuaauuuuucaaugaaau

SEQ ID NO: 163650 - RNA, 19 nt, Artificial Sequence
  Synthetic
ucuaauuuuucaaugaaau

SEQ ID NO: 163651 - RNA, 20 nt, Artificial Sequence
  Synthetic
aucuaauuuuucaaugaaau

SEQ ID NO: 163652 - RNA, 18 nt, Artificial Sequence
  Synthetic
uuucuuauuuggugaaau

SEQ ID NO: 163653 - RNA, 19 nt, Artificial Sequence
  Synthetic
uuuucuuauuuggugaaau

SEQ ID NO: 163654 - RNA, 20 nt, Artificial Sequence
  Synthetic
uuuuucuuauuuggugaaau

SEQ ID NO: 163655 - RNA, 18 nt, Artificial Sequence
  Synthetic
uuuccuucucugugaaau

SEQ ID NO: 163656 - RNA, 19 nt, Artificial Sequence
  Synthetic
cuuuccuucucugugaaau

SEQ ID NO: 163657 - RNA, 20 nt, Artificial Sequence
  Synthetic
ucuuuccuucucugugaaau

SEQ ID NO: 163658 - RNA, 19 nt, Artificial Sequence
  Synthetic
ugcacauuuaaaaauaaau

SEQ ID NO: 163659 - RNA, 20 nt, Artificial Sequence
  Synthetic
cugcacauuuaaaaauaaau

SEQ ID NO: 163660 - RNA, 18 nt, Artificial Sequence
  Synthetic
uuagauaaggaaauaaau

SEQ ID NO: 163661 - RNA, 19 nt, Artificial Sequence
  Synthetic
uuuagauaaggaaauaaau

SEQ ID NO: 163662 - RNA, 20 nt, Artificial Sequence
  Synthetic
uuuuagauaaggaaauaaau

SEQ ID NO: 163663 - RNA, 21 nt, Artificial Sequence
  Synthetic
auuuuagauaaggaaauaaau

SEQ ID NO: 163664 - RNA, 23 nt, Artificial Sequence
  Synthetic
agauuuuagauaaggaaauaaau

SEQ ID NO: 163665 - RNA, 24 nt, Artificial Sequence
  Synthetic
aagauuuuagauaaggaaauaaau

SEQ ID NO: 163666 - RNA, 18 nt, Artificial Sequence
  Synthetic
auuuuuccaauaauaaau

SEQ ID NO: 163667 - RNA, 19 nt, Artificial Sequence
  Synthetic
aauuuuuccaauaauaaau

SEQ ID NO: 163668 - RNA, 20 nt, Artificial Sequence
  Synthetic
uaauuuuuccaauaauaaau

SEQ ID NO: 163669 - RNA, 18 nt, Artificial Sequence
  Synthetic
uccauuauaaagauaaau

SEQ ID NO: 163670 - RNA, 19 nt, Artificial Sequence
  Synthetic
uuccauuauaaagauaaau

SEQ ID NO: 163671 - RNA, 20 nt, Artificial Sequence
  Synthetic
uuuccauuauaaagauaaau

SEQ ID NO: 163672 - RNA, 18 nt, Artificial Sequence
  Synthetic
aaagaaaauuauauaaau

SEQ ID NO: 163673 - RNA, 20 nt, Artificial Sequence
  Synthetic
agaaagaaaauuauauaaau

SEQ ID NO: 163674 - RNA, 21 nt, Artificial Sequence
  Synthetic
cuugccacagaccugcuaaau

SEQ ID NO: 163675 - RNA, 22 nt, Artificial Sequence
  Synthetic
ccuugccacagaccugcuaaau

SEQ ID NO: 163676 - RNA, 18 nt, Artificial Sequence
  Synthetic
uuuccuccuuugcuaaau

SEQ ID NO: 163677 - RNA, 20 nt, Artificial Sequence
  Synthetic
aguuuccuccuuugcuaaau

SEQ ID NO: 163678 - RNA, 21 nt, Artificial Sequence
  Synthetic
caguuuccuccuuugcuaaau

SEQ ID NO: 163679 - RNA, 22 nt, Artificial Sequence
  Synthetic
ucaguuuccuccuuugcuaaau

SEQ ID NO: 163680 - RNA, 23 nt, Artificial Sequence
  Synthetic
cucaguuuccuccuuugcuaaau

SEQ ID NO: 163681 - RNA, 24 nt, Artificial Sequence
  Synthetic
ccucaguuuccuccuuugcuaaau

SEQ ID NO: 163682 - RNA, 18 nt, Artificial Sequence
  Synthetic
ucugcaauaugaaacaau

SEQ ID NO: 163683 - RNA, 19 nt, Artificial Sequence
  Synthetic
uucugcaauaugaaacaau

SEQ ID NO: 163684 - RNA, 20 nt, Artificial Sequence
  Synthetic
auucugcaauaugaaacaau

SEQ ID NO: 163685 - RNA, 21 nt, Artificial Sequence
  Synthetic
aauucugcaauaugaaacaau

SEQ ID NO: 163686 - RNA, 22 nt, Artificial Sequence
  Synthetic
aaauucugcaauaugaaacaau

SEQ ID NO: 163687 - RNA, 18 nt, Artificial Sequence
  Synthetic
cagauuacccuccacaau

SEQ ID NO: 163688 - RNA, 20 nt, Artificial Sequence
  Synthetic
agcagauuacccuccacaau

SEQ ID NO: 163689 - RNA, 21 nt, Artificial Sequence
  Synthetic
aagcagauuacccuccacaau

SEQ ID NO: 163690 - RNA, 22 nt, Artificial Sequence
  Synthetic
aaagcagauuacccuccacaau

SEQ ID NO: 163691 - RNA, 23 nt, Artificial Sequence
  Synthetic
uaaagcagauuacccuccacaau

SEQ ID NO: 163692 - RNA, 18 nt, Artificial Sequence
  Synthetic
uguuguuguuuucacaau

SEQ ID NO: 163693 - RNA, 19 nt, Artificial Sequence
  Synthetic
uuguuguuguuuucacaau

SEQ ID NO: 163694 - RNA, 20 nt, Artificial Sequence
  Synthetic
uuuguuguuguuuucacaau

SEQ ID NO: 163695 - RNA, 19 nt, Artificial Sequence
  Synthetic
ugcauguugaaaugacaau

SEQ ID NO: 163696 - RNA, 20 nt, Artificial Sequence
  Synthetic
uugcauguugaaaugacaau

SEQ ID NO: 163697 - RNA, 21 nt, Artificial Sequence
  Synthetic
auugcauguugaaaugacaau

SEQ ID NO: 163698 - RNA, 23 nt, Artificial Sequence
  Synthetic
ugauugcauguugaaaugacaau

SEQ ID NO: 163699 - RNA, 24 nt, Artificial Sequence
  Synthetic
uugauugcauguugaaaugacaau

SEQ ID NO: 163700 - RNA, 21 nt, Artificial Sequence
  Synthetic
ucagaauauguuccauacaau

SEQ ID NO: 163701 - RNA, 22 nt, Artificial Sequence
  Synthetic
cucagaauauguuccauacaau

SEQ ID NO: 163702 - RNA, 23 nt, Artificial Sequence
  Synthetic
ucucagaauauguuccauacaau

SEQ ID NO: 163703 - RNA, 24 nt, Artificial Sequence
  Synthetic
uucucagaauauguuccauacaau

SEQ ID NO: 163704 - RNA, 18 nt, Artificial Sequence
  Synthetic
cuuaccauaugcuacaau

SEQ ID NO: 163705 - RNA, 19 nt, Artificial Sequence
  Synthetic
ucuuaccauaugcuacaau

SEQ ID NO: 163706 - RNA, 20 nt, Artificial Sequence
  Synthetic
aucuuaccauaugcuacaau

SEQ ID NO: 163707 - RNA, 21 nt, Artificial Sequence
  Synthetic
aaucuuaccauaugcuacaau

SEQ ID NO: 163708 - RNA, 22 nt, Artificial Sequence
  Synthetic
aaaucuuaccauaugcuacaau

SEQ ID NO: 163709 - RNA, 21 nt, Artificial Sequence
  Synthetic
aaauaagaaagcugcuacaau

SEQ ID NO: 163710 - RNA, 22 nt, Artificial Sequence
  Synthetic
aaaauaagaaagcugcuacaau

SEQ ID NO: 163711 - RNA, 23 nt, Artificial Sequence
  Synthetic
aaaaauaagaaagcugcuacaau

SEQ ID NO: 163712 - RNA, 24 nt, Artificial Sequence
  Synthetic
uaaaaauaagaaagcugcuacaau

SEQ ID NO: 163713 - RNA, 18 nt, Artificial Sequence
  Synthetic
aaaaaaaaaaaaaagaau

SEQ ID NO: 163714 - RNA, 19 nt, Artificial Sequence
  Synthetic
aaaaaaaaaaaaaaagaau

SEQ ID NO: 163715 - RNA, 20 nt, Artificial Sequence
  Synthetic
uaaaaaaaaaaaaaaagaau

SEQ ID NO: 163716 - RNA, 21 nt, Artificial Sequence
  Synthetic
uuaaaaaaaaaaaaaaagaau

SEQ ID NO: 163717 - RNA, 22 nt, Artificial Sequence
  Synthetic
uuuaaaaaaaaaaaaaaagaau

SEQ ID NO: 163718 - RNA, 23 nt, Artificial Sequence
  Synthetic
cuuuaaaaaaaaaaaaaaagaau

SEQ ID NO: 163719 - RNA, 24 nt, Artificial Sequence
  Synthetic
ucuuuaaaaaaaaaaaaaaagaau

SEQ ID NO: 163720 - RNA, 18 nt, Artificial Sequence
  Synthetic
uaaaaaaaugaaaagaau

SEQ ID NO: 163721 - RNA, 19 nt, Artificial Sequence
  Synthetic
uuaaaaaaaugaaaagaau

SEQ ID NO: 163722 - RNA, 21 nt, Artificial Sequence
  Synthetic
aguuaaaaaaaugaaaagaau

SEQ ID NO: 163723 - RNA, 22 nt, Artificial Sequence
  Synthetic
aaguuaaaaaaaugaaaagaau

SEQ ID NO: 163724 - RNA, 23 nt, Artificial Sequence
  Synthetic
aaaguuaaaaaaaugaaaagaau

SEQ ID NO: 163725 - RNA, 24 nt, Artificial Sequence
  Synthetic
aaaaguuaaaaaaaugaaaagaau

SEQ ID NO: 163726 - RNA, 18 nt, Artificial Sequence
  Synthetic
auuuaaaaaagaaagaau

SEQ ID NO: 163727 - RNA, 19 nt, Artificial Sequence
  Synthetic
aauuuaaaaaagaaagaau

SEQ ID NO: 163728 - RNA, 20 nt, Artificial Sequence
  Synthetic
aaauuuaaaaaagaaagaau

SEQ ID NO: 163729 - RNA, 21 nt, Artificial Sequence
  Synthetic
aaaauuuaaaaaagaaagaau

SEQ ID NO: 163730 - RNA, 22 nt, Artificial Sequence
  Synthetic
aaaaauuuaaaaaagaaagaau

SEQ ID NO: 163731 - RNA, 23 nt, Artificial Sequence
  Synthetic
aaaaaauuuaaaaaagaaagaau

SEQ ID NO: 163732 - RNA, 24 nt, Artificial Sequence
  Synthetic
uaaaaaauuuaaaaaagaaagaau

SEQ ID NO: 163733 - RNA, 18 nt, Artificial Sequence
  Synthetic
uauuuuuaaagaaagaau

SEQ ID NO: 163734 - RNA, 19 nt, Artificial Sequence
  Synthetic
uuauuuuuaaagaaagaau

SEQ ID NO: 163735 - RNA, 18 nt, Artificial Sequence
  Synthetic
uauguauuagacaagaau

SEQ ID NO: 163736 - RNA, 19 nt, Artificial Sequence
  Synthetic
uuauguauuagacaagaau

SEQ ID NO: 163737 - RNA, 21 nt, Artificial Sequence
  Synthetic
aguuauguauuagacaagaau

SEQ ID NO: 163738 - RNA, 22 nt, Artificial Sequence
  Synthetic
aaguuauguauuagacaagaau

SEQ ID NO: 163739 - RNA, 23 nt, Artificial Sequence
  Synthetic
caaguuauguauuagacaagaau

SEQ ID NO: 163740 - RNA, 24 nt, Artificial Sequence
  Synthetic
ucaaguuauguauuagacaagaau

SEQ ID NO: 163741 - RNA, 18 nt, Artificial Sequence
  Synthetic
aacauuuucucacagaau

SEQ ID NO: 163742 - RNA, 19 nt, Artificial Sequence
  Synthetic
caacauuuucucacagaau

SEQ ID NO: 163743 - RNA, 20 nt, Artificial Sequence
  Synthetic
acaacauuuucucacagaau

SEQ ID NO: 163744 - RNA, 18 nt, Artificial Sequence
  Synthetic
uauauuagauggcagaau

SEQ ID NO: 163745 - RNA, 19 nt, Artificial Sequence
  Synthetic
auauauuagauggcagaau

SEQ ID NO: 163746 - RNA, 20 nt, Artificial Sequence
  Synthetic
aauauauuagauggcagaau

SEQ ID NO: 163747 - RNA, 21 nt, Artificial Sequence
  Synthetic
aaauauauuagauggcagaau

SEQ ID NO: 163748 - RNA, 22 nt, Artificial Sequence
  Synthetic
aaaauauauuagauggcagaau

SEQ ID NO: 163749 - RNA, 18 nt, Artificial Sequence
  Synthetic
caaagaaaaaaagagaau

SEQ ID NO: 163750 - RNA, 20 nt, Artificial Sequence
  Synthetic
agcaaagaaaaaaagagaau

SEQ ID NO: 163751 - RNA, 22 nt, Artificial Sequence
  Synthetic
agagcaaagaaaaaaagagaau

SEQ ID NO: 163752 - RNA, 24 nt, Artificial Sequence
  Synthetic
agagagcaaagaaaaaaagagaau

SEQ ID NO: 163753 - RNA, 18 nt, Artificial Sequence
  Synthetic
uuaguuuuuuuuuagaau

SEQ ID NO: 163754 - RNA, 19 nt, Artificial Sequence
  Synthetic
cuuaguuuuuuuuuagaau

SEQ ID NO: 163755 - RNA, 20 nt, Artificial Sequence
  Synthetic
ucuuaguuuuuuuuuagaau

SEQ ID NO: 163756 - RNA, 19 nt, Artificial Sequence
  Synthetic
aggaacuugcuuuacgaau

SEQ ID NO: 163757 - RNA, 20 nt, Artificial Sequence
  Synthetic
uaggaacuugcuuuacgaau

SEQ ID NO: 163758 - RNA, 21 nt, Artificial Sequence
  Synthetic
cuaggaacuugcuuuacgaau

SEQ ID NO: 163759 - RNA, 22 nt, Artificial Sequence
  Synthetic
ucuaggaacuugcuuuacgaau

SEQ ID NO: 163760 - RNA, 23 nt, Artificial Sequence
  Synthetic
cucuaggaacuugcuuuacgaau

SEQ ID NO: 163761 - RNA, 24 nt, Artificial Sequence
  Synthetic
ucucuaggaacuugcuuuacgaau

SEQ ID NO: 163762 - RNA, 18 nt, Artificial Sequence
  Synthetic
augacuaauuguaggaau

SEQ ID NO: 163763 - RNA, 19 nt, Artificial Sequence
  Synthetic
aaugacuaauuguaggaau

SEQ ID NO: 163764 - RNA, 20 nt, Artificial Sequence
  Synthetic
uaaugacuaauuguaggaau

SEQ ID NO: 163765 - RNA, 18 nt, Artificial Sequence
  Synthetic
uuggaacaacuuaggaau

SEQ ID NO: 163766 - RNA, 19 nt, Artificial Sequence
  Synthetic
uuuggaacaacuuaggaau

SEQ ID NO: 163767 - RNA, 21 nt, Artificial Sequence
  Synthetic
uguuuggaacaacuuaggaau

SEQ ID NO: 163768 - RNA, 22 nt, Artificial Sequence
  Synthetic
auguuuggaacaacuuaggaau

SEQ ID NO: 163769 - RNA, 23 nt, Artificial Sequence
  Synthetic
uauguuuggaacaacuuaggaau

SEQ ID NO: 163770 - RNA, 18 nt, Artificial Sequence
  Synthetic
aaagauuuguuauggaau

SEQ ID NO: 163771 - RNA, 19 nt, Artificial Sequence
  Synthetic
aaaagauuuguuauggaau

SEQ ID NO: 163772 - RNA, 18 nt, Artificial Sequence
  Synthetic
uagcuuuguugaaugaau

SEQ ID NO: 163773 - RNA, 19 nt, Artificial Sequence
  Synthetic
cuagcuuuguugaaugaau

SEQ ID NO: 163774 - RNA, 20 nt, Artificial Sequence
  Synthetic
ucuagcuuuguugaaugaau

SEQ ID NO: 163775 - RNA, 18 nt, Artificial Sequence
  Synthetic
aagaaacaagcgaugaau

SEQ ID NO: 163776 - RNA, 19 nt, Artificial Sequence
  Synthetic
aaagaaacaagcgaugaau

SEQ ID NO: 163777 - RNA, 20 nt, Artificial Sequence
  Synthetic
aaaagaaacaagcgaugaau

SEQ ID NO: 163778 - RNA, 19 nt, Artificial Sequence
  Synthetic
uguauacaaugugaugaau

SEQ ID NO: 163779 - RNA, 20 nt, Artificial Sequence
  Synthetic
cuguauacaaugugaugaau

SEQ ID NO: 163780 - RNA, 18 nt, Artificial Sequence
  Synthetic
caauucccaccuaugaau

SEQ ID NO: 163781 - RNA, 19 nt, Artificial Sequence
  Synthetic
ucaauucccaccuaugaau

SEQ ID NO: 163782 - RNA, 20 nt, Artificial Sequence
  Synthetic
uucaauucccaccuaugaau

SEQ ID NO: 163783 - RNA, 22 nt, Artificial Sequence
  Synthetic
uguucaauucccaccuaugaau

SEQ ID NO: 163784 - RNA, 23 nt, Artificial Sequence
  Synthetic
uuguucaauucccaccuaugaau

SEQ ID NO: 163785 - RNA, 24 nt, Artificial Sequence
  Synthetic
auuguucaauucccaccuaugaau

SEQ ID NO: 163786 - RNA, 18 nt, Artificial Sequence
  Synthetic
agaacuuacuuuaugaau

SEQ ID NO: 163787 - RNA, 19 nt, Artificial Sequence
  Synthetic
aagaacuuacuuuaugaau

SEQ ID NO: 163788 - RNA, 20 nt, Artificial Sequence
  Synthetic
uaagaacuuacuuuaugaau

SEQ ID NO: 163789 - RNA, 21 nt, Artificial Sequence
  Synthetic
cuaagaacuuacuuuaugaau

SEQ ID NO: 163790 - RNA, 22 nt, Artificial Sequence
  Synthetic
ucuaagaacuuacuuuaugaau

SEQ ID NO: 163791 - RNA, 23 nt, Artificial Sequence
  Synthetic
cucuaagaacuuacuuuaugaau

SEQ ID NO: 163792 - RNA, 24 nt, Artificial Sequence
  Synthetic
ucucuaagaacuuacuuuaugaau

SEQ ID NO: 163793 - RNA, 18 nt, Artificial Sequence
  Synthetic
acccuaaacuuacugaau

SEQ ID NO: 163794 - RNA, 19 nt, Artificial Sequence
  Synthetic
uacccuaaacuuacugaau

SEQ ID NO: 163795 - RNA, 20 nt, Artificial Sequence
  Synthetic
cuacccuaaacuuacugaau

SEQ ID NO: 163796 - RNA, 18 nt, Artificial Sequence
  Synthetic
ucuccauauuuccugaau

SEQ ID NO: 163797 - RNA, 19 nt, Artificial Sequence
  Synthetic
uucuccauauuuccugaau

SEQ ID NO: 163798 - RNA, 21 nt, Artificial Sequence
  Synthetic
uguucuccauauuuccugaau

SEQ ID NO: 163799 - RNA, 24 nt, Artificial Sequence
  Synthetic
ugguguucuccauauuuccugaau

SEQ ID NO: 163800 - RNA, 18 nt, Artificial Sequence
  Synthetic
agaugcguuuggcugaau

SEQ ID NO: 163801 - RNA, 19 nt, Artificial Sequence
  Synthetic
cagaugcguuuggcugaau

SEQ ID NO: 163802 - RNA, 20 nt, Artificial Sequence
  Synthetic
acagaugcguuuggcugaau

SEQ ID NO: 163803 - RNA, 18 nt, Artificial Sequence
  Synthetic
aaagaaaauaacgugaau

SEQ ID NO: 163804 - RNA, 19 nt, Artificial Sequence
  Synthetic
aaaagaaaauaacgugaau

SEQ ID NO: 163805 - RNA, 20 nt, Artificial Sequence
  Synthetic
aaaaagaaaauaacgugaau

SEQ ID NO: 163806 - RNA, 18 nt, Artificial Sequence
  Synthetic
uuucuccacuccuugaau

SEQ ID NO: 163807 - RNA, 20 nt, Artificial Sequence
  Synthetic
uguuucuccacuccuugaau

SEQ ID NO: 163808 - RNA, 21 nt, Artificial Sequence
  Synthetic
cuguuucuccacuccuugaau

SEQ ID NO: 163809 - RNA, 22 nt, Artificial Sequence
  Synthetic
ucuguuucuccacuccuugaau

SEQ ID NO: 163810 - RNA, 24 nt, Artificial Sequence
  Synthetic
agucuguuucuccacuccuugaau

SEQ ID NO: 163811 - RNA, 18 nt, Artificial Sequence
  Synthetic
uccaauauuauguugaau

SEQ ID NO: 163812 - RNA, 19 nt, Artificial Sequence
  Synthetic
uuccaauauuauguugaau

SEQ ID NO: 163813 - RNA, 20 nt, Artificial Sequence
  Synthetic
cuuccaauauuauguugaau

SEQ ID NO: 163814 - RNA, 21 nt, Artificial Sequence
  Synthetic
acuuccaauauuauguugaau

SEQ ID NO: 163815 - RNA, 22 nt, Artificial Sequence
  Synthetic
aacuuccaauauuauguugaau

SEQ ID NO: 163816 - RNA, 23 nt, Artificial Sequence
  Synthetic
aaacuuccaauauuauguugaau

SEQ ID NO: 163817 - RNA, 24 nt, Artificial Sequence
  Synthetic
aaaacuuccaauauuauguugaau

SEQ ID NO: 163818 - RNA, 18 nt, Artificial Sequence
  Synthetic
uacuuuugaaaaaauaau

SEQ ID NO: 163819 - RNA, 19 nt, Artificial Sequence
  Synthetic
auacuuuugaaaaaauaau

SEQ ID NO: 163820 - RNA, 20 nt, Artificial Sequence
  Synthetic
aauacuuuugaaaaaauaau

SEQ ID NO: 163821 - RNA, 18 nt, Artificial Sequence
  Synthetic
aucaacaauaaaaauaau

SEQ ID NO: 163822 - RNA, 19 nt, Artificial Sequence
  Synthetic
aaucaacaauaaaaauaau

SEQ ID NO: 163823 - RNA, 18 nt, Artificial Sequence
  Synthetic
uuaggguaagaaaauaau

SEQ ID NO: 163824 - RNA, 19 nt, Artificial Sequence
  Synthetic
uuuaggguaagaaaauaau

SEQ ID NO: 163825 - RNA, 20 nt, Artificial Sequence
  Synthetic
uuuuaggguaagaaaauaau

SEQ ID NO: 163826 - RNA, 21 nt, Artificial Sequence
  Synthetic
auuuuaggguaagaaaauaau

SEQ ID NO: 163827 - RNA, 22 nt, Artificial Sequence
  Synthetic
aauuuuaggguaagaaaauaau

SEQ ID NO: 163828 - RNA, 23 nt, Artificial Sequence
  Synthetic
aaauuuuaggguaagaaaauaau

SEQ ID NO: 163829 - RNA, 24 nt, Artificial Sequence
  Synthetic
aaaauuuuaggguaagaaaauaau

SEQ ID NO: 163830 - RNA, 20 nt, Artificial Sequence
  Synthetic
uggggccuuugagaaauaau

SEQ ID NO: 163831 - RNA, 23 nt, Artificial Sequence
  Synthetic
agguggggccuuugagaaauaau

SEQ ID NO: 163832 - RNA, 18 nt, Artificial Sequence
  Synthetic
aaugaaaauggaaauaau

SEQ ID NO: 163833 - RNA, 19 nt, Artificial Sequence
  Synthetic
aaaugaaaauggaaauaau

SEQ ID NO: 163834 - RNA, 20 nt, Artificial Sequence
  Synthetic
caaaugaaaauggaaauaau

SEQ ID NO: 163835 - RNA, 18 nt, Artificial Sequence
  Synthetic
ccauuuuauauaaauaau

SEQ ID NO: 163836 - RNA, 20 nt, Artificial Sequence
  Synthetic
ugccauuuuauauaaauaau

SEQ ID NO: 163837 - RNA, 21 nt, Artificial Sequence
  Synthetic
augccauuuuauauaaauaau

SEQ ID NO: 163838 - RNA, 22 nt, Artificial Sequence
  Synthetic
uaugccauuuuauauaaauaau

SEQ ID NO: 163839 - RNA, 23 nt, Artificial Sequence
  Synthetic
cuaugccauuuuauauaaauaau

SEQ ID NO: 163840 - RNA, 24 nt, Artificial Sequence
  Synthetic
acuaugccauuuuauauaaauaau

SEQ ID NO: 163841 - RNA, 18 nt, Artificial Sequence
  Synthetic
cugcaaacuaagaauaau

SEQ ID NO: 163842 - RNA, 19 nt, Artificial Sequence
  Synthetic
ucugcaaacuaagaauaau

SEQ ID NO: 163843 - RNA, 20 nt, Artificial Sequence
  Synthetic
cucugcaaacuaagaauaau

SEQ ID NO: 163844 - RNA, 18 nt, Artificial Sequence
  Synthetic
ucugucauuuggaauaau

SEQ ID NO: 163845 - RNA, 19 nt, Artificial Sequence
  Synthetic
uucugucauuuggaauaau

SEQ ID NO: 163846 - RNA, 20 nt, Artificial Sequence
  Synthetic
auucugucauuuggaauaau

SEQ ID NO: 163847 - RNA, 21 nt, Artificial Sequence
  Synthetic
aauucugucauuuggaauaau

SEQ ID NO: 163848 - RNA, 22 nt, Artificial Sequence
  Synthetic
aaauucugucauuuggaauaau

SEQ ID NO: 163849 - RNA, 18 nt, Artificial Sequence
  Synthetic
auuuagaaauguaauaau

SEQ ID NO: 163850 - RNA, 19 nt, Artificial Sequence
  Synthetic
aauuuagaaauguaauaau

SEQ ID NO: 163851 - RNA, 20 nt, Artificial Sequence
  Synthetic
caauuuagaaauguaauaau

SEQ ID NO: 163852 - RNA, 18 nt, Artificial Sequence
  Synthetic
auucuuuuaaaacauaau

SEQ ID NO: 163853 - RNA, 20 nt, Artificial Sequence
  Synthetic
agauucuuuuaaaacauaau

SEQ ID NO: 163854 - RNA, 18 nt, Artificial Sequence
  Synthetic
acuuaacgugaagauaau

SEQ ID NO: 163855 - RNA, 19 nt, Artificial Sequence
  Synthetic
uacuuaacgugaagauaau

SEQ ID NO: 163856 - RNA, 20 nt, Artificial Sequence
  Synthetic
cuacuuaacgugaagauaau

SEQ ID NO: 163857 - RNA, 21 nt, Artificial Sequence
  Synthetic
ccuacuuaacgugaagauaau

SEQ ID NO: 163858 - RNA, 23 nt, Artificial Sequence
  Synthetic
agccuacuuaacgugaagauaau

SEQ ID NO: 163859 - RNA, 24 nt, Artificial Sequence
  Synthetic
cagccuacuuaacgugaagauaau

SEQ ID NO: 163860 - RNA, 18 nt, Artificial Sequence
  Synthetic
cauguucucacugauaau

SEQ ID NO: 163861 - RNA, 20 nt, Artificial Sequence
  Synthetic
ugcauguucucacugauaau

SEQ ID NO: 163862 - RNA, 21 nt, Artificial Sequence
  Synthetic
cugcauguucucacugauaau

SEQ ID NO: 163863 - RNA, 22 nt, Artificial Sequence
  Synthetic
acugcauguucucacugauaau

SEQ ID NO: 163864 - RNA, 23 nt, Artificial Sequence
  Synthetic
cacugcauguucucacugauaau

SEQ ID NO: 163865 - RNA, 24 nt, Artificial Sequence
  Synthetic
acacugcauguucucacugauaau

SEQ ID NO: 163866 - RNA, 19 nt, Artificial Sequence
  Synthetic
ugaaaucucugccuauaau

SEQ ID NO: 163867 - RNA, 20 nt, Artificial Sequence
  Synthetic
cugaaaucucugccuauaau

SEQ ID NO: 163868 - RNA, 18 nt, Artificial Sequence
  Synthetic
uaacuaacagaguauaau

SEQ ID NO: 163869 - RNA, 19 nt, Artificial Sequence
  Synthetic
auaacuaacagaguauaau

SEQ ID NO: 163870 - RNA, 20 nt, Artificial Sequence
  Synthetic
aauaacuaacagaguauaau

SEQ ID NO: 163871 - RNA, 21 nt, Artificial Sequence
  Synthetic
aaauaacuaacagaguauaau

SEQ ID NO: 163872 - RNA, 22 nt, Artificial Sequence
  Synthetic
aaaauaacuaacagaguauaau

SEQ ID NO: 163873 - RNA, 23 nt, Artificial Sequence
  Synthetic
uaaaauaacuaacagaguauaau

SEQ ID NO: 163874 - RNA, 24 nt, Artificial Sequence
  Synthetic
uuaaaauaacuaacagaguauaau

SEQ ID NO: 163875 - RNA, 18 nt, Artificial Sequence
  Synthetic
cucaaugauuuguauaau

SEQ ID NO: 163876 - RNA, 19 nt, Artificial Sequence
  Synthetic
ucucaaugauuuguauaau

SEQ ID NO: 163877 - RNA, 20 nt, Artificial Sequence
  Synthetic
uucucaaugauuuguauaau

SEQ ID NO: 163878 - RNA, 19 nt, Artificial Sequence
  Synthetic
ugcuuuguuuuguuauaau

SEQ ID NO: 163879 - RNA, 20 nt, Artificial Sequence
  Synthetic
uugcuuuguuuuguuauaau

SEQ ID NO: 163880 - RNA, 18 nt, Artificial Sequence
  Synthetic
auauuuauuaaaacuaau

SEQ ID NO: 163881 - RNA, 19 nt, Artificial Sequence
  Synthetic
cauauuuauuaaaacuaau

SEQ ID NO: 163882 - RNA, 20 nt, Artificial Sequence
  Synthetic
acauauuuauuaaaacuaau

SEQ ID NO: 163883 - RNA, 21 nt, Artificial Sequence
  Synthetic
agaaaaauaaugguuacuaau

SEQ ID NO: 163884 - RNA, 23 nt, Artificial Sequence
  Synthetic
ugagaaaaauaaugguuacuaau

SEQ ID NO: 163885 - RNA, 24 nt, Artificial Sequence
  Synthetic
augagaaaaauaaugguuacuaau

SEQ ID NO: 163886 - RNA, 18 nt, Artificial Sequence
  Synthetic
uccucaacuuacccuaau

SEQ ID NO: 163887 - RNA, 19 nt, Artificial Sequence
  Synthetic
cuccucaacuuacccuaau

SEQ ID NO: 163888 - RNA, 20 nt, Artificial Sequence
  Synthetic
acuccucaacuuacccuaau

SEQ ID NO: 163889 - RNA, 18 nt, Artificial Sequence
  Synthetic
uacuuauuccuuucuaau

SEQ ID NO: 163890 - RNA, 19 nt, Artificial Sequence
  Synthetic
uuacuuauuccuuucuaau

SEQ ID NO: 163891 - RNA, 20 nt, Artificial Sequence
  Synthetic
uuuacuuauuccuuucuaau

SEQ ID NO: 163892 - RNA, 21 nt, Artificial Sequence
  Synthetic
uuuuacuuauuccuuucuaau

SEQ ID NO: 163893 - RNA, 22 nt, Artificial Sequence
  Synthetic
auuuuacuuauuccuuucuaau

SEQ ID NO: 163894 - RNA, 23 nt, Artificial Sequence
  Synthetic
aauuuuacuuauuccuuucuaau

SEQ ID NO: 163895 - RNA, 24 nt, Artificial Sequence
  Synthetic
uaauuuuacuuauuccuuucuaau

SEQ ID NO: 163896 - RNA, 18 nt, Artificial Sequence
  Synthetic
caaaaagaaacaaguaau

SEQ ID NO: 163897 - RNA, 19 nt, Artificial Sequence
  Synthetic
acaaaaagaaacaaguaau

SEQ ID NO: 163898 - RNA, 20 nt, Artificial Sequence
  Synthetic
aacaaaaagaaacaaguaau

SEQ ID NO: 163899 - RNA, 21 nt, Artificial Sequence
  Synthetic
aaacaaaaagaaacaaguaau

SEQ ID NO: 163900 - RNA, 22 nt, Artificial Sequence
  Synthetic
aaaacaaaaagaaacaaguaau

SEQ ID NO: 163901 - RNA, 23 nt, Artificial Sequence
  Synthetic
uaaaacaaaaagaaacaaguaau

SEQ ID NO: 163902 - RNA, 24 nt, Artificial Sequence
  Synthetic
auaaaacaaaaagaaacaaguaau

SEQ ID NO: 163903 - RNA, 21 nt, Artificial Sequence
  Synthetic
uuugcauuuauagucauuaau

SEQ ID NO: 163904 - RNA, 22 nt, Artificial Sequence
  Synthetic
auuugcauuuauagucauuaau

SEQ ID NO: 163905 - RNA, 23 nt, Artificial Sequence
  Synthetic
cauuugcauuuauagucauuaau

SEQ ID NO: 163906 - RNA, 24 nt, Artificial Sequence
  Synthetic
ccauuugcauuuauagucauuaau

SEQ ID NO: 163907 - RNA, 18 nt, Artificial Sequence
  Synthetic
uugaaaaugaauauuaau

SEQ ID NO: 163908 - RNA, 19 nt, Artificial Sequence
  Synthetic
uuugaaaaugaauauuaau

SEQ ID NO: 163909 - RNA, 20 nt, Artificial Sequence
  Synthetic
uuuugaaaaugaauauuaau

SEQ ID NO: 163910 - RNA, 18 nt, Artificial Sequence
  Synthetic
cauuaaauaaaucuuaau

SEQ ID NO: 163911 - RNA, 19 nt, Artificial Sequence
  Synthetic
ucauuaaauaaaucuuaau

SEQ ID NO: 163912 - RNA, 18 nt, Artificial Sequence
  Synthetic
uauucaguuuacuuuaau

SEQ ID NO: 163913 - RNA, 19 nt, Artificial Sequence
  Synthetic
uuauucaguuuacuuuaau

SEQ ID NO: 163914 - RNA, 20 nt, Artificial Sequence
  Synthetic
uuuauucaguuuacuuuaau

SEQ ID NO: 163915 - RNA, 18 nt, Artificial Sequence
  Synthetic
uuaaaucuucaguuuaau

SEQ ID NO: 163916 - RNA, 19 nt, Artificial Sequence
  Synthetic
uuuaaaucuucaguuuaau

SEQ ID NO: 163917 - RNA, 20 nt, Artificial Sequence
  Synthetic
auuuaaaucuucaguuuaau

SEQ ID NO: 163918 - RNA, 18 nt, Artificial Sequence
  Synthetic
uuuuccuuuugguuuaau

SEQ ID NO: 163919 - RNA, 19 nt, Artificial Sequence
  Synthetic
cuuuuccuuuugguuuaau

SEQ ID NO: 163920 - RNA, 20 nt, Artificial Sequence
  Synthetic
ucuuuuccuuuugguuuaau

SEQ ID NO: 163921 - RNA, 18 nt, Artificial Sequence
  Synthetic
ucuuauugauuuuuuaau

SEQ ID NO: 163922 - RNA, 19 nt, Artificial Sequence
  Synthetic
uucuuauugauuuuuuaau

SEQ ID NO: 163923 - RNA, 20 nt, Artificial Sequence
  Synthetic
auucuuauugauuuuuuaau

SEQ ID NO: 163924 - RNA, 18 nt, Artificial Sequence
  Synthetic
auuucagauuuuuuuaau

SEQ ID NO: 163925 - RNA, 19 nt, Artificial Sequence
  Synthetic
aauuucagauuuuuuuaau

SEQ ID NO: 163926 - RNA, 20 nt, Artificial Sequence
  Synthetic
aaauuucagauuuuuuuaau

SEQ ID NO: 163927 - RNA, 21 nt, Artificial Sequence
  Synthetic
caaauuucagauuuuuuuaau

SEQ ID NO: 163928 - RNA, 22 nt, Artificial Sequence
  Synthetic
ucaaauuucagauuuuuuuaau

SEQ ID NO: 163929 - RNA, 23 nt, Artificial Sequence
  Synthetic
uucaaauuucagauuuuuuuaau

SEQ ID NO: 163930 - RNA, 24 nt, Artificial Sequence
  Synthetic
uuucaaauuucagauuuuuuuaau

SEQ ID NO: 163931 - RNA, 18 nt, Artificial Sequence
  Synthetic
cauggggucauaaaacau

SEQ ID NO: 163932 - RNA, 19 nt, Artificial Sequence
  Synthetic
acauggggucauaaaacau

SEQ ID NO: 163933 - RNA, 18 nt, Artificial Sequence
  Synthetic
uagugcugugacaaacau

SEQ ID NO: 163934 - RNA, 19 nt, Artificial Sequence
  Synthetic
auagugcugugacaaacau

SEQ ID NO: 163935 - RNA, 20 nt, Artificial Sequence
  Synthetic
cauagugcugugacaaacau

SEQ ID NO: 163936 - RNA, 22 nt, Artificial Sequence
  Synthetic
ugcauagugcugugacaaacau

SEQ ID NO: 163937 - RNA, 24 nt, Artificial Sequence
  Synthetic
ugugcauagugcugugacaaacau

SEQ ID NO: 163938 - RNA, 18 nt, Artificial Sequence
  Synthetic
aaaugucaguauaaacau

SEQ ID NO: 163939 - RNA, 19 nt, Artificial Sequence
  Synthetic
aaaaugucaguauaaacau

SEQ ID NO: 163940 - RNA, 20 nt, Artificial Sequence
  Synthetic
aaaaaugucaguauaaacau

SEQ ID NO: 163941 - RNA, 21 nt, Artificial Sequence
  Synthetic
aaaaaaugucaguauaaacau

SEQ ID NO: 163942 - RNA, 22 nt, Artificial Sequence
  Synthetic
aaaaaaaugucaguauaaacau

SEQ ID NO: 163943 - RNA, 23 nt, Artificial Sequence
  Synthetic
caaaaaaaugucaguauaaacau

SEQ ID NO: 163944 - RNA, 22 nt, Artificial Sequence
  Synthetic
ugagcacucacacagacaacau

SEQ ID NO: 163945 - RNA, 24 nt, Artificial Sequence
  Synthetic
ugugagcacucacacagacaacau

SEQ ID NO: 163946 - RNA, 18 nt, Artificial Sequence
  Synthetic
agcuccaucuugcaacau

SEQ ID NO: 163947 - RNA, 20 nt, Artificial Sequence
  Synthetic
agagcuccaucuugcaacau

SEQ ID NO: 163948 - RNA, 18 nt, Artificial Sequence
  Synthetic
cuaacuguccaucaacau

SEQ ID NO: 163949 - RNA, 20 nt, Artificial Sequence
  Synthetic
agcuaacuguccaucaacau

SEQ ID NO: 163950 - RNA, 21 nt, Artificial Sequence
  Synthetic
aagcuaacuguccaucaacau

SEQ ID NO: 163951 - RNA, 22 nt, Artificial Sequence
  Synthetic
caagcuaacuguccaucaacau

SEQ ID NO: 163952 - RNA, 24 nt, Artificial Sequence
  Synthetic
agcaagcuaacuguccaucaacau

SEQ ID NO: 163953 - RNA, 19 nt, Artificial Sequence
  Synthetic
ugagaaguaaaaagaacau

SEQ ID NO: 163954 - RNA, 20 nt, Artificial Sequence
  Synthetic
augagaaguaaaaagaacau

SEQ ID NO: 163955 - RNA, 18 nt, Artificial Sequence
  Synthetic
uagugcugcgacgaacau

SEQ ID NO: 163956 - RNA, 19 nt, Artificial Sequence
  Synthetic
auagugcugcgacgaacau

SEQ ID NO: 163957 - RNA, 20 nt, Artificial Sequence
  Synthetic
uauagugcugcgacgaacau

SEQ ID NO: 163958 - RNA, 18 nt, Artificial Sequence
  Synthetic
uuuuggaauuuggaacau

SEQ ID NO: 163959 - RNA, 20 nt, Artificial Sequence
  Synthetic
aguuuuggaauuuggaacau

SEQ ID NO: 163960 - RNA, 21 nt, Artificial Sequence
  Synthetic
caguuuuggaauuuggaacau

SEQ ID NO: 163961 - RNA, 22 nt, Artificial Sequence
  Synthetic
acaguuuuggaauuuggaacau

SEQ ID NO: 163962 - RNA, 23 nt, Artificial Sequence
  Synthetic
aacaguuuuggaauuuggaacau

SEQ ID NO: 163963 - RNA, 24 nt, Artificial Sequence
  Synthetic
aaacaguuuuggaauuuggaacau

SEQ ID NO: 163964 - RNA, 21 nt, Artificial Sequence
  Synthetic
ugggucccucccacaacacau

SEQ ID NO: 163965 - RNA, 22 nt, Artificial Sequence
  Synthetic
cugggucccucccacaacacau

SEQ ID NO: 163966 - RNA, 23 nt, Artificial Sequence
  Synthetic
ccugggucccucccacaacacau

SEQ ID NO: 163967 - RNA, 24 nt, Artificial Sequence
  Synthetic
cccugggucccucccacaacacau

SEQ ID NO: 163968 - RNA, 18 nt, Artificial Sequence
  Synthetic
auaugucaaaagacacau

SEQ ID NO: 163969 - RNA, 19 nt, Artificial Sequence
  Synthetic
aauaugucaaaagacacau

SEQ ID NO: 163970 - RNA, 20 nt, Artificial Sequence
  Synthetic
aaauaugucaaaagacacau

SEQ ID NO: 163971 - RNA, 18 nt, Artificial Sequence
  Synthetic
aauguguaauaaucacau

SEQ ID NO: 163972 - RNA, 19 nt, Artificial Sequence
  Synthetic
caauguguaauaaucacau

SEQ ID NO: 163973 - RNA, 20 nt, Artificial Sequence
  Synthetic
acaauguguaauaaucacau

SEQ ID NO: 163974 - RNA, 21 nt, Artificial Sequence
  Synthetic
uacaauguguaauaaucacau

SEQ ID NO: 163975 - RNA, 22 nt, Artificial Sequence
  Synthetic
cuacaauguguaauaaucacau

SEQ ID NO: 163976 - RNA, 23 nt, Artificial Sequence
  Synthetic
ccuacaauguguaauaaucacau

SEQ ID NO: 163977 - RNA, 18 nt, Artificial Sequence
  Synthetic
ucugcuuuaagaggacau

SEQ ID NO: 163978 - RNA, 19 nt, Artificial Sequence
  Synthetic
uucugcuuuaagaggacau

SEQ ID NO: 163979 - RNA, 20 nt, Artificial Sequence
  Synthetic
cuucugcuuuaagaggacau

SEQ ID NO: 163980 - RNA, 18 nt, Artificial Sequence
  Synthetic
ucuaucauugucggacau

SEQ ID NO: 163981 - RNA, 20 nt, Artificial Sequence
  Synthetic
agucuaucauugucggacau

SEQ ID NO: 163982 - RNA, 21 nt, Artificial Sequence
  Synthetic
cagucuaucauugucggacau

SEQ ID NO: 163983 - RNA, 22 nt, Artificial Sequence
  Synthetic
ccagucuaucauugucggacau

SEQ ID NO: 163984 - RNA, 23 nt, Artificial Sequence
  Synthetic
uccagucuaucauugucggacau

SEQ ID NO: 163985 - RNA, 24 nt, Artificial Sequence
  Synthetic
auccagucuaucauugucggacau

SEQ ID NO: 163986 - RNA, 18 nt, Artificial Sequence
  Synthetic
ucauuagcugauggacau

SEQ ID NO: 163987 - RNA, 19 nt, Artificial Sequence
  Synthetic
uucauuagcugauggacau

SEQ ID NO: 163988 - RNA, 20 nt, Artificial Sequence
  Synthetic
auucauuagcugauggacau

SEQ ID NO: 163989 - RNA, 21 nt, Artificial Sequence
  Synthetic
uauucauuagcugauggacau

SEQ ID NO: 163990 - RNA, 22 nt, Artificial Sequence
  Synthetic
uuauucauuagcugauggacau

SEQ ID NO: 163991 - RNA, 23 nt, Artificial Sequence
  Synthetic
uuuauucauuagcugauggacau

SEQ ID NO: 163992 - RNA, 24 nt, Artificial Sequence
  Synthetic
auuuauucauuagcugauggacau

SEQ ID NO: 163993 - RNA, 18 nt, Artificial Sequence
  Synthetic
ucuaucauugauggacau

SEQ ID NO: 163994 - RNA, 21 nt, Artificial Sequence
  Synthetic
cggucuaucauugauggacau

SEQ ID NO: 163995 - RNA, 22 nt, Artificial Sequence
  Synthetic
ccggucuaucauugauggacau

SEQ ID NO: 163996 - RNA, 23 nt, Artificial Sequence
  Synthetic
uccggucuaucauugauggacau

SEQ ID NO: 163997 - RNA, 24 nt, Artificial Sequence
  Synthetic
auccggucuaucauugauggacau

SEQ ID NO: 163998 - RNA, 18 nt, Artificial Sequence
  Synthetic
ucuauuauugauggacau

SEQ ID NO: 163999 - RNA, 20 nt, Artificial Sequence
  Synthetic
agucuauuauugauggacau

SEQ ID NO: 164000 - RNA, 21 nt, Artificial Sequence
  Synthetic
cagucuauuauugauggacau

SEQ ID NO: 164001 - RNA, 22 nt, Artificial Sequence
  Synthetic
ccagucuauuauugauggacau

SEQ ID NO: 164002 - RNA, 23 nt, Artificial Sequence
  Synthetic
uccagucuauuauugauggacau

SEQ ID NO: 164003 - RNA, 24 nt, Artificial Sequence
  Synthetic
auccagucuauuauugauggacau

SEQ ID NO: 164004 - RNA, 18 nt, Artificial Sequence
  Synthetic
ucuaucacuguuggacau

SEQ ID NO: 164005 - RNA, 20 nt, Artificial Sequence
  Synthetic
agucuaucacuguuggacau

SEQ ID NO: 164006 - RNA, 21 nt, Artificial Sequence
  Synthetic
cagucuaucacuguuggacau

SEQ ID NO: 164007 - RNA, 22 nt, Artificial Sequence
  Synthetic
ccagucuaucacuguuggacau

SEQ ID NO: 164008 - RNA, 23 nt, Artificial Sequence
  Synthetic
uccagucuaucacuguuggacau

SEQ ID NO: 164009 - RNA, 24 nt, Artificial Sequence
  Synthetic
auccagucuaucacuguuggacau

SEQ ID NO: 164010 - RNA, 21 nt, Artificial Sequence
  Synthetic
cagucuaucauuguuggacau

SEQ ID NO: 164011 - RNA, 22 nt, Artificial Sequence
  Synthetic
ccagucuaucauuguuggacau

SEQ ID NO: 164012 - RNA, 23 nt, Artificial Sequence
  Synthetic
uccagucuaucauuguuggacau

SEQ ID NO: 164013 - RNA, 24 nt, Artificial Sequence
  Synthetic
auccagucuaucauuguuggacau

SEQ ID NO: 164014 - RNA, 18 nt, Artificial Sequence
  Synthetic
auauauacaggcauacau

SEQ ID NO: 164015 - RNA, 19 nt, Artificial Sequence
  Synthetic
uauauauacaggcauacau

SEQ ID NO: 164016 - RNA, 19 nt, Artificial Sequence
  Synthetic
cgaaguccauaguuuacau

SEQ ID NO: 164017 - RNA, 20 nt, Artificial Sequence
  Synthetic
ucgaaguccauaguuuacau

SEQ ID NO: 164018 - RNA, 21 nt, Artificial Sequence
  Synthetic
cucgaaguccauaguuuacau

SEQ ID NO: 164019 - RNA, 22 nt, Artificial Sequence
  Synthetic
acucgaaguccauaguuuacau

SEQ ID NO: 164020 - RNA, 23 nt, Artificial Sequence
  Synthetic
cacucgaaguccauaguuuacau

SEQ ID NO: 164021 - RNA, 24 nt, Artificial Sequence
  Synthetic
acacucgaaguccauaguuuacau

SEQ ID NO: 164022 - RNA, 18 nt, Artificial Sequence
  Synthetic
uuacaagaauuuuuacau

SEQ ID NO: 164023 - RNA, 19 nt, Artificial Sequence
  Synthetic
uuuacaagaauuuuuacau

SEQ ID NO: 164024 - RNA, 20 nt, Artificial Sequence
  Synthetic
uuuuacaagaauuuuuacau

SEQ ID NO: 164025 - RNA, 18 nt, Artificial Sequence
  Synthetic
auauuaccucacaaccau

SEQ ID NO: 164026 - RNA, 20 nt, Artificial Sequence
  Synthetic
agauauuaccucacaaccau

SEQ ID NO: 164027 - RNA, 22 nt, Artificial Sequence
  Synthetic
ugagauauuaccucacaaccau

SEQ ID NO: 164028 - RNA, 23 nt, Artificial Sequence
  Synthetic
augagauauuaccucacaaccau

SEQ ID NO: 164029 - RNA, 24 nt, Artificial Sequence
  Synthetic
aaugagauauuaccucacaaccau

SEQ ID NO: 164030 - RNA, 18 nt, Artificial Sequence
  Synthetic
aaagcaaaauaauaccau

SEQ ID NO: 164031 - RNA, 19 nt, Artificial Sequence
  Synthetic
uaaagcaaaauaauaccau

SEQ ID NO: 164032 - RNA, 20 nt, Artificial Sequence
  Synthetic
uuaaagcaaaauaauaccau

SEQ ID NO: 164033 - RNA, 21 nt, Artificial Sequence
  Synthetic
cacagcaaaagaaacuaccau

SEQ ID NO: 164034 - RNA, 23 nt, Artificial Sequence
  Synthetic
ugcacagcaaaagaaacuaccau

SEQ ID NO: 164035 - RNA, 24 nt, Artificial Sequence
  Synthetic
cugcacagcaaaagaaacuaccau

SEQ ID NO: 164036 - RNA, 18 nt, Artificial Sequence
  Synthetic
agcaaaagaaaguaccau

SEQ ID NO: 164037 - RNA, 19 nt, Artificial Sequence
  Synthetic
cagcaaaagaaaguaccau

SEQ ID NO: 164038 - RNA, 20 nt, Artificial Sequence
  Synthetic
acagcaaaagaaaguaccau

SEQ ID NO: 164039 - RNA, 21 nt, Artificial Sequence
  Synthetic
cacagcaaaagaaaguaccau

SEQ ID NO: 164040 - RNA, 23 nt, Artificial Sequence
  Synthetic
ugcacagcaaaagaaaguaccau

SEQ ID NO: 164041 - RNA, 24 nt, Artificial Sequence
  Synthetic
cugcacagcaaaagaaaguaccau

SEQ ID NO: 164042 - RNA, 18 nt, Artificial Sequence
  Synthetic
ugguuagauuaggcccau

SEQ ID NO: 164043 - RNA, 20 nt, Artificial Sequence
  Synthetic
ugugguuagauuaggcccau

SEQ ID NO: 164044 - RNA, 21 nt, Artificial Sequence
  Synthetic
cugugguuagauuaggcccau

SEQ ID NO: 164045 - RNA, 22 nt, Artificial Sequence
  Synthetic
ccugugguuagauuaggcccau

SEQ ID NO: 164046 - RNA, 23 nt, Artificial Sequence
  Synthetic
cccugugguuagauuaggcccau

SEQ ID NO: 164047 - RNA, 24 nt, Artificial Sequence
  Synthetic
acccugugguuagauuaggcccau

SEQ ID NO: 164048 - RNA, 19 nt, Artificial Sequence
  Synthetic
agaucgagaaagaggccau

SEQ ID NO: 164049 - RNA, 20 nt, Artificial Sequence
  Synthetic
aagaucgagaaagaggccau

SEQ ID NO: 164050 - RNA, 22 nt, Artificial Sequence
  Synthetic
ugaagaucgagaaagaggccau

SEQ ID NO: 164051 - RNA, 23 nt, Artificial Sequence
  Synthetic
cugaagaucgagaaagaggccau

SEQ ID NO: 164052 - RNA, 24 nt, Artificial Sequence
  Synthetic
ucugaagaucgagaaagaggccau

SEQ ID NO: 164053 - RNA, 18 nt, Artificial Sequence
  Synthetic
uucuuguuuuuuuuccau

SEQ ID NO: 164054 - RNA, 20 nt, Artificial Sequence
  Synthetic
aguucuuguuuuuuuuccau

SEQ ID NO: 164055 - RNA, 18 nt, Artificial Sequence
  Synthetic
ucuaucauugaugagcau

SEQ ID NO: 164056 - RNA, 20 nt, Artificial Sequence
  Synthetic
agucuaucauugaugagcau

SEQ ID NO: 164057 - RNA, 21 nt, Artificial Sequence
  Synthetic
cagucuaucauugaugagcau

SEQ ID NO: 164058 - RNA, 22 nt, Artificial Sequence
  Synthetic
ccagucuaucauugaugagcau

SEQ ID NO: 164059 - RNA, 23 nt, Artificial Sequence
  Synthetic
uccagucuaucauugaugagcau

SEQ ID NO: 164060 - RNA, 24 nt, Artificial Sequence
  Synthetic
auccagucuaucauugaugagcau

SEQ ID NO: 164061 - RNA, 21 nt, Artificial Sequence
  Synthetic
uaagaucuagcaaucccgcau

SEQ ID NO: 164062 - RNA, 22 nt, Artificial Sequence
  Synthetic
auaagaucuagcaaucccgcau

SEQ ID NO: 164063 - RNA, 23 nt, Artificial Sequence
  Synthetic
cauaagaucuagcaaucccgcau

SEQ ID NO: 164064 - RNA, 24 nt, Artificial Sequence
  Synthetic
ccauaagaucuagcaaucccgcau

SEQ ID NO: 164065 - RNA, 18 nt, Artificial Sequence
  Synthetic
augaggaugcaaaggcau

SEQ ID NO: 164066 - RNA, 19 nt, Artificial Sequence
  Synthetic
uaugaggaugcaaaggcau

SEQ ID NO: 164067 - RNA, 20 nt, Artificial Sequence
  Synthetic
cuaugaggaugcaaaggcau

SEQ ID NO: 164068 - RNA, 22 nt, Artificial Sequence
  Synthetic
agcuaugaggaugcaaaggcau

SEQ ID NO: 164069 - RNA, 23 nt, Artificial Sequence
  Synthetic
aagcuaugaggaugcaaaggcau

SEQ ID NO: 164070 - RNA, 24 nt, Artificial Sequence
  Synthetic
uaagcuaugaggaugcaaaggcau

SEQ ID NO: 164071 - RNA, 21 nt, Artificial Sequence
  Synthetic
uuugggacauggccagggcau

SEQ ID NO: 164072 - RNA, 22 nt, Artificial Sequence
  Synthetic
auuugggacauggccagggcau

SEQ ID NO: 164073 - RNA, 24 nt, Artificial Sequence
  Synthetic
ugauuugggacauggccagggcau

SEQ ID NO: 164074 - RNA, 18 nt, Artificial Sequence
  Synthetic
aagagagagagagggcau

SEQ ID NO: 164075 - RNA, 19 nt, Artificial Sequence
  Synthetic
caagagagagagagggcau

SEQ ID NO: 164076 - RNA, 21 nt, Artificial Sequence
  Synthetic
agcaagagagagagagggcau

SEQ ID NO: 164077 - RNA, 23 nt, Artificial Sequence
  Synthetic
agagcaagagagagagagggcau

SEQ ID NO: 164078 - RNA, 24 nt, Artificial Sequence
  Synthetic
cagagcaagagagagagagggcau

SEQ ID NO: 164079 - RNA, 18 nt, Artificial Sequence
  Synthetic
uccaucacugaugggcau

SEQ ID NO: 164080 - RNA, 20 nt, Artificial Sequence
  Synthetic
aguccaucacugaugggcau

SEQ ID NO: 164081 - RNA, 21 nt, Artificial Sequence
  Synthetic
caguccaucacugaugggcau

SEQ ID NO: 164082 - RNA, 22 nt, Artificial Sequence
  Synthetic
ccaguccaucacugaugggcau

SEQ ID NO: 164083 - RNA, 23 nt, Artificial Sequence
  Synthetic
uccaguccaucacugaugggcau

SEQ ID NO: 164084 - RNA, 24 nt, Artificial Sequence
  Synthetic
auccaguccaucacugaugggcau

SEQ ID NO: 164085 - RNA, 18 nt, Artificial Sequence
  Synthetic
uauuugaaaggauggcau

SEQ ID NO: 164086 - RNA, 19 nt, Artificial Sequence
  Synthetic
auauuugaaaggauggcau

SEQ ID NO: 164087 - RNA, 20 nt, Artificial Sequence
  Synthetic
aauauuugaaaggauggcau

SEQ ID NO: 164088 - RNA, 18 nt, Artificial Sequence
  Synthetic
cuugggaggcuguggcau

SEQ ID NO: 164089 - RNA, 19 nt, Artificial Sequence
  Synthetic
acuugggaggcuguggcau

SEQ ID NO: 164090 - RNA, 20 nt, Artificial Sequence
  Synthetic
uacuugggaggcuguggcau

SEQ ID NO: 164091 - RNA, 21 nt, Artificial Sequence
  Synthetic
cuacuugggaggcuguggcau

SEQ ID NO: 164092 - RNA, 23 nt, Artificial Sequence
  Synthetic
agcuacuugggaggcuguggcau

SEQ ID NO: 164093 - RNA, 24 nt, Artificial Sequence
  Synthetic
cagcuacuugggaggcuguggcau

SEQ ID NO: 164094 - RNA, 18 nt, Artificial Sequence
  Synthetic
cauuguaaugaaaaucau

SEQ ID NO: 164095 - RNA, 19 nt, Artificial Sequence
  Synthetic
acauuguaaugaaaaucau

SEQ ID NO: 164096 - RNA, 20 nt, Artificial Sequence
  Synthetic
uacauuguaaugaaaaucau

SEQ ID NO: 164097 - RNA, 21 nt, Artificial Sequence
  Synthetic
auacauuguaaugaaaaucau

SEQ ID NO: 164098 - RNA, 22 nt, Artificial Sequence
  Synthetic
aauacauuguaaugaaaaucau

SEQ ID NO: 164099 - RNA, 23 nt, Artificial Sequence
  Synthetic
caauacauuguaaugaaaaucau

SEQ ID NO: 164100 - RNA, 24 nt, Artificial Sequence
  Synthetic
acaauacauuguaaugaaaaucau

SEQ ID NO: 164101 - RNA, 18 nt, Artificial Sequence
  Synthetic
uuuaauauaagaaaucau

SEQ ID NO: 164102 - RNA, 19 nt, Artificial Sequence
  Synthetic
uuuuaauauaagaaaucau

SEQ ID NO: 164103 - RNA, 20 nt, Artificial Sequence
  Synthetic
uuuuuaauauaagaaaucau

SEQ ID NO: 164104 - RNA, 18 nt, Artificial Sequence
  Synthetic
uucagcucccacaaucau

SEQ ID NO: 164105 - RNA, 19 nt, Artificial Sequence
  Synthetic
uuucagcucccacaaucau

SEQ ID NO: 164106 - RNA, 20 nt, Artificial Sequence
  Synthetic
uuuucagcucccacaaucau

SEQ ID NO: 164107 - RNA, 21 nt, Artificial Sequence
  Synthetic
cuuuucagcucccacaaucau

SEQ ID NO: 164108 - RNA, 22 nt, Artificial Sequence
  Synthetic
acuuuucagcucccacaaucau

SEQ ID NO: 164109 - RNA, 24 nt, Artificial Sequence
  Synthetic
ugacuuuucagcucccacaaucau

SEQ ID NO: 164110 - RNA, 19 nt, Artificial Sequence
  Synthetic
ugggagguaacugaaucau

SEQ ID NO: 164111 - RNA, 21 nt, Artificial Sequence
  Synthetic
ugugggagguaacugaaucau

SEQ ID NO: 164112 - RNA, 22 nt, Artificial Sequence
  Synthetic
augugggagguaacugaaucau

SEQ ID NO: 164113 - RNA, 23 nt, Artificial Sequence
  Synthetic
caugugggagguaacugaaucau

SEQ ID NO: 164114 - RNA, 24 nt, Artificial Sequence
  Synthetic
ccaugugggagguaacugaaucau

SEQ ID NO: 164115 - RNA, 19 nt, Artificial Sequence
  Synthetic
ugagaggugacuggaucau

SEQ ID NO: 164116 - RNA, 22 nt, Artificial Sequence
  Synthetic
uggugagaggugacuggaucau

SEQ ID NO: 164117 - RNA, 23 nt, Artificial Sequence
  Synthetic
cuggugagaggugacuggaucau

SEQ ID NO: 164118 - RNA, 24 nt, Artificial Sequence
  Synthetic
ccuggugagaggugacuggaucau

SEQ ID NO: 164119 - RNA, 19 nt, Artificial Sequence
  Synthetic
ugggaggugauuggaucau

SEQ ID NO: 164120 - RNA, 22 nt, Artificial Sequence
  Synthetic
uggugggaggugauuggaucau

SEQ ID NO: 164121 - RNA, 23 nt, Artificial Sequence
  Synthetic
cuggugggaggugauuggaucau

SEQ ID NO: 164122 - RNA, 24 nt, Artificial Sequence
  Synthetic
ccuggugggaggugauuggaucau

SEQ ID NO: 164123 - RNA, 18 nt, Artificial Sequence
  Synthetic
ugcaaaagaaacuaucau

SEQ ID NO: 164124 - RNA, 19 nt, Artificial Sequence
  Synthetic
cugcaaaagaaacuaucau

SEQ ID NO: 164125 - RNA, 20 nt, Artificial Sequence
  Synthetic
acugcaaaagaaacuaucau

SEQ ID NO: 164126 - RNA, 21 nt, Artificial Sequence
  Synthetic
cacugcaaaagaaacuaucau

SEQ ID NO: 164127 - RNA, 22 nt, Artificial Sequence
  Synthetic
acacugcaaaagaaacuaucau

SEQ ID NO: 164128 - RNA, 23 nt, Artificial Sequence
  Synthetic
uacacugcaaaagaaacuaucau

SEQ ID NO: 164129 - RNA, 24 nt, Artificial Sequence
  Synthetic
cuacacugcaaaagaaacuaucau

SEQ ID NO: 164130 - RNA, 19 nt, Artificial Sequence
  Synthetic
ugaaaucacccacuaucau

SEQ ID NO: 164131 - RNA, 21 nt, Artificial Sequence
  Synthetic
ugugaaaucacccacuaucau

SEQ ID NO: 164132 - RNA, 22 nt, Artificial Sequence
  Synthetic
augugaaaucacccacuaucau

SEQ ID NO: 164133 - RNA, 23 nt, Artificial Sequence
  Synthetic
caugugaaaucacccacuaucau

SEQ ID NO: 164134 - RNA, 24 nt, Artificial Sequence
  Synthetic
ucaugugaaaucacccacuaucau

SEQ ID NO: 164135 - RNA, 18 nt, Artificial Sequence
  Synthetic
agcaaaagacccuaucau

SEQ ID NO: 164136 - RNA, 19 nt, Artificial Sequence
  Synthetic
cagcaaaagacccuaucau

SEQ ID NO: 164137 - RNA, 20 nt, Artificial Sequence
  Synthetic
acagcaaaagacccuaucau

SEQ ID NO: 164138 - RNA, 21 nt, Artificial Sequence
  Synthetic
cacagcaaaagacccuaucau

SEQ ID NO: 164139 - RNA, 23 nt, Artificial Sequence
  Synthetic
agcacagcaaaagacccuaucau

SEQ ID NO: 164140 - RNA, 18 nt, Artificial Sequence
  Synthetic
agguuaauggguuaucau

SEQ ID NO: 164141 - RNA, 19 nt, Artificial Sequence
  Synthetic
uagguuaauggguuaucau

SEQ ID NO: 164142 - RNA, 20 nt, Artificial Sequence
  Synthetic
auagguuaauggguuaucau

SEQ ID NO: 164143 - RNA, 21 nt, Artificial Sequence
  Synthetic
aauagguuaauggguuaucau

SEQ ID NO: 164144 - RNA, 22 nt, Artificial Sequence
  Synthetic
uaauagguuaauggguuaucau

SEQ ID NO: 164145 - RNA, 23 nt, Artificial Sequence
  Synthetic
uuaauagguuaauggguuaucau

SEQ ID NO: 164146 - RNA, 24 nt, Artificial Sequence
  Synthetic
auuaauagguuaauggguuaucau

SEQ ID NO: 164147 - RNA, 18 nt, Artificial Sequence
  Synthetic
cucaaaguaaaugcucau

SEQ ID NO: 164148 - RNA, 19 nt, Artificial Sequence
  Synthetic
ucucaaaguaaaugcucau

SEQ ID NO: 164149 - RNA, 20 nt, Artificial Sequence
  Synthetic
uucucaaaguaaaugcucau

SEQ ID NO: 164150 - RNA, 21 nt, Artificial Sequence
  Synthetic
auucucaaaguaaaugcucau

SEQ ID NO: 164151 - RNA, 23 nt, Artificial Sequence
  Synthetic
ugauucucaaaguaaaugcucau

SEQ ID NO: 164152 - RNA, 24 nt, Artificial Sequence
  Synthetic
augauucucaaaguaaaugcucau

SEQ ID NO: 164153 - RNA, 18 nt, Artificial Sequence
  Synthetic
ucacagaggauaucucau

SEQ ID NO: 164154 - RNA, 19 nt, Artificial Sequence
  Synthetic
uucacagaggauaucucau

SEQ ID NO: 164155 - RNA, 20 nt, Artificial Sequence
  Synthetic
uuucacagaggauaucucau

SEQ ID NO: 164156 - RNA, 18 nt, Artificial Sequence
  Synthetic
aucaccauuauuucucau

SEQ ID NO: 164157 - RNA, 19 nt, Artificial Sequence
  Synthetic
aaucaccauuauuucucau

SEQ ID NO: 164158 - RNA, 19 nt, Artificial Sequence
  Synthetic
agcaccaacugccagucau

SEQ ID NO: 164159 - RNA, 20 nt, Artificial Sequence
  Synthetic
cagcaccaacugccagucau

SEQ ID NO: 164160 - RNA, 23 nt, Artificial Sequence
  Synthetic
aggcagcaccaacugccagucau

SEQ ID NO: 164161 - RNA, 24 nt, Artificial Sequence
  Synthetic
uaggcagcaccaacugccagucau

SEQ ID NO: 164162 - RNA, 19 nt, Artificial Sequence
  Synthetic
uguuuuuuuuaagugucau

SEQ ID NO: 164163 - RNA, 20 nt, Artificial Sequence
  Synthetic
uuguuuuuuuuaagugucau

SEQ ID NO: 164164 - RNA, 18 nt, Artificial Sequence
  Synthetic
auaauccccaugugucau

SEQ ID NO: 164165 - RNA, 19 nt, Artificial Sequence
  Synthetic
cauaauccccaugugucau

SEQ ID NO: 164166 - RNA, 20 nt, Artificial Sequence
  Synthetic
ccauaauccccaugugucau

SEQ ID NO: 164167 - RNA, 21 nt, Artificial Sequence
  Synthetic
cccauaauccccaugugucau

SEQ ID NO: 164168 - RNA, 22 nt, Artificial Sequence
  Synthetic
ucccauaauccccaugugucau

SEQ ID NO: 164169 - RNA, 23 nt, Artificial Sequence
  Synthetic
cucccauaauccccaugugucau

SEQ ID NO: 164170 - RNA, 21 nt, Artificial Sequence
  Synthetic
aguaaucuaaagcaaauucau

SEQ ID NO: 164171 - RNA, 22 nt, Artificial Sequence
  Synthetic
caguaaucuaaagcaaauucau

SEQ ID NO: 164172 - RNA, 23 nt, Artificial Sequence
  Synthetic
ccaguaaucuaaagcaaauucau

SEQ ID NO: 164173 - RNA, 24 nt, Artificial Sequence
  Synthetic
cccaguaaucuaaagcaaauucau

SEQ ID NO: 164174 - RNA, 18 nt, Artificial Sequence
  Synthetic
acauuuuaauuucuucau

SEQ ID NO: 164175 - RNA, 20 nt, Artificial Sequence
  Synthetic
agacauuuuaauuucuucau

SEQ ID NO: 164176 - RNA, 18 nt, Artificial Sequence
  Synthetic
aagguuaaaugaguucau

SEQ ID NO: 164177 - RNA, 19 nt, Artificial Sequence
  Synthetic
uaagguuaaaugaguucau

SEQ ID NO: 164178 - RNA, 20 nt, Artificial Sequence
  Synthetic
uuaagguuaaaugaguucau

SEQ ID NO: 164179 - RNA, 21 nt, Artificial Sequence
  Synthetic
auuaagguuaaaugaguucau

SEQ ID NO: 164180 - RNA, 22 nt, Artificial Sequence
  Synthetic
aauuaagguuaaaugaguucau

SEQ ID NO: 164181 - RNA, 23 nt, Artificial Sequence
  Synthetic
uaauuaagguuaaaugaguucau

SEQ ID NO: 164182 - RNA, 18 nt, Artificial Sequence
  Synthetic
aagauaacaaguguucau

SEQ ID NO: 164183 - RNA, 19 nt, Artificial Sequence
  Synthetic
aaagauaacaaguguucau

SEQ ID NO: 164184 - RNA, 21 nt, Artificial Sequence
  Synthetic
ugaaagauaacaaguguucau

SEQ ID NO: 164185 - RNA, 22 nt, Artificial Sequence
  Synthetic
uugaaagauaacaaguguucau

SEQ ID NO: 164186 - RNA, 24 nt, Artificial Sequence
  Synthetic
aguugaaagauaacaaguguucau

SEQ ID NO: 164187 - RNA, 18 nt, Artificial Sequence
  Synthetic
uaauaaugaaaaaaagau

SEQ ID NO: 164188 - RNA, 19 nt, Artificial Sequence
  Synthetic
auaauaaugaaaaaaagau

SEQ ID NO: 164189 - RNA, 20 nt, Artificial Sequence
  Synthetic
uauaauaaugaaaaaaagau

SEQ ID NO: 164190 - RNA, 22 nt, Artificial Sequence
  Synthetic
aguauaauaaugaaaaaaagau

SEQ ID NO: 164191 - RNA, 23 nt, Artificial Sequence
  Synthetic
aaguauaauaaugaaaaaaagau

SEQ ID NO: 164192 - RNA, 24 nt, Artificial Sequence
  Synthetic
aaaguauaauaaugaaaaaaagau

SEQ ID NO: 164193 - RNA, 18 nt, Artificial Sequence
  Synthetic
agaaaauagacaaaagau

SEQ ID NO: 164194 - RNA, 19 nt, Artificial Sequence
  Synthetic
cagaaaauagacaaaagau

SEQ ID NO: 164195 - RNA, 20 nt, Artificial Sequence
  Synthetic
ucagaaaauagacaaaagau

SEQ ID NO: 164196 - RNA, 22 nt, Artificial Sequence
  Synthetic
agauaagaggccagaacaagau

SEQ ID NO: 164197 - RNA, 24 nt, Artificial Sequence
  Synthetic
ugagauaagaggccagaacaagau

SEQ ID NO: 164198 - RNA, 18 nt, Artificial Sequence
  Synthetic
uaaugcuucagagaagau

SEQ ID NO: 164199 - RNA, 19 nt, Artificial Sequence
  Synthetic
auaaugcuucagagaagau

SEQ ID NO: 164200 - RNA, 20 nt, Artificial Sequence
  Synthetic
aauaaugcuucagagaagau

SEQ ID NO: 164201 - RNA, 22 nt, Artificial Sequence
  Synthetic
ugaauaaugcuucagagaagau

SEQ ID NO: 164202 - RNA, 24 nt, Artificial Sequence
  Synthetic
ugugaauaaugcuucagagaagau

SEQ ID NO: 164203 - RNA, 18 nt, Artificial Sequence
  Synthetic
uauauguaaaaauaagau

SEQ ID NO: 164204 - RNA, 19 nt, Artificial Sequence
  Synthetic
uuauauguaaaaauaagau

SEQ ID NO: 164205 - RNA, 22 nt, Artificial Sequence
  Synthetic
aggcccugaggggaaggcagau

SEQ ID NO: 164206 - RNA, 23 nt, Artificial Sequence
  Synthetic
aaggcccugaggggaaggcagau

SEQ ID NO: 164207 - RNA, 24 nt, Artificial Sequence
  Synthetic
uaaggcccugaggggaaggcagau

SEQ ID NO: 164208 - RNA, 18 nt, Artificial Sequence
  Synthetic
uguauuuuuaguagagau

SEQ ID NO: 164209 - RNA, 19 nt, Artificial Sequence
  Synthetic
uuguauuuuuaguagagau

SEQ ID NO: 164210 - RNA, 20 nt, Artificial Sequence
  Synthetic
uuuguauuuuuaguagagau

SEQ ID NO: 164211 - RNA, 21 nt, Artificial Sequence
  Synthetic
uuuuguauuuuuaguagagau

SEQ ID NO: 164212 - RNA, 22 nt, Artificial Sequence
  Synthetic
uuuuuguauuuuuaguagagau

SEQ ID NO: 164213 - RNA, 23 nt, Artificial Sequence
  Synthetic
auuuuuguauuuuuaguagagau

SEQ ID NO: 164214 - RNA, 24 nt, Artificial Sequence
  Synthetic
aauuuuuguauuuuuaguagagau

SEQ ID NO: 164215 - RNA, 23 nt, Artificial Sequence
  Synthetic
uuuuuuguauuuuuaguagagau

SEQ ID NO: 164216 - RNA, 24 nt, Artificial Sequence
  Synthetic
uuuuuuuguauuuuuaguagagau

SEQ ID NO: 164217 - RNA, 18 nt, Artificial Sequence
  Synthetic
aaguuuuucaaaggagau

SEQ ID NO: 164218 - RNA, 20 nt, Artificial Sequence
  Synthetic
agaaguuuuucaaaggagau

SEQ ID NO: 164219 - RNA, 21 nt, Artificial Sequence
  Synthetic
aagaaguuuuucaaaggagau

SEQ ID NO: 164220 - RNA, 22 nt, Artificial Sequence
  Synthetic
caagaaguuuuucaaaggagau

SEQ ID NO: 164221 - RNA, 23 nt, Artificial Sequence
  Synthetic
ucaagaaguuuuucaaaggagau

SEQ ID NO: 164222 - RNA, 24 nt, Artificial Sequence
  Synthetic
uucaagaaguuuuucaaaggagau

SEQ ID NO: 164223 - RNA, 19 nt, Artificial Sequence
  Synthetic
ugcucugucccagggagau

SEQ ID NO: 164224 - RNA, 22 nt, Artificial Sequence
  Synthetic
uggugcucugucccagggagau

SEQ ID NO: 164225 - RNA, 24 nt, Artificial Sequence
  Synthetic
cguggugcucugucccagggagau

SEQ ID NO: 164226 - RNA, 18 nt, Artificial Sequence
  Synthetic
uacaauucaaaaugagau

SEQ ID NO: 164227 - RNA, 19 nt, Artificial Sequence
  Synthetic
uuacaauucaaaaugagau

SEQ ID NO: 164228 - RNA, 20 nt, Artificial Sequence
  Synthetic
auuacaauucaaaaugagau

SEQ ID NO: 164229 - RNA, 18 nt, Artificial Sequence
  Synthetic
uauaauucaaaaugagau

SEQ ID NO: 164230 - RNA, 19 nt, Artificial Sequence
  Synthetic
uuauaauucaaaaugagau

SEQ ID NO: 164231 - RNA, 20 nt, Artificial Sequence
  Synthetic
auuauaauucaaaaugagau

SEQ ID NO: 164232 - RNA, 18 nt, Artificial Sequence
  Synthetic
uagaauucaagaugagau

SEQ ID NO: 164233 - RNA, 20 nt, Artificial Sequence
  Synthetic
aguagaauucaagaugagau

SEQ ID NO: 164234 - RNA, 24 nt, Artificial Sequence
  Synthetic
ugggaguagaauucaagaugagau

SEQ ID NO: 164235 - RNA, 18 nt, Artificial Sequence
  Synthetic
uacaauucaaggugagau

SEQ ID NO: 164236 - RNA, 19 nt, Artificial Sequence
  Synthetic
uuacaauucaaggugagau

SEQ ID NO: 164237 - RNA, 20 nt, Artificial Sequence
  Synthetic
auuacaauucaaggugagau

SEQ ID NO: 164238 - RNA, 22 nt, Artificial Sequence
  Synthetic
agauuacaauucaaggugagau

SEQ ID NO: 164239 - RNA, 24 nt, Artificial Sequence
  Synthetic
agggauuacaauucaaggugagau

SEQ ID NO: 164240 - RNA, 18 nt, Artificial Sequence
  Synthetic
cauaauucaaggugagau

SEQ ID NO: 164241 - RNA, 19 nt, Artificial Sequence
  Synthetic
ccauaauucaaggugagau

SEQ ID NO: 164242 - RNA, 20 nt, Artificial Sequence
  Synthetic
accauaauucaaggugagau

SEQ ID NO: 164243 - RNA, 21 nt, Artificial Sequence
  Synthetic
uaccauaauucaaggugagau

SEQ ID NO: 164244 - RNA, 22 nt, Artificial Sequence
  Synthetic
uuaccauaauucaaggugagau

SEQ ID NO: 164245 - RNA, 23 nt, Artificial Sequence
  Synthetic
auuaccauaauucaaggugagau

SEQ ID NO: 164246 - RNA, 18 nt, Artificial Sequence
  Synthetic
uguaaaagcuggugagau

SEQ ID NO: 164247 - RNA, 19 nt, Artificial Sequence
  Synthetic
auguaaaagcuggugagau

SEQ ID NO: 164248 - RNA, 20 nt, Artificial Sequence
  Synthetic
cauguaaaagcuggugagau

SEQ ID NO: 164249 - RNA, 22 nt, Artificial Sequence
  Synthetic
ugcauguaaaagcuggugagau

SEQ ID NO: 164250 - RNA, 24 nt, Artificial Sequence
  Synthetic
agugcauguaaaagcuggugagau

SEQ ID NO: 164251 - RNA, 21 nt, Artificial Sequence
  Synthetic
uguuuauguacagugugagau

SEQ ID NO: 164252 - RNA, 22 nt, Artificial Sequence
  Synthetic
auguuuauguacagugugagau

SEQ ID NO: 164253 - RNA, 23 nt, Artificial Sequence
  Synthetic
uauguuuauguacagugugagau

SEQ ID NO: 164254 - RNA, 24 nt, Artificial Sequence
  Synthetic
uuauguuuauguacagugugagau

SEQ ID NO: 164255 - RNA, 18 nt, Artificial Sequence
  Synthetic
uaauaauauuaaauagau

SEQ ID NO: 164256 - RNA, 19 nt, Artificial Sequence
  Synthetic
auaauaauauuaaauagau

SEQ ID NO: 164257 - RNA, 20 nt, Artificial Sequence
  Synthetic
uauaauaauauuaaauagau

SEQ ID NO: 164258 - RNA, 19 nt, Artificial Sequence
  Synthetic
agcaccuuaggagguagau

SEQ ID NO: 164259 - RNA, 20 nt, Artificial Sequence
  Synthetic
cagcaccuuaggagguagau

SEQ ID NO: 164260 - RNA, 21 nt, Artificial Sequence
  Synthetic
ccagcaccuuaggagguagau

SEQ ID NO: 164261 - RNA, 22 nt, Artificial Sequence
  Synthetic
uccagcaccuuaggagguagau

SEQ ID NO: 164262 - RNA, 23 nt, Artificial Sequence
  Synthetic
uuccagcaccuuaggagguagau

SEQ ID NO: 164263 - RNA, 24 nt, Artificial Sequence
  Synthetic
auuccagcaccuuaggagguagau

SEQ ID NO: 164264 - RNA, 21 nt, Artificial Sequence
  Synthetic
uuucuucuuaaaacuuuagau

SEQ ID NO: 164265 - RNA, 22 nt, Artificial Sequence
  Synthetic
uuuucuucuuaaaacuuuagau

SEQ ID NO: 164266 - RNA, 24 nt, Artificial Sequence
  Synthetic
aguuuucuucuuaaaacuuuagau

SEQ ID NO: 164267 - RNA, 18 nt, Artificial Sequence
  Synthetic
auucugugggucaaggau

SEQ ID NO: 164268 - RNA, 19 nt, Artificial Sequence
  Synthetic
uauucugugggucaaggau

SEQ ID NO: 164269 - RNA, 20 nt, Artificial Sequence
  Synthetic
uuauucugugggucaaggau

SEQ ID NO: 164270 - RNA, 18 nt, Artificial Sequence
  Synthetic
agaaaaagauagaaggau

SEQ ID NO: 164271 - RNA, 18 nt, Artificial Sequence
  Synthetic
uccugugcauuguaggau

SEQ ID NO: 164272 - RNA, 20 nt, Artificial Sequence
  Synthetic
uguccugugcauuguaggau

SEQ ID NO: 164273 - RNA, 21 nt, Artificial Sequence
  Synthetic
cuguccugugcauuguaggau

SEQ ID NO: 164274 - RNA, 24 nt, Artificial Sequence
  Synthetic
uggcuguccugugcauuguaggau

SEQ ID NO: 164275 - RNA, 18 nt, Artificial Sequence
  Synthetic
cauguccuuuguagggau

SEQ ID NO: 164276 - RNA, 19 nt, Artificial Sequence
  Synthetic
ucauguccuuuguagggau

SEQ ID NO: 164277 - RNA, 20 nt, Artificial Sequence
  Synthetic
uucauguccuuuguagggau

SEQ ID NO: 164278 - RNA, 22 nt, Artificial Sequence
  Synthetic
aguucauguccuuuguagggau

SEQ ID NO: 164279 - RNA, 24 nt, Artificial Sequence
  Synthetic
ugaguucauguccuuuguagggau

SEQ ID NO: 164280 - RNA, 20 nt, Artificial Sequence
  Synthetic
aggggagcugaaaaggggau

SEQ ID NO: 164281 - RNA, 21 nt, Artificial Sequence
  Synthetic
aaggggagcugaaaaggggau

SEQ ID NO: 164282 - RNA, 18 nt, Artificial Sequence
  Synthetic
uucacagguuccugggau

SEQ ID NO: 164283 - RNA, 19 nt, Artificial Sequence
  Synthetic
auucacagguuccugggau

SEQ ID NO: 164284 - RNA, 20 nt, Artificial Sequence
  Synthetic
uauucacagguuccugggau

SEQ ID NO: 164285 - RNA, 21 nt, Artificial Sequence
  Synthetic
auauucacagguuccugggau

SEQ ID NO: 164286 - RNA, 22 nt, Artificial Sequence
  Synthetic
cauauucacagguuccugggau

SEQ ID NO: 164287 - RNA, 23 nt, Artificial Sequence
  Synthetic
acauauucacagguuccugggau

SEQ ID NO: 164288 - RNA, 24 nt, Artificial Sequence
  Synthetic
aacauauucacagguuccugggau

SEQ ID NO: 164289 - RNA, 18 nt, Artificial Sequence
  Synthetic
acaguauuauaaauggau

SEQ ID NO: 164290 - RNA, 19 nt, Artificial Sequence
  Synthetic
cacaguauuauaaauggau

SEQ ID NO: 164291 - RNA, 20 nt, Artificial Sequence
  Synthetic
ucacaguauuauaaauggau

SEQ ID NO: 164292 - RNA, 19 nt, Artificial Sequence
  Synthetic
agcgauuccucugauggau

SEQ ID NO: 164293 - RNA, 20 nt, Artificial Sequence
  Synthetic
uagcgauuccucugauggau

SEQ ID NO: 164294 - RNA, 23 nt, Artificial Sequence
  Synthetic
agguagcgauuccucugauggau

SEQ ID NO: 164295 - RNA, 24 nt, Artificial Sequence
  Synthetic
uagguagcgauuccucugauggau

SEQ ID NO: 164296 - RNA, 18 nt, Artificial Sequence
  Synthetic
aaucaaauggacuuggau

SEQ ID NO: 164297 - RNA, 19 nt, Artificial Sequence
  Synthetic
agaugauggugcuuuggau

SEQ ID NO: 164298 - RNA, 18 nt, Artificial Sequence
  Synthetic
uuaaucauugcuaaugau

SEQ ID NO: 164299 - RNA, 19 nt, Artificial Sequence
  Synthetic
uuuaaucauugcuaaugau

SEQ ID NO: 164300 - RNA, 20 nt, Artificial Sequence
  Synthetic
uuuuaaucauugcuaaugau

SEQ ID NO: 164301 - RNA, 18 nt, Artificial Sequence
  Synthetic
ccacgccuggcccaugau

SEQ ID NO: 164302 - RNA, 19 nt, Artificial Sequence
  Synthetic
accacgccuggcccaugau

SEQ ID NO: 164303 - RNA, 20 nt, Artificial Sequence
  Synthetic
caccacgccuggcccaugau

SEQ ID NO: 164304 - RNA, 21 nt, Artificial Sequence
  Synthetic
ccaccacgccuggcccaugau

SEQ ID NO: 164305 - RNA, 23 nt, Artificial Sequence
  Synthetic
agccaccacgccuggcccaugau

SEQ ID NO: 164306 - RNA, 18 nt, Artificial Sequence
  Synthetic
aggcugaguguguaugau

SEQ ID NO: 164307 - RNA, 19 nt, Artificial Sequence
  Synthetic
uaggcugaguguguaugau

SEQ ID NO: 164308 - RNA, 20 nt, Artificial Sequence
  Synthetic
cuaggcugaguguguaugau

SEQ ID NO: 164309 - RNA, 18 nt, Artificial Sequence
  Synthetic
uauauuuuuauuuaugau

SEQ ID NO: 164310 - RNA, 19 nt, Artificial Sequence
  Synthetic
uuauauuuuuauuuaugau

SEQ ID NO: 164311 - RNA, 20 nt, Artificial Sequence
  Synthetic
uuuauauuuuuauuuaugau

SEQ ID NO: 164312 - RNA, 18 nt, Artificial Sequence
  Synthetic
aacuuaugaugggcugau

SEQ ID NO: 164313 - RNA, 19 nt, Artificial Sequence
  Synthetic
caacuuaugaugggcugau

SEQ ID NO: 164314 - RNA, 20 nt, Artificial Sequence
  Synthetic
ucaacuuaugaugggcugau

SEQ ID NO: 164315 - RNA, 21 nt, Artificial Sequence
  Synthetic
uucaacuuaugaugggcugau

SEQ ID NO: 164316 - RNA, 22 nt, Artificial Sequence
  Synthetic
uuucaacuuaugaugggcugau

SEQ ID NO: 164317 - RNA, 23 nt, Artificial Sequence
  Synthetic
uuuucaacuuaugaugggcugau

SEQ ID NO: 164318 - RNA, 24 nt, Artificial Sequence
  Synthetic
auuuucaacuuaugaugggcugau

SEQ ID NO: 164319 - RNA, 18 nt, Artificial Sequence
  Synthetic
ccuccagcugauucugau

SEQ ID NO: 164320 - RNA, 19 nt, Artificial Sequence
  Synthetic
cccuccagcugauucugau

SEQ ID NO: 164321 - RNA, 20 nt, Artificial Sequence
  Synthetic
acccuccagcugauucugau

SEQ ID NO: 164322 - RNA, 21 nt, Artificial Sequence
  Synthetic
aacccuccagcugauucugau

SEQ ID NO: 164323 - RNA, 22 nt, Artificial Sequence
  Synthetic
aaacccuccagcugauucugau

SEQ ID NO: 164324 - RNA, 23 nt, Artificial Sequence
  Synthetic
caaacccuccagcugauucugau

SEQ ID NO: 164325 - RNA, 18 nt, Artificial Sequence
  Synthetic
uaaauaauuuauucugau

SEQ ID NO: 164326 - RNA, 19 nt, Artificial Sequence
  Synthetic
uuaaauaauuuauucugau

SEQ ID NO: 164327 - RNA, 20 nt, Artificial Sequence
  Synthetic
auuaaauaauuuauucugau

SEQ ID NO: 164328 - RNA, 19 nt, Artificial Sequence
  Synthetic
aggauggcugcugauugau

SEQ ID NO: 164329 - RNA, 21 nt, Artificial Sequence
  Synthetic
ugaggauggcugcugauugau

SEQ ID NO: 164330 - RNA, 23 nt, Artificial Sequence
  Synthetic
agugaggauggcugcugauugau

SEQ ID NO: 164331 - RNA, 24 nt, Artificial Sequence
  Synthetic
cagugaggauggcugcugauugau

SEQ ID NO: 164332 - RNA, 18 nt, Artificial Sequence
  Synthetic
uauauuauguuucuugau

SEQ ID NO: 164333 - RNA, 19 nt, Artificial Sequence
  Synthetic
uuauauuauguuucuugau

SEQ ID NO: 164334 - RNA, 20 nt, Artificial Sequence
  Synthetic
auuauauuauguuucuugau

SEQ ID NO: 164335 - RNA, 18 nt, Artificial Sequence
  Synthetic
cccuuguacaauguugau

SEQ ID NO: 164336 - RNA, 19 nt, Artificial Sequence
  Synthetic
acccuuguacaauguugau

SEQ ID NO: 164337 - RNA, 20 nt, Artificial Sequence
  Synthetic
aacccuuguacaauguugau

SEQ ID NO: 164338 - RNA, 22 nt, Artificial Sequence
  Synthetic
agaacccuuguacaauguugau

SEQ ID NO: 164339 - RNA, 24 nt, Artificial Sequence
  Synthetic
agagaacccuuguacaauguugau

SEQ ID NO: 164340 - RNA, 18 nt, Artificial Sequence
  Synthetic
ugacauugcuaguuugau

SEQ ID NO: 164341 - RNA, 19 nt, Artificial Sequence
  Synthetic
augacauugcuaguuugau

SEQ ID NO: 164342 - RNA, 20 nt, Artificial Sequence
  Synthetic
aaugacauugcuaguuugau

SEQ ID NO: 164343 - RNA, 21 nt, Artificial Sequence
  Synthetic
aaaugacauugcuaguuugau

SEQ ID NO: 164344 - RNA, 22 nt, Artificial Sequence
  Synthetic
aaaaugacauugcuaguuugau

SEQ ID NO: 164345 - RNA, 23 nt, Artificial Sequence
  Synthetic
aaaaaugacauugcuaguuugau

SEQ ID NO: 164346 - RNA, 19 nt, Artificial Sequence
  Synthetic
agaaaaaaagucaaaauau

SEQ ID NO: 164347 - RNA, 20 nt, Artificial Sequence
  Synthetic
uagaaaaaaagucaaaauau

SEQ ID NO: 164348 - RNA, 18 nt, Artificial Sequence
  Synthetic
aaaaaaaugggcaaauau

SEQ ID NO: 164349 - RNA, 19 nt, Artificial Sequence
  Synthetic
uaaaaaaaugggcaaauau

SEQ ID NO: 164350 - RNA, 20 nt, Artificial Sequence
  Synthetic
auaaaaaaaugggcaaauau

SEQ ID NO: 164351 - RNA, 18 nt, Artificial Sequence
  Synthetic
uuugcugauaauaaauau

SEQ ID NO: 164352 - RNA, 19 nt, Artificial Sequence
  Synthetic
uuuugcugauaauaaauau

SEQ ID NO: 164353 - RNA, 20 nt, Artificial Sequence
  Synthetic
cuuuugcugauaauaaauau

SEQ ID NO: 164354 - RNA, 18 nt, Artificial Sequence
  Synthetic
uugauugaccauaaauau

SEQ ID NO: 164355 - RNA, 19 nt, Artificial Sequence
  Synthetic
auugauugaccauaaauau

SEQ ID NO: 164356 - RNA, 20 nt, Artificial Sequence
  Synthetic
uauugauugaccauaaauau

SEQ ID NO: 164357 - RNA, 21 nt, Artificial Sequence
  Synthetic
auauugauugaccauaaauau

SEQ ID NO: 164358 - RNA, 22 nt, Artificial Sequence
  Synthetic
uauauugauugaccauaaauau

SEQ ID NO: 164359 - RNA, 23 nt, Artificial Sequence
  Synthetic
auauauugauugaccauaaauau

SEQ ID NO: 164360 - RNA, 24 nt, Artificial Sequence
  Synthetic
cauauauugauugaccauaaauau

SEQ ID NO: 164361 - RNA, 19 nt, Artificial Sequence
  Synthetic
agcaauuuuaccuaaauau

SEQ ID NO: 164362 - RNA, 20 nt, Artificial Sequence
  Synthetic
uagcaauuuuaccuaaauau

SEQ ID NO: 164363 - RNA, 18 nt, Artificial Sequence
  Synthetic
cucucuuuucuuaaauau

SEQ ID NO: 164364 - RNA, 19 nt, Artificial Sequence
  Synthetic
ucucucuuuucuuaaauau

SEQ ID NO: 164365 - RNA, 18 nt, Artificial Sequence
  Synthetic
cauuuccaccagcaauau

SEQ ID NO: 164366 - RNA, 19 nt, Artificial Sequence
  Synthetic
acauuuccaccagcaauau

SEQ ID NO: 164367 - RNA, 20 nt, Artificial Sequence
  Synthetic
uacauuuccaccagcaauau

SEQ ID NO: 164368 - RNA, 21 nt, Artificial Sequence
  Synthetic
uuacauuuccaccagcaauau

SEQ ID NO: 164369 - RNA, 22 nt, Artificial Sequence
  Synthetic
uuuacauuuccaccagcaauau

SEQ ID NO: 164370 - RNA, 23 nt, Artificial Sequence
  Synthetic
uuuuacauuuccaccagcaauau

SEQ ID NO: 164371 - RNA, 24 nt, Artificial Sequence
  Synthetic
auuuuacauuuccaccagcaauau

SEQ ID NO: 164372 - RNA, 18 nt, Artificial Sequence
  Synthetic
auauuacauuuucaauau

SEQ ID NO: 164373 - RNA, 19 nt, Artificial Sequence
  Synthetic
aauauuacauuuucaauau

SEQ ID NO: 164374 - RNA, 19 nt, Artificial Sequence
  Synthetic
aguucuguaaguagaauau

SEQ ID NO: 164375 - RNA, 18 nt, Artificial Sequence
  Synthetic
uaacuauuuuuggaauau

SEQ ID NO: 164376 - RNA, 19 nt, Artificial Sequence
  Synthetic
auaacuauuuuuggaauau

SEQ ID NO: 164377 - RNA, 20 nt, Artificial Sequence
  Synthetic
aauaacuauuuuuggaauau

SEQ ID NO: 164378 - RNA, 18 nt, Artificial Sequence
  Synthetic
augaagguauaugaauau

SEQ ID NO: 164379 - RNA, 19 nt, Artificial Sequence
  Synthetic
aaugaagguauaugaauau

SEQ ID NO: 164380 - RNA, 20 nt, Artificial Sequence
  Synthetic
aaaugaagguauaugaauau

SEQ ID NO: 164381 - RNA, 18 nt, Artificial Sequence
  Synthetic
auaagugguaaauaauau

SEQ ID NO: 164382 - RNA, 19 nt, Artificial Sequence
  Synthetic
uauaagugguaaauaauau

SEQ ID NO: 164383 - RNA, 21 nt, Artificial Sequence
  Synthetic
aguauaagugguaaauaauau

SEQ ID NO: 164384 - RNA, 22 nt, Artificial Sequence
  Synthetic
aaguauaagugguaaauaauau

SEQ ID NO: 164385 - RNA, 23 nt, Artificial Sequence
  Synthetic
caaguauaagugguaaauaauau

SEQ ID NO: 164386 - RNA, 24 nt, Artificial Sequence
  Synthetic
ucaaguauaagugguaaauaauau

SEQ ID NO: 164387 - RNA, 18 nt, Artificial Sequence
  Synthetic
uaacuuauacuaacauau

SEQ ID NO: 164388 - RNA, 19 nt, Artificial Sequence
  Synthetic
uuaacuuauacuaacauau

SEQ ID NO: 164389 - RNA, 20 nt, Artificial Sequence
  Synthetic
auuaacuuauacuaacauau

SEQ ID NO: 164390 - RNA, 18 nt, Artificial Sequence
  Synthetic
cagacaacaguggcauau

SEQ ID NO: 164391 - RNA, 19 nt, Artificial Sequence
  Synthetic
acagacaacaguggcauau

SEQ ID NO: 164392 - RNA, 20 nt, Artificial Sequence
  Synthetic
cacagacaacaguggcauau

SEQ ID NO: 164393 - RNA, 19 nt, Artificial Sequence
  Synthetic
agauuaaaaacaaugauau

SEQ ID NO: 164394 - RNA, 20 nt, Artificial Sequence
  Synthetic
aagauuaaaaacaaugauau

SEQ ID NO: 164395 - RNA, 19 nt, Artificial Sequence
  Synthetic
aguuuauauauaaauauau

SEQ ID NO: 164396 - RNA, 21 nt, Artificial Sequence
  Synthetic
ugaguuuauauauaaauauau

SEQ ID NO: 164397 - RNA, 22 nt, Artificial Sequence
  Synthetic
augaguuuauauauaaauauau

SEQ ID NO: 164398 - RNA, 23 nt, Artificial Sequence
  Synthetic
uaugaguuuauauauaaauauau

SEQ ID NO: 164399 - RNA, 24 nt, Artificial Sequence
  Synthetic
auaugaguuuauauauaaauauau

SEQ ID NO: 164400 - RNA, 21 nt, Artificial Sequence
  Synthetic
augaaucaauuuuaaauauau

SEQ ID NO: 164401 - RNA, 22 nt, Artificial Sequence
  Synthetic
aaugaaucaauuuuaaauauau

SEQ ID NO: 164402 - RNA, 23 nt, Artificial Sequence
  Synthetic
aaaugaaucaauuuuaaauauau

SEQ ID NO: 164403 - RNA, 24 nt, Artificial Sequence
  Synthetic
uaaaugaaucaauuuuaaauauau

SEQ ID NO: 164404 - RNA, 18 nt, Artificial Sequence
  Synthetic
auauuuauuucaauauau

SEQ ID NO: 164405 - RNA, 19 nt, Artificial Sequence
  Synthetic
aauauuuauuucaauauau

SEQ ID NO: 164406 - RNA, 19 nt, Artificial Sequence
  Synthetic
aguacaauaguagauauau

SEQ ID NO: 164407 - RNA, 20 nt, Artificial Sequence
  Synthetic
uaguacaauaguagauauau

SEQ ID NO: 164408 - RNA, 18 nt, Artificial Sequence
  Synthetic
auaauauguuggauauau

SEQ ID NO: 164409 - RNA, 19 nt, Artificial Sequence
  Synthetic
aauaauauguuggauauau

SEQ ID NO: 164410 - RNA, 20 nt, Artificial Sequence
  Synthetic
uaauaauauguuggauauau

SEQ ID NO: 164411 - RNA, 19 nt, Artificial Sequence
  Synthetic
ugugucuauauauauauau

SEQ ID NO: 164412 - RNA, 21 nt, Artificial Sequence
  Synthetic
cgugugucuauauauauauau

SEQ ID NO: 164413 - RNA, 22 nt, Artificial Sequence
  Synthetic
acgugugucuauauauauauau

SEQ ID NO: 164414 - RNA, 23 nt, Artificial Sequence
  Synthetic
uacgugugucuauauauauauau

SEQ ID NO: 164415 - RNA, 18 nt, Artificial Sequence
  Synthetic
aaaaucucuuauauauau

SEQ ID NO: 164416 - RNA, 19 nt, Artificial Sequence
  Synthetic
uaaaaucucuuauauauau

SEQ ID NO: 164417 - RNA, 20 nt, Artificial Sequence
  Synthetic
auaaaaucucuuauauauau

SEQ ID NO: 164418 - RNA, 21 nt, Artificial Sequence
  Synthetic
uauaaaaucucuuauauauau

SEQ ID NO: 164419 - RNA, 22 nt, Artificial Sequence
  Synthetic
auauaaaaucucuuauauauau

SEQ ID NO: 164420 - RNA, 23 nt, Artificial Sequence
  Synthetic
cauauaaaaucucuuauauauau

SEQ ID NO: 164421 - RNA, 24 nt, Artificial Sequence
  Synthetic
acauauaaaaucucuuauauauau

SEQ ID NO: 164422 - RNA, 18 nt, Artificial Sequence
  Synthetic
auaugaguuuauauauau

SEQ ID NO: 164423 - RNA, 19 nt, Artificial Sequence
  Synthetic
uauaugaguuuauauauau

SEQ ID NO: 164424 - RNA, 20 nt, Artificial Sequence
  Synthetic
auauaugaguuuauauauau

SEQ ID NO: 164425 - RNA, 21 nt, Artificial Sequence
  Synthetic
uauauaugaguuuauauauau

SEQ ID NO: 164426 - RNA, 22 nt, Artificial Sequence
  Synthetic
auauauaugaguuuauauauau

SEQ ID NO: 164427 - RNA, 23 nt, Artificial Sequence
  Synthetic
aauauauaugaguuuauauauau

SEQ ID NO: 164428 - RNA, 24 nt, Artificial Sequence
  Synthetic
aaauauauaugaguuuauauauau

SEQ ID NO: 164429 - RNA, 18 nt, Artificial Sequence
  Synthetic
auuccacaauguauauau

SEQ ID NO: 164430 - RNA, 19 nt, Artificial Sequence
  Synthetic
uauuccacaauguauauau

SEQ ID NO: 164431 - RNA, 20 nt, Artificial Sequence
  Synthetic
uuauuccacaauguauauau

SEQ ID NO: 164432 - RNA, 18 nt, Artificial Sequence
  Synthetic
uauuauauuuuacuauau

SEQ ID NO: 164433 - RNA, 19 nt, Artificial Sequence
  Synthetic
auauuauauuuuacuauau

SEQ ID NO: 164434 - RNA, 20 nt, Artificial Sequence
  Synthetic
aauauuauauuuuacuauau

SEQ ID NO: 164435 - RNA, 21 nt, Artificial Sequence
  Synthetic
uuaguaauguuuuaauuauau

SEQ ID NO: 164436 - RNA, 23 nt, Artificial Sequence
  Synthetic
uguuaguaauguuuuaauuauau

SEQ ID NO: 164437 - RNA, 24 nt, Artificial Sequence
  Synthetic
auguuaguaauguuuuaauuauau

SEQ ID NO: 164438 - RNA, 18 nt, Artificial Sequence
  Synthetic
auauuuuaucuauuauau

SEQ ID NO: 164439 - RNA, 18 nt, Artificial Sequence
  Synthetic
uuuaaaacauuauuauau

SEQ ID NO: 164440 - RNA, 19 nt, Artificial Sequence
  Synthetic
uuuuaaaacauuauuauau

SEQ ID NO: 164441 - RNA, 20 nt, Artificial Sequence
  Synthetic
uuuuuaaaacauuauuauau

SEQ ID NO: 164442 - RNA, 18 nt, Artificial Sequence
  Synthetic
aauuaaugaaauuuauau

SEQ ID NO: 164443 - RNA, 19 nt, Artificial Sequence
  Synthetic
aaauuaaugaaauuuauau

SEQ ID NO: 164444 - RNA, 18 nt, Artificial Sequence
  Synthetic
agauaaacauguuuauau

SEQ ID NO: 164445 - RNA, 20 nt, Artificial Sequence
  Synthetic
ugagauaaacauguuuauau

SEQ ID NO: 164446 - RNA, 21 nt, Artificial Sequence
  Synthetic
augagauaaacauguuuauau

SEQ ID NO: 164447 - RNA, 22 nt, Artificial Sequence
  Synthetic
uaugagauaaacauguuuauau

SEQ ID NO: 164448 - RNA, 23 nt, Artificial Sequence
  Synthetic
auaugagauaaacauguuuauau

SEQ ID NO: 164449 - RNA, 24 nt, Artificial Sequence
  Synthetic
uauaugagauaaacauguuuauau

SEQ ID NO: 164450 - RNA, 18 nt, Artificial Sequence
  Synthetic
augagaaaaagaaacuau

SEQ ID NO: 164451 - RNA, 19 nt, Artificial Sequence
  Synthetic
uaugagaaaaagaaacuau

SEQ ID NO: 164452 - RNA, 20 nt, Artificial Sequence
  Synthetic
cuaugagaaaaagaaacuau

SEQ ID NO: 164453 - RNA, 18 nt, Artificial Sequence
  Synthetic
caaaaacuaucagacuau

SEQ ID NO: 164454 - RNA, 19 nt, Artificial Sequence
  Synthetic
acaaaaacuaucagacuau

SEQ ID NO: 164455 - RNA, 20 nt, Artificial Sequence
  Synthetic
aacaaaaacuaucagacuau

SEQ ID NO: 164456 - RNA, 18 nt, Artificial Sequence
  Synthetic
acacaugcuagggacuau

SEQ ID NO: 164457 - RNA, 19 nt, Artificial Sequence
  Synthetic
aacacaugcuagggacuau

SEQ ID NO: 164458 - RNA, 20 nt, Artificial Sequence
  Synthetic
caacacaugcuagggacuau

SEQ ID NO: 164459 - RNA, 21 nt, Artificial Sequence
  Synthetic
acaacacaugcuagggacuau

SEQ ID NO: 164460 - RNA, 22 nt, Artificial Sequence
  Synthetic
aacaacacaugcuagggacuau

SEQ ID NO: 164461 - RNA, 18 nt, Artificial Sequence
  Synthetic
uauuauuauuauuacuau

SEQ ID NO: 164462 - RNA, 19 nt, Artificial Sequence
  Synthetic
uuauuauuauuauuacuau

SEQ ID NO: 164463 - RNA, 20 nt, Artificial Sequence
  Synthetic
auuauuauuauuauuacuau

SEQ ID NO: 164464 - RNA, 21 nt, Artificial Sequence
  Synthetic
aauuauuauuauuauuacuau

SEQ ID NO: 164465 - RNA, 22 nt, Artificial Sequence
  Synthetic
uaauuauuauuauuauuacuau

SEQ ID NO: 164466 - RNA, 23 nt, Artificial Sequence
  Synthetic
auaauuauuauuauuauuacuau

SEQ ID NO: 164467 - RNA, 24 nt, Artificial Sequence
  Synthetic
aauaauuauuauuauuauuacuau

SEQ ID NO: 164468 - RNA, 18 nt, Artificial Sequence
  Synthetic
acccucaugaaugccuau

SEQ ID NO: 164469 - RNA, 19 nt, Artificial Sequence
  Synthetic
aacccucaugaaugccuau

SEQ ID NO: 164470 - RNA, 20 nt, Artificial Sequence
  Synthetic
caacccucaugaaugccuau

SEQ ID NO: 164471 - RNA, 21 nt, Artificial Sequence
  Synthetic
ccaacccucaugaaugccuau

SEQ ID NO: 164472 - RNA, 22 nt, Artificial Sequence
  Synthetic
uccaacccucaugaaugccuau

SEQ ID NO: 164473 - RNA, 23 nt, Artificial Sequence
  Synthetic
uuccaacccucaugaaugccuau

SEQ ID NO: 164474 - RNA, 24 nt, Artificial Sequence
  Synthetic
auuccaacccucaugaaugccuau

SEQ ID NO: 164475 - RNA, 18 nt, Artificial Sequence
  Synthetic
uucaggaaugaauccuau

SEQ ID NO: 164476 - RNA, 19 nt, Artificial Sequence
  Synthetic
cuucaggaaugaauccuau

SEQ ID NO: 164477 - RNA, 20 nt, Artificial Sequence
  Synthetic
ucuucaggaaugaauccuau

SEQ ID NO: 164478 - RNA, 18 nt, Artificial Sequence
  Synthetic
uaggguucgugauccuau

SEQ ID NO: 164479 - RNA, 19 nt, Artificial Sequence
  Synthetic
auaggguucgugauccuau

SEQ ID NO: 164480 - RNA, 20 nt, Artificial Sequence
  Synthetic
aauaggguucgugauccuau

SEQ ID NO: 164481 - RNA, 21 nt, Artificial Sequence
  Synthetic
caauaggguucgugauccuau

SEQ ID NO: 164482 - RNA, 22 nt, Artificial Sequence
  Synthetic
acaauaggguucgugauccuau

SEQ ID NO: 164483 - RNA, 23 nt, Artificial Sequence
  Synthetic
cacaauaggguucgugauccuau

SEQ ID NO: 164484 - RNA, 24 nt, Artificial Sequence
  Synthetic
ucacaauaggguucgugauccuau

SEQ ID NO: 164485 - RNA, 18 nt, Artificial Sequence
  Synthetic
uaggguuugugcuccuau

SEQ ID NO: 164486 - RNA, 19 nt, Artificial Sequence
  Synthetic
auaggguuugugcuccuau

SEQ ID NO: 164487 - RNA, 20 nt, Artificial Sequence
  Synthetic
aauaggguuugugcuccuau

SEQ ID NO: 164488 - RNA, 21 nt, Artificial Sequence
  Synthetic
caauaggguuugugcuccuau

SEQ ID NO: 164489 - RNA, 22 nt, Artificial Sequence
  Synthetic
acaauaggguuugugcuccuau

SEQ ID NO: 164490 - RNA, 23 nt, Artificial Sequence
  Synthetic
cacaauaggguuugugcuccuau

SEQ ID NO: 164491 - RNA, 24 nt, Artificial Sequence
  Synthetic
ucacaauaggguuugugcuccuau

SEQ ID NO: 164492 - RNA, 20 nt, Artificial Sequence
  Synthetic
agggaaggacucaguccuau

SEQ ID NO: 164493 - RNA, 21 nt, Artificial Sequence
  Synthetic
aagggaaggacucaguccuau

SEQ ID NO: 164494 - RNA, 22 nt, Artificial Sequence
  Synthetic
aaagggaaggacucaguccuau

SEQ ID NO: 164495 - RNA, 23 nt, Artificial Sequence
  Synthetic
uaaagggaaggacucaguccuau

SEQ ID NO: 164496 - RNA, 24 nt, Artificial Sequence
  Synthetic
uuaaagggaaggacucaguccuau

SEQ ID NO: 164497 - RNA, 20 nt, Artificial Sequence
  Synthetic
cugacuuccucucuuccuau

SEQ ID NO: 164498 - RNA, 21 nt, Artificial Sequence
  Synthetic
ucugacuuccucucuuccuau

SEQ ID NO: 164499 - RNA, 22 nt, Artificial Sequence
  Synthetic
aucugacuuccucucuuccuau

SEQ ID NO: 164500 - RNA, 23 nt, Artificial Sequence
  Synthetic
aaucugacuuccucucuuccuau

SEQ ID NO: 164501 - RNA, 24 nt, Artificial Sequence
  Synthetic
caaucugacuuccucucuuccuau

SEQ ID NO: 164502 - RNA, 18 nt, Artificial Sequence
  Synthetic
aagugggagcuaagcuau

SEQ ID NO: 164503 - RNA, 19 nt, Artificial Sequence
  Synthetic
uaagugggagcuaagcuau

SEQ ID NO: 164504 - RNA, 21 nt, Artificial Sequence
  Synthetic
cguaagugggagcuaagcuau

SEQ ID NO: 164505 - RNA, 22 nt, Artificial Sequence
  Synthetic
ucguaagugggagcuaagcuau

SEQ ID NO: 164506 - RNA, 23 nt, Artificial Sequence
  Synthetic
cucguaagugggagcuaagcuau

SEQ ID NO: 164507 - RNA, 24 nt, Artificial Sequence
  Synthetic
acucguaagugggagcuaagcuau

SEQ ID NO: 164508 - RNA, 18 nt, Artificial Sequence
  Synthetic
acgugggagcuaagcuau

SEQ ID NO: 164509 - RNA, 19 nt, Artificial Sequence
  Synthetic
uacgugggagcuaagcuau

SEQ ID NO: 164510 - RNA, 20 nt, Artificial Sequence
  Synthetic
auacgugggagcuaagcuau

SEQ ID NO: 164511 - RNA, 22 nt, Artificial Sequence
  Synthetic
ugauacgugggagcuaagcuau

SEQ ID NO: 164512 - RNA, 23 nt, Artificial Sequence
  Synthetic
cugauacgugggagcuaagcuau

SEQ ID NO: 164513 - RNA, 24 nt, Artificial Sequence
  Synthetic
acugauacgugggagcuaagcuau

SEQ ID NO: 164514 - RNA, 18 nt, Artificial Sequence
  Synthetic
auuuuuuuuaaaggcuau

SEQ ID NO: 164515 - RNA, 20 nt, Artificial Sequence
  Synthetic
ugauuuuuuuuaaaggcuau

SEQ ID NO: 164516 - RNA, 18 nt, Artificial Sequence
  Synthetic
aaaugucucuaaugcuau

SEQ ID NO: 164517 - RNA, 19 nt, Artificial Sequence
  Synthetic
caaaugucucuaaugcuau

SEQ ID NO: 164518 - RNA, 20 nt, Artificial Sequence
  Synthetic
ccaaaugucucuaaugcuau

SEQ ID NO: 164519 - RNA, 21 nt, Artificial Sequence
  Synthetic
aaauacauggauuaaaaguau

SEQ ID NO: 164520 - RNA, 22 nt, Artificial Sequence
  Synthetic
uaaauacauggauuaaaaguau

SEQ ID NO: 164521 - RNA, 23 nt, Artificial Sequence
  Synthetic
auaaauacauggauuaaaaguau

SEQ ID NO: 164522 - RNA, 24 nt, Artificial Sequence
  Synthetic
aauaaauacauggauuaaaaguau

SEQ ID NO: 164523 - RNA, 18 nt, Artificial Sequence
  Synthetic
uaaacaugaacaaaguau

SEQ ID NO: 164524 - RNA, 19 nt, Artificial Sequence
  Synthetic
uuaaacaugaacaaaguau

SEQ ID NO: 164525 - RNA, 20 nt, Artificial Sequence
  Synthetic
uuuaaacaugaacaaaguau

SEQ ID NO: 164526 - RNA, 21 nt, Artificial Sequence
  Synthetic
auuuaaacaugaacaaaguau

SEQ ID NO: 164527 - RNA, 22 nt, Artificial Sequence
  Synthetic
aauuuaaacaugaacaaaguau

SEQ ID NO: 164528 - RNA, 23 nt, Artificial Sequence
  Synthetic
aaauuuaaacaugaacaaaguau

SEQ ID NO: 164529 - RNA, 24 nt, Artificial Sequence
  Synthetic
aaaauuuaaacaugaacaaaguau

SEQ ID NO: 164530 - RNA, 19 nt, Artificial Sequence
  Synthetic
agagugaauuuuaaaguau

SEQ ID NO: 164531 - RNA, 20 nt, Artificial Sequence
  Synthetic
aagagugaauuuuaaaguau

SEQ ID NO: 164532 - RNA, 21 nt, Artificial Sequence
  Synthetic
aaagagugaauuuuaaaguau

SEQ ID NO: 164533 - RNA, 23 nt, Artificial Sequence
  Synthetic
ugaaagagugaauuuuaaaguau

SEQ ID NO: 164534 - RNA, 24 nt, Artificial Sequence
  Synthetic
uugaaagagugaauuuuaaaguau

SEQ ID NO: 164535 - RNA, 19 nt, Artificial Sequence
  Synthetic
agcuuuuuuuccccaguau

SEQ ID NO: 164536 - RNA, 20 nt, Artificial Sequence
  Synthetic
aagcuuuuuuuccccaguau

SEQ ID NO: 164537 - RNA, 21 nt, Artificial Sequence
  Synthetic
caagcuuuuuuuccccaguau

SEQ ID NO: 164538 - RNA, 23 nt, Artificial Sequence
  Synthetic
ugcaagcuuuuuuuccccaguau

SEQ ID NO: 164539 - RNA, 18 nt, Artificial Sequence
  Synthetic
aucucugucuccuaguau

SEQ ID NO: 164540 - RNA, 20 nt, Artificial Sequence
  Synthetic
ugaucucugucuccuaguau

SEQ ID NO: 164541 - RNA, 18 nt, Artificial Sequence
  Synthetic
ugucuauuauuggcguau

SEQ ID NO: 164542 - RNA, 19 nt, Artificial Sequence
  Synthetic
uugucuauuauuggcguau

SEQ ID NO: 164543 - RNA, 20 nt, Artificial Sequence
  Synthetic
uuugucuauuauuggcguau

SEQ ID NO: 164544 - RNA, 21 nt, Artificial Sequence
  Synthetic
cuuugucuauuauuggcguau

SEQ ID NO: 164545 - RNA, 22 nt, Artificial Sequence
  Synthetic
ucuuugucuauuauuggcguau

SEQ ID NO: 164546 - RNA, 23 nt, Artificial Sequence
  Synthetic
cucuuugucuauuauuggcguau

SEQ ID NO: 164547 - RNA, 24 nt, Artificial Sequence
  Synthetic
ucucuuugucuauuauuggcguau

SEQ ID NO: 164548 - RNA, 18 nt, Artificial Sequence
  Synthetic
auuuauaaaugaagguau

SEQ ID NO: 164549 - RNA, 19 nt, Artificial Sequence
  Synthetic
uauuuauaaaugaagguau

SEQ ID NO: 164550 - RNA, 20 nt, Artificial Sequence
  Synthetic
auauuuauaaaugaagguau

SEQ ID NO: 164551 - RNA, 18 nt, Artificial Sequence
  Synthetic
aaaaaauccuucagguau

SEQ ID NO: 164552 - RNA, 19 nt, Artificial Sequence
  Synthetic
aaaaaaauccuucagguau

SEQ ID NO: 164553 - RNA, 20 nt, Artificial Sequence
  Synthetic
aaaaaaaauccuucagguau

SEQ ID NO: 164554 - RNA, 19 nt, Artificial Sequence
  Synthetic
agaauggagugguggguau

SEQ ID NO: 164555 - RNA, 20 nt, Artificial Sequence
  Synthetic
cagaauggagugguggguau

SEQ ID NO: 164556 - RNA, 21 nt, Artificial Sequence
  Synthetic
uuuaaaugaguuuaaugguau

SEQ ID NO: 164557 - RNA, 22 nt, Artificial Sequence
  Synthetic
cuuuaaaugaguuuaaugguau

SEQ ID NO: 164558 - RNA, 23 nt, Artificial Sequence
  Synthetic
acuuuaaaugaguuuaaugguau

SEQ ID NO: 164559 - RNA, 24 nt, Artificial Sequence
  Synthetic
cacuuuaaaugaguuuaaugguau

SEQ ID NO: 164560 - RNA, 18 nt, Artificial Sequence
  Synthetic
caaugccccucaugguau

SEQ ID NO: 164561 - RNA, 19 nt, Artificial Sequence
  Synthetic
ccaaugccccucaugguau

SEQ ID NO: 164562 - RNA, 20 nt, Artificial Sequence
  Synthetic
accaaugccccucaugguau

SEQ ID NO: 164563 - RNA, 18 nt, Artificial Sequence
  Synthetic
ucugccagguuuugguau

SEQ ID NO: 164564 - RNA, 19 nt, Artificial Sequence
  Synthetic
cucugccagguuuugguau

SEQ ID NO: 164565 - RNA, 20 nt, Artificial Sequence
  Synthetic
ucucugccagguuuugguau

SEQ ID NO: 164566 - RNA, 22 nt, Artificial Sequence
  Synthetic
ugucucugccagguuuugguau

SEQ ID NO: 164567 - RNA, 24 nt, Artificial Sequence
  Synthetic
ugugucucugccagguuuugguau

SEQ ID NO: 164568 - RNA, 18 nt, Artificial Sequence
  Synthetic
cuaauucugggcauguau

SEQ ID NO: 164569 - RNA, 19 nt, Artificial Sequence
  Synthetic
ucuaauucugggcauguau

SEQ ID NO: 164570 - RNA, 20 nt, Artificial Sequence
  Synthetic
uucuaauucugggcauguau

SEQ ID NO: 164571 - RNA, 21 nt, Artificial Sequence
  Synthetic
auucuaauucugggcauguau

SEQ ID NO: 164572 - RNA, 22 nt, Artificial Sequence
  Synthetic
uauucuaauucugggcauguau

SEQ ID NO: 164573 - RNA, 24 nt, Artificial Sequence
  Synthetic
aguauucuaauucugggcauguau

SEQ ID NO: 164574 - RNA, 18 nt, Artificial Sequence
  Synthetic
aaaaagauguuacuguau

SEQ ID NO: 164575 - RNA, 19 nt, Artificial Sequence
  Synthetic
aaaaaagauguuacuguau

SEQ ID NO: 164576 - RNA, 20 nt, Artificial Sequence
  Synthetic
uaaaaaagauguuacuguau

SEQ ID NO: 164577 - RNA, 19 nt, Artificial Sequence
  Synthetic
agccagagcucuccuguau

SEQ ID NO: 164578 - RNA, 20 nt, Artificial Sequence
  Synthetic
cagccagagcucuccuguau

SEQ ID NO: 164579 - RNA, 21 nt, Artificial Sequence
  Synthetic
ccagccagagcucuccuguau

SEQ ID NO: 164580 - RNA, 23 nt, Artificial Sequence
  Synthetic
ugccagccagagcucuccuguau

SEQ ID NO: 164581 - RNA, 24 nt, Artificial Sequence
  Synthetic
augccagccagagcucuccuguau

SEQ ID NO: 164582 - RNA, 22 nt, Artificial Sequence
  Synthetic
uguuugucuguuguugguguau

SEQ ID NO: 164583 - RNA, 23 nt, Artificial Sequence
  Synthetic
cuguuugucuguuguugguguau

SEQ ID NO: 164584 - RNA, 24 nt, Artificial Sequence
  Synthetic
ucuguuugucuguuguugguguau

SEQ ID NO: 164585 - RNA, 18 nt, Artificial Sequence
  Synthetic
aggaaguacaauuuguau

SEQ ID NO: 164586 - RNA, 19 nt, Artificial Sequence
  Synthetic
caggaaguacaauuuguau

SEQ ID NO: 164587 - RNA, 20 nt, Artificial Sequence
  Synthetic
ccaggaaguacaauuuguau

SEQ ID NO: 164588 - RNA, 18 nt, Artificial Sequence
  Synthetic
cuguuuuacuuuuuguau

SEQ ID NO: 164589 - RNA, 20 nt, Artificial Sequence
  Synthetic
ugcuguuuuacuuuuuguau

SEQ ID NO: 164590 - RNA, 18 nt, Artificial Sequence
  Synthetic
aaacaaaccuaaaauuau

SEQ ID NO: 164591 - RNA, 20 nt, Artificial Sequence
  Synthetic
agaaacaaaccuaaaauuau

SEQ ID NO: 164592 - RNA, 21 nt, Artificial Sequence
  Synthetic
aaacauuagaucucaaauuau

SEQ ID NO: 164593 - RNA, 22 nt, Artificial Sequence
  Synthetic
uaaacauuagaucucaaauuau

SEQ ID NO: 164594 - RNA, 23 nt, Artificial Sequence
  Synthetic
uuaaacauuagaucucaaauuau

SEQ ID NO: 164595 - RNA, 24 nt, Artificial Sequence
  Synthetic
uuuaaacauuagaucucaaauuau

SEQ ID NO: 164596 - RNA, 18 nt, Artificial Sequence
  Synthetic
acaacaaguaggaauuau

SEQ ID NO: 164597 - RNA, 19 nt, Artificial Sequence
  Synthetic
cacaacaaguaggaauuau

SEQ ID NO: 164598 - RNA, 20 nt, Artificial Sequence
  Synthetic
ccacaacaaguaggaauuau

SEQ ID NO: 164599 - RNA, 21 nt, Artificial Sequence
  Synthetic
cccacaacaaguaggaauuau

SEQ ID NO: 164600 - RNA, 22 nt, Artificial Sequence
  Synthetic
ucccacaacaaguaggaauuau

SEQ ID NO: 164601 - RNA, 23 nt, Artificial Sequence
  Synthetic
cucccacaacaaguaggaauuau

SEQ ID NO: 164602 - RNA, 24 nt, Artificial Sequence
  Synthetic
ccucccacaacaaguaggaauuau

SEQ ID NO: 164603 - RNA, 21 nt, Artificial Sequence
  Synthetic
uaaugugaaaacuaagauuau

SEQ ID NO: 164604 - RNA, 22 nt, Artificial Sequence
  Synthetic
auaaugugaaaacuaagauuau

SEQ ID NO: 164605 - RNA, 23 nt, Artificial Sequence
  Synthetic
aauaaugugaaaacuaagauuau

SEQ ID NO: 164606 - RNA, 24 nt, Artificial Sequence
  Synthetic
aaauaaugugaaaacuaagauuau

SEQ ID NO: 164607 - RNA, 18 nt, Artificial Sequence
  Synthetic
aaggaaauagaauauuau

SEQ ID NO: 164608 - RNA, 20 nt, Artificial Sequence
  Synthetic
agaaggaaauagaauauuau

SEQ ID NO: 164609 - RNA, 18 nt, Artificial Sequence
  Synthetic
uuuuaaaaugaauauuau

SEQ ID NO: 164610 - RNA, 19 nt, Artificial Sequence
  Synthetic
uuuuuaaaaugaauauuau

SEQ ID NO: 164611 - RNA, 20 nt, Artificial Sequence
  Synthetic
auuuuuaaaaugaauauuau

SEQ ID NO: 164612 - RNA, 18 nt, Artificial Sequence
  Synthetic
auuuuuaacaucuauuau

SEQ ID NO: 164613 - RNA, 19 nt, Artificial Sequence
  Synthetic
uauuuuuaacaucuauuau

SEQ ID NO: 164614 - RNA, 20 nt, Artificial Sequence
  Synthetic
uuauuuuuaacaucuauuau

SEQ ID NO: 164615 - RNA, 19 nt, Artificial Sequence
  Synthetic
agagaaaacacauuauuau

SEQ ID NO: 164616 - RNA, 20 nt, Artificial Sequence
  Synthetic
cagagaaaacacauuauuau

SEQ ID NO: 164617 - RNA, 18 nt, Artificial Sequence
  Synthetic
agguaccaugcuuauuau

SEQ ID NO: 164618 - RNA, 19 nt, Artificial Sequence
  Synthetic
cagguaccaugcuuauuau

SEQ ID NO: 164619 - RNA, 20 nt, Artificial Sequence
  Synthetic
ucagguaccaugcuuauuau

SEQ ID NO: 164620 - RNA, 21 nt, Artificial Sequence
  Synthetic
aucagguaccaugcuuauuau

SEQ ID NO: 164621 - RNA, 22 nt, Artificial Sequence
  Synthetic
uaucagguaccaugcuuauuau

SEQ ID NO: 164622 - RNA, 23 nt, Artificial Sequence
  Synthetic
cuaucagguaccaugcuuauuau

SEQ ID NO: 164623 - RNA, 24 nt, Artificial Sequence
  Synthetic
ccuaucagguaccaugcuuauuau

SEQ ID NO: 164624 - RNA, 18 nt, Artificial Sequence
  Synthetic
caagugcaauuuuauuau

SEQ ID NO: 164625 - RNA, 19 nt, Artificial Sequence
  Synthetic
acaagugcaauuuuauuau

SEQ ID NO: 164626 - RNA, 20 nt, Artificial Sequence
  Synthetic
uacaagugcaauuuuauuau

SEQ ID NO: 164627 - RNA, 18 nt, Artificial Sequence
  Synthetic
acauuuauuuuuacuuau

SEQ ID NO: 164628 - RNA, 19 nt, Artificial Sequence
  Synthetic
uacauuuauuuuuacuuau

SEQ ID NO: 164629 - RNA, 20 nt, Artificial Sequence
  Synthetic
uuacauuuauuuuuacuuau

SEQ ID NO: 164630 - RNA, 18 nt, Artificial Sequence
  Synthetic
uucgagcguuuuucuuau

SEQ ID NO: 164631 - RNA, 19 nt, Artificial Sequence
  Synthetic
auucgagcguuuuucuuau

SEQ ID NO: 164632 - RNA, 20 nt, Artificial Sequence
  Synthetic
aauucgagcguuuuucuuau

SEQ ID NO: 164633 - RNA, 21 nt, Artificial Sequence
  Synthetic
aaauucgagcguuuuucuuau

SEQ ID NO: 164634 - RNA, 22 nt, Artificial Sequence
  Synthetic
caaauucgagcguuuuucuuau

SEQ ID NO: 164635 - RNA, 24 nt, Artificial Sequence
  Synthetic
agcaaauucgagcguuuuucuuau

SEQ ID NO: 164636 - RNA, 18 nt, Artificial Sequence
  Synthetic
uaaaacagacacaguuau

SEQ ID NO: 164637 - RNA, 19 nt, Artificial Sequence
  Synthetic
uuaaaacagacacaguuau

SEQ ID NO: 164638 - RNA, 20 nt, Artificial Sequence
  Synthetic
auuaaaacagacacaguuau

SEQ ID NO: 164639 - RNA, 18 nt, Artificial Sequence
  Synthetic
cucugaacuuccaguuau

SEQ ID NO: 164640 - RNA, 19 nt, Artificial Sequence
  Synthetic
ccucugaacuuccaguuau

SEQ ID NO: 164641 - RNA, 20 nt, Artificial Sequence
  Synthetic
accucugaacuuccaguuau

SEQ ID NO: 164642 - RNA, 18 nt, Artificial Sequence
  Synthetic
auuucacaggguuguuau

SEQ ID NO: 164643 - RNA, 19 nt, Artificial Sequence
  Synthetic
uauuucacaggguuguuau

SEQ ID NO: 164644 - RNA, 20 nt, Artificial Sequence
  Synthetic
auauuucacaggguuguuau

SEQ ID NO: 164645 - RNA, 21 nt, Artificial Sequence
  Synthetic
uauauuucacaggguuguuau

SEQ ID NO: 164646 - RNA, 22 nt, Artificial Sequence
  Synthetic
auauauuucacaggguuguuau

SEQ ID NO: 164647 - RNA, 23 nt, Artificial Sequence
  Synthetic
uauauauuucacaggguuguuau

SEQ ID NO: 164648 - RNA, 24 nt, Artificial Sequence
  Synthetic
auauauauuucacaggguuguuau

SEQ ID NO: 164649 - RNA, 18 nt, Artificial Sequence
  Synthetic
uuuauuaacauaauuuau

SEQ ID NO: 164650 - RNA, 19 nt, Artificial Sequence
  Synthetic
auuuauuaacauaauuuau

SEQ ID NO: 164651 - RNA, 20 nt, Artificial Sequence
  Synthetic
aauuuauuaacauaauuuau

SEQ ID NO: 164652 - RNA, 18 nt, Artificial Sequence
  Synthetic
aucauaacuaacauuuau

SEQ ID NO: 164653 - RNA, 19 nt, Artificial Sequence
  Synthetic
aaucauaacuaacauuuau

SEQ ID NO: 164654 - RNA, 20 nt, Artificial Sequence
  Synthetic
aaaucauaacuaacauuuau

SEQ ID NO: 164655 - RNA, 21 nt, Artificial Sequence
  Synthetic
aaaaucauaacuaacauuuau

SEQ ID NO: 164656 - RNA, 22 nt, Artificial Sequence
  Synthetic
aaaaaucauaacuaacauuuau

SEQ ID NO: 164657 - RNA, 23 nt, Artificial Sequence
  Synthetic
uaaaaaucauaacuaacauuuau

SEQ ID NO: 164658 - RNA, 24 nt, Artificial Sequence
  Synthetic
auaaaaaucauaacuaacauuuau

SEQ ID NO: 164659 - RNA, 18 nt, Artificial Sequence
  Synthetic
acaaauuuucuucuuuau

SEQ ID NO: 164660 - RNA, 19 nt, Artificial Sequence
  Synthetic
aacaaauuuucuucuuuau

SEQ ID NO: 164661 - RNA, 20 nt, Artificial Sequence
  Synthetic
caacaaauuuucuucuuuau

SEQ ID NO: 164662 - RNA, 18 nt, Artificial Sequence
  Synthetic
uaaaaauuuuuucuuuau

SEQ ID NO: 164663 - RNA, 19 nt, Artificial Sequence
  Synthetic
auaaaaauuuuuucuuuau

SEQ ID NO: 164664 - RNA, 20 nt, Artificial Sequence
  Synthetic
aauaaaaauuuuuucuuuau

SEQ ID NO: 164665 - RNA, 18 nt, Artificial Sequence
  Synthetic
agagauaauuaaguuuau

SEQ ID NO: 164666 - RNA, 19 nt, Artificial Sequence
  Synthetic
aagagauaauuaaguuuau

SEQ ID NO: 164667 - RNA, 20 nt, Artificial Sequence
  Synthetic
aaagagauaauuaaguuuau

SEQ ID NO: 164668 - RNA, 18 nt, Artificial Sequence
  Synthetic
aacuuacaauggguuuau

SEQ ID NO: 164669 - RNA, 19 nt, Artificial Sequence
  Synthetic
caacuuacaauggguuuau

SEQ ID NO: 164670 - RNA, 20 nt, Artificial Sequence
  Synthetic
ucaacuuacaauggguuuau

SEQ ID NO: 164671 - RNA, 21 nt, Artificial Sequence
  Synthetic
cucaacuuacaauggguuuau

SEQ ID NO: 164672 - RNA, 22 nt, Artificial Sequence
  Synthetic
ucucaacuuacaauggguuuau

SEQ ID NO: 164673 - RNA, 23 nt, Artificial Sequence
  Synthetic
uucucaacuuacaauggguuuau

SEQ ID NO: 164674 - RNA, 24 nt, Artificial Sequence
  Synthetic
auucucaacuuacaauggguuuau

SEQ ID NO: 164675 - RNA, 18 nt, Artificial Sequence
  Synthetic
cuuuccuuuauuguuuau

SEQ ID NO: 164676 - RNA, 19 nt, Artificial Sequence
  Synthetic
acuuuccuuuauuguuuau

SEQ ID NO: 164677 - RNA, 20 nt, Artificial Sequence
  Synthetic
cacuuuccuuuauuguuuau

SEQ ID NO: 164678 - RNA, 22 nt, Artificial Sequence
  Synthetic
ugcugcgugaagccuuguuuau

SEQ ID NO: 164679 - RNA, 23 nt, Artificial Sequence
  Synthetic
augcugcgugaagccuuguuuau

SEQ ID NO: 164680 - RNA, 24 nt, Artificial Sequence
  Synthetic
aaugcugcgugaagccuuguuuau

SEQ ID NO: 164681 - RNA, 18 nt, Artificial Sequence
  Synthetic
uauccucaucuauuuuau

SEQ ID NO: 164682 - RNA, 19 nt, Artificial Sequence
  Synthetic
uuauccucaucuauuuuau

SEQ ID NO: 164683 - RNA, 20 nt, Artificial Sequence
  Synthetic
cuuauccucaucuauuuuau

SEQ ID NO: 164684 - RNA, 18 nt, Artificial Sequence
  Synthetic
uuaaaaauaaaguuuuau

SEQ ID NO: 164685 - RNA, 19 nt, Artificial Sequence
  Synthetic
uuuaaaaauaaaguuuuau

SEQ ID NO: 164686 - RNA, 21 nt, Artificial Sequence
  Synthetic
aguuuaaaaauaaaguuuuau

SEQ ID NO: 164687 - RNA, 22 nt, Artificial Sequence
  Synthetic
uaguuuaaaaauaaaguuuuau

SEQ ID NO: 164688 - RNA, 24 nt, Artificial Sequence
  Synthetic
uguaguuuaaaaauaaaguuuuau

SEQ ID NO: 164689 - RNA, 18 nt, Artificial Sequence
  Synthetic
aaaaucugaugguuuuau

SEQ ID NO: 164690 - RNA, 19 nt, Artificial Sequence
  Synthetic
caaaaucugaugguuuuau

SEQ ID NO: 164691 - RNA, 20 nt, Artificial Sequence
  Synthetic
ccaaaaucugaugguuuuau

SEQ ID NO: 164692 - RNA, 21 nt, Artificial Sequence
  Synthetic
cccaaaaucugaugguuuuau

SEQ ID NO: 164693 - RNA, 22 nt, Artificial Sequence
  Synthetic
ucccaaaaucugaugguuuuau

SEQ ID NO: 164694 - RNA, 23 nt, Artificial Sequence
  Synthetic
cucccaaaaucugaugguuuuau

SEQ ID NO: 164695 - RNA, 24 nt, Artificial Sequence
  Synthetic
ucucccaaaaucugaugguuuuau

SEQ ID NO: 164696 - RNA, 18 nt, Artificial Sequence
  Synthetic
aaaucaaagauaaaaacu

SEQ ID NO: 164697 - RNA, 19 nt, Artificial Sequence
  Synthetic
caaaucaaagauaaaaacu

SEQ ID NO: 164698 - RNA, 20 nt, Artificial Sequence
  Synthetic
ucaaaucaaagauaaaaacu

SEQ ID NO: 164699 - RNA, 18 nt, Artificial Sequence
  Synthetic
acuggggaaagcaaaacu

SEQ ID NO: 164700 - RNA, 19 nt, Artificial Sequence
  Synthetic
aacuggggaaagcaaaacu

SEQ ID NO: 164701 - RNA, 20 nt, Artificial Sequence
  Synthetic
aaacuggggaaagcaaaacu

SEQ ID NO: 164702 - RNA, 22 nt, Artificial Sequence
  Synthetic
ugaaacuggggaaagcaaaacu

SEQ ID NO: 164703 - RNA, 23 nt, Artificial Sequence
  Synthetic
cugaaacuggggaaagcaaaacu

SEQ ID NO: 164704 - RNA, 24 nt, Artificial Sequence
  Synthetic
acugaaacuggggaaagcaaaacu

SEQ ID NO: 164705 - RNA, 18 nt, Artificial Sequence
  Synthetic
aaaaacacacaacaaacu

SEQ ID NO: 164706 - RNA, 19 nt, Artificial Sequence
  Synthetic
uaaaaacacacaacaaacu

SEQ ID NO: 164707 - RNA, 20 nt, Artificial Sequence
  Synthetic
auaaaaacacacaacaaacu

SEQ ID NO: 164708 - RNA, 22 nt, Artificial Sequence
  Synthetic
ugauaaaaacacacaacaaacu

SEQ ID NO: 164709 - RNA, 23 nt, Artificial Sequence
  Synthetic
augauaaaaacacacaacaaacu

SEQ ID NO: 164710 - RNA, 24 nt, Artificial Sequence
  Synthetic
caugauaaaaacacacaacaaacu

SEQ ID NO: 164711 - RNA, 18 nt, Artificial Sequence
  Synthetic
uuuucuucucugcaaacu

SEQ ID NO: 164712 - RNA, 20 nt, Artificial Sequence
  Synthetic
aguuuucuucucugcaaacu

SEQ ID NO: 164713 - RNA, 21 nt, Artificial Sequence
  Synthetic
caguuuucuucucugcaaacu

SEQ ID NO: 164714 - RNA, 22 nt, Artificial Sequence
  Synthetic
ucaguuuucuucucugcaaacu

SEQ ID NO: 164715 - RNA, 23 nt, Artificial Sequence
  Synthetic
uucaguuuucuucucugcaaacu

SEQ ID NO: 164716 - RNA, 24 nt, Artificial Sequence
  Synthetic
cuucaguuuucuucucugcaaacu

SEQ ID NO: 164717 - RNA, 21 nt, Artificial Sequence
  Synthetic
uccuucucaugcucucaaacu

SEQ ID NO: 164718 - RNA, 22 nt, Artificial Sequence
  Synthetic
uuccuucucaugcucucaaacu

SEQ ID NO: 164719 - RNA, 23 nt, Artificial Sequence
  Synthetic
uuuccuucucaugcucucaaacu

SEQ ID NO: 164720 - RNA, 24 nt, Artificial Sequence
  Synthetic
uuuuccuucucaugcucucaaacu

SEQ ID NO: 164721 - RNA, 18 nt, Artificial Sequence
  Synthetic
aagagcgagagagaaacu

SEQ ID NO: 164722 - RNA, 19 nt, Artificial Sequence
  Synthetic
aaagagcgagagagaaacu

SEQ ID NO: 164723 - RNA, 18 nt, Artificial Sequence
  Synthetic
uuaaaacaaaugacaacu

SEQ ID NO: 164724 - RNA, 19 nt, Artificial Sequence
  Synthetic
auuaaaacaaaugacaacu

SEQ ID NO: 164725 - RNA, 20 nt, Artificial Sequence
  Synthetic
aauuaaaacaaaugacaacu

SEQ ID NO: 164726 - RNA, 18 nt, Artificial Sequence
  Synthetic
cauccauaagcagcaacu

SEQ ID NO: 164727 - RNA, 19 nt, Artificial Sequence
  Synthetic
ucauccauaagcagcaacu

SEQ ID NO: 164728 - RNA, 20 nt, Artificial Sequence
  Synthetic
cucauccauaagcagcaacu

SEQ ID NO: 164729 - RNA, 22 nt, Artificial Sequence
  Synthetic
ugcucauccauaagcagcaacu

SEQ ID NO: 164730 - RNA, 23 nt, Artificial Sequence
  Synthetic
uugcucauccauaagcagcaacu

SEQ ID NO: 164731 - RNA, 24 nt, Artificial Sequence
  Synthetic
uuugcucauccauaagcagcaacu

SEQ ID NO: 164732 - RNA, 19 nt, Artificial Sequence
  Synthetic
cgacucacccagagcaacu

SEQ ID NO: 164733 - RNA, 20 nt, Artificial Sequence
  Synthetic
ccgacucacccagagcaacu

SEQ ID NO: 164734 - RNA, 21 nt, Artificial Sequence
  Synthetic
accgacucacccagagcaacu

SEQ ID NO: 164735 - RNA, 22 nt, Artificial Sequence
  Synthetic
caccgacucacccagagcaacu

SEQ ID NO: 164736 - RNA, 23 nt, Artificial Sequence
  Synthetic
ucaccgacucacccagagcaacu

SEQ ID NO: 164737 - RNA, 24 nt, Artificial Sequence
  Synthetic
cucaccgacucacccagagcaacu

SEQ ID NO: 164738 - RNA, 18 nt, Artificial Sequence
  Synthetic
uuccauaucuuugcaacu

SEQ ID NO: 164739 - RNA, 21 nt, Artificial Sequence
  Synthetic
ugguuccauaucuuugcaacu

SEQ ID NO: 164740 - RNA, 22 nt, Artificial Sequence
  Synthetic
augguuccauaucuuugcaacu

SEQ ID NO: 164741 - RNA, 19 nt, Artificial Sequence
  Synthetic
agaccagugauuuucaacu

SEQ ID NO: 164742 - RNA, 20 nt, Artificial Sequence
  Synthetic
uagaccagugauuuucaacu

SEQ ID NO: 164743 - RNA, 18 nt, Artificial Sequence
  Synthetic
uuuuuuuuuuuuucaacu

SEQ ID NO: 164744 - RNA, 19 nt, Artificial Sequence
  Synthetic
uuuuuuuuuuuuuucaacu

SEQ ID NO: 164745 - RNA, 20 nt, Artificial Sequence
  Synthetic
uuuuuuuuuuuuuuucaacu

SEQ ID NO: 164746 - RNA, 21 nt, Artificial Sequence
  Synthetic
uuuuuuuuuuuuuuuucaacu

SEQ ID NO: 164747 - RNA, 22 nt, Artificial Sequence
  Synthetic
uuuuuuuuuuuuuuuuucaacu

SEQ ID NO: 164748 - RNA, 24 nt, Artificial Sequence
  Synthetic
uguuuuuuuuuuuuuuuuucaacu

SEQ ID NO: 164749 - RNA, 18 nt, Artificial Sequence
  Synthetic
ccccagccacacagaacu

SEQ ID NO: 164750 - RNA, 19 nt, Artificial Sequence
  Synthetic
uccccagccacacagaacu

SEQ ID NO: 164751 - RNA, 20 nt, Artificial Sequence
  Synthetic
cuccccagccacacagaacu

SEQ ID NO: 164752 - RNA, 21 nt, Artificial Sequence
  Synthetic
ccuccccagccacacagaacu

SEQ ID NO: 164753 - RNA, 24 nt, Artificial Sequence
  Synthetic
aggccuccccagccacacagaacu

SEQ ID NO: 164754 - RNA, 18 nt, Artificial Sequence
  Synthetic
ugcaaucaaacuagaacu

SEQ ID NO: 164755 - RNA, 20 nt, Artificial Sequence
  Synthetic
agugcaaucaaacuagaacu

SEQ ID NO: 164756 - RNA, 21 nt, Artificial Sequence
  Synthetic
cagugcaaucaaacuagaacu

SEQ ID NO: 164757 - RNA, 22 nt, Artificial Sequence
  Synthetic
acagugcaaucaaacuagaacu

SEQ ID NO: 164758 - RNA, 23 nt, Artificial Sequence
  Synthetic
cacagugcaaucaaacuagaacu

SEQ ID NO: 164759 - RNA, 24 nt, Artificial Sequence
  Synthetic
ccacagugcaaucaaacuagaacu

SEQ ID NO: 164760 - RNA, 18 nt, Artificial Sequence
  Synthetic
aaaacugaaauaggaacu

SEQ ID NO: 164761 - RNA, 19 nt, Artificial Sequence
  Synthetic
caaaacugaaauaggaacu

SEQ ID NO: 164762 - RNA, 21 nt, Artificial Sequence
  Synthetic
agcaaaacugaaauaggaacu

SEQ ID NO: 164763 - RNA, 22 nt, Artificial Sequence
  Synthetic
aagcaaaacugaaauaggaacu

SEQ ID NO: 164764 - RNA, 23 nt, Artificial Sequence
  Synthetic
aaagcaaaacugaaauaggaacu

SEQ ID NO: 164765 - RNA, 18 nt, Artificial Sequence
  Synthetic
acccagccauguggaacu

SEQ ID NO: 164766 - RNA, 19 nt, Artificial Sequence
  Synthetic
uacccagccauguggaacu

SEQ ID NO: 164767 - RNA, 20 nt, Artificial Sequence
  Synthetic
cuacccagccauguggaacu

SEQ ID NO: 164768 - RNA, 21 nt, Artificial Sequence
  Synthetic
ccuacccagccauguggaacu

SEQ ID NO: 164769 - RNA, 24 nt, Artificial Sequence
  Synthetic
aggccuacccagccauguggaacu

SEQ ID NO: 164770 - RNA, 18 nt, Artificial Sequence
  Synthetic
ccccagccauguggaacu

SEQ ID NO: 164771 - RNA, 19 nt, Artificial Sequence
  Synthetic
uccccagccauguggaacu

SEQ ID NO: 164772 - RNA, 20 nt, Artificial Sequence
  Synthetic
cuccccagccauguggaacu

SEQ ID NO: 164773 - RNA, 21 nt, Artificial Sequence
  Synthetic
ccuccccagccauguggaacu

SEQ ID NO: 164774 - RNA, 24 nt, Artificial Sequence
  Synthetic
aggccuccccagccauguggaacu

SEQ ID NO: 164775 - RNA, 18 nt, Artificial Sequence
  Synthetic
cuccagccauguggaacu

SEQ ID NO: 164776 - RNA, 19 nt, Artificial Sequence
  Synthetic
ucuccagccauguggaacu

SEQ ID NO: 164777 - RNA, 20 nt, Artificial Sequence
  Synthetic
cucuccagccauguggaacu

SEQ ID NO: 164778 - RNA, 21 nt, Artificial Sequence
  Synthetic
ccucuccagccauguggaacu

SEQ ID NO: 164779 - RNA, 24 nt, Artificial Sequence
  Synthetic
aggccucuccagccauguggaacu

SEQ ID NO: 164780 - RNA, 21 nt, Artificial Sequence
  Synthetic
ccuccccagccaugcugaacu

SEQ ID NO: 164781 - RNA, 24 nt, Artificial Sequence
  Synthetic
aggccuccccagccaugcugaacu

SEQ ID NO: 164782 - RNA, 19 nt, Artificial Sequence
  Synthetic
uguuggauaguggugaacu

SEQ ID NO: 164783 - RNA, 20 nt, Artificial Sequence
  Synthetic
auguuggauaguggugaacu

SEQ ID NO: 164784 - RNA, 18 nt, Artificial Sequence
  Synthetic
ccccagccauauugaacu

SEQ ID NO: 164785 - RNA, 19 nt, Artificial Sequence
  Synthetic
uccccagccauauugaacu

SEQ ID NO: 164786 - RNA, 20 nt, Artificial Sequence
  Synthetic
cuccccagccauauugaacu

SEQ ID NO: 164787 - RNA, 21 nt, Artificial Sequence
  Synthetic
ccuccccagccauauugaacu

SEQ ID NO: 164788 - RNA, 24 nt, Artificial Sequence
  Synthetic
aggccuccccagccauauugaacu

SEQ ID NO: 164789 - RNA, 18 nt, Artificial Sequence
  Synthetic
uggaccagagaccacacu

SEQ ID NO: 164790 - RNA, 19 nt, Artificial Sequence
  Synthetic
cuggaccagagaccacacu

SEQ ID NO: 164791 - RNA, 20 nt, Artificial Sequence
  Synthetic
ucuggaccagagaccacacu

SEQ ID NO: 164792 - RNA, 18 nt, Artificial Sequence
  Synthetic
ccuguuucaucuuccacu

SEQ ID NO: 164793 - RNA, 19 nt, Artificial Sequence
  Synthetic
uccuguuucaucuuccacu

SEQ ID NO: 164794 - RNA, 20 nt, Artificial Sequence
  Synthetic
cuccuguuucaucuuccacu

SEQ ID NO: 164795 - RNA, 20 nt, Artificial Sequence
  Synthetic
ugggcaccauucuaggcacu

SEQ ID NO: 164796 - RNA, 18 nt, Artificial Sequence
  Synthetic
auaaauuugagagucacu

SEQ ID NO: 164797 - RNA, 19 nt, Artificial Sequence
  Synthetic
uauaaauuugagagucacu

SEQ ID NO: 164798 - RNA, 20 nt, Artificial Sequence
  Synthetic
auauaaauuugagagucacu

SEQ ID NO: 164799 - RNA, 22 nt, Artificial Sequence
  Synthetic
agauauaaauuugagagucacu

SEQ ID NO: 164800 - RNA, 24 nt, Artificial Sequence
  Synthetic
agagauauaaauuugagagucacu

SEQ ID NO: 164801 - RNA, 18 nt, Artificial Sequence
  Synthetic
uuccugcauuaauucacu

SEQ ID NO: 164802 - RNA, 20 nt, Artificial Sequence
  Synthetic
uguuccugcauuaauucacu

SEQ ID NO: 164803 - RNA, 21 nt, Artificial Sequence
  Synthetic
cuguuccugcauuaauucacu

SEQ ID NO: 164804 - RNA, 22 nt, Artificial Sequence
  Synthetic
ucuguuccugcauuaauucacu

SEQ ID NO: 164805 - RNA, 23 nt, Artificial Sequence
  Synthetic
uucuguuccugcauuaauucacu

SEQ ID NO: 164806 - RNA, 24 nt, Artificial Sequence
  Synthetic
uuucuguuccugcauuaauucacu

SEQ ID NO: 164807 - RNA, 18 nt, Artificial Sequence
  Synthetic
uuccugaauuacuucacu

SEQ ID NO: 164808 - RNA, 19 nt, Artificial Sequence
  Synthetic
auuccugaauuacuucacu

SEQ ID NO: 164809 - RNA, 20 nt, Artificial Sequence
  Synthetic
cauuccugaauuacuucacu

SEQ ID NO: 164810 - RNA, 21 nt, Artificial Sequence
  Synthetic
ccauuccugaauuacuucacu

SEQ ID NO: 164811 - RNA, 22 nt, Artificial Sequence
  Synthetic
uccauuccugaauuacuucacu

SEQ ID NO: 164812 - RNA, 23 nt, Artificial Sequence
  Synthetic
uuccauuccugaauuacuucacu

SEQ ID NO: 164813 - RNA, 24 nt, Artificial Sequence
  Synthetic
uuuccauuccugaauuacuucacu

SEQ ID NO: 164814 - RNA, 18 nt, Artificial Sequence
  Synthetic
ugccagauuucaaagacu

SEQ ID NO: 164815 - RNA, 19 nt, Artificial Sequence
  Synthetic
augccagauuucaaagacu

SEQ ID NO: 164816 - RNA, 20 nt, Artificial Sequence
  Synthetic
caugccagauuucaaagacu

SEQ ID NO: 164817 - RNA, 21 nt, Artificial Sequence
  Synthetic
acaugccagauuucaaagacu

SEQ ID NO: 164818 - RNA, 22 nt, Artificial Sequence
  Synthetic
cacaugccagauuucaaagacu

SEQ ID NO: 164819 - RNA, 23 nt, Artificial Sequence
  Synthetic
acacaugccagauuucaaagacu

SEQ ID NO: 164820 - RNA, 19 nt, Artificial Sequence
  Synthetic
ugugauguugaauaagacu

SEQ ID NO: 164821 - RNA, 18 nt, Artificial Sequence
  Synthetic
cuagagugaguuaagacu

SEQ ID NO: 164822 - RNA, 20 nt, Artificial Sequence
  Synthetic
ugcuagagugaguuaagacu

SEQ ID NO: 164823 - RNA, 21 nt, Artificial Sequence
  Synthetic
augcuagagugaguuaagacu

SEQ ID NO: 164824 - RNA, 22 nt, Artificial Sequence
  Synthetic
aaugcuagagugaguuaagacu

SEQ ID NO: 164825 - RNA, 23 nt, Artificial Sequence
  Synthetic
uaaugcuagagugaguuaagacu

SEQ ID NO: 164826 - RNA, 24 nt, Artificial Sequence
  Synthetic
uuaaugcuagagugaguuaagacu

SEQ ID NO: 164827 - RNA, 18 nt, Artificial Sequence
  Synthetic
cauuucaaucagcagacu

SEQ ID NO: 164828 - RNA, 19 nt, Artificial Sequence
  Synthetic
acauuucaaucagcagacu

SEQ ID NO: 164829 - RNA, 20 nt, Artificial Sequence
  Synthetic
aacauuucaaucagcagacu

SEQ ID NO: 164830 - RNA, 21 nt, Artificial Sequence
  Synthetic
uaacauuucaaucagcagacu

SEQ ID NO: 164831 - RNA, 22 nt, Artificial Sequence
  Synthetic
uuaacauuucaaucagcagacu

SEQ ID NO: 164832 - RNA, 23 nt, Artificial Sequence
  Synthetic
auuaacauuucaaucagcagacu

SEQ ID NO: 164833 - RNA, 18 nt, Artificial Sequence
  Synthetic
cccuagucaugugagacu

SEQ ID NO: 164834 - RNA, 19 nt, Artificial Sequence
  Synthetic
ucccuagucaugugagacu

SEQ ID NO: 164835 - RNA, 20 nt, Artificial Sequence
  Synthetic
cucccuagucaugugagacu

SEQ ID NO: 164836 - RNA, 21 nt, Artificial Sequence
  Synthetic
ccucccuagucaugugagacu

SEQ ID NO: 164837 - RNA, 24 nt, Artificial Sequence
  Synthetic
aggccucccuagucaugugagacu

SEQ ID NO: 164838 - RNA, 18 nt, Artificial Sequence
  Synthetic
caaauccuuagcuagacu

SEQ ID NO: 164839 - RNA, 19 nt, Artificial Sequence
  Synthetic
acaaauccuuagcuagacu

SEQ ID NO: 164840 - RNA, 21 nt, Artificial Sequence
  Synthetic
ugacaaauccuuagcuagacu

SEQ ID NO: 164841 - RNA, 22 nt, Artificial Sequence
  Synthetic
uugacaaauccuuagcuagacu

SEQ ID NO: 164842 - RNA, 23 nt, Artificial Sequence
  Synthetic
auugacaaauccuuagcuagacu

SEQ ID NO: 164843 - RNA, 24 nt, Artificial Sequence
  Synthetic
aauugacaaauccuuagcuagacu

SEQ ID NO: 164844 - RNA, 18 nt, Artificial Sequence
  Synthetic
cauuuuucucuuaggacu

SEQ ID NO: 164845 - RNA, 19 nt, Artificial Sequence
  Synthetic
acauuuuucucuuaggacu

SEQ ID NO: 164846 - RNA, 20 nt, Artificial Sequence
  Synthetic
cacauuuuucucuuaggacu

SEQ ID NO: 164847 - RNA, 18 nt, Artificial Sequence
  Synthetic
cccaaagccacagggacu

SEQ ID NO: 164848 - RNA, 19 nt, Artificial Sequence
  Synthetic
acccaaagccacagggacu

SEQ ID NO: 164849 - RNA, 20 nt, Artificial Sequence
  Synthetic
aacccaaagccacagggacu

SEQ ID NO: 164850 - RNA, 18 nt, Artificial Sequence
  Synthetic
uuagaagaaaaauggacu

SEQ ID NO: 164851 - RNA, 20 nt, Artificial Sequence
  Synthetic
aguuagaagaaaaauggacu

SEQ ID NO: 164852 - RNA, 21 nt, Artificial Sequence
  Synthetic
ugccagucagaggaccauacu

SEQ ID NO: 164853 - RNA, 22 nt, Artificial Sequence
  Synthetic
cugccagucagaggaccauacu

SEQ ID NO: 164854 - RNA, 24 nt, Artificial Sequence
  Synthetic
ugcugccagucagaggaccauacu

SEQ ID NO: 164855 - RNA, 21 nt, Artificial Sequence
  Synthetic
uuucauuucuucuucuauacu

SEQ ID NO: 164856 - RNA, 23 nt, Artificial Sequence
  Synthetic
aguuucauuucuucuucuauacu

SEQ ID NO: 164857 - RNA, 18 nt, Artificial Sequence
  Synthetic
auuuguugagagccuacu

SEQ ID NO: 164858 - RNA, 19 nt, Artificial Sequence
  Synthetic
uauuuguugagagccuacu

SEQ ID NO: 164859 - RNA, 20 nt, Artificial Sequence
  Synthetic
auauuuguugagagccuacu

SEQ ID NO: 164860 - RNA, 21 nt, Artificial Sequence
  Synthetic
aauauuuguugagagccuacu

SEQ ID NO: 164861 - RNA, 22 nt, Artificial Sequence
  Synthetic
aaauauuuguugagagccuacu

SEQ ID NO: 164862 - RNA, 23 nt, Artificial Sequence
  Synthetic
caaauauuuguugagagccuacu

SEQ ID NO: 164863 - RNA, 24 nt, Artificial Sequence
  Synthetic
acaaauauuuguugagagccuacu

SEQ ID NO: 164864 - RNA, 18 nt, Artificial Sequence
  Synthetic
auugauaucuuggcuacu

SEQ ID NO: 164865 - RNA, 19 nt, Artificial Sequence
  Synthetic
uauugauaucuuggcuacu

SEQ ID NO: 164866 - RNA, 18 nt, Artificial Sequence
  Synthetic
ccuguaguuccaucuacu

SEQ ID NO: 164867 - RNA, 20 nt, Artificial Sequence
  Synthetic
ugccuguaguuccaucuacu

SEQ ID NO: 164868 - RNA, 22 nt, Artificial Sequence
  Synthetic
ugugccuguaguuccaucuacu

SEQ ID NO: 164869 - RNA, 23 nt, Artificial Sequence
  Synthetic
augugccuguaguuccaucuacu

SEQ ID NO: 164870 - RNA, 24 nt, Artificial Sequence
  Synthetic
aaugugccuguaguuccaucuacu

SEQ ID NO: 164871 - RNA, 18 nt, Artificial Sequence
  Synthetic
auuuuugaaagaucuacu

SEQ ID NO: 164872 - RNA, 19 nt, Artificial Sequence
  Synthetic
cauuuuugaaagaucuacu

SEQ ID NO: 164873 - RNA, 20 nt, Artificial Sequence
  Synthetic
ucauuuuugaaagaucuacu

SEQ ID NO: 164874 - RNA, 18 nt, Artificial Sequence
  Synthetic
aucuggcuacugaguacu

SEQ ID NO: 164875 - RNA, 19 nt, Artificial Sequence
  Synthetic
caucuggcuacugaguacu

SEQ ID NO: 164876 - RNA, 20 nt, Artificial Sequence
  Synthetic
acaucuggcuacugaguacu

SEQ ID NO: 164877 - RNA, 18 nt, Artificial Sequence
  Synthetic
acugccuaaauauuuacu

SEQ ID NO: 164878 - RNA, 19 nt, Artificial Sequence
  Synthetic
aacugccuaaauauuuacu

SEQ ID NO: 164879 - RNA, 18 nt, Artificial Sequence
  Synthetic
uucuugcaauaguuuacu

SEQ ID NO: 164880 - RNA, 20 nt, Artificial Sequence
  Synthetic
uguucuugcaauaguuuacu

SEQ ID NO: 164881 - RNA, 21 nt, Artificial Sequence
  Synthetic
uuguucuugcaauaguuuacu

SEQ ID NO: 164882 - RNA, 22 nt, Artificial Sequence
  Synthetic
uuuguucuugcaauaguuuacu

SEQ ID NO: 164883 - RNA, 23 nt, Artificial Sequence
  Synthetic
uuuuguucuugcaauaguuuacu

SEQ ID NO: 164884 - RNA, 24 nt, Artificial Sequence
  Synthetic
uuuuuguucuugcaauaguuuacu

SEQ ID NO: 164885 - RNA, 21 nt, Artificial Sequence
  Synthetic
uuguucuugcgauaguuuacu

SEQ ID NO: 164886 - RNA, 22 nt, Artificial Sequence
  Synthetic
uuuguucuugcgauaguuuacu

SEQ ID NO: 164887 - RNA, 23 nt, Artificial Sequence
  Synthetic
uuuuguucuugcgauaguuuacu

SEQ ID NO: 164888 - RNA, 24 nt, Artificial Sequence
  Synthetic
uuuuuguucuugcgauaguuuacu

SEQ ID NO: 164889 - RNA, 18 nt, Artificial Sequence
  Synthetic
uucuugugauaguuuacu

SEQ ID NO: 164890 - RNA, 20 nt, Artificial Sequence
  Synthetic
uguucuugugauaguuuacu

SEQ ID NO: 164891 - RNA, 21 nt, Artificial Sequence
  Synthetic
cuguucuugugauaguuuacu

SEQ ID NO: 164892 - RNA, 22 nt, Artificial Sequence
  Synthetic
ucuguucuugugauaguuuacu

SEQ ID NO: 164893 - RNA, 23 nt, Artificial Sequence
  Synthetic
uucuguucuugugauaguuuacu

SEQ ID NO: 164894 - RNA, 18 nt, Artificial Sequence
  Synthetic
cuucuaauuuaguuuacu

SEQ ID NO: 164895 - RNA, 19 nt, Artificial Sequence
  Synthetic
ccuucuaauuuaguuuacu

SEQ ID NO: 164896 - RNA, 21 nt, Artificial Sequence
  Synthetic
agccuucuaauuuaguuuacu

SEQ ID NO: 164897 - RNA, 22 nt, Artificial Sequence
  Synthetic
aagccuucuaauuuaguuuacu

SEQ ID NO: 164898 - RNA, 23 nt, Artificial Sequence
  Synthetic
aaagccuucuaauuuaguuuacu

SEQ ID NO: 164899 - RNA, 21 nt, Artificial Sequence
  Synthetic
aaacagagaaauauuuuuacu

SEQ ID NO: 164900 - RNA, 23 nt, Artificial Sequence
  Synthetic
agaaacagagaaauauuuuuacu

SEQ ID NO: 164901 - RNA, 24 nt, Artificial Sequence
  Synthetic
uagaaacagagaaauauuuuuacu

SEQ ID NO: 164902 - RNA, 18 nt, Artificial Sequence
  Synthetic
uccugaccuacagaaccu

SEQ ID NO: 164903 - RNA, 19 nt, Artificial Sequence
  Synthetic
auccugaccuacagaaccu

SEQ ID NO: 164904 - RNA, 20 nt, Artificial Sequence
  Synthetic
aauccugaccuacagaaccu

SEQ ID NO: 164905 - RNA, 19 nt, Artificial Sequence
  Synthetic
ugacaacauggaugaaccu

SEQ ID NO: 164906 - RNA, 20 nt, Artificial Sequence
  Synthetic
augacaacauggaugaaccu

SEQ ID NO: 164907 - RNA, 21 nt, Artificial Sequence
  Synthetic
uaugacaacauggaugaaccu

SEQ ID NO: 164908 - RNA, 22 nt, Artificial Sequence
  Synthetic
uuaugacaacauggaugaaccu

SEQ ID NO: 164909 - RNA, 23 nt, Artificial Sequence
  Synthetic
uuuaugacaacauggaugaaccu

SEQ ID NO: 164910 - RNA, 24 nt, Artificial Sequence
  Synthetic
auuuaugacaacauggaugaaccu

SEQ ID NO: 164911 - RNA, 21 nt, Artificial Sequence
  Synthetic
ugggucccucccaugacaccu

SEQ ID NO: 164912 - RNA, 22 nt, Artificial Sequence
  Synthetic
cugggucccucccaugacaccu

SEQ ID NO: 164913 - RNA, 23 nt, Artificial Sequence
  Synthetic
acugggucccucccaugacaccu

SEQ ID NO: 164914 - RNA, 24 nt, Artificial Sequence
  Synthetic
cacugggucccucccaugacaccu

SEQ ID NO: 164915 - RNA, 21 nt, Artificial Sequence
  Synthetic
cucauuguucaauucccaccu

SEQ ID NO: 164916 - RNA, 22 nt, Artificial Sequence
  Synthetic
ucucauuguucaauucccaccu

SEQ ID NO: 164917 - RNA, 23 nt, Artificial Sequence
  Synthetic
aucucauuguucaauucccaccu

SEQ ID NO: 164918 - RNA, 18 nt, Artificial Sequence
  Synthetic
aagauguuuuaugcaccu

SEQ ID NO: 164919 - RNA, 18 nt, Artificial Sequence
  Synthetic
ugugcacaggauucaccu

SEQ ID NO: 164920 - RNA, 20 nt, Artificial Sequence
  Synthetic
agugugcacaggauucaccu

SEQ ID NO: 164921 - RNA, 19 nt, Artificial Sequence
  Synthetic
ugaagaugagaaaggaccu

SEQ ID NO: 164922 - RNA, 20 nt, Artificial Sequence
  Synthetic
augaagaugagaaaggaccu

SEQ ID NO: 164923 - RNA, 20 nt, Artificial Sequence
  Synthetic
acaaagagaauaaaauaccu

SEQ ID NO: 164924 - RNA, 21 nt, Artificial Sequence
  Synthetic
uacaaagagaauaaaauaccu

SEQ ID NO: 164925 - RNA, 22 nt, Artificial Sequence
  Synthetic
cuacaaagagaauaaaauaccu

SEQ ID NO: 164926 - RNA, 24 nt, Artificial Sequence
  Synthetic
ugcuacaaagagaauaaaauaccu

SEQ ID NO: 164927 - RNA, 18 nt, Artificial Sequence
  Synthetic
cuucuuuuaacaauaccu

SEQ ID NO: 164928 - RNA, 19 nt, Artificial Sequence
  Synthetic
acuucuuuuaacaauaccu

SEQ ID NO: 164929 - RNA, 20 nt, Artificial Sequence
  Synthetic
aacuucuuuuaacaauaccu

SEQ ID NO: 164930 - RNA, 18 nt, Artificial Sequence
  Synthetic
uccuaaccccugguaccu

SEQ ID NO: 164931 - RNA, 20 nt, Artificial Sequence
  Synthetic
aguccuaaccccugguaccu

SEQ ID NO: 164932 - RNA, 21 nt, Artificial Sequence
  Synthetic
aaguccuaaccccugguaccu

SEQ ID NO: 164933 - RNA, 23 nt, Artificial Sequence
  Synthetic
ugaaguccuaaccccugguaccu

SEQ ID NO: 164934 - RNA, 24 nt, Artificial Sequence
  Synthetic
uugaaguccuaaccccugguaccu

SEQ ID NO: 164935 - RNA, 19 nt, Artificial Sequence
  Synthetic
aguagaaggaugguuaccu

SEQ ID NO: 164936 - RNA, 21 nt, Artificial Sequence
  Synthetic
agaguagaaggaugguuaccu

SEQ ID NO: 164937 - RNA, 23 nt, Artificial Sequence
  Synthetic
agagaguagaaggaugguuaccu

SEQ ID NO: 164938 - RNA, 24 nt, Artificial Sequence
  Synthetic
uagagaguagaaggaugguuaccu

SEQ ID NO: 164939 - RNA, 20 nt, Artificial Sequence
  Synthetic
uggaauauuugcauuacccu

SEQ ID NO: 164940 - RNA, 21 nt, Artificial Sequence
  Synthetic
uuggaauauuugcauuacccu

SEQ ID NO: 164941 - RNA, 22 nt, Artificial Sequence
  Synthetic
uuuggaauauuugcauuacccu

SEQ ID NO: 164942 - RNA, 23 nt, Artificial Sequence
  Synthetic
uuuuggaauauuugcauuacccu

SEQ ID NO: 164943 - RNA, 18 nt, Artificial Sequence
  Synthetic
uguggucuggggaccccu

SEQ ID NO: 164944 - RNA, 19 nt, Artificial Sequence
  Synthetic
auguggucuggggaccccu

SEQ ID NO: 164945 - RNA, 20 nt, Artificial Sequence
  Synthetic
aauguggucuggggaccccu

SEQ ID NO: 164946 - RNA, 21 nt, Artificial Sequence
  Synthetic
aaauguggucuggggaccccu

SEQ ID NO: 164947 - RNA, 22 nt, Artificial Sequence
  Synthetic
uaaauguggucuggggaccccu

SEQ ID NO: 164948 - RNA, 23 nt, Artificial Sequence
  Synthetic
uuaaauguggucuggggaccccu

SEQ ID NO: 164949 - RNA, 24 nt, Artificial Sequence
  Synthetic
cuuaaauguggucuggggaccccu

SEQ ID NO: 164950 - RNA, 18 nt, Artificial Sequence
  Synthetic
uucuggccucuuuccccu

SEQ ID NO: 164951 - RNA, 19 nt, Artificial Sequence
  Synthetic
uuucuggccucuuuccccu

SEQ ID NO: 164952 - RNA, 20 nt, Artificial Sequence
  Synthetic
uuuucuggccucuuuccccu

SEQ ID NO: 164953 - RNA, 18 nt, Artificial Sequence
  Synthetic
aauguuuuauguaagccu

SEQ ID NO: 164954 - RNA, 19 nt, Artificial Sequence
  Synthetic
aaauguuuuauguaagccu

SEQ ID NO: 164955 - RNA, 20 nt, Artificial Sequence
  Synthetic
aaaauguuuuauguaagccu

SEQ ID NO: 164956 - RNA, 21 nt, Artificial Sequence
  Synthetic
uaaaauguuuuauguaagccu

SEQ ID NO: 164957 - RNA, 22 nt, Artificial Sequence
  Synthetic
auaaaauguuuuauguaagccu

SEQ ID NO: 164958 - RNA, 23 nt, Artificial Sequence
  Synthetic
uauaaaauguuuuauguaagccu

SEQ ID NO: 164959 - RNA, 24 nt, Artificial Sequence
  Synthetic
uuauaaaauguuuuauguaagccu

SEQ ID NO: 164960 - RNA, 21 nt, Artificial Sequence
  Synthetic
acgauucuccugccucagccu

SEQ ID NO: 164961 - RNA, 22 nt, Artificial Sequence
  Synthetic
aacgauucuccugccucagccu

SEQ ID NO: 164962 - RNA, 23 nt, Artificial Sequence
  Synthetic
aaacgauucuccugccucagccu

SEQ ID NO: 164963 - RNA, 24 nt, Artificial Sequence
  Synthetic
caaacgauucuccugccucagccu

SEQ ID NO: 164964 - RNA, 18 nt, Artificial Sequence
  Synthetic
auaggaucuccugagccu

SEQ ID NO: 164965 - RNA, 19 nt, Artificial Sequence
  Synthetic
aauaggaucuccugagccu

SEQ ID NO: 164966 - RNA, 20 nt, Artificial Sequence
  Synthetic
caauaggaucuccugagccu

SEQ ID NO: 164967 - RNA, 23 nt, Artificial Sequence
  Synthetic
aggcaauaggaucuccugagccu

SEQ ID NO: 164968 - RNA, 18 nt, Artificial Sequence
  Synthetic
ccaugugguguugagccu

SEQ ID NO: 164969 - RNA, 19 nt, Artificial Sequence
  Synthetic
uccaugugguguugagccu

SEQ ID NO: 164970 - RNA, 20 nt, Artificial Sequence
  Synthetic
uuccaugugguguugagccu

SEQ ID NO: 164971 - RNA, 21 nt, Artificial Sequence
  Synthetic
cuuccaugugguguugagccu

SEQ ID NO: 164972 - RNA, 23 nt, Artificial Sequence
  Synthetic
agcuuccaugugguguugagccu

SEQ ID NO: 164973 - RNA, 24 nt, Artificial Sequence
  Synthetic
cagcuuccaugugguguugagccu

SEQ ID NO: 164974 - RNA, 18 nt, Artificial Sequence
  Synthetic
auugcucaauucccgccu

SEQ ID NO: 164975 - RNA, 19 nt, Artificial Sequence
  Synthetic
cauugcucaauucccgccu

SEQ ID NO: 164976 - RNA, 20 nt, Artificial Sequence
  Synthetic
ucauugcucaauucccgccu

SEQ ID NO: 164977 - RNA, 21 nt, Artificial Sequence
  Synthetic
cucauugcucaauucccgccu

SEQ ID NO: 164978 - RNA, 22 nt, Artificial Sequence
  Synthetic
ucucauugcucaauucccgccu

SEQ ID NO: 164979 - RNA, 23 nt, Artificial Sequence
  Synthetic
uucucauugcucaauucccgccu

SEQ ID NO: 164980 - RNA, 18 nt, Artificial Sequence
  Synthetic
acaugacuggggaggccu

SEQ ID NO: 164981 - RNA, 19 nt, Artificial Sequence
  Synthetic
cacaugacuggggaggccu

SEQ ID NO: 164982 - RNA, 20 nt, Artificial Sequence
  Synthetic
ccacaugacuggggaggccu

SEQ ID NO: 164983 - RNA, 21 nt, Artificial Sequence
  Synthetic
uccacaugacuggggaggccu

SEQ ID NO: 164984 - RNA, 22 nt, Artificial Sequence
  Synthetic
uuccacaugacuggggaggccu

SEQ ID NO: 164985 - RNA, 24 nt, Artificial Sequence
  Synthetic
aguuccacaugacuggggaggccu

SEQ ID NO: 164986 - RNA, 18 nt, Artificial Sequence
  Synthetic
aggucugagaugaggccu

SEQ ID NO: 164987 - RNA, 19 nt, Artificial Sequence
  Synthetic
caggucugagaugaggccu

SEQ ID NO: 164988 - RNA, 21 nt, Artificial Sequence
  Synthetic
agcaggucugagaugaggccu

SEQ ID NO: 164989 - RNA, 22 nt, Artificial Sequence
  Synthetic
aagcaggucugagaugaggccu

SEQ ID NO: 164990 - RNA, 23 nt, Artificial Sequence
  Synthetic
caagcaggucugagaugaggccu

SEQ ID NO: 164991 - RNA, 24 nt, Artificial Sequence
  Synthetic
ucaagcaggucugagaugaggccu

SEQ ID NO: 164992 - RNA, 18 nt, Artificial Sequence
  Synthetic
caagagaauaaaaugccu

SEQ ID NO: 164993 - RNA, 19 nt, Artificial Sequence
  Synthetic
ucaagagaauaaaaugccu

SEQ ID NO: 164994 - RNA, 20 nt, Artificial Sequence
  Synthetic
cucaagagaauaaaaugccu

SEQ ID NO: 164995 - RNA, 18 nt, Artificial Sequence
  Synthetic
aaagagaauaaagugccu

SEQ ID NO: 164996 - RNA, 19 nt, Artificial Sequence
  Synthetic
caaagagaauaaagugccu

SEQ ID NO: 164997 - RNA, 20 nt, Artificial Sequence
  Synthetic
acaaagagaauaaagugccu

SEQ ID NO: 164998 - RNA, 21 nt, Artificial Sequence
  Synthetic
uacaaagagaauaaagugccu

SEQ ID NO: 164999 - RNA, 22 nt, Artificial Sequence
  Synthetic
cuacaaagagaauaaagugccu

SEQ ID NO: 165000 - RNA, 24 nt, Artificial Sequence
  Synthetic
ugcuacaaagagaauaaagugccu

SEQ ID NO: 165001 - RNA, 18 nt, Artificial Sequence
  Synthetic
auuaugacuuaugugccu

SEQ ID NO: 165002 - RNA, 19 nt, Artificial Sequence
  Synthetic
cauuaugacuuaugugccu

SEQ ID NO: 165003 - RNA, 18 nt, Artificial Sequence
  Synthetic
cucagcuucccaaauccu

SEQ ID NO: 165004 - RNA, 19 nt, Artificial Sequence
  Synthetic
ccucagcuucccaaauccu

SEQ ID NO: 165005 - RNA, 21 nt, Artificial Sequence
  Synthetic
ugccucagcuucccaaauccu

SEQ ID NO: 165006 - RNA, 22 nt, Artificial Sequence
  Synthetic
cugccucagcuucccaaauccu

SEQ ID NO: 165007 - RNA, 23 nt, Artificial Sequence
  Synthetic
ccugccucagcuucccaaauccu

SEQ ID NO: 165008 - RNA, 18 nt, Artificial Sequence
  Synthetic
agaaugauuuauaauccu

SEQ ID NO: 165009 - RNA, 19 nt, Artificial Sequence
  Synthetic
uagaaugauuuauaauccu

SEQ ID NO: 165010 - RNA, 21 nt, Artificial Sequence
  Synthetic
aguagaaugauuuauaauccu

SEQ ID NO: 165011 - RNA, 22 nt, Artificial Sequence
  Synthetic
caguagaaugauuuauaauccu

SEQ ID NO: 165012 - RNA, 23 nt, Artificial Sequence
  Synthetic
acaguagaaugauuuauaauccu

SEQ ID NO: 165013 - RNA, 24 nt, Artificial Sequence
  Synthetic
uacaguagaaugauuuauaauccu

SEQ ID NO: 165014 - RNA, 22 nt, Artificial Sequence
  Synthetic
uaguagaaugauuuauaauccu

SEQ ID NO: 165015 - RNA, 23 nt, Artificial Sequence
  Synthetic
auaguagaaugauuuauaauccu

SEQ ID NO: 165016 - RNA, 24 nt, Artificial Sequence
  Synthetic
uauaguagaaugauuuauaauccu

SEQ ID NO: 165017 - RNA, 22 nt, Artificial Sequence
  Synthetic
cagcagcaugauuuauaauccu

SEQ ID NO: 165018 - RNA, 23 nt, Artificial Sequence
  Synthetic
acagcagcaugauuuauaauccu

SEQ ID NO: 165019 - RNA, 24 nt, Artificial Sequence
  Synthetic
uacagcagcaugauuuauaauccu

SEQ ID NO: 165020 - RNA, 19 nt, Artificial Sequence
  Synthetic
aggcuuuuccauacauccu

SEQ ID NO: 165021 - RNA, 20 nt, Artificial Sequence
  Synthetic
uaggcuuuuccauacauccu

SEQ ID NO: 165022 - RNA, 21 nt, Artificial Sequence
  Synthetic
cuaggcuuuuccauacauccu

SEQ ID NO: 165023 - RNA, 22 nt, Artificial Sequence
  Synthetic
ccuaggcuuuuccauacauccu

SEQ ID NO: 165024 - RNA, 23 nt, Artificial Sequence
  Synthetic
accuaggcuuuuccauacauccu

SEQ ID NO: 165025 - RNA, 24 nt, Artificial Sequence
  Synthetic
caccuaggcuuuuccauacauccu

SEQ ID NO: 165026 - RNA, 18 nt, Artificial Sequence
  Synthetic
uggugguuauuagauccu

SEQ ID NO: 165027 - RNA, 19 nt, Artificial Sequence
  Synthetic
auggugguuauuagauccu

SEQ ID NO: 165028 - RNA, 20 nt, Artificial Sequence
  Synthetic
aauggugguuauuagauccu

SEQ ID NO: 165029 - RNA, 22 nt, Artificial Sequence
  Synthetic
uguugaauugucuaguucuccu

SEQ ID NO: 165030 - RNA, 23 nt, Artificial Sequence
  Synthetic
uuguugaauugucuaguucuccu

SEQ ID NO: 165031 - RNA, 24 nt, Artificial Sequence
  Synthetic
auuguugaauugucuaguucuccu

SEQ ID NO: 165032 - RNA, 18 nt, Artificial Sequence
  Synthetic
caaaaccagaaaaguccu

SEQ ID NO: 165033 - RNA, 19 nt, Artificial Sequence
  Synthetic
ucaaaaccagaaaaguccu

SEQ ID NO: 165034 - RNA, 21 nt, Artificial Sequence
  Synthetic
agcagcaugauuuauaguccu

SEQ ID NO: 165035 - RNA, 22 nt, Artificial Sequence
  Synthetic
uagcagcaugauuuauaguccu

SEQ ID NO: 165036 - RNA, 23 nt, Artificial Sequence
  Synthetic
auagcagcaugauuuauaguccu

SEQ ID NO: 165037 - RNA, 24 nt, Artificial Sequence
  Synthetic
uauagcagcaugauuuauaguccu

SEQ ID NO: 165038 - RNA, 18 nt, Artificial Sequence
  Synthetic
ucgaguguucaauguccu

SEQ ID NO: 165039 - RNA, 19 nt, Artificial Sequence
  Synthetic
uucgaguguucaauguccu

SEQ ID NO: 165040 - RNA, 21 nt, Artificial Sequence
  Synthetic
uguucgaguguucaauguccu

SEQ ID NO: 165041 - RNA, 22 nt, Artificial Sequence
  Synthetic
uuguucgaguguucaauguccu

SEQ ID NO: 165042 - RNA, 23 nt, Artificial Sequence
  Synthetic
uuuguucgaguguucaauguccu

SEQ ID NO: 165043 - RNA, 24 nt, Artificial Sequence
  Synthetic
cuuuguucgaguguucaauguccu

SEQ ID NO: 165044 - RNA, 20 nt, Artificial Sequence
  Synthetic
aggaguccaguuucauuccu

SEQ ID NO: 165045 - RNA, 21 nt, Artificial Sequence
  Synthetic
uaggaguccaguuucauuccu

SEQ ID NO: 165046 - RNA, 24 nt, Artificial Sequence
  Synthetic
agguaggaguccaguuucauuccu

SEQ ID NO: 165047 - RNA, 18 nt, Artificial Sequence
  Synthetic
agaaugauuucuauuccu

SEQ ID NO: 165048 - RNA, 19 nt, Artificial Sequence
  Synthetic
uagaaugauuucuauuccu

SEQ ID NO: 165049 - RNA, 22 nt, Artificial Sequence
  Synthetic
ugguagaaugauuucuauuccu

SEQ ID NO: 165050 - RNA, 23 nt, Artificial Sequence
  Synthetic
augguagaaugauuucuauuccu

SEQ ID NO: 165051 - RNA, 24 nt, Artificial Sequence
  Synthetic
uaugguagaaugauuucuauuccu

SEQ ID NO: 165052 - RNA, 22 nt, Artificial Sequence
  Synthetic
aggcaugaccacgugacuuccu

SEQ ID NO: 165053 - RNA, 23 nt, Artificial Sequence
  Synthetic
uaggcaugaccacgugacuuccu

SEQ ID NO: 165054 - RNA, 24 nt, Artificial Sequence
  Synthetic
uuaggcaugaccacgugacuuccu

SEQ ID NO: 165055 - RNA, 18 nt, Artificial Sequence
  Synthetic
acuucuguuccuuuuccu

SEQ ID NO: 165056 - RNA, 19 nt, Artificial Sequence
  Synthetic
aacuucuguuccuuuuccu

SEQ ID NO: 165057 - RNA, 20 nt, Artificial Sequence
  Synthetic
uaacuucuguuccuuuuccu

SEQ ID NO: 165058 - RNA, 18 nt, Artificial Sequence
  Synthetic
agaaaaaucaacaaagcu

SEQ ID NO: 165059 - RNA, 19 nt, Artificial Sequence
  Synthetic
uagaaaaaucaacaaagcu

SEQ ID NO: 165060 - RNA, 20 nt, Artificial Sequence
  Synthetic
auagaaaaaucaacaaagcu

SEQ ID NO: 165061 - RNA, 21 nt, Artificial Sequence
  Synthetic
aauagaaaaaucaacaaagcu

SEQ ID NO: 165062 - RNA, 22 nt, Artificial Sequence
  Synthetic
caauagaaaaaucaacaaagcu

SEQ ID NO: 165063 - RNA, 23 nt, Artificial Sequence
  Synthetic
acaauagaaaaaucaacaaagcu

SEQ ID NO: 165064 - RNA, 24 nt, Artificial Sequence
  Synthetic
aacaauagaaaaaucaacaaagcu

SEQ ID NO: 165065 - RNA, 18 nt, Artificial Sequence
  Synthetic
auuuuaauaaaagcagcu

SEQ ID NO: 165066 - RNA, 19 nt, Artificial Sequence
  Synthetic
uauuuuaauaaaagcagcu

SEQ ID NO: 165067 - RNA, 20 nt, Artificial Sequence
  Synthetic
uuauuuuaauaaaagcagcu

SEQ ID NO: 165068 - RNA, 18 nt, Artificial Sequence
  Synthetic
cucugguagaauucagcu

SEQ ID NO: 165069 - RNA, 19 nt, Artificial Sequence
  Synthetic
ccucugguagaauucagcu

SEQ ID NO: 165070 - RNA, 20 nt, Artificial Sequence
  Synthetic
accucugguagaauucagcu

SEQ ID NO: 165071 - RNA, 21 nt, Artificial Sequence
  Synthetic
uaccucugguagaauucagcu

SEQ ID NO: 165072 - RNA, 23 nt, Artificial Sequence
  Synthetic
uguaccucugguagaauucagcu

SEQ ID NO: 165073 - RNA, 24 nt, Artificial Sequence
  Synthetic
uuguaccucugguagaauucagcu

SEQ ID NO: 165074 - RNA, 18 nt, Artificial Sequence
  Synthetic
aaguuaaguggcagagcu

SEQ ID NO: 165075 - RNA, 19 nt, Artificial Sequence
  Synthetic
caaguuaaguggcagagcu

SEQ ID NO: 165076 - RNA, 20 nt, Artificial Sequence
  Synthetic
acaaguuaaguggcagagcu

SEQ ID NO: 165077 - RNA, 18 nt, Artificial Sequence
  Synthetic
ucagccucccaaagcgcu

SEQ ID NO: 165078 - RNA, 19 nt, Artificial Sequence
  Synthetic
cucagccucccaaagcgcu

SEQ ID NO: 165079 - RNA, 20 nt, Artificial Sequence
  Synthetic
ccucagccucccaaagcgcu

SEQ ID NO: 165080 - RNA, 22 nt, Artificial Sequence
  Synthetic
ugccucagccucccaaagcgcu

SEQ ID NO: 165081 - RNA, 23 nt, Artificial Sequence
  Synthetic
cugccucagccucccaaagcgcu

SEQ ID NO: 165082 - RNA, 24 nt, Artificial Sequence
  Synthetic
ccugccucagccucccaaagcgcu

SEQ ID NO: 165083 - RNA, 18 nt, Artificial Sequence
  Synthetic
cuuauaguucuggaggcu

SEQ ID NO: 165084 - RNA, 20 nt, Artificial Sequence
  Synthetic
ugcuuauaguucuggaggcu

SEQ ID NO: 165085 - RNA, 21 nt, Artificial Sequence
  Synthetic
uugcuuauaguucuggaggcu

SEQ ID NO: 165086 - RNA, 22 nt, Artificial Sequence
  Synthetic
auugcuuauaguucuggaggcu

SEQ ID NO: 165087 - RNA, 23 nt, Artificial Sequence
  Synthetic
uauugcuuauaguucuggaggcu

SEQ ID NO: 165088 - RNA, 24 nt, Artificial Sequence
  Synthetic
uuauugcuuauaguucuggaggcu

SEQ ID NO: 165089 - RNA, 20 nt, Artificial Sequence
  Synthetic
cggguggaugacuugaggcu

SEQ ID NO: 165090 - RNA, 21 nt, Artificial Sequence
  Synthetic
ucggguggaugacuugaggcu

SEQ ID NO: 165091 - RNA, 23 nt, Artificial Sequence
  Synthetic
agucggguggaugacuugaggcu

SEQ ID NO: 165092 - RNA, 18 nt, Artificial Sequence
  Synthetic
uuauaaauguuugaggcu

SEQ ID NO: 165093 - RNA, 19 nt, Artificial Sequence
  Synthetic
auuauaaauguuugaggcu

SEQ ID NO: 165094 - RNA, 20 nt, Artificial Sequence
  Synthetic
aauuauaaauguuugaggcu

SEQ ID NO: 165095 - RNA, 21 nt, Artificial Sequence
  Synthetic
aaauuauaaauguuugaggcu

SEQ ID NO: 165096 - RNA, 23 nt, Artificial Sequence
  Synthetic
agaaauuauaaauguuugaggcu

SEQ ID NO: 165097 - RNA, 21 nt, Artificial Sequence
  Synthetic
uauauguaagugcaaagggcu

SEQ ID NO: 165098 - RNA, 22 nt, Artificial Sequence
  Synthetic
uuauauguaagugcaaagggcu

SEQ ID NO: 165099 - RNA, 23 nt, Artificial Sequence
  Synthetic
uuuauauguaagugcaaagggcu

SEQ ID NO: 165100 - RNA, 24 nt, Artificial Sequence
  Synthetic
auuuauauguaagugcaaagggcu

SEQ ID NO: 165101 - RNA, 18 nt, Artificial Sequence
  Synthetic
uggugguugccaggggcu

SEQ ID NO: 165102 - RNA, 19 nt, Artificial Sequence
  Synthetic
cuggugguugccaggggcu

SEQ ID NO: 165103 - RNA, 20 nt, Artificial Sequence
  Synthetic
acuggugguugccaggggcu

SEQ ID NO: 165104 - RNA, 23 nt, Artificial Sequence
  Synthetic
uggacuggugguugccaggggcu

SEQ ID NO: 165105 - RNA, 24 nt, Artificial Sequence
  Synthetic
cuggacuggugguugccaggggcu

SEQ ID NO: 165106 - RNA, 18 nt, Artificial Sequence
  Synthetic
cccaucagaaagugggcu

SEQ ID NO: 165107 - RNA, 19 nt, Artificial Sequence
  Synthetic
acccaucagaaagugggcu

SEQ ID NO: 165108 - RNA, 20 nt, Artificial Sequence
  Synthetic
aacccaucagaaagugggcu

SEQ ID NO: 165109 - RNA, 21 nt, Artificial Sequence
  Synthetic
aaacccaucagaaagugggcu

SEQ ID NO: 165110 - RNA, 22 nt, Artificial Sequence
  Synthetic
aaaacccaucagaaagugggcu

SEQ ID NO: 165111 - RNA, 23 nt, Artificial Sequence
  Synthetic
aaaaacccaucagaaagugggcu

SEQ ID NO: 165112 - RNA, 24 nt, Artificial Sequence
  Synthetic
aaaaaacccaucagaaagugggcu

SEQ ID NO: 165113 - RNA, 18 nt, Artificial Sequence
  Synthetic
uucaguaugauaauggcu

SEQ ID NO: 165114 - RNA, 19 nt, Artificial Sequence
  Synthetic
auucaguaugauaauggcu

SEQ ID NO: 165115 - RNA, 20 nt, Artificial Sequence
  Synthetic
cauucaguaugauaauggcu

SEQ ID NO: 165116 - RNA, 21 nt, Artificial Sequence
  Synthetic
ccauucaguaugauaauggcu

SEQ ID NO: 165117 - RNA, 22 nt, Artificial Sequence
  Synthetic
cccauucaguaugauaauggcu

SEQ ID NO: 165118 - RNA, 24 nt, Artificial Sequence
  Synthetic
ugcccauucaguaugauaauggcu

SEQ ID NO: 165119 - RNA, 18 nt, Artificial Sequence
  Synthetic
ucccauauccaaaaugcu

SEQ ID NO: 165120 - RNA, 19 nt, Artificial Sequence
  Synthetic
aucccauauccaaaaugcu

SEQ ID NO: 165121 - RNA, 20 nt, Artificial Sequence
  Synthetic
uaucccauauccaaaaugcu

SEQ ID NO: 165122 - RNA, 22 nt, Artificial Sequence
  Synthetic
aguaucccauauccaaaaugcu

SEQ ID NO: 165123 - RNA, 24 nt, Artificial Sequence
  Synthetic
ugaguaucccauauccaaaaugcu

SEQ ID NO: 165124 - RNA, 18 nt, Artificial Sequence
  Synthetic
uugggacauaguuaugcu

SEQ ID NO: 165125 - RNA, 19 nt, Artificial Sequence
  Synthetic
uuugggacauaguuaugcu

SEQ ID NO: 165126 - RNA, 20 nt, Artificial Sequence
  Synthetic
auuugggacauaguuaugcu

SEQ ID NO: 165127 - RNA, 18 nt, Artificial Sequence
  Synthetic
cuuaguuccccagcugcu

SEQ ID NO: 165128 - RNA, 19 nt, Artificial Sequence
  Synthetic
acuuaguuccccagcugcu

SEQ ID NO: 165129 - RNA, 22 nt, Artificial Sequence
  Synthetic
aggacuuaguuccccagcugcu

SEQ ID NO: 165130 - RNA, 23 nt, Artificial Sequence
  Synthetic
aaggacuuaguuccccagcugcu

SEQ ID NO: 165131 - RNA, 18 nt, Artificial Sequence
  Synthetic
ucagccucccaaagugcu

SEQ ID NO: 165132 - RNA, 19 nt, Artificial Sequence
  Synthetic
cucagccucccaaagugcu

SEQ ID NO: 165133 - RNA, 20 nt, Artificial Sequence
  Synthetic
ccucagccucccaaagugcu

SEQ ID NO: 165134 - RNA, 22 nt, Artificial Sequence
  Synthetic
ugccucagccucccaaagugcu

SEQ ID NO: 165135 - RNA, 23 nt, Artificial Sequence
  Synthetic
cugccucagccucccaaagugcu

SEQ ID NO: 165136 - RNA, 24 nt, Artificial Sequence
  Synthetic
ccugccucagccucccaaagugcu

SEQ ID NO: 165137 - RNA, 18 nt, Artificial Sequence
  Synthetic
uaagugugauguggugcu

SEQ ID NO: 165138 - RNA, 19 nt, Artificial Sequence
  Synthetic
auaagugugauguggugcu

SEQ ID NO: 165139 - RNA, 20 nt, Artificial Sequence
  Synthetic
aauaagugugauguggugcu

SEQ ID NO: 165140 - RNA, 21 nt, Artificial Sequence
  Synthetic
uaauaagugugauguggugcu

SEQ ID NO: 165141 - RNA, 22 nt, Artificial Sequence
  Synthetic
auaauaagugugauguggugcu

SEQ ID NO: 165142 - RNA, 23 nt, Artificial Sequence
  Synthetic
uauaauaagugugauguggugcu

SEQ ID NO: 165143 - RNA, 24 nt, Artificial Sequence
  Synthetic
uuauaauaagugugauguggugcu

SEQ ID NO: 165144 - RNA, 18 nt, Artificial Sequence
  Synthetic
aguuuuaaaagaugugcu

SEQ ID NO: 165145 - RNA, 20 nt, Artificial Sequence
  Synthetic
agaguuuuaaaagaugugcu

SEQ ID NO: 165146 - RNA, 18 nt, Artificial Sequence
  Synthetic
uggaagauaguuugugcu

SEQ ID NO: 165147 - RNA, 20 nt, Artificial Sequence
  Synthetic
uguggaagauaguuugugcu

SEQ ID NO: 165148 - RNA, 18 nt, Artificial Sequence
  Synthetic
auauacuugauacuugcu

SEQ ID NO: 165149 - RNA, 19 nt, Artificial Sequence
  Synthetic
uauauacuugauacuugcu

SEQ ID NO: 165150 - RNA, 20 nt, Artificial Sequence
  Synthetic
uuauauacuugauacuugcu

SEQ ID NO: 165151 - RNA, 21 nt, Artificial Sequence
  Synthetic
auuauauacuugauacuugcu

SEQ ID NO: 165152 - RNA, 22 nt, Artificial Sequence
  Synthetic
uauuauauacuugauacuugcu

SEQ ID NO: 165153 - RNA, 24 nt, Artificial Sequence
  Synthetic
uguauuauauacuugauacuugcu

SEQ ID NO: 165154 - RNA, 18 nt, Artificial Sequence
  Synthetic
cucugauacacuguugcu

SEQ ID NO: 165155 - RNA, 19 nt, Artificial Sequence
  Synthetic
acucugauacacuguugcu

SEQ ID NO: 165156 - RNA, 20 nt, Artificial Sequence
  Synthetic
aacucugauacacuguugcu

SEQ ID NO: 165157 - RNA, 24 nt, Artificial Sequence
  Synthetic
agggaacucugauacacuguugcu

SEQ ID NO: 165158 - RNA, 18 nt, Artificial Sequence
  Synthetic
uucuuauguuaauuugcu

SEQ ID NO: 165159 - RNA, 20 nt, Artificial Sequence
  Synthetic
uguucuuauguuaauuugcu

SEQ ID NO: 165160 - RNA, 21 nt, Artificial Sequence
  Synthetic
cuguucuuauguuaauuugcu

SEQ ID NO: 165161 - RNA, 22 nt, Artificial Sequence
  Synthetic
ucuguucuuauguuaauuugcu

SEQ ID NO: 165162 - RNA, 23 nt, Artificial Sequence
  Synthetic
uucuguucuuauguuaauuugcu

SEQ ID NO: 165163 - RNA, 24 nt, Artificial Sequence
  Synthetic
uuucuguucuuauguuaauuugcu

SEQ ID NO: 165164 - RNA, 18 nt, Artificial Sequence
  Synthetic
aaguaaaauugcuuugcu

SEQ ID NO: 165165 - RNA, 20 nt, Artificial Sequence
  Synthetic
agaaguaaaauugcuuugcu

SEQ ID NO: 165166 - RNA, 21 nt, Artificial Sequence
  Synthetic
cagaaguaaaauugcuuugcu

SEQ ID NO: 165167 - RNA, 23 nt, Artificial Sequence
  Synthetic
ugcagaaguaaaauugcuuugcu

SEQ ID NO: 165168 - RNA, 18 nt, Artificial Sequence
  Synthetic
auuaaaucauucuuugcu

SEQ ID NO: 165169 - RNA, 20 nt, Artificial Sequence
  Synthetic
ugauuaaaucauucuuugcu

SEQ ID NO: 165170 - RNA, 18 nt, Artificial Sequence
  Synthetic
uuuccauauaaguuugcu

SEQ ID NO: 165171 - RNA, 20 nt, Artificial Sequence
  Synthetic
uguuuccauauaaguuugcu

SEQ ID NO: 165172 - RNA, 21 nt, Artificial Sequence
  Synthetic
cuguuuccauauaaguuugcu

SEQ ID NO: 165173 - RNA, 22 nt, Artificial Sequence
  Synthetic
ucuguuuccauauaaguuugcu

SEQ ID NO: 165174 - RNA, 23 nt, Artificial Sequence
  Synthetic
uucuguuuccauauaaguuugcu

SEQ ID NO: 165175 - RNA, 24 nt, Artificial Sequence
  Synthetic
uuucuguuuccauauaaguuugcu

SEQ ID NO: 165176 - RNA, 18 nt, Artificial Sequence
  Synthetic
ucauugcaauaguuugcu

SEQ ID NO: 165177 - RNA, 19 nt, Artificial Sequence
  Synthetic
cucauugcaauaguuugcu

SEQ ID NO: 165178 - RNA, 20 nt, Artificial Sequence
  Synthetic
acucauugcaauaguuugcu

SEQ ID NO: 165179 - RNA, 18 nt, Artificial Sequence
  Synthetic
uccuugccauaguuugcu

SEQ ID NO: 165180 - RNA, 20 nt, Artificial Sequence
  Synthetic
uguccuugccauaguuugcu

SEQ ID NO: 165181 - RNA, 21 nt, Artificial Sequence
  Synthetic
uuguccuugccauaguuugcu

SEQ ID NO: 165182 - RNA, 22 nt, Artificial Sequence
  Synthetic
uuuguccuugccauaguuugcu

SEQ ID NO: 165183 - RNA, 23 nt, Artificial Sequence
  Synthetic
uuuuguccuugccauaguuugcu

SEQ ID NO: 165184 - RNA, 24 nt, Artificial Sequence
  Synthetic
uuuuuguccuugccauaguuugcu

SEQ ID NO: 165185 - RNA, 21 nt, Artificial Sequence
  Synthetic
cuguccuugugauaguuugcu

SEQ ID NO: 165186 - RNA, 22 nt, Artificial Sequence
  Synthetic
ucuguccuugugauaguuugcu

SEQ ID NO: 165187 - RNA, 23 nt, Artificial Sequence
  Synthetic
uucuguccuugugauaguuugcu

SEQ ID NO: 165188 - RNA, 24 nt, Artificial Sequence
  Synthetic
uuucuguccuugugauaguuugcu

SEQ ID NO: 165189 - RNA, 18 nt, Artificial Sequence
  Synthetic
uuccuguguuaguuugcu

SEQ ID NO: 165190 - RNA, 19 nt, Artificial Sequence
  Synthetic
auuccuguguuaguuugcu

SEQ ID NO: 165191 - RNA, 20 nt, Artificial Sequence
  Synthetic
cauuccuguguuaguuugcu

SEQ ID NO: 165192 - RNA, 21 nt, Artificial Sequence
  Synthetic
ccauuccuguguuaguuugcu

SEQ ID NO: 165193 - RNA, 22 nt, Artificial Sequence
  Synthetic
uccauuccuguguuaguuugcu

SEQ ID NO: 165194 - RNA, 23 nt, Artificial Sequence
  Synthetic
uuccauuccuguguuaguuugcu

SEQ ID NO: 165195 - RNA, 24 nt, Artificial Sequence
  Synthetic
uuuccauuccuguguuaguuugcu

SEQ ID NO: 165196 - RNA, 18 nt, Artificial Sequence
  Synthetic
agcuuuguucuuuuugcu

SEQ ID NO: 165197 - RNA, 19 nt, Artificial Sequence
  Synthetic
cagcuuuguucuuuuugcu

SEQ ID NO: 165198 - RNA, 20 nt, Artificial Sequence
  Synthetic
ccagcuuuguucuuuuugcu

SEQ ID NO: 165199 - RNA, 21 nt, Artificial Sequence
  Synthetic
uccagcuuuguucuuuuugcu

SEQ ID NO: 165200 - RNA, 22 nt, Artificial Sequence
  Synthetic
cuccagcuuuguucuuuuugcu

SEQ ID NO: 165201 - RNA, 23 nt, Artificial Sequence
  Synthetic
ccuccagcuuuguucuuuuugcu

SEQ ID NO: 165202 - RNA, 21 nt, Artificial Sequence
  Synthetic
acauguauguuuaaagaaucu

SEQ ID NO: 165203 - RNA, 22 nt, Artificial Sequence
  Synthetic
uacauguauguuuaaagaaucu

SEQ ID NO: 165204 - RNA, 23 nt, Artificial Sequence
  Synthetic
uuacauguauguuuaaagaaucu

SEQ ID NO: 165205 - RNA, 24 nt, Artificial Sequence
  Synthetic
auuacauguauguuuaaagaaucu

SEQ ID NO: 165206 - RNA, 18 nt, Artificial Sequence
  Synthetic
ucugaaggucaagaaucu

SEQ ID NO: 165207 - RNA, 19 nt, Artificial Sequence
  Synthetic
uucugaaggucaagaaucu

SEQ ID NO: 165208 - RNA, 20 nt, Artificial Sequence
  Synthetic
uuucugaaggucaagaaucu

SEQ ID NO: 165209 - RNA, 22 nt, Artificial Sequence
  Synthetic
aguuucugaaggucaagaaucu

SEQ ID NO: 165210 - RNA, 23 nt, Artificial Sequence
  Synthetic
caguuucugaaggucaagaaucu

SEQ ID NO: 165211 - RNA, 21 nt, Artificial Sequence
  Synthetic
aaccaggaagaaguugaaucu

SEQ ID NO: 165212 - RNA, 22 nt, Artificial Sequence
  Synthetic
aaaccaggaagaaguugaaucu

SEQ ID NO: 165213 - RNA, 23 nt, Artificial Sequence
  Synthetic
uaaaccaggaagaaguugaaucu

SEQ ID NO: 165214 - RNA, 24 nt, Artificial Sequence
  Synthetic
cuaaaccaggaagaaguugaaucu

SEQ ID NO: 165215 - RNA, 18 nt, Artificial Sequence
  Synthetic
cuuuguuuuccuuaaucu

SEQ ID NO: 165216 - RNA, 19 nt, Artificial Sequence
  Synthetic
ucuuuguuuuccuuaaucu

SEQ ID NO: 165217 - RNA, 20 nt, Artificial Sequence
  Synthetic
uucuuuguuuuccuuaaucu

SEQ ID NO: 165218 - RNA, 21 nt, Artificial Sequence
  Synthetic
auucuuuguuuuccuuaaucu

SEQ ID NO: 165219 - RNA, 22 nt, Artificial Sequence
  Synthetic
aauucuuuguuuuccuuaaucu

SEQ ID NO: 165220 - RNA, 23 nt, Artificial Sequence
  Synthetic
aaauucuuuguuuuccuuaaucu

SEQ ID NO: 165221 - RNA, 18 nt, Artificial Sequence
  Synthetic
uuauuuacaaucacaucu

SEQ ID NO: 165222 - RNA, 19 nt, Artificial Sequence
  Synthetic
auuauuuacaaucacaucu

SEQ ID NO: 165223 - RNA, 20 nt, Artificial Sequence
  Synthetic
aauuauuuacaaucacaucu

SEQ ID NO: 165224 - RNA, 22 nt, Artificial Sequence
  Synthetic
ugccauccucacucuaccaucu

SEQ ID NO: 165225 - RNA, 23 nt, Artificial Sequence
  Synthetic
cugccauccucacucuaccaucu

SEQ ID NO: 165226 - RNA, 24 nt, Artificial Sequence
  Synthetic
acugccauccucacucuaccaucu

SEQ ID NO: 165227 - RNA, 19 nt, Artificial Sequence
  Synthetic
uggcccucagacagcaucu

SEQ ID NO: 165228 - RNA, 20 nt, Artificial Sequence
  Synthetic
cuggcccucagacagcaucu

SEQ ID NO: 165229 - RNA, 18 nt, Artificial Sequence
  Synthetic
uuucucuaucccugaucu

SEQ ID NO: 165230 - RNA, 19 nt, Artificial Sequence
  Synthetic
auuucucuaucccugaucu

SEQ ID NO: 165231 - RNA, 20 nt, Artificial Sequence
  Synthetic
uauuucucuaucccugaucu

SEQ ID NO: 165232 - RNA, 18 nt, Artificial Sequence
  Synthetic
ugaauauuuucaauaucu

SEQ ID NO: 165233 - RNA, 19 nt, Artificial Sequence
  Synthetic
augaauauuuucaauaucu

SEQ ID NO: 165234 - RNA, 20 nt, Artificial Sequence
  Synthetic
uaugaauauuuucaauaucu

SEQ ID NO: 165235 - RNA, 18 nt, Artificial Sequence
  Synthetic
agugauuuugacauaucu

SEQ ID NO: 165236 - RNA, 19 nt, Artificial Sequence
  Synthetic
aagugauuuugacauaucu

SEQ ID NO: 165237 - RNA, 20 nt, Artificial Sequence
  Synthetic
aaagugauuuugacauaucu

SEQ ID NO: 165238 - RNA, 21 nt, Artificial Sequence
  Synthetic
aaaagugauuuugacauaucu

SEQ ID NO: 165239 - RNA, 22 nt, Artificial Sequence
  Synthetic
caaaagugauuuugacauaucu

SEQ ID NO: 165240 - RNA, 23 nt, Artificial Sequence
  Synthetic
acaaaagugauuuugacauaucu

SEQ ID NO: 165241 - RNA, 24 nt, Artificial Sequence
  Synthetic
aacaaaagugauuuugacauaucu

SEQ ID NO: 165242 - RNA, 18 nt, Artificial Sequence
  Synthetic
ugggaucugacacuaucu

SEQ ID NO: 165243 - RNA, 19 nt, Artificial Sequence
  Synthetic
augggaucugacacuaucu

SEQ ID NO: 165244 - RNA, 20 nt, Artificial Sequence
  Synthetic
uaugggaucugacacuaucu

SEQ ID NO: 165245 - RNA, 21 nt, Artificial Sequence
  Synthetic
cuaugggaucugacacuaucu

SEQ ID NO: 165246 - RNA, 22 nt, Artificial Sequence
  Synthetic
ucuaugggaucugacacuaucu

SEQ ID NO: 165247 - RNA, 23 nt, Artificial Sequence
  Synthetic
aucuaugggaucugacacuaucu

SEQ ID NO: 165248 - RNA, 24 nt, Artificial Sequence
  Synthetic
aaucuaugggaucugacacuaucu

SEQ ID NO: 165249 - RNA, 18 nt, Artificial Sequence
  Synthetic
uuuugauuguucuuaucu

SEQ ID NO: 165250 - RNA, 19 nt, Artificial Sequence
  Synthetic
auuuugauuguucuuaucu

SEQ ID NO: 165251 - RNA, 20 nt, Artificial Sequence
  Synthetic
aauuuugauuguucuuaucu

SEQ ID NO: 165252 - RNA, 18 nt, Artificial Sequence
  Synthetic
aacugacacagaaacucu

SEQ ID NO: 165253 - RNA, 19 nt, Artificial Sequence
  Synthetic
caacugacacagaaacucu

SEQ ID NO: 165254 - RNA, 20 nt, Artificial Sequence
  Synthetic
ccaacugacacagaaacucu

SEQ ID NO: 165255 - RNA, 21 nt, Artificial Sequence
  Synthetic
accaacugacacagaaacucu

SEQ ID NO: 165256 - RNA, 23 nt, Artificial Sequence
  Synthetic
agaccaacugacacagaaacucu

SEQ ID NO: 165257 - RNA, 24 nt, Artificial Sequence
  Synthetic
cagaccaacugacacagaaacucu

SEQ ID NO: 165258 - RNA, 18 nt, Artificial Sequence
  Synthetic
cuuuuuuuuucccacucu

SEQ ID NO: 165259 - RNA, 19 nt, Artificial Sequence
  Synthetic
ucuuuuuuuuucccacucu

SEQ ID NO: 165260 - RNA, 20 nt, Artificial Sequence
  Synthetic
uucuuuuuuuuucccacucu

SEQ ID NO: 165261 - RNA, 18 nt, Artificial Sequence
  Synthetic
uacugaaucagagacucu

SEQ ID NO: 165262 - RNA, 19 nt, Artificial Sequence
  Synthetic
cuacugaaucagagacucu

SEQ ID NO: 165263 - RNA, 20 nt, Artificial Sequence
  Synthetic
ucuacugaaucagagacucu

SEQ ID NO: 165264 - RNA, 21 nt, Artificial Sequence
  Synthetic
cucuacugaaucagagacucu

SEQ ID NO: 165265 - RNA, 23 nt, Artificial Sequence
  Synthetic
agcucuacugaaucagagacucu

SEQ ID NO: 165266 - RNA, 24 nt, Artificial Sequence
  Synthetic
uagcucuacugaaucagagacucu

SEQ ID NO: 165267 - RNA, 18 nt, Artificial Sequence
  Synthetic
uuaacaauuguugacucu

SEQ ID NO: 165268 - RNA, 20 nt, Artificial Sequence
  Synthetic
uguuaacaauuguugacucu

SEQ ID NO: 165269 - RNA, 21 nt, Artificial Sequence
  Synthetic
auguuaacaauuguugacucu

SEQ ID NO: 165270 - RNA, 22 nt, Artificial Sequence
  Synthetic
aauguuaacaauuguugacucu

SEQ ID NO: 165271 - RNA, 23 nt, Artificial Sequence
  Synthetic
aaauguuaacaauuguugacucu

SEQ ID NO: 165272 - RNA, 24 nt, Artificial Sequence
  Synthetic
aaaauguuaacaauuguugacucu

SEQ ID NO: 165273 - RNA, 18 nt, Artificial Sequence
  Synthetic
cacauacauauauacucu

SEQ ID NO: 165274 - RNA, 19 nt, Artificial Sequence
  Synthetic
acacauacauauauacucu

SEQ ID NO: 165275 - RNA, 20 nt, Artificial Sequence
  Synthetic
uacacauacauauauacucu

SEQ ID NO: 165276 - RNA, 18 nt, Artificial Sequence
  Synthetic
aauaauuuauccuacucu

SEQ ID NO: 165277 - RNA, 19 nt, Artificial Sequence
  Synthetic
aaauaauuuauccuacucu

SEQ ID NO: 165278 - RNA, 20 nt, Artificial Sequence
  Synthetic
caaauaauuuauccuacucu

SEQ ID NO: 165279 - RNA, 21 nt, Artificial Sequence
  Synthetic
ugggcaagucacuuaaccucu

SEQ ID NO: 165280 - RNA, 22 nt, Artificial Sequence
  Synthetic
uugggcaagucacuuaaccucu

SEQ ID NO: 165281 - RNA, 23 nt, Artificial Sequence
  Synthetic
cuugggcaagucacuuaaccucu

SEQ ID NO: 165282 - RNA, 24 nt, Artificial Sequence
  Synthetic
ccuugggcaagucacuuaaccucu

SEQ ID NO: 165283 - RNA, 18 nt, Artificial Sequence
  Synthetic
ucagaugacuuaaccucu

SEQ ID NO: 165284 - RNA, 20 nt, Artificial Sequence
  Synthetic
agucagaugacuuaaccucu

SEQ ID NO: 165285 - RNA, 18 nt, Artificial Sequence
  Synthetic
auaauaaaaucuaccucu

SEQ ID NO: 165286 - RNA, 19 nt, Artificial Sequence
  Synthetic
aauaauaaaaucuaccucu

SEQ ID NO: 165287 - RNA, 20 nt, Artificial Sequence
  Synthetic
caauaauaaaaucuaccucu

SEQ ID NO: 165288 - RNA, 18 nt, Artificial Sequence
  Synthetic
ccccaguggcauagcucu

SEQ ID NO: 165289 - RNA, 19 nt, Artificial Sequence
  Synthetic
cccccaguggcauagcucu

SEQ ID NO: 165290 - RNA, 18 nt, Artificial Sequence
  Synthetic
auacacauaauuggcucu

SEQ ID NO: 165291 - RNA, 20 nt, Artificial Sequence
  Synthetic
agauacacauaauuggcucu

SEQ ID NO: 165292 - RNA, 22 nt, Artificial Sequence
  Synthetic
agagauacacauaauuggcucu

SEQ ID NO: 165293 - RNA, 23 nt, Artificial Sequence
  Synthetic
aagagauacacauaauuggcucu

SEQ ID NO: 165294 - RNA, 24 nt, Artificial Sequence
  Synthetic
aaagagauacacauaauuggcucu

SEQ ID NO: 165295 - RNA, 21 nt, Artificial Sequence
  Synthetic
augauucuacucuacaucucu

SEQ ID NO: 165296 - RNA, 22 nt, Artificial Sequence
  Synthetic
caugauucuacucuacaucucu

SEQ ID NO: 165297 - RNA, 23 nt, Artificial Sequence
  Synthetic
ccaugauucuacucuacaucucu

SEQ ID NO: 165298 - RNA, 24 nt, Artificial Sequence
  Synthetic
accaugauucuacucuacaucucu

SEQ ID NO: 165299 - RNA, 18 nt, Artificial Sequence
  Synthetic
auaaaaugaaauaucucu

SEQ ID NO: 165300 - RNA, 19 nt, Artificial Sequence
  Synthetic
aauaaaaugaaauaucucu

SEQ ID NO: 165301 - RNA, 20 nt, Artificial Sequence
  Synthetic
aaauaaaaugaaauaucucu

SEQ ID NO: 165302 - RNA, 18 nt, Artificial Sequence
  Synthetic
cgagggcuugcucucucu

SEQ ID NO: 165303 - RNA, 19 nt, Artificial Sequence
  Synthetic
ucgagggcuugcucucucu

SEQ ID NO: 165304 - RNA, 20 nt, Artificial Sequence
  Synthetic
cucgagggcuugcucucucu

SEQ ID NO: 165305 - RNA, 18 nt, Artificial Sequence
  Synthetic
aucucucucucucucucu

SEQ ID NO: 165306 - RNA, 19 nt, Artificial Sequence
  Synthetic
aaucucucucucucucucu

SEQ ID NO: 165307 - RNA, 20 nt, Artificial Sequence
  Synthetic
caaucucucucucucucucu

SEQ ID NO: 165308 - RNA, 21 nt, Artificial Sequence
  Synthetic
ucaaucucucucucucucucu

SEQ ID NO: 165309 - RNA, 22 nt, Artificial Sequence
  Synthetic
cucaaucucucucucucucucu

SEQ ID NO: 165310 - RNA, 23 nt, Artificial Sequence
  Synthetic
ucucaaucucucucucucucucu

SEQ ID NO: 165311 - RNA, 24 nt, Artificial Sequence
  Synthetic
cucucaaucucucucucucucucu

SEQ ID NO: 165312 - RNA, 19 nt, Artificial Sequence
  Synthetic
agucuuuucauaugucucu

SEQ ID NO: 165313 - RNA, 20 nt, Artificial Sequence
  Synthetic
uagucuuuucauaugucucu

SEQ ID NO: 165314 - RNA, 18 nt, Artificial Sequence
  Synthetic
uacugucaaauguucucu

SEQ ID NO: 165315 - RNA, 19 nt, Artificial Sequence
  Synthetic
auacugucaaauguucucu

SEQ ID NO: 165316 - RNA, 21 nt, Artificial Sequence
  Synthetic
uaagcaacuucagcaaagucu

SEQ ID NO: 165317 - RNA, 22 nt, Artificial Sequence
  Synthetic
auaagcaacuucagcaaagucu

SEQ ID NO: 165318 - RNA, 24 nt, Artificial Sequence
  Synthetic
ugauaagcaacuucagcaaagucu

SEQ ID NO: 165319 - RNA, 19 nt, Artificial Sequence
  Synthetic
agcaacuucagccaagucu

SEQ ID NO: 165320 - RNA, 21 nt, Artificial Sequence
  Synthetic
cgagcaacuucagccaagucu

SEQ ID NO: 165321 - RNA, 22 nt, Artificial Sequence
  Synthetic
acgagcaacuucagccaagucu

SEQ ID NO: 165322 - RNA, 23 nt, Artificial Sequence
  Synthetic
uacgagcaacuucagccaagucu

SEQ ID NO: 165323 - RNA, 24 nt, Artificial Sequence
  Synthetic
uuacgagcaacuucagccaagucu

SEQ ID NO: 165324 - RNA, 18 nt, Artificial Sequence
  Synthetic
ccacgugguguugagucu

SEQ ID NO: 165325 - RNA, 20 nt, Artificial Sequence
  Synthetic
ugccacgugguguugagucu

SEQ ID NO: 165326 - RNA, 21 nt, Artificial Sequence
  Synthetic
cugccacgugguguugagucu

SEQ ID NO: 165327 - RNA, 22 nt, Artificial Sequence
  Synthetic
acugccacgugguguugagucu

SEQ ID NO: 165328 - RNA, 23 nt, Artificial Sequence
  Synthetic
aacugccacgugguguugagucu

SEQ ID NO: 165329 - RNA, 24 nt, Artificial Sequence
  Synthetic
caacugccacgugguguugagucu

SEQ ID NO: 165330 - RNA, 21 nt, Artificial Sequence
  Synthetic
uuugauguauaaaaauagucu

SEQ ID NO: 165331 - RNA, 22 nt, Artificial Sequence
  Synthetic
uuuugauguauaaaaauagucu

SEQ ID NO: 165332 - RNA, 23 nt, Artificial Sequence
  Synthetic
auuuugauguauaaaaauagucu

SEQ ID NO: 165333 - RNA, 24 nt, Artificial Sequence
  Synthetic
uauuuugauguauaaaaauagucu

SEQ ID NO: 165334 - RNA, 21 nt, Artificial Sequence
  Synthetic
cuauucuguuucauuuggucu

SEQ ID NO: 165335 - RNA, 22 nt, Artificial Sequence
  Synthetic
ucuauucuguuucauuuggucu

SEQ ID NO: 165336 - RNA, 23 nt, Artificial Sequence
  Synthetic
cucuauucuguuucauuuggucu

SEQ ID NO: 165337 - RNA, 24 nt, Artificial Sequence
  Synthetic
ucucuauucuguuucauuuggucu

SEQ ID NO: 165338 - RNA, 19 nt, Artificial Sequence
  Synthetic
ugcauggaaaucucugucu

SEQ ID NO: 165339 - RNA, 20 nt, Artificial Sequence
  Synthetic
cugcauggaaaucucugucu

SEQ ID NO: 165340 - RNA, 21 nt, Artificial Sequence
  Synthetic
ucugcauggaaaucucugucu

SEQ ID NO: 165341 - RNA, 22 nt, Artificial Sequence
  Synthetic
aucugcauggaaaucucugucu

SEQ ID NO: 165342 - RNA, 23 nt, Artificial Sequence
  Synthetic
caucugcauggaaaucucugucu

SEQ ID NO: 165343 - RNA, 24 nt, Artificial Sequence
  Synthetic
ccaucugcauggaaaucucugucu

SEQ ID NO: 165344 - RNA, 20 nt, Artificial Sequence
  Synthetic
aggcauuuuucccauugucu

SEQ ID NO: 165345 - RNA, 21 nt, Artificial Sequence
  Synthetic
aaggcauuuuucccauugucu

SEQ ID NO: 165346 - RNA, 23 nt, Artificial Sequence
  Synthetic
ugaaggcauuuuucccauugucu

SEQ ID NO: 165347 - RNA, 19 nt, Artificial Sequence
  Synthetic
ugaacucacauccuugucu

SEQ ID NO: 165348 - RNA, 20 nt, Artificial Sequence
  Synthetic
uugaacucacauccuugucu

SEQ ID NO: 165349 - RNA, 21 nt, Artificial Sequence
  Synthetic
uuugaacucacauccuugucu

SEQ ID NO: 165350 - RNA, 22 nt, Artificial Sequence
  Synthetic
auuugaacucacauccuugucu

SEQ ID NO: 165351 - RNA, 23 nt, Artificial Sequence
  Synthetic
uauuugaacucacauccuugucu

SEQ ID NO: 165352 - RNA, 24 nt, Artificial Sequence
  Synthetic
cuauuugaacucacauccuugucu

SEQ ID NO: 165353 - RNA, 18 nt, Artificial Sequence
  Synthetic
uuacuuauuuaguugucu

SEQ ID NO: 165354 - RNA, 19 nt, Artificial Sequence
  Synthetic
uuuacuuauuuaguugucu

SEQ ID NO: 165355 - RNA, 20 nt, Artificial Sequence
  Synthetic
uuuuacuuauuuaguugucu

SEQ ID NO: 165356 - RNA, 19 nt, Artificial Sequence
  Synthetic
ugcuauuauaauuuugucu

SEQ ID NO: 165357 - RNA, 20 nt, Artificial Sequence
  Synthetic
augcuauuauaauuuugucu

SEQ ID NO: 165358 - RNA, 18 nt, Artificial Sequence
  Synthetic
uuuuuauuugcuaauucu

SEQ ID NO: 165359 - RNA, 19 nt, Artificial Sequence
  Synthetic
auuuuuauuugcuaauucu

SEQ ID NO: 165360 - RNA, 20 nt, Artificial Sequence
  Synthetic
uauuuuuauuugcuaauucu

SEQ ID NO: 165361 - RNA, 21 nt, Artificial Sequence
  Synthetic
auauuuuuauuugcuaauucu

SEQ ID NO: 165362 - RNA, 22 nt, Artificial Sequence
  Synthetic
cauauuuuuauuugcuaauucu

SEQ ID NO: 165363 - RNA, 23 nt, Artificial Sequence
  Synthetic
ucauauuuuuauuugcuaauucu

SEQ ID NO: 165364 - RNA, 24 nt, Artificial Sequence
  Synthetic
uucauauuuuuauuugcuaauucu

SEQ ID NO: 165365 - RNA, 18 nt, Artificial Sequence
  Synthetic
aauauuuuuacccauucu

SEQ ID NO: 165366 - RNA, 19 nt, Artificial Sequence
  Synthetic
aaauauuuuuacccauucu

SEQ ID NO: 165367 - RNA, 20 nt, Artificial Sequence
  Synthetic
caaauauuuuuacccauucu

SEQ ID NO: 165368 - RNA, 21 nt, Artificial Sequence
  Synthetic
acaaauauuuuuacccauucu

SEQ ID NO: 165369 - RNA, 22 nt, Artificial Sequence
  Synthetic
uacaaauauuuuuacccauucu

SEQ ID NO: 165370 - RNA, 23 nt, Artificial Sequence
  Synthetic
uuacaaauauuuuuacccauucu

SEQ ID NO: 165371 - RNA, 24 nt, Artificial Sequence
  Synthetic
uuuacaaauauuuuuacccauucu

SEQ ID NO: 165372 - RNA, 18 nt, Artificial Sequence
  Synthetic
acacuuuucccugauucu

SEQ ID NO: 165373 - RNA, 19 nt, Artificial Sequence
  Synthetic
cacacuuuucccugauucu

SEQ ID NO: 165374 - RNA, 20 nt, Artificial Sequence
  Synthetic
acacacuuuucccugauucu

SEQ ID NO: 165375 - RNA, 21 nt, Artificial Sequence
  Synthetic
uacacacuuuucccugauucu

SEQ ID NO: 165376 - RNA, 22 nt, Artificial Sequence
  Synthetic
auacacacuuuucccugauucu

SEQ ID NO: 165377 - RNA, 23 nt, Artificial Sequence
  Synthetic
aauacacacuuuucccugauucu

SEQ ID NO: 165378 - RNA, 24 nt, Artificial Sequence
  Synthetic
aaauacacacuuuucccugauucu

SEQ ID NO: 165379 - RNA, 21 nt, Artificial Sequence
  Synthetic
acacaacauagaaaaacuucu

SEQ ID NO: 165380 - RNA, 22 nt, Artificial Sequence
  Synthetic
aacacaacauagaaaaacuucu

SEQ ID NO: 165381 - RNA, 23 nt, Artificial Sequence
  Synthetic
aaacacaacauagaaaaacuucu

SEQ ID NO: 165382 - RNA, 24 nt, Artificial Sequence
  Synthetic
aaaacacaacauagaaaaacuucu

SEQ ID NO: 165383 - RNA, 19 nt, Artificial Sequence
  Synthetic
aguuguuauuuuuacuucu

SEQ ID NO: 165384 - RNA, 20 nt, Artificial Sequence
  Synthetic
uaguuguuauuuuuacuucu

SEQ ID NO: 165385 - RNA, 18 nt, Artificial Sequence
  Synthetic
uuucuacucucugcuucu

SEQ ID NO: 165386 - RNA, 19 nt, Artificial Sequence
  Synthetic
uuuucuacucucugcuucu

SEQ ID NO: 165387 - RNA, 20 nt, Artificial Sequence
  Synthetic
uuuuucuacucucugcuucu

SEQ ID NO: 165388 - RNA, 21 nt, Artificial Sequence
  Synthetic
auuuuucuacucucugcuucu

SEQ ID NO: 165389 - RNA, 22 nt, Artificial Sequence
  Synthetic
cauuuuucuacucucugcuucu

SEQ ID NO: 165390 - RNA, 23 nt, Artificial Sequence
  Synthetic
ccauuuuucuacucucugcuucu

SEQ ID NO: 165391 - RNA, 24 nt, Artificial Sequence
  Synthetic
accauuuuucuacucucugcuucu

SEQ ID NO: 165392 - RNA, 20 nt, Artificial Sequence
  Synthetic
uggagauggcuucugcuucu

SEQ ID NO: 165393 - RNA, 18 nt, Artificial Sequence
  Synthetic
cuuuugaaguaaaguucu

SEQ ID NO: 165394 - RNA, 19 nt, Artificial Sequence
  Synthetic
ccuuuugaaguaaaguucu

SEQ ID NO: 165395 - RNA, 20 nt, Artificial Sequence
  Synthetic
uccuuuugaaguaaaguucu

SEQ ID NO: 165396 - RNA, 20 nt, Artificial Sequence
  Synthetic
ugggagaaacccucaguucu

SEQ ID NO: 165397 - RNA, 21 nt, Artificial Sequence
  Synthetic
augggagaaacccucaguucu

SEQ ID NO: 165398 - RNA, 22 nt, Artificial Sequence
  Synthetic
aaugggagaaacccucaguucu

SEQ ID NO: 165399 - RNA, 23 nt, Artificial Sequence
  Synthetic
aaaugggagaaacccucaguucu

SEQ ID NO: 165400 - RNA, 24 nt, Artificial Sequence
  Synthetic
aaaaugggagaaacccucaguucu

SEQ ID NO: 165401 - RNA, 18 nt, Artificial Sequence
  Synthetic
agcauauucacagguucu

SEQ ID NO: 165402 - RNA, 19 nt, Artificial Sequence
  Synthetic
cagcauauucacagguucu

SEQ ID NO: 165403 - RNA, 20 nt, Artificial Sequence
  Synthetic
acagcauauucacagguucu

SEQ ID NO: 165404 - RNA, 21 nt, Artificial Sequence
  Synthetic
cacagcauauucacagguucu

SEQ ID NO: 165405 - RNA, 23 nt, Artificial Sequence
  Synthetic
agcacagcauauucacagguucu

SEQ ID NO: 165406 - RNA, 18 nt, Artificial Sequence
  Synthetic
uuguuuuuuaaugguucu

SEQ ID NO: 165407 - RNA, 19 nt, Artificial Sequence
  Synthetic
uuuguuuuuuaaugguucu

SEQ ID NO: 165408 - RNA, 21 nt, Artificial Sequence
  Synthetic
uguuuguuuuuuaaugguucu

SEQ ID NO: 165409 - RNA, 22 nt, Artificial Sequence
  Synthetic
uuguuuguuuuuuaaugguucu

SEQ ID NO: 165410 - RNA, 23 nt, Artificial Sequence
  Synthetic
uuuguuuguuuuuuaaugguucu

SEQ ID NO: 165411 - RNA, 18 nt, Artificial Sequence
  Synthetic
auucuacucucugguucu

SEQ ID NO: 165412 - RNA, 19 nt, Artificial Sequence
  Synthetic
cauucuacucucugguucu

SEQ ID NO: 165413 - RNA, 20 nt, Artificial Sequence
  Synthetic
ucauucuacucucugguucu

SEQ ID NO: 165414 - RNA, 21 nt, Artificial Sequence
  Synthetic
aucauucuacucucugguucu

SEQ ID NO: 165415 - RNA, 22 nt, Artificial Sequence
  Synthetic
uaucauucuacucucugguucu

SEQ ID NO: 165416 - RNA, 23 nt, Artificial Sequence
  Synthetic
cuaucauucuacucucugguucu

SEQ ID NO: 165417 - RNA, 24 nt, Artificial Sequence
  Synthetic
acuaucauucuacucucugguucu

SEQ ID NO: 165418 - RNA, 18 nt, Artificial Sequence
  Synthetic
uacaauuacugugguucu

SEQ ID NO: 165419 - RNA, 20 nt, Artificial Sequence
  Synthetic
uguacaauuacugugguucu

SEQ ID NO: 165420 - RNA, 22 nt, Artificial Sequence
  Synthetic
agaaauaauggugguauguucu

SEQ ID NO: 165421 - RNA, 23 nt, Artificial Sequence
  Synthetic
aagaaauaauggugguauguucu

SEQ ID NO: 165422 - RNA, 24 nt, Artificial Sequence
  Synthetic
uaagaaauaauggugguauguucu

SEQ ID NO: 165423 - RNA, 18 nt, Artificial Sequence
  Synthetic
agugcuaggugcuguucu

SEQ ID NO: 165424 - RNA, 19 nt, Artificial Sequence
  Synthetic
aagugcuaggugcuguucu

SEQ ID NO: 165425 - RNA, 20 nt, Artificial Sequence
  Synthetic
uaagugcuaggugcuguucu

SEQ ID NO: 165426 - RNA, 18 nt, Artificial Sequence
  Synthetic
auuuuauucaucuguucu

SEQ ID NO: 165427 - RNA, 20 nt, Artificial Sequence
  Synthetic
agauuuuauucaucuguucu

SEQ ID NO: 165428 - RNA, 18 nt, Artificial Sequence
  Synthetic
cuaugaucccaaauuucu

SEQ ID NO: 165429 - RNA, 19 nt, Artificial Sequence
  Synthetic
ucuaugaucccaaauuucu

SEQ ID NO: 165430 - RNA, 20 nt, Artificial Sequence
  Synthetic
uucuaugaucccaaauuucu

SEQ ID NO: 165431 - RNA, 18 nt, Artificial Sequence
  Synthetic
agcuaaccaugcauuucu

SEQ ID NO: 165432 - RNA, 19 nt, Artificial Sequence
  Synthetic
cagcuaaccaugcauuucu

SEQ ID NO: 165433 - RNA, 20 nt, Artificial Sequence
  Synthetic
ucagcuaaccaugcauuucu

SEQ ID NO: 165434 - RNA, 21 nt, Artificial Sequence
  Synthetic
aucagcuaaccaugcauuucu

SEQ ID NO: 165435 - RNA, 22 nt, Artificial Sequence
  Synthetic
aaucagcuaaccaugcauuucu

SEQ ID NO: 165436 - RNA, 23 nt, Artificial Sequence
  Synthetic
caaucagcuaaccaugcauuucu

SEQ ID NO: 165437 - RNA, 24 nt, Artificial Sequence
  Synthetic
ucaaucagcuaaccaugcauuucu

SEQ ID NO: 165438 - RNA, 21 nt, Artificial Sequence
  Synthetic
ccagugguuuaaaagauuucu

SEQ ID NO: 165439 - RNA, 22 nt, Artificial Sequence
  Synthetic
uccagugguuuaaaagauuucu

SEQ ID NO: 165440 - RNA, 23 nt, Artificial Sequence
  Synthetic
uuccagugguuuaaaagauuucu

SEQ ID NO: 165441 - RNA, 24 nt, Artificial Sequence
  Synthetic
uuuccagugguuuaaaagauuucu

SEQ ID NO: 165442 - RNA, 18 nt, Artificial Sequence
  Synthetic
ucaugcuaaucacuuucu

SEQ ID NO: 165443 - RNA, 19 nt, Artificial Sequence
  Synthetic
uucaugcuaaucacuuucu

SEQ ID NO: 165444 - RNA, 20 nt, Artificial Sequence
  Synthetic
cuucaugcuaaucacuuucu

SEQ ID NO: 165445 - RNA, 18 nt, Artificial Sequence
  Synthetic
uaauuuucaucucuuucu

SEQ ID NO: 165446 - RNA, 19 nt, Artificial Sequence
  Synthetic
auaauuuucaucucuuucu

SEQ ID NO: 165447 - RNA, 20 nt, Artificial Sequence
  Synthetic
aauaauuuucaucucuuucu

SEQ ID NO: 165448 - RNA, 19 nt, Artificial Sequence
  Synthetic
uguuaauuuaugucuuucu

SEQ ID NO: 165449 - RNA, 20 nt, Artificial Sequence
  Synthetic
uuguuaauuuaugucuuucu

SEQ ID NO: 165450 - RNA, 21 nt, Artificial Sequence
  Synthetic
uuuguuaauuuaugucuuucu

SEQ ID NO: 165451 - RNA, 22 nt, Artificial Sequence
  Synthetic
uuuuguuaauuuaugucuuucu

SEQ ID NO: 165452 - RNA, 24 nt, Artificial Sequence
  Synthetic
aguuuuguuaauuuaugucuuucu

SEQ ID NO: 165453 - RNA, 18 nt, Artificial Sequence
  Synthetic
uuucugauuugauuuucu

SEQ ID NO: 165454 - RNA, 20 nt, Artificial Sequence
  Synthetic
uguuucugauuugauuuucu

SEQ ID NO: 165455 - RNA, 24 nt, Artificial Sequence
  Synthetic
ugggaacaauauacaguauuuucu

SEQ ID NO: 165456 - RNA, 18 nt, Artificial Sequence
  Synthetic
auacugauuuccuuuucu

SEQ ID NO: 165457 - RNA, 20 nt, Artificial Sequence
  Synthetic
agauacugauuuccuuuucu

SEQ ID NO: 165458 - RNA, 18 nt, Artificial Sequence
  Synthetic
auuuuuucuuucuuuucu

SEQ ID NO: 165459 - RNA, 19 nt, Artificial Sequence
  Synthetic
uauuuuuucuuucuuuucu

SEQ ID NO: 165460 - RNA, 20 nt, Artificial Sequence
  Synthetic
auauuuuuucuuucuuuucu

SEQ ID NO: 165461 - RNA, 21 nt, Artificial Sequence
  Synthetic
aauauuuuuucuuucuuuucu

SEQ ID NO: 165462 - RNA, 22 nt, Artificial Sequence
  Synthetic
uaauauuuuuucuuucuuuucu

SEQ ID NO: 165463 - RNA, 23 nt, Artificial Sequence
  Synthetic
uuaauauuuuuucuuucuuuucu

SEQ ID NO: 165464 - RNA, 24 nt, Artificial Sequence
  Synthetic
cuuaauauuuuuucuuucuuuucu

SEQ ID NO: 165465 - RNA, 18 nt, Artificial Sequence
  Synthetic
caaacauuuuauuuuucu

SEQ ID NO: 165466 - RNA, 19 nt, Artificial Sequence
  Synthetic
ucaaacauuuuauuuuucu

SEQ ID NO: 165467 - RNA, 20 nt, Artificial Sequence
  Synthetic
uucaaacauuuuauuuuucu

SEQ ID NO: 165468 - RNA, 18 nt, Artificial Sequence
  Synthetic
uuuucuuguuuuuuuucu

SEQ ID NO: 165469 - RNA, 19 nt, Artificial Sequence
  Synthetic
auuuucuuguuuuuuuucu

SEQ ID NO: 165470 - RNA, 20 nt, Artificial Sequence
  Synthetic
uauuuucuuguuuuuuuucu

SEQ ID NO: 165471 - RNA, 21 nt, Artificial Sequence
  Synthetic
auauuuucuuguuuuuuuucu

SEQ ID NO: 165472 - RNA, 22 nt, Artificial Sequence
  Synthetic
aauauuuucuuguuuuuuuucu

SEQ ID NO: 165473 - RNA, 23 nt, Artificial Sequence
  Synthetic
uaauauuuucuuguuuuuuuucu

SEQ ID NO: 165474 - RNA, 24 nt, Artificial Sequence
  Synthetic
cuaauauuuucuuguuuuuuuucu

SEQ ID NO: 165475 - RNA, 18 nt, Artificial Sequence
  Synthetic
uucuuucccugaaaaagu

SEQ ID NO: 165476 - RNA, 19 nt, Artificial Sequence
  Synthetic
cuucuuucccugaaaaagu

SEQ ID NO: 165477 - RNA, 20 nt, Artificial Sequence
  Synthetic
acuucuuucccugaaaaagu

SEQ ID NO: 165478 - RNA, 18 nt, Artificial Sequence
  Synthetic
aaaaaaaaugcuaaaagu

SEQ ID NO: 165479 - RNA, 19 nt, Artificial Sequence
  Synthetic
aaaaaaaaaugcuaaaagu

SEQ ID NO: 165480 - RNA, 20 nt, Artificial Sequence
  Synthetic
aaaaaaaaaaugcuaaaagu

SEQ ID NO: 165481 - RNA, 18 nt, Artificial Sequence
  Synthetic
caaaaagggagacaaagu

SEQ ID NO: 165482 - RNA, 20 nt, Artificial Sequence
  Synthetic
agcaaaaagggagacaaagu

SEQ ID NO: 165483 - RNA, 18 nt, Artificial Sequence
  Synthetic
aacaggaaaagucaaagu

SEQ ID NO: 165484 - RNA, 19 nt, Artificial Sequence
  Synthetic
aaacaggaaaagucaaagu

SEQ ID NO: 165485 - RNA, 20 nt, Artificial Sequence
  Synthetic
aaaacaggaaaagucaaagu

SEQ ID NO: 165486 - RNA, 21 nt, Artificial Sequence
  Synthetic
ucugacuuguacuuucaaagu

SEQ ID NO: 165487 - RNA, 22 nt, Artificial Sequence
  Synthetic
uucugacuuguacuuucaaagu

SEQ ID NO: 165488 - RNA, 23 nt, Artificial Sequence
  Synthetic
auucugacuuguacuuucaaagu

SEQ ID NO: 165489 - RNA, 18 nt, Artificial Sequence
  Synthetic
agaauggggggagaaagu

SEQ ID NO: 165490 - RNA, 20 nt, Artificial Sequence
  Synthetic
agagaauggggggagaaagu

SEQ ID NO: 165491 - RNA, 18 nt, Artificial Sequence
  Synthetic
aauauuguuuuagaaagu

SEQ ID NO: 165492 - RNA, 19 nt, Artificial Sequence
  Synthetic
aaauauuguuuuagaaagu

SEQ ID NO: 165493 - RNA, 18 nt, Artificial Sequence
  Synthetic
cuagaaaacugauaaagu

SEQ ID NO: 165494 - RNA, 19 nt, Artificial Sequence
  Synthetic
ccuagaaaacugauaaagu

SEQ ID NO: 165495 - RNA, 20 nt, Artificial Sequence
  Synthetic
cccuagaaaacugauaaagu

SEQ ID NO: 165496 - RNA, 18 nt, Artificial Sequence
  Synthetic
uuauuuauuuucuaaagu

SEQ ID NO: 165497 - RNA, 19 nt, Artificial Sequence
  Synthetic
auuauuuauuuucuaaagu

SEQ ID NO: 165498 - RNA, 20 nt, Artificial Sequence
  Synthetic
uauuauuuauuuucuaaagu

SEQ ID NO: 165499 - RNA, 18 nt, Artificial Sequence
  Synthetic
aucccucccacaacaagu

SEQ ID NO: 165500 - RNA, 21 nt, Artificial Sequence
  Synthetic
uggaucccucccacaacaagu

SEQ ID NO: 165501 - RNA, 22 nt, Artificial Sequence
  Synthetic
cuggaucccucccacaacaagu

SEQ ID NO: 165502 - RNA, 23 nt, Artificial Sequence
  Synthetic
acuggaucccucccacaacaagu

SEQ ID NO: 165503 - RNA, 24 nt, Artificial Sequence
  Synthetic
cacuggaucccucccacaacaagu

SEQ ID NO: 165504 - RNA, 18 nt, Artificial Sequence
  Synthetic
uuucuaaaauuaucaagu

SEQ ID NO: 165505 - RNA, 19 nt, Artificial Sequence
  Synthetic
uuuucuaaaauuaucaagu

SEQ ID NO: 165506 - RNA, 20 nt, Artificial Sequence
  Synthetic
auuuucuaaaauuaucaagu

SEQ ID NO: 165507 - RNA, 18 nt, Artificial Sequence
  Synthetic
uucuuugaucucagaagu

SEQ ID NO: 165508 - RNA, 19 nt, Artificial Sequence
  Synthetic
auucuuugaucucagaagu

SEQ ID NO: 165509 - RNA, 18 nt, Artificial Sequence
  Synthetic
augagaaaaaaaggaagu

SEQ ID NO: 165510 - RNA, 19 nt, Artificial Sequence
  Synthetic
aaugagaaaaaaaggaagu

SEQ ID NO: 165511 - RNA, 20 nt, Artificial Sequence
  Synthetic
caaugagaaaaaaaggaagu

SEQ ID NO: 165512 - RNA, 18 nt, Artificial Sequence
  Synthetic
uuauuuccucugugaagu

SEQ ID NO: 165513 - RNA, 19 nt, Artificial Sequence
  Synthetic
uuuauuuccucugugaagu

SEQ ID NO: 165514 - RNA, 20 nt, Artificial Sequence
  Synthetic
uuuuauuuccucugugaagu

SEQ ID NO: 165515 - RNA, 18 nt, Artificial Sequence
  Synthetic
auauucucacccauaagu

SEQ ID NO: 165516 - RNA, 19 nt, Artificial Sequence
  Synthetic
cauauucucacccauaagu

SEQ ID NO: 165517 - RNA, 20 nt, Artificial Sequence
  Synthetic
acauauucucacccauaagu

SEQ ID NO: 165518 - RNA, 21 nt, Artificial Sequence
  Synthetic
cacauauucucacccauaagu

SEQ ID NO: 165519 - RNA, 22 nt, Artificial Sequence
  Synthetic
ccacauauucucacccauaagu

SEQ ID NO: 165520 - RNA, 23 nt, Artificial Sequence
  Synthetic
accacauauucucacccauaagu

SEQ ID NO: 165521 - RNA, 24 nt, Artificial Sequence
  Synthetic
caccacauauucucacccauaagu

SEQ ID NO: 165522 - RNA, 18 nt, Artificial Sequence
  Synthetic
auugagauacagauaagu

SEQ ID NO: 165523 - RNA, 19 nt, Artificial Sequence
  Synthetic
aauugagauacagauaagu

SEQ ID NO: 165524 - RNA, 20 nt, Artificial Sequence
  Synthetic
aaauugagauacagauaagu

SEQ ID NO: 165525 - RNA, 18 nt, Artificial Sequence
  Synthetic
auggacucacucguaagu

SEQ ID NO: 165526 - RNA, 19 nt, Artificial Sequence
  Synthetic
cauggacucacucguaagu

SEQ ID NO: 165527 - RNA, 21 nt, Artificial Sequence
  Synthetic
ugcauggacucacucguaagu

SEQ ID NO: 165528 - RNA, 22 nt, Artificial Sequence
  Synthetic
cugcauggacucacucguaagu

SEQ ID NO: 165529 - RNA, 23 nt, Artificial Sequence
  Synthetic
acugcauggacucacucguaagu

SEQ ID NO: 165530 - RNA, 24 nt, Artificial Sequence
  Synthetic
cacugcauggacucacucguaagu

SEQ ID NO: 165531 - RNA, 21 nt, Artificial Sequence
  Synthetic
ugcauguucucacucguaagu

SEQ ID NO: 165532 - RNA, 22 nt, Artificial Sequence
  Synthetic
cugcauguucucacucguaagu

SEQ ID NO: 165533 - RNA, 23 nt, Artificial Sequence
  Synthetic
acugcauguucucacucguaagu

SEQ ID NO: 165534 - RNA, 24 nt, Artificial Sequence
  Synthetic
cacugcauguucucacucguaagu

SEQ ID NO: 165535 - RNA, 18 nt, Artificial Sequence
  Synthetic
uccuuuuuagaagacagu

SEQ ID NO: 165536 - RNA, 19 nt, Artificial Sequence
  Synthetic
auccuuuuuagaagacagu

SEQ ID NO: 165537 - RNA, 20 nt, Artificial Sequence
  Synthetic
aauccuuuuuagaagacagu

SEQ ID NO: 165538 - RNA, 22 nt, Artificial Sequence
  Synthetic
ugagauaccaucucacaccagu

SEQ ID NO: 165539 - RNA, 23 nt, Artificial Sequence
  Synthetic
augagauaccaucucacaccagu

SEQ ID NO: 165540 - RNA, 24 nt, Artificial Sequence
  Synthetic
aaugagauaccaucucacaccagu

SEQ ID NO: 165541 - RNA, 18 nt, Artificial Sequence
  Synthetic
auagcaucucacaccagu

SEQ ID NO: 165542 - RNA, 20 nt, Artificial Sequence
  Synthetic
agauagcaucucacaccagu

SEQ ID NO: 165543 - RNA, 22 nt, Artificial Sequence
  Synthetic
cgagauagcaucucacaccagu

SEQ ID NO: 165544 - RNA, 23 nt, Artificial Sequence
  Synthetic
acgagauagcaucucacaccagu

SEQ ID NO: 165545 - RNA, 24 nt, Artificial Sequence
  Synthetic
aacgagauagcaucucacaccagu

SEQ ID NO: 165546 - RNA, 18 nt, Artificial Sequence
  Synthetic
auaccaucacauaccagu

SEQ ID NO: 165547 - RNA, 20 nt, Artificial Sequence
  Synthetic
agauaccaucacauaccagu

SEQ ID NO: 165548 - RNA, 23 nt, Artificial Sequence
  Synthetic
aggagauaccaucacauaccagu

SEQ ID NO: 165549 - RNA, 24 nt, Artificial Sequence
  Synthetic
aaggagauaccaucacauaccagu

SEQ ID NO: 165550 - RNA, 18 nt, Artificial Sequence
  Synthetic
caaagacagccagccagu

SEQ ID NO: 165551 - RNA, 19 nt, Artificial Sequence
  Synthetic
ccaaagacagccagccagu

SEQ ID NO: 165552 - RNA, 20 nt, Artificial Sequence
  Synthetic
cccaaagacagccagccagu

SEQ ID NO: 165553 - RNA, 18 nt, Artificial Sequence
  Synthetic
auaccaucucacuccagu

SEQ ID NO: 165554 - RNA, 20 nt, Artificial Sequence
  Synthetic
agauaccaucucacuccagu

SEQ ID NO: 165555 - RNA, 22 nt, Artificial Sequence
  Synthetic
ugagauaccaucucacuccagu

SEQ ID NO: 165556 - RNA, 23 nt, Artificial Sequence
  Synthetic
augagauaccaucucacuccagu

SEQ ID NO: 165557 - RNA, 24 nt, Artificial Sequence
  Synthetic
aaugagauaccaucucacuccagu

SEQ ID NO: 165558 - RNA, 18 nt, Artificial Sequence
  Synthetic
auaucaucucauuccagu

SEQ ID NO: 165559 - RNA, 20 nt, Artificial Sequence
  Synthetic
agauaucaucucauuccagu

SEQ ID NO: 165560 - RNA, 22 nt, Artificial Sequence
  Synthetic
ugagauaucaucucauuccagu

SEQ ID NO: 165561 - RNA, 23 nt, Artificial Sequence
  Synthetic
augagauaucaucucauuccagu

SEQ ID NO: 165562 - RNA, 24 nt, Artificial Sequence
  Synthetic
aaugagauaucaucucauuccagu

SEQ ID NO: 165563 - RNA, 22 nt, Artificial Sequence
  Synthetic
ugguacaggcucuugccucagu

SEQ ID NO: 165564 - RNA, 23 nt, Artificial Sequence
  Synthetic
cugguacaggcucuugccucagu

SEQ ID NO: 165565 - RNA, 18 nt, Artificial Sequence
  Synthetic
uauugcauauaucucagu

SEQ ID NO: 165566 - RNA, 19 nt, Artificial Sequence
  Synthetic
uuauugcauauaucucagu

SEQ ID NO: 165567 - RNA, 20 nt, Artificial Sequence
  Synthetic
uuuauugcauauaucucagu

SEQ ID NO: 165568 - RNA, 18 nt, Artificial Sequence
  Synthetic
ccaaugauggauaagagu

SEQ ID NO: 165569 - RNA, 20 nt, Artificial Sequence
  Synthetic
agccaaugauggauaagagu

SEQ ID NO: 165570 - RNA, 18 nt, Artificial Sequence
  Synthetic
cccaccccaccuaugagu

SEQ ID NO: 165571 - RNA, 19 nt, Artificial Sequence
  Synthetic
ucccaccccaccuaugagu

SEQ ID NO: 165572 - RNA, 20 nt, Artificial Sequence
  Synthetic
uucccaccccaccuaugagu

SEQ ID NO: 165573 - RNA, 22 nt, Artificial Sequence
  Synthetic
uguucaauucccaccuaugagu

SEQ ID NO: 165574 - RNA, 23 nt, Artificial Sequence
  Synthetic
uuguucaauucccaccuaugagu

SEQ ID NO: 165575 - RNA, 24 nt, Artificial Sequence
  Synthetic
auuguucaauucccaccuaugagu

SEQ ID NO: 165576 - RNA, 18 nt, Artificial Sequence
  Synthetic
caaaagauaauauauagu

SEQ ID NO: 165577 - RNA, 19 nt, Artificial Sequence
  Synthetic
acaaaagauaauauauagu

SEQ ID NO: 165578 - RNA, 20 nt, Artificial Sequence
  Synthetic
aacaaaagauaauauauagu

SEQ ID NO: 165579 - RNA, 18 nt, Artificial Sequence
  Synthetic
uuuuuuuuaauuucuagu

SEQ ID NO: 165580 - RNA, 19 nt, Artificial Sequence
  Synthetic
auuuuuuuuaauuucuagu

SEQ ID NO: 165581 - RNA, 20 nt, Artificial Sequence
  Synthetic
aauuuuuuuuaauuucuagu

SEQ ID NO: 165582 - RNA, 19 nt, Artificial Sequence
  Synthetic
ugagcaaggggagaguagu

SEQ ID NO: 165583 - RNA, 18 nt, Artificial Sequence
  Synthetic
cucugccucccgaguagu

SEQ ID NO: 165584 - RNA, 19 nt, Artificial Sequence
  Synthetic
ccucugccucccgaguagu

SEQ ID NO: 165585 - RNA, 21 nt, Artificial Sequence
  Synthetic
ugccucugccucccgaguagu

SEQ ID NO: 165586 - RNA, 22 nt, Artificial Sequence
  Synthetic
cugccucugccucccgaguagu

SEQ ID NO: 165587 - RNA, 23 nt, Artificial Sequence
  Synthetic
ccugccucugccucccgaguagu

SEQ ID NO: 165588 - RNA, 24 nt, Artificial Sequence
  Synthetic
uccugccucugccucccgaguagu

SEQ ID NO: 165589 - RNA, 18 nt, Artificial Sequence
  Synthetic
cucagccuccugaguagu

SEQ ID NO: 165590 - RNA, 19 nt, Artificial Sequence
  Synthetic
ccucagccuccugaguagu

SEQ ID NO: 165591 - RNA, 20 nt, Artificial Sequence
  Synthetic
accucagccuccugaguagu

SEQ ID NO: 165592 - RNA, 21 nt, Artificial Sequence
  Synthetic
caccucagccuccugaguagu

SEQ ID NO: 165593 - RNA, 22 nt, Artificial Sequence
  Synthetic
ccaccucagccuccugaguagu

SEQ ID NO: 165594 - RNA, 23 nt, Artificial Sequence
  Synthetic
cccaccucagccuccugaguagu

SEQ ID NO: 165595 - RNA, 24 nt, Artificial Sequence
  Synthetic
ucccaccucagccuccugaguagu

SEQ ID NO: 165596 - RNA, 18 nt, Artificial Sequence
  Synthetic
agacuugaaaguuuuagu

SEQ ID NO: 165597 - RNA, 19 nt, Artificial Sequence
  Synthetic
uagacuugaaaguuuuagu

SEQ ID NO: 165598 - RNA, 20 nt, Artificial Sequence
  Synthetic
auagacuugaaaguuuuagu

SEQ ID NO: 165599 - RNA, 20 nt, Artificial Sequence
  Synthetic
agggcacaugugcacaacgu

SEQ ID NO: 165600 - RNA, 21 nt, Artificial Sequence
  Synthetic
uagggcacaugugcacaacgu

SEQ ID NO: 165601 - RNA, 22 nt, Artificial Sequence
  Synthetic
cuagggcacaugugcacaacgu

SEQ ID NO: 165602 - RNA, 23 nt, Artificial Sequence
  Synthetic
ucuagggcacaugugcacaacgu

SEQ ID NO: 165603 - RNA, 24 nt, Artificial Sequence
  Synthetic
uucuagggcacaugugcacaacgu

SEQ ID NO: 165604 - RNA, 18 nt, Artificial Sequence
  Synthetic
agguugcugaagacccgu

SEQ ID NO: 165605 - RNA, 19 nt, Artificial Sequence
  Synthetic
aagguugcugaagacccgu

SEQ ID NO: 165606 - RNA, 20 nt, Artificial Sequence
  Synthetic
uaagguugcugaagacccgu

SEQ ID NO: 165607 - RNA, 21 nt, Artificial Sequence
  Synthetic
uuaagguugcugaagacccgu

SEQ ID NO: 165608 - RNA, 22 nt, Artificial Sequence
  Synthetic
auuaagguugcugaagacccgu

SEQ ID NO: 165609 - RNA, 23 nt, Artificial Sequence
  Synthetic
aauuaagguugcugaagacccgu

SEQ ID NO: 165610 - RNA, 18 nt, Artificial Sequence
  Synthetic
uauauauuuauuggccgu

SEQ ID NO: 165611 - RNA, 19 nt, Artificial Sequence
  Synthetic
uuauauauuuauuggccgu

SEQ ID NO: 165612 - RNA, 20 nt, Artificial Sequence
  Synthetic
uuuauauauuuauuggccgu

SEQ ID NO: 165613 - RNA, 21 nt, Artificial Sequence
  Synthetic
uucuuuaacuugagugugcgu

SEQ ID NO: 165614 - RNA, 24 nt, Artificial Sequence
  Synthetic
ugguucuuuaacuugagugugcgu

SEQ ID NO: 165615 - RNA, 18 nt, Artificial Sequence
  Synthetic
uuuuuguggguacaucgu

SEQ ID NO: 165616 - RNA, 19 nt, Artificial Sequence
  Synthetic
auuuuuguggguacaucgu

SEQ ID NO: 165617 - RNA, 20 nt, Artificial Sequence
  Synthetic
aauuuuuguggguacaucgu

SEQ ID NO: 165618 - RNA, 21 nt, Artificial Sequence
  Synthetic
uaauuuuuguggguacaucgu

SEQ ID NO: 165619 - RNA, 22 nt, Artificial Sequence
  Synthetic
uuaauuuuuguggguacaucgu

SEQ ID NO: 165620 - RNA, 23 nt, Artificial Sequence
  Synthetic
uuuaauuuuuguggguacaucgu

SEQ ID NO: 165621 - RNA, 24 nt, Artificial Sequence
  Synthetic
uuuuaauuuuuguggguacaucgu

SEQ ID NO: 165622 - RNA, 18 nt, Artificial Sequence
  Synthetic
cacgcuccuuuagcucgu

SEQ ID NO: 165623 - RNA, 19 nt, Artificial Sequence
  Synthetic
acacgcuccuuuagcucgu

SEQ ID NO: 165624 - RNA, 20 nt, Artificial Sequence
  Synthetic
aacacgcuccuuuagcucgu

SEQ ID NO: 165625 - RNA, 22 nt, Artificial Sequence
  Synthetic
agaacacgcuccuuuagcucgu

SEQ ID NO: 165626 - RNA, 23 nt, Artificial Sequence
  Synthetic
uagaacacgcuccuuuagcucgu

SEQ ID NO: 165627 - RNA, 24 nt, Artificial Sequence
  Synthetic
uuagaacacgcuccuuuagcucgu

SEQ ID NO: 165628 - RNA, 18 nt, Artificial Sequence
  Synthetic
uuguauauagugaaaggu

SEQ ID NO: 165629 - RNA, 19 nt, Artificial Sequence
  Synthetic
uuuguauauagugaaaggu

SEQ ID NO: 165630 - RNA, 20 nt, Artificial Sequence
  Synthetic
uuuuguauauagugaaaggu

SEQ ID NO: 165631 - RNA, 21 nt, Artificial Sequence
  Synthetic
uuuuuguauauagugaaaggu

SEQ ID NO: 165632 - RNA, 22 nt, Artificial Sequence
  Synthetic
auuuuuguauauagugaaaggu

SEQ ID NO: 165633 - RNA, 23 nt, Artificial Sequence
  Synthetic
aauuuuuguauauagugaaaggu

SEQ ID NO: 165634 - RNA, 24 nt, Artificial Sequence
  Synthetic
uaauuuuuguauauagugaaaggu

SEQ ID NO: 165635 - RNA, 21 nt, Artificial Sequence
  Synthetic
aggguggcgguugcugaaggu

SEQ ID NO: 165636 - RNA, 22 nt, Artificial Sequence
  Synthetic
caggguggcgguugcugaaggu

SEQ ID NO: 165637 - RNA, 23 nt, Artificial Sequence
  Synthetic
ucaggguggcgguugcugaaggu

SEQ ID NO: 165638 - RNA, 24 nt, Artificial Sequence
  Synthetic
aucaggguggcgguugcugaaggu

SEQ ID NO: 165639 - RNA, 18 nt, Artificial Sequence
  Synthetic
auacucucacucacaggu

SEQ ID NO: 165640 - RNA, 19 nt, Artificial Sequence
  Synthetic
cauacucucacucacaggu

SEQ ID NO: 165641 - RNA, 21 nt, Artificial Sequence
  Synthetic
ugcauacucucacucacaggu

SEQ ID NO: 165642 - RNA, 22 nt, Artificial Sequence
  Synthetic
cugcauacucucacucacaggu

SEQ ID NO: 165643 - RNA, 23 nt, Artificial Sequence
  Synthetic
acugcauacucucacucacaggu

SEQ ID NO: 165644 - RNA, 24 nt, Artificial Sequence
  Synthetic
cacugcauacucucacucacaggu

SEQ ID NO: 165645 - RNA, 18 nt, Artificial Sequence
  Synthetic
auauucucacucacaggu

SEQ ID NO: 165646 - RNA, 19 nt, Artificial Sequence
  Synthetic
cauauucucacucacaggu

SEQ ID NO: 165647 - RNA, 21 nt, Artificial Sequence
  Synthetic
cgcauauucucacucacaggu

SEQ ID NO: 165648 - RNA, 22 nt, Artificial Sequence
  Synthetic
ccgcauauucucacucacaggu

SEQ ID NO: 165649 - RNA, 23 nt, Artificial Sequence
  Synthetic
accgcauauucucacucacaggu

SEQ ID NO: 165650 - RNA, 24 nt, Artificial Sequence
  Synthetic
caccgcauauucucacucacaggu

SEQ ID NO: 165651 - RNA, 18 nt, Artificial Sequence
  Synthetic
aaugcugggauuacaggu

SEQ ID NO: 165652 - RNA, 19 nt, Artificial Sequence
  Synthetic
aaaugcugggauuacaggu

SEQ ID NO: 165653 - RNA, 20 nt, Artificial Sequence
  Synthetic
aaaaugcugggauuacaggu

SEQ ID NO: 165654 - RNA, 21 nt, Artificial Sequence
  Synthetic
aaaaaugcugggauuacaggu

SEQ ID NO: 165655 - RNA, 22 nt, Artificial Sequence
  Synthetic
caaaaaugcugggauuacaggu

SEQ ID NO: 165656 - RNA, 23 nt, Artificial Sequence
  Synthetic
ccaaaaaugcugggauuacaggu

SEQ ID NO: 165657 - RNA, 24 nt, Artificial Sequence
  Synthetic
uccaaaaaugcugggauuacaggu

SEQ ID NO: 165658 - RNA, 18 nt, Artificial Sequence
  Synthetic
uuacucugucacccaggu

SEQ ID NO: 165659 - RNA, 19 nt, Artificial Sequence
  Synthetic
cuuacucugucacccaggu

SEQ ID NO: 165660 - RNA, 20 nt, Artificial Sequence
  Synthetic
ucuuacucugucacccaggu

SEQ ID NO: 165661 - RNA, 22 nt, Artificial Sequence
  Synthetic
agucuuacucugucacccaggu

SEQ ID NO: 165662 - RNA, 23 nt, Artificial Sequence
  Synthetic
cagucuuacucugucacccaggu

SEQ ID NO: 165663 - RNA, 24 nt, Artificial Sequence
  Synthetic
acagucuuacucugucacccaggu

SEQ ID NO: 165664 - RNA, 18 nt, Artificial Sequence
  Synthetic
ucgcucugucgcccaggu

SEQ ID NO: 165665 - RNA, 19 nt, Artificial Sequence
  Synthetic
cucgcucugucgcccaggu

SEQ ID NO: 165666 - RNA, 20 nt, Artificial Sequence
  Synthetic
ucucgcucugucgcccaggu

SEQ ID NO: 165667 - RNA, 22 nt, Artificial Sequence
  Synthetic
agucucgcucugucgcccaggu

SEQ ID NO: 165668 - RNA, 23 nt, Artificial Sequence
  Synthetic
aagucucgcucugucgcccaggu

SEQ ID NO: 165669 - RNA, 18 nt, Artificial Sequence
  Synthetic
uuguuccauugcccaggu

SEQ ID NO: 165670 - RNA, 19 nt, Artificial Sequence
  Synthetic
uuuguuccauugcccaggu

SEQ ID NO: 165671 - RNA, 20 nt, Artificial Sequence
  Synthetic
uuuuguuccauugcccaggu

SEQ ID NO: 165672 - RNA, 22 nt, Artificial Sequence
  Synthetic
aguuuuguuccauugcccaggu

SEQ ID NO: 165673 - RNA, 18 nt, Artificial Sequence
  Synthetic
cacucuuguugcccaggu

SEQ ID NO: 165674 - RNA, 19 nt, Artificial Sequence
  Synthetic
ucacucuuguugcccaggu

SEQ ID NO: 165675 - RNA, 20 nt, Artificial Sequence
  Synthetic
uucacucuuguugcccaggu

SEQ ID NO: 165676 - RNA, 21 nt, Artificial Sequence
  Synthetic
uuucacucuuguugcccaggu

SEQ ID NO: 165677 - RNA, 23 nt, Artificial Sequence
  Synthetic
aguuucacucuuguugcccaggu

SEQ ID NO: 165678 - RNA, 18 nt, Artificial Sequence
  Synthetic
aacagaaaugccucaggu

SEQ ID NO: 165679 - RNA, 19 nt, Artificial Sequence
  Synthetic
aaacagaaaugccucaggu

SEQ ID NO: 165680 - RNA, 19 nt, Artificial Sequence
  Synthetic
aggaauuacauagagaggu

SEQ ID NO: 165681 - RNA, 20 nt, Artificial Sequence
  Synthetic
aaggaauuacauagagaggu

SEQ ID NO: 165682 - RNA, 19 nt, Artificial Sequence
  Synthetic
ugcuuugggaggccgaggu

SEQ ID NO: 165683 - RNA, 22 nt, Artificial Sequence
  Synthetic
aggugcuuugggaggccgaggu

SEQ ID NO: 165684 - RNA, 23 nt, Artificial Sequence
  Synthetic
caggugcuuugggaggccgaggu

SEQ ID NO: 165685 - RNA, 24 nt, Artificial Sequence
  Synthetic
ccaggugcuuugggaggccgaggu

SEQ ID NO: 165686 - RNA, 18 nt, Artificial Sequence
  Synthetic
uuuggagaauuuggaggu

SEQ ID NO: 165687 - RNA, 19 nt, Artificial Sequence
  Synthetic
uuuuggagaauuuggaggu

SEQ ID NO: 165688 - RNA, 20 nt, Artificial Sequence
  Synthetic
cuuuuggagaauuuggaggu

SEQ ID NO: 165689 - RNA, 18 nt, Artificial Sequence
  Synthetic
auguccucacucauaggu

SEQ ID NO: 165690 - RNA, 19 nt, Artificial Sequence
  Synthetic
cauguccucacucauaggu

SEQ ID NO: 165691 - RNA, 21 nt, Artificial Sequence
  Synthetic
cgcauguccucacucauaggu

SEQ ID NO: 165692 - RNA, 22 nt, Artificial Sequence
  Synthetic
ccgcauguccucacucauaggu

SEQ ID NO: 165693 - RNA, 23 nt, Artificial Sequence
  Synthetic
accgcauguccucacucauaggu

SEQ ID NO: 165694 - RNA, 24 nt, Artificial Sequence
  Synthetic
caccgcauguccucacucauaggu

SEQ ID NO: 165695 - RNA, 18 nt, Artificial Sequence
  Synthetic
auguucucgcucauaggu

SEQ ID NO: 165696 - RNA, 19 nt, Artificial Sequence
  Synthetic
cauguucucgcucauaggu

SEQ ID NO: 165697 - RNA, 21 nt, Artificial Sequence
  Synthetic
cgcauguucucgcucauaggu

SEQ ID NO: 165698 - RNA, 22 nt, Artificial Sequence
  Synthetic
ccgcauguucucgcucauaggu

SEQ ID NO: 165699 - RNA, 23 nt, Artificial Sequence
  Synthetic
accgcauguucucgcucauaggu

SEQ ID NO: 165700 - RNA, 24 nt, Artificial Sequence
  Synthetic
caccgcauguucucgcucauaggu

SEQ ID NO: 165701 - RNA, 22 nt, Artificial Sequence
  Synthetic
aguguggagguaggggauaggu

SEQ ID NO: 165702 - RNA, 23 nt, Artificial Sequence
  Synthetic
uaguguggagguaggggauaggu

SEQ ID NO: 165703 - RNA, 18 nt, Artificial Sequence
  Synthetic
aaguaaauauugauaggu

SEQ ID NO: 165704 - RNA, 19 nt, Artificial Sequence
  Synthetic
aaaguaaauauugauaggu

SEQ ID NO: 165705 - RNA, 20 nt, Artificial Sequence
  Synthetic
caaaguaaauauugauaggu

SEQ ID NO: 165706 - RNA, 21 nt, Artificial Sequence
  Synthetic
ucaaaguaaauauugauaggu

SEQ ID NO: 165707 - RNA, 22 nt, Artificial Sequence
  Synthetic
uucaaaguaaauauugauaggu

SEQ ID NO: 165708 - RNA, 23 nt, Artificial Sequence
  Synthetic
auucaaaguaaauauugauaggu

SEQ ID NO: 165709 - RNA, 24 nt, Artificial Sequence
  Synthetic
cauucaaaguaaauauugauaggu

SEQ ID NO: 165710 - RNA, 18 nt, Artificial Sequence
  Synthetic
auguucucacucuuaggu

SEQ ID NO: 165711 - RNA, 19 nt, Artificial Sequence
  Synthetic
cauguucucacucuuaggu

SEQ ID NO: 165712 - RNA, 21 nt, Artificial Sequence
  Synthetic
cgcauguucucacucuuaggu

SEQ ID NO: 165713 - RNA, 23 nt, Artificial Sequence
  Synthetic
agcgcauguucucacucuuaggu

SEQ ID NO: 165714 - RNA, 24 nt, Artificial Sequence
  Synthetic
cagcgcauguucucacucuuaggu

SEQ ID NO: 165715 - RNA, 18 nt, Artificial Sequence
  Synthetic
accacaacaggaaagggu

SEQ ID NO: 165716 - RNA, 19 nt, Artificial Sequence
  Synthetic
aaccacaacaggaaagggu

SEQ ID NO: 165717 - RNA, 20 nt, Artificial Sequence
  Synthetic
uaaccacaacaggaaagggu

SEQ ID NO: 165718 - RNA, 18 nt, Artificial Sequence
  Synthetic
cagccugggugacagggu

SEQ ID NO: 165719 - RNA, 19 nt, Artificial Sequence
  Synthetic
ccagccugggugacagggu

SEQ ID NO: 165720 - RNA, 20 nt, Artificial Sequence
  Synthetic
uccagccugggugacagggu

SEQ ID NO: 165721 - RNA, 21 nt, Artificial Sequence
  Synthetic
cuccagccugggugacagggu

SEQ ID NO: 165722 - RNA, 22 nt, Artificial Sequence
  Synthetic
acuccagccugggugacagggu

SEQ ID NO: 165723 - RNA, 23 nt, Artificial Sequence
  Synthetic
cacuccagccugggugacagggu

SEQ ID NO: 165724 - RNA, 20 nt, Artificial Sequence
  Synthetic
uggggguggggggcuagggu

SEQ ID NO: 165725 - RNA, 21 nt, Artificial Sequence
  Synthetic
uuggggguggggggcuagggu

SEQ ID NO: 165726 - RNA, 23 nt, Artificial Sequence
  Synthetic
uguuggggguggggggcuagggu

SEQ ID NO: 165727 - RNA, 24 nt, Artificial Sequence
  Synthetic
cuguuggggguggggggcuagggu

SEQ ID NO: 165728 - RNA, 18 nt, Artificial Sequence
  Synthetic
uuugguuggggguggggu

SEQ ID NO: 165729 - RNA, 19 nt, Artificial Sequence
  Synthetic
auuugguuggggguggggu

SEQ ID NO: 165730 - RNA, 20 nt, Artificial Sequence
  Synthetic
uauuugguuggggguggggu

SEQ ID NO: 165731 - RNA, 18 nt, Artificial Sequence
  Synthetic
aggacuguaggacugggu

SEQ ID NO: 165732 - RNA, 19 nt, Artificial Sequence
  Synthetic
caggacuguaggacugggu

SEQ ID NO: 165733 - RNA, 20 nt, Artificial Sequence
  Synthetic
ucaggacuguaggacugggu

SEQ ID NO: 165734 - RNA, 21 nt, Artificial Sequence
  Synthetic
uucaggacuguaggacugggu

SEQ ID NO: 165735 - RNA, 23 nt, Artificial Sequence
  Synthetic
aguucaggacuguaggacugggu

SEQ ID NO: 165736 - RNA, 24 nt, Artificial Sequence
  Synthetic
caguucaggacuguaggacugggu

SEQ ID NO: 165737 - RNA, 18 nt, Artificial Sequence
  Synthetic
uuaucucuucauuugggu

SEQ ID NO: 165738 - RNA, 19 nt, Artificial Sequence
  Synthetic
uuuaucucuucauuugggu

SEQ ID NO: 165739 - RNA, 20 nt, Artificial Sequence
  Synthetic
cuuuaucucuucauuugggu

SEQ ID NO: 165740 - RNA, 18 nt, Artificial Sequence
  Synthetic
uuuuauaaauacaauggu

SEQ ID NO: 165741 - RNA, 19 nt, Artificial Sequence
  Synthetic
uuuuuauaaauacaauggu

SEQ ID NO: 165742 - RNA, 20 nt, Artificial Sequence
  Synthetic
uuuuuuauaaauacaauggu

SEQ ID NO: 165743 - RNA, 21 nt, Artificial Sequence
  Synthetic
auuuuuuauaaauacaauggu

SEQ ID NO: 165744 - RNA, 22 nt, Artificial Sequence
  Synthetic
uauuuuuuauaaauacaauggu

SEQ ID NO: 165745 - RNA, 23 nt, Artificial Sequence
  Synthetic
uuauuuuuuauaaauacaauggu

SEQ ID NO: 165746 - RNA, 24 nt, Artificial Sequence
  Synthetic
uuuauuuuuuauaaauacaauggu

SEQ ID NO: 165747 - RNA, 20 nt, Artificial Sequence
  Synthetic
agguuuguuugggggauggu

SEQ ID NO: 165748 - RNA, 18 nt, Artificial Sequence
  Synthetic
cugauggccagugauggu

SEQ ID NO: 165749 - RNA, 19 nt, Artificial Sequence
  Synthetic
ucugauggccagugauggu

SEQ ID NO: 165750 - RNA, 20 nt, Artificial Sequence
  Synthetic
cucugauggccagugauggu

SEQ ID NO: 165751 - RNA, 21 nt, Artificial Sequence
  Synthetic
acucugauggccagugauggu

SEQ ID NO: 165752 - RNA, 22 nt, Artificial Sequence
  Synthetic
uacucugauggccagugauggu

SEQ ID NO: 165753 - RNA, 23 nt, Artificial Sequence
  Synthetic
uuacucugauggccagugauggu

SEQ ID NO: 165754 - RNA, 24 nt, Artificial Sequence
  Synthetic
auuacucugauggccagugauggu

SEQ ID NO: 165755 - RNA, 18 nt, Artificial Sequence
  Synthetic
uuaucauuuuuuuauggu

SEQ ID NO: 165756 - RNA, 19 nt, Artificial Sequence
  Synthetic
cuuaucauuuuuuuauggu

SEQ ID NO: 165757 - RNA, 20 nt, Artificial Sequence
  Synthetic
ucuuaucauuuuuuuauggu

SEQ ID NO: 165758 - RNA, 21 nt, Artificial Sequence
  Synthetic
uucuuaucauuuuuuuauggu

SEQ ID NO: 165759 - RNA, 22 nt, Artificial Sequence
  Synthetic
auucuuaucauuuuuuuauggu

SEQ ID NO: 165760 - RNA, 23 nt, Artificial Sequence
  Synthetic
cauucuuaucauuuuuuuauggu

SEQ ID NO: 165761 - RNA, 24 nt, Artificial Sequence
  Synthetic
acauucuuaucauuuuuuuauggu

SEQ ID NO: 165762 - RNA, 18 nt, Artificial Sequence
  Synthetic
ugagccaccaugccuggu

SEQ ID NO: 165763 - RNA, 20 nt, Artificial Sequence
  Synthetic
ugugagccaccaugccuggu

SEQ ID NO: 165764 - RNA, 23 nt, Artificial Sequence
  Synthetic
aggugugagccaccaugccuggu

SEQ ID NO: 165765 - RNA, 24 nt, Artificial Sequence
  Synthetic
caggugugagccaccaugccuggu

SEQ ID NO: 165766 - RNA, 18 nt, Artificial Sequence
  Synthetic
ucuugucuuucagcuggu

SEQ ID NO: 165767 - RNA, 19 nt, Artificial Sequence
  Synthetic
uucuugucuuucagcuggu

SEQ ID NO: 165768 - RNA, 20 nt, Artificial Sequence
  Synthetic
uuucuugucuuucagcuggu

SEQ ID NO: 165769 - RNA, 18 nt, Artificial Sequence
  Synthetic
auaaugaauaaugguggu

SEQ ID NO: 165770 - RNA, 19 nt, Artificial Sequence
  Synthetic
uauaaugaauaaugguggu

SEQ ID NO: 165771 - RNA, 20 nt, Artificial Sequence
  Synthetic
cuauaaugaauaaugguggu

SEQ ID NO: 165772 - RNA, 23 nt, Artificial Sequence
  Synthetic
uggcuauaaugaauaaugguggu

SEQ ID NO: 165773 - RNA, 24 nt, Artificial Sequence
  Synthetic
uuggcuauaaugaauaaugguggu

SEQ ID NO: 165774 - RNA, 18 nt, Artificial Sequence
  Synthetic
agcacuuuauauuguggu

SEQ ID NO: 165775 - RNA, 22 nt, Artificial Sequence
  Synthetic
agggagcacuuuauauuguggu

SEQ ID NO: 165776 - RNA, 23 nt, Artificial Sequence
  Synthetic
cagggagcacuuuauauuguggu

SEQ ID NO: 165777 - RNA, 18 nt, Artificial Sequence
  Synthetic
accuugcacacuguuggu

SEQ ID NO: 165778 - RNA, 19 nt, Artificial Sequence
  Synthetic
aaccuugcacacuguuggu

SEQ ID NO: 165779 - RNA, 20 nt, Artificial Sequence
  Synthetic
aaaccuugcacacuguuggu

SEQ ID NO: 165780 - RNA, 21 nt, Artificial Sequence
  Synthetic
aaaaccuugcacacuguuggu

SEQ ID NO: 165781 - RNA, 24 nt, Artificial Sequence
  Synthetic
aggaaaaccuugcacacuguuggu

SEQ ID NO: 165782 - RNA, 18 nt, Artificial Sequence
  Synthetic
cucuuuuacacuguuggu

SEQ ID NO: 165783 - RNA, 19 nt, Artificial Sequence
  Synthetic
acucuuuuacacuguuggu

SEQ ID NO: 165784 - RNA, 20 nt, Artificial Sequence
  Synthetic
aacucuuuuacacuguuggu

SEQ ID NO: 165785 - RNA, 23 nt, Artificial Sequence
  Synthetic
aggaacucuuuuacacuguuggu

SEQ ID NO: 165786 - RNA, 24 nt, Artificial Sequence
  Synthetic
uaggaacucuuuuacacuguuggu

SEQ ID NO: 165787 - RNA, 18 nt, Artificial Sequence
  Synthetic
cccuuaugcacuguuggu

SEQ ID NO: 165788 - RNA, 19 nt, Artificial Sequence
  Synthetic
acccuuaugcacuguuggu

SEQ ID NO: 165789 - RNA, 20 nt, Artificial Sequence
  Synthetic
aacccuuaugcacuguuggu

SEQ ID NO: 165790 - RNA, 24 nt, Artificial Sequence
  Synthetic
agggaacccuuaugcacuguuggu

SEQ ID NO: 165791 - RNA, 18 nt, Artificial Sequence
  Synthetic
ugcuuauacccuguuggu

SEQ ID NO: 165792 - RNA, 19 nt, Artificial Sequence
  Synthetic
augcuuauacccuguuggu

SEQ ID NO: 165793 - RNA, 20 nt, Artificial Sequence
  Synthetic
aaugcuuauacccuguuggu

SEQ ID NO: 165794 - RNA, 18 nt, Artificial Sequence
  Synthetic
cacuucugcauuguuggu

SEQ ID NO: 165795 - RNA, 19 nt, Artificial Sequence
  Synthetic
acacuucugcauuguuggu

SEQ ID NO: 165796 - RNA, 20 nt, Artificial Sequence
  Synthetic
aacacuucugcauuguuggu

SEQ ID NO: 165797 - RNA, 21 nt, Artificial Sequence
  Synthetic
aaacacuucugcauuguuggu

SEQ ID NO: 165798 - RNA, 23 nt, Artificial Sequence
  Synthetic
ugaaacacuucugcauuguuggu

SEQ ID NO: 165799 - RNA, 24 nt, Artificial Sequence
  Synthetic
cugaaacacuucugcauuguuggu

SEQ ID NO: 165800 - RNA, 18 nt, Artificial Sequence
  Synthetic
aacaaauguacaaaaugu

SEQ ID NO: 165801 - RNA, 19 nt, Artificial Sequence
  Synthetic
aaacaaauguacaaaaugu

SEQ ID NO: 165802 - RNA, 20 nt, Artificial Sequence
  Synthetic
uaaacaaauguacaaaaugu

SEQ ID NO: 165803 - RNA, 18 nt, Artificial Sequence
  Synthetic
uuagccauuccacaaugu

SEQ ID NO: 165804 - RNA, 19 nt, Artificial Sequence
  Synthetic
uuuagccauuccacaaugu

SEQ ID NO: 165805 - RNA, 20 nt, Artificial Sequence
  Synthetic
auuuagccauuccacaaugu

SEQ ID NO: 165806 - RNA, 22 nt, Artificial Sequence
  Synthetic
ugauuuagccauuccacaaugu

SEQ ID NO: 165807 - RNA, 23 nt, Artificial Sequence
  Synthetic
uugauuuagccauuccacaaugu

SEQ ID NO: 165808 - RNA, 24 nt, Artificial Sequence
  Synthetic
cuugauuuagccauuccacaaugu

SEQ ID NO: 165809 - RNA, 18 nt, Artificial Sequence
  Synthetic
ucaacauuugaugaaugu

SEQ ID NO: 165810 - RNA, 19 nt, Artificial Sequence
  Synthetic
aucaacauuugaugaaugu

SEQ ID NO: 165811 - RNA, 20 nt, Artificial Sequence
  Synthetic
aaucaacauuugaugaaugu

SEQ ID NO: 165812 - RNA, 18 nt, Artificial Sequence
  Synthetic
auaugagaacuauaaugu

SEQ ID NO: 165813 - RNA, 20 nt, Artificial Sequence
  Synthetic
agauaugagaacuauaaugu

SEQ ID NO: 165814 - RNA, 18 nt, Artificial Sequence
  Synthetic
uugaaaaguagguaaugu

SEQ ID NO: 165815 - RNA, 19 nt, Artificial Sequence
  Synthetic
cuugaaaaguagguaaugu

SEQ ID NO: 165816 - RNA, 20 nt, Artificial Sequence
  Synthetic
ccuugaaaaguagguaaugu

SEQ ID NO: 165817 - RNA, 20 nt, Artificial Sequence
  Synthetic
uggcuccacccuugacaugu

SEQ ID NO: 165818 - RNA, 21 nt, Artificial Sequence
  Synthetic
cuggcuccacccuugacaugu

SEQ ID NO: 165819 - RNA, 22 nt, Artificial Sequence
  Synthetic
ccuggcuccacccuugacaugu

SEQ ID NO: 165820 - RNA, 23 nt, Artificial Sequence
  Synthetic
accuggcuccacccuugacaugu

SEQ ID NO: 165821 - RNA, 24 nt, Artificial Sequence
  Synthetic
caccuggcuccacccuugacaugu

SEQ ID NO: 165822 - RNA, 18 nt, Artificial Sequence
  Synthetic
cucucucccuugacaugu

SEQ ID NO: 165823 - RNA, 19 nt, Artificial Sequence
  Synthetic
ucucucucccuugacaugu

SEQ ID NO: 165824 - RNA, 22 nt, Artificial Sequence
  Synthetic
uggucucucucccuugacaugu

SEQ ID NO: 165825 - RNA, 23 nt, Artificial Sequence
  Synthetic
cuggucucucucccuugacaugu

SEQ ID NO: 165826 - RNA, 24 nt, Artificial Sequence
  Synthetic
ccuggucucucucccuugacaugu

SEQ ID NO: 165827 - RNA, 18 nt, Artificial Sequence
  Synthetic
uuuacauauauuacaugu

SEQ ID NO: 165828 - RNA, 19 nt, Artificial Sequence
  Synthetic
auuuacauauauuacaugu

SEQ ID NO: 165829 - RNA, 20 nt, Artificial Sequence
  Synthetic
uauuuacauauauuacaugu

SEQ ID NO: 165830 - RNA, 18 nt, Artificial Sequence
  Synthetic
uagcuccuuucagcaugu

SEQ ID NO: 165831 - RNA, 19 nt, Artificial Sequence
  Synthetic
cuagcuccuuucagcaugu

SEQ ID NO: 165832 - RNA, 21 nt, Artificial Sequence
  Synthetic
agcuagcuccuuucagcaugu

SEQ ID NO: 165833 - RNA, 22 nt, Artificial Sequence
  Synthetic
uagcuagcuccuuucagcaugu

SEQ ID NO: 165834 - RNA, 23 nt, Artificial Sequence
  Synthetic
cuagcuagcuccuuucagcaugu

SEQ ID NO: 165835 - RNA, 18 nt, Artificial Sequence
  Synthetic
aaguuaauauugucaugu

SEQ ID NO: 165836 - RNA, 19 nt, Artificial Sequence
  Synthetic
aaaguuaauauugucaugu

SEQ ID NO: 165837 - RNA, 20 nt, Artificial Sequence
  Synthetic
uaaaguuaauauugucaugu

SEQ ID NO: 165838 - RNA, 21 nt, Artificial Sequence
  Synthetic
uuaaaguuaauauugucaugu

SEQ ID NO: 165839 - RNA, 22 nt, Artificial Sequence
  Synthetic
uuuaaaguuaauauugucaugu

SEQ ID NO: 165840 - RNA, 23 nt, Artificial Sequence
  Synthetic
auuuaaaguuaauauugucaugu

SEQ ID NO: 165841 - RNA, 24 nt, Artificial Sequence
  Synthetic
cauuuaaaguuaauauugucaugu

SEQ ID NO: 165842 - RNA, 18 nt, Artificial Sequence
  Synthetic
acagcaguuuauucaugu

SEQ ID NO: 165843 - RNA, 19 nt, Artificial Sequence
  Synthetic
aacagcaguuuauucaugu

SEQ ID NO: 165844 - RNA, 20 nt, Artificial Sequence
  Synthetic
aaacagcaguuuauucaugu

SEQ ID NO: 165845 - RNA, 20 nt, Artificial Sequence
  Synthetic
uggggccuggugugagaugu

SEQ ID NO: 165846 - RNA, 21 nt, Artificial Sequence
  Synthetic
uuggggccuggugugagaugu

SEQ ID NO: 165847 - RNA, 22 nt, Artificial Sequence
  Synthetic
cuuggggccuggugugagaugu

SEQ ID NO: 165848 - RNA, 23 nt, Artificial Sequence
  Synthetic
acuuggggccuggugugagaugu

SEQ ID NO: 165849 - RNA, 18 nt, Artificial Sequence
  Synthetic
auuuuaaaauacugaugu

SEQ ID NO: 165850 - RNA, 19 nt, Artificial Sequence
  Synthetic
uauuuuaaaauacugaugu

SEQ ID NO: 165851 - RNA, 20 nt, Artificial Sequence
  Synthetic
auauuuuaaaauacugaugu

SEQ ID NO: 165852 - RNA, 18 nt, Artificial Sequence
  Synthetic
auacacauacacauaugu

SEQ ID NO: 165853 - RNA, 19 nt, Artificial Sequence
  Synthetic
aauacacauacacauaugu

SEQ ID NO: 165854 - RNA, 20 nt, Artificial Sequence
  Synthetic
uaauacacauacacauaugu

SEQ ID NO: 165855 - RNA, 21 nt, Artificial Sequence
  Synthetic
auaauacacauacacauaugu

SEQ ID NO: 165856 - RNA, 22 nt, Artificial Sequence
  Synthetic
uauaauacacauacacauaugu

SEQ ID NO: 165857 - RNA, 23 nt, Artificial Sequence
  Synthetic
auauaauacacauacacauaugu

SEQ ID NO: 165858 - RNA, 24 nt, Artificial Sequence
  Synthetic
cauauaauacacauacacauaugu

SEQ ID NO: 165859 - RNA, 18 nt, Artificial Sequence
  Synthetic
uaguauugccugguaugu

SEQ ID NO: 165860 - RNA, 19 nt, Artificial Sequence
  Synthetic
auaguauugccugguaugu

SEQ ID NO: 165861 - RNA, 20 nt, Artificial Sequence
  Synthetic
aauaguauugccugguaugu

SEQ ID NO: 165862 - RNA, 18 nt, Artificial Sequence
  Synthetic
aaauguuaaaacuuaugu

SEQ ID NO: 165863 - RNA, 19 nt, Artificial Sequence
  Synthetic
uaaauguuaaaacuuaugu

SEQ ID NO: 165864 - RNA, 20 nt, Artificial Sequence
  Synthetic
uuaaauguuaaaacuuaugu

SEQ ID NO: 165865 - RNA, 18 nt, Artificial Sequence
  Synthetic
agguuaauauuguuaugu

SEQ ID NO: 165866 - RNA, 19 nt, Artificial Sequence
  Synthetic
aagguuaauauuguuaugu

SEQ ID NO: 165867 - RNA, 20 nt, Artificial Sequence
  Synthetic
uaagguuaauauuguuaugu

SEQ ID NO: 165868 - RNA, 21 nt, Artificial Sequence
  Synthetic
uuaagguuaauauuguuaugu

SEQ ID NO: 165869 - RNA, 22 nt, Artificial Sequence
  Synthetic
uuuaagguuaauauuguuaugu

SEQ ID NO: 165870 - RNA, 23 nt, Artificial Sequence
  Synthetic
auuuaagguuaauauuguuaugu

SEQ ID NO: 165871 - RNA, 24 nt, Artificial Sequence
  Synthetic
cauuuaagguuaauauuguuaugu

SEQ ID NO: 165872 - RNA, 18 nt, Artificial Sequence
  Synthetic
uuaaauuuuaaaaacugu

SEQ ID NO: 165873 - RNA, 19 nt, Artificial Sequence
  Synthetic
uuuaaauuuuaaaaacugu

SEQ ID NO: 165874 - RNA, 20 nt, Artificial Sequence
  Synthetic
auuuaaauuuuaaaaacugu

SEQ ID NO: 165875 - RNA, 21 nt, Artificial Sequence
  Synthetic
aaggacuccacugaaaacugu

SEQ ID NO: 165876 - RNA, 22 nt, Artificial Sequence
  Synthetic
uaaggacuccacugaaaacugu

SEQ ID NO: 165877 - RNA, 23 nt, Artificial Sequence
  Synthetic
cuaaggacuccacugaaaacugu

SEQ ID NO: 165878 - RNA, 24 nt, Artificial Sequence
  Synthetic
ccuaaggacuccacugaaaacugu

SEQ ID NO: 165879 - RNA, 18 nt, Artificial Sequence
  Synthetic
agguacuaugcucacugu

SEQ ID NO: 165880 - RNA, 19 nt, Artificial Sequence
  Synthetic
uagguacuaugcucacugu

SEQ ID NO: 165881 - RNA, 18 nt, Artificial Sequence
  Synthetic
ucuuuauccuugaccugu

SEQ ID NO: 165882 - RNA, 19 nt, Artificial Sequence
  Synthetic
uucuuuauccuugaccugu

SEQ ID NO: 165883 - RNA, 20 nt, Artificial Sequence
  Synthetic
uuucuuuauccuugaccugu

SEQ ID NO: 165884 - RNA, 21 nt, Artificial Sequence
  Synthetic
cuuucuuuauccuugaccugu

SEQ ID NO: 165885 - RNA, 22 nt, Artificial Sequence
  Synthetic
ucuuucuuuauccuugaccugu

SEQ ID NO: 165886 - RNA, 23 nt, Artificial Sequence
  Synthetic
uucuuucuuuauccuugaccugu

SEQ ID NO: 165887 - RNA, 24 nt, Artificial Sequence
  Synthetic
auucuuucuuuauccuugaccugu

SEQ ID NO: 165888 - RNA, 18 nt, Artificial Sequence
  Synthetic
auaucaucuuauaccugu

SEQ ID NO: 165889 - RNA, 20 nt, Artificial Sequence
  Synthetic
agauaucaucuuauaccugu

SEQ ID NO: 165890 - RNA, 21 nt, Artificial Sequence
  Synthetic
aagauaucaucuuauaccugu

SEQ ID NO: 165891 - RNA, 22 nt, Artificial Sequence
  Synthetic
uaagauaucaucuuauaccugu

SEQ ID NO: 165892 - RNA, 23 nt, Artificial Sequence
  Synthetic
auaagauaucaucuuauaccugu

SEQ ID NO: 165893 - RNA, 24 nt, Artificial Sequence
  Synthetic
aauaagauaucaucuuauaccugu

SEQ ID NO: 165894 - RNA, 18 nt, Artificial Sequence
  Synthetic
uuuccugcuuucuccugu

SEQ ID NO: 165895 - RNA, 19 nt, Artificial Sequence
  Synthetic
auuuccugcuuucuccugu

SEQ ID NO: 165896 - RNA, 20 nt, Artificial Sequence
  Synthetic
uauuuccugcuuucuccugu

SEQ ID NO: 165897 - RNA, 21 nt, Artificial Sequence
  Synthetic
auauuuccugcuuucuccugu

SEQ ID NO: 165898 - RNA, 23 nt, Artificial Sequence
  Synthetic
agauauuuccugcuuucuccugu

SEQ ID NO: 165899 - RNA, 24 nt, Artificial Sequence
  Synthetic
uagauauuuccugcuuucuccugu

SEQ ID NO: 165900 - RNA, 18 nt, Artificial Sequence
  Synthetic
caaugauguaguuccugu

SEQ ID NO: 165901 - RNA, 19 nt, Artificial Sequence
  Synthetic
ccaaugauguaguuccugu

SEQ ID NO: 165902 - RNA, 21 nt, Artificial Sequence
  Synthetic
agccaaugauguaguuccugu

SEQ ID NO: 165903 - RNA, 22 nt, Artificial Sequence
  Synthetic
aagccaaugauguaguuccugu

SEQ ID NO: 165904 - RNA, 23 nt, Artificial Sequence
  Synthetic
aaagccaaugauguaguuccugu

SEQ ID NO: 165905 - RNA, 18 nt, Artificial Sequence
  Synthetic
cuugcugcugcucgcugu

SEQ ID NO: 165906 - RNA, 19 nt, Artificial Sequence
  Synthetic
ucuugcugcugcucgcugu

SEQ ID NO: 165907 - RNA, 20 nt, Artificial Sequence
  Synthetic
aucuugcugcugcucgcugu

SEQ ID NO: 165908 - RNA, 21 nt, Artificial Sequence
  Synthetic
aaucuugcugcugcucgcugu

SEQ ID NO: 165909 - RNA, 22 nt, Artificial Sequence
  Synthetic
aaaucuugcugcugcucgcugu

SEQ ID NO: 165910 - RNA, 23 nt, Artificial Sequence
  Synthetic
uaaaucuugcugcugcucgcugu

SEQ ID NO: 165911 - RNA, 24 nt, Artificial Sequence
  Synthetic
auaaaucuugcugcugcucgcugu

SEQ ID NO: 165912 - RNA, 19 nt, Artificial Sequence
  Synthetic
uggguguacaaauaucugu

SEQ ID NO: 165913 - RNA, 20 nt, Artificial Sequence
  Synthetic
uuggguguacaaauaucugu

SEQ ID NO: 165914 - RNA, 21 nt, Artificial Sequence
  Synthetic
cuuggguguacaaauaucugu

SEQ ID NO: 165915 - RNA, 22 nt, Artificial Sequence
  Synthetic
acuuggguguacaaauaucugu

SEQ ID NO: 165916 - RNA, 23 nt, Artificial Sequence
  Synthetic
aacuuggguguacaaauaucugu

SEQ ID NO: 165917 - RNA, 18 nt, Artificial Sequence
  Synthetic
acucuccaggauaucugu

SEQ ID NO: 165918 - RNA, 19 nt, Artificial Sequence
  Synthetic
aacucuccaggauaucugu

SEQ ID NO: 165919 - RNA, 20 nt, Artificial Sequence
  Synthetic
aaacucuccaggauaucugu

SEQ ID NO: 165920 - RNA, 22 nt, Artificial Sequence
  Synthetic
agaaacucuccaggauaucugu

SEQ ID NO: 165921 - RNA, 21 nt, Artificial Sequence
  Synthetic
cuaugcccuaugguuuucugu

SEQ ID NO: 165922 - RNA, 22 nt, Artificial Sequence
  Synthetic
ccuaugcccuaugguuuucugu

SEQ ID NO: 165923 - RNA, 23 nt, Artificial Sequence
  Synthetic
uccuaugcccuaugguuuucugu

SEQ ID NO: 165924 - RNA, 24 nt, Artificial Sequence
  Synthetic
cuccuaugcccuaugguuuucugu

SEQ ID NO: 165925 - RNA, 18 nt, Artificial Sequence
  Synthetic
cucggccccccaaagugu

SEQ ID NO: 165926 - RNA, 19 nt, Artificial Sequence
  Synthetic
ccucggccccccaaagugu

SEQ ID NO: 165927 - RNA, 20 nt, Artificial Sequence
  Synthetic
accucggccccccaaagugu

SEQ ID NO: 165928 - RNA, 21 nt, Artificial Sequence
  Synthetic
caccucggccccccaaagugu

SEQ ID NO: 165929 - RNA, 22 nt, Artificial Sequence
  Synthetic
ccaccucggccccccaaagugu

SEQ ID NO: 165930 - RNA, 23 nt, Artificial Sequence
  Synthetic
cccaccucggccccccaaagugu

SEQ ID NO: 165931 - RNA, 24 nt, Artificial Sequence
  Synthetic
acccaccucggccccccaaagugu

SEQ ID NO: 165932 - RNA, 18 nt, Artificial Sequence
  Synthetic
uucggccucccaaagugu

SEQ ID NO: 165933 - RNA, 19 nt, Artificial Sequence
  Synthetic
cuucggccucccaaagugu

SEQ ID NO: 165934 - RNA, 20 nt, Artificial Sequence
  Synthetic
acuucggccucccaaagugu

SEQ ID NO: 165935 - RNA, 21 nt, Artificial Sequence
  Synthetic
cacuucggccucccaaagugu

SEQ ID NO: 165936 - RNA, 22 nt, Artificial Sequence
  Synthetic
ccacuucggccucccaaagugu

SEQ ID NO: 165937 - RNA, 23 nt, Artificial Sequence
  Synthetic
cccacuucggccucccaaagugu

SEQ ID NO: 165938 - RNA, 24 nt, Artificial Sequence
  Synthetic
ucccacuucggccucccaaagugu

SEQ ID NO: 165939 - RNA, 18 nt, Artificial Sequence
  Synthetic
cuuggccucccaaagugu

SEQ ID NO: 165940 - RNA, 19 nt, Artificial Sequence
  Synthetic
ccuuggccucccaaagugu

SEQ ID NO: 165941 - RNA, 21 nt, Artificial Sequence
  Synthetic
ugccuuggccucccaaagugu

SEQ ID NO: 165942 - RNA, 22 nt, Artificial Sequence
  Synthetic
cugccuuggccucccaaagugu

SEQ ID NO: 165943 - RNA, 23 nt, Artificial Sequence
  Synthetic
ccugccuuggccucccaaagugu

SEQ ID NO: 165944 - RNA, 24 nt, Artificial Sequence
  Synthetic
uccugccuuggccucccaaagugu

SEQ ID NO: 165945 - RNA, 18 nt, Artificial Sequence
  Synthetic
cagucccaccaacagugu

SEQ ID NO: 165946 - RNA, 19 nt, Artificial Sequence
  Synthetic
acagucccaccaacagugu

SEQ ID NO: 165947 - RNA, 20 nt, Artificial Sequence
  Synthetic
uacagucccaccaacagugu

SEQ ID NO: 165948 - RNA, 21 nt, Artificial Sequence
  Synthetic
uuacagucccaccaacagugu

SEQ ID NO: 165949 - RNA, 22 nt, Artificial Sequence
  Synthetic
uuuacagucccaccaacagugu

SEQ ID NO: 165950 - RNA, 24 nt, Artificial Sequence
  Synthetic
aguuuacagucccaccaacagugu

SEQ ID NO: 165951 - RNA, 18 nt, Artificial Sequence
  Synthetic
aaagucauugaugagugu

SEQ ID NO: 165952 - RNA, 19 nt, Artificial Sequence
  Synthetic
caaagucauugaugagugu

SEQ ID NO: 165953 - RNA, 20 nt, Artificial Sequence
  Synthetic
ucaaagucauugaugagugu

SEQ ID NO: 165954 - RNA, 21 nt, Artificial Sequence
  Synthetic
cucaaagucauugaugagugu

SEQ ID NO: 165955 - RNA, 22 nt, Artificial Sequence
  Synthetic
ccucaaagucauugaugagugu

SEQ ID NO: 165956 - RNA, 23 nt, Artificial Sequence
  Synthetic
cccucaaagucauugaugagugu

SEQ ID NO: 165957 - RNA, 24 nt, Artificial Sequence
  Synthetic
acccucaaagucauugaugagugu

SEQ ID NO: 165958 - RNA, 18 nt, Artificial Sequence
  Synthetic
caaaaauuagccaggugu

SEQ ID NO: 165959 - RNA, 19 nt, Artificial Sequence
  Synthetic
acaaaaauuagccaggugu

SEQ ID NO: 165960 - RNA, 20 nt, Artificial Sequence
  Synthetic
uacaaaaauuagccaggugu

SEQ ID NO: 165961 - RNA, 21 nt, Artificial Sequence
  Synthetic
auacaaaaauuagccaggugu

SEQ ID NO: 165962 - RNA, 22 nt, Artificial Sequence
  Synthetic
aauacaaaaauuagccaggugu

SEQ ID NO: 165963 - RNA, 23 nt, Artificial Sequence
  Synthetic
aaauacaaaaauuagccaggugu

SEQ ID NO: 165964 - RNA, 24 nt, Artificial Sequence
  Synthetic
aaaauacaaaaauuagccaggugu

SEQ ID NO: 165965 - RNA, 19 nt, Artificial Sequence
  Synthetic
aggugacuggaucaugugu

SEQ ID NO: 165966 - RNA, 23 nt, Artificial Sequence
  Synthetic
ugggaggugacuggaucaugugu

SEQ ID NO: 165967 - RNA, 18 nt, Artificial Sequence
  Synthetic
ccauucugauagaugugu

SEQ ID NO: 165968 - RNA, 20 nt, Artificial Sequence
  Synthetic
agccauucugauagaugugu

SEQ ID NO: 165969 - RNA, 21 nt, Artificial Sequence
  Synthetic
uagccauucugauagaugugu

SEQ ID NO: 165970 - RNA, 22 nt, Artificial Sequence
  Synthetic
uuagccauucugauagaugugu

SEQ ID NO: 165971 - RNA, 23 nt, Artificial Sequence
  Synthetic
uuuagccauucugauagaugugu

SEQ ID NO: 165972 - RNA, 24 nt, Artificial Sequence
  Synthetic
uuuuagccauucugauagaugugu

SEQ ID NO: 165973 - RNA, 18 nt, Artificial Sequence
  Synthetic
ucuuuuauuuauaugugu

SEQ ID NO: 165974 - RNA, 19 nt, Artificial Sequence
  Synthetic
uucuuuuauuuauaugugu

SEQ ID NO: 165975 - RNA, 20 nt, Artificial Sequence
  Synthetic
auucuuuuauuuauaugugu

SEQ ID NO: 165976 - RNA, 18 nt, Artificial Sequence
  Synthetic
cucucacuauuacugugu

SEQ ID NO: 165977 - RNA, 19 nt, Artificial Sequence
  Synthetic
ucucucacuauuacugugu

SEQ ID NO: 165978 - RNA, 21 nt, Artificial Sequence
  Synthetic
agucucucacuauuacugugu

SEQ ID NO: 165979 - RNA, 22 nt, Artificial Sequence
  Synthetic
aagucucucacuauuacugugu

SEQ ID NO: 165980 - RNA, 23 nt, Artificial Sequence
  Synthetic
aaagucucucacuauuacugugu

SEQ ID NO: 165981 - RNA, 24 nt, Artificial Sequence
  Synthetic
aaaagucucucacuauuacugugu

SEQ ID NO: 165982 - RNA, 19 nt, Artificial Sequence
  Synthetic
ugaaugcugaauggugugu

SEQ ID NO: 165983 - RNA, 20 nt, Artificial Sequence
  Synthetic
cugaaugcugaauggugugu

SEQ ID NO: 165984 - RNA, 18 nt, Artificial Sequence
  Synthetic
aaaguaauauaugugugu

SEQ ID NO: 165985 - RNA, 19 nt, Artificial Sequence
  Synthetic
aaaaguaauauaugugugu

SEQ ID NO: 165986 - RNA, 20 nt, Artificial Sequence
  Synthetic
uaaaaguaauauaugugugu

SEQ ID NO: 165987 - RNA, 18 nt, Artificial Sequence
  Synthetic
aaauaaauacauaauugu

SEQ ID NO: 165988 - RNA, 19 nt, Artificial Sequence
  Synthetic
aaaauaaauacauaauugu

SEQ ID NO: 165989 - RNA, 20 nt, Artificial Sequence
  Synthetic
caaaauaaauacauaauugu

SEQ ID NO: 165990 - RNA, 18 nt, Artificial Sequence
  Synthetic
cuuuuuuuucuucauugu

SEQ ID NO: 165991 - RNA, 19 nt, Artificial Sequence
  Synthetic
ucuuuuuuuucuucauugu

SEQ ID NO: 165992 - RNA, 20 nt, Artificial Sequence
  Synthetic
uucuuuuuuuucuucauugu

SEQ ID NO: 165993 - RNA, 18 nt, Artificial Sequence
  Synthetic
uugacauguggggauugu

SEQ ID NO: 165994 - RNA, 19 nt, Artificial Sequence
  Synthetic
cuugacauguggggauugu

SEQ ID NO: 165995 - RNA, 20 nt, Artificial Sequence
  Synthetic
ccuugacauguggggauugu

SEQ ID NO: 165996 - RNA, 21 nt, Artificial Sequence
  Synthetic
cccuugacauguggggauugu

SEQ ID NO: 165997 - RNA, 22 nt, Artificial Sequence
  Synthetic
ucccuugacauguggggauugu

SEQ ID NO: 165998 - RNA, 23 nt, Artificial Sequence
  Synthetic
cucccuugacauguggggauugu

SEQ ID NO: 165999 - RNA, 24 nt, Artificial Sequence
  Synthetic
ucucccuugacauguggggauugu

SEQ ID NO: 166000 - RNA, 18 nt, Artificial Sequence
  Synthetic
aaacaccacagaaguugu

SEQ ID NO: 166001 - RNA, 19 nt, Artificial Sequence
  Synthetic
aaaacaccacagaaguugu

SEQ ID NO: 166002 - RNA, 19 nt, Artificial Sequence
  Synthetic
ugaaaagcagaacaguugu

SEQ ID NO: 166003 - RNA, 20 nt, Artificial Sequence
  Synthetic
augaaaagcagaacaguugu

SEQ ID NO: 166004 - RNA, 21 nt, Artificial Sequence
  Synthetic
caugaaaagcagaacaguugu

SEQ ID NO: 166005 - RNA, 22 nt, Artificial Sequence
  Synthetic
acaugaaaagcagaacaguugu

SEQ ID NO: 166006 - RNA, 23 nt, Artificial Sequence
  Synthetic
aacaugaaaagcagaacaguugu

SEQ ID NO: 166007 - RNA, 18 nt, Artificial Sequence
  Synthetic
uuuuucuuguacauuugu

SEQ ID NO: 166008 - RNA, 19 nt, Artificial Sequence
  Synthetic
uuuuuucuuguacauuugu

SEQ ID NO: 166009 - RNA, 20 nt, Artificial Sequence
  Synthetic
uuuuuuucuuguacauuugu

SEQ ID NO: 166010 - RNA, 22 nt, Artificial Sequence
  Synthetic
uguuuuuuucuuguacauuugu

SEQ ID NO: 166011 - RNA, 23 nt, Artificial Sequence
  Synthetic
uuguuuuuuucuuguacauuugu

SEQ ID NO: 166012 - RNA, 24 nt, Artificial Sequence
  Synthetic
uuuguuuuuuucuuguacauuugu

SEQ ID NO: 166013 - RNA, 18 nt, Artificial Sequence
  Synthetic
cuuuucugaaagauuugu

SEQ ID NO: 166014 - RNA, 19 nt, Artificial Sequence
  Synthetic
ucuuuucugaaagauuugu

SEQ ID NO: 166015 - RNA, 20 nt, Artificial Sequence
  Synthetic
uucuuuucugaaagauuugu

SEQ ID NO: 166016 - RNA, 18 nt, Artificial Sequence
  Synthetic
aaauaauuuuuuauuugu

SEQ ID NO: 166017 - RNA, 19 nt, Artificial Sequence
  Synthetic
uaaauaauuuuuuauuugu

SEQ ID NO: 166018 - RNA, 20 nt, Artificial Sequence
  Synthetic
uuaaauaauuuuuuauuugu

SEQ ID NO: 166019 - RNA, 21 nt, Artificial Sequence
  Synthetic
uuuaaauaauuuuuuauuugu

SEQ ID NO: 166020 - RNA, 22 nt, Artificial Sequence
  Synthetic
auuuaaauaauuuuuuauuugu

SEQ ID NO: 166021 - RNA, 23 nt, Artificial Sequence
  Synthetic
uauuuaaauaauuuuuuauuugu

SEQ ID NO: 166022 - RNA, 24 nt, Artificial Sequence
  Synthetic
uuauuuaaauaauuuuuuauuugu

SEQ ID NO: 166023 - RNA, 18 nt, Artificial Sequence
  Synthetic
uugcuaagaauccuuugu

SEQ ID NO: 166024 - RNA, 19 nt, Artificial Sequence
  Synthetic
uuugcuaagaauccuuugu

SEQ ID NO: 166025 - RNA, 20 nt, Artificial Sequence
  Synthetic
cuuugcuaagaauccuuugu

SEQ ID NO: 166026 - RNA, 22 nt, Artificial Sequence
  Synthetic
ugcuuugcuaagaauccuuugu

SEQ ID NO: 166027 - RNA, 23 nt, Artificial Sequence
  Synthetic
uugcuuugcuaagaauccuuugu

SEQ ID NO: 166028 - RNA, 24 nt, Artificial Sequence
  Synthetic
auugcuuugcuaagaauccuuugu

SEQ ID NO: 166029 - RNA, 21 nt, Artificial Sequence
  Synthetic
ugaugaguucauguccuuugu

SEQ ID NO: 166030 - RNA, 22 nt, Artificial Sequence
  Synthetic
augaugaguucauguccuuugu

SEQ ID NO: 166031 - RNA, 23 nt, Artificial Sequence
  Synthetic
aaugaugaguucauguccuuugu

SEQ ID NO: 166032 - RNA, 24 nt, Artificial Sequence
  Synthetic
aaaugaugaguucauguccuuugu

SEQ ID NO: 166033 - RNA, 18 nt, Artificial Sequence
  Synthetic
aauuuaauuuaaguuugu

SEQ ID NO: 166034 - RNA, 19 nt, Artificial Sequence
  Synthetic
aaauuuaauuuaaguuugu

SEQ ID NO: 166035 - RNA, 18 nt, Artificial Sequence
  Synthetic
auauaaauuaauguuugu

SEQ ID NO: 166036 - RNA, 19 nt, Artificial Sequence
  Synthetic
aauauaaauuaauguuugu

SEQ ID NO: 166037 - RNA, 20 nt, Artificial Sequence
  Synthetic
aaauauaaauuaauguuugu

SEQ ID NO: 166038 - RNA, 18 nt, Artificial Sequence
  Synthetic
aaaagaaaaaaaaaaauu

SEQ ID NO: 166039 - RNA, 19 nt, Artificial Sequence
  Synthetic
aaaaagaaaaaaaaaaauu

SEQ ID NO: 166040 - RNA, 20 nt, Artificial Sequence
  Synthetic
aaaaaagaaaaaaaaaaauu

SEQ ID NO: 166041 - RNA, 21 nt, Artificial Sequence
  Synthetic
caaaaaagaaaaaaaaaaauu

SEQ ID NO: 166042 - RNA, 22 nt, Artificial Sequence
  Synthetic
ccaaaaaagaaaaaaaaaaauu

SEQ ID NO: 166043 - RNA, 23 nt, Artificial Sequence
  Synthetic
uccaaaaaagaaaaaaaaaaauu

SEQ ID NO: 166044 - RNA, 24 nt, Artificial Sequence
  Synthetic
cuccaaaaaagaaaaaaaaaaauu

SEQ ID NO: 166045 - RNA, 18 nt, Artificial Sequence
  Synthetic
uuuguuuuagaaaaaauu

SEQ ID NO: 166046 - RNA, 19 nt, Artificial Sequence
  Synthetic
uuuuguuuuagaaaaaauu

SEQ ID NO: 166047 - RNA, 20 nt, Artificial Sequence
  Synthetic
uuuuuguuuuagaaaaaauu

SEQ ID NO: 166048 - RNA, 18 nt, Artificial Sequence
  Synthetic
aaaaaaauccucaaaauu

SEQ ID NO: 166049 - RNA, 18 nt, Artificial Sequence
  Synthetic
aaaaacaauuuccaaauu

SEQ ID NO: 166050 - RNA, 19 nt, Artificial Sequence
  Synthetic
uaaaaacaauuuccaaauu

SEQ ID NO: 166051 - RNA, 20 nt, Artificial Sequence
  Synthetic
uuaaaaacaauuuccaaauu

SEQ ID NO: 166052 - RNA, 19 nt, Artificial Sequence
  Synthetic
agaaaccauacuucaaauu

SEQ ID NO: 166053 - RNA, 20 nt, Artificial Sequence
  Synthetic
aagaaaccauacuucaaauu

SEQ ID NO: 166054 - RNA, 23 nt, Artificial Sequence
  Synthetic
ugguauaauacauugauuaaauu

SEQ ID NO: 166055 - RNA, 24 nt, Artificial Sequence
  Synthetic
augguauaauacauugauuaaauu

SEQ ID NO: 166056 - RNA, 18 nt, Artificial Sequence
  Synthetic
auaauggaaauuuaaauu

SEQ ID NO: 166057 - RNA, 19 nt, Artificial Sequence
  Synthetic
aauaauggaaauuuaaauu

SEQ ID NO: 166058 - RNA, 20 nt, Artificial Sequence
  Synthetic
aaauaauggaaauuuaaauu

SEQ ID NO: 166059 - RNA, 18 nt, Artificial Sequence
  Synthetic
uaauauuggagaacaauu

SEQ ID NO: 166060 - RNA, 19 nt, Artificial Sequence
  Synthetic
uuaauauuggagaacaauu

SEQ ID NO: 166061 - RNA, 20 nt, Artificial Sequence
  Synthetic
uuuaauauuggagaacaauu

SEQ ID NO: 166062 - RNA, 19 nt, Artificial Sequence
  Synthetic
agaaagaagagagacaauu

SEQ ID NO: 166063 - RNA, 21 nt, Artificial Sequence
  Synthetic
agagaaagaagagagacaauu

SEQ ID NO: 166064 - RNA, 23 nt, Artificial Sequence
  Synthetic
agagagaaagaagagagacaauu

SEQ ID NO: 166065 - RNA, 24 nt, Artificial Sequence
  Synthetic
cagagagaaagaagagagacaauu

SEQ ID NO: 166066 - RNA, 18 nt, Artificial Sequence
  Synthetic
ccauaaauuuauacaauu

SEQ ID NO: 166067 - RNA, 19 nt, Artificial Sequence
  Synthetic
cccauaaauuuauacaauu

SEQ ID NO: 166068 - RNA, 20 nt, Artificial Sequence
  Synthetic
acccauaaauuuauacaauu

SEQ ID NO: 166069 - RNA, 18 nt, Artificial Sequence
  Synthetic
auugcucaacucccaauu

SEQ ID NO: 166070 - RNA, 19 nt, Artificial Sequence
  Synthetic
cauugcucaacucccaauu

SEQ ID NO: 166071 - RNA, 20 nt, Artificial Sequence
  Synthetic
ucauugcucaacucccaauu

SEQ ID NO: 166072 - RNA, 21 nt, Artificial Sequence
  Synthetic
cucauugcucaacucccaauu

SEQ ID NO: 166073 - RNA, 22 nt, Artificial Sequence
  Synthetic
ucucauugcucaacucccaauu

SEQ ID NO: 166074 - RNA, 23 nt, Artificial Sequence
  Synthetic
uucucauugcucaacucccaauu

SEQ ID NO: 166075 - RNA, 18 nt, Artificial Sequence
  Synthetic
auuggaguauuuccaauu

SEQ ID NO: 166076 - RNA, 19 nt, Artificial Sequence
  Synthetic
cauuggaguauuuccaauu

SEQ ID NO: 166077 - RNA, 20 nt, Artificial Sequence
  Synthetic
ucauuggaguauuuccaauu

SEQ ID NO: 166078 - RNA, 21 nt, Artificial Sequence
  Synthetic
cucauuggaguauuuccaauu

SEQ ID NO: 166079 - RNA, 23 nt, Artificial Sequence
  Synthetic
ugcucauuggaguauuuccaauu

SEQ ID NO: 166080 - RNA, 24 nt, Artificial Sequence
  Synthetic
augcucauuggaguauuuccaauu

SEQ ID NO: 166081 - RNA, 21 nt, Artificial Sequence
  Synthetic
uuuauucucuuugaagcaauu

SEQ ID NO: 166082 - RNA, 22 nt, Artificial Sequence
  Synthetic
uuuuauucucuuugaagcaauu

SEQ ID NO: 166083 - RNA, 23 nt, Artificial Sequence
  Synthetic
auuuuauucucuuugaagcaauu

SEQ ID NO: 166084 - RNA, 24 nt, Artificial Sequence
  Synthetic
uauuuuauucucuuugaagcaauu

SEQ ID NO: 166085 - RNA, 18 nt, Artificial Sequence
  Synthetic
uaauccuggaacagaauu

SEQ ID NO: 166086 - RNA, 19 nt, Artificial Sequence
  Synthetic
uuaauccuggaacagaauu

SEQ ID NO: 166087 - RNA, 20 nt, Artificial Sequence
  Synthetic
cuuaauccuggaacagaauu

SEQ ID NO: 166088 - RNA, 18 nt, Artificial Sequence
  Synthetic
auagaggaaucuagaauu

SEQ ID NO: 166089 - RNA, 19 nt, Artificial Sequence
  Synthetic
aauagaggaaucuagaauu

SEQ ID NO: 166090 - RNA, 20 nt, Artificial Sequence
  Synthetic
uaauagaggaaucuagaauu

SEQ ID NO: 166091 - RNA, 18 nt, Artificial Sequence
  Synthetic
uaaauauauuaaggaauu

SEQ ID NO: 166092 - RNA, 19 nt, Artificial Sequence
  Synthetic
auaaauauauuaaggaauu

SEQ ID NO: 166093 - RNA, 18 nt, Artificial Sequence
  Synthetic
ugaaugaaaacaugaauu

SEQ ID NO: 166094 - RNA, 19 nt, Artificial Sequence
  Synthetic
cugaaugaaaacaugaauu

SEQ ID NO: 166095 - RNA, 20 nt, Artificial Sequence
  Synthetic
acugaaugaaaacaugaauu

SEQ ID NO: 166096 - RNA, 18 nt, Artificial Sequence
  Synthetic
caaacagguauaugaauu

SEQ ID NO: 166097 - RNA, 19 nt, Artificial Sequence
  Synthetic
ccaaacagguauaugaauu

SEQ ID NO: 166098 - RNA, 20 nt, Artificial Sequence
  Synthetic
accaaacagguauaugaauu

SEQ ID NO: 166099 - RNA, 18 nt, Artificial Sequence
  Synthetic
aaaaaccuucacauaauu

SEQ ID NO: 166100 - RNA, 19 nt, Artificial Sequence
  Synthetic
caaaaaccuucacauaauu

SEQ ID NO: 166101 - RNA, 20 nt, Artificial Sequence
  Synthetic
acaaaaaccuucacauaauu

SEQ ID NO: 166102 - RNA, 18 nt, Artificial Sequence
  Synthetic
auggcuggagauauaauu

SEQ ID NO: 166103 - RNA, 19 nt, Artificial Sequence
  Synthetic
aauggcuggagauauaauu

SEQ ID NO: 166104 - RNA, 20 nt, Artificial Sequence
  Synthetic
caauggcuggagauauaauu

SEQ ID NO: 166105 - RNA, 18 nt, Artificial Sequence
  Synthetic
uaggaauucuuuauaauu

SEQ ID NO: 166106 - RNA, 20 nt, Artificial Sequence
  Synthetic
uguaggaauucuuuauaauu

SEQ ID NO: 166107 - RNA, 21 nt, Artificial Sequence
  Synthetic
uuguaggaauucuuuauaauu

SEQ ID NO: 166108 - RNA, 22 nt, Artificial Sequence
  Synthetic
uuuguaggaauucuuuauaauu

SEQ ID NO: 166109 - RNA, 23 nt, Artificial Sequence
  Synthetic
auuuguaggaauucuuuauaauu

SEQ ID NO: 166110 - RNA, 18 nt, Artificial Sequence
  Synthetic
uuugcauuuaagguaauu

SEQ ID NO: 166111 - RNA, 19 nt, Artificial Sequence
  Synthetic
auuugcauuuaagguaauu

SEQ ID NO: 166112 - RNA, 20 nt, Artificial Sequence
  Synthetic
cauuugcauuuaagguaauu

SEQ ID NO: 166113 - RNA, 21 nt, Artificial Sequence
  Synthetic
ccauuugcauuuaagguaauu

SEQ ID NO: 166114 - RNA, 22 nt, Artificial Sequence
  Synthetic
accauuugcauuuaagguaauu

SEQ ID NO: 166115 - RNA, 24 nt, Artificial Sequence
  Synthetic
agaccauuugcauuuaagguaauu

SEQ ID NO: 166116 - RNA, 18 nt, Artificial Sequence
  Synthetic
uuuacaggugagguaauu

SEQ ID NO: 166117 - RNA, 19 nt, Artificial Sequence
  Synthetic
uuuuacaggugagguaauu

SEQ ID NO: 166118 - RNA, 20 nt, Artificial Sequence
  Synthetic
auuuuacaggugagguaauu

SEQ ID NO: 166119 - RNA, 21 nt, Artificial Sequence
  Synthetic
uauuuuacaggugagguaauu

SEQ ID NO: 166120 - RNA, 22 nt, Artificial Sequence
  Synthetic
cuauuuuacaggugagguaauu

SEQ ID NO: 166121 - RNA, 23 nt, Artificial Sequence
  Synthetic
ccuauuuuacaggugagguaauu

SEQ ID NO: 166122 - RNA, 24 nt, Artificial Sequence
  Synthetic
accuauuuuacaggugagguaauu

SEQ ID NO: 166123 - RNA, 18 nt, Artificial Sequence
  Synthetic
aaacauauauauuuaauu

SEQ ID NO: 166124 - RNA, 19 nt, Artificial Sequence
  Synthetic
aaaacauauauauuuaauu

SEQ ID NO: 166125 - RNA, 20 nt, Artificial Sequence
  Synthetic
aaaaacauauauauuuaauu

SEQ ID NO: 166126 - RNA, 18 nt, Artificial Sequence
  Synthetic
aaguauuuauaaaacauu

SEQ ID NO: 166127 - RNA, 19 nt, Artificial Sequence
  Synthetic
aaaguauuuauaaaacauu

SEQ ID NO: 166128 - RNA, 20 nt, Artificial Sequence
  Synthetic
aaaaguauuuauaaaacauu

SEQ ID NO: 166129 - RNA, 18 nt, Artificial Sequence
  Synthetic
aaaacuuccagaaacauu

SEQ ID NO: 166130 - RNA, 19 nt, Artificial Sequence
  Synthetic
uaaaacuuccagaaacauu

SEQ ID NO: 166131 - RNA, 20 nt, Artificial Sequence
  Synthetic
auaaaacuuccagaaacauu

SEQ ID NO: 166132 - RNA, 21 nt, Artificial Sequence
  Synthetic
aauaaaacuuccagaaacauu

SEQ ID NO: 166133 - RNA, 22 nt, Artificial Sequence
  Synthetic
aaauaaaacuuccagaaacauu

SEQ ID NO: 166134 - RNA, 23 nt, Artificial Sequence
  Synthetic
uaaauaaaacuuccagaaacauu

SEQ ID NO: 166135 - RNA, 18 nt, Artificial Sequence
  Synthetic
uauacacacauaaacauu

SEQ ID NO: 166136 - RNA, 19 nt, Artificial Sequence
  Synthetic
auauacacacauaaacauu

SEQ ID NO: 166137 - RNA, 20 nt, Artificial Sequence
  Synthetic
cauauacacacauaaacauu

SEQ ID NO: 166138 - RNA, 18 nt, Artificial Sequence
  Synthetic
uuauaaaauuuaaacauu

SEQ ID NO: 166139 - RNA, 19 nt, Artificial Sequence
  Synthetic
auuauaaaauuuaaacauu

SEQ ID NO: 166140 - RNA, 20 nt, Artificial Sequence
  Synthetic
aauuauaaaauuuaaacauu

SEQ ID NO: 166141 - RNA, 18 nt, Artificial Sequence
  Synthetic
ucuuccauugucaacauu

SEQ ID NO: 166142 - RNA, 19 nt, Artificial Sequence
  Synthetic
cucuuccauugucaacauu

SEQ ID NO: 166143 - RNA, 20 nt, Artificial Sequence
  Synthetic
ucucuuccauugucaacauu

SEQ ID NO: 166144 - RNA, 21 nt, Artificial Sequence
  Synthetic
acugagauauuguagaacauu

SEQ ID NO: 166145 - RNA, 22 nt, Artificial Sequence
  Synthetic
uacugagauauuguagaacauu

SEQ ID NO: 166146 - RNA, 24 nt, Artificial Sequence
  Synthetic
uguacugagauauuguagaacauu

SEQ ID NO: 166147 - RNA, 19 nt, Artificial Sequence
  Synthetic
uguuaggugcaaacacauu

SEQ ID NO: 166148 - RNA, 20 nt, Artificial Sequence
  Synthetic
uuguuaggugcaaacacauu

SEQ ID NO: 166149 - RNA, 22 nt, Artificial Sequence
  Synthetic
uguuguuaggugcaaacacauu

SEQ ID NO: 166150 - RNA, 23 nt, Artificial Sequence
  Synthetic
cuguuguuaggugcaaacacauu

SEQ ID NO: 166151 - RNA, 24 nt, Artificial Sequence
  Synthetic
ucuguuguuaggugcaaacacauu

SEQ ID NO: 166152 - RNA, 19 nt, Artificial Sequence
  Synthetic
aguuaccaauuuucacauu

SEQ ID NO: 166153 - RNA, 20 nt, Artificial Sequence
  Synthetic
aaguuaccaauuuucacauu

SEQ ID NO: 166154 - RNA, 18 nt, Artificial Sequence
  Synthetic
uaagagguaacugacauu

SEQ ID NO: 166155 - RNA, 19 nt, Artificial Sequence
  Synthetic
uuaagagguaacugacauu

SEQ ID NO: 166156 - RNA, 20 nt, Artificial Sequence
  Synthetic
cuuaagagguaacugacauu

SEQ ID NO: 166157 - RNA, 18 nt, Artificial Sequence
  Synthetic
cacauuuauuuauacauu

SEQ ID NO: 166158 - RNA, 19 nt, Artificial Sequence
  Synthetic
acacauuuauuuauacauu

SEQ ID NO: 166159 - RNA, 20 nt, Artificial Sequence
  Synthetic
aacacauuuauuuauacauu

SEQ ID NO: 166160 - RNA, 21 nt, Artificial Sequence
  Synthetic
aaacacauuuauuuauacauu

SEQ ID NO: 166161 - RNA, 22 nt, Artificial Sequence
  Synthetic
uaaacacauuuauuuauacauu

SEQ ID NO: 166162 - RNA, 23 nt, Artificial Sequence
  Synthetic
auaaacacauuuauuuauacauu

SEQ ID NO: 166163 - RNA, 24 nt, Artificial Sequence
  Synthetic
aauaaacacauuuauuuauacauu

SEQ ID NO: 166164 - RNA, 18 nt, Artificial Sequence
  Synthetic
auuuuaagucucuacauu

SEQ ID NO: 166165 - RNA, 19 nt, Artificial Sequence
  Synthetic
uauuuuaagucucuacauu

SEQ ID NO: 166166 - RNA, 20 nt, Artificial Sequence
  Synthetic
uuauuuuaagucucuacauu

SEQ ID NO: 166167 - RNA, 21 nt, Artificial Sequence
  Synthetic
cuuauuuuaagucucuacauu

SEQ ID NO: 166168 - RNA, 22 nt, Artificial Sequence
  Synthetic
ucuuauuuuaagucucuacauu

SEQ ID NO: 166169 - RNA, 23 nt, Artificial Sequence
  Synthetic
uucuuauuuuaagucucuacauu

SEQ ID NO: 166170 - RNA, 24 nt, Artificial Sequence
  Synthetic
auucuuauuuuaagucucuacauu

SEQ ID NO: 166171 - RNA, 22 nt, Artificial Sequence
  Synthetic
agaaaaccuaggcaauaccauu

SEQ ID NO: 166172 - RNA, 23 nt, Artificial Sequence
  Synthetic
aagaaaaccuaggcaauaccauu

SEQ ID NO: 166173 - RNA, 19 nt, Artificial Sequence
  Synthetic
agagaaaaggaagagcauu

SEQ ID NO: 166174 - RNA, 20 nt, Artificial Sequence
  Synthetic
aagagaaaaggaagagcauu

SEQ ID NO: 166175 - RNA, 18 nt, Artificial Sequence
  Synthetic
aacaaaagagauggcauu

SEQ ID NO: 166176 - RNA, 19 nt, Artificial Sequence
  Synthetic
uaacaaaagagauggcauu

SEQ ID NO: 166177 - RNA, 20 nt, Artificial Sequence
  Synthetic
auaacaaaagagauggcauu

SEQ ID NO: 166178 - RNA, 21 nt, Artificial Sequence
  Synthetic
aauaacaaaagagauggcauu

SEQ ID NO: 166179 - RNA, 22 nt, Artificial Sequence
  Synthetic
aaauaacaaaagagauggcauu

SEQ ID NO: 166180 - RNA, 24 nt, Artificial Sequence
  Synthetic
ugaaauaacaaaagagauggcauu

SEQ ID NO: 166181 - RNA, 18 nt, Artificial Sequence
  Synthetic
aaaucauaaauaaucauu

SEQ ID NO: 166182 - RNA, 19 nt, Artificial Sequence
  Synthetic
aaaaucauaaauaaucauu

SEQ ID NO: 166183 - RNA, 20 nt, Artificial Sequence
  Synthetic
uaaaaucauaaauaaucauu

SEQ ID NO: 166184 - RNA, 22 nt, Artificial Sequence
  Synthetic
auguccccacccaaaucucauu

SEQ ID NO: 166185 - RNA, 23 nt, Artificial Sequence
  Synthetic
uauguccccacccaaaucucauu

SEQ ID NO: 166186 - RNA, 24 nt, Artificial Sequence
  Synthetic
cuauguccccacccaaaucucauu

SEQ ID NO: 166187 - RNA, 21 nt, Artificial Sequence
  Synthetic
aaccuaggaaauucugucauu

SEQ ID NO: 166188 - RNA, 22 nt, Artificial Sequence
  Synthetic
aaaccuaggaaauucugucauu

SEQ ID NO: 166189 - RNA, 23 nt, Artificial Sequence
  Synthetic
aaaaccuaggaaauucugucauu

SEQ ID NO: 166190 - RNA, 24 nt, Artificial Sequence
  Synthetic
aaaaaccuaggaaauucugucauu

SEQ ID NO: 166191 - RNA, 18 nt, Artificial Sequence
  Synthetic
uauuuucauuauuucauu

SEQ ID NO: 166192 - RNA, 19 nt, Artificial Sequence
  Synthetic
uuauuuucauuauuucauu

SEQ ID NO: 166193 - RNA, 20 nt, Artificial Sequence
  Synthetic
auuauuuucauuauuucauu

SEQ ID NO: 166194 - RNA, 18 nt, Artificial Sequence
  Synthetic
auuccugcuuucaagauu

SEQ ID NO: 166195 - RNA, 19 nt, Artificial Sequence
  Synthetic
aauuccugcuuucaagauu

SEQ ID NO: 166196 - RNA, 20 nt, Artificial Sequence
  Synthetic
aaauuccugcuuucaagauu

SEQ ID NO: 166197 - RNA, 18 nt, Artificial Sequence
  Synthetic
uaucagcuuaagaagauu

SEQ ID NO: 166198 - RNA, 19 nt, Artificial Sequence
  Synthetic
uuaucagcuuaagaagauu

SEQ ID NO: 166199 - RNA, 20 nt, Artificial Sequence
  Synthetic
cuuaucagcuuaagaagauu

SEQ ID NO: 166200 - RNA, 22 nt, Artificial Sequence
  Synthetic
ugcuuaucagcuuaagaagauu

SEQ ID NO: 166201 - RNA, 23 nt, Artificial Sequence
  Synthetic
uugcuuaucagcuuaagaagauu

SEQ ID NO: 166202 - RNA, 21 nt, Artificial Sequence
  Synthetic
ugaaaagucaacgauaagauu

SEQ ID NO: 166203 - RNA, 22 nt, Artificial Sequence
  Synthetic
cugaaaagucaacgauaagauu

SEQ ID NO: 166204 - RNA, 23 nt, Artificial Sequence
  Synthetic
ccugaaaagucaacgauaagauu

SEQ ID NO: 166205 - RNA, 24 nt, Artificial Sequence
  Synthetic
uccugaaaagucaacgauaagauu

SEQ ID NO: 166206 - RNA, 18 nt, Artificial Sequence
  Synthetic
agagauggagaacagauu

SEQ ID NO: 166207 - RNA, 19 nt, Artificial Sequence
  Synthetic
uagagauggagaacagauu

SEQ ID NO: 166208 - RNA, 20 nt, Artificial Sequence
  Synthetic
auagagauggagaacagauu

SEQ ID NO: 166209 - RNA, 21 nt, Artificial Sequence
  Synthetic
cauagagauggagaacagauu

SEQ ID NO: 166210 - RNA, 22 nt, Artificial Sequence
  Synthetic
ucauagagauggagaacagauu

SEQ ID NO: 166211 - RNA, 23 nt, Artificial Sequence
  Synthetic
aucauagagauggagaacagauu

SEQ ID NO: 166212 - RNA, 24 nt, Artificial Sequence
  Synthetic
aaucauagagauggagaacagauu

SEQ ID NO: 166213 - RNA, 19 nt, Artificial Sequence
  Synthetic
agagagagagcgagagauu

SEQ ID NO: 166214 - RNA, 20 nt, Artificial Sequence
  Synthetic
cagagagagagcgagagauu

SEQ ID NO: 166215 - RNA, 21 nt, Artificial Sequence
  Synthetic
acagagagagagcgagagauu

SEQ ID NO: 166216 - RNA, 22 nt, Artificial Sequence
  Synthetic
cacagagagagagcgagagauu

SEQ ID NO: 166217 - RNA, 23 nt, Artificial Sequence
  Synthetic
acacagagagagagcgagagauu

SEQ ID NO: 166218 - RNA, 18 nt, Artificial Sequence
  Synthetic
uuagguuccucauagauu

SEQ ID NO: 166219 - RNA, 19 nt, Artificial Sequence
  Synthetic
uuuagguuccucauagauu

SEQ ID NO: 166220 - RNA, 21 nt, Artificial Sequence
  Synthetic
uguuuagguuccucauagauu

SEQ ID NO: 166221 - RNA, 22 nt, Artificial Sequence
  Synthetic
uuguuuagguuccucauagauu

SEQ ID NO: 166222 - RNA, 23 nt, Artificial Sequence
  Synthetic
auuguuuagguuccucauagauu

SEQ ID NO: 166223 - RNA, 24 nt, Artificial Sequence
  Synthetic
aauuguuuagguuccucauagauu

SEQ ID NO: 166224 - RNA, 20 nt, Artificial Sequence
  Synthetic
uguuaaguucccuauagauu

SEQ ID NO: 166225 - RNA, 21 nt, Artificial Sequence
  Synthetic
uuguuaaguucccuauagauu

SEQ ID NO: 166226 - RNA, 22 nt, Artificial Sequence
  Synthetic
cuuguuaaguucccuauagauu

SEQ ID NO: 166227 - RNA, 24 nt, Artificial Sequence
  Synthetic
ugcuuguuaaguucccuauagauu

SEQ ID NO: 166228 - RNA, 21 nt, Artificial Sequence
  Synthetic
uuucuucuuuucaccuagauu

SEQ ID NO: 166229 - RNA, 22 nt, Artificial Sequence
  Synthetic
uuuucuucuuuucaccuagauu

SEQ ID NO: 166230 - RNA, 24 nt, Artificial Sequence
  Synthetic
aguuuucuucuuuucaccuagauu

SEQ ID NO: 166231 - RNA, 18 nt, Artificial Sequence
  Synthetic
uggaguucauuguagauu

SEQ ID NO: 166232 - RNA, 19 nt, Artificial Sequence
  Synthetic
uuggaguucauuguagauu

SEQ ID NO: 166233 - RNA, 21 nt, Artificial Sequence
  Synthetic
uguuggaguucauuguagauu

SEQ ID NO: 166234 - RNA, 22 nt, Artificial Sequence
  Synthetic
uuguuggaguucauuguagauu

SEQ ID NO: 166235 - RNA, 23 nt, Artificial Sequence
  Synthetic
uuuguuggaguucauuguagauu

SEQ ID NO: 166236 - RNA, 24 nt, Artificial Sequence
  Synthetic
auuuguuggaguucauuguagauu

SEQ ID NO: 166237 - RNA, 21 nt, Artificial Sequence
  Synthetic
uguuugaguucauuguagauu

SEQ ID NO: 166238 - RNA, 22 nt, Artificial Sequence
  Synthetic
uuguuugaguucauuguagauu

SEQ ID NO: 166239 - RNA, 23 nt, Artificial Sequence
  Synthetic
uuuguuugaguucauuguagauu

SEQ ID NO: 166240 - RNA, 24 nt, Artificial Sequence
  Synthetic
auuuguuugaguucauuguagauu

SEQ ID NO: 166241 - RNA, 18 nt, Artificial Sequence
  Synthetic
uuaaguuccuuguagauu

SEQ ID NO: 166242 - RNA, 19 nt, Artificial Sequence
  Synthetic
uuuaaguuccuuguagauu

SEQ ID NO: 166243 - RNA, 21 nt, Artificial Sequence
  Synthetic
uguuuaaguuccuuguagauu

SEQ ID NO: 166244 - RNA, 22 nt, Artificial Sequence
  Synthetic
uuguuuaaguuccuuguagauu

SEQ ID NO: 166245 - RNA, 23 nt, Artificial Sequence
  Synthetic
uuuguuuaaguuccuuguagauu

SEQ ID NO: 166246 - RNA, 24 nt, Artificial Sequence
  Synthetic
auuuguuuaaguuccuuguagauu

SEQ ID NO: 166247 - RNA, 18 nt, Artificial Sequence
  Synthetic
aaacuagaacucaggauu

SEQ ID NO: 166248 - RNA, 19 nt, Artificial Sequence
  Synthetic
caaacuagaacucaggauu

SEQ ID NO: 166249 - RNA, 20 nt, Artificial Sequence
  Synthetic
ucaaacuagaacucaggauu

SEQ ID NO: 166250 - RNA, 21 nt, Artificial Sequence
  Synthetic
aucaaacuagaacucaggauu

SEQ ID NO: 166251 - RNA, 22 nt, Artificial Sequence
  Synthetic
aaucaaacuagaacucaggauu

SEQ ID NO: 166252 - RNA, 23 nt, Artificial Sequence
  Synthetic
caaucaaacuagaacucaggauu

SEQ ID NO: 166253 - RNA, 18 nt, Artificial Sequence
  Synthetic
ucuacuacccuuaggauu

SEQ ID NO: 166254 - RNA, 19 nt, Artificial Sequence
  Synthetic
cucuacuacccuuaggauu

SEQ ID NO: 166255 - RNA, 20 nt, Artificial Sequence
  Synthetic
acucuacuacccuuaggauu

SEQ ID NO: 166256 - RNA, 18 nt, Artificial Sequence
  Synthetic
ucuaaugacuaauggauu

SEQ ID NO: 166257 - RNA, 19 nt, Artificial Sequence
  Synthetic
aucuaaugacuaauggauu

SEQ ID NO: 166258 - RNA, 20 nt, Artificial Sequence
  Synthetic
caucuaaugacuaauggauu

SEQ ID NO: 166259 - RNA, 18 nt, Artificial Sequence
  Synthetic
uuggaaguguuuuggauu

SEQ ID NO: 166260 - RNA, 19 nt, Artificial Sequence
  Synthetic
auuggaaguguuuuggauu

SEQ ID NO: 166261 - RNA, 23 nt, Artificial Sequence
  Synthetic
ugggauuggaaguguuuuggauu

SEQ ID NO: 166262 - RNA, 24 nt, Artificial Sequence
  Synthetic
uugggauuggaaguguuuuggauu

SEQ ID NO: 166263 - RNA, 18 nt, Artificial Sequence
  Synthetic
auagaaaaauaaaugauu

SEQ ID NO: 166264 - RNA, 19 nt, Artificial Sequence
  Synthetic
aauagaaaaauaaaugauu

SEQ ID NO: 166265 - RNA, 20 nt, Artificial Sequence
  Synthetic
aaauagaaaaauaaaugauu

SEQ ID NO: 166266 - RNA, 18 nt, Artificial Sequence
  Synthetic
uuuauuagcuuuaugauu

SEQ ID NO: 166267 - RNA, 19 nt, Artificial Sequence
  Synthetic
auuuauuagcuuuaugauu

SEQ ID NO: 166268 - RNA, 20 nt, Artificial Sequence
  Synthetic
cauuuauuagcuuuaugauu

SEQ ID NO: 166269 - RNA, 21 nt, Artificial Sequence
  Synthetic
ucauuuauuagcuuuaugauu

SEQ ID NO: 166270 - RNA, 22 nt, Artificial Sequence
  Synthetic
uucauuuauuagcuuuaugauu

SEQ ID NO: 166271 - RNA, 23 nt, Artificial Sequence
  Synthetic
cuucauuuauuagcuuuaugauu

SEQ ID NO: 166272 - RNA, 24 nt, Artificial Sequence
  Synthetic
ucuucauuuauuagcuuuaugauu

SEQ ID NO: 166273 - RNA, 18 nt, Artificial Sequence
  Synthetic
ugugcuguucuagugauu

SEQ ID NO: 166274 - RNA, 19 nt, Artificial Sequence
  Synthetic
cugugcuguucuagugauu

SEQ ID NO: 166275 - RNA, 20 nt, Artificial Sequence
  Synthetic
ccugugcuguucuagugauu

SEQ ID NO: 166276 - RNA, 21 nt, Artificial Sequence
  Synthetic
uccugugcuguucuagugauu

SEQ ID NO: 166277 - RNA, 22 nt, Artificial Sequence
  Synthetic
uuccugugcuguucuagugauu

SEQ ID NO: 166278 - RNA, 23 nt, Artificial Sequence
  Synthetic
uuuccugugcuguucuagugauu

SEQ ID NO: 166279 - RNA, 24 nt, Artificial Sequence
  Synthetic
cuuuccugugcuguucuagugauu

SEQ ID NO: 166280 - RNA, 18 nt, Artificial Sequence
  Synthetic
aauuagccacgcgugauu

SEQ ID NO: 166281 - RNA, 19 nt, Artificial Sequence
  Synthetic
aaauuagccacgcgugauu

SEQ ID NO: 166282 - RNA, 20 nt, Artificial Sequence
  Synthetic
aaaauuagccacgcgugauu

SEQ ID NO: 166283 - RNA, 21 nt, Artificial Sequence
  Synthetic
aaaaauuagccacgcgugauu

SEQ ID NO: 166284 - RNA, 22 nt, Artificial Sequence
  Synthetic
caaaaauuagccacgcgugauu

SEQ ID NO: 166285 - RNA, 23 nt, Artificial Sequence
  Synthetic
acaaaaauuagccacgcgugauu

SEQ ID NO: 166286 - RNA, 24 nt, Artificial Sequence
  Synthetic
uacaaaaauuagccacgcgugauu

SEQ ID NO: 166287 - RNA, 18 nt, Artificial Sequence
  Synthetic
auguauauucuguugauu

SEQ ID NO: 166288 - RNA, 19 nt, Artificial Sequence
  Synthetic
aauguauauucuguugauu

SEQ ID NO: 166289 - RNA, 20 nt, Artificial Sequence
  Synthetic
uaauguauauucuguugauu

SEQ ID NO: 166290 - RNA, 21 nt, Artificial Sequence
  Synthetic
auaauguauauucuguugauu

SEQ ID NO: 166291 - RNA, 22 nt, Artificial Sequence
  Synthetic
aauaauguauauucuguugauu

SEQ ID NO: 166292 - RNA, 24 nt, Artificial Sequence
  Synthetic
agaauaauguauauucuguugauu

SEQ ID NO: 166293 - RNA, 18 nt, Artificial Sequence
  Synthetic
aaauuacugauuuugauu

SEQ ID NO: 166294 - RNA, 19 nt, Artificial Sequence
  Synthetic
aaaauuacugauuuugauu

SEQ ID NO: 166295 - RNA, 20 nt, Artificial Sequence
  Synthetic
uaaaauuacugauuuugauu

SEQ ID NO: 166296 - RNA, 18 nt, Artificial Sequence
  Synthetic
auagcaugaaaaaauauu

SEQ ID NO: 166297 - RNA, 19 nt, Artificial Sequence
  Synthetic
aauagcaugaaaaaauauu

SEQ ID NO: 166298 - RNA, 20 nt, Artificial Sequence
  Synthetic
uaauagcaugaaaaaauauu

SEQ ID NO: 166299 - RNA, 21 nt, Artificial Sequence
  Synthetic
auaauagcaugaaaaaauauu

SEQ ID NO: 166300 - RNA, 22 nt, Artificial Sequence
  Synthetic
uauaauagcaugaaaaaauauu

SEQ ID NO: 166301 - RNA, 23 nt, Artificial Sequence
  Synthetic
uuauaauagcaugaaaaaauauu

SEQ ID NO: 166302 - RNA, 24 nt, Artificial Sequence
  Synthetic
cuuauaauagcaugaaaaaauauu

SEQ ID NO: 166303 - RNA, 18 nt, Artificial Sequence
  Synthetic
aaucaaaaucaaaauauu

SEQ ID NO: 166304 - RNA, 19 nt, Artificial Sequence
  Synthetic
aaaucaaaaucaaaauauu

SEQ ID NO: 166305 - RNA, 20 nt, Artificial Sequence
  Synthetic
aaaaucaaaaucaaaauauu

SEQ ID NO: 166306 - RNA, 18 nt, Artificial Sequence
  Synthetic
acauaauuugaaaauauu

SEQ ID NO: 166307 - RNA, 19 nt, Artificial Sequence
  Synthetic
cacauaauuugaaaauauu

SEQ ID NO: 166308 - RNA, 20 nt, Artificial Sequence
  Synthetic
ucacauaauuugaaaauauu

SEQ ID NO: 166309 - RNA, 18 nt, Artificial Sequence
  Synthetic
uuuauauuuaggaauauu

SEQ ID NO: 166310 - RNA, 19 nt, Artificial Sequence
  Synthetic
auuuauauuuaggaauauu

SEQ ID NO: 166311 - RNA, 20 nt, Artificial Sequence
  Synthetic
aauuuauauuuaggaauauu

SEQ ID NO: 166312 - RNA, 18 nt, Artificial Sequence
  Synthetic
ugacaaaggucuaauauu

SEQ ID NO: 166313 - RNA, 19 nt, Artificial Sequence
  Synthetic
cugacaaaggucuaauauu

SEQ ID NO: 166314 - RNA, 20 nt, Artificial Sequence
  Synthetic
ucugacaaaggucuaauauu

SEQ ID NO: 166315 - RNA, 21 nt, Artificial Sequence
  Synthetic
aucugacaaaggucuaauauu

SEQ ID NO: 166316 - RNA, 22 nt, Artificial Sequence
  Synthetic
caucugacaaaggucuaauauu

SEQ ID NO: 166317 - RNA, 24 nt, Artificial Sequence
  Synthetic
ugcaucugacaaaggucuaauauu

SEQ ID NO: 166318 - RNA, 18 nt, Artificial Sequence
  Synthetic
uauguuuucaaacauauu

SEQ ID NO: 166319 - RNA, 19 nt, Artificial Sequence
  Synthetic
auauguuuucaaacauauu

SEQ ID NO: 166320 - RNA, 20 nt, Artificial Sequence
  Synthetic
uauauguuuucaaacauauu

SEQ ID NO: 166321 - RNA, 21 nt, Artificial Sequence
  Synthetic
uuauauguuuucaaacauauu

SEQ ID NO: 166322 - RNA, 22 nt, Artificial Sequence
  Synthetic
uuuauauguuuucaaacauauu

SEQ ID NO: 166323 - RNA, 23 nt, Artificial Sequence
  Synthetic
cuuuauauguuuucaaacauauu

SEQ ID NO: 166324 - RNA, 24 nt, Artificial Sequence
  Synthetic
ucuuuauauguuuucaaacauauu

SEQ ID NO: 166325 - RNA, 18 nt, Artificial Sequence
  Synthetic
aauauguguacacauauu

SEQ ID NO: 166326 - RNA, 19 nt, Artificial Sequence
  Synthetic
aaauauguguacacauauu

SEQ ID NO: 166327 - RNA, 20 nt, Artificial Sequence
  Synthetic
aaaauauguguacacauauu

SEQ ID NO: 166328 - RNA, 18 nt, Artificial Sequence
  Synthetic
aaaaggcaggcacauauu

SEQ ID NO: 166329 - RNA, 19 nt, Artificial Sequence
  Synthetic
aaaaaggcaggcacauauu

SEQ ID NO: 166330 - RNA, 20 nt, Artificial Sequence
  Synthetic
uggcauaggaaacagauauu

SEQ ID NO: 166331 - RNA, 18 nt, Artificial Sequence
  Synthetic
uuaucaagugaggauauu

SEQ ID NO: 166332 - RNA, 19 nt, Artificial Sequence
  Synthetic
auuaucaagugaggauauu

SEQ ID NO: 166333 - RNA, 20 nt, Artificial Sequence
  Synthetic
aauuaucaagugaggauauu

SEQ ID NO: 166334 - RNA, 21 nt, Artificial Sequence
  Synthetic
aaauuaucaagugaggauauu

SEQ ID NO: 166335 - RNA, 22 nt, Artificial Sequence
  Synthetic
aaaauuaucaagugaggauauu

SEQ ID NO: 166336 - RNA, 23 nt, Artificial Sequence
  Synthetic
uaaaauuaucaagugaggauauu

SEQ ID NO: 166337 - RNA, 24 nt, Artificial Sequence
  Synthetic
cuaaaauuaucaagugaggauauu

SEQ ID NO: 166338 - RNA, 18 nt, Artificial Sequence
  Synthetic
auugggugcauauauauu

SEQ ID NO: 166339 - RNA, 19 nt, Artificial Sequence
  Synthetic
uauugggugcauauauauu

SEQ ID NO: 166340 - RNA, 20 nt, Artificial Sequence
  Synthetic
auauugggugcauauauauu

SEQ ID NO: 166341 - RNA, 21 nt, Artificial Sequence
  Synthetic
uauauugggugcauauauauu

SEQ ID NO: 166342 - RNA, 22 nt, Artificial Sequence
  Synthetic
cuauauugggugcauauauauu

SEQ ID NO: 166343 - RNA, 23 nt, Artificial Sequence
  Synthetic
ccuauauugggugcauauauauu

SEQ ID NO: 166344 - RNA, 24 nt, Artificial Sequence
  Synthetic
uccuauauugggugcauauauauu

SEQ ID NO: 166345 - RNA, 21 nt, Artificial Sequence
  Synthetic
uguauugggugcauauauauu

SEQ ID NO: 166346 - RNA, 22 nt, Artificial Sequence
  Synthetic
cuguauugggugcauauauauu

SEQ ID NO: 166347 - RNA, 23 nt, Artificial Sequence
  Synthetic
ccuguauugggugcauauauauu

SEQ ID NO: 166348 - RNA, 24 nt, Artificial Sequence
  Synthetic
uccuguauugggugcauauauauu

SEQ ID NO: 166349 - RNA, 18 nt, Artificial Sequence
  Synthetic
uaugauuauauauauauu

SEQ ID NO: 166350 - RNA, 19 nt, Artificial Sequence
  Synthetic
auaugauuauauauauauu

SEQ ID NO: 166351 - RNA, 20 nt, Artificial Sequence
  Synthetic
uauaugauuauauauauauu

SEQ ID NO: 166352 - RNA, 18 nt, Artificial Sequence
  Synthetic
uuaauaugacacuauauu

SEQ ID NO: 166353 - RNA, 19 nt, Artificial Sequence
  Synthetic
auuaauaugacacuauauu

SEQ ID NO: 166354 - RNA, 20 nt, Artificial Sequence
  Synthetic
uauuaauaugacacuauauu

SEQ ID NO: 166355 - RNA, 21 nt, Artificial Sequence
  Synthetic
uuauuaauaugacacuauauu

SEQ ID NO: 166356 - RNA, 22 nt, Artificial Sequence
  Synthetic
cuuauuaauaugacacuauauu

SEQ ID NO: 166357 - RNA, 23 nt, Artificial Sequence
  Synthetic
ucuuauuaauaugacacuauauu

SEQ ID NO: 166358 - RNA, 24 nt, Artificial Sequence
  Synthetic
aucuuauuaauaugacacuauauu

SEQ ID NO: 166359 - RNA, 21 nt, Artificial Sequence
  Synthetic
ucuauucaauuucuuuauauu

SEQ ID NO: 166360 - RNA, 22 nt, Artificial Sequence
  Synthetic
uucuauucaauuucuuuauauu

SEQ ID NO: 166361 - RNA, 23 nt, Artificial Sequence
  Synthetic
uuucuauucaauuucuuuauauu

SEQ ID NO: 166362 - RNA, 24 nt, Artificial Sequence
  Synthetic
cuuucuauucaauuucuuuauauu

SEQ ID NO: 166363 - RNA, 21 nt, Artificial Sequence
  Synthetic
ugugguguauacuuuuauauu

SEQ ID NO: 166364 - RNA, 22 nt, Artificial Sequence
  Synthetic
uugugguguauacuuuuauauu

SEQ ID NO: 166365 - RNA, 23 nt, Artificial Sequence
  Synthetic
uuugugguguauacuuuuauauu

SEQ ID NO: 166366 - RNA, 24 nt, Artificial Sequence
  Synthetic
auuugugguguauacuuuuauauu

SEQ ID NO: 166367 - RNA, 18 nt, Artificial Sequence
  Synthetic
uguuuuuuuuuuuauauu

SEQ ID NO: 166368 - RNA, 19 nt, Artificial Sequence
  Synthetic
uuguuuuuuuuuuuauauu

SEQ ID NO: 166369 - RNA, 20 nt, Artificial Sequence
  Synthetic
uuuguuuuuuuuuuuauauu

SEQ ID NO: 166370 - RNA, 21 nt, Artificial Sequence
  Synthetic
auuuguuuuuuuuuuuauauu

SEQ ID NO: 166371 - RNA, 22 nt, Artificial Sequence
  Synthetic
aauuuguuuuuuuuuuuauauu

SEQ ID NO: 166372 - RNA, 23 nt, Artificial Sequence
  Synthetic
aaauuuguuuuuuuuuuuauauu

SEQ ID NO: 166373 - RNA, 24 nt, Artificial Sequence
  Synthetic
aaaauuuguuuuuuuuuuuauauu

SEQ ID NO: 166374 - RNA, 21 nt, Artificial Sequence
  Synthetic
ugguuccaagucuuugcuauu

SEQ ID NO: 166375 - RNA, 22 nt, Artificial Sequence
  Synthetic
uugguuccaagucuuugcuauu

SEQ ID NO: 166376 - RNA, 18 nt, Artificial Sequence
  Synthetic
auccaugucuuugcuauu

SEQ ID NO: 166377 - RNA, 19 nt, Artificial Sequence
  Synthetic
aauccaugucuuugcuauu

SEQ ID NO: 166378 - RNA, 21 nt, Artificial Sequence
  Synthetic
ugaauccaugucuuugcuauu

SEQ ID NO: 166379 - RNA, 22 nt, Artificial Sequence
  Synthetic
uugaauccaugucuuugcuauu

SEQ ID NO: 166380 - RNA, 24 nt, Artificial Sequence
  Synthetic
aguugaauccaugucuuugcuauu

SEQ ID NO: 166381 - RNA, 18 nt, Artificial Sequence
  Synthetic
uuaaguccaugaucuauu

SEQ ID NO: 166382 - RNA, 19 nt, Artificial Sequence
  Synthetic
uuuaaguccaugaucuauu

SEQ ID NO: 166383 - RNA, 20 nt, Artificial Sequence
  Synthetic
auuuaaguccaugaucuauu

SEQ ID NO: 166384 - RNA, 21 nt, Artificial Sequence
  Synthetic
cauuuaaguccaugaucuauu

SEQ ID NO: 166385 - RNA, 22 nt, Artificial Sequence
  Synthetic
acauuuaaguccaugaucuauu

SEQ ID NO: 166386 - RNA, 23 nt, Artificial Sequence
  Synthetic
uacauuuaaguccaugaucuauu

SEQ ID NO: 166387 - RNA, 24 nt, Artificial Sequence
  Synthetic
uuacauuuaaguccaugaucuauu

SEQ ID NO: 166388 - RNA, 18 nt, Artificial Sequence
  Synthetic
cuucguguuuauucuauu

SEQ ID NO: 166389 - RNA, 19 nt, Artificial Sequence
  Synthetic
ucuucguguuuauucuauu

SEQ ID NO: 166390 - RNA, 20 nt, Artificial Sequence
  Synthetic
cucuucguguuuauucuauu

SEQ ID NO: 166391 - RNA, 18 nt, Artificial Sequence
  Synthetic
uuccuuggcuuuucuauu

SEQ ID NO: 166392 - RNA, 19 nt, Artificial Sequence
  Synthetic
auuccuuggcuuuucuauu

SEQ ID NO: 166393 - RNA, 21 nt, Artificial Sequence
  Synthetic
ugauuccuuggcuuuucuauu

SEQ ID NO: 166394 - RNA, 22 nt, Artificial Sequence
  Synthetic
uugauuccuuggcuuuucuauu

SEQ ID NO: 166395 - RNA, 19 nt, Artificial Sequence
  Synthetic
uguuuugauuuuuucuauu

SEQ ID NO: 166396 - RNA, 20 nt, Artificial Sequence
  Synthetic
uuguuuugauuuuuucuauu

SEQ ID NO: 166397 - RNA, 21 nt, Artificial Sequence
  Synthetic
uuuguuuugauuuuuucuauu

SEQ ID NO: 166398 - RNA, 22 nt, Artificial Sequence
  Synthetic
uuuuguuuugauuuuuucuauu

SEQ ID NO: 166399 - RNA, 24 nt, Artificial Sequence
  Synthetic
aguuuuguuuugauuuuuucuauu

SEQ ID NO: 166400 - RNA, 21 nt, Artificial Sequence
  Synthetic
uuuucugguucuuaauguauu

SEQ ID NO: 166401 - RNA, 22 nt, Artificial Sequence
  Synthetic
auuuucugguucuuaauguauu

SEQ ID NO: 166402 - RNA, 23 nt, Artificial Sequence
  Synthetic
aauuuucugguucuuaauguauu

SEQ ID NO: 166403 - RNA, 24 nt, Artificial Sequence
  Synthetic
uaauuuucugguucuuaauguauu

SEQ ID NO: 166404 - RNA, 18 nt, Artificial Sequence
  Synthetic
auauaaaaugcauguauu

SEQ ID NO: 166405 - RNA, 19 nt, Artificial Sequence
  Synthetic
uauauaaaaugcauguauu

SEQ ID NO: 166406 - RNA, 20 nt, Artificial Sequence
  Synthetic
auauauaaaaugcauguauu

SEQ ID NO: 166407 - RNA, 21 nt, Artificial Sequence
  Synthetic
uauauauaaaaugcauguauu

SEQ ID NO: 166408 - RNA, 22 nt, Artificial Sequence
  Synthetic
auauauauaaaaugcauguauu

SEQ ID NO: 166409 - RNA, 23 nt, Artificial Sequence
  Synthetic
uauauauauaaaaugcauguauu

SEQ ID NO: 166410 - RNA, 24 nt, Artificial Sequence
  Synthetic
auauauauauaaaaugcauguauu

SEQ ID NO: 166411 - RNA, 18 nt, Artificial Sequence
  Synthetic
uaccuguuuucaauuauu

SEQ ID NO: 166412 - RNA, 19 nt, Artificial Sequence
  Synthetic
auaccuguuuucaauuauu

SEQ ID NO: 166413 - RNA, 20 nt, Artificial Sequence
  Synthetic
aauaccuguuuucaauuauu

SEQ ID NO: 166414 - RNA, 22 nt, Artificial Sequence
  Synthetic
ugaauaccuguuuucaauuauu

SEQ ID NO: 166415 - RNA, 24 nt, Artificial Sequence
  Synthetic
ugugaauaccuguuuucaauuauu

SEQ ID NO: 166416 - RNA, 18 nt, Artificial Sequence
  Synthetic
auuacuaaaauaauuauu

SEQ ID NO: 166417 - RNA, 19 nt, Artificial Sequence
  Synthetic
uauuacuaaaauaauuauu

SEQ ID NO: 166418 - RNA, 20 nt, Artificial Sequence
  Synthetic
uuauuacuaaaauaauuauu

SEQ ID NO: 166419 - RNA, 19 nt, Artificial Sequence
  Synthetic
aguaucuauguauauuauu

SEQ ID NO: 166420 - RNA, 18 nt, Artificial Sequence
  Synthetic
auuuaaaaaccuauuauu

SEQ ID NO: 166421 - RNA, 19 nt, Artificial Sequence
  Synthetic
aauuuaaaaaccuauuauu

SEQ ID NO: 166422 - RNA, 20 nt, Artificial Sequence
  Synthetic
uaauuuaaaaaccuauuauu

SEQ ID NO: 166423 - RNA, 18 nt, Artificial Sequence
  Synthetic
auugauaucuuuguuauu

SEQ ID NO: 166424 - RNA, 19 nt, Artificial Sequence
  Synthetic
uauugauaucuuuguuauu

SEQ ID NO: 166425 - RNA, 20 nt, Artificial Sequence
  Synthetic
auauugauaucuuuguuauu

SEQ ID NO: 166426 - RNA, 18 nt, Artificial Sequence
  Synthetic
uuccaagucuuuguuauu

SEQ ID NO: 166427 - RNA, 21 nt, Artificial Sequence
  Synthetic
ugguuccaagucuuuguuauu

SEQ ID NO: 166428 - RNA, 22 nt, Artificial Sequence
  Synthetic
uugguuccaagucuuuguuauu

SEQ ID NO: 166429 - RNA, 21 nt, Artificial Sequence
  Synthetic
cccaucaauaccuaauuuauu

SEQ ID NO: 166430 - RNA, 22 nt, Artificial Sequence
  Synthetic
ucccaucaauaccuaauuuauu

SEQ ID NO: 166431 - RNA, 24 nt, Artificial Sequence
  Synthetic
ugucccaucaauaccuaauuuauu

SEQ ID NO: 166432 - RNA, 18 nt, Artificial Sequence
  Synthetic
aucaguaccuaauuuauu

SEQ ID NO: 166433 - RNA, 19 nt, Artificial Sequence
  Synthetic
caucaguaccuaauuuauu

SEQ ID NO: 166434 - RNA, 20 nt, Artificial Sequence
  Synthetic
ccaucaguaccuaauuuauu

SEQ ID NO: 166435 - RNA, 21 nt, Artificial Sequence
  Synthetic
uccaucaguaccuaauuuauu

SEQ ID NO: 166436 - RNA, 22 nt, Artificial Sequence
  Synthetic
uuccaucaguaccuaauuuauu

SEQ ID NO: 166437 - RNA, 24 nt, Artificial Sequence
  Synthetic
cguuccaucaguaccuaauuuauu

SEQ ID NO: 166438 - RNA, 18 nt, Artificial Sequence
  Synthetic
aaacauuuaccauuuauu

SEQ ID NO: 166439 - RNA, 19 nt, Artificial Sequence
  Synthetic
caaacauuuaccauuuauu

SEQ ID NO: 166440 - RNA, 20 nt, Artificial Sequence
  Synthetic
ucaaacauuuaccauuuauu

SEQ ID NO: 166441 - RNA, 21 nt, Artificial Sequence
  Synthetic
cucaaacauuuaccauuuauu

SEQ ID NO: 166442 - RNA, 22 nt, Artificial Sequence
  Synthetic
ccucaaacauuuaccauuuauu

SEQ ID NO: 166443 - RNA, 23 nt, Artificial Sequence
  Synthetic
accucaaacauuuaccauuuauu

SEQ ID NO: 166444 - RNA, 24 nt, Artificial Sequence
  Synthetic
caccucaaacauuuaccauuuauu

SEQ ID NO: 166445 - RNA, 18 nt, Artificial Sequence
  Synthetic
uaaaaauuauauuuuauu

SEQ ID NO: 166446 - RNA, 19 nt, Artificial Sequence
  Synthetic
uuaaaaauuauauuuuauu

SEQ ID NO: 166447 - RNA, 20 nt, Artificial Sequence
  Synthetic
uuuaaaaauuauauuuuauu

SEQ ID NO: 166448 - RNA, 20 nt, Artificial Sequence
  Synthetic
cgguaugccaguauuuuauu

SEQ ID NO: 166449 - RNA, 21 nt, Artificial Sequence
  Synthetic
ucgguaugccaguauuuuauu

SEQ ID NO: 166450 - RNA, 22 nt, Artificial Sequence
  Synthetic
uucgguaugccaguauuuuauu

SEQ ID NO: 166451 - RNA, 23 nt, Artificial Sequence
  Synthetic
auucgguaugccaguauuuuauu

SEQ ID NO: 166452 - RNA, 21 nt, Artificial Sequence
  Synthetic
ucgguuugccaguauuuuauu

SEQ ID NO: 166453 - RNA, 22 nt, Artificial Sequence
  Synthetic
uucgguuugccaguauuuuauu

SEQ ID NO: 166454 - RNA, 23 nt, Artificial Sequence
  Synthetic
auucgguuugccaguauuuuauu

SEQ ID NO: 166455 - RNA, 21 nt, Artificial Sequence
  Synthetic
auauauguauucgguuuuauu

SEQ ID NO: 166456 - RNA, 22 nt, Artificial Sequence
  Synthetic
uauauauguauucgguuuuauu

SEQ ID NO: 166457 - RNA, 23 nt, Artificial Sequence
  Synthetic
auauauauguauucgguuuuauu

SEQ ID NO: 166458 - RNA, 24 nt, Artificial Sequence
  Synthetic
uauauauauguauucgguuuuauu

SEQ ID NO: 166459 - RNA, 21 nt, Artificial Sequence
  Synthetic
cacuggauugcuggaaaacuu

SEQ ID NO: 166460 - RNA, 22 nt, Artificial Sequence
  Synthetic
acacuggauugcuggaaaacuu

SEQ ID NO: 166461 - RNA, 23 nt, Artificial Sequence
  Synthetic
aacacuggauugcuggaaaacuu

SEQ ID NO: 166462 - RNA, 24 nt, Artificial Sequence
  Synthetic
aaacacuggauugcuggaaaacuu

SEQ ID NO: 166463 - RNA, 18 nt, Artificial Sequence
  Synthetic
uucaugaccuugaaacuu

SEQ ID NO: 166464 - RNA, 19 nt, Artificial Sequence
  Synthetic
cuucaugaccuugaaacuu

SEQ ID NO: 166465 - RNA, 20 nt, Artificial Sequence
  Synthetic
ucuucaugaccuugaaacuu

SEQ ID NO: 166466 - RNA, 21 nt, Artificial Sequence
  Synthetic
uucuucaugaccuugaaacuu

SEQ ID NO: 166467 - RNA, 23 nt, Artificial Sequence
  Synthetic
uguucuucaugaccuugaaacuu

SEQ ID NO: 166468 - RNA, 24 nt, Artificial Sequence
  Synthetic
uuguucuucaugaccuugaaacuu

SEQ ID NO: 166469 - RNA, 18 nt, Artificial Sequence
  Synthetic
agugauggguucacacuu

SEQ ID NO: 166470 - RNA, 19 nt, Artificial Sequence
  Synthetic
aagugauggguucacacuu

SEQ ID NO: 166471 - RNA, 20 nt, Artificial Sequence
  Synthetic
aaagugauggguucacacuu

SEQ ID NO: 166472 - RNA, 18 nt, Artificial Sequence
  Synthetic
cauguccuucgcccacuu

SEQ ID NO: 166473 - RNA, 19 nt, Artificial Sequence
  Synthetic
ucauguccuucgcccacuu

SEQ ID NO: 166474 - RNA, 20 nt, Artificial Sequence
  Synthetic
uucauguccuucgcccacuu

SEQ ID NO: 166475 - RNA, 22 nt, Artificial Sequence
  Synthetic
uguucauguccuucgcccacuu

SEQ ID NO: 166476 - RNA, 23 nt, Artificial Sequence
  Synthetic
cuguucauguccuucgcccacuu

SEQ ID NO: 166477 - RNA, 24 nt, Artificial Sequence
  Synthetic
ucuguucauguccuucgcccacuu

SEQ ID NO: 166478 - RNA, 19 nt, Artificial Sequence
  Synthetic
uguuccagaaaucccacuu

SEQ ID NO: 166479 - RNA, 20 nt, Artificial Sequence
  Synthetic
auguuccagaaaucccacuu

SEQ ID NO: 166480 - RNA, 21 nt, Artificial Sequence
  Synthetic
uauguuccagaaaucccacuu

SEQ ID NO: 166481 - RNA, 22 nt, Artificial Sequence
  Synthetic
auauguuccagaaaucccacuu

SEQ ID NO: 166482 - RNA, 23 nt, Artificial Sequence
  Synthetic
cauauguuccagaaaucccacuu

SEQ ID NO: 166483 - RNA, 24 nt, Artificial Sequence
  Synthetic
ccauauguuccagaaaucccacuu

SEQ ID NO: 166484 - RNA, 19 nt, Artificial Sequence
  Synthetic
cguuguucaacucccacuu

SEQ ID NO: 166485 - RNA, 20 nt, Artificial Sequence
  Synthetic
ucguuguucaacucccacuu

SEQ ID NO: 166486 - RNA, 21 nt, Artificial Sequence
  Synthetic
cucguuguucaacucccacuu

SEQ ID NO: 166487 - RNA, 22 nt, Artificial Sequence
  Synthetic
ucucguuguucaacucccacuu

SEQ ID NO: 166488 - RNA, 23 nt, Artificial Sequence
  Synthetic
cucucguuguucaacucccacuu

SEQ ID NO: 166489 - RNA, 18 nt, Artificial Sequence
  Synthetic
acugugaacucugcacuu

SEQ ID NO: 166490 - RNA, 19 nt, Artificial Sequence
  Synthetic
aacugugaacucugcacuu

SEQ ID NO: 166491 - RNA, 20 nt, Artificial Sequence
  Synthetic
caacugugaacucugcacuu

SEQ ID NO: 166492 - RNA, 19 nt, Artificial Sequence
  Synthetic
agacuuuggacuuggacuu

SEQ ID NO: 166493 - RNA, 21 nt, Artificial Sequence
  Synthetic
ugagacuuuggacuuggacuu

SEQ ID NO: 166494 - RNA, 22 nt, Artificial Sequence
  Synthetic
augagacuuuggacuuggacuu

SEQ ID NO: 166495 - RNA, 24 nt, Artificial Sequence
  Synthetic
agaugagacuuuggacuuggacuu

SEQ ID NO: 166496 - RNA, 18 nt, Artificial Sequence
  Synthetic
ccuguuguuuccugacuu

SEQ ID NO: 166497 - RNA, 19 nt, Artificial Sequence
  Synthetic
accuguuguuuccugacuu

SEQ ID NO: 166498 - RNA, 20 nt, Artificial Sequence
  Synthetic
caccuguuguuuccugacuu

SEQ ID NO: 166499 - RNA, 22 nt, Artificial Sequence
  Synthetic
agcaccuguuguuuccugacuu

SEQ ID NO: 166500 - RNA, 23 nt, Artificial Sequence
  Synthetic
cagcaccuguuguuuccugacuu

SEQ ID NO: 166501 - RNA, 24 nt, Artificial Sequence
  Synthetic
ccagcaccuguuguuuccugacuu

SEQ ID NO: 166502 - RNA, 18 nt, Artificial Sequence
  Synthetic
aggagaaaaaaaauacuu

SEQ ID NO: 166503 - RNA, 20 nt, Artificial Sequence
  Synthetic
ugaggagaaaaaaaauacuu

SEQ ID NO: 166504 - RNA, 21 nt, Artificial Sequence
  Synthetic
uugaggagaaaaaaaauacuu

SEQ ID NO: 166505 - RNA, 22 nt, Artificial Sequence
  Synthetic
uuugaggagaaaaaaaauacuu

SEQ ID NO: 166506 - RNA, 18 nt, Artificial Sequence
  Synthetic
ugaaaugaauuaauacuu

SEQ ID NO: 166507 - RNA, 19 nt, Artificial Sequence
  Synthetic
cugaaaugaauuaauacuu

SEQ ID NO: 166508 - RNA, 21 nt, Artificial Sequence
  Synthetic
ugcugaaaugaauuaauacuu

SEQ ID NO: 166509 - RNA, 22 nt, Artificial Sequence
  Synthetic
augcugaaaugaauuaauacuu

SEQ ID NO: 166510 - RNA, 23 nt, Artificial Sequence
  Synthetic
aaugcugaaaugaauuaauacuu

SEQ ID NO: 166511 - RNA, 24 nt, Artificial Sequence
  Synthetic
uaaugcugaaaugaauuaauacuu

SEQ ID NO: 166512 - RNA, 18 nt, Artificial Sequence
  Synthetic
cuguaaucccagauacuu

SEQ ID NO: 166513 - RNA, 19 nt, Artificial Sequence
  Synthetic
ccuguaaucccagauacuu

SEQ ID NO: 166514 - RNA, 21 nt, Artificial Sequence
  Synthetic
ugccuguaaucccagauacuu

SEQ ID NO: 166515 - RNA, 22 nt, Artificial Sequence
  Synthetic
uugccuguaaucccagauacuu

SEQ ID NO: 166516 - RNA, 23 nt, Artificial Sequence
  Synthetic
cuugccuguaaucccagauacuu

SEQ ID NO: 166517 - RNA, 24 nt, Artificial Sequence
  Synthetic
acuugccuguaaucccagauacuu

SEQ ID NO: 166518 - RNA, 18 nt, Artificial Sequence
  Synthetic
aaaaaaaauggauuacuu

SEQ ID NO: 166519 - RNA, 19 nt, Artificial Sequence
  Synthetic
aaaaaaaaauggauuacuu

SEQ ID NO: 166520 - RNA, 20 nt, Artificial Sequence
  Synthetic
aaaaaaaaaauggauuacuu

SEQ ID NO: 166521 - RNA, 18 nt, Artificial Sequence
  Synthetic
agaaugauuuauuuacuu

SEQ ID NO: 166522 - RNA, 19 nt, Artificial Sequence
  Synthetic
uagaaugauuuauuuacuu

SEQ ID NO: 166523 - RNA, 22 nt, Artificial Sequence
  Synthetic
ugguagaaugauuuauuuacuu

SEQ ID NO: 166524 - RNA, 23 nt, Artificial Sequence
  Synthetic
uugguagaaugauuuauuuacuu

SEQ ID NO: 166525 - RNA, 24 nt, Artificial Sequence
  Synthetic
uuugguagaaugauuuauuuacuu

SEQ ID NO: 166526 - RNA, 18 nt, Artificial Sequence
  Synthetic
uagaaaaaaaaaacccuu

SEQ ID NO: 166527 - RNA, 18 nt, Artificial Sequence
  Synthetic
caugagggcucugcccuu

SEQ ID NO: 166528 - RNA, 19 nt, Artificial Sequence
  Synthetic
ucaugagggcucugcccuu

SEQ ID NO: 166529 - RNA, 20 nt, Artificial Sequence
  Synthetic
aucaugagggcucugcccuu

SEQ ID NO: 166530 - RNA, 21 nt, Artificial Sequence
  Synthetic
caucaugagggcucugcccuu

SEQ ID NO: 166531 - RNA, 23 nt, Artificial Sequence
  Synthetic
ugcaucaugagggcucugcccuu

SEQ ID NO: 166532 - RNA, 24 nt, Artificial Sequence
  Synthetic
uugcaucaugagggcucugcccuu

SEQ ID NO: 166533 - RNA, 18 nt, Artificial Sequence
  Synthetic
cgugcgugcagaucccuu

SEQ ID NO: 166534 - RNA, 19 nt, Artificial Sequence
  Synthetic
acgugcgugcagaucccuu

SEQ ID NO: 166535 - RNA, 20 nt, Artificial Sequence
  Synthetic
aacgugcgugcagaucccuu

SEQ ID NO: 166536 - RNA, 21 nt, Artificial Sequence
  Synthetic
ugagaggaucuuucuucccuu

SEQ ID NO: 166537 - RNA, 22 nt, Artificial Sequence
  Synthetic
cugagaggaucuuucuucccuu

SEQ ID NO: 166538 - RNA, 18 nt, Artificial Sequence
  Synthetic
uccuccugccccagccuu

SEQ ID NO: 166539 - RNA, 20 nt, Artificial Sequence
  Synthetic
aguccuccugccccagccuu

SEQ ID NO: 166540 - RNA, 21 nt, Artificial Sequence
  Synthetic
caguccuccugccccagccuu

SEQ ID NO: 166541 - RNA, 22 nt, Artificial Sequence
  Synthetic
acaguccuccugccccagccuu

SEQ ID NO: 166542 - RNA, 23 nt, Artificial Sequence
  Synthetic
aacaguccuccugccccagccuu

SEQ ID NO: 166543 - RNA, 24 nt, Artificial Sequence
  Synthetic
aaacaguccuccugccccagccuu

SEQ ID NO: 166544 - RNA, 18 nt, Artificial Sequence
  Synthetic
cuguuuuugcaacuccuu

SEQ ID NO: 166545 - RNA, 19 nt, Artificial Sequence
  Synthetic
acuguuuuugcaacuccuu

SEQ ID NO: 166546 - RNA, 20 nt, Artificial Sequence
  Synthetic
uacuguuuuugcaacuccuu

SEQ ID NO: 166547 - RNA, 22 nt, Artificial Sequence
  Synthetic
uguacuguuuuugcaacuccuu

SEQ ID NO: 166548 - RNA, 23 nt, Artificial Sequence
  Synthetic
cuguacuguuuuugcaacuccuu

SEQ ID NO: 166549 - RNA, 24 nt, Artificial Sequence
  Synthetic
ucuguacuguuuuugcaacuccuu

SEQ ID NO: 166550 - RNA, 18 nt, Artificial Sequence
  Synthetic
auauuguuccauuuccuu

SEQ ID NO: 166551 - RNA, 19 nt, Artificial Sequence
  Synthetic
aauauuguuccauuuccuu

SEQ ID NO: 166552 - RNA, 20 nt, Artificial Sequence
  Synthetic
aaauauuguuccauuuccuu

SEQ ID NO: 166553 - RNA, 18 nt, Artificial Sequence
  Synthetic
ucucuccuuccuuuccuu

SEQ ID NO: 166554 - RNA, 19 nt, Artificial Sequence
  Synthetic
uucucuccuuccuuuccuu

SEQ ID NO: 166555 - RNA, 19 nt, Artificial Sequence
  Synthetic
agucugaugggcuuuccuu

SEQ ID NO: 166556 - RNA, 20 nt, Artificial Sequence
  Synthetic
uagucugaugggcuuuccuu

SEQ ID NO: 166557 - RNA, 21 nt, Artificial Sequence
  Synthetic
uuagucugaugggcuuuccuu

SEQ ID NO: 166558 - RNA, 23 nt, Artificial Sequence
  Synthetic
uguuagucugaugggcuuuccuu

SEQ ID NO: 166559 - RNA, 24 nt, Artificial Sequence
  Synthetic
cuguuagucugaugggcuuuccuu

SEQ ID NO: 166560 - RNA, 18 nt, Artificial Sequence
  Synthetic
acagaguccagugagcuu

SEQ ID NO: 166561 - RNA, 21 nt, Artificial Sequence
  Synthetic
aggacagaguccagugagcuu

SEQ ID NO: 166562 - RNA, 23 nt, Artificial Sequence
  Synthetic
agaggacagaguccagugagcuu

SEQ ID NO: 166563 - RNA, 24 nt, Artificial Sequence
  Synthetic
aagaggacagaguccagugagcuu

SEQ ID NO: 166564 - RNA, 18 nt, Artificial Sequence
  Synthetic
cuucucuucugcuagcuu

SEQ ID NO: 166565 - RNA, 19 nt, Artificial Sequence
  Synthetic
ucuucucuucugcuagcuu

SEQ ID NO: 166566 - RNA, 20 nt, Artificial Sequence
  Synthetic
uucuucucuucugcuagcuu

SEQ ID NO: 166567 - RNA, 21 nt, Artificial Sequence
  Synthetic
uuucuucucuucugcuagcuu

SEQ ID NO: 166568 - RNA, 22 nt, Artificial Sequence
  Synthetic
auuucuucucuucugcuagcuu

SEQ ID NO: 166569 - RNA, 23 nt, Artificial Sequence
  Synthetic
uauuucuucucuucugcuagcuu

SEQ ID NO: 166570 - RNA, 24 nt, Artificial Sequence
  Synthetic
uuauuucuucucuucugcuagcuu

SEQ ID NO: 166571 - RNA, 18 nt, Artificial Sequence
  Synthetic
uuaaaguuuuuuuagcuu

SEQ ID NO: 166572 - RNA, 19 nt, Artificial Sequence
  Synthetic
uuuaaaguuuuuuuagcuu

SEQ ID NO: 166573 - RNA, 20 nt, Artificial Sequence
  Synthetic
uuuuaaaguuuuuuuagcuu

SEQ ID NO: 166574 - RNA, 18 nt, Artificial Sequence
  Synthetic
ucaaacuugagugggcuu

SEQ ID NO: 166575 - RNA, 19 nt, Artificial Sequence
  Synthetic
cucaaacuugagugggcuu

SEQ ID NO: 166576 - RNA, 20 nt, Artificial Sequence
  Synthetic
ucucaaacuugagugggcuu

SEQ ID NO: 166577 - RNA, 21 nt, Artificial Sequence
  Synthetic
uucucaaacuugagugggcuu

SEQ ID NO: 166578 - RNA, 24 nt, Artificial Sequence
  Synthetic
ugguucucaaacuugagugggcuu

SEQ ID NO: 166579 - RNA, 22 nt, Artificial Sequence
  Synthetic
agagggcagcaaacuauggcuu

SEQ ID NO: 166580 - RNA, 23 nt, Artificial Sequence
  Synthetic
cagagggcagcaaacuauggcuu

SEQ ID NO: 166581 - RNA, 18 nt, Artificial Sequence
  Synthetic
uuucaggcuuuuuggcuu

SEQ ID NO: 166582 - RNA, 21 nt, Artificial Sequence
  Synthetic
cgguuucaggcuuuuuggcuu

SEQ ID NO: 166583 - RNA, 23 nt, Artificial Sequence
  Synthetic
ugcgguuucaggcuuuuuggcuu

SEQ ID NO: 166584 - RNA, 24 nt, Artificial Sequence
  Synthetic
cugcgguuucaggcuuuuuggcuu

SEQ ID NO: 166585 - RNA, 18 nt, Artificial Sequence
  Synthetic
agagcauaaaucaugcuu

SEQ ID NO: 166586 - RNA, 19 nt, Artificial Sequence
  Synthetic
cagagcauaaaucaugcuu

SEQ ID NO: 166587 - RNA, 20 nt, Artificial Sequence
  Synthetic
ucagagcauaaaucaugcuu

SEQ ID NO: 166588 - RNA, 18 nt, Artificial Sequence
  Synthetic
ucuugcccugagaugcuu

SEQ ID NO: 166589 - RNA, 19 nt, Artificial Sequence
  Synthetic
aucuugcccugagaugcuu

SEQ ID NO: 166590 - RNA, 20 nt, Artificial Sequence
  Synthetic
caucuugcccugagaugcuu

SEQ ID NO: 166591 - RNA, 18 nt, Artificial Sequence
  Synthetic
uuucucuuccagcugcuu

SEQ ID NO: 166592 - RNA, 19 nt, Artificial Sequence
  Synthetic
auuucucuuccagcugcuu

SEQ ID NO: 166593 - RNA, 20 nt, Artificial Sequence
  Synthetic
cauuucucuuccagcugcuu

SEQ ID NO: 166594 - RNA, 19 nt, Artificial Sequence
  Synthetic
aguuugcugacucuugcuu

SEQ ID NO: 166595 - RNA, 20 nt, Artificial Sequence
  Synthetic
uaguuugcugacucuugcuu

SEQ ID NO: 166596 - RNA, 21 nt, Artificial Sequence
  Synthetic
auaguuugcugacucuugcuu

SEQ ID NO: 166597 - RNA, 22 nt, Artificial Sequence
  Synthetic
cauaguuugcugacucuugcuu

SEQ ID NO: 166598 - RNA, 23 nt, Artificial Sequence
  Synthetic
ccauaguuugcugacucuugcuu

SEQ ID NO: 166599 - RNA, 24 nt, Artificial Sequence
  Synthetic
accauaguuugcugacucuugcuu

SEQ ID NO: 166600 - RNA, 21 nt, Artificial Sequence
  Synthetic
acuggagucaaagaguugcuu

SEQ ID NO: 166601 - RNA, 22 nt, Artificial Sequence
  Synthetic
cacuggagucaaagaguugcuu

SEQ ID NO: 166602 - RNA, 23 nt, Artificial Sequence
  Synthetic
ucacuggagucaaagaguugcuu

SEQ ID NO: 166603 - RNA, 24 nt, Artificial Sequence
  Synthetic
aucacuggagucaaagaguugcuu

SEQ ID NO: 166604 - RNA, 21 nt, Artificial Sequence
  Synthetic
aucugauacguagaaaaucuu

SEQ ID NO: 166605 - RNA, 23 nt, Artificial Sequence
  Synthetic
ugaucugauacguagaaaaucuu

SEQ ID NO: 166606 - RNA, 24 nt, Artificial Sequence
  Synthetic
augaucugauacguagaaaaucuu

SEQ ID NO: 166607 - RNA, 18 nt, Artificial Sequence
  Synthetic
aaaacauacugaaaucuu

SEQ ID NO: 166608 - RNA, 19 nt, Artificial Sequence
  Synthetic
uaaaacauacugaaaucuu

SEQ ID NO: 166609 - RNA, 20 nt, Artificial Sequence
  Synthetic
auaaaacauacugaaaucuu

SEQ ID NO: 166610 - RNA, 18 nt, Artificial Sequence
  Synthetic
auuuuuaaacuaaaucuu

SEQ ID NO: 166611 - RNA, 19 nt, Artificial Sequence
  Synthetic
cauuuuuaaacuaaaucuu

SEQ ID NO: 166612 - RNA, 20 nt, Artificial Sequence
  Synthetic
ucauuuuuaaacuaaaucuu

SEQ ID NO: 166613 - RNA, 18 nt, Artificial Sequence
  Synthetic
ugaugguggcacaaucuu

SEQ ID NO: 166614 - RNA, 21 nt, Artificial Sequence
  Synthetic
uggugaugguggcacaaucuu

SEQ ID NO: 166615 - RNA, 22 nt, Artificial Sequence
  Synthetic
auggugaugguggcacaaucuu

SEQ ID NO: 166616 - RNA, 23 nt, Artificial Sequence
  Synthetic
aauggugaugguggcacaaucuu

SEQ ID NO: 166617 - RNA, 24 nt, Artificial Sequence
  Synthetic
caauggugaugguggcacaaucuu

SEQ ID NO: 166618 - RNA, 18 nt, Artificial Sequence
  Synthetic
uauauuuucucucaucuu

SEQ ID NO: 166619 - RNA, 20 nt, Artificial Sequence
  Synthetic
uguauauuuucucucaucuu

SEQ ID NO: 166620 - RNA, 22 nt, Artificial Sequence
  Synthetic
uguguauauuuucucucaucuu

SEQ ID NO: 166621 - RNA, 23 nt, Artificial Sequence
  Synthetic
uuguguauauuuucucucaucuu

SEQ ID NO: 166622 - RNA, 24 nt, Artificial Sequence
  Synthetic
uuuguguauauuuucucucaucuu

SEQ ID NO: 166623 - RNA, 19 nt, Artificial Sequence
  Synthetic
agauaucaccucauaucuu

SEQ ID NO: 166624 - RNA, 21 nt, Artificial Sequence
  Synthetic
ugagauaucaccucauaucuu

SEQ ID NO: 166625 - RNA, 22 nt, Artificial Sequence
  Synthetic
augagauaucaccucauaucuu

SEQ ID NO: 166626 - RNA, 23 nt, Artificial Sequence
  Synthetic
aaugagauaucaccucauaucuu

SEQ ID NO: 166627 - RNA, 24 nt, Artificial Sequence
  Synthetic
caaugagauaucaccucauaucuu

SEQ ID NO: 166628 - RNA, 18 nt, Artificial Sequence
  Synthetic
ccccacuuuguggcucuu

SEQ ID NO: 166629 - RNA, 19 nt, Artificial Sequence
  Synthetic
uccccacuuuguggcucuu

SEQ ID NO: 166630 - RNA, 20 nt, Artificial Sequence
  Synthetic
auccccacuuuguggcucuu

SEQ ID NO: 166631 - RNA, 18 nt, Artificial Sequence
  Synthetic
accuuuuccaagggucuu

SEQ ID NO: 166632 - RNA, 19 nt, Artificial Sequence
  Synthetic
aaccuuuuccaagggucuu

SEQ ID NO: 166633 - RNA, 20 nt, Artificial Sequence
  Synthetic
aaaccuuuuccaagggucuu

SEQ ID NO: 166634 - RNA, 19 nt, Artificial Sequence
  Synthetic
ugcacaugaggugggucuu

SEQ ID NO: 166635 - RNA, 20 nt, Artificial Sequence
  Synthetic
cugcacaugaggugggucuu

SEQ ID NO: 166636 - RNA, 21 nt, Artificial Sequence
  Synthetic
ucugcacaugaggugggucuu

SEQ ID NO: 166637 - RNA, 22 nt, Artificial Sequence
  Synthetic
cucugcacaugaggugggucuu

SEQ ID NO: 166638 - RNA, 23 nt, Artificial Sequence
  Synthetic
ucucugcacaugaggugggucuu

SEQ ID NO: 166639 - RNA, 18 nt, Artificial Sequence
  Synthetic
auacugguuuaaauucuu

SEQ ID NO: 166640 - RNA, 19 nt, Artificial Sequence
  Synthetic
cauacugguuuaaauucuu

SEQ ID NO: 166641 - RNA, 20 nt, Artificial Sequence
  Synthetic
acauacugguuuaaauucuu

SEQ ID NO: 166642 - RNA, 22 nt, Artificial Sequence
  Synthetic
ugacauacugguuuaaauucuu

SEQ ID NO: 166643 - RNA, 23 nt, Artificial Sequence
  Synthetic
uugacauacugguuuaaauucuu

SEQ ID NO: 166644 - RNA, 24 nt, Artificial Sequence
  Synthetic
uuugacauacugguuuaaauucuu

SEQ ID NO: 166645 - RNA, 18 nt, Artificial Sequence
  Synthetic
auucugguuuuaauucuu

SEQ ID NO: 166646 - RNA, 20 nt, Artificial Sequence
  Synthetic
agauucugguuuuaauucuu

SEQ ID NO: 166647 - RNA, 22 nt, Artificial Sequence
  Synthetic
ugagauucugguuuuaauucuu

SEQ ID NO: 166648 - RNA, 23 nt, Artificial Sequence
  Synthetic
uugagauucugguuuuaauucuu

SEQ ID NO: 166649 - RNA, 24 nt, Artificial Sequence
  Synthetic
uuugagauucugguuuuaauucuu

SEQ ID NO: 166650 - RNA, 18 nt, Artificial Sequence
  Synthetic
cuuuuuucuuaccuucuu

SEQ ID NO: 166651 - RNA, 19 nt, Artificial Sequence
  Synthetic
ucuuuuuucuuaccuucuu

SEQ ID NO: 166652 - RNA, 20 nt, Artificial Sequence
  Synthetic
uucuuuuuucuuaccuucuu

SEQ ID NO: 166653 - RNA, 21 nt, Artificial Sequence
  Synthetic
uuucuuuuuucuuaccuucuu

SEQ ID NO: 166654 - RNA, 22 nt, Artificial Sequence
  Synthetic
cuuucuuuuuucuuaccuucuu

SEQ ID NO: 166655 - RNA, 23 nt, Artificial Sequence
  Synthetic
ucuuucuuuuuucuuaccuucuu

SEQ ID NO: 166656 - RNA, 24 nt, Artificial Sequence
  Synthetic
cucuuucuuuuuucuuaccuucuu

SEQ ID NO: 166657 - RNA, 18 nt, Artificial Sequence
  Synthetic
cauucuuucuucuuucuu

SEQ ID NO: 166658 - RNA, 20 nt, Artificial Sequence
  Synthetic
ugcauucuuucuucuuucuu

SEQ ID NO: 166659 - RNA, 19 nt, Artificial Sequence
  Synthetic
ugguuucugugauuuucuu

SEQ ID NO: 166660 - RNA, 20 nt, Artificial Sequence
  Synthetic
uugguuucugugauuuucuu

SEQ ID NO: 166661 - RNA, 18 nt, Artificial Sequence
  Synthetic
auaauuucagguuuucuu

SEQ ID NO: 166662 - RNA, 19 nt, Artificial Sequence
  Synthetic
uauaauuucagguuuucuu

SEQ ID NO: 166663 - RNA, 20 nt, Artificial Sequence
  Synthetic
cuauaauuucagguuuucuu

SEQ ID NO: 166664 - RNA, 18 nt, Artificial Sequence
  Synthetic
agaaccauuuguuuucuu

SEQ ID NO: 166665 - RNA, 19 nt, Artificial Sequence
  Synthetic
uagaaccauuuguuuucuu

SEQ ID NO: 166666 - RNA, 22 nt, Artificial Sequence
  Synthetic
ugguagaaccauuuguuuucuu

SEQ ID NO: 166667 - RNA, 23 nt, Artificial Sequence
  Synthetic
uugguagaaccauuuguuuucuu

SEQ ID NO: 166668 - RNA, 24 nt, Artificial Sequence
  Synthetic
uuugguagaaccauuuguuuucuu

SEQ ID NO: 166669 - RNA, 18 nt, Artificial Sequence
  Synthetic
uacuaaaauuuuuuucuu

SEQ ID NO: 166670 - RNA, 19 nt, Artificial Sequence
  Synthetic
uuacuaaaauuuuuuucuu

SEQ ID NO: 166671 - RNA, 20 nt, Artificial Sequence
  Synthetic
uuuacuaaaauuuuuuucuu

SEQ ID NO: 166672 - RNA, 18 nt, Artificial Sequence
  Synthetic
ucuagguauucauaaguu

SEQ ID NO: 166673 - RNA, 19 nt, Artificial Sequence
  Synthetic
uucuagguauucauaaguu

SEQ ID NO: 166674 - RNA, 20 nt, Artificial Sequence
  Synthetic
uuucuagguauucauaaguu

SEQ ID NO: 166675 - RNA, 22 nt, Artificial Sequence
  Synthetic
ugcuacuuuaggacacuaaguu

SEQ ID NO: 166676 - RNA, 23 nt, Artificial Sequence
  Synthetic
uugcuacuuuaggacacuaaguu

SEQ ID NO: 166677 - RNA, 24 nt, Artificial Sequence
  Synthetic
auugcuacuuuaggacacuaaguu

SEQ ID NO: 166678 - RNA, 19 nt, Artificial Sequence
  Synthetic
ugugcccguuagcuaaguu

SEQ ID NO: 166679 - RNA, 20 nt, Artificial Sequence
  Synthetic
uugugcccguuagcuaaguu

SEQ ID NO: 166680 - RNA, 21 nt, Artificial Sequence
  Synthetic
cuugugcccguuagcuaaguu

SEQ ID NO: 166681 - RNA, 22 nt, Artificial Sequence
  Synthetic
ucuugugcccguuagcuaaguu

SEQ ID NO: 166682 - RNA, 23 nt, Artificial Sequence
  Synthetic
cucuugugcccguuagcuaaguu

SEQ ID NO: 166683 - RNA, 24 nt, Artificial Sequence
  Synthetic
ccucuugugcccguuagcuaaguu

SEQ ID NO: 166684 - RNA, 18 nt, Artificial Sequence
  Synthetic
aaaaauguaugcacaguu

SEQ ID NO: 166685 - RNA, 19 nt, Artificial Sequence
  Synthetic
aaaaaauguaugcacaguu

SEQ ID NO: 166686 - RNA, 20 nt, Artificial Sequence
  Synthetic
aaaaaaauguaugcacaguu

SEQ ID NO: 166687 - RNA, 18 nt, Artificial Sequence
  Synthetic
uguagaaaaugaagaguu

SEQ ID NO: 166688 - RNA, 19 nt, Artificial Sequence
  Synthetic
auguagaaaaugaagaguu

SEQ ID NO: 166689 - RNA, 20 nt, Artificial Sequence
  Synthetic
uauguagaaaaugaagaguu

SEQ ID NO: 166690 - RNA, 20 nt, Artificial Sequence
  Synthetic
aggaauaguugcuaagaguu

SEQ ID NO: 166691 - RNA, 18 nt, Artificial Sequence
  Synthetic
caggugaaaauaugaguu

SEQ ID NO: 166692 - RNA, 20 nt, Artificial Sequence
  Synthetic
agcaggugaaaauaugaguu

SEQ ID NO: 166693 - RNA, 18 nt, Artificial Sequence
  Synthetic
uugaagauguaauuaguu

SEQ ID NO: 166694 - RNA, 19 nt, Artificial Sequence
  Synthetic
uuugaagauguaauuaguu

SEQ ID NO: 166695 - RNA, 20 nt, Artificial Sequence
  Synthetic
cuuugaagauguaauuaguu

SEQ ID NO: 166696 - RNA, 21 nt, Artificial Sequence
  Synthetic
ucuuugaagauguaauuaguu

SEQ ID NO: 166697 - RNA, 21 nt, Artificial Sequence
  Synthetic
cuuagcuggcugggcuccguu

SEQ ID NO: 166698 - RNA, 22 nt, Artificial Sequence
  Synthetic
ucuuagcuggcugggcuccguu

SEQ ID NO: 166699 - RNA, 23 nt, Artificial Sequence
  Synthetic
aucuuagcuggcugggcuccguu

SEQ ID NO: 166700 - RNA, 18 nt, Artificial Sequence
  Synthetic
uugugugaugccaagguu

SEQ ID NO: 166701 - RNA, 20 nt, Artificial Sequence
  Synthetic
uguugugugaugccaagguu

SEQ ID NO: 166702 - RNA, 21 nt, Artificial Sequence
  Synthetic
auguugugugaugccaagguu

SEQ ID NO: 166703 - RNA, 22 nt, Artificial Sequence
  Synthetic
uauguugugugaugccaagguu

SEQ ID NO: 166704 - RNA, 24 nt, Artificial Sequence
  Synthetic
aguauguugugugaugccaagguu

SEQ ID NO: 166705 - RNA, 18 nt, Artificial Sequence
  Synthetic
uugggugauacugagguu

SEQ ID NO: 166706 - RNA, 19 nt, Artificial Sequence
  Synthetic
auugggugauacugagguu

SEQ ID NO: 166707 - RNA, 20 nt, Artificial Sequence
  Synthetic
uauugggugauacugagguu

SEQ ID NO: 166708 - RNA, 18 nt, Artificial Sequence
  Synthetic
uggcgugaugcugagguu

SEQ ID NO: 166709 - RNA, 19 nt, Artificial Sequence
  Synthetic
auggcgugaugcugagguu

SEQ ID NO: 166710 - RNA, 20 nt, Artificial Sequence
  Synthetic
uauggcgugaugcugagguu

SEQ ID NO: 166711 - RNA, 21 nt, Artificial Sequence
  Synthetic
auauggcgugaugcugagguu

SEQ ID NO: 166712 - RNA, 22 nt, Artificial Sequence
  Synthetic
uauauggcgugaugcugagguu

SEQ ID NO: 166713 - RNA, 23 nt, Artificial Sequence
  Synthetic
auauauggcgugaugcugagguu

SEQ ID NO: 166714 - RNA, 18 nt, Artificial Sequence
  Synthetic
acacugauucaauagguu

SEQ ID NO: 166715 - RNA, 20 nt, Artificial Sequence
  Synthetic
agacacugauucaauagguu

SEQ ID NO: 166716 - RNA, 21 nt, Artificial Sequence
  Synthetic
cagacacugauucaauagguu

SEQ ID NO: 166717 - RNA, 22 nt, Artificial Sequence
  Synthetic
acagacacugauucaauagguu

SEQ ID NO: 166718 - RNA, 23 nt, Artificial Sequence
  Synthetic
cacagacacugauucaauagguu

SEQ ID NO: 166719 - RNA, 24 nt, Artificial Sequence
  Synthetic
acacagacacugauucaauagguu

SEQ ID NO: 166720 - RNA, 18 nt, Artificial Sequence
  Synthetic
acacugauucaguagguu

SEQ ID NO: 166721 - RNA, 20 nt, Artificial Sequence
  Synthetic
agacacugauucaguagguu

SEQ ID NO: 166722 - RNA, 21 nt, Artificial Sequence
  Synthetic
cagacacugauucaguagguu

SEQ ID NO: 166723 - RNA, 22 nt, Artificial Sequence
  Synthetic
acagacacugauucaguagguu

SEQ ID NO: 166724 - RNA, 23 nt, Artificial Sequence
  Synthetic
cacagacacugauucaguagguu

SEQ ID NO: 166725 - RNA, 24 nt, Artificial Sequence
  Synthetic
acacagacacugauucaguagguu

SEQ ID NO: 166726 - RNA, 18 nt, Artificial Sequence
  Synthetic
aaaugacaacaaaggguu

SEQ ID NO: 166727 - RNA, 20 nt, Artificial Sequence
  Synthetic
ugaaaugacaacaaaggguu

SEQ ID NO: 166728 - RNA, 21 nt, Artificial Sequence
  Synthetic
uugaaaugacaacaaaggguu

SEQ ID NO: 166729 - RNA, 23 nt, Artificial Sequence
  Synthetic
uguugaaaugacaacaaaggguu

SEQ ID NO: 166730 - RNA, 24 nt, Artificial Sequence
  Synthetic
auguugaaaugacaacaaaggguu

SEQ ID NO: 166731 - RNA, 18 nt, Artificial Sequence
  Synthetic
auccacaaagauaugguu

SEQ ID NO: 166732 - RNA, 19 nt, Artificial Sequence
  Synthetic
uauccacaaagauaugguu

SEQ ID NO: 166733 - RNA, 21 nt, Artificial Sequence
  Synthetic
uguauccacaaagauaugguu

SEQ ID NO: 166734 - RNA, 22 nt, Artificial Sequence
  Synthetic
auguauccacaaagauaugguu

SEQ ID NO: 166735 - RNA, 23 nt, Artificial Sequence
  Synthetic
uauguauccacaaagauaugguu

SEQ ID NO: 166736 - RNA, 24 nt, Artificial Sequence
  Synthetic
uuauguauccacaaagauaugguu

SEQ ID NO: 166737 - RNA, 20 nt, Artificial Sequence
  Synthetic
aggcucugauuuaacugguu

SEQ ID NO: 166738 - RNA, 18 nt, Artificial Sequence
  Synthetic
ccauguaguugugugguu

SEQ ID NO: 166739 - RNA, 19 nt, Artificial Sequence
  Synthetic
uccauguaguugugugguu

SEQ ID NO: 166740 - RNA, 20 nt, Artificial Sequence
  Synthetic
uuccauguaguugugugguu

SEQ ID NO: 166741 - RNA, 21 nt, Artificial Sequence
  Synthetic
uuuccauguaguugugugguu

SEQ ID NO: 166742 - RNA, 23 nt, Artificial Sequence
  Synthetic
aguuuccauguaguugugugguu

SEQ ID NO: 166743 - RNA, 24 nt, Artificial Sequence
  Synthetic
caguuuccauguaguugugugguu

SEQ ID NO: 166744 - RNA, 21 nt, Artificial Sequence
  Synthetic
ugaaaugaguaauucuugguu

SEQ ID NO: 166745 - RNA, 22 nt, Artificial Sequence
  Synthetic
uugaaaugaguaauucuugguu

SEQ ID NO: 166746 - RNA, 23 nt, Artificial Sequence
  Synthetic
uuugaaaugaguaauucuugguu

SEQ ID NO: 166747 - RNA, 24 nt, Artificial Sequence
  Synthetic
cuuugaaaugaguaauucuugguu

SEQ ID NO: 166748 - RNA, 18 nt, Artificial Sequence
  Synthetic
ugcaauuuagaaaauguu

SEQ ID NO: 166749 - RNA, 19 nt, Artificial Sequence
  Synthetic
augcaauuuagaaaauguu

SEQ ID NO: 166750 - RNA, 20 nt, Artificial Sequence
  Synthetic
uaugcaauuuagaaaauguu

SEQ ID NO: 166751 - RNA, 18 nt, Artificial Sequence
  Synthetic
uuuauuuguucaaauguu

SEQ ID NO: 166752 - RNA, 19 nt, Artificial Sequence
  Synthetic
auuuauuuguucaaauguu

SEQ ID NO: 166753 - RNA, 20 nt, Artificial Sequence
  Synthetic
cauuuauuuguucaaauguu

SEQ ID NO: 166754 - RNA, 18 nt, Artificial Sequence
  Synthetic
acacaaaauagaaauguu

SEQ ID NO: 166755 - RNA, 19 nt, Artificial Sequence
  Synthetic
cacacaaaauagaaauguu

SEQ ID NO: 166756 - RNA, 20 nt, Artificial Sequence
  Synthetic
acacacaaaauagaaauguu

SEQ ID NO: 166757 - RNA, 18 nt, Artificial Sequence
  Synthetic
uguuaaaaugacaauguu

SEQ ID NO: 166758 - RNA, 19 nt, Artificial Sequence
  Synthetic
auguuaaaaugacaauguu

SEQ ID NO: 166759 - RNA, 20 nt, Artificial Sequence
  Synthetic
cauguuaaaaugacaauguu

SEQ ID NO: 166760 - RNA, 21 nt, Artificial Sequence
  Synthetic
acauguuaaaaugacaauguu

SEQ ID NO: 166761 - RNA, 22 nt, Artificial Sequence
  Synthetic
uacauguuaaaaugacaauguu

SEQ ID NO: 166762 - RNA, 23 nt, Artificial Sequence
  Synthetic
uuacauguuaaaaugacaauguu

SEQ ID NO: 166763 - RNA, 24 nt, Artificial Sequence
  Synthetic
auuacauguuaaaaugacaauguu

SEQ ID NO: 166764 - RNA, 18 nt, Artificial Sequence
  Synthetic
ugauuuggacaggauguu

SEQ ID NO: 166765 - RNA, 20 nt, Artificial Sequence
  Synthetic
agugauuuggacaggauguu

SEQ ID NO: 166766 - RNA, 21 nt, Artificial Sequence
  Synthetic
cagugauuuggacaggauguu

SEQ ID NO: 166767 - RNA, 24 nt, Artificial Sequence
  Synthetic
aggcagugauuuggacaggauguu

SEQ ID NO: 166768 - RNA, 18 nt, Artificial Sequence
  Synthetic
uaggaauaaauugauguu

SEQ ID NO: 166769 - RNA, 19 nt, Artificial Sequence
  Synthetic
uuaggaauaaauugauguu

SEQ ID NO: 166770 - RNA, 20 nt, Artificial Sequence
  Synthetic
uuuaggaauaaauugauguu

SEQ ID NO: 166771 - RNA, 19 nt, Artificial Sequence
  Synthetic
uggugaaaagagcacuguu

SEQ ID NO: 166772 - RNA, 18 nt, Artificial Sequence
  Synthetic
uggguaaauacaccuguu

SEQ ID NO: 166773 - RNA, 19 nt, Artificial Sequence
  Synthetic
uuggguaaauacaccuguu

SEQ ID NO: 166774 - RNA, 20 nt, Artificial Sequence
  Synthetic
auuggguaaauacaccuguu

SEQ ID NO: 166775 - RNA, 21 nt, Artificial Sequence
  Synthetic
cauuggguaaauacaccuguu

SEQ ID NO: 166776 - RNA, 24 nt, Artificial Sequence
  Synthetic
aggcauuggguaaauacaccuguu

SEQ ID NO: 166777 - RNA, 18 nt, Artificial Sequence
  Synthetic
cacacacuggugccuguu

SEQ ID NO: 166778 - RNA, 19 nt, Artificial Sequence
  Synthetic
acacacacuggugccuguu

SEQ ID NO: 166779 - RNA, 20 nt, Artificial Sequence
  Synthetic
aacacacacuggugccuguu

SEQ ID NO: 166780 - RNA, 21 nt, Artificial Sequence
  Synthetic
caacacacacuggugccuguu

SEQ ID NO: 166781 - RNA, 22 nt, Artificial Sequence
  Synthetic
acaacacacacuggugccuguu

SEQ ID NO: 166782 - RNA, 23 nt, Artificial Sequence
  Synthetic
aacaacacacacuggugccuguu

SEQ ID NO: 166783 - RNA, 18 nt, Artificial Sequence
  Synthetic
acagggcuuagagcuguu

SEQ ID NO: 166784 - RNA, 19 nt, Artificial Sequence
  Synthetic
cacagggcuuagagcuguu

SEQ ID NO: 166785 - RNA, 18 nt, Artificial Sequence
  Synthetic
ucagccucccaaaguguu

SEQ ID NO: 166786 - RNA, 19 nt, Artificial Sequence
  Synthetic
cucagccucccaaaguguu

SEQ ID NO: 166787 - RNA, 20 nt, Artificial Sequence
  Synthetic
ccucagccucccaaaguguu

SEQ ID NO: 166788 - RNA, 22 nt, Artificial Sequence
  Synthetic
ugccucagccucccaaaguguu

SEQ ID NO: 166789 - RNA, 23 nt, Artificial Sequence
  Synthetic
cugccucagccucccaaaguguu

SEQ ID NO: 166790 - RNA, 24 nt, Artificial Sequence
  Synthetic
ccugccucagccucccaaaguguu

SEQ ID NO: 166791 - RNA, 18 nt, Artificial Sequence
  Synthetic
cuuguggucccaaguguu

SEQ ID NO: 166792 - RNA, 19 nt, Artificial Sequence
  Synthetic
acuuguggucccaaguguu

SEQ ID NO: 166793 - RNA, 20 nt, Artificial Sequence
  Synthetic
cacuuguggucccaaguguu

SEQ ID NO: 166794 - RNA, 18 nt, Artificial Sequence
  Synthetic
cuugggauuggaaguguu

SEQ ID NO: 166795 - RNA, 20 nt, Artificial Sequence
  Synthetic
ugcuugggauuggaaguguu

SEQ ID NO: 166796 - RNA, 21 nt, Artificial Sequence
  Synthetic
augcuugggauuggaaguguu

SEQ ID NO: 166797 - RNA, 22 nt, Artificial Sequence
  Synthetic
aaugcuugggauuggaaguguu

SEQ ID NO: 166798 - RNA, 23 nt, Artificial Sequence
  Synthetic
aaaugcuugggauuggaaguguu

SEQ ID NO: 166799 - RNA, 24 nt, Artificial Sequence
  Synthetic
aaaaugcuugggauuggaaguguu

SEQ ID NO: 166800 - RNA, 18 nt, Artificial Sequence
  Synthetic
augauuuugcacaguguu

SEQ ID NO: 166801 - RNA, 20 nt, Artificial Sequence
  Synthetic
agaugauuuugcacaguguu

SEQ ID NO: 166802 - RNA, 21 nt, Artificial Sequence
  Synthetic
cucaccaacaucuauuguguu

SEQ ID NO: 166803 - RNA, 22 nt, Artificial Sequence
  Synthetic
ccucaccaacaucuauuguguu

SEQ ID NO: 166804 - RNA, 24 nt, Artificial Sequence
  Synthetic
agccucaccaacaucuauuguguu

SEQ ID NO: 166805 - RNA, 18 nt, Artificial Sequence
  Synthetic
cccucuuuuccuauuguu

SEQ ID NO: 166806 - RNA, 19 nt, Artificial Sequence
  Synthetic
ucccucuuuuccuauuguu

SEQ ID NO: 166807 - RNA, 21 nt, Artificial Sequence
  Synthetic
agucccucuuuuccuauuguu

SEQ ID NO: 166808 - RNA, 24 nt, Artificial Sequence
  Synthetic
aggagucccucuuuuccuauuguu

SEQ ID NO: 166809 - RNA, 18 nt, Artificial Sequence
  Synthetic
aagcaaagcaaauuuguu

SEQ ID NO: 166810 - RNA, 19 nt, Artificial Sequence
  Synthetic
aaagcaaagcaaauuuguu

SEQ ID NO: 166811 - RNA, 20 nt, Artificial Sequence
  Synthetic
aaaagcaaagcaaauuuguu

SEQ ID NO: 166812 - RNA, 21 nt, Artificial Sequence
  Synthetic
caaaagcaaagcaaauuuguu

SEQ ID NO: 166813 - RNA, 22 nt, Artificial Sequence
  Synthetic
acaaaagcaaagcaaauuuguu

SEQ ID NO: 166814 - RNA, 23 nt, Artificial Sequence
  Synthetic
uacaaaagcaaagcaaauuuguu

SEQ ID NO: 166815 - RNA, 19 nt, Artificial Sequence
  Synthetic
aguaaaauaaauguuuguu

SEQ ID NO: 166816 - RNA, 20 nt, Artificial Sequence
  Synthetic
aaguaaaauaaauguuuguu

SEQ ID NO: 166817 - RNA, 18 nt, Artificial Sequence
  Synthetic
uuacuuucagaaaaauuu

SEQ ID NO: 166818 - RNA, 19 nt, Artificial Sequence
  Synthetic
uuuacuuucagaaaaauuu

SEQ ID NO: 166819 - RNA, 20 nt, Artificial Sequence
  Synthetic
uuuuacuuucagaaaaauuu

SEQ ID NO: 166820 - RNA, 18 nt, Artificial Sequence
  Synthetic
uugaauaaauaaaaauuu

SEQ ID NO: 166821 - RNA, 19 nt, Artificial Sequence
  Synthetic
auugaauaaauaaaaauuu

SEQ ID NO: 166822 - RNA, 20 nt, Artificial Sequence
  Synthetic
uauugaauaaauaaaaauuu

SEQ ID NO: 166823 - RNA, 21 nt, Artificial Sequence
  Synthetic
auauugaauaaauaaaaauuu

SEQ ID NO: 166824 - RNA, 22 nt, Artificial Sequence
  Synthetic
uauauugaauaaauaaaaauuu

SEQ ID NO: 166825 - RNA, 23 nt, Artificial Sequence
  Synthetic
auauauugaauaaauaaaaauuu

SEQ ID NO: 166826 - RNA, 24 nt, Artificial Sequence
  Synthetic
aauauauugaauaaauaaaaauuu

SEQ ID NO: 166827 - RNA, 18 nt, Artificial Sequence
  Synthetic
auaaguaaaacaaaauuu

SEQ ID NO: 166828 - RNA, 19 nt, Artificial Sequence
  Synthetic
aauaaguaaaacaaaauuu

SEQ ID NO: 166829 - RNA, 20 nt, Artificial Sequence
  Synthetic
aaauaaguaaaacaaaauuu

SEQ ID NO: 166830 - RNA, 21 nt, Artificial Sequence
  Synthetic
uaaauaaguaaaacaaaauuu

SEQ ID NO: 166831 - RNA, 22 nt, Artificial Sequence
  Synthetic
auaaauaaguaaaacaaaauuu

SEQ ID NO: 166832 - RNA, 23 nt, Artificial Sequence
  Synthetic
aauaaauaaguaaaacaaaauuu

SEQ ID NO: 166833 - RNA, 24 nt, Artificial Sequence
  Synthetic
aaauaaauaaguaaaacaaaauuu

SEQ ID NO: 166834 - RNA, 19 nt, Artificial Sequence
  Synthetic
agagaacuuuauaaaauuu

SEQ ID NO: 166835 - RNA, 20 nt, Artificial Sequence
  Synthetic
aagagaacuuuauaaaauuu

SEQ ID NO: 166836 - RNA, 21 nt, Artificial Sequence
  Synthetic
uaagagaacuuuauaaaauuu

SEQ ID NO: 166837 - RNA, 22 nt, Artificial Sequence
  Synthetic
uuaagagaacuuuauaaaauuu

SEQ ID NO: 166838 - RNA, 23 nt, Artificial Sequence
  Synthetic
uuuaagagaacuuuauaaaauuu

SEQ ID NO: 166839 - RNA, 24 nt, Artificial Sequence
  Synthetic
auuuaagagaacuuuauaaaauuu

SEQ ID NO: 166840 - RNA, 18 nt, Artificial Sequence
  Synthetic
uaauuuucauagaaauuu

SEQ ID NO: 166841 - RNA, 19 nt, Artificial Sequence
  Synthetic
auaauuuucauagaaauuu

SEQ ID NO: 166842 - RNA, 19 nt, Artificial Sequence
  Synthetic
ugacuagagauauaaauuu

SEQ ID NO: 166843 - RNA, 20 nt, Artificial Sequence
  Synthetic
uugacuagagauauaaauuu

SEQ ID NO: 166844 - RNA, 21 nt, Artificial Sequence
  Synthetic
cuugacuagagauauaaauuu

SEQ ID NO: 166845 - RNA, 22 nt, Artificial Sequence
  Synthetic
ucuugacuagagauauaaauuu

SEQ ID NO: 166846 - RNA, 23 nt, Artificial Sequence
  Synthetic
aucuugacuagagauauaaauuu

SEQ ID NO: 166847 - RNA, 24 nt, Artificial Sequence
  Synthetic
aaucuugacuagagauauaaauuu

SEQ ID NO: 166848 - RNA, 18 nt, Artificial Sequence
  Synthetic
uuauuauacuuuaaauuu

SEQ ID NO: 166849 - RNA, 19 nt, Artificial Sequence
  Synthetic
auuauuauacuuuaaauuu

SEQ ID NO: 166850 - RNA, 20 nt, Artificial Sequence
  Synthetic
uauuauuauacuuuaaauuu

SEQ ID NO: 166851 - RNA, 21 nt, Artificial Sequence
  Synthetic
uuauuauuauacuuuaaauuu

SEQ ID NO: 166852 - RNA, 22 nt, Artificial Sequence
  Synthetic
auuauuauuauacuuuaaauuu

SEQ ID NO: 166853 - RNA, 23 nt, Artificial Sequence
  Synthetic
uauuauuauuauacuuuaaauuu

SEQ ID NO: 166854 - RNA, 24 nt, Artificial Sequence
  Synthetic
uuauuauuauuauacuuuaaauuu

SEQ ID NO: 166855 - RNA, 19 nt, Artificial Sequence
  Synthetic
agaguuaagaaugcaauuu

SEQ ID NO: 166856 - RNA, 20 nt, Artificial Sequence
  Synthetic
cagaguuaagaaugcaauuu

SEQ ID NO: 166857 - RNA, 18 nt, Artificial Sequence
  Synthetic
uauauuuauauagaauuu

SEQ ID NO: 166858 - RNA, 19 nt, Artificial Sequence
  Synthetic
uuauauuuauauagaauuu

SEQ ID NO: 166859 - RNA, 20 nt, Artificial Sequence
  Synthetic
uuuauauuuauauagaauuu

SEQ ID NO: 166860 - RNA, 21 nt, Artificial Sequence
  Synthetic
auuuauauuuauauagaauuu

SEQ ID NO: 166861 - RNA, 22 nt, Artificial Sequence
  Synthetic
aauuuauauuuauauagaauuu

SEQ ID NO: 166862 - RNA, 23 nt, Artificial Sequence
  Synthetic
uaauuuauauuuauauagaauuu

SEQ ID NO: 166863 - RNA, 24 nt, Artificial Sequence
  Synthetic
auaauuuauauuuauauagaauuu

SEQ ID NO: 166864 - RNA, 18 nt, Artificial Sequence
  Synthetic
uuagauucauaugaauuu

SEQ ID NO: 166865 - RNA, 19 nt, Artificial Sequence
  Synthetic
uuuagauucauaugaauuu

SEQ ID NO: 166866 - RNA, 20 nt, Artificial Sequence
  Synthetic
uuuuagauucauaugaauuu

SEQ ID NO: 166867 - RNA, 21 nt, Artificial Sequence
  Synthetic
uuuuuagauucauaugaauuu

SEQ ID NO: 166868 - RNA, 22 nt, Artificial Sequence
  Synthetic
uuuuuuagauucauaugaauuu

SEQ ID NO: 166869 - RNA, 24 nt, Artificial Sequence
  Synthetic
uguuuuuuagauucauaugaauuu

SEQ ID NO: 166870 - RNA, 18 nt, Artificial Sequence
  Synthetic
auuuccaauuuugaauuu

SEQ ID NO: 166871 - RNA, 19 nt, Artificial Sequence
  Synthetic
uauuuccaauuuugaauuu

SEQ ID NO: 166872 - RNA, 21 nt, Artificial Sequence
  Synthetic
aguauuuccaauuuugaauuu

SEQ ID NO: 166873 - RNA, 24 nt, Artificial Sequence
  Synthetic
uggaguauuuccaauuuugaauuu

SEQ ID NO: 166874 - RNA, 18 nt, Artificial Sequence
  Synthetic
ucuguuuuaaaauaauuu

SEQ ID NO: 166875 - RNA, 19 nt, Artificial Sequence
  Synthetic
cucuguuuuaaaauaauuu

SEQ ID NO: 166876 - RNA, 20 nt, Artificial Sequence
  Synthetic
ucucuguuuuaaaauaauuu

SEQ ID NO: 166877 - RNA, 18 nt, Artificial Sequence
  Synthetic
uauaaaaauaauuaauuu

SEQ ID NO: 166878 - RNA, 19 nt, Artificial Sequence
  Synthetic
cuauaaaaauaauuaauuu

SEQ ID NO: 166879 - RNA, 20 nt, Artificial Sequence
  Synthetic
acuauaaaaauaauuaauuu

SEQ ID NO: 166880 - RNA, 18 nt, Artificial Sequence
  Synthetic
aauuucauauauuaauuu

SEQ ID NO: 166881 - RNA, 19 nt, Artificial Sequence
  Synthetic
uaauuucauauauuaauuu

SEQ ID NO: 166882 - RNA, 20 nt, Artificial Sequence
  Synthetic
auaauuucauauauuaauuu

SEQ ID NO: 166883 - RNA, 18 nt, Artificial Sequence
  Synthetic
cccacacccaguuaauuu

SEQ ID NO: 166884 - RNA, 19 nt, Artificial Sequence
  Synthetic
ucccacacccaguuaauuu

SEQ ID NO: 166885 - RNA, 20 nt, Artificial Sequence
  Synthetic
cucccacacccaguuaauuu

SEQ ID NO: 166886 - RNA, 18 nt, Artificial Sequence
  Synthetic
uuagaacaauaaacauuu

SEQ ID NO: 166887 - RNA, 19 nt, Artificial Sequence
  Synthetic
auuagaacaauaaacauuu

SEQ ID NO: 166888 - RNA, 20 nt, Artificial Sequence
  Synthetic
aauuagaacaauaaacauuu

SEQ ID NO: 166889 - RNA, 18 nt, Artificial Sequence
  Synthetic
uccauggguuccacauuu

SEQ ID NO: 166890 - RNA, 19 nt, Artificial Sequence
  Synthetic
auccauggguuccacauuu

SEQ ID NO: 166891 - RNA, 20 nt, Artificial Sequence
  Synthetic
uauccauggguuccacauuu

SEQ ID NO: 166892 - RNA, 22 nt, Artificial Sequence
  Synthetic
uguauccauggguuccacauuu

SEQ ID NO: 166893 - RNA, 23 nt, Artificial Sequence
  Synthetic
cuguauccauggguuccacauuu

SEQ ID NO: 166894 - RNA, 24 nt, Artificial Sequence
  Synthetic
ucuguauccauggguuccacauuu

SEQ ID NO: 166895 - RNA, 18 nt, Artificial Sequence
  Synthetic
aauccagcaaucccauuu

SEQ ID NO: 166896 - RNA, 19 nt, Artificial Sequence
  Synthetic
uaauccagcaaucccauuu

SEQ ID NO: 166897 - RNA, 20 nt, Artificial Sequence
  Synthetic
auaauccagcaaucccauuu

SEQ ID NO: 166898 - RNA, 21 nt, Artificial Sequence
  Synthetic
uauaauccagcaaucccauuu

SEQ ID NO: 166899 - RNA, 22 nt, Artificial Sequence
  Synthetic
auauaauccagcaaucccauuu

SEQ ID NO: 166900 - RNA, 23 nt, Artificial Sequence
  Synthetic
cauauaauccagcaaucccauuu

SEQ ID NO: 166901 - RNA, 24 nt, Artificial Sequence
  Synthetic
ucauauaauccagcaaucccauuu

SEQ ID NO: 166902 - RNA, 21 nt, Artificial Sequence
  Synthetic
uguuuugagcuaaagccauuu

SEQ ID NO: 166903 - RNA, 22 nt, Artificial Sequence
  Synthetic
uuguuuugagcuaaagccauuu

SEQ ID NO: 166904 - RNA, 23 nt, Artificial Sequence
  Synthetic
auuguuuugagcuaaagccauuu

SEQ ID NO: 166905 - RNA, 24 nt, Artificial Sequence
  Synthetic
aauuguuuugagcuaaagccauuu

SEQ ID NO: 166906 - RNA, 18 nt, Artificial Sequence
  Synthetic
cuaaauaauauuccauuu

SEQ ID NO: 166907 - RNA, 20 nt, Artificial Sequence
  Synthetic
ugcuaaauaauauuccauuu

SEQ ID NO: 166908 - RNA, 21 nt, Artificial Sequence
  Synthetic
uugcuaaauaauauuccauuu

SEQ ID NO: 166909 - RNA, 22 nt, Artificial Sequence
  Synthetic
auugcuaaauaauauuccauuu

SEQ ID NO: 166910 - RNA, 23 nt, Artificial Sequence
  Synthetic
uauugcuaaauaauauuccauuu

SEQ ID NO: 166911 - RNA, 24 nt, Artificial Sequence
  Synthetic
uuauugcuaaauaauauuccauuu

SEQ ID NO: 166912 - RNA, 18 nt, Artificial Sequence
  Synthetic
auacuaaaaaaugcauuu

SEQ ID NO: 166913 - RNA, 19 nt, Artificial Sequence
  Synthetic
aauacuaaaaaaugcauuu

SEQ ID NO: 166914 - RNA, 20 nt, Artificial Sequence
  Synthetic
aaauacuaaaaaaugcauuu

SEQ ID NO: 166915 - RNA, 18 nt, Artificial Sequence
  Synthetic
ugcuuaucaaaugcauuu

SEQ ID NO: 166916 - RNA, 19 nt, Artificial Sequence
  Synthetic
augcuuaucaaaugcauuu

SEQ ID NO: 166917 - RNA, 20 nt, Artificial Sequence
  Synthetic
aaugcuuaucaaaugcauuu

SEQ ID NO: 166918 - RNA, 18 nt, Artificial Sequence
  Synthetic
uuuuuuucugaaucauuu

SEQ ID NO: 166919 - RNA, 19 nt, Artificial Sequence
  Synthetic
uuuuuuuucugaaucauuu

SEQ ID NO: 166920 - RNA, 20 nt, Artificial Sequence
  Synthetic
auuuuuuuucugaaucauuu

SEQ ID NO: 166921 - RNA, 21 nt, Artificial Sequence
  Synthetic
uauuuuuuuucugaaucauuu

SEQ ID NO: 166922 - RNA, 22 nt, Artificial Sequence
  Synthetic
auauuuuuuuucugaaucauuu

SEQ ID NO: 166923 - RNA, 23 nt, Artificial Sequence
  Synthetic
uauauuuuuuuucugaaucauuu

SEQ ID NO: 166924 - RNA, 24 nt, Artificial Sequence
  Synthetic
auauauuuuuuuucugaaucauuu

SEQ ID NO: 166925 - RNA, 18 nt, Artificial Sequence
  Synthetic
uugugcauuucuucauuu

SEQ ID NO: 166926 - RNA, 19 nt, Artificial Sequence
  Synthetic
uuugugcauuucuucauuu

SEQ ID NO: 166927 - RNA, 20 nt, Artificial Sequence
  Synthetic
uuuugugcauuucuucauuu

SEQ ID NO: 166928 - RNA, 18 nt, Artificial Sequence
  Synthetic
uaccuacguauuucauuu

SEQ ID NO: 166929 - RNA, 19 nt, Artificial Sequence
  Synthetic
auaccuacguauuucauuu

SEQ ID NO: 166930 - RNA, 20 nt, Artificial Sequence
  Synthetic
uauaccuacguauuucauuu

SEQ ID NO: 166931 - RNA, 21 nt, Artificial Sequence
  Synthetic
uuauaccuacguauuucauuu

SEQ ID NO: 166932 - RNA, 22 nt, Artificial Sequence
  Synthetic
uuuauaccuacguauuucauuu

SEQ ID NO: 166933 - RNA, 23 nt, Artificial Sequence
  Synthetic
auuuauaccuacguauuucauuu

SEQ ID NO: 166934 - RNA, 18 nt, Artificial Sequence
  Synthetic
uuuuguaaauuuucauuu

SEQ ID NO: 166935 - RNA, 19 nt, Artificial Sequence
  Synthetic
uuuuuguaaauuuucauuu

SEQ ID NO: 166936 - RNA, 20 nt, Artificial Sequence
  Synthetic
cuuuuuguaaauuuucauuu

SEQ ID NO: 166937 - RNA, 18 nt, Artificial Sequence
  Synthetic
uuuuuaaaauagagauuu

SEQ ID NO: 166938 - RNA, 20 nt, Artificial Sequence
  Synthetic
uguuuuuaaaauagagauuu

SEQ ID NO: 166939 - RNA, 18 nt, Artificial Sequence
  Synthetic
aaaaaaacuuagagauuu

SEQ ID NO: 166940 - RNA, 19 nt, Artificial Sequence
  Synthetic
aaaaaaaacuuagagauuu

SEQ ID NO: 166941 - RNA, 20 nt, Artificial Sequence
  Synthetic
aaaaaaaaacuuagagauuu

SEQ ID NO: 166942 - RNA, 21 nt, Artificial Sequence
  Synthetic
aaaaaaaaaacuuagagauuu

SEQ ID NO: 166943 - RNA, 22 nt, Artificial Sequence
  Synthetic
aaaaaaaaaaacuuagagauuu

SEQ ID NO: 166944 - RNA, 23 nt, Artificial Sequence
  Synthetic
aaaaaaaaaaaacuuagagauuu

SEQ ID NO: 166945 - RNA, 24 nt, Artificial Sequence
  Synthetic
uaaaaaaaaaaaacuuagagauuu

SEQ ID NO: 166946 - RNA, 21 nt, Artificial Sequence
  Synthetic
ugagauaucauggugagauuu

SEQ ID NO: 166947 - RNA, 22 nt, Artificial Sequence
  Synthetic
uugagauaucauggugagauuu

SEQ ID NO: 166948 - RNA, 23 nt, Artificial Sequence
  Synthetic
uuugagauaucauggugagauuu

SEQ ID NO: 166949 - RNA, 24 nt, Artificial Sequence
  Synthetic
cuuugagauaucauggugagauuu

SEQ ID NO: 166950 - RNA, 19 nt, Artificial Sequence
  Synthetic
uguuaagcuauugagauuu

SEQ ID NO: 166951 - RNA, 21 nt, Artificial Sequence
  Synthetic
uguguuaagcuauugagauuu

SEQ ID NO: 166952 - RNA, 22 nt, Artificial Sequence
  Synthetic
uuguguuaagcuauugagauuu

SEQ ID NO: 166953 - RNA, 23 nt, Artificial Sequence
  Synthetic
auuguguuaagcuauugagauuu

SEQ ID NO: 166954 - RNA, 24 nt, Artificial Sequence
  Synthetic
uauuguguuaagcuauugagauuu

SEQ ID NO: 166955 - RNA, 18 nt, Artificial Sequence
  Synthetic
ucugcucuugaaugauuu

SEQ ID NO: 166956 - RNA, 19 nt, Artificial Sequence
  Synthetic
aucugcucuugaaugauuu

SEQ ID NO: 166957 - RNA, 20 nt, Artificial Sequence
  Synthetic
aaucugcucuugaaugauuu

SEQ ID NO: 166958 - RNA, 21 nt, Artificial Sequence
  Synthetic
aaaucugcucuugaaugauuu

SEQ ID NO: 166959 - RNA, 23 nt, Artificial Sequence
  Synthetic
agaaaucugcucuugaaugauuu

SEQ ID NO: 166960 - RNA, 24 nt, Artificial Sequence
  Synthetic
aagaaaucugcucuugaaugauuu

SEQ ID NO: 166961 - RNA, 19 nt, Artificial Sequence
  Synthetic
ugauuuaauuuccugauuu

SEQ ID NO: 166962 - RNA, 18 nt, Artificial Sequence
  Synthetic
uucccuuucaaaauauuu

SEQ ID NO: 166963 - RNA, 19 nt, Artificial Sequence
  Synthetic
auucccuuucaaaauauuu

SEQ ID NO: 166964 - RNA, 20 nt, Artificial Sequence
  Synthetic
uauucccuuucaaaauauuu

SEQ ID NO: 166965 - RNA, 21 nt, Artificial Sequence
  Synthetic
auauucccuuucaaaauauuu

SEQ ID NO: 166966 - RNA, 22 nt, Artificial Sequence
  Synthetic
uauauucccuuucaaaauauuu

SEQ ID NO: 166967 - RNA, 23 nt, Artificial Sequence
  Synthetic
auauauucccuuucaaaauauuu

SEQ ID NO: 166968 - RNA, 24 nt, Artificial Sequence
  Synthetic
aauauauucccuuucaaaauauuu

SEQ ID NO: 166969 - RNA, 19 nt, Artificial Sequence
  Synthetic
aggaguucaguaaauauuu

SEQ ID NO: 166970 - RNA, 21 nt, Artificial Sequence
  Synthetic
agaggaguucaguaaauauuu

SEQ ID NO: 166971 - RNA, 22 nt, Artificial Sequence
  Synthetic
aagaggaguucaguaaauauuu

SEQ ID NO: 166972 - RNA, 23 nt, Artificial Sequence
  Synthetic
uaagaggaguucaguaaauauuu

SEQ ID NO: 166973 - RNA, 24 nt, Artificial Sequence
  Synthetic
auaagaggaguucaguaaauauuu

SEQ ID NO: 166974 - RNA, 18 nt, Artificial Sequence
  Synthetic
uacuauggaaacauauuu

SEQ ID NO: 166975 - RNA, 19 nt, Artificial Sequence
  Synthetic
uuacuauggaaacauauuu

SEQ ID NO: 166976 - RNA, 20 nt, Artificial Sequence
  Synthetic
uuuacuauggaaacauauuu

SEQ ID NO: 166977 - RNA, 19 nt, Artificial Sequence
  Synthetic
ugacuggaaugucauauuu

SEQ ID NO: 166978 - RNA, 20 nt, Artificial Sequence
  Synthetic
uugacuggaaugucauauuu

SEQ ID NO: 166979 - RNA, 21 nt, Artificial Sequence
  Synthetic
uuugacuggaaugucauauuu

SEQ ID NO: 166980 - RNA, 22 nt, Artificial Sequence
  Synthetic
cuuugacuggaaugucauauuu

SEQ ID NO: 166981 - RNA, 18 nt, Artificial Sequence
  Synthetic
acauagauuuucauauuu

SEQ ID NO: 166982 - RNA, 19 nt, Artificial Sequence
  Synthetic
cacauagauuuucauauuu

SEQ ID NO: 166983 - RNA, 20 nt, Artificial Sequence
  Synthetic
acacauagauuuucauauuu

SEQ ID NO: 166984 - RNA, 18 nt, Artificial Sequence
  Synthetic
uaguauguauauauauuu

SEQ ID NO: 166985 - RNA, 19 nt, Artificial Sequence
  Synthetic
auaguauguauauauauuu

SEQ ID NO: 166986 - RNA, 20 nt, Artificial Sequence
  Synthetic
cauaguauguauauauauuu

SEQ ID NO: 166987 - RNA, 21 nt, Artificial Sequence
  Synthetic
acauaguauguauauauauuu

SEQ ID NO: 166988 - RNA, 22 nt, Artificial Sequence
  Synthetic
uacauaguauguauauauauuu

SEQ ID NO: 166989 - RNA, 18 nt, Artificial Sequence
  Synthetic
aaauuagucccuauauuu

SEQ ID NO: 166990 - RNA, 19 nt, Artificial Sequence
  Synthetic
aaaauuagucccuauauuu

SEQ ID NO: 166991 - RNA, 20 nt, Artificial Sequence
  Synthetic
aaaaauuagucccuauauuu

SEQ ID NO: 166992 - RNA, 18 nt, Artificial Sequence
  Synthetic
cauuuauaauuuauauuu

SEQ ID NO: 166993 - RNA, 19 nt, Artificial Sequence
  Synthetic
acauuuauaauuuauauuu

SEQ ID NO: 166994 - RNA, 20 nt, Artificial Sequence
  Synthetic
uacauuuauaauuuauauuu

SEQ ID NO: 166995 - RNA, 18 nt, Artificial Sequence
  Synthetic
aaaaauucuuagcuauuu

SEQ ID NO: 166996 - RNA, 19 nt, Artificial Sequence
  Synthetic
uaaaaauucuuagcuauuu

SEQ ID NO: 166997 - RNA, 20 nt, Artificial Sequence
  Synthetic
auaaaaauucuuagcuauuu

SEQ ID NO: 166998 - RNA, 18 nt, Artificial Sequence
  Synthetic
uugucccauuggcuauuu

SEQ ID NO: 166999 - RNA, 19 nt, Artificial Sequence
  Synthetic
uuugucccauuggcuauuu

SEQ ID NO: 167000 - RNA, 20 nt, Artificial Sequence
  Synthetic
cuuugucccauuggcuauuu

SEQ ID NO: 167001 - RNA, 21 nt, Artificial Sequence
  Synthetic
ucuuugucccauuggcuauuu

SEQ ID NO: 167002 - RNA, 22 nt, Artificial Sequence
  Synthetic
uucuuugucccauuggcuauuu

SEQ ID NO: 167003 - RNA, 23 nt, Artificial Sequence
  Synthetic
cuucuuugucccauuggcuauuu

SEQ ID NO: 167004 - RNA, 24 nt, Artificial Sequence
  Synthetic
ucuucuuugucccauuggcuauuu

SEQ ID NO: 167005 - RNA, 21 nt, Artificial Sequence
  Synthetic
ugaaaagauaacuuauuauuu

SEQ ID NO: 167006 - RNA, 22 nt, Artificial Sequence
  Synthetic
uugaaaagauaacuuauuauuu

SEQ ID NO: 167007 - RNA, 23 nt, Artificial Sequence
  Synthetic
uuugaaaagauaacuuauuauuu

SEQ ID NO: 167008 - RNA, 24 nt, Artificial Sequence
  Synthetic
uuuugaaaagauaacuuauuauuu

SEQ ID NO: 167009 - RNA, 18 nt, Artificial Sequence
  Synthetic
agguaugcggcuuuauuu

SEQ ID NO: 167010 - RNA, 19 nt, Artificial Sequence
  Synthetic
uagguaugcggcuuuauuu

SEQ ID NO: 167011 - RNA, 21 nt, Artificial Sequence
  Synthetic
uguagguaugcggcuuuauuu

SEQ ID NO: 167012 - RNA, 22 nt, Artificial Sequence
  Synthetic
cuguagguaugcggcuuuauuu

SEQ ID NO: 167013 - RNA, 19 nt, Artificial Sequence
  Synthetic
uguacuauuaucuuuauuu

SEQ ID NO: 167014 - RNA, 20 nt, Artificial Sequence
  Synthetic
auguacuauuaucuuuauuu

SEQ ID NO: 167015 - RNA, 21 nt, Artificial Sequence
  Synthetic
uauguacuauuaucuuuauuu

SEQ ID NO: 167016 - RNA, 22 nt, Artificial Sequence
  Synthetic
auauguacuauuaucuuuauuu

SEQ ID NO: 167017 - RNA, 23 nt, Artificial Sequence
  Synthetic
aauauguacuauuaucuuuauuu

SEQ ID NO: 167018 - RNA, 24 nt, Artificial Sequence
  Synthetic
aaauauguacuauuaucuuuauuu

SEQ ID NO: 167019 - RNA, 18 nt, Artificial Sequence
  Synthetic
aaaaaaaaaaguuuauuu

SEQ ID NO: 167020 - RNA, 19 nt, Artificial Sequence
  Synthetic
aaaaaaaaaaaguuuauuu

SEQ ID NO: 167021 - RNA, 20 nt, Artificial Sequence
  Synthetic
aaaaaaaaaaaaguuuauuu

SEQ ID NO: 167022 - RNA, 18 nt, Artificial Sequence
  Synthetic
uuuuaagccaguaacuuu

SEQ ID NO: 167023 - RNA, 19 nt, Artificial Sequence
  Synthetic
auuuuaagccaguaacuuu

SEQ ID NO: 167024 - RNA, 20 nt, Artificial Sequence
  Synthetic
uauuuuaagccaguaacuuu

SEQ ID NO: 167025 - RNA, 18 nt, Artificial Sequence
  Synthetic
cuguaauuucagcacuuu

SEQ ID NO: 167026 - RNA, 19 nt, Artificial Sequence
  Synthetic
ucuguaauuucagcacuuu

SEQ ID NO: 167027 - RNA, 21 nt, Artificial Sequence
  Synthetic
ugucuguaauuucagcacuuu

SEQ ID NO: 167028 - RNA, 22 nt, Artificial Sequence
  Synthetic
augucuguaauuucagcacuuu

SEQ ID NO: 167029 - RNA, 23 nt, Artificial Sequence
  Synthetic
caugucuguaauuucagcacuuu

SEQ ID NO: 167030 - RNA, 24 nt, Artificial Sequence
  Synthetic
ccaugucuguaauuucagcacuuu

SEQ ID NO: 167031 - RNA, 18 nt, Artificial Sequence
  Synthetic
ugagaaaacugagacuuu

SEQ ID NO: 167032 - RNA, 19 nt, Artificial Sequence
  Synthetic
augagaaaacugagacuuu

SEQ ID NO: 167033 - RNA, 20 nt, Artificial Sequence
  Synthetic
aaugagaaaacugagacuuu

SEQ ID NO: 167034 - RNA, 21 nt, Artificial Sequence
  Synthetic
aaaugagaaaacugagacuuu

SEQ ID NO: 167035 - RNA, 22 nt, Artificial Sequence
  Synthetic
caaaugagaaaacugagacuuu

SEQ ID NO: 167036 - RNA, 24 nt, Artificial Sequence
  Synthetic
ugcaaaugagaaaacugagacuuu

SEQ ID NO: 167037 - RNA, 18 nt, Artificial Sequence
  Synthetic
cuguaaucccaggacuuu

SEQ ID NO: 167038 - RNA, 20 nt, Artificial Sequence
  Synthetic
cgcuguaaucccaggacuuu

SEQ ID NO: 167039 - RNA, 21 nt, Artificial Sequence
  Synthetic
acgcuguaaucccaggacuuu

SEQ ID NO: 167040 - RNA, 22 nt, Artificial Sequence
  Synthetic
cacgcuguaaucccaggacuuu

SEQ ID NO: 167041 - RNA, 23 nt, Artificial Sequence
  Synthetic
ucacgcuguaaucccaggacuuu

SEQ ID NO: 167042 - RNA, 24 nt, Artificial Sequence
  Synthetic
cucacgcuguaaucccaggacuuu

SEQ ID NO: 167043 - RNA, 18 nt, Artificial Sequence
  Synthetic
ugaggccagcuggacuuu

SEQ ID NO: 167044 - RNA, 21 nt, Artificial Sequence
  Synthetic
aggugaggccagcuggacuuu

SEQ ID NO: 167045 - RNA, 23 nt, Artificial Sequence
  Synthetic
agaggugaggccagcuggacuuu

SEQ ID NO: 167046 - RNA, 18 nt, Artificial Sequence
  Synthetic
uguaauacauuggacuuu

SEQ ID NO: 167047 - RNA, 19 nt, Artificial Sequence
  Synthetic
auguaauacauuggacuuu

SEQ ID NO: 167048 - RNA, 20 nt, Artificial Sequence
  Synthetic
aauguaauacauuggacuuu

SEQ ID NO: 167049 - RNA, 18 nt, Artificial Sequence
  Synthetic
ugaaugagaaauuacuuu

SEQ ID NO: 167050 - RNA, 19 nt, Artificial Sequence
  Synthetic
augaaugagaaauuacuuu

SEQ ID NO: 167051 - RNA, 21 nt, Artificial Sequence
  Synthetic
ugaugaaugagaaauuacuuu

SEQ ID NO: 167052 - RNA, 22 nt, Artificial Sequence
  Synthetic
uugaugaaugagaaauuacuuu

SEQ ID NO: 167053 - RNA, 24 nt, Artificial Sequence
  Synthetic
aguugaugaaugagaaauuacuuu

SEQ ID NO: 167054 - RNA, 18 nt, Artificial Sequence
  Synthetic
ucucuaagaacuuacuuu

SEQ ID NO: 167055 - RNA, 21 nt, Artificial Sequence
  Synthetic
aggucucuaagaacuuacuuu

SEQ ID NO: 167056 - RNA, 22 nt, Artificial Sequence
  Synthetic
uaggucucuaagaacuuacuuu

SEQ ID NO: 167057 - RNA, 24 nt, Artificial Sequence
  Synthetic
uguaggucucuaagaacuuacuuu

SEQ ID NO: 167058 - RNA, 18 nt, Artificial Sequence
  Synthetic
aauuugguuuuuuacuuu

SEQ ID NO: 167059 - RNA, 19 nt, Artificial Sequence
  Synthetic
aaauuugguuuuuuacuuu

SEQ ID NO: 167060 - RNA, 20 nt, Artificial Sequence
  Synthetic
aaaauuugguuuuuuacuuu

SEQ ID NO: 167061 - RNA, 18 nt, Artificial Sequence
  Synthetic
ccuccuguguugcccuuu

SEQ ID NO: 167062 - RNA, 20 nt, Artificial Sequence
  Synthetic
ugccuccuguguugcccuuu

SEQ ID NO: 167063 - RNA, 18 nt, Artificial Sequence
  Synthetic
ucugaugggcuucccuuu

SEQ ID NO: 167064 - RNA, 20 nt, Artificial Sequence
  Synthetic
agucugaugggcuucccuuu

SEQ ID NO: 167065 - RNA, 21 nt, Artificial Sequence
  Synthetic
uagucugaugggcuucccuuu

SEQ ID NO: 167066 - RNA, 22 nt, Artificial Sequence
  Synthetic
uuagucugaugggcuucccuuu

SEQ ID NO: 167067 - RNA, 24 nt, Artificial Sequence
  Synthetic
uguuagucugaugggcuucccuuu

SEQ ID NO: 167068 - RNA, 18 nt, Artificial Sequence
  Synthetic
ucccuccccuccuccuuu

SEQ ID NO: 167069 - RNA, 19 nt, Artificial Sequence
  Synthetic
cucccuccccuccuccuuu

SEQ ID NO: 167070 - RNA, 20 nt, Artificial Sequence
  Synthetic
ccucccuccccuccuccuuu

SEQ ID NO: 167071 - RNA, 21 nt, Artificial Sequence
  Synthetic
cccucccuccccuccuccuuu

SEQ ID NO: 167072 - RNA, 22 nt, Artificial Sequence
  Synthetic
ccccucccuccccuccuccuuu

SEQ ID NO: 167073 - RNA, 23 nt, Artificial Sequence
  Synthetic
uccccucccuccccuccuccuuu

SEQ ID NO: 167074 - RNA, 24 nt, Artificial Sequence
  Synthetic
cuccccucccuccccuccuccuuu

SEQ ID NO: 167075 - RNA, 18 nt, Artificial Sequence
  Synthetic
auuuaauuaucuagcuuu

SEQ ID NO: 167076 - RNA, 19 nt, Artificial Sequence
  Synthetic
cauuuaauuaucuagcuuu

SEQ ID NO: 167077 - RNA, 20 nt, Artificial Sequence
  Synthetic
acauuuaauuaucuagcuuu

SEQ ID NO: 167078 - RNA, 22 nt, Artificial Sequence
  Synthetic
uggccugacccacuaccgcuuu

SEQ ID NO: 167079 - RNA, 23 nt, Artificial Sequence
  Synthetic
cuggccugacccacuaccgcuuu

SEQ ID NO: 167080 - RNA, 18 nt, Artificial Sequence
  Synthetic
ccuuucucuugcugcuuu

SEQ ID NO: 167081 - RNA, 19 nt, Artificial Sequence
  Synthetic
uccuuucucuugcugcuuu

SEQ ID NO: 167082 - RNA, 20 nt, Artificial Sequence
  Synthetic
uuccuuucucuugcugcuuu

SEQ ID NO: 167083 - RNA, 21 nt, Artificial Sequence
  Synthetic
uuuccuuucucuugcugcuuu

SEQ ID NO: 167084 - RNA, 23 nt, Artificial Sequence
  Synthetic
uguuuccuuucucuugcugcuuu

SEQ ID NO: 167085 - RNA, 24 nt, Artificial Sequence
  Synthetic
uuguuuccuuucucuugcugcuuu

SEQ ID NO: 167086 - RNA, 18 nt, Artificial Sequence
  Synthetic
ucucuaggaacuugcuuu

SEQ ID NO: 167087 - RNA, 21 nt, Artificial Sequence
  Synthetic
aggucucuaggaacuugcuuu

SEQ ID NO: 167088 - RNA, 22 nt, Artificial Sequence
  Synthetic
uaggucucuaggaacuugcuuu

SEQ ID NO: 167089 - RNA, 24 nt, Artificial Sequence
  Synthetic
uguaggucucuaggaacuugcuuu

SEQ ID NO: 167090 - RNA, 18 nt, Artificial Sequence
  Synthetic
cacacacacacaaucuuu

SEQ ID NO: 167091 - RNA, 19 nt, Artificial Sequence
  Synthetic
acacacacacacaaucuuu

SEQ ID NO: 167092 - RNA, 20 nt, Artificial Sequence
  Synthetic
cacacacacacacaaucuuu

SEQ ID NO: 167093 - RNA, 21 nt, Artificial Sequence
  Synthetic
acacacacacacacaaucuuu

SEQ ID NO: 167094 - RNA, 22 nt, Artificial Sequence
  Synthetic
cacacacacacacacaaucuuu

SEQ ID NO: 167095 - RNA, 23 nt, Artificial Sequence
  Synthetic
acacacacacacacacaaucuuu

SEQ ID NO: 167096 - RNA, 24 nt, Artificial Sequence
  Synthetic
cacacacacacacacacaaucuuu

SEQ ID NO: 167097 - RNA, 18 nt, Artificial Sequence
  Synthetic
uauuucuuucuuaucuuu

SEQ ID NO: 167098 - RNA, 19 nt, Artificial Sequence
  Synthetic
auauuucuuucuuaucuuu

SEQ ID NO: 167099 - RNA, 20 nt, Artificial Sequence
  Synthetic
aauauuucuuucuuaucuuu

SEQ ID NO: 167100 - RNA, 18 nt, Artificial Sequence
  Synthetic
cacuauuaauuccucuuu

SEQ ID NO: 167101 - RNA, 19 nt, Artificial Sequence
  Synthetic
ccacuauuaauuccucuuu

SEQ ID NO: 167102 - RNA, 20 nt, Artificial Sequence
  Synthetic
accacuauuaauuccucuuu

SEQ ID NO: 167103 - RNA, 18 nt, Artificial Sequence
  Synthetic
ccacauccucaggucuuu

SEQ ID NO: 167104 - RNA, 19 nt, Artificial Sequence
  Synthetic
cccacauccucaggucuuu

SEQ ID NO: 167105 - RNA, 18 nt, Artificial Sequence
  Synthetic
uucuauuaaaaaaaguuu

SEQ ID NO: 167106 - RNA, 19 nt, Artificial Sequence
  Synthetic
cuucuauuaaaaaaaguuu

SEQ ID NO: 167107 - RNA, 20 nt, Artificial Sequence
  Synthetic
acuucuauuaaaaaaaguuu

SEQ ID NO: 167108 - RNA, 21 nt, Artificial Sequence
  Synthetic
auaacugaaguaaauaaguuu

SEQ ID NO: 167109 - RNA, 23 nt, Artificial Sequence
  Synthetic
agauaacugaaguaaauaaguuu

SEQ ID NO: 167110 - RNA, 24 nt, Artificial Sequence
  Synthetic
aagauaacugaaguaaauaaguuu

SEQ ID NO: 167111 - RNA, 18 nt, Artificial Sequence
  Synthetic
uuuuaagucaauaaguuu

SEQ ID NO: 167112 - RNA, 19 nt, Artificial Sequence
  Synthetic
auuuuaagucaauaaguuu

SEQ ID NO: 167113 - RNA, 20 nt, Artificial Sequence
  Synthetic
aauuuuaagucaauaaguuu

SEQ ID NO: 167114 - RNA, 21 nt, Artificial Sequence
  Synthetic
uaauuuuaagucaauaaguuu

SEQ ID NO: 167115 - RNA, 22 nt, Artificial Sequence
  Synthetic
auaauuuuaagucaauaaguuu

SEQ ID NO: 167116 - RNA, 24 nt, Artificial Sequence
  Synthetic
ugauaauuuuaagucaauaaguuu

SEQ ID NO: 167117 - RNA, 18 nt, Artificial Sequence
  Synthetic
uuauuauacucuaaguuu

SEQ ID NO: 167118 - RNA, 19 nt, Artificial Sequence
  Synthetic
uuuauuauacucuaaguuu

SEQ ID NO: 167119 - RNA, 20 nt, Artificial Sequence
  Synthetic
uuuuauuauacucuaaguuu

SEQ ID NO: 167120 - RNA, 21 nt, Artificial Sequence
  Synthetic
uuuuuauuauacucuaaguuu

SEQ ID NO: 167121 - RNA, 22 nt, Artificial Sequence
  Synthetic
uuuuuuauuauacucuaaguuu

SEQ ID NO: 167122 - RNA, 23 nt, Artificial Sequence
  Synthetic
uuuuuuuauuauacucuaaguuu

SEQ ID NO: 167123 - RNA, 24 nt, Artificial Sequence
  Synthetic
uuuuuuuuauuauacucuaaguuu

SEQ ID NO: 167124 - RNA, 21 nt, Artificial Sequence
  Synthetic
uuauuauuauacuuuaaguuu

SEQ ID NO: 167125 - RNA, 22 nt, Artificial Sequence
  Synthetic
auuauuauuauacuuuaaguuu

SEQ ID NO: 167126 - RNA, 23 nt, Artificial Sequence
  Synthetic
uauuauuauuauacuuuaaguuu

SEQ ID NO: 167127 - RNA, 24 nt, Artificial Sequence
  Synthetic
uuauuauuauuauacuuuaaguuu

SEQ ID NO: 167128 - RNA, 22 nt, Artificial Sequence
  Synthetic
uuuauuauuauacuuuaaguuu

SEQ ID NO: 167129 - RNA, 23 nt, Artificial Sequence
  Synthetic
uuuuauuauuauacuuuaaguuu

SEQ ID NO: 167130 - RNA, 24 nt, Artificial Sequence
  Synthetic
auuuuauuauuauacuuuaaguuu

SEQ ID NO: 167131 - RNA, 21 nt, Artificial Sequence
  Synthetic
uuuuuauuauacuuuaaguuu

SEQ ID NO: 167132 - RNA, 22 nt, Artificial Sequence
  Synthetic
uuuuuuauuauacuuuaaguuu

SEQ ID NO: 167133 - RNA, 23 nt, Artificial Sequence
  Synthetic
uuuuuuuauuauacuuuaaguuu

SEQ ID NO: 167134 - RNA, 24 nt, Artificial Sequence
  Synthetic
uuuuuuuuauuauacuuuaaguuu

SEQ ID NO: 167135 - RNA, 18 nt, Artificial Sequence
  Synthetic
uuauuguacuuuaaguuu

SEQ ID NO: 167136 - RNA, 19 nt, Artificial Sequence
  Synthetic
auuauuguacuuuaaguuu

SEQ ID NO: 167137 - RNA, 20 nt, Artificial Sequence
  Synthetic
uauuauuguacuuuaaguuu

SEQ ID NO: 167138 - RNA, 21 nt, Artificial Sequence
  Synthetic
uuauuauuguacuuuaaguuu

SEQ ID NO: 167139 - RNA, 22 nt, Artificial Sequence
  Synthetic
uuuauuauuguacuuuaaguuu

SEQ ID NO: 167140 - RNA, 23 nt, Artificial Sequence
  Synthetic
uuuuauuauuguacuuuaaguuu

SEQ ID NO: 167141 - RNA, 24 nt, Artificial Sequence
  Synthetic
cuuuuauuauuguacuuuaaguuu

SEQ ID NO: 167142 - RNA, 18 nt, Artificial Sequence
  Synthetic
ucagcauucaaacaguuu

SEQ ID NO: 167143 - RNA, 20 nt, Artificial Sequence
  Synthetic
ugucagcauucaaacaguuu

SEQ ID NO: 167144 - RNA, 21 nt, Artificial Sequence
  Synthetic
augucagcauucaaacaguuu

SEQ ID NO: 167145 - RNA, 22 nt, Artificial Sequence
  Synthetic
caugucagcauucaaacaguuu

SEQ ID NO: 167146 - RNA, 23 nt, Artificial Sequence
  Synthetic
ucaugucagcauucaaacaguuu

SEQ ID NO: 167147 - RNA, 18 nt, Artificial Sequence
  Synthetic
uuuuaaaaacaucaguuu

SEQ ID NO: 167148 - RNA, 19 nt, Artificial Sequence
  Synthetic
uuuuuaaaaacaucaguuu

SEQ ID NO: 167149 - RNA, 20 nt, Artificial Sequence
  Synthetic
cuuuuuaaaaacaucaguuu

SEQ ID NO: 167150 - RNA, 18 nt, Artificial Sequence
  Synthetic
uuacuauuuuaauaguuu

SEQ ID NO: 167151 - RNA, 20 nt, Artificial Sequence
  Synthetic
uguuacuauuuuaauaguuu

SEQ ID NO: 167152 - RNA, 21 nt, Artificial Sequence
  Synthetic
auguuacuauuuuaauaguuu

SEQ ID NO: 167153 - RNA, 23 nt, Artificial Sequence
  Synthetic
ugauguuacuauuuuaauaguuu

SEQ ID NO: 167154 - RNA, 24 nt, Artificial Sequence
  Synthetic
uugauguuacuauuuuaauaguuu

SEQ ID NO: 167155 - RNA, 18 nt, Artificial Sequence
  Synthetic
uauauauguauauaguuu

SEQ ID NO: 167156 - RNA, 20 nt, Artificial Sequence
  Synthetic
uguauauauguauauaguuu

SEQ ID NO: 167157 - RNA, 22 nt, Artificial Sequence
  Synthetic
uguguauauauguauauaguuu

SEQ ID NO: 167158 - RNA, 23 nt, Artificial Sequence
  Synthetic
auguguauauauguauauaguuu

SEQ ID NO: 167159 - RNA, 24 nt, Artificial Sequence
  Synthetic
uauguguauauauguauauaguuu

SEQ ID NO: 167160 - RNA, 18 nt, Artificial Sequence
  Synthetic
uuuugugagcuauaguuu

SEQ ID NO: 167161 - RNA, 19 nt, Artificial Sequence
  Synthetic
uuuuugugagcuauaguuu

SEQ ID NO: 167162 - RNA, 18 nt, Artificial Sequence
  Synthetic
aaugaaaguuaguaguuu

SEQ ID NO: 167163 - RNA, 19 nt, Artificial Sequence
  Synthetic
aaaugaaaguuaguaguuu

SEQ ID NO: 167164 - RNA, 20 nt, Artificial Sequence
  Synthetic
aaaaugaaaguuaguaguuu

SEQ ID NO: 167165 - RNA, 18 nt, Artificial Sequence
  Synthetic
uauuuaaaagaaucguuu

SEQ ID NO: 167166 - RNA, 19 nt, Artificial Sequence
  Synthetic
auauuuaaaagaaucguuu

SEQ ID NO: 167167 - RNA, 18 nt, Artificial Sequence
  Synthetic
auuucaaauuucagguuu

SEQ ID NO: 167168 - RNA, 19 nt, Artificial Sequence
  Synthetic
uauuucaaauuucagguuu

SEQ ID NO: 167169 - RNA, 18 nt, Artificial Sequence
  Synthetic
cauuuggauuucagguuu

SEQ ID NO: 167170 - RNA, 19 nt, Artificial Sequence
  Synthetic
acauuuggauuucagguuu

SEQ ID NO: 167171 - RNA, 20 nt, Artificial Sequence
  Synthetic
aacauuuggauuucagguuu

SEQ ID NO: 167172 - RNA, 23 nt, Artificial Sequence
  Synthetic
uggaacauuuggauuucagguuu

SEQ ID NO: 167173 - RNA, 24 nt, Artificial Sequence
  Synthetic
uuggaacauuuggauuucagguuu

SEQ ID NO: 167174 - RNA, 20 nt, Artificial Sequence
  Synthetic
uggggccuggcgggagguuu

SEQ ID NO: 167175 - RNA, 23 nt, Artificial Sequence
  Synthetic
ugguggggccuggcgggagguuu

SEQ ID NO: 167176 - RNA, 19 nt, Artificial Sequence
  Synthetic
aguaaaaauaaaaauguuu

SEQ ID NO: 167177 - RNA, 20 nt, Artificial Sequence
  Synthetic
aaguaaaaauaaaaauguuu

SEQ ID NO: 167178 - RNA, 21 nt, Artificial Sequence
  Synthetic
aaaguaaaaauaaaaauguuu

SEQ ID NO: 167179 - RNA, 22 nt, Artificial Sequence
  Synthetic
uaaaguaaaaauaaaaauguuu

SEQ ID NO: 167180 - RNA, 23 nt, Artificial Sequence
  Synthetic
auaaaguaaaaauaaaaauguuu

SEQ ID NO: 167181 - RNA, 24 nt, Artificial Sequence
  Synthetic
aauaaaguaaaaauaaaaauguuu

SEQ ID NO: 167182 - RNA, 18 nt, Artificial Sequence
  Synthetic
aaugaacuuuaaauguuu

SEQ ID NO: 167183 - RNA, 19 nt, Artificial Sequence
  Synthetic
aaaugaacuuuaaauguuu

SEQ ID NO: 167184 - RNA, 20 nt, Artificial Sequence
  Synthetic
aaaaugaacuuuaaauguuu

SEQ ID NO: 167185 - RNA, 21 nt, Artificial Sequence
  Synthetic
uaaaaugaacuuuaaauguuu

SEQ ID NO: 167186 - RNA, 22 nt, Artificial Sequence
  Synthetic
uuaaaaugaacuuuaaauguuu

SEQ ID NO: 167187 - RNA, 23 nt, Artificial Sequence
  Synthetic
uuuaaaaugaacuuuaaauguuu

SEQ ID NO: 167188 - RNA, 24 nt, Artificial Sequence
  Synthetic
auuuaaaaugaacuuuaaauguuu

SEQ ID NO: 167189 - RNA, 21 nt, Artificial Sequence
  Synthetic
ccccgaacccucacacuguuu

SEQ ID NO: 167190 - RNA, 23 nt, Artificial Sequence
  Synthetic
cgccccgaacccucacacuguuu

SEQ ID NO: 167191 - RNA, 18 nt, Artificial Sequence
  Synthetic
auuugcaugggucuguuu

SEQ ID NO: 167192 - RNA, 19 nt, Artificial Sequence
  Synthetic
cauuugcaugggucuguuu

SEQ ID NO: 167193 - RNA, 20 nt, Artificial Sequence
  Synthetic
acauuugcaugggucuguuu

SEQ ID NO: 167194 - RNA, 21 nt, Artificial Sequence
  Synthetic
cacauuugcaugggucuguuu

SEQ ID NO: 167195 - RNA, 18 nt, Artificial Sequence
  Synthetic
caugucauuuuucuguuu

SEQ ID NO: 167196 - RNA, 19 nt, Artificial Sequence
  Synthetic
ucaugucauuuuucuguuu

SEQ ID NO: 167197 - RNA, 20 nt, Artificial Sequence
  Synthetic
cucaugucauuuuucuguuu

SEQ ID NO: 167198 - RNA, 21 nt, Artificial Sequence
  Synthetic
acucaugucauuuuucuguuu

SEQ ID NO: 167199 - RNA, 22 nt, Artificial Sequence
  Synthetic
cacucaugucauuuuucuguuu

SEQ ID NO: 167200 - RNA, 23 nt, Artificial Sequence
  Synthetic
ccacucaugucauuuuucuguuu

SEQ ID NO: 167201 - RNA, 24 nt, Artificial Sequence
  Synthetic
uccacucaugucauuuuucuguuu

SEQ ID NO: 167202 - RNA, 18 nt, Artificial Sequence
  Synthetic
cuuaguagcuggguguuu

SEQ ID NO: 167203 - RNA, 19 nt, Artificial Sequence
  Synthetic
acuuaguagcuggguguuu

SEQ ID NO: 167204 - RNA, 20 nt, Artificial Sequence
  Synthetic
cacuuaguagcuggguguuu

SEQ ID NO: 167205 - RNA, 18 nt, Artificial Sequence
  Synthetic
cuaacccucacauuguuu

SEQ ID NO: 167206 - RNA, 19 nt, Artificial Sequence
  Synthetic
ccuaacccucacauuguuu

SEQ ID NO: 167207 - RNA, 20 nt, Artificial Sequence
  Synthetic
cccuaacccucacauuguuu

SEQ ID NO: 167208 - RNA, 21 nt, Artificial Sequence
  Synthetic
ccccuaacccucacauuguuu

SEQ ID NO: 167209 - RNA, 23 nt, Artificial Sequence
  Synthetic
cgccccuaacccucacauuguuu

SEQ ID NO: 167210 - RNA, 19 nt, Artificial Sequence
  Synthetic
uggggaaaaagaaaauuuu

SEQ ID NO: 167211 - RNA, 20 nt, Artificial Sequence
  Synthetic
auggggaaaaagaaaauuuu

SEQ ID NO: 167212 - RNA, 18 nt, Artificial Sequence
  Synthetic
uuuccugaaugaaauuuu

SEQ ID NO: 167213 - RNA, 19 nt, Artificial Sequence
  Synthetic
uuuuccugaaugaaauuuu

SEQ ID NO: 167214 - RNA, 20 nt, Artificial Sequence
  Synthetic
uuuuuccugaaugaaauuuu

SEQ ID NO: 167215 - RNA, 19 nt, Artificial Sequence
  Synthetic
ugccuaagguugcaauuuu

SEQ ID NO: 167216 - RNA, 20 nt, Artificial Sequence
  Synthetic
augccuaagguugcaauuuu

SEQ ID NO: 167217 - RNA, 21 nt, Artificial Sequence
  Synthetic
uaugccuaagguugcaauuuu

SEQ ID NO: 167218 - RNA, 22 nt, Artificial Sequence
  Synthetic
uuaugccuaagguugcaauuuu

SEQ ID NO: 167219 - RNA, 23 nt, Artificial Sequence
  Synthetic
uuuaugccuaagguugcaauuuu

SEQ ID NO: 167220 - RNA, 24 nt, Artificial Sequence
  Synthetic
auuuaugccuaagguugcaauuuu

SEQ ID NO: 167221 - RNA, 18 nt, Artificial Sequence
  Synthetic
ccuuaaaaaaucaauuuu

SEQ ID NO: 167222 - RNA, 19 nt, Artificial Sequence
  Synthetic
accuuaaaaaaucaauuuu

SEQ ID NO: 167223 - RNA, 20 nt, Artificial Sequence
  Synthetic
aaccuuaaaaaaucaauuuu

SEQ ID NO: 167224 - RNA, 18 nt, Artificial Sequence
  Synthetic
uuuuaguauuugaauuuu

SEQ ID NO: 167225 - RNA, 19 nt, Artificial Sequence
  Synthetic
cuuuuaguauuugaauuuu

SEQ ID NO: 167226 - RNA, 20 nt, Artificial Sequence
  Synthetic
ucuuuuaguauuugaauuuu

SEQ ID NO: 167227 - RNA, 18 nt, Artificial Sequence
  Synthetic
acaaaacaaauacauuuu

SEQ ID NO: 167228 - RNA, 19 nt, Artificial Sequence
  Synthetic
uacaaaacaaauacauuuu

SEQ ID NO: 167229 - RNA, 20 nt, Artificial Sequence
  Synthetic
uuacaaaacaaauacauuuu

SEQ ID NO: 167230 - RNA, 18 nt, Artificial Sequence
  Synthetic
ugaaaaguuuuacauuuu

SEQ ID NO: 167231 - RNA, 19 nt, Artificial Sequence
  Synthetic
uugaaaaguuuuacauuuu

SEQ ID NO: 167232 - RNA, 20 nt, Artificial Sequence
  Synthetic
auugaaaaguuuuacauuuu

SEQ ID NO: 167233 - RNA, 18 nt, Artificial Sequence
  Synthetic
uuuaaccuggaccauuuu

SEQ ID NO: 167234 - RNA, 19 nt, Artificial Sequence
  Synthetic
cuuuaaccuggaccauuuu

SEQ ID NO: 167235 - RNA, 20 nt, Artificial Sequence
  Synthetic
ucuuuaaccuggaccauuuu

SEQ ID NO: 167236 - RNA, 19 nt, Artificial Sequence
  Synthetic
aguccagagaccccauuuu

SEQ ID NO: 167237 - RNA, 20 nt, Artificial Sequence
  Synthetic
uaguccagagaccccauuuu

SEQ ID NO: 167238 - RNA, 21 nt, Artificial Sequence
  Synthetic
cuaguccagagaccccauuuu

SEQ ID NO: 167239 - RNA, 23 nt, Artificial Sequence
  Synthetic
ugcuaguccagagaccccauuuu

SEQ ID NO: 167240 - RNA, 24 nt, Artificial Sequence
  Synthetic
cugcuaguccagagaccccauuuu

SEQ ID NO: 167241 - RNA, 18 nt, Artificial Sequence
  Synthetic
aauuuauccugccauuuu

SEQ ID NO: 167242 - RNA, 19 nt, Artificial Sequence
  Synthetic
caauuuauccugccauuuu

SEQ ID NO: 167243 - RNA, 20 nt, Artificial Sequence
  Synthetic
ccaauuuauccugccauuuu

SEQ ID NO: 167244 - RNA, 21 nt, Artificial Sequence
  Synthetic
uccaauuuauccugccauuuu

SEQ ID NO: 167245 - RNA, 23 nt, Artificial Sequence
  Synthetic
uguccaauuuauccugccauuuu

SEQ ID NO: 167246 - RNA, 18 nt, Artificial Sequence
  Synthetic
auuucacauuuucauuuu

SEQ ID NO: 167247 - RNA, 19 nt, Artificial Sequence
  Synthetic
cauuucacauuuucauuuu

SEQ ID NO: 167248 - RNA, 20 nt, Artificial Sequence
  Synthetic
ccauuucacauuuucauuuu

SEQ ID NO: 167249 - RNA, 18 nt, Artificial Sequence
  Synthetic
acuacuuuucuagauuuu

SEQ ID NO: 167250 - RNA, 19 nt, Artificial Sequence
  Synthetic
aacuacuuuucuagauuuu

SEQ ID NO: 167251 - RNA, 20 nt, Artificial Sequence
  Synthetic
aaacuacuuuucuagauuuu

SEQ ID NO: 167252 - RNA, 19 nt, Artificial Sequence
  Synthetic
ugaagggcccuaggauuuu

SEQ ID NO: 167253 - RNA, 20 nt, Artificial Sequence
  Synthetic
cugaagggcccuaggauuuu

SEQ ID NO: 167254 - RNA, 21 nt, Artificial Sequence
  Synthetic
ccugaagggcccuaggauuuu

SEQ ID NO: 167255 - RNA, 22 nt, Artificial Sequence
  Synthetic
accugaagggcccuaggauuuu

SEQ ID NO: 167256 - RNA, 23 nt, Artificial Sequence
  Synthetic
aaccugaagggcccuaggauuuu

SEQ ID NO: 167257 - RNA, 24 nt, Artificial Sequence
  Synthetic
uaaccugaagggcccuaggauuuu

SEQ ID NO: 167258 - RNA, 18 nt, Artificial Sequence
  Synthetic
aaaaaauuuccauauuuu

SEQ ID NO: 167259 - RNA, 19 nt, Artificial Sequence
  Synthetic
uaaaaaauuuccauauuuu

SEQ ID NO: 167260 - RNA, 20 nt, Artificial Sequence
  Synthetic
uuaaaaaauuuccauauuuu

SEQ ID NO: 167261 - RNA, 21 nt, Artificial Sequence
  Synthetic
uuuaaaaaauuuccauauuuu

SEQ ID NO: 167262 - RNA, 22 nt, Artificial Sequence
  Synthetic
uuuuaaaaaauuuccauauuuu

SEQ ID NO: 167263 - RNA, 23 nt, Artificial Sequence
  Synthetic
uuuuuaaaaaauuuccauauuuu

SEQ ID NO: 167264 - RNA, 18 nt, Artificial Sequence
  Synthetic
uuucuugccucauauuuu

SEQ ID NO: 167265 - RNA, 19 nt, Artificial Sequence
  Synthetic
cuuucuugccucauauuuu

SEQ ID NO: 167266 - RNA, 18 nt, Artificial Sequence
  Synthetic
auuuuuaaacuauauuuu

SEQ ID NO: 167267 - RNA, 19 nt, Artificial Sequence
  Synthetic
cauuuuuaaacuauauuuu

SEQ ID NO: 167268 - RNA, 20 nt, Artificial Sequence
  Synthetic
acauuuuuaaacuauauuuu

SEQ ID NO: 167269 - RNA, 21 nt, Artificial Sequence
  Synthetic
uacauuuuuaaacuauauuuu

SEQ ID NO: 167270 - RNA, 22 nt, Artificial Sequence
  Synthetic
uuacauuuuuaaacuauauuuu

SEQ ID NO: 167271 - RNA, 23 nt, Artificial Sequence
  Synthetic
uuuacauuuuuaaacuauauuuu

SEQ ID NO: 167272 - RNA, 24 nt, Artificial Sequence
  Synthetic
cuuuacauuuuuaaacuauauuuu

SEQ ID NO: 167273 - RNA, 18 nt, Artificial Sequence
  Synthetic
cccuuuugaggcuauuuu

SEQ ID NO: 167274 - RNA, 19 nt, Artificial Sequence
  Synthetic
acccuuuugaggcuauuuu

SEQ ID NO: 167275 - RNA, 21 nt, Artificial Sequence
  Synthetic
ugacccuuuugaggcuauuuu

SEQ ID NO: 167276 - RNA, 22 nt, Artificial Sequence
  Synthetic
uugacccuuuugaggcuauuuu

SEQ ID NO: 167277 - RNA, 23 nt, Artificial Sequence
  Synthetic
auugacccuuuugaggcuauuuu

SEQ ID NO: 167278 - RNA, 18 nt, Artificial Sequence
  Synthetic
ugauuaauuacuuauuuu

SEQ ID NO: 167279 - RNA, 19 nt, Artificial Sequence
  Synthetic
uugauuaauuacuuauuuu

SEQ ID NO: 167280 - RNA, 20 nt, Artificial Sequence
  Synthetic
auugauuaauuacuuauuuu

SEQ ID NO: 167281 - RNA, 19 nt, Artificial Sequence
  Synthetic
uguucuuugcaguuauuuu

SEQ ID NO: 167282 - RNA, 20 nt, Artificial Sequence
  Synthetic
auguucuuugcaguuauuuu

SEQ ID NO: 167283 - RNA, 18 nt, Artificial Sequence
  Synthetic
ucacuucucaaaacuuuu

SEQ ID NO: 167284 - RNA, 19 nt, Artificial Sequence
  Synthetic
uucacuucucaaaacuuuu

SEQ ID NO: 167285 - RNA, 20 nt, Artificial Sequence
  Synthetic
uuucacuucucaaaacuuuu

SEQ ID NO: 167286 - RNA, 18 nt, Artificial Sequence
  Synthetic
ccaaaccugaacacuuuu

SEQ ID NO: 167287 - RNA, 19 nt, Artificial Sequence
  Synthetic
uccaaaccugaacacuuuu

SEQ ID NO: 167288 - RNA, 21 nt, Artificial Sequence
  Synthetic
uguccaaaccugaacacuuuu

SEQ ID NO: 167289 - RNA, 22 nt, Artificial Sequence
  Synthetic
uuguccaaaccugaacacuuuu

SEQ ID NO: 167290 - RNA, 23 nt, Artificial Sequence
  Synthetic
auuguccaaaccugaacacuuuu

SEQ ID NO: 167291 - RNA, 24 nt, Artificial Sequence
  Synthetic
cauuguccaaaccugaacacuuuu

SEQ ID NO: 167292 - RNA, 18 nt, Artificial Sequence
  Synthetic
cuuuauaauauuacuuuu

SEQ ID NO: 167293 - RNA, 20 nt, Artificial Sequence
  Synthetic
ugcuuuauaauauuacuuuu

SEQ ID NO: 167294 - RNA, 18 nt, Artificial Sequence
  Synthetic
uucauuugguuuccuuuu

SEQ ID NO: 167295 - RNA, 19 nt, Artificial Sequence
  Synthetic
uuucauuugguuuccuuuu

SEQ ID NO: 167296 - RNA, 20 nt, Artificial Sequence
  Synthetic
uuuucauuugguuuccuuuu

SEQ ID NO: 167297 - RNA, 18 nt, Artificial Sequence
  Synthetic
cauaaugacuucucuuuu

SEQ ID NO: 167298 - RNA, 19 nt, Artificial Sequence
  Synthetic
acauaaugacuucucuuuu

SEQ ID NO: 167299 - RNA, 20 nt, Artificial Sequence
  Synthetic
aacauaaugacuucucuuuu

SEQ ID NO: 167300 - RNA, 18 nt, Artificial Sequence
  Synthetic
accuucccuacuucuuuu

SEQ ID NO: 167301 - RNA, 19 nt, Artificial Sequence
  Synthetic
aaccuucccuacuucuuuu

SEQ ID NO: 167302 - RNA, 20 nt, Artificial Sequence
  Synthetic
caaccuucccuacuucuuuu

SEQ ID NO: 167303 - RNA, 19 nt, Artificial Sequence
  Synthetic
ugucuaucuucuuucuuuu

SEQ ID NO: 167304 - RNA, 21 nt, Artificial Sequence
  Synthetic
agugucuaucuucuuucuuuu

SEQ ID NO: 167305 - RNA, 22 nt, Artificial Sequence
  Synthetic
cagugucuaucuucuuucuuuu

SEQ ID NO: 167306 - RNA, 23 nt, Artificial Sequence
  Synthetic
acagugucuaucuucuuucuuuu

SEQ ID NO: 167307 - RNA, 24 nt, Artificial Sequence
  Synthetic
aacagugucuaucuucuuucuuuu

SEQ ID NO: 167308 - RNA, 18 nt, Artificial Sequence
  Synthetic
uccaaaaguaaaaguuuu

SEQ ID NO: 167309 - RNA, 19 nt, Artificial Sequence
  Synthetic
cuccaaaaguaaaaguuuu

SEQ ID NO: 167310 - RNA, 18 nt, Artificial Sequence
  Synthetic
uucuuuuuuaaaaguuuu

SEQ ID NO: 167311 - RNA, 19 nt, Artificial Sequence
  Synthetic
auucuuuuuuaaaaguuuu

SEQ ID NO: 167312 - RNA, 20 nt, Artificial Sequence
  Synthetic
aauucuuuuuuaaaaguuuu

SEQ ID NO: 167313 - RNA, 21 nt, Artificial Sequence
  Synthetic
caauucuuuuuuaaaaguuuu

SEQ ID NO: 167314 - RNA, 22 nt, Artificial Sequence
  Synthetic
ucaauucuuuuuuaaaaguuuu

SEQ ID NO: 167315 - RNA, 23 nt, Artificial Sequence
  Synthetic
cucaauucuuuuuuaaaaguuuu

SEQ ID NO: 167316 - RNA, 19 nt, Artificial Sequence
  Synthetic
agcaauguauuacaguuuu

SEQ ID NO: 167317 - RNA, 20 nt, Artificial Sequence
  Synthetic
cagcaauguauuacaguuuu

SEQ ID NO: 167318 - RNA, 21 nt, Artificial Sequence
  Synthetic
ucagcaauguauuacaguuuu

SEQ ID NO: 167319 - RNA, 22 nt, Artificial Sequence
  Synthetic
cucagcaauguauuacaguuuu

SEQ ID NO: 167320 - RNA, 23 nt, Artificial Sequence
  Synthetic
ucucagcaauguauuacaguuuu

SEQ ID NO: 167321 - RNA, 24 nt, Artificial Sequence
  Synthetic
cucucagcaauguauuacaguuuu

SEQ ID NO: 167322 - RNA, 18 nt, Artificial Sequence
  Synthetic
uuucuucugcucaguuuu

SEQ ID NO: 167323 - RNA, 20 nt, Artificial Sequence
  Synthetic
uguuucuucugcucaguuuu

SEQ ID NO: 167324 - RNA, 18 nt, Artificial Sequence
  Synthetic
aagaggcguuccgguuuu

SEQ ID NO: 167325 - RNA, 20 nt, Artificial Sequence
  Synthetic
agaagaggcguuccgguuuu

SEQ ID NO: 167326 - RNA, 23 nt, Artificial Sequence
  Synthetic
aggagaagaggcguuccgguuuu

SEQ ID NO: 167327 - RNA, 18 nt, Artificial Sequence
  Synthetic
uugcuugauuuguguuuu

SEQ ID NO: 167328 - RNA, 19 nt, Artificial Sequence
  Synthetic
uuugcuugauuuguguuuu

SEQ ID NO: 167329 - RNA, 20 nt, Artificial Sequence
  Synthetic
cuuugcuugauuuguguuuu

SEQ ID NO: 167330 - RNA, 18 nt, Artificial Sequence
  Synthetic
uuaaagguaauuuguuuu

SEQ ID NO: 167331 - RNA, 19 nt, Artificial Sequence
  Synthetic
cuuaaagguaauuuguuuu

SEQ ID NO: 167332 - RNA, 20 nt, Artificial Sequence
  Synthetic
ucuuaaagguaauuuguuuu

SEQ ID NO: 167333 - RNA, 21 nt, Artificial Sequence
  Synthetic
uucuuaaagguaauuuguuuu

SEQ ID NO: 167334 - RNA, 22 nt, Artificial Sequence
  Synthetic
auucuuaaagguaauuuguuuu

SEQ ID NO: 167335 - RNA, 23 nt, Artificial Sequence
  Synthetic
cauucuuaaagguaauuuguuuu

SEQ ID NO: 167336 - RNA, 24 nt, Artificial Sequence
  Synthetic
acauucuuaaagguaauuuguuuu

SEQ ID NO: 167337 - RNA, 18 nt, Artificial Sequence
  Synthetic
aaaauucauauuuguuuu

SEQ ID NO: 167338 - RNA, 19 nt, Artificial Sequence
  Synthetic
uaaaauucauauuuguuuu

SEQ ID NO: 167339 - RNA, 20 nt, Artificial Sequence
  Synthetic
cuaaaauucauauuuguuuu

SEQ ID NO: 167340 - RNA, 21 nt, Artificial Sequence
  Synthetic
ucuaaaauucauauuuguuuu

SEQ ID NO: 167341 - RNA, 22 nt, Artificial Sequence
  Synthetic
aucuaaaauucauauuuguuuu

SEQ ID NO: 167342 - RNA, 23 nt, Artificial Sequence
  Synthetic
caucuaaaauucauauuuguuuu

SEQ ID NO: 167343 - RNA, 24 nt, Artificial Sequence
  Synthetic
ucaucuaaaauucauauuuguuuu

SEQ ID NO: 167344 - RNA, 18 nt, Artificial Sequence
  Synthetic
auuugcaaaauaauuuuu

SEQ ID NO: 167345 - RNA, 19 nt, Artificial Sequence
  Synthetic
uauuugcaaaauaauuuuu

SEQ ID NO: 167346 - RNA, 20 nt, Artificial Sequence
  Synthetic
uuauuugcaaaauaauuuuu

SEQ ID NO: 167347 - RNA, 18 nt, Artificial Sequence
  Synthetic
uaagagaacauaauuuuu

SEQ ID NO: 167348 - RNA, 19 nt, Artificial Sequence
  Synthetic
uuaagagaacauaauuuuu

SEQ ID NO: 167349 - RNA, 20 nt, Artificial Sequence
  Synthetic
auuaagagaacauaauuuuu

SEQ ID NO: 167350 - RNA, 18 nt, Artificial Sequence
  Synthetic
uuuuuuauuuuaauuuuu

SEQ ID NO: 167351 - RNA, 19 nt, Artificial Sequence
  Synthetic
cuuuuuuauuuuaauuuuu

SEQ ID NO: 167352 - RNA, 20 nt, Artificial Sequence
  Synthetic
ucuuuuuuauuuuaauuuuu

SEQ ID NO: 167353 - RNA, 21 nt, Artificial Sequence
  Synthetic
cucuuuuuuauuuuaauuuuu

SEQ ID NO: 167354 - RNA, 22 nt, Artificial Sequence
  Synthetic
ucucuuuuuuauuuuaauuuuu

SEQ ID NO: 167355 - RNA, 23 nt, Artificial Sequence
  Synthetic
cucucuuuuuuauuuuaauuuuu

SEQ ID NO: 167356 - RNA, 24 nt, Artificial Sequence
  Synthetic
ccucucuuuuuuauuuuaauuuuu

SEQ ID NO: 167357 - RNA, 18 nt, Artificial Sequence
  Synthetic
uaacuaaauaacauuuuu

SEQ ID NO: 167358 - RNA, 19 nt, Artificial Sequence
  Synthetic
auaacuaaauaacauuuuu

SEQ ID NO: 167359 - RNA, 20 nt, Artificial Sequence
  Synthetic
cauaacuaaauaacauuuuu

SEQ ID NO: 167360 - RNA, 19 nt, Artificial Sequence
  Synthetic
agauuuaaaagagauuuuu

SEQ ID NO: 167361 - RNA, 20 nt, Artificial Sequence
  Synthetic
aggauaguguauuccuuuuu

SEQ ID NO: 167362 - RNA, 18 nt, Artificial Sequence
  Synthetic
auuauuucuuugcuuuuu

SEQ ID NO: 167363 - RNA, 19 nt, Artificial Sequence
  Synthetic
aauuauuucuuugcuuuuu

SEQ ID NO: 167364 - RNA, 20 nt, Artificial Sequence
  Synthetic
aaauuauuucuuugcuuuuu

SEQ ID NO: 167365 - RNA, 21 nt, Artificial Sequence
  Synthetic
aaaauuauuucuuugcuuuuu

SEQ ID NO: 167366 - RNA, 22 nt, Artificial Sequence
  Synthetic
uaaaauuauuucuuugcuuuuu

SEQ ID NO: 167367 - RNA, 23 nt, Artificial Sequence
  Synthetic
uuaaaauuauuucuuugcuuuuu

SEQ ID NO: 167368 - RNA, 24 nt, Artificial Sequence
  Synthetic
uuuaaaauuauuucuuugcuuuuu

SEQ ID NO: 167369 - RNA, 21 nt, Artificial Sequence
  Synthetic
uggucuucacaauaauuuuuu

SEQ ID NO: 167370 - RNA, 22 nt, Artificial Sequence
  Synthetic
uuggucuucacaauaauuuuuu

SEQ ID NO: 167371 - RNA, 23 nt, Artificial Sequence
  Synthetic
auuggucuucacaauaauuuuuu

SEQ ID NO: 167372 - RNA, 24 nt, Artificial Sequence
  Synthetic
cauuggucuucacaauaauuuuuu

SEQ ID NO: 167373 - RNA, 18 nt, Artificial Sequence
  Synthetic
uuaaaaaaaaccuuuuuu

SEQ ID NO: 167374 - RNA, 20 nt, Artificial Sequence
  Synthetic
uguuaaaaaaaaccuuuuuu

SEQ ID NO: 167375 - RNA, 18 nt, Artificial Sequence
  Synthetic
augaacucguucuuuuuu

SEQ ID NO: 167376 - RNA, 19 nt, Artificial Sequence
  Synthetic
caugaacucguucuuuuuu

SEQ ID NO: 167377 - RNA, 20 nt, Artificial Sequence
  Synthetic
acaugaacucguucuuuuuu

SEQ ID NO: 167378 - RNA, 23 nt, Artificial Sequence
  Synthetic
aggacaugaacucguucuuuuuu

SEQ ID NO: 167379 - RNA, 24 nt, Artificial Sequence
  Synthetic
aaggacaugaacucguucuuuuuu

SEQ ID NO: 167380 - RNA, 18 nt, Artificial Sequence
  Synthetic
agccuuuaaauuuuuuuu

SEQ ID NO: 167381 - RNA, 19 nt, Artificial Sequence
  Synthetic
uagccuuuaaauuuuuuuu

SEQ ID NO: 167382 - RNA, 20 nt, Artificial Sequence
  Synthetic
uuagccuuuaaauuuuuuuu

SEQ ID NO: 167383 - RNA, 18 nt, Artificial Sequence
  Synthetic
aaguuaacaauuuuuuuu

SEQ ID NO: 167384 - RNA, 19 nt, Artificial Sequence
  Synthetic
aaaguuaacaauuuuuuuu

SEQ ID NO: 167385 - RNA, 18 nt, Artificial Sequence
  Synthetic
uauauauauauuuuuuuu

SEQ ID NO: 167386 - RNA, 19 nt, Artificial Sequence
  Synthetic
auauauauauauuuuuuuu

SEQ ID NO: 167387 - RNA, 20 nt, Artificial Sequence
  Synthetic
uauauauauauauuuuuuuu

SEQ ID NO: 167388 - RNA, 21 nt, Artificial Sequence
  Synthetic
uuauauauauauauuuuuuuu

SEQ ID NO: 167389 - RNA, 22 nt, Artificial Sequence
  Synthetic
uuuauauauauauauuuuuuuu

SEQ ID NO: 167390 - RNA, 23 nt, Artificial Sequence
  Synthetic
uuuuauauauauauauuuuuuuu

SEQ ID NO: 167391 - RNA, 21 nt, Artificial Sequence
  Synthetic
aaaaaaaaaaaaaaaaaaaaa

SEQ ID NO: 167392 - RNA, 22 nt, Artificial Sequence
  Synthetic
aaaaaaaaaaaaaaaaaaaaaa

SEQ ID NO: 167393 - RNA, 23 nt, Artificial Sequence
  Synthetic
uaaaaaaaaaaaaaaaaaaaaaa

SEQ ID NO: 167394 - RNA, 24 nt, Artificial Sequence
  Synthetic
uuaaaaaaaaaaaaaaaaaaaaaa

SEQ ID NO: 167395 - RNA, 21 nt, Artificial Sequence
  Synthetic
uaaaaaaaaaaaaaaaaaaaa

SEQ ID NO: 167396 - RNA, 22 nt, Artificial Sequence
  Synthetic
uuaaaaaaaaaaaaaaaaaaaa

SEQ ID NO: 167397 - RNA, 23 nt, Artificial Sequence
  Synthetic
auuaaaaaaaaaaaaaaaaaaaa

SEQ ID NO: 167398 - RNA, 24 nt, Artificial Sequence
  Synthetic
aauuaaaaaaaaaaaaaaaaaaaa

SEQ ID NO: 167399 - RNA, 18 nt, Artificial Sequence
  Synthetic
caaaaaaaaaaaaaaaaa

SEQ ID NO: 167400 - RNA, 19 nt, Artificial Sequence
  Synthetic
ucaaaaaaaaaaaaaaaaa

SEQ ID NO: 167401 - RNA, 20 nt, Artificial Sequence
  Synthetic
cucaaaaaaaaaaaaaaaaa

SEQ ID NO: 167402 - RNA, 18 nt, Artificial Sequence
  Synthetic
gaaaaaaaaaaaaaaaaa

SEQ ID NO: 167403 - RNA, 19 nt, Artificial Sequence
  Synthetic
agaaaaaaaaaaaaaaaaa

SEQ ID NO: 167404 - RNA, 20 nt, Artificial Sequence
  Synthetic
aagaaaaaaaaaaaaaaaaa

SEQ ID NO: 167405 - RNA, 21 nt, Artificial Sequence
  Synthetic
gaagaaaaaaaaaaaaaaaaa

SEQ ID NO: 167406 - RNA, 22 nt, Artificial Sequence
  Synthetic
agaagaaaaaaaaaaaaaaaaa

SEQ ID NO: 167407 - RNA, 23 nt, Artificial Sequence
  Synthetic
cagaagaaaaaaaaaaaaaaaaa

SEQ ID NO: 167408 - RNA, 24 nt, Artificial Sequence
  Synthetic
ucagaagaaaaaaaaaaaaaaaaa

SEQ ID NO: 167409 - RNA, 18 nt, Artificial Sequence
  Synthetic
uaaaaaaaaaaaaaaaaa

SEQ ID NO: 167410 - RNA, 19 nt, Artificial Sequence
  Synthetic
uuaaaaaaaaaaaaaaaaa

SEQ ID NO: 167411 - RNA, 20 nt, Artificial Sequence
  Synthetic
uuuaaaaaaaaaaaaaaaaa

SEQ ID NO: 167412 - RNA, 21 nt, Artificial Sequence
  Synthetic
guuuaaaaaaaaaaaaaaaaa

SEQ ID NO: 167413 - RNA, 22 nt, Artificial Sequence
  Synthetic
uguuuaaaaaaaaaaaaaaaaa

SEQ ID NO: 167414 - RNA, 23 nt, Artificial Sequence
  Synthetic
guguuuaaaaaaaaaaaaaaaaa

SEQ ID NO: 167415 - RNA, 24 nt, Artificial Sequence
  Synthetic
gguguuuaaaaaaaaaaaaaaaaa

SEQ ID NO: 167416 - RNA, 18 nt, Artificial Sequence
  Synthetic
ccaaaaaaaaaaaaaaaa

SEQ ID NO: 167417 - RNA, 19 nt, Artificial Sequence
  Synthetic
accaaaaaaaaaaaaaaaa

SEQ ID NO: 167418 - RNA, 20 nt, Artificial Sequence
  Synthetic
caccaaaaaaaaaaaaaaaa

SEQ ID NO: 167419 - RNA, 21 nt, Artificial Sequence
  Synthetic
ucaccaaaaaaaaaaaaaaaa

SEQ ID NO: 167420 - RNA, 22 nt, Artificial Sequence
  Synthetic
cucaccaaaaaaaaaaaaaaaa

SEQ ID NO: 167421 - RNA, 23 nt, Artificial Sequence
  Synthetic
ucucaccaaaaaaaaaaaaaaaa

SEQ ID NO: 167422 - RNA, 24 nt, Artificial Sequence
  Synthetic
gucucaccaaaaaaaaaaaaaaaa

SEQ ID NO: 167423 - RNA, 18 nt, Artificial Sequence
  Synthetic
gcaaaaaaaaaaaaaaaa

SEQ ID NO: 167424 - RNA, 19 nt, Artificial Sequence
  Synthetic
cgcaaaaaaaaaaaaaaaa

SEQ ID NO: 167425 - RNA, 20 nt, Artificial Sequence
  Synthetic
ucgcaaaaaaaaaaaaaaaa

SEQ ID NO: 167426 - RNA, 21 nt, Artificial Sequence
  Synthetic
cucgcaaaaaaaaaaaaaaaa

SEQ ID NO: 167427 - RNA, 22 nt, Artificial Sequence
  Synthetic
ucucgcaaaaaaaaaaaaaaaa

SEQ ID NO: 167428 - RNA, 23 nt, Artificial Sequence
  Synthetic
aucucgcaaaaaaaaaaaaaaaa

SEQ ID NO: 167429 - RNA, 24 nt, Artificial Sequence
  Synthetic
caucucgcaaaaaaaaaaaaaaaa

SEQ ID NO: 167430 - RNA, 18 nt, Artificial Sequence
  Synthetic
ucaaaaaaaaaaaaaaaa

SEQ ID NO: 167431 - RNA, 19 nt, Artificial Sequence
  Synthetic
cucaaaaaaaaaaaaaaaa

SEQ ID NO: 167432 - RNA, 20 nt, Artificial Sequence
  Synthetic
ucucaaaaaaaaaaaaaaaa

SEQ ID NO: 167433 - RNA, 18 nt, Artificial Sequence
  Synthetic
ggaaaaaaaaaaaaaaaa

SEQ ID NO: 167434 - RNA, 19 nt, Artificial Sequence
  Synthetic
uggaaaaaaaaaaaaaaaa

SEQ ID NO: 167435 - RNA, 20 nt, Artificial Sequence
  Synthetic
uuggaaaaaaaaaaaaaaaa

SEQ ID NO: 167436 - RNA, 21 nt, Artificial Sequence
  Synthetic
cuuggaaaaaaaaaaaaaaaa

SEQ ID NO: 167437 - RNA, 22 nt, Artificial Sequence
  Synthetic
ccuuggaaaaaaaaaaaaaaaa

SEQ ID NO: 167438 - RNA, 23 nt, Artificial Sequence
  Synthetic
accuuggaaaaaaaaaaaaaaaa

SEQ ID NO: 167439 - RNA, 24 nt, Artificial Sequence
  Synthetic
caccuuggaaaaaaaaaaaaaaaa

SEQ ID NO: 167440 - RNA, 18 nt, Artificial Sequence
  Synthetic
uggaaaaaaaaaaaaaaa

SEQ ID NO: 167441 - RNA, 19 nt, Artificial Sequence
  Synthetic
cuggaaaaaaaaaaaaaaa

SEQ ID NO: 167442 - RNA, 20 nt, Artificial Sequence
  Synthetic
ucuggaaaaaaaaaaaaaaa

SEQ ID NO: 167443 - RNA, 21 nt, Artificial Sequence
  Synthetic
uucuggaaaaaaaaaaaaaaa

SEQ ID NO: 167444 - RNA, 22 nt, Artificial Sequence
  Synthetic
auucuggaaaaaaaaaaaaaaa

SEQ ID NO: 167445 - RNA, 23 nt, Artificial Sequence
  Synthetic
aauucuggaaaaaaaaaaaaaaa

SEQ ID NO: 167446 - RNA, 24 nt, Artificial Sequence
  Synthetic
aaauucuggaaaaaaaaaaaaaaa

SEQ ID NO: 167447 - RNA, 19 nt, Artificial Sequence
  Synthetic
uuggaaaaaaaaaaaaaaa

SEQ ID NO: 167448 - RNA, 20 nt, Artificial Sequence
  Synthetic
cuuggaaaaaaaaaaaaaaa

SEQ ID NO: 167449 - RNA, 21 nt, Artificial Sequence
  Synthetic
ccuuggaaaaaaaaaaaaaaa

SEQ ID NO: 167450 - RNA, 22 nt, Artificial Sequence
  Synthetic
accuuggaaaaaaaaaaaaaaa

SEQ ID NO: 167451 - RNA, 23 nt, Artificial Sequence
  Synthetic
caccuuggaaaaaaaaaaaaaaa

SEQ ID NO: 167452 - RNA, 24 nt, Artificial Sequence
  Synthetic
ccaccuuggaaaaaaaaaaaaaaa

SEQ ID NO: 167453 - RNA, 18 nt, Artificial Sequence
  Synthetic
ucuaaaaaaaaaaaaaaa

SEQ ID NO: 167454 - RNA, 19 nt, Artificial Sequence
  Synthetic
gucuaaaaaaaaaaaaaaa

SEQ ID NO: 167455 - RNA, 20 nt, Artificial Sequence
  Synthetic
cgucuaaaaaaaaaaaaaaa

SEQ ID NO: 167456 - RNA, 21 nt, Artificial Sequence
  Synthetic
ccgucuaaaaaaaaaaaaaaa

SEQ ID NO: 167457 - RNA, 22 nt, Artificial Sequence
  Synthetic
uccgucuaaaaaaaaaaaaaaa

SEQ ID NO: 167458 - RNA, 23 nt, Artificial Sequence
  Synthetic
cuccgucuaaaaaaaaaaaaaaa

SEQ ID NO: 167459 - RNA, 24 nt, Artificial Sequence
  Synthetic
acuccgucuaaaaaaaaaaaaaaa

SEQ ID NO: 167460 - RNA, 18 nt, Artificial Sequence
  Synthetic
uuuaaaaaaaaaaaaaaa

SEQ ID NO: 167461 - RNA, 19 nt, Artificial Sequence
  Synthetic
auuuaaaaaaaaaaaaaaa

SEQ ID NO: 167462 - RNA, 20 nt, Artificial Sequence
  Synthetic
aauuuaaaaaaaaaaaaaaa

SEQ ID NO: 167463 - RNA, 21 nt, Artificial Sequence
  Synthetic
aaauuuaaaaaaaaaaaaaaa

SEQ ID NO: 167464 - RNA, 22 nt, Artificial Sequence
  Synthetic
gaaauuuaaaaaaaaaaaaaaa

SEQ ID NO: 167465 - RNA, 23 nt, Artificial Sequence
  Synthetic
agaaauuuaaaaaaaaaaaaaaa

SEQ ID NO: 167466 - RNA, 24 nt, Artificial Sequence
  Synthetic
aagaaauuuaaaaaaaaaaaaaaa

SEQ ID NO: 167467 - RNA, 18 nt, Artificial Sequence
  Synthetic
aaacaaaaaaaaaaaaaa

SEQ ID NO: 167468 - RNA, 19 nt, Artificial Sequence
  Synthetic
uaaacaaaaaaaaaaaaaa

SEQ ID NO: 167469 - RNA, 20 nt, Artificial Sequence
  Synthetic
guaaacaaaaaaaaaaaaaa

SEQ ID NO: 167470 - RNA, 21 nt, Artificial Sequence
  Synthetic
aguaaacaaaaaaaaaaaaaa

SEQ ID NO: 167471 - RNA, 22 nt, Artificial Sequence
  Synthetic
aaguaaacaaaaaaaaaaaaaa

SEQ ID NO: 167472 - RNA, 23 nt, Artificial Sequence
  Synthetic
aaaguaaacaaaaaaaaaaaaaa

SEQ ID NO: 167473 - RNA, 24 nt, Artificial Sequence
  Synthetic
caaaguaaacaaaaaaaaaaaaaa

SEQ ID NO: 167474 - RNA, 18 nt, Artificial Sequence
  Synthetic
ucucaaaaaaaaaaaaaa

SEQ ID NO: 167475 - RNA, 19 nt, Artificial Sequence
  Synthetic
gucucaaaaaaaaaaaaaa

SEQ ID NO: 167476 - RNA, 20 nt, Artificial Sequence
  Synthetic
ugucucaaaaaaaaaaaaaa

SEQ ID NO: 167477 - RNA, 18 nt, Artificial Sequence
  Synthetic
cuggaaaaaaaaaaaaaa

SEQ ID NO: 167478 - RNA, 19 nt, Artificial Sequence
  Synthetic
ucuggaaaaaaaaaaaaaa

SEQ ID NO: 167479 - RNA, 20 nt, Artificial Sequence
  Synthetic
uucuggaaaaaaaaaaaaaa

SEQ ID NO: 167480 - RNA, 21 nt, Artificial Sequence
  Synthetic
auucuggaaaaaaaaaaaaaa

SEQ ID NO: 167481 - RNA, 22 nt, Artificial Sequence
  Synthetic
aauucuggaaaaaaaaaaaaaa

SEQ ID NO: 167482 - RNA, 23 nt, Artificial Sequence
  Synthetic
aaauucuggaaaaaaaaaaaaaa

SEQ ID NO: 167483 - RNA, 24 nt, Artificial Sequence
  Synthetic
aaaauucuggaaaaaaaaaaaaaa

SEQ ID NO: 167484 - RNA, 18 nt, Artificial Sequence
  Synthetic
acuuaaaaaaaaaaaaaa

SEQ ID NO: 167485 - RNA, 19 nt, Artificial Sequence
  Synthetic
aacuuaaaaaaaaaaaaaa

SEQ ID NO: 167486 - RNA, 20 nt, Artificial Sequence
  Synthetic
caacuuaaaaaaaaaaaaaa

SEQ ID NO: 167487 - RNA, 21 nt, Artificial Sequence
  Synthetic
ucaacuuaaaaaaaaaaaaaa

SEQ ID NO: 167488 - RNA, 22 nt, Artificial Sequence
  Synthetic
cucaacuuaaaaaaaaaaaaaa

SEQ ID NO: 167489 - RNA, 23 nt, Artificial Sequence
  Synthetic
gcucaacuuaaaaaaaaaaaaaa

SEQ ID NO: 167490 - RNA, 24 nt, Artificial Sequence
  Synthetic
agcucaacuuaaaaaaaaaaaaaa

SEQ ID NO: 167491 - RNA, 18 nt, Artificial Sequence
  Synthetic
auuuaaaaaaaaaaaaaa

SEQ ID NO: 167492 - RNA, 19 nt, Artificial Sequence
  Synthetic
aauuuaaaaaaaaaaaaaa

SEQ ID NO: 167493 - RNA, 20 nt, Artificial Sequence
  Synthetic
aaauuuaaaaaaaaaaaaaa

SEQ ID NO: 167494 - RNA, 21 nt, Artificial Sequence
  Synthetic
gaaauuuaaaaaaaaaaaaaa

SEQ ID NO: 167495 - RNA, 22 nt, Artificial Sequence
  Synthetic
agaaauuuaaaaaaaaaaaaaa

SEQ ID NO: 167496 - RNA, 23 nt, Artificial Sequence
  Synthetic
aagaaauuuaaaaaaaaaaaaaa

SEQ ID NO: 167497 - RNA, 24 nt, Artificial Sequence
  Synthetic
gaagaaauuuaaaaaaaaaaaaaa

SEQ ID NO: 167498 - RNA, 18 nt, Artificial Sequence
  Synthetic
uaaacaaaaaaaaaaaaa

SEQ ID NO: 167499 - RNA, 19 nt, Artificial Sequence
  Synthetic
guaaacaaaaaaaaaaaaa

SEQ ID NO: 167500 - RNA, 20 nt, Artificial Sequence
  Synthetic
aguaaacaaaaaaaaaaaaa

SEQ ID NO: 167501 - RNA, 21 nt, Artificial Sequence
  Synthetic
aaguaaacaaaaaaaaaaaaa

SEQ ID NO: 167502 - RNA, 22 nt, Artificial Sequence
  Synthetic
aaaguaaacaaaaaaaaaaaaa

SEQ ID NO: 167503 - RNA, 23 nt, Artificial Sequence
  Synthetic
caaaguaaacaaaaaaaaaaaaa

SEQ ID NO: 167504 - RNA, 24 nt, Artificial Sequence
  Synthetic
acaaaguaaacaaaaaaaaaaaaa

SEQ ID NO: 167505 - RNA, 18 nt, Artificial Sequence
  Synthetic
uuagcaaaaaaaaaaaaa

SEQ ID NO: 167506 - RNA, 19 nt, Artificial Sequence
  Synthetic
auuagcaaaaaaaaaaaaa

SEQ ID NO: 167507 - RNA, 20 nt, Artificial Sequence
  Synthetic
cauuagcaaaaaaaaaaaaa

SEQ ID NO: 167508 - RNA, 21 nt, Artificial Sequence
  Synthetic
ucauuagcaaaaaaaaaaaaa

SEQ ID NO: 167509 - RNA, 22 nt, Artificial Sequence
  Synthetic
gucauuagcaaaaaaaaaaaaa

SEQ ID NO: 167510 - RNA, 23 nt, Artificial Sequence
  Synthetic
agucauuagcaaaaaaaaaaaaa

SEQ ID NO: 167511 - RNA, 24 nt, Artificial Sequence
  Synthetic
aagucauuagcaaaaaaaaaaaaa

SEQ ID NO: 167512 - RNA, 18 nt, Artificial Sequence
  Synthetic
gggggaaaaaaaaaaaaa

SEQ ID NO: 167513 - RNA, 19 nt, Artificial Sequence
  Synthetic
agggggaaaaaaaaaaaaa

SEQ ID NO: 167514 - RNA, 20 nt, Artificial Sequence
  Synthetic
uagggggaaaaaaaaaaaaa

SEQ ID NO: 167515 - RNA, 21 nt, Artificial Sequence
  Synthetic
uuagggggaaaaaaaaaaaaa

SEQ ID NO: 167516 - RNA, 22 nt, Artificial Sequence
  Synthetic
auuagggggaaaaaaaaaaaaa

SEQ ID NO: 167517 - RNA, 23 nt, Artificial Sequence
  Synthetic
uauuagggggaaaaaaaaaaaaa

SEQ ID NO: 167518 - RNA, 24 nt, Artificial Sequence
  Synthetic
cuauuagggggaaaaaaaaaaaaa

SEQ ID NO: 167519 - RNA, 18 nt, Artificial Sequence
  Synthetic
caucucaaaaaaaaaaaa

SEQ ID NO: 167520 - RNA, 19 nt, Artificial Sequence
  Synthetic
ccaucucaaaaaaaaaaaa

SEQ ID NO: 167521 - RNA, 20 nt, Artificial Sequence
  Synthetic
uccaucucaaaaaaaaaaaa

SEQ ID NO: 167522 - RNA, 21 nt, Artificial Sequence
  Synthetic
uuccaucucaaaaaaaaaaaa

SEQ ID NO: 167523 - RNA, 22 nt, Artificial Sequence
  Synthetic
auuccaucucaaaaaaaaaaaa

SEQ ID NO: 167524 - RNA, 23 nt, Artificial Sequence
  Synthetic
gauuccaucucaaaaaaaaaaaa

SEQ ID NO: 167525 - RNA, 24 nt, Artificial Sequence
  Synthetic
agauuccaucucaaaaaaaaaaaa

SEQ ID NO: 167526 - RNA, 18 nt, Artificial Sequence
  Synthetic
ugucucaaaaaaaaaaaa

SEQ ID NO: 167527 - RNA, 19 nt, Artificial Sequence
  Synthetic
cugucucaaaaaaaaaaaa

SEQ ID NO: 167528 - RNA, 20 nt, Artificial Sequence
  Synthetic
ucugucucaaaaaaaaaaaa

SEQ ID NO: 167529 - RNA, 18 nt, Artificial Sequence
  Synthetic
caacuuaaaaaaaaaaaa

SEQ ID NO: 167530 - RNA, 19 nt, Artificial Sequence
  Synthetic
ucaacuuaaaaaaaaaaaa

SEQ ID NO: 167531 - RNA, 20 nt, Artificial Sequence
  Synthetic
cucaacuuaaaaaaaaaaaa

SEQ ID NO: 167532 - RNA, 21 nt, Artificial Sequence
  Synthetic
gcucaacuuaaaaaaaaaaaa

SEQ ID NO: 167533 - RNA, 22 nt, Artificial Sequence
  Synthetic
agcucaacuuaaaaaaaaaaaa

SEQ ID NO: 167534 - RNA, 23 nt, Artificial Sequence
  Synthetic
uagcucaacuuaaaaaaaaaaaa

SEQ ID NO: 167535 - RNA, 24 nt, Artificial Sequence
  Synthetic
auagcucaacuuaaaaaaaaaaaa

SEQ ID NO: 167536 - RNA, 18 nt, Artificial Sequence
  Synthetic
ccaucucaaaaaaaaaaa

SEQ ID NO: 167537 - RNA, 19 nt, Artificial Sequence
  Synthetic
uccaucucaaaaaaaaaaa

SEQ ID NO: 167538 - RNA, 20 nt, Artificial Sequence
  Synthetic
uuccaucucaaaaaaaaaaa

SEQ ID NO: 167539 - RNA, 21 nt, Artificial Sequence
  Synthetic
auuccaucucaaaaaaaaaaa

SEQ ID NO: 167540 - RNA, 22 nt, Artificial Sequence
  Synthetic
gauuccaucucaaaaaaaaaaa

SEQ ID NO: 167541 - RNA, 23 nt, Artificial Sequence
  Synthetic
agauuccaucucaaaaaaaaaaa

SEQ ID NO: 167542 - RNA, 24 nt, Artificial Sequence
  Synthetic
aagauuccaucucaaaaaaaaaaa

SEQ ID NO: 167543 - RNA, 18 nt, Artificial Sequence
  Synthetic
uagggggaaaaaaaaaaa

SEQ ID NO: 167544 - RNA, 19 nt, Artificial Sequence
  Synthetic
uuagggggaaaaaaaaaaa

SEQ ID NO: 167545 - RNA, 20 nt, Artificial Sequence
  Synthetic
auuagggggaaaaaaaaaaa

SEQ ID NO: 167546 - RNA, 21 nt, Artificial Sequence
  Synthetic
uauuagggggaaaaaaaaaaa

SEQ ID NO: 167547 - RNA, 22 nt, Artificial Sequence
  Synthetic
cuauuagggggaaaaaaaaaaa

SEQ ID NO: 167548 - RNA, 23 nt, Artificial Sequence
  Synthetic
ucuauuagggggaaaaaaaaaaa

SEQ ID NO: 167549 - RNA, 24 nt, Artificial Sequence
  Synthetic
cucuauuagggggaaaaaaaaaaa

SEQ ID NO: 167550 - RNA, 18 nt, Artificial Sequence
  Synthetic
aaaaaauaaaaaaaaaaa

SEQ ID NO: 167551 - RNA, 19 nt, Artificial Sequence
  Synthetic
aaaaaaauaaaaaaaaaaa

SEQ ID NO: 167552 - RNA, 20 nt, Artificial Sequence
  Synthetic
aaaaaaaauaaaaaaaaaaa

SEQ ID NO: 167553 - RNA, 21 nt, Artificial Sequence
  Synthetic
uaaaaaaaauaaaaaaaaaaa

SEQ ID NO: 167554 - RNA, 22 nt, Artificial Sequence
  Synthetic
uuaaaaaaaauaaaaaaaaaaa

SEQ ID NO: 167555 - RNA, 23 nt, Artificial Sequence
  Synthetic
auuaaaaaaaauaaaaaaaaaaa

SEQ ID NO: 167556 - RNA, 24 nt, Artificial Sequence
  Synthetic
aauuaaaaaaaauaaaaaaaaaaa

SEQ ID NO: 167557 - RNA, 18 nt, Artificial Sequence
  Synthetic
acuccaucaaaaaaaaaa

SEQ ID NO: 167558 - RNA, 19 nt, Artificial Sequence
  Synthetic
aacuccaucaaaaaaaaaa

SEQ ID NO: 167559 - RNA, 20 nt, Artificial Sequence
  Synthetic
aaacuccaucaaaaaaaaaa

SEQ ID NO: 167560 - RNA, 21 nt, Artificial Sequence
  Synthetic
aaaacuccaucaaaaaaaaaa

SEQ ID NO: 167561 - RNA, 22 nt, Artificial Sequence
  Synthetic
caaaacuccaucaaaaaaaaaa

SEQ ID NO: 167562 - RNA, 23 nt, Artificial Sequence
  Synthetic
gcaaaacuccaucaaaaaaaaaa

SEQ ID NO: 167563 - RNA, 24 nt, Artificial Sequence
  Synthetic
agcaaaacuccaucaaaaaaaaaa

SEQ ID NO: 167564 - RNA, 18 nt, Artificial Sequence
  Synthetic
aguauaauaaaaaaaaaa

SEQ ID NO: 167565 - RNA, 19 nt, Artificial Sequence
  Synthetic
aaguauaauaaaaaaaaaa

SEQ ID NO: 167566 - RNA, 20 nt, Artificial Sequence
  Synthetic
aaaguauaauaaaaaaaaaa

SEQ ID NO: 167567 - RNA, 21 nt, Artificial Sequence
  Synthetic
uaaaguauaauaaaaaaaaaa

SEQ ID NO: 167568 - RNA, 22 nt, Artificial Sequence
  Synthetic
uuaaaguauaauaaaaaaaaaa

SEQ ID NO: 167569 - RNA, 23 nt, Artificial Sequence
  Synthetic
cuuaaaguauaauaaaaaaaaaa

SEQ ID NO: 167570 - RNA, 24 nt, Artificial Sequence
  Synthetic
acuuaaaguauaauaaaaaaaaaa

SEQ ID NO: 167571 - RNA, 18 nt, Artificial Sequence
  Synthetic
cuccaucuaaaaaaaaaa

SEQ ID NO: 167572 - RNA, 19 nt, Artificial Sequence
  Synthetic
acuccaucuaaaaaaaaaa

SEQ ID NO: 167573 - RNA, 20 nt, Artificial Sequence
  Synthetic
aacuccaucuaaaaaaaaaa

SEQ ID NO: 167574 - RNA, 21 nt, Artificial Sequence
  Synthetic
aaacuccaucuaaaaaaaaaa

SEQ ID NO: 167575 - RNA, 22 nt, Artificial Sequence
  Synthetic
gaaacuccaucuaaaaaaaaaa

SEQ ID NO: 167576 - RNA, 23 nt, Artificial Sequence
  Synthetic
ugaaacuccaucuaaaaaaaaaa

SEQ ID NO: 167577 - RNA, 24 nt, Artificial Sequence
  Synthetic
gugaaacuccaucuaaaaaaaaaa

SEQ ID NO: 167578 - RNA, 18 nt, Artificial Sequence
  Synthetic
acaaaaaacaaaaaaaaa

SEQ ID NO: 167579 - RNA, 19 nt, Artificial Sequence
  Synthetic
aacaaaaaacaaaaaaaaa

SEQ ID NO: 167580 - RNA, 20 nt, Artificial Sequence
  Synthetic
aaacaaaaaacaaaaaaaaa

SEQ ID NO: 167581 - RNA, 21 nt, Artificial Sequence
  Synthetic
aaaacaaaaaacaaaaaaaaa

SEQ ID NO: 167582 - RNA, 22 nt, Artificial Sequence
  Synthetic
aaaaacaaaaaacaaaaaaaaa

SEQ ID NO: 167583 - RNA, 23 nt, Artificial Sequence
  Synthetic
aaaaaacaaaaaacaaaaaaaaa

SEQ ID NO: 167584 - RNA, 24 nt, Artificial Sequence
  Synthetic
aaaaaaacaaaaaacaaaaaaaaa

SEQ ID NO: 167585 - RNA, 18 nt, Artificial Sequence
  Synthetic
uuuaaaaagaaaaaaaaa

SEQ ID NO: 167586 - RNA, 19 nt, Artificial Sequence
  Synthetic
uuuuaaaaagaaaaaaaaa

SEQ ID NO: 167587 - RNA, 20 nt, Artificial Sequence
  Synthetic
auuuuaaaaagaaaaaaaaa

SEQ ID NO: 167588 - RNA, 21 nt, Artificial Sequence
  Synthetic
aauuuuaaaaagaaaaaaaaa

SEQ ID NO: 167589 - RNA, 22 nt, Artificial Sequence
  Synthetic
aaauuuuaaaaagaaaaaaaaa

SEQ ID NO: 167590 - RNA, 23 nt, Artificial Sequence
  Synthetic
uaaauuuuaaaaagaaaaaaaaa

SEQ ID NO: 167591 - RNA, 24 nt, Artificial Sequence
  Synthetic
guaaauuuuaaaaagaaaaaaaaa

SEQ ID NO: 167592 - RNA, 18 nt, Artificial Sequence
  Synthetic
agacugucucaaaaaaaa

SEQ ID NO: 167593 - RNA, 19 nt, Artificial Sequence
  Synthetic
aagacugucucaaaaaaaa

SEQ ID NO: 167594 - RNA, 20 nt, Artificial Sequence
  Synthetic
uaagacugucucaaaaaaaa

SEQ ID NO: 167595 - RNA, 21 nt, Artificial Sequence
  Synthetic
guaagacugucucaaaaaaaa

SEQ ID NO: 167596 - RNA, 22 nt, Artificial Sequence
  Synthetic
aguaagacugucucaaaaaaaa

SEQ ID NO: 167597 - RNA, 23 nt, Artificial Sequence
  Synthetic
gaguaagacugucucaaaaaaaa

SEQ ID NO: 167598 - RNA, 24 nt, Artificial Sequence
  Synthetic
agaguaagacugucucaaaaaaaa

SEQ ID NO: 167599 - RNA, 18 nt, Artificial Sequence
  Synthetic
auaauaaaagaaaaaaaa

SEQ ID NO: 167600 - RNA, 19 nt, Artificial Sequence
  Synthetic
aauaauaaaagaaaaaaaa

SEQ ID NO: 167601 - RNA, 20 nt, Artificial Sequence
  Synthetic
caauaauaaaagaaaaaaaa

SEQ ID NO: 167602 - RNA, 21 nt, Artificial Sequence
  Synthetic
acaauaauaaaagaaaaaaaa

SEQ ID NO: 167603 - RNA, 22 nt, Artificial Sequence
  Synthetic
uacaauaauaaaagaaaaaaaa

SEQ ID NO: 167604 - RNA, 23 nt, Artificial Sequence
  Synthetic
guacaauaauaaaagaaaaaaaa

SEQ ID NO: 167605 - RNA, 24 nt, Artificial Sequence
  Synthetic
aguacaauaauaaaagaaaaaaaa

SEQ ID NO: 167606 - RNA, 18 nt, Artificial Sequence
  Synthetic
uggaaacuagaaaaaaaa

SEQ ID NO: 167607 - RNA, 19 nt, Artificial Sequence
  Synthetic
auggaaacuagaaaaaaaa

SEQ ID NO: 167608 - RNA, 20 nt, Artificial Sequence
  Synthetic
gauggaaacuagaaaaaaaa

SEQ ID NO: 167609 - RNA, 21 nt, Artificial Sequence
  Synthetic
agauggaaacuagaaaaaaaa

SEQ ID NO: 167610 - RNA, 22 nt, Artificial Sequence
  Synthetic
cagauggaaacuagaaaaaaaa

SEQ ID NO: 167611 - RNA, 23 nt, Artificial Sequence
  Synthetic
ucagauggaaacuagaaaaaaaa

SEQ ID NO: 167612 - RNA, 24 nt, Artificial Sequence
  Synthetic
cucagauggaaacuagaaaaaaaa

SEQ ID NO: 167613 - RNA, 18 nt, Artificial Sequence
  Synthetic
uggaggaaugaaaaaaaa

SEQ ID NO: 167614 - RNA, 19 nt, Artificial Sequence
  Synthetic
uuggaggaaugaaaaaaaa

SEQ ID NO: 167615 - RNA, 20 nt, Artificial Sequence
  Synthetic
auuggaggaaugaaaaaaaa

SEQ ID NO: 167616 - RNA, 21 nt, Artificial Sequence
  Synthetic
gauuggaggaaugaaaaaaaa

SEQ ID NO: 167617 - RNA, 22 nt, Artificial Sequence
  Synthetic
ggauuggaggaaugaaaaaaaa

SEQ ID NO: 167618 - RNA, 23 nt, Artificial Sequence
  Synthetic
uggauuggaggaaugaaaaaaaa

SEQ ID NO: 167619 - RNA, 24 nt, Artificial Sequence
  Synthetic
uuggauuggaggaaugaaaaaaaa

SEQ ID NO: 167620 - RNA, 18 nt, Artificial Sequence
  Synthetic
aaaguauaauaaaaaaaa

SEQ ID NO: 167621 - RNA, 19 nt, Artificial Sequence
  Synthetic
uaaaguauaauaaaaaaaa

SEQ ID NO: 167622 - RNA, 20 nt, Artificial Sequence
  Synthetic
uuaaaguauaauaaaaaaaa

SEQ ID NO: 167623 - RNA, 21 nt, Artificial Sequence
  Synthetic
cuuaaaguauaauaaaaaaaa

SEQ ID NO: 167624 - RNA, 22 nt, Artificial Sequence
  Synthetic
acuuaaaguauaauaaaaaaaa

SEQ ID NO: 167625 - RNA, 23 nt, Artificial Sequence
  Synthetic
aacuuaaaguauaauaaaaaaaa

SEQ ID NO: 167626 - RNA, 24 nt, Artificial Sequence
  Synthetic
gaacuuaaaguauaauaaaaaaaa

SEQ ID NO: 167627 - RNA, 18 nt, Artificial Sequence
  Synthetic
gccuacuaauaaaaaaaa

SEQ ID NO: 167628 - RNA, 19 nt, Artificial Sequence
  Synthetic
ggccuacuaauaaaaaaaa

SEQ ID NO: 167629 - RNA, 20 nt, Artificial Sequence
  Synthetic
aggccuacuaauaaaaaaaa

SEQ ID NO: 167630 - RNA, 21 nt, Artificial Sequence
  Synthetic
gaggccuacuaauaaaaaaaa

SEQ ID NO: 167631 - RNA, 22 nt, Artificial Sequence
  Synthetic
agaggccuacuaauaaaaaaaa

SEQ ID NO: 167632 - RNA, 23 nt, Artificial Sequence
  Synthetic
cagaggccuacuaauaaaaaaaa

SEQ ID NO: 167633 - RNA, 24 nt, Artificial Sequence
  Synthetic
acagaggccuacuaauaaaaaaaa

SEQ ID NO: 167634 - RNA, 18 nt, Artificial Sequence
  Synthetic
ggauggguauaaaaaaaa

SEQ ID NO: 167635 - RNA, 19 nt, Artificial Sequence
  Synthetic
uggauggguauaaaaaaaa

SEQ ID NO: 167636 - RNA, 20 nt, Artificial Sequence
  Synthetic
cuggauggguauaaaaaaaa

SEQ ID NO: 167637 - RNA, 21 nt, Artificial Sequence
  Synthetic
acuggauggguauaaaaaaaa

SEQ ID NO: 167638 - RNA, 22 nt, Artificial Sequence
  Synthetic
aacuggauggguauaaaaaaaa

SEQ ID NO: 167639 - RNA, 23 nt, Artificial Sequence
  Synthetic
gaacuggauggguauaaaaaaaa

SEQ ID NO: 167640 - RNA, 24 nt, Artificial Sequence
  Synthetic
agaacuggauggguauaaaaaaaa

SEQ ID NO: 167641 - RNA, 18 nt, Artificial Sequence
  Synthetic
cucauauauuaaaaaaaa

SEQ ID NO: 167642 - RNA, 19 nt, Artificial Sequence
  Synthetic
ucucauauauuaaaaaaaa

SEQ ID NO: 167643 - RNA, 20 nt, Artificial Sequence
  Synthetic
uucucauauauuaaaaaaaa

SEQ ID NO: 167644 - RNA, 21 nt, Artificial Sequence
  Synthetic
guucucauauauuaaaaaaaa

SEQ ID NO: 167645 - RNA, 22 nt, Artificial Sequence
  Synthetic
aguucucauauauuaaaaaaaa

SEQ ID NO: 167646 - RNA, 23 nt, Artificial Sequence
  Synthetic
uaguucucauauauuaaaaaaaa

SEQ ID NO: 167647 - RNA, 24 nt, Artificial Sequence
  Synthetic
auaguucucauauauuaaaaaaaa

SEQ ID NO: 167648 - RNA, 18 nt, Artificial Sequence
  Synthetic
ccauuuuuuuaaaaaaaa

SEQ ID NO: 167649 - RNA, 19 nt, Artificial Sequence
  Synthetic
accauuuuuuuaaaaaaaa

SEQ ID NO: 167650 - RNA, 20 nt, Artificial Sequence
  Synthetic
aaccauuuuuuuaaaaaaaa

SEQ ID NO: 167651 - RNA, 21 nt, Artificial Sequence
  Synthetic
caaccauuuuuuuaaaaaaaa

SEQ ID NO: 167652 - RNA, 22 nt, Artificial Sequence
  Synthetic
ucaaccauuuuuuuaaaaaaaa

SEQ ID NO: 167653 - RNA, 23 nt, Artificial Sequence
  Synthetic
uucaaccauuuuuuuaaaaaaaa

SEQ ID NO: 167654 - RNA, 24 nt, Artificial Sequence
  Synthetic
uuucaaccauuuuuuuaaaaaaaa

SEQ ID NO: 167655 - RNA, 18 nt, Artificial Sequence
  Synthetic
ucagcaaaugcaaaaaaa

SEQ ID NO: 167656 - RNA, 19 nt, Artificial Sequence
  Synthetic
cucagcaaaugcaaaaaaa

SEQ ID NO: 167657 - RNA, 20 nt, Artificial Sequence
  Synthetic
ccucagcaaaugcaaaaaaa

SEQ ID NO: 167658 - RNA, 21 nt, Artificial Sequence
  Synthetic
uccucagcaaaugcaaaaaaa

SEQ ID NO: 167659 - RNA, 22 nt, Artificial Sequence
  Synthetic
cuccucagcaaaugcaaaaaaa

SEQ ID NO: 167660 - RNA, 23 nt, Artificial Sequence
  Synthetic
acuccucagcaaaugcaaaaaaa

SEQ ID NO: 167661 - RNA, 24 nt, Artificial Sequence
  Synthetic
cacuccucagcaaaugcaaaaaaa

SEQ ID NO: 167662 - RNA, 18 nt, Artificial Sequence
  Synthetic
guuugugaugcaaaaaaa

SEQ ID NO: 167663 - RNA, 19 nt, Artificial Sequence
  Synthetic
cguuugugaugcaaaaaaa

SEQ ID NO: 167664 - RNA, 20 nt, Artificial Sequence
  Synthetic
gcguuugugaugcaaaaaaa

SEQ ID NO: 167665 - RNA, 21 nt, Artificial Sequence
  Synthetic
ggcguuugugaugcaaaaaaa

SEQ ID NO: 167666 - RNA, 22 nt, Artificial Sequence
  Synthetic
aggcguuugugaugcaaaaaaa

SEQ ID NO: 167667 - RNA, 23 nt, Artificial Sequence
  Synthetic
aaggcguuugugaugcaaaaaaa

SEQ ID NO: 167668 - RNA, 24 nt, Artificial Sequence
  Synthetic
caaggcguuugugaugcaaaaaaa

SEQ ID NO: 167669 - RNA, 18 nt, Artificial Sequence
  Synthetic
gacuccgucucaaaaaaa

SEQ ID NO: 167670 - RNA, 19 nt, Artificial Sequence
  Synthetic
agacuccgucucaaaaaaa

SEQ ID NO: 167671 - RNA, 20 nt, Artificial Sequence
  Synthetic
aagacuccgucucaaaaaaa

SEQ ID NO: 167672 - RNA, 21 nt, Artificial Sequence
  Synthetic
caagacuccgucucaaaaaaa

SEQ ID NO: 167673 - RNA, 22 nt, Artificial Sequence
  Synthetic
gcaagacuccgucucaaaaaaa

SEQ ID NO: 167674 - RNA, 23 nt, Artificial Sequence
  Synthetic
agcaagacuccgucucaaaaaaa

SEQ ID NO: 167675 - RNA, 24 nt, Artificial Sequence
  Synthetic
gagcaagacuccgucucaaaaaaa

SEQ ID NO: 167676 - RNA, 18 nt, Artificial Sequence
  Synthetic
auuuuaaaaagaaaaaaa

SEQ ID NO: 167677 - RNA, 19 nt, Artificial Sequence
  Synthetic
aauuuuaaaaagaaaaaaa

SEQ ID NO: 167678 - RNA, 20 nt, Artificial Sequence
  Synthetic
aaauuuuaaaaagaaaaaaa

SEQ ID NO: 167679 - RNA, 21 nt, Artificial Sequence
  Synthetic
uaaauuuuaaaaagaaaaaaa

SEQ ID NO: 167680 - RNA, 22 nt, Artificial Sequence
  Synthetic
guaaauuuuaaaaagaaaaaaa

SEQ ID NO: 167681 - RNA, 23 nt, Artificial Sequence
  Synthetic
aguaaauuuuaaaaagaaaaaaa

SEQ ID NO: 167682 - RNA, 24 nt, Artificial Sequence
  Synthetic
aaguaaauuuuaaaaagaaaaaaa

SEQ ID NO: 167683 - RNA, 18 nt, Artificial Sequence
  Synthetic
gccugcaguagaaaaaaa

SEQ ID NO: 167684 - RNA, 19 nt, Artificial Sequence
  Synthetic
ugccugcaguagaaaaaaa

SEQ ID NO: 167685 - RNA, 20 nt, Artificial Sequence
  Synthetic
uugccugcaguagaaaaaaa

SEQ ID NO: 167686 - RNA, 21 nt, Artificial Sequence
  Synthetic
cuugccugcaguagaaaaaaa

SEQ ID NO: 167687 - RNA, 22 nt, Artificial Sequence
  Synthetic
ccuugccugcaguagaaaaaaa

SEQ ID NO: 167688 - RNA, 23 nt, Artificial Sequence
  Synthetic
gccuugccugcaguagaaaaaaa

SEQ ID NO: 167689 - RNA, 24 nt, Artificial Sequence
  Synthetic
ugccuugccugcaguagaaaaaaa

SEQ ID NO: 167690 - RNA, 18 nt, Artificial Sequence
  Synthetic
auauucuuuagaaaaaaa

SEQ ID NO: 167691 - RNA, 19 nt, Artificial Sequence
  Synthetic
aauauucuuuagaaaaaaa

SEQ ID NO: 167692 - RNA, 20 nt, Artificial Sequence
  Synthetic
gaauauucuuuagaaaaaaa

SEQ ID NO: 167693 - RNA, 21 nt, Artificial Sequence
  Synthetic
agaauauucuuuagaaaaaaa

SEQ ID NO: 167694 - RNA, 22 nt, Artificial Sequence
  Synthetic
aagaauauucuuuagaaaaaaa

SEQ ID NO: 167695 - RNA, 23 nt, Artificial Sequence
  Synthetic
uaagaauauucuuuagaaaaaaa

SEQ ID NO: 167696 - RNA, 24 nt, Artificial Sequence
  Synthetic
auaagaauauucuuuagaaaaaaa

SEQ ID NO: 167697 - RNA, 18 nt, Artificial Sequence
  Synthetic
ccuagagugggaaaaaaa

SEQ ID NO: 167698 - RNA, 19 nt, Artificial Sequence
  Synthetic
cccuagagugggaaaaaaa

SEQ ID NO: 167699 - RNA, 20 nt, Artificial Sequence
  Synthetic
ucccuagagugggaaaaaaa

SEQ ID NO: 167700 - RNA, 21 nt, Artificial Sequence
  Synthetic
aucccuagagugggaaaaaaa

SEQ ID NO: 167701 - RNA, 22 nt, Artificial Sequence
  Synthetic
caucccuagagugggaaaaaaa

SEQ ID NO: 167702 - RNA, 23 nt, Artificial Sequence
  Synthetic
acaucccuagagugggaaaaaaa

SEQ ID NO: 167703 - RNA, 24 nt, Artificial Sequence
  Synthetic
gacaucccuagagugggaaaaaaa

SEQ ID NO: 167704 - RNA, 18 nt, Artificial Sequence
  Synthetic
ucauuagcuggaaaaaaa

SEQ ID NO: 167705 - RNA, 19 nt, Artificial Sequence
  Synthetic
uucauuagcuggaaaaaaa

SEQ ID NO: 167706 - RNA, 20 nt, Artificial Sequence
  Synthetic
uuucauuagcuggaaaaaaa

SEQ ID NO: 167707 - RNA, 21 nt, Artificial Sequence
  Synthetic
cuuucauuagcuggaaaaaaa

SEQ ID NO: 167708 - RNA, 22 nt, Artificial Sequence
  Synthetic
acuuucauuagcuggaaaaaaa

SEQ ID NO: 167709 - RNA, 23 nt, Artificial Sequence
  Synthetic
aacuuucauuagcuggaaaaaaa

SEQ ID NO: 167710 - RNA, 24 nt, Artificial Sequence
  Synthetic
uaacuuucauuagcuggaaaaaaa

SEQ ID NO: 167711 - RNA, 18 nt, Artificial Sequence
  Synthetic
uauuuaaaaugaaaaaaa

SEQ ID NO: 167712 - RNA, 19 nt, Artificial Sequence
  Synthetic
cuauuuaaaaugaaaaaaa

SEQ ID NO: 167713 - RNA, 20 nt, Artificial Sequence
  Synthetic
gcuauuuaaaaugaaaaaaa

SEQ ID NO: 167714 - RNA, 21 nt, Artificial Sequence
  Synthetic
ugcuauuuaaaaugaaaaaaa

SEQ ID NO: 167715 - RNA, 22 nt, Artificial Sequence
  Synthetic
cugcuauuuaaaaugaaaaaaa

SEQ ID NO: 167716 - RNA, 23 nt, Artificial Sequence
  Synthetic
ccugcuauuuaaaaugaaaaaaa

SEQ ID NO: 167717 - RNA, 24 nt, Artificial Sequence
  Synthetic
uccugcuauuuaaaaugaaaaaaa

SEQ ID NO: 167718 - RNA, 18 nt, Artificial Sequence
  Synthetic
agaaaggaaugaaaaaaa

SEQ ID NO: 167719 - RNA, 19 nt, Artificial Sequence
  Synthetic
gagaaaggaaugaaaaaaa

SEQ ID NO: 167720 - RNA, 20 nt, Artificial Sequence
  Synthetic
agagaaaggaaugaaaaaaa

SEQ ID NO: 167721 - RNA, 21 nt, Artificial Sequence
  Synthetic
uagagaaaggaaugaaaaaaa

SEQ ID NO: 167722 - RNA, 22 nt, Artificial Sequence
  Synthetic
auagagaaaggaaugaaaaaaa

SEQ ID NO: 167723 - RNA, 23 nt, Artificial Sequence
  Synthetic
cauagagaaaggaaugaaaaaaa

SEQ ID NO: 167724 - RNA, 24 nt, Artificial Sequence
  Synthetic
acauagagaaaggaaugaaaaaaa

SEQ ID NO: 167725 - RNA, 18 nt, Artificial Sequence
  Synthetic
uuggaggaaugaaaaaaa

SEQ ID NO: 167726 - RNA, 19 nt, Artificial Sequence
  Synthetic
auuggaggaaugaaaaaaa

SEQ ID NO: 167727 - RNA, 20 nt, Artificial Sequence
  Synthetic
gauuggaggaaugaaaaaaa

SEQ ID NO: 167728 - RNA, 21 nt, Artificial Sequence
  Synthetic
ggauuggaggaaugaaaaaaa

SEQ ID NO: 167729 - RNA, 22 nt, Artificial Sequence
  Synthetic
uggauuggaggaaugaaaaaaa

SEQ ID NO: 167730 - RNA, 23 nt, Artificial Sequence
  Synthetic
uuggauuggaggaaugaaaaaaa

SEQ ID NO: 167731 - RNA, 24 nt, Artificial Sequence
  Synthetic
uuuggauuggaggaaugaaaaaaa

SEQ ID NO: 167732 - RNA, 18 nt, Artificial Sequence
  Synthetic
auguuguccugaaaaaaa

SEQ ID NO: 167733 - RNA, 19 nt, Artificial Sequence
  Synthetic
gauguuguccugaaaaaaa

SEQ ID NO: 167734 - RNA, 20 nt, Artificial Sequence
  Synthetic
agauguuguccugaaaaaaa

SEQ ID NO: 167735 - RNA, 21 nt, Artificial Sequence
  Synthetic
gagauguuguccugaaaaaaa

SEQ ID NO: 167736 - RNA, 22 nt, Artificial Sequence
  Synthetic
agagauguuguccugaaaaaaa

SEQ ID NO: 167737 - RNA, 23 nt, Artificial Sequence
  Synthetic
cagagauguuguccugaaaaaaa

SEQ ID NO: 167738 - RNA, 24 nt, Artificial Sequence
  Synthetic
acagagauguuguccugaaaaaaa

SEQ ID NO: 167739 - RNA, 18 nt, Artificial Sequence
  Synthetic
uauauucagugaaaaaaa

SEQ ID NO: 167740 - RNA, 19 nt, Artificial Sequence
  Synthetic
uuauauucagugaaaaaaa

SEQ ID NO: 167741 - RNA, 20 nt, Artificial Sequence
  Synthetic
auuauauucagugaaaaaaa

SEQ ID NO: 167742 - RNA, 21 nt, Artificial Sequence
  Synthetic
aauuauauucagugaaaaaaa

SEQ ID NO: 167743 - RNA, 22 nt, Artificial Sequence
  Synthetic
gaauuauauucagugaaaaaaa

SEQ ID NO: 167744 - RNA, 23 nt, Artificial Sequence
  Synthetic
ugaauuauauucagugaaaaaaa

SEQ ID NO: 167745 - RNA, 24 nt, Artificial Sequence
  Synthetic
gugaauuauauucagugaaaaaaa

SEQ ID NO: 167746 - RNA, 18 nt, Artificial Sequence
  Synthetic
guuucaaguugaaaaaaa

SEQ ID NO: 167747 - RNA, 19 nt, Artificial Sequence
  Synthetic
aguuucaaguugaaaaaaa

SEQ ID NO: 167748 - RNA, 20 nt, Artificial Sequence
  Synthetic
aaguuucaaguugaaaaaaa

SEQ ID NO: 167749 - RNA, 21 nt, Artificial Sequence
  Synthetic
uaaguuucaaguugaaaaaaa

SEQ ID NO: 167750 - RNA, 22 nt, Artificial Sequence
  Synthetic
auaaguuucaaguugaaaaaaa

SEQ ID NO: 167751 - RNA, 23 nt, Artificial Sequence
  Synthetic
aauaaguuucaaguugaaaaaaa

SEQ ID NO: 167752 - RNA, 24 nt, Artificial Sequence
  Synthetic
aaauaaguuucaaguugaaaaaaa

SEQ ID NO: 167753 - RNA, 18 nt, Artificial Sequence
  Synthetic
auaaaaacaauaaaaaaa

SEQ ID NO: 167754 - RNA, 19 nt, Artificial Sequence
  Synthetic
aauaaaaacaauaaaaaaa

SEQ ID NO: 167755 - RNA, 20 nt, Artificial Sequence
  Synthetic
aaauaaaaacaauaaaaaaa

SEQ ID NO: 167756 - RNA, 21 nt, Artificial Sequence
  Synthetic
aaaauaaaaacaauaaaaaaa

SEQ ID NO: 167757 - RNA, 22 nt, Artificial Sequence
  Synthetic
aaaaauaaaaacaauaaaaaaa

SEQ ID NO: 167758 - RNA, 23 nt, Artificial Sequence
  Synthetic
aaaaaauaaaaacaauaaaaaaa

SEQ ID NO: 167759 - RNA, 24 nt, Artificial Sequence
  Synthetic
caaaaaauaaaaacaauaaaaaaa

SEQ ID NO: 167760 - RNA, 18 nt, Artificial Sequence
  Synthetic
aaauuaaagauaaaaaaa

SEQ ID NO: 167761 - RNA, 19 nt, Artificial Sequence
  Synthetic
gaaauuaaagauaaaaaaa

SEQ ID NO: 167762 - RNA, 20 nt, Artificial Sequence
  Synthetic
agaaauuaaagauaaaaaaa

SEQ ID NO: 167763 - RNA, 21 nt, Artificial Sequence
  Synthetic
aagaaauuaaagauaaaaaaa

SEQ ID NO: 167764 - RNA, 22 nt, Artificial Sequence
  Synthetic
aaagaaauuaaagauaaaaaaa

SEQ ID NO: 167765 - RNA, 23 nt, Artificial Sequence
  Synthetic
gaaagaaauuaaagauaaaaaaa

SEQ ID NO: 167766 - RNA, 24 nt, Artificial Sequence
  Synthetic
ugaaagaaauuaaagauaaaaaaa

SEQ ID NO: 167767 - RNA, 18 nt, Artificial Sequence
  Synthetic
aagaaaaugguaaaaaaa

SEQ ID NO: 167768 - RNA, 19 nt, Artificial Sequence
  Synthetic
aaagaaaaugguaaaaaaa

SEQ ID NO: 167769 - RNA, 20 nt, Artificial Sequence
  Synthetic
caaagaaaaugguaaaaaaa

SEQ ID NO: 167770 - RNA, 21 nt, Artificial Sequence
  Synthetic
gcaaagaaaaugguaaaaaaa

SEQ ID NO: 167771 - RNA, 22 nt, Artificial Sequence
  Synthetic
ugcaaagaaaaugguaaaaaaa

SEQ ID NO: 167772 - RNA, 23 nt, Artificial Sequence
  Synthetic
gugcaaagaaaaugguaaaaaaa

SEQ ID NO: 167773 - RNA, 24 nt, Artificial Sequence
  Synthetic
ugugcaaagaaaaugguaaaaaaa

SEQ ID NO: 167774 - RNA, 18 nt, Artificial Sequence
  Synthetic
ucucauauauuaaaaaaa

SEQ ID NO: 167775 - RNA, 19 nt, Artificial Sequence
  Synthetic
uucucauauauuaaaaaaa

SEQ ID NO: 167776 - RNA, 20 nt, Artificial Sequence
  Synthetic
guucucauauauuaaaaaaa

SEQ ID NO: 167777 - RNA, 21 nt, Artificial Sequence
  Synthetic
aguucucauauauuaaaaaaa

SEQ ID NO: 167778 - RNA, 22 nt, Artificial Sequence
  Synthetic
uaguucucauauauuaaaaaaa

SEQ ID NO: 167779 - RNA, 23 nt, Artificial Sequence
  Synthetic
auaguucucauauauuaaaaaaa

SEQ ID NO: 167780 - RNA, 24 nt, Artificial Sequence
  Synthetic
cauaguucucauauauuaaaaaaa

SEQ ID NO: 167781 - RNA, 18 nt, Artificial Sequence
  Synthetic
uguacaaacuuaaaaaaa

SEQ ID NO: 167782 - RNA, 19 nt, Artificial Sequence
  Synthetic
guguacaaacuuaaaaaaa

SEQ ID NO: 167783 - RNA, 20 nt, Artificial Sequence
  Synthetic
uguguacaaacuuaaaaaaa

SEQ ID NO: 167784 - RNA, 21 nt, Artificial Sequence
  Synthetic
cuguguacaaacuuaaaaaaa

SEQ ID NO: 167785 - RNA, 22 nt, Artificial Sequence
  Synthetic
ucuguguacaaacuuaaaaaaa

SEQ ID NO: 167786 - RNA, 23 nt, Artificial Sequence
  Synthetic
gucuguguacaaacuuaaaaaaa

SEQ ID NO: 167787 - RNA, 24 nt, Artificial Sequence
  Synthetic
ugucuguguacaaacuuaaaaaaa

SEQ ID NO: 167788 - RNA, 18 nt, Artificial Sequence
  Synthetic
cuucuagucuuaaaaaaa

SEQ ID NO: 167789 - RNA, 19 nt, Artificial Sequence
  Synthetic
ccuucuagucuuaaaaaaa

SEQ ID NO: 167790 - RNA, 20 nt, Artificial Sequence
  Synthetic
cccuucuagucuuaaaaaaa

SEQ ID NO: 167791 - RNA, 21 nt, Artificial Sequence
  Synthetic
ucccuucuagucuuaaaaaaa

SEQ ID NO: 167792 - RNA, 22 nt, Artificial Sequence
  Synthetic
aucccuucuagucuuaaaaaaa

SEQ ID NO: 167793 - RNA, 23 nt, Artificial Sequence
  Synthetic
gaucccuucuagucuuaaaaaaa

SEQ ID NO: 167794 - RNA, 24 nt, Artificial Sequence
  Synthetic
ugaucccuucuagucuuaaaaaaa

SEQ ID NO: 167795 - RNA, 18 nt, Artificial Sequence
  Synthetic
accauuuuuuuaaaaaaa

SEQ ID NO: 167796 - RNA, 19 nt, Artificial Sequence
  Synthetic
aaccauuuuuuuaaaaaaa

SEQ ID NO: 167797 - RNA, 20 nt, Artificial Sequence
  Synthetic
caaccauuuuuuuaaaaaaa

SEQ ID NO: 167798 - RNA, 21 nt, Artificial Sequence
  Synthetic
ucaaccauuuuuuuaaaaaaa

SEQ ID NO: 167799 - RNA, 22 nt, Artificial Sequence
  Synthetic
uucaaccauuuuuuuaaaaaaa

SEQ ID NO: 167800 - RNA, 23 nt, Artificial Sequence
  Synthetic
uuucaaccauuuuuuuaaaaaaa

SEQ ID NO: 167801 - RNA, 24 nt, Artificial Sequence
  Synthetic
cuuucaaccauuuuuuuaaaaaaa

SEQ ID NO: 167802 - RNA, 18 nt, Artificial Sequence
  Synthetic
aacagcaacaacaaaaaa

SEQ ID NO: 167803 - RNA, 19 nt, Artificial Sequence
  Synthetic
gaacagcaacaacaaaaaa

SEQ ID NO: 167804 - RNA, 20 nt, Artificial Sequence
  Synthetic
ggaacagcaacaacaaaaaa

SEQ ID NO: 167805 - RNA, 21 nt, Artificial Sequence
  Synthetic
aggaacagcaacaacaaaaaa

SEQ ID NO: 167806 - RNA, 22 nt, Artificial Sequence
  Synthetic
aaggaacagcaacaacaaaaaa

SEQ ID NO: 167807 - RNA, 23 nt, Artificial Sequence
  Synthetic
gaaggaacagcaacaacaaaaaa

SEQ ID NO: 167808 - RNA, 24 nt, Artificial Sequence
  Synthetic
cgaaggaacagcaacaacaaaaaa

SEQ ID NO: 167809 - RNA, 18 nt, Artificial Sequence
  Synthetic
gaaccaagccacaaaaaa

SEQ ID NO: 167810 - RNA, 19 nt, Artificial Sequence
  Synthetic
ugaaccaagccacaaaaaa

SEQ ID NO: 167811 - RNA, 20 nt, Artificial Sequence
  Synthetic
uugaaccaagccacaaaaaa

SEQ ID NO: 167812 - RNA, 21 nt, Artificial Sequence
  Synthetic
auugaaccaagccacaaaaaa

SEQ ID NO: 167813 - RNA, 22 nt, Artificial Sequence
  Synthetic
aauugaaccaagccacaaaaaa

SEQ ID NO: 167814 - RNA, 23 nt, Artificial Sequence
  Synthetic
aaauugaaccaagccacaaaaaa

SEQ ID NO: 167815 - RNA, 24 nt, Artificial Sequence
  Synthetic
caaauugaaccaagccacaaaaaa

SEQ ID NO: 167816 - RNA, 18 nt, Artificial Sequence
  Synthetic
cuucaucucuacaaaaaa

SEQ ID NO: 167817 - RNA, 19 nt, Artificial Sequence
  Synthetic
acuucaucucuacaaaaaa

SEQ ID NO: 167818 - RNA, 20 nt, Artificial Sequence
  Synthetic
gacuucaucucuacaaaaaa

SEQ ID NO: 167819 - RNA, 21 nt, Artificial Sequence
  Synthetic
agacuucaucucuacaaaaaa

SEQ ID NO: 167820 - RNA, 22 nt, Artificial Sequence
  Synthetic
gagacuucaucucuacaaaaaa

SEQ ID NO: 167821 - RNA, 23 nt, Artificial Sequence
  Synthetic
ugagacuucaucucuacaaaaaa

SEQ ID NO: 167822 - RNA, 24 nt, Artificial Sequence
  Synthetic
gugagacuucaucucuacaaaaaa

SEQ ID NO: 167823 - RNA, 18 nt, Artificial Sequence
  Synthetic
cuauaucucaccaaaaaa

SEQ ID NO: 167824 - RNA, 19 nt, Artificial Sequence
  Synthetic
ccuauaucucaccaaaaaa

SEQ ID NO: 167825 - RNA, 20 nt, Artificial Sequence
  Synthetic
accuauaucucaccaaaaaa

SEQ ID NO: 167826 - RNA, 21 nt, Artificial Sequence
  Synthetic
gaccuauaucucaccaaaaaa

SEQ ID NO: 167827 - RNA, 22 nt, Artificial Sequence
  Synthetic
ugaccuauaucucaccaaaaaa

SEQ ID NO: 167828 - RNA, 23 nt, Artificial Sequence
  Synthetic
cugaccuauaucucaccaaaaaa

SEQ ID NO: 167829 - RNA, 24 nt, Artificial Sequence
  Synthetic
ucugaccuauaucucaccaaaaaa

SEQ ID NO: 167830 - RNA, 18 nt, Artificial Sequence
  Synthetic
gauagaauccccaaaaaa

SEQ ID NO: 167831 - RNA, 19 nt, Artificial Sequence
  Synthetic
ggauagaauccccaaaaaa

SEQ ID NO: 167832 - RNA, 20 nt, Artificial Sequence
  Synthetic
gggauagaauccccaaaaaa

SEQ ID NO: 167833 - RNA, 21 nt, Artificial Sequence
  Synthetic
agggauagaauccccaaaaaa

SEQ ID NO: 167834 - RNA, 22 nt, Artificial Sequence
  Synthetic
gagggauagaauccccaaaaaa

SEQ ID NO: 167835 - RNA, 23 nt, Artificial Sequence
  Synthetic
ugagggauagaauccccaaaaaa

SEQ ID NO: 167836 - RNA, 24 nt, Artificial Sequence
  Synthetic
augagggauagaauccccaaaaaa

SEQ ID NO: 167837 - RNA, 18 nt, Artificial Sequence
  Synthetic
aacaacucuuccaaaaaa

SEQ ID NO: 167838 - RNA, 19 nt, Artificial Sequence
  Synthetic
aaacaacucuuccaaaaaa

SEQ ID NO: 167839 - RNA, 20 nt, Artificial Sequence
  Synthetic
uaaacaacucuuccaaaaaa

SEQ ID NO: 167840 - RNA, 21 nt, Artificial Sequence
  Synthetic
auaaacaacucuuccaaaaaa

SEQ ID NO: 167841 - RNA, 22 nt, Artificial Sequence
  Synthetic
uauaaacaacucuuccaaaaaa

SEQ ID NO: 167842 - RNA, 23 nt, Artificial Sequence
  Synthetic
auauaaacaacucuuccaaaaaa

SEQ ID NO: 167843 - RNA, 24 nt, Artificial Sequence
  Synthetic
cauauaaacaacucuuccaaaaaa

SEQ ID NO: 167844 - RNA, 18 nt, Artificial Sequence
  Synthetic
accagccucagcaaaaaa

SEQ ID NO: 167845 - RNA, 19 nt, Artificial Sequence
  Synthetic
gaccagccucagcaaaaaa

SEQ ID NO: 167846 - RNA, 20 nt, Artificial Sequence
  Synthetic
agaccagccucagcaaaaaa

SEQ ID NO: 167847 - RNA, 21 nt, Artificial Sequence
  Synthetic
aagaccagccucagcaaaaaa

SEQ ID NO: 167848 - RNA, 22 nt, Artificial Sequence
  Synthetic
caagaccagccucagcaaaaaa

SEQ ID NO: 167849 - RNA, 23 nt, Artificial Sequence
  Synthetic
ucaagaccagccucagcaaaaaa

SEQ ID NO: 167850 - RNA, 24 nt, Artificial Sequence
  Synthetic
uucaagaccagccucagcaaaaaa

SEQ ID NO: 167851 - RNA, 18 nt, Artificial Sequence
  Synthetic
ugguagcuccucaaaaaa

SEQ ID NO: 167852 - RNA, 19 nt, Artificial Sequence
  Synthetic
augguagcuccucaaaaaa

SEQ ID NO: 167853 - RNA, 20 nt, Artificial Sequence
  Synthetic
uaugguagcuccucaaaaaa

SEQ ID NO: 167854 - RNA, 21 nt, Artificial Sequence
  Synthetic
guaugguagcuccucaaaaaa

SEQ ID NO: 167855 - RNA, 22 nt, Artificial Sequence
  Synthetic
aguaugguagcuccucaaaaaa

SEQ ID NO: 167856 - RNA, 23 nt, Artificial Sequence
  Synthetic
caguaugguagcuccucaaaaaa

SEQ ID NO: 167857 - RNA, 24 nt, Artificial Sequence
  Synthetic
acaguaugguagcuccucaaaaaa

SEQ ID NO: 167858 - RNA, 18 nt, Artificial Sequence
  Synthetic
ucucuggaguucaaaaaa

SEQ ID NO: 167859 - RNA, 19 nt, Artificial Sequence
  Synthetic
cucucuggaguucaaaaaa

SEQ ID NO: 167860 - RNA, 20 nt, Artificial Sequence
  Synthetic
ucucucuggaguucaaaaaa

SEQ ID NO: 167861 - RNA, 21 nt, Artificial Sequence
  Synthetic
cucucucuggaguucaaaaaa

SEQ ID NO: 167862 - RNA, 22 nt, Artificial Sequence
  Synthetic
ucucucucuggaguucaaaaaa

SEQ ID NO: 167863 - RNA, 23 nt, Artificial Sequence
  Synthetic
aucucucucuggaguucaaaaaa

SEQ ID NO: 167864 - RNA, 24 nt, Artificial Sequence
  Synthetic
aaucucucucuggaguucaaaaaa

SEQ ID NO: 167865 - RNA, 18 nt, Artificial Sequence
  Synthetic
cauaaggaaaagaaaaaa

SEQ ID NO: 167866 - RNA, 19 nt, Artificial Sequence
  Synthetic
ccauaaggaaaagaaaaaa

SEQ ID NO: 167867 - RNA, 20 nt, Artificial Sequence
  Synthetic
uccauaaggaaaagaaaaaa

SEQ ID NO: 167868 - RNA, 21 nt, Artificial Sequence
  Synthetic
guccauaaggaaaagaaaaaa

SEQ ID NO: 167869 - RNA, 22 nt, Artificial Sequence
  Synthetic
gguccauaaggaaaagaaaaaa

SEQ ID NO: 167870 - RNA, 23 nt, Artificial Sequence
  Synthetic
ugguccauaaggaaaagaaaaaa

SEQ ID NO: 167871 - RNA, 24 nt, Artificial Sequence
  Synthetic
augguccauaaggaaaagaaaaaa

SEQ ID NO: 167872 - RNA, 18 nt, Artificial Sequence
  Synthetic
aaggaaggaaagaaaaaa

SEQ ID NO: 167873 - RNA, 19 nt, Artificial Sequence
  Synthetic
gaaggaaggaaagaaaaaa

SEQ ID NO: 167874 - RNA, 20 nt, Artificial Sequence
  Synthetic
ggaaggaaggaaagaaaaaa

SEQ ID NO: 167875 - RNA, 21 nt, Artificial Sequence
  Synthetic
aggaaggaaggaaagaaaaaa

SEQ ID NO: 167876 - RNA, 22 nt, Artificial Sequence
  Synthetic
aaggaaggaaggaaagaaaaaa

SEQ ID NO: 167877 - RNA, 23 nt, Artificial Sequence
  Synthetic
gaaggaaggaaggaaagaaaaaa

SEQ ID NO: 167878 - RNA, 24 nt, Artificial Sequence
  Synthetic
ggaaggaaggaaggaaagaaaaaa

SEQ ID NO: 167879 - RNA, 18 nt, Artificial Sequence
  Synthetic
cauacaaugaagaaaaaa

SEQ ID NO: 167880 - RNA, 19 nt, Artificial Sequence
  Synthetic
ucauacaaugaagaaaaaa

SEQ ID NO: 167881 - RNA, 20 nt, Artificial Sequence
  Synthetic
cucauacaaugaagaaaaaa

SEQ ID NO: 167882 - RNA, 21 nt, Artificial Sequence
  Synthetic
acucauacaaugaagaaaaaa

SEQ ID NO: 167883 - RNA, 22 nt, Artificial Sequence
  Synthetic
aacucauacaaugaagaaaaaa

SEQ ID NO: 167884 - RNA, 23 nt, Artificial Sequence
  Synthetic
uaacucauacaaugaagaaaaaa

SEQ ID NO: 167885 - RNA, 24 nt, Artificial Sequence
  Synthetic
auaacucauacaaugaagaaaaaa

SEQ ID NO: 167886 - RNA, 18 nt, Artificial Sequence
  Synthetic
gguuauuauaagaaaaaa

SEQ ID NO: 167887 - RNA, 19 nt, Artificial Sequence
  Synthetic
ugguuauuauaagaaaaaa

SEQ ID NO: 167888 - RNA, 20 nt, Artificial Sequence
  Synthetic
gugguuauuauaagaaaaaa

SEQ ID NO: 167889 - RNA, 21 nt, Artificial Sequence
  Synthetic
ugugguuauuauaagaaaaaa

SEQ ID NO: 167890 - RNA, 22 nt, Artificial Sequence
  Synthetic
gugugguuauuauaagaaaaaa

SEQ ID NO: 167891 - RNA, 23 nt, Artificial Sequence
  Synthetic
agugugguuauuauaagaaaaaa

SEQ ID NO: 167892 - RNA, 24 nt, Artificial Sequence
  Synthetic
uagugugguuauuauaagaaaaaa

SEQ ID NO: 167893 - RNA, 18 nt, Artificial Sequence
  Synthetic
accaaaagagagaaaaaa

SEQ ID NO: 167894 - RNA, 19 nt, Artificial Sequence
  Synthetic
gaccaaaagagagaaaaaa

SEQ ID NO: 167895 - RNA, 20 nt, Artificial Sequence
  Synthetic
agaccaaaagagagaaaaaa

SEQ ID NO: 167896 - RNA, 21 nt, Artificial Sequence
  Synthetic
aagaccaaaagagagaaaaaa

SEQ ID NO: 167897 - RNA, 22 nt, Artificial Sequence
  Synthetic
gaagaccaaaagagagaaaaaa

SEQ ID NO: 167898 - RNA, 23 nt, Artificial Sequence
  Synthetic
ggaagaccaaaagagagaaaaaa

SEQ ID NO: 167899 - RNA, 24 nt, Artificial Sequence
  Synthetic
uggaagaccaaaagagagaaaaaa

SEQ ID NO: 167900 - RNA, 18 nt, Artificial Sequence
  Synthetic
gauggaaacuagaaaaaa

SEQ ID NO: 167901 - RNA, 19 nt, Artificial Sequence
  Synthetic
agauggaaacuagaaaaaa

SEQ ID NO: 167902 - RNA, 20 nt, Artificial Sequence
  Synthetic
cagauggaaacuagaaaaaa

SEQ ID NO: 167903 - RNA, 21 nt, Artificial Sequence
  Synthetic
ucagauggaaacuagaaaaaa

SEQ ID NO: 167904 - RNA, 22 nt, Artificial Sequence
  Synthetic
cucagauggaaacuagaaaaaa

SEQ ID NO: 167905 - RNA, 23 nt, Artificial Sequence
  Synthetic
ucucagauggaaacuagaaaaaa

SEQ ID NO: 167906 - RNA, 24 nt, Artificial Sequence
  Synthetic
aucucagauggaaacuagaaaaaa

SEQ ID NO: 167907 - RNA, 18 nt, Artificial Sequence
  Synthetic
aauauucuuuagaaaaaa

SEQ ID NO: 167908 - RNA, 19 nt, Artificial Sequence
  Synthetic
gaauauucuuuagaaaaaa

SEQ ID NO: 167909 - RNA, 20 nt, Artificial Sequence
  Synthetic
agaauauucuuuagaaaaaa

SEQ ID NO: 167910 - RNA, 21 nt, Artificial Sequence
  Synthetic
aagaauauucuuuagaaaaaa

SEQ ID NO: 167911 - RNA, 22 nt, Artificial Sequence
  Synthetic
uaagaauauucuuuagaaaaaa

SEQ ID NO: 167912 - RNA, 23 nt, Artificial Sequence
  Synthetic
auaagaauauucuuuagaaaaaa

SEQ ID NO: 167913 - RNA, 24 nt, Artificial Sequence
  Synthetic
aauaagaauauucuuuagaaaaaa

SEQ ID NO: 167914 - RNA, 18 nt, Artificial Sequence
  Synthetic
guucacagggcgaaaaaa

SEQ ID NO: 167915 - RNA, 19 nt, Artificial Sequence
  Synthetic
uguucacagggcgaaaaaa

SEQ ID NO: 167916 - RNA, 20 nt, Artificial Sequence
  Synthetic
uuguucacagggcgaaaaaa

SEQ ID NO: 167917 - RNA, 21 nt, Artificial Sequence
  Synthetic
auuguucacagggcgaaaaaa

SEQ ID NO: 167918 - RNA, 22 nt, Artificial Sequence
  Synthetic
aauuguucacagggcgaaaaaa

SEQ ID NO: 167919 - RNA, 23 nt, Artificial Sequence
  Synthetic
aaauuguucacagggcgaaaaaa

SEQ ID NO: 167920 - RNA, 24 nt, Artificial Sequence
  Synthetic
uaaauuguucacagggcgaaaaaa

SEQ ID NO: 167921 - RNA, 18 nt, Artificial Sequence
  Synthetic
cuuuaggagaggaaaaaa

SEQ ID NO: 167922 - RNA, 19 nt, Artificial Sequence
  Synthetic
gcuuuaggagaggaaaaaa

SEQ ID NO: 167923 - RNA, 20 nt, Artificial Sequence
  Synthetic
agcuuuaggagaggaaaaaa

SEQ ID NO: 167924 - RNA, 21 nt, Artificial Sequence
  Synthetic
gagcuuuaggagaggaaaaaa

SEQ ID NO: 167925 - RNA, 22 nt, Artificial Sequence
  Synthetic
ugagcuuuaggagaggaaaaaa

SEQ ID NO: 167926 - RNA, 23 nt, Artificial Sequence
  Synthetic
uugagcuuuaggagaggaaaaaa

SEQ ID NO: 167927 - RNA, 24 nt, Artificial Sequence
  Synthetic
cuugagcuuuaggagaggaaaaaa

SEQ ID NO: 167928 - RNA, 18 nt, Artificial Sequence
  Synthetic
gaggcaggagggaaaaaa

SEQ ID NO: 167929 - RNA, 19 nt, Artificial Sequence
  Synthetic
ugaggcaggagggaaaaaa

SEQ ID NO: 167930 - RNA, 20 nt, Artificial Sequence
  Synthetic
gugaggcaggagggaaaaaa

SEQ ID NO: 167931 - RNA, 21 nt, Artificial Sequence
  Synthetic
ugugaggcaggagggaaaaaa

SEQ ID NO: 167932 - RNA, 22 nt, Artificial Sequence
  Synthetic
gugugaggcaggagggaaaaaa

SEQ ID NO: 167933 - RNA, 23 nt, Artificial Sequence
  Synthetic
ugugugaggcaggagggaaaaaa

SEQ ID NO: 167934 - RNA, 24 nt, Artificial Sequence
  Synthetic
cugugugaggcaggagggaaaaaa

SEQ ID NO: 167935 - RNA, 18 nt, Artificial Sequence
  Synthetic
aucuaucuauggaaaaaa

SEQ ID NO: 167936 - RNA, 19 nt, Artificial Sequence
  Synthetic
aaucuaucuauggaaaaaa

SEQ ID NO: 167937 - RNA, 20 nt, Artificial Sequence
  Synthetic
uaaucuaucuauggaaaaaa

SEQ ID NO: 167938 - RNA, 21 nt, Artificial Sequence
  Synthetic
cuaaucuaucuauggaaaaaa

SEQ ID NO: 167939 - RNA, 22 nt, Artificial Sequence
  Synthetic
acuaaucuaucuauggaaaaaa

SEQ ID NO: 167940 - RNA, 23 nt, Artificial Sequence
  Synthetic
aacuaaucuaucuauggaaaaaa

SEQ ID NO: 167941 - RNA, 24 nt, Artificial Sequence
  Synthetic
gaacuaaucuaucuauggaaaaaa

SEQ ID NO: 167942 - RNA, 18 nt, Artificial Sequence
  Synthetic
aauacagcaaugaaaaaa

SEQ ID NO: 167943 - RNA, 19 nt, Artificial Sequence
  Synthetic
aaauacagcaaugaaaaaa

SEQ ID NO: 167944 - RNA, 20 nt, Artificial Sequence
  Synthetic
aaaauacagcaaugaaaaaa

SEQ ID NO: 167945 - RNA, 21 nt, Artificial Sequence
  Synthetic
caaaauacagcaaugaaaaaa

SEQ ID NO: 167946 - RNA, 22 nt, Artificial Sequence
  Synthetic
ccaaaauacagcaaugaaaaaa

SEQ ID NO: 167947 - RNA, 23 nt, Artificial Sequence
  Synthetic
cccaaaauacagcaaugaaaaaa

SEQ ID NO: 167948 - RNA, 24 nt, Artificial Sequence
  Synthetic
ucccaaaauacagcaaugaaaaaa

SEQ ID NO: 167949 - RNA, 18 nt, Artificial Sequence
  Synthetic
aaauuaauacugaaaaaa

SEQ ID NO: 167950 - RNA, 19 nt, Artificial Sequence
  Synthetic
gaaauuaauacugaaaaaa

SEQ ID NO: 167951 - RNA, 20 nt, Artificial Sequence
  Synthetic
agaaauuaauacugaaaaaa

SEQ ID NO: 167952 - RNA, 21 nt, Artificial Sequence
  Synthetic
aagaaauuaauacugaaaaaa

SEQ ID NO: 167953 - RNA, 22 nt, Artificial Sequence
  Synthetic
caagaaauuaauacugaaaaaa

SEQ ID NO: 167954 - RNA, 23 nt, Artificial Sequence
  Synthetic
acaagaaauuaauacugaaaaaa

SEQ ID NO: 167955 - RNA, 24 nt, Artificial Sequence
  Synthetic
aacaagaaauuaauacugaaaaaa

SEQ ID NO: 167956 - RNA, 18 nt, Artificial Sequence
  Synthetic
uuauauucagugaaaaaa

SEQ ID NO: 167957 - RNA, 19 nt, Artificial Sequence
  Synthetic
auuauauucagugaaaaaa

SEQ ID NO: 167958 - RNA, 20 nt, Artificial Sequence
  Synthetic
aauuauauucagugaaaaaa

SEQ ID NO: 167959 - RNA, 21 nt, Artificial Sequence
  Synthetic
gaauuauauucagugaaaaaa

SEQ ID NO: 167960 - RNA, 22 nt, Artificial Sequence
  Synthetic
ugaauuauauucagugaaaaaa

SEQ ID NO: 167961 - RNA, 23 nt, Artificial Sequence
  Synthetic
gugaauuauauucagugaaaaaa

SEQ ID NO: 167962 - RNA, 24 nt, Artificial Sequence
  Synthetic
agugaauuauauucagugaaaaaa

SEQ ID NO: 167963 - RNA, 18 nt, Artificial Sequence
  Synthetic
auaagugcugugaaaaaa

SEQ ID NO: 167964 - RNA, 19 nt, Artificial Sequence
  Synthetic
gauaagugcugugaaaaaa

SEQ ID NO: 167965 - RNA, 20 nt, Artificial Sequence
  Synthetic
ugauaagugcugugaaaaaa

SEQ ID NO: 167966 - RNA, 21 nt, Artificial Sequence
  Synthetic
gugauaagugcugugaaaaaa

SEQ ID NO: 167967 - RNA, 22 nt, Artificial Sequence
  Synthetic
agugauaagugcugugaaaaaa

SEQ ID NO: 167968 - RNA, 23 nt, Artificial Sequence
  Synthetic
aagugauaagugcugugaaaaaa

SEQ ID NO: 167969 - RNA, 24 nt, Artificial Sequence
  Synthetic
aaagugauaagugcugugaaaaaa

SEQ ID NO: 167970 - RNA, 18 nt, Artificial Sequence
  Synthetic
aaaaauuaaaauaaaaaa

SEQ ID NO: 167971 - RNA, 19 nt, Artificial Sequence
  Synthetic
caaaaauuaaaauaaaaaa

SEQ ID NO: 167972 - RNA, 20 nt, Artificial Sequence
  Synthetic
acaaaaauuaaaauaaaaaa

SEQ ID NO: 167973 - RNA, 21 nt, Artificial Sequence
  Synthetic
cacaaaaauuaaaauaaaaaa

SEQ ID NO: 167974 - RNA, 22 nt, Artificial Sequence
  Synthetic
ccacaaaaauuaaaauaaaaaa

SEQ ID NO: 167975 - RNA, 23 nt, Artificial Sequence
  Synthetic
cccacaaaaauuaaaauaaaaaa

SEQ ID NO: 167976 - RNA, 24 nt, Artificial Sequence
  Synthetic
acccacaaaaauuaaaauaaaaaa

SEQ ID NO: 167977 - RNA, 18 nt, Artificial Sequence
  Synthetic
aauaaaaacaauaaaaaa

SEQ ID NO: 167978 - RNA, 19 nt, Artificial Sequence
  Synthetic
aaauaaaaacaauaaaaaa

SEQ ID NO: 167979 - RNA, 20 nt, Artificial Sequence
  Synthetic
aaaauaaaaacaauaaaaaa

SEQ ID NO: 167980 - RNA, 21 nt, Artificial Sequence
  Synthetic
aaaaauaaaaacaauaaaaaa

SEQ ID NO: 167981 - RNA, 22 nt, Artificial Sequence
  Synthetic
aaaaaauaaaaacaauaaaaaa

SEQ ID NO: 167982 - RNA, 23 nt, Artificial Sequence
  Synthetic
caaaaaauaaaaacaauaaaaaa

SEQ ID NO: 167983 - RNA, 24 nt, Artificial Sequence
  Synthetic
ucaaaaaauaaaaacaauaaaaaa

SEQ ID NO: 167984 - RNA, 18 nt, Artificial Sequence
  Synthetic
uguacuagcaauaaaaaa

SEQ ID NO: 167985 - RNA, 19 nt, Artificial Sequence
  Synthetic
guguacuagcaauaaaaaa

SEQ ID NO: 167986 - RNA, 20 nt, Artificial Sequence
  Synthetic
uguguacuagcaauaaaaaa

SEQ ID NO: 167987 - RNA, 21 nt, Artificial Sequence
  Synthetic
cuguguacuagcaauaaaaaa

SEQ ID NO: 167988 - RNA, 22 nt, Artificial Sequence
  Synthetic
ccuguguacuagcaauaaaaaa

SEQ ID NO: 167989 - RNA, 23 nt, Artificial Sequence
  Synthetic
uccuguguacuagcaauaaaaaa

SEQ ID NO: 167990 - RNA, 24 nt, Artificial Sequence
  Synthetic
uuccuguguacuagcaauaaaaaa

SEQ ID NO: 167991 - RNA, 18 nt, Artificial Sequence
  Synthetic
cacagaauuaauaaaaaa

SEQ ID NO: 167992 - RNA, 19 nt, Artificial Sequence
  Synthetic
gcacagaauuaauaaaaaa

SEQ ID NO: 167993 - RNA, 20 nt, Artificial Sequence
  Synthetic
ugcacagaauuaauaaaaaa

SEQ ID NO: 167994 - RNA, 21 nt, Artificial Sequence
  Synthetic
augcacagaauuaauaaaaaa

SEQ ID NO: 167995 - RNA, 22 nt, Artificial Sequence
  Synthetic
uaugcacagaauuaauaaaaaa

SEQ ID NO: 167996 - RNA, 23 nt, Artificial Sequence
  Synthetic
uuaugcacagaauuaauaaaaaa

SEQ ID NO: 167997 - RNA, 24 nt, Artificial Sequence
  Synthetic
auuaugcacagaauuaauaaaaaa

SEQ ID NO: 167998 - RNA, 18 nt, Artificial Sequence
  Synthetic
gauguguggcauaaaaaa

SEQ ID NO: 167999 - RNA, 19 nt, Artificial Sequence
  Synthetic
agauguguggcauaaaaaa

SEQ ID NO: 168000 - RNA, 20 nt, Artificial Sequence
  Synthetic
aagauguguggcauaaaaaa

SEQ ID NO: 168001 - RNA, 21 nt, Artificial Sequence
  Synthetic
gaagauguguggcauaaaaaa

SEQ ID NO: 168002 - RNA, 22 nt, Artificial Sequence
  Synthetic
agaagauguguggcauaaaaaa

SEQ ID NO: 168003 - RNA, 23 nt, Artificial Sequence
  Synthetic
gagaagauguguggcauaaaaaa

SEQ ID NO: 168004 - RNA, 24 nt, Artificial Sequence
  Synthetic
ugagaagauguguggcauaaaaaa

SEQ ID NO: 168005 - RNA, 18 nt, Artificial Sequence
  Synthetic
agucuccuguauaaaaaa

SEQ ID NO: 168006 - RNA, 19 nt, Artificial Sequence
  Synthetic
aagucuccuguauaaaaaa

SEQ ID NO: 168007 - RNA, 20 nt, Artificial Sequence
  Synthetic
gaagucuccuguauaaaaaa

SEQ ID NO: 168008 - RNA, 21 nt, Artificial Sequence
  Synthetic
agaagucuccuguauaaaaaa

SEQ ID NO: 168009 - RNA, 22 nt, Artificial Sequence
  Synthetic
aagaagucuccuguauaaaaaa

SEQ ID NO: 168010 - RNA, 23 nt, Artificial Sequence
  Synthetic
aaagaagucuccuguauaaaaaa

SEQ ID NO: 168011 - RNA, 24 nt, Artificial Sequence
  Synthetic
gaaagaagucuccuguauaaaaaa

SEQ ID NO: 168012 - RNA, 18 nt, Artificial Sequence
  Synthetic
aaagaaaaugguaaaaaa

SEQ ID NO: 168013 - RNA, 19 nt, Artificial Sequence
  Synthetic
caaagaaaaugguaaaaaa

SEQ ID NO: 168014 - RNA, 20 nt, Artificial Sequence
  Synthetic
gcaaagaaaaugguaaaaaa

SEQ ID NO: 168015 - RNA, 21 nt, Artificial Sequence
  Synthetic
ugcaaagaaaaugguaaaaaa

SEQ ID NO: 168016 - RNA, 22 nt, Artificial Sequence
  Synthetic
gugcaaagaaaaugguaaaaaa

SEQ ID NO: 168017 - RNA, 23 nt, Artificial Sequence
  Synthetic
ugugcaaagaaaaugguaaaaaa

SEQ ID NO: 168018 - RNA, 24 nt, Artificial Sequence
  Synthetic
augugcaaagaaaaugguaaaaaa

SEQ ID NO: 168019 - RNA, 18 nt, Artificial Sequence
  Synthetic
uccuaauuuuguaaaaaa

SEQ ID NO: 168020 - RNA, 19 nt, Artificial Sequence
  Synthetic
auccuaauuuuguaaaaaa

SEQ ID NO: 168021 - RNA, 20 nt, Artificial Sequence
  Synthetic
gauccuaauuuuguaaaaaa

SEQ ID NO: 168022 - RNA, 21 nt, Artificial Sequence
  Synthetic
ggauccuaauuuuguaaaaaa

SEQ ID NO: 168023 - RNA, 22 nt, Artificial Sequence
  Synthetic
aggauccuaauuuuguaaaaaa

SEQ ID NO: 168024 - RNA, 23 nt, Artificial Sequence
  Synthetic
uaggauccuaauuuuguaaaaaa

SEQ ID NO: 168025 - RNA, 24 nt, Artificial Sequence
  Synthetic
auaggauccuaauuuuguaaaaaa

SEQ ID NO: 168026 - RNA, 18 nt, Artificial Sequence
  Synthetic
aaaauagagauuaaaaaa

SEQ ID NO: 168027 - RNA, 19 nt, Artificial Sequence
  Synthetic
aaaaauagagauuaaaaaa

SEQ ID NO: 168028 - RNA, 20 nt, Artificial Sequence
  Synthetic
uaaaaauagagauuaaaaaa

SEQ ID NO: 168029 - RNA, 21 nt, Artificial Sequence
  Synthetic
uuaaaaauagagauuaaaaaa

SEQ ID NO: 168030 - RNA, 22 nt, Artificial Sequence
  Synthetic
auuaaaaauagagauuaaaaaa

SEQ ID NO: 168031 - RNA, 23 nt, Artificial Sequence
  Synthetic
cauuaaaaauagagauuaaaaaa

SEQ ID NO: 168032 - RNA, 24 nt, Artificial Sequence
  Synthetic
acauuaaaaauagagauuaaaaaa

SEQ ID NO: 168033 - RNA, 18 nt, Artificial Sequence
  Synthetic
aaagugucuauuaaaaaa

SEQ ID NO: 168034 - RNA, 19 nt, Artificial Sequence
  Synthetic
gaaagugucuauuaaaaaa

SEQ ID NO: 168035 - RNA, 20 nt, Artificial Sequence
  Synthetic
ugaaagugucuauuaaaaaa

SEQ ID NO: 168036 - RNA, 21 nt, Artificial Sequence
  Synthetic
augaaagugucuauuaaaaaa

SEQ ID NO: 168037 - RNA, 22 nt, Artificial Sequence
  Synthetic
uaugaaagugucuauuaaaaaa

SEQ ID NO: 168038 - RNA, 23 nt, Artificial Sequence
  Synthetic
guaugaaagugucuauuaaaaaa

SEQ ID NO: 168039 - RNA, 24 nt, Artificial Sequence
  Synthetic
uguaugaaagugucuauuaaaaaa

SEQ ID NO: 168040 - RNA, 18 nt, Artificial Sequence
  Synthetic
gaaaagauuauuaaaaaa

SEQ ID NO: 168041 - RNA, 19 nt, Artificial Sequence
  Synthetic
agaaaagauuauuaaaaaa

SEQ ID NO: 168042 - RNA, 20 nt, Artificial Sequence
  Synthetic
cagaaaagauuauuaaaaaa

SEQ ID NO: 168043 - RNA, 21 nt, Artificial Sequence
  Synthetic
gcagaaaagauuauuaaaaaa

SEQ ID NO: 168044 - RNA, 22 nt, Artificial Sequence
  Synthetic
agcagaaaagauuauuaaaaaa

SEQ ID NO: 168045 - RNA, 23 nt, Artificial Sequence
  Synthetic
aagcagaaaagauuauuaaaaaa

SEQ ID NO: 168046 - RNA, 24 nt, Artificial Sequence
  Synthetic
gaagcagaaaagauuauuaaaaaa

SEQ ID NO: 168047 - RNA, 18 nt, Artificial Sequence
  Synthetic
cacuuucagcuuaaaaaa

SEQ ID NO: 168048 - RNA, 19 nt, Artificial Sequence
  Synthetic
acacuuucagcuuaaaaaa

SEQ ID NO: 168049 - RNA, 20 nt, Artificial Sequence
  Synthetic
uacacuuucagcuuaaaaaa

SEQ ID NO: 168050 - RNA, 21 nt, Artificial Sequence
  Synthetic
cuacacuuucagcuuaaaaaa

SEQ ID NO: 168051 - RNA, 22 nt, Artificial Sequence
  Synthetic
ucuacacuuucagcuuaaaaaa

SEQ ID NO: 168052 - RNA, 23 nt, Artificial Sequence
  Synthetic
uucuacacuuucagcuuaaaaaa

SEQ ID NO: 168053 - RNA, 24 nt, Artificial Sequence
  Synthetic
cuucuacacuuucagcuuaaaaaa

SEQ ID NO: 168054 - RNA, 18 nt, Artificial Sequence
  Synthetic
ccuucuagucuuaaaaaa

SEQ ID NO: 168055 - RNA, 19 nt, Artificial Sequence
  Synthetic
cccuucuagucuuaaaaaa

SEQ ID NO: 168056 - RNA, 20 nt, Artificial Sequence
  Synthetic
ucccuucuagucuuaaaaaa

SEQ ID NO: 168057 - RNA, 21 nt, Artificial Sequence
  Synthetic
aucccuucuagucuuaaaaaa

SEQ ID NO: 168058 - RNA, 22 nt, Artificial Sequence
  Synthetic
gaucccuucuagucuuaaaaaa

SEQ ID NO: 168059 - RNA, 23 nt, Artificial Sequence
  Synthetic
ugaucccuucuagucuuaaaaaa

SEQ ID NO: 168060 - RNA, 24 nt, Artificial Sequence
  Synthetic
uugaucccuucuagucuuaaaaaa

SEQ ID NO: 168061 - RNA, 18 nt, Artificial Sequence
  Synthetic
auucauaagguuaaaaaa

SEQ ID NO: 168062 - RNA, 19 nt, Artificial Sequence
  Synthetic
cauucauaagguuaaaaaa

SEQ ID NO: 168063 - RNA, 20 nt, Artificial Sequence
  Synthetic
acauucauaagguuaaaaaa

SEQ ID NO: 168064 - RNA, 21 nt, Artificial Sequence
  Synthetic
aacauucauaagguuaaaaaa

SEQ ID NO: 168065 - RNA, 22 nt, Artificial Sequence
  Synthetic
aaacauucauaagguuaaaaaa

SEQ ID NO: 168066 - RNA, 23 nt, Artificial Sequence
  Synthetic
aaaacauucauaagguuaaaaaa

SEQ ID NO: 168067 - RNA, 24 nt, Artificial Sequence
  Synthetic
aaaaacauucauaagguuaaaaaa

SEQ ID NO: 168068 - RNA, 18 nt, Artificial Sequence
  Synthetic
uagucuuuuuuuaaaaaa

SEQ ID NO: 168069 - RNA, 19 nt, Artificial Sequence
  Synthetic
auagucuuuuuuuaaaaaa

SEQ ID NO: 168070 - RNA, 20 nt, Artificial Sequence
  Synthetic
uauagucuuuuuuuaaaaaa

SEQ ID NO: 168071 - RNA, 21 nt, Artificial Sequence
  Synthetic
auauagucuuuuuuuaaaaaa

SEQ ID NO: 168072 - RNA, 22 nt, Artificial Sequence
  Synthetic
uauauagucuuuuuuuaaaaaa

SEQ ID NO: 168073 - RNA, 23 nt, Artificial Sequence
  Synthetic
guauauagucuuuuuuuaaaaaa

SEQ ID NO: 168074 - RNA, 24 nt, Artificial Sequence
  Synthetic
gguauauagucuuuuuuuaaaaaa

SEQ ID NO: 168075 - RNA, 18 nt, Artificial Sequence
  Synthetic
acaggaaagaaacaaaaa

SEQ ID NO: 168076 - RNA, 19 nt, Artificial Sequence
  Synthetic
uacaggaaagaaacaaaaa

SEQ ID NO: 168077 - RNA, 20 nt, Artificial Sequence
  Synthetic
guacaggaaagaaacaaaaa

SEQ ID NO: 168078 - RNA, 21 nt, Artificial Sequence
  Synthetic
uguacaggaaagaaacaaaaa

SEQ ID NO: 168079 - RNA, 22 nt, Artificial Sequence
  Synthetic
auguacaggaaagaaacaaaaa

SEQ ID NO: 168080 - RNA, 23 nt, Artificial Sequence
  Synthetic
gauguacaggaaagaaacaaaaa

SEQ ID NO: 168081 - RNA, 24 nt, Artificial Sequence
  Synthetic
ugauguacaggaaagaaacaaaaa

SEQ ID NO: 168082 - RNA, 18 nt, Artificial Sequence
  Synthetic
gaacagcaacaacaaaaa

SEQ ID NO: 168083 - RNA, 19 nt, Artificial Sequence
  Synthetic
ggaacagcaacaacaaaaa

SEQ ID NO: 168084 - RNA, 20 nt, Artificial Sequence
  Synthetic
aggaacagcaacaacaaaaa

SEQ ID NO: 168085 - RNA, 21 nt, Artificial Sequence
  Synthetic
aaggaacagcaacaacaaaaa

SEQ ID NO: 168086 - RNA, 22 nt, Artificial Sequence
  Synthetic
gaaggaacagcaacaacaaaaa

SEQ ID NO: 168087 - RNA, 23 nt, Artificial Sequence
  Synthetic
cgaaggaacagcaacaacaaaaa

SEQ ID NO: 168088 - RNA, 24 nt, Artificial Sequence
  Synthetic
ccgaaggaacagcaacaacaaaaa

SEQ ID NO: 168089 - RNA, 18 nt, Artificial Sequence
  Synthetic
agagacuagcaacaaaaa

SEQ ID NO: 168090 - RNA, 19 nt, Artificial Sequence
  Synthetic
aagagacuagcaacaaaaa

SEQ ID NO: 168091 - RNA, 20 nt, Artificial Sequence
  Synthetic
caagagacuagcaacaaaaa

SEQ ID NO: 168092 - RNA, 21 nt, Artificial Sequence
  Synthetic
gcaagagacuagcaacaaaaa

SEQ ID NO: 168093 - RNA, 22 nt, Artificial Sequence
  Synthetic
agcaagagacuagcaacaaaaa

SEQ ID NO: 168094 - RNA, 23 nt, Artificial Sequence
  Synthetic
uagcaagagacuagcaacaaaaa

SEQ ID NO: 168095 - RNA, 24 nt, Artificial Sequence
  Synthetic
uuagcaagagacuagcaacaaaaa

SEQ ID NO: 168096 - RNA, 18 nt, Artificial Sequence
  Synthetic
aauaaagcagaacaaaaa

SEQ ID NO: 168097 - RNA, 19 nt, Artificial Sequence
  Synthetic
uaauaaagcagaacaaaaa

SEQ ID NO: 168098 - RNA, 20 nt, Artificial Sequence
  Synthetic
auaauaaagcagaacaaaaa

SEQ ID NO: 168099 - RNA, 21 nt, Artificial Sequence
  Synthetic
aauaauaaagcagaacaaaaa

SEQ ID NO: 168100 - RNA, 22 nt, Artificial Sequence
  Synthetic
uaauaauaaagcagaacaaaaa

SEQ ID NO: 168101 - RNA, 23 nt, Artificial Sequence
  Synthetic
auaauaauaaagcagaacaaaaa

SEQ ID NO: 168102 - RNA, 24 nt, Artificial Sequence
  Synthetic
aauaauaauaaagcagaacaaaaa

SEQ ID NO: 168103 - RNA, 18 nt, Artificial Sequence
  Synthetic
ugaaccaagccacaaaaa

SEQ ID NO: 168104 - RNA, 19 nt, Artificial Sequence
  Synthetic
uugaaccaagccacaaaaa

SEQ ID NO: 168105 - RNA, 20 nt, Artificial Sequence
  Synthetic
auugaaccaagccacaaaaa

SEQ ID NO: 168106 - RNA, 21 nt, Artificial Sequence
  Synthetic
aauugaaccaagccacaaaaa

SEQ ID NO: 168107 - RNA, 22 nt, Artificial Sequence
  Synthetic
aaauugaaccaagccacaaaaa

SEQ ID NO: 168108 - RNA, 23 nt, Artificial Sequence
  Synthetic
caaauugaaccaagccacaaaaa

SEQ ID NO: 168109 - RNA, 24 nt, Artificial Sequence
  Synthetic
acaaauugaaccaagccacaaaaa

SEQ ID NO: 168110 - RNA, 18 nt, Artificial Sequence
  Synthetic
ccacauacaucacaaaaa

SEQ ID NO: 168111 - RNA, 19 nt, Artificial Sequence
  Synthetic
accacauacaucacaaaaa

SEQ ID NO: 168112 - RNA, 20 nt, Artificial Sequence
  Synthetic
aaccacauacaucacaaaaa

SEQ ID NO: 168113 - RNA, 21 nt, Artificial Sequence
  Synthetic
uaaccacauacaucacaaaaa

SEQ ID NO: 168114 - RNA, 22 nt, Artificial Sequence
  Synthetic
auaaccacauacaucacaaaaa

SEQ ID NO: 168115 - RNA, 23 nt, Artificial Sequence
  Synthetic
gauaaccacauacaucacaaaaa

SEQ ID NO: 168116 - RNA, 24 nt, Artificial Sequence
  Synthetic
agauaaccacauacaucacaaaaa

SEQ ID NO: 168117 - RNA, 18 nt, Artificial Sequence
  Synthetic
uaucaaguuucacaaaaa

SEQ ID NO: 168118 - RNA, 19 nt, Artificial Sequence
  Synthetic
guaucaaguuucacaaaaa

SEQ ID NO: 168119 - RNA, 20 nt, Artificial Sequence
  Synthetic
uguaucaaguuucacaaaaa

SEQ ID NO: 168120 - RNA, 21 nt, Artificial Sequence
  Synthetic
auguaucaaguuucacaaaaa

SEQ ID NO: 168121 - RNA, 22 nt, Artificial Sequence
  Synthetic
aauguaucaaguuucacaaaaa

SEQ ID NO: 168122 - RNA, 23 nt, Artificial Sequence
  Synthetic
uaauguaucaaguuucacaaaaa

SEQ ID NO: 168123 - RNA, 24 nt, Artificial Sequence
  Synthetic
auaauguaucaaguuucacaaaaa

SEQ ID NO: 168124 - RNA, 18 nt, Artificial Sequence
  Synthetic
agcaugguuagacaaaaa

SEQ ID NO: 168125 - RNA, 19 nt, Artificial Sequence
  Synthetic
uagcaugguuagacaaaaa

SEQ ID NO: 168126 - RNA, 20 nt, Artificial Sequence
  Synthetic
uuagcaugguuagacaaaaa

SEQ ID NO: 168127 - RNA, 21 nt, Artificial Sequence
  Synthetic
uuuagcaugguuagacaaaaa

SEQ ID NO: 168128 - RNA, 22 nt, Artificial Sequence
  Synthetic
uuuuagcaugguuagacaaaaa

SEQ ID NO: 168129 - RNA, 23 nt, Artificial Sequence
  Synthetic
uuuuuagcaugguuagacaaaaa

SEQ ID NO: 168130 - RNA, 24 nt, Artificial Sequence
  Synthetic
auuuuuagcaugguuagacaaaaa

SEQ ID NO: 168131 - RNA, 18 nt, Artificial Sequence
  Synthetic
uauuuguuaugacaaaaa

SEQ ID NO: 168132 - RNA, 19 nt, Artificial Sequence
  Synthetic
uuauuuguuaugacaaaaa

SEQ ID NO: 168133 - RNA, 20 nt, Artificial Sequence
  Synthetic
uuuauuuguuaugacaaaaa

SEQ ID NO: 168134 - RNA, 21 nt, Artificial Sequence
  Synthetic
guuuauuuguuaugacaaaaa

SEQ ID NO: 168135 - RNA, 22 nt, Artificial Sequence
  Synthetic
uguuuauuuguuaugacaaaaa

SEQ ID NO: 168136 - RNA, 23 nt, Artificial Sequence
  Synthetic
auguuuauuuguuaugacaaaaa

SEQ ID NO: 168137 - RNA, 24 nt, Artificial Sequence
  Synthetic
gauguuuauuuguuaugacaaaaa

SEQ ID NO: 168138 - RNA, 18 nt, Artificial Sequence
  Synthetic
cuacuaaaaauacaaaaa

SEQ ID NO: 168139 - RNA, 19 nt, Artificial Sequence
  Synthetic
ucuacuaaaaauacaaaaa

SEQ ID NO: 168140 - RNA, 20 nt, Artificial Sequence
  Synthetic
cucuacuaaaaauacaaaaa

SEQ ID NO: 168141 - RNA, 21 nt, Artificial Sequence
  Synthetic
ucucuacuaaaaauacaaaaa

SEQ ID NO: 168142 - RNA, 22 nt, Artificial Sequence
  Synthetic
aucucuacuaaaaauacaaaaa

SEQ ID NO: 168143 - RNA, 23 nt, Artificial Sequence
  Synthetic
caucucuacuaaaaauacaaaaa

SEQ ID NO: 168144 - RNA, 24 nt, Artificial Sequence
  Synthetic
ccaucucuacuaaaaauacaaaaa

SEQ ID NO: 168145 - RNA, 18 nt, Artificial Sequence
  Synthetic
uuugccacaauacaaaaa

SEQ ID NO: 168146 - RNA, 19 nt, Artificial Sequence
  Synthetic
uuuugccacaauacaaaaa

SEQ ID NO: 168147 - RNA, 20 nt, Artificial Sequence
  Synthetic
auuuugccacaauacaaaaa

SEQ ID NO: 168148 - RNA, 21 nt, Artificial Sequence
  Synthetic
uauuuugccacaauacaaaaa

SEQ ID NO: 168149 - RNA, 22 nt, Artificial Sequence
  Synthetic
auauuuugccacaauacaaaaa

SEQ ID NO: 168150 - RNA, 23 nt, Artificial Sequence
  Synthetic
uauauuuugccacaauacaaaaa

SEQ ID NO: 168151 - RNA, 24 nt, Artificial Sequence
  Synthetic
guauauuuugccacaauacaaaaa

SEQ ID NO: 168152 - RNA, 18 nt, Artificial Sequence
  Synthetic
aguaagagacuacaaaaa

SEQ ID NO: 168153 - RNA, 19 nt, Artificial Sequence
  Synthetic
gaguaagagacuacaaaaa

SEQ ID NO: 168154 - RNA, 20 nt, Artificial Sequence
  Synthetic
agaguaagagacuacaaaaa

SEQ ID NO: 168155 - RNA, 21 nt, Artificial Sequence
  Synthetic
gagaguaagagacuacaaaaa

SEQ ID NO: 168156 - RNA, 22 nt, Artificial Sequence
  Synthetic
agagaguaagagacuacaaaaa

SEQ ID NO: 168157 - RNA, 23 nt, Artificial Sequence
  Synthetic
aagagaguaagagacuacaaaaa

SEQ ID NO: 168158 - RNA, 24 nt, Artificial Sequence
  Synthetic
caagagaguaagagacuacaaaaa

SEQ ID NO: 168159 - RNA, 18 nt, Artificial Sequence
  Synthetic
augggacuucuacaaaaa

SEQ ID NO: 168160 - RNA, 19 nt, Artificial Sequence
  Synthetic
aaugggacuucuacaaaaa

SEQ ID NO: 168161 - RNA, 20 nt, Artificial Sequence
  Synthetic
gaaugggacuucuacaaaaa

SEQ ID NO: 168162 - RNA, 21 nt, Artificial Sequence
  Synthetic
agaaugggacuucuacaaaaa

SEQ ID NO: 168163 - RNA, 22 nt, Artificial Sequence
  Synthetic
gagaaugggacuucuacaaaaa

SEQ ID NO: 168164 - RNA, 23 nt, Artificial Sequence
  Synthetic
agagaaugggacuucuacaaaaa

SEQ ID NO: 168165 - RNA, 24 nt, Artificial Sequence
  Synthetic
aagagaaugggacuucuacaaaaa

SEQ ID NO: 168166 - RNA, 18 nt, Artificial Sequence
  Synthetic
cuuuucuauuuacaaaaa

SEQ ID NO: 168167 - RNA, 19 nt, Artificial Sequence
  Synthetic
acuuuucuauuuacaaaaa

SEQ ID NO: 168168 - RNA, 20 nt, Artificial Sequence
  Synthetic
uacuuuucuauuuacaaaaa

SEQ ID NO: 168169 - RNA, 21 nt, Artificial Sequence
  Synthetic
uuacuuuucuauuuacaaaaa

SEQ ID NO: 168170 - RNA, 22 nt, Artificial Sequence
  Synthetic
uuuacuuuucuauuuacaaaaa

SEQ ID NO: 168171 - RNA, 23 nt, Artificial Sequence
  Synthetic
uuuuacuuuucuauuuacaaaaa

SEQ ID NO: 168172 - RNA, 24 nt, Artificial Sequence
  Synthetic
cuuuuacuuuucuauuuacaaaaa

SEQ ID NO: 168173 - RNA, 18 nt, Artificial Sequence
  Synthetic
ucugucauuaaccaaaaa

SEQ ID NO: 168174 - RNA, 19 nt, Artificial Sequence
  Synthetic
gucugucauuaaccaaaaa

SEQ ID NO: 168175 - RNA, 20 nt, Artificial Sequence
  Synthetic
agucugucauuaaccaaaaa

SEQ ID NO: 168176 - RNA, 21 nt, Artificial Sequence
  Synthetic
aagucugucauuaaccaaaaa

SEQ ID NO: 168177 - RNA, 22 nt, Artificial Sequence
  Synthetic
aaagucugucauuaaccaaaaa

SEQ ID NO: 168178 - RNA, 23 nt, Artificial Sequence
  Synthetic
gaaagucugucauuaaccaaaaa

SEQ ID NO: 168179 - RNA, 24 nt, Artificial Sequence
  Synthetic
agaaagucugucauuaaccaaaaa

SEQ ID NO: 168180 - RNA, 18 nt, Artificial Sequence
  Synthetic
ccuauaucucaccaaaaa

SEQ ID NO: 168181 - RNA, 19 nt, Artificial Sequence
  Synthetic
accuauaucucaccaaaaa

SEQ ID NO: 168182 - RNA, 20 nt, Artificial Sequence
  Synthetic
gaccuauaucucaccaaaaa

SEQ ID NO: 168183 - RNA, 21 nt, Artificial Sequence
  Synthetic
ugaccuauaucucaccaaaaa

SEQ ID NO: 168184 - RNA, 22 nt, Artificial Sequence
  Synthetic
cugaccuauaucucaccaaaaa

SEQ ID NO: 168185 - RNA, 23 nt, Artificial Sequence
  Synthetic
ucugaccuauaucucaccaaaaa

SEQ ID NO: 168186 - RNA, 24 nt, Artificial Sequence
  Synthetic
cucugaccuauaucucaccaaaaa

SEQ ID NO: 168187 - RNA, 18 nt, Artificial Sequence
  Synthetic
ccugguagagaccaaaaa

SEQ ID NO: 168188 - RNA, 19 nt, Artificial Sequence
  Synthetic
cccugguagagaccaaaaa

SEQ ID NO: 168189 - RNA, 20 nt, Artificial Sequence
  Synthetic
ucccugguagagaccaaaaa

SEQ ID NO: 168190 - RNA, 21 nt, Artificial Sequence
  Synthetic
aucccugguagagaccaaaaa

SEQ ID NO: 168191 - RNA, 22 nt, Artificial Sequence
  Synthetic
aaucccugguagagaccaaaaa

SEQ ID NO: 168192 - RNA, 23 nt, Artificial Sequence
  Synthetic
aaaucccugguagagaccaaaaa

SEQ ID NO: 168193 - RNA, 24 nt, Artificial Sequence
  Synthetic
aaaaucccugguagagaccaaaaa

SEQ ID NO: 168194 - RNA, 18 nt, Artificial Sequence
  Synthetic
ggauagaauccccaaaaa

SEQ ID NO: 168195 - RNA, 19 nt, Artificial Sequence
  Synthetic
gggauagaauccccaaaaa

SEQ ID NO: 168196 - RNA, 20 nt, Artificial Sequence
  Synthetic
agggauagaauccccaaaaa

SEQ ID NO: 168197 - RNA, 21 nt, Artificial Sequence
  Synthetic
gagggauagaauccccaaaaa

SEQ ID NO: 168198 - RNA, 22 nt, Artificial Sequence
  Synthetic
ugagggauagaauccccaaaaa

SEQ ID NO: 168199 - RNA, 23 nt, Artificial Sequence
  Synthetic
augagggauagaauccccaaaaa

SEQ ID NO: 168200 - RNA, 24 nt, Artificial Sequence
  Synthetic
uaugagggauagaauccccaaaaa

SEQ ID NO: 168201 - RNA, 18 nt, Artificial Sequence
  Synthetic
auucauuauagccaaaaa

SEQ ID NO: 168202 - RNA, 19 nt, Artificial Sequence
  Synthetic
uauucauuauagccaaaaa

SEQ ID NO: 168203 - RNA, 20 nt, Artificial Sequence
  Synthetic
uuauucauuauagccaaaaa

SEQ ID NO: 168204 - RNA, 21 nt, Artificial Sequence
  Synthetic
auuauucauuauagccaaaaa

SEQ ID NO: 168205 - RNA, 22 nt, Artificial Sequence
  Synthetic
cauuauucauuauagccaaaaa

SEQ ID NO: 168206 - RNA, 23 nt, Artificial Sequence
  Synthetic
ccauuauucauuauagccaaaaa

SEQ ID NO: 168207 - RNA, 24 nt, Artificial Sequence
  Synthetic
accauuauucauuauagccaaaaa

SEQ ID NO: 168208 - RNA, 18 nt, Artificial Sequence
  Synthetic
agaaaaacacuccaaaaa

SEQ ID NO: 168209 - RNA, 19 nt, Artificial Sequence
  Synthetic
cagaaaaacacuccaaaaa

SEQ ID NO: 168210 - RNA, 20 nt, Artificial Sequence
  Synthetic
ccagaaaaacacuccaaaaa

SEQ ID NO: 168211 - RNA, 21 nt, Artificial Sequence
  Synthetic
accagaaaaacacuccaaaaa

SEQ ID NO: 168212 - RNA, 22 nt, Artificial Sequence
  Synthetic
uaccagaaaaacacuccaaaaa

SEQ ID NO: 168213 - RNA, 23 nt, Artificial Sequence
  Synthetic
guaccagaaaaacacuccaaaaa

SEQ ID NO: 168214 - RNA, 24 nt, Artificial Sequence
  Synthetic
gguaccagaaaaacacuccaaaaa

SEQ ID NO: 168215 - RNA, 18 nt, Artificial Sequence
  Synthetic
gccugaaaauuccaaaaa

SEQ ID NO: 168216 - RNA, 19 nt, Artificial Sequence
  Synthetic
agccugaaaauuccaaaaa

SEQ ID NO: 168217 - RNA, 20 nt, Artificial Sequence
  Synthetic
aagccugaaaauuccaaaaa

SEQ ID NO: 168218 - RNA, 21 nt, Artificial Sequence
  Synthetic
aaagccugaaaauuccaaaaa

SEQ ID NO: 168219 - RNA, 22 nt, Artificial Sequence
  Synthetic
aaaagccugaaaauuccaaaaa

SEQ ID NO: 168220 - RNA, 23 nt, Artificial Sequence
  Synthetic
aaaaagccugaaaauuccaaaaa

SEQ ID NO: 168221 - RNA, 24 nt, Artificial Sequence
  Synthetic
caaaaagccugaaaauuccaaaaa

SEQ ID NO: 168222 - RNA, 18 nt, Artificial Sequence
  Synthetic
gagagagcauuccaaaaa

SEQ ID NO: 168223 - RNA, 19 nt, Artificial Sequence
  Synthetic
agagagagcauuccaaaaa

SEQ ID NO: 168224 - RNA, 20 nt, Artificial Sequence
  Synthetic
gagagagagcauuccaaaaa

SEQ ID NO: 168225 - RNA, 21 nt, Artificial Sequence
  Synthetic
agagagagagcauuccaaaaa

SEQ ID NO: 168226 - RNA, 22 nt, Artificial Sequence
  Synthetic
uagagagagagcauuccaaaaa

SEQ ID NO: 168227 - RNA, 23 nt, Artificial Sequence
  Synthetic
guagagagagagcauuccaaaaa

SEQ ID NO: 168228 - RNA, 24 nt, Artificial Sequence
  Synthetic
uguagagagagagcauuccaaaaa

SEQ ID NO: 168229 - RNA, 18 nt, Artificial Sequence
  Synthetic
uguuucauuuuccaaaaa

SEQ ID NO: 168230 - RNA, 19 nt, Artificial Sequence
  Synthetic
cuguuucauuuuccaaaaa

SEQ ID NO: 168231 - RNA, 20 nt, Artificial Sequence
  Synthetic
ucuguuucauuuuccaaaaa

SEQ ID NO: 168232 - RNA, 21 nt, Artificial Sequence
  Synthetic
uucuguuucauuuuccaaaaa

SEQ ID NO: 168233 - RNA, 22 nt, Artificial Sequence
  Synthetic
cuucuguuucauuuuccaaaaa

SEQ ID NO: 168234 - RNA, 23 nt, Artificial Sequence
  Synthetic
acuucuguuucauuuuccaaaaa

SEQ ID NO: 168235 - RNA, 24 nt, Artificial Sequence
  Synthetic
gacuucuguuucauuuuccaaaaa

SEQ ID NO: 168236 - RNA, 18 nt, Artificial Sequence
  Synthetic
aagcaggaggagcaaaaa

SEQ ID NO: 168237 - RNA, 19 nt, Artificial Sequence
  Synthetic
uaagcaggaggagcaaaaa

SEQ ID NO: 168238 - RNA, 20 nt, Artificial Sequence
  Synthetic
auaagcaggaggagcaaaaa

SEQ ID NO: 168239 - RNA, 21 nt, Artificial Sequence
  Synthetic
uauaagcaggaggagcaaaaa

SEQ ID NO: 168240 - RNA, 22 nt, Artificial Sequence
  Synthetic
uuauaagcaggaggagcaaaaa

SEQ ID NO: 168241 - RNA, 23 nt, Artificial Sequence
  Synthetic
uuuauaagcaggaggagcaaaaa

SEQ ID NO: 168242 - RNA, 24 nt, Artificial Sequence
  Synthetic
guuuauaagcaggaggagcaaaaa

SEQ ID NO: 168243 - RNA, 18 nt, Artificial Sequence
  Synthetic
acauuucuauagcaaaaa

SEQ ID NO: 168244 - RNA, 19 nt, Artificial Sequence
  Synthetic
uacauuucuauagcaaaaa

SEQ ID NO: 168245 - RNA, 20 nt, Artificial Sequence
  Synthetic
uuacauuucuauagcaaaaa

SEQ ID NO: 168246 - RNA, 21 nt, Artificial Sequence
  Synthetic
auuacauuucuauagcaaaaa

SEQ ID NO: 168247 - RNA, 22 nt, Artificial Sequence
  Synthetic
uauuacauuucuauagcaaaaa

SEQ ID NO: 168248 - RNA, 23 nt, Artificial Sequence
  Synthetic
uuauuacauuucuauagcaaaaa

SEQ ID NO: 168249 - RNA, 24 nt, Artificial Sequence
  Synthetic
auuauuacauuucuauagcaaaaa

SEQ ID NO: 168250 - RNA, 18 nt, Artificial Sequence
  Synthetic
gacagggucuagcaaaaa

SEQ ID NO: 168251 - RNA, 19 nt, Artificial Sequence
  Synthetic
ggacagggucuagcaaaaa

SEQ ID NO: 168252 - RNA, 20 nt, Artificial Sequence
  Synthetic
uggacagggucuagcaaaaa

SEQ ID NO: 168253 - RNA, 21 nt, Artificial Sequence
  Synthetic
cuggacagggucuagcaaaaa

SEQ ID NO: 168254 - RNA, 22 nt, Artificial Sequence
  Synthetic
gcuggacagggucuagcaaaaa

SEQ ID NO: 168255 - RNA, 23 nt, Artificial Sequence
  Synthetic
agcuggacagggucuagcaaaaa

SEQ ID NO: 168256 - RNA, 24 nt, Artificial Sequence
  Synthetic
gagcuggacagggucuagcaaaaa

SEQ ID NO: 168257 - RNA, 18 nt, Artificial Sequence
  Synthetic
aaauaauuguagcaaaaa

SEQ ID NO: 168258 - RNA, 19 nt, Artificial Sequence
  Synthetic
uaaauaauuguagcaaaaa

SEQ ID NO: 168259 - RNA, 20 nt, Artificial Sequence
  Synthetic
uuaaauaauuguagcaaaaa

SEQ ID NO: 168260 - RNA, 21 nt, Artificial Sequence
  Synthetic
auuaaauaauuguagcaaaaa

SEQ ID NO: 168261 - RNA, 22 nt, Artificial Sequence
  Synthetic
aauuaaauaauuguagcaaaaa

SEQ ID NO: 168262 - RNA, 23 nt, Artificial Sequence
  Synthetic
uaauuaaauaauuguagcaaaaa

SEQ ID NO: 168263 - RNA, 24 nt, Artificial Sequence
  Synthetic
auaauuaaauaauuguagcaaaaa

SEQ ID NO: 168264 - RNA, 18 nt, Artificial Sequence
  Synthetic
cugcucaaugggcaaaaa

SEQ ID NO: 168265 - RNA, 19 nt, Artificial Sequence
  Synthetic
ucugcucaaugggcaaaaa

SEQ ID NO: 168266 - RNA, 20 nt, Artificial Sequence
  Synthetic
cucugcucaaugggcaaaaa

SEQ ID NO: 168267 - RNA, 21 nt, Artificial Sequence
  Synthetic
ccucugcucaaugggcaaaaa

SEQ ID NO: 168268 - RNA, 22 nt, Artificial Sequence
  Synthetic
gccucugcucaaugggcaaaaa

SEQ ID NO: 168269 - RNA, 23 nt, Artificial Sequence
  Synthetic
agccucugcucaaugggcaaaaa

SEQ ID NO: 168270 - RNA, 24 nt, Artificial Sequence
  Synthetic
uagccucugcucaaugggcaaaaa

SEQ ID NO: 168271 - RNA, 18 nt, Artificial Sequence
  Synthetic
auacugaaugggcaaaaa

SEQ ID NO: 168272 - RNA, 19 nt, Artificial Sequence
  Synthetic
cauacugaaugggcaaaaa

SEQ ID NO: 168273 - RNA, 20 nt, Artificial Sequence
  Synthetic
ucauacugaaugggcaaaaa

SEQ ID NO: 168274 - RNA, 18 nt, Artificial Sequence
  Synthetic
aaaaaaccuaaucaaaaa

SEQ ID NO: 168275 - RNA, 19 nt, Artificial Sequence
  Synthetic
gaaaaaaccuaaucaaaaa

SEQ ID NO: 168276 - RNA, 20 nt, Artificial Sequence
  Synthetic
agaaaaaaccuaaucaaaaa

SEQ ID NO: 168277 - RNA, 21 nt, Artificial Sequence
  Synthetic
aagaaaaaaccuaaucaaaaa

SEQ ID NO: 168278 - RNA, 22 nt, Artificial Sequence
  Synthetic
caagaaaaaaccuaaucaaaaa

SEQ ID NO: 168279 - RNA, 23 nt, Artificial Sequence
  Synthetic
acaagaaaaaaccuaaucaaaaa

SEQ ID NO: 168280 - RNA, 24 nt, Artificial Sequence
  Synthetic
uacaagaaaaaaccuaaucaaaaa

SEQ ID NO: 168281 - RNA, 18 nt, Artificial Sequence
  Synthetic
cagacuccaucucaaaaa

SEQ ID NO: 168282 - RNA, 19 nt, Artificial Sequence
  Synthetic
ccagacuccaucucaaaaa

SEQ ID NO: 168283 - RNA, 20 nt, Artificial Sequence
  Synthetic
gccagacuccaucucaaaaa

SEQ ID NO: 168284 - RNA, 21 nt, Artificial Sequence
  Synthetic
agccagacuccaucucaaaaa

SEQ ID NO: 168285 - RNA, 22 nt, Artificial Sequence
  Synthetic
gagccagacuccaucucaaaaa

SEQ ID NO: 168286 - RNA, 23 nt, Artificial Sequence
  Synthetic
agagccagacuccaucucaaaaa

SEQ ID NO: 168287 - RNA, 24 nt, Artificial Sequence
  Synthetic
cagagccagacuccaucucaaaaa

SEQ ID NO: 168288 - RNA, 18 nt, Artificial Sequence
  Synthetic
ucauuccagauucaaaaa

SEQ ID NO: 168289 - RNA, 19 nt, Artificial Sequence
  Synthetic
cucauuccagauucaaaaa

SEQ ID NO: 168290 - RNA, 20 nt, Artificial Sequence
  Synthetic
acucauuccagauucaaaaa

SEQ ID NO: 168291 - RNA, 21 nt, Artificial Sequence
  Synthetic
cacucauuccagauucaaaaa

SEQ ID NO: 168292 - RNA, 22 nt, Artificial Sequence
  Synthetic
ucacucauuccagauucaaaaa

SEQ ID NO: 168293 - RNA, 23 nt, Artificial Sequence
  Synthetic
gucacucauuccagauucaaaaa

SEQ ID NO: 168294 - RNA, 24 nt, Artificial Sequence
  Synthetic
ugucacucauuccagauucaaaaa

SEQ ID NO: 168295 - RNA, 18 nt, Artificial Sequence
  Synthetic
guauuugggauucaaaaa

SEQ ID NO: 168296 - RNA, 19 nt, Artificial Sequence
  Synthetic
gguauuugggauucaaaaa

SEQ ID NO: 168297 - RNA, 20 nt, Artificial Sequence
  Synthetic
agguauuugggauucaaaaa

SEQ ID NO: 168298 - RNA, 21 nt, Artificial Sequence
  Synthetic
uagguauuugggauucaaaaa

SEQ ID NO: 168299 - RNA, 22 nt, Artificial Sequence
  Synthetic
cuagguauuugggauucaaaaa

SEQ ID NO: 168300 - RNA, 23 nt, Artificial Sequence
  Synthetic
acuagguauuugggauucaaaaa

SEQ ID NO: 168301 - RNA, 24 nt, Artificial Sequence
  Synthetic
uacuagguauuugggauucaaaaa

SEQ ID NO: 168302 - RNA, 18 nt, Artificial Sequence
  Synthetic
aaauaaaaauuucaaaaa

SEQ ID NO: 168303 - RNA, 19 nt, Artificial Sequence
  Synthetic
aaaauaaaaauuucaaaaa

SEQ ID NO: 168304 - RNA, 20 nt, Artificial Sequence
  Synthetic
caaaauaaaaauuucaaaaa

SEQ ID NO: 168305 - RNA, 21 nt, Artificial Sequence
  Synthetic
ucaaaauaaaaauuucaaaaa

SEQ ID NO: 168306 - RNA, 22 nt, Artificial Sequence
  Synthetic
cucaaaauaaaaauuucaaaaa

SEQ ID NO: 168307 - RNA, 23 nt, Artificial Sequence
  Synthetic
ucucaaaauaaaaauuucaaaaa

SEQ ID NO: 168308 - RNA, 24 nt, Artificial Sequence
  Synthetic
aucucaaaauaaaaauuucaaaaa

SEQ ID NO: 168309 - RNA, 18 nt, Artificial Sequence
  Synthetic
aaaagaaagaaagaaaaa

SEQ ID NO: 168310 - RNA, 19 nt, Artificial Sequence
  Synthetic
aaaaagaaagaaagaaaaa

SEQ ID NO: 168311 - RNA, 20 nt, Artificial Sequence
  Synthetic
aaaaaagaaagaaagaaaaa

SEQ ID NO: 168312 - RNA, 21 nt, Artificial Sequence
  Synthetic
aaaaaaagaaagaaagaaaaa

SEQ ID NO: 168313 - RNA, 22 nt, Artificial Sequence
  Synthetic
aaaaaaaagaaagaaagaaaaa

SEQ ID NO: 168314 - RNA, 23 nt, Artificial Sequence
  Synthetic
aaaaaaaaagaaagaaagaaaaa

SEQ ID NO: 168315 - RNA, 24 nt, Artificial Sequence
  Synthetic
aaaaaaaaaagaaagaaagaaaaa

SEQ ID NO: 168316 - RNA, 18 nt, Artificial Sequence
  Synthetic
aagaagaagaaagaaaaa

SEQ ID NO: 168317 - RNA, 19 nt, Artificial Sequence
  Synthetic
gaagaagaagaaagaaaaa

SEQ ID NO: 168318 - RNA, 20 nt, Artificial Sequence
  Synthetic
ugaagaagaagaaagaaaaa

SEQ ID NO: 168319 - RNA, 21 nt, Artificial Sequence
  Synthetic
gugaagaagaagaaagaaaaa

SEQ ID NO: 168320 - RNA, 22 nt, Artificial Sequence
  Synthetic
agugaagaagaagaaagaaaaa

SEQ ID NO: 168321 - RNA, 23 nt, Artificial Sequence
  Synthetic
aagugaagaagaagaaagaaaaa

SEQ ID NO: 168322 - RNA, 24 nt, Artificial Sequence
  Synthetic
aaagugaagaagaagaaagaaaaa

SEQ ID NO: 168323 - RNA, 18 nt, Artificial Sequence
  Synthetic
gaauagaagaaagaaaaa

SEQ ID NO: 168324 - RNA, 19 nt, Artificial Sequence
  Synthetic
agaauagaagaaagaaaaa

SEQ ID NO: 168325 - RNA, 20 nt, Artificial Sequence
  Synthetic
aagaauagaagaaagaaaaa

SEQ ID NO: 168326 - RNA, 21 nt, Artificial Sequence
  Synthetic
gaagaauagaagaaagaaaaa

SEQ ID NO: 168327 - RNA, 22 nt, Artificial Sequence
  Synthetic
agaagaauagaagaaagaaaaa

SEQ ID NO: 168328 - RNA, 23 nt, Artificial Sequence
  Synthetic
gagaagaauagaagaaagaaaaa

SEQ ID NO: 168329 - RNA, 24 nt, Artificial Sequence
  Synthetic
agagaagaauagaagaaagaaaaa

SEQ ID NO: 168330 - RNA, 18 nt, Artificial Sequence
  Synthetic
agacaacaauaagaaaaa

SEQ ID NO: 168331 - RNA, 19 nt, Artificial Sequence
  Synthetic
aagacaacaauaagaaaaa

SEQ ID NO: 168332 - RNA, 20 nt, Artificial Sequence
  Synthetic
aaagacaacaauaagaaaaa

SEQ ID NO: 168333 - RNA, 21 nt, Artificial Sequence
  Synthetic
caaagacaacaauaagaaaaa

SEQ ID NO: 168334 - RNA, 22 nt, Artificial Sequence
  Synthetic
ccaaagacaacaauaagaaaaa

SEQ ID NO: 168335 - RNA, 23 nt, Artificial Sequence
  Synthetic
cccaaagacaacaauaagaaaaa

SEQ ID NO: 168336 - RNA, 24 nt, Artificial Sequence
  Synthetic
acccaaagacaacaauaagaaaaa

SEQ ID NO: 168337 - RNA, 18 nt, Artificial Sequence
  Synthetic
uuaugaauuuaagaaaaa

SEQ ID NO: 168338 - RNA, 19 nt, Artificial Sequence
  Synthetic
uuuaugaauuuaagaaaaa

SEQ ID NO: 168339 - RNA, 20 nt, Artificial Sequence
  Synthetic
uuuuaugaauuuaagaaaaa

SEQ ID NO: 168340 - RNA, 21 nt, Artificial Sequence
  Synthetic
auuuuaugaauuuaagaaaaa

SEQ ID NO: 168341 - RNA, 22 nt, Artificial Sequence
  Synthetic
cauuuuaugaauuuaagaaaaa

SEQ ID NO: 168342 - RNA, 23 nt, Artificial Sequence
  Synthetic
acauuuuaugaauuuaagaaaaa

SEQ ID NO: 168343 - RNA, 24 nt, Artificial Sequence
  Synthetic
uacauuuuaugaauuuaagaaaaa

SEQ ID NO: 168344 - RNA, 18 nt, Artificial Sequence
  Synthetic
ucucagagcccagaaaaa

SEQ ID NO: 168345 - RNA, 19 nt, Artificial Sequence
  Synthetic
uucucagagcccagaaaaa

SEQ ID NO: 168346 - RNA, 20 nt, Artificial Sequence
  Synthetic
uuucucagagcccagaaaaa

SEQ ID NO: 168347 - RNA, 21 nt, Artificial Sequence
  Synthetic
guuucucagagcccagaaaaa

SEQ ID NO: 168348 - RNA, 22 nt, Artificial Sequence
  Synthetic
gguuucucagagcccagaaaaa

SEQ ID NO: 168349 - RNA, 23 nt, Artificial Sequence
  Synthetic
agguuucucagagcccagaaaaa

SEQ ID NO: 168350 - RNA, 24 nt, Artificial Sequence
  Synthetic
gagguuucucagagcccagaaaaa

SEQ ID NO: 168351 - RNA, 18 nt, Artificial Sequence
  Synthetic
acaagaguuccagaaaaa

SEQ ID NO: 168352 - RNA, 19 nt, Artificial Sequence
  Synthetic
uacaagaguuccagaaaaa

SEQ ID NO: 168353 - RNA, 20 nt, Artificial Sequence
  Synthetic
uuacaagaguuccagaaaaa

SEQ ID NO: 168354 - RNA, 21 nt, Artificial Sequence
  Synthetic
guuacaagaguuccagaaaaa

SEQ ID NO: 168355 - RNA, 22 nt, Artificial Sequence
  Synthetic
uguuacaagaguuccagaaaaa

SEQ ID NO: 168356 - RNA, 23 nt, Artificial Sequence
  Synthetic
auguuacaagaguuccagaaaaa

SEQ ID NO: 168357 - RNA, 24 nt, Artificial Sequence
  Synthetic
gauguuacaagaguuccagaaaaa

SEQ ID NO: 168358 - RNA, 18 nt, Artificial Sequence
  Synthetic
cuccgagaggcagaaaaa

SEQ ID NO: 168359 - RNA, 19 nt, Artificial Sequence
  Synthetic
ucuccgagaggcagaaaaa

SEQ ID NO: 168360 - RNA, 20 nt, Artificial Sequence
  Synthetic
aucuccgagaggcagaaaaa

SEQ ID NO: 168361 - RNA, 21 nt, Artificial Sequence
  Synthetic
gaucuccgagaggcagaaaaa

SEQ ID NO: 168362 - RNA, 22 nt, Artificial Sequence
  Synthetic
agaucuccgagaggcagaaaaa

SEQ ID NO: 168363 - RNA, 23 nt, Artificial Sequence
  Synthetic
aagaucuccgagaggcagaaaaa

SEQ ID NO: 168364 - RNA, 24 nt, Artificial Sequence
  Synthetic
uaagaucuccgagaggcagaaaaa

SEQ ID NO: 168365 - RNA, 18 nt, Artificial Sequence
  Synthetic
gcugguuagucagaaaaa

SEQ ID NO: 168366 - RNA, 19 nt, Artificial Sequence
  Synthetic
ggcugguuagucagaaaaa

SEQ ID NO: 168367 - RNA, 20 nt, Artificial Sequence
  Synthetic
aggcugguuagucagaaaaa

SEQ ID NO: 168368 - RNA, 21 nt, Artificial Sequence
  Synthetic
aaggcugguuagucagaaaaa

SEQ ID NO: 168369 - RNA, 22 nt, Artificial Sequence
  Synthetic
aaaggcugguuagucagaaaaa

SEQ ID NO: 168370 - RNA, 23 nt, Artificial Sequence
  Synthetic
aaaaggcugguuagucagaaaaa

SEQ ID NO: 168371 - RNA, 24 nt, Artificial Sequence
  Synthetic
gaaaaggcugguuagucagaaaaa

SEQ ID NO: 168372 - RNA, 18 nt, Artificial Sequence
  Synthetic
accuguaguucagaaaaa

SEQ ID NO: 168373 - RNA, 19 nt, Artificial Sequence
  Synthetic
uaccuguaguucagaaaaa

SEQ ID NO: 168374 - RNA, 20 nt, Artificial Sequence
  Synthetic
uuaccuguaguucagaaaaa

SEQ ID NO: 168375 - RNA, 21 nt, Artificial Sequence
  Synthetic
guuaccuguaguucagaaaaa

SEQ ID NO: 168376 - RNA, 22 nt, Artificial Sequence
  Synthetic
uguuaccuguaguucagaaaaa

SEQ ID NO: 168377 - RNA, 23 nt, Artificial Sequence
  Synthetic
auguuaccuguaguucagaaaaa

SEQ ID NO: 168378 - RNA, 24 nt, Artificial Sequence
  Synthetic
gauguuaccuguaguucagaaaaa

SEQ ID NO: 168379 - RNA, 18 nt, Artificial Sequence
  Synthetic
gaccaaaagagagaaaaa

SEQ ID NO: 168380 - RNA, 19 nt, Artificial Sequence
  Synthetic
agaccaaaagagagaaaaa

SEQ ID NO: 168381 - RNA, 20 nt, Artificial Sequence
  Synthetic
aagaccaaaagagagaaaaa

SEQ ID NO: 168382 - RNA, 21 nt, Artificial Sequence
  Synthetic
gaagaccaaaagagagaaaaa

SEQ ID NO: 168383 - RNA, 22 nt, Artificial Sequence
  Synthetic
ggaagaccaaaagagagaaaaa

SEQ ID NO: 168384 - RNA, 23 nt, Artificial Sequence
  Synthetic
uggaagaccaaaagagagaaaaa

SEQ ID NO: 168385 - RNA, 24 nt, Artificial Sequence
  Synthetic
guggaagaccaaaagagagaaaaa

SEQ ID NO: 168386 - RNA, 18 nt, Artificial Sequence
  Synthetic
gaggagacgagagaaaaa

SEQ ID NO: 168387 - RNA, 19 nt, Artificial Sequence
  Synthetic
cgaggagacgagagaaaaa

SEQ ID NO: 168388 - RNA, 20 nt, Artificial Sequence
  Synthetic
acgaggagacgagagaaaaa

SEQ ID NO: 168389 - RNA, 21 nt, Artificial Sequence
  Synthetic
uacgaggagacgagagaaaaa

SEQ ID NO: 168390 - RNA, 22 nt, Artificial Sequence
  Synthetic
auacgaggagacgagagaaaaa

SEQ ID NO: 168391 - RNA, 23 nt, Artificial Sequence
  Synthetic
uauacgaggagacgagagaaaaa

SEQ ID NO: 168392 - RNA, 24 nt, Artificial Sequence
  Synthetic
uuauacgaggagacgagagaaaaa

SEQ ID NO: 168393 - RNA, 18 nt, Artificial Sequence
  Synthetic
cuguguggaggagaaaaa

SEQ ID NO: 168394 - RNA, 19 nt, Artificial Sequence
  Synthetic
ucuguguggaggagaaaaa

SEQ ID NO: 168395 - RNA, 20 nt, Artificial Sequence
  Synthetic
uucuguguggaggagaaaaa

SEQ ID NO: 168396 - RNA, 21 nt, Artificial Sequence
  Synthetic
auucuguguggaggagaaaaa

SEQ ID NO: 168397 - RNA, 22 nt, Artificial Sequence
  Synthetic
gauucuguguggaggagaaaaa

SEQ ID NO: 168398 - RNA, 23 nt, Artificial Sequence
  Synthetic
ugauucuguguggaggagaaaaa

SEQ ID NO: 168399 - RNA, 24 nt, Artificial Sequence
  Synthetic
cugauucuguguggaggagaaaaa

SEQ ID NO: 168400 - RNA, 18 nt, Artificial Sequence
  Synthetic
cuuuaagugggagaaaaa

SEQ ID NO: 168401 - RNA, 19 nt, Artificial Sequence
  Synthetic
gcuuuaagugggagaaaaa

SEQ ID NO: 168402 - RNA, 20 nt, Artificial Sequence
  Synthetic
ugcuuuaagugggagaaaaa

SEQ ID NO: 168403 - RNA, 21 nt, Artificial Sequence
  Synthetic
cugcuuuaagugggagaaaaa

SEQ ID NO: 168404 - RNA, 22 nt, Artificial Sequence
  Synthetic
acugcuuuaagugggagaaaaa

SEQ ID NO: 168405 - RNA, 23 nt, Artificial Sequence
  Synthetic
aacugcuuuaagugggagaaaaa

SEQ ID NO: 168406 - RNA, 24 nt, Artificial Sequence
  Synthetic
uaacugcuuuaagugggagaaaaa

SEQ ID NO: 168407 - RNA, 18 nt, Artificial Sequence
  Synthetic
ggagaaggaugagaaaaa

SEQ ID NO: 168408 - RNA, 19 nt, Artificial Sequence
  Synthetic
aggagaaggaugagaaaaa

SEQ ID NO: 168409 - RNA, 20 nt, Artificial Sequence
  Synthetic
gaggagaaggaugagaaaaa

SEQ ID NO: 168410 - RNA, 21 nt, Artificial Sequence
  Synthetic
agaggagaaggaugagaaaaa

SEQ ID NO: 168411 - RNA, 22 nt, Artificial Sequence
  Synthetic
gagaggagaaggaugagaaaaa

SEQ ID NO: 168412 - RNA, 23 nt, Artificial Sequence
  Synthetic
ggagaggagaaggaugagaaaaa

SEQ ID NO: 168413 - RNA, 24 nt, Artificial Sequence
  Synthetic
gggagaggagaaggaugagaaaaa

SEQ ID NO: 168414 - RNA, 18 nt, Artificial Sequence
  Synthetic
gauaauccaauagaaaaa

SEQ ID NO: 168415 - RNA, 19 nt, Artificial Sequence
  Synthetic
agauaauccaauagaaaaa

SEQ ID NO: 168416 - RNA, 20 nt, Artificial Sequence
  Synthetic
cagauaauccaauagaaaaa

SEQ ID NO: 168417 - RNA, 21 nt, Artificial Sequence
  Synthetic
acagauaauccaauagaaaaa

SEQ ID NO: 168418 - RNA, 22 nt, Artificial Sequence
  Synthetic
aacagauaauccaauagaaaaa

SEQ ID NO: 168419 - RNA, 23 nt, Artificial Sequence
  Synthetic
gaacagauaauccaauagaaaaa

SEQ ID NO: 168420 - RNA, 24 nt, Artificial Sequence
  Synthetic
agaacagauaauccaauagaaaaa

SEQ ID NO: 168421 - RNA, 18 nt, Artificial Sequence
  Synthetic
uuccaaucaauagaaaaa

SEQ ID NO: 168422 - RNA, 19 nt, Artificial Sequence
  Synthetic
auuccaaucaauagaaaaa

SEQ ID NO: 168423 - RNA, 20 nt, Artificial Sequence
  Synthetic
uauuccaaucaauagaaaaa

SEQ ID NO: 168424 - RNA, 21 nt, Artificial Sequence
  Synthetic
cuauuccaaucaauagaaaaa

SEQ ID NO: 168425 - RNA, 22 nt, Artificial Sequence
  Synthetic
acuauuccaaucaauagaaaaa

SEQ ID NO: 168426 - RNA, 23 nt, Artificial Sequence
  Synthetic
aacuauuccaaucaauagaaaaa

SEQ ID NO: 168427 - RNA, 24 nt, Artificial Sequence
  Synthetic
aaacuauuccaaucaauagaaaaa

SEQ ID NO: 168428 - RNA, 18 nt, Artificial Sequence
  Synthetic
uucaaacauauagaaaaa

SEQ ID NO: 168429 - RNA, 19 nt, Artificial Sequence
  Synthetic
uuucaaacauauagaaaaa

SEQ ID NO: 168430 - RNA, 20 nt, Artificial Sequence
  Synthetic
auuucaaacauauagaaaaa

SEQ ID NO: 168431 - RNA, 21 nt, Artificial Sequence
  Synthetic
aauuucaaacauauagaaaaa

SEQ ID NO: 168432 - RNA, 22 nt, Artificial Sequence
  Synthetic
aaauuucaaacauauagaaaaa

SEQ ID NO: 168433 - RNA, 23 nt, Artificial Sequence
  Synthetic
aaaauuucaaacauauagaaaaa

SEQ ID NO: 168434 - RNA, 24 nt, Artificial Sequence
  Synthetic
aaaaauuucaaacauauagaaaaa

SEQ ID NO: 168435 - RNA, 18 nt, Artificial Sequence
  Synthetic
guacccgagguagaaaaa

SEQ ID NO: 168436 - RNA, 19 nt, Artificial Sequence
  Synthetic
uguacccgagguagaaaaa

SEQ ID NO: 168437 - RNA, 20 nt, Artificial Sequence
  Synthetic
guguacccgagguagaaaaa

SEQ ID NO: 168438 - RNA, 21 nt, Artificial Sequence
  Synthetic
aguguacccgagguagaaaaa

SEQ ID NO: 168439 - RNA, 22 nt, Artificial Sequence
  Synthetic
caguguacccgagguagaaaaa

SEQ ID NO: 168440 - RNA, 23 nt, Artificial Sequence
  Synthetic
ucaguguacccgagguagaaaaa

SEQ ID NO: 168441 - RNA, 24 nt, Artificial Sequence
  Synthetic
uucaguguacccgagguagaaaaa

SEQ ID NO: 168442 - RNA, 18 nt, Artificial Sequence
  Synthetic
agaagguagguagaaaaa

SEQ ID NO: 168443 - RNA, 19 nt, Artificial Sequence
  Synthetic
aagaagguagguagaaaaa

SEQ ID NO: 168444 - RNA, 20 nt, Artificial Sequence
  Synthetic
aaagaagguagguagaaaaa

SEQ ID NO: 168445 - RNA, 21 nt, Artificial Sequence
  Synthetic
aaaagaagguagguagaaaaa

SEQ ID NO: 168446 - RNA, 22 nt, Artificial Sequence
  Synthetic
aaaaagaagguagguagaaaaa

SEQ ID NO: 168447 - RNA, 23 nt, Artificial Sequence
  Synthetic
gaaaaagaagguagguagaaaaa

SEQ ID NO: 168448 - RNA, 24 nt, Artificial Sequence
  Synthetic
agaaaaagaagguagguagaaaaa

SEQ ID NO: 168449 - RNA, 18 nt, Artificial Sequence
  Synthetic
ugaacucaguuagaaaaa

SEQ ID NO: 168450 - RNA, 19 nt, Artificial Sequence
  Synthetic
cugaacucaguuagaaaaa

SEQ ID NO: 168451 - RNA, 20 nt, Artificial Sequence
  Synthetic
ccugaacucaguuagaaaaa

SEQ ID NO: 168452 - RNA, 21 nt, Artificial Sequence
  Synthetic
uccugaacucaguuagaaaaa

SEQ ID NO: 168453 - RNA, 22 nt, Artificial Sequence
  Synthetic
cuccugaacucaguuagaaaaa

SEQ ID NO: 168454 - RNA, 23 nt, Artificial Sequence
  Synthetic
ucuccugaacucaguuagaaaaa

SEQ ID NO: 168455 - RNA, 24 nt, Artificial Sequence
  Synthetic
aucuccugaacucaguuagaaaaa

SEQ ID NO: 168456 - RNA, 18 nt, Artificial Sequence
  Synthetic
aucaggguaaaggaaaaa

SEQ ID NO: 168457 - RNA, 19 nt, Artificial Sequence
  Synthetic
caucaggguaaaggaaaaa

SEQ ID NO: 168458 - RNA, 20 nt, Artificial Sequence
  Synthetic
ucaucaggguaaaggaaaaa

SEQ ID NO: 168459 - RNA, 21 nt, Artificial Sequence
  Synthetic
aucaucaggguaaaggaaaaa

SEQ ID NO: 168460 - RNA, 22 nt, Artificial Sequence
  Synthetic
aaucaucaggguaaaggaaaaa

SEQ ID NO: 168461 - RNA, 23 nt, Artificial Sequence
  Synthetic
aaaucaucaggguaaaggaaaaa

SEQ ID NO: 168462 - RNA, 24 nt, Artificial Sequence
  Synthetic
aaaaucaucaggguaaaggaaaaa

SEQ ID NO: 168463 - RNA, 18 nt, Artificial Sequence
  Synthetic
gaaggaaagcaggaaaaa

SEQ ID NO: 168464 - RNA, 19 nt, Artificial Sequence
  Synthetic
ggaaggaaagcaggaaaaa

SEQ ID NO: 168465 - RNA, 20 nt, Artificial Sequence
  Synthetic
aggaaggaaagcaggaaaaa

SEQ ID NO: 168466 - RNA, 21 nt, Artificial Sequence
  Synthetic
gaggaaggaaagcaggaaaaa

SEQ ID NO: 168467 - RNA, 22 nt, Artificial Sequence
  Synthetic
agaggaaggaaagcaggaaaaa

SEQ ID NO: 168468 - RNA, 23 nt, Artificial Sequence
  Synthetic
gagaggaaggaaagcaggaaaaa

SEQ ID NO: 168469 - RNA, 24 nt, Artificial Sequence
  Synthetic
agagaggaaggaaagcaggaaaaa

SEQ ID NO: 168470 - RNA, 18 nt, Artificial Sequence
  Synthetic
ugagaaaugcaggaaaaa

SEQ ID NO: 168471 - RNA, 19 nt, Artificial Sequence
  Synthetic
gugagaaaugcaggaaaaa

SEQ ID NO: 168472 - RNA, 20 nt, Artificial Sequence
  Synthetic
ugugagaaaugcaggaaaaa

SEQ ID NO: 168473 - RNA, 21 nt, Artificial Sequence
  Synthetic
gugugagaaaugcaggaaaaa

SEQ ID NO: 168474 - RNA, 22 nt, Artificial Sequence
  Synthetic
ugugugagaaaugcaggaaaaa

SEQ ID NO: 168475 - RNA, 23 nt, Artificial Sequence
  Synthetic
uugugugagaaaugcaggaaaaa

SEQ ID NO: 168476 - RNA, 24 nt, Artificial Sequence
  Synthetic
auugugugagaaaugcaggaaaaa

SEQ ID NO: 168477 - RNA, 18 nt, Artificial Sequence
  Synthetic
uuuaguacagaggaaaaa

SEQ ID NO: 168478 - RNA, 19 nt, Artificial Sequence
  Synthetic
auuuaguacagaggaaaaa

SEQ ID NO: 168479 - RNA, 20 nt, Artificial Sequence
  Synthetic
uauuuaguacagaggaaaaa

SEQ ID NO: 168480 - RNA, 21 nt, Artificial Sequence
  Synthetic
auauuuaguacagaggaaaaa

SEQ ID NO: 168481 - RNA, 22 nt, Artificial Sequence
  Synthetic
uauauuuaguacagaggaaaaa

SEQ ID NO: 168482 - RNA, 23 nt, Artificial Sequence
  Synthetic
guauauuuaguacagaggaaaaa

SEQ ID NO: 168483 - RNA, 24 nt, Artificial Sequence
  Synthetic
cguauauuuaguacagaggaaaaa

SEQ ID NO: 168484 - RNA, 18 nt, Artificial Sequence
  Synthetic
caucauuucuaggaaaaa

SEQ ID NO: 168485 - RNA, 19 nt, Artificial Sequence
  Synthetic
ucaucauuucuaggaaaaa

SEQ ID NO: 168486 - RNA, 20 nt, Artificial Sequence
  Synthetic
uucaucauuucuaggaaaaa

SEQ ID NO: 168487 - RNA, 21 nt, Artificial Sequence
  Synthetic
guucaucauuucuaggaaaaa

SEQ ID NO: 168488 - RNA, 22 nt, Artificial Sequence
  Synthetic
aguucaucauuucuaggaaaaa

SEQ ID NO: 168489 - RNA, 23 nt, Artificial Sequence
  Synthetic
uaguucaucauuucuaggaaaaa

SEQ ID NO: 168490 - RNA, 24 nt, Artificial Sequence
  Synthetic
cuaguucaucauuucuaggaaaaa

SEQ ID NO: 168491 - RNA, 18 nt, Artificial Sequence
  Synthetic
gaggaggaaagggaaaaa

SEQ ID NO: 168492 - RNA, 19 nt, Artificial Sequence
  Synthetic
ggaggaggaaagggaaaaa

SEQ ID NO: 168493 - RNA, 20 nt, Artificial Sequence
  Synthetic
aggaggaggaaagggaaaaa

SEQ ID NO: 168494 - RNA, 21 nt, Artificial Sequence
  Synthetic
aaggaggaggaaagggaaaaa

SEQ ID NO: 168495 - RNA, 22 nt, Artificial Sequence
  Synthetic
gaaggaggaggaaagggaaaaa

SEQ ID NO: 168496 - RNA, 23 nt, Artificial Sequence
  Synthetic
ggaaggaggaggaaagggaaaaa

SEQ ID NO: 168497 - RNA, 24 nt, Artificial Sequence
  Synthetic
aggaaggaggaggaaagggaaaaa

SEQ ID NO: 168498 - RNA, 18 nt, Artificial Sequence
  Synthetic
ugucugcgaagggaaaaa

SEQ ID NO: 168499 - RNA, 19 nt, Artificial Sequence
  Synthetic
augucugcgaagggaaaaa

SEQ ID NO: 168500 - RNA, 20 nt, Artificial Sequence
  Synthetic
aaugucugcgaagggaaaaa

SEQ ID NO: 168501 - RNA, 21 nt, Artificial Sequence
  Synthetic
gaaugucugcgaagggaaaaa

SEQ ID NO: 168502 - RNA, 22 nt, Artificial Sequence
  Synthetic
ugaaugucugcgaagggaaaaa

SEQ ID NO: 168503 - RNA, 23 nt, Artificial Sequence
  Synthetic
uugaaugucugcgaagggaaaaa

SEQ ID NO: 168504 - RNA, 24 nt, Artificial Sequence
  Synthetic
uuugaaugucugcgaagggaaaaa

SEQ ID NO: 168505 - RNA, 18 nt, Artificial Sequence
  Synthetic
cucuugucccuggaaaaa

SEQ ID NO: 168506 - RNA, 19 nt, Artificial Sequence
  Synthetic
acucuugucccuggaaaaa

SEQ ID NO: 168507 - RNA, 20 nt, Artificial Sequence
  Synthetic
cacucuugucccuggaaaaa

SEQ ID NO: 168508 - RNA, 21 nt, Artificial Sequence
  Synthetic
ccacucuugucccuggaaaaa

SEQ ID NO: 168509 - RNA, 22 nt, Artificial Sequence
  Synthetic
cccacucuugucccuggaaaaa

SEQ ID NO: 168510 - RNA, 23 nt, Artificial Sequence
  Synthetic
acccacucuugucccuggaaaaa

SEQ ID NO: 168511 - RNA, 24 nt, Artificial Sequence
  Synthetic
aacccacucuugucccuggaaaaa

SEQ ID NO: 168512 - RNA, 18 nt, Artificial Sequence
  Synthetic
aaguuuaaaaaugaaaaa

SEQ ID NO: 168513 - RNA, 19 nt, Artificial Sequence
  Synthetic
gaaguuuaaaaaugaaaaa

SEQ ID NO: 168514 - RNA, 20 nt, Artificial Sequence
  Synthetic
ugaaguuuaaaaaugaaaaa

SEQ ID NO: 168515 - RNA, 21 nt, Artificial Sequence
  Synthetic
augaaguuuaaaaaugaaaaa

SEQ ID NO: 168516 - RNA, 22 nt, Artificial Sequence
  Synthetic
gaugaaguuuaaaaaugaaaaa

SEQ ID NO: 168517 - RNA, 23 nt, Artificial Sequence
  Synthetic
agaugaaguuuaaaaaugaaaaa

SEQ ID NO: 168518 - RNA, 24 nt, Artificial Sequence
  Synthetic
uagaugaaguuuaaaaaugaaaaa

SEQ ID NO: 168519 - RNA, 18 nt, Artificial Sequence
  Synthetic
aggcaagauaaugaaaaa

SEQ ID NO: 168520 - RNA, 19 nt, Artificial Sequence
  Synthetic
uaggcaagauaaugaaaaa

SEQ ID NO: 168521 - RNA, 20 nt, Artificial Sequence
  Synthetic
auaggcaagauaaugaaaaa

SEQ ID NO: 168522 - RNA, 21 nt, Artificial Sequence
  Synthetic
cauaggcaagauaaugaaaaa

SEQ ID NO: 168523 - RNA, 22 nt, Artificial Sequence
  Synthetic
ucauaggcaagauaaugaaaaa

SEQ ID NO: 168524 - RNA, 23 nt, Artificial Sequence
  Synthetic
aucauaggcaagauaaugaaaaa

SEQ ID NO: 168525 - RNA, 24 nt, Artificial Sequence
  Synthetic
gaucauaggcaagauaaugaaaaa

SEQ ID NO: 168526 - RNA, 18 nt, Artificial Sequence
  Synthetic
ucugcagaacaugaaaaa

SEQ ID NO: 168527 - RNA, 19 nt, Artificial Sequence
  Synthetic
gucugcagaacaugaaaaa

SEQ ID NO: 168528 - RNA, 20 nt, Artificial Sequence
  Synthetic
ugucugcagaacaugaaaaa

SEQ ID NO: 168529 - RNA, 21 nt, Artificial Sequence
  Synthetic
augucugcagaacaugaaaaa

SEQ ID NO: 168530 - RNA, 22 nt, Artificial Sequence
  Synthetic
gaugucugcagaacaugaaaaa

SEQ ID NO: 168531 - RNA, 23 nt, Artificial Sequence
  Synthetic
agaugucugcagaacaugaaaaa

SEQ ID NO: 168532 - RNA, 24 nt, Artificial Sequence
  Synthetic
gagaugucugcagaacaugaaaaa

SEQ ID NO: 168533 - RNA, 18 nt, Artificial Sequence
  Synthetic
ugagcucagagugaaaaa

SEQ ID NO: 168534 - RNA, 19 nt, Artificial Sequence
  Synthetic
uugagcucagagugaaaaa

SEQ ID NO: 168535 - RNA, 20 nt, Artificial Sequence
  Synthetic
guugagcucagagugaaaaa

SEQ ID NO: 168536 - RNA, 21 nt, Artificial Sequence
  Synthetic
aguugagcucagagugaaaaa

SEQ ID NO: 168537 - RNA, 22 nt, Artificial Sequence
  Synthetic
caguugagcucagagugaaaaa

SEQ ID NO: 168538 - RNA, 23 nt, Artificial Sequence
  Synthetic
acaguugagcucagagugaaaaa

SEQ ID NO: 168539 - RNA, 24 nt, Artificial Sequence
  Synthetic
gacaguugagcucagagugaaaaa

SEQ ID NO: 168540 - RNA, 18 nt, Artificial Sequence
  Synthetic
ccaaaggggagugaaaaa

SEQ ID NO: 168541 - RNA, 19 nt, Artificial Sequence
  Synthetic
accaaaggggagugaaaaa

SEQ ID NO: 168542 - RNA, 20 nt, Artificial Sequence
  Synthetic
uaccaaaggggagugaaaaa

SEQ ID NO: 168543 - RNA, 21 nt, Artificial Sequence
  Synthetic
guaccaaaggggagugaaaaa

SEQ ID NO: 168544 - RNA, 22 nt, Artificial Sequence
  Synthetic
aguaccaaaggggagugaaaaa

SEQ ID NO: 168545 - RNA, 23 nt, Artificial Sequence
  Synthetic
gaguaccaaaggggagugaaaaa

SEQ ID NO: 168546 - RNA, 24 nt, Artificial Sequence
  Synthetic
ggaguaccaaaggggagugaaaaa

SEQ ID NO: 168547 - RNA, 18 nt, Artificial Sequence
  Synthetic
aagaagucucuugaaaaa

SEQ ID NO: 168548 - RNA, 19 nt, Artificial Sequence
  Synthetic
aaagaagucucuugaaaaa

SEQ ID NO: 168549 - RNA, 20 nt, Artificial Sequence
  Synthetic
gaaagaagucucuugaaaaa

SEQ ID NO: 168550 - RNA, 21 nt, Artificial Sequence
  Synthetic
agaaagaagucucuugaaaaa

SEQ ID NO: 168551 - RNA, 22 nt, Artificial Sequence
  Synthetic
gagaaagaagucucuugaaaaa

SEQ ID NO: 168552 - RNA, 23 nt, Artificial Sequence
  Synthetic
agagaaagaagucucuugaaaaa

SEQ ID NO: 168553 - RNA, 24 nt, Artificial Sequence
  Synthetic
aagagaaagaagucucuugaaaaa

SEQ ID NO: 168554 - RNA, 18 nt, Artificial Sequence
  Synthetic
uaaauaggauuugaaaaa

SEQ ID NO: 168555 - RNA, 19 nt, Artificial Sequence
  Synthetic
auaaauaggauuugaaaaa

SEQ ID NO: 168556 - RNA, 20 nt, Artificial Sequence
  Synthetic
gauaaauaggauuugaaaaa

SEQ ID NO: 168557 - RNA, 21 nt, Artificial Sequence
  Synthetic
ggauaaauaggauuugaaaaa

SEQ ID NO: 168558 - RNA, 22 nt, Artificial Sequence
  Synthetic
aggauaaauaggauuugaaaaa

SEQ ID NO: 168559 - RNA, 23 nt, Artificial Sequence
  Synthetic
uaggauaaauaggauuugaaaaa

SEQ ID NO: 168560 - RNA, 24 nt, Artificial Sequence
  Synthetic
guaggauaaauaggauuugaaaaa

SEQ ID NO: 168561 - RNA, 18 nt, Artificial Sequence
  Synthetic
agagcagauuuugaaaaa

SEQ ID NO: 168562 - RNA, 19 nt, Artificial Sequence
  Synthetic
aagagcagauuuugaaaaa

SEQ ID NO: 168563 - RNA, 20 nt, Artificial Sequence
  Synthetic
aaagagcagauuuugaaaaa

SEQ ID NO: 168564 - RNA, 21 nt, Artificial Sequence
  Synthetic
gaaagagcagauuuugaaaaa

SEQ ID NO: 168565 - RNA, 22 nt, Artificial Sequence
  Synthetic
agaaagagcagauuuugaaaaa

SEQ ID NO: 168566 - RNA, 23 nt, Artificial Sequence
  Synthetic
aagaaagagcagauuuugaaaaa

SEQ ID NO: 168567 - RNA, 24 nt, Artificial Sequence
  Synthetic
uaagaaagagcagauuuugaaaaa

SEQ ID NO: 168568 - RNA, 18 nt, Artificial Sequence
  Synthetic
agcuuacaaaaauaaaaa

SEQ ID NO: 168569 - RNA, 19 nt, Artificial Sequence
  Synthetic
aagcuuacaaaaauaaaaa

SEQ ID NO: 168570 - RNA, 20 nt, Artificial Sequence
  Synthetic
caagcuuacaaaaauaaaaa

SEQ ID NO: 168571 - RNA, 21 nt, Artificial Sequence
  Synthetic
acaagcuuacaaaaauaaaaa

SEQ ID NO: 168572 - RNA, 22 nt, Artificial Sequence
  Synthetic
gacaagcuuacaaaaauaaaaa

SEQ ID NO: 168573 - RNA, 23 nt, Artificial Sequence
  Synthetic
ugacaagcuuacaaaaauaaaaa

SEQ ID NO: 168574 - RNA, 24 nt, Artificial Sequence
  Synthetic
cugacaagcuuacaaaaauaaaaa

SEQ ID NO: 168575 - RNA, 18 nt, Artificial Sequence
  Synthetic
cacucaugaaaauaaaaa

SEQ ID NO: 168576 - RNA, 19 nt, Artificial Sequence
  Synthetic
acacucaugaaaauaaaaa

SEQ ID NO: 168577 - RNA, 20 nt, Artificial Sequence
  Synthetic
uacacucaugaaaauaaaaa

SEQ ID NO: 168578 - RNA, 21 nt, Artificial Sequence
  Synthetic
auacacucaugaaaauaaaaa

SEQ ID NO: 168579 - RNA, 22 nt, Artificial Sequence
  Synthetic
uauacacucaugaaaauaaaaa

SEQ ID NO: 168580 - RNA, 23 nt, Artificial Sequence
  Synthetic
auauacacucaugaaaauaaaaa

SEQ ID NO: 168581 - RNA, 24 nt, Artificial Sequence
  Synthetic
uauauacacucaugaaaauaaaaa

SEQ ID NO: 168582 - RNA, 18 nt, Artificial Sequence
  Synthetic
cugacagccaaauaaaaa

SEQ ID NO: 168583 - RNA, 19 nt, Artificial Sequence
  Synthetic
ccugacagccaaauaaaaa

SEQ ID NO: 168584 - RNA, 20 nt, Artificial Sequence
  Synthetic
uccugacagccaaauaaaaa

SEQ ID NO: 168585 - RNA, 21 nt, Artificial Sequence
  Synthetic
cuccugacagccaaauaaaaa

SEQ ID NO: 168586 - RNA, 22 nt, Artificial Sequence
  Synthetic
acuccugacagccaaauaaaaa

SEQ ID NO: 168587 - RNA, 23 nt, Artificial Sequence
  Synthetic
aacuccugacagccaaauaaaaa

SEQ ID NO: 168588 - RNA, 24 nt, Artificial Sequence
  Synthetic
caacuccugacagccaaauaaaaa

SEQ ID NO: 168589 - RNA, 18 nt, Artificial Sequence
  Synthetic
uuuugguuuaaauaaaaa

SEQ ID NO: 168590 - RNA, 19 nt, Artificial Sequence
  Synthetic
guuuugguuuaaauaaaaa

SEQ ID NO: 168591 - RNA, 20 nt, Artificial Sequence
  Synthetic
gguuuugguuuaaauaaaaa

SEQ ID NO: 168592 - RNA, 21 nt, Artificial Sequence
  Synthetic
ugguuuugguuuaaauaaaaa

SEQ ID NO: 168593 - RNA, 22 nt, Artificial Sequence
  Synthetic
cugguuuugguuuaaauaaaaa

SEQ ID NO: 168594 - RNA, 23 nt, Artificial Sequence
  Synthetic
ucugguuuugguuuaaauaaaaa

SEQ ID NO: 168595 - RNA, 24 nt, Artificial Sequence
  Synthetic
uucugguuuugguuuaaauaaaaa

SEQ ID NO: 168596 - RNA, 18 nt, Artificial Sequence
  Synthetic
uauucauuauaauaaaaa

SEQ ID NO: 168597 - RNA, 19 nt, Artificial Sequence
  Synthetic
uuauucauuauaauaaaaa

SEQ ID NO: 168598 - RNA, 20 nt, Artificial Sequence
  Synthetic
guuauucauuauaauaaaaa

SEQ ID NO: 168599 - RNA, 21 nt, Artificial Sequence
  Synthetic
gguuauucauuauaauaaaaa

SEQ ID NO: 168600 - RNA, 22 nt, Artificial Sequence
  Synthetic
ggguuauucauuauaauaaaaa

SEQ ID NO: 168601 - RNA, 23 nt, Artificial Sequence
  Synthetic
aggguuauucauuauaauaaaaa

SEQ ID NO: 168602 - RNA, 24 nt, Artificial Sequence
  Synthetic
uaggguuauucauuauaauaaaaa

SEQ ID NO: 168603 - RNA, 18 nt, Artificial Sequence
  Synthetic
gggaguuauuaauaaaaa

SEQ ID NO: 168604 - RNA, 19 nt, Artificial Sequence
  Synthetic
ugggaguuauuaauaaaaa

SEQ ID NO: 168605 - RNA, 20 nt, Artificial Sequence
  Synthetic
gugggaguuauuaauaaaaa

SEQ ID NO: 168606 - RNA, 21 nt, Artificial Sequence
  Synthetic
ggugggaguuauuaauaaaaa

SEQ ID NO: 168607 - RNA, 22 nt, Artificial Sequence
  Synthetic
uggugggaguuauuaauaaaaa

SEQ ID NO: 168608 - RNA, 23 nt, Artificial Sequence
  Synthetic
auggugggaguuauuaauaaaaa

SEQ ID NO: 168609 - RNA, 24 nt, Artificial Sequence
  Synthetic
cauggugggaguuauuaauaaaaa

SEQ ID NO: 168610 - RNA, 18 nt, Artificial Sequence
  Synthetic
ggaacuuguacauaaaaa

SEQ ID NO: 168611 - RNA, 19 nt, Artificial Sequence
  Synthetic
aggaacuuguacauaaaaa

SEQ ID NO: 168612 - RNA, 20 nt, Artificial Sequence
  Synthetic
uaggaacuuguacauaaaaa

SEQ ID NO: 168613 - RNA, 21 nt, Artificial Sequence
  Synthetic
cuaggaacuuguacauaaaaa

SEQ ID NO: 168614 - RNA, 22 nt, Artificial Sequence
  Synthetic
ucuaggaacuuguacauaaaaa

SEQ ID NO: 168615 - RNA, 23 nt, Artificial Sequence
  Synthetic
cucuaggaacuuguacauaaaaa

SEQ ID NO: 168616 - RNA, 24 nt, Artificial Sequence
  Synthetic
ccucuaggaacuuguacauaaaaa

SEQ ID NO: 168617 - RNA, 18 nt, Artificial Sequence
  Synthetic
aaucaucccucauaaaaa

SEQ ID NO: 168618 - RNA, 19 nt, Artificial Sequence
  Synthetic
aaaucaucccucauaaaaa

SEQ ID NO: 168619 - RNA, 20 nt, Artificial Sequence
  Synthetic
gaaaucaucccucauaaaaa

SEQ ID NO: 168620 - RNA, 21 nt, Artificial Sequence
  Synthetic
ugaaaucaucccucauaaaaa

SEQ ID NO: 168621 - RNA, 22 nt, Artificial Sequence
  Synthetic
augaaaucaucccucauaaaaa

SEQ ID NO: 168622 - RNA, 23 nt, Artificial Sequence
  Synthetic
aaugaaaucaucccucauaaaaa

SEQ ID NO: 168623 - RNA, 24 nt, Artificial Sequence
  Synthetic
aaaugaaaucaucccucauaaaaa

SEQ ID NO: 168624 - RNA, 18 nt, Artificial Sequence
  Synthetic
uuugaucacugauaaaaa

SEQ ID NO: 168625 - RNA, 19 nt, Artificial Sequence
  Synthetic
uuuugaucacugauaaaaa

SEQ ID NO: 168626 - RNA, 20 nt, Artificial Sequence
  Synthetic
auuuugaucacugauaaaaa

SEQ ID NO: 168627 - RNA, 21 nt, Artificial Sequence
  Synthetic
gauuuugaucacugauaaaaa

SEQ ID NO: 168628 - RNA, 22 nt, Artificial Sequence
  Synthetic
ggauuuugaucacugauaaaaa

SEQ ID NO: 168629 - RNA, 23 nt, Artificial Sequence
  Synthetic
aggauuuugaucacugauaaaaa

SEQ ID NO: 168630 - RNA, 24 nt, Artificial Sequence
  Synthetic
aaggauuuugaucacugauaaaaa

SEQ ID NO: 168631 - RNA, 18 nt, Artificial Sequence
  Synthetic
auaaaugcaauauaaaaa

SEQ ID NO: 168632 - RNA, 19 nt, Artificial Sequence
  Synthetic
aauaaaugcaauauaaaaa

SEQ ID NO: 168633 - RNA, 20 nt, Artificial Sequence
  Synthetic
aaauaaaugcaauauaaaaa

SEQ ID NO: 168634 - RNA, 21 nt, Artificial Sequence
  Synthetic
gaaauaaaugcaauauaaaaa

SEQ ID NO: 168635 - RNA, 22 nt, Artificial Sequence
  Synthetic
agaaauaaaugcaauauaaaaa

SEQ ID NO: 168636 - RNA, 23 nt, Artificial Sequence
  Synthetic
cagaaauaaaugcaauauaaaaa

SEQ ID NO: 168637 - RNA, 24 nt, Artificial Sequence
  Synthetic
ucagaaauaaaugcaauauaaaaa

SEQ ID NO: 168638 - RNA, 18 nt, Artificial Sequence
  Synthetic
auuguuuacauauaaaaa

SEQ ID NO: 168639 - RNA, 19 nt, Artificial Sequence
  Synthetic
aauuguuuacauauaaaaa

SEQ ID NO: 168640 - RNA, 20 nt, Artificial Sequence
  Synthetic
aaauuguuuacauauaaaaa

SEQ ID NO: 168641 - RNA, 21 nt, Artificial Sequence
  Synthetic
caaauuguuuacauauaaaaa

SEQ ID NO: 168642 - RNA, 22 nt, Artificial Sequence
  Synthetic
gcaaauuguuuacauauaaaaa

SEQ ID NO: 168643 - RNA, 23 nt, Artificial Sequence
  Synthetic
ugcaaauuguuuacauauaaaaa

SEQ ID NO: 168644 - RNA, 24 nt, Artificial Sequence
  Synthetic
augcaaauuguuuacauauaaaaa

SEQ ID NO: 168645 - RNA, 18 nt, Artificial Sequence
  Synthetic
ugguauaucauauaaaaa

SEQ ID NO: 168646 - RNA, 19 nt, Artificial Sequence
  Synthetic
augguauaucauauaaaaa

SEQ ID NO: 168647 - RNA, 20 nt, Artificial Sequence
  Synthetic
uaugguauaucauauaaaaa

SEQ ID NO: 168648 - RNA, 21 nt, Artificial Sequence
  Synthetic
uuaugguauaucauauaaaaa

SEQ ID NO: 168649 - RNA, 22 nt, Artificial Sequence
  Synthetic
cuuaugguauaucauauaaaaa

SEQ ID NO: 168650 - RNA, 23 nt, Artificial Sequence
  Synthetic
ucuuaugguauaucauauaaaaa

SEQ ID NO: 168651 - RNA, 24 nt, Artificial Sequence
  Synthetic
cucuuaugguauaucauauaaaaa

SEQ ID NO: 168652 - RNA, 18 nt, Artificial Sequence
  Synthetic
gguaaaacaguauaaaaa

SEQ ID NO: 168653 - RNA, 19 nt, Artificial Sequence
  Synthetic
agguaaaacaguauaaaaa

SEQ ID NO: 168654 - RNA, 20 nt, Artificial Sequence
  Synthetic
gagguaaaacaguauaaaaa

SEQ ID NO: 168655 - RNA, 21 nt, Artificial Sequence
  Synthetic
agagguaaaacaguauaaaaa

SEQ ID NO: 168656 - RNA, 22 nt, Artificial Sequence
  Synthetic
cagagguaaaacaguauaaaaa

SEQ ID NO: 168657 - RNA, 23 nt, Artificial Sequence
  Synthetic
ucagagguaaaacaguauaaaaa

SEQ ID NO: 168658 - RNA, 24 nt, Artificial Sequence
  Synthetic
gucagagguaaaacaguauaaaaa

SEQ ID NO: 168659 - RNA, 18 nt, Artificial Sequence
  Synthetic
augucaguaguauaaaaa

SEQ ID NO: 168660 - RNA, 19 nt, Artificial Sequence
  Synthetic
aaugucaguaguauaaaaa

SEQ ID NO: 168661 - RNA, 20 nt, Artificial Sequence
  Synthetic
aaaugucaguaguauaaaaa

SEQ ID NO: 168662 - RNA, 21 nt, Artificial Sequence
  Synthetic
aaaaugucaguaguauaaaaa

SEQ ID NO: 168663 - RNA, 22 nt, Artificial Sequence
  Synthetic
caaaaugucaguaguauaaaaa

SEQ ID NO: 168664 - RNA, 23 nt, Artificial Sequence
  Synthetic
ccaaaaugucaguaguauaaaaa

SEQ ID NO: 168665 - RNA, 24 nt, Artificial Sequence
  Synthetic
gccaaaaugucaguaguauaaaaa

SEQ ID NO: 168666 - RNA, 18 nt, Artificial Sequence
  Synthetic
aagucuccuguauaaaaa

SEQ ID NO: 168667 - RNA, 19 nt, Artificial Sequence
  Synthetic
gaagucuccuguauaaaaa

SEQ ID NO: 168668 - RNA, 20 nt, Artificial Sequence
  Synthetic
agaagucuccuguauaaaaa

SEQ ID NO: 168669 - RNA, 21 nt, Artificial Sequence
  Synthetic
aagaagucuccuguauaaaaa

SEQ ID NO: 168670 - RNA, 22 nt, Artificial Sequence
  Synthetic
aaagaagucuccuguauaaaaa

SEQ ID NO: 168671 - RNA, 23 nt, Artificial Sequence
  Synthetic
gaaagaagucuccuguauaaaaa

SEQ ID NO: 168672 - RNA, 24 nt, Artificial Sequence
  Synthetic
agaaagaagucuccuguauaaaaa

SEQ ID NO: 168673 - RNA, 18 nt, Artificial Sequence
  Synthetic
uauaggaaauuauaaaaa

SEQ ID NO: 168674 - RNA, 19 nt, Artificial Sequence
  Synthetic
auauaggaaauuauaaaaa

SEQ ID NO: 168675 - RNA, 20 nt, Artificial Sequence
  Synthetic
gauauaggaaauuauaaaaa

SEQ ID NO: 168676 - RNA, 21 nt, Artificial Sequence
  Synthetic
ggauauaggaaauuauaaaaa

SEQ ID NO: 168677 - RNA, 22 nt, Artificial Sequence
  Synthetic
aggauauaggaaauuauaaaaa

SEQ ID NO: 168678 - RNA, 23 nt, Artificial Sequence
  Synthetic
gaggauauaggaaauuauaaaaa

SEQ ID NO: 168679 - RNA, 24 nt, Artificial Sequence
  Synthetic
agaggauauaggaaauuauaaaaa

SEQ ID NO: 168680 - RNA, 18 nt, Artificial Sequence
  Synthetic
gaauggcuguuauaaaaa

SEQ ID NO: 168681 - RNA, 19 nt, Artificial Sequence
  Synthetic
agaauggcuguuauaaaaa

SEQ ID NO: 168682 - RNA, 20 nt, Artificial Sequence
  Synthetic
uagaauggcuguuauaaaaa

SEQ ID NO: 168683 - RNA, 21 nt, Artificial Sequence
  Synthetic
uuagaauggcuguuauaaaaa

SEQ ID NO: 168684 - RNA, 22 nt, Artificial Sequence
  Synthetic
guuagaauggcuguuauaaaaa

SEQ ID NO: 168685 - RNA, 23 nt, Artificial Sequence
  Synthetic
uguuagaauggcuguuauaaaaa

SEQ ID NO: 168686 - RNA, 24 nt, Artificial Sequence
  Synthetic
cuguuagaauggcuguuauaaaaa

SEQ ID NO: 168687 - RNA, 18 nt, Artificial Sequence
  Synthetic
ccccaucucuacuaaaaa

SEQ ID NO: 168688 - RNA, 19 nt, Artificial Sequence
  Synthetic
accccaucucuacuaaaaa

SEQ ID NO: 168689 - RNA, 20 nt, Artificial Sequence
  Synthetic
aaccccaucucuacuaaaaa

SEQ ID NO: 168690 - RNA, 21 nt, Artificial Sequence
  Synthetic
aaaccccaucucuacuaaaaa

SEQ ID NO: 168691 - RNA, 22 nt, Artificial Sequence
  Synthetic
aaaaccccaucucuacuaaaaa

SEQ ID NO: 168692 - RNA, 23 nt, Artificial Sequence
  Synthetic
caaaaccccaucucuacuaaaaa

SEQ ID NO: 168693 - RNA, 24 nt, Artificial Sequence
  Synthetic
gcaaaaccccaucucuacuaaaaa

SEQ ID NO: 168694 - RNA, 18 nt, Artificial Sequence
  Synthetic
aaauuauuuuacuaaaaa

SEQ ID NO: 168695 - RNA, 19 nt, Artificial Sequence
  Synthetic
caaauuauuuuacuaaaaa

SEQ ID NO: 168696 - RNA, 20 nt, Artificial Sequence
  Synthetic
ucaaauuauuuuacuaaaaa

SEQ ID NO: 168697 - RNA, 21 nt, Artificial Sequence
  Synthetic
cucaaauuauuuuacuaaaaa

SEQ ID NO: 168698 - RNA, 22 nt, Artificial Sequence
  Synthetic
ucucaaauuauuuuacuaaaaa

SEQ ID NO: 168699 - RNA, 23 nt, Artificial Sequence
  Synthetic
gucucaaauuauuuuacuaaaaa

SEQ ID NO: 168700 - RNA, 24 nt, Artificial Sequence
  Synthetic
ugucucaaauuauuuuacuaaaaa

SEQ ID NO: 168701 - RNA, 18 nt, Artificial Sequence
  Synthetic
ugaauugaguucuaaaaa

SEQ ID NO: 168702 - RNA, 19 nt, Artificial Sequence
  Synthetic
uugaauugaguucuaaaaa

SEQ ID NO: 168703 - RNA, 20 nt, Artificial Sequence
  Synthetic
cuugaauugaguucuaaaaa

SEQ ID NO: 168704 - RNA, 21 nt, Artificial Sequence
  Synthetic
ccuugaauugaguucuaaaaa

SEQ ID NO: 168705 - RNA, 22 nt, Artificial Sequence
  Synthetic
uccuugaauugaguucuaaaaa

SEQ ID NO: 168706 - RNA, 23 nt, Artificial Sequence
  Synthetic
auccuugaauugaguucuaaaaa

SEQ ID NO: 168707 - RNA, 24 nt, Artificial Sequence
  Synthetic
gauccuugaauugaguucuaaaaa

SEQ ID NO: 168708 - RNA, 18 nt, Artificial Sequence
  Synthetic
aaauguugguucuaaaaa

SEQ ID NO: 168709 - RNA, 19 nt, Artificial Sequence
  Synthetic
uaaauguugguucuaaaaa

SEQ ID NO: 168710 - RNA, 20 nt, Artificial Sequence
  Synthetic
cuaaauguugguucuaaaaa

SEQ ID NO: 168711 - RNA, 21 nt, Artificial Sequence
  Synthetic
acuaaauguugguucuaaaaa

SEQ ID NO: 168712 - RNA, 22 nt, Artificial Sequence
  Synthetic
uacuaaauguugguucuaaaaa

SEQ ID NO: 168713 - RNA, 23 nt, Artificial Sequence
  Synthetic
uuacuaaauguugguucuaaaaa

SEQ ID NO: 168714 - RNA, 24 nt, Artificial Sequence
  Synthetic
guuacuaaauguugguucuaaaaa

SEQ ID NO: 168715 - RNA, 18 nt, Artificial Sequence
  Synthetic
gauaccuacaaguaaaaa

SEQ ID NO: 168716 - RNA, 19 nt, Artificial Sequence
  Synthetic
ugauaccuacaaguaaaaa

SEQ ID NO: 168717 - RNA, 20 nt, Artificial Sequence
  Synthetic
augauaccuacaaguaaaaa

SEQ ID NO: 168718 - RNA, 21 nt, Artificial Sequence
  Synthetic
aaugauaccuacaaguaaaaa

SEQ ID NO: 168719 - RNA, 22 nt, Artificial Sequence
  Synthetic
uaaugauaccuacaaguaaaaa

SEQ ID NO: 168720 - RNA, 23 nt, Artificial Sequence
  Synthetic
uuaaugauaccuacaaguaaaaa

SEQ ID NO: 168721 - RNA, 24 nt, Artificial Sequence
  Synthetic
cuuaaugauaccuacaaguaaaaa

SEQ ID NO: 168722 - RNA, 18 nt, Artificial Sequence
  Synthetic
agggauaugaaguaaaaa

SEQ ID NO: 168723 - RNA, 19 nt, Artificial Sequence
  Synthetic
uagggauaugaaguaaaaa

SEQ ID NO: 168724 - RNA, 20 nt, Artificial Sequence
  Synthetic
uuagggauaugaaguaaaaa

SEQ ID NO: 168725 - RNA, 21 nt, Artificial Sequence
  Synthetic
uuuagggauaugaaguaaaaa

SEQ ID NO: 168726 - RNA, 22 nt, Artificial Sequence
  Synthetic
auuuagggauaugaaguaaaaa

SEQ ID NO: 168727 - RNA, 23 nt, Artificial Sequence
  Synthetic
aauuuagggauaugaaguaaaaa

SEQ ID NO: 168728 - RNA, 24 nt, Artificial Sequence
  Synthetic
aaauuuagggauaugaaguaaaaa

SEQ ID NO: 168729 - RNA, 18 nt, Artificial Sequence
  Synthetic
cccagucucuaguaaaaa

SEQ ID NO: 168730 - RNA, 19 nt, Artificial Sequence
  Synthetic
acccagucucuaguaaaaa

SEQ ID NO: 168731 - RNA, 20 nt, Artificial Sequence
  Synthetic
aacccagucucuaguaaaaa

SEQ ID NO: 168732 - RNA, 21 nt, Artificial Sequence
  Synthetic
aaacccagucucuaguaaaaa

SEQ ID NO: 168733 - RNA, 22 nt, Artificial Sequence
  Synthetic
gaaacccagucucuaguaaaaa

SEQ ID NO: 168734 - RNA, 23 nt, Artificial Sequence
  Synthetic
ugaaacccagucucuaguaaaaa

SEQ ID NO: 168735 - RNA, 24 nt, Artificial Sequence
  Synthetic
gugaaacccagucucuaguaaaaa

SEQ ID NO: 168736 - RNA, 18 nt, Artificial Sequence
  Synthetic
auuauccaguaguaaaaa

SEQ ID NO: 168737 - RNA, 19 nt, Artificial Sequence
  Synthetic
cauuauccaguaguaaaaa

SEQ ID NO: 168738 - RNA, 20 nt, Artificial Sequence
  Synthetic
ucauuauccaguaguaaaaa

SEQ ID NO: 168739 - RNA, 21 nt, Artificial Sequence
  Synthetic
gucauuauccaguaguaaaaa

SEQ ID NO: 168740 - RNA, 22 nt, Artificial Sequence
  Synthetic
ugucauuauccaguaguaaaaa

SEQ ID NO: 168741 - RNA, 23 nt, Artificial Sequence
  Synthetic
uugucauuauccaguaguaaaaa

SEQ ID NO: 168742 - RNA, 24 nt, Artificial Sequence
  Synthetic
auugucauuauccaguaguaaaaa

SEQ ID NO: 168743 - RNA, 18 nt, Artificial Sequence
  Synthetic
gauaaccccauguaaaaa

SEQ ID NO: 168744 - RNA, 19 nt, Artificial Sequence
  Synthetic
agauaaccccauguaaaaa

SEQ ID NO: 168745 - RNA, 20 nt, Artificial Sequence
  Synthetic
cagauaaccccauguaaaaa

SEQ ID NO: 168746 - RNA, 21 nt, Artificial Sequence
  Synthetic
gcagauaaccccauguaaaaa

SEQ ID NO: 168747 - RNA, 22 nt, Artificial Sequence
  Synthetic
cgcagauaaccccauguaaaaa

SEQ ID NO: 168748 - RNA, 23 nt, Artificial Sequence
  Synthetic
acgcagauaaccccauguaaaaa

SEQ ID NO: 168749 - RNA, 24 nt, Artificial Sequence
  Synthetic
aacgcagauaaccccauguaaaaa

SEQ ID NO: 168750 - RNA, 18 nt, Artificial Sequence
  Synthetic
aaauaaaagauguaaaaa

SEQ ID NO: 168751 - RNA, 19 nt, Artificial Sequence
  Synthetic
aaaauaaaagauguaaaaa

SEQ ID NO: 168752 - RNA, 20 nt, Artificial Sequence
  Synthetic
uaaaauaaaagauguaaaaa

SEQ ID NO: 168753 - RNA, 21 nt, Artificial Sequence
  Synthetic
auaaaauaaaagauguaaaaa

SEQ ID NO: 168754 - RNA, 22 nt, Artificial Sequence
  Synthetic
aauaaaauaaaagauguaaaaa

SEQ ID NO: 168755 - RNA, 23 nt, Artificial Sequence
  Synthetic
uaauaaaauaaaagauguaaaaa

SEQ ID NO: 168756 - RNA, 24 nt, Artificial Sequence
  Synthetic
uuaauaaaauaaaagauguaaaaa

SEQ ID NO: 168757 - RNA, 18 nt, Artificial Sequence
  Synthetic
agcaaaacaaauuaaaaa

SEQ ID NO: 168758 - RNA, 19 nt, Artificial Sequence
  Synthetic
uagcaaaacaaauuaaaaa

SEQ ID NO: 168759 - RNA, 20 nt, Artificial Sequence
  Synthetic
uuagcaaaacaaauuaaaaa

SEQ ID NO: 168760 - RNA, 21 nt, Artificial Sequence
  Synthetic
cuuagcaaaacaaauuaaaaa

SEQ ID NO: 168761 - RNA, 22 nt, Artificial Sequence
  Synthetic
acuuagcaaaacaaauuaaaaa

SEQ ID NO: 168762 - RNA, 23 nt, Artificial Sequence
  Synthetic
uacuuagcaaaacaaauuaaaaa

SEQ ID NO: 168763 - RNA, 24 nt, Artificial Sequence
  Synthetic
uuacuuagcaaaacaaauuaaaaa

SEQ ID NO: 168764 - RNA, 18 nt, Artificial Sequence
  Synthetic
ggucuugccaauuaaaaa

SEQ ID NO: 168765 - RNA, 19 nt, Artificial Sequence
  Synthetic
aggucuugccaauuaaaaa

SEQ ID NO: 168766 - RNA, 20 nt, Artificial Sequence
  Synthetic
aaggucuugccaauuaaaaa

SEQ ID NO: 168767 - RNA, 21 nt, Artificial Sequence
  Synthetic
gaaggucuugccaauuaaaaa

SEQ ID NO: 168768 - RNA, 22 nt, Artificial Sequence
  Synthetic
ggaaggucuugccaauuaaaaa

SEQ ID NO: 168769 - RNA, 23 nt, Artificial Sequence
  Synthetic
gggaaggucuugccaauuaaaaa

SEQ ID NO: 168770 - RNA, 24 nt, Artificial Sequence
  Synthetic
ugggaaggucuugccaauuaaaaa

SEQ ID NO: 168771 - RNA, 18 nt, Artificial Sequence
  Synthetic
ucucaaaauaauuaaaaa

SEQ ID NO: 168772 - RNA, 19 nt, Artificial Sequence
  Synthetic
aucucaaaauaauuaaaaa

SEQ ID NO: 168773 - RNA, 20 nt, Artificial Sequence
  Synthetic
aaucucaaaauaauuaaaaa

SEQ ID NO: 168774 - RNA, 21 nt, Artificial Sequence
  Synthetic
aaaucucaaaauaauuaaaaa

SEQ ID NO: 168775 - RNA, 22 nt, Artificial Sequence
  Synthetic
aaaaucucaaaauaauuaaaaa

SEQ ID NO: 168776 - RNA, 23 nt, Artificial Sequence
  Synthetic
uaaaaucucaaaauaauuaaaaa

SEQ ID NO: 168777 - RNA, 24 nt, Artificial Sequence
  Synthetic
auaaaaucucaaaauaauuaaaaa

SEQ ID NO: 168778 - RNA, 18 nt, Artificial Sequence
  Synthetic
cugagucuacauuaaaaa

SEQ ID NO: 168779 - RNA, 19 nt, Artificial Sequence
  Synthetic
ccugagucuacauuaaaaa

SEQ ID NO: 168780 - RNA, 20 nt, Artificial Sequence
  Synthetic
cccugagucuacauuaaaaa

SEQ ID NO: 168781 - RNA, 21 nt, Artificial Sequence
  Synthetic
ccccugagucuacauuaaaaa

SEQ ID NO: 168782 - RNA, 22 nt, Artificial Sequence
  Synthetic
accccugagucuacauuaaaaa

SEQ ID NO: 168783 - RNA, 23 nt, Artificial Sequence
  Synthetic
uaccccugagucuacauuaaaaa

SEQ ID NO: 168784 - RNA, 24 nt, Artificial Sequence
  Synthetic
guaccccugagucuacauuaaaaa

SEQ ID NO: 168785 - RNA, 18 nt, Artificial Sequence
  Synthetic
aaaaauagagauuaaaaa

SEQ ID NO: 168786 - RNA, 19 nt, Artificial Sequence
  Synthetic
uaaaaauagagauuaaaaa

SEQ ID NO: 168787 - RNA, 20 nt, Artificial Sequence
  Synthetic
uuaaaaauagagauuaaaaa

SEQ ID NO: 168788 - RNA, 21 nt, Artificial Sequence
  Synthetic
auuaaaaauagagauuaaaaa

SEQ ID NO: 168789 - RNA, 22 nt, Artificial Sequence
  Synthetic
cauuaaaaauagagauuaaaaa

SEQ ID NO: 168790 - RNA, 23 nt, Artificial Sequence
  Synthetic
acauuaaaaauagagauuaaaaa

SEQ ID NO: 168791 - RNA, 24 nt, Artificial Sequence
  Synthetic
uacauuaaaaauagagauuaaaaa

SEQ ID NO: 168792 - RNA, 18 nt, Artificial Sequence
  Synthetic
cagcacuuagauuaaaaa

SEQ ID NO: 168793 - RNA, 19 nt, Artificial Sequence
  Synthetic
ccagcacuuagauuaaaaa

SEQ ID NO: 168794 - RNA, 20 nt, Artificial Sequence
  Synthetic
accagcacuuagauuaaaaa

SEQ ID NO: 168795 - RNA, 21 nt, Artificial Sequence
  Synthetic
aaccagcacuuagauuaaaaa

SEQ ID NO: 168796 - RNA, 22 nt, Artificial Sequence
  Synthetic
uaaccagcacuuagauuaaaaa

SEQ ID NO: 168797 - RNA, 23 nt, Artificial Sequence
  Synthetic
uuaaccagcacuuagauuaaaaa

SEQ ID NO: 168798 - RNA, 24 nt, Artificial Sequence
  Synthetic
uuuaaccagcacuuagauuaaaaa

SEQ ID NO: 168799 - RNA, 18 nt, Artificial Sequence
  Synthetic
aaacacuuugauuaaaaa

SEQ ID NO: 168800 - RNA, 19 nt, Artificial Sequence
  Synthetic
gaaacacuuugauuaaaaa

SEQ ID NO: 168801 - RNA, 20 nt, Artificial Sequence
  Synthetic
ugaaacacuuugauuaaaaa

SEQ ID NO: 168802 - RNA, 21 nt, Artificial Sequence
  Synthetic
uugaaacacuuugauuaaaaa

SEQ ID NO: 168803 - RNA, 22 nt, Artificial Sequence
  Synthetic
uuugaaacacuuugauuaaaaa

SEQ ID NO: 168804 - RNA, 23 nt, Artificial Sequence
  Synthetic
cuuugaaacacuuugauuaaaaa

SEQ ID NO: 168805 - RNA, 24 nt, Artificial Sequence
  Synthetic
ccuuugaaacacuuugauuaaaaa

SEQ ID NO: 168806 - RNA, 18 nt, Artificial Sequence
  Synthetic
uagaugcaguauuaaaaa

SEQ ID NO: 168807 - RNA, 19 nt, Artificial Sequence
  Synthetic
uuagaugcaguauuaaaaa

SEQ ID NO: 168808 - RNA, 20 nt, Artificial Sequence
  Synthetic
uuuagaugcaguauuaaaaa

SEQ ID NO: 168809 - RNA, 21 nt, Artificial Sequence
  Synthetic
uuuuagaugcaguauuaaaaa

SEQ ID NO: 168810 - RNA, 22 nt, Artificial Sequence
  Synthetic
auuuuagaugcaguauuaaaaa

SEQ ID NO: 168811 - RNA, 23 nt, Artificial Sequence
  Synthetic
gauuuuagaugcaguauuaaaaa

SEQ ID NO: 168812 - RNA, 24 nt, Artificial Sequence
  Synthetic
ggauuuuagaugcaguauuaaaaa

SEQ ID NO: 168813 - RNA, 18 nt, Artificial Sequence
  Synthetic
uguguacaaacuuaaaaa

SEQ ID NO: 168814 - RNA, 19 nt, Artificial Sequence
  Synthetic
cuguguacaaacuuaaaaa

SEQ ID NO: 168815 - RNA, 20 nt, Artificial Sequence
  Synthetic
ucuguguacaaacuuaaaaa

SEQ ID NO: 168816 - RNA, 21 nt, Artificial Sequence
  Synthetic
gucuguguacaaacuuaaaaa

SEQ ID NO: 168817 - RNA, 22 nt, Artificial Sequence
  Synthetic
ugucuguguacaaacuuaaaaa

SEQ ID NO: 168818 - RNA, 23 nt, Artificial Sequence
  Synthetic
uugucuguguacaaacuuaaaaa

SEQ ID NO: 168819 - RNA, 24 nt, Artificial Sequence
  Synthetic
auugucuguguacaaacuuaaaaa

SEQ ID NO: 168820 - RNA, 18 nt, Artificial Sequence
  Synthetic
agagcuauaacuuaaaaa

SEQ ID NO: 168821 - RNA, 19 nt, Artificial Sequence
  Synthetic
gagagcuauaacuuaaaaa

SEQ ID NO: 168822 - RNA, 20 nt, Artificial Sequence
  Synthetic
agagagcuauaacuuaaaaa

SEQ ID NO: 168823 - RNA, 21 nt, Artificial Sequence
  Synthetic
aagagagcuauaacuuaaaaa

SEQ ID NO: 168824 - RNA, 22 nt, Artificial Sequence
  Synthetic
aaagagagcuauaacuuaaaaa

SEQ ID NO: 168825 - RNA, 23 nt, Artificial Sequence
  Synthetic
gaaagagagcuauaacuuaaaaa

SEQ ID NO: 168826 - RNA, 24 nt, Artificial Sequence
  Synthetic
ugaaagagagcuauaacuuaaaaa

SEQ ID NO: 168827 - RNA, 18 nt, Artificial Sequence
  Synthetic
gaaaagagcucuuaaaaa

SEQ ID NO: 168828 - RNA, 19 nt, Artificial Sequence
  Synthetic
ugaaaagagcucuuaaaaa

SEQ ID NO: 168829 - RNA, 20 nt, Artificial Sequence
  Synthetic
gugaaaagagcucuuaaaaa

SEQ ID NO: 168830 - RNA, 21 nt, Artificial Sequence
  Synthetic
ugugaaaagagcucuuaaaaa

SEQ ID NO: 168831 - RNA, 22 nt, Artificial Sequence
  Synthetic
augugaaaagagcucuuaaaaa

SEQ ID NO: 168832 - RNA, 23 nt, Artificial Sequence
  Synthetic
aaugugaaaagagcucuuaaaaa

SEQ ID NO: 168833 - RNA, 24 nt, Artificial Sequence
  Synthetic
uaaugugaaaagagcucuuaaaaa

SEQ ID NO: 168834 - RNA, 18 nt, Artificial Sequence
  Synthetic
caacucucuucuuaaaaa

SEQ ID NO: 168835 - RNA, 19 nt, Artificial Sequence
  Synthetic
ccaacucucuucuuaaaaa

SEQ ID NO: 168836 - RNA, 20 nt, Artificial Sequence
  Synthetic
gccaacucucuucuuaaaaa

SEQ ID NO: 168837 - RNA, 21 nt, Artificial Sequence
  Synthetic
ugccaacucucuucuuaaaaa

SEQ ID NO: 168838 - RNA, 22 nt, Artificial Sequence
  Synthetic
cugccaacucucuucuuaaaaa

SEQ ID NO: 168839 - RNA, 23 nt, Artificial Sequence
  Synthetic
acugccaacucucuucuuaaaaa

SEQ ID NO: 168840 - RNA, 24 nt, Artificial Sequence
  Synthetic
aacugccaacucucuucuuaaaaa

SEQ ID NO: 168841 - RNA, 18 nt, Artificial Sequence
  Synthetic
cuaaaauuuucuuaaaaa

SEQ ID NO: 168842 - RNA, 19 nt, Artificial Sequence
  Synthetic
ucuaaaauuuucuuaaaaa

SEQ ID NO: 168843 - RNA, 20 nt, Artificial Sequence
  Synthetic
aucuaaaauuuucuuaaaaa

SEQ ID NO: 168844 - RNA, 21 nt, Artificial Sequence
  Synthetic
uaucuaaaauuuucuuaaaaa

SEQ ID NO: 168845 - RNA, 22 nt, Artificial Sequence
  Synthetic
guaucuaaaauuuucuuaaaaa

SEQ ID NO: 168846 - RNA, 23 nt, Artificial Sequence
  Synthetic
gguaucuaaaauuuucuuaaaaa

SEQ ID NO: 168847 - RNA, 24 nt, Artificial Sequence
  Synthetic
agguaucuaaaauuuucuuaaaaa

SEQ ID NO: 168848 - RNA, 18 nt, Artificial Sequence
  Synthetic
ucuugaaaaaguuaaaaa

SEQ ID NO: 168849 - RNA, 19 nt, Artificial Sequence
  Synthetic
uucuugaaaaaguuaaaaa

SEQ ID NO: 168850 - RNA, 20 nt, Artificial Sequence
  Synthetic
guucuugaaaaaguuaaaaa

SEQ ID NO: 168851 - RNA, 21 nt, Artificial Sequence
  Synthetic
gguucuugaaaaaguuaaaaa

SEQ ID NO: 168852 - RNA, 22 nt, Artificial Sequence
  Synthetic
agguucuugaaaaaguuaaaaa

SEQ ID NO: 168853 - RNA, 23 nt, Artificial Sequence
  Synthetic
aagguucuugaaaaaguuaaaaa

SEQ ID NO: 168854 - RNA, 24 nt, Artificial Sequence
  Synthetic
aaagguucuugaaaaaguuaaaaa

SEQ ID NO: 168855 - RNA, 18 nt, Artificial Sequence
  Synthetic
uaauauuggcguuaaaaa

SEQ ID NO: 168856 - RNA, 19 nt, Artificial Sequence
  Synthetic
auaauauuggcguuaaaaa

SEQ ID NO: 168857 - RNA, 20 nt, Artificial Sequence
  Synthetic
gauaauauuggcguuaaaaa

SEQ ID NO: 168858 - RNA, 21 nt, Artificial Sequence
  Synthetic
agauaauauuggcguuaaaaa

SEQ ID NO: 168859 - RNA, 22 nt, Artificial Sequence
  Synthetic
cagauaauauuggcguuaaaaa

SEQ ID NO: 168860 - RNA, 23 nt, Artificial Sequence
  Synthetic
acagauaauauuggcguuaaaaa

SEQ ID NO: 168861 - RNA, 24 nt, Artificial Sequence
  Synthetic
cacagauaauauuggcguuaaaaa

SEQ ID NO: 168862 - RNA, 18 nt, Artificial Sequence
  Synthetic
agaacaaaauguuaaaaa

SEQ ID NO: 168863 - RNA, 19 nt, Artificial Sequence
  Synthetic
gagaacaaaauguuaaaaa

SEQ ID NO: 168864 - RNA, 20 nt, Artificial Sequence
  Synthetic
ugagaacaaaauguuaaaaa

SEQ ID NO: 168865 - RNA, 21 nt, Artificial Sequence
  Synthetic
augagaacaaaauguuaaaaa

SEQ ID NO: 168866 - RNA, 22 nt, Artificial Sequence
  Synthetic
aaugagaacaaaauguuaaaaa

SEQ ID NO: 168867 - RNA, 23 nt, Artificial Sequence
  Synthetic
gaaugagaacaaaauguuaaaaa

SEQ ID NO: 168868 - RNA, 24 nt, Artificial Sequence
  Synthetic
agaaugagaacaaaauguuaaaaa

SEQ ID NO: 168869 - RNA, 18 nt, Artificial Sequence
  Synthetic
aacaguccguguuaaaaa

SEQ ID NO: 168870 - RNA, 19 nt, Artificial Sequence
  Synthetic
uaacaguccguguuaaaaa

SEQ ID NO: 168871 - RNA, 20 nt, Artificial Sequence
  Synthetic
guaacaguccguguuaaaaa

SEQ ID NO: 168872 - RNA, 21 nt, Artificial Sequence
  Synthetic
uguaacaguccguguuaaaaa

SEQ ID NO: 168873 - RNA, 22 nt, Artificial Sequence
  Synthetic
auguaacaguccguguuaaaaa

SEQ ID NO: 168874 - RNA, 23 nt, Artificial Sequence
  Synthetic
aauguaacaguccguguuaaaaa

SEQ ID NO: 168875 - RNA, 24 nt, Artificial Sequence
  Synthetic
aaauguaacaguccguguuaaaaa

SEQ ID NO: 168876 - RNA, 18 nt, Artificial Sequence
  Synthetic
augguacaaauuuaaaaa

SEQ ID NO: 168877 - RNA, 19 nt, Artificial Sequence
  Synthetic
gaugguacaaauuuaaaaa

SEQ ID NO: 168878 - RNA, 20 nt, Artificial Sequence
  Synthetic
ugaugguacaaauuuaaaaa

SEQ ID NO: 168879 - RNA, 21 nt, Artificial Sequence
  Synthetic
uugaugguacaaauuuaaaaa

SEQ ID NO: 168880 - RNA, 22 nt, Artificial Sequence
  Synthetic
auugaugguacaaauuuaaaaa

SEQ ID NO: 168881 - RNA, 23 nt, Artificial Sequence
  Synthetic
aauugaugguacaaauuuaaaaa

SEQ ID NO: 168882 - RNA, 24 nt, Artificial Sequence
  Synthetic
caauugaugguacaaauuuaaaaa

SEQ ID NO: 168883 - RNA, 18 nt, Artificial Sequence
  Synthetic
uaggaaaacauuuaaaaa

SEQ ID NO: 168884 - RNA, 19 nt, Artificial Sequence
  Synthetic
uuaggaaaacauuuaaaaa

SEQ ID NO: 168885 - RNA, 20 nt, Artificial Sequence
  Synthetic
uuuaggaaaacauuuaaaaa

SEQ ID NO: 168886 - RNA, 21 nt, Artificial Sequence
  Synthetic
guuuaggaaaacauuuaaaaa

SEQ ID NO: 168887 - RNA, 22 nt, Artificial Sequence
  Synthetic
uguuuaggaaaacauuuaaaaa

SEQ ID NO: 168888 - RNA, 23 nt, Artificial Sequence
  Synthetic
auguuuaggaaaacauuuaaaaa

SEQ ID NO: 168889 - RNA, 24 nt, Artificial Sequence
  Synthetic
uauguuuaggaaaacauuuaaaaa

SEQ ID NO: 168890 - RNA, 18 nt, Artificial Sequence
  Synthetic
uaaaacaucauuuaaaaa

SEQ ID NO: 168891 - RNA, 19 nt, Artificial Sequence
  Synthetic
auaaaacaucauuuaaaaa

SEQ ID NO: 168892 - RNA, 20 nt, Artificial Sequence
  Synthetic
cauaaaacaucauuuaaaaa

SEQ ID NO: 168893 - RNA, 21 nt, Artificial Sequence
  Synthetic
ucauaaaacaucauuuaaaaa

SEQ ID NO: 168894 - RNA, 22 nt, Artificial Sequence
  Synthetic
aucauaaaacaucauuuaaaaa

SEQ ID NO: 168895 - RNA, 23 nt, Artificial Sequence
  Synthetic
aaucauaaaacaucauuuaaaaa

SEQ ID NO: 168896 - RNA, 24 nt, Artificial Sequence
  Synthetic
aaaucauaaaacaucauuuaaaaa

SEQ ID NO: 168897 - RNA, 18 nt, Artificial Sequence
  Synthetic
uuuaaaaaacuuuaaaaa

SEQ ID NO: 168898 - RNA, 19 nt, Artificial Sequence
  Synthetic
auuuaaaaaacuuuaaaaa

SEQ ID NO: 168899 - RNA, 20 nt, Artificial Sequence
  Synthetic
aauuuaaaaaacuuuaaaaa

SEQ ID NO: 168900 - RNA, 21 nt, Artificial Sequence
  Synthetic
aaauuuaaaaaacuuuaaaaa

SEQ ID NO: 168901 - RNA, 22 nt, Artificial Sequence
  Synthetic
aaaauuuaaaaaacuuuaaaaa

SEQ ID NO: 168902 - RNA, 23 nt, Artificial Sequence
  Synthetic
uaaaauuuaaaaaacuuuaaaaa

SEQ ID NO: 168903 - RNA, 24 nt, Artificial Sequence
  Synthetic
uuaaaauuuaaaaaacuuuaaaaa

SEQ ID NO: 168904 - RNA, 18 nt, Artificial Sequence
  Synthetic
aucauagaacuuuaaaaa

SEQ ID NO: 168905 - RNA, 19 nt, Artificial Sequence
  Synthetic
aaucauagaacuuuaaaaa

SEQ ID NO: 168906 - RNA, 20 nt, Artificial Sequence
  Synthetic
uaaucauagaacuuuaaaaa

SEQ ID NO: 168907 - RNA, 21 nt, Artificial Sequence
  Synthetic
uuaaucauagaacuuuaaaaa

SEQ ID NO: 168908 - RNA, 22 nt, Artificial Sequence
  Synthetic
auuaaucauagaacuuuaaaaa

SEQ ID NO: 168909 - RNA, 23 nt, Artificial Sequence
  Synthetic
aauuaaucauagaacuuuaaaaa

SEQ ID NO: 168910 - RNA, 24 nt, Artificial Sequence
  Synthetic
aaauuaaucauagaacuuuaaaaa

SEQ ID NO: 168911 - RNA, 18 nt, Artificial Sequence
  Synthetic
ucuuccugucuuuaaaaa

SEQ ID NO: 168912 - RNA, 19 nt, Artificial Sequence
  Synthetic
cucuuccugucuuuaaaaa

SEQ ID NO: 168913 - RNA, 20 nt, Artificial Sequence
  Synthetic
ccucuuccugucuuuaaaaa

SEQ ID NO: 168914 - RNA, 21 nt, Artificial Sequence
  Synthetic
accucuuccugucuuuaaaaa

SEQ ID NO: 168915 - RNA, 22 nt, Artificial Sequence
  Synthetic
gaccucuuccugucuuuaaaaa

SEQ ID NO: 168916 - RNA, 23 nt, Artificial Sequence
  Synthetic
ugaccucuuccugucuuuaaaaa

SEQ ID NO: 168917 - RNA, 24 nt, Artificial Sequence
  Synthetic
gugaccucuuccugucuuuaaaaa

SEQ ID NO: 168918 - RNA, 18 nt, Artificial Sequence
  Synthetic
aaaauaguucuuuaaaaa

SEQ ID NO: 168919 - RNA, 19 nt, Artificial Sequence
  Synthetic
aaaaauaguucuuuaaaaa

SEQ ID NO: 168920 - RNA, 20 nt, Artificial Sequence
  Synthetic
uaaaaauaguucuuuaaaaa

SEQ ID NO: 168921 - RNA, 21 nt, Artificial Sequence
  Synthetic
uuaaaaauaguucuuuaaaaa

SEQ ID NO: 168922 - RNA, 22 nt, Artificial Sequence
  Synthetic
uuuaaaaauaguucuuuaaaaa

SEQ ID NO: 168923 - RNA, 23 nt, Artificial Sequence
  Synthetic
uuuuaaaaauaguucuuuaaaaa

SEQ ID NO: 168924 - RNA, 24 nt, Artificial Sequence
  Synthetic
auuuuaaaaauaguucuuuaaaaa

SEQ ID NO: 168925 - RNA, 18 nt, Artificial Sequence
  Synthetic
uuugcugaauuuuaaaaa

SEQ ID NO: 168926 - RNA, 19 nt, Artificial Sequence
  Synthetic
guuugcugaauuuuaaaaa

SEQ ID NO: 168927 - RNA, 20 nt, Artificial Sequence
  Synthetic
uguuugcugaauuuuaaaaa

SEQ ID NO: 168928 - RNA, 21 nt, Artificial Sequence
  Synthetic
cuguuugcugaauuuuaaaaa

SEQ ID NO: 168929 - RNA, 22 nt, Artificial Sequence
  Synthetic
ucuguuugcugaauuuuaaaaa

SEQ ID NO: 168930 - RNA, 23 nt, Artificial Sequence
  Synthetic
aucuguuugcugaauuuuaaaaa

SEQ ID NO: 168931 - RNA, 24 nt, Artificial Sequence
  Synthetic
aaucuguuugcugaauuuuaaaaa

SEQ ID NO: 168932 - RNA, 18 nt, Artificial Sequence
  Synthetic
uucauauaauuuuaaaaa

SEQ ID NO: 168933 - RNA, 19 nt, Artificial Sequence
  Synthetic
cuucauauaauuuuaaaaa

SEQ ID NO: 168934 - RNA, 20 nt, Artificial Sequence
  Synthetic
acuucauauaauuuuaaaaa

SEQ ID NO: 168935 - RNA, 21 nt, Artificial Sequence
  Synthetic
aacuucauauaauuuuaaaaa

SEQ ID NO: 168936 - RNA, 22 nt, Artificial Sequence
  Synthetic
caacuucauauaauuuuaaaaa

SEQ ID NO: 168937 - RNA, 23 nt, Artificial Sequence
  Synthetic
acaacuucauauaauuuuaaaaa

SEQ ID NO: 168938 - RNA, 24 nt, Artificial Sequence
  Synthetic
cacaacuucauauaauuuuaaaaa

SEQ ID NO: 168939 - RNA, 18 nt, Artificial Sequence
  Synthetic
auugacaacuuuuaaaaa

SEQ ID NO: 168940 - RNA, 19 nt, Artificial Sequence
  Synthetic
aauugacaacuuuuaaaaa

SEQ ID NO: 168941 - RNA, 20 nt, Artificial Sequence
  Synthetic
uaauugacaacuuuuaaaaa

SEQ ID NO: 168942 - RNA, 21 nt, Artificial Sequence
  Synthetic
auaauugacaacuuuuaaaaa

SEQ ID NO: 168943 - RNA, 22 nt, Artificial Sequence
  Synthetic
aauaauugacaacuuuuaaaaa

SEQ ID NO: 168944 - RNA, 23 nt, Artificial Sequence
  Synthetic
aaauaauugacaacuuuuaaaaa

SEQ ID NO: 168945 - RNA, 24 nt, Artificial Sequence
  Synthetic
uaaauaauugacaacuuuuaaaaa

SEQ ID NO: 168946 - RNA, 18 nt, Artificial Sequence
  Synthetic
aacaaugucuuuuaaaaa

SEQ ID NO: 168947 - RNA, 19 nt, Artificial Sequence
  Synthetic
aaacaaugucuuuuaaaaa

SEQ ID NO: 168948 - RNA, 20 nt, Artificial Sequence
  Synthetic
gaaacaaugucuuuuaaaaa

SEQ ID NO: 168949 - RNA, 21 nt, Artificial Sequence
  Synthetic
ugaaacaaugucuuuuaaaaa

SEQ ID NO: 168950 - RNA, 22 nt, Artificial Sequence
  Synthetic
augaaacaaugucuuuuaaaaa

SEQ ID NO: 168951 - RNA, 23 nt, Artificial Sequence
  Synthetic
uaugaaacaaugucuuuuaaaaa

SEQ ID NO: 168952 - RNA, 24 nt, Artificial Sequence
  Synthetic
uuaugaaacaaugucuuuuaaaaa

SEQ ID NO: 168953 - RNA, 18 nt, Artificial Sequence
  Synthetic
aaaaagaacaaaacaaaa

SEQ ID NO: 168954 - RNA, 19 nt, Artificial Sequence
  Synthetic
caaaaagaacaaaacaaaa

SEQ ID NO: 168955 - RNA, 20 nt, Artificial Sequence
  Synthetic
gcaaaaagaacaaaacaaaa

SEQ ID NO: 168956 - RNA, 21 nt, Artificial Sequence
  Synthetic
ugcaaaaagaacaaaacaaaa

SEQ ID NO: 168957 - RNA, 22 nt, Artificial Sequence
  Synthetic
augcaaaaagaacaaaacaaaa

SEQ ID NO: 168958 - RNA, 23 nt, Artificial Sequence
  Synthetic
aaugcaaaaagaacaaaacaaaa

SEQ ID NO: 168959 - RNA, 24 nt, Artificial Sequence
  Synthetic
uaaugcaaaaagaacaaaacaaaa

SEQ ID NO: 168960 - RNA, 18 nt, Artificial Sequence
  Synthetic
aaaugaagcaaaacaaaa

SEQ ID NO: 168961 - RNA, 19 nt, Artificial Sequence
  Synthetic
aaaaugaagcaaaacaaaa

SEQ ID NO: 168962 - RNA, 20 nt, Artificial Sequence
  Synthetic
caaaaugaagcaaaacaaaa

SEQ ID NO: 168963 - RNA, 21 nt, Artificial Sequence
  Synthetic
gcaaaaugaagcaaaacaaaa

SEQ ID NO: 168964 - RNA, 22 nt, Artificial Sequence
  Synthetic
agcaaaaugaagcaaaacaaaa

SEQ ID NO: 168965 - RNA, 23 nt, Artificial Sequence
  Synthetic
aagcaaaaugaagcaaaacaaaa

SEQ ID NO: 168966 - RNA, 24 nt, Artificial Sequence
  Synthetic
aaagcaaaaugaagcaaaacaaaa

SEQ ID NO: 168967 - RNA, 18 nt, Artificial Sequence
  Synthetic
ggcuuugaacaaacaaaa

SEQ ID NO: 168968 - RNA, 19 nt, Artificial Sequence
  Synthetic
gggcuuugaacaaacaaaa

SEQ ID NO: 168969 - RNA, 20 nt, Artificial Sequence
  Synthetic
cgggcuuugaacaaacaaaa

SEQ ID NO: 168970 - RNA, 21 nt, Artificial Sequence
  Synthetic
gcgggcuuugaacaaacaaaa

SEQ ID NO: 168971 - RNA, 22 nt, Artificial Sequence
  Synthetic
ggcgggcuuugaacaaacaaaa

SEQ ID NO: 168972 - RNA, 23 nt, Artificial Sequence
  Synthetic
aggcgggcuuugaacaaacaaaa

SEQ ID NO: 168973 - RNA, 24 nt, Artificial Sequence
  Synthetic
aaggcgggcuuugaacaaacaaaa

SEQ ID NO: 168974 - RNA, 18 nt, Artificial Sequence
  Synthetic
auuuuuagugaaacaaaa

SEQ ID NO: 168975 - RNA, 19 nt, Artificial Sequence
  Synthetic
gauuuuuagugaaacaaaa

SEQ ID NO: 168976 - RNA, 20 nt, Artificial Sequence
  Synthetic
ugauuuuuagugaaacaaaa

SEQ ID NO: 168977 - RNA, 21 nt, Artificial Sequence
  Synthetic
uugauuuuuagugaaacaaaa

SEQ ID NO: 168978 - RNA, 22 nt, Artificial Sequence
  Synthetic
uuugauuuuuagugaaacaaaa

SEQ ID NO: 168979 - RNA, 23 nt, Artificial Sequence
  Synthetic
cuuugauuuuuagugaaacaaaa

SEQ ID NO: 168980 - RNA, 24 nt, Artificial Sequence
  Synthetic
ccuuugauuuuuagugaaacaaaa

SEQ ID NO: 168981 - RNA, 18 nt, Artificial Sequence
  Synthetic
aaaaugacuuaaacaaaa

SEQ ID NO: 168982 - RNA, 19 nt, Artificial Sequence
  Synthetic
uaaaaugacuuaaacaaaa

SEQ ID NO: 168983 - RNA, 20 nt, Artificial Sequence
  Synthetic
uuaaaaugacuuaaacaaaa

SEQ ID NO: 168984 - RNA, 21 nt, Artificial Sequence
  Synthetic
auuaaaaugacuuaaacaaaa

SEQ ID NO: 168985 - RNA, 22 nt, Artificial Sequence
  Synthetic
uauuaaaaugacuuaaacaaaa

SEQ ID NO: 168986 - RNA, 23 nt, Artificial Sequence
  Synthetic
cuauuaaaaugacuuaaacaaaa

SEQ ID NO: 168987 - RNA, 24 nt, Artificial Sequence
  Synthetic
acuauuaaaaugacuuaaacaaaa

SEQ ID NO: 168988 - RNA, 18 nt, Artificial Sequence
  Synthetic
aagucaugugcaacaaaa

SEQ ID NO: 168989 - RNA, 19 nt, Artificial Sequence
  Synthetic
gaagucaugugcaacaaaa

SEQ ID NO: 168990 - RNA, 20 nt, Artificial Sequence
  Synthetic
agaagucaugugcaacaaaa

SEQ ID NO: 168991 - RNA, 21 nt, Artificial Sequence
  Synthetic
aagaagucaugugcaacaaaa

SEQ ID NO: 168992 - RNA, 22 nt, Artificial Sequence
  Synthetic
aaagaagucaugugcaacaaaa

SEQ ID NO: 168993 - RNA, 23 nt, Artificial Sequence
  Synthetic
uaaagaagucaugugcaacaaaa

SEQ ID NO: 168994 - RNA, 24 nt, Artificial Sequence
  Synthetic
auaaagaagucaugugcaacaaaa

SEQ ID NO: 168995 - RNA, 18 nt, Artificial Sequence
  Synthetic
uaauaaagcagaacaaaa

SEQ ID NO: 168996 - RNA, 19 nt, Artificial Sequence
  Synthetic
auaauaaagcagaacaaaa

SEQ ID NO: 168997 - RNA, 20 nt, Artificial Sequence
  Synthetic
aauaauaaagcagaacaaaa

SEQ ID NO: 168998 - RNA, 21 nt, Artificial Sequence
  Synthetic
uaauaauaaagcagaacaaaa

SEQ ID NO: 168999 - RNA, 22 nt, Artificial Sequence
  Synthetic
auaauaauaaagcagaacaaaa

SEQ ID NO: 169000 - RNA, 23 nt, Artificial Sequence
  Synthetic
aauaauaauaaagcagaacaaaa

SEQ ID NO: 169001 - RNA, 24 nt, Artificial Sequence
  Synthetic
aaauaauaauaaagcagaacaaaa

SEQ ID NO: 169002 - RNA, 18 nt, Artificial Sequence
  Synthetic
aucucaaaaggaacaaaa

SEQ ID NO: 169003 - RNA, 19 nt, Artificial Sequence
  Synthetic
caucucaaaaggaacaaaa

SEQ ID NO: 169004 - RNA, 20 nt, Artificial Sequence
  Synthetic
ccaucucaaaaggaacaaaa

SEQ ID NO: 169005 - RNA, 21 nt, Artificial Sequence
  Synthetic
uccaucucaaaaggaacaaaa

SEQ ID NO: 169006 - RNA, 22 nt, Artificial Sequence
  Synthetic
cuccaucucaaaaggaacaaaa

SEQ ID NO: 169007 - RNA, 23 nt, Artificial Sequence
  Synthetic
acuccaucucaaaaggaacaaaa

SEQ ID NO: 169008 - RNA, 24 nt, Artificial Sequence
  Synthetic
gacuccaucucaaaaggaacaaaa

SEQ ID NO: 169009 - RNA, 18 nt, Artificial Sequence
  Synthetic
cucagaugaggaacaaaa

SEQ ID NO: 169010 - RNA, 19 nt, Artificial Sequence
  Synthetic
ucucagaugaggaacaaaa

SEQ ID NO: 169011 - RNA, 20 nt, Artificial Sequence
  Synthetic
cucucagaugaggaacaaaa

SEQ ID NO: 169012 - RNA, 21 nt, Artificial Sequence
  Synthetic
ucucucagaugaggaacaaaa

SEQ ID NO: 169013 - RNA, 22 nt, Artificial Sequence
  Synthetic
aucucucagaugaggaacaaaa

SEQ ID NO: 169014 - RNA, 23 nt, Artificial Sequence
  Synthetic
gaucucucagaugaggaacaaaa

SEQ ID NO: 169015 - RNA, 24 nt, Artificial Sequence
  Synthetic
ugaucucucagaugaggaacaaaa

SEQ ID NO: 169016 - RNA, 18 nt, Artificial Sequence
  Synthetic
uaaaacugaguaacaaaa

SEQ ID NO: 169017 - RNA, 19 nt, Artificial Sequence
  Synthetic
auaaaacugaguaacaaaa

SEQ ID NO: 169018 - RNA, 20 nt, Artificial Sequence
  Synthetic
uauaaaacugaguaacaaaa

SEQ ID NO: 169019 - RNA, 21 nt, Artificial Sequence
  Synthetic
uuauaaaacugaguaacaaaa

SEQ ID NO: 169020 - RNA, 22 nt, Artificial Sequence
  Synthetic
auuauaaaacugaguaacaaaa

SEQ ID NO: 169021 - RNA, 23 nt, Artificial Sequence
  Synthetic
aauuauaaaacugaguaacaaaa

SEQ ID NO: 169022 - RNA, 24 nt, Artificial Sequence
  Synthetic
aaauuauaaaacugaguaacaaaa

SEQ ID NO: 169023 - RNA, 18 nt, Artificial Sequence
  Synthetic
aaaaauugaguaacaaaa

SEQ ID NO: 169024 - RNA, 19 nt, Artificial Sequence
  Synthetic
aaaaaauugaguaacaaaa

SEQ ID NO: 169025 - RNA, 20 nt, Artificial Sequence
  Synthetic
aaaaaaauugaguaacaaaa

SEQ ID NO: 169026 - RNA, 21 nt, Artificial Sequence
  Synthetic
gaaaaaaauugaguaacaaaa

SEQ ID NO: 169027 - RNA, 22 nt, Artificial Sequence
  Synthetic
ggaaaaaaauugaguaacaaaa

SEQ ID NO: 169028 - RNA, 23 nt, Artificial Sequence
  Synthetic
gggaaaaaaauugaguaacaaaa

SEQ ID NO: 169029 - RNA, 24 nt, Artificial Sequence
  Synthetic
ggggaaaaaaauugaguaacaaaa

SEQ ID NO: 169030 - RNA, 18 nt, Artificial Sequence
  Synthetic
aaaggccaacacacaaaa

SEQ ID NO: 169031 - RNA, 19 nt, Artificial Sequence
  Synthetic
uaaaggccaacacacaaaa

SEQ ID NO: 169032 - RNA, 20 nt, Artificial Sequence
  Synthetic
auaaaggccaacacacaaaa

SEQ ID NO: 169033 - RNA, 21 nt, Artificial Sequence
  Synthetic
aauaaaggccaacacacaaaa

SEQ ID NO: 169034 - RNA, 22 nt, Artificial Sequence
  Synthetic
aaauaaaggccaacacacaaaa

SEQ ID NO: 169035 - RNA, 23 nt, Artificial Sequence
  Synthetic
caaauaaaggccaacacacaaaa

SEQ ID NO: 169036 - RNA, 24 nt, Artificial Sequence
  Synthetic
acaaauaaaggccaacacacaaaa

SEQ ID NO: 169037 - RNA, 18 nt, Artificial Sequence
  Synthetic
acaugcacacacacaaaa

SEQ ID NO: 169038 - RNA, 19 nt, Artificial Sequence
  Synthetic
cacaugcacacacacaaaa

SEQ ID NO: 169039 - RNA, 20 nt, Artificial Sequence
  Synthetic
acacaugcacacacacaaaa

SEQ ID NO: 169040 - RNA, 21 nt, Artificial Sequence
  Synthetic
cacacaugcacacacacaaaa

SEQ ID NO: 169041 - RNA, 22 nt, Artificial Sequence
  Synthetic
gcacacaugcacacacacaaaa

SEQ ID NO: 169042 - RNA, 23 nt, Artificial Sequence
  Synthetic
cgcacacaugcacacacacaaaa

SEQ ID NO: 169043 - RNA, 24 nt, Artificial Sequence
  Synthetic
acgcacacaugcacacacacaaaa

SEQ ID NO: 169044 - RNA, 18 nt, Artificial Sequence
  Synthetic
gaaggggauuacacaaaa

SEQ ID NO: 169045 - RNA, 19 nt, Artificial Sequence
  Synthetic
ggaaggggauuacacaaaa

SEQ ID NO: 169046 - RNA, 20 nt, Artificial Sequence
  Synthetic
aggaaggggauuacacaaaa

SEQ ID NO: 169047 - RNA, 21 nt, Artificial Sequence
  Synthetic
caggaaggggauuacacaaaa

SEQ ID NO: 169048 - RNA, 22 nt, Artificial Sequence
  Synthetic
ucaggaaggggauuacacaaaa

SEQ ID NO: 169049 - RNA, 23 nt, Artificial Sequence
  Synthetic
cucaggaaggggauuacacaaaa

SEQ ID NO: 169050 - RNA, 24 nt, Artificial Sequence
  Synthetic
acucaggaaggggauuacacaaaa

SEQ ID NO: 169051 - RNA, 18 nt, Artificial Sequence
  Synthetic
uggguuucaagcacaaaa

SEQ ID NO: 169052 - RNA, 19 nt, Artificial Sequence
  Synthetic
cuggguuucaagcacaaaa

SEQ ID NO: 169053 - RNA, 20 nt, Artificial Sequence
  Synthetic
ccuggguuucaagcacaaaa

SEQ ID NO: 169054 - RNA, 21 nt, Artificial Sequence
  Synthetic
cccuggguuucaagcacaaaa

SEQ ID NO: 169055 - RNA, 22 nt, Artificial Sequence
  Synthetic
gcccuggguuucaagcacaaaa

SEQ ID NO: 169056 - RNA, 23 nt, Artificial Sequence
  Synthetic
ggcccuggguuucaagcacaaaa

SEQ ID NO: 169057 - RNA, 24 nt, Artificial Sequence
  Synthetic
gggcccuggguuucaagcacaaaa

SEQ ID NO: 169058 - RNA, 18 nt, Artificial Sequence
  Synthetic
aagacuacaaucacaaaa

SEQ ID NO: 169059 - RNA, 19 nt, Artificial Sequence
  Synthetic
aaagacuacaaucacaaaa

SEQ ID NO: 169060 - RNA, 20 nt, Artificial Sequence
  Synthetic
uaaagacuacaaucacaaaa

SEQ ID NO: 169061 - RNA, 21 nt, Artificial Sequence
  Synthetic
cuaaagacuacaaucacaaaa

SEQ ID NO: 169062 - RNA, 22 nt, Artificial Sequence
  Synthetic
ccuaaagacuacaaucacaaaa

SEQ ID NO: 169063 - RNA, 23 nt, Artificial Sequence
  Synthetic
uccuaaagacuacaaucacaaaa

SEQ ID NO: 169064 - RNA, 24 nt, Artificial Sequence
  Synthetic
uuccuaaagacuacaaucacaaaa

SEQ ID NO: 169065 - RNA, 18 nt, Artificial Sequence
  Synthetic
gugguggugcucacaaaa

SEQ ID NO: 169066 - RNA, 19 nt, Artificial Sequence
  Synthetic
ugugguggugcucacaaaa

SEQ ID NO: 169067 - RNA, 20 nt, Artificial Sequence
  Synthetic
gugugguggugcucacaaaa

SEQ ID NO: 169068 - RNA, 21 nt, Artificial Sequence
  Synthetic
ugugugguggugcucacaaaa

SEQ ID NO: 169069 - RNA, 22 nt, Artificial Sequence
  Synthetic
uugugugguggugcucacaaaa

SEQ ID NO: 169070 - RNA, 23 nt, Artificial Sequence
  Synthetic
auugugugguggugcucacaaaa

SEQ ID NO: 169071 - RNA, 24 nt, Artificial Sequence
  Synthetic
aauugugugguggugcucacaaaa

SEQ ID NO: 169072 - RNA, 18 nt, Artificial Sequence
  Synthetic
uuauaacuuaagacaaaa

SEQ ID NO: 169073 - RNA, 19 nt, Artificial Sequence
  Synthetic
guuauaacuuaagacaaaa

SEQ ID NO: 169074 - RNA, 20 nt, Artificial Sequence
  Synthetic
uguuauaacuuaagacaaaa

SEQ ID NO: 169075 - RNA, 21 nt, Artificial Sequence
  Synthetic
auguuauaacuuaagacaaaa

SEQ ID NO: 169076 - RNA, 22 nt, Artificial Sequence
  Synthetic
uauguuauaacuuaagacaaaa

SEQ ID NO: 169077 - RNA, 23 nt, Artificial Sequence
  Synthetic
uuauguuauaacuuaagacaaaa

SEQ ID NO: 169078 - RNA, 24 nt, Artificial Sequence
  Synthetic
guuauguuauaacuuaagacaaaa

SEQ ID NO: 169079 - RNA, 18 nt, Artificial Sequence
  Synthetic
uaagauuuuuagacaaaa

SEQ ID NO: 169080 - RNA, 19 nt, Artificial Sequence
  Synthetic
auaagauuuuuagacaaaa

SEQ ID NO: 169081 - RNA, 20 nt, Artificial Sequence
  Synthetic
aauaagauuuuuagacaaaa

SEQ ID NO: 169082 - RNA, 21 nt, Artificial Sequence
  Synthetic
gaauaagauuuuuagacaaaa

SEQ ID NO: 169083 - RNA, 22 nt, Artificial Sequence
  Synthetic
cgaauaagauuuuuagacaaaa

SEQ ID NO: 169084 - RNA, 23 nt, Artificial Sequence
  Synthetic
acgaauaagauuuuuagacaaaa

SEQ ID NO: 169085 - RNA, 24 nt, Artificial Sequence
  Synthetic
uacgaauaagauuuuuagacaaaa

SEQ ID NO: 169086 - RNA, 18 nt, Artificial Sequence
  Synthetic
aaccuugaaaggacaaaa

SEQ ID NO: 169087 - RNA, 19 nt, Artificial Sequence
  Synthetic
uaaccuugaaaggacaaaa

SEQ ID NO: 169088 - RNA, 20 nt, Artificial Sequence
  Synthetic
auaaccuugaaaggacaaaa

SEQ ID NO: 169089 - RNA, 21 nt, Artificial Sequence
  Synthetic
aauaaccuugaaaggacaaaa

SEQ ID NO: 169090 - RNA, 22 nt, Artificial Sequence
  Synthetic
gaauaaccuugaaaggacaaaa

SEQ ID NO: 169091 - RNA, 23 nt, Artificial Sequence
  Synthetic
ugaauaaccuugaaaggacaaaa

SEQ ID NO: 169092 - RNA, 24 nt, Artificial Sequence
  Synthetic
uugaauaaccuugaaaggacaaaa

SEQ ID NO: 169093 - RNA, 18 nt, Artificial Sequence
  Synthetic
auauuaaagaggacaaaa

SEQ ID NO: 169094 - RNA, 19 nt, Artificial Sequence
  Synthetic
aauauuaaagaggacaaaa

SEQ ID NO: 169095 - RNA, 20 nt, Artificial Sequence
  Synthetic
gaauauuaaagaggacaaaa

SEQ ID NO: 169096 - RNA, 21 nt, Artificial Sequence
  Synthetic
ggaauauuaaagaggacaaaa

SEQ ID NO: 169097 - RNA, 22 nt, Artificial Sequence
  Synthetic
aggaauauuaaagaggacaaaa

SEQ ID NO: 169098 - RNA, 23 nt, Artificial Sequence
  Synthetic
aaggaauauuaaagaggacaaaa

SEQ ID NO: 169099 - RNA, 24 nt, Artificial Sequence
  Synthetic
aaaggaauauuaaagaggacaaaa

SEQ ID NO: 169100 - RNA, 18 nt, Artificial Sequence
  Synthetic
ccauguugagggacaaaa

SEQ ID NO: 169101 - RNA, 19 nt, Artificial Sequence
  Synthetic
cccauguugagggacaaaa

SEQ ID NO: 169102 - RNA, 20 nt, Artificial Sequence
  Synthetic
gcccauguugagggacaaaa

SEQ ID NO: 169103 - RNA, 21 nt, Artificial Sequence
  Synthetic
ggcccauguugagggacaaaa

SEQ ID NO: 169104 - RNA, 22 nt, Artificial Sequence
  Synthetic
aggcccauguugagggacaaaa

SEQ ID NO: 169105 - RNA, 23 nt, Artificial Sequence
  Synthetic
caggcccauguugagggacaaaa

SEQ ID NO: 169106 - RNA, 24 nt, Artificial Sequence
  Synthetic
gcaggcccauguugagggacaaaa

SEQ ID NO: 169107 - RNA, 18 nt, Artificial Sequence
  Synthetic
uguaggaaguggacaaaa

SEQ ID NO: 169108 - RNA, 19 nt, Artificial Sequence
  Synthetic
guguaggaaguggacaaaa

SEQ ID NO: 169109 - RNA, 20 nt, Artificial Sequence
  Synthetic
gguguaggaaguggacaaaa

SEQ ID NO: 169110 - RNA, 21 nt, Artificial Sequence
  Synthetic
agguguaggaaguggacaaaa

SEQ ID NO: 169111 - RNA, 22 nt, Artificial Sequence
  Synthetic
aagguguaggaaguggacaaaa

SEQ ID NO: 169112 - RNA, 23 nt, Artificial Sequence
  Synthetic
caagguguaggaaguggacaaaa

SEQ ID NO: 169113 - RNA, 24 nt, Artificial Sequence
  Synthetic
gcaagguguaggaaguggacaaaa

SEQ ID NO: 169114 - RNA, 18 nt, Artificial Sequence
  Synthetic
aguuuacagaugacaaaa

SEQ ID NO: 169115 - RNA, 19 nt, Artificial Sequence
  Synthetic
uaguuuacagaugacaaaa

SEQ ID NO: 169116 - RNA, 20 nt, Artificial Sequence
  Synthetic
cuaguuuacagaugacaaaa

SEQ ID NO: 169117 - RNA, 21 nt, Artificial Sequence
  Synthetic
ccuaguuuacagaugacaaaa

SEQ ID NO: 169118 - RNA, 22 nt, Artificial Sequence
  Synthetic
uccuaguuuacagaugacaaaa

SEQ ID NO: 169119 - RNA, 23 nt, Artificial Sequence
  Synthetic
auccuaguuuacagaugacaaaa

SEQ ID NO: 169120 - RNA, 24 nt, Artificial Sequence
  Synthetic
cauccuaguuuacagaugacaaaa

SEQ ID NO: 169121 - RNA, 18 nt, Artificial Sequence
  Synthetic
uuauuuguuaugacaaaa

SEQ ID NO: 169122 - RNA, 19 nt, Artificial Sequence
  Synthetic
uuuauuuguuaugacaaaa

SEQ ID NO: 169123 - RNA, 20 nt, Artificial Sequence
  Synthetic
guuuauuuguuaugacaaaa

SEQ ID NO: 169124 - RNA, 21 nt, Artificial Sequence
  Synthetic
uguuuauuuguuaugacaaaa

SEQ ID NO: 169125 - RNA, 22 nt, Artificial Sequence
  Synthetic
auguuuauuuguuaugacaaaa

SEQ ID NO: 169126 - RNA, 23 nt, Artificial Sequence
  Synthetic
gauguuuauuuguuaugacaaaa

SEQ ID NO: 169127 - RNA, 24 nt, Artificial Sequence
  Synthetic
ggauguuuauuuguuaugacaaaa

SEQ ID NO: 169128 - RNA, 18 nt, Artificial Sequence
  Synthetic
uaacuuuaguugacaaaa

SEQ ID NO: 169129 - RNA, 19 nt, Artificial Sequence
  Synthetic
guaacuuuaguugacaaaa

SEQ ID NO: 169130 - RNA, 20 nt, Artificial Sequence
  Synthetic
aguaacuuuaguugacaaaa

SEQ ID NO: 169131 - RNA, 21 nt, Artificial Sequence
  Synthetic
caguaacuuuaguugacaaaa

SEQ ID NO: 169132 - RNA, 22 nt, Artificial Sequence
  Synthetic
acaguaacuuuaguugacaaaa

SEQ ID NO: 169133 - RNA, 23 nt, Artificial Sequence
  Synthetic
cacaguaacuuuaguugacaaaa

SEQ ID NO: 169134 - RNA, 24 nt, Artificial Sequence
  Synthetic
acacaguaacuuuaguugacaaaa

SEQ ID NO: 169135 - RNA, 18 nt, Artificial Sequence
  Synthetic
uuuugccacaauacaaaa

SEQ ID NO: 169136 - RNA, 19 nt, Artificial Sequence
  Synthetic
auuuugccacaauacaaaa

SEQ ID NO: 169137 - RNA, 20 nt, Artificial Sequence
  Synthetic
uauuuugccacaauacaaaa

SEQ ID NO: 169138 - RNA, 21 nt, Artificial Sequence
  Synthetic
auauuuugccacaauacaaaa

SEQ ID NO: 169139 - RNA, 22 nt, Artificial Sequence
  Synthetic
uauauuuugccacaauacaaaa

SEQ ID NO: 169140 - RNA, 23 nt, Artificial Sequence
  Synthetic
guauauuuugccacaauacaaaa

SEQ ID NO: 169141 - RNA, 24 nt, Artificial Sequence
  Synthetic
uguauauuuugccacaauacaaaa

SEQ ID NO: 169142 - RNA, 18 nt, Artificial Sequence
  Synthetic
ccaacaaaaacuacaaaa

SEQ ID NO: 169143 - RNA, 19 nt, Artificial Sequence
  Synthetic
accaacaaaaacuacaaaa

SEQ ID NO: 169144 - RNA, 20 nt, Artificial Sequence
  Synthetic
gaccaacaaaaacuacaaaa

SEQ ID NO: 169145 - RNA, 21 nt, Artificial Sequence
  Synthetic
ugaccaacaaaaacuacaaaa

SEQ ID NO: 169146 - RNA, 22 nt, Artificial Sequence
  Synthetic
uugaccaacaaaaacuacaaaa

SEQ ID NO: 169147 - RNA, 23 nt, Artificial Sequence
  Synthetic
auugaccaacaaaaacuacaaaa

SEQ ID NO: 169148 - RNA, 24 nt, Artificial Sequence
  Synthetic
aauugaccaacaaaaacuacaaaa

SEQ ID NO: 169149 - RNA, 18 nt, Artificial Sequence
  Synthetic
uauaacacuacuacaaaa

SEQ ID NO: 169150 - RNA, 19 nt, Artificial Sequence
  Synthetic
guauaacacuacuacaaaa

SEQ ID NO: 169151 - RNA, 20 nt, Artificial Sequence
  Synthetic
uguauaacacuacuacaaaa

SEQ ID NO: 169152 - RNA, 21 nt, Artificial Sequence
  Synthetic
guguauaacacuacuacaaaa

SEQ ID NO: 169153 - RNA, 22 nt, Artificial Sequence
  Synthetic
gguguauaacacuacuacaaaa

SEQ ID NO: 169154 - RNA, 23 nt, Artificial Sequence
  Synthetic
ggguguauaacacuacuacaaaa

SEQ ID NO: 169155 - RNA, 24 nt, Artificial Sequence
  Synthetic
uggguguauaacacuacuacaaaa

SEQ ID NO: 169156 - RNA, 18 nt, Artificial Sequence
  Synthetic
aacaggcaaccuacaaaa

SEQ ID NO: 169157 - RNA, 19 nt, Artificial Sequence
  Synthetic
gaacaggcaaccuacaaaa

SEQ ID NO: 169158 - RNA, 20 nt, Artificial Sequence
  Synthetic
ugaacaggcaaccuacaaaa

SEQ ID NO: 169159 - RNA, 21 nt, Artificial Sequence
  Synthetic
gugaacaggcaaccuacaaaa

SEQ ID NO: 169160 - RNA, 22 nt, Artificial Sequence
  Synthetic
agugaacaggcaaccuacaaaa

SEQ ID NO: 169161 - RNA, 23 nt, Artificial Sequence
  Synthetic
gagugaacaggcaaccuacaaaa

SEQ ID NO: 169162 - RNA, 24 nt, Artificial Sequence
  Synthetic
agagugaacaggcaaccuacaaaa

SEQ ID NO: 169163 - RNA, 18 nt, Artificial Sequence
  Synthetic
aaaaauggcccuacaaaa

SEQ ID NO: 169164 - RNA, 19 nt, Artificial Sequence
  Synthetic
caaaaauggcccuacaaaa

SEQ ID NO: 169165 - RNA, 20 nt, Artificial Sequence
  Synthetic
acaaaaauggcccuacaaaa

SEQ ID NO: 169166 - RNA, 21 nt, Artificial Sequence
  Synthetic
aacaaaaauggcccuacaaaa

SEQ ID NO: 169167 - RNA, 22 nt, Artificial Sequence
  Synthetic
gaacaaaaauggcccuacaaaa

SEQ ID NO: 169168 - RNA, 23 nt, Artificial Sequence
  Synthetic
ggaacaaaaauggcccuacaaaa

SEQ ID NO: 169169 - RNA, 24 nt, Artificial Sequence
  Synthetic
aggaacaaaaauggcccuacaaaa

SEQ ID NO: 169170 - RNA, 18 nt, Artificial Sequence
  Synthetic
acuuuucuauuuacaaaa

SEQ ID NO: 169171 - RNA, 19 nt, Artificial Sequence
  Synthetic
uacuuuucuauuuacaaaa

SEQ ID NO: 169172 - RNA, 20 nt, Artificial Sequence
  Synthetic
uuacuuuucuauuuacaaaa

SEQ ID NO: 169173 - RNA, 21 nt, Artificial Sequence
  Synthetic
uuuacuuuucuauuuacaaaa

SEQ ID NO: 169174 - RNA, 22 nt, Artificial Sequence
  Synthetic
uuuuacuuuucuauuuacaaaa

SEQ ID NO: 169175 - RNA, 23 nt, Artificial Sequence
  Synthetic
cuuuuacuuuucuauuuacaaaa

SEQ ID NO: 169176 - RNA, 24 nt, Artificial Sequence
  Synthetic
ucuuuuacuuuucuauuuacaaaa

SEQ ID NO: 169177 - RNA, 18 nt, Artificial Sequence
  Synthetic
gcagagacacaaccaaaa

SEQ ID NO: 169178 - RNA, 19 nt, Artificial Sequence
  Synthetic
ggcagagacacaaccaaaa

SEQ ID NO: 169179 - RNA, 20 nt, Artificial Sequence
  Synthetic
gggcagagacacaaccaaaa

SEQ ID NO: 169180 - RNA, 21 nt, Artificial Sequence
  Synthetic
cgggcagagacacaaccaaaa

SEQ ID NO: 169181 - RNA, 22 nt, Artificial Sequence
  Synthetic
ccgggcagagacacaaccaaaa

SEQ ID NO: 169182 - RNA, 23 nt, Artificial Sequence
  Synthetic
gccgggcagagacacaaccaaaa

SEQ ID NO: 169183 - RNA, 24 nt, Artificial Sequence
  Synthetic
agccgggcagagacacaaccaaaa

SEQ ID NO: 169184 - RNA, 18 nt, Artificial Sequence
  Synthetic
augacaagccaaccaaaa

SEQ ID NO: 169185 - RNA, 19 nt, Artificial Sequence
  Synthetic
aaugacaagccaaccaaaa

SEQ ID NO: 169186 - RNA, 20 nt, Artificial Sequence
  Synthetic
aaaugacaagccaaccaaaa

SEQ ID NO: 169187 - RNA, 21 nt, Artificial Sequence
  Synthetic
uaaaugacaagccaaccaaaa

SEQ ID NO: 169188 - RNA, 22 nt, Artificial Sequence
  Synthetic
auaaaugacaagccaaccaaaa

SEQ ID NO: 169189 - RNA, 23 nt, Artificial Sequence
  Synthetic
aauaaaugacaagccaaccaaaa

SEQ ID NO: 169190 - RNA, 24 nt, Artificial Sequence
  Synthetic
aaauaaaugacaagccaaccaaaa

SEQ ID NO: 169191 - RNA, 18 nt, Artificial Sequence
  Synthetic
gaauacuuagaaccaaaa

SEQ ID NO: 169192 - RNA, 19 nt, Artificial Sequence
  Synthetic
ugaauacuuagaaccaaaa

SEQ ID NO: 169193 - RNA, 20 nt, Artificial Sequence
  Synthetic
uugaauacuuagaaccaaaa

SEQ ID NO: 169194 - RNA, 21 nt, Artificial Sequence
  Synthetic
uuugaauacuuagaaccaaaa

SEQ ID NO: 169195 - RNA, 22 nt, Artificial Sequence
  Synthetic
guuugaauacuuagaaccaaaa

SEQ ID NO: 169196 - RNA, 23 nt, Artificial Sequence
  Synthetic
gguuugaauacuuagaaccaaaa

SEQ ID NO: 169197 - RNA, 24 nt, Artificial Sequence
  Synthetic
ggguuugaauacuuagaaccaaaa

SEQ ID NO: 169198 - RNA, 18 nt, Artificial Sequence
  Synthetic
guucauauggaaccaaaa

SEQ ID NO: 169199 - RNA, 19 nt, Artificial Sequence
  Synthetic
aguucauauggaaccaaaa

SEQ ID NO: 169200 - RNA, 20 nt, Artificial Sequence
  Synthetic
aaguucauauggaaccaaaa

SEQ ID NO: 169201 - RNA, 20 nt, Artificial Sequence
  Synthetic
aauuucauauggaaccaaaa

SEQ ID NO: 169202 - RNA, 21 nt, Artificial Sequence
  Synthetic
aaauuucauauggaaccaaaa

SEQ ID NO: 169203 - RNA, 22 nt, Artificial Sequence
  Synthetic
uaaauuucauauggaaccaaaa

SEQ ID NO: 169204 - RNA, 23 nt, Artificial Sequence
  Synthetic
uuaaauuucauauggaaccaaaa

SEQ ID NO: 169205 - RNA, 24 nt, Artificial Sequence
  Synthetic
uuuaaauuucauauggaaccaaaa

SEQ ID NO: 169206 - RNA, 18 nt, Artificial Sequence
  Synthetic
aucuggcacucaccaaaa

SEQ ID NO: 169207 - RNA, 19 nt, Artificial Sequence
  Synthetic
gaucuggcacucaccaaaa

SEQ ID NO: 169208 - RNA, 20 nt, Artificial Sequence
  Synthetic
ugaucuggcacucaccaaaa

SEQ ID NO: 169209 - RNA, 21 nt, Artificial Sequence
  Synthetic
gugaucuggcacucaccaaaa

SEQ ID NO: 169210 - RNA, 22 nt, Artificial Sequence
  Synthetic
agugaucuggcacucaccaaaa

SEQ ID NO: 169211 - RNA, 23 nt, Artificial Sequence
  Synthetic
uagugaucuggcacucaccaaaa

SEQ ID NO: 169212 - RNA, 24 nt, Artificial Sequence
  Synthetic
auagugaucuggcacucaccaaaa

SEQ ID NO: 169213 - RNA, 18 nt, Artificial Sequence
  Synthetic
aucauguauucaccaaaa

SEQ ID NO: 169214 - RNA, 19 nt, Artificial Sequence
  Synthetic
aaucauguauucaccaaaa

SEQ ID NO: 169215 - RNA, 20 nt, Artificial Sequence
  Synthetic
caaucauguauucaccaaaa

SEQ ID NO: 169216 - RNA, 21 nt, Artificial Sequence
  Synthetic
ucaaucauguauucaccaaaa

SEQ ID NO: 169217 - RNA, 22 nt, Artificial Sequence
  Synthetic
cucaaucauguauucaccaaaa

SEQ ID NO: 169218 - RNA, 23 nt, Artificial Sequence
  Synthetic
acucaaucauguauucaccaaaa

SEQ ID NO: 169219 - RNA, 24 nt, Artificial Sequence
  Synthetic
uacucaaucauguauucaccaaaa

SEQ ID NO: 169220 - RNA, 18 nt, Artificial Sequence
  Synthetic
gaagguggaagaccaaaa

SEQ ID NO: 169221 - RNA, 19 nt, Artificial Sequence
  Synthetic
ggaagguggaagaccaaaa

SEQ ID NO: 169222 - RNA, 20 nt, Artificial Sequence
  Synthetic
uggaagguggaagaccaaaa

SEQ ID NO: 169223 - RNA, 21 nt, Artificial Sequence
  Synthetic
auggaagguggaagaccaaaa

SEQ ID NO: 169224 - RNA, 22 nt, Artificial Sequence
  Synthetic
gauggaagguggaagaccaaaa

SEQ ID NO: 169225 - RNA, 23 nt, Artificial Sequence
  Synthetic
ugauggaagguggaagaccaaaa

SEQ ID NO: 169226 - RNA, 24 nt, Artificial Sequence
  Synthetic
augauggaagguggaagaccaaaa

SEQ ID NO: 169227 - RNA, 18 nt, Artificial Sequence
  Synthetic
aucagaaucauaccaaaa

SEQ ID NO: 169228 - RNA, 19 nt, Artificial Sequence
  Synthetic
gaucagaaucauaccaaaa

SEQ ID NO: 169229 - RNA, 20 nt, Artificial Sequence
  Synthetic
agaucagaaucauaccaaaa

SEQ ID NO: 169230 - RNA, 21 nt, Artificial Sequence
  Synthetic
aagaucagaaucauaccaaaa

SEQ ID NO: 169231 - RNA, 22 nt, Artificial Sequence
  Synthetic
aaagaucagaaucauaccaaaa

SEQ ID NO: 169232 - RNA, 23 nt, Artificial Sequence
  Synthetic
uaaagaucagaaucauaccaaaa

SEQ ID NO: 169233 - RNA, 24 nt, Artificial Sequence
  Synthetic
uuaaagaucagaaucauaccaaaa

SEQ ID NO: 169234 - RNA, 18 nt, Artificial Sequence
  Synthetic
caggauaaaguaccaaaa

SEQ ID NO: 169235 - RNA, 19 nt, Artificial Sequence
  Synthetic
ucaggauaaaguaccaaaa

SEQ ID NO: 169236 - RNA, 20 nt, Artificial Sequence
  Synthetic
aucaggauaaaguaccaaaa

SEQ ID NO: 169237 - RNA, 21 nt, Artificial Sequence
  Synthetic
uaucaggauaaaguaccaaaa

SEQ ID NO: 169238 - RNA, 22 nt, Artificial Sequence
  Synthetic
uuaucaggauaaaguaccaaaa

SEQ ID NO: 169239 - RNA, 23 nt, Artificial Sequence
  Synthetic
uuuaucaggauaaaguaccaaaa

SEQ ID NO: 169240 - RNA, 24 nt, Artificial Sequence
  Synthetic
uuuuaucaggauaaaguaccaaaa

SEQ ID NO: 169241 - RNA, 18 nt, Artificial Sequence
  Synthetic
augguacugguaccaaaa

SEQ ID NO: 169242 - RNA, 19 nt, Artificial Sequence
  Synthetic
caugguacugguaccaaaa

SEQ ID NO: 169243 - RNA, 20 nt, Artificial Sequence
  Synthetic
acaugguacugguaccaaaa

SEQ ID NO: 169244 - RNA, 21 nt, Artificial Sequence
  Synthetic
aacaugguacugguaccaaaa

SEQ ID NO: 169245 - RNA, 22 nt, Artificial Sequence
  Synthetic
caacaugguacugguaccaaaa

SEQ ID NO: 169246 - RNA, 23 nt, Artificial Sequence
  Synthetic
acaacaugguacugguaccaaaa

SEQ ID NO: 169247 - RNA, 24 nt, Artificial Sequence
  Synthetic
aacaacaugguacugguaccaaaa

SEQ ID NO: 169248 - RNA, 20 nt, Artificial Sequence
  Synthetic
gcaugguacugguaccaaaa

SEQ ID NO: 169249 - RNA, 18 nt, Artificial Sequence
  Synthetic
uauguuuuauuaccaaaa

SEQ ID NO: 169250 - RNA, 19 nt, Artificial Sequence
  Synthetic
cuauguuuuauuaccaaaa

SEQ ID NO: 169251 - RNA, 20 nt, Artificial Sequence
  Synthetic
ccuauguuuuauuaccaaaa

SEQ ID NO: 169252 - RNA, 21 nt, Artificial Sequence
  Synthetic
cccuauguuuuauuaccaaaa

SEQ ID NO: 169253 - RNA, 22 nt, Artificial Sequence
  Synthetic
ucccuauguuuuauuaccaaaa

SEQ ID NO: 169254 - RNA, 23 nt, Artificial Sequence
  Synthetic
uucccuauguuuuauuaccaaaa

SEQ ID NO: 169255 - RNA, 24 nt, Artificial Sequence
  Synthetic
cuucccuauguuuuauuaccaaaa

SEQ ID NO: 169256 - RNA, 18 nt, Artificial Sequence
  Synthetic
aauaaccuguuaccaaaa

SEQ ID NO: 169257 - RNA, 19 nt, Artificial Sequence
  Synthetic
uaauaaccuguuaccaaaa

SEQ ID NO: 169258 - RNA, 20 nt, Artificial Sequence
  Synthetic
uuaauaaccuguuaccaaaa

SEQ ID NO: 169259 - RNA, 21 nt, Artificial Sequence
  Synthetic
uuuaauaaccuguuaccaaaa

SEQ ID NO: 169260 - RNA, 22 nt, Artificial Sequence
  Synthetic
uuuuaauaaccuguuaccaaaa

SEQ ID NO: 169261 - RNA, 23 nt, Artificial Sequence
  Synthetic
auuuuaauaaccuguuaccaaaa

SEQ ID NO: 169262 - RNA, 24 nt, Artificial Sequence
  Synthetic
uauuuuaauaaccuguuaccaaaa

SEQ ID NO: 169263 - RNA, 18 nt, Artificial Sequence
  Synthetic
uauggaacuaccccaaaa

SEQ ID NO: 169264 - RNA, 19 nt, Artificial Sequence
  Synthetic
auauggaacuaccccaaaa

SEQ ID NO: 169265 - RNA, 20 nt, Artificial Sequence
  Synthetic
gauauggaacuaccccaaaa

SEQ ID NO: 169266 - RNA, 21 nt, Artificial Sequence
  Synthetic
agauauggaacuaccccaaaa

SEQ ID NO: 169267 - RNA, 22 nt, Artificial Sequence
  Synthetic
aagauauggaacuaccccaaaa

SEQ ID NO: 169268 - RNA, 23 nt, Artificial Sequence
  Synthetic
uaagauauggaacuaccccaaaa

SEQ ID NO: 169269 - RNA, 24 nt, Artificial Sequence
  Synthetic
auaagauauggaacuaccccaaaa

SEQ ID NO: 169270 - RNA, 18 nt, Artificial Sequence
  Synthetic
uuuccaacacccccaaaa

SEQ ID NO: 169271 - RNA, 19 nt, Artificial Sequence
  Synthetic
guuuccaacacccccaaaa

SEQ ID NO: 169272 - RNA, 20 nt, Artificial Sequence
  Synthetic
aguuuccaacacccccaaaa

SEQ ID NO: 169273 - RNA, 21 nt, Artificial Sequence
  Synthetic
uaguuuccaacacccccaaaa

SEQ ID NO: 169274 - RNA, 22 nt, Artificial Sequence
  Synthetic
auaguuuccaacacccccaaaa

SEQ ID NO: 169275 - RNA, 23 nt, Artificial Sequence
  Synthetic
aauaguuuccaacacccccaaaa

SEQ ID NO: 169276 - RNA, 24 nt, Artificial Sequence
  Synthetic
caauaguuuccaacacccccaaaa

SEQ ID NO: 169277 - RNA, 18 nt, Artificial Sequence
  Synthetic
cuuauagaguucccaaaa

SEQ ID NO: 169278 - RNA, 19 nt, Artificial Sequence
  Synthetic
ucuuauagaguucccaaaa

SEQ ID NO: 169279 - RNA, 20 nt, Artificial Sequence
  Synthetic
uucuuauagaguucccaaaa

SEQ ID NO: 169280 - RNA, 21 nt, Artificial Sequence
  Synthetic
cuucuuauagaguucccaaaa

SEQ ID NO: 169281 - RNA, 22 nt, Artificial Sequence
  Synthetic
gcuucuuauagaguucccaaaa

SEQ ID NO: 169282 - RNA, 23 nt, Artificial Sequence
  Synthetic
ggcuucuuauagaguucccaaaa

SEQ ID NO: 169283 - RNA, 24 nt, Artificial Sequence
  Synthetic
uggcuucuuauagaguucccaaaa

SEQ ID NO: 169284 - RNA, 18 nt, Artificial Sequence
  Synthetic
uguccucuacauccaaaa

SEQ ID NO: 169285 - RNA, 19 nt, Artificial Sequence
  Synthetic
auguccucuacauccaaaa

SEQ ID NO: 169286 - RNA, 20 nt, Artificial Sequence
  Synthetic
aauguccucuacauccaaaa

SEQ ID NO: 169287 - RNA, 21 nt, Artificial Sequence
  Synthetic
aaauguccucuacauccaaaa

SEQ ID NO: 169288 - RNA, 22 nt, Artificial Sequence
  Synthetic
aaaauguccucuacauccaaaa

SEQ ID NO: 169289 - RNA, 23 nt, Artificial Sequence
  Synthetic
uaaaauguccucuacauccaaaa

SEQ ID NO: 169290 - RNA, 24 nt, Artificial Sequence
  Synthetic
uuaaaauguccucuacauccaaaa

SEQ ID NO: 169291 - RNA, 18 nt, Artificial Sequence
  Synthetic
aaacaaccccauccaaaa

SEQ ID NO: 169292 - RNA, 19 nt, Artificial Sequence
  Synthetic
caaacaaccccauccaaaa

SEQ ID NO: 169293 - RNA, 20 nt, Artificial Sequence
  Synthetic
acaaacaaccccauccaaaa

SEQ ID NO: 169294 - RNA, 21 nt, Artificial Sequence
  Synthetic
aacaaacaaccccauccaaaa

SEQ ID NO: 169295 - RNA, 22 nt, Artificial Sequence
  Synthetic
aaacaaacaaccccauccaaaa

SEQ ID NO: 169296 - RNA, 23 nt, Artificial Sequence
  Synthetic
aaaacaaacaaccccauccaaaa

SEQ ID NO: 169297 - RNA, 24 nt, Artificial Sequence
  Synthetic
aaaaacaaacaaccccauccaaaa

SEQ ID NO: 169298 - RNA, 18 nt, Artificial Sequence
  Synthetic
ccugacauguauccaaaa

SEQ ID NO: 169299 - RNA, 19 nt, Artificial Sequence
  Synthetic
uccugacauguauccaaaa

SEQ ID NO: 169300 - RNA, 20 nt, Artificial Sequence
  Synthetic
uuccugacauguauccaaaa

SEQ ID NO: 169301 - RNA, 21 nt, Artificial Sequence
  Synthetic
guuccugacauguauccaaaa

SEQ ID NO: 169302 - RNA, 22 nt, Artificial Sequence
  Synthetic
uguuccugacauguauccaaaa

SEQ ID NO: 169303 - RNA, 23 nt, Artificial Sequence
  Synthetic
auguuccugacauguauccaaaa

SEQ ID NO: 169304 - RNA, 24 nt, Artificial Sequence
  Synthetic
cauguuccugacauguauccaaaa

SEQ ID NO: 169305 - RNA, 18 nt, Artificial Sequence
  Synthetic
uagauuccuuauccaaaa

SEQ ID NO: 169306 - RNA, 19 nt, Artificial Sequence
  Synthetic
auagauuccuuauccaaaa

SEQ ID NO: 169307 - RNA, 20 nt, Artificial Sequence
  Synthetic
cauagauuccuuauccaaaa

SEQ ID NO: 169308 - RNA, 21 nt, Artificial Sequence
  Synthetic
ucauagauuccuuauccaaaa

SEQ ID NO: 169309 - RNA, 22 nt, Artificial Sequence
  Synthetic
uucauagauuccuuauccaaaa

SEQ ID NO: 169310 - RNA, 23 nt, Artificial Sequence
  Synthetic
auucauagauuccuuauccaaaa

SEQ ID NO: 169311 - RNA, 24 nt, Artificial Sequence
  Synthetic
uauucauagauuccuuauccaaaa

SEQ ID NO: 169312 - RNA, 18 nt, Artificial Sequence
  Synthetic
auaauugcuuauccaaaa

SEQ ID NO: 169313 - RNA, 19 nt, Artificial Sequence
  Synthetic
uauaauugcuuauccaaaa

SEQ ID NO: 169314 - RNA, 20 nt, Artificial Sequence
  Synthetic
uuauaauugcuuauccaaaa

SEQ ID NO: 169315 - RNA, 21 nt, Artificial Sequence
  Synthetic
uuuauaauugcuuauccaaaa

SEQ ID NO: 169316 - RNA, 22 nt, Artificial Sequence
  Synthetic
auuuauaauugcuuauccaaaa

SEQ ID NO: 169317 - RNA, 23 nt, Artificial Sequence
  Synthetic
cauuuauaauugcuuauccaaaa

SEQ ID NO: 169318 - RNA, 24 nt, Artificial Sequence
  Synthetic
ccauuuauaauugcuuauccaaaa

SEQ ID NO: 169319 - RNA, 18 nt, Artificial Sequence
  Synthetic
cagaaaaacacuccaaaa

SEQ ID NO: 169320 - RNA, 19 nt, Artificial Sequence
  Synthetic
ccagaaaaacacuccaaaa

SEQ ID NO: 169321 - RNA, 20 nt, Artificial Sequence
  Synthetic
accagaaaaacacuccaaaa

SEQ ID NO: 169322 - RNA, 21 nt, Artificial Sequence
  Synthetic
uaccagaaaaacacuccaaaa

SEQ ID NO: 169323 - RNA, 22 nt, Artificial Sequence
  Synthetic
guaccagaaaaacacuccaaaa

SEQ ID NO: 169324 - RNA, 23 nt, Artificial Sequence
  Synthetic
gguaccagaaaaacacuccaaaa

SEQ ID NO: 169325 - RNA, 24 nt, Artificial Sequence
  Synthetic
ugguaccagaaaaacacuccaaaa

SEQ ID NO: 169326 - RNA, 18 nt, Artificial Sequence
  Synthetic
aaucauaacacuccaaaa

SEQ ID NO: 169327 - RNA, 19 nt, Artificial Sequence
  Synthetic
aaaucauaacacuccaaaa

SEQ ID NO: 169328 - RNA, 20 nt, Artificial Sequence
  Synthetic
caaaucauaacacuccaaaa

SEQ ID NO: 169329 - RNA, 21 nt, Artificial Sequence
  Synthetic
acaaaucauaacacuccaaaa

SEQ ID NO: 169330 - RNA, 22 nt, Artificial Sequence
  Synthetic
cacaaaucauaacacuccaaaa

SEQ ID NO: 169331 - RNA, 23 nt, Artificial Sequence
  Synthetic
ucacaaaucauaacacuccaaaa

SEQ ID NO: 169332 - RNA, 24 nt, Artificial Sequence
  Synthetic
aucacaaaucauaacacuccaaaa

SEQ ID NO: 169333 - RNA, 18 nt, Artificial Sequence
  Synthetic
ugacagacuucuccaaaa

SEQ ID NO: 169334 - RNA, 19 nt, Artificial Sequence
  Synthetic
uugacagacuucuccaaaa

SEQ ID NO: 169335 - RNA, 20 nt, Artificial Sequence
  Synthetic
uuugacagacuucuccaaaa

SEQ ID NO: 169336 - RNA, 21 nt, Artificial Sequence
  Synthetic
uuuugacagacuucuccaaaa

SEQ ID NO: 169337 - RNA, 22 nt, Artificial Sequence
  Synthetic
uuuuugacagacuucuccaaaa

SEQ ID NO: 169338 - RNA, 23 nt, Artificial Sequence
  Synthetic
uuuuuugacagacuucuccaaaa

SEQ ID NO: 169339 - RNA, 24 nt, Artificial Sequence
  Synthetic
auuuuuugacagacuucuccaaaa

SEQ ID NO: 169340 - RNA, 18 nt, Artificial Sequence
  Synthetic
cagugaauagguccaaaa

SEQ ID NO: 169341 - RNA, 19 nt, Artificial Sequence
  Synthetic
ccagugaauagguccaaaa

SEQ ID NO: 169342 - RNA, 20 nt, Artificial Sequence
  Synthetic
cccagugaauagguccaaaa

SEQ ID NO: 169343 - RNA, 21 nt, Artificial Sequence
  Synthetic
ucccagugaauagguccaaaa

SEQ ID NO: 169344 - RNA, 22 nt, Artificial Sequence
  Synthetic
cucccagugaauagguccaaaa

SEQ ID NO: 169345 - RNA, 23 nt, Artificial Sequence
  Synthetic
ccucccagugaauagguccaaaa

SEQ ID NO: 169346 - RNA, 24 nt, Artificial Sequence
  Synthetic
accucccagugaauagguccaaaa

SEQ ID NO: 169347 - RNA, 18 nt, Artificial Sequence
  Synthetic
gaaugaccauguccaaaa

SEQ ID NO: 169348 - RNA, 19 nt, Artificial Sequence
  Synthetic
agaaugaccauguccaaaa

SEQ ID NO: 169349 - RNA, 20 nt, Artificial Sequence
  Synthetic
cagaaugaccauguccaaaa

SEQ ID NO: 169350 - RNA, 21 nt, Artificial Sequence
  Synthetic
ucagaaugaccauguccaaaa

SEQ ID NO: 169351 - RNA, 22 nt, Artificial Sequence
  Synthetic
uucagaaugaccauguccaaaa

SEQ ID NO: 169352 - RNA, 23 nt, Artificial Sequence
  Synthetic
uuucagaaugaccauguccaaaa

SEQ ID NO: 169353 - RNA, 24 nt, Artificial Sequence
  Synthetic
uuuucagaaugaccauguccaaaa

SEQ ID NO: 169354 - RNA, 18 nt, Artificial Sequence
  Synthetic
cuguuucauuuuccaaaa

SEQ ID NO: 169355 - RNA, 19 nt, Artificial Sequence
  Synthetic
ucuguuucauuuuccaaaa

SEQ ID NO: 169356 - RNA, 20 nt, Artificial Sequence
  Synthetic
uucuguuucauuuuccaaaa

SEQ ID NO: 169357 - RNA, 21 nt, Artificial Sequence
  Synthetic
cuucuguuucauuuuccaaaa

SEQ ID NO: 169358 - RNA, 22 nt, Artificial Sequence
  Synthetic
acuucuguuucauuuuccaaaa

SEQ ID NO: 169359 - RNA, 23 nt, Artificial Sequence
  Synthetic
gacuucuguuucauuuuccaaaa

SEQ ID NO: 169360 - RNA, 24 nt, Artificial Sequence
  Synthetic
ugacuucuguuucauuuuccaaaa

SEQ ID NO: 169361 - RNA, 18 nt, Artificial Sequence
  Synthetic
uagaucacugaagcaaaa

SEQ ID NO: 169362 - RNA, 19 nt, Artificial Sequence
  Synthetic
guagaucacugaagcaaaa

SEQ ID NO: 169363 - RNA, 20 nt, Artificial Sequence
  Synthetic
aguagaucacugaagcaaaa

SEQ ID NO: 169364 - RNA, 21 nt, Artificial Sequence
  Synthetic
aaguagaucacugaagcaaaa

SEQ ID NO: 169365 - RNA, 22 nt, Artificial Sequence
  Synthetic
caaguagaucacugaagcaaaa

SEQ ID NO: 169366 - RNA, 23 nt, Artificial Sequence
  Synthetic
acaaguagaucacugaagcaaaa

SEQ ID NO: 169367 - RNA, 24 nt, Artificial Sequence
  Synthetic
gacaaguagaucacugaagcaaaa

SEQ ID NO: 169368 - RNA, 18 nt, Artificial Sequence
  Synthetic
uaagcaggaggagcaaaa

SEQ ID NO: 169369 - RNA, 19 nt, Artificial Sequence
  Synthetic
auaagcaggaggagcaaaa

SEQ ID NO: 169370 - RNA, 20 nt, Artificial Sequence
  Synthetic
uauaagcaggaggagcaaaa

SEQ ID NO: 169371 - RNA, 21 nt, Artificial Sequence
  Synthetic
uuauaagcaggaggagcaaaa

SEQ ID NO: 169372 - RNA, 22 nt, Artificial Sequence
  Synthetic
uuuauaagcaggaggagcaaaa

SEQ ID NO: 169373 - RNA, 23 nt, Artificial Sequence
  Synthetic
guuuauaagcaggaggagcaaaa

SEQ ID NO: 169374 - RNA, 24 nt, Artificial Sequence
  Synthetic
uguuuauaagcaggaggagcaaaa

SEQ ID NO: 169375 - RNA, 18 nt, Artificial Sequence
  Synthetic
ggaggagaaugagcaaaa

SEQ ID NO: 169376 - RNA, 19 nt, Artificial Sequence
  Synthetic
aggaggagaaugagcaaaa

SEQ ID NO: 169377 - RNA, 20 nt, Artificial Sequence
  Synthetic
aaggaggagaaugagcaaaa

SEQ ID NO: 169378 - RNA, 21 nt, Artificial Sequence
  Synthetic
gaaggaggagaaugagcaaaa

SEQ ID NO: 169379 - RNA, 22 nt, Artificial Sequence
  Synthetic
ggaaggaggagaaugagcaaaa

SEQ ID NO: 169380 - RNA, 23 nt, Artificial Sequence
  Synthetic
aggaaggaggagaaugagcaaaa

SEQ ID NO: 169381 - RNA, 24 nt, Artificial Sequence
  Synthetic
caggaaggaggagaaugagcaaaa

SEQ ID NO: 169382 - RNA, 18 nt, Artificial Sequence
  Synthetic
cugcugauuugagcaaaa

SEQ ID NO: 169383 - RNA, 19 nt, Artificial Sequence
  Synthetic
ucugcugauuugagcaaaa

SEQ ID NO: 169384 - RNA, 20 nt, Artificial Sequence
  Synthetic
aucugcugauuugagcaaaa

SEQ ID NO: 169385 - RNA, 21 nt, Artificial Sequence
  Synthetic
gaucugcugauuugagcaaaa

SEQ ID NO: 169386 - RNA, 22 nt, Artificial Sequence
  Synthetic
ggaucugcugauuugagcaaaa

SEQ ID NO: 169387 - RNA, 23 nt, Artificial Sequence
  Synthetic
aggaucugcugauuugagcaaaa

SEQ ID NO: 169388 - RNA, 24 nt, Artificial Sequence
  Synthetic
gaggaucugcugauuugagcaaaa

SEQ ID NO: 169389 - RNA, 18 nt, Artificial Sequence
  Synthetic
uaaaugugaauagcaaaa

SEQ ID NO: 169390 - RNA, 19 nt, Artificial Sequence
  Synthetic
auaaaugugaauagcaaaa

SEQ ID NO: 169391 - RNA, 20 nt, Artificial Sequence
  Synthetic
uauaaaugugaauagcaaaa

SEQ ID NO: 169392 - RNA, 21 nt, Artificial Sequence
  Synthetic
guauaaaugugaauagcaaaa

SEQ ID NO: 169393 - RNA, 22 nt, Artificial Sequence
  Synthetic
aguauaaaugugaauagcaaaa

SEQ ID NO: 169394 - RNA, 23 nt, Artificial Sequence
  Synthetic
caguauaaaugugaauagcaaaa

SEQ ID NO: 169395 - RNA, 24 nt, Artificial Sequence
  Synthetic
ucaguauaaaugugaauagcaaaa

SEQ ID NO: 169396 - RNA, 18 nt, Artificial Sequence
  Synthetic
aacuacuaaaaggcaaaa

SEQ ID NO: 169397 - RNA, 19 nt, Artificial Sequence
  Synthetic
aaacuacuaaaaggcaaaa

SEQ ID NO: 169398 - RNA, 20 nt, Artificial Sequence
  Synthetic
aaaacuacuaaaaggcaaaa

SEQ ID NO: 169399 - RNA, 21 nt, Artificial Sequence
  Synthetic
aaaaacuacuaaaaggcaaaa

SEQ ID NO: 169400 - RNA, 22 nt, Artificial Sequence
  Synthetic
aaaaaacuacuaaaaggcaaaa

SEQ ID NO: 169401 - RNA, 23 nt, Artificial Sequence
  Synthetic
gaaaaaacuacuaaaaggcaaaa

SEQ ID NO: 169402 - RNA, 24 nt, Artificial Sequence
  Synthetic
agaaaaaacuacuaaaaggcaaaa

SEQ ID NO: 169403 - RNA, 18 nt, Artificial Sequence
  Synthetic
uaacaguuggaggcaaaa

SEQ ID NO: 169404 - RNA, 19 nt, Artificial Sequence
  Synthetic
guaacaguuggaggcaaaa

SEQ ID NO: 169405 - RNA, 20 nt, Artificial Sequence
  Synthetic
aguaacaguuggaggcaaaa

SEQ ID NO: 169406 - RNA, 21 nt, Artificial Sequence
  Synthetic
aaguaacaguuggaggcaaaa

SEQ ID NO: 169407 - RNA, 22 nt, Artificial Sequence
  Synthetic
caaguaacaguuggaggcaaaa

SEQ ID NO: 169408 - RNA, 23 nt, Artificial Sequence
  Synthetic
acaaguaacaguuggaggcaaaa

SEQ ID NO: 169409 - RNA, 24 nt, Artificial Sequence
  Synthetic
aacaaguaacaguuggaggcaaaa

SEQ ID NO: 169410 - RNA, 18 nt, Artificial Sequence
  Synthetic
accauuuacagggcaaaa

SEQ ID NO: 169411 - RNA, 19 nt, Artificial Sequence
  Synthetic
caccauuuacagggcaaaa

SEQ ID NO: 169412 - RNA, 20 nt, Artificial Sequence
  Synthetic
ccaccauuuacagggcaaaa

SEQ ID NO: 169413 - RNA, 21 nt, Artificial Sequence
  Synthetic
uccaccauuuacagggcaaaa

SEQ ID NO: 169414 - RNA, 22 nt, Artificial Sequence
  Synthetic
uuccaccauuuacagggcaaaa

SEQ ID NO: 169415 - RNA, 23 nt, Artificial Sequence
  Synthetic
uuuccaccauuuacagggcaaaa

SEQ ID NO: 169416 - RNA, 24 nt, Artificial Sequence
  Synthetic
cuuuccaccauuuacagggcaaaa

SEQ ID NO: 169417 - RNA, 18 nt, Artificial Sequence
  Synthetic
ucugcucaaugggcaaaa

SEQ ID NO: 169418 - RNA, 19 nt, Artificial Sequence
  Synthetic
cucugcucaaugggcaaaa

SEQ ID NO: 169419 - RNA, 20 nt, Artificial Sequence
  Synthetic
ccucugcucaaugggcaaaa

SEQ ID NO: 169420 - RNA, 21 nt, Artificial Sequence
  Synthetic
gccucugcucaaugggcaaaa

SEQ ID NO: 169421 - RNA, 22 nt, Artificial Sequence
  Synthetic
agccucugcucaaugggcaaaa

SEQ ID NO: 169422 - RNA, 23 nt, Artificial Sequence
  Synthetic
uagccucugcucaaugggcaaaa

SEQ ID NO: 169423 - RNA, 24 nt, Artificial Sequence
  Synthetic
cuagccucugcucaaugggcaaaa

SEQ ID NO: 169424 - RNA, 18 nt, Artificial Sequence
  Synthetic
aguuagaaaauggcaaaa

SEQ ID NO: 169425 - RNA, 19 nt, Artificial Sequence
  Synthetic
caguuagaaaauggcaaaa

SEQ ID NO: 169426 - RNA, 20 nt, Artificial Sequence
  Synthetic
acaguuagaaaauggcaaaa

SEQ ID NO: 169427 - RNA, 21 nt, Artificial Sequence
  Synthetic
uacaguuagaaaauggcaaaa

SEQ ID NO: 169428 - RNA, 22 nt, Artificial Sequence
  Synthetic
auacaguuagaaaauggcaaaa

SEQ ID NO: 169429 - RNA, 23 nt, Artificial Sequence
  Synthetic
uauacaguuagaaaauggcaaaa

SEQ ID NO: 169430 - RNA, 24 nt, Artificial Sequence
  Synthetic
guauacaguuagaaaauggcaaaa

SEQ ID NO: 169431 - RNA, 18 nt, Artificial Sequence
  Synthetic
ugaagucgucaugcaaaa

SEQ ID NO: 169432 - RNA, 19 nt, Artificial Sequence
  Synthetic
cugaagucgucaugcaaaa

SEQ ID NO: 169433 - RNA, 20 nt, Artificial Sequence
  Synthetic
ccugaagucgucaugcaaaa

SEQ ID NO: 169434 - RNA, 21 nt, Artificial Sequence
  Synthetic
cccugaagucgucaugcaaaa

SEQ ID NO: 169435 - RNA, 22 nt, Artificial Sequence
  Synthetic
ucccugaagucgucaugcaaaa

SEQ ID NO: 169436 - RNA, 23 nt, Artificial Sequence
  Synthetic
uucccugaagucgucaugcaaaa

SEQ ID NO: 169437 - RNA, 24 nt, Artificial Sequence
  Synthetic
uuucccugaagucgucaugcaaaa

SEQ ID NO: 169438 - RNA, 18 nt, Artificial Sequence
  Synthetic
gcaaguuuuccugcaaaa

SEQ ID NO: 169439 - RNA, 19 nt, Artificial Sequence
  Synthetic
ugcaaguuuuccugcaaaa

SEQ ID NO: 169440 - RNA, 20 nt, Artificial Sequence
  Synthetic
uugcaaguuuuccugcaaaa

SEQ ID NO: 169441 - RNA, 21 nt, Artificial Sequence
  Synthetic
guugcaaguuuuccugcaaaa

SEQ ID NO: 169442 - RNA, 22 nt, Artificial Sequence
  Synthetic
gguugcaaguuuuccugcaaaa

SEQ ID NO: 169443 - RNA, 23 nt, Artificial Sequence
  Synthetic
ggguugcaaguuuuccugcaaaa

SEQ ID NO: 169444 - RNA, 24 nt, Artificial Sequence
  Synthetic
aggguugcaaguuuuccugcaaaa

SEQ ID NO: 169445 - RNA, 18 nt, Artificial Sequence
  Synthetic
gugcucucaucugcaaaa

SEQ ID NO: 169446 - RNA, 19 nt, Artificial Sequence
  Synthetic
agugcucucaucugcaaaa

SEQ ID NO: 169447 - RNA, 20 nt, Artificial Sequence
  Synthetic
cagugcucucaucugcaaaa

SEQ ID NO: 169448 - RNA, 21 nt, Artificial Sequence
  Synthetic
ucagugcucucaucugcaaaa

SEQ ID NO: 169449 - RNA, 22 nt, Artificial Sequence
  Synthetic
cucagugcucucaucugcaaaa

SEQ ID NO: 169450 - RNA, 23 nt, Artificial Sequence
  Synthetic
ucucagugcucucaucugcaaaa

SEQ ID NO: 169451 - RNA, 24 nt, Artificial Sequence
  Synthetic
gucucagugcucucaucugcaaaa

SEQ ID NO: 169452 - RNA, 18 nt, Artificial Sequence
  Synthetic
acacuggggcuugcaaaa

SEQ ID NO: 169453 - RNA, 19 nt, Artificial Sequence
  Synthetic
uacacuggggcuugcaaaa

SEQ ID NO: 169454 - RNA, 20 nt, Artificial Sequence
  Synthetic
uuacacuggggcuugcaaaa

SEQ ID NO: 169455 - RNA, 21 nt, Artificial Sequence
  Synthetic
auuacacuggggcuugcaaaa

SEQ ID NO: 169456 - RNA, 22 nt, Artificial Sequence
  Synthetic
uauuacacuggggcuugcaaaa

SEQ ID NO: 169457 - RNA, 23 nt, Artificial Sequence
  Synthetic
uuauuacacuggggcuugcaaaa

SEQ ID NO: 169458 - RNA, 24 nt, Artificial Sequence
  Synthetic
guuauuacacuggggcuugcaaaa

SEQ ID NO: 169459 - RNA, 18 nt, Artificial Sequence
  Synthetic
ucuucucaucuugcaaaa

SEQ ID NO: 169460 - RNA, 19 nt, Artificial Sequence
  Synthetic
cucuucucaucuugcaaaa

SEQ ID NO: 169461 - RNA, 20 nt, Artificial Sequence
  Synthetic
acucuucucaucuugcaaaa

SEQ ID NO: 169462 - RNA, 21 nt, Artificial Sequence
  Synthetic
aacucuucucaucuugcaaaa

SEQ ID NO: 169463 - RNA, 22 nt, Artificial Sequence
  Synthetic
gaacucuucucaucuugcaaaa

SEQ ID NO: 169464 - RNA, 23 nt, Artificial Sequence
  Synthetic
agaacucuucucaucuugcaaaa

SEQ ID NO: 169465 - RNA, 24 nt, Artificial Sequence
  Synthetic
cagaacucuucucaucuugcaaaa

SEQ ID NO: 169466 - RNA, 18 nt, Artificial Sequence
  Synthetic
cuuccauauuaaucaaaa

SEQ ID NO: 169467 - RNA, 19 nt, Artificial Sequence
  Synthetic
ucuuccauauuaaucaaaa

SEQ ID NO: 169468 - RNA, 20 nt, Artificial Sequence
  Synthetic
aucuuccauauuaaucaaaa

SEQ ID NO: 169469 - RNA, 21 nt, Artificial Sequence
  Synthetic
aaucuuccauauuaaucaaaa

SEQ ID NO: 169470 - RNA, 22 nt, Artificial Sequence
  Synthetic
gaaucuuccauauuaaucaaaa

SEQ ID NO: 169471 - RNA, 23 nt, Artificial Sequence
  Synthetic
ggaaucuuccauauuaaucaaaa

SEQ ID NO: 169472 - RNA, 24 nt, Artificial Sequence
  Synthetic
aggaaucuuccauauuaaucaaaa
